United States Patent Application Publication US 2007/0042381 A1 - sequence listing, part 39

SEQ ID NO: 1740201 - RNA, 14 nt, Human
ugagagcugggugu

SEQ ID NO: 1740202 - RNA, 23 nt, Human
ugagauguagccccucuccugga

SEQ ID NO: 1740203 - RNA, 23 nt, Human
ugagaggacuuuucuuuguggcu

SEQ ID NO: 1740204 - RNA, 17 nt, Human
ugagaggaaaucaccga

SEQ ID NO: 1740205 - RNA, 14 nt, Human
ugagauguguucac

SEQ ID NO: 1740206 - RNA, 17 nt, Human
agcaaggagauuuacaa

SEQ ID NO: 1740207 - RNA, 19 nt, Human
agcaaggagauuuacaacu

SEQ ID NO: 1740208 - RNA, 14 nt, Human
agcaaggagauuua

SEQ ID NO: 1740209 - RNA, 15 nt, Human
agcaagucagaauag

SEQ ID NO: 1740210 - RNA, 16 nt, Human
agcaagugagagcugg

SEQ ID NO: 1740211 - RNA, 15 nt, Human
agcaagugagagcug

SEQ ID NO: 1740212 - RNA, 16 nt, Human
agcaagugagacccug

SEQ ID NO: 1740213 - RNA, 13 nt, Human
ugagccacugcac

SEQ ID NO: 1740214 - RNA, 12 nt, Human
ugagccacugca

SEQ ID NO: 1740215 - RNA, 14 nt, Human
ugagcauuagauuu

SEQ ID NO: 1740216 - RNA, 16 nt, Human
ugagcauuagauuucu

SEQ ID NO: 1740217 - RNA, 15 nt, Human
ugagcaaauguggcu

SEQ ID NO: 1740218 - RNA, 19 nt, Human
ugagccagauuucacucuc

SEQ ID NO: 1740219 - RNA, 18 nt, Human
ugagccagauuucacucu

SEQ ID NO: 1740220 - RNA, 14 nt, Human
ugagccacugcacc

SEQ ID NO: 1740221 - RNA, 21 nt, Human
ugagccagauuucacucuccu

SEQ ID NO: 1740222 - RNA, 20 nt, Human
ugagccagauuucacucucc

SEQ ID NO: 1740223 - RNA, 18 nt, Human
agcaagugagagcugggu

SEQ ID NO: 1740224 - RNA, 17 nt, Human
agcaagugagagcuggg

SEQ ID NO: 1740225 - RNA, 21 nt, Human
agcacagcuucauuuccugug

SEQ ID NO: 1740226 - RNA, 22 nt, Human
agcacaugccucucucaggcca

SEQ ID NO: 1740227 - RNA, 21 nt, Human
agcacaugccucucucaggcc

SEQ ID NO: 1740228 - RNA, 20 nt, Human
agcacaugccucucucaggc

SEQ ID NO: 1740229 - RNA, 19 nt, Human
agcacaugccucucucagg

SEQ ID NO: 1740230 - RNA, 18 nt, Human
agcacaugccucucucag

SEQ ID NO: 1740231 - RNA, 16 nt, Human
agcaccaucucuccuc

SEQ ID NO: 1740232 - RNA, 23 nt, Human
agcacaugccucucucaggccaa

SEQ ID NO: 1740233 - RNA, 22 nt, Human
agcaccaaaagcuuaccaaggg

SEQ ID NO: 1740234 - RNA, 16 nt, Human
agcaccuccugccucg

SEQ ID NO: 1740235 - RNA, 14 nt, Human
agcaccuccugccu

SEQ ID NO: 1740236 - RNA, 13 nt, Human
agcaccuccugcc

SEQ ID NO: 1740237 - RNA, 17 nt, Human
agcaccuagccucgcuc

SEQ ID NO: 1740238 - RNA, 22 nt, Human
agcaccuacaguguacagucuu

SEQ ID NO: 1740239 - RNA, 14 nt, Human
agcaccuacagugu

SEQ ID NO: 1740240 - RNA, 15 nt, Human
agcaccuacagugua

SEQ ID NO: 1740241 - RNA, 19 nt, Human
agcaccuacaguguacagu

SEQ ID NO: 1740242 - RNA, 21 nt, Human
agcaccuacaguguacagucu

SEQ ID NO: 1740243 - RNA, 22 nt, Human
ugacagggcacaccgggcacuc

SEQ ID NO: 1740244 - RNA, 19 nt, Human
ugacaggcaaugcuggcug

SEQ ID NO: 1740245 - RNA, 17 nt, Human
ugacaggcaaugcuggc

SEQ ID NO: 1740246 - RNA, 16 nt, Human
ugacacgaauauugcu

SEQ ID NO: 1740247 - RNA, 15 nt, Human
ugacacuuaaaaaug

SEQ ID NO: 1740248 - RNA, 19 nt, Human
ugacacgaauauugcugau

SEQ ID NO: 1740249 - RNA, 19 nt, Human
agaugcuagaacucccuuu

SEQ ID NO: 1740250 - RNA, 21 nt, Human
agaugcuagaacucccuuuca

SEQ ID NO: 1740251 - RNA, 22 nt, Human
agaugcuagaacucccuuucaa

SEQ ID NO: 1740252 - RNA, 22 nt, Human
agauguagccccucuccuggaa

SEQ ID NO: 1740253 - RNA, 21 nt, Human
agauguagccccucuccugga

SEQ ID NO: 1740254 - RNA, 16 nt, Human
agaucguucucugccu

SEQ ID NO: 1740255 - RNA, 18 nt, Human
agaucucuaacuucacca

SEQ ID NO: 1740256 - RNA, 18 nt, Human
agauccccaagccuggca

SEQ ID NO: 1740257 - RNA, 16 nt, Human
agauucauauuuacuu

SEQ ID NO: 1740258 - RNA, 13 nt, Human
agauucauauuua

SEQ ID NO: 1740259 - RNA, 17 nt, Human
ugacuuauuuauauaaa

SEQ ID NO: 1740260 - RNA, 14 nt, Human
agauuaagaaauag

SEQ ID NO: 1740261 - RNA, 15 nt, Human
agauuaagaaauaga

SEQ ID NO: 1740262 - RNA, 12 nt, Human
ugacuuacugua

SEQ ID NO: 1740263 - RNA, 20 nt, Human
ugacuuacuguacaugaaaa

SEQ ID NO: 1740264 - RNA, 19 nt, Human
agauucauauuuacuucuu

SEQ ID NO: 1740265 - RNA, 21 nt, Human
agauuccagagaguggcuccu

SEQ ID NO: 1740266 - RNA, 22 nt, Human
agauuccagagaguggcuccuc

SEQ ID NO: 1740267 - RNA, 19 nt, Human
agauuucacucuccuuggu

SEQ ID NO: 1740268 - RNA, 19 nt, Human
ugaccugccaggcacacug

SEQ ID NO: 1740269 - RNA, 16 nt, Human
ugaccugccaggcaca

SEQ ID NO: 1740270 - RNA, 15 nt, Human
ugaccuuuaagagaa

SEQ ID NO: 1740271 - RNA, 13 nt, Human
ugaccuuucaaua

SEQ ID NO: 1740272 - RNA, 12 nt, Human
ugaccuuucaau

SEQ ID NO: 1740273 - RNA, 21 nt, Human
ugacuguuuucucuugagagg

SEQ ID NO: 1740274 - RNA, 21 nt, Human
ugacucguauaugucucaggu

SEQ ID NO: 1740275 - RNA, 19 nt, Human
ugacuauuuuucagaaucu

SEQ ID NO: 1740276 - RNA, 23 nt, Human
ucucacuauguugcccaggcagg

SEQ ID NO: 1740277 - RNA, 22 nt, Human
ucucacuauguugcccaggcag

SEQ ID NO: 1740278 - RNA, 21 nt, Human
ucucacuauguugcccaggca

SEQ ID NO: 1740279 - RNA, 20 nt, Human
ucucacuauguugcccaggc

SEQ ID NO: 1740280 - RNA, 22 nt, Human
acuugcagacucuacagaggcc

SEQ ID NO: 1740281 - RNA, 19 nt, Human
acuugcagacucuacagag

SEQ ID NO: 1740282 - RNA, 23 nt, Human
acuugcagacucuacagaggcca

SEQ ID NO: 1740283 - RNA, 16 nt, Human
acuugcucuugaugcc

SEQ ID NO: 1740284 - RNA, 20 nt, Human
acuugcucuugaugccuggc

SEQ ID NO: 1740285 - RNA, 18 nt, Human
acuugcucuugaugccug

SEQ ID NO: 1740286 - RNA, 17 nt, Human
acuugcucuugaugccu

SEQ ID NO: 1740287 - RNA, 22 nt, Human
acuuguggacacagcucuucuc

SEQ ID NO: 1740288 - RNA, 19 nt, Human
acuuguggacacagcucuu

SEQ ID NO: 1740289 - RNA, 21 nt, Human
acuugucuuuggacccugagg

SEQ ID NO: 1740290 - RNA, 20 nt, Human
acuugucuuuggacccugag

SEQ ID NO: 1740291 - RNA, 19 nt, Human
acuuguauuauguguguuu

SEQ ID NO: 1740292 - RNA, 18 nt, Human
acuuguauuauguguguu

SEQ ID NO: 1740293 - RNA, 14 nt, Human
acuugcuuuuaaaa

SEQ ID NO: 1740294 - RNA, 13 nt, Human
ucucaggccagcu

SEQ ID NO: 1740295 - RNA, 12 nt, Human
ucucaggccagc

SEQ ID NO: 1740296 - RNA, 12 nt, Human
ucucaggccaaa

SEQ ID NO: 1740297 - RNA, 10 nt, Human
ucucaggcca

SEQ ID NO: 1740298 - RNA, 14 nt, Human
ucucauuugucaca

SEQ ID NO: 1740299 - RNA, 19 nt, Human
ucucauuugccaauaauaa

SEQ ID NO: 1740300 - RNA, 16 nt, Human
ucuccaagcaggacau

SEQ ID NO: 1740301 - RNA, 13 nt, Human
ucuccaaaauaaa

SEQ ID NO: 1740302 - RNA, 16 nt, Human
ucucauuugucacaca

SEQ ID NO: 1740303 - RNA, 18 nt, Human
ucucaggccagcugcuug

SEQ ID NO: 1740304 - RNA, 17 nt, Human
ucucaggccagcugcuu

SEQ ID NO: 1740305 - RNA, 21 nt, Human
ucucaggccagcugcuugggc

SEQ ID NO: 1740306 - RNA, 20 nt, Human
ucucaugccucagccuccug

SEQ ID NO: 1740307 - RNA, 21 nt, Human
ucucaugccucagccuccuga

SEQ ID NO: 1740308 - RNA, 12 nt, Human
acuuugaccucu

SEQ ID NO: 1740309 - RNA, 13 nt, Human
acuuugaccucug

SEQ ID NO: 1740310 - RNA, 20 nt, Human
acuuuguuaguuucuccaag

SEQ ID NO: 1740311 - RNA, 14 nt, Human
acuuuguucuggcu

SEQ ID NO: 1740312 - RNA, 21 nt, Human
acuuuguuaguuucuccaagc

SEQ ID NO: 1740313 - RNA, 12 nt, Human
acuuuuguucuu

SEQ ID NO: 1740314 - RNA, 13 nt, Human
acuuuuguucuug

SEQ ID NO: 1740315 - RNA, 15 nt, Human
acuuuuguucuuggu

SEQ ID NO: 1740316 - RNA, 23 nt, Human
acuuuuguucuugguuuguaaau

SEQ ID NO: 1740317 - RNA, 15 nt, Human
ucuccuucaccuuug

SEQ ID NO: 1740318 - RNA, 14 nt, Human
ucuccuucaccuuu

SEQ ID NO: 1740319 - RNA, 17 nt, Human
agaaaaaauauuuuccc

SEQ ID NO: 1740320 - RNA, 18 nt, Human
ucuccuucaccuuugucc

SEQ ID NO: 1740321 - RNA, 16 nt, Human
ucuccuucaccuuugu

SEQ ID NO: 1740322 - RNA, 13 nt, Human
ucuccuuguguua

SEQ ID NO: 1740323 - RNA, 21 nt, Human
ucuccuuguguuacuaaguuu

SEQ ID NO: 1740324 - RNA, 23 nt, Human
ucuccgaccagacaccuugacag

SEQ ID NO: 1740325 - RNA, 17 nt, Human
ucuccgaccagacaccu

SEQ ID NO: 1740326 - RNA, 15 nt, Human
ucucccuuuuccaug

SEQ ID NO: 1740327 - RNA, 19 nt, Human
ucuccaagcaggacaugga

SEQ ID NO: 1740328 - RNA, 18 nt, Human
ucuccaagcaggacaugg

SEQ ID NO: 1740329 - RNA, 12 nt, Human
ucuccacccugc

SEQ ID NO: 1740330 - RNA, 23 nt, Human
ucuccccagcaagugagagcugg

SEQ ID NO: 1740331 - RNA, 16 nt, Human
ucuccucugcugcugg

SEQ ID NO: 1740332 - RNA, 15 nt, Human
ucuccucugcugcug

SEQ ID NO: 1740333 - RNA, 15 nt, Human
ucuccuccagaguca

SEQ ID NO: 1740334 - RNA, 18 nt, Human
ucuccucugcugcuggcu

SEQ ID NO: 1740335 - RNA, 17 nt, Human
ucuccucugcugcuggc

SEQ ID NO: 1740336 - RNA, 20 nt, Human
acuuucugaaauaacauggc

SEQ ID NO: 1740337 - RNA, 14 nt, Human
acuuucugaaauaa

SEQ ID NO: 1740338 - RNA, 12 nt, Human
acuuuaccuuuu

SEQ ID NO: 1740339 - RNA, 17 nt, Human
acuuacacuuuaugcac

SEQ ID NO: 1740340 - RNA, 21 nt, Human
acuuacuguacaugaaaacac

SEQ ID NO: 1740341 - RNA, 22 nt, Human
acuuacuguacaugaaaacaca

SEQ ID NO: 1740342 - RNA, 14 nt, Human
acuuagcugggaga

SEQ ID NO: 1740343 - RNA, 15 nt, Human
acuuagguguggggg

SEQ ID NO: 1740344 - RNA, 20 nt, Human
acuuaaauaaugugaaacug

SEQ ID NO: 1740345 - RNA, 13 nt, Human
acuuaagcacacu

SEQ ID NO: 1740346 - RNA, 17 nt, Human
acuuaaucuaaauggaa

SEQ ID NO: 1740347 - RNA, 19 nt, Human
acuuaaucuaaauggaacc

SEQ ID NO: 1740348 - RNA, 22 nt, Human
acuuaaucuaaauggaaccacu

SEQ ID NO: 1740349 - RNA, 16 nt, Human
acuuacacuuuaugca

SEQ ID NO: 1740350 - RNA, 17 nt, Human
acuguucucugcccucc

SEQ ID NO: 1740351 - RNA, 16 nt, Human
acuguucucugcccuc

SEQ ID NO: 1740352 - RNA, 18 nt, Human
acuguucucugcccucca

SEQ ID NO: 1740353 - RNA, 19 nt, Human
acuguucucugcccuccaa

SEQ ID NO: 1740354 - RNA, 21 nt, Human
ucuacccuggcacuauaaugu

SEQ ID NO: 1740355 - RNA, 14 nt, Human
ucuacccuggcacu

SEQ ID NO: 1740356 - RNA, 19 nt, Human
ucuacccuggcacuauaau

SEQ ID NO: 1740357 - RNA, 14 nt, Human
ucuacccaggugcu

SEQ ID NO: 1740358 - RNA, 20 nt, Human
ucuacccagcgagcccuggu

SEQ ID NO: 1740359 - RNA, 18 nt, Human
uccugggagugagcuggu

SEQ ID NO: 1740360 - RNA, 21 nt, Human
ucuacagaggccaugggccuc

SEQ ID NO: 1740361 - RNA, 19 nt, Human
ucuacccagcgagcccugg

SEQ ID NO: 1740362 - RNA, 23 nt, Human
ucuacagcuaaucagcauucuca

SEQ ID NO: 1740363 - RNA, 20 nt, Human
ucuacagcuaaucagcauuc

SEQ ID NO: 1740364 - RNA, 13 nt, Human
ucuagccagagga

SEQ ID NO: 1740365 - RNA, 12 nt, Human
ucuaggaagacu

SEQ ID NO: 1740366 - RNA, 22 nt, Human
ucuaguuguuugauucagacag

SEQ ID NO: 1740367 - RNA, 22 nt, Human
ucuaguuugauuaaauucuugc

SEQ ID NO: 1740368 - RNA, 21 nt, Human
ucuaguuugauuaaauucuug

SEQ ID NO: 1740369 - RNA, 23 nt, Human
ucuaguuguuugauucagacagc

SEQ ID NO: 1740370 - RNA, 13 nt, Human
ucuagauacugua

SEQ ID NO: 1740371 - RNA, 18 nt, Human
ucuagcauggcugccaau

SEQ ID NO: 1740372 - RNA, 16 nt, Human
acuucaucccucuggg

SEQ ID NO: 1740373 - RNA, 19 nt, Human
acuuccccuuccuaauucc

SEQ ID NO: 1740374 - RNA, 13 nt, Human
acuuccccuuccu

SEQ ID NO: 1740375 - RNA, 19 nt, Human
ucucacuauguugcccagg

SEQ ID NO: 1740376 - RNA, 17 nt, Human
ucucacuauguugccca

SEQ ID NO: 1740377 - RNA, 23 nt, Human
agaauuaacacaugauccugcaa

SEQ ID NO: 1740378 - RNA, 15 nt, Human
agaauuaacacauga

SEQ ID NO: 1740379 - RNA, 18 nt, Human
ucugcuuuccucuuccug

SEQ ID NO: 1740380 - RNA, 13 nt, Human
ucugcuuuccucu

SEQ ID NO: 1740381 - RNA, 12 nt, Human
ucugcuuuccuc

SEQ ID NO: 1740382 - RNA, 23 nt, Human
agaaguuucugccgcagcccugc

SEQ ID NO: 1740383 - RNA, 22 nt, Human
agaaguuucugccgcagcccug

SEQ ID NO: 1740384 - RNA, 21 nt, Human
agaaguuucugccgcagcccu

SEQ ID NO: 1740385 - RNA, 20 nt, Human
agaaguggggacagagcaga

SEQ ID NO: 1740386 - RNA, 16 nt, Human
agaauagaugcugacu

SEQ ID NO: 1740387 - RNA, 17 nt, Human
agaauaaaauuuuuaau

SEQ ID NO: 1740388 - RNA, 14 nt, Human
agaauaaaauuuuu

SEQ ID NO: 1740389 - RNA, 12 nt, Human
agaauaaaauuu

SEQ ID NO: 1740390 - RNA, 14 nt, Human
ucugugagaugcua

SEQ ID NO: 1740391 - RNA, 23 nt, Human
ucugugagaugcuagaacucccu

SEQ ID NO: 1740392 - RNA, 17 nt, Human
ucugugagaugcuagaa

SEQ ID NO: 1740393 - RNA, 22 nt, Human
ucugugagaugcuagaacuccc

SEQ ID NO: 1740394 - RNA, 15 nt, Human
ucugggccagaauuu

SEQ ID NO: 1740395 - RNA, 14 nt, Human
ucugggccagaauu

SEQ ID NO: 1740396 - RNA, 13 nt, Human
ucuguuuagauaa

SEQ ID NO: 1740397 - RNA, 16 nt, Human
ucuguuguauucauug

SEQ ID NO: 1740398 - RNA, 13 nt, Human
ucuguucuuucca

SEQ ID NO: 1740399 - RNA, 22 nt, Human
ucuguucuuuccaaaguacacu

SEQ ID NO: 1740400 - RNA, 17 nt, Human
ucuguuggccaguguga

SEQ ID NO: 1740401 - RNA, 12 nt, Human
ucuguuggccag

SEQ ID NO: 1740402 - RNA, 15 nt, Human
ucuguugcugccuca

SEQ ID NO: 1740403 - RNA, 16 nt, Human
ucuguugcccaggcug

SEQ ID NO: 1740404 - RNA, 16 nt, Human
agacacaggcccggcu

SEQ ID NO: 1740405 - RNA, 13 nt, Human
agacacaggcccg

SEQ ID NO: 1740406 - RNA, 12 nt, Human
agacacaggccc

SEQ ID NO: 1740407 - RNA, 20 nt, Human
agacacauguccaagaagcc

SEQ ID NO: 1740408 - RNA, 16 nt, Human
agacacauguccaaga

SEQ ID NO: 1740409 - RNA, 17 nt, Human
agacaccuugacagggc

SEQ ID NO: 1740410 - RNA, 18 nt, Human
agacaccuugacagggca

SEQ ID NO: 1740411 - RNA, 19 nt, Human
agacaccuugacagggcac

SEQ ID NO: 1740412 - RNA, 13 nt, Human
agacagagcuaca

SEQ ID NO: 1740413 - RNA, 21 nt, Human
ucugaucauccacugugccau

SEQ ID NO: 1740414 - RNA, 17 nt, Human
ucugaucauccacugug

SEQ ID NO: 1740415 - RNA, 16 nt, Human
ucugaugcaagcaaga

SEQ ID NO: 1740416 - RNA, 21 nt, Human
ucugagacucgcgacaaugca

SEQ ID NO: 1740417 - RNA, 22 nt, Human
ucugagacucgcgacaaugcaa

SEQ ID NO: 1740418 - RNA, 18 nt, Human
ucugcagauaaacaguag

SEQ ID NO: 1740419 - RNA, 15 nt, Human
ucugcagauaaacag

SEQ ID NO: 1740420 - RNA, 17 nt, Human
ucugcagcaauaaagca

SEQ ID NO: 1740421 - RNA, 15 nt, Human
ucugcacuccccugc

SEQ ID NO: 1740422 - RNA, 14 nt, Human
ucugcacuccccug

SEQ ID NO: 1740423 - RNA, 16 nt, Human
ucugcacuccccugcu

SEQ ID NO: 1740424 - RNA, 17 nt, Human
ucugcacuccccugcug

SEQ ID NO: 1740425 - RNA, 21 nt, Human
ucugaugcaagcaagaaacac

SEQ ID NO: 1740426 - RNA, 14 nt, Human
agaaauguacagca

SEQ ID NO: 1740427 - RNA, 15 nt, Human
agaaauguacagcaa

SEQ ID NO: 1740428 - RNA, 14 nt, Human
ucugcaggucccua

SEQ ID NO: 1740429 - RNA, 13 nt, Human
ucugcaggucccu

SEQ ID NO: 1740430 - RNA, 12 nt, Human
ucugcagguccc

SEQ ID NO: 1740431 - RNA, 11 nt, Human
ucugcaggucc

SEQ ID NO: 1740432 - RNA, 21 nt, Human
ucugaaggacauugcggacag

SEQ ID NO: 1740433 - RNA, 22 nt, Human
ucugaaggacauugcggacagc

SEQ ID NO: 1740434 - RNA, 10 nt, Human
ucugaauuau

SEQ ID NO: 1740435 - RNA, 15 nt, Human
ucugacacacagcuc

SEQ ID NO: 1740436 - RNA, 14 nt, Human
ucugacacacagcu

SEQ ID NO: 1740437 - RNA, 13 nt, Human
ucugacacacagc

SEQ ID NO: 1740438 - RNA, 15 nt, Human
ucugaauuauuuucu

SEQ ID NO: 1740439 - RNA, 16 nt, Human
ucuccuuucacaaccu

SEQ ID NO: 1740440 - RNA, 22 nt, Human
agaaagcccuuaggaagaauuu

SEQ ID NO: 1740441 - RNA, 20 nt, Human
agaaagcccuuaggaagaau

SEQ ID NO: 1740442 - RNA, 20 nt, Human
agaaauugcauuuccugaca

SEQ ID NO: 1740443 - RNA, 17 nt, Human
agaaauugcauuuccug

SEQ ID NO: 1740444 - RNA, 18 nt, Human
agaagauuuugaaauuuu

SEQ ID NO: 1740445 - RNA, 17 nt, Human
ucugcccacucccugca

SEQ ID NO: 1740446 - RNA, 22 nt, Human
agaagcccaggaaaggcuccag

SEQ ID NO: 1740447 - RNA, 21 nt, Human
agaagcccaggaaaggcucca

SEQ ID NO: 1740448 - RNA, 20 nt, Human
agaagcccaggaaaggcucc

SEQ ID NO: 1740449 - RNA, 18 nt, Human
agaagcccaggaaaggcu

SEQ ID NO: 1740450 - RNA, 16 nt, Human
agaagcccaggaaagg

SEQ ID NO: 1740451 - RNA, 12 nt, Human
agaagcccagga

SEQ ID NO: 1740452 - RNA, 13 nt, Human
ucugcuucagccu

SEQ ID NO: 1740453 - RNA, 15 nt, Human
ucugcuucagccucc

SEQ ID NO: 1740454 - RNA, 14 nt, Human
ucugcuucagccuc

SEQ ID NO: 1740455 - RNA, 20 nt, Human
ucugcucacauaucugucau

SEQ ID NO: 1740456 - RNA, 19 nt, Human
ucugcucacauaucuguca

SEQ ID NO: 1740457 - RNA, 22 nt, Human
ucugccugcccaggccccugcc

SEQ ID NO: 1740458 - RNA, 21 nt, Human
ucugccugcccaggccccugc

SEQ ID NO: 1740459 - RNA, 22 nt, Human
ucugccgcagcccugcagaggg

SEQ ID NO: 1740460 - RNA, 23 nt, Human
ucugccgcagcccugcagagggc

SEQ ID NO: 1740461 - RNA, 19 nt, Human
ucugcccuccaagaccuuc

SEQ ID NO: 1740462 - RNA, 21 nt, Human
ucugcccacucccugcaaccu

SEQ ID NO: 1740463 - RNA, 18 nt, Human
ucugcccacucccugcaa

SEQ ID NO: 1740464 - RNA, 15 nt, Human
ucugccgcagcccug

SEQ ID NO: 1740465 - RNA, 14 nt, Human
ucugccgcagcccu

SEQ ID NO: 1740466 - RNA, 10 nt, Human
ucugcccugc

SEQ ID NO: 1740467 - RNA, 12 nt, Human
ucugcccugcgg

SEQ ID NO: 1740468 - RNA, 11 nt, Human
ucugcccugcg

SEQ ID NO: 1740469 - RNA, 19 nt, Human
acuccagugagacagcucu

SEQ ID NO: 1740470 - RNA, 21 nt, Human
acuccagaccccuggcuuuuc

SEQ ID NO: 1740471 - RNA, 19 nt, Human
acuccagaccccuggcuuu

SEQ ID NO: 1740472 - RNA, 18 nt, Human
acuccagaccccuggcuu

SEQ ID NO: 1740473 - RNA, 15 nt, Human
acucaccccagcccc

SEQ ID NO: 1740474 - RNA, 14 nt, Human
acucaccccagccc

SEQ ID NO: 1740475 - RNA, 16 nt, Human
acucaccccagcccca

SEQ ID NO: 1740476 - RNA, 15 nt, Human
acuccagaccccugg

SEQ ID NO: 1740477 - RNA, 13 nt, Human
acuccagaccccu

SEQ ID NO: 1740478 - RNA, 13 nt, Human
acucaccccagcc

SEQ ID NO: 1740479 - RNA, 11 nt, Human
acuccuggccu

SEQ ID NO: 1740480 - RNA, 17 nt, Human
ucccugguggcagcuca

SEQ ID NO: 1740481 - RNA, 16 nt, Human
ucccugguggcagcuc

SEQ ID NO: 1740482 - RNA, 21 nt, Human
ucccugguggcagcucaccuc

SEQ ID NO: 1740483 - RNA, 20 nt, Human
ucccugguggcagcucaccu

SEQ ID NO: 1740484 - RNA, 19 nt, Human
ucccugguggcagcucacc

SEQ ID NO: 1740485 - RNA, 18 nt, Human
ucccugguggcagcucac

SEQ ID NO: 1740486 - RNA, 16 nt, Human
acuccugcaggcagcc

SEQ ID NO: 1740487 - RNA, 15 nt, Human
acuccugcaggcagc

SEQ ID NO: 1740488 - RNA, 22 nt, Human
acuccugcaggcagccaggcca

SEQ ID NO: 1740489 - RNA, 14 nt, Human
acuccugcaggcag

SEQ ID NO: 1740490 - RNA, 12 nt, Human
acuccugcaggc

SEQ ID NO: 1740491 - RNA, 12 nt, Human
acuccucccagg

SEQ ID NO: 1740492 - RNA, 14 nt, Human
acuccuggccucaa

SEQ ID NO: 1740493 - RNA, 13 nt, Human
acuccuggccuca

SEQ ID NO: 1740494 - RNA, 13 nt, Human
uccuaggcauuug

SEQ ID NO: 1740495 - RNA, 12 nt, Human
acuccuggccuc

SEQ ID NO: 1740496 - RNA, 15 nt, Human
uccuacucuguguca

SEQ ID NO: 1740497 - RNA, 14 nt, Human
uccuacucuguguc

SEQ ID NO: 1740498 - RNA, 13 nt, Human
uccuacucugugu

SEQ ID NO: 1740499 - RNA, 21 nt, Human
ucccuuuuuuuaaguaaggaa

SEQ ID NO: 1740500 - RNA, 16 nt, Human
ucccuuuuuuuaagua

SEQ ID NO: 1740501 - RNA, 18 nt, Human
uccgguguuuaagacauu

SEQ ID NO: 1740502 - RNA, 20 nt, Human
ucccuuggauuguccccgac

SEQ ID NO: 1740503 - RNA, 19 nt, Human
ucccuuggauuguccccga

SEQ ID NO: 1740504 - RNA, 23 nt, Human
ucccugguggcagcucaccucuc

SEQ ID NO: 1740505 - RNA, 22 nt, Human
ucccugguggcagcucaccucu

SEQ ID NO: 1740506 - RNA, 18 nt, Human
ucccuuugacgccauccc

SEQ ID NO: 1740507 - RNA, 16 nt, Human
ucccuuugacgccauc

SEQ ID NO: 1740508 - RNA, 19 nt, Human
ucccuuuuuuggcugcuga

SEQ ID NO: 1740509 - RNA, 17 nt, Human
ucccuuuuuuggcugcu

SEQ ID NO: 1740510 - RNA, 19 nt, Human
ucccuuugacgccauccca

SEQ ID NO: 1740511 - RNA, 21 nt, Human
ucccuuugacgccaucccagc

SEQ ID NO: 1740512 - RNA, 22 nt, Human
ucccuuuuuuggcugcugaagg

SEQ ID NO: 1740513 - RNA, 20 nt, Human
ucccuuuuuuggcugcugaa

SEQ ID NO: 1740514 - RNA, 23 nt, Human
ucccuuuuuuggcugcugaaggc

SEQ ID NO: 1740515 - RNA, 13 nt, Human
ucccuuuuuuuaa

SEQ ID NO: 1740516 - RNA, 14 nt, Human
acucuugaccucag

SEQ ID NO: 1740517 - RNA, 16 nt, Human
acucuugaccucaggu

SEQ ID NO: 1740518 - RNA, 15 nt, Human
acucuugaccucagg

SEQ ID NO: 1740519 - RNA, 23 nt, Human
uccucauacccacccccacccaa

SEQ ID NO: 1740520 - RNA, 22 nt, Human
uccucauaguaugguggcuggg

SEQ ID NO: 1740521 - RNA, 13 nt, Human
uccucccaggcgc

SEQ ID NO: 1740522 - RNA, 21 nt, Human
uccucccaggcgccccuuccc

SEQ ID NO: 1740523 - RNA, 19 nt, Human
uccucccaggcgccccuuc

SEQ ID NO: 1740524 - RNA, 15 nt, Human
acucuccuugguguc

SEQ ID NO: 1740525 - RNA, 18 nt, Human
acucuccuggaaauauua

SEQ ID NO: 1740526 - RNA, 16 nt, Human
acucuccucugcugcu

SEQ ID NO: 1740527 - RNA, 14 nt, Human
acucuccucugcug

SEQ ID NO: 1740528 - RNA, 13 nt, Human
acucuccucugcu

SEQ ID NO: 1740529 - RNA, 12 nt, Human
acucuccucugc

SEQ ID NO: 1740530 - RNA, 17 nt, Human
acucuccuccagaguca

SEQ ID NO: 1740531 - RNA, 14 nt, Human
acucuccuccagag

SEQ ID NO: 1740532 - RNA, 24 nt, Human
acuccuugaaaacacuguucucug

SEQ ID NO: 1740533 - RNA, 23 nt, Human
acuccuugaaaacacuguucucu

SEQ ID NO: 1740534 - RNA, 15 nt, Human
acucuggcagcucag

SEQ ID NO: 1740535 - RNA, 13 nt, Human
acucuggcagcuc

SEQ ID NO: 1740536 - RNA, 16 nt, Human
acucugccuccucuuc

SEQ ID NO: 1740537 - RNA, 12 nt, Human
acucugccuccu

SEQ ID NO: 1740538 - RNA, 23 nt, Human
acucuccuuggugucgggcauga

SEQ ID NO: 1740539 - RNA, 16 nt, Human
acucuccuuggugucg

SEQ ID NO: 1740540 - RNA, 22 nt, Human
acucugagacucgcgacaaugc

SEQ ID NO: 1740541 - RNA, 11 nt, Human
acucugagacu

SEQ ID NO: 1740542 - RNA, 18 nt, Human
acugagagugaacaaauu

SEQ ID NO: 1740543 - RNA, 23 nt, Human
acugagacagcccgggcucugcc

SEQ ID NO: 1740544 - RNA, 22 nt, Human
acugagacagcccgggcucugc

SEQ ID NO: 1740545 - RNA, 21 nt, Human
acugagacagcccgggcucug

SEQ ID NO: 1740546 - RNA, 18 nt, Human
acugagacagcccgggcu

SEQ ID NO: 1740547 - RNA, 15 nt, Human
acugagacagcccgg

SEQ ID NO: 1740548 - RNA, 21 nt, Human
acugagaaauuuauaaacuuu

SEQ ID NO: 1740549 - RNA, 17 nt, Human
acugagaaauuuauaaa

SEQ ID NO: 1740550 - RNA, 12 nt, Human
acugagaaauuu

SEQ ID NO: 1740551 - RNA, 12 nt, Human
uccucuuuccau

SEQ ID NO: 1740552 - RNA, 11 nt, Human
uccucuuucca

SEQ ID NO: 1740553 - RNA, 14 nt, Human
uccucccucccucu

SEQ ID NO: 1740554 - RNA, 11 nt, Human
uccucccuccc

SEQ ID NO: 1740555 - RNA, 21 nt, Human
uccucuuuggucuacacugug

SEQ ID NO: 1740556 - RNA, 19 nt, Human
uccucuuuggucuacacug

SEQ ID NO: 1740557 - RNA, 19 nt, Human
uccucuuuccaucuacccu

SEQ ID NO: 1740558 - RNA, 23 nt, Human
uccucuuuggucuacacugugcu

SEQ ID NO: 1740559 - RNA, 22 nt, Human
uccucuuuggucuacacugugc

SEQ ID NO: 1740560 - RNA, 21 nt, Human
uccugaauuuuauuuuuuggg

SEQ ID NO: 1740561 - RNA, 19 nt, Human
acucuuucuauuguuucuu

SEQ ID NO: 1740562 - RNA, 15 nt, Human
acucuuguuuccuua

SEQ ID NO: 1740563 - RNA, 20 nt, Human
acugaacucugacaacagac

SEQ ID NO: 1740564 - RNA, 13 nt, Human
acugaacauucca

SEQ ID NO: 1740565 - RNA, 16 nt, Human
acugaacauuccagag

SEQ ID NO: 1740566 - RNA, 13 nt, Human
acugauaaagaug

SEQ ID NO: 1740567 - RNA, 21 nt, Human
acugauaaagaugagugagca

SEQ ID NO: 1740568 - RNA, 20 nt, Human
acugcaacuuguaaaugugg

SEQ ID NO: 1740569 - RNA, 16 nt, Human
acugcaacuucugccu

SEQ ID NO: 1740570 - RNA, 14 nt, Human
acugcaacuucugc

SEQ ID NO: 1740571 - RNA, 14 nt, Human
acugcaccgggcca

SEQ ID NO: 1740572 - RNA, 20 nt, Human
acugcacuauagccuaggug

SEQ ID NO: 1740573 - RNA, 16 nt, Human
acugcaccgggccaca

SEQ ID NO: 1740574 - RNA, 23 nt, Human
acugcacagugcaucucagccca

SEQ ID NO: 1740575 - RNA, 21 nt, Human
uccugcacacgcuccuuccuc

SEQ ID NO: 1740576 - RNA, 14 nt, Human
uccugcacacgcuc

SEQ ID NO: 1740577 - RNA, 22 nt, Human
uccugcacacgcuccuuccucu

SEQ ID NO: 1740578 - RNA, 21 nt, Human
uccugaugcuucuucagagac

SEQ ID NO: 1740579 - RNA, 20 nt, Human
uccugaugcuucuucagaga

SEQ ID NO: 1740580 - RNA, 19 nt, Human
uccugaugcuucuucagag

SEQ ID NO: 1740581 - RNA, 20 nt, Human
acugcacuccagccugggug

SEQ ID NO: 1740582 - RNA, 19 nt, Human
acugcacuccagccugggu

SEQ ID NO: 1740583 - RNA, 18 nt, Human
acugcacuccagccuggg

SEQ ID NO: 1740584 - RNA, 17 nt, Human
acugcacuccagccugg

SEQ ID NO: 1740585 - RNA, 14 nt, Human
acugcacuccagcc

SEQ ID NO: 1740586 - RNA, 21 nt, Human
acugcacuauagccuagguga

SEQ ID NO: 1740587 - RNA, 15 nt, Human
uccuggaaauauuaa

SEQ ID NO: 1740588 - RNA, 23 nt, Human
uccuggaagugcuaauuuugaaa

SEQ ID NO: 1740589 - RNA, 17 nt, Human
uccugggagugagcugg

SEQ ID NO: 1740590 - RNA, 14 nt, Human
uccugggagugagc

SEQ ID NO: 1740591 - RNA, 12 nt, Human
uccugggaguga

SEQ ID NO: 1740592 - RNA, 15 nt, Human
uccugcaggcagcca

SEQ ID NO: 1740593 - RNA, 14 nt, Human
uccugcaggcagcc

SEQ ID NO: 1740594 - RNA, 13 nt, Human
uccugcaggcagc

SEQ ID NO: 1740595 - RNA, 12 nt, Human
uccugcaggcag

SEQ ID NO: 1740596 - RNA, 15 nt, Human
acuaauuuuaaaaug

SEQ ID NO: 1740597 - RNA, 22 nt, Human
acguuucuaaaggcuaccuuug

SEQ ID NO: 1740598 - RNA, 18 nt, Human
ucccagauacuugggggg

SEQ ID NO: 1740599 - RNA, 16 nt, Human
ucccagauacuugggg

SEQ ID NO: 1740600 - RNA, 19 nt, Human
uccauccugaggcuccacu

SEQ ID NO: 1740601 - RNA, 12 nt, Human
uccauccugagg

SEQ ID NO: 1740602 - RNA, 15 nt, Human
uccauccugaggcuc

SEQ ID NO: 1740603 - RNA, 17 nt, Human
acguaaagcuagaaaug

SEQ ID NO: 1740604 - RNA, 18 nt, Human
acguaaagcuagaaauga

SEQ ID NO: 1740605 - RNA, 16 nt, Human
acguuucuaaaggcua

SEQ ID NO: 1740606 - RNA, 14 nt, Human
acguugugcauuug

SEQ ID NO: 1740607 - RNA, 15 nt, Human
acguugugcauuugg

SEQ ID NO: 1740608 - RNA, 13 nt, Human
acguugugcauuu

SEQ ID NO: 1740609 - RNA, 15 nt, Human
acguuaccaggcagg

SEQ ID NO: 1740610 - RNA, 21 nt, Human
acguggcugcuucaaggaucc

SEQ ID NO: 1740611 - RNA, 19 nt, Human
acguggcugcuucaaggau

SEQ ID NO: 1740612 - RNA, 18 nt, Human
acguggcugcuucaagga

SEQ ID NO: 1740613 - RNA, 16 nt, Human
acucaaugcacugaca

SEQ ID NO: 1740614 - RNA, 14 nt, Human
acuauguugcccag

SEQ ID NO: 1740615 - RNA, 22 nt, Human
acuauggcccuggccuagcaua

SEQ ID NO: 1740616 - RNA, 16 nt, Human
acuauguugcccaggc

SEQ ID NO: 1740617 - RNA, 15 nt, Human
acuauguugcccagg

SEQ ID NO: 1740618 - RNA, 17 nt, Human
acuauguugcccaggca

SEQ ID NO: 1740619 - RNA, 21 nt, Human
acuaucuaaauguugaaagau

SEQ ID NO: 1740620 - RNA, 16 nt, Human
acuaucuaaauguuga

SEQ ID NO: 1740621 - RNA, 22 nt, Human
acuauagccuaggugacagagu

SEQ ID NO: 1740622 - RNA, 20 nt, Human
acuauagccuaggugacaga

SEQ ID NO: 1740623 - RNA, 18 nt, Human
uccccaggaggccagccu

SEQ ID NO: 1740624 - RNA, 16 nt, Human
uccccaccgcagacag

SEQ ID NO: 1740625 - RNA, 15 nt, Human
uccccaccgcagaca

SEQ ID NO: 1740626 - RNA, 23 nt, Human
uccccacccugaaagcccugagc

SEQ ID NO: 1740627 - RNA, 21 nt, Human
uccccaggaggccagccuuga

SEQ ID NO: 1740628 - RNA, 20 nt, Human
uccccaggaggccagccuug

SEQ ID NO: 1740629 - RNA, 11 nt, Human
ucccccagccc

SEQ ID NO: 1740630 - RNA, 15 nt, Human
ucccccagccccauc

SEQ ID NO: 1740631 - RNA, 13 nt, Human
ucccccagcccca

SEQ ID NO: 1740632 - RNA, 16 nt, Human
ucccccagccccaucc

SEQ ID NO: 1740633 - RNA, 19 nt, Human
acuagacucccaagcugga

SEQ ID NO: 1740634 - RNA, 12 nt, Human
acggccaggcca

SEQ ID NO: 1740635 - RNA, 18 nt, Human
acggcucacugcagccuc

SEQ ID NO: 1740636 - RNA, 17 nt, Human
acggcucacugcagccu

SEQ ID NO: 1740637 - RNA, 16 nt, Human
acggcucacugcagcc

SEQ ID NO: 1740638 - RNA, 13 nt, Human
acggccaggccag

SEQ ID NO: 1740639 - RNA, 15 nt, Human
uccaguaucuugaag

SEQ ID NO: 1740640 - RNA, 14 nt, Human
uccaguaucuugaa

SEQ ID NO: 1740641 - RNA, 18 nt, Human
acggcuuuuacuuaaacc

SEQ ID NO: 1740642 - RNA, 18 nt, Human
uccagugagacagcucug

SEQ ID NO: 1740643 - RNA, 15 nt, Human
uccagugaggcucug

SEQ ID NO: 1740644 - RNA, 16 nt, Human
uccagugaggcucugc

SEQ ID NO: 1740645 - RNA, 23 nt, Human
uccagugaggcucugcccuuggu

SEQ ID NO: 1740646 - RNA, 22 nt, Human
uccagugaggcucugcccuugg

SEQ ID NO: 1740647 - RNA, 18 nt, Human
uccaguaucuugaagacu

SEQ ID NO: 1740648 - RNA, 16 nt, Human
uccaguaucuugaaga

SEQ ID NO: 1740649 - RNA, 11 nt, Human
acgcucucugg

SEQ ID NO: 1740650 - RNA, 14 nt, Human
acgcucucuggccu

SEQ ID NO: 1740651 - RNA, 13 nt, Human
acgcuggaccuug

SEQ ID NO: 1740652 - RNA, 15 nt, Human
acgcuccuuccucug

SEQ ID NO: 1740653 - RNA, 14 nt, Human
acgcuccuuccucu

SEQ ID NO: 1740654 - RNA, 16 nt, Human
acgcuggagugcagug

SEQ ID NO: 1740655 - RNA, 15 nt, Human
acgcuggagugcagu

SEQ ID NO: 1740656 - RNA, 23 nt, Human
acgcuggaccuugaacuggguac

SEQ ID NO: 1740657 - RNA, 20 nt, Human
acgcuggaccuugaacuggg

SEQ ID NO: 1740658 - RNA, 18 nt, Human
acgcuggagugcagugag

SEQ ID NO: 1740659 - RNA, 17 nt, Human
acgcuggagugcaguga

SEQ ID NO: 1740660 - RNA, 23 nt, Human
acggagucccaccuuggcugcag

SEQ ID NO: 1740661 - RNA, 21 nt, Human
acgaauauugcugauggugca

SEQ ID NO: 1740662 - RNA, 21 nt, Human
acgcuacccgggaagggggcu

SEQ ID NO: 1740663 - RNA, 20 nt, Human
acgcgugcacacaccagagc

SEQ ID NO: 1740664 - RNA, 13 nt, Human
accuuuuuuauac

SEQ ID NO: 1740665 - RNA, 22 nt, Human
uccacugguucuucuuggucuc

SEQ ID NO: 1740666 - RNA, 21 nt, Human
uccacugugccaugugccagg

SEQ ID NO: 1740667 - RNA, 18 nt, Human
uccagaauggucuuucua

SEQ ID NO: 1740668 - RNA, 19 nt, Human
accuugaaaacuuuaugcu

SEQ ID NO: 1740669 - RNA, 20 nt, Human
accuugaacuggguacuugu

SEQ ID NO: 1740670 - RNA, 18 nt, Human
accuuuguccccaccgca

SEQ ID NO: 1740671 - RNA, 22 nt, Human
accuuuguuugcaucugaaaau

SEQ ID NO: 1740672 - RNA, 17 nt, Human
accuuuguccccaccgc

SEQ ID NO: 1740673 - RNA, 18 nt, Human
accuuugacaaagguaaa

SEQ ID NO: 1740674 - RNA, 17 nt, Human
accuuugacaaagguaa

SEQ ID NO: 1740675 - RNA, 21 nt, Human
uccaggcugggagagccuucc

SEQ ID NO: 1740676 - RNA, 20 nt, Human
uccaggcugggagagccuuc

SEQ ID NO: 1740677 - RNA, 22 nt, Human
uccaggcuccuuuagcgcccag

SEQ ID NO: 1740678 - RNA, 12 nt, Human
uccaggcuccuu

SEQ ID NO: 1740679 - RNA, 10 nt, Human
uccaggcucc

SEQ ID NO: 1740680 - RNA, 18 nt, Human
acgaauauugcugauggu

SEQ ID NO: 1740681 - RNA, 15 nt, Human
acgaauauugcugau

SEQ ID NO: 1740682 - RNA, 23 nt, Human
uccaggcugggagagccuuccag

SEQ ID NO: 1740683 - RNA, 15 nt, Human
uccagaauuucccaa

SEQ ID NO: 1740684 - RNA, 14 nt, Human
uccagaauuuccca

SEQ ID NO: 1740685 - RNA, 13 nt, Human
uccagaccccugg

SEQ ID NO: 1740686 - RNA, 11 nt, Human
uccagccuggg

SEQ ID NO: 1740687 - RNA, 20 nt, Human
uccagccugcugccugcuuu

SEQ ID NO: 1740688 - RNA, 20 nt, Human
ucauauuuuaaacagaggau

SEQ ID NO: 1740689 - RNA, 16 nt, Human
ucauauuuacuucuua

SEQ ID NO: 1740690 - RNA, 17 nt, Human
accgagucucuucucca

SEQ ID NO: 1740691 - RNA, 16 nt, Human
accgagucucuucucc

SEQ ID NO: 1740692 - RNA, 23 nt, Human
ucauauuuacuucuuauacauuu

SEQ ID NO: 1740693 - RNA, 15 nt, Human
ucauauuuacuucuu

SEQ ID NO: 1740694 - RNA, 21 nt, Human
ucauaguaugguggcuggguu

SEQ ID NO: 1740695 - RNA, 18 nt, Human
ucauauaagauucauauu

SEQ ID NO: 1740696 - RNA, 19 nt, Human
ucauaguaugguggcuggg

SEQ ID NO: 1740697 - RNA, 18 nt, Human
ucauaguaugguggcugg

SEQ ID NO: 1740698 - RNA, 15 nt, Human
ucauaguaugguggc

SEQ ID NO: 1740699 - RNA, 14 nt, Human
ucauaaccuagccu

SEQ ID NO: 1740700 - RNA, 16 nt, Human
ucaguuuucaggagug

SEQ ID NO: 1740701 - RNA, 17 nt, Human
ucaguuuuugugaaaag

SEQ ID NO: 1740702 - RNA, 15 nt, Human
ucaguuuuugugaaa

SEQ ID NO: 1740703 - RNA, 11 nt, Human
ucaguggcagc

SEQ ID NO: 1740704 - RNA, 18 nt, Human
ucagugccuuauggaaca

SEQ ID NO: 1740705 - RNA, 16 nt, Human
ucagugccuuauggaa

SEQ ID NO: 1740706 - RNA, 13 nt, Human
ucaguggcagcug

SEQ ID NO: 1740707 - RNA, 12 nt, Human
ucaguggcagcu

SEQ ID NO: 1740708 - RNA, 16 nt, Human
ucaguggggaggggcu

SEQ ID NO: 1740709 - RNA, 15 nt, Human
ucagugccuuaugga

SEQ ID NO: 1740710 - RNA, 14 nt, Human
ucagugccuuaugg

SEQ ID NO: 1740711 - RNA, 12 nt, Human
ucagugccuuau

SEQ ID NO: 1740712 - RNA, 11 nt, Human
ucagugccuua

SEQ ID NO: 1740713 - RNA, 10 nt, Human
ucagugccuu

SEQ ID NO: 1740714 - RNA, 9 nt, Human
ucagugccu

SEQ ID NO: 1740715 - RNA, 20 nt, Human
ucagugcccuccaggauaga

SEQ ID NO: 1740716 - RNA, 19 nt, Human
accgaaaacguggcugcuu

SEQ ID NO: 1740717 - RNA, 17 nt, Human
accgaaaacguggcugc

SEQ ID NO: 1740718 - RNA, 12 nt, Human
ucagugccacua

SEQ ID NO: 1740719 - RNA, 16 nt, Human
ucagugccaaaaacaa

SEQ ID NO: 1740720 - RNA, 16 nt, Human
accgcagacaggacca

SEQ ID NO: 1740721 - RNA, 12 nt, Human
accgcagacagg

SEQ ID NO: 1740722 - RNA, 17 nt, Human
accgcagacaggaccag

SEQ ID NO: 1740723 - RNA, 20 nt, Human
accucccacaaaggagagcu

SEQ ID NO: 1740724 - RNA, 14 nt, Human
ucaugcaaacuuua

SEQ ID NO: 1740725 - RNA, 11 nt, Human
ucaugauuuuu

SEQ ID NO: 1740726 - RNA, 13 nt, Human
ucaucuaggauuu

SEQ ID NO: 1740727 - RNA, 13 nt, Human
ucauccauccagg

SEQ ID NO: 1740728 - RNA, 23 nt, Human
ucaugcaaacuuuauuuuguguu

SEQ ID NO: 1740729 - RNA, 16 nt, Human
ucaugugaaaucauuc

SEQ ID NO: 1740730 - RNA, 17 nt, Human
ucaugugaaaucauuca

SEQ ID NO: 1740731 - RNA, 15 nt, Human
ucagcaaaagaugcu

SEQ ID NO: 1740732 - RNA, 18 nt, Human
accaguguuguggauuua

SEQ ID NO: 1740733 - RNA, 12 nt, Human
ucagauuugaac

SEQ ID NO: 1740734 - RNA, 21 nt, Human
ucagauuugaacucuucaauc

SEQ ID NO: 1740735 - RNA, 22 nt, Human
accccagccccaaaacucuccu

SEQ ID NO: 1740736 - RNA, 13 nt, Human
accccagccccaa

SEQ ID NO: 1740737 - RNA, 17 nt, Human
accccacacacgccaga

SEQ ID NO: 1740738 - RNA, 23 nt, Human
acccaggagccccgaggccuucu

SEQ ID NO: 1740739 - RNA, 19 nt, Human
acccaggagccccgaggcc

SEQ ID NO: 1740740 - RNA, 17 nt, Human
ucagcccucccugcccc

SEQ ID NO: 1740741 - RNA, 16 nt, Human
ucagcccucccugccc

SEQ ID NO: 1740742 - RNA, 15 nt, Human
ucagcccucccugcc

SEQ ID NO: 1740743 - RNA, 14 nt, Human
ucagcccucccugc

SEQ ID NO: 1740744 - RNA, 13 nt, Human
ucagcccucccug

SEQ ID NO: 1740745 - RNA, 15 nt, Human
accccugagcuugca

SEQ ID NO: 1740746 - RNA, 18 nt, Human
accccaucucuacaaaaa

SEQ ID NO: 1740747 - RNA, 23 nt, Human
ucagcggggacagcuccuucugu

SEQ ID NO: 1740748 - RNA, 21 nt, Human
ucagcggggacagcuccuucu

SEQ ID NO: 1740749 - RNA, 20 nt, Human
ucagcggggacagcuccuuc

SEQ ID NO: 1740750 - RNA, 19 nt, Human
ucagcggggacagcuccuu

SEQ ID NO: 1740751 - RNA, 12 nt, Human
ucagcuccagcu

SEQ ID NO: 1740752 - RNA, 21 nt, Human
accccuggcuuuucacugcug

SEQ ID NO: 1740753 - RNA, 20 nt, Human
accccuggcuuuucacugcu

SEQ ID NO: 1740754 - RNA, 19 nt, Human
accccuggcuuuucacugc

SEQ ID NO: 1740755 - RNA, 18 nt, Human
accccuggcuuuucacug

SEQ ID NO: 1740756 - RNA, 17 nt, Human
acccgggaggcagaggu

SEQ ID NO: 1740757 - RNA, 13 nt, Human
acccgggaagggg

SEQ ID NO: 1740758 - RNA, 12 nt, Human
acccgggaaggg

SEQ ID NO: 1740759 - RNA, 20 nt, Human
acccggccccugcugguuca

SEQ ID NO: 1740760 - RNA, 17 nt, Human
acccggccccugcuggu

SEQ ID NO: 1740761 - RNA, 22 nt, Human
acccggccccugcugguucagg

SEQ ID NO: 1740762 - RNA, 16 nt, Human
acccggccccugcugg

SEQ ID NO: 1740763 - RNA, 15 nt, Human
acccggccccugcug

SEQ ID NO: 1740764 - RNA, 14 nt, Human
acccggccccugcu

SEQ ID NO: 1740765 - RNA, 21 nt, Human
acccggaggggccuggcagcc

SEQ ID NO: 1740766 - RNA, 18 nt, Human
acccggaggggccuggca

SEQ ID NO: 1740767 - RNA, 22 nt, Human
ucagguaacaggcagauacagg

SEQ ID NO: 1740768 - RNA, 21 nt, Human
ucagguaacaggcagauacag

SEQ ID NO: 1740769 - RNA, 23 nt, Human
ucagguaacaggcagauacagga

SEQ ID NO: 1740770 - RNA, 17 nt, Human
ucaggguuggccccugc

SEQ ID NO: 1740771 - RNA, 16 nt, Human
ucaggguuggccccug

SEQ ID NO: 1740772 - RNA, 19 nt, Human
ucagggucccugguggcag

SEQ ID NO: 1740773 - RNA, 23 nt, Human
ucaggccaggcccucugcccacu

SEQ ID NO: 1740774 - RNA, 22 nt, Human
ucagcuuguaaauagcucaggu

SEQ ID NO: 1740775 - RNA, 21 nt, Human
ucagcuuguaaauagcucagg

SEQ ID NO: 1740776 - RNA, 15 nt, Human
ucagcuccagcucac

SEQ ID NO: 1740777 - RNA, 14 nt, Human
ucagcuccagcuca

SEQ ID NO: 1740778 - RNA, 22 nt, Human
ucaggccaggcccucugcccac

SEQ ID NO: 1740779 - RNA, 21 nt, Human
ucaggccaggcccucugccca

SEQ ID NO: 1740780 - RNA, 15 nt, Human
acccugcccuguggg

SEQ ID NO: 1740781 - RNA, 17 nt, Human
acccugaggcccagagg

SEQ ID NO: 1740782 - RNA, 16 nt, Human
acccugaggcccagag

SEQ ID NO: 1740783 - RNA, 15 nt, Human
acccugaggcccaga

SEQ ID NO: 1740784 - RNA, 22 nt, Human
acccugcccugugggcccccaa

SEQ ID NO: 1740785 - RNA, 17 nt, Human
acccugcccugugggcc

SEQ ID NO: 1740786 - RNA, 12 nt, Human
acccuucuuuuc

SEQ ID NO: 1740787 - RNA, 23 nt, Human
acccuuguggucccaccccacac

SEQ ID NO: 1740788 - RNA, 20 nt, Human
acccuuguggucccacccca

SEQ ID NO: 1740789 - RNA, 17 nt, Human
acccuugccgucuaccu

SEQ ID NO: 1740790 - RNA, 15 nt, Human
accgaaaacguggcu

SEQ ID NO: 1740791 - RNA, 14 nt, Human
acccugaggcccag

SEQ ID NO: 1740792 - RNA, 18 nt, Human
acccugaaagcccugagc

SEQ ID NO: 1740793 - RNA, 16 nt, Human
acccugaaagcccuga

SEQ ID NO: 1740794 - RNA, 19 nt, Human
acccucgaggcggaucuuu

SEQ ID NO: 1740795 - RNA, 14 nt, Human
ucaaauuucuaaau

SEQ ID NO: 1740796 - RNA, 13 nt, Human
ucaaauuucuaaa

SEQ ID NO: 1740797 - RNA, 14 nt, Human
ucaaccagcagaug

SEQ ID NO: 1740798 - RNA, 18 nt, Human
ucaaccauuccccauggg

SEQ ID NO: 1740799 - RNA, 15 nt, Human
ucaaccauuccccau

SEQ ID NO: 1740800 - RNA, 20 nt, Human
ucaacugcaucaagauguga

SEQ ID NO: 1740801 - RNA, 14 nt, Human
acauuccugaugcu

SEQ ID NO: 1740802 - RNA, 23 nt, Human
acauguaauuaaguacuauguau

SEQ ID NO: 1740803 - RNA, 15 nt, Human
acauguccaagaagc

SEQ ID NO: 1740804 - RNA, 19 nt, Human
acauguccaagaagcccag

SEQ ID NO: 1740805 - RNA, 14 nt, Human
acauggaaguacua

SEQ ID NO: 1740806 - RNA, 22 nt, Human
acauguaauuaaguacuaugua

SEQ ID NO: 1740807 - RNA, 21 nt, Human
acauguaauuaaguacuaugu

SEQ ID NO: 1740808 - RNA, 19 nt, Human
acauguaauuaaguacuau

SEQ ID NO: 1740809 - RNA, 17 nt, Human
acauguaauuaaguacu

SEQ ID NO: 1740810 - RNA, 15 nt, Human
acauguaauuaagua

SEQ ID NO: 1740811 - RNA, 23 nt, Human
acaugagguacugagagugaaca

SEQ ID NO: 1740812 - RNA, 15 nt, Human
acaugcuacacacug

SEQ ID NO: 1740813 - RNA, 21 nt, Human
acaugcuacacacugcauguu

SEQ ID NO: 1740814 - RNA, 20 nt, Human
acaugagguacugagaguga

SEQ ID NO: 1740815 - RNA, 12 nt, Human
acagucccugcc

SEQ ID NO: 1740816 - RNA, 20 nt, Human
acaugaauauuuaguguuca

SEQ ID NO: 1740817 - RNA, 23 nt, Human
ucaaugaaugaaugaauggcuaa

SEQ ID NO: 1740818 - RNA, 22 nt, Human
ucaauaucuuuuuuuuaauaaa

SEQ ID NO: 1740819 - RNA, 18 nt, Human
acauuuuauuuuauuaug

SEQ ID NO: 1740820 - RNA, 14 nt, Human
acauuuuauuuuau

SEQ ID NO: 1740821 - RNA, 19 nt, Human
acauuuuauuuuauuaugc

SEQ ID NO: 1740822 - RNA, 20 nt, Human
acauuuuauuuuauuaugca

SEQ ID NO: 1740823 - RNA, 15 nt, Human
acauugcaauagaaa

SEQ ID NO: 1740824 - RNA, 16 nt, Human
acauugcaauagaaau

SEQ ID NO: 1740825 - RNA, 14 nt, Human
acauugcaauagaa

SEQ ID NO: 1740826 - RNA, 21 nt, Human
acauuuuuaagugcugcauuu

SEQ ID NO: 1740827 - RNA, 22 nt, Human
acauuuuuaagugcugcauuua

SEQ ID NO: 1740828 - RNA, 23 nt, Human
acauuuuuaagugcugcauuuaa

SEQ ID NO: 1740829 - RNA, 11 nt, Human
acauuuuguau

SEQ ID NO: 1740830 - RNA, 14 nt, Human
acauuuuuuaaaug

SEQ ID NO: 1740831 - RNA, 16 nt, Human
acauuuuuuaaaugca

SEQ ID NO: 1740832 - RNA, 17 nt, Human
acauuuuuuaaaugcac

SEQ ID NO: 1740833 - RNA, 21 nt, Human
acauuuuuuaaaugcaccugg

SEQ ID NO: 1740834 - RNA, 23 nt, Human
ucacuguugcccaggcuggcgug

SEQ ID NO: 1740835 - RNA, 13 nt, Human
ucacugcauccuc

SEQ ID NO: 1740836 - RNA, 15 nt, Human
ucacugcagccucaa

SEQ ID NO: 1740837 - RNA, 14 nt, Human
ucacugcagccuca

SEQ ID NO: 1740838 - RNA, 22 nt, Human
ucacugagacagcccgggcucu

SEQ ID NO: 1740839 - RNA, 21 nt, Human
ucacugagacagcccgggcuc

SEQ ID NO: 1740840 - RNA, 17 nt, Human
ucacugagacagcccgg

SEQ ID NO: 1740841 - RNA, 16 nt, Human
ucacugagacagcccg

SEQ ID NO: 1740842 - RNA, 17 nt, Human
ucacuauguugcccagg

SEQ ID NO: 1740843 - RNA, 20 nt, Human
ucacuaucccggcugcccuu

SEQ ID NO: 1740844 - RNA, 19 nt, Human
ucacuaucccggcugcccu

SEQ ID NO: 1740845 - RNA, 23 nt, Human
ucacuugaacccgggaggcagag

SEQ ID NO: 1740846 - RNA, 10 nt, Human
ucacuugagu

SEQ ID NO: 1740847 - RNA, 15 nt, Human
accaguguuguggau

SEQ ID NO: 1740848 - RNA, 17 nt, Human
accaguguuguggauuu

SEQ ID NO: 1740849 - RNA, 18 nt, Human
ucacguaaagcuagaaau

SEQ ID NO: 1740850 - RNA, 16 nt, Human
ucacuaggcuucuggu

SEQ ID NO: 1740851 - RNA, 19 nt, Human
ucacguaaagcuagaaaug

SEQ ID NO: 1740852 - RNA, 20 nt, Human
ucacguaaagcuagaaauga

SEQ ID NO: 1740853 - RNA, 17 nt, Human
accacuacauucuguua

SEQ ID NO: 1740854 - RNA, 16 nt, Human
accacuacauucuguu

SEQ ID NO: 1740855 - RNA, 15 nt, Human
accacuacauucugu

SEQ ID NO: 1740856 - RNA, 22 nt, Human
accagcgugugacuacuccccc

SEQ ID NO: 1740857 - RNA, 17 nt, Human
ucacaaaggaugcccaa

SEQ ID NO: 1740858 - RNA, 16 nt, Human
ucaauucuugccaaau

SEQ ID NO: 1740859 - RNA, 20 nt, Human
ucacaguucucuccuucuuc

SEQ ID NO: 1740860 - RNA, 16 nt, Human
ucacaguucucuccuu

SEQ ID NO: 1740861 - RNA, 13 nt, Human
ucacagccucuga

SEQ ID NO: 1740862 - RNA, 21 nt, Human
ucacagaugugugauucacag

SEQ ID NO: 1740863 - RNA, 23 nt, Human
ucacagaugugugauucacagug

SEQ ID NO: 1740864 - RNA, 20 nt, Human
ucacagaugggugcuuggag

SEQ ID NO: 1740865 - RNA, 14 nt, Human
ucacaaccuucugu

SEQ ID NO: 1740866 - RNA, 15 nt, Human
ucaccauguuggcca

SEQ ID NO: 1740867 - RNA, 22 nt, Human
ucaccauguuggccaggcuggu

SEQ ID NO: 1740868 - RNA, 21 nt, Human
ucaccauguuggccaggcugg

SEQ ID NO: 1740869 - RNA, 19 nt, Human
accacaucuugcucugcug

SEQ ID NO: 1740870 - RNA, 18 nt, Human
accacaucuugcucugcu

SEQ ID NO: 1740871 - RNA, 17 nt, Human
accacaucuugcucugc

SEQ ID NO: 1740872 - RNA, 18 nt, Human
accacaugugcacaugca

SEQ ID NO: 1740873 - RNA, 24 nt, Human
accacauuggagauguuuaguaau

SEQ ID NO: 1740874 - RNA, 19 nt, Human
accaccaacuacuaccugu

SEQ ID NO: 1740875 - RNA, 20 nt, Human
accaccacacccagcccacu

SEQ ID NO: 1740876 - RNA, 15 nt, Human
accaccacacccagc

SEQ ID NO: 1740877 - RNA, 20 nt, Human
uaacgauaaaagacagugaa

SEQ ID NO: 1740878 - RNA, 18 nt, Human
uaacauggugugcuucuu

SEQ ID NO: 1740879 - RNA, 12 nt, Human
uaacuagaacug

SEQ ID NO: 1740880 - RNA, 14 nt, Human
uaacuagaacugaa

SEQ ID NO: 1740881 - RNA, 17 nt, Human
uaacuagaacugaauuu

SEQ ID NO: 1740882 - RNA, 20 nt, Human
uaacuagaacugaauuuugu

SEQ ID NO: 1740883 - RNA, 21 nt, Human
uaacuucacauauugauuucc

SEQ ID NO: 1740884 - RNA, 17 nt, Human
uaacuuccaauuuacau

SEQ ID NO: 1740885 - RNA, 14 nt, Human
uaacuucaccauau

SEQ ID NO: 1740886 - RNA, 18 nt, Human
uaagaagugaaaaucuac

SEQ ID NO: 1740887 - RNA, 13 nt, Human
uaagacaaauaug

SEQ ID NO: 1740888 - RNA, 16 nt, Human
uaacuuucugaaauaa

SEQ ID NO: 1740889 - RNA, 18 nt, Human
uaacauggacaugaucuu

SEQ ID NO: 1740890 - RNA, 17 nt, Human
uaacauguaauuaagua

SEQ ID NO: 1740891 - RNA, 23 nt, Human
uaacauggacaugaucuucuuua

SEQ ID NO: 1740892 - RNA, 17 nt, Human
uaacaguggacaaaguu

SEQ ID NO: 1740893 - RNA, 18 nt, Human
aauauauuuuaagacgaa

SEQ ID NO: 1740894 - RNA, 16 nt, Human
aauaguggugugauuu

SEQ ID NO: 1740895 - RNA, 22 nt, Human
aauaguggugugauuuggggau

SEQ ID NO: 1740896 - RNA, 13 nt, Human
aauaguuggcuag

SEQ ID NO: 1740897 - RNA, 15 nt, Human
aauauauuuuaagac

SEQ ID NO: 1740898 - RNA, 14 nt, Human
aauauauuuuaaga

SEQ ID NO: 1740899 - RNA, 14 nt, Human
aauaguuguugauu

SEQ ID NO: 1740900 - RNA, 14 nt, Human
uaagauuccagaga

SEQ ID NO: 1740901 - RNA, 21 nt, Human
uaagauuccagagaguggcuc

SEQ ID NO: 1740902 - RNA, 22 nt, Human
uaagcuguuacugucuucagua

SEQ ID NO: 1740903 - RNA, 18 nt, Human
uaagcacacuugacauca

SEQ ID NO: 1740904 - RNA, 15 nt, Human
aauauuccugcauuu

SEQ ID NO: 1740905 - RNA, 12 nt, Human
aauauuccagag

SEQ ID NO: 1740906 - RNA, 22 nt, Human
aauaugcacacauuuuuuaaau

SEQ ID NO: 1740907 - RNA, 16 nt, Human
aauaugcacacauuuu

SEQ ID NO: 1740908 - RNA, 17 nt, Human
aauaugcacacauuuuu

SEQ ID NO: 1740909 - RNA, 15 nt, Human
uaagagaaaugagcu

SEQ ID NO: 1740910 - RNA, 12 nt, Human
aauauuuagugu

SEQ ID NO: 1740911 - RNA, 17 nt, Human
aauauugauaugcuuau

SEQ ID NO: 1740912 - RNA, 23 nt, Human
aauauuguacaguuuuuauugcu

SEQ ID NO: 1740913 - RNA, 15 nt, Human
aauauuguacaguuu

SEQ ID NO: 1740914 - RNA, 17 nt, Human
aauauuguacaguuuuu

SEQ ID NO: 1740915 - RNA, 21 nt, Human
aauccuggggaacauagaacu

SEQ ID NO: 1740916 - RNA, 14 nt, Human
aauccuggggaaca

SEQ ID NO: 1740917 - RNA, 15 nt, Human
aaucgaccugccucg

SEQ ID NO: 1740918 - RNA, 15 nt, Human
aaucauuagguguga

SEQ ID NO: 1740919 - RNA, 17 nt, Human
aaucauuaggugugacu

SEQ ID NO: 1740920 - RNA, 23 nt, Human
aaucauuaggugugacugaauuu

SEQ ID NO: 1740921 - RNA, 12 nt, Human
aauccgcccauc

SEQ ID NO: 1740922 - RNA, 19 nt, Human
aaucuuauaauuuaaaaua

SEQ ID NO: 1740923 - RNA, 17 nt, Human
aaucugggccagaauuu

SEQ ID NO: 1740924 - RNA, 16 nt, Human
aaucugggccagaauu

SEQ ID NO: 1740925 - RNA, 19 nt, Human
aaucuacacuccagugaga

SEQ ID NO: 1740926 - RNA, 18 nt, Human
uaauaaacacucuugaaa

SEQ ID NO: 1740927 - RNA, 12 nt, Human
uaauaaacacuc

SEQ ID NO: 1740928 - RNA, 19 nt, Human
uaaguauucuuauuuaaug

SEQ ID NO: 1740929 - RNA, 20 nt, Human
uaaguauucuuauuuaauga

SEQ ID NO: 1740930 - RNA, 21 nt, Human
uaaguauucuuauuuaaugaa

SEQ ID NO: 1740931 - RNA, 19 nt, Human
uaaguacuauguaucaaug

SEQ ID NO: 1740932 - RNA, 17 nt, Human
uaaguacuauguaucaa

SEQ ID NO: 1740933 - RNA, 16 nt, Human
uaaguacuauguauca

SEQ ID NO: 1740934 - RNA, 13 nt, Human
uaaguacuaugua

SEQ ID NO: 1740935 - RNA, 15 nt, Human
uaaugaaugcauaaa

SEQ ID NO: 1740936 - RNA, 13 nt, Human
uaauguacugcau

SEQ ID NO: 1740937 - RNA, 19 nt, Human
uaauguaucaaauacauuu

SEQ ID NO: 1740938 - RNA, 18 nt, Human
uaaugucacaggcagguc

SEQ ID NO: 1740939 - RNA, 16 nt, Human
aaucuuuaauuuuaca

SEQ ID NO: 1740940 - RNA, 15 nt, Human
aaucuuuaauuuuac

SEQ ID NO: 1740941 - RNA, 13 nt, Human
aaugaaugucagu

SEQ ID NO: 1740942 - RNA, 22 nt, Human
aaugaauggcuaagcaaaaugu

SEQ ID NO: 1740943 - RNA, 17 nt, Human
aaugaaugcauaaaaug

SEQ ID NO: 1740944 - RNA, 22 nt, Human
aaugaaugucagugugacugau

SEQ ID NO: 1740945 - RNA, 13 nt, Human
aaugacacagucu

SEQ ID NO: 1740946 - RNA, 17 nt, Human
aaugaaacauuuuguca

SEQ ID NO: 1740947 - RNA, 13 nt, Human
aaucuuucugcag

SEQ ID NO: 1740948 - RNA, 17 nt, Human
aaugaaaccugugucuc

SEQ ID NO: 1740949 - RNA, 17 nt, Human
aaugaaagacuguacaa

SEQ ID NO: 1740950 - RNA, 16 nt, Human
aaugaaagacuguaca

SEQ ID NO: 1740951 - RNA, 17 nt, Human
uaaugaaugaaacauuu

SEQ ID NO: 1740952 - RNA, 18 nt, Human
uaauagacaauuuauuau

SEQ ID NO: 1740953 - RNA, 22 nt, Human
uaauagacaauuuauuauggca

SEQ ID NO: 1740954 - RNA, 19 nt, Human
uaauagcgucauaacuaga

SEQ ID NO: 1740955 - RNA, 16 nt, Human
uaauacaccacuacau

SEQ ID NO: 1740956 - RNA, 18 nt, Human
uaauacaccacuacauuc

SEQ ID NO: 1740957 - RNA, 19 nt, Human
uaauacaccacuacauucu

SEQ ID NO: 1740958 - RNA, 14 nt, Human
uaauagacaauuua

SEQ ID NO: 1740959 - RNA, 16 nt, Human
uaauagacaauuuauu

SEQ ID NO: 1740960 - RNA, 15 nt, Human
aauuagccaagugug

SEQ ID NO: 1740961 - RNA, 11 nt, Human
aauuacaggaa

SEQ ID NO: 1740962 - RNA, 20 nt, Human
uaccugccaggaagccagca

SEQ ID NO: 1740963 - RNA, 18 nt, Human
uaccugccaggaagccag

SEQ ID NO: 1740964 - RNA, 23 nt, Human
uaccugccaggaagccagcaggc

SEQ ID NO: 1740965 - RNA, 17 nt, Human
uaccugucccccugaca

SEQ ID NO: 1740966 - RNA, 16 nt, Human
uaccugucccccugac

SEQ ID NO: 1740967 - RNA, 14 nt, Human
uaccugucccccug

SEQ ID NO: 1740968 - RNA, 13 nt, Human
uaccugucccccu

SEQ ID NO: 1740969 - RNA, 10 nt, Human
uaccuguccc

SEQ ID NO: 1740970 - RNA, 18 nt, Human
aauuccaagugauugaaa

SEQ ID NO: 1740971 - RNA, 22 nt, Human
aauuccacuuauaggaauugac

SEQ ID NO: 1740972 - RNA, 12 nt, Human
aauuccccagau

SEQ ID NO: 1740973 - RNA, 14 nt, Human
aauuccccacccug

SEQ ID NO: 1740974 - RNA, 16 nt, Human
aauuauuauuuggccc

SEQ ID NO: 1740975 - RNA, 16 nt, Human
uacuggagaaaaugga

SEQ ID NO: 1740976 - RNA, 12 nt, Human
uacucuguguca

SEQ ID NO: 1740977 - RNA, 21 nt, Human
uacucugugucagguggggca

SEQ ID NO: 1740978 - RNA, 18 nt, Human
uacuguaaggcaaucaug

SEQ ID NO: 1740979 - RNA, 19 nt, Human
uacuguaauuugugauaca

SEQ ID NO: 1740980 - RNA, 20 nt, Human
uacuguaauuugugauacaa

SEQ ID NO: 1740981 - RNA, 18 nt, Human
uacuguaauuugugauac

SEQ ID NO: 1740982 - RNA, 19 nt, Human
uacuguaaggcaaucaugg

SEQ ID NO: 1740983 - RNA, 22 nt, Human
aauugacccacaagaaaugaaa

SEQ ID NO: 1740984 - RNA, 14 nt, Human
aauugacuuauuua

SEQ ID NO: 1740985 - RNA, 21 nt, Human
aauugacccacaagaaaugaa

SEQ ID NO: 1740986 - RNA, 23 nt, Human
uacuguaauuugugauacaaugc

SEQ ID NO: 1740987 - RNA, 21 nt, Human
uacuguacaugaaaacacauu

SEQ ID NO: 1740988 - RNA, 22 nt, Human
uacuguacaugaaaacacauuu

SEQ ID NO: 1740989 - RNA, 12 nt, Human
aauugcauuucc

SEQ ID NO: 1740990 - RNA, 19 nt, Human
aauugaugggauuugguca

SEQ ID NO: 1740991 - RNA, 21 nt, Human
aauugacuuauuuauauaaau

SEQ ID NO: 1740992 - RNA, 22 nt, Human
uacgccaggggaaaaucagccu

SEQ ID NO: 1740993 - RNA, 18 nt, Human
uacgggaggguaaggcug

SEQ ID NO: 1740994 - RNA, 12 nt, Human
uacguacacauu

SEQ ID NO: 1740995 - RNA, 13 nt, Human
uacguacacauuu

SEQ ID NO: 1740996 - RNA, 14 nt, Human
uacguacacauuuu

SEQ ID NO: 1740997 - RNA, 15 nt, Human
uacguugugcauuug

SEQ ID NO: 1740998 - RNA, 16 nt, Human
uacguugugcauuugg

SEQ ID NO: 1740999 - RNA, 20 nt, Human
uacuaucaugucaaacguga

SEQ ID NO: 1741000 - RNA, 17 nt, Human
uacuacuccuguaggaa

SEQ ID NO: 1741001 - RNA, 13 nt, Human
uacuacuccugua

SEQ ID NO: 1741002 - RNA, 23 nt, Human
uacucuccuggaaauauuaagaa

SEQ ID NO: 1741003 - RNA, 22 nt, Human
uacucuccuggaaauauuaaga

SEQ ID NO: 1741004 - RNA, 14 nt, Human
uacuauguaucaau

SEQ ID NO: 1741005 - RNA, 13 nt, Human
uacuauguaucaa

SEQ ID NO: 1741006 - RNA, 12 nt, Human
uacuauguauca

SEQ ID NO: 1741007 - RNA, 23 nt, Human
uacuauggcccuggccuagcaua

SEQ ID NO: 1741008 - RNA, 23 nt, Human
aauggcacaaucucggcucacug

SEQ ID NO: 1741009 - RNA, 12 nt, Human
aauggcagccuu

SEQ ID NO: 1741010 - RNA, 16 nt, Human
aauggcagccuuggca

SEQ ID NO: 1741011 - RNA, 15 nt, Human
uacacuaaaagguga

SEQ ID NO: 1741012 - RNA, 23 nt, Human
uacacauuuuauuuuauuaugca

SEQ ID NO: 1741013 - RNA, 21 nt, Human
uacacauuuuauuuuauuaug

SEQ ID NO: 1741014 - RNA, 22 nt, Human
uacacauuuuauuuuauuaugc

SEQ ID NO: 1741015 - RNA, 19 nt, Human
uacacauuuuauuuuauua

SEQ ID NO: 1741016 - RNA, 22 nt, Human
uacagacaacaaaccuguuucu

SEQ ID NO: 1741017 - RNA, 20 nt, Human
uacagauccccaagccuggc

SEQ ID NO: 1741018 - RNA, 22 nt, Human
aaugcuguauuagucacagaga

SEQ ID NO: 1741019 - RNA, 12 nt, Human
aaugcccagccc

SEQ ID NO: 1741020 - RNA, 11 nt, Human
aaugcccagcc

SEQ ID NO: 1741021 - RNA, 13 nt, Human
aaugcccagcccc

SEQ ID NO: 1741022 - RNA, 20 nt, Human
aauggacuaacuugucuuug

SEQ ID NO: 1741023 - RNA, 23 nt, Human
aauggacguguuaugacuccaga

SEQ ID NO: 1741024 - RNA, 14 nt, Human
aauggaaccacucu

SEQ ID NO: 1741025 - RNA, 21 nt, Human
aauggaaaugggcagagcaga

SEQ ID NO: 1741026 - RNA, 20 nt, Human
aauggaaaugggcagagcag

SEQ ID NO: 1741027 - RNA, 16 nt, Human
aaugcuucaucccuuu

SEQ ID NO: 1741028 - RNA, 22 nt, Human
aaugcacuuuguucuggcucuu

SEQ ID NO: 1741029 - RNA, 21 nt, Human
aaugcacuuuguucuggcucu

SEQ ID NO: 1741030 - RNA, 20 nt, Human
aaugaccuuucaauaggaaa

SEQ ID NO: 1741031 - RNA, 17 nt, Human
aaugaccuuucaauagg

SEQ ID NO: 1741032 - RNA, 16 nt, Human
aaugaccuuucaauag

SEQ ID NO: 1741033 - RNA, 18 nt, Human
aaugaccuuucaauagga

SEQ ID NO: 1741034 - RNA, 21 nt, Human
uacaaugcugugcccuaaagu

SEQ ID NO: 1741035 - RNA, 13 nt, Human
uacauucuguuaa

SEQ ID NO: 1741036 - RNA, 21 nt, Human
aauuaagaaaggauaaaguug

SEQ ID NO: 1741037 - RNA, 22 nt, Human
aauuaaucugggccagaauuuc

SEQ ID NO: 1741038 - RNA, 11 nt, Human
aauuaacuuuu

SEQ ID NO: 1741039 - RNA, 16 nt, Human
uacaggugugagucac

SEQ ID NO: 1741040 - RNA, 23 nt, Human
uacauaaugcgugcauaccacuu

SEQ ID NO: 1741041 - RNA, 24 nt, Human
uacauaaugcgugcauaccacuuu

SEQ ID NO: 1741042 - RNA, 15 nt, Human
aaugugaaacuggau

SEQ ID NO: 1741043 - RNA, 19 nt, Human
aaugugaaaagaaaaauga

SEQ ID NO: 1741044 - RNA, 14 nt, Human
aaugugaaacugga

SEQ ID NO: 1741045 - RNA, 11 nt, Human
aaugugugugu

SEQ ID NO: 1741046 - RNA, 20 nt, Human
aauguauguguaaguauucu

SEQ ID NO: 1741047 - RNA, 18 nt, Human
aauguaucaaauacauuu

SEQ ID NO: 1741048 - RNA, 19 nt, Human
aauguauguguaaguauuc

SEQ ID NO: 1741049 - RNA, 20 nt, Human
acagggaggacgcucucugg

SEQ ID NO: 1741050 - RNA, 21 nt, Human
acagggaggacgcucucuggc

SEQ ID NO: 1741051 - RNA, 23 nt, Human
acaggcugggcuucaguggcagc

SEQ ID NO: 1741052 - RNA, 22 nt, Human
acaggcugggcuucaguggcag

SEQ ID NO: 1741053 - RNA, 12 nt, Human
acaggcugggcu

SEQ ID NO: 1741054 - RNA, 22 nt, Human
acaggcuccugccaccacgccc

SEQ ID NO: 1741055 - RNA, 21 nt, Human
acaggcuccugccaccacgcc

SEQ ID NO: 1741056 - RNA, 15 nt, Human
acaggcuccugccac

SEQ ID NO: 1741057 - RNA, 13 nt, Human
acaggcuccugcc

SEQ ID NO: 1741058 - RNA, 20 nt, Human
acagggcacaccgggcacuc

SEQ ID NO: 1741059 - RNA, 12 nt, Human
acagggcacacc

SEQ ID NO: 1741060 - RNA, 21 nt, Human
uauucagcucauggacuucug

SEQ ID NO: 1741061 - RNA, 20 nt, Human
uauucaguaauaacucuacc

SEQ ID NO: 1741062 - RNA, 14 nt, Human
uauucaggaagcuc

SEQ ID NO: 1741063 - RNA, 16 nt, Human
uauucaggaagcucag

SEQ ID NO: 1741064 - RNA, 14 nt, Human
uauucauaauuauu

SEQ ID NO: 1741065 - RNA, 22 nt, Human
acaggcgugagccaccgugccu

SEQ ID NO: 1741066 - RNA, 12 nt, Human
acaggcuccugc

SEQ ID NO: 1741067 - RNA, 13 nt, Human
uauuacuucugcu

SEQ ID NO: 1741068 - RNA, 14 nt, Human
uauuacuucugcua

SEQ ID NO: 1741069 - RNA, 19 nt, Human
uauuagugaccucagcuuu

SEQ ID NO: 1741070 - RNA, 21 nt, Human
uauuagugaccucagcuuuga

SEQ ID NO: 1741071 - RNA, 20 nt, Human
acaggcauguucucugagga

SEQ ID NO: 1741072 - RNA, 19 nt, Human
acaggcauguucucugagg

SEQ ID NO: 1741073 - RNA, 18 nt, Human
acaggcauguucucugag

SEQ ID NO: 1741074 - RNA, 15 nt, Human
acaggcauguucucu

SEQ ID NO: 1741075 - RNA, 22 nt, Human
acaggcauguucucugaggaca

SEQ ID NO: 1741076 - RNA, 14 nt, Human
uaugugaaacaugu

SEQ ID NO: 1741077 - RNA, 20 nt, Human
uauguggaguucaucuugaa

SEQ ID NO: 1741078 - RNA, 23 nt, Human
uaugugccagauuuaugcauauu

SEQ ID NO: 1741079 - RNA, 17 nt, Human
uaugugaaacauguuuc

SEQ ID NO: 1741080 - RNA, 17 nt, Human
acaggaaguagaggagg

SEQ ID NO: 1741081 - RNA, 13 nt, Human
acaggaaguacug

SEQ ID NO: 1741082 - RNA, 18 nt, Human
acaggaaaagcugcugac

SEQ ID NO: 1741083 - RNA, 17 nt, Human
acaggaaaagcugcuga

SEQ ID NO: 1741084 - RNA, 16 nt, Human
acaggaaaagcugcug

SEQ ID NO: 1741085 - RNA, 15 nt, Human
acaggaaaagcugcu

SEQ ID NO: 1741086 - RNA, 13 nt, Human
acagcuaacaugg

SEQ ID NO: 1741087 - RNA, 11 nt, Human
acagccuggca

SEQ ID NO: 1741088 - RNA, 23 nt, Human
acaggaccagggauuuccaugau

SEQ ID NO: 1741089 - RNA, 14 nt, Human
acaggacucugccu

SEQ ID NO: 1741090 - RNA, 15 nt, Human
acaggaucagucuga

SEQ ID NO: 1741091 - RNA, 14 nt, Human
acaggaucagucug

SEQ ID NO: 1741092 - RNA, 16 nt, Human
acaggagugagcacua

SEQ ID NO: 1741093 - RNA, 16 nt, Human
acaggcagguccaggg

SEQ ID NO: 1741094 - RNA, 14 nt, Human
acaggcagguccag

SEQ ID NO: 1741095 - RNA, 14 nt, Human
acaggcauguucuc

SEQ ID NO: 1741096 - RNA, 16 nt, Human
uauauuuaguaucuuu

SEQ ID NO: 1741097 - RNA, 15 nt, Human
acagacccugcccug

SEQ ID NO: 1741098 - RNA, 14 nt, Human
acagacccugcccu

SEQ ID NO: 1741099 - RNA, 13 nt, Human
acagacccugccc

SEQ ID NO: 1741100 - RNA, 18 nt, Human
acagaaaauucuucucca

SEQ ID NO: 1741101 - RNA, 17 nt, Human
acagaaaauucuucucc

SEQ ID NO: 1741102 - RNA, 20 nt, Human
acagaaaauggaagacagcu

SEQ ID NO: 1741103 - RNA, 14 nt, Human
acagaaauguacag

SEQ ID NO: 1741104 - RNA, 16 nt, Human
acagaaauguacagca

SEQ ID NO: 1741105 - RNA, 17 nt, Human
acagaaauguacagcaa

SEQ ID NO: 1741106 - RNA, 23 nt, Human
uauaaguguguguuuuucauaaa

SEQ ID NO: 1741107 - RNA, 17 nt, Human
uauaaguguguguuuuu

SEQ ID NO: 1741108 - RNA, 18 nt, Human
uaucaaguauuauaccuu

SEQ ID NO: 1741109 - RNA, 14 nt, Human
uaucucccccagcc

SEQ ID NO: 1741110 - RNA, 16 nt, Human
uaucucccccagcccc

SEQ ID NO: 1741111 - RNA, 13 nt, Human
uaucucccccagc

SEQ ID NO: 1741112 - RNA, 18 nt, Human
acagagaaaguacuucuc

SEQ ID NO: 1741113 - RNA, 11 nt, Human
acagagaaagu

SEQ ID NO: 1741114 - RNA, 12 nt, Human
acagccuggcac

SEQ ID NO: 1741115 - RNA, 23 nt, Human
uauggcuuuugugcauuaucuag

SEQ ID NO: 1741116 - RNA, 15 nt, Human
uaugcuuauacacuu

SEQ ID NO: 1741117 - RNA, 18 nt, Human
uauggcuuuugugcauua

SEQ ID NO: 1741118 - RNA, 21 nt, Human
uauggcuuuugugcauuaucu

SEQ ID NO: 1741119 - RNA, 17 nt, Human
uauggcuuuugugcauu

SEQ ID NO: 1741120 - RNA, 17 nt, Human
uaugccugggcagaagg

SEQ ID NO: 1741121 - RNA, 11 nt, Human
uaugcauuuga

SEQ ID NO: 1741122 - RNA, 23 nt, Human
uaugcauuugaaaauuuugaugu

SEQ ID NO: 1741123 - RNA, 24 nt, Human
uaugcauuugaaaauuuugauguu

SEQ ID NO: 1741124 - RNA, 18 nt, Human
acagccguuuguucccca

SEQ ID NO: 1741125 - RNA, 17 nt, Human
acagcccgggcucugcc

SEQ ID NO: 1741126 - RNA, 21 nt, Human
acagcaaggagauuuacaacu

SEQ ID NO: 1741127 - RNA, 20 nt, Human
acagcccgggcucugccucc

SEQ ID NO: 1741128 - RNA, 19 nt, Human
acagcccgggcucugccuc

SEQ ID NO: 1741129 - RNA, 18 nt, Human
acagcccgggcucugccu

SEQ ID NO: 1741130 - RNA, 17 nt, Human
acagcaaggagauuuac

SEQ ID NO: 1741131 - RNA, 15 nt, Human
acagauuugagcuca

SEQ ID NO: 1741132 - RNA, 14 nt, Human
acagauuugagcuc

SEQ ID NO: 1741133 - RNA, 19 nt, Human
acagagcccacgcccccac

SEQ ID NO: 1741134 - RNA, 18 nt, Human
acagagcccacgccccca

SEQ ID NO: 1741135 - RNA, 15 nt, Human
acagagcccacgccc

SEQ ID NO: 1741136 - RNA, 17 nt, Human
acagauccccaagccug

SEQ ID NO: 1741137 - RNA, 18 nt, Human
acagauccccaagccugg

SEQ ID NO: 1741138 - RNA, 22 nt, Human
acagaucucugcuuuggaaauc

SEQ ID NO: 1741139 - RNA, 21 nt, Human
uagugaaucacguaaagcuag

SEQ ID NO: 1741140 - RNA, 18 nt, Human
acacaguauuacuucugc

SEQ ID NO: 1741141 - RNA, 22 nt, Human
acacaguauuacuucugcuaca

SEQ ID NO: 1741142 - RNA, 19 nt, Human
acacaguauuacuucugcu

SEQ ID NO: 1741143 - RNA, 21 nt, Human
acaaugcugugcccuaaagug

SEQ ID NO: 1741144 - RNA, 22 nt, Human
acaaugcugugcccuaaagugu

SEQ ID NO: 1741145 - RNA, 23 nt, Human
acaaugcugugcccuaaagugua

SEQ ID NO: 1741146 - RNA, 24 nt, Human
acaaugcugugcccuaaaguguau

SEQ ID NO: 1741147 - RNA, 19 nt, Human
acaauggauaggcacagga

SEQ ID NO: 1741148 - RNA, 17 nt, Human
acaaugugaaaagaaaa

SEQ ID NO: 1741149 - RNA, 19 nt, Human
acaaugugaaaagaaaaau

SEQ ID NO: 1741150 - RNA, 21 nt, Human
acacacugcauguuugugauu

SEQ ID NO: 1741151 - RNA, 21 nt, Human
acacacgcgugcacacaccag

SEQ ID NO: 1741152 - RNA, 20 nt, Human
acacaccagagcccaccuug

SEQ ID NO: 1741153 - RNA, 15 nt, Human
acacaccagagccca

SEQ ID NO: 1741154 - RNA, 14 nt, Human
acacaccagagccc

SEQ ID NO: 1741155 - RNA, 22 nt, Human
acacacacgcgugcacacacca

SEQ ID NO: 1741156 - RNA, 14 nt, Human
acacacagcucugu

SEQ ID NO: 1741157 - RNA, 13 nt, Human
acacacagcucug

SEQ ID NO: 1741158 - RNA, 17 nt, Human
acacacagcucuguccu

SEQ ID NO: 1741159 - RNA, 19 nt, Human
acacacagcucuguccugg

SEQ ID NO: 1741160 - RNA, 20 nt, Human
uaguuccaccaucaagccac

SEQ ID NO: 1741161 - RNA, 14 nt, Human
uaguuccacugaga

SEQ ID NO: 1741162 - RNA, 15 nt, Human
uaguuccacugagac

SEQ ID NO: 1741163 - RNA, 19 nt, Human
uauaaaagccuguuuaaga

SEQ ID NO: 1741164 - RNA, 22 nt, Human
uauaaaagggacugagaaauuu

SEQ ID NO: 1741165 - RNA, 20 nt, Human
uauaaaagccuguuuaagag

SEQ ID NO: 1741166 - RNA, 19 nt, Human
uauaaaaauaaaaaacacu

SEQ ID NO: 1741167 - RNA, 21 nt, Human
acacauuuuauuuuauuaugc

SEQ ID NO: 1741168 - RNA, 18 nt, Human
acacaugauccugcaauu

SEQ ID NO: 1741169 - RNA, 21 nt, Human
acacaugagcaucaggccagg

SEQ ID NO: 1741170 - RNA, 14 nt, Human
acacauuuuauuuu

SEQ ID NO: 1741171 - RNA, 19 nt, Human
acacauuuuauuuuauuau

SEQ ID NO: 1741172 - RNA, 20 nt, Human
acacauuuuauuuuauuaug

SEQ ID NO: 1741173 - RNA, 15 nt, Human
acacucaaaagcugg

SEQ ID NO: 1741174 - RNA, 22 nt, Human
acacucacauuuauucugcuca

SEQ ID NO: 1741175 - RNA, 20 nt, Human
acacucacauuuauucugcu

SEQ ID NO: 1741176 - RNA, 15 nt, Human
uauaaguguguguuu

SEQ ID NO: 1741177 - RNA, 16 nt, Human
acaccgggcacucaga

SEQ ID NO: 1741178 - RNA, 14 nt, Human
acaccgggccugga

SEQ ID NO: 1741179 - RNA, 21 nt, Human
acaccucugcacaagcugcac

SEQ ID NO: 1741180 - RNA, 20 nt, Human
acacuaaccacgcuggaccu

SEQ ID NO: 1741181 - RNA, 21 nt, Human
acaccuuagccugcccuccuu

SEQ ID NO: 1741182 - RNA, 19 nt, Human
acaaggacuaggguccugg

SEQ ID NO: 1741183 - RNA, 18 nt, Human
acaaggacuaggguccug

SEQ ID NO: 1741184 - RNA, 21 nt, Human
acaaggacagccccuccucca

SEQ ID NO: 1741185 - RNA, 22 nt, Human
acaaggacagccccuccuccau

SEQ ID NO: 1741186 - RNA, 12 nt, Human
acaaugacuuac

SEQ ID NO: 1741187 - RNA, 17 nt, Human
acaaugacuuacuguac

SEQ ID NO: 1741188 - RNA, 18 nt, Human
acaaugacuuacuguaca

SEQ ID NO: 1741189 - RNA, 19 nt, Human
acaaugacuuacuguacau

SEQ ID NO: 1741190 - RNA, 19 nt, Human
uagcuaauaacaugugaaa

SEQ ID NO: 1741191 - RNA, 16 nt, Human
uaggaaauccagggug

SEQ ID NO: 1741192 - RNA, 21 nt, Human
uagcuuacaagccagcuggag

SEQ ID NO: 1741193 - RNA, 13 nt, Human
uaggacuguagaa

SEQ ID NO: 1741194 - RNA, 14 nt, Human
uaggacuguagaaa

SEQ ID NO: 1741195 - RNA, 20 nt, Human
uaggcauuugcugaauacag

SEQ ID NO: 1741196 - RNA, 16 nt, Human
uaggcauuugcugaau

SEQ ID NO: 1741197 - RNA, 14 nt, Human
uaggcauuguggga

SEQ ID NO: 1741198 - RNA, 16 nt, Human
uagcauuuugcuaaau

SEQ ID NO: 1741199 - RNA, 18 nt, Human
uagcaugucgucaaagcu

SEQ ID NO: 1741200 - RNA, 22 nt, Human
uagcauuuugcuaaaugugaau

SEQ ID NO: 1741201 - RNA, 21 nt, Human
uagccaaggccaaaggaagca

SEQ ID NO: 1741202 - RNA, 14 nt, Human
uagaugcugacugu

SEQ ID NO: 1741203 - RNA, 23 nt, Human
uagaugcugacuguacuccuccc

SEQ ID NO: 1741204 - RNA, 19 nt, Human
uagcauggcugccaauggg

SEQ ID NO: 1741205 - RNA, 19 nt, Human
acaaauuuacagagacaga

SEQ ID NO: 1741206 - RNA, 18 nt, Human
acaaauuuacagagacag

SEQ ID NO: 1741207 - RNA, 15 nt, Human
uagccagaggagaga

SEQ ID NO: 1741208 - RNA, 11 nt, Human
uagccagagga

SEQ ID NO: 1741209 - RNA, 20 nt, Human
acaagacccaaaaggcagaa

SEQ ID NO: 1741210 - RNA, 19 nt, Human
acaagacccuugugguccc

SEQ ID NO: 1741211 - RNA, 19 nt, Human
acaagaccacguuucuaaa

SEQ ID NO: 1741212 - RNA, 21 nt, Human
acaacacucauugaccugagg

SEQ ID NO: 1741213 - RNA, 23 nt, Human
acaacacucauugaccugaggcc

SEQ ID NO: 1741214 - RNA, 18 nt, Human
acaaaaggauaaugaaua

SEQ ID NO: 1741215 - RNA, 11 nt, Human
acaaaagcaug

SEQ ID NO: 1741216 - RNA, 22 nt, Human
acaaaagcaugugagacugguu

SEQ ID NO: 1741217 - RNA, 16 nt, Human
aauuguuacaaauugu

SEQ ID NO: 1741218 - RNA, 21 nt, Human
aauuguguuuauaauuuuaaa

SEQ ID NO: 1741219 - RNA, 22 nt, Human
acaaaggaugcccaaagaugca

SEQ ID NO: 1741220 - RNA, 19 nt, Human
uagaggagaaacuggaacu

SEQ ID NO: 1741221 - RNA, 22 nt, Human
uagaggagaaacuggaacucuc

SEQ ID NO: 1741222 - RNA, 15 nt, Human
uagauauaugcucug

SEQ ID NO: 1741223 - RNA, 19 nt, Human
uagauauaugcucugcaug

SEQ ID NO: 1741224 - RNA, 11 nt, Human
gugauuaccag

SEQ ID NO: 1741225 - RNA, 16 nt, Human
gugauuaccagggacu

SEQ ID NO: 1741226 - RNA, 17 nt, Human
gugauuaccagggacug

SEQ ID NO: 1741227 - RNA, 23 nt, Human
gugaugguuccccuguucacucu

SEQ ID NO: 1741228 - RNA, 17 nt, Human
gugcauuugaggucugu

SEQ ID NO: 1741229 - RNA, 19 nt, Human
gugcauuugaggucuguuc

SEQ ID NO: 1741230 - RNA, 23 nt, Human
gugccaaaaacaacaacaaaaug

SEQ ID NO: 1741231 - RNA, 21 nt, Human
gugcauuuggugguuucagaa

SEQ ID NO: 1741232 - RNA, 21 nt, Human
gugcacaagcuccaagcuccc

SEQ ID NO: 1741233 - RNA, 16 nt, Human
gugcacaagcuccaag

SEQ ID NO: 1741234 - RNA, 13 nt, Human
gugcacaagcucc

SEQ ID NO: 1741235 - RNA, 18 nt, Human
gugcaaugaccuuucaau

SEQ ID NO: 1741236 - RNA, 21 nt, Human
gugcacaugcacgugugugca

SEQ ID NO: 1741237 - RNA, 23 nt, Human
gugcacaagcuccaagcucccag

SEQ ID NO: 1741238 - RNA, 22 nt, Human
gugcaaugaccuuucaauagga

SEQ ID NO: 1741239 - RNA, 13 nt, Human
aacuucagacaua

SEQ ID NO: 1741240 - RNA, 22 nt, Human
aacuucuccccugguagaaaga

SEQ ID NO: 1741241 - RNA, 14 nt, Human
aacuucacauauug

SEQ ID NO: 1741242 - RNA, 22 nt, Human
aacuucacauauugauuuccgu

SEQ ID NO: 1741243 - RNA, 22 nt, Human
aacuucaccauauuaccacaga

SEQ ID NO: 1741244 - RNA, 17 nt, Human
aacugcccccucugccc

SEQ ID NO: 1741245 - RNA, 16 nt, Human
aacugcccccucugcc

SEQ ID NO: 1741246 - RNA, 21 nt, Human
aacugcccccucugcccugcg

SEQ ID NO: 1741247 - RNA, 20 nt, Human
aacugcccccucugcccugc

SEQ ID NO: 1741248 - RNA, 19 nt, Human
aacugcccccucugcccug

SEQ ID NO: 1741249 - RNA, 18 nt, Human
aacugcccccucugcccu

SEQ ID NO: 1741250 - RNA, 14 nt, Human
aagaaagaaaauca

SEQ ID NO: 1741251 - RNA, 16 nt, Human
aagaaagaaaaucagg

SEQ ID NO: 1741252 - RNA, 19 nt, Human
aagaaagcccuuaggaaga

SEQ ID NO: 1741253 - RNA, 15 nt, Human
aagaaaauaguggug

SEQ ID NO: 1741254 - RNA, 21 nt, Human
aagaaaauaguggugugauuu

SEQ ID NO: 1741255 - RNA, 22 nt, Human
aagaaaauaguggugugauuug

SEQ ID NO: 1741256 - RNA, 18 nt, Human
aagaaaaaugagccuggc

SEQ ID NO: 1741257 - RNA, 17 nt, Human
aagaaaaaugagccugg

SEQ ID NO: 1741258 - RNA, 18 nt, Human
aagaaaaagaaaaagaaa

SEQ ID NO: 1741259 - RNA, 13 nt, Human
aagaaaaagaaaa

SEQ ID NO: 1741260 - RNA, 19 nt, Human
aagaaaaaauauuuucccu

SEQ ID NO: 1741261 - RNA, 21 nt, Human
aacuuuaccuuuuuuauacau

SEQ ID NO: 1741262 - RNA, 22 nt, Human
aacuuuaccuuuuuuauacaua

SEQ ID NO: 1741263 - RNA, 23 nt, Human
aacuuuaccuuuuuuauacauaa

SEQ ID NO: 1741264 - RNA, 19 nt, Human
gugccagauuuaugcauau

SEQ ID NO: 1741265 - RNA, 18 nt, Human
gugcuaucucccccagcc

SEQ ID NO: 1741266 - RNA, 15 nt, Human
gugcuaucuccccca

SEQ ID NO: 1741267 - RNA, 17 nt, Human
gugcuaggaacacuccu

SEQ ID NO: 1741268 - RNA, 15 nt, Human
gugcugcccugccca

SEQ ID NO: 1741269 - RNA, 14 nt, Human
gugcugcccugccc

SEQ ID NO: 1741270 - RNA, 13 nt, Human
gugcugcccugcc

SEQ ID NO: 1741271 - RNA, 12 nt, Human
gugcugcccugc

SEQ ID NO: 1741272 - RNA, 14 nt, Human
gugcucuggacagg

SEQ ID NO: 1741273 - RNA, 13 nt, Human
gugcucuggacag

SEQ ID NO: 1741274 - RNA, 16 nt, Human
gugcucugaucaucca

SEQ ID NO: 1741275 - RNA, 16 nt, Human
gugcucaggagcccug

SEQ ID NO: 1741276 - RNA, 19 nt, Human
gugcuaucucccccagccc

SEQ ID NO: 1741277 - RNA, 18 nt, Human
gugcucaggagcccuggg

SEQ ID NO: 1741278 - RNA, 19 nt, Human
gugcucaggagcccuggga

SEQ ID NO: 1741279 - RNA, 15 nt, Human
aacuaaaauaauuuu

SEQ ID NO: 1741280 - RNA, 19 nt, Human
aacuaaaauaauuuuguaa

SEQ ID NO: 1741281 - RNA, 17 nt, Human
aacuaaaauaauuuugu

SEQ ID NO: 1741282 - RNA, 17 nt, Human
aacuagggaagauaaua

SEQ ID NO: 1741283 - RNA, 21 nt, Human
aacuaggugcauauuuauaaa

SEQ ID NO: 1741284 - RNA, 17 nt, Human
aacguuuuuccuguucu

SEQ ID NO: 1741285 - RNA, 13 nt, Human
aacguggcugcuu

SEQ ID NO: 1741286 - RNA, 12 nt, Human
aacguggcugcu

SEQ ID NO: 1741287 - RNA, 15 nt, Human
aacuauguugauaaa

SEQ ID NO: 1741288 - RNA, 12 nt, Human
aacuauggccug

SEQ ID NO: 1741289 - RNA, 23 nt, Human
aaccuggucacaggacucugccu

SEQ ID NO: 1741290 - RNA, 12 nt, Human
aacgugaaaaug

SEQ ID NO: 1741291 - RNA, 21 nt, Human
aaccuucgccaccuggguucc

SEQ ID NO: 1741292 - RNA, 22 nt, Human
gucuuguuuuuuuuuuccacuu

SEQ ID NO: 1741293 - RNA, 20 nt, Human
gucuuguguuucuuuaguuu

SEQ ID NO: 1741294 - RNA, 16 nt, Human
gucuggaaugcagugg

SEQ ID NO: 1741295 - RNA, 15 nt, Human
gucuggaaugcagug

SEQ ID NO: 1741296 - RNA, 18 nt, Human
gucuggaaugcaguggua

SEQ ID NO: 1741297 - RNA, 14 nt, Human
gucugacaggcaau

SEQ ID NO: 1741298 - RNA, 13 nt, Human
gucugacaggcaa

SEQ ID NO: 1741299 - RNA, 12 nt, Human
gucugacaggca

SEQ ID NO: 1741300 - RNA, 18 nt, Human
gucugacaggcaaugcug

SEQ ID NO: 1741301 - RNA, 15 nt, Human
gucugacaggcaaug

SEQ ID NO: 1741302 - RNA, 20 nt, Human
gucugacaggcaaugcuggc

SEQ ID NO: 1741303 - RNA, 19 nt, Human
gucucaaaaaaagaaaaag

SEQ ID NO: 1741304 - RNA, 17 nt, Human
gucucaaaaaaagaaaa

SEQ ID NO: 1741305 - RNA, 14 nt, Human
gucucaaaaaaaca

SEQ ID NO: 1741306 - RNA, 14 nt, Human
gucugaaggcuggg

SEQ ID NO: 1741307 - RNA, 16 nt, Human
gugacuucagcucugu

SEQ ID NO: 1741308 - RNA, 19 nt, Human
gugacaugucuuuucuugc

SEQ ID NO: 1741309 - RNA, 22 nt, Human
gugacauguguuggcagccucu

SEQ ID NO: 1741310 - RNA, 16 nt, Human
gugagacucugucuca

SEQ ID NO: 1741311 - RNA, 14 nt, Human
gugagacucugucu

SEQ ID NO: 1741312 - RNA, 23 nt, Human
gugagaccugccccuccucucug

SEQ ID NO: 1741313 - RNA, 16 nt, Human
gugagaccugccccuc

SEQ ID NO: 1741314 - RNA, 22 nt, Human
gugagacccugucucaaaaaaa

SEQ ID NO: 1741315 - RNA, 15 nt, Human
gugagaccugccccu

SEQ ID NO: 1741316 - RNA, 14 nt, Human
gugagaccugcccc

SEQ ID NO: 1741317 - RNA, 13 nt, Human
gugagaccugccc

SEQ ID NO: 1741318 - RNA, 23 nt, Human
gugaauaauacaguaucucaggg

SEQ ID NO: 1741319 - RNA, 19 nt, Human
gugaaguuuaauugacuua

SEQ ID NO: 1741320 - RNA, 14 nt, Human
aacuccugaccuca

SEQ ID NO: 1741321 - RNA, 12 nt, Human
aacuccugaccu

SEQ ID NO: 1741322 - RNA, 22 nt, Human
gugacagagugagacucugucu

SEQ ID NO: 1741323 - RNA, 20 nt, Human
gugacagagugagacucugu

SEQ ID NO: 1741324 - RNA, 16 nt, Human
aacugcauuggcuuug

SEQ ID NO: 1741325 - RNA, 23 nt, Human
aacugauuuuuuuuuccuucagu

SEQ ID NO: 1741326 - RNA, 22 nt, Human
aacugauuuuuuuuuccuucag

SEQ ID NO: 1741327 - RNA, 21 nt, Human
aacugauuuuuuuuuccuuca

SEQ ID NO: 1741328 - RNA, 20 nt, Human
aacugauuuuuuuuuccuuc

SEQ ID NO: 1741329 - RNA, 23 nt, Human
aacucuccucugcugcuggcugg

SEQ ID NO: 1741330 - RNA, 22 nt, Human
aacucuccucugcugcuggcug

SEQ ID NO: 1741331 - RNA, 16 nt, Human
aacucugacaacagac

SEQ ID NO: 1741332 - RNA, 17 nt, Human
gugaggcucugcccuug

SEQ ID NO: 1741333 - RNA, 16 nt, Human
gugaggcucugcccuu

SEQ ID NO: 1741334 - RNA, 15 nt, Human
gugaggcucugcccu

SEQ ID NO: 1741335 - RNA, 14 nt, Human
gugaggcucugccc

SEQ ID NO: 1741336 - RNA, 13 nt, Human
gugaggcucugcc

SEQ ID NO: 1741337 - RNA, 12 nt, Human
gugaggcucugc

SEQ ID NO: 1741338 - RNA, 18 nt, Human
gugagacucugucucaaa

SEQ ID NO: 1741339 - RNA, 21 nt, Human
aacucuccucugcugcuggcu

SEQ ID NO: 1741340 - RNA, 19 nt, Human
aacucuccucugcugcugg

SEQ ID NO: 1741341 - RNA, 19 nt, Human
gugagucaccaagcccagu

SEQ ID NO: 1741342 - RNA, 17 nt, Human
gugagucaccaagccca

SEQ ID NO: 1741343 - RNA, 23 nt, Human
gugaguacuacaguccucccauc

SEQ ID NO: 1741344 - RNA, 18 nt, Human
gugaggcucugcccuugg

SEQ ID NO: 1741345 - RNA, 14 nt, Human
aaauuaaucugggc

SEQ ID NO: 1741346 - RNA, 15 nt, Human
aaauguggcuccugg

SEQ ID NO: 1741347 - RNA, 23 nt, Human
aaauuaugugccagauuuaugca

SEQ ID NO: 1741348 - RNA, 19 nt, Human
aaauuaggauuucaugauu

SEQ ID NO: 1741349 - RNA, 18 nt, Human
aaauuaggauuucaugau

SEQ ID NO: 1741350 - RNA, 17 nt, Human
aaauuccaagugauuga

SEQ ID NO: 1741351 - RNA, 16 nt, Human
aaauuccccacccuga

SEQ ID NO: 1741352 - RNA, 17 nt, Human
aaauuguauuacaaauc

SEQ ID NO: 1741353 - RNA, 18 nt, Human
aaauugucagaugcugug

SEQ ID NO: 1741354 - RNA, 21 nt, Human
aaaugucucuuuaaugucaca

SEQ ID NO: 1741355 - RNA, 14 nt, Human
aaaugucuuccugg

SEQ ID NO: 1741356 - RNA, 11 nt, Human
guauuuauuca

SEQ ID NO: 1741357 - RNA, 18 nt, Human
guauucucuccuguaccu

SEQ ID NO: 1741358 - RNA, 21 nt, Human
guauucucuccuguaccucuu

SEQ ID NO: 1741359 - RNA, 16 nt, Human
aaaucauucauuuucu

SEQ ID NO: 1741360 - RNA, 20 nt, Human
gucacaggaaguagaggagg

SEQ ID NO: 1741361 - RNA, 18 nt, Human
gucacaggacucugccuc

SEQ ID NO: 1741362 - RNA, 17 nt, Human
gucacaggacucugccu

SEQ ID NO: 1741363 - RNA, 12 nt, Human
gucacaggcagg

SEQ ID NO: 1741364 - RNA, 16 nt, Human
gucacaggagggaggg

SEQ ID NO: 1741365 - RNA, 19 nt, Human
gucacaggacucugccucc

SEQ ID NO: 1741366 - RNA, 22 nt, Human
gucaccaaaucagcugcuacua

SEQ ID NO: 1741367 - RNA, 21 nt, Human
gucaauuuuguuauguauauu

SEQ ID NO: 1741368 - RNA, 13 nt, Human
gucacaggaagua

SEQ ID NO: 1741369 - RNA, 15 nt, Human
gucacaggaaguaga

SEQ ID NO: 1741370 - RNA, 22 nt, Human
gucaauuacaggaaguacugga

SEQ ID NO: 1741371 - RNA, 23 nt, Human
gucacucuggcagcucagagagg

SEQ ID NO: 1741372 - RNA, 15 nt, Human
gucaccaagcccagu

SEQ ID NO: 1741373 - RNA, 12 nt, Human
gucaccaagccc

SEQ ID NO: 1741374 - RNA, 16 nt, Human
gucacugagacagccc

SEQ ID NO: 1741375 - RNA, 15 nt, Human
gucacugagacagcc

SEQ ID NO: 1741376 - RNA, 14 nt, Human
gucacugagacagc

SEQ ID NO: 1741377 - RNA, 23 nt, Human
gucacugagacagcccgggcucu

SEQ ID NO: 1741378 - RNA, 21 nt, Human
gucacugagacagcccgggcu

SEQ ID NO: 1741379 - RNA, 18 nt, Human
gucacugagacagcccgg

SEQ ID NO: 1741380 - RNA, 17 nt, Human
gucacugagacagcccg

SEQ ID NO: 1741381 - RNA, 10 nt, Human
gucacugcuu

SEQ ID NO: 1741382 - RNA, 23 nt, Human
gucacugcacagugcaucucagc

SEQ ID NO: 1741383 - RNA, 20 nt, Human
gucacugcacagugcaucuc

SEQ ID NO: 1741384 - RNA, 21 nt, Human
gucagaaguuucugccgcagc

SEQ ID NO: 1741385 - RNA, 23 nt, Human
gucagaaguuucugccgcagccc

SEQ ID NO: 1741386 - RNA, 17 nt, Human
gucacuuuguuuuacug

SEQ ID NO: 1741387 - RNA, 15 nt, Human
gucacugcuuaacuu

SEQ ID NO: 1741388 - RNA, 21 nt, Human
gucacugcuuaacuucacaua

SEQ ID NO: 1741389 - RNA, 22 nt, Human
gucagguggggcagcuugaggg

SEQ ID NO: 1741390 - RNA, 18 nt, Human
gucagguggggcagcuug

SEQ ID NO: 1741391 - RNA, 17 nt, Human
gucagguggggcagcuu

SEQ ID NO: 1741392 - RNA, 16 nt, Human
gucagguggggcagcu

SEQ ID NO: 1741393 - RNA, 15 nt, Human
gucagugugacugau

SEQ ID NO: 1741394 - RNA, 13 nt, Human
aaauuucuaaauc

SEQ ID NO: 1741395 - RNA, 15 nt, Human
aaauuucuaaaucuc

SEQ ID NO: 1741396 - RNA, 19 nt, Human
aaauuucuaaaucuccaaa

SEQ ID NO: 1741397 - RNA, 17 nt, Human
aaauuucucuacugucu

SEQ ID NO: 1741398 - RNA, 19 nt, Human
aacacaaacgggcucagca

SEQ ID NO: 1741399 - RNA, 18 nt, Human
aacacuguucucugcccu

SEQ ID NO: 1741400 - RNA, 17 nt, Human
aacacuguucucugccc

SEQ ID NO: 1741401 - RNA, 16 nt, Human
aacacuguucucugcc

SEQ ID NO: 1741402 - RNA, 19 nt, Human
aacacuguucucugcccuc

SEQ ID NO: 1741403 - RNA, 17 nt, Human
gucauuugagcagggcu

SEQ ID NO: 1741404 - RNA, 21 nt, Human
aacacucacauuuauucugcu

SEQ ID NO: 1741405 - RNA, 17 nt, Human
aacacucauugaccuga

SEQ ID NO: 1741406 - RNA, 21 nt, Human
aacacugggagaaaugaaaaa

SEQ ID NO: 1741407 - RNA, 22 nt, Human
guccaugaagauguagaggaga

SEQ ID NO: 1741408 - RNA, 23 nt, Human
guccaugaagauguagaggagaa

SEQ ID NO: 1741409 - RNA, 19 nt, Human
gucauuugagcagggcuca

SEQ ID NO: 1741410 - RNA, 18 nt, Human
guccccaccgcagacagg

SEQ ID NO: 1741411 - RNA, 20 nt, Human
gucccaccccacacacgcca

SEQ ID NO: 1741412 - RNA, 22 nt, Human
guccccaccgcagacaggacca

SEQ ID NO: 1741413 - RNA, 15 nt, Human
gucccaccccacaca

SEQ ID NO: 1741414 - RNA, 18 nt, Human
guccccuguuuguuucug

SEQ ID NO: 1741415 - RNA, 22 nt, Human
guccccuguuuguuucugaaag

SEQ ID NO: 1741416 - RNA, 12 nt, Human
gucccuaauaaa

SEQ ID NO: 1741417 - RNA, 19 nt, Human
gucccuuacgugaguccug

SEQ ID NO: 1741418 - RNA, 18 nt, Human
gucccuuacgugaguccu

SEQ ID NO: 1741419 - RNA, 19 nt, Human
gucccugguggcagcucac

SEQ ID NO: 1741420 - RNA, 18 nt, Human
gucccugguggcagcuca

SEQ ID NO: 1741421 - RNA, 15 nt, Human
gucccuaauaaagcu

SEQ ID NO: 1741422 - RNA, 18 nt, Human
aacaguccauugaaaggg

SEQ ID NO: 1741423 - RNA, 14 nt, Human
aacauuguagccuc

SEQ ID NO: 1741424 - RNA, 17 nt, Human
aacaugugaaaagaaua

SEQ ID NO: 1741425 - RNA, 22 nt, Human
gucuaugggacucaaugcacug

SEQ ID NO: 1741426 - RNA, 23 nt, Human
gucuaggcaggaccuguggccaa

SEQ ID NO: 1741427 - RNA, 16 nt, Human
gucuaccugaggggcc

SEQ ID NO: 1741428 - RNA, 15 nt, Human
gucuaccugaggggc

SEQ ID NO: 1741429 - RNA, 13 nt, Human
gucuaccugaggg

SEQ ID NO: 1741430 - RNA, 14 nt, Human
gucuaccugagggg

SEQ ID NO: 1741431 - RNA, 12 nt, Human
gucgccucugca

SEQ ID NO: 1741432 - RNA, 16 nt, Human
guccuggcaugggaau

SEQ ID NO: 1741433 - RNA, 19 nt, Human
guccugcugcaguugccag

SEQ ID NO: 1741434 - RNA, 14 nt, Human
guccucuuuucuga

SEQ ID NO: 1741435 - RNA, 12 nt, Human
gucgaggcagga

SEQ ID NO: 1741436 - RNA, 16 nt, Human
gucgaggacagggagg

SEQ ID NO: 1741437 - RNA, 21 nt, Human
uaaaaaaaaaccugagcccca

SEQ ID NO: 1741438 - RNA, 22 nt, Human
uaaaaagcuccaaaugcagcuu

SEQ ID NO: 1741439 - RNA, 23 nt, Human
uaaaaaucucaaauuucuaaauc

SEQ ID NO: 1741440 - RNA, 15 nt, Human
uaaaaaugagguacu

SEQ ID NO: 1741441 - RNA, 22 nt, Human
uaaaaaugagguacucuccugg

SEQ ID NO: 1741442 - RNA, 12 nt, Human
uaaaacuuuuua

SEQ ID NO: 1741443 - RNA, 15 nt, Human
uaaaacuuuuuaaaa

SEQ ID NO: 1741444 - RNA, 13 nt, Human
uaaaacccaagug

SEQ ID NO: 1741445 - RNA, 20 nt, Human
uaaaaguacauguuaaacuu

SEQ ID NO: 1741446 - RNA, 13 nt, Human
uaaaagucuugug

SEQ ID NO: 1741447 - RNA, 23 nt, Human
aagugauccucccaccucagccu

SEQ ID NO: 1741448 - RNA, 19 nt, Human
aagugauucucaugccuca

SEQ ID NO: 1741449 - RNA, 16 nt, Human
aagugauucucaugcc

SEQ ID NO: 1741450 - RNA, 13 nt, Human
aagugauucucau

SEQ ID NO: 1741451 - RNA, 17 nt, Human
aagugauucucaugccu

SEQ ID NO: 1741452 - RNA, 21 nt, Human
aagugauucuccugccucagc

SEQ ID NO: 1741453 - RNA, 20 nt, Human
aagugauccucccaccucag

SEQ ID NO: 1741454 - RNA, 19 nt, Human
aagugauccucccaccuca

SEQ ID NO: 1741455 - RNA, 13 nt, Human
aagugauccuccc

SEQ ID NO: 1741456 - RNA, 21 nt, Human
uaaaauaccagccaguaaaug

SEQ ID NO: 1741457 - RNA, 9 nt, Human
uaaaauggu

SEQ ID NO: 1741458 - RNA, 20 nt, Human
aaguuugagaucagccuggg

SEQ ID NO: 1741459 - RNA, 21 nt, Human
aaguuucugccgcagcccugc

SEQ ID NO: 1741460 - RNA, 19 nt, Human
aaguuucugccgcagcccu

SEQ ID NO: 1741461 - RNA, 20 nt, Human
aaguucccuacuuccuguga

SEQ ID NO: 1741462 - RNA, 17 nt, Human
aaguucccuacuuccug

SEQ ID NO: 1741463 - RNA, 14 nt, Human
aaguucccuacuuc

SEQ ID NO: 1741464 - RNA, 23 nt, Human
aaguguauuuuuuuacuaauaga

SEQ ID NO: 1741465 - RNA, 13 nt, Human
aagugugguagag

SEQ ID NO: 1741466 - RNA, 12 nt, Human
aaguguguguuu

SEQ ID NO: 1741467 - RNA, 21 nt, Human
aaguguguguuuuucauaaag

SEQ ID NO: 1741468 - RNA, 16 nt, Human
aaguguguguuuuuca

SEQ ID NO: 1741469 - RNA, 11 nt, Human
aaguuaagaau

SEQ ID NO: 1741470 - RNA, 23 nt, Human
aaguuaagaauguucuuauguug

SEQ ID NO: 1741471 - RNA, 14 nt, Human
aaguuacacauuuu

SEQ ID NO: 1741472 - RNA, 18 nt, Human
aaguuaguuccacugaga

SEQ ID NO: 1741473 - RNA, 19 nt, Human
aaguuaguuccacugagac

SEQ ID NO: 1741474 - RNA, 23 nt, Human
aagguuucagaaagaagugggga

SEQ ID NO: 1741475 - RNA, 23 nt, Human
aagggggcugggacaugggaaag

SEQ ID NO: 1741476 - RNA, 12 nt, Human
aagggggcuggg

SEQ ID NO: 1741477 - RNA, 13 nt, Human
aaggggagaguaa

SEQ ID NO: 1741478 - RNA, 20 nt, Human
aaggcugucaauuacaggaa

SEQ ID NO: 1741479 - RNA, 22 nt, Human
aaggcugggggaagaagcucuc

SEQ ID NO: 1741480 - RNA, 19 nt, Human
aaggcugggggaagaagcu

SEQ ID NO: 1741481 - RNA, 11 nt, Human
guuucagaaau

SEQ ID NO: 1741482 - RNA, 13 nt, Human
guuucagaaaugu

SEQ ID NO: 1741483 - RNA, 16 nt, Human
aaggcugggggaagaa

SEQ ID NO: 1741484 - RNA, 14 nt, Human
guuuaugauuccac

SEQ ID NO: 1741485 - RNA, 23 nt, Human
guuguuugauucagacagcugcc

SEQ ID NO: 1741486 - RNA, 22 nt, Human
aaggaaacccagcucuggucca

SEQ ID NO: 1741487 - RNA, 17 nt, Human
aaggaaacccagcucug

SEQ ID NO: 1741488 - RNA, 21 nt, Human
guuuaagugacugauggcuaa

SEQ ID NO: 1741489 - RNA, 22 nt, Human
aagucacugcacagugcaucuc

SEQ ID NO: 1741490 - RNA, 21 nt, Human
aaguauucuuauuuaaugaaa

SEQ ID NO: 1741491 - RNA, 16 nt, Human
aaguauuauaccuuuu

SEQ ID NO: 1741492 - RNA, 19 nt, Human
aaguauuauaccuuuuuua

SEQ ID NO: 1741493 - RNA, 23 nt, Human
aaguauucuuauuuaaugaaaga

SEQ ID NO: 1741494 - RNA, 15 nt, Human
aaguauuuuccuguu

SEQ ID NO: 1741495 - RNA, 15 nt, Human
aaguauuauaccuuu

SEQ ID NO: 1741496 - RNA, 20 nt, Human
aaguacuucuccacccugcu

SEQ ID NO: 1741497 - RNA, 19 nt, Human
aaguacuucuccacccugc

SEQ ID NO: 1741498 - RNA, 18 nt, Human
aaguacuucuccacccug

SEQ ID NO: 1741499 - RNA, 15 nt, Human
aaguacuauguauca

SEQ ID NO: 1741500 - RNA, 13 nt, Human
aaguacuauguau

SEQ ID NO: 1741501 - RNA, 17 nt, Human
aaguacuauaauuuacc

SEQ ID NO: 1741502 - RNA, 14 nt, Human
aaguacuauaauuu

SEQ ID NO: 1741503 - RNA, 22 nt, Human
guuuuaaggaugcuuguacaua

SEQ ID NO: 1741504 - RNA, 14 nt, Human
guuuucuguucuuu

SEQ ID NO: 1741505 - RNA, 15 nt, Human
guuuucuguucuuuc

SEQ ID NO: 1741506 - RNA, 16 nt, Human
guuuucuguucuuucu

SEQ ID NO: 1741507 - RNA, 19 nt, Human
guuuucuguucuuucuggc

SEQ ID NO: 1741508 - RNA, 13 nt, Human
guuuggagacaga

SEQ ID NO: 1741509 - RNA, 20 nt, Human
guuugcuuuguaugcacuuu

SEQ ID NO: 1741510 - RNA, 21 nt, Human
aaguaauaugcacacauuuuu

SEQ ID NO: 1741511 - RNA, 17 nt, Human
aaguaauaugcacacau

SEQ ID NO: 1741512 - RNA, 18 nt, Human
aaguaauaugcacacauu

SEQ ID NO: 1741513 - RNA, 20 nt, Human
aaguaauaugcacacauuuu

SEQ ID NO: 1741514 - RNA, 14 nt, Human
guucuugguuugua

SEQ ID NO: 1741515 - RNA, 15 nt, Human
guucuugguuuguaa

SEQ ID NO: 1741516 - RNA, 18 nt, Human
guucuugguuuguaaauu

SEQ ID NO: 1741517 - RNA, 19 nt, Human
guugauagcacagacccug

SEQ ID NO: 1741518 - RNA, 14 nt, Human
guugauagcacaga

SEQ ID NO: 1741519 - RNA, 22 nt, Human
guugauagcacagacccugccc

SEQ ID NO: 1741520 - RNA, 14 nt, Human
guucuuaauucuua

SEQ ID NO: 1741521 - RNA, 17 nt, Human
guucuuaauucuuagcu

SEQ ID NO: 1741522 - RNA, 18 nt, Human
guucucugcccuccaaga

SEQ ID NO: 1741523 - RNA, 17 nt, Human
guucucugcccuccaag

SEQ ID NO: 1741524 - RNA, 13 nt, Human
guucuuaauucuu

SEQ ID NO: 1741525 - RNA, 16 nt, Human
guucuuaagacgugau

SEQ ID NO: 1741526 - RNA, 15 nt, Human
guucucugcccucca

SEQ ID NO: 1741527 - RNA, 14 nt, Human
guucucugaggaca

SEQ ID NO: 1741528 - RNA, 12 nt, Human
guucucugagga

SEQ ID NO: 1741529 - RNA, 15 nt, Human
guucucucuucucca

SEQ ID NO: 1741530 - RNA, 19 nt, Human
guucuagcauggcugccaa

SEQ ID NO: 1741531 - RNA, 17 nt, Human
aagcucugcuccucucc

SEQ ID NO: 1741532 - RNA, 22 nt, Human
guucccuuuuuuggcugcugaa

SEQ ID NO: 1741533 - RNA, 21 nt, Human
guucccuuuuuuggcugcuga

SEQ ID NO: 1741534 - RNA, 21 nt, Human
aagcuuuuaugugaaacaugu

SEQ ID NO: 1741535 - RNA, 19 nt, Human
aagcuuuuaugugaaacau

SEQ ID NO: 1741536 - RNA, 15 nt, Human
guuccccaagacauu

SEQ ID NO: 1741537 - RNA, 18 nt, Human
guucccccuguuucagag

SEQ ID NO: 1741538 - RNA, 20 nt, Human
guuauuauauuuacaaaugg

SEQ ID NO: 1741539 - RNA, 22 nt, Human
guuauugguguaagguacuuuc

SEQ ID NO: 1741540 - RNA, 19 nt, Human
guuauuauauuuacaaaug

SEQ ID NO: 1741541 - RNA, 19 nt, Human
guuagagguucccuuugac

SEQ ID NO: 1741542 - RNA, 13 nt, Human
aagcccagcuuga

SEQ ID NO: 1741543 - RNA, 18 nt, Human
guuaaucauuagguguga

SEQ ID NO: 1741544 - RNA, 19 nt, Human
guuaauauuuauaggucac

SEQ ID NO: 1741545 - RNA, 23 nt, Human
guuacucuucaguuaagccuuug

SEQ ID NO: 1741546 - RNA, 15 nt, Human
aagccuccuccagcc

SEQ ID NO: 1741547 - RNA, 16 nt, Human
aagccucccacgacug

SEQ ID NO: 1741548 - RNA, 18 nt, Human
aagccuguuuaagagaca

SEQ ID NO: 1741549 - RNA, 15 nt, Human
aagccuguuuaagag

SEQ ID NO: 1741550 - RNA, 23 nt, Human
guucagcuuguaaauagcucagg

SEQ ID NO: 1741551 - RNA, 18 nt, Human
guuauuuugauguaaaga

SEQ ID NO: 1741552 - RNA, 22 nt, Human
guucaggguuggccccugcccg

SEQ ID NO: 1741553 - RNA, 21 nt, Human
guucaggguuggccccugccc

SEQ ID NO: 1741554 - RNA, 20 nt, Human
guucaggguuggccccugcc

SEQ ID NO: 1741555 - RNA, 21 nt, Human
aagccgugauuuucauugcug

SEQ ID NO: 1741556 - RNA, 15 nt, Human
aagccguggcuuccc

SEQ ID NO: 1741557 - RNA, 14 nt, Human
aagccguggcuucc

SEQ ID NO: 1741558 - RNA, 13 nt, Human
aagccguggcuuc

SEQ ID NO: 1741559 - RNA, 18 nt, Human
guucagguaacaggcaga

SEQ ID NO: 1741560 - RNA, 17 nt, Human
guucagguaacaggcag

SEQ ID NO: 1741561 - RNA, 16 nt, Human
aagcacuaaacaaaga

SEQ ID NO: 1741562 - RNA, 17 nt, Human
aagcaccuccugccucg

SEQ ID NO: 1741563 - RNA, 16 nt, Human
aagcaccuccugccuc

SEQ ID NO: 1741564 - RNA, 15 nt, Human
aagcaccuccugccu

SEQ ID NO: 1741565 - RNA, 14 nt, Human
aagcaccuccugcc

SEQ ID NO: 1741566 - RNA, 13 nt, Human
aagcaccuccugc

SEQ ID NO: 1741567 - RNA, 21 nt, Human
aagcacaugccucucucaggc

SEQ ID NO: 1741568 - RNA, 20 nt, Human
aagcacaugccucucucagg

SEQ ID NO: 1741569 - RNA, 19 nt, Human
aagcacaugccucucucag

SEQ ID NO: 1741570 - RNA, 16 nt, Human
aagcacaugccucucu

SEQ ID NO: 1741571 - RNA, 15 nt, Human
aagcacaugccucuc

SEQ ID NO: 1741572 - RNA, 14 nt, Human
aagcacaugccucu

SEQ ID NO: 1741573 - RNA, 16 nt, Human
aagcacacuugacauc

SEQ ID NO: 1741574 - RNA, 13 nt, Human
guguuucuuuagu

SEQ ID NO: 1741575 - RNA, 16 nt, Human
guguuucuuuaguuuu

SEQ ID NO: 1741576 - RNA, 12 nt, Human
aagcauuuugua

SEQ ID NO: 1741577 - RNA, 13 nt, Human
aagcauuuuguaa

SEQ ID NO: 1741578 - RNA, 20 nt, Human
aagccaaagcuaggccuggc

SEQ ID NO: 1741579 - RNA, 18 nt, Human
aagccaaagcuaggccug

SEQ ID NO: 1741580 - RNA, 17 nt, Human
aagccaaagcuaggccu

SEQ ID NO: 1741581 - RNA, 12 nt, Human
aagcaugugaga

SEQ ID NO: 1741582 - RNA, 23 nt, Human
aagcaugcacaaauucugucucu

SEQ ID NO: 1741583 - RNA, 15 nt, Human
gugguuucagaaaug

SEQ ID NO: 1741584 - RNA, 23 nt, Human
gugcugcccugcccaccuggccu

SEQ ID NO: 1741585 - RNA, 22 nt, Human
aagagggagggagggcuccaga

SEQ ID NO: 1741586 - RNA, 21 nt, Human
aagagggagggagggcuccag

SEQ ID NO: 1741587 - RNA, 14 nt, Human
aagaggcagggucu

SEQ ID NO: 1741588 - RNA, 11 nt, Human
aagaggcaggg

SEQ ID NO: 1741589 - RNA, 18 nt, Human
guguaagaaauacagacu

SEQ ID NO: 1741590 - RNA, 13 nt, Human
aagcaaaauguga

SEQ ID NO: 1741591 - RNA, 20 nt, Human
aagcaaaugugaaucauuuu

SEQ ID NO: 1741592 - RNA, 17 nt, Human
aagcaacccaaauguuc

SEQ ID NO: 1741593 - RNA, 20 nt, Human
aagaucaaaagguuaauaaa

SEQ ID NO: 1741594 - RNA, 23 nt, Human
aagaucaaaagguuaauaaagua

SEQ ID NO: 1741595 - RNA, 16 nt, Human
aagauggcugugccuc

SEQ ID NO: 1741596 - RNA, 23 nt, Human
aagauggcacuuauaaccaaagc

SEQ ID NO: 1741597 - RNA, 19 nt, Human
gugucagguggggcagcuu

SEQ ID NO: 1741598 - RNA, 20 nt, Human
gugucagguggggcagcuug

SEQ ID NO: 1741599 - RNA, 23 nt, Human
gugugaaccaccacacccagccc

SEQ ID NO: 1741600 - RNA, 18 nt, Human
gugucagguggggcagcu

SEQ ID NO: 1741601 - RNA, 14 nt, Human
gugucagguggggc

SEQ ID NO: 1741602 - RNA, 22 nt, Human
gugucaccugaagacucauucu

SEQ ID NO: 1741603 - RNA, 14 nt, Human
gugucaccugaaga

SEQ ID NO: 1741604 - RNA, 23 nt, Human
cuccacuuggucugugagaugcu

SEQ ID NO: 1741605 - RNA, 19 nt, Human
cuccacuuucuagccagag

SEQ ID NO: 1741606 - RNA, 16 nt, Human
cuccacuuucuagcca

SEQ ID NO: 1741607 - RNA, 20 nt, Human
cuccacuuucuagccagagg

SEQ ID NO: 1741608 - RNA, 13 nt, Human
cuccacuuggucu

SEQ ID NO: 1741609 - RNA, 15 nt, Human
cuccacuuggucugu

SEQ ID NO: 1741610 - RNA, 17 nt, Human
cuccaagcucccaggca

SEQ ID NO: 1741611 - RNA, 16 nt, Human
cuccacuggauggagg

SEQ ID NO: 1741612 - RNA, 16 nt, Human
cuccacuuggucugug

SEQ ID NO: 1741613 - RNA, 17 nt, Human
cuccacuuggucuguga

SEQ ID NO: 1741614 - RNA, 21 nt, Human
cuccacuuggucugugagaug

SEQ ID NO: 1741615 - RNA, 22 nt, Human
cuccacuuggucugugagaugc

SEQ ID NO: 1741616 - RNA, 16 nt, Human
cuccaagcucccaggc

SEQ ID NO: 1741617 - RNA, 15 nt, Human
cuccaagcucccagg

SEQ ID NO: 1741618 - RNA, 14 nt, Human
cuccaagcucccag

SEQ ID NO: 1741619 - RNA, 13 nt, Human
cuccaagcuccca

SEQ ID NO: 1741620 - RNA, 14 nt, Human
cuccaagcuccauc

SEQ ID NO: 1741621 - RNA, 19 nt, Human
cuccaagcuccaucuccac

SEQ ID NO: 1741622 - RNA, 18 nt, Human
cuccaagcuccaucucca

SEQ ID NO: 1741623 - RNA, 24 nt, Human
cuccaagcaggacauggacaagga

SEQ ID NO: 1741624 - RNA, 22 nt, Human
cuccaagcaggacauggacaag

SEQ ID NO: 1741625 - RNA, 14 nt, Human
cuccaagcaggaca

SEQ ID NO: 1741626 - RNA, 13 nt, Human
cuccaagcaggac

SEQ ID NO: 1741627 - RNA, 22 nt, Human
cuccaagaccuucuccuucacc

SEQ ID NO: 1741628 - RNA, 15 nt, Human
cuccaagaccuucuc

SEQ ID NO: 1741629 - RNA, 12 nt, Human
cucaugccucag

SEQ ID NO: 1741630 - RNA, 16 nt, Human
cucaugccucagccuc

SEQ ID NO: 1741631 - RNA, 17 nt, Human
cucagucucccucccuu

SEQ ID NO: 1741632 - RNA, 16 nt, Human
cucagucucccucccu

SEQ ID NO: 1741633 - RNA, 15 nt, Human
cucagucucccuccc

SEQ ID NO: 1741634 - RNA, 13 nt, Human
cucagucucccuc

SEQ ID NO: 1741635 - RNA, 21 nt, Human
cucgugguaggacuguagaaa

SEQ ID NO: 1741636 - RNA, 15 nt, Human
cucuaucaccaagga

SEQ ID NO: 1741637 - RNA, 16 nt, Human
cucgaacuggcugcaa

SEQ ID NO: 1741638 - RNA, 15 nt, Human
cucgaacuggcugca

SEQ ID NO: 1741639 - RNA, 14 nt, Human
cucgaacuggcugc

SEQ ID NO: 1741640 - RNA, 13 nt, Human
cucgaacuggcug

SEQ ID NO: 1741641 - RNA, 23 nt, Human
cuccuggggguucuuucuuccuc

SEQ ID NO: 1741642 - RNA, 18 nt, Human
cuccuggggguucuuucu

SEQ ID NO: 1741643 - RNA, 22 nt, Human
cuccuggggguucuuucuuccu

SEQ ID NO: 1741644 - RNA, 20 nt, Human
cuccuggggguucuuucuuc

SEQ ID NO: 1741645 - RNA, 18 nt, Human
cuccucugcugcuggcug

SEQ ID NO: 1741646 - RNA, 16 nt, Human
cuccucugcugcuggc

SEQ ID NO: 1741647 - RNA, 19 nt, Human
cuccucucugcccuaaugc

SEQ ID NO: 1741648 - RNA, 15 nt, Human
cuccucucugcccua

SEQ ID NO: 1741649 - RNA, 14 nt, Human
cuccucucugcccu

SEQ ID NO: 1741650 - RNA, 13 nt, Human
cuccucucugccc

SEQ ID NO: 1741651 - RNA, 18 nt, Human
cuccuggcccacugcauc

SEQ ID NO: 1741652 - RNA, 16 nt, Human
cuccuggcccacugca

SEQ ID NO: 1741653 - RNA, 15 nt, Human
cuccuggacuccugc

SEQ ID NO: 1741654 - RNA, 23 nt, Human
cuccucuucaacugaccagccuc

SEQ ID NO: 1741655 - RNA, 18 nt, Human
cuccucuucaacugacca

SEQ ID NO: 1741656 - RNA, 20 nt, Human
cucccccagccccauccucu

SEQ ID NO: 1741657 - RNA, 15 nt, Human
cucccccagccccau

SEQ ID NO: 1741658 - RNA, 22 nt, Human
cucccccagccccauccucugu

SEQ ID NO: 1741659 - RNA, 13 nt, Human
cucccccaucucu

SEQ ID NO: 1741660 - RNA, 19 nt, Human
cugacaacagacuucugaa

SEQ ID NO: 1741661 - RNA, 18 nt, Human
cugacaacagacuucuga

SEQ ID NO: 1741662 - RNA, 15 nt, Human
cugacaacagacuuc

SEQ ID NO: 1741663 - RNA, 22 nt, Human
cugacccaugcugcccugugag

SEQ ID NO: 1741664 - RNA, 21 nt, Human
cugacccaugcugcccuguga

SEQ ID NO: 1741665 - RNA, 23 nt, Human
cugagacagcccgggcucugccu

SEQ ID NO: 1741666 - RNA, 21 nt, Human
cugagacucgcgacaaugcaa

SEQ ID NO: 1741667 - RNA, 22 nt, Human
cugagacucgcgacaaugcaaa

SEQ ID NO: 1741668 - RNA, 22 nt, Human
cugagaggacuuuucuuugugg

SEQ ID NO: 1741669 - RNA, 21 nt, Human
cugagaggacuuuucuuugug

SEQ ID NO: 1741670 - RNA, 14 nt, Human
cugagaggcugucu

SEQ ID NO: 1741671 - RNA, 17 nt, Human
cugagaguagagucacu

SEQ ID NO: 1741672 - RNA, 15 nt, Human
cugagcuuucugcua

SEQ ID NO: 1741673 - RNA, 14 nt, Human
cugagcuuucugcu

SEQ ID NO: 1741674 - RNA, 21 nt, Human
cugagaucaaaacgguuuuac

SEQ ID NO: 1741675 - RNA, 20 nt, Human
cugaggaauccagacccggc

SEQ ID NO: 1741676 - RNA, 17 nt, Human
cugaggaauccagaccc

SEQ ID NO: 1741677 - RNA, 20 nt, Human
cugaggacacuaaccacgcu

SEQ ID NO: 1741678 - RNA, 21 nt, Human
cugaggaauccagacccggcu

SEQ ID NO: 1741679 - RNA, 23 nt, Human
cugaggacacuaaccacgcugga

SEQ ID NO: 1741680 - RNA, 23 nt, Human
cugaggacaagagaaaaaagcca

SEQ ID NO: 1741681 - RNA, 12 nt, Human
cugaggugggag

SEQ ID NO: 1741682 - RNA, 21 nt, Human
cugaguacguugugcauuugg

SEQ ID NO: 1741683 - RNA, 19 nt, Human
cugaguagcuggauuacag

SEQ ID NO: 1741684 - RNA, 18 nt, Human
cugaguacguugugcauu

SEQ ID NO: 1741685 - RNA, 17 nt, Human
cugaguacguugugcau

SEQ ID NO: 1741686 - RNA, 19 nt, Human
cugaguacguugugcauuu

SEQ ID NO: 1741687 - RNA, 20 nt, Human
cugaguacguugugcauuug

SEQ ID NO: 1741688 - RNA, 14 nt, Human
cugaggaccagcca

SEQ ID NO: 1741689 - RNA, 22 nt, Human
cugaggacuuaaaauauuccug

SEQ ID NO: 1741690 - RNA, 20 nt, Human
cugaguagcugggauuacag

SEQ ID NO: 1741691 - RNA, 15 nt, Human
cugaguagcugggau

SEQ ID NO: 1741692 - RNA, 14 nt, Human
cugaguagcuggga

SEQ ID NO: 1741693 - RNA, 20 nt, Human
cugaguagcuggauuacagg

SEQ ID NO: 1741694 - RNA, 23 nt, Human
cugacaacacucauugaccugag

SEQ ID NO: 1741695 - RNA, 22 nt, Human
cugacaacacucauugaccuga

SEQ ID NO: 1741696 - RNA, 21 nt, Human
cugaaggccccgcccaggcuu

SEQ ID NO: 1741697 - RNA, 17 nt, Human
cugaaggcuggguucug

SEQ ID NO: 1741698 - RNA, 19 nt, Human
cugaaggccccgcccaggc

SEQ ID NO: 1741699 - RNA, 23 nt, Human
cugaaggacauugcggacagcca

SEQ ID NO: 1741700 - RNA, 22 nt, Human
cugaagcuaucguaaaauuaag

SEQ ID NO: 1741701 - RNA, 21 nt, Human
cugaagcuaucguaaaauuaa

SEQ ID NO: 1741702 - RNA, 22 nt, Human
cugaaaauugaugggauuuggu

SEQ ID NO: 1741703 - RNA, 21 nt, Human
cucuugaugccuggcggggug

SEQ ID NO: 1741704 - RNA, 16 nt, Human
cucuugaugccuggcg

SEQ ID NO: 1741705 - RNA, 15 nt, Human
cucuugaugccuggc

SEQ ID NO: 1741706 - RNA, 13 nt, Human
cucuugaugccug

SEQ ID NO: 1741707 - RNA, 16 nt, Human
cucuugagccuugaac

SEQ ID NO: 1741708 - RNA, 17 nt, Human
cucuugagccuugaacu

SEQ ID NO: 1741709 - RNA, 18 nt, Human
cucuugagccuugaacuu

SEQ ID NO: 1741710 - RNA, 23 nt, Human
cucuugagccuugaacuuugacc

SEQ ID NO: 1741711 - RNA, 20 nt, Human
cucuucaacugaccagccuc

SEQ ID NO: 1741712 - RNA, 17 nt, Human
cucuucaacugaccagc

SEQ ID NO: 1741713 - RNA, 16 nt, Human
cucuucaacugaccag

SEQ ID NO: 1741714 - RNA, 18 nt, Human
cucuucagaucucuaacu

SEQ ID NO: 1741715 - RNA, 19 nt, Human
cucuucagaucucuaacuu

SEQ ID NO: 1741716 - RNA, 14 nt, Human
cucuucaaucucuu

SEQ ID NO: 1741717 - RNA, 13 nt, Human
cucuuauugccca

SEQ ID NO: 1741718 - RNA, 20 nt, Human
cucuuauugcccacgcugga

SEQ ID NO: 1741719 - RNA, 19 nt, Human
cucuuauugcccacgcugg

SEQ ID NO: 1741720 - RNA, 15 nt, Human
cucuuauugcccacg

SEQ ID NO: 1741721 - RNA, 14 nt, Human
cucuuauugcccac

SEQ ID NO: 1741722 - RNA, 15 nt, Human
cucugguccauagag

SEQ ID NO: 1741723 - RNA, 15 nt, Human
cucugguuaucuaau

SEQ ID NO: 1741724 - RNA, 12 nt, Human
cucuguccaggc

SEQ ID NO: 1741725 - RNA, 16 nt, Human
cucugcugacagacac

SEQ ID NO: 1741726 - RNA, 14 nt, Human
cucugcugacagac

SEQ ID NO: 1741727 - RNA, 13 nt, Human
cucugcugacaga

SEQ ID NO: 1741728 - RNA, 14 nt, Human
cucugguccauaga

SEQ ID NO: 1741729 - RNA, 20 nt, Human
cucugcacuccccugcuggg

SEQ ID NO: 1741730 - RNA, 21 nt, Human
cucugcacuccccugcugggu

SEQ ID NO: 1741731 - RNA, 13 nt, Human
cucugcagcaaua

SEQ ID NO: 1741732 - RNA, 20 nt, Human
cucugcuccucuccccagca

SEQ ID NO: 1741733 - RNA, 18 nt, Human
cucugcuccucuccccag

SEQ ID NO: 1741734 - RNA, 13 nt, Human
cucugcuccucuc

SEQ ID NO: 1741735 - RNA, 17 nt, Human
cucugcaggucccuaau

SEQ ID NO: 1741736 - RNA, 16 nt, Human
cucugcaggucccuaa

SEQ ID NO: 1741737 - RNA, 15 nt, Human
cucugcaggucccua

SEQ ID NO: 1741738 - RNA, 14 nt, Human
cucugcaggucccu

SEQ ID NO: 1741739 - RNA, 12 nt, Human
cuagaacucccu

SEQ ID NO: 1741740 - RNA, 13 nt, Human
cuagaacucccuu

SEQ ID NO: 1741741 - RNA, 22 nt, Human
cuagaagauuuugaaauuuuua

SEQ ID NO: 1741742 - RNA, 21 nt, Human
cuagcauacguacacauuuua

SEQ ID NO: 1741743 - RNA, 23 nt, Human
cuagcauacguacacauuuuauu

SEQ ID NO: 1741744 - RNA, 20 nt, Human
cuacaugagguacugagagu

SEQ ID NO: 1741745 - RNA, 18 nt, Human
cuacaugagguacugaga

SEQ ID NO: 1741746 - RNA, 17 nt, Human
cuaccuuuguauucucu

SEQ ID NO: 1741747 - RNA, 17 nt, Human
cuacguuaccaggcagg

SEQ ID NO: 1741748 - RNA, 19 nt, Human
cuacaguccucccaucuca

SEQ ID NO: 1741749 - RNA, 22 nt, Human
cuacaguugaaaaacagcugag

SEQ ID NO: 1741750 - RNA, 13 nt, Human
cuacaguguacag

SEQ ID NO: 1741751 - RNA, 14 nt, Human
cuacaguguacagu

SEQ ID NO: 1741752 - RNA, 21 nt, Human
cuacaguugaaaaacagcuga

SEQ ID NO: 1741753 - RNA, 20 nt, Human
cuacaguccucccaucucac

SEQ ID NO: 1741754 - RNA, 11 nt, Human
cgugugugugu

SEQ ID NO: 1741755 - RNA, 23 nt, Human
cuaagugauccucccaccucagc

SEQ ID NO: 1741756 - RNA, 21 nt, Human
cuaagugguacuaacuuuccu

SEQ ID NO: 1741757 - RNA, 20 nt, Human
cuaaguuuuuauggcuuuug

SEQ ID NO: 1741758 - RNA, 23 nt, Human
cuaaguuuuuauggcuuuugugc

SEQ ID NO: 1741759 - RNA, 15 nt, Human
cuaauucuaugccug

SEQ ID NO: 1741760 - RNA, 14 nt, Human
cucaauaaaguaca

SEQ ID NO: 1741761 - RNA, 20 nt, Human
cucaaacucuugaccucagg

SEQ ID NO: 1741762 - RNA, 14 nt, Human
cucaaacuccugac

SEQ ID NO: 1741763 - RNA, 13 nt, Human
cucaaacuccuga

SEQ ID NO: 1741764 - RNA, 11 nt, Human
cucacaaaaga

SEQ ID NO: 1741765 - RNA, 15 nt, Human
cucaaugcacugaca

SEQ ID NO: 1741766 - RNA, 13 nt, Human
cucaaugcacuga

SEQ ID NO: 1741767 - RNA, 17 nt, Human
cucaaaaaaagaaaaag

SEQ ID NO: 1741768 - RNA, 18 nt, Human
cucaaaagcugggcaggu

SEQ ID NO: 1741769 - RNA, 17 nt, Human
cuaucucccccagcccc

SEQ ID NO: 1741770 - RNA, 16 nt, Human
cuaucucccccagccc

SEQ ID NO: 1741771 - RNA, 18 nt, Human
cuaucucccccagcccca

SEQ ID NO: 1741772 - RNA, 15 nt, Human
cuagccagaggagag

SEQ ID NO: 1741773 - RNA, 13 nt, Human
cuagccagaggag

SEQ ID NO: 1741774 - RNA, 12 nt, Human
cuagccagagga

SEQ ID NO: 1741775 - RNA, 23 nt, Human
cuaguuguuugauucagacagcu

SEQ ID NO: 1741776 - RNA, 22 nt, Human
cuaguuguuugauucagacagc

SEQ ID NO: 1741777 - RNA, 13 nt, Human
cuaguuugauuaa

SEQ ID NO: 1741778 - RNA, 15 nt, Human
cuaguuugauuaaau

SEQ ID NO: 1741779 - RNA, 22 nt, Human
cuaguuugauuaaauucuugca

SEQ ID NO: 1741780 - RNA, 21 nt, Human
cuaguuugauuaaauucuugc

SEQ ID NO: 1741781 - RNA, 15 nt, Human
cuaucucccccagcc

SEQ ID NO: 1741782 - RNA, 14 nt, Human
cuaucuaaauguug

SEQ ID NO: 1741783 - RNA, 17 nt, Human
cuaucguaaaauuaaga

SEQ ID NO: 1741784 - RNA, 18 nt, Human
cuaucguaaaauuaagaa

SEQ ID NO: 1741785 - RNA, 18 nt, Human
cuaucaugucaaacguga

SEQ ID NO: 1741786 - RNA, 17 nt, Human
ccuuuugagugccuuac

SEQ ID NO: 1741787 - RNA, 15 nt, Human
ccuuuugagugccuu

SEQ ID NO: 1741788 - RNA, 21 nt, Human
ccuuucaauaggaaaaacuga

SEQ ID NO: 1741789 - RNA, 15 nt, Human
ccuuucacaaccuuc

SEQ ID NO: 1741790 - RNA, 16 nt, Human
ccuugccgucuaccug

SEQ ID NO: 1741791 - RNA, 21 nt, Human
ccuuuuuuagaguugauacua

SEQ ID NO: 1741792 - RNA, 12 nt, Human
cgacaaugcaaa

SEQ ID NO: 1741793 - RNA, 13 nt, Human
cgacaaugcaaac

SEQ ID NO: 1741794 - RNA, 13 nt, Human
cgacagccuggca

SEQ ID NO: 1741795 - RNA, 12 nt, Human
cgacagccuggc

SEQ ID NO: 1741796 - RNA, 14 nt, Human
cgacagccuggcac

SEQ ID NO: 1741797 - RNA, 17 nt, Human
cgacugcccggcagggu

SEQ ID NO: 1741798 - RNA, 17 nt, Human
cgacugccaucuuggac

SEQ ID NO: 1741799 - RNA, 20 nt, Human
cgacccuugccgucuaccug

SEQ ID NO: 1741800 - RNA, 19 nt, Human
cgacccuugccgucuaccu

SEQ ID NO: 1741801 - RNA, 17 nt, Human
cgccagauucuuuccug

SEQ ID NO: 1741802 - RNA, 13 nt, Human
cgccucugcauuc

SEQ ID NO: 1741803 - RNA, 22 nt, Human
cgcaggauucuuccucccuccc

SEQ ID NO: 1741804 - RNA, 13 nt, Human
cgcaggcuggccc

SEQ ID NO: 1741805 - RNA, 14 nt, Human
cgauagugguggug

SEQ ID NO: 1741806 - RNA, 16 nt, Human
cgagucucuucuccac

SEQ ID NO: 1741807 - RNA, 16 nt, Human
cgguuuuacugcagcu

SEQ ID NO: 1741808 - RNA, 23 nt, Human
cgguguuuaagacauuuuuggaa

SEQ ID NO: 1741809 - RNA, 14 nt, Human
cguaaaauuaagaa

SEQ ID NO: 1741810 - RNA, 16 nt, Human
cguaaagcuagaaaug

SEQ ID NO: 1741811 - RNA, 16 nt, Human
cgugaguccuggcaug

SEQ ID NO: 1741812 - RNA, 17 nt, Human
cgugaggccagagacac

SEQ ID NO: 1741813 - RNA, 17 nt, Human
cgugaguccuggcaugg

SEQ ID NO: 1741814 - RNA, 20 nt, Human
cguguaaccauggacccaau

SEQ ID NO: 1741815 - RNA, 14 nt, Human
cgugcacacaccag

SEQ ID NO: 1741816 - RNA, 18 nt, Human
cgugauuuugcuguagaa

SEQ ID NO: 1741817 - RNA, 12 nt, Human
cggcuccaggcu

SEQ ID NO: 1741818 - RNA, 17 nt, Human
cggcucacugcagccuc

SEQ ID NO: 1741819 - RNA, 16 nt, Human
cggcucacugcagccu

SEQ ID NO: 1741820 - RNA, 15 nt, Human
cggcucacugcagcc

SEQ ID NO: 1741821 - RNA, 20 nt, Human
cggagucccaccuuggcugc

SEQ ID NO: 1741822 - RNA, 18 nt, Human
cggagucccaccuuggcu

SEQ ID NO: 1741823 - RNA, 16 nt, Human
cggcuccaggcuccuu

SEQ ID NO: 1741824 - RNA, 15 nt, Human
cggcuccaggcuccu

SEQ ID NO: 1741825 - RNA, 14 nt, Human
cggcuccaggcucc

SEQ ID NO: 1741826 - RNA, 13 nt, Human
cggcuccaggcuc

SEQ ID NO: 1741827 - RNA, 14 nt, Human
cgggccacagagaa

SEQ ID NO: 1741828 - RNA, 12 nt, Human
cgggccacagag

SEQ ID NO: 1741829 - RNA, 16 nt, Human
cgggcucugccuccca

SEQ ID NO: 1741830 - RNA, 14 nt, Human
cgggcucugccucc

SEQ ID NO: 1741831 - RNA, 15 nt, Human
cgggcucagcaaaag

SEQ ID NO: 1741832 - RNA, 11 nt, Human
cgggcucagca

SEQ ID NO: 1741833 - RNA, 17 nt, Human
cgggccacagagaaagu

SEQ ID NO: 1741834 - RNA, 18 nt, Human
cgguguggagaagcggcu

SEQ ID NO: 1741835 - RNA, 15 nt, Human
cggggacagcuccuu

SEQ ID NO: 1741836 - RNA, 17 nt, Human
cgggcucugccucccau

SEQ ID NO: 1741837 - RNA, 14 nt, Human
cggggacagcuccu

SEQ ID NO: 1741838 - RNA, 16 nt, Human
cggagucccaccuugg

SEQ ID NO: 1741839 - RNA, 20 nt, Human
ccauaauuuuuuuuuuccuu

SEQ ID NO: 1741840 - RNA, 13 nt, Human
ccaucccagcccc

SEQ ID NO: 1741841 - RNA, 12 nt, Human
ccaucccagccc

SEQ ID NO: 1741842 - RNA, 23 nt, Human
ccaucccaaacccuucagugcca

SEQ ID NO: 1741843 - RNA, 13 nt, Human
ccaugggccuccu

SEQ ID NO: 1741844 - RNA, 16 nt, Human
ccaugaguccccuguu

SEQ ID NO: 1741845 - RNA, 15 nt, Human
ccaugaguccccugu

SEQ ID NO: 1741846 - RNA, 14 nt, Human
ccaugaguccccug

SEQ ID NO: 1741847 - RNA, 13 nt, Human
ccaugaguccccu

SEQ ID NO: 1741848 - RNA, 19 nt, Human
ccaugagccucagcauccu

SEQ ID NO: 1741849 - RNA, 18 nt, Human
ccaugagccucagcaucc

SEQ ID NO: 1741850 - RNA, 14 nt, Human
ccaugagccucagc

SEQ ID NO: 1741851 - RNA, 22 nt, Human
ccauccccuguagagugggagc

SEQ ID NO: 1741852 - RNA, 16 nt, Human
ccauccccuguagagu

SEQ ID NO: 1741853 - RNA, 20 nt, Human
ccauuuaauggggaggacaa

SEQ ID NO: 1741854 - RNA, 15 nt, Human
ccaugggccuccugu

SEQ ID NO: 1741855 - RNA, 14 nt, Human
ccaugggccuccug

SEQ ID NO: 1741856 - RNA, 17 nt, Human
ccaugggccuccugugu

SEQ ID NO: 1741857 - RNA, 21 nt, Human
ccagucaccccggccaccugc

SEQ ID NO: 1741858 - RNA, 20 nt, Human
ccagucaccccggccaccug

SEQ ID NO: 1741859 - RNA, 13 nt, Human
ccagucaccccgg

SEQ ID NO: 1741860 - RNA, 12 nt, Human
ccagucaccccg

SEQ ID NO: 1741861 - RNA, 14 nt, Human
ccagucccccugcc

SEQ ID NO: 1741862 - RNA, 22 nt, Human
ccaggauguacaaggacagccc

SEQ ID NO: 1741863 - RNA, 14 nt, Human
ccaggcugggagag

SEQ ID NO: 1741864 - RNA, 13 nt, Human
ccaggcugggaga

SEQ ID NO: 1741865 - RNA, 17 nt, Human
ccaggcaacuugggaac

SEQ ID NO: 1741866 - RNA, 22 nt, Human
ccaggcugggagagccuuccag

SEQ ID NO: 1741867 - RNA, 23 nt, Human
ccaggcugggagagccuuccagg

SEQ ID NO: 1741868 - RNA, 21 nt, Human
ccaggcugggagagccuucca

SEQ ID NO: 1741869 - RNA, 18 nt, Human
ccaggcugggagagccuu

SEQ ID NO: 1741870 - RNA, 17 nt, Human
ccaggcugggagagccu

SEQ ID NO: 1741871 - RNA, 15 nt, Human
ccaggcugggagagc

SEQ ID NO: 1741872 - RNA, 21 nt, Human
ccagccccuggaugcagccuc

SEQ ID NO: 1741873 - RNA, 10 nt, Human
ccagccccuu

SEQ ID NO: 1741874 - RNA, 15 nt, Human
ccagcagccuggacc

SEQ ID NO: 1741875 - RNA, 20 nt, Human
ccagcagccuggacccugug

SEQ ID NO: 1741876 - RNA, 19 nt, Human
ccagcagccuggacccugu

SEQ ID NO: 1741877 - RNA, 23 nt, Human
ccaggaaaggcuccaggagcagc

SEQ ID NO: 1741878 - RNA, 22 nt, Human
ccaggaaaggcuccaggagcag

SEQ ID NO: 1741879 - RNA, 21 nt, Human
ccaggaaaggcuccaggagca

SEQ ID NO: 1741880 - RNA, 20 nt, Human
ccagcuugaaaccuucacuu

SEQ ID NO: 1741881 - RNA, 18 nt, Human
ccagcuugaaaccuucac

SEQ ID NO: 1741882 - RNA, 19 nt, Human
ccagcagagcaccuuagac

SEQ ID NO: 1741883 - RNA, 23 nt, Human
ccagcagagcaccuuagacaguc

SEQ ID NO: 1741884 - RNA, 20 nt, Human
cccaggcuuagucacugaga

SEQ ID NO: 1741885 - RNA, 15 nt, Human
cccaggcuuagucac

SEQ ID NO: 1741886 - RNA, 23 nt, Human
cccagcugugcucuggacaggca

SEQ ID NO: 1741887 - RNA, 21 nt, Human
cccagcugugcucuggacagg

SEQ ID NO: 1741888 - RNA, 19 nt, Human
cccaggaaaggcuccagga

SEQ ID NO: 1741889 - RNA, 22 nt, Human
cccagcuuaaaggggcuagagu

SEQ ID NO: 1741890 - RNA, 11 nt, Human
cccagcuguuu

SEQ ID NO: 1741891 - RNA, 22 nt, Human
cccaggaaaggcuccaggagca

SEQ ID NO: 1741892 - RNA, 21 nt, Human
cccaggaaaggcuccaggagc

SEQ ID NO: 1741893 - RNA, 23 nt, Human
cccaggaaaggcuccaggagcag

SEQ ID NO: 1741894 - RNA, 14 nt, Human
cccagcccacuucu

SEQ ID NO: 1741895 - RNA, 17 nt, Human
cccagcccacuucugcc

SEQ ID NO: 1741896 - RNA, 22 nt, Human
cccauucugccugcccaggccc

SEQ ID NO: 1741897 - RNA, 21 nt, Human
cccauucugccugcccaggcc

SEQ ID NO: 1741898 - RNA, 20 nt, Human
cccauucugccugcccaggc

SEQ ID NO: 1741899 - RNA, 21 nt, Human
ccccagcaagugagagcuggg

SEQ ID NO: 1741900 - RNA, 17 nt, Human
ccccauccucuguacag

SEQ ID NO: 1741901 - RNA, 20 nt, Human
ccccagcaagugagagcugg

SEQ ID NO: 1741902 - RNA, 19 nt, Human
ccccagcaagugagagcug

SEQ ID NO: 1741903 - RNA, 21 nt, Human
ccccauccucuguacagagcc

SEQ ID NO: 1741904 - RNA, 19 nt, Human
ccccauccucuguacagag

SEQ ID NO: 1741905 - RNA, 22 nt, Human
ccccauccucuguacagagccc

SEQ ID NO: 1741906 - RNA, 17 nt, Human
ccccagcaagugagagc

SEQ ID NO: 1741907 - RNA, 23 nt, Human
ccccagauugcaacaggcugggc

SEQ ID NO: 1741908 - RNA, 22 nt, Human
ccccagauugcaacaggcuggg

SEQ ID NO: 1741909 - RNA, 21 nt, Human
ccccagauugcaacaggcugg

SEQ ID NO: 1741910 - RNA, 23 nt, Human
cccauucugccugcccaggcccc

SEQ ID NO: 1741911 - RNA, 22 nt, Human
cccauaauuuuuuuuuuccuuu

SEQ ID NO: 1741912 - RNA, 23 nt, Human
cccauaauuuuuuuuuuccuuuu

SEQ ID NO: 1741913 - RNA, 13 nt, Human
cccaguuguauuu

SEQ ID NO: 1741914 - RNA, 18 nt, Human
ccccugcacuccagccug

SEQ ID NO: 1741915 - RNA, 17 nt, Human
ccccugcaaagcccagc

SEQ ID NO: 1741916 - RNA, 16 nt, Human
ccccugcaaagcccag

SEQ ID NO: 1741917 - RNA, 15 nt, Human
ccccugcaaagccca

SEQ ID NO: 1741918 - RNA, 17 nt, Human
ccccuucgcuccugugu

SEQ ID NO: 1741919 - RNA, 15 nt, Human
ccccuucgcuccugu

SEQ ID NO: 1741920 - RNA, 14 nt, Human
ccccuucgcuccug

SEQ ID NO: 1741921 - RNA, 19 nt, Human
ccccuucgcuccugugucu

SEQ ID NO: 1741922 - RNA, 14 nt, Human
ccccauucugccug

SEQ ID NO: 1741923 - RNA, 13 nt, Human
ccccauucugccu

SEQ ID NO: 1741924 - RNA, 15 nt, Human
ccccauucugccugc

SEQ ID NO: 1741925 - RNA, 12 nt, Human
cccggcugcgga

SEQ ID NO: 1741926 - RNA, 13 nt, Human
cccggcugcccuu

SEQ ID NO: 1741927 - RNA, 12 nt, Human
cccggcugcccu

SEQ ID NO: 1741928 - RNA, 12 nt, Human
cccgggaagggg

SEQ ID NO: 1741929 - RNA, 17 nt, Human
ccccuucugacccaugc

SEQ ID NO: 1741930 - RNA, 13 nt, Human
cccucagagccac

SEQ ID NO: 1741931 - RNA, 14 nt, Human
ccucaaaacaaagg

SEQ ID NO: 1741932 - RNA, 17 nt, Human
ccucccaccucagccuc

SEQ ID NO: 1741933 - RNA, 15 nt, Human
ccucccaccucagcc

SEQ ID NO: 1741934 - RNA, 23 nt, Human
ccucauuuuugaauacaggcaua

SEQ ID NO: 1741935 - RNA, 13 nt, Human
ccucccaucucac

SEQ ID NO: 1741936 - RNA, 16 nt, Human
ccucccaucucacaca

SEQ ID NO: 1741937 - RNA, 14 nt, Human
ccggccccugcugg

SEQ ID NO: 1741938 - RNA, 22 nt, Human
cccuucucuccagccccuggau

SEQ ID NO: 1741939 - RNA, 21 nt, Human
cccuucucuccagccccugga

SEQ ID NO: 1741940 - RNA, 15 nt, Human
cccuucgcuccugug

SEQ ID NO: 1741941 - RNA, 14 nt, Human
cccuucgcuccugu

SEQ ID NO: 1741942 - RNA, 23 nt, Human
ccgcaggauuugggcucuuggaa

SEQ ID NO: 1741943 - RNA, 13 nt, Human
ccggccccugcug

SEQ ID NO: 1741944 - RNA, 23 nt, Human
cccugucucaaaaaaagaaaaag

SEQ ID NO: 1741945 - RNA, 20 nt, Human
cccugucucaaaaaaagaaa

SEQ ID NO: 1741946 - RNA, 16 nt, Human
cccugucuaaugaaac

SEQ ID NO: 1741947 - RNA, 13 nt, Human
cccuucgcuccug

SEQ ID NO: 1741948 - RNA, 20 nt, Human
cccugugauggggcccugcc

SEQ ID NO: 1741949 - RNA, 19 nt, Human
cccugugauggggcccugc

SEQ ID NO: 1741950 - RNA, 18 nt, Human
cccugugauggggcccug

SEQ ID NO: 1741951 - RNA, 17 nt, Human
cccugugauggggcccu

SEQ ID NO: 1741952 - RNA, 22 nt, Human
ccugucuaaugaaaccuguguc

SEQ ID NO: 1741953 - RNA, 15 nt, Human
ccugucuaaugaaac

SEQ ID NO: 1741954 - RNA, 18 nt, Human
ccugugacuucagcucug

SEQ ID NO: 1741955 - RNA, 17 nt, Human
ccugugaacugaacucu

SEQ ID NO: 1741956 - RNA, 16 nt, Human
ccugugaacugaacuc

SEQ ID NO: 1741957 - RNA, 15 nt, Human
ccuguaaucacagcu

SEQ ID NO: 1741958 - RNA, 17 nt, Human
ccuguccugccuaaggc

SEQ ID NO: 1741959 - RNA, 19 nt, Human
ccuguccugccuaaggcug

SEQ ID NO: 1741960 - RNA, 15 nt, Human
ccugguuuccugccc

SEQ ID NO: 1741961 - RNA, 16 nt, Human
ccugguuuccugcccu

SEQ ID NO: 1741962 - RNA, 14 nt, Human
ccugguuuccugcc

SEQ ID NO: 1741963 - RNA, 13 nt, Human
ccugguuuccugc

SEQ ID NO: 1741964 - RNA, 21 nt, Human
ccugguggcagugggagcugc

SEQ ID NO: 1741965 - RNA, 18 nt, Human
ccugggggcugggcagag

SEQ ID NO: 1741966 - RNA, 22 nt, Human
ccuggccucugcacuccccugc

SEQ ID NO: 1741967 - RNA, 20 nt, Human
ccugggccccaguuguauuu

SEQ ID NO: 1741968 - RNA, 21 nt, Human
ccuggccucugcacuccccug

SEQ ID NO: 1741969 - RNA, 20 nt, Human
ccuggccucugcacuccccu

SEQ ID NO: 1741970 - RNA, 22 nt, Human
ccuggccucaagugauucuccu

SEQ ID NO: 1741971 - RNA, 22 nt, Human
ccuggccuagcauacguacaca

SEQ ID NO: 1741972 - RNA, 13 nt, Human
ccucuuucccucc

SEQ ID NO: 1741973 - RNA, 16 nt, Human
ccucuuucccucccuu

SEQ ID NO: 1741974 - RNA, 21 nt, Human
ccugaguagcugggauuacag

SEQ ID NO: 1741975 - RNA, 19 nt, Human
ccugcacuugcagacucua

SEQ ID NO: 1741976 - RNA, 18 nt, Human
ccugcacuugcagacucu

SEQ ID NO: 1741977 - RNA, 17 nt, Human
ccugcacuugcagacuc

SEQ ID NO: 1741978 - RNA, 16 nt, Human
ccugcacuugcagacu

SEQ ID NO: 1741979 - RNA, 20 nt, Human
ccugcccaccuggccucugc

SEQ ID NO: 1741980 - RNA, 14 nt, Human
ccugcccaccuggc

SEQ ID NO: 1741981 - RNA, 13 nt, Human
ccugcccaccugg

SEQ ID NO: 1741982 - RNA, 12 nt, Human
ccugcccaccug

SEQ ID NO: 1741983 - RNA, 17 nt, Human
ccugccccagggcuccc

SEQ ID NO: 1741984 - RNA, 13 nt, Human
ccugcccaggccc

SEQ ID NO: 1741985 - RNA, 20 nt, Human
ccugcugcaguugccaguca

SEQ ID NO: 1741986 - RNA, 21 nt, Human
ccugcugcaguugccagucac

SEQ ID NO: 1741987 - RNA, 19 nt, Human
ccugcugcaguugccaguc

SEQ ID NO: 1741988 - RNA, 17 nt, Human
ccugcugcaguugccag

SEQ ID NO: 1741989 - RNA, 23 nt, Human
ccugccucgaacuggcugcaaag

SEQ ID NO: 1741990 - RNA, 21 nt, Human
ccugccucgaacuggcugcaa

SEQ ID NO: 1741991 - RNA, 19 nt, Human
ccugccucgaacuggcugc

SEQ ID NO: 1741992 - RNA, 11 nt, Human
ccucuuucccu

SEQ ID NO: 1741993 - RNA, 21 nt, Human
ccaaaacucuccucugcugcu

SEQ ID NO: 1741994 - RNA, 20 nt, Human
ccaaaacucuccucugcugc

SEQ ID NO: 1741995 - RNA, 22 nt, Human
cauuuuuuuuaagaaaaaggau

SEQ ID NO: 1741996 - RNA, 18 nt, Human
ccaaauguucaucaauga

SEQ ID NO: 1741997 - RNA, 18 nt, Human
ccaacucaccccagcccc

SEQ ID NO: 1741998 - RNA, 17 nt, Human
ccaacucaccccagccc

SEQ ID NO: 1741999 - RNA, 16 nt, Human
ccaacucaccccagcc

SEQ ID NO: 1742000 - RNA, 17 nt, Human
ccaaauguucaucaaug

SEQ ID NO: 1742001 - RNA, 14 nt, Human
ccaacucaccccag

SEQ ID NO: 1742002 - RNA, 23 nt, Human
ccaaauggaaaugggcagagcag

SEQ ID NO: 1742003 - RNA, 13 nt, Human
ccaagcucugcuc

SEQ ID NO: 1742004 - RNA, 12 nt, Human
ccaagcucugcu

SEQ ID NO: 1742005 - RNA, 18 nt, Human
ccaagcucugcuccucuc

SEQ ID NO: 1742006 - RNA, 14 nt, Human
ccaaugcacuuugu

SEQ ID NO: 1742007 - RNA, 15 nt, Human
ccaaugauggucacc

SEQ ID NO: 1742008 - RNA, 17 nt, Human
ccaauauuuaccagacc

SEQ ID NO: 1742009 - RNA, 17 nt, Human
ccaaugggagcucaugg

SEQ ID NO: 1742010 - RNA, 21 nt, Human
ccaccuuugaagaaguaagga

SEQ ID NO: 1742011 - RNA, 22 nt, Human
ccaccgcagacaggaccaggga

SEQ ID NO: 1742012 - RNA, 13 nt, Human
ccaccgcagacag

SEQ ID NO: 1742013 - RNA, 17 nt, Human
ccacgcccccacuggug

SEQ ID NO: 1742014 - RNA, 16 nt, Human
ccacgcccccacuggu

SEQ ID NO: 1742015 - RNA, 19 nt, Human
ccacgcccccacuggugac

SEQ ID NO: 1742016 - RNA, 18 nt, Human
ccacgcccccacugguga

SEQ ID NO: 1742017 - RNA, 13 nt, Human
ccacgcccggcua

SEQ ID NO: 1742018 - RNA, 23 nt, Human
ccacagcgcuggccgggaccccg

SEQ ID NO: 1742019 - RNA, 15 nt, Human
ccaccaucaagccac

SEQ ID NO: 1742020 - RNA, 14 nt, Human
ccaccaucaagcca

SEQ ID NO: 1742021 - RNA, 13 nt, Human
ccaccaucaagcc

SEQ ID NO: 1742022 - RNA, 14 nt, Human
ccacagcugcucaa

SEQ ID NO: 1742023 - RNA, 17 nt, Human
ccaccacacccagccca

SEQ ID NO: 1742024 - RNA, 17 nt, Human
ccacucccugcaaccug

SEQ ID NO: 1742025 - RNA, 19 nt, Human
caguggugguuuucuguuc

SEQ ID NO: 1742026 - RNA, 20 nt, Human
caguggugguuuucuguucu

SEQ ID NO: 1742027 - RNA, 21 nt, Human
caguggugguuuucuguucuu

SEQ ID NO: 1742028 - RNA, 22 nt, Human
caguggugguuuucuguucuuu

SEQ ID NO: 1742029 - RNA, 18 nt, Human
cauauucuguuggccagu

SEQ ID NO: 1742030 - RNA, 17 nt, Human
cauauucuguuggccag

SEQ ID NO: 1742031 - RNA, 16 nt, Human
cauauuaccacagaca

SEQ ID NO: 1742032 - RNA, 14 nt, Human
caucacuucccuac

SEQ ID NO: 1742033 - RNA, 12 nt, Human
caucacuucccu

SEQ ID NO: 1742034 - RNA, 15 nt, Human
cauccuggcacccgg

SEQ ID NO: 1742035 - RNA, 22 nt, Human
cauccuggcacccggccccugc

SEQ ID NO: 1742036 - RNA, 23 nt, Human
cauccuggcacccggccccugcu

SEQ ID NO: 1742037 - RNA, 14 nt, Human
caugcuacacacug

SEQ ID NO: 1742038 - RNA, 20 nt, Human
caugcuacacacugcauguu

SEQ ID NO: 1742039 - RNA, 23 nt, Human
caugcuacacacugcauguuugu

SEQ ID NO: 1742040 - RNA, 13 nt, Human
caugauguuuucc

SEQ ID NO: 1742041 - RNA, 17 nt, Human
caugggaaugaauguca

SEQ ID NO: 1742042 - RNA, 16 nt, Human
caugggaaugaauguc

SEQ ID NO: 1742043 - RNA, 15 nt, Human
caugggaaugaaugu

SEQ ID NO: 1742044 - RNA, 14 nt, Human
caugggaaugaaug

SEQ ID NO: 1742045 - RNA, 17 nt, Human
cauggcugccaauggga

SEQ ID NO: 1742046 - RNA, 13 nt, Human
cauucuccaccug

SEQ ID NO: 1742047 - RNA, 16 nt, Human
cauucuccaccugcca

SEQ ID NO: 1742048 - RNA, 14 nt, Human
cauucuccaccugc

SEQ ID NO: 1742049 - RNA, 23 nt, Human
caugucccuaccgagucucuucu

SEQ ID NO: 1742050 - RNA, 19 nt, Human
caugucaaacgugaaaaug

SEQ ID NO: 1742051 - RNA, 14 nt, Human
caugucaaacguga

SEQ ID NO: 1742052 - RNA, 22 nt, Human
caugucccuaccgagucucuuc

SEQ ID NO: 1742053 - RNA, 16 nt, Human
caugucccuaccgagu

SEQ ID NO: 1742054 - RNA, 15 nt, Human
cauguuggccaggcu

SEQ ID NO: 1742055 - RNA, 14 nt, Human
cauguuggccaggc

SEQ ID NO: 1742056 - RNA, 16 nt, Human
cauguuggccaggcug

SEQ ID NO: 1742057 - RNA, 15 nt, Human
cagauccccaagccu

SEQ ID NO: 1742058 - RNA, 19 nt, Human
cagauccccaagccuggca

SEQ ID NO: 1742059 - RNA, 17 nt, Human
cagagguugcagugagc

SEQ ID NO: 1742060 - RNA, 16 nt, Human
cagagguugcagugag

SEQ ID NO: 1742061 - RNA, 20 nt, Human
cagagguccacaacacacag

SEQ ID NO: 1742062 - RNA, 15 nt, Human
cagagguccacaaca

SEQ ID NO: 1742063 - RNA, 21 nt, Human
cagaguaauccaagcaaaugu

SEQ ID NO: 1742064 - RNA, 23 nt, Human
cagaggggguggccucccaacuc

SEQ ID NO: 1742065 - RNA, 22 nt, Human
cagaggggguggccucccaacu

SEQ ID NO: 1742066 - RNA, 19 nt, Human
cagauucuuuccugaggcu

SEQ ID NO: 1742067 - RNA, 18 nt, Human
cagauucuuuccugaggc

SEQ ID NO: 1742068 - RNA, 17 nt, Human
cagauucuuuccugagg

SEQ ID NO: 1742069 - RNA, 15 nt, Human
cagauucuuuccuga

SEQ ID NO: 1742070 - RNA, 17 nt, Human
cagcauagaaguaacuu

SEQ ID NO: 1742071 - RNA, 13 nt, Human
cagcauaauacuu

SEQ ID NO: 1742072 - RNA, 22 nt, Human
cagauucuuuccugaggcuggg

SEQ ID NO: 1742073 - RNA, 20 nt, Human
cagauucuuuccugaggcug

SEQ ID NO: 1742074 - RNA, 17 nt, Human
cagauugcaacaggcug

SEQ ID NO: 1742075 - RNA, 16 nt, Human
cagcacgauuucuguu

SEQ ID NO: 1742076 - RNA, 18 nt, Human
cagcacgauuucuguuua

SEQ ID NO: 1742077 - RNA, 19 nt, Human
cagcacgauuucuguuuag

SEQ ID NO: 1742078 - RNA, 20 nt, Human
cagcacgauuucuguuuaga

SEQ ID NO: 1742079 - RNA, 13 nt, Human
cagccaguaaaug

SEQ ID NO: 1742080 - RNA, 20 nt, Human
cagcaucauggagguuugaa

SEQ ID NO: 1742081 - RNA, 14 nt, Human
cagcugccugggau

SEQ ID NO: 1742082 - RNA, 13 nt, Human
cagcugccuggga

SEQ ID NO: 1742083 - RNA, 12 nt, Human
cagcugccugca

SEQ ID NO: 1742084 - RNA, 12 nt, Human
cagcugccuggg

SEQ ID NO: 1742085 - RNA, 19 nt, Human
cagcugagggugagugggu

SEQ ID NO: 1742086 - RNA, 20 nt, Human
cagcugugcucuggacaggc

SEQ ID NO: 1742087 - RNA, 15 nt, Human
cagcugccugggauc

SEQ ID NO: 1742088 - RNA, 24 nt, Human
cagcugugcucuggacaggcaugu

SEQ ID NO: 1742089 - RNA, 21 nt, Human
cagcuguuuaugcauagauaa

SEQ ID NO: 1742090 - RNA, 16 nt, Human
caggaaaagcugcuga

SEQ ID NO: 1742091 - RNA, 15 nt, Human
caggaaaagcugcug

SEQ ID NO: 1742092 - RNA, 18 nt, Human
caggaaaagcugcugaca

SEQ ID NO: 1742093 - RNA, 21 nt, Human
cagcggggacagcuccuucug

SEQ ID NO: 1742094 - RNA, 19 nt, Human
cagcggggacagcuccuuc

SEQ ID NO: 1742095 - RNA, 18 nt, Human
cagcggggacagcuccuu

SEQ ID NO: 1742096 - RNA, 12 nt, Human
cagccugcucca

SEQ ID NO: 1742097 - RNA, 15 nt, Human
cagccugcuccagcu

SEQ ID NO: 1742098 - RNA, 19 nt, Human
cagccugcuaauuccccag

SEQ ID NO: 1742099 - RNA, 20 nt, Human
cagccgagauagccaaggcc

SEQ ID NO: 1742100 - RNA, 19 nt, Human
cagccgagauagccaaggc

SEQ ID NO: 1742101 - RNA, 15 nt, Human
cagucacauuccaag

SEQ ID NO: 1742102 - RNA, 21 nt, Human
caggugcacaagcuccaagcu

SEQ ID NO: 1742103 - RNA, 22 nt, Human
caggugcacaagcuccaagcuc

SEQ ID NO: 1742104 - RNA, 23 nt, Human
cagguugucugaagucacugcac

SEQ ID NO: 1742105 - RNA, 22 nt, Human
cagguugucugaagucacugca

SEQ ID NO: 1742106 - RNA, 16 nt, Human
cagguuuuccugaaga

SEQ ID NO: 1742107 - RNA, 12 nt, Human
cagguuuuccug

SEQ ID NO: 1742108 - RNA, 14 nt, Human
cagguuuaagcugu

SEQ ID NO: 1742109 - RNA, 23 nt, Human
caguaaagaacaucccuccuggg

SEQ ID NO: 1742110 - RNA, 20 nt, Human
caggugcacaagcuccaagc

SEQ ID NO: 1742111 - RNA, 19 nt, Human
caggugcacaagcuccaag

SEQ ID NO: 1742112 - RNA, 18 nt, Human
caggugcacaagcuccaa

SEQ ID NO: 1742113 - RNA, 17 nt, Human
caggugcacaagcucca

SEQ ID NO: 1742114 - RNA, 23 nt, Human
caggugauccacccaccucagcc

SEQ ID NO: 1742115 - RNA, 22 nt, Human
caggugauccacccaccucagc

SEQ ID NO: 1742116 - RNA, 15 nt, Human
caggugcacaagcuc

SEQ ID NO: 1742117 - RNA, 21 nt, Human
caggugauccacccaccucag

SEQ ID NO: 1742118 - RNA, 18 nt, Human
cagucuggaaugcagugg

SEQ ID NO: 1742119 - RNA, 12 nt, Human
cagugcaucuca

SEQ ID NO: 1742120 - RNA, 17 nt, Human
cagucuggaaugcagug

SEQ ID NO: 1742121 - RNA, 15 nt, Human
cagucuggaaugcag

SEQ ID NO: 1742122 - RNA, 14 nt, Human
cagugcaugcuguc

SEQ ID NO: 1742123 - RNA, 13 nt, Human
cagugcaugcugu

SEQ ID NO: 1742124 - RNA, 18 nt, Human
cagugcaucucagcccac

SEQ ID NO: 1742125 - RNA, 17 nt, Human
cagugcaucucagccca

SEQ ID NO: 1742126 - RNA, 16 nt, Human
cagugcaucucagccc

SEQ ID NO: 1742127 - RNA, 15 nt, Human
cagugcaucucagcc

SEQ ID NO: 1742128 - RNA, 18 nt, Human
cagugcccacaggaucag

SEQ ID NO: 1742129 - RNA, 23 nt, Human
cagugggagcugccuguucagcu

SEQ ID NO: 1742130 - RNA, 20 nt, Human
cagugggagcugccuguuca

SEQ ID NO: 1742131 - RNA, 17 nt, Human
cagugcccacaggauca

SEQ ID NO: 1742132 - RNA, 15 nt, Human
cagugcccacaggau

SEQ ID NO: 1742133 - RNA, 13 nt, Human
cagugcccacagg

SEQ ID NO: 1742134 - RNA, 17 nt, Human
cagugcaugcugucccu

SEQ ID NO: 1742135 - RNA, 16 nt, Human
cagugcaugcuguccc

SEQ ID NO: 1742136 - RNA, 21 nt, Human
caguggugcgaucuggguuca

SEQ ID NO: 1742137 - RNA, 18 nt, Human
caguggugguuuucuguu

SEQ ID NO: 1742138 - RNA, 20 nt, Human
caguggggaggggcuguggg

SEQ ID NO: 1742139 - RNA, 20 nt, Human
caggcugggcuucaguggca

SEQ ID NO: 1742140 - RNA, 15 nt, Human
caggcugggagagcc

SEQ ID NO: 1742141 - RNA, 14 nt, Human
caggcugggagagc

SEQ ID NO: 1742142 - RNA, 12 nt, Human
caggcugggaga

SEQ ID NO: 1742143 - RNA, 22 nt, Human
caggcugggcuucaguggcagc

SEQ ID NO: 1742144 - RNA, 21 nt, Human
caggcugggcuucaguggcag

SEQ ID NO: 1742145 - RNA, 23 nt, Human
cagggcucagcggggacagcucc

SEQ ID NO: 1742146 - RNA, 21 nt, Human
cagggcucagcggggacagcu

SEQ ID NO: 1742147 - RNA, 19 nt, Human
caggggaaaaucagccugc

SEQ ID NO: 1742148 - RNA, 20 nt, Human
caggggaaaaucagccugcu

SEQ ID NO: 1742149 - RNA, 20 nt, Human
caggccaggcccucugccca

SEQ ID NO: 1742150 - RNA, 16 nt, Human
caggccagagggagug

SEQ ID NO: 1742151 - RNA, 19 nt, Human
caggccaggcccucugccc

SEQ ID NO: 1742152 - RNA, 18 nt, Human
caggccaggcccucugcc

SEQ ID NO: 1742153 - RNA, 17 nt, Human
caggccaggcccucugc

SEQ ID NO: 1742154 - RNA, 23 nt, Human
caggccagcugcuugggcuucau

SEQ ID NO: 1742155 - RNA, 21 nt, Human
caggccagcugcuugggcuuc

SEQ ID NO: 1742156 - RNA, 19 nt, Human
caggccagcugcuugggcu

SEQ ID NO: 1742157 - RNA, 17 nt, Human
caggccagcugcuuggg

SEQ ID NO: 1742158 - RNA, 15 nt, Human
caggccagagggagu

SEQ ID NO: 1742159 - RNA, 13 nt, Human
caggccagaggga

SEQ ID NO: 1742160 - RNA, 18 nt, Human
caggcagauacaggaaaa

SEQ ID NO: 1742161 - RNA, 15 nt, Human
caggccacuugauga

SEQ ID NO: 1742162 - RNA, 15 nt, Human
cagaacacauaauuc

SEQ ID NO: 1742163 - RNA, 17 nt, Human
cagaaauguguuaucac

SEQ ID NO: 1742164 - RNA, 22 nt, Human
cagaauauuagugaccucagcu

SEQ ID NO: 1742165 - RNA, 21 nt, Human
cagaaguuucugccgcagccc

SEQ ID NO: 1742166 - RNA, 20 nt, Human
cagaaguuucugccgcagcc

SEQ ID NO: 1742167 - RNA, 22 nt, Human
cagaaguuucugccgcagcccu

SEQ ID NO: 1742168 - RNA, 23 nt, Human
cagaaguuucugccgcagcccug

SEQ ID NO: 1742169 - RNA, 19 nt, Human
cacuguuucaaacuuuacu

SEQ ID NO: 1742170 - RNA, 17 nt, Human
cacuguugcccaggcug

SEQ ID NO: 1742171 - RNA, 19 nt, Human
cacuuagaaauugcauuuc

SEQ ID NO: 1742172 - RNA, 17 nt, Human
cacuuagaaauugcauu

SEQ ID NO: 1742173 - RNA, 17 nt, Human
cacuuggucugugagau

SEQ ID NO: 1742174 - RNA, 20 nt, Human
cacuuggucugugagaugcu

SEQ ID NO: 1742175 - RNA, 20 nt, Human
cacuuagaaauugcauuucc

SEQ ID NO: 1742176 - RNA, 22 nt, Human
cacugggcuuggggaccagagc

SEQ ID NO: 1742177 - RNA, 23 nt, Human
cacugggcuuggggaccagagcu

SEQ ID NO: 1742178 - RNA, 16 nt, Human
cacuguugcccaggcu

SEQ ID NO: 1742179 - RNA, 15 nt, Human
cacuguugcccaggc

SEQ ID NO: 1742180 - RNA, 22 nt, Human
cacugguggcccgacagccugg

SEQ ID NO: 1742181 - RNA, 21 nt, Human
cacugguggcccgacagccug

SEQ ID NO: 1742182 - RNA, 13 nt, Human
cacugguggcccg

SEQ ID NO: 1742183 - RNA, 17 nt, Human
cacuggugacaugucuu

SEQ ID NO: 1742184 - RNA, 23 nt, Human
cacuacggaauaguuggcuagga

SEQ ID NO: 1742185 - RNA, 17 nt, Human
cacggccaggccagagg

SEQ ID NO: 1742186 - RNA, 20 nt, Human
cacggagggugacgggggug

SEQ ID NO: 1742187 - RNA, 16 nt, Human
cacggccaggccagag

SEQ ID NO: 1742188 - RNA, 15 nt, Human
cacggccaggccaga

SEQ ID NO: 1742189 - RNA, 14 nt, Human
cacggccaggccag

SEQ ID NO: 1742190 - RNA, 19 nt, Human
cacucuuauugcccacgcu

SEQ ID NO: 1742191 - RNA, 18 nt, Human
cacucuuauugcccacgc

SEQ ID NO: 1742192 - RNA, 17 nt, Human
cacucuuauugcccacg

SEQ ID NO: 1742193 - RNA, 17 nt, Human
cacucuugaaaaaugca

SEQ ID NO: 1742194 - RNA, 21 nt, Human
caccuacaugagguacugaga

SEQ ID NO: 1742195 - RNA, 16 nt, Human
caccugccagggacag

SEQ ID NO: 1742196 - RNA, 14 nt, Human
caccugccagggac

SEQ ID NO: 1742197 - RNA, 20 nt, Human
caccuaccaccacgcccggc

SEQ ID NO: 1742198 - RNA, 13 nt, Human
caccuuggcucaa

SEQ ID NO: 1742199 - RNA, 14 nt, Human
caccuuggcucaag

SEQ ID NO: 1742200 - RNA, 19 nt, Human
caccuugacagggcacacc

SEQ ID NO: 1742201 - RNA, 17 nt, Human
caccugccagggacaga

SEQ ID NO: 1742202 - RNA, 15 nt, Human
caccuuuguccccac

SEQ ID NO: 1742203 - RNA, 14 nt, Human
caccuuugucccca

SEQ ID NO: 1742204 - RNA, 17 nt, Human
caccuuuguccccaccg

SEQ ID NO: 1742205 - RNA, 14 nt, Human
caccuuuauucugg

SEQ ID NO: 1742206 - RNA, 22 nt, Human
caaguaauccaccugccucggc

SEQ ID NO: 1742207 - RNA, 13 nt, Human
caaguauuauacc

SEQ ID NO: 1742208 - RNA, 12 nt, Human
caauuuaaaaaa

SEQ ID NO: 1742209 - RNA, 16 nt, Human
cacaagacccuugugg

SEQ ID NO: 1742210 - RNA, 14 nt, Human
cacaagacccuugu

SEQ ID NO: 1742211 - RNA, 14 nt, Human
cacaagccuucggc

SEQ ID NO: 1742212 - RNA, 23 nt, Human
caaugcuggcuguuggcuggggg

SEQ ID NO: 1742213 - RNA, 22 nt, Human
caaugcuggcuguuggcugggg

SEQ ID NO: 1742214 - RNA, 22 nt, Human
caaugcugugcccuaaagugua

SEQ ID NO: 1742215 - RNA, 17 nt, Human
caauucuccugccucag

SEQ ID NO: 1742216 - RNA, 19 nt, Human
caauucuccugccucagcc

SEQ ID NO: 1742217 - RNA, 22 nt, Human
cacaucagcacgauuucuguuu

SEQ ID NO: 1742218 - RNA, 17 nt, Human
cacaucuugcucugcug

SEQ ID NO: 1742219 - RNA, 16 nt, Human
cacaucuugcucugcu

SEQ ID NO: 1742220 - RNA, 20 nt, Human
cacaucagcacgauuucugu

SEQ ID NO: 1742221 - RNA, 21 nt, Human
cacaucagcacgauuucuguu

SEQ ID NO: 1742222 - RNA, 21 nt, Human
caccaacauacucccaucugu

SEQ ID NO: 1742223 - RNA, 20 nt, Human
caccaacauacucccaucug

SEQ ID NO: 1742224 - RNA, 18 nt, Human
cacauuuuucagauauaa

SEQ ID NO: 1742225 - RNA, 13 nt, Human
cacauuuuucuua

SEQ ID NO: 1742226 - RNA, 14 nt, Human
cacauuuuucuuag

SEQ ID NO: 1742227 - RNA, 17 nt, Human
cacauuuuuuaaaugca

SEQ ID NO: 1742228 - RNA, 21 nt, Human
cacauuuuuuaaaugcaccug

SEQ ID NO: 1742229 - RNA, 18 nt, Human
cacaucuugcucugcuga

SEQ ID NO: 1742230 - RNA, 19 nt, Human
cacaucuugcucugcugac

SEQ ID NO: 1742231 - RNA, 15 nt, Human
cacauuuuauuuuau

SEQ ID NO: 1742232 - RNA, 14 nt, Human
cacauuuuucagau

SEQ ID NO: 1742233 - RNA, 23 nt, Human
cacccaggagccccgaggccuuc

SEQ ID NO: 1742234 - RNA, 20 nt, Human
cacccaggagccccgaggcc

SEQ ID NO: 1742235 - RNA, 19 nt, Human
cacccagcccacuucugcc

SEQ ID NO: 1742236 - RNA, 24 nt, Human
cacccaggagccccgaggccuucu

SEQ ID NO: 1742237 - RNA, 15 nt, Human
caccagcagccugga

SEQ ID NO: 1742238 - RNA, 12 nt, Human
caccagcagccu

SEQ ID NO: 1742239 - RNA, 14 nt, Human
caccagcagccugg

SEQ ID NO: 1742240 - RNA, 23 nt, Human
caccaacauacucccaucuguga

SEQ ID NO: 1742241 - RNA, 17 nt, Human
cacccagcccacuucug

SEQ ID NO: 1742242 - RNA, 16 nt, Human
cacccagcccacuucu

SEQ ID NO: 1742243 - RNA, 19 nt, Human
cacaguauuacuucugcua

SEQ ID NO: 1742244 - RNA, 18 nt, Human
cacaguauuacuucugcu

SEQ ID NO: 1742245 - RNA, 16 nt, Human
cacaguauuacuucug

SEQ ID NO: 1742246 - RNA, 16 nt, Human
cacagcuaacauggaa

SEQ ID NO: 1742247 - RNA, 15 nt, Human
cacagcuaacaugga

SEQ ID NO: 1742248 - RNA, 22 nt, Human
cacagacccugcccugugggcc

SEQ ID NO: 1742249 - RNA, 18 nt, Human
cacagacauacuaaccag

SEQ ID NO: 1742250 - RNA, 21 nt, Human
cacagacccugcccugugggc

SEQ ID NO: 1742251 - RNA, 20 nt, Human
cacagacccugcccuguggg

SEQ ID NO: 1742252 - RNA, 19 nt, Human
cacagacccugcccugugg

SEQ ID NO: 1742253 - RNA, 10 nt, Human
cacagcucuu

SEQ ID NO: 1742254 - RNA, 23 nt, Human
cacagcucuguccugggagugag

SEQ ID NO: 1742255 - RNA, 20 nt, Human
cacagcucuguccugggagu

SEQ ID NO: 1742256 - RNA, 22 nt, Human
cacagcuaacauggaaguacua

SEQ ID NO: 1742257 - RNA, 18 nt, Human
auuuugauccaagcuggu

SEQ ID NO: 1742258 - RNA, 20 nt, Human
auuuguuucuuucucugagg

SEQ ID NO: 1742259 - RNA, 20 nt, Human
auuuguuugaacugauaaag

SEQ ID NO: 1742260 - RNA, 14 nt, Human
auuuguuugaacug

SEQ ID NO: 1742261 - RNA, 16 nt, Human
auuuguuugaacugau

SEQ ID NO: 1742262 - RNA, 13 nt, Human
auuuguuugaacu

SEQ ID NO: 1742263 - RNA, 20 nt, Human
auuuuuaaagaaaaguuuug

SEQ ID NO: 1742264 - RNA, 17 nt, Human
auuuuuuuuuccuucag

SEQ ID NO: 1742265 - RNA, 13 nt, Human
auuuuuaagugcu

SEQ ID NO: 1742266 - RNA, 16 nt, Human
auuuuuuuuuccuuca

SEQ ID NO: 1742267 - RNA, 13 nt, Human
auuuuuuuuuccu

SEQ ID NO: 1742268 - RNA, 12 nt, Human
auuuuuuuuucc

SEQ ID NO: 1742269 - RNA, 19 nt, Human
caaaagcugggcagguugg

SEQ ID NO: 1742270 - RNA, 15 nt, Human
caaaagcugggcagg

SEQ ID NO: 1742271 - RNA, 18 nt, Human
caaccacugcgaccacaa

SEQ ID NO: 1742272 - RNA, 17 nt, Human
caacuaugauuuggaaa

SEQ ID NO: 1742273 - RNA, 22 nt, Human
caacuaugauuuggaaaauaaa

SEQ ID NO: 1742274 - RNA, 19 nt, Human
caacuaugauuuggaaaau

SEQ ID NO: 1742275 - RNA, 18 nt, Human
caacuaugauuuggaaaa

SEQ ID NO: 1742276 - RNA, 17 nt, Human
caacccccagccugcua

SEQ ID NO: 1742277 - RNA, 16 nt, Human
caacccccagccugcu

SEQ ID NO: 1742278 - RNA, 15 nt, Human
caacccccagccugc

SEQ ID NO: 1742279 - RNA, 19 nt, Human
caacccaaauguucaucaa

SEQ ID NO: 1742280 - RNA, 14 nt, Human
caaccauuccccau

SEQ ID NO: 1742281 - RNA, 14 nt, Human
caaccauuugaaac

SEQ ID NO: 1742282 - RNA, 15 nt, Human
caacucaccccagcc

SEQ ID NO: 1742283 - RNA, 13 nt, Human
caacucaccccag

SEQ ID NO: 1742284 - RNA, 16 nt, Human
caacucaccccagccc

SEQ ID NO: 1742285 - RNA, 17 nt, Human
caacucaccccagcccc

SEQ ID NO: 1742286 - RNA, 19 nt, Human
caagacccuugugguccca

SEQ ID NO: 1742287 - RNA, 18 nt, Human
caagacccuugugguccc

SEQ ID NO: 1742288 - RNA, 22 nt, Human
caagacccuuguggucccaccc

SEQ ID NO: 1742289 - RNA, 23 nt, Human
caagacccuuguggucccacccc

SEQ ID NO: 1742290 - RNA, 13 nt, Human
caagacacaguga

SEQ ID NO: 1742291 - RNA, 21 nt, Human
caaaguacacuguuucaaacu

SEQ ID NO: 1742292 - RNA, 16 nt, Human
caaaguacacuguuuc

SEQ ID NO: 1742293 - RNA, 20 nt, Human
caaaguacacuguuucaaac

SEQ ID NO: 1742294 - RNA, 14 nt, Human
caaagaugcagccg

SEQ ID NO: 1742295 - RNA, 13 nt, Human
caaagaugcagcc

SEQ ID NO: 1742296 - RNA, 17 nt, Human
caaaucagcugcuacua

SEQ ID NO: 1742297 - RNA, 22 nt, Human
caaauccagccugcugccugcu

SEQ ID NO: 1742298 - RNA, 23 nt, Human
caacaaaccuguuucugcagcca

SEQ ID NO: 1742299 - RNA, 21 nt, Human
caaaucugcuuuuuaaagaau

SEQ ID NO: 1742300 - RNA, 13 nt, Human
caaaugcagcuuu

SEQ ID NO: 1742301 - RNA, 20 nt, Human
caacaccuuguuucccucuc

SEQ ID NO: 1742302 - RNA, 22 nt, Human
caacaccucugcacaagcugca

SEQ ID NO: 1742303 - RNA, 13 nt, Human
caacacaaagauu

SEQ ID NO: 1742304 - RNA, 18 nt, Human
auucacaagacccaaaag

SEQ ID NO: 1742305 - RNA, 15 nt, Human
auuauguguguuuua

SEQ ID NO: 1742306 - RNA, 21 nt, Human
auuauguguguuuuaaaauga

SEQ ID NO: 1742307 - RNA, 20 nt, Human
auuauguguguuuuaaaaug

SEQ ID NO: 1742308 - RNA, 20 nt, Human
auuaaauucuugcaaaguau

SEQ ID NO: 1742309 - RNA, 14 nt, Human
auuaaauucuugca

SEQ ID NO: 1742310 - RNA, 18 nt, Human
auuaaauucuugcaaagu

SEQ ID NO: 1742311 - RNA, 19 nt, Human
auucauauuuacuucuuau

SEQ ID NO: 1742312 - RNA, 18 nt, Human
auucauauuuacuucuua

SEQ ID NO: 1742313 - RNA, 20 nt, Human
auucauauuuacuucuuaua

SEQ ID NO: 1742314 - RNA, 17 nt, Human
auucuugccaaauauaa

SEQ ID NO: 1742315 - RNA, 18 nt, Human
auucugaccuuaaaugca

SEQ ID NO: 1742316 - RNA, 21 nt, Human
auuccugaugcuucuucagag

SEQ ID NO: 1742317 - RNA, 19 nt, Human
auucucuccuguaccucuu

SEQ ID NO: 1742318 - RNA, 21 nt, Human
auucucuccuguaccucuuga

SEQ ID NO: 1742319 - RNA, 22 nt, Human
auucuuuccugaggcugggcuc

SEQ ID NO: 1742320 - RNA, 17 nt, Human
auucuuuccugaggcug

SEQ ID NO: 1742321 - RNA, 17 nt, Human
auugauccagaaagaaa

SEQ ID NO: 1742322 - RNA, 16 nt, Human
auugauccagaaagaa

SEQ ID NO: 1742323 - RNA, 23 nt, Human
auuguaauaggcguaacuaauuu

SEQ ID NO: 1742324 - RNA, 16 nt, Human
auuguaaggaaugauu

SEQ ID NO: 1742325 - RNA, 15 nt, Human
auuguaaggaaugau

SEQ ID NO: 1742326 - RNA, 18 nt, Human
auuguaagcaugcacaaa

SEQ ID NO: 1742327 - RNA, 18 nt, Human
auugaugggauuugguca

SEQ ID NO: 1742328 - RNA, 13 nt, Human
auuguaaaagcau

SEQ ID NO: 1742329 - RNA, 13 nt, Human
auuguaaaauggu

SEQ ID NO: 1742330 - RNA, 19 nt, Human
auuguaaaagcauuuugua

SEQ ID NO: 1742331 - RNA, 20 nt, Human
auuguaaaagcauuuuguaa

SEQ ID NO: 1742332 - RNA, 21 nt, Human
auuguaaaagcauuuuguaau

SEQ ID NO: 1742333 - RNA, 23 nt, Human
auuguaaaagcauuuuguaauaa

SEQ ID NO: 1742334 - RNA, 22 nt, Human
auugauccagaaagaaaacuug

SEQ ID NO: 1742335 - RNA, 19 nt, Human
auugauccagaaagaaaac

SEQ ID NO: 1742336 - RNA, 18 nt, Human
auugauccagaaagaaaa

SEQ ID NO: 1742337 - RNA, 13 nt, Human
auuguacaguuuu

SEQ ID NO: 1742338 - RNA, 19 nt, Human
auuguucuuaguuugcagu

SEQ ID NO: 1742339 - RNA, 16 nt, Human
auuucagcagcugcag

SEQ ID NO: 1742340 - RNA, 15 nt, Human
auuucagauuuguga

SEQ ID NO: 1742341 - RNA, 17 nt, Human
auuuaauggggaggaca

SEQ ID NO: 1742342 - RNA, 15 nt, Human
auuuaaugaaagacu

SEQ ID NO: 1742343 - RNA, 14 nt, Human
auuuaaugaaagac

SEQ ID NO: 1742344 - RNA, 12 nt, Human
auuucuguuuag

SEQ ID NO: 1742345 - RNA, 14 nt, Human
auuucuguuuagau

SEQ ID NO: 1742346 - RNA, 16 nt, Human
auuucuguuuagauaa

SEQ ID NO: 1742347 - RNA, 21 nt, Human
ggaucuuuggacagaagcagc

SEQ ID NO: 1742348 - RNA, 18 nt, Human
ggaucucuugagccuggg

SEQ ID NO: 1742349 - RNA, 23 nt, Human
ggauccugagccagauuucacuc

SEQ ID NO: 1742350 - RNA, 20 nt, Human
ggauccugagccagauuuca

SEQ ID NO: 1742351 - RNA, 19 nt, Human
ggauccugagccagauuuc

SEQ ID NO: 1742352 - RNA, 18 nt, Human
ggauccugagccagauuu

SEQ ID NO: 1742353 - RNA, 16 nt, Human
ggauccugagccagau

SEQ ID NO: 1742354 - RNA, 15 nt, Human
ggauccugagccaga

SEQ ID NO: 1742355 - RNA, 16 nt, Human
ggaguucaucuugaau

SEQ ID NO: 1742356 - RNA, 20 nt, Human
ggauuguccccgacccuugc

SEQ ID NO: 1742357 - RNA, 16 nt, Human
ggauuguccccgaccc

SEQ ID NO: 1742358 - RNA, 12 nt, Human
ggauuuaacaga

SEQ ID NO: 1742359 - RNA, 22 nt, Human
ggauuuaacagaaauguacagc

SEQ ID NO: 1742360 - RNA, 16 nt, Human
ggauuuaacagaaaug

SEQ ID NO: 1742361 - RNA, 17 nt, Human
ggauuuaacagaaaugu

SEQ ID NO: 1742362 - RNA, 14 nt, Human
ggaugaaaaaauaa

SEQ ID NO: 1742363 - RNA, 22 nt, Human
ggaucuuuggacagaagcagcu

SEQ ID NO: 1742364 - RNA, 13 nt, Human
ggauuguccccga

SEQ ID NO: 1742365 - RNA, 14 nt, Human
ggauuguaguccca

SEQ ID NO: 1742366 - RNA, 15 nt, Human
ggaguggccacagaa

SEQ ID NO: 1742367 - RNA, 22 nt, Human
ggagugggcccaaugcacuuug

SEQ ID NO: 1742368 - RNA, 12 nt, Human
ggagugggccca

SEQ ID NO: 1742369 - RNA, 16 nt, Human
ggaguggccacagaaa

SEQ ID NO: 1742370 - RNA, 15 nt, Human
ggaggcucuggagcc

SEQ ID NO: 1742371 - RNA, 14 nt, Human
ggaggggggaggug

SEQ ID NO: 1742372 - RNA, 13 nt, Human
ggaggggggaggu

SEQ ID NO: 1742373 - RNA, 23 nt, Human
ggaggugggauccuccaggugca

SEQ ID NO: 1742374 - RNA, 22 nt, Human
ggaggugggauccuccaggugc

SEQ ID NO: 1742375 - RNA, 21 nt, Human
ggagggugacgggggugaacu

SEQ ID NO: 1742376 - RNA, 22 nt, Human
ggagguaaggaauaccuguccc

SEQ ID NO: 1742377 - RNA, 19 nt, Human
ggccaaaggaagcacaugc

SEQ ID NO: 1742378 - RNA, 21 nt, Human
ggccaaaggaagcacaugccu

SEQ ID NO: 1742379 - RNA, 17 nt, Human
ggcauuuguuucuuucu

SEQ ID NO: 1742380 - RNA, 23 nt, Human
ggcauuuguuucuuucucugagg

SEQ ID NO: 1742381 - RNA, 16 nt, Human
ggccaaaggaagcaca

SEQ ID NO: 1742382 - RNA, 14 nt, Human
ggccaaaggaagca

SEQ ID NO: 1742383 - RNA, 17 nt, Human
ggcauuuguuugaacug

SEQ ID NO: 1742384 - RNA, 19 nt, Human
ggccagagggagugacaga

SEQ ID NO: 1742385 - RNA, 17 nt, Human
ggccagagggagugaca

SEQ ID NO: 1742386 - RNA, 18 nt, Human
ggccagagacacaagccu

SEQ ID NO: 1742387 - RNA, 17 nt, Human
ggccagagacacaagcc

SEQ ID NO: 1742388 - RNA, 14 nt, Human
ggcauuugcugaau

SEQ ID NO: 1742389 - RNA, 20 nt, Human
ggcaucgcaauguaagacuc

SEQ ID NO: 1742390 - RNA, 15 nt, Human
ggcaaaaaggcagga

SEQ ID NO: 1742391 - RNA, 14 nt, Human
ggauuuuugucuug

SEQ ID NO: 1742392 - RNA, 16 nt, Human
ggauuuuugucuugug

SEQ ID NO: 1742393 - RNA, 18 nt, Human
ggcacaccgggcacucag

SEQ ID NO: 1742394 - RNA, 16 nt, Human
ggcacugcuuccagug

SEQ ID NO: 1742395 - RNA, 18 nt, Human
ggcacaucagcacgauuu

SEQ ID NO: 1742396 - RNA, 21 nt, Human
ggcagccccauucugccugcc

SEQ ID NO: 1742397 - RNA, 20 nt, Human
ggcagccccauucugccugc

SEQ ID NO: 1742398 - RNA, 16 nt, Human
ggcagccccauucugc

SEQ ID NO: 1742399 - RNA, 22 nt, Human
ggcagccccauucugccugccc

SEQ ID NO: 1742400 - RNA, 23 nt, Human
ggcagccccauucugccugccca

SEQ ID NO: 1742401 - RNA, 16 nt, Human
ggcagccucuucaaaa

SEQ ID NO: 1742402 - RNA, 20 nt, Human
ggcacugcuuccagugaggc

SEQ ID NO: 1742403 - RNA, 22 nt, Human
ggcacugcuuccagugaggcuc

SEQ ID NO: 1742404 - RNA, 13 nt, Human
ggcagccaggcca

SEQ ID NO: 1742405 - RNA, 14 nt, Human
ggcagccaggccac

SEQ ID NO: 1742406 - RNA, 18 nt, Human
ggcaggaggaucacuuga

SEQ ID NO: 1742407 - RNA, 10 nt, Human
ggcagggagg

SEQ ID NO: 1742408 - RNA, 18 nt, Human
ggcagggagggccugggc

SEQ ID NO: 1742409 - RNA, 17 nt, Human
ggcagggagggccuggg

SEQ ID NO: 1742410 - RNA, 20 nt, Human
ggcagggagggccugggccc

SEQ ID NO: 1742411 - RNA, 19 nt, Human
ggcagggagggccugggcc

SEQ ID NO: 1742412 - RNA, 20 nt, Human
ggcuaagcuucacuguaaaa

SEQ ID NO: 1742413 - RNA, 18 nt, Human
ggcgugagaccugccccu

SEQ ID NO: 1742414 - RNA, 17 nt, Human
ggcgugagaccugcccc

SEQ ID NO: 1742415 - RNA, 16 nt, Human
ggcgugagaccugccc

SEQ ID NO: 1742416 - RNA, 14 nt, Human
ggcgugagaccugc

SEQ ID NO: 1742417 - RNA, 18 nt, Human
ggccuucggccuccaucc

SEQ ID NO: 1742418 - RNA, 22 nt, Human
ggccuucggccuccauccugag

SEQ ID NO: 1742419 - RNA, 16 nt, Human
ggccuucggccuccau

SEQ ID NO: 1742420 - RNA, 16 nt, Human
ggcuaauguacugcau

SEQ ID NO: 1742421 - RNA, 20 nt, Human
ggcuaagugauccucccacc

SEQ ID NO: 1742422 - RNA, 18 nt, Human
ggcuaauuuuuguuuugu

SEQ ID NO: 1742423 - RNA, 13 nt, Human
ggcuaccuuugua

SEQ ID NO: 1742424 - RNA, 22 nt, Human
ggcuacaccuuagccugcccuc

SEQ ID NO: 1742425 - RNA, 23 nt, Human
ggcuacaccuuagccugcccucc

SEQ ID NO: 1742426 - RNA, 14 nt, Human
ggcuaccuuuguau

SEQ ID NO: 1742427 - RNA, 16 nt, Human
ggcuagagguucaaag

SEQ ID NO: 1742428 - RNA, 16 nt, Human
ggccugcaagggagug

SEQ ID NO: 1742429 - RNA, 11 nt, Human
ggccugccugu

SEQ ID NO: 1742430 - RNA, 15 nt, Human
ggccuggccagaugc

SEQ ID NO: 1742431 - RNA, 12 nt, Human
ggccuggccaga

SEQ ID NO: 1742432 - RNA, 15 nt, Human
ggccuggcagccgug

SEQ ID NO: 1742433 - RNA, 14 nt, Human
ggccuggcagccgu

SEQ ID NO: 1742434 - RNA, 16 nt, Human
ggccuggccagaugca

SEQ ID NO: 1742435 - RNA, 17 nt, Human
ggccuucagggagugag

SEQ ID NO: 1742436 - RNA, 19 nt, Human
ggccucccaacucacccca

SEQ ID NO: 1742437 - RNA, 18 nt, Human
ggccucccaacucacccc

SEQ ID NO: 1742438 - RNA, 17 nt, Human
ggccucccaacucaccc

SEQ ID NO: 1742439 - RNA, 13 nt, Human
ggccucagugcca

SEQ ID NO: 1742440 - RNA, 22 nt, Human
ggccucccaacucaccccagcc

SEQ ID NO: 1742441 - RNA, 20 nt, Human
ggccucccaacucaccccag

SEQ ID NO: 1742442 - RNA, 23 nt, Human
ggccucccaacucaccccagccc

SEQ ID NO: 1742443 - RNA, 16 nt, Human
ggccagaugcaccagc

SEQ ID NO: 1742444 - RNA, 15 nt, Human
ggccagaugcaccag

SEQ ID NO: 1742445 - RNA, 22 nt, Human
ggccagagggagugacagaggc

SEQ ID NO: 1742446 - RNA, 17 nt, Human
ggccagaugcaccagcc

SEQ ID NO: 1742447 - RNA, 21 nt, Human
ggccccugccucucugcaggu

SEQ ID NO: 1742448 - RNA, 19 nt, Human
ggccccugccucucugcag

SEQ ID NO: 1742449 - RNA, 18 nt, Human
ggccccugccucucugca

SEQ ID NO: 1742450 - RNA, 17 nt, Human
ggccccugccucucugc

SEQ ID NO: 1742451 - RNA, 13 nt, Human
ggccccugccucu

SEQ ID NO: 1742452 - RNA, 13 nt, Human
aaaaauacaaaaa

SEQ ID NO: 1742453 - RNA, 22 nt, Human
ggcuggguucuacccaggugcu

SEQ ID NO: 1742454 - RNA, 14 nt, Human
ggcuggguuggagg

SEQ ID NO: 1742455 - RNA, 14 nt, Human
aaaaaggaggaaga

SEQ ID NO: 1742456 - RNA, 12 nt, Human
aaaaaggcagga

SEQ ID NO: 1742457 - RNA, 21 nt, Human
aaaaaggaugcacagaguugu

SEQ ID NO: 1742458 - RNA, 14 nt, Human
aaaaauaaaaaaca

SEQ ID NO: 1742459 - RNA, 22 nt, Human
aaaaaacugcugacuguuuucu

SEQ ID NO: 1742460 - RNA, 15 nt, Human
ggcuggccuggcccc

SEQ ID NO: 1742461 - RNA, 14 nt, Human
ggcuggccuggccc

SEQ ID NO: 1742462 - RNA, 13 nt, Human
ggcuggccuggcc

SEQ ID NO: 1742463 - RNA, 17 nt, Human
ggcuggcccugcccugg

SEQ ID NO: 1742464 - RNA, 15 nt, Human
ggcucacugcagccu

SEQ ID NO: 1742465 - RNA, 14 nt, Human
ggcucacugcagcc

SEQ ID NO: 1742466 - RNA, 13 nt, Human
ggcucacugcagc

SEQ ID NO: 1742467 - RNA, 20 nt, Human
ggcucuuccaggcugggaga

SEQ ID NO: 1742468 - RNA, 18 nt, Human
ggcucuuccaggcuggga

SEQ ID NO: 1742469 - RNA, 17 nt, Human
ggcucuuccaggcuggg

SEQ ID NO: 1742470 - RNA, 15 nt, Human
ggcucuuccaggcug

SEQ ID NO: 1742471 - RNA, 13 nt, Human
ggcucccuuccca

SEQ ID NO: 1742472 - RNA, 18 nt, Human
ggcugcccuuucugggca

SEQ ID NO: 1742473 - RNA, 14 nt, Human
ggcugcccuuucug

SEQ ID NO: 1742474 - RNA, 11 nt, Human
ggcugcccuuu

SEQ ID NO: 1742475 - RNA, 10 nt, Human
ggcugcccuu

SEQ ID NO: 1742476 - RNA, 12 nt, Human
ggcugcccuggu

SEQ ID NO: 1742477 - RNA, 15 nt, Human
aaagcagcguuucua

SEQ ID NO: 1742478 - RNA, 16 nt, Human
aaagcuaggccuggcc

SEQ ID NO: 1742479 - RNA, 14 nt, Human
aaagcuaggccugg

SEQ ID NO: 1742480 - RNA, 16 nt, Human
aaagcagugcaugcug

SEQ ID NO: 1742481 - RNA, 14 nt, Human
aaagcuagaaauga

SEQ ID NO: 1742482 - RNA, 13 nt, Human
aaagcagugcaug

SEQ ID NO: 1742483 - RNA, 13 nt, Human
aaagcugccagcc

SEQ ID NO: 1742484 - RNA, 12 nt, Human
aaagcugccagc

SEQ ID NO: 1742485 - RNA, 17 nt, Human
aaagcuaggccuggcca

SEQ ID NO: 1742486 - RNA, 22 nt, Human
aaagcugccagccgagauagcc

SEQ ID NO: 1742487 - RNA, 14 nt, Human
aaagcuguguggca

SEQ ID NO: 1742488 - RNA, 16 nt, Human
aaagcagaacagugau

SEQ ID NO: 1742489 - RNA, 20 nt, Human
gguggcaccagcagccugga

SEQ ID NO: 1742490 - RNA, 14 nt, Human
gguggcaccagcag

SEQ ID NO: 1742491 - RNA, 12 nt, Human
aaacuuuaugcu

SEQ ID NO: 1742492 - RNA, 19 nt, Human
aaacuuuaugcuaagugaa

SEQ ID NO: 1742493 - RNA, 20 nt, Human
aaagggcccagagagggugg

SEQ ID NO: 1742494 - RNA, 18 nt, Human
aaagguucaugcaaacuu

SEQ ID NO: 1742495 - RNA, 20 nt, Human
ggugggaggaucucuugagc

SEQ ID NO: 1742496 - RNA, 17 nt, Human
ggugggacacccuguga

SEQ ID NO: 1742497 - RNA, 16 nt, Human
ggugggacacccugug

SEQ ID NO: 1742498 - RNA, 13 nt, Human
ggugggacacccu

SEQ ID NO: 1742499 - RNA, 19 nt, Human
gguggggaccucaggccug

SEQ ID NO: 1742500 - RNA, 18 nt, Human
gguggcuggguuggaggg

SEQ ID NO: 1742501 - RNA, 21 nt, Human
aaaguaaaaacaaagaaauua

SEQ ID NO: 1742502 - RNA, 17 nt, Human
gguguuuccuggcacug

SEQ ID NO: 1742503 - RNA, 19 nt, Human
gguguuuccuggcacugcu

SEQ ID NO: 1742504 - RNA, 17 nt, Human
gguucccauuugcuccu

SEQ ID NO: 1742505 - RNA, 22 nt, Human
gguucccuuuuuuggcugcuga

SEQ ID NO: 1742506 - RNA, 23 nt, Human
gguucccuuugacgccaucccag

SEQ ID NO: 1742507 - RNA, 12 nt, Human
gguguggagaag

SEQ ID NO: 1742508 - RNA, 23 nt, Human
gguguggagaagcggcuggcagc

SEQ ID NO: 1742509 - RNA, 14 nt, Human
gguguggagaagcg

SEQ ID NO: 1742510 - RNA, 13 nt, Human
ggugggggccucg

SEQ ID NO: 1742511 - RNA, 13 nt, Human
ggugugggggaag

SEQ ID NO: 1742512 - RNA, 11 nt, Human
gguguggggga

SEQ ID NO: 1742513 - RNA, 21 nt, Human
aaaguauccugcuucugauau

SEQ ID NO: 1742514 - RNA, 14 nt, Human
aaaguguauuuuuu

SEQ ID NO: 1742515 - RNA, 21 nt, Human
aaaguguauuuuuuuacuaau

SEQ ID NO: 1742516 - RNA, 16 nt, Human
aaagugguauagaaau

SEQ ID NO: 1742517 - RNA, 17 nt, Human
aaagugguauagaaaug

SEQ ID NO: 1742518 - RNA, 20 nt, Human
aaagugguauagaaaugcug

SEQ ID NO: 1742519 - RNA, 19 nt, Human
aaaguacacuguuucaaac

SEQ ID NO: 1742520 - RNA, 18 nt, Human
aaaguacacuguuucaaa

SEQ ID NO: 1742521 - RNA, 22 nt, Human
aaaguagaagucuuagauguau

SEQ ID NO: 1742522 - RNA, 20 nt, Human
aaaguagaagucuuagaugu

SEQ ID NO: 1742523 - RNA, 21 nt, Human
aaaguaucccuacuguaauuu

SEQ ID NO: 1742524 - RNA, 20 nt, Human
gguuuguaaauuaacuuuua

SEQ ID NO: 1742525 - RNA, 16 nt, Human
gguuucuaaagcugcc

SEQ ID NO: 1742526 - RNA, 19 nt, Human
gguuuccugcccugggagg

SEQ ID NO: 1742527 - RNA, 16 nt, Human
gguuuccugcccuggg

SEQ ID NO: 1742528 - RNA, 22 nt, Human
gguuucuaaagcugccagccga

SEQ ID NO: 1742529 - RNA, 15 nt, Human
gguuuccugcccugg

SEQ ID NO: 1742530 - RNA, 13 nt, Human
gguuuccugcccu

SEQ ID NO: 1742531 - RNA, 12 nt, Human
gguuuccugccc

SEQ ID NO: 1742532 - RNA, 15 nt, Human
aaauauaggaacuua

SEQ ID NO: 1742533 - RNA, 20 nt, Human
aaauaccagccaguaaaugg

SEQ ID NO: 1742534 - RNA, 21 nt, Human
aaauaccagccaguaaauggg

SEQ ID NO: 1742535 - RNA, 16 nt, Human
guacacacacauacac

SEQ ID NO: 1742536 - RNA, 19 nt, Human
aaauaccagccaguaaaug

SEQ ID NO: 1742537 - RNA, 18 nt, Human
aaauauaugcuaagucuu

SEQ ID NO: 1742538 - RNA, 14 nt, Human
aaauauauaucaaa

SEQ ID NO: 1742539 - RNA, 22 nt, Human
aaauauauuuuaagacgaaaca

SEQ ID NO: 1742540 - RNA, 16 nt, Human
aaauauauuuuaagac

SEQ ID NO: 1742541 - RNA, 23 nt, Human
aaaucagccugcuccagcuguuc

SEQ ID NO: 1742542 - RNA, 21 nt, Human
aaaucagccugcuccagcugu

SEQ ID NO: 1742543 - RNA, 19 nt, Human
aaaucagccugcuccagcu

SEQ ID NO: 1742544 - RNA, 19 nt, Human
aaauauuaagaaagacuau

SEQ ID NO: 1742545 - RNA, 20 nt, Human
aaauauuccugcauuuguga

SEQ ID NO: 1742546 - RNA, 19 nt, Human
aaauauggucuuuugguua

SEQ ID NO: 1742547 - RNA, 23 nt, Human
aaauaucugaaaauguaugugua

SEQ ID NO: 1742548 - RNA, 22 nt, Human
aaauaucugaaaauguaugugu

SEQ ID NO: 1742549 - RNA, 21 nt, Human
aaauaucugaaaauguaugug

SEQ ID NO: 1742550 - RNA, 19 nt, Human
aaauaucugaaaauguaug

SEQ ID NO: 1742551 - RNA, 18 nt, Human
aaauaucugaaaauguau

SEQ ID NO: 1742552 - RNA, 17 nt, Human
aaauaucugaaaaugua

SEQ ID NO: 1742553 - RNA, 14 nt, Human
aaauaucugaaaau

SEQ ID NO: 1742554 - RNA, 12 nt, Human
aaauaucugaaa

SEQ ID NO: 1742555 - RNA, 13 nt, Human
guaacuaaaauaa

SEQ ID NO: 1742556 - RNA, 15 nt, Human
guaacuaaaauaauu

SEQ ID NO: 1742557 - RNA, 20 nt, Human
guaacuaaaauaauuuugua

SEQ ID NO: 1742558 - RNA, 22 nt, Human
guaacuaaaauaauuuuguaau

SEQ ID NO: 1742559 - RNA, 12 nt, Human
guaauaauaaag

SEQ ID NO: 1742560 - RNA, 16 nt, Human
guaauaauaaagaaua

SEQ ID NO: 1742561 - RNA, 15 nt, Human
guaaucgaccugccu

SEQ ID NO: 1742562 - RNA, 23 nt, Human
guaauccuagcacuuugggaggc

SEQ ID NO: 1742563 - RNA, 15 nt, Human
guaauuugugauaca

SEQ ID NO: 1742564 - RNA, 17 nt, Human
guaaucgaccugccucg

SEQ ID NO: 1742565 - RNA, 17 nt, Human
guaauuugugauacaau

SEQ ID NO: 1742566 - RNA, 20 nt, Human
guaauuugugauacaaugcu

SEQ ID NO: 1742567 - RNA, 22 nt, Human
guaauuugugauacaaugcugu

SEQ ID NO: 1742568 - RNA, 21 nt, Human
guaauuuuuuuaucgucacug

SEQ ID NO: 1742569 - RNA, 22 nt, Human
guacaaccuguucugcuuuccu

SEQ ID NO: 1742570 - RNA, 22 nt, Human
aaaguguauuuuuuuacuaaua

SEQ ID NO: 1742571 - RNA, 22 nt, Human
aaauaaugugaaacuggauuaa

SEQ ID NO: 1742572 - RNA, 14 nt, Human
aaauaaugugaaac

SEQ ID NO: 1742573 - RNA, 13 nt, Human
guaaaccuuuuau

SEQ ID NO: 1742574 - RNA, 20 nt, Human
guaacaggaaaauuuuaaaa

SEQ ID NO: 1742575 - RNA, 19 nt, Human
guaacaggaaaauuuuaaa

SEQ ID NO: 1742576 - RNA, 16 nt, Human
guaacaagccacccca

SEQ ID NO: 1742577 - RNA, 15 nt, Human
guaaagcuagaaaug

SEQ ID NO: 1742578 - RNA, 16 nt, Human
guaaagcuagaaauga

SEQ ID NO: 1742579 - RNA, 23 nt, Human
ggguuuugccauguuggccaggc

SEQ ID NO: 1742580 - RNA, 20 nt, Human
ggguuuugccauguuggcca

SEQ ID NO: 1742581 - RNA, 19 nt, Human
gggugggacacccugugau

SEQ ID NO: 1742582 - RNA, 15 nt, Human
gggugguggugauag

SEQ ID NO: 1742583 - RNA, 13 nt, Human
gguaacaggcaga

SEQ ID NO: 1742584 - RNA, 22 nt, Human
gguaaaucagacuaugaaguuu

SEQ ID NO: 1742585 - RNA, 21 nt, Human
aaacguggcugcuucaaggau

SEQ ID NO: 1742586 - RNA, 18 nt, Human
gggugggacacccuguga

SEQ ID NO: 1742587 - RNA, 15 nt, Human
gggugggacacccug

SEQ ID NO: 1742588 - RNA, 14 nt, Human
aaacuuaaucuaaa

SEQ ID NO: 1742589 - RNA, 14 nt, Human
gguaucaggugcug

SEQ ID NO: 1742590 - RNA, 20 nt, Human
gguaggguaagugagagagg

SEQ ID NO: 1742591 - RNA, 23 nt, Human
gguagggugggccuucagggagu

SEQ ID NO: 1742592 - RNA, 11 nt, Human
gguaggguggg

SEQ ID NO: 1742593 - RNA, 13 nt, Human
gguauagaaaugc

SEQ ID NO: 1742594 - RNA, 20 nt, Human
gguaaggaauaccugucccc

SEQ ID NO: 1742595 - RNA, 22 nt, Human
aaacuugauguguuaucucuua

SEQ ID NO: 1742596 - RNA, 14 nt, Human
ggucagugcaaaua

SEQ ID NO: 1742597 - RNA, 19 nt, Human
gguaucaggugcugccauc

SEQ ID NO: 1742598 - RNA, 19 nt, Human
aaacauuuugucauauaag

SEQ ID NO: 1742599 - RNA, 20 nt, Human
gggucacucuggcagcucag

SEQ ID NO: 1742600 - RNA, 14 nt, Human
gggucacucuggca

SEQ ID NO: 1742601 - RNA, 22 nt, Human
gggucacucuggcagcucagag

SEQ ID NO: 1742602 - RNA, 22 nt, Human
aaaccugugucucugagaguag

SEQ ID NO: 1742603 - RNA, 17 nt, Human
aaaccuucacuuaggaa

SEQ ID NO: 1742604 - RNA, 15 nt, Human
ggggaccagagcugc

SEQ ID NO: 1742605 - RNA, 14 nt, Human
ggggaccagagcug

SEQ ID NO: 1742606 - RNA, 13 nt, Human
ggggaccagagcu

SEQ ID NO: 1742607 - RNA, 12 nt, Human
ggggaccagagc

SEQ ID NO: 1742608 - RNA, 18 nt, Human
aaaauguauguguaagua

SEQ ID NO: 1742609 - RNA, 15 nt, Human
gggggcugggcagag

SEQ ID NO: 1742610 - RNA, 13 nt, Human
ggggguggccucc

SEQ ID NO: 1742611 - RNA, 21 nt, Human
ggggucacucuggcagcucag

SEQ ID NO: 1742612 - RNA, 15 nt, Human
ggggcccugccuccu

SEQ ID NO: 1742613 - RNA, 17 nt, Human
gggggaucacagccucu

SEQ ID NO: 1742614 - RNA, 11 nt, Human
gggggcuggga

SEQ ID NO: 1742615 - RNA, 15 nt, Human
aaaauauuccugcau

SEQ ID NO: 1742616 - RNA, 22 nt, Human
aaaauaugaccacacuccagcu

SEQ ID NO: 1742617 - RNA, 16 nt, Human
aaaauauuuuccugcc

SEQ ID NO: 1742618 - RNA, 20 nt, Human
aaaauggaagacagcucuua

SEQ ID NO: 1742619 - RNA, 23 nt, Human
aaaaugcuguauuagucacagag

SEQ ID NO: 1742620 - RNA, 12 nt, Human
aaaaugagaaau

SEQ ID NO: 1742621 - RNA, 11 nt, Human
aaaaugagaaa

SEQ ID NO: 1742622 - RNA, 15 nt, Human
aaaaucugcuaggga

SEQ ID NO: 1742623 - RNA, 13 nt, Human
aaaauaauuuugu

SEQ ID NO: 1742624 - RNA, 14 nt, Human
aaaauaauuuugua

SEQ ID NO: 1742625 - RNA, 13 nt, Human
aaaauaccaagga

SEQ ID NO: 1742626 - RNA, 14 nt, Human
aaaauaccaaggaa

SEQ ID NO: 1742627 - RNA, 11 nt, Human
aaaaggcagga

SEQ ID NO: 1742628 - RNA, 17 nt, Human
aaaagguuaauaaagua

SEQ ID NO: 1742629 - RNA, 16 nt, Human
aaaagguuaauaaagu

SEQ ID NO: 1742630 - RNA, 14 nt, Human
aaaaggaugcacag

SEQ ID NO: 1742631 - RNA, 15 nt, Human
aaaaggaugcacaga

SEQ ID NO: 1742632 - RNA, 19 nt, Human
aaaaggaugcacagaguug

SEQ ID NO: 1742633 - RNA, 22 nt, Human
aaaaggaugcacagaguuguua

SEQ ID NO: 1742634 - RNA, 22 nt, Human
aaaaggagccaauuuaaagaaa

SEQ ID NO: 1742635 - RNA, 13 nt, Human
aaaaggaugcaca

SEQ ID NO: 1742636 - RNA, 16 nt, Human
aaaaugguuuaaaugg

SEQ ID NO: 1742637 - RNA, 18 nt, Human
aaaaugguuuaaaugguc

SEQ ID NO: 1742638 - RNA, 17 nt, Human
gggcuggguucuaccca

SEQ ID NO: 1742639 - RNA, 15 nt, Human
gggcugggcagagga

SEQ ID NO: 1742640 - RNA, 21 nt, Human
gggcugcaccggcuggccugg

SEQ ID NO: 1742641 - RNA, 20 nt, Human
gggcugcaccggcuggccug

SEQ ID NO: 1742642 - RNA, 19 nt, Human
gggcucagcggggacagcu

SEQ ID NO: 1742643 - RNA, 17 nt, Human
gggcucagcggggacag

SEQ ID NO: 1742644 - RNA, 22 nt, Human
gggcucagcaaaagaugcuucu

SEQ ID NO: 1742645 - RNA, 18 nt, Human
gggcuaguugggcuuccu

SEQ ID NO: 1742646 - RNA, 15 nt, Human
gggcuaguugggcuu

SEQ ID NO: 1742647 - RNA, 20 nt, Human
gggcuaggaaauccagggug

SEQ ID NO: 1742648 - RNA, 13 nt, Human
gggcuccagacac

SEQ ID NO: 1742649 - RNA, 10 nt, Human
gggcuccaga

SEQ ID NO: 1742650 - RNA, 21 nt, Human
gggcucagcggggacagcucc

SEQ ID NO: 1742651 - RNA, 19 nt, Human
gggcugcaccggcuggccu

SEQ ID NO: 1742652 - RNA, 15 nt, Human
gggcgugguggugag

SEQ ID NO: 1742653 - RNA, 21 nt, Human
gggcggugagaggggaacaga

SEQ ID NO: 1742654 - RNA, 19 nt, Human
gggcgugagaccugccccu

SEQ ID NO: 1742655 - RNA, 18 nt, Human
gggcgugagaccugcccc

SEQ ID NO: 1742656 - RNA, 22 nt, Human
gggccucgguguggagaagcgg

SEQ ID NO: 1742657 - RNA, 18 nt, Human
gggccucuuaugggcugg

SEQ ID NO: 1742658 - RNA, 19 nt, Human
gggccucuuaugggcuggg

SEQ ID NO: 1742659 - RNA, 14 nt, Human
gggccucagugcca

SEQ ID NO: 1742660 - RNA, 13 nt, Human
gggccucagugcc

SEQ ID NO: 1742661 - RNA, 15 nt, Human
gggccucagugccac

SEQ ID NO: 1742662 - RNA, 14 nt, Human
gggccaggagccuc

SEQ ID NO: 1742663 - RNA, 13 nt, Human
gggccaggagccu

SEQ ID NO: 1742664 - RNA, 20 nt, Human
gcuguuggcugggggccuca

SEQ ID NO: 1742665 - RNA, 16 nt, Human
gcuguuggcugggggc

SEQ ID NO: 1742666 - RNA, 15 nt, Human
gcuguuggcuggggg

SEQ ID NO: 1742667 - RNA, 17 nt, Human
gcugugcugcccugccc

SEQ ID NO: 1742668 - RNA, 16 nt, Human
gcugugcugcccugcc

SEQ ID NO: 1742669 - RNA, 15 nt, Human
gcugugcugcccugc

SEQ ID NO: 1742670 - RNA, 13 nt, Human
gcugugcucugga

SEQ ID NO: 1742671 - RNA, 16 nt, Human
gcugugccucugccug

SEQ ID NO: 1742672 - RNA, 15 nt, Human
gcugugccucugccu

SEQ ID NO: 1742673 - RNA, 14 nt, Human
gcugugccucugcc

SEQ ID NO: 1742674 - RNA, 16 nt, Human
gcugugcucuggacag

SEQ ID NO: 1742675 - RNA, 15 nt, Human
gcugugcucuggaca

SEQ ID NO: 1742676 - RNA, 18 nt, Human
gcugugcucuggacaggc

SEQ ID NO: 1742677 - RNA, 14 nt, Human
gcugugcugcccug

SEQ ID NO: 1742678 - RNA, 19 nt, Human
gcuguaucccaugagccuc

SEQ ID NO: 1742679 - RNA, 17 nt, Human
gcuguaucccaugagcc

SEQ ID NO: 1742680 - RNA, 12 nt, Human
gcugcugaaggc

SEQ ID NO: 1742681 - RNA, 14 nt, Human
gcuggcgugcagug

SEQ ID NO: 1742682 - RNA, 19 nt, Human
gcuggcuguuggcuggggg

SEQ ID NO: 1742683 - RNA, 18 nt, Human
gcuggcuguuggcugggg

SEQ ID NO: 1742684 - RNA, 11 nt, Human
gcuggcugccu

SEQ ID NO: 1742685 - RNA, 20 nt, Human
gcuggcugccuuagaaccuu

SEQ ID NO: 1742686 - RNA, 14 nt, Human
gcuggcugccuuag

SEQ ID NO: 1742687 - RNA, 18 nt, Human
gcuggcgugcaguggugc

SEQ ID NO: 1742688 - RNA, 15 nt, Human
gcuggcgugcagugg

SEQ ID NO: 1742689 - RNA, 21 nt, Human
gcuggguucuacccaggugcu

SEQ ID NO: 1742690 - RNA, 20 nt, Human
gcuggguucuacccaggugc

SEQ ID NO: 1742691 - RNA, 17 nt, Human
gcuggguucuacccagg

SEQ ID NO: 1742692 - RNA, 18 nt, Human
gcuggguucuacccaggu

SEQ ID NO: 1742693 - RNA, 23 nt, Human
gcugggguggggaccucaggccu

SEQ ID NO: 1742694 - RNA, 22 nt, Human
gcugggguggggaccucaggcc

SEQ ID NO: 1742695 - RNA, 19 nt, Human
gcugggguggggaccucag

SEQ ID NO: 1742696 - RNA, 17 nt, Human
gcugggguggggaccuc

SEQ ID NO: 1742697 - RNA, 20 nt, Human
gcugggccccugccucucug

SEQ ID NO: 1742698 - RNA, 18 nt, Human
gcugggccccugccucuc

SEQ ID NO: 1742699 - RNA, 14 nt, Human
gcugggccccugcc

SEQ ID NO: 1742700 - RNA, 13 nt, Human
gcugggccccugc

SEQ ID NO: 1742701 - RNA, 12 nt, Human
gcugggccccug

SEQ ID NO: 1742702 - RNA, 23 nt, Human
gcuggcuguuggcugggggccuc

SEQ ID NO: 1742703 - RNA, 20 nt, Human
gcuggcuguuggcugggggc

SEQ ID NO: 1742704 - RNA, 15 nt, Human
gcugaggugggagga

SEQ ID NO: 1742705 - RNA, 14 nt, Human
gcugaggugggagg

SEQ ID NO: 1742706 - RNA, 23 nt, Human
gcugagggugagugggugaauaa

SEQ ID NO: 1742707 - RNA, 16 nt, Human
gcugagaggagagaga

SEQ ID NO: 1742708 - RNA, 14 nt, Human
gcugcaccggcugg

SEQ ID NO: 1742709 - RNA, 13 nt, Human
gcugcaccggcug

SEQ ID NO: 1742710 - RNA, 19 nt, Human
gcugcacccucaggcaggu

SEQ ID NO: 1742711 - RNA, 18 nt, Human
gcugcacccucaggcagg

SEQ ID NO: 1742712 - RNA, 13 nt, Human
gcugccucaugcu

SEQ ID NO: 1742713 - RNA, 16 nt, Human
gcugccucucccauca

SEQ ID NO: 1742714 - RNA, 20 nt, Human
gcugccugggaucccucauc

SEQ ID NO: 1742715 - RNA, 13 nt, Human
gcugccuguucag

SEQ ID NO: 1742716 - RNA, 12 nt, Human
gcugccuguuca

SEQ ID NO: 1742717 - RNA, 17 nt, Human
gcugccuguucagcucc

SEQ ID NO: 1742718 - RNA, 23 nt, Human
gcugcucuugaacuccugaccuc

SEQ ID NO: 1742719 - RNA, 21 nt, Human
gcugccugggaucccucaucc

SEQ ID NO: 1742720 - RNA, 19 nt, Human
gcugccccuggcagccccu

SEQ ID NO: 1742721 - RNA, 18 nt, Human
gcugccccuggcagcccc

SEQ ID NO: 1742722 - RNA, 20 nt, Human
gcugccccuggcagccccug

SEQ ID NO: 1742723 - RNA, 15 nt, Human
gcuuuuuaauauuga

SEQ ID NO: 1742724 - RNA, 13 nt, Human
gcuuuugugcauu

SEQ ID NO: 1742725 - RNA, 19 nt, Human
gcuuuugugcauuaucuag

SEQ ID NO: 1742726 - RNA, 16 nt, Human
ggaaaaaauaacaaug

SEQ ID NO: 1742727 - RNA, 21 nt, Human
ggaaacuaggugcauauuuau

SEQ ID NO: 1742728 - RNA, 20 nt, Human
ggaaacagcuaaugggacac

SEQ ID NO: 1742729 - RNA, 15 nt, Human
ggaaacccagcucug

SEQ ID NO: 1742730 - RNA, 17 nt, Human
ggaaagaguaggaagac

SEQ ID NO: 1742731 - RNA, 16 nt, Human
ggaaagaguaggaaga

SEQ ID NO: 1742732 - RNA, 19 nt, Human
ggaaagcaaaggagauugg

SEQ ID NO: 1742733 - RNA, 14 nt, Human
ggaaagaggcucug

SEQ ID NO: 1742734 - RNA, 20 nt, Human
ggaaagacuuuuccaacccu

SEQ ID NO: 1742735 - RNA, 20 nt, Human
gcuuuucccuuuuuuuaagu

SEQ ID NO: 1742736 - RNA, 21 nt, Human
gcuuuucccuuuuuuuaagua

SEQ ID NO: 1742737 - RNA, 16 nt, Human
gcuuggggaccagagc

SEQ ID NO: 1742738 - RNA, 23 nt, Human
gcuugggcuucauccuccucaga

SEQ ID NO: 1742739 - RNA, 19 nt, Human
gcuugaccgugaggccaga

SEQ ID NO: 1742740 - RNA, 18 nt, Human
gcuugaccgugaggccag

SEQ ID NO: 1742741 - RNA, 17 nt, Human
gcuugaccgugaggcca

SEQ ID NO: 1742742 - RNA, 23 nt, Human
gcuucuucagagacuccugcagg

SEQ ID NO: 1742743 - RNA, 21 nt, Human
gcuucuucagagacuccugca

SEQ ID NO: 1742744 - RNA, 19 nt, Human
gcuucuucagagacuccug

SEQ ID NO: 1742745 - RNA, 16 nt, Human
gcuuaacuucacauau

SEQ ID NO: 1742746 - RNA, 17 nt, Human
gcuuaacuucacauauu

SEQ ID NO: 1742747 - RNA, 16 nt, Human
gcuucuucagagacuc

SEQ ID NO: 1742748 - RNA, 23 nt, Human
gcuuucuacccagcgagcccugg

SEQ ID NO: 1742749 - RNA, 22 nt, Human
gcuuucuacccagcgagcccug

SEQ ID NO: 1742750 - RNA, 19 nt, Human
gcuuucuacccagcgagcc

SEQ ID NO: 1742751 - RNA, 13 nt, Human
gcuuucuacccag

SEQ ID NO: 1742752 - RNA, 21 nt, Human
gcuuggggaccagagcugcca

SEQ ID NO: 1742753 - RNA, 20 nt, Human
gcuuggggaccagagcugcc

SEQ ID NO: 1742754 - RNA, 18 nt, Human
gcuuggggaccagagcug

SEQ ID NO: 1742755 - RNA, 17 nt, Human
gcuuggggaccagagcu

SEQ ID NO: 1742756 - RNA, 22 nt, Human
gcuuggggaccagagcugccac

SEQ ID NO: 1742757 - RNA, 14 nt, Human
gcuuuggaaguuuu

SEQ ID NO: 1742758 - RNA, 17 nt, Human
ggaagcucagggccugg

SEQ ID NO: 1742759 - RNA, 16 nt, Human
ggaagcucagggccug

SEQ ID NO: 1742760 - RNA, 15 nt, Human
ggaauaccugucccc

SEQ ID NO: 1742761 - RNA, 21 nt, Human
ggaagcucagggccuggcuca

SEQ ID NO: 1742762 - RNA, 22 nt, Human
ggaagcucagggccuggcucag

SEQ ID NO: 1742763 - RNA, 16 nt, Human
ggaauauauaaccagu

SEQ ID NO: 1742764 - RNA, 19 nt, Human
ggaauaccugucccccuga

SEQ ID NO: 1742765 - RNA, 16 nt, Human
ggaauaccuguccccc

SEQ ID NO: 1742766 - RNA, 12 nt, Human
ggacacagcucu

SEQ ID NO: 1742767 - RNA, 14 nt, Human
ggaaugauuaauua

SEQ ID NO: 1742768 - RNA, 19 nt, Human
ggaaugaaugucaguguga

SEQ ID NO: 1742769 - RNA, 13 nt, Human
ggacacagcucuu

SEQ ID NO: 1742770 - RNA, 14 nt, Human
ggacacagcucuuc

SEQ ID NO: 1742771 - RNA, 12 nt, Human
ggacacccugug

SEQ ID NO: 1742772 - RNA, 15 nt, Human
ggacagggcauggcc

SEQ ID NO: 1742773 - RNA, 22 nt, Human
ggacagggcauggccagguggc

SEQ ID NO: 1742774 - RNA, 17 nt, Human
ggacagggaggugaccc

SEQ ID NO: 1742775 - RNA, 23 nt, Human
ggacacccugugauggggcccug

SEQ ID NO: 1742776 - RNA, 13 nt, Human
ggacacccuguga

SEQ ID NO: 1742777 - RNA, 14 nt, Human
ggacauggacaagg

SEQ ID NO: 1742778 - RNA, 13 nt, Human
ggacauggacaag

SEQ ID NO: 1742779 - RNA, 23 nt, Human
ggaaaucaccgaaaacguggcug

SEQ ID NO: 1742780 - RNA, 16 nt, Human
ggaaauccaggguggu

SEQ ID NO: 1742781 - RNA, 21 nt, Human
ggaagccagcaggcucucagg

SEQ ID NO: 1742782 - RNA, 23 nt, Human
ggaagccagcaggcucucaggcc

SEQ ID NO: 1742783 - RNA, 22 nt, Human
ggaagccagcaggcucucaggc

SEQ ID NO: 1742784 - RNA, 18 nt, Human
ggaagccgcuggggccag

SEQ ID NO: 1742785 - RNA, 16 nt, Human
gcucagagcaguguuu

SEQ ID NO: 1742786 - RNA, 19 nt, Human
gcucagggccuggcucagg

SEQ ID NO: 1742787 - RNA, 18 nt, Human
gcucagggccuggcucag

SEQ ID NO: 1742788 - RNA, 13 nt, Human
gcucaggaguuug

SEQ ID NO: 1742789 - RNA, 23 nt, Human
gcucaggagcccugggaggcucu

SEQ ID NO: 1742790 - RNA, 22 nt, Human
gcucaggagcccugggaggcuc

SEQ ID NO: 1742791 - RNA, 20 nt, Human
gcucagggccuggcucaggu

SEQ ID NO: 1742792 - RNA, 18 nt, Human
gcuauucaguaauaacuc

SEQ ID NO: 1742793 - RNA, 16 nt, Human
gcuaguugggcuuccu

SEQ ID NO: 1742794 - RNA, 14 nt, Human
gcuaguugggcuuc

SEQ ID NO: 1742795 - RNA, 21 nt, Human
gcuaguugggcuuccucauag

SEQ ID NO: 1742796 - RNA, 20 nt, Human
gcuaggaccccuccaugugg

SEQ ID NO: 1742797 - RNA, 22 nt, Human
gcuaggaccccuccaugugggc

SEQ ID NO: 1742798 - RNA, 21 nt, Human
gcuaggaauuguguuuauaau

SEQ ID NO: 1742799 - RNA, 22 nt, Human
gcuaagugauccucccaccuca

SEQ ID NO: 1742800 - RNA, 18 nt, Human
gcuaagugauccucccac

SEQ ID NO: 1742801 - RNA, 15 nt, Human
gcggcuggcagccca

SEQ ID NO: 1742802 - RNA, 16 nt, Human
gcgcaggcuggcccug

SEQ ID NO: 1742803 - RNA, 15 nt, Human
gcgcaggcuggcccu

SEQ ID NO: 1742804 - RNA, 23 nt, Human
gcgauucuucugcuucagccucc

SEQ ID NO: 1742805 - RNA, 21 nt, Human
gcgcagcauauucaggaagcu

SEQ ID NO: 1742806 - RNA, 14 nt, Human
gcgcaggcuggccc

SEQ ID NO: 1742807 - RNA, 23 nt, Human
gccuugaccauucuccaccugcc

SEQ ID NO: 1742808 - RNA, 22 nt, Human
gcgauucuucugcuucagccuc

SEQ ID NO: 1742809 - RNA, 22 nt, Human
gccuugaccauucuccaccugc

SEQ ID NO: 1742810 - RNA, 16 nt, Human
gccuugaccauucucc

SEQ ID NO: 1742811 - RNA, 23 nt, Human
gccuugaacuuugaccucugcag

SEQ ID NO: 1742812 - RNA, 19 nt, Human
gccugugccucugggacug

SEQ ID NO: 1742813 - RNA, 11 nt, Human
gccugggcaga

SEQ ID NO: 1742814 - RNA, 23 nt, Human
gccugggaucccucauccucaua

SEQ ID NO: 1742815 - RNA, 17 nt, Human
gccuguucagcuccagc

SEQ ID NO: 1742816 - RNA, 16 nt, Human
gccuguucagcuccag

SEQ ID NO: 1742817 - RNA, 15 nt, Human
gccuguucagcucca

SEQ ID NO: 1742818 - RNA, 16 nt, Human
gccuucucugaaggac

SEQ ID NO: 1742819 - RNA, 15 nt, Human
gccuucucugaagga

SEQ ID NO: 1742820 - RNA, 14 nt, Human
gccuugaacuuuga

SEQ ID NO: 1742821 - RNA, 19 nt, Human
gcauuuaggccaugggaca

SEQ ID NO: 1742822 - RNA, 18 nt, Human
gcauuuacuuuguguuca

SEQ ID NO: 1742823 - RNA, 21 nt, Human
gcccacgcccccacuggugac

SEQ ID NO: 1742824 - RNA, 17 nt, Human
gcccacgcccccacugg

SEQ ID NO: 1742825 - RNA, 16 nt, Human
gcccacgcccccacug

SEQ ID NO: 1742826 - RNA, 15 nt, Human
gcccacgcccccacu

SEQ ID NO: 1742827 - RNA, 17 nt, Human
gccauugacuucuuccc

SEQ ID NO: 1742828 - RNA, 23 nt, Human
gcccaggaaaggcuccaggagca

SEQ ID NO: 1742829 - RNA, 22 nt, Human
gcccaggaaaggcuccaggagc

SEQ ID NO: 1742830 - RNA, 24 nt, Human
gcccaggaaaggcuccaggagcag

SEQ ID NO: 1742831 - RNA, 13 nt, Human
gcccacuucugcc

SEQ ID NO: 1742832 - RNA, 21 nt, Human
gcccacgcuggagugcaguga

SEQ ID NO: 1742833 - RNA, 19 nt, Human
gcccacgcuggagugcagu

SEQ ID NO: 1742834 - RNA, 23 nt, Human
gcccacgcuggagugcagugagc

SEQ ID NO: 1742835 - RNA, 22 nt, Human
gcccacuguacuugcucuugau

SEQ ID NO: 1742836 - RNA, 20 nt, Human
gcccacuguacuugcucuug

SEQ ID NO: 1742837 - RNA, 15 nt, Human
gcccacuguacuugc

SEQ ID NO: 1742838 - RNA, 22 nt, Human
gcccaggccccugccacccugg

SEQ ID NO: 1742839 - RNA, 21 nt, Human
gcccaggccccugccacccug

SEQ ID NO: 1742840 - RNA, 20 nt, Human
gcccaggccccugccacccu

SEQ ID NO: 1742841 - RNA, 12 nt, Human
gcccaggccccu

SEQ ID NO: 1742842 - RNA, 11 nt, Human
gcccaggcccc

SEQ ID NO: 1742843 - RNA, 11 nt, Human
gcccaggcagg

SEQ ID NO: 1742844 - RNA, 12 nt, Human
gcccaggcaggu

SEQ ID NO: 1742845 - RNA, 11 nt, Human
gccccaaaagg

SEQ ID NO: 1742846 - RNA, 21 nt, Human
gccccaaaacucuccucugcu

SEQ ID NO: 1742847 - RNA, 20 nt, Human
gccccaaaacucuccucugc

SEQ ID NO: 1742848 - RNA, 15 nt, Human
gccccuggcagcccc

SEQ ID NO: 1742849 - RNA, 12 nt, Human
gccccuggcagc

SEQ ID NO: 1742850 - RNA, 16 nt, Human
gccccugcugguucag

SEQ ID NO: 1742851 - RNA, 15 nt, Human
gccccugcugguuca

SEQ ID NO: 1742852 - RNA, 17 nt, Human
gcccccucugcccugcg

SEQ ID NO: 1742853 - RNA, 12 nt, Human
gccccugcuggu

SEQ ID NO: 1742854 - RNA, 16 nt, Human
gcccccucugcccugc

SEQ ID NO: 1742855 - RNA, 15 nt, Human
gcccccucugcccug

SEQ ID NO: 1742856 - RNA, 13 nt, Human
gccuccauccuga

SEQ ID NO: 1742857 - RNA, 14 nt, Human
gccuccauccugag

SEQ ID NO: 1742858 - RNA, 15 nt, Human
gccuccauccugagg

SEQ ID NO: 1742859 - RNA, 18 nt, Human
gccuccugcccuuaccug

SEQ ID NO: 1742860 - RNA, 19 nt, Human
gccuccugaguagcuggga

SEQ ID NO: 1742861 - RNA, 13 nt, Human
gccucgaacuggc

SEQ ID NO: 1742862 - RNA, 22 nt, Human
gccuccuuugugaggaagccgc

SEQ ID NO: 1742863 - RNA, 16 nt, Human
gccucgaacuggcugc

SEQ ID NO: 1742864 - RNA, 22 nt, Human
gccucauguccacugguucuuc

SEQ ID NO: 1742865 - RNA, 19 nt, Human
gccucaugucaaauauuua

SEQ ID NO: 1742866 - RNA, 19 nt, Human
gccucaugcuaagacucag

SEQ ID NO: 1742867 - RNA, 12 nt, Human
gccuagcauacg

SEQ ID NO: 1742868 - RNA, 19 nt, Human
gccuagcauacguacacau

SEQ ID NO: 1742869 - RNA, 17 nt, Human
gccuacaggagugagca

SEQ ID NO: 1742870 - RNA, 17 nt, Human
gccccuggcagccccug

SEQ ID NO: 1742871 - RNA, 16 nt, Human
gccccuggcagccccu

SEQ ID NO: 1742872 - RNA, 21 nt, Human
gccccugcugguucaggguug

SEQ ID NO: 1742873 - RNA, 22 nt, Human
gcccuuaccugccaggaagcca

SEQ ID NO: 1742874 - RNA, 21 nt, Human
gcccuuaccugccaggaagcc

SEQ ID NO: 1742875 - RNA, 17 nt, Human
gcccugugggcccccaa

SEQ ID NO: 1742876 - RNA, 16 nt, Human
gcccugugggccccca

SEQ ID NO: 1742877 - RNA, 21 nt, Human
gcccugugggcccccaaaugg

SEQ ID NO: 1742878 - RNA, 23 nt, Human
gcccuuaccugccaggaagccag

SEQ ID NO: 1742879 - RNA, 19 nt, Human
gcccuuagcagggaaacag

SEQ ID NO: 1742880 - RNA, 15 nt, Human
gcccugcccaccugg

SEQ ID NO: 1742881 - RNA, 14 nt, Human
gcccugcccaccug

SEQ ID NO: 1742882 - RNA, 20 nt, Human
gcccugcgggucacaggagg

SEQ ID NO: 1742883 - RNA, 16 nt, Human
gccuacaggagugagc

SEQ ID NO: 1742884 - RNA, 21 nt, Human
gcccuuccaugucgccucugc

SEQ ID NO: 1742885 - RNA, 12 nt, Human
gcccuuccaugu

SEQ ID NO: 1742886 - RNA, 12 nt, Human
gcccuuccucuc

SEQ ID NO: 1742887 - RNA, 22 nt, Human
gcccuuccaugucgccucugca

SEQ ID NO: 1742888 - RNA, 15 nt, Human
gcccuuccucuccac

SEQ ID NO: 1742889 - RNA, 14 nt, Human
gcccuuccucucca

SEQ ID NO: 1742890 - RNA, 20 nt, Human
gacuuuuccaacccucauca

SEQ ID NO: 1742891 - RNA, 19 nt, Human
gacuuuuccaacccucauc

SEQ ID NO: 1742892 - RNA, 14 nt, Human
gacuuuuccaaccc

SEQ ID NO: 1742893 - RNA, 18 nt, Human
gacuuuuauuuccaguga

SEQ ID NO: 1742894 - RNA, 23 nt, Human
gagaaugaaagggcccagagagg

SEQ ID NO: 1742895 - RNA, 15 nt, Human
gagaaugaaagggcc

SEQ ID NO: 1742896 - RNA, 14 nt, Human
gagacggaguccca

SEQ ID NO: 1742897 - RNA, 19 nt, Human
gagacggagucccaccuug

SEQ ID NO: 1742898 - RNA, 16 nt, Human
gagacggagucccacc

SEQ ID NO: 1742899 - RNA, 18 nt, Human
gagacgggggcagagagg

SEQ ID NO: 1742900 - RNA, 21 nt, Human
gagauugugccccugcacucc

SEQ ID NO: 1742901 - RNA, 14 nt, Human
gagauuggaaggaa

SEQ ID NO: 1742902 - RNA, 20 nt, Human
gagaugcuagaacucccuuu

SEQ ID NO: 1742903 - RNA, 16 nt, Human
gagaugcuagaacucc

SEQ ID NO: 1742904 - RNA, 15 nt, Human
gagauuauguucuuu

SEQ ID NO: 1742905 - RNA, 20 nt, Human
gagagcugggugucaagagg

SEQ ID NO: 1742906 - RNA, 12 nt, Human
gagaggaaauca

SEQ ID NO: 1742907 - RNA, 22 nt, Human
gagagcuucuguugcugccuca

SEQ ID NO: 1742908 - RNA, 15 nt, Human
gagaggacccccuga

SEQ ID NO: 1742909 - RNA, 20 nt, Human
gagagccuuccagggguggg

SEQ ID NO: 1742910 - RNA, 18 nt, Human
gagagccuuccaggggug

SEQ ID NO: 1742911 - RNA, 21 nt, Human
gagagcuagcagcagggaggg

SEQ ID NO: 1742912 - RNA, 15 nt, Human
gagagcuagcagcag

SEQ ID NO: 1742913 - RNA, 13 nt, Human
gagagcugggugu

SEQ ID NO: 1742914 - RNA, 16 nt, Human
gagagccuuccagggg

SEQ ID NO: 1742915 - RNA, 15 nt, Human
gagagccuuccaggg

SEQ ID NO: 1742916 - RNA, 14 nt, Human
gagacuccugcagg

SEQ ID NO: 1742917 - RNA, 13 nt, Human
gagacuccugcag

SEQ ID NO: 1742918 - RNA, 14 nt, Human
gagcaucaggccag

SEQ ID NO: 1742919 - RNA, 13 nt, Human
gagcaugccugga

SEQ ID NO: 1742920 - RNA, 21 nt, Human
gagcaugccuggauggggcug

SEQ ID NO: 1742921 - RNA, 16 nt, Human
gagcaucaggccaggc

SEQ ID NO: 1742922 - RNA, 15 nt, Human
gagcaucaggccagg

SEQ ID NO: 1742923 - RNA, 17 nt, Human
gagcaucaggccaggcc

SEQ ID NO: 1742924 - RNA, 17 nt, Human
gagccccgaggccuucu

SEQ ID NO: 1742925 - RNA, 14 nt, Human
gagccccgaggccu

SEQ ID NO: 1742926 - RNA, 20 nt, Human
gagcccugggaggcucugga

SEQ ID NO: 1742927 - RNA, 19 nt, Human
gagcccugggaggcucugg

SEQ ID NO: 1742928 - RNA, 18 nt, Human
gagcccugggaggcucug

SEQ ID NO: 1742929 - RNA, 16 nt, Human
gagcccugggaggcuc

SEQ ID NO: 1742930 - RNA, 12 nt, Human
gagcccugggag

SEQ ID NO: 1742931 - RNA, 14 nt, Human
gagcccugguggca

SEQ ID NO: 1742932 - RNA, 13 nt, Human
gagcccugguggc

SEQ ID NO: 1742933 - RNA, 21 nt, Human
gaggacgcucucuggccuucg

SEQ ID NO: 1742934 - RNA, 20 nt, Human
gaggacgcucucuggccuuc

SEQ ID NO: 1742935 - RNA, 23 nt, Human
gaggacuuuucuuuguggcuucc

SEQ ID NO: 1742936 - RNA, 20 nt, Human
gaggacuuuucuuuguggcu

SEQ ID NO: 1742937 - RNA, 16 nt, Human
gaggacuuuucuuugu

SEQ ID NO: 1742938 - RNA, 12 nt, Human
gaggagaaacug

SEQ ID NO: 1742939 - RNA, 14 nt, Human
gaggagaaacugga

SEQ ID NO: 1742940 - RNA, 15 nt, Human
gaggagagaggaccc

SEQ ID NO: 1742941 - RNA, 14 nt, Human
gaggagagaggacc

SEQ ID NO: 1742942 - RNA, 12 nt, Human
gaggagagagga

SEQ ID NO: 1742943 - RNA, 20 nt, Human
gaggcagggucucacucugu

SEQ ID NO: 1742944 - RNA, 19 nt, Human
gaggcagggucucacucug

SEQ ID NO: 1742945 - RNA, 22 nt, Human
gaggcagggucucacucugucg

SEQ ID NO: 1742946 - RNA, 18 nt, Human
gaggcugagaugggagaa

SEQ ID NO: 1742947 - RNA, 20 nt, Human
gaggcucuggagcccacugu

SEQ ID NO: 1742948 - RNA, 17 nt, Human
gaggcuccacuuggucu

SEQ ID NO: 1742949 - RNA, 18 nt, Human
gaggcuccacuuggucug

SEQ ID NO: 1742950 - RNA, 15 nt, Human
gaggcuccacuuggu

SEQ ID NO: 1742951 - RNA, 21 nt, Human
gaggcauuuguuugaacugau

SEQ ID NO: 1742952 - RNA, 21 nt, Human
gaggcaugugaugagaggaaa

SEQ ID NO: 1742953 - RNA, 20 nt, Human
gaggcaugugaugagaggaa

SEQ ID NO: 1742954 - RNA, 22 nt, Human
gaggcaugugaugagaggaaau

SEQ ID NO: 1742955 - RNA, 19 nt, Human
gaggcauuuguuugaacug

SEQ ID NO: 1742956 - RNA, 21 nt, Human
gagggccugcaagggagugag

SEQ ID NO: 1742957 - RNA, 17 nt, Human
gagggccugcaagggag

SEQ ID NO: 1742958 - RNA, 14 nt, Human
gagggccugcaagg

SEQ ID NO: 1742959 - RNA, 12 nt, Human
gagggccugggc

SEQ ID NO: 1742960 - RNA, 18 nt, Human
gaaugcacaaacagaggc

SEQ ID NO: 1742961 - RNA, 17 nt, Human
gaauguuugccucugcc

SEQ ID NO: 1742962 - RNA, 16 nt, Human
gaauguuugccucugc

SEQ ID NO: 1742963 - RNA, 19 nt, Human
gaaugcacaaacagaggcc

SEQ ID NO: 1742964 - RNA, 14 nt, Human
gaaugauuaauuaa

SEQ ID NO: 1742965 - RNA, 14 nt, Human
gaaugaugccauga

SEQ ID NO: 1742966 - RNA, 20 nt, Human
gaaugaugauccuaggcauu

SEQ ID NO: 1742967 - RNA, 15 nt, Human
gaaugaauggcuaag

SEQ ID NO: 1742968 - RNA, 20 nt, Human
gaaugaauggcuaagcaaaa

SEQ ID NO: 1742969 - RNA, 14 nt, Human
gaauuaacacauga

SEQ ID NO: 1742970 - RNA, 15 nt, Human
gaauuaacacaugau

SEQ ID NO: 1742971 - RNA, 19 nt, Human
gaauguuugccucugccuc

SEQ ID NO: 1742972 - RNA, 18 nt, Human
gaauguuugccucugccu

SEQ ID NO: 1742973 - RNA, 13 nt, Human
gacacagcucuuc

SEQ ID NO: 1742974 - RNA, 21 nt, Human
gacacagcucuucuccaggcu

SEQ ID NO: 1742975 - RNA, 20 nt, Human
gacacagcucuucuccaggc

SEQ ID NO: 1742976 - RNA, 19 nt, Human
gacacagcucuucuccagg

SEQ ID NO: 1742977 - RNA, 12 nt, Human
gacacagcucuu

SEQ ID NO: 1742978 - RNA, 14 nt, Human
gaaugaauggcuaa

SEQ ID NO: 1742979 - RNA, 24 nt, Human
gaauauugcugauggugcaaugac

SEQ ID NO: 1742980 - RNA, 19 nt, Human
gaauauugccauuaugcuu

SEQ ID NO: 1742981 - RNA, 23 nt, Human
gaauauugcugauggugcaauga

SEQ ID NO: 1742982 - RNA, 22 nt, Human
gaauauugcugauggugcaaug

SEQ ID NO: 1742983 - RNA, 15 nt, Human
gaauauauaaccagu

SEQ ID NO: 1742984 - RNA, 13 nt, Human
gaauauugcugau

SEQ ID NO: 1742985 - RNA, 12 nt, Human
gaauauugcuga

SEQ ID NO: 1742986 - RNA, 11 nt, Human
gaauauugcug

SEQ ID NO: 1742987 - RNA, 14 nt, Human
gacgcucucuggcc

SEQ ID NO: 1742988 - RNA, 23 nt, Human
gacgcuacccgggaagggggcug

SEQ ID NO: 1742989 - RNA, 22 nt, Human
gacgcuacccgggaagggggcu

SEQ ID NO: 1742990 - RNA, 21 nt, Human
gacgcugugcugcccugccca

SEQ ID NO: 1742991 - RNA, 18 nt, Human
gacgcugugcugcccugc

SEQ ID NO: 1742992 - RNA, 17 nt, Human
gacgcugugcugcccug

SEQ ID NO: 1742993 - RNA, 16 nt, Human
gacgcugugcugcccu

SEQ ID NO: 1742994 - RNA, 13 nt, Human
gacgccaucccag

SEQ ID NO: 1742995 - RNA, 12 nt, Human
gacgccauccca

SEQ ID NO: 1742996 - RNA, 13 nt, Human
gaccucugccuga

SEQ ID NO: 1742997 - RNA, 21 nt, Human
gacgccaucccagccccaaug

SEQ ID NO: 1742998 - RNA, 15 nt, Human
gacgccaucccagcc

SEQ ID NO: 1742999 - RNA, 16 nt, Human
gaccucugcagcaaua

SEQ ID NO: 1743000 - RNA, 18 nt, Human
gaccucugcagcaauaaa

SEQ ID NO: 1743001 - RNA, 22 nt, Human
gaccucugcagcaauaaagcag

SEQ ID NO: 1743002 - RNA, 17 nt, Human
gacccggaggggccugg

SEQ ID NO: 1743003 - RNA, 16 nt, Human
gaccccugagcuugca

SEQ ID NO: 1743004 - RNA, 20 nt, Human
gacccggaggggccuggcag

SEQ ID NO: 1743005 - RNA, 19 nt, Human
gacccggaggggccuggca

SEQ ID NO: 1743006 - RNA, 18 nt, Human
gacccggaggggccuggc

SEQ ID NO: 1743007 - RNA, 21 nt, Human
gaccucaggugauccacccac

SEQ ID NO: 1743008 - RNA, 20 nt, Human
gaccucaggugauccaccca

SEQ ID NO: 1743009 - RNA, 19 nt, Human
gaccucaggugauccaccc

SEQ ID NO: 1743010 - RNA, 21 nt, Human
gaccucaggugagaagcagag

SEQ ID NO: 1743011 - RNA, 19 nt, Human
gaccucaggugagaagcag

SEQ ID NO: 1743012 - RNA, 18 nt, Human
gaccucaggugagaagca

SEQ ID NO: 1743013 - RNA, 19 nt, Human
gaccucaggccugggggcu

SEQ ID NO: 1743014 - RNA, 23 nt, Human
gaccucagguaaucgaccugccu

SEQ ID NO: 1743015 - RNA, 22 nt, Human
gaccucagguaaucgaccugcc

SEQ ID NO: 1743016 - RNA, 14 nt, Human
gaccucaggccugg

SEQ ID NO: 1743017 - RNA, 10 nt, Human
gacccugagg

SEQ ID NO: 1743018 - RNA, 11 nt, Human
gacagcucuua

SEQ ID NO: 1743019 - RNA, 12 nt, Human
gacagucccugc

SEQ ID NO: 1743020 - RNA, 12 nt, Human
gacagcucugca

SEQ ID NO: 1743021 - RNA, 19 nt, Human
gacagcuccuucuguccua

SEQ ID NO: 1743022 - RNA, 10 nt, Human
gacagcucuu

SEQ ID NO: 1743023 - RNA, 20 nt, Human
gacagucccugccaauggac

SEQ ID NO: 1743024 - RNA, 16 nt, Human
gacagucccugccaau

SEQ ID NO: 1743025 - RNA, 15 nt, Human
gacagucccugccaa

SEQ ID NO: 1743026 - RNA, 14 nt, Human
gacagucccugcca

SEQ ID NO: 1743027 - RNA, 18 nt, Human
gacagcuccuucuguccu

SEQ ID NO: 1743028 - RNA, 17 nt, Human
gacagcuccuucugucc

SEQ ID NO: 1743029 - RNA, 16 nt, Human
gacagcccgggcucug

SEQ ID NO: 1743030 - RNA, 14 nt, Human
gacagcccgggcuc

SEQ ID NO: 1743031 - RNA, 23 nt, Human
gacauugcggacagccacggcca

SEQ ID NO: 1743032 - RNA, 17 nt, Human
gacauugcggacagcca

SEQ ID NO: 1743033 - RNA, 19 nt, Human
gacauuguagagcuucugg

SEQ ID NO: 1743034 - RNA, 20 nt, Human
gcaucuagcaugucgucaaa

SEQ ID NO: 1743035 - RNA, 13 nt, Human
gcauccuggcacc

SEQ ID NO: 1743036 - RNA, 17 nt, Human
gcauccuccgccucccg

SEQ ID NO: 1743037 - RNA, 14 nt, Human
gcauccuggcaccc

SEQ ID NO: 1743038 - RNA, 21 nt, Human
gcauggcugccaaugggagcu

SEQ ID NO: 1743039 - RNA, 15 nt, Human
gcauuuacuuugugu

SEQ ID NO: 1743040 - RNA, 18 nt, Human
gcauuuaaaagauacagu

SEQ ID NO: 1743041 - RNA, 22 nt, Human
gcauuuaaaagauacaguuacu

SEQ ID NO: 1743042 - RNA, 18 nt, Human
gcauugugggaaggggag

SEQ ID NO: 1743043 - RNA, 16 nt, Human
gcauugugggaagggg

SEQ ID NO: 1743044 - RNA, 16 nt, Human
gcauuuaaaagauaca

SEQ ID NO: 1743045 - RNA, 17 nt, Human
gcauuuaaaagauacag

SEQ ID NO: 1743046 - RNA, 15 nt, Human
gcauugugggaaggg

SEQ ID NO: 1743047 - RNA, 13 nt, Human
gcauugugggaag

SEQ ID NO: 1743048 - RNA, 21 nt, Human
gcaugugaugagaggaaauca

SEQ ID NO: 1743049 - RNA, 19 nt, Human
gcaugugaugagaggaaau

SEQ ID NO: 1743050 - RNA, 17 nt, Human
gcauccaguaucuugaa

SEQ ID NO: 1743051 - RNA, 14 nt, Human
gcauccaguaucuu

SEQ ID NO: 1743052 - RNA, 18 nt, Human
gcauccaguaucuugaag

SEQ ID NO: 1743053 - RNA, 15 nt, Human
gcauacguacacauu

SEQ ID NO: 1743054 - RNA, 16 nt, Human
gcauacguacacauuu

SEQ ID NO: 1743055 - RNA, 17 nt, Human
gcauacguacacauuuu

SEQ ID NO: 1743056 - RNA, 18 nt, Human
gcauacguacacauuuua

SEQ ID NO: 1743057 - RNA, 12 nt, Human
gcagaacaguga

SEQ ID NO: 1743058 - RNA, 13 nt, Human
gcagaacagugau

SEQ ID NO: 1743059 - RNA, 22 nt, Human
gcacuuuguucuggcucuucca

SEQ ID NO: 1743060 - RNA, 15 nt, Human
gcacuccagccuggg

SEQ ID NO: 1743061 - RNA, 14 nt, Human
gcacuccagccugg

SEQ ID NO: 1743062 - RNA, 14 nt, Human
gcacuccccugcug

SEQ ID NO: 1743063 - RNA, 13 nt, Human
gcacuccccugcu

SEQ ID NO: 1743064 - RNA, 19 nt, Human
gcacuuuguucuggcucuu

SEQ ID NO: 1743065 - RNA, 18 nt, Human
gcacuuuguucuggcucu

SEQ ID NO: 1743066 - RNA, 16 nt, Human
gcacuccccugcuggg

SEQ ID NO: 1743067 - RNA, 15 nt, Human
gcacuccccugcugg

SEQ ID NO: 1743068 - RNA, 19 nt, Human
gcaagugagagcugggugu

SEQ ID NO: 1743069 - RNA, 18 nt, Human
gcaagugagagcugggug

SEQ ID NO: 1743070 - RNA, 20 nt, Human
gcacucagaagacacugaug

SEQ ID NO: 1743071 - RNA, 18 nt, Human
gcagaacagugauuacca

SEQ ID NO: 1743072 - RNA, 22 nt, Human
gcagaacagugauuaccaggga

SEQ ID NO: 1743073 - RNA, 20 nt, Human
gcagaggaaagcaaaggaga

SEQ ID NO: 1743074 - RNA, 18 nt, Human
gcagaggaaagcaaagga

SEQ ID NO: 1743075 - RNA, 14 nt, Human
gcagaggaaagcaa

SEQ ID NO: 1743076 - RNA, 13 nt, Human
gcagaggaaagca

SEQ ID NO: 1743077 - RNA, 21 nt, Human
gcagaggaaagcaaaggagau

SEQ ID NO: 1743078 - RNA, 23 nt, Human
gcagcauauucaggaagcucagg

SEQ ID NO: 1743079 - RNA, 19 nt, Human
gcagcauauucaggaagcu

SEQ ID NO: 1743080 - RNA, 18 nt, Human
gcagcauauucaggaagc

SEQ ID NO: 1743081 - RNA, 17 nt, Human
gcagcauauucaggaag

SEQ ID NO: 1743082 - RNA, 14 nt, Human
gcagagggcacaga

SEQ ID NO: 1743083 - RNA, 18 nt, Human
gcagcccaccccucaaca

SEQ ID NO: 1743084 - RNA, 15 nt, Human
gcagccacauuccug

SEQ ID NO: 1743085 - RNA, 13 nt, Human
gcaacaggcuggg

SEQ ID NO: 1743086 - RNA, 15 nt, Human
gcaacaggcugggcu

SEQ ID NO: 1743087 - RNA, 14 nt, Human
gcaacaggcugggc

SEQ ID NO: 1743088 - RNA, 18 nt, Human
gcaaccaccaccaaccac

SEQ ID NO: 1743089 - RNA, 16 nt, Human
gcaaccaccaccaacc

SEQ ID NO: 1743090 - RNA, 13 nt, Human
gcaaccaccacca

SEQ ID NO: 1743091 - RNA, 19 nt, Human
gcaacaggcugggcuucag

SEQ ID NO: 1743092 - RNA, 16 nt, Human
gcaacaggcugggcuu

SEQ ID NO: 1743093 - RNA, 20 nt, Human
gcaaccuucgccaccugggu

SEQ ID NO: 1743094 - RNA, 20 nt, Human
gcaaccuccgccucuugggu

SEQ ID NO: 1743095 - RNA, 17 nt, Human
gcaacccccagccugcu

SEQ ID NO: 1743096 - RNA, 16 nt, Human
gcaacccccagccugc

SEQ ID NO: 1743097 - RNA, 15 nt, Human
gcaacccccagccug

SEQ ID NO: 1743098 - RNA, 14 nt, Human
gcaacccccagccu

SEQ ID NO: 1743099 - RNA, 14 nt, Human
gcaaccauuugaaa

SEQ ID NO: 1743100 - RNA, 16 nt, Human
gcaagugagagcuggg

SEQ ID NO: 1743101 - RNA, 15 nt, Human
gauucuucugcuuca

SEQ ID NO: 1743102 - RNA, 13 nt, Human
gauucuucugcuu

SEQ ID NO: 1743103 - RNA, 19 nt, Human
gauuuaacagaaauguaca

SEQ ID NO: 1743104 - RNA, 20 nt, Human
gauucuucugcuucagccuc

SEQ ID NO: 1743105 - RNA, 16 nt, Human
gauuuaacagaaaugu

SEQ ID NO: 1743106 - RNA, 17 nt, Human
gauuuaacagaaaugua

SEQ ID NO: 1743107 - RNA, 18 nt, Human
gauuuaacagaaauguac

SEQ ID NO: 1743108 - RNA, 18 nt, Human
gauuuuuuuuuccuucag

SEQ ID NO: 1743109 - RNA, 17 nt, Human
gauuuuuuuuuccuuca

SEQ ID NO: 1743110 - RNA, 12 nt, Human
gauuucacucuc

SEQ ID NO: 1743111 - RNA, 16 nt, Human
gauuuuuuuuuccuuc

SEQ ID NO: 1743112 - RNA, 11 nt, Human
gauuucacucu

SEQ ID NO: 1743113 - RNA, 16 nt, Human
gauuuaauuugaaaua

SEQ ID NO: 1743114 - RNA, 21 nt, Human
gauuuuuuuuuccuucagugc

SEQ ID NO: 1743115 - RNA, 14 nt, Human
gcaaaaaggcagga

SEQ ID NO: 1743116 - RNA, 22 nt, Human
gcaaaagaugcuucucacugcc

SEQ ID NO: 1743117 - RNA, 17 nt, Human
gcaaaagaugcuucuca

SEQ ID NO: 1743118 - RNA, 19 nt, Human
gaucucuugagccugggag

SEQ ID NO: 1743119 - RNA, 17 nt, Human
gaucugaugcaagcaag

SEQ ID NO: 1743120 - RNA, 20 nt, Human
gaugcuucuucagagacucc

SEQ ID NO: 1743121 - RNA, 17 nt, Human
gaugcuucuucagagac

SEQ ID NO: 1743122 - RNA, 21 nt, Human
gaugcuucuucagagacuccu

SEQ ID NO: 1743123 - RNA, 14 nt, Human
gaugauccuaggca

SEQ ID NO: 1743124 - RNA, 13 nt, Human
gaugauccuaggc

SEQ ID NO: 1743125 - RNA, 22 nt, Human
gaugauuggaggggggaggugg

SEQ ID NO: 1743126 - RNA, 19 nt, Human
gauccaagcuggucccacu

SEQ ID NO: 1743127 - RNA, 17 nt, Human
gauccaagcugguccca

SEQ ID NO: 1743128 - RNA, 16 nt, Human
gauccaagcugguccc

SEQ ID NO: 1743129 - RNA, 12 nt, Human
gauccaagcugg

SEQ ID NO: 1743130 - RNA, 19 nt, Human
gauccacccaccucagccu

SEQ ID NO: 1743131 - RNA, 18 nt, Human
gauccacccaccucagcc

SEQ ID NO: 1743132 - RNA, 21 nt, Human
gauccaagcuggucccacuca

SEQ ID NO: 1743133 - RNA, 21 nt, Human
gauccacccaccucagccucc

SEQ ID NO: 1743134 - RNA, 20 nt, Human
gauccacccaccucagccuc

SEQ ID NO: 1743135 - RNA, 22 nt, Human
gauccacccaccucagccuccc

SEQ ID NO: 1743136 - RNA, 22 nt, Human
gaucaaaccccgaccaccugcc

SEQ ID NO: 1743137 - RNA, 23 nt, Human
gaucaaaagguuaauaaaguaau

SEQ ID NO: 1743138 - RNA, 20 nt, Human
gaucaaaagguuaauaaagu

SEQ ID NO: 1743139 - RNA, 15 nt, Human
gauauuuugcuuugu

SEQ ID NO: 1743140 - RNA, 23 nt, Human
gauauuuucaacgcagcccugcu

SEQ ID NO: 1743141 - RNA, 22 nt, Human
gauauuuucaacgcagcccugc

SEQ ID NO: 1743142 - RNA, 21 nt, Human
gauauuuucaacgcagcccug

SEQ ID NO: 1743143 - RNA, 18 nt, Human
gauacuuugauauuuuca

SEQ ID NO: 1743144 - RNA, 19 nt, Human
gauauuuucaacgcagccc

SEQ ID NO: 1743145 - RNA, 17 nt, Human
gauacuguaucaugaca

SEQ ID NO: 1743146 - RNA, 21 nt, Human
gauacuguaucaugacaaaga

SEQ ID NO: 1743147 - RNA, 16 nt, Human
gauacaguuacucaga

SEQ ID NO: 1743148 - RNA, 19 nt, Human
gauacaguuacucagaauu

SEQ ID NO: 1743149 - RNA, 23 nt, Human
gauacaguuacucagaauucucu

SEQ ID NO: 1743150 - RNA, 14 nt, Human
cugcucacauaucu

SEQ ID NO: 1743151 - RNA, 17 nt, Human
cugcuaucaaagagguu

SEQ ID NO: 1743152 - RNA, 18 nt, Human
cugcugaaggcucgagca

SEQ ID NO: 1743153 - RNA, 23 nt, Human
cugcugaaggcucgagcaugccu

SEQ ID NO: 1743154 - RNA, 24 nt, Human
cugcugaaggcucgagcaugccug

SEQ ID NO: 1743155 - RNA, 23 nt, Human
cugccuguucagcuccagcucac

SEQ ID NO: 1743156 - RNA, 20 nt, Human
cugccuguucagcuccagcu

SEQ ID NO: 1743157 - RNA, 19 nt, Human
cugccuguucccauucuug

SEQ ID NO: 1743158 - RNA, 15 nt, Human
cugccuguucccauu

SEQ ID NO: 1743159 - RNA, 14 nt, Human
cugccuccuuugug

SEQ ID NO: 1743160 - RNA, 14 nt, Human
cugccucgaacugg

SEQ ID NO: 1743161 - RNA, 23 nt, Human
cugccuccuuugugaggaagccg

SEQ ID NO: 1743162 - RNA, 21 nt, Human
cugccuccuuugugaggaagc

SEQ ID NO: 1743163 - RNA, 17 nt, Human
cugccuccuuugugagg

SEQ ID NO: 1743164 - RNA, 20 nt, Human
cugccucgaacuggcugcaa

SEQ ID NO: 1743165 - RNA, 23 nt, Human
cugcccuuaccugccaggaagcc

SEQ ID NO: 1743166 - RNA, 22 nt, Human
cugcccuuaccugccaggaagc

SEQ ID NO: 1743167 - RNA, 12 nt, Human
cugcccuguggg

SEQ ID NO: 1743168 - RNA, 11 nt, Human
cugcccugugg

SEQ ID NO: 1743169 - RNA, 19 nt, Human
cugcccuuaccugccagga

SEQ ID NO: 1743170 - RNA, 14 nt, Human
cugcccugugggcc

SEQ ID NO: 1743171 - RNA, 20 nt, Human
cugcccugguuuccugcccu

SEQ ID NO: 1743172 - RNA, 24 nt, Human
cugcccugugaguacuacaguccu

SEQ ID NO: 1743173 - RNA, 21 nt, Human
cugcccugguuuccugcccug

SEQ ID NO: 1743174 - RNA, 19 nt, Human
cugcccugguuuccugccc

SEQ ID NO: 1743175 - RNA, 18 nt, Human
cugcccugguuuccugcc

SEQ ID NO: 1743176 - RNA, 17 nt, Human
cugcccugguuuccugc

SEQ ID NO: 1743177 - RNA, 23 nt, Human
cugcccuggugcugccacacuuc

SEQ ID NO: 1743178 - RNA, 15 nt, Human
cugcccuggugcugc

SEQ ID NO: 1743179 - RNA, 14 nt, Human
cugcccuggugcug

SEQ ID NO: 1743180 - RNA, 13 nt, Human
cugcccuggugcu

SEQ ID NO: 1743181 - RNA, 12 nt, Human
cugcccuggugc

SEQ ID NO: 1743182 - RNA, 14 nt, Human
cugcuuccagugag

SEQ ID NO: 1743183 - RNA, 20 nt, Human
cugcuucaaggauccugagc

SEQ ID NO: 1743184 - RNA, 19 nt, Human
cugcuucaaggauccugag

SEQ ID NO: 1743185 - RNA, 16 nt, Human
cugcuucaaggauccu

SEQ ID NO: 1743186 - RNA, 14 nt, Human
cugcuucaaggauc

SEQ ID NO: 1743187 - RNA, 17 nt, Human
cuggauccaucaggcca

SEQ ID NO: 1743188 - RNA, 15 nt, Human
cuggagaacuagaga

SEQ ID NO: 1743189 - RNA, 14 nt, Human
cuggagaacuagag

SEQ ID NO: 1743190 - RNA, 21 nt, Human
cuggagaaaauggacguguua

SEQ ID NO: 1743191 - RNA, 23 nt, Human
cuggacuccucuguccaggcacu

SEQ ID NO: 1743192 - RNA, 22 nt, Human
cuggacuccucuguccaggcac

SEQ ID NO: 1743193 - RNA, 23 nt, Human
cuggacucuaaagucuguugauu

SEQ ID NO: 1743194 - RNA, 18 nt, Human
cuggaugcagccucacag

SEQ ID NO: 1743195 - RNA, 17 nt, Human
cuggaugcagccucaca

SEQ ID NO: 1743196 - RNA, 16 nt, Human
cuggaugcagccucac

SEQ ID NO: 1743197 - RNA, 20 nt, Human
cuggaucuccauucucucag

SEQ ID NO: 1743198 - RNA, 19 nt, Human
cuggauccaucaggccacu

SEQ ID NO: 1743199 - RNA, 22 nt, Human
cuggcagaguugaagacagagc

SEQ ID NO: 1743200 - RNA, 23 nt, Human
cuggcagccccuguucuggcaga

SEQ ID NO: 1743201 - RNA, 13 nt, Human
cuggcagccgugc

SEQ ID NO: 1743202 - RNA, 21 nt, Human
cuggcagaguugaagacagag

SEQ ID NO: 1743203 - RNA, 20 nt, Human
cuggcagaguugaagacaga

SEQ ID NO: 1743204 - RNA, 17 nt, Human
cugggacuacaggugug

SEQ ID NO: 1743205 - RNA, 21 nt, Human
cugggacuacaggcacccacc

SEQ ID NO: 1743206 - RNA, 17 nt, Human
cugggacuacaggcacc

SEQ ID NO: 1743207 - RNA, 15 nt, Human
cuggcucuuccaggc

SEQ ID NO: 1743208 - RNA, 14 nt, Human
cuggcucuuccagg

SEQ ID NO: 1743209 - RNA, 13 nt, Human
cuggcucuuccag

SEQ ID NO: 1743210 - RNA, 22 nt, Human
cuggcucccacaggcccuuccu

SEQ ID NO: 1743211 - RNA, 22 nt, Human
cuggccgggaccccgagccugg

SEQ ID NO: 1743212 - RNA, 18 nt, Human
cuggcucccacaggcccu

SEQ ID NO: 1743213 - RNA, 19 nt, Human
cuggcucccacaggcccuu

SEQ ID NO: 1743214 - RNA, 19 nt, Human
cuggcagcucagagagggu

SEQ ID NO: 1743215 - RNA, 17 nt, Human
cuggcagcucagagagg

SEQ ID NO: 1743216 - RNA, 16 nt, Human
cuggcagcucagagag

SEQ ID NO: 1743217 - RNA, 18 nt, Human
cuggcagccgugccuuca

SEQ ID NO: 1743218 - RNA, 17 nt, Human
cuggcagccgugccuuc

SEQ ID NO: 1743219 - RNA, 15 nt, Human
cuguuggccagugug

SEQ ID NO: 1743220 - RNA, 12 nt, Human
cuguuggccagu

SEQ ID NO: 1743221 - RNA, 14 nt, Human
cuuaaauaauguga

SEQ ID NO: 1743222 - RNA, 16 nt, Human
cuuaaauaaugugaaa

SEQ ID NO: 1743223 - RNA, 19 nt, Human
cuuaaauaaugugaaacug

SEQ ID NO: 1743224 - RNA, 13 nt, Human
cuuaaaaaugguu

SEQ ID NO: 1743225 - RNA, 20 nt, Human
cuuaaaaaugguuuaaaugg

SEQ ID NO: 1743226 - RNA, 23 nt, Human
cugugagaugcuagaacucccuu

SEQ ID NO: 1743227 - RNA, 17 nt, Human
cugugcucuggacaggc

SEQ ID NO: 1743228 - RNA, 16 nt, Human
cugugaacugaacucu

SEQ ID NO: 1743229 - RNA, 15 nt, Human
cugugaacugaacuc

SEQ ID NO: 1743230 - RNA, 13 nt, Human
cugugaacugaac

SEQ ID NO: 1743231 - RNA, 15 nt, Human
cuguucagcuccagc

SEQ ID NO: 1743232 - RNA, 13 nt, Human
cuguucacucuac

SEQ ID NO: 1743233 - RNA, 18 nt, Human
cuguucagcugguugagg

SEQ ID NO: 1743234 - RNA, 12 nt, Human
cuguucagcugg

SEQ ID NO: 1743235 - RNA, 22 nt, Human
cuguucagcuccagcucaccag

SEQ ID NO: 1743236 - RNA, 19 nt, Human
cuguucagcuccagcucac

SEQ ID NO: 1743237 - RNA, 18 nt, Human
cuguucagcuccagcuca

SEQ ID NO: 1743238 - RNA, 16 nt, Human
cuguucagcuccagcu

SEQ ID NO: 1743239 - RNA, 17 nt, Human
cuguuacugucuucagu

SEQ ID NO: 1743240 - RNA, 19 nt, Human
cugugcucuggacaggcau

SEQ ID NO: 1743241 - RNA, 18 nt, Human
cugugcucuggacaggca

SEQ ID NO: 1743242 - RNA, 22 nt, Human
cugugucagguggggcagcuug

SEQ ID NO: 1743243 - RNA, 18 nt, Human
cuguaggaagguuaaugu

SEQ ID NO: 1743244 - RNA, 21 nt, Human
cuguccugggagugagcuggu

SEQ ID NO: 1743245 - RNA, 20 nt, Human
cuguccugggagugagcugg

SEQ ID NO: 1743246 - RNA, 14 nt, Human
cuguccugggagug

SEQ ID NO: 1743247 - RNA, 13 nt, Human
cuguccugggagu

SEQ ID NO: 1743248 - RNA, 14 nt, Human
cugucauuugagca

SEQ ID NO: 1743249 - RNA, 22 nt, Human
cugucuaaugaaaccugugucu

SEQ ID NO: 1743250 - RNA, 15 nt, Human
cugucguuaaaaaca

SEQ ID NO: 1743251 - RNA, 15 nt, Human
cuguagagugggagc

SEQ ID NO: 1743252 - RNA, 21 nt, Human
cuguacuugcucuugaugccu

SEQ ID NO: 1743253 - RNA, 20 nt, Human
cuguacuugcucuugaugcc

SEQ ID NO: 1743254 - RNA, 19 nt, Human
cuguacuugcucuugaugc

SEQ ID NO: 1743255 - RNA, 16 nt, Human
cuguacuugcucuuga

SEQ ID NO: 1743256 - RNA, 14 nt, Human
cugguuuuucaguu

SEQ ID NO: 1743257 - RNA, 15 nt, Human
cugguuuuucaguuu

SEQ ID NO: 1743258 - RNA, 16 nt, Human
cugguuuuucaguuuu

SEQ ID NO: 1743259 - RNA, 12 nt, Human
cuggugccucac

SEQ ID NO: 1743260 - RNA, 18 nt, Human
cuggucuuauuuguaaag

SEQ ID NO: 1743261 - RNA, 21 nt, Human
cuggucucgaacuccugaccu

SEQ ID NO: 1743262 - RNA, 20 nt, Human
cuuacauuagcaguuugcuu

SEQ ID NO: 1743263 - RNA, 16 nt, Human
cuucuuauacauuuga

SEQ ID NO: 1743264 - RNA, 13 nt, Human
cuucuuauacauu

SEQ ID NO: 1743265 - RNA, 17 nt, Human
cuucugacccaugcugc

SEQ ID NO: 1743266 - RNA, 16 nt, Human
cuucugacccaugcug

SEQ ID NO: 1743267 - RNA, 18 nt, Human
cuucugacccaugcugcc

SEQ ID NO: 1743268 - RNA, 23 nt, Human
cuucugaacuuggcgcugccccu

SEQ ID NO: 1743269 - RNA, 18 nt, Human
cuuccucccucccucuuu

SEQ ID NO: 1743270 - RNA, 14 nt, Human
cuuccucccucccu

SEQ ID NO: 1743271 - RNA, 13 nt, Human
cuuccucccuccc

SEQ ID NO: 1743272 - RNA, 12 nt, Human
cuuccucccucc

SEQ ID NO: 1743273 - RNA, 13 nt, Human
cuuccucugcuga

SEQ ID NO: 1743274 - RNA, 12 nt, Human
cuuccucugcug

SEQ ID NO: 1743275 - RNA, 11 nt, Human
cuuccucugcu

SEQ ID NO: 1743276 - RNA, 21 nt, Human
cuuccucuccacugccuucga

SEQ ID NO: 1743277 - RNA, 19 nt, Human
cuuccucuccacugccuuc

SEQ ID NO: 1743278 - RNA, 17 nt, Human
cuuccucuccacugccu

SEQ ID NO: 1743279 - RNA, 16 nt, Human
cuuccucuccacugcc

SEQ ID NO: 1743280 - RNA, 22 nt, Human
cuucugaacuuggcgcugcccc

SEQ ID NO: 1743281 - RNA, 15 nt, Human
cuucugacccaugcu

SEQ ID NO: 1743282 - RNA, 19 nt, Human
cuucugaacuuggcgcugc

SEQ ID NO: 1743283 - RNA, 13 nt, Human
cuugucuguagau

SEQ ID NO: 1743284 - RNA, 20 nt, Human
cuugucuuuggacccugagg

SEQ ID NO: 1743285 - RNA, 23 nt, Human
cuuggucucagugucaaugcagc

SEQ ID NO: 1743286 - RNA, 22 nt, Human
cuugguccugcugcaguugcca

SEQ ID NO: 1743287 - RNA, 16 nt, Human
cuugguucccauuugc

SEQ ID NO: 1743288 - RNA, 20 nt, Human
cuugguucccauuugcuccu

SEQ ID NO: 1743289 - RNA, 15 nt, Human
cuugguccugcugca

SEQ ID NO: 1743290 - RNA, 20 nt, Human
cuugguccugcugcaguugc

SEQ ID NO: 1743291 - RNA, 18 nt, Human
cuugguccugcugcaguu

SEQ ID NO: 1743292 - RNA, 17 nt, Human
cuugguccugcugcagu

SEQ ID NO: 1743293 - RNA, 16 nt, Human
cuugguccugcugcag

SEQ ID NO: 1743294 - RNA, 18 nt, Human
cuuucaauaggaaaaacu

SEQ ID NO: 1743295 - RNA, 17 nt, Human
cuuucaauaggaaaaac

SEQ ID NO: 1743296 - RNA, 20 nt, Human
cuuuaaugucacaggcaggu

SEQ ID NO: 1743297 - RNA, 19 nt, Human
cuuuaaugucacaggcagg

SEQ ID NO: 1743298 - RNA, 18 nt, Human
cuuuaaugucacaggcag

SEQ ID NO: 1743299 - RNA, 17 nt, Human
cuuuaaugucacaggca

SEQ ID NO: 1743300 - RNA, 15 nt, Human
cuuucaauaggaaaa

SEQ ID NO: 1743301 - RNA, 14 nt, Human
cuuucaauaggaaa

SEQ ID NO: 1743302 - RNA, 22 nt, Human
cuuuaaugucacaggcaggucc

SEQ ID NO: 1743303 - RNA, 22 nt, Human
cuugucuuuggacccugaggcc

SEQ ID NO: 1743304 - RNA, 21 nt, Human
cuugucuuuggacccugaggc

SEQ ID NO: 1743305 - RNA, 16 nt, Human
cuuuaaugauaugcuu

SEQ ID NO: 1743306 - RNA, 21 nt, Human
cuuuaaugauaugcuuguaac

SEQ ID NO: 1743307 - RNA, 22 nt, Human
cuuuaaugauaugcuuguaacu

SEQ ID NO: 1743308 - RNA, 15 nt, Human
cuugauguguuaucu

SEQ ID NO: 1743309 - RNA, 19 nt, Human
cuugauucauaaugacuua

SEQ ID NO: 1743310 - RNA, 18 nt, Human
cuugccgucuaccugagg

SEQ ID NO: 1743311 - RNA, 19 nt, Human
cuugccgucuaccugaggg

SEQ ID NO: 1743312 - RNA, 15 nt, Human
cuuggauuguccccg

SEQ ID NO: 1743313 - RNA, 20 nt, Human
cuuggauuguccccgacccu

SEQ ID NO: 1743314 - RNA, 18 nt, Human
cuuggauuguccccgacc

SEQ ID NO: 1743315 - RNA, 22 nt, Human
cuuggauuguccccgacccuug

SEQ ID NO: 1743316 - RNA, 23 nt, Human
cuuggcgcugccccuggcagccc

SEQ ID NO: 1743317 - RNA, 22 nt, Human
cuuggcgcugccccuggcagcc

SEQ ID NO: 1743318 - RNA, 21 nt, Human
cuuggcgcugccccuggcagc

SEQ ID NO: 1743319 - RNA, 18 nt, Human
gaaagaaguggggacaga

SEQ ID NO: 1743320 - RNA, 18 nt, Human
gaaaugaaagcagggacu

SEQ ID NO: 1743321 - RNA, 18 nt, Human
gaaauuuuuauuaaauua

SEQ ID NO: 1743322 - RNA, 17 nt, Human
gaaaucaccgaaaacgu

SEQ ID NO: 1743323 - RNA, 17 nt, Human
gaacaaauuuacagaga

SEQ ID NO: 1743324 - RNA, 18 nt, Human
gaacaaauuuacagagac

SEQ ID NO: 1743325 - RNA, 19 nt, Human
gaaauuuuuauuaaauuau

SEQ ID NO: 1743326 - RNA, 23 nt, Human
gaacaaauuuacagagacagaaa

SEQ ID NO: 1743327 - RNA, 21 nt, Human
gaaaguacuucuccacccugc

SEQ ID NO: 1743328 - RNA, 22 nt, Human
gaaaguacuucuccacccugcu

SEQ ID NO: 1743329 - RNA, 20 nt, Human
gaaaggcuccaggagcagcc

SEQ ID NO: 1743330 - RNA, 19 nt, Human
gaaaggcuccaggagcagc

SEQ ID NO: 1743331 - RNA, 18 nt, Human
gaaaggcuccaggagcag

SEQ ID NO: 1743332 - RNA, 17 nt, Human
gaaaggcuccaggagca

SEQ ID NO: 1743333 - RNA, 18 nt, Human
gaaagacuaucuaaaugu

SEQ ID NO: 1743334 - RNA, 21 nt, Human
gaacaaggcaaggcugucaau

SEQ ID NO: 1743335 - RNA, 18 nt, Human
gaacaaggcaaggcuguc

SEQ ID NO: 1743336 - RNA, 17 nt, Human
gaacaaggcaaggcugu

SEQ ID NO: 1743337 - RNA, 15 nt, Human
gaacaaggcaaggcu

SEQ ID NO: 1743338 - RNA, 14 nt, Human
gaacaaggcaaggc

SEQ ID NO: 1743339 - RNA, 17 nt, Human
cuuuugucuaugggacu

SEQ ID NO: 1743340 - RNA, 16 nt, Human
cuuuuggucuguguga

SEQ ID NO: 1743341 - RNA, 15 nt, Human
cuuuuggucugugug

SEQ ID NO: 1743342 - RNA, 18 nt, Human
cuuuugccguuauuaaaa

SEQ ID NO: 1743343 - RNA, 14 nt, Human
cuuuugugcauuau

SEQ ID NO: 1743344 - RNA, 18 nt, Human
cuuuugugcauuaucuag

SEQ ID NO: 1743345 - RNA, 14 nt, Human
cuuuuuuuuaaguu

SEQ ID NO: 1743346 - RNA, 21 nt, Human
cuuuuuuuuuuuuuuugacaa

SEQ ID NO: 1743347 - RNA, 19 nt, Human
gaaaaaauauuuuccugcc

SEQ ID NO: 1743348 - RNA, 14 nt, Human
gaaaaaauauauau

SEQ ID NO: 1743349 - RNA, 18 nt, Human
gaaaauuuugauguuuua

SEQ ID NO: 1743350 - RNA, 18 nt, Human
gaaaacuuguauuaugug

SEQ ID NO: 1743351 - RNA, 19 nt, Human
gaaaacugcaacuuguaaa

SEQ ID NO: 1743352 - RNA, 22 nt, Human
gaaaauuaggauuucaugauuu

SEQ ID NO: 1743353 - RNA, 18 nt, Human
gaaaauuaggauuucaug

SEQ ID NO: 1743354 - RNA, 14 nt, Human
gaaaauuaacauga

SEQ ID NO: 1743355 - RNA, 19 nt, Human
cuuuuaugugaaacauguu

SEQ ID NO: 1743356 - RNA, 21 nt, Human
agcuggucccacucaguccau

SEQ ID NO: 1743357 - RNA, 14 nt, Human
agcuggguuggaaa

SEQ ID NO: 1743358 - RNA, 22 nt, Human
agcugggugucaagagggucug

SEQ ID NO: 1743359 - RNA, 17 nt, Human
agcugggugucaagagg

SEQ ID NO: 1743360 - RNA, 22 nt, Human
agcuucuguugcugccucaugc

SEQ ID NO: 1743361 - RNA, 21 nt, Human
agcuucuguugcugccucaug

SEQ ID NO: 1743362 - RNA, 20 nt, Human
agcuucuguugcugccucau

SEQ ID NO: 1743363 - RNA, 15 nt, Human
aggaaaaacugauuu

SEQ ID NO: 1743364 - RNA, 13 nt, Human
aggaaaaacugau

SEQ ID NO: 1743365 - RNA, 15 nt, Human
agcuuuucccuuuuu

SEQ ID NO: 1743366 - RNA, 16 nt, Human
agcuuuucccuucuuu

SEQ ID NO: 1743367 - RNA, 13 nt, Human
agcuuuucccuuc

SEQ ID NO: 1743368 - RNA, 23 nt, Human
agcuucuguugcugccucaugcu

SEQ ID NO: 1743369 - RNA, 17 nt, Human
aggaaauccaggguggu

SEQ ID NO: 1743370 - RNA, 15 nt, Human
aggaaauccagggug

SEQ ID NO: 1743371 - RNA, 22 nt, Human
aggaacguaaucguguccccua

SEQ ID NO: 1743372 - RNA, 17 nt, Human
aggauguugaaaaaguu

SEQ ID NO: 1743373 - RNA, 14 nt, Human
aggauguugaaaaa

SEQ ID NO: 1743374 - RNA, 20 nt, Human
aggauguucugggacacagu

SEQ ID NO: 1743375 - RNA, 17 nt, Human
aggaggggauagagaga

SEQ ID NO: 1743376 - RNA, 12 nt, Human
aggauucuuccu

SEQ ID NO: 1743377 - RNA, 16 nt, Human
aggauucuuccucccu

SEQ ID NO: 1743378 - RNA, 22 nt, Human
aggcacugcugcccagccucca

SEQ ID NO: 1743379 - RNA, 16 nt, Human
aggcacugcugcccag

SEQ ID NO: 1743380 - RNA, 14 nt, Human
aggcacugcugccc

SEQ ID NO: 1743381 - RNA, 17 nt, Human
aggacccggaggggccu

SEQ ID NO: 1743382 - RNA, 20 nt, Human
aggaccucaggugagaagca

SEQ ID NO: 1743383 - RNA, 14 nt, Human
aggaccucagguga

SEQ ID NO: 1743384 - RNA, 18 nt, Human
aggagaggggcacagggu

SEQ ID NO: 1743385 - RNA, 16 nt, Human
aggagaggggcacagg

SEQ ID NO: 1743386 - RNA, 15 nt, Human
aggagaggagagggg

SEQ ID NO: 1743387 - RNA, 15 nt, Human
aggagagcuagcagc

SEQ ID NO: 1743388 - RNA, 20 nt, Human
aggaccccuccaugugggcu

SEQ ID NO: 1743389 - RNA, 15 nt, Human
aggaacuacugagga

SEQ ID NO: 1743390 - RNA, 14 nt, Human
aggcucuucuccuu

SEQ ID NO: 1743391 - RNA, 21 nt, Human
aggcugaacuuguuuucuggg

SEQ ID NO: 1743392 - RNA, 20 nt, Human
aggcugaacuuguuuucugg

SEQ ID NO: 1743393 - RNA, 23 nt, Human
aggcuagugugguguuuccuggc

SEQ ID NO: 1743394 - RNA, 20 nt, Human
agggacagaggggguggccu

SEQ ID NO: 1743395 - RNA, 13 nt, Human
agggacagagggg

SEQ ID NO: 1743396 - RNA, 12 nt, Human
agggacagaggg

SEQ ID NO: 1743397 - RNA, 21 nt, Human
agggacgcuacccgggaaggg

SEQ ID NO: 1743398 - RNA, 20 nt, Human
agggacucaucauuuccauu

SEQ ID NO: 1743399 - RNA, 18 nt, Human
aggcugccucucccauca

SEQ ID NO: 1743400 - RNA, 16 nt, Human
aggcugucuguuguau

SEQ ID NO: 1743401 - RNA, 17 nt, Human
agggccuggccugagcu

SEQ ID NO: 1743402 - RNA, 16 nt, Human
agggccuggccugagc

SEQ ID NO: 1743403 - RNA, 15 nt, Human
agggccuggccugag

SEQ ID NO: 1743404 - RNA, 21 nt, Human
agggcacaccgggcacucaga

SEQ ID NO: 1743405 - RNA, 20 nt, Human
agggcacaccgggcacucag

SEQ ID NO: 1743406 - RNA, 22 nt, Human
agggcacagaaaauggaagaca

SEQ ID NO: 1743407 - RNA, 17 nt, Human
agggcacaccgggcacu

SEQ ID NO: 1743408 - RNA, 18 nt, Human
agggccuggccugagcug

SEQ ID NO: 1743409 - RNA, 19 nt, Human
agggcgggaggauguucug

SEQ ID NO: 1743410 - RNA, 21 nt, Human
aggggauagagagagaccacu

SEQ ID NO: 1743411 - RNA, 15 nt, Human
aggggcacagggucu

SEQ ID NO: 1743412 - RNA, 15 nt, Human
agguuaauaaaguaa

SEQ ID NO: 1743413 - RNA, 14 nt, Human
agguuaauguucau

SEQ ID NO: 1743414 - RNA, 17 nt, Human
agguucaaagauauuuu

SEQ ID NO: 1743415 - RNA, 13 nt, Human
agguucagcuugu

SEQ ID NO: 1743416 - RNA, 17 nt, Human
agguucaugcaaacuuu

SEQ ID NO: 1743417 - RNA, 18 nt, Human
agguuccacagaggacac

SEQ ID NO: 1743418 - RNA, 17 nt, Human
aggugcugccauccagg

SEQ ID NO: 1743419 - RNA, 16 nt, Human
aggugcugccauccag

SEQ ID NO: 1743420 - RNA, 14 nt, Human
aggucgaggcagga

SEQ ID NO: 1743421 - RNA, 20 nt, Human
aggucgcuugggaauuuuau

SEQ ID NO: 1743422 - RNA, 15 nt, Human
agguggaaauaaacu

SEQ ID NO: 1743423 - RNA, 17 nt, Human
agguaaggaauaccugu

SEQ ID NO: 1743424 - RNA, 17 nt, Human
agguaaucgaccugccu

SEQ ID NO: 1743425 - RNA, 18 nt, Human
agguaaucgaccugccuc

SEQ ID NO: 1743426 - RNA, 22 nt, Human
agguacgaaaagaggggaagag

SEQ ID NO: 1743427 - RNA, 20 nt, Human
aggucccuaauaaagcugug

SEQ ID NO: 1743428 - RNA, 19 nt, Human
aggucccuaauaaagcugu

SEQ ID NO: 1743429 - RNA, 18 nt, Human
aggucccuaauaaagcug

SEQ ID NO: 1743430 - RNA, 17 nt, Human
aggucccuaauaaagcu

SEQ ID NO: 1743431 - RNA, 13 nt, Human
agauguaauuuug

SEQ ID NO: 1743432 - RNA, 21 nt, Human
agaugggagaaucacuugaac

SEQ ID NO: 1743433 - RNA, 14 nt, Human
agauguagaggaga

SEQ ID NO: 1743434 - RNA, 14 nt, Human
agauguaauuuugu

SEQ ID NO: 1743435 - RNA, 15 nt, Human
agauguaauuuugug

SEQ ID NO: 1743436 - RNA, 17 nt, Human
agauguaauuuugugua

SEQ ID NO: 1743437 - RNA, 19 nt, Human
agauguaauuuuguguaag

SEQ ID NO: 1743438 - RNA, 19 nt, Human
agcacuaaggugugcucug

SEQ ID NO: 1743439 - RNA, 20 nt, Human
agcacuaaggugugcucuga

SEQ ID NO: 1743440 - RNA, 21 nt, Human
agcagccacauuccugaugcu

SEQ ID NO: 1743441 - RNA, 23 nt, Human
agccaaggccaaaggaagcacau

SEQ ID NO: 1743442 - RNA, 22 nt, Human
agccaaggccaaaggaagcaca

SEQ ID NO: 1743443 - RNA, 20 nt, Human
agccagaggagagaggaccc

SEQ ID NO: 1743444 - RNA, 23 nt, Human
agccaaagcuaggccuggccaga

SEQ ID NO: 1743445 - RNA, 20 nt, Human
agccaaagcuaggccuggcc

SEQ ID NO: 1743446 - RNA, 19 nt, Human
agccaaagcuaggccuggc

SEQ ID NO: 1743447 - RNA, 20 nt, Human
agcaugccuggauggggcug

SEQ ID NO: 1743448 - RNA, 12 nt, Human
agcaugccugga

SEQ ID NO: 1743449 - RNA, 14 nt, Human
agcaugcacaaauu

SEQ ID NO: 1743450 - RNA, 20 nt, Human
agcaugagagggaugaggca

SEQ ID NO: 1743451 - RNA, 11 nt, Human
agccuccugag

SEQ ID NO: 1743452 - RNA, 17 nt, Human
agccucccgaguagcug

SEQ ID NO: 1743453 - RNA, 22 nt, Human
agccucccgaauagcugggacu

SEQ ID NO: 1743454 - RNA, 20 nt, Human
agccucccgaauagcuggga

SEQ ID NO: 1743455 - RNA, 19 nt, Human
agccucccgaauagcuggg

SEQ ID NO: 1743456 - RNA, 18 nt, Human
agccucccgaauagcugg

SEQ ID NO: 1743457 - RNA, 20 nt, Human
agccucccaaagugcuggga

SEQ ID NO: 1743458 - RNA, 19 nt, Human
agccgagauugcaccacug

SEQ ID NO: 1743459 - RNA, 21 nt, Human
agccgagaucacgccacugca

SEQ ID NO: 1743460 - RNA, 20 nt, Human
agccgagauugcaccacugc

SEQ ID NO: 1743461 - RNA, 22 nt, Human
agccgcuggggccaguuggucc

SEQ ID NO: 1743462 - RNA, 14 nt, Human
agccgcuggggcca

SEQ ID NO: 1743463 - RNA, 19 nt, Human
agccucccaaagugcuggg

SEQ ID NO: 1743464 - RNA, 18 nt, Human
agccucccaaagugcugg

SEQ ID NO: 1743465 - RNA, 19 nt, Human
agccuccugaguagcugga

SEQ ID NO: 1743466 - RNA, 20 nt, Human
agccgagaucacgccacugc

SEQ ID NO: 1743467 - RNA, 19 nt, Human
agccgagaucacgccacug

SEQ ID NO: 1743468 - RNA, 15 nt, Human
agcccugagcuuucu

SEQ ID NO: 1743469 - RNA, 11 nt, Human
agccccauccu

SEQ ID NO: 1743470 - RNA, 20 nt, Human
agccccaucccaaacccuuc

SEQ ID NO: 1743471 - RNA, 16 nt, Human
agccccagugcccaca

SEQ ID NO: 1743472 - RNA, 23 nt, Human
agccccauaauuuuuuuuuuccu

SEQ ID NO: 1743473 - RNA, 20 nt, Human
agcccaaagugguauagaaa

SEQ ID NO: 1743474 - RNA, 23 nt, Human
agcccaaagugguauagaaaugc

SEQ ID NO: 1743475 - RNA, 21 nt, Human
agauaggucagugcaaauacu

SEQ ID NO: 1743476 - RNA, 16 nt, Human
agauagccaaggccaa

SEQ ID NO: 1743477 - RNA, 15 nt, Human
agauagccaaggcca

SEQ ID NO: 1743478 - RNA, 14 nt, Human
agaucuucuguggg

SEQ ID NO: 1743479 - RNA, 23 nt, Human
agauggcugugccucugccuguc

SEQ ID NO: 1743480 - RNA, 22 nt, Human
agauacuuggggggcugaggug

SEQ ID NO: 1743481 - RNA, 13 nt, Human
agauagccaaggc

SEQ ID NO: 1743482 - RNA, 22 nt, Human
agaggggaacagacuggaagca

SEQ ID NO: 1743483 - RNA, 16 nt, Human
agaggggaagagacuu

SEQ ID NO: 1743484 - RNA, 13 nt, Human
agaggagaggggc

SEQ ID NO: 1743485 - RNA, 21 nt, Human
agagaagagauugugguuuca

SEQ ID NO: 1743486 - RNA, 10 nt, Human
agagaagaga

SEQ ID NO: 1743487 - RNA, 18 nt, Human
agagaaaguacuucucca

SEQ ID NO: 1743488 - RNA, 16 nt, Human
agagagcuucuguugc

SEQ ID NO: 1743489 - RNA, 23 nt, Human
agagagcuucuguugcugccuca

SEQ ID NO: 1743490 - RNA, 20 nt, Human
agagagcuucuguugcugcc

SEQ ID NO: 1743491 - RNA, 23 nt, Human
agagaggguggugaccucugccu

SEQ ID NO: 1743492 - RNA, 16 nt, Human
agagaguggcuccucc

SEQ ID NO: 1743493 - RNA, 14 nt, Human
agagaguggcuccu

SEQ ID NO: 1743494 - RNA, 23 nt, Human
agacugaguacguugugcauuug

SEQ ID NO: 1743495 - RNA, 17 nt, Human
agacagcccgggcucug

SEQ ID NO: 1743496 - RNA, 20 nt, Human
agacagcccgggcucugccu

SEQ ID NO: 1743497 - RNA, 18 nt, Human
agacagcccgggcucugc

SEQ ID NO: 1743498 - RNA, 21 nt, Human
agaccaucccugaaggccccg

SEQ ID NO: 1743499 - RNA, 18 nt, Human
agaccaucccugaaggcc

SEQ ID NO: 1743500 - RNA, 17 nt, Human
agaccaucccugaaggc

SEQ ID NO: 1743501 - RNA, 14 nt, Human
agaccaucccugaa

SEQ ID NO: 1743502 - RNA, 13 nt, Human
agaccaucccuga

SEQ ID NO: 1743503 - RNA, 18 nt, Human
agacgggggcagagaggg

SEQ ID NO: 1743504 - RNA, 19 nt, Human
agacggagucccaccuugg

SEQ ID NO: 1743505 - RNA, 13 nt, Human
agacaaugacuua

SEQ ID NO: 1743506 - RNA, 17 nt, Human
agacaaugacuuacugu

SEQ ID NO: 1743507 - RNA, 19 nt, Human
agacaaugacuuacuguac

SEQ ID NO: 1743508 - RNA, 15 nt, Human
agacaauuuauuaug

SEQ ID NO: 1743509 - RNA, 21 nt, Human
agacaauuuauuauggcacau

SEQ ID NO: 1743510 - RNA, 14 nt, Human
auccuccucagauc

SEQ ID NO: 1743511 - RNA, 13 nt, Human
aucgaugcagugc

SEQ ID NO: 1743512 - RNA, 22 nt, Human
auccuccaggugcacaagcucc

SEQ ID NO: 1743513 - RNA, 19 nt, Human
auccuccaggugcacaagc

SEQ ID NO: 1743514 - RNA, 14 nt, Human
auccuccaggugca

SEQ ID NO: 1743515 - RNA, 13 nt, Human
auccuccaggugc

SEQ ID NO: 1743516 - RNA, 11 nt, Human
auccuccucag

SEQ ID NO: 1743517 - RNA, 23 nt, Human
auccucauacccacccccaccca

SEQ ID NO: 1743518 - RNA, 22 nt, Human
auccucauacccacccccaccc

SEQ ID NO: 1743519 - RNA, 19 nt, Human
auccucauacccaccccca

SEQ ID NO: 1743520 - RNA, 18 nt, Human
auccucauacccaccccc

SEQ ID NO: 1743521 - RNA, 13 nt, Human
aucccucauccuc

SEQ ID NO: 1743522 - RNA, 15 nt, Human
aucccuacuguaauu

SEQ ID NO: 1743523 - RNA, 14 nt, Human
aucccggcugcccu

SEQ ID NO: 1743524 - RNA, 20 nt, Human
auccacccaccucagccucc

SEQ ID NO: 1743525 - RNA, 18 nt, Human
auccacccaccucagccu

SEQ ID NO: 1743526 - RNA, 13 nt, Human
aucaccugcccug

SEQ ID NO: 1743527 - RNA, 12 nt, Human
aucaccugcccu

SEQ ID NO: 1743528 - RNA, 12 nt, Human
aucagcugcuac

SEQ ID NO: 1743529 - RNA, 21 nt, Human
aucagccugggcaaugugaua

SEQ ID NO: 1743530 - RNA, 20 nt, Human
aucagccugggcaaugugau

SEQ ID NO: 1743531 - RNA, 11 nt, Human
aucagccuggg

SEQ ID NO: 1743532 - RNA, 23 nt, Human
aucagcugcuacuacuccuguag

SEQ ID NO: 1743533 - RNA, 13 nt, Human
aucagcugcuacu

SEQ ID NO: 1743534 - RNA, 14 nt, Human
augagccuggcaag

SEQ ID NO: 1743535 - RNA, 13 nt, Human
augagccuggcaa

SEQ ID NO: 1743536 - RNA, 23 nt, Human
augaaaaaauauauaucaaauau

SEQ ID NO: 1743537 - RNA, 22 nt, Human
augaaaaaauauauaucaaaua

SEQ ID NO: 1743538 - RNA, 17 nt, Human
augaaaaaauauauauc

SEQ ID NO: 1743539 - RNA, 14 nt, Human
augaaaaaauauau

SEQ ID NO: 1743540 - RNA, 16 nt, Human
augacuccagaauuuc

SEQ ID NO: 1743541 - RNA, 12 nt, Human
augacuccagaa

SEQ ID NO: 1743542 - RNA, 17 nt, Human
augacuccagaauuucc

SEQ ID NO: 1743543 - RNA, 12 nt, Human
augacccagugg

SEQ ID NO: 1743544 - RNA, 21 nt, Human
augaagcuuuuaugugaaaca

SEQ ID NO: 1743545 - RNA, 20 nt, Human
augaagcuuuuaugugaaac

SEQ ID NO: 1743546 - RNA, 19 nt, Human
augaagcuuuuaugugaaa

SEQ ID NO: 1743547 - RNA, 18 nt, Human
augaagcuuuuaugugaa

SEQ ID NO: 1743548 - RNA, 22 nt, Human
aucuuauaauuuaaaauaugcu

SEQ ID NO: 1743549 - RNA, 17 nt, Human
aucugggccagaauuuc

SEQ ID NO: 1743550 - RNA, 15 nt, Human
aucugggccagaauu

SEQ ID NO: 1743551 - RNA, 19 nt, Human
aucuuccaacucaaacucu

SEQ ID NO: 1743552 - RNA, 22 nt, Human
aucucucgugauugauaagaac

SEQ ID NO: 1743553 - RNA, 15 nt, Human
aucucucuucuuuuc

SEQ ID NO: 1743554 - RNA, 17 nt, Human
aucuucuuuauaauucu

SEQ ID NO: 1743555 - RNA, 22 nt, Human
aucuucugaacuuggcgcugcc

SEQ ID NO: 1743556 - RNA, 17 nt, Human
aucuugaagacuuuucu

SEQ ID NO: 1743557 - RNA, 18 nt, Human
auguuuuaagaggcaggg

SEQ ID NO: 1743558 - RNA, 16 nt, Human
auguuuuaagaggcag

SEQ ID NO: 1743559 - RNA, 13 nt, Human
auuaaauucuugc

SEQ ID NO: 1743560 - RNA, 16 nt, Human
auuaaaugcccagccc

SEQ ID NO: 1743561 - RNA, 15 nt, Human
auuaaaugcccagcc

SEQ ID NO: 1743562 - RNA, 14 nt, Human
auuaaaugcccagc

SEQ ID NO: 1743563 - RNA, 18 nt, Human
auguucucugaggacacu

SEQ ID NO: 1743564 - RNA, 22 nt, Human
auguucugacccugcuucaaau

SEQ ID NO: 1743565 - RNA, 20 nt, Human
auguucuuaguggauguucu

SEQ ID NO: 1743566 - RNA, 15 nt, Human
auguucuuaauucuu

SEQ ID NO: 1743567 - RNA, 20 nt, Human
auguucuuucacccuuuucu

SEQ ID NO: 1743568 - RNA, 18 nt, Human
auguuucuuuguaaugaa

SEQ ID NO: 1743569 - RNA, 14 nt, Human
auguguaaguauuc

SEQ ID NO: 1743570 - RNA, 17 nt, Human
auguacauguacugauu

SEQ ID NO: 1743571 - RNA, 19 nt, Human
augucaaauauuuagaugu

SEQ ID NO: 1743572 - RNA, 23 nt, Human
augucaaauauuuagauguaauu

SEQ ID NO: 1743573 - RNA, 17 nt, Human
augucacaggcaggucc

SEQ ID NO: 1743574 - RNA, 16 nt, Human
augucacaggcagguc

SEQ ID NO: 1743575 - RNA, 15 nt, Human
augucacaggcaggu

SEQ ID NO: 1743576 - RNA, 17 nt, Human
auguaagcucuacugag

SEQ ID NO: 1743577 - RNA, 23 nt, Human
augauguauguugaagccuuugu

SEQ ID NO: 1743578 - RNA, 16 nt, Human
augaugugugaaaacu

SEQ ID NO: 1743579 - RNA, 17 nt, Human
augcacacauuuuuuaa

SEQ ID NO: 1743580 - RNA, 19 nt, Human
augcacacauuuuuuaaau

SEQ ID NO: 1743581 - RNA, 22 nt, Human
augcacacauuuuuuaaaugca

SEQ ID NO: 1743582 - RNA, 14 nt, Human
augcacagcuaaca

SEQ ID NO: 1743583 - RNA, 23 nt, Human
augcacacauuuuuuaaaugcac

SEQ ID NO: 1743584 - RNA, 21 nt, Human
augcacagcuaacauggaagu

SEQ ID NO: 1743585 - RNA, 17 nt, Human
augccugguggcagcug

SEQ ID NO: 1743586 - RNA, 16 nt, Human
augccugguggcagcu

SEQ ID NO: 1743587 - RNA, 15 nt, Human
augccugguggcagc

SEQ ID NO: 1743588 - RNA, 17 nt, Human
augccugggcagaagga

SEQ ID NO: 1743589 - RNA, 23 nt, Human
augccuggauggggcugcaccgg

SEQ ID NO: 1743590 - RNA, 21 nt, Human
augccuggauggggcugcacc

SEQ ID NO: 1743591 - RNA, 10 nt, Human
augcauuuga

SEQ ID NO: 1743592 - RNA, 12 nt, Human
augcauuugaaa

SEQ ID NO: 1743593 - RNA, 18 nt, Human
augcauuugaaaauuuug

SEQ ID NO: 1743594 - RNA, 23 nt, Human
augcaugaaguaauaugcacaca

SEQ ID NO: 1743595 - RNA, 20 nt, Human
augcaugaaguaauaugcac

SEQ ID NO: 1743596 - RNA, 21 nt, Human
augccuuuguacuuuagggaa

SEQ ID NO: 1743597 - RNA, 15 nt, Human
augggaaugaauguc

SEQ ID NO: 1743598 - RNA, 21 nt, Human
augggaaugaaugucagugug

SEQ ID NO: 1743599 - RNA, 23 nt, Human
auggcugccaaugggagcucaug

SEQ ID NO: 1743600 - RNA, 20 nt, Human
auggaaaugggcagagcaga

SEQ ID NO: 1743601 - RNA, 19 nt, Human
auggaaaugggcagagcag

SEQ ID NO: 1743602 - RNA, 13 nt, Human
auggaaauguuua

SEQ ID NO: 1743603 - RNA, 12 nt, Human
auaccugucccc

SEQ ID NO: 1743604 - RNA, 13 nt, Human
auaccuguccccc

SEQ ID NO: 1743605 - RNA, 14 nt, Human
auaauuacuauguc

SEQ ID NO: 1743606 - RNA, 22 nt, Human
auacccccugcaaagcccagcu

SEQ ID NO: 1743607 - RNA, 19 nt, Human
auaaugugaaacuggauua

SEQ ID NO: 1743608 - RNA, 21 nt, Human
auaaugugaaacuggauuaaa

SEQ ID NO: 1743609 - RNA, 18 nt, Human
auaaugugaaacuggauu

SEQ ID NO: 1743610 - RNA, 22 nt, Human
auaaguguguguuuuucauaaa

SEQ ID NO: 1743611 - RNA, 19 nt, Human
auaaguguguguuuuucau

SEQ ID NO: 1743612 - RNA, 19 nt, Human
auaaguauuuaauucaugu

SEQ ID NO: 1743613 - RNA, 15 nt, Human
auaaguggugugugu

SEQ ID NO: 1743614 - RNA, 16 nt, Human
auauaggaacuuaaau

SEQ ID NO: 1743615 - RNA, 19 nt, Human
auacuugaaaauuaacaug

SEQ ID NO: 1743616 - RNA, 15 nt, Human
auaguaugguggcug

SEQ ID NO: 1743617 - RNA, 16 nt, Human
auacuugaaaauuaac

SEQ ID NO: 1743618 - RNA, 15 nt, Human
auacuugaaaauuaa

SEQ ID NO: 1743619 - RNA, 16 nt, Human
auaguaugguggcugg

SEQ ID NO: 1743620 - RNA, 15 nt, Human
auauaagugauugcu

SEQ ID NO: 1743621 - RNA, 15 nt, Human
auauaaguguguguu

SEQ ID NO: 1743622 - RNA, 22 nt, Human
auaugccugggcagaaggaaga

SEQ ID NO: 1743623 - RNA, 17 nt, Human
auaugcaguuuuccuua

SEQ ID NO: 1743624 - RNA, 19 nt, Human
auaugcuuauacacuuaca

SEQ ID NO: 1743625 - RNA, 16 nt, Human
auaugcuuauacacuu

SEQ ID NO: 1743626 - RNA, 14 nt, Human
auaugcuuauacac

SEQ ID NO: 1743627 - RNA, 21 nt, Human
auaugcuuauacacuuacacu

SEQ ID NO: 1743628 - RNA, 19 nt, Human
auaugcuuguaacuaaaau

SEQ ID NO: 1743629 - RNA, 16 nt, Human
auauuuauaaaaauaa

SEQ ID NO: 1743630 - RNA, 18 nt, Human
auauuuaguguucauaaa

SEQ ID NO: 1743631 - RNA, 13 nt, Human
auauucaggaagc

SEQ ID NO: 1743632 - RNA, 16 nt, Human
auauucaggaagcuca

SEQ ID NO: 1743633 - RNA, 14 nt, Human
auauucaggaagcu

SEQ ID NO: 1743634 - RNA, 17 nt, Human
auauucaggaagcucag

SEQ ID NO: 1743635 - RNA, 20 nt, Human
auauuuagauguaauuuugu

SEQ ID NO: 1743636 - RNA, 22 nt, Human
auauuuagauguaauuuugugu

SEQ ID NO: 1743637 - RNA, 18 nt, Human
aguuguaccgcaauguga

SEQ ID NO: 1743638 - RNA, 19 nt, Human
aguuguaccgcaaugugac

SEQ ID NO: 1743639 - RNA, 18 nt, Human
aguuacagacaaagcgug

SEQ ID NO: 1743640 - RNA, 16 nt, Human
aguuguuacauuuuua

SEQ ID NO: 1743641 - RNA, 23 nt, Human
aguuguuaauaaaaguacauguu

SEQ ID NO: 1743642 - RNA, 13 nt, Human
aguuguuacauuu

SEQ ID NO: 1743643 - RNA, 15 nt, Human
aguuguuacauuuuu

SEQ ID NO: 1743644 - RNA, 18 nt, Human
agugauuaccagggacug

SEQ ID NO: 1743645 - RNA, 15 nt, Human
agugauuaccaggga

SEQ ID NO: 1743646 - RNA, 19 nt, Human
agugauucucaugccucag

SEQ ID NO: 1743647 - RNA, 18 nt, Human
agugauucucaugccuca

SEQ ID NO: 1743648 - RNA, 23 nt, Human
agugugacaaggauugcuacugu

SEQ ID NO: 1743649 - RNA, 16 nt, Human
agucaagugaaaaagg

SEQ ID NO: 1743650 - RNA, 18 nt, Human
agucaaggguaggguggg

SEQ ID NO: 1743651 - RNA, 20 nt, Human
agucaagugaaaaaggagga

SEQ ID NO: 1743652 - RNA, 13 nt, Human
agugauccuccca

SEQ ID NO: 1743653 - RNA, 16 nt, Human
aguccacaguggaacc

SEQ ID NO: 1743654 - RNA, 19 nt, Human
acccaugcugcccugugag

SEQ ID NO: 1743655 - RNA, 18 nt, Human
acccaugcugcccuguga

SEQ ID NO: 1743656 - RNA, 17 nt, Human
acccaugcugcccugug

SEQ ID NO: 1743657 - RNA, 15 nt, Human
acccacaagaaauga

SEQ ID NO: 1743658 - RNA, 16 nt, Human
acccaagggccuggcc

SEQ ID NO: 1743659 - RNA, 13 nt, Human
acccaagggccug

SEQ ID NO: 1743660 - RNA, 18 nt, Human
accccgaccaccugccca

SEQ ID NO: 1743661 - RNA, 15 nt, Human
accccggccaccugc

SEQ ID NO: 1743662 - RNA, 22 nt, Human
accccuaaagagauacuuugau

SEQ ID NO: 1743663 - RNA, 18 nt, Human
accaucccugaaggcccc

SEQ ID NO: 1743664 - RNA, 12 nt, Human
accaucauugaa

SEQ ID NO: 1743665 - RNA, 17 nt, Human
accaucaugucuggcua

SEQ ID NO: 1743666 - RNA, 16 nt, Human
accaucaugucuggcu

SEQ ID NO: 1743667 - RNA, 22 nt, Human
accaucccugaaggccccgccc

SEQ ID NO: 1743668 - RNA, 21 nt, Human
accaucccugaaggccccgcc

SEQ ID NO: 1743669 - RNA, 14 nt, Human
accaucaugucugg

SEQ ID NO: 1743670 - RNA, 20 nt, Human
accccucaacaccucugcac

SEQ ID NO: 1743671 - RNA, 20 nt, Human
acaucagcacgauuucuguu

SEQ ID NO: 1743672 - RNA, 21 nt, Human
acaucagcacgauuucuguuu

SEQ ID NO: 1743673 - RNA, 22 nt, Human
acaucagcacgauuucuguuua

SEQ ID NO: 1743674 - RNA, 23 nt, Human
acauaaacaagaccacguuucua

SEQ ID NO: 1743675 - RNA, 13 nt, Human
acauguuacaaca

SEQ ID NO: 1743676 - RNA, 21 nt, Human
acauguuuuucuucucccuca

SEQ ID NO: 1743677 - RNA, 23 nt, Human
acaugcacagcuaacauggaagu

SEQ ID NO: 1743678 - RNA, 20 nt, Human
acaugcacagcuaacaugga

SEQ ID NO: 1743679 - RNA, 19 nt, Human
acaugcaaggucauuuuuu

SEQ ID NO: 1743680 - RNA, 17 nt, Human
accagcagccuggaccc

SEQ ID NO: 1743681 - RNA, 14 nt, Human
accagcagccugga

SEQ ID NO: 1743682 - RNA, 15 nt, Human
accacguuucuaaag

SEQ ID NO: 1743683 - RNA, 19 nt, Human
accacguuucuaaaggcua

SEQ ID NO: 1743684 - RNA, 14 nt, Human
accacuacauucug

SEQ ID NO: 1743685 - RNA, 14 nt, Human
accacgcccggcua

SEQ ID NO: 1743686 - RNA, 20 nt, Human
accacgcccggcuaauuuuu

SEQ ID NO: 1743687 - RNA, 23 nt, Human
acagagucucacuguugcccagg

SEQ ID NO: 1743688 - RNA, 19 nt, Human
acagagucucacuguugcc

SEQ ID NO: 1743689 - RNA, 17 nt, Human
acagagucucacuguug

SEQ ID NO: 1743690 - RNA, 14 nt, Human
acagagucucacug

SEQ ID NO: 1743691 - RNA, 12 nt, Human
acagagucucac

SEQ ID NO: 1743692 - RNA, 22 nt, Human
acagaggggguggccucccaac

SEQ ID NO: 1743693 - RNA, 15 nt, Human
acagccaugauucuu

SEQ ID NO: 1743694 - RNA, 21 nt, Human
acagaacacauaauucaggaa

SEQ ID NO: 1743695 - RNA, 12 nt, Human
acagaagcagcu

SEQ ID NO: 1743696 - RNA, 14 nt, Human
acagaagcagcucu

SEQ ID NO: 1743697 - RNA, 13 nt, Human
acagaagcagcuc

SEQ ID NO: 1743698 - RNA, 15 nt, Human
acagaagcagcucuu

SEQ ID NO: 1743699 - RNA, 16 nt, Human
acaggcaagcaccucc

SEQ ID NO: 1743700 - RNA, 15 nt, Human
acaggcaagcaccuc

SEQ ID NO: 1743701 - RNA, 18 nt, Human
acaggcaagcaccuccug

SEQ ID NO: 1743702 - RNA, 19 nt, Human
acaggcaagcaccuccugc

SEQ ID NO: 1743703 - RNA, 21 nt, Human
acagcugcucaauaaaguaca

SEQ ID NO: 1743704 - RNA, 23 nt, Human
acaggugugaaccaccacaccca

SEQ ID NO: 1743705 - RNA, 20 nt, Human
acaggugugaaccaccacac

SEQ ID NO: 1743706 - RNA, 21 nt, Human
acaggugugagccaccacgcc

SEQ ID NO: 1743707 - RNA, 22 nt, Human
acaggugugagccaccacgccc

SEQ ID NO: 1743708 - RNA, 20 nt, Human
acagcucugcauacucauua

SEQ ID NO: 1743709 - RNA, 15 nt, Human
acagcuccuucuguc

SEQ ID NO: 1743710 - RNA, 14 nt, Human
acagcugccuggga

SEQ ID NO: 1743711 - RNA, 13 nt, Human
acagcucuguccu

SEQ ID NO: 1743712 - RNA, 23 nt, Human
acagcugccugggaucccucauc

SEQ ID NO: 1743713 - RNA, 14 nt, Human
acagcuccuucugu

SEQ ID NO: 1743714 - RNA, 13 nt, Human
acagcuccuucug

SEQ ID NO: 1743715 - RNA, 12 nt, Human
acagcuccuucu

SEQ ID NO: 1743716 - RNA, 13 nt, Human
aauuuugaaaaac

SEQ ID NO: 1743717 - RNA, 18 nt, Human
acaacuaugauuuggaaa

SEQ ID NO: 1743718 - RNA, 13 nt, Human
acaaagacugagu

SEQ ID NO: 1743719 - RNA, 15 nt, Human
acaaacgggcucagc

SEQ ID NO: 1743720 - RNA, 21 nt, Human
acaaaccuguuucugcagcca

SEQ ID NO: 1743721 - RNA, 12 nt, Human
aauuuucuuuca

SEQ ID NO: 1743722 - RNA, 20 nt, Human
acaaaauguaggguuauaau

SEQ ID NO: 1743723 - RNA, 23 nt, Human
acaaguaugaauaaagacaccua

SEQ ID NO: 1743724 - RNA, 21 nt, Human
acaaguaugaauaaagacacc

SEQ ID NO: 1743725 - RNA, 24 nt, Human
acaacuugcacguauuuuaauagc

SEQ ID NO: 1743726 - RNA, 18 nt, Human
acacaaacgggcucagca

SEQ ID NO: 1743727 - RNA, 16 nt, Human
acaauuuauuauggca

SEQ ID NO: 1743728 - RNA, 15 nt, Human
acaauuuauuauggc

SEQ ID NO: 1743729 - RNA, 14 nt, Human
acaccacuacauuc

SEQ ID NO: 1743730 - RNA, 13 nt, Human
acaccagagccca

SEQ ID NO: 1743731 - RNA, 12 nt, Human
acaccagagccc

SEQ ID NO: 1743732 - RNA, 19 nt, Human
acacgcuccuuccucugag

SEQ ID NO: 1743733 - RNA, 17 nt, Human
acacgcuccuuccucug

SEQ ID NO: 1743734 - RNA, 12 nt, Human
acacagcucugu

SEQ ID NO: 1743735 - RNA, 11 nt, Human
acacagcucug

SEQ ID NO: 1743736 - RNA, 14 nt, Human
acacagcucugucc

SEQ ID NO: 1743737 - RNA, 15 nt, Human
acacuaaccacgcug

SEQ ID NO: 1743738 - RNA, 14 nt, Human
acacuaaccacgcu

SEQ ID NO: 1743739 - RNA, 15 nt, Human
acacggacacucaaa

SEQ ID NO: 1743740 - RNA, 14 nt, Human
agaaaauaacaaua

SEQ ID NO: 1743741 - RNA, 20 nt, Human
agaaaauggacguguuauga

SEQ ID NO: 1743742 - RNA, 15 nt, Human
agaaaauggacgugu

SEQ ID NO: 1743743 - RNA, 23 nt, Human
agaaaauggaagacagcucuuau

SEQ ID NO: 1743744 - RNA, 23 nt, Human
agaaaauggacguguuaugacuc

SEQ ID NO: 1743745 - RNA, 22 nt, Human
agaaaauggacguguuaugacu

SEQ ID NO: 1743746 - RNA, 15 nt, Human
acuuuuauaaacuuu

SEQ ID NO: 1743747 - RNA, 19 nt, Human
acuuuuauaaacuuuaccu

SEQ ID NO: 1743748 - RNA, 22 nt, Human
acuuuuauaaacuuuaccuuuu

SEQ ID NO: 1743749 - RNA, 20 nt, Human
agaaaagggaacugaacauu

SEQ ID NO: 1743750 - RNA, 23 nt, Human
acuuuagggaaguacuuuuggca

SEQ ID NO: 1743751 - RNA, 22 nt, Human
acuuucauauuuuaaacagagg

SEQ ID NO: 1743752 - RNA, 23 nt, Human
acuuuccuucauucaacccaccu

SEQ ID NO: 1743753 - RNA, 23 nt, Human
acuuuguucuggcucuuccaggc

SEQ ID NO: 1743754 - RNA, 16 nt, Human
acuuucuagccagagg

SEQ ID NO: 1743755 - RNA, 23 nt, Human
agaaaggaggggauagagagaga

SEQ ID NO: 1743756 - RNA, 20 nt, Human
agaaaggaggggauagagag

SEQ ID NO: 1743757 - RNA, 18 nt, Human
agaaauaaaguuucuguu

SEQ ID NO: 1743758 - RNA, 15 nt, Human
agaaauaaaguuucu

SEQ ID NO: 1743759 - RNA, 16 nt, Human
agaaaggauaaaguug

SEQ ID NO: 1743760 - RNA, 14 nt, Human
acuggagaaaaugg

SEQ ID NO: 1743761 - RNA, 14 nt, Human
acuggaagcacagc

SEQ ID NO: 1743762 - RNA, 15 nt, Human
acuggaagcacagcu

SEQ ID NO: 1743763 - RNA, 16 nt, Human
acuggaagcacagcuu

SEQ ID NO: 1743764 - RNA, 20 nt, Human
acugcccccucugcccugcg

SEQ ID NO: 1743765 - RNA, 18 nt, Human
acugcccccucugcccug

SEQ ID NO: 1743766 - RNA, 19 nt, Human
acugcccccucugcccugc

SEQ ID NO: 1743767 - RNA, 12 nt, Human
acugucuucagu

SEQ ID NO: 1743768 - RNA, 16 nt, Human
acugugccaugugcca

SEQ ID NO: 1743769 - RNA, 23 nt, Human
acugguggcccgacagccuggca

SEQ ID NO: 1743770 - RNA, 20 nt, Human
acugguggcccgacagccug

SEQ ID NO: 1743771 - RNA, 22 nt, Human
acugguggcccgacagccuggc

SEQ ID NO: 1743772 - RNA, 21 nt, Human
acugguggcccgacagccugg

SEQ ID NO: 1743773 - RNA, 19 nt, Human
acugucucaagagggcacu

SEQ ID NO: 1743774 - RNA, 13 nt, Human
acuguuucaaacu

SEQ ID NO: 1743775 - RNA, 19 nt, Human
acuucacauauugauuucc

SEQ ID NO: 1743776 - RNA, 15 nt, Human
acuuauuuauauaaa

SEQ ID NO: 1743777 - RNA, 19 nt, Human
acuuguaaaggaauuuaaa

SEQ ID NO: 1743778 - RNA, 20 nt, Human
acuuguaaaggaauuuaaaa

SEQ ID NO: 1743779 - RNA, 14 nt, Human
acuuggucugugag

SEQ ID NO: 1743780 - RNA, 15 nt, Human
acuuggucugugaga

SEQ ID NO: 1743781 - RNA, 19 nt, Human
acuucugccauauucuguu

SEQ ID NO: 1743782 - RNA, 23 nt, Human
acuucacauauugauuuccguua

SEQ ID NO: 1743783 - RNA, 18 nt, Human
acuucugccauauucugu

SEQ ID NO: 1743784 - RNA, 22 nt, Human
acuucugccagcauaauacuug

SEQ ID NO: 1743785 - RNA, 21 nt, Human
acuuggucugugagaugcuag

SEQ ID NO: 1743786 - RNA, 18 nt, Human
acuuguaaaugugguaaa

SEQ ID NO: 1743787 - RNA, 20 nt, Human
acuuguaaaugugguaaaga

SEQ ID NO: 1743788 - RNA, 14 nt, Human
acuagcuauggugu

SEQ ID NO: 1743789 - RNA, 15 nt, Human
acuaggguccugggg

SEQ ID NO: 1743790 - RNA, 16 nt, Human
acuaggguccugggga

SEQ ID NO: 1743791 - RNA, 14 nt, Human
acucccccaggugg

SEQ ID NO: 1743792 - RNA, 17 nt, Human
acuccccugcugggugu

SEQ ID NO: 1743793 - RNA, 13 nt, Human
acuccccugcugg

SEQ ID NO: 1743794 - RNA, 12 nt, Human
acuccccuccuu

SEQ ID NO: 1743795 - RNA, 14 nt, Human
acucaguggggagg

SEQ ID NO: 1743796 - RNA, 11 nt, Human
acuauaaugua

SEQ ID NO: 1743797 - RNA, 16 nt, Human
acucaaacucuuaaaa

SEQ ID NO: 1743798 - RNA, 17 nt, Human
acucaaacucuuaaaac

SEQ ID NO: 1743799 - RNA, 12 nt, Human
acucccuuucaa

SEQ ID NO: 1743800 - RNA, 13 nt, Human
acucccuuucaac

SEQ ID NO: 1743801 - RNA, 18 nt, Human
acucuacccucuuagaaa

SEQ ID NO: 1743802 - RNA, 13 nt, Human
acucuacccucuu

SEQ ID NO: 1743803 - RNA, 21 nt, Human
acucuacccucuuagaaaaac

SEQ ID NO: 1743804 - RNA, 14 nt, Human
acucuaucaaguau

SEQ ID NO: 1743805 - RNA, 16 nt, Human
acucuaucaaguauua

SEQ ID NO: 1743806 - RNA, 21 nt, Human
acucuaucaaguauuauaccu

SEQ ID NO: 1743807 - RNA, 16 nt, Human
acucugugucaggugg

SEQ ID NO: 1743808 - RNA, 18 nt, Human
acucuuaaaacccaagug

SEQ ID NO: 1743809 - RNA, 11 nt, Human
acucuuaaaac

SEQ ID NO: 1743810 - RNA, 15 nt, Human
acuaaguuuuuaugg

SEQ ID NO: 1743811 - RNA, 22 nt, Human
acuaaguuuuuauggcuuuugu

SEQ ID NO: 1743812 - RNA, 19 nt, Human
acgugauuuugcuguagaa

SEQ ID NO: 1743813 - RNA, 18 nt, Human
acgcugugcugcccugcc

SEQ ID NO: 1743814 - RNA, 17 nt, Human
acgcugugcugcccugc

SEQ ID NO: 1743815 - RNA, 16 nt, Human
acgcugugcugcccug

SEQ ID NO: 1743816 - RNA, 17 nt, Human
acgccagauucuuuccu

SEQ ID NO: 1743817 - RNA, 15 nt, Human
acgcugugcugcccu

SEQ ID NO: 1743818 - RNA, 17 nt, Human
acguggcugcuucaagg

SEQ ID NO: 1743819 - RNA, 15 nt, Human
acguggcugcuucaa

SEQ ID NO: 1743820 - RNA, 14 nt, Human
acguggcugcuuca

SEQ ID NO: 1743821 - RNA, 13 nt, Human
acguggcugcuuc

SEQ ID NO: 1743822 - RNA, 12 nt, Human
acgauuucuguu

SEQ ID NO: 1743823 - RNA, 13 nt, Human
acgauuucuguuu

SEQ ID NO: 1743824 - RNA, 14 nt, Human
acgauuucuguuua

SEQ ID NO: 1743825 - RNA, 17 nt, Human
acgauuucuguuuagau

SEQ ID NO: 1743826 - RNA, 18 nt, Human
acgccacugcacuauagc

SEQ ID NO: 1743827 - RNA, 23 nt, Human
accuuucaauaggaaaaacugau

SEQ ID NO: 1743828 - RNA, 21 nt, Human
accuuucaauaggaaaaacug

SEQ ID NO: 1743829 - RNA, 17 nt, Human
accuuucaauaggaaaa

SEQ ID NO: 1743830 - RNA, 14 nt, Human
accuuggcugcagg

SEQ ID NO: 1743831 - RNA, 16 nt, Human
accuuucaauaggaaa

SEQ ID NO: 1743832 - RNA, 13 nt, Human
accuuuauucugg

SEQ ID NO: 1743833 - RNA, 12 nt, Human
accuuuauucug

SEQ ID NO: 1743834 - RNA, 12 nt, Human
accuuggcugca

SEQ ID NO: 1743835 - RNA, 14 nt, Human
accuuggcucaagu

SEQ ID NO: 1743836 - RNA, 22 nt, Human
accugccccuccucucugcccu

SEQ ID NO: 1743837 - RNA, 20 nt, Human
accugccccuccucucugcc

SEQ ID NO: 1743838 - RNA, 15 nt, Human
accuguaaugacagg

SEQ ID NO: 1743839 - RNA, 20 nt, Human
accuguaaugacaggccugu

SEQ ID NO: 1743840 - RNA, 18 nt, Human
accucugcacaagcugca

SEQ ID NO: 1743841 - RNA, 16 nt, Human
accucugcacaagcug

SEQ ID NO: 1743842 - RNA, 21 nt, Human
accucugcacaagcugcaccc

SEQ ID NO: 1743843 - RNA, 23 nt, Human
accugccccucaacucuccucca

SEQ ID NO: 1743844 - RNA, 18 nt, Human
accugccccuccucucug

SEQ ID NO: 1743845 - RNA, 14 nt, Human
accugccccuccuc

SEQ ID NO: 1743846 - RNA, 21 nt, Human
accugcccaaccugcucuccu

SEQ ID NO: 1743847 - RNA, 13 nt, Human
aacaugauuuggg

SEQ ID NO: 1743848 - RNA, 13 nt, Human
aacagcucgacuu

SEQ ID NO: 1743849 - RNA, 17 nt, Human
aaccaguguuguggauu

SEQ ID NO: 1743850 - RNA, 14 nt, Human
aaccagaucauugu

SEQ ID NO: 1743851 - RNA, 21 nt, Human
aacauguaauuaaguacuaug

SEQ ID NO: 1743852 - RNA, 14 nt, Human
aacauguaauuaag

SEQ ID NO: 1743853 - RNA, 23 nt, Human
aacauguaauuaaguacuaugua

SEQ ID NO: 1743854 - RNA, 22 nt, Human
aaccacucuaucaaguauuaua

SEQ ID NO: 1743855 - RNA, 14 nt, Human
aacccuggugacca

SEQ ID NO: 1743856 - RNA, 19 nt, Human
aacacauuuuucuuaggga

SEQ ID NO: 1743857 - RNA, 18 nt, Human
aaauugcauuuccugaca

SEQ ID NO: 1743858 - RNA, 17 nt, Human
aacaaagaaauuaugug

SEQ ID NO: 1743859 - RNA, 15 nt, Human
aacaaagaaauuaug

SEQ ID NO: 1743860 - RNA, 15 nt, Human
aacugaauuuugucu

SEQ ID NO: 1743861 - RNA, 19 nt, Human
aacugaccagccuccaugc

SEQ ID NO: 1743862 - RNA, 14 nt, Human
aacugaccagccuc

SEQ ID NO: 1743863 - RNA, 19 nt, Human
aacugauuuuuuuuuccuu

SEQ ID NO: 1743864 - RNA, 17 nt, Human
aacugauuuuuuuuucc

SEQ ID NO: 1743865 - RNA, 19 nt, Human
aacuuaaauaaugugaaac

SEQ ID NO: 1743866 - RNA, 17 nt, Human
aacuuaaauaaugugaa

SEQ ID NO: 1743867 - RNA, 16 nt, Human
aacucaccugccccuc

SEQ ID NO: 1743868 - RNA, 15 nt, Human
aacucaccugccccu

SEQ ID NO: 1743869 - RNA, 15 nt, Human
aacucaccccagccc

SEQ ID NO: 1743870 - RNA, 12 nt, Human
aacucaccccag

SEQ ID NO: 1743871 - RNA, 16 nt, Human
aacugaacucugacaa

SEQ ID NO: 1743872 - RNA, 20 nt, Human
aacugaacucugacaacaga

SEQ ID NO: 1743873 - RNA, 19 nt, Human
aacugaacucugacaacag

SEQ ID NO: 1743874 - RNA, 23 nt, Human
aacugaacucugacaacagacuu

SEQ ID NO: 1743875 - RNA, 13 nt, Human
aacuucacauauu

SEQ ID NO: 1743876 - RNA, 14 nt, Human
aacuuuuuuuuaag

SEQ ID NO: 1743877 - RNA, 20 nt, Human
aacuuuuuuuuaaguuacac

SEQ ID NO: 1743878 - RNA, 16 nt, Human
aacuuuuauaaacuuu

SEQ ID NO: 1743879 - RNA, 19 nt, Human
aacuuuuauaaacuuuacc

SEQ ID NO: 1743880 - RNA, 19 nt, Human
aacuuugaccucugcagca

SEQ ID NO: 1743881 - RNA, 20 nt, Human
aacuuugaccucugcagcaa

SEQ ID NO: 1743882 - RNA, 12 nt, Human
aacuuuuauaaa

SEQ ID NO: 1743883 - RNA, 15 nt, Human
aacuuuuauaaacuu

SEQ ID NO: 1743884 - RNA, 13 nt, Human
aacuuugaccucu

SEQ ID NO: 1743885 - RNA, 14 nt, Human
aacuuugaccucug

SEQ ID NO: 1743886 - RNA, 17 nt, Human
aacuuugaccucugcag

SEQ ID NO: 1743887 - RNA, 17 nt, Human
aaacagauuuggaaaga

SEQ ID NO: 1743888 - RNA, 22 nt, Human
aaacacuguucucugcccucca

SEQ ID NO: 1743889 - RNA, 19 nt, Human
aaacacuguucucugcccu

SEQ ID NO: 1743890 - RNA, 13 nt, Human
aaacacucuugaa

SEQ ID NO: 1743891 - RNA, 18 nt, Human
aaacacuguucucugccc

SEQ ID NO: 1743892 - RNA, 17 nt, Human
aaacacucuugaaaaau

SEQ ID NO: 1743893 - RNA, 14 nt, Human
aaacacucuugaaa

SEQ ID NO: 1743894 - RNA, 13 nt, Human
aaaacacauuuuu

SEQ ID NO: 1743895 - RNA, 15 nt, Human
aaaacacauuuuucu

SEQ ID NO: 1743896 - RNA, 13 nt, Human
aaaauucagugga

SEQ ID NO: 1743897 - RNA, 12 nt, Human
aaagaguacucu

SEQ ID NO: 1743898 - RNA, 17 nt, Human
aaagaguacucuuguuu

SEQ ID NO: 1743899 - RNA, 11 nt, Human
aaagaacaucc

SEQ ID NO: 1743900 - RNA, 15 nt, Human
aaagaaauuaugugc

SEQ ID NO: 1743901 - RNA, 13 nt, Human
aaagaaauuaugu

SEQ ID NO: 1743902 - RNA, 20 nt, Human
aaagaaaacuuguauuaugu

SEQ ID NO: 1743903 - RNA, 12 nt, Human
aaagaaaacuug

SEQ ID NO: 1743904 - RNA, 12 nt, Human
aaauaacaauga

SEQ ID NO: 1743905 - RNA, 22 nt, Human
aaauaaaauuaaagcugaaaac

SEQ ID NO: 1743906 - RNA, 14 nt, Human
aaagugcugggauu

SEQ ID NO: 1743907 - RNA, 12 nt, Human
aaagugcuggga

SEQ ID NO: 1743908 - RNA, 11 nt, Human
aaagugcuggg

SEQ ID NO: 1743909 - RNA, 23 nt, Human
aaagugagacuuugaggguguau

SEQ ID NO: 1743910 - RNA, 22 nt, Human
aaagucucuggaauuugaaaca

SEQ ID NO: 1743911 - RNA, 20 nt, Human
aaagucucuggaauuugaaa

SEQ ID NO: 1743912 - RNA, 18 nt, Human
aaagucuguugauuaaag

SEQ ID NO: 1743913 - RNA, 19 nt, Human
aaagucuguugauuaaaga

SEQ ID NO: 1743914 - RNA, 20 nt, Human
aaagucuguugauuaaagau

SEQ ID NO: 1743915 - RNA, 19 nt, Human
aaagucucuggaauuugaa

SEQ ID NO: 1743916 - RNA, 16 nt, Human
aaagggacugagaaau

SEQ ID NO: 1743917 - RNA, 16 nt, Human
aaagggaacugaacau

SEQ ID NO: 1743918 - RNA, 21 nt, Human
aaagggaacugaacauuccag

SEQ ID NO: 1743919 - RNA, 18 nt, Human
aaauggaagacagcucuu

SEQ ID NO: 1743920 - RNA, 16 nt, Human
aaauggaaaugggcag

SEQ ID NO: 1743921 - RNA, 22 nt, Human
aaauggacguguuaugacucca

SEQ ID NO: 1743922 - RNA, 21 nt, Human
aaauggacguguuaugacucc

SEQ ID NO: 1743923 - RNA, 20 nt, Human
aaauggacguguuaugacuc

SEQ ID NO: 1743924 - RNA, 17 nt, Human
aaauagacagcaugaga

SEQ ID NO: 1743925 - RNA, 16 nt, Human
aaauaguaaaaauaaa

SEQ ID NO: 1743926 - RNA, 13 nt, Human
aaauaguaaaaau

SEQ ID NO: 1743927 - RNA, 14 nt, Human
aaauauaauugaca

SEQ ID NO: 1743928 - RNA, 22 nt, Human
aaauacuguuuuuaacaacuau

SEQ ID NO: 1743929 - RNA, 11 nt, Human
aagcugggcag

SEQ ID NO: 1743930 - RNA, 18 nt, Human
aaggacauugcggacagc

SEQ ID NO: 1743931 - RNA, 13 nt, Human
aagcugggcaggu

SEQ ID NO: 1743932 - RNA, 15 nt, Human
aagcugggcagguug

SEQ ID NO: 1743933 - RNA, 20 nt, Human
aaggacuaggguccugggga

SEQ ID NO: 1743934 - RNA, 18 nt, Human
aaggacuaggguccuggg

SEQ ID NO: 1743935 - RNA, 21 nt, Human
aaggacccggaggggccuggc

SEQ ID NO: 1743936 - RNA, 15 nt, Human
aaggacuaggguccu

SEQ ID NO: 1743937 - RNA, 18 nt, Human
aaggacccggaggggccu

SEQ ID NO: 1743938 - RNA, 12 nt, Human
aagcguggugga

SEQ ID NO: 1743939 - RNA, 20 nt, Human
aagcugcacccucaggcagg

SEQ ID NO: 1743940 - RNA, 21 nt, Human
aagcugcacccucaggcaggu

SEQ ID NO: 1743941 - RNA, 17 nt, Human
aagcuaagguuuagaua

SEQ ID NO: 1743942 - RNA, 22 nt, Human
aagcugcacccucaggcaggug

SEQ ID NO: 1743943 - RNA, 18 nt, Human
aaggcaaggcugucaauu

SEQ ID NO: 1743944 - RNA, 17 nt, Human
aaggcaaggcugucaau

SEQ ID NO: 1743945 - RNA, 22 nt, Human
aagaaauuaugugccagauuua

SEQ ID NO: 1743946 - RNA, 13 nt, Human
aagaaauuaugug

SEQ ID NO: 1743947 - RNA, 21 nt, Human
aagaaauuuccacucaggucu

SEQ ID NO: 1743948 - RNA, 21 nt, Human
aagcagaggaaggagaggaga

SEQ ID NO: 1743949 - RNA, 11 nt, Human
aagcagcucuu

SEQ ID NO: 1743950 - RNA, 14 nt, Human
aagcagaggaagga

SEQ ID NO: 1743951 - RNA, 21 nt, Human
aauaauccuaaacauaugaau

SEQ ID NO: 1743952 - RNA, 12 nt, Human
aauaauaaagaa

SEQ ID NO: 1743953 - RNA, 20 nt, Human
aauaauaaagaauagcuuua

SEQ ID NO: 1743954 - RNA, 16 nt, Human
aauaaugugaaacugg

SEQ ID NO: 1743955 - RNA, 19 nt, Human
aauaauguaagacaaauau

SEQ ID NO: 1743956 - RNA, 12 nt, Human
aauaauguaaga

SEQ ID NO: 1743957 - RNA, 15 nt, Human
aaguuguuaauaaaa

SEQ ID NO: 1743958 - RNA, 17 nt, Human
aagugguauagaaaugc

SEQ ID NO: 1743959 - RNA, 13 nt, Human
aagugguauagaa

SEQ ID NO: 1743960 - RNA, 23 nt, Human
aauaaaauuaaagcugaaaacug

SEQ ID NO: 1743961 - RNA, 19 nt, Human
aauaaacuauuuguaaagu

SEQ ID NO: 1743962 - RNA, 16 nt, Human
aaguaucccuacugua

SEQ ID NO: 1743963 - RNA, 23 nt, Human
aaguccaggcuuuuuuaucaugu

SEQ ID NO: 1743964 - RNA, 11 nt, Human
aaguacuucuu

SEQ ID NO: 1743965 - RNA, 15 nt, Human
aaguacuuuuggcau

SEQ ID NO: 1743966 - RNA, 14 nt, Human
aaguacuuuuggca

SEQ ID NO: 1743967 - RNA, 20 nt, Human
aagguuaauguucaucaucc

SEQ ID NO: 1743968 - RNA, 16 nt, Human
aagguuaauaaaguaa

SEQ ID NO: 1743969 - RNA, 15 nt, Human
aagguuaauaaagua

SEQ ID NO: 1743970 - RNA, 11 nt, Human
aaggugggagg

SEQ ID NO: 1743971 - RNA, 19 nt, Human
aagucucuggaauuugaaa

SEQ ID NO: 1743972 - RNA, 16 nt, Human
aagucuuagauguaua

SEQ ID NO: 1743973 - RNA, 17 nt, Human
aagucuuagauguauau

SEQ ID NO: 1743974 - RNA, 21 nt, Human
aaugaugauccuaggcauuug

SEQ ID NO: 1743975 - RNA, 22 nt, Human
aaucugcuuuuuaaagaaugcu

SEQ ID NO: 1743976 - RNA, 23 nt, Human
aaugaaccacaucuugcucugcu

SEQ ID NO: 1743977 - RNA, 17 nt, Human
aaugaaccacaucuugc

SEQ ID NO: 1743978 - RNA, 16 nt, Human
aaugaaccacaucuug

SEQ ID NO: 1743979 - RNA, 13 nt, Human
aaucuccaaaaua

SEQ ID NO: 1743980 - RNA, 14 nt, Human
aaucuccaaaauaa

SEQ ID NO: 1743981 - RNA, 18 nt, Human
aaucuccaaaauaaaacu

SEQ ID NO: 1743982 - RNA, 18 nt, Human
aauccaggguggugguga

SEQ ID NO: 1743983 - RNA, 19 nt, Human
aaugaugccaugaggaaca

SEQ ID NO: 1743984 - RNA, 18 nt, Human
aauauggucuuuugguua

SEQ ID NO: 1743985 - RNA, 18 nt, Human
aauauaggaacuuaaaua

SEQ ID NO: 1743986 - RNA, 20 nt, Human
aauauaggaacuuaaauaau

SEQ ID NO: 1743987 - RNA, 21 nt, Human
aauauaggaacuuaaauaaug

SEQ ID NO: 1743988 - RNA, 20 nt, Human
aaugucucuuuaaugucaca

SEQ ID NO: 1743989 - RNA, 21 nt, Human
aaugucagugugacugaucuc

SEQ ID NO: 1743990 - RNA, 17 nt, Human
aaugucagugugacuga

SEQ ID NO: 1743991 - RNA, 22 nt, Human
aaugucuaguuguaacaccaug

SEQ ID NO: 1743992 - RNA, 22 nt, Human
aauggucuuucuaaugugugaa

SEQ ID NO: 1743993 - RNA, 13 nt, Human
aaugucaguguga

SEQ ID NO: 1743994 - RNA, 16 nt, Human
aaugucagugugacug

SEQ ID NO: 1743995 - RNA, 15 nt, Human
aaugucagugugacu

SEQ ID NO: 1743996 - RNA, 13 nt, Human
aaugggcagagca

SEQ ID NO: 1743997 - RNA, 15 nt, Human
aaugggcagagcaga

SEQ ID NO: 1743998 - RNA, 20 nt, Human
aaugguacuccacauauuuc

SEQ ID NO: 1743999 - RNA, 18 nt, Human
aauuaaaacacaacaucu

SEQ ID NO: 1744000 - RNA, 19 nt, Human
aauguuugccucugccucu

SEQ ID NO: 1744001 - RNA, 18 nt, Human
aauguuugccucugccuc

SEQ ID NO: 1744002 - RNA, 18 nt, Human
aauuaguggcacuugcuu

SEQ ID NO: 1744003 - RNA, 14 nt, Human
aaaaacacaaaagu

SEQ ID NO: 1744004 - RNA, 12 nt, Human
aaaaagaggcua

SEQ ID NO: 1744005 - RNA, 13 nt, Human
aaaaacugauuuu

SEQ ID NO: 1744006 - RNA, 14 nt, Human
aaaaacauggccuu

SEQ ID NO: 1744007 - RNA, 15 nt, Human
aaaaacugauuuuuu

SEQ ID NO: 1744008 - RNA, 12 nt, Human
aaaacacauuuu

SEQ ID NO: 1744009 - RNA, 16 nt, Human
uuaucuugaauaaugu

SEQ ID NO: 1744010 - RNA, 14 nt, Human
uuaucuugaauaau

SEQ ID NO: 1744011 - RNA, 14 nt, Human
uuaucuagauacug

SEQ ID NO: 1744012 - RNA, 16 nt, Human
uuauauuuacaaaugg

SEQ ID NO: 1744013 - RNA, 21 nt, Human
uuauuaaaugcccagccccuu

SEQ ID NO: 1744014 - RNA, 19 nt, Human
uuauuaaaugcccagcccc

SEQ ID NO: 1744015 - RNA, 23 nt, Human
uuauuaaaaaucucaaauuucua

SEQ ID NO: 1744016 - RNA, 16 nt, Human
uuauggcuuuugugca

SEQ ID NO: 1744017 - RNA, 14 nt, Human
uuauggcacaucag

SEQ ID NO: 1744018 - RNA, 17 nt, Human
uuauguugcauagaaua

SEQ ID NO: 1744019 - RNA, 18 nt, Human
uuauggcuuuugugcauu

SEQ ID NO: 1744020 - RNA, 17 nt, Human
uuauggcuuuugugcau

SEQ ID NO: 1744021 - RNA, 20 nt, Human
uuauggaacacucugagacu

SEQ ID NO: 1744022 - RNA, 18 nt, Human
uuauggaacacucugaga

SEQ ID NO: 1744023 - RNA, 21 nt, Human
uuauggacaaugacccagugg

SEQ ID NO: 1744024 - RNA, 17 nt, Human
uuauggaacacucugag

SEQ ID NO: 1744025 - RNA, 16 nt, Human
uuaugauuuuuaaaga

SEQ ID NO: 1744026 - RNA, 19 nt, Human
uuaugauuuuuaaagaaaa

SEQ ID NO: 1744027 - RNA, 19 nt, Human
uuagugaccucagcuuuga

SEQ ID NO: 1744028 - RNA, 15 nt, Human
ugugaaaagaaaaau

SEQ ID NO: 1744029 - RNA, 13 nt, Human
ugugaaaagaaaa

SEQ ID NO: 1744030 - RNA, 17 nt, Human
ugugaaaagaaaaauga

SEQ ID NO: 1744031 - RNA, 21 nt, Human
ugugaaaagaaaaaugagccu

SEQ ID NO: 1744032 - RNA, 12 nt, Human
uuauaauuuaaa

SEQ ID NO: 1744033 - RNA, 12 nt, Human
uuauaauuuuaa

SEQ ID NO: 1744034 - RNA, 21 nt, Human
uuauaauuuuaaauguuuuuu

SEQ ID NO: 1744035 - RNA, 17 nt, Human
uuauaauuuuaaauguu

SEQ ID NO: 1744036 - RNA, 15 nt, Human
uuauaauaauguuaa

SEQ ID NO: 1744037 - RNA, 18 nt, Human
uuauaauaauguuaacau

SEQ ID NO: 1744038 - RNA, 15 nt, Human
uuauaaugaaugaaa

SEQ ID NO: 1744039 - RNA, 16 nt, Human
uuauauuaugaagcuu

SEQ ID NO: 1744040 - RNA, 11 nt, Human
uuauacauaaa

SEQ ID NO: 1744041 - RNA, 13 nt, Human
uuauacauaaaca

SEQ ID NO: 1744042 - RNA, 13 nt, Human
uuccaaaguacac

SEQ ID NO: 1744043 - RNA, 16 nt, Human
uuccaaaguacacugu

SEQ ID NO: 1744044 - RNA, 15 nt, Human
uuccauggacuuugu

SEQ ID NO: 1744045 - RNA, 14 nt, Human
uuccauggacuuug

SEQ ID NO: 1744046 - RNA, 13 nt, Human
uuccagagccuca

SEQ ID NO: 1744047 - RNA, 19 nt, Human
uuccaacccucaucaccaa

SEQ ID NO: 1744048 - RNA, 23 nt, Human
uucaguuauuauauuuacaaaug

SEQ ID NO: 1744049 - RNA, 20 nt, Human
uucauaaauaaaguuuguug

SEQ ID NO: 1744050 - RNA, 19 nt, Human
uucauccuccucagaucuu

SEQ ID NO: 1744051 - RNA, 15 nt, Human
uucauccuccucaga

SEQ ID NO: 1744052 - RNA, 15 nt, Human
uucauaaccuagccu

SEQ ID NO: 1744053 - RNA, 16 nt, Human
uucaguggcagcugcu

SEQ ID NO: 1744054 - RNA, 15 nt, Human
uucaguggcagcugc

SEQ ID NO: 1744055 - RNA, 17 nt, Human
uucaguggcagcugcuu

SEQ ID NO: 1744056 - RNA, 12 nt, Human
uucaguguacau

SEQ ID NO: 1744057 - RNA, 13 nt, Human
uucaguguacaug

SEQ ID NO: 1744058 - RNA, 15 nt, Human
uucagcuccagcuca

SEQ ID NO: 1744059 - RNA, 12 nt, Human
uucagcuccagc

SEQ ID NO: 1744060 - RNA, 22 nt, Human
uucagcuccagcucaccagccc

SEQ ID NO: 1744061 - RNA, 14 nt, Human
uucaguggcagcug

SEQ ID NO: 1744062 - RNA, 22 nt, Human
uucagcuuguaaauagcucagg

SEQ ID NO: 1744063 - RNA, 17 nt, Human
uuauuuuaauucaguug

SEQ ID NO: 1744064 - RNA, 18 nt, Human
uuauuuuauuaugcauga

SEQ ID NO: 1744065 - RNA, 22 nt, Human
uuauuuuggaaaauaaauuauu

SEQ ID NO: 1744066 - RNA, 18 nt, Human
uucaaaugcuguaacuuu

SEQ ID NO: 1744067 - RNA, 15 nt, Human
uucaaccauucccca

SEQ ID NO: 1744068 - RNA, 12 nt, Human
uucagauauaaa

SEQ ID NO: 1744069 - RNA, 14 nt, Human
uucagcucacugca

SEQ ID NO: 1744070 - RNA, 19 nt, Human
uucagauauaaaagacuga

SEQ ID NO: 1744071 - RNA, 14 nt, Human
uucagauauaaaag

SEQ ID NO: 1744072 - RNA, 15 nt, Human
uucagauauaaaaga

SEQ ID NO: 1744073 - RNA, 17 nt, Human
uucagacagcugccugg

SEQ ID NO: 1744074 - RNA, 16 nt, Human
uucagacagcugccug

SEQ ID NO: 1744075 - RNA, 15 nt, Human
uucagacagcugccu

SEQ ID NO: 1744076 - RNA, 14 nt, Human
uucagacagcugcc

SEQ ID NO: 1744077 - RNA, 17 nt, Human
uucacggaagagccuug

SEQ ID NO: 1744078 - RNA, 22 nt, Human
uucaccuuuguccccaccgcag

SEQ ID NO: 1744079 - RNA, 13 nt, Human
uucacggaagagc

SEQ ID NO: 1744080 - RNA, 22 nt, Human
uucacaagacccaaaaggcaga

SEQ ID NO: 1744081 - RNA, 21 nt, Human
uucacaaccuucuguggcuca

SEQ ID NO: 1744082 - RNA, 13 nt, Human
uucacccuuuucu

SEQ ID NO: 1744083 - RNA, 20 nt, Human
uucaccuuuguccccaccgc

SEQ ID NO: 1744084 - RNA, 19 nt, Human
uucaccuuuguccccaccg

SEQ ID NO: 1744085 - RNA, 14 nt, Human
uucaccuuuguccc

SEQ ID NO: 1744086 - RNA, 22 nt, Human
uucaauaggaaaaacugauuuu

SEQ ID NO: 1744087 - RNA, 21 nt, Human
uucaauaggaaaaacugauuu

SEQ ID NO: 1744088 - RNA, 14 nt, Human
uugaauuguaagga

SEQ ID NO: 1744089 - RNA, 18 nt, Human
uugaacuggguacuugug

SEQ ID NO: 1744090 - RNA, 17 nt, Human
uugaacuccugaccuca

SEQ ID NO: 1744091 - RNA, 13 nt, Human
uugaacuuugacc

SEQ ID NO: 1744092 - RNA, 17 nt, Human
uugacccacaagaaaug

SEQ ID NO: 1744093 - RNA, 17 nt, Human
uugaccgugaggccaga

SEQ ID NO: 1744094 - RNA, 14 nt, Human
uugacccacaagaa

SEQ ID NO: 1744095 - RNA, 14 nt, Human
uugaccucugcagc

SEQ ID NO: 1744096 - RNA, 15 nt, Human
uugaccucugcagca

SEQ ID NO: 1744097 - RNA, 21 nt, Human
uugaccucaggugauccaccc

SEQ ID NO: 1744098 - RNA, 20 nt, Human
uugacgccaucccagcccca

SEQ ID NO: 1744099 - RNA, 19 nt, Human
uugacgccaucccagcccc

SEQ ID NO: 1744100 - RNA, 18 nt, Human
uugacgccaucccagccc

SEQ ID NO: 1744101 - RNA, 17 nt, Human
uugacgccaucccagcc

SEQ ID NO: 1744102 - RNA, 16 nt, Human
uugaccucugcagcaa

SEQ ID NO: 1744103 - RNA, 23 nt, Human
uugauauccucuuugagugaagc

SEQ ID NO: 1744104 - RNA, 11 nt, Human
uugagccuggg

SEQ ID NO: 1744105 - RNA, 13 nt, Human
uugaggguugggc

SEQ ID NO: 1744106 - RNA, 14 nt, Human
uugagccugggagg

SEQ ID NO: 1744107 - RNA, 16 nt, Human
uugaggguugggcugg

SEQ ID NO: 1744108 - RNA, 16 nt, Human
uugaugaucuuugcag

SEQ ID NO: 1744109 - RNA, 17 nt, Human
uugaugacccccaacca

SEQ ID NO: 1744110 - RNA, 21 nt, Human
uugcaaaguaucccuacugua

SEQ ID NO: 1744111 - RNA, 21 nt, Human
uucuuauacauuugauaaagu

SEQ ID NO: 1744112 - RNA, 21 nt, Human
uucuuccacaagagcccaggc

SEQ ID NO: 1744113 - RNA, 21 nt, Human
uucuuguguguuuauugucaa

SEQ ID NO: 1744114 - RNA, 13 nt, Human
uucuuccucccuc

SEQ ID NO: 1744115 - RNA, 12 nt, Human
uucuuucagcca

SEQ ID NO: 1744116 - RNA, 14 nt, Human
uucuuuccaaagua

SEQ ID NO: 1744117 - RNA, 16 nt, Human
uugaacuccuggccuc

SEQ ID NO: 1744118 - RNA, 15 nt, Human
uugaacuccuggccu

SEQ ID NO: 1744119 - RNA, 20 nt, Human
uugaaaaaccauuuugcugu

SEQ ID NO: 1744120 - RNA, 21 nt, Human
uucuuuccaaaguacacuguu

SEQ ID NO: 1744121 - RNA, 23 nt, Human
uugaaaacacuguucucugcccu

SEQ ID NO: 1744122 - RNA, 19 nt, Human
uucugcuucagccucccga

SEQ ID NO: 1744123 - RNA, 16 nt, Human
uucugcuucagccucc

SEQ ID NO: 1744124 - RNA, 15 nt, Human
uucugcuucagccuc

SEQ ID NO: 1744125 - RNA, 14 nt, Human
uucugcuucagccu

SEQ ID NO: 1744126 - RNA, 18 nt, Human
uucugcuuuccucuuccu

SEQ ID NO: 1744127 - RNA, 14 nt, Human
uucuuaguugcugu

SEQ ID NO: 1744128 - RNA, 15 nt, Human
uucuuaguugcugua

SEQ ID NO: 1744129 - RNA, 23 nt, Human
uucuuaguugcuguaugucucgu

SEQ ID NO: 1744130 - RNA, 18 nt, Human
uucuguauuuuguuuuug

SEQ ID NO: 1744131 - RNA, 18 nt, Human
uucggugagcuacaaaug

SEQ ID NO: 1744132 - RNA, 21 nt, Human
uuccuugaguugauucagcuc

SEQ ID NO: 1744133 - RNA, 15 nt, Human
uuccugcauuuguga

SEQ ID NO: 1744134 - RNA, 16 nt, Human
uuccaugucgccucug

SEQ ID NO: 1744135 - RNA, 12 nt, Human
uuccauggccuc

SEQ ID NO: 1744136 - RNA, 16 nt, Human
uuccauggccucuuca

SEQ ID NO: 1744137 - RNA, 15 nt, Human
uuccugaggcugggc

SEQ ID NO: 1744138 - RNA, 20 nt, Human
uuccugaggcugggcucccu

SEQ ID NO: 1744139 - RNA, 19 nt, Human
uucuacccagcgagcccug

SEQ ID NO: 1744140 - RNA, 12 nt, Human
uucuacccagcg

SEQ ID NO: 1744141 - RNA, 23 nt, Human
uucuaaugugugaaucagagcac

SEQ ID NO: 1744142 - RNA, 13 nt, Human
uucuacgccaggg

SEQ ID NO: 1744143 - RNA, 13 nt, Human
uucuacuauuuau

SEQ ID NO: 1744144 - RNA, 21 nt, Human
uucuacccagcgagcccuggu

SEQ ID NO: 1744145 - RNA, 20 nt, Human
uucuacccagcgagcccugg

SEQ ID NO: 1744146 - RNA, 14 nt, Human
uucuacccaggugc

SEQ ID NO: 1744147 - RNA, 22 nt, Human
uucuacucgaguuacagacaaa

SEQ ID NO: 1744148 - RNA, 14 nt, Human
uucuauagcuuuuc

SEQ ID NO: 1744149 - RNA, 21 nt, Human
uucugacccugcuucaaauau

SEQ ID NO: 1744150 - RNA, 18 nt, Human
uucugacccugcuucaaa

SEQ ID NO: 1744151 - RNA, 22 nt, Human
uucugacccaugcugcccugug

SEQ ID NO: 1744152 - RNA, 23 nt, Human
uucugacccaugcugcccuguga

SEQ ID NO: 1744153 - RNA, 17 nt, Human
uucucugcccuccaaga

SEQ ID NO: 1744154 - RNA, 16 nt, Human
uucucugcccuccaag

SEQ ID NO: 1744155 - RNA, 19 nt, Human
uucugauccuaguuccacc

SEQ ID NO: 1744156 - RNA, 22 nt, Human
uucugauaugcaguuuuccuua

SEQ ID NO: 1744157 - RNA, 19 nt, Human
uucugcucacauaucuguc

SEQ ID NO: 1744158 - RNA, 20 nt, Human
uucucauuugccaauaauaa

SEQ ID NO: 1744159 - RNA, 16 nt, Human
uucuccacccugcucu

SEQ ID NO: 1744160 - RNA, 15 nt, Human
uucuccaccugccag

SEQ ID NO: 1744161 - RNA, 14 nt, Human
uucuccaccugcca

SEQ ID NO: 1744162 - RNA, 12 nt, Human
uucuccaccugc

SEQ ID NO: 1744163 - RNA, 21 nt, Human
uucuccaccucccacaaagga

SEQ ID NO: 1744164 - RNA, 18 nt, Human
uucuccaccugccaggga

SEQ ID NO: 1744165 - RNA, 16 nt, Human
uucuccaccugccagg

SEQ ID NO: 1744166 - RNA, 20 nt, Human
uucuccaccugccagggaca

SEQ ID NO: 1744167 - RNA, 12 nt, Human
uucuccacugga

SEQ ID NO: 1744168 - RNA, 12 nt, Human
uucucugcccuc

SEQ ID NO: 1744169 - RNA, 11 nt, Human
uucucugcccu

SEQ ID NO: 1744170 - RNA, 20 nt, Human
uucucugaggacacuaacca

SEQ ID NO: 1744171 - RNA, 14 nt, Human
uucucugaggacac

SEQ ID NO: 1744172 - RNA, 22 nt, Human
uucucuccuguaccucuugagc

SEQ ID NO: 1744173 - RNA, 19 nt, Human
uucucuccuguaccucuug

SEQ ID NO: 1744174 - RNA, 13 nt, Human
uucucugaggaca

SEQ ID NO: 1744175 - RNA, 16 nt, Human
uucucugaggacaaga

SEQ ID NO: 1744176 - RNA, 20 nt, Human
uucucugaggacaagagaaa

SEQ ID NO: 1744177 - RNA, 16 nt, Human
uucucuccagccccug

SEQ ID NO: 1744178 - RNA, 15 nt, Human
uucucuccagccccu

SEQ ID NO: 1744179 - RNA, 14 nt, Human
uucucuccuguacc

SEQ ID NO: 1744180 - RNA, 18 nt, Human
uucucuccuguaccucuu

SEQ ID NO: 1744181 - RNA, 14 nt, Human
uucucuccagcccc

SEQ ID NO: 1744182 - RNA, 13 nt, Human
uucucuccagccc

SEQ ID NO: 1744183 - RNA, 14 nt, Human
uuuauggcuuuugu

SEQ ID NO: 1744184 - RNA, 16 nt, Human
uuuauggcuuuugugc

SEQ ID NO: 1744185 - RNA, 13 nt, Human
uuuauuaugcaug

SEQ ID NO: 1744186 - RNA, 13 nt, Human
uuuauuauggcac

SEQ ID NO: 1744187 - RNA, 19 nt, Human
uuuauuuaguuccuugagu

SEQ ID NO: 1744188 - RNA, 21 nt, Human
uuucaacgcagcccugcuuug

SEQ ID NO: 1744189 - RNA, 20 nt, Human
uuucaacgcagcccugcuuu

SEQ ID NO: 1744190 - RNA, 16 nt, Human
uuucaacgcagcccug

SEQ ID NO: 1744191 - RNA, 15 nt, Human
uuucaacgcagcccu

SEQ ID NO: 1744192 - RNA, 14 nt, Human
uuucagauauaaaa

SEQ ID NO: 1744193 - RNA, 16 nt, Human
uuucagauauaaaaga

SEQ ID NO: 1744194 - RNA, 18 nt, Human
uuucagauauaaaagacu

SEQ ID NO: 1744195 - RNA, 16 nt, Human
uuucacaaccuucugu

SEQ ID NO: 1744196 - RNA, 22 nt, Human
uuucacaaccuucuguggcuca

SEQ ID NO: 1744197 - RNA, 19 nt, Human
uuucaauaggaaaaacuga

SEQ ID NO: 1744198 - RNA, 17 nt, Human
uuucaauaggaaaaacu

SEQ ID NO: 1744199 - RNA, 14 nt, Human
uuucaauaggaaaa

SEQ ID NO: 1744200 - RNA, 12 nt, Human
uuucaauaggaa

SEQ ID NO: 1744201 - RNA, 14 nt, Human
uuucaguguacaug

SEQ ID NO: 1744202 - RNA, 13 nt, Human
uuucaguguacau

SEQ ID NO: 1744203 - RNA, 11 nt, Human
uuucagugagg

SEQ ID NO: 1744204 - RNA, 23 nt, Human
uuucagcaccuacaguguacagu

SEQ ID NO: 1744205 - RNA, 18 nt, Human
uuucauuuaggugaggaa

SEQ ID NO: 1744206 - RNA, 14 nt, Human
uuucauuuagguga

SEQ ID NO: 1744207 - RNA, 16 nt, Human
uuuacagcugccugca

SEQ ID NO: 1744208 - RNA, 15 nt, Human
uuuacagcugccugc

SEQ ID NO: 1744209 - RNA, 22 nt, Human
uuuaauagcgucauaacuagaa

SEQ ID NO: 1744210 - RNA, 21 nt, Human
uuuaauagcgucauaacuaga

SEQ ID NO: 1744211 - RNA, 22 nt, Human
uuuacuucuuauacauuugaua

SEQ ID NO: 1744212 - RNA, 19 nt, Human
uuuacuucuuauacauuug

SEQ ID NO: 1744213 - RNA, 14 nt, Human
uuuagaaauauaau

SEQ ID NO: 1744214 - RNA, 12 nt, Human
uuuagacagagu

SEQ ID NO: 1744215 - RNA, 23 nt, Human
uuuauaaaaauaaaaaacacugg

SEQ ID NO: 1744216 - RNA, 21 nt, Human
uuuauaaaaauaaaaaacacu

SEQ ID NO: 1744217 - RNA, 19 nt, Human
uuuaacucuauaauguguu

SEQ ID NO: 1744218 - RNA, 18 nt, Human
uuguuuggagacagaguc

SEQ ID NO: 1744219 - RNA, 23 nt, Human
uuuaacaacuaugauuuggaaaa

SEQ ID NO: 1744220 - RNA, 18 nt, Human
uuuaacagaaauguacag

SEQ ID NO: 1744221 - RNA, 20 nt, Human
uuuaagacgaaacauuuguu

SEQ ID NO: 1744222 - RNA, 18 nt, Human
uuuaaguuacacauuuuu

SEQ ID NO: 1744223 - RNA, 22 nt, Human
uuuaagaaaaaggaugcacaga

SEQ ID NO: 1744224 - RNA, 19 nt, Human
uuuaagacauuuuuggaag

SEQ ID NO: 1744225 - RNA, 18 nt, Human
uuuaagaaaaaggaugca

SEQ ID NO: 1744226 - RNA, 20 nt, Human
uuguuagugugucuuagugu

SEQ ID NO: 1744227 - RNA, 22 nt, Human
uuguuaguaugaggcauuuguu

SEQ ID NO: 1744228 - RNA, 19 nt, Human
uuguuaguaugaggcauuu

SEQ ID NO: 1744229 - RNA, 21 nt, Human
uuguuaguaugaggcauuugu

SEQ ID NO: 1744230 - RNA, 14 nt, Human
uuguuacauuuuua

SEQ ID NO: 1744231 - RNA, 19 nt, Human
uuguguuucuuuaguuuuu

SEQ ID NO: 1744232 - RNA, 21 nt, Human
uuguuaauaaaaguacauguu

SEQ ID NO: 1744233 - RNA, 14 nt, Human
uuguuaauaaaagu

SEQ ID NO: 1744234 - RNA, 19 nt, Human
uuguuaauaaaaguacaug

SEQ ID NO: 1744235 - RNA, 21 nt, Human
uuguguuuauauauaagccaa

SEQ ID NO: 1744236 - RNA, 22 nt, Human
uuguggauuuaacagaaaugua

SEQ ID NO: 1744237 - RNA, 23 nt, Human
uuguggauuuaacagaaauguac

SEQ ID NO: 1744238 - RNA, 20 nt, Human
uuguggauuuaacagaaaug

SEQ ID NO: 1744239 - RNA, 21 nt, Human
uuguggauuuaacagaaaugu

SEQ ID NO: 1744240 - RNA, 16 nt, Human
uuguggacacagcucu

SEQ ID NO: 1744241 - RNA, 21 nt, Human
uuguggaaaaugaaaauuagg

SEQ ID NO: 1744242 - RNA, 17 nt, Human
uuguggacacagcucuu

SEQ ID NO: 1744243 - RNA, 12 nt, Human
uugugccccugc

SEQ ID NO: 1744244 - RNA, 21 nt, Human
uugugccagaaugcuuuagga

SEQ ID NO: 1744245 - RNA, 16 nt, Human
uugugccagaaugcuu

SEQ ID NO: 1744246 - RNA, 17 nt, Human
uugugcauuaucuagau

SEQ ID NO: 1744247 - RNA, 22 nt, Human
uugugcauuaucuagauacugu

SEQ ID NO: 1744248 - RNA, 23 nt, Human
uugugcauuaucuagauacugua

SEQ ID NO: 1744249 - RNA, 12 nt, Human
uugugcauuugg

SEQ ID NO: 1744250 - RNA, 21 nt, Human
uuguauucagaguugaugguu

SEQ ID NO: 1744251 - RNA, 15 nt, Human
uuguauucucuccug

SEQ ID NO: 1744252 - RNA, 16 nt, Human
uuguauucucuccugu

SEQ ID NO: 1744253 - RNA, 19 nt, Human
uuguauucucuccuguacc

SEQ ID NO: 1744254 - RNA, 20 nt, Human
uugucugaagucacugcaca

SEQ ID NO: 1744255 - RNA, 15 nt, Human
uugucuuaaaaagug

SEQ ID NO: 1744256 - RNA, 21 nt, Human
uugucugaagucacugcacag

SEQ ID NO: 1744257 - RNA, 22 nt, Human
uugucuuaaaaaguggaaaaau

SEQ ID NO: 1744258 - RNA, 20 nt, Human
uugugaaaggaaagaggcuc

SEQ ID NO: 1744259 - RNA, 16 nt, Human
uugugauuuuuguaau

SEQ ID NO: 1744260 - RNA, 17 nt, Human
uugugauuuuuguaauu

SEQ ID NO: 1744261 - RNA, 12 nt, Human
uugugauuuuug

SEQ ID NO: 1744262 - RNA, 13 nt, Human
uugugaaauuauu

SEQ ID NO: 1744263 - RNA, 14 nt, Human
uugugaaaugaugg

SEQ ID NO: 1744264 - RNA, 22 nt, Human
uuggguucaagcgauucuucug

SEQ ID NO: 1744265 - RNA, 19 nt, Human
uugcacguauuuuaauagc

SEQ ID NO: 1744266 - RNA, 16 nt, Human
uuggucugugagaugc

SEQ ID NO: 1744267 - RNA, 13 nt, Human
uuggucuguguga

SEQ ID NO: 1744268 - RNA, 21 nt, Human
uuggugaacauugcaauagaa

SEQ ID NO: 1744269 - RNA, 22 nt, Human
uuguaaaaauuaaaaguuaugg

SEQ ID NO: 1744270 - RNA, 17 nt, Human
uuguaaauagcucaggu

SEQ ID NO: 1744271 - RNA, 21 nt, Human
uuguaaaugugguaaagaguu

SEQ ID NO: 1744272 - RNA, 16 nt, Human
uuguaaaugugguaaa

SEQ ID NO: 1744273 - RNA, 17 nt, Human
uuguaaaagcauuuugu

SEQ ID NO: 1744274 - RNA, 18 nt, Human
uuguaaaagcauuuugua

SEQ ID NO: 1744275 - RNA, 19 nt, Human
uuguaaaagcauuuuguaa

SEQ ID NO: 1744276 - RNA, 20 nt, Human
uuguaaaagcauuuuguaau

SEQ ID NO: 1744277 - RNA, 15 nt, Human
uuguaaauuaacuuu

SEQ ID NO: 1744278 - RNA, 16 nt, Human
uuguaaauuaacuuuu

SEQ ID NO: 1744279 - RNA, 18 nt, Human
uuguaaauuaacuuuuau

SEQ ID NO: 1744280 - RNA, 23 nt, Human
uuguaaauuaacuuuuauaaacu

SEQ ID NO: 1744281 - RNA, 18 nt, Human
uuguacauaaugcgugca

SEQ ID NO: 1744282 - RNA, 13 nt, Human
uuuuuuuugacaa

SEQ ID NO: 1744283 - RNA, 13 nt, Human
uuuuuuccacuua

SEQ ID NO: 1744284 - RNA, 11 nt, Human
uuuuuuuacua

SEQ ID NO: 1744285 - RNA, 12 nt, Human
uuuuuuuuaaga

SEQ ID NO: 1744286 - RNA, 12 nt, Human
uuuuucaguuuu

SEQ ID NO: 1744287 - RNA, 15 nt, Human
uuuuucaguuuucag

SEQ ID NO: 1744288 - RNA, 13 nt, Human
uuuuuaaucuuua

SEQ ID NO: 1744289 - RNA, 18 nt, Human
uuuuuaaguuacacauuu

SEQ ID NO: 1744290 - RNA, 17 nt, Human
uuuuuaauaaagacagg

SEQ ID NO: 1744291 - RNA, 20 nt, Human
uuuuuaauaaagacaggguu

SEQ ID NO: 1744292 - RNA, 12 nt, Human
uuuuuaagaaaa

SEQ ID NO: 1744293 - RNA, 23 nt, Human
uuuuuaagaaaaaggaugcacag

SEQ ID NO: 1744294 - RNA, 16 nt, Human
uuuuuaagugcugcau

SEQ ID NO: 1744295 - RNA, 17 nt, Human
uuuuuaagugcugcauu

SEQ ID NO: 1744296 - RNA, 18 nt, Human
uuuuuaagugcugcauuu

SEQ ID NO: 1744297 - RNA, 19 nt, Human
uuuuuaagugcugcauuua

SEQ ID NO: 1744298 - RNA, 22 nt, Human
uuuuuaagugcugcauuuaaaa

SEQ ID NO: 1744299 - RNA, 23 nt, Human
uuuuuaagugcugcauuuaaaag

SEQ ID NO: 1744300 - RNA, 21 nt, Human
uuuuaaaguaacccuacaaaa

SEQ ID NO: 1744301 - RNA, 17 nt, Human
uuuuacaauaaaaucuu

SEQ ID NO: 1744302 - RNA, 19 nt, Human
uuuuacaaaaaagaaaaga

SEQ ID NO: 1744303 - RNA, 15 nt, Human
uuuuacuaauagaca

SEQ ID NO: 1744304 - RNA, 19 nt, Human
uuuuacguccaucucuugu

SEQ ID NO: 1744305 - RNA, 13 nt, Human
uuuuauacauaaa

SEQ ID NO: 1744306 - RNA, 21 nt, Human
uuuuauacauaaacaagacca

SEQ ID NO: 1744307 - RNA, 18 nt, Human
uuuuauuuuuagacagag

SEQ ID NO: 1744308 - RNA, 17 nt, Human
uuuucaaaauaaaaaug

SEQ ID NO: 1744309 - RNA, 21 nt, Human
uuuucaaaauuguuacaaauu

SEQ ID NO: 1744310 - RNA, 22 nt, Human
uuuucccuauuagagaagagau

SEQ ID NO: 1744311 - RNA, 18 nt, Human
uuuucccuauuagagaag

SEQ ID NO: 1744312 - RNA, 15 nt, Human
uuuucagauauaaaa

SEQ ID NO: 1744313 - RNA, 17 nt, Human
uuuucagauauaaaaga

SEQ ID NO: 1744314 - RNA, 23 nt, Human
uuuucuacucgaguuacagacaa

SEQ ID NO: 1744315 - RNA, 22 nt, Human
uuuucuacucgaguuacagaca

SEQ ID NO: 1744316 - RNA, 20 nt, Human
uuuucuacucgaguuacaga

SEQ ID NO: 1744317 - RNA, 13 nt, Human
uuuucuacucgag

SEQ ID NO: 1744318 - RNA, 13 nt, Human
uuuucuucucccu

SEQ ID NO: 1744319 - RNA, 22 nt, Human
uuuucuuguguguuuauuguca

SEQ ID NO: 1744320 - RNA, 16 nt, Human
uuuucuuucagccaag

SEQ ID NO: 1744321 - RNA, 15 nt, Human
uuuccguuaaaauac

SEQ ID NO: 1744322 - RNA, 17 nt, Human
uuuccguuaaaauacca

SEQ ID NO: 1744323 - RNA, 21 nt, Human
uuugagugccuuacacaaugg

SEQ ID NO: 1744324 - RNA, 13 nt, Human
uuuggacccugag

SEQ ID NO: 1744325 - RNA, 12 nt, Human
uuuggaaaauaa

SEQ ID NO: 1744326 - RNA, 16 nt, Human
uuuggaaagacuggac

SEQ ID NO: 1744327 - RNA, 18 nt, Human
uuugcauaacguauaaaa

SEQ ID NO: 1744328 - RNA, 15 nt, Human
uuuggucaacacuaa

SEQ ID NO: 1744329 - RNA, 17 nt, Human
uuuggucuacacugugc

SEQ ID NO: 1744330 - RNA, 14 nt, Human
uuuguauuuuuagu

SEQ ID NO: 1744331 - RNA, 22 nt, Human
uuuguuaguaugaggcauuugu

SEQ ID NO: 1744332 - RNA, 15 nt, Human
uuuguugucagcuga

SEQ ID NO: 1744333 - RNA, 16 nt, Human
uuuguugucagcugaa

SEQ ID NO: 1744334 - RNA, 14 nt, Human
uuuuaaaauccacu

SEQ ID NO: 1744335 - RNA, 23 nt, Human
uuuuaaaauccacuuuaucuuga

SEQ ID NO: 1744336 - RNA, 20 nt, Human
uuuuaaacccuauugguaaa

SEQ ID NO: 1744337 - RNA, 14 nt, Human
ugcauccuccgccu

SEQ ID NO: 1744338 - RNA, 19 nt, Human
ugcagauaaacaguaguga

SEQ ID NO: 1744339 - RNA, 15 nt, Human
ugcauguuugugauu

SEQ ID NO: 1744340 - RNA, 15 nt, Human
ugcauccuccgccuc

SEQ ID NO: 1744341 - RNA, 17 nt, Human
ugcaugguuuagaaagc

SEQ ID NO: 1744342 - RNA, 12 nt, Human
ugcauuaucuag

SEQ ID NO: 1744343 - RNA, 17 nt, Human
ugcauuaucuagauacu

SEQ ID NO: 1744344 - RNA, 18 nt, Human
ugcauuaucuagauacug

SEQ ID NO: 1744345 - RNA, 15 nt, Human
ugccaccacgcccgg

SEQ ID NO: 1744346 - RNA, 12 nt, Human
ugccauccaggu

SEQ ID NO: 1744347 - RNA, 20 nt, Human
ugccauccagguucagcuug

SEQ ID NO: 1744348 - RNA, 15 nt, Human
ugccauccagguuca

SEQ ID NO: 1744349 - RNA, 17 nt, Human
ugccagguuuuuggucu

SEQ ID NO: 1744350 - RNA, 19 nt, Human
ugccaggaagccagcaggc

SEQ ID NO: 1744351 - RNA, 18 nt, Human
ugccaggaagccagcagg

SEQ ID NO: 1744352 - RNA, 16 nt, Human
ugccaggaagccagca

SEQ ID NO: 1744353 - RNA, 12 nt, Human
ugccaggaagcc

SEQ ID NO: 1744354 - RNA, 20 nt, Human
ugcccaccuggccucugcac

SEQ ID NO: 1744355 - RNA, 16 nt, Human
ugccauguuggccagg

SEQ ID NO: 1744356 - RNA, 15 nt, Human
ugccauguuggccag

SEQ ID NO: 1744357 - RNA, 12 nt, Human
ugccauguuggc

SEQ ID NO: 1744358 - RNA, 13 nt, Human
ugcccacucccug

SEQ ID NO: 1744359 - RNA, 18 nt, Human
ugcccacgcuggagugca

SEQ ID NO: 1744360 - RNA, 20 nt, Human
ugccaugaggaacaaggcaa

SEQ ID NO: 1744361 - RNA, 23 nt, Human
ugccaugaggaacaaggcaaggc

SEQ ID NO: 1744362 - RNA, 15 nt, Human
ugccaugugccaggu

SEQ ID NO: 1744363 - RNA, 14 nt, Human
ugccaugugccagg

SEQ ID NO: 1744364 - RNA, 18 nt, Human
ugcccuggauccaucagg

SEQ ID NO: 1744365 - RNA, 18 nt, Human
ugcccuggugcugccaca

SEQ ID NO: 1744366 - RNA, 20 nt, Human
ugcccuggugcugccacacu

SEQ ID NO: 1744367 - RNA, 21 nt, Human
ugcccuggugcugccacacuu

SEQ ID NO: 1744368 - RNA, 19 nt, Human
ugccgucuaccugaggggc

SEQ ID NO: 1744369 - RNA, 17 nt, Human
ugccgucuaccugaggg

SEQ ID NO: 1744370 - RNA, 16 nt, Human
ugccgucuaccugagg

SEQ ID NO: 1744371 - RNA, 15 nt, Human
ugccgucuaccugag

SEQ ID NO: 1744372 - RNA, 15 nt, Human
ugcccugguuuccug

SEQ ID NO: 1744373 - RNA, 23 nt, Human
ugcccugcccaccuggccucugc

SEQ ID NO: 1744374 - RNA, 22 nt, Human
ugcccugcccaccuggccucug

SEQ ID NO: 1744375 - RNA, 17 nt, Human
ugcccuaaaguguauuu

SEQ ID NO: 1744376 - RNA, 19 nt, Human
ugcccuaaaguguauuuuu

SEQ ID NO: 1744377 - RNA, 23 nt, Human
ugcccugcugagucccaggcuga

SEQ ID NO: 1744378 - RNA, 22 nt, Human
ugcccugcugagucccaggcug

SEQ ID NO: 1744379 - RNA, 18 nt, Human
ugcccugcugagucccag

SEQ ID NO: 1744380 - RNA, 19 nt, Human
ugcccugcgggucacagga

SEQ ID NO: 1744381 - RNA, 13 nt, Human
ugccucugggacu

SEQ ID NO: 1744382 - RNA, 14 nt, Human
ugccucugggacug

SEQ ID NO: 1744383 - RNA, 18 nt, Human
ugccucugccugucuccc

SEQ ID NO: 1744384 - RNA, 14 nt, Human
ugccucugccuguc

SEQ ID NO: 1744385 - RNA, 13 nt, Human
ugccucugccugu

SEQ ID NO: 1744386 - RNA, 20 nt, Human
ugccuccuuugugaggaagc

SEQ ID NO: 1744387 - RNA, 21 nt, Human
ugccuccuuugugaggaagcc

SEQ ID NO: 1744388 - RNA, 22 nt, Human
ugccuccuuugugaggaagccg

SEQ ID NO: 1744389 - RNA, 19 nt, Human
ugccugguggcagcugcgg

SEQ ID NO: 1744390 - RNA, 18 nt, Human
ugccugguggcagcugcg

SEQ ID NO: 1744391 - RNA, 17 nt, Human
ugccugguggcagcugc

SEQ ID NO: 1744392 - RNA, 13 nt, Human
ugccugcccaggc

SEQ ID NO: 1744393 - RNA, 21 nt, Human
ugccucuucucuacucuaggg

SEQ ID NO: 1744394 - RNA, 13 nt, Human
ugccucuuccucc

SEQ ID NO: 1744395 - RNA, 16 nt, Human
ugauuuuuuuuuuuca

SEQ ID NO: 1744396 - RNA, 23 nt, Human
ugauuuuuuuuuccuucagugcc

SEQ ID NO: 1744397 - RNA, 22 nt, Human
ugauuuuuuuuuccuucagugc

SEQ ID NO: 1744398 - RNA, 20 nt, Human
ugauuuuuuuuuccuucagu

SEQ ID NO: 1744399 - RNA, 19 nt, Human
ugauuuuuuuuuccuucag

SEQ ID NO: 1744400 - RNA, 17 nt, Human
ugauuuuuuuuuccuuc

SEQ ID NO: 1744401 - RNA, 16 nt, Human
ugauuuuuuuuuccuu

SEQ ID NO: 1744402 - RNA, 13 nt, Human
ugauuuuuuucca

SEQ ID NO: 1744403 - RNA, 13 nt, Human
ugauuuucauugc

SEQ ID NO: 1744404 - RNA, 15 nt, Human
ugauuuucauugcug

SEQ ID NO: 1744405 - RNA, 19 nt, Human
ugauuuuuaaagaaaaguu

SEQ ID NO: 1744406 - RNA, 17 nt, Human
ugauuuugcuguagaag

SEQ ID NO: 1744407 - RNA, 19 nt, Human
ugauuuugcuguagaagau

SEQ ID NO: 1744408 - RNA, 14 nt, Human
ugauuuugcuguag

SEQ ID NO: 1744409 - RNA, 16 nt, Human
ugauuuugcuguagaa

SEQ ID NO: 1744410 - RNA, 17 nt, Human
ugcaacaggcugggcuu

SEQ ID NO: 1744411 - RNA, 16 nt, Human
ugcaacaggcugggcu

SEQ ID NO: 1744412 - RNA, 15 nt, Human
ugcaacaggcugggc

SEQ ID NO: 1744413 - RNA, 14 nt, Human
ugcaacaggcuggg

SEQ ID NO: 1744414 - RNA, 20 nt, Human
ugcaacaggcugggcuucag

SEQ ID NO: 1744415 - RNA, 19 nt, Human
ugcaacaggcugggcuuca

SEQ ID NO: 1744416 - RNA, 14 nt, Human
ugcaaccuccgccu

SEQ ID NO: 1744417 - RNA, 13 nt, Human
ugcaaccuccgcc

SEQ ID NO: 1744418 - RNA, 16 nt, Human
ugcaaccauuugaaac

SEQ ID NO: 1744419 - RNA, 21 nt, Human
ugcaaccuccgccucuugggu

SEQ ID NO: 1744420 - RNA, 20 nt, Human
ugcaaccuccgccucuuggg

SEQ ID NO: 1744421 - RNA, 18 nt, Human
ugcaaccuccgccucuug

SEQ ID NO: 1744422 - RNA, 20 nt, Human
ugcaaccugauugugucucu

SEQ ID NO: 1744423 - RNA, 19 nt, Human
ugcaaccugauugugucuc

SEQ ID NO: 1744424 - RNA, 22 nt, Human
ugcaaccugauugugucucuug

SEQ ID NO: 1744425 - RNA, 21 nt, Human
ugcaaccuucgccaccugggu

SEQ ID NO: 1744426 - RNA, 18 nt, Human
ugcaaccuucgccaccug

SEQ ID NO: 1744427 - RNA, 18 nt, Human
ugcaacuuuguauaaaag

SEQ ID NO: 1744428 - RNA, 18 nt, Human
ugcaacuuguaaaugugg

SEQ ID NO: 1744429 - RNA, 16 nt, Human
ugcaacuuguaaaugu

SEQ ID NO: 1744430 - RNA, 13 nt, Human
ugcaacuucugcc

SEQ ID NO: 1744431 - RNA, 14 nt, Human
ugcaacuucugccu

SEQ ID NO: 1744432 - RNA, 21 nt, Human
ugcaaugacacagucuuggcu

SEQ ID NO: 1744433 - RNA, 16 nt, Human
ugcaaugaccuuucaa

SEQ ID NO: 1744434 - RNA, 13 nt, Human
ugcaaugaccuuu

SEQ ID NO: 1744435 - RNA, 23 nt, Human
ugcaaugaccuuucaauaggaaa

SEQ ID NO: 1744436 - RNA, 22 nt, Human
ugcaaugaccuuucaauaggaa

SEQ ID NO: 1744437 - RNA, 19 nt, Human
ugcaaugaccuuucaauag

SEQ ID NO: 1744438 - RNA, 17 nt, Human
ugcaaugaccuuucaau

SEQ ID NO: 1744439 - RNA, 16 nt, Human
ugcaauggcagccuug

SEQ ID NO: 1744440 - RNA, 15 nt, Human
ugcaauggcagccuu

SEQ ID NO: 1744441 - RNA, 14 nt, Human
ugcaauggcagccu

SEQ ID NO: 1744442 - RNA, 13 nt, Human
ugcaauggcagcc

SEQ ID NO: 1744443 - RNA, 16 nt, Human
ugcacaaacagaggcc

SEQ ID NO: 1744444 - RNA, 15 nt, Human
ugcacaaacagaggc

SEQ ID NO: 1744445 - RNA, 19 nt, Human
ugcacaaacagaggccgcc

SEQ ID NO: 1744446 - RNA, 17 nt, Human
ugcacaaacagaggccg

SEQ ID NO: 1744447 - RNA, 20 nt, Human
ugcacaaacagaggccgcca

SEQ ID NO: 1744448 - RNA, 17 nt, Human
ugcacagaguuguuaca

SEQ ID NO: 1744449 - RNA, 17 nt, Human
ugcacaaagcccuucca

SEQ ID NO: 1744450 - RNA, 15 nt, Human
ugcacaaagcccuuc

SEQ ID NO: 1744451 - RNA, 18 nt, Human
ugcacagaguuguuacau

SEQ ID NO: 1744452 - RNA, 19 nt, Human
ugcacagaguuguuacauu

SEQ ID NO: 1744453 - RNA, 16 nt, Human
ugcacuugcagacucu

SEQ ID NO: 1744454 - RNA, 19 nt, Human
ugcagagguccacaacaca

SEQ ID NO: 1744455 - RNA, 21 nt, Human
ugcacugacauuguuggccaa

SEQ ID NO: 1744456 - RNA, 18 nt, Human
ugcacugacauuguuggc

SEQ ID NO: 1744457 - RNA, 21 nt, Human
ugcaccggcuggccuggcccc

SEQ ID NO: 1744458 - RNA, 17 nt, Human
ugcaccuggaauauaua

SEQ ID NO: 1744459 - RNA, 20 nt, Human
ugcaccuggaauauauaacc

SEQ ID NO: 1744460 - RNA, 22 nt, Human
ugcaccuggaauauauaaccag

SEQ ID NO: 1744461 - RNA, 20 nt, Human
ugcaccggcuggccuggccc

SEQ ID NO: 1744462 - RNA, 19 nt, Human
ugcaccggcuggccuggcc

SEQ ID NO: 1744463 - RNA, 18 nt, Human
ugcaccggcuggccuggc

SEQ ID NO: 1744464 - RNA, 17 nt, Human
ugcacagugcaucucag

SEQ ID NO: 1744465 - RNA, 16 nt, Human
ugcacagugcaucuca

SEQ ID NO: 1744466 - RNA, 20 nt, Human
ugcacagaguuguuacauuu

SEQ ID NO: 1744467 - RNA, 15 nt, Human
ugcacagugcaucuc

SEQ ID NO: 1744468 - RNA, 23 nt, Human
ugaccauucuccaccugccaggg

SEQ ID NO: 1744469 - RNA, 22 nt, Human
ugaccauucuccaccugccagg

SEQ ID NO: 1744470 - RNA, 21 nt, Human
ugaccauucuccaccugccag

SEQ ID NO: 1744471 - RNA, 20 nt, Human
ugaccauucuccaccugcca

SEQ ID NO: 1744472 - RNA, 17 nt, Human
ucuugaauuguaaggaa

SEQ ID NO: 1744473 - RNA, 15 nt, Human
ucuugaacuccuggc

SEQ ID NO: 1744474 - RNA, 16 nt, Human
ucuugaauaauguaag

SEQ ID NO: 1744475 - RNA, 16 nt, Human
ugaccuuucaauagga

SEQ ID NO: 1744476 - RNA, 15 nt, Human
ugaccuuucaauagg

SEQ ID NO: 1744477 - RNA, 14 nt, Human
ugaccuuucaauag

SEQ ID NO: 1744478 - RNA, 18 nt, Human
ugaccucugcagcaauaa

SEQ ID NO: 1744479 - RNA, 21 nt, Human
ugaccucugcagcaauaaagc

SEQ ID NO: 1744480 - RNA, 12 nt, Human
ugaccucugccu

SEQ ID NO: 1744481 - RNA, 23 nt, Human
ugaccucugcagcaauaaagcag

SEQ ID NO: 1744482 - RNA, 22 nt, Human
ugaccucaggugauccacccac

SEQ ID NO: 1744483 - RNA, 16 nt, Human
ugaccucagcuuugau

SEQ ID NO: 1744484 - RNA, 13 nt, Human
ugaccucugcagc

SEQ ID NO: 1744485 - RNA, 16 nt, Human
ugaccucugcagcaau

SEQ ID NO: 1744486 - RNA, 14 nt, Human
ugacugaauuucuu

SEQ ID NO: 1744487 - RNA, 15 nt, Human
ugacugaauuucuuu

SEQ ID NO: 1744488 - RNA, 13 nt, Human
ugacugaauuucu

SEQ ID NO: 1744489 - RNA, 20 nt, Human
ugacgccaucccagccccaa

SEQ ID NO: 1744490 - RNA, 19 nt, Human
ugacgccaucccagcccca

SEQ ID NO: 1744491 - RNA, 18 nt, Human
ugacgccaucccagcccc

SEQ ID NO: 1744492 - RNA, 17 nt, Human
ugacgccaucccagccc

SEQ ID NO: 1744493 - RNA, 16 nt, Human
ugacgccaucccagcc

SEQ ID NO: 1744494 - RNA, 15 nt, Human
ugacgccaucccagc

SEQ ID NO: 1744495 - RNA, 14 nt, Human
ugacgccaucccag

SEQ ID NO: 1744496 - RNA, 13 nt, Human
ugacgccauccca

SEQ ID NO: 1744497 - RNA, 22 nt, Human
ugaccuuucaauaggaaaaacu

SEQ ID NO: 1744498 - RNA, 18 nt, Human
ugaccuuucaauaggaaa

SEQ ID NO: 1744499 - RNA, 14 nt, Human
ugagacagcucugc

SEQ ID NO: 1744500 - RNA, 16 nt, Human
ugagacagcucugcau

SEQ ID NO: 1744501 - RNA, 12 nt, Human
ugagacccuguc

SEQ ID NO: 1744502 - RNA, 22 nt, Human
ugacuguacuccucccaggcgc

SEQ ID NO: 1744503 - RNA, 18 nt, Human
ugacuguacuccucccag

SEQ ID NO: 1744504 - RNA, 17 nt, Human
ugacuguacuccuccca

SEQ ID NO: 1744505 - RNA, 16 nt, Human
ugacuguacuccuccc

SEQ ID NO: 1744506 - RNA, 13 nt, Human
ugagaaaucuaaa

SEQ ID NO: 1744507 - RNA, 17 nt, Human
ugagaaaucuaaaaaac

SEQ ID NO: 1744508 - RNA, 17 nt, Human
ugagaguagagucacug

SEQ ID NO: 1744509 - RNA, 22 nt, Human
ugagaggcauccaguaucuuga

SEQ ID NO: 1744510 - RNA, 23 nt, Human
ugagaggcauccaguaucuugaa

SEQ ID NO: 1744511 - RNA, 14 nt, Human
ugagacucugucuc

SEQ ID NO: 1744512 - RNA, 13 nt, Human
ugagacucugucu

SEQ ID NO: 1744513 - RNA, 12 nt, Human
ugagacucuguc

SEQ ID NO: 1744514 - RNA, 16 nt, Human
ugagcaucaggccagg

SEQ ID NO: 1744515 - RNA, 15 nt, Human
ugagcaucaggccag

SEQ ID NO: 1744516 - RNA, 14 nt, Human
ugagcaucaggcca

SEQ ID NO: 1744517 - RNA, 13 nt, Human
ugagccccaaaag

SEQ ID NO: 1744518 - RNA, 13 nt, Human
ugagcaucaggcc

SEQ ID NO: 1744519 - RNA, 14 nt, Human
ugagaugcuagaac

SEQ ID NO: 1744520 - RNA, 16 nt, Human
ugagaugcuagaacuc

SEQ ID NO: 1744521 - RNA, 20 nt, Human
ugagaugcuagaacucccuu

SEQ ID NO: 1744522 - RNA, 15 nt, Human
ugagccucagcaucc

SEQ ID NO: 1744523 - RNA, 13 nt, Human
ugagccucagcau

SEQ ID NO: 1744524 - RNA, 16 nt, Human
ugauagcacagacccu

SEQ ID NO: 1744525 - RNA, 15 nt, Human
ugauagcacagaccc

SEQ ID NO: 1744526 - RNA, 21 nt, Human
ugauagcacagacccugcccu

SEQ ID NO: 1744527 - RNA, 20 nt, Human
ugauagcacagacccugccc

SEQ ID NO: 1744528 - RNA, 18 nt, Human
ugauagcacagacccugc

SEQ ID NO: 1744529 - RNA, 17 nt, Human
ugauagcacagacccug

SEQ ID NO: 1744530 - RNA, 23 nt, Human
ugauagcacagacccugcccugu

SEQ ID NO: 1744531 - RNA, 22 nt, Human
ugauagcacagacccugcccug

SEQ ID NO: 1744532 - RNA, 18 nt, Human
ugauagguauaaguggug

SEQ ID NO: 1744533 - RNA, 22 nt, Human
ugauagguuauuuugauguaaa

SEQ ID NO: 1744534 - RNA, 18 nt, Human
ugagucgaggacagggag

SEQ ID NO: 1744535 - RNA, 19 nt, Human
ugaguugauucagcucugc

SEQ ID NO: 1744536 - RNA, 16 nt, Human
ugaguugauucagcuc

SEQ ID NO: 1744537 - RNA, 23 nt, Human
ugaguugauagcacagacccugc

SEQ ID NO: 1744538 - RNA, 21 nt, Human
ugaguugauagcacagacccu

SEQ ID NO: 1744539 - RNA, 16 nt, Human
ugagucgaggacaggg

SEQ ID NO: 1744540 - RNA, 15 nt, Human
ugagucgaggacagg

SEQ ID NO: 1744541 - RNA, 15 nt, Human
ugaggugcuauguuc

SEQ ID NO: 1744542 - RNA, 16 nt, Human
ugaggugcuauguucu

SEQ ID NO: 1744543 - RNA, 21 nt, Human
ugaguccccuguuuguuucug

SEQ ID NO: 1744544 - RNA, 19 nt, Human
ugagguuucaaaccucccu

SEQ ID NO: 1744545 - RNA, 18 nt, Human
ugaguccuggcaugggaa

SEQ ID NO: 1744546 - RNA, 11 nt, Human
ugaguccuggc

SEQ ID NO: 1744547 - RNA, 22 nt, Human
ugaguccuggcaugggaaugaa

SEQ ID NO: 1744548 - RNA, 19 nt, Human
ugaguccuggcaugggaau

SEQ ID NO: 1744549 - RNA, 14 nt, Human
ugagucgaggacag

SEQ ID NO: 1744550 - RNA, 20 nt, Human
ugaggucuguucuuuccaaa

SEQ ID NO: 1744551 - RNA, 14 nt, Human
ugaggucuguucuu

SEQ ID NO: 1744552 - RNA, 15 nt, Human
ugaggucuguucuuu

SEQ ID NO: 1744553 - RNA, 11 nt, Human
ugaggcugggc

SEQ ID NO: 1744554 - RNA, 23 nt, Human
ugaggacuuaaaauauuccugca

SEQ ID NO: 1744555 - RNA, 14 nt, Human
ugaugccaugagga

SEQ ID NO: 1744556 - RNA, 20 nt, Human
ugaugaugaaaugaggucag

SEQ ID NO: 1744557 - RNA, 23 nt, Human
ugaugaucuuugcagacaggcaa

SEQ ID NO: 1744558 - RNA, 22 nt, Human
ugaugaucuuugcagacaggca

SEQ ID NO: 1744559 - RNA, 20 nt, Human
ugaucuuugcagacaggcaa

SEQ ID NO: 1744560 - RNA, 19 nt, Human
ugaucuuugcagacaggca

SEQ ID NO: 1744561 - RNA, 21 nt, Human
ugaucugaugcaagcaagaaa

SEQ ID NO: 1744562 - RNA, 23 nt, Human
ugaucuuugcagacaggcaagca

SEQ ID NO: 1744563 - RNA, 21 nt, Human
ugaucuuugcagacaggcaag

SEQ ID NO: 1744564 - RNA, 23 nt, Human
ugaugcuucuucagagacuccug

SEQ ID NO: 1744565 - RNA, 13 nt, Human
ugauguacaugua

SEQ ID NO: 1744566 - RNA, 22 nt, Human
ugaugcuucuucagagacuccu

SEQ ID NO: 1744567 - RNA, 21 nt, Human
ugaugcuucuucagagacucc

SEQ ID NO: 1744568 - RNA, 19 nt, Human
ugaugcuucuucagagacu

SEQ ID NO: 1744569 - RNA, 24 nt, Human
ugauaguuguaccgcaaugugacu

SEQ ID NO: 1744570 - RNA, 23 nt, Human
ugauauaaguguguguuuuucau

SEQ ID NO: 1744571 - RNA, 17 nt, Human
ugauauaaguguguguu

SEQ ID NO: 1744572 - RNA, 22 nt, Human
ugaucacggcucacugcagccu

SEQ ID NO: 1744573 - RNA, 19 nt, Human
ugauaugcaguuuuccuua

SEQ ID NO: 1744574 - RNA, 20 nt, Human
ugauccacccaccucagccu

SEQ ID NO: 1744575 - RNA, 16 nt, Human
ugauccacccaccuca

SEQ ID NO: 1744576 - RNA, 15 nt, Human
ugauccacccaccuc

SEQ ID NO: 1744577 - RNA, 21 nt, Human
ugauccaagcuggucccacuc

SEQ ID NO: 1744578 - RNA, 24 nt, Human
ugaucauccacugugccaugugcc

SEQ ID NO: 1744579 - RNA, 13 nt, Human
ugaucauccacug

SEQ ID NO: 1744580 - RNA, 21 nt, Human
ugaucuaggaagacuuuggaa

SEQ ID NO: 1744581 - RNA, 19 nt, Human
ugaucuaggaagacuuugg

SEQ ID NO: 1744582 - RNA, 22 nt, Human
ugauccacccaccucagccucc

SEQ ID NO: 1744583 - RNA, 21 nt, Human
ugauccacccaccucagccuc

SEQ ID NO: 1744584 - RNA, 20 nt, Human
ugaucugaugcaagcaagaa

SEQ ID NO: 1744585 - RNA, 19 nt, Human
ugcuuaacuucacauauug

SEQ ID NO: 1744586 - RNA, 13 nt, Human
ugcuuaacuucac

SEQ ID NO: 1744587 - RNA, 14 nt, Human
ugcuuaacuucaca

SEQ ID NO: 1744588 - RNA, 17 nt, Human
ugcuuaacuucacauau

SEQ ID NO: 1744589 - RNA, 18 nt, Human
ugcuuaacuucacauauu

SEQ ID NO: 1744590 - RNA, 23 nt, Human
ugcuuccagugaggcucugcccu

SEQ ID NO: 1744591 - RNA, 22 nt, Human
ugcuuccagugaggcucugccc

SEQ ID NO: 1744592 - RNA, 14 nt, Human
ugcuuguuaacuga

SEQ ID NO: 1744593 - RNA, 16 nt, Human
ugcuuguuaacugagu

SEQ ID NO: 1744594 - RNA, 13 nt, Human
ugcuucuucagag

SEQ ID NO: 1744595 - RNA, 18 nt, Human
ugcuugugaaaggaaaga

SEQ ID NO: 1744596 - RNA, 17 nt, Human
ugcuuuggaaaacccag

SEQ ID NO: 1744597 - RNA, 13 nt, Human
ugcuuuggaaauc

SEQ ID NO: 1744598 - RNA, 17 nt, Human
uggaacacucugagacu

SEQ ID NO: 1744599 - RNA, 15 nt, Human
uggaacacucugaga

SEQ ID NO: 1744600 - RNA, 23 nt, Human
uggacaggcauguucucugagga

SEQ ID NO: 1744601 - RNA, 22 nt, Human
uggacaggcauguucucugagg

SEQ ID NO: 1744602 - RNA, 18 nt, Human
uggacaggcauguucucu

SEQ ID NO: 1744603 - RNA, 23 nt, Human
uggacguguuaugacuccagaau

SEQ ID NO: 1744604 - RNA, 19 nt, Human
uggacguguuaugacucca

SEQ ID NO: 1744605 - RNA, 20 nt, Human
uggacuaacuugucuuugga

SEQ ID NO: 1744606 - RNA, 19 nt, Human
uggacuaacuugucuuugg

SEQ ID NO: 1744607 - RNA, 22 nt, Human
uggcacugcuuccagugaggcu

SEQ ID NO: 1744608 - RNA, 22 nt, Human
uggcacuauaauguaagcucua

SEQ ID NO: 1744609 - RNA, 19 nt, Human
uggcacugcuuccagugag

SEQ ID NO: 1744610 - RNA, 21 nt, Human
uggcacuauaauguaagcucu

SEQ ID NO: 1744611 - RNA, 15 nt, Human
uggauuuaacagaaa

SEQ ID NO: 1744612 - RNA, 17 nt, Human
uggauuuaacagaaaug

SEQ ID NO: 1744613 - RNA, 23 nt, Human
uggaggggggaggugggauccuc

SEQ ID NO: 1744614 - RNA, 21 nt, Human
uggaugcagccucacaguccu

SEQ ID NO: 1744615 - RNA, 13 nt, Human
uggaugcagccuc

SEQ ID NO: 1744616 - RNA, 22 nt, Human
uggaugcagccucacaguccuu

SEQ ID NO: 1744617 - RNA, 19 nt, Human
uggaucaaauccagccugc

SEQ ID NO: 1744618 - RNA, 18 nt, Human
ugggaggaucucuugagc

SEQ ID NO: 1744619 - RNA, 18 nt, Human
ugggaugauuggaggggg

SEQ ID NO: 1744620 - RNA, 14 nt, Human
ugggacagggagga

SEQ ID NO: 1744621 - RNA, 16 nt, Human
ugggaggaucucuuga

SEQ ID NO: 1744622 - RNA, 15 nt, Human
ugggacacccuguga

SEQ ID NO: 1744623 - RNA, 14 nt, Human
ugggacacccugug

SEQ ID NO: 1744624 - RNA, 21 nt, Human
ugggaaugaaugucaguguga

SEQ ID NO: 1744625 - RNA, 16 nt, Human
ugggaaugaaugucag

SEQ ID NO: 1744626 - RNA, 17 nt, Human
ugggcagagcagagacc

SEQ ID NO: 1744627 - RNA, 15 nt, Human
ugggcagagcagaga

SEQ ID NO: 1744628 - RNA, 14 nt, Human
ugggcagagcagag

SEQ ID NO: 1744629 - RNA, 18 nt, Human
ugggcagagcagagacca

SEQ ID NO: 1744630 - RNA, 19 nt, Human
uggggggcugaggugggag

SEQ ID NO: 1744631 - RNA, 16 nt, Human
ugggggccucagugcc

SEQ ID NO: 1744632 - RNA, 17 nt, Human
uggggccaggcuggguc

SEQ ID NO: 1744633 - RNA, 21 nt, Human
ugggcuugucuguagauuuua

SEQ ID NO: 1744634 - RNA, 17 nt, Human
ugggcuugucuguagau

SEQ ID NO: 1744635 - RNA, 23 nt, Human
ugggcuuggggaccagagcugcc

SEQ ID NO: 1744636 - RNA, 13 nt, Human
uggggcagcuuga

SEQ ID NO: 1744637 - RNA, 21 nt, Human
ugggcuucaguggcagcugcu

SEQ ID NO: 1744638 - RNA, 22 nt, Human
ugggcuucaguggcagcugcuu

SEQ ID NO: 1744639 - RNA, 15 nt, Human
ugggcuucauccucc

SEQ ID NO: 1744640 - RNA, 22 nt, Human
ugggcuucauccuccucagauc

SEQ ID NO: 1744641 - RNA, 23 nt, Human
uggccuucggccuccauccugag

SEQ ID NO: 1744642 - RNA, 13 nt, Human
uggccucugcacu

SEQ ID NO: 1744643 - RNA, 22 nt, Human
uggccuucggccuccauccuga

SEQ ID NO: 1744644 - RNA, 17 nt, Human
uggcuccagcuggccgg

SEQ ID NO: 1744645 - RNA, 16 nt, Human
uggcugcugaaggcuc

SEQ ID NO: 1744646 - RNA, 14 nt, Human
uggcugcugaaggc

SEQ ID NO: 1744647 - RNA, 13 nt, Human
uggcugcugaagg

SEQ ID NO: 1744648 - RNA, 14 nt, Human
ugggaaugaagcaa

SEQ ID NO: 1744649 - RNA, 22 nt, Human
uggcuuuucacugcuggcugcc

SEQ ID NO: 1744650 - RNA, 21 nt, Human
uggcuuuucacugcuggcugc

SEQ ID NO: 1744651 - RNA, 19 nt, Human
uggcuuuucacugcuggcu

SEQ ID NO: 1744652 - RNA, 18 nt, Human
uggcuuuucacugcuggc

SEQ ID NO: 1744653 - RNA, 16 nt, Human
uggcuuuucacugcug

SEQ ID NO: 1744654 - RNA, 22 nt, Human
uggcuuccuaaaauucagugga

SEQ ID NO: 1744655 - RNA, 22 nt, Human
uggcuucccgcucagcccuccc

SEQ ID NO: 1744656 - RNA, 21 nt, Human
uggcuucccgcucagcccucc

SEQ ID NO: 1744657 - RNA, 20 nt, Human
uggcuucccgcucagcccuc

SEQ ID NO: 1744658 - RNA, 19 nt, Human
uggcuucccgcucagcccu

SEQ ID NO: 1744659 - RNA, 18 nt, Human
uggcuucccgcucagccc

SEQ ID NO: 1744660 - RNA, 22 nt, Human
uggccucccaacucaccccagc

SEQ ID NO: 1744661 - RNA, 21 nt, Human
uggccucccaacucaccccag

SEQ ID NO: 1744662 - RNA, 20 nt, Human
uggccucccaacucacccca

SEQ ID NO: 1744663 - RNA, 19 nt, Human
uggccucccaacucacccc

SEQ ID NO: 1744664 - RNA, 14 nt, Human
uggccucccaacuc

SEQ ID NO: 1744665 - RNA, 11 nt, Human
uggccucccaa

SEQ ID NO: 1744666 - RNA, 13 nt, Human
uggccuccaaguc

SEQ ID NO: 1744667 - RNA, 23 nt, Human
uggccuccaaguccacaguggaa

SEQ ID NO: 1744668 - RNA, 23 nt, Human
uggccucaagugauucuccugcc

SEQ ID NO: 1744669 - RNA, 18 nt, Human
uggccucaagugauucuc

SEQ ID NO: 1744670 - RNA, 23 nt, Human
uggccuagcauacguacacauuu

SEQ ID NO: 1744671 - RNA, 20 nt, Human
uggccccucagggucccugg

SEQ ID NO: 1744672 - RNA, 13 nt, Human
uggccccucaggg

SEQ ID NO: 1744673 - RNA, 19 nt, Human
uggcagcugcgguccaccc

SEQ ID NO: 1744674 - RNA, 17 nt, Human
uggcagcugcgguccac

SEQ ID NO: 1744675 - RNA, 22 nt, Human
uggccccucagggucccuggug

SEQ ID NO: 1744676 - RNA, 21 nt, Human
uggccccucagggucccuggu

SEQ ID NO: 1744677 - RNA, 14 nt, Human
uggccccugcccgg

SEQ ID NO: 1744678 - RNA, 20 nt, Human
uggccuagcauacguacaca

SEQ ID NO: 1744679 - RNA, 16 nt, Human
ugucuguuguauucau

SEQ ID NO: 1744680 - RNA, 23 nt, Human
ugucuuuggacccugaggcccag

SEQ ID NO: 1744681 - RNA, 16 nt, Human
ugucuuuucuugcaug

SEQ ID NO: 1744682 - RNA, 19 nt, Human
ugucucaagagggcacugg

SEQ ID NO: 1744683 - RNA, 21 nt, Human
ugucucaaaaaaagaaaaaga

SEQ ID NO: 1744684 - RNA, 18 nt, Human
ugucucaagagggcacug

SEQ ID NO: 1744685 - RNA, 17 nt, Human
ugucucaagagggcacu

SEQ ID NO: 1744686 - RNA, 23 nt, Human
ugucuaguuguuugauucagaca

SEQ ID NO: 1744687 - RNA, 15 nt, Human
ugucuaguuguuuga

SEQ ID NO: 1744688 - RNA, 17 nt, Human
ugucuaggcaggaccug

SEQ ID NO: 1744689 - RNA, 19 nt, Human
ugucuaggcaggaccugug

SEQ ID NO: 1744690 - RNA, 16 nt, Human
ugucuaugggacucaa

SEQ ID NO: 1744691 - RNA, 15 nt, Human
ugucuaugggacuca

SEQ ID NO: 1744692 - RNA, 14 nt, Human
ugucuaugggacuc

SEQ ID NO: 1744693 - RNA, 14 nt, Human
ugucuaaugaaacc

SEQ ID NO: 1744694 - RNA, 20 nt, Human
uguccugggagugagcuggu

SEQ ID NO: 1744695 - RNA, 19 nt, Human
uguccugggagugagcugg

SEQ ID NO: 1744696 - RNA, 12 nt, Human
uguccugggagu

SEQ ID NO: 1744697 - RNA, 22 nt, Human
uguccugccuaaggcugaacuu

SEQ ID NO: 1744698 - RNA, 19 nt, Human
uguccccgcacugggcuug

SEQ ID NO: 1744699 - RNA, 17 nt, Human
uguccccgcacugggcu

SEQ ID NO: 1744700 - RNA, 13 nt, Human
ugucaucucagcu

SEQ ID NO: 1744701 - RNA, 13 nt, Human
uguccccuauccu

SEQ ID NO: 1744702 - RNA, 23 nt, Human
uguacagcaaggagauuuacaac

SEQ ID NO: 1744703 - RNA, 12 nt, Human
uguacagagccc

SEQ ID NO: 1744704 - RNA, 21 nt, Human
uguacagagcccacgccccca

SEQ ID NO: 1744705 - RNA, 13 nt, Human
uguacagagccca

SEQ ID NO: 1744706 - RNA, 22 nt, Human
uguacagcaaggagauuuacaa

SEQ ID NO: 1744707 - RNA, 13 nt, Human
uguaucugagcag

SEQ ID NO: 1744708 - RNA, 22 nt, Human
uguaugaaagauggcugugccu

SEQ ID NO: 1744709 - RNA, 19 nt, Human
uguauuuuacuaauaaaau

SEQ ID NO: 1744710 - RNA, 14 nt, Human
ugucacaggcaggu

SEQ ID NO: 1744711 - RNA, 13 nt, Human
ugucacacacuuu

SEQ ID NO: 1744712 - RNA, 21 nt, Human
ugucaauuacaggaaguacug

SEQ ID NO: 1744713 - RNA, 13 nt, Human
uguaugcgugugu

SEQ ID NO: 1744714 - RNA, 14 nt, Human
ugucagugugacug

SEQ ID NO: 1744715 - RNA, 15 nt, Human
ugucagugugacuga

SEQ ID NO: 1744716 - RNA, 19 nt, Human
ugucagugugacugaucuc

SEQ ID NO: 1744717 - RNA, 16 nt, Human
ugucagugugacugau

SEQ ID NO: 1744718 - RNA, 21 nt, Human
ugucacaggcagguccagggu

SEQ ID NO: 1744719 - RNA, 17 nt, Human
ugucacaggcaggucca

SEQ ID NO: 1744720 - RNA, 16 nt, Human
ugucacaggcaggucc

SEQ ID NO: 1744721 - RNA, 15 nt, Human
ugucacaggcagguc

SEQ ID NO: 1744722 - RNA, 11 nt, Human
uguacagagcc

SEQ ID NO: 1744723 - RNA, 14 nt, Human
uguacagacaacaa

SEQ ID NO: 1744724 - RNA, 17 nt, Human
uguaaugaaaaccacau

SEQ ID NO: 1744725 - RNA, 13 nt, Human
uguaaugaaaacc

SEQ ID NO: 1744726 - RNA, 12 nt, Human
uguaaugaaaac

SEQ ID NO: 1744727 - RNA, 11 nt, Human
uguaaugaaaa

SEQ ID NO: 1744728 - RNA, 19 nt, Human
uguaauaauaaagaauagc

SEQ ID NO: 1744729 - RNA, 17 nt, Human
uguaacaagccacccca

SEQ ID NO: 1744730 - RNA, 14 nt, Human
uguaacaagccacc

SEQ ID NO: 1744731 - RNA, 13 nt, Human
ugguugcauccua

SEQ ID NO: 1744732 - RNA, 16 nt, Human
ugguuuucuguucuuu

SEQ ID NO: 1744733 - RNA, 20 nt, Human
ugguuguacauauaagugau

SEQ ID NO: 1744734 - RNA, 23 nt, Human
ugguuuuuaaaaaacugcugacu

SEQ ID NO: 1744735 - RNA, 16 nt, Human
ugguuuuucaguuuuc

SEQ ID NO: 1744736 - RNA, 21 nt, Human
ugguuuuuaaaaaacugcuga

SEQ ID NO: 1744737 - RNA, 19 nt, Human
ugguuuucuuguguguuua

SEQ ID NO: 1744738 - RNA, 11 nt, Human
uguaaaauggu

SEQ ID NO: 1744739 - RNA, 12 nt, Human
uguaaaauggug

SEQ ID NO: 1744740 - RNA, 17 nt, Human
uguaaaagcauuuugua

SEQ ID NO: 1744741 - RNA, 18 nt, Human
uguaaaagcauuuuguaa

SEQ ID NO: 1744742 - RNA, 19 nt, Human
uguaaaagcauuuuguaau

SEQ ID NO: 1744743 - RNA, 23 nt, Human
uggguacuuguggacacagcucu

SEQ ID NO: 1744744 - RNA, 20 nt, Human
uggguacuuguggacacagc

SEQ ID NO: 1744745 - RNA, 14 nt, Human
uggugagaggcauc

SEQ ID NO: 1744746 - RNA, 20 nt, Human
uggugcaaugaccuuucaau

SEQ ID NO: 1744747 - RNA, 19 nt, Human
uggugcaaugaccuuucaa

SEQ ID NO: 1744748 - RNA, 14 nt, Human
uggugcaaugaccu

SEQ ID NO: 1744749 - RNA, 18 nt, Human
ugguggcagugggagcug

SEQ ID NO: 1744750 - RNA, 13 nt, Human
ugguggcaguggg

SEQ ID NO: 1744751 - RNA, 20 nt, Human
ugguggcagugggagcugcc

SEQ ID NO: 1744752 - RNA, 19 nt, Human
ugguggcccgacagccugg

SEQ ID NO: 1744753 - RNA, 18 nt, Human
uggugggggccucggugu

SEQ ID NO: 1744754 - RNA, 16 nt, Human
uggugggggccucggu

SEQ ID NO: 1744755 - RNA, 13 nt, Human
ugguggcuggguu

SEQ ID NO: 1744756 - RNA, 21 nt, Human
ugguggcccgacagccuggca

SEQ ID NO: 1744757 - RNA, 19 nt, Human
uggugguuuucuguucuuu

SEQ ID NO: 1744758 - RNA, 18 nt, Human
ugguguaagguacuuuca

SEQ ID NO: 1744759 - RNA, 17 nt, Human
uggugguuucagaaaug

SEQ ID NO: 1744760 - RNA, 18 nt, Human
uggugguuucagaaaugu

SEQ ID NO: 1744761 - RNA, 20 nt, Human
ugguggggcugccaggggag

SEQ ID NO: 1744762 - RNA, 18 nt, Human
ugguugaugaucuuugca

SEQ ID NO: 1744763 - RNA, 23 nt, Human
ugguuccccuguucacucuacuu

SEQ ID NO: 1744764 - RNA, 23 nt, Human
ugguuccuccccuccuccuggac

SEQ ID NO: 1744765 - RNA, 18 nt, Human
ugguuccuccccuccucc

SEQ ID NO: 1744766 - RNA, 12 nt, Human
ugguuccucccc

SEQ ID NO: 1744767 - RNA, 19 nt, Human
uggugucgggcaugacacg

SEQ ID NO: 1744768 - RNA, 18 nt, Human
uggugucgggcaugacac

SEQ ID NO: 1744769 - RNA, 20 nt, Human
ugguuccccuguucacucua

SEQ ID NO: 1744770 - RNA, 19 nt, Human
ugguuccccuguucacucu

SEQ ID NO: 1744771 - RNA, 18 nt, Human
ugguuccccuguucacuc

SEQ ID NO: 1744772 - RNA, 11 nt, Human
ugguuccccug

SEQ ID NO: 1744773 - RNA, 15 nt, Human
uggugucgggcauga

SEQ ID NO: 1744774 - RNA, 16 nt, Human
uggugucaccugaaga

SEQ ID NO: 1744775 - RNA, 16 nt, Human
ucccuaauaaagcugu

SEQ ID NO: 1744776 - RNA, 16 nt, Human
ucccuauuagagaaga

SEQ ID NO: 1744777 - RNA, 19 nt, Human
ucccuccugggaaugaagc

SEQ ID NO: 1744778 - RNA, 11 nt, Human
ucccuccuggg

SEQ ID NO: 1744779 - RNA, 21 nt, Human
uccccuguuuguuucugaaag

SEQ ID NO: 1744780 - RNA, 13 nt, Human
uccccuucacucc

SEQ ID NO: 1744781 - RNA, 20 nt, Human
uccccuguuuguuucugaaa

SEQ ID NO: 1744782 - RNA, 18 nt, Human
uccagguuuaagcuguua

SEQ ID NO: 1744783 - RNA, 17 nt, Human
uccagguuuaagcuguu

SEQ ID NO: 1744784 - RNA, 15 nt, Human
ucccuaauaaagcug

SEQ ID NO: 1744785 - RNA, 14 nt, Human
ucccuaauaaagcu

SEQ ID NO: 1744786 - RNA, 16 nt, Human
ucccguggaacguuuu

SEQ ID NO: 1744787 - RNA, 22 nt, Human
ucccguggaacguuuuuccugu

SEQ ID NO: 1744788 - RNA, 23 nt, Human
ucccguggaacguuuuuccuguu

SEQ ID NO: 1744789 - RNA, 13 nt, Human
ucccuucccaccu

SEQ ID NO: 1744790 - RNA, 14 nt, Human
ucccuucccaccuc

SEQ ID NO: 1744791 - RNA, 14 nt, Human
ucccugcacuugca

SEQ ID NO: 1744792 - RNA, 19 nt, Human
ucccugccccucccuucaa

SEQ ID NO: 1744793 - RNA, 13 nt, Human
ucccugcacuugc

SEQ ID NO: 1744794 - RNA, 20 nt, Human
ucccugccccucccuucaac

SEQ ID NO: 1744795 - RNA, 17 nt, Human
uccucugcugcuggcug

SEQ ID NO: 1744796 - RNA, 16 nt, Human
uccucugcugcuggcu

SEQ ID NO: 1744797 - RNA, 15 nt, Human
uccucugcugcuggc

SEQ ID NO: 1744798 - RNA, 14 nt, Human
uccucugcugcugg

SEQ ID NO: 1744799 - RNA, 17 nt, Human
uccucuaggaggucucu

SEQ ID NO: 1744800 - RNA, 19 nt, Human
uccucuguacagagcccac

SEQ ID NO: 1744801 - RNA, 18 nt, Human
uccucuguacagagccca

SEQ ID NO: 1744802 - RNA, 17 nt, Human
uccucuguacagagccc

SEQ ID NO: 1744803 - RNA, 16 nt, Human
uccucuguacagagcc

SEQ ID NO: 1744804 - RNA, 21 nt, Human
uccucuuccugaauuuuauuu

SEQ ID NO: 1744805 - RNA, 14 nt, Human
uccucuaggagguc

SEQ ID NO: 1744806 - RNA, 19 nt, Human
uccuccuuuucacaguucu

SEQ ID NO: 1744807 - RNA, 18 nt, Human
uccuauauuguuuucagu

SEQ ID NO: 1744808 - RNA, 21 nt, Human
uccuauauuguuuucagugua

SEQ ID NO: 1744809 - RNA, 17 nt, Human
uccucauuagcauuuug

SEQ ID NO: 1744810 - RNA, 18 nt, Human
uccuacccacccuccuuu

SEQ ID NO: 1744811 - RNA, 15 nt, Human
uccuacaagacacag

SEQ ID NO: 1744812 - RNA, 18 nt, Human
uccuaauuccacagcugc

SEQ ID NO: 1744813 - RNA, 17 nt, Human
uccuaauuccacagcug

SEQ ID NO: 1744814 - RNA, 16 nt, Human
uccuaauuccacagcu

SEQ ID NO: 1744815 - RNA, 15 nt, Human
uccuaauuccacagc

SEQ ID NO: 1744816 - RNA, 22 nt, Human
uccuaaugaaugcauaaaaugu

SEQ ID NO: 1744817 - RNA, 17 nt, Human
uccgaccagacaccuug

SEQ ID NO: 1744818 - RNA, 13 nt, Human
uccgaccagacac

SEQ ID NO: 1744819 - RNA, 16 nt, Human
uccuaaucuucugaac

SEQ ID NO: 1744820 - RNA, 22 nt, Human
uccuucaccuuuguccccaccg

SEQ ID NO: 1744821 - RNA, 21 nt, Human
uccuucaccuuuguccccacc

SEQ ID NO: 1744822 - RNA, 20 nt, Human
uccuucaccuuuguccccac

SEQ ID NO: 1744823 - RNA, 18 nt, Human
uccuucaccuuugucccc

SEQ ID NO: 1744824 - RNA, 20 nt, Human
uccuuaccagcagagcaccu

SEQ ID NO: 1744825 - RNA, 19 nt, Human
uccuucacagaugggugcu

SEQ ID NO: 1744826 - RNA, 18 nt, Human
uccuucacagaugggugc

SEQ ID NO: 1744827 - RNA, 18 nt, Human
uccuuaccagcagagcac

SEQ ID NO: 1744828 - RNA, 17 nt, Human
uccuuaccagcagagca

SEQ ID NO: 1744829 - RNA, 16 nt, Human
uccuuaccagcagagc

SEQ ID NO: 1744830 - RNA, 23 nt, Human
uccuuuucacaguucucuccuuc

SEQ ID NO: 1744831 - RNA, 19 nt, Human
uccuuuuaaaacacuucca

SEQ ID NO: 1744832 - RNA, 18 nt, Human
uccuuuucgcaggauucu

SEQ ID NO: 1744833 - RNA, 13 nt, Human
ucgaacuggcugc

SEQ ID NO: 1744834 - RNA, 22 nt, Human
ucgaggcggaucuuuggacaga

SEQ ID NO: 1744835 - RNA, 17 nt, Human
ucgaggcggaucuuugg

SEQ ID NO: 1744836 - RNA, 15 nt, Human
ucgaacuccugaccu

SEQ ID NO: 1744837 - RNA, 20 nt, Human
uccugccuaagugcagcccc

SEQ ID NO: 1744838 - RNA, 14 nt, Human
uccugagccagauu

SEQ ID NO: 1744839 - RNA, 14 nt, Human
uccugccucagccu

SEQ ID NO: 1744840 - RNA, 13 nt, Human
uccugagccagau

SEQ ID NO: 1744841 - RNA, 19 nt, Human
uccuggcacccggccccug

SEQ ID NO: 1744842 - RNA, 16 nt, Human
uccuggcacccggccc

SEQ ID NO: 1744843 - RNA, 14 nt, Human
uccuggcacccggc

SEQ ID NO: 1744844 - RNA, 15 nt, Human
uccugccucagccuc

SEQ ID NO: 1744845 - RNA, 13 nt, Human
uccugccucagcc

SEQ ID NO: 1744846 - RNA, 16 nt, Human
uccugccucagccucc

SEQ ID NO: 1744847 - RNA, 17 nt, Human
uccugccucagccuccc

SEQ ID NO: 1744848 - RNA, 17 nt, Human
uccuggcacugcuucca

SEQ ID NO: 1744849 - RNA, 22 nt, Human
uccuggcacccggccccugcug

SEQ ID NO: 1744850 - RNA, 21 nt, Human
uccuggcacccggccccugcu

SEQ ID NO: 1744851 - RNA, 20 nt, Human
uccuggcacccggccccugc

SEQ ID NO: 1744852 - RNA, 22 nt, Human
uccuggcacugcuuccagugag

SEQ ID NO: 1744853 - RNA, 18 nt, Human
uccuggcacugcuuccag

SEQ ID NO: 1744854 - RNA, 22 nt, Human
uccuguaccucuugagccuuga

SEQ ID NO: 1744855 - RNA, 20 nt, Human
uccuguaccucuugagccuu

SEQ ID NO: 1744856 - RNA, 22 nt, Human
ucuaaaucuccaaaauaaaacu

SEQ ID NO: 1744857 - RNA, 21 nt, Human
ucuaaaucuccaaaauaaaac

SEQ ID NO: 1744858 - RNA, 18 nt, Human
ucggccuccauccugagg

SEQ ID NO: 1744859 - RNA, 16 nt, Human
ucgagguuucucaaag

SEQ ID NO: 1744860 - RNA, 22 nt, Human
ucgagguuucucaaagaaauuu

SEQ ID NO: 1744861 - RNA, 16 nt, Human
ucgugauugauaagaa

SEQ ID NO: 1744862 - RNA, 22 nt, Human
ucggccucccaaagugcuggga

SEQ ID NO: 1744863 - RNA, 14 nt, Human
ucuaaugugugaau

SEQ ID NO: 1744864 - RNA, 14 nt, Human
ucuaauauguaaca

SEQ ID NO: 1744865 - RNA, 18 nt, Human
ucuaggaggucucuaaga

SEQ ID NO: 1744866 - RNA, 13 nt, Human
ucuaugccugucu

SEQ ID NO: 1744867 - RNA, 17 nt, Human
ucucaaauaacuaaaag

SEQ ID NO: 1744868 - RNA, 21 nt, Human
ucucaaagaaauuuccacuca

SEQ ID NO: 1744869 - RNA, 22 nt, Human
ucucaaagaaauuuccacucag

SEQ ID NO: 1744870 - RNA, 21 nt, Human
ucuaucaaguauuauaccuuu

SEQ ID NO: 1744871 - RNA, 22 nt, Human
ucuaucaaguauuauaccuuuu

SEQ ID NO: 1744872 - RNA, 15 nt, Human
ucuaucaaguauuau

SEQ ID NO: 1744873 - RNA, 12 nt, Human
ucuccugccuca

SEQ ID NO: 1744874 - RNA, 18 nt, Human
ucucaagagggcacuggu

SEQ ID NO: 1744875 - RNA, 17 nt, Human
ucucaagagggcacugg

SEQ ID NO: 1744876 - RNA, 19 nt, Human
ucucaagagggcacuggug

SEQ ID NO: 1744877 - RNA, 15 nt, Human
ucuccugccucagcc

SEQ ID NO: 1744878 - RNA, 17 nt, Human
ucuccugccucagccuc

SEQ ID NO: 1744879 - RNA, 19 nt, Human
ucuccugccucagccuccc

SEQ ID NO: 1744880 - RNA, 15 nt, Human
ucuccuguaccucuu

SEQ ID NO: 1744881 - RNA, 21 nt, Human
ucuccuggaaauauuaagaaa

SEQ ID NO: 1744882 - RNA, 21 nt, Human
ucuccuggaagugcuaauuuu

SEQ ID NO: 1744883 - RNA, 19 nt, Human
ucucuaacuucaccauauu

SEQ ID NO: 1744884 - RNA, 12 nt, Human
ucucuaacuuca

SEQ ID NO: 1744885 - RNA, 20 nt, Human
ucucuaacaguggacaaagu

SEQ ID NO: 1744886 - RNA, 14 nt, Human
ucucuaacagugga

SEQ ID NO: 1744887 - RNA, 22 nt, Human
ucucgugauugauaagaaccuu

SEQ ID NO: 1744888 - RNA, 14 nt, Human
ucucgugauugaua

SEQ ID NO: 1744889 - RNA, 19 nt, Human
ucucgugguaggacuguag

SEQ ID NO: 1744890 - RNA, 21 nt, Human
ucucgugguaggacuguagaa

SEQ ID NO: 1744891 - RNA, 19 nt, Human
ucuccuguaccucuugagc

SEQ ID NO: 1744892 - RNA, 16 nt, Human
ucuccuguaccucuug

SEQ ID NO: 1744893 - RNA, 17 nt, Human
ucuccuguaccucuuga

SEQ ID NO: 1744894 - RNA, 18 nt, Human
ucucugcaggucccuaau

SEQ ID NO: 1744895 - RNA, 16 nt, Human
ucucugcaggucccua

SEQ ID NO: 1744896 - RNA, 15 nt, Human
ucucugcaggucccu

SEQ ID NO: 1744897 - RNA, 17 nt, Human
ucucugaggacacuaac

SEQ ID NO: 1744898 - RNA, 14 nt, Human
ucucugcagguccc

SEQ ID NO: 1744899 - RNA, 13 nt, Human
ucucugcaggucc

SEQ ID NO: 1744900 - RNA, 16 nt, Human
ucucuaguuugauuaa

SEQ ID NO: 1744901 - RNA, 15 nt, Human
ucucuaguuugauua

SEQ ID NO: 1744902 - RNA, 17 nt, Human
ucugcauucaggaucaa

SEQ ID NO: 1744903 - RNA, 23 nt, Human
ucugaggaauccagacccggcug

SEQ ID NO: 1744904 - RNA, 15 nt, Human
ucugacccacugcuu

SEQ ID NO: 1744905 - RNA, 14 nt, Human
ucugacccacugcu

SEQ ID NO: 1744906 - RNA, 21 nt, Human
ucugcaagaauugaagcagga

SEQ ID NO: 1744907 - RNA, 20 nt, Human
ucugcaagaauugaagcagg

SEQ ID NO: 1744908 - RNA, 14 nt, Human
ucugcacacagcac

SEQ ID NO: 1744909 - RNA, 23 nt, Human
ucugaggcugaaauucagaauau

SEQ ID NO: 1744910 - RNA, 11 nt, Human
ucugaggcuga

SEQ ID NO: 1744911 - RNA, 13 nt, Human
ucugacccacugc

SEQ ID NO: 1744912 - RNA, 15 nt, Human
ucugacauaaguauu

SEQ ID NO: 1744913 - RNA, 22 nt, Human
ucugacaggcaaugcuggcugu

SEQ ID NO: 1744914 - RNA, 21 nt, Human
ucugacaggcaaugcuggcug

SEQ ID NO: 1744915 - RNA, 12 nt, Human
ucugacaggcaa

SEQ ID NO: 1744916 - RNA, 19 nt, Human
ucugacacacagcucuguc

SEQ ID NO: 1744917 - RNA, 18 nt, Human
ucugacacacagcucugu

SEQ ID NO: 1744918 - RNA, 17 nt, Human
ucugacacacagcucug

SEQ ID NO: 1744919 - RNA, 16 nt, Human
ucugacacacagcucu

SEQ ID NO: 1744920 - RNA, 13 nt, Human
ucugaaaauguau

SEQ ID NO: 1744921 - RNA, 14 nt, Human
ucugaaaauugaug

SEQ ID NO: 1744922 - RNA, 14 nt, Human
ucugaaaauguaug

SEQ ID NO: 1744923 - RNA, 22 nt, Human
ucugaaaauugaugggauuugg

SEQ ID NO: 1744924 - RNA, 17 nt, Human
ucuuccuggauuauuca

SEQ ID NO: 1744925 - RNA, 18 nt, Human
ucuucagaucucuaacuu

SEQ ID NO: 1744926 - RNA, 23 nt, Human
ucuucagaucucuaacuucacca

SEQ ID NO: 1744927 - RNA, 12 nt, Human
ucuugaacuccu

SEQ ID NO: 1744928 - RNA, 19 nt, Human
ucuugaacuccugaccuca

SEQ ID NO: 1744929 - RNA, 17 nt, Human
ucuugaacuccugaccu

SEQ ID NO: 1744930 - RNA, 13 nt, Human
ucuugaaaaaugc

SEQ ID NO: 1744931 - RNA, 13 nt, Human
ucuucuccuuuca

SEQ ID NO: 1744932 - RNA, 14 nt, Human
ucuucuccuuucac

SEQ ID NO: 1744933 - RNA, 18 nt, Human
ucuucuuuuuuugugaug

SEQ ID NO: 1744934 - RNA, 17 nt, Human
ucuucuuuuuuugugau

SEQ ID NO: 1744935 - RNA, 16 nt, Human
ucuucuuuuuuuguga

SEQ ID NO: 1744936 - RNA, 19 nt, Human
ucuucuuuuugcuucaaaa

SEQ ID NO: 1744937 - RNA, 12 nt, Human
ucuucuccacug

SEQ ID NO: 1744938 - RNA, 13 nt, Human
ucuuaaaaagugg

SEQ ID NO: 1744939 - RNA, 22 nt, Human
ucuuaaauauguggaguucauc

SEQ ID NO: 1744940 - RNA, 17 nt, Human
ucuuaaccagaucauug

SEQ ID NO: 1744941 - RNA, 16 nt, Human
ucuuaaccagaucauu

SEQ ID NO: 1744942 - RNA, 22 nt, Human
ucuuaaccagaucauugugaaa

SEQ ID NO: 1744943 - RNA, 17 nt, Human
ucuggccuucggccucc

SEQ ID NO: 1744944 - RNA, 18 nt, Human
ucuggccuucggccucca

SEQ ID NO: 1744945 - RNA, 23 nt, Human
ucuggccuucggccuccauccug

SEQ ID NO: 1744946 - RNA, 19 nt, Human
ucuggcuaugcauuugaaa

SEQ ID NO: 1744947 - RNA, 22 nt, Human
ucuggcuaugcauuugaaaauu

SEQ ID NO: 1744948 - RNA, 15 nt, Human
ucuggcuccagcugg

SEQ ID NO: 1744949 - RNA, 14 nt, Human
ucugggacacaguu

SEQ ID NO: 1744950 - RNA, 23 nt, Human
ucuggugacuuuccucuuugguc

SEQ ID NO: 1744951 - RNA, 23 nt, Human
ucuggcucuuccaggcugggaga

SEQ ID NO: 1744952 - RNA, 18 nt, Human
ucuggcucuuccaggcug

SEQ ID NO: 1744953 - RNA, 19 nt, Human
ucuguccuacucuguguca

SEQ ID NO: 1744954 - RNA, 15 nt, Human
ucuguccuacucugu

SEQ ID NO: 1744955 - RNA, 20 nt, Human
ucuguccuacucugugucag

SEQ ID NO: 1744956 - RNA, 21 nt, Human
ucuguccugggagugagcugg

SEQ ID NO: 1744957 - RNA, 14 nt, Human
ucugucgcccaguc

SEQ ID NO: 1744958 - RNA, 16 nt, Human
ucugucgcccagucug

SEQ ID NO: 1744959 - RNA, 22 nt, Human
ucugucucuggauuauauuaug

SEQ ID NO: 1744960 - RNA, 13 nt, Human
ucugguuccuccc

SEQ ID NO: 1744961 - RNA, 14 nt, Human
ucuguccuacucug

SEQ ID NO: 1744962 - RNA, 21 nt, Human
ucugguuccuccccuccuccu

SEQ ID NO: 1744963 - RNA, 20 nt, Human
ucugguuccuccccuccucc

SEQ ID NO: 1744964 - RNA, 22 nt, Human
ucugcugacagacacaggcccg

SEQ ID NO: 1744965 - RNA, 21 nt, Human
ucugcugacagacacaggccc

SEQ ID NO: 1744966 - RNA, 20 nt, Human
ucugcugacagacacaggcc

SEQ ID NO: 1744967 - RNA, 19 nt, Human
ucugcugacagacacaggc

SEQ ID NO: 1744968 - RNA, 22 nt, Human
ucugcugauccucccaggcuuc

SEQ ID NO: 1744969 - RNA, 19 nt, Human
ucuggaauaaggagaauga

SEQ ID NO: 1744970 - RNA, 15 nt, Human
ucuggaaugcagugg

SEQ ID NO: 1744971 - RNA, 14 nt, Human
ucuggacaggcaug

SEQ ID NO: 1744972 - RNA, 16 nt, Human
ucuggaaugcaguggu

SEQ ID NO: 1744973 - RNA, 21 nt, Human
ucuggacaggcauguucucug

SEQ ID NO: 1744974 - RNA, 18 nt, Human
ucugcugacagacacagg

SEQ ID NO: 1744975 - RNA, 21 nt, Human
ucugcuccucuccccagcaag

SEQ ID NO: 1744976 - RNA, 18 nt, Human
ucugcuccucuccccagc

SEQ ID NO: 1744977 - RNA, 16 nt, Human
ucugccugcccaggcc

SEQ ID NO: 1744978 - RNA, 15 nt, Human
ucugccugcccaggc

SEQ ID NO: 1744979 - RNA, 22 nt, Human
ucugcuccccuaaagccucaaa

SEQ ID NO: 1744980 - RNA, 14 nt, Human
ucugccugcccagg

SEQ ID NO: 1744981 - RNA, 18 nt, Human
ucugccauauucuguugg

SEQ ID NO: 1744982 - RNA, 15 nt, Human
ucaaaugagaaaaug

SEQ ID NO: 1744983 - RNA, 20 nt, Human
ucaaauuguaagcaugcaca

SEQ ID NO: 1744984 - RNA, 17 nt, Human
ucaaauuguaagcaugc

SEQ ID NO: 1744985 - RNA, 23 nt, Human
ucaaccccuucgcuccugugucu

SEQ ID NO: 1744986 - RNA, 23 nt, Human
ucaaauauauucagccuggcuuc

SEQ ID NO: 1744987 - RNA, 22 nt, Human
ucaaauauauucagccuggcuu

SEQ ID NO: 1744988 - RNA, 21 nt, Human
ucaaauauauucagccuggcu

SEQ ID NO: 1744989 - RNA, 16 nt, Human
ucaaaacaaaggccua

SEQ ID NO: 1744990 - RNA, 12 nt, Human
ucaaagaaauuu

SEQ ID NO: 1744991 - RNA, 13 nt, Human
ucaaagaaauuuc

SEQ ID NO: 1744992 - RNA, 19 nt, Human
ucaaagaaauuuccacuca

SEQ ID NO: 1744993 - RNA, 20 nt, Human
ucaaagaaauuuccacucag

SEQ ID NO: 1744994 - RNA, 19 nt, Human
uauuuucaacgcagcccug

SEQ ID NO: 1744995 - RNA, 14 nt, Human
uauuuuauuaugca

SEQ ID NO: 1744996 - RNA, 17 nt, Human
uauuuuauuaugcauga

SEQ ID NO: 1744997 - RNA, 13 nt, Human
uauuuauauaaau

SEQ ID NO: 1744998 - RNA, 17 nt, Human
uauuuuauguugcauag

SEQ ID NO: 1744999 - RNA, 15 nt, Human
ucaaaaaaagaaaaa

SEQ ID NO: 1745000 - RNA, 14 nt, Human
ucaaaaaaagaaaa

SEQ ID NO: 1745001 - RNA, 14 nt, Human
uauuuuuuuacuaa

SEQ ID NO: 1745002 - RNA, 17 nt, Human
uauuuuuuucuuuucuu

SEQ ID NO: 1745003 - RNA, 22 nt, Human
uauuuucccuauuagagaagag

SEQ ID NO: 1745004 - RNA, 21 nt, Human
ucaagugauucuccugccuca

SEQ ID NO: 1745005 - RNA, 19 nt, Human
ucaagugauucuccugccu

SEQ ID NO: 1745006 - RNA, 18 nt, Human
ucaagugauucuccugcc

SEQ ID NO: 1745007 - RNA, 20 nt, Human
ucaagugauucuccugccuc

SEQ ID NO: 1745008 - RNA, 18 nt, Human
ucaacgcagcccugcuuu

SEQ ID NO: 1745009 - RNA, 15 nt, Human
ucaacgcagcccugc

SEQ ID NO: 1745010 - RNA, 14 nt, Human
ucaacgcagcccug

SEQ ID NO: 1745011 - RNA, 23 nt, Human
ucaauuacaggaaguacuggaga

SEQ ID NO: 1745012 - RNA, 21 nt, Human
ucaauuacaggaaguacugga

SEQ ID NO: 1745013 - RNA, 13 nt, Human
ucaaugcagcccc

SEQ ID NO: 1745014 - RNA, 13 nt, Human
ucacaagacccaa

SEQ ID NO: 1745015 - RNA, 17 nt, Human
ucacaagacccaaaagg

SEQ ID NO: 1745016 - RNA, 18 nt, Human
ucacaagacccaaaaggc

SEQ ID NO: 1745017 - RNA, 16 nt, Human
ucacagucacauucca

SEQ ID NO: 1745018 - RNA, 19 nt, Human
ucacaguccuuaccagcag

SEQ ID NO: 1745019 - RNA, 23 nt, Human
ucacaguccuuaccagcagagca

SEQ ID NO: 1745020 - RNA, 22 nt, Human
ucacaguccuuaccagcagagc

SEQ ID NO: 1745021 - RNA, 19 nt, Human
ucacaggcagguccagggu

SEQ ID NO: 1745022 - RNA, 18 nt, Human
ucacaggcagguccaggg

SEQ ID NO: 1745023 - RNA, 17 nt, Human
ucacaggcagguccagg

SEQ ID NO: 1745024 - RNA, 16 nt, Human
ucacaggcagguccag

SEQ ID NO: 1745025 - RNA, 14 nt, Human
ucaccaaggcugau

SEQ ID NO: 1745026 - RNA, 21 nt, Human
ucaccaaaucagcugcuacua

SEQ ID NO: 1745027 - RNA, 20 nt, Human
ucaccaaaucagcugcuacu

SEQ ID NO: 1745028 - RNA, 19 nt, Human
ucaccaaaucagcugcuac

SEQ ID NO: 1745029 - RNA, 16 nt, Human
ucaccacaugugcaca

SEQ ID NO: 1745030 - RNA, 17 nt, Human
ucacauuuauucugcuc

SEQ ID NO: 1745031 - RNA, 19 nt, Human
ucacauuuauucugcucac

SEQ ID NO: 1745032 - RNA, 18 nt, Human
ucacauuuauucugcuca

SEQ ID NO: 1745033 - RNA, 17 nt, Human
uauugcugauggugcaa

SEQ ID NO: 1745034 - RNA, 22 nt, Human
uauuggaaauuuguuauaauga

SEQ ID NO: 1745035 - RNA, 22 nt, Human
uauugcugauggugcaaugacc

SEQ ID NO: 1745036 - RNA, 19 nt, Human
uauugcuuguuggauuuuu

SEQ ID NO: 1745037 - RNA, 21 nt, Human
uauugauaugcuuauacacuu

SEQ ID NO: 1745038 - RNA, 18 nt, Human
uauucucuccuguaccuc

SEQ ID NO: 1745039 - RNA, 17 nt, Human
uauucucuccuguaccu

SEQ ID NO: 1745040 - RNA, 12 nt, Human
uauuguuuucag

SEQ ID NO: 1745041 - RNA, 20 nt, Human
uauuguuuucaguguacaug

SEQ ID NO: 1745042 - RNA, 18 nt, Human
uauuguuuucaguguaca

SEQ ID NO: 1745043 - RNA, 22 nt, Human
uauuguuuucaguguacaugga

SEQ ID NO: 1745044 - RNA, 24 nt, Human
uauuuauaaaaauaaaaaacacug

SEQ ID NO: 1745045 - RNA, 21 nt, Human
uauuccugcauuugugaaaug

SEQ ID NO: 1745046 - RNA, 20 nt, Human
uauuccugcauuugugaaau

SEQ ID NO: 1745047 - RNA, 19 nt, Human
uauuccugcauuugugaaa

SEQ ID NO: 1745048 - RNA, 17 nt, Human
uauuccugcauuuguga

SEQ ID NO: 1745049 - RNA, 15 nt, Human
gggaguggccacaga

SEQ ID NO: 1745050 - RNA, 13 nt, Human
gggaguggccaca

SEQ ID NO: 1745051 - RNA, 20 nt, Human
uauguaaaugguaugucauu

SEQ ID NO: 1745052 - RNA, 21 nt, Human
uauguaaaugguaugucauuc

SEQ ID NO: 1745053 - RNA, 12 nt, Human
uauguugcauag

SEQ ID NO: 1745054 - RNA, 14 nt, Human
uauguugauaaaag

SEQ ID NO: 1745055 - RNA, 20 nt, Human
uauguugcccaggcaggucu

SEQ ID NO: 1745056 - RNA, 19 nt, Human
uauguugcccaggcagguc

SEQ ID NO: 1745057 - RNA, 16 nt, Human
uauguugcccaggcag

SEQ ID NO: 1745058 - RNA, 13 nt, Human
uauguugcccagg

SEQ ID NO: 1745059 - RNA, 16 nt, Human
uauguugcauagaaua

SEQ ID NO: 1745060 - RNA, 12 nt, Human
uauuaaauuaug

SEQ ID NO: 1745061 - RNA, 18 nt, Human
uccaauuuacauacucug

SEQ ID NO: 1745062 - RNA, 17 nt, Human
uccaauuuacauacucu

SEQ ID NO: 1745063 - RNA, 20 nt, Human
uccaaaauaaaacuuuuuaa

SEQ ID NO: 1745064 - RNA, 18 nt, Human
uccaaaauaaaacuuuuu

SEQ ID NO: 1745065 - RNA, 19 nt, Human
uccacaagagcccaggccu

SEQ ID NO: 1745066 - RNA, 18 nt, Human
uccacaagagcccaggcc

SEQ ID NO: 1745067 - RNA, 17 nt, Human
uccacaagagcccaggc

SEQ ID NO: 1745068 - RNA, 16 nt, Human
uccacaagagcccagg

SEQ ID NO: 1745069 - RNA, 18 nt, Human
uccacaaguuaaauaaau

SEQ ID NO: 1745070 - RNA, 17 nt, Human
uccacaaguuaaauaaa

SEQ ID NO: 1745071 - RNA, 15 nt, Human
uccacagaggacaca

SEQ ID NO: 1745072 - RNA, 17 nt, Human
uccacagaggacacaga

SEQ ID NO: 1745073 - RNA, 19 nt, Human
uccacagaggacacagaga

SEQ ID NO: 1745074 - RNA, 12 nt, Human
uccacccugcuc

SEQ ID NO: 1745075 - RNA, 15 nt, Human
uccaccugccaggga

SEQ ID NO: 1745076 - RNA, 17 nt, Human
uccaccugccagggaca

SEQ ID NO: 1745077 - RNA, 21 nt, Human
uccaccugccagggacagagg

SEQ ID NO: 1745078 - RNA, 18 nt, Human
uccaccugccagggacag

SEQ ID NO: 1745079 - RNA, 17 nt, Human
uccacuuggucugugag

SEQ ID NO: 1745080 - RNA, 15 nt, Human
uccacuuggucugug

SEQ ID NO: 1745081 - RNA, 16 nt, Human
uccacuuggucuguga

SEQ ID NO: 1745082 - RNA, 15 nt, Human
uccaccuucccaugc

SEQ ID NO: 1745083 - RNA, 16 nt, Human
uccaggagcagccaca

SEQ ID NO: 1745084 - RNA, 17 nt, Human
uccagcuguucagcugg

SEQ ID NO: 1745085 - RNA, 17 nt, Human
uccagcucaccagcccc

SEQ ID NO: 1745086 - RNA, 16 nt, Human
uccagcucaccagccc

SEQ ID NO: 1745087 - RNA, 18 nt, Human
uccagcucaccagcccca

SEQ ID NO: 1745088 - RNA, 22 nt, Human
uccaggugcacaagcuccaagc

SEQ ID NO: 1745089 - RNA, 21 nt, Human
uccaggugcacaagcuccaag

SEQ ID NO: 1745090 - RNA, 20 nt, Human
uccaggugcacaagcuccaa

SEQ ID NO: 1745091 - RNA, 18 nt, Human
uccaggugcacaagcucc

SEQ ID NO: 1745092 - RNA, 16 nt, Human
uccagguucagcuugu

SEQ ID NO: 1745093 - RNA, 15 nt, Human
uccagguucagcuug

SEQ ID NO: 1745094 - RNA, 11 nt, Human
uccaggguggu

SEQ ID NO: 1745095 - RNA, 18 nt, Human
uccaggagcagccacauu

SEQ ID NO: 1745096 - RNA, 17 nt, Human
uccaggagcagccacau

SEQ ID NO: 1745097 - RNA, 22 nt, Human
uccaggagcagccacauuccug

SEQ ID NO: 1745098 - RNA, 23 nt, Human
uccaggggugggacacccuguga

SEQ ID NO: 1745099 - RNA, 15 nt, Human
uccaggugcacaagc

SEQ ID NO: 1745100 - RNA, 23 nt, Human
ucaucuuagguuggcaaaaaggc

SEQ ID NO: 1745101 - RNA, 19 nt, Human
ucaucuugaauuguaagga

SEQ ID NO: 1745102 - RNA, 15 nt, Human
ucaggugcugccauc

SEQ ID NO: 1745103 - RNA, 14 nt, Human
ucaggugcugccau

SEQ ID NO: 1745104 - RNA, 13 nt, Human
ucaggugcugcca

SEQ ID NO: 1745105 - RNA, 21 nt, Human
ucaggugagaagcagaggaag

SEQ ID NO: 1745106 - RNA, 23 nt, Human
ucaggugccucaagagaaggcaa

SEQ ID NO: 1745107 - RNA, 21 nt, Human
ucaucaccaacgucugugcca

SEQ ID NO: 1745108 - RNA, 20 nt, Human
ucaucaccaacgucugugcc

SEQ ID NO: 1745109 - RNA, 19 nt, Human
ucaucaccaacgucugugc

SEQ ID NO: 1745110 - RNA, 15 nt, Human
ucauacucaccucac

SEQ ID NO: 1745111 - RNA, 21 nt, Human
ucauagcccucacccuggggc

SEQ ID NO: 1745112 - RNA, 21 nt, Human
ucauucaacccaccugcgucu

SEQ ID NO: 1745113 - RNA, 23 nt, Human
ucauuccaccuucccaugcccug

SEQ ID NO: 1745114 - RNA, 16 nt, Human
ucauuuccugugucuu

SEQ ID NO: 1745115 - RNA, 13 nt, Human
ucauuuccugugu

SEQ ID NO: 1745116 - RNA, 18 nt, Human
ucauugugaaauuauuca

SEQ ID NO: 1745117 - RNA, 17 nt, Human
ucauugugaaauuauuc

SEQ ID NO: 1745118 - RNA, 15 nt, Human
ucauugugaaauuau

SEQ ID NO: 1745119 - RNA, 12 nt, Human
ucauugugaaau

SEQ ID NO: 1745120 - RNA, 23 nt, Human
ucaggagcccugggaggcucugg

SEQ ID NO: 1745121 - RNA, 20 nt, Human
ucaggagcccugggaggcuc

SEQ ID NO: 1745122 - RNA, 18 nt, Human
ucaggagcccugggaggc

SEQ ID NO: 1745123 - RNA, 19 nt, Human
ucaggagcccugggaggcu

SEQ ID NO: 1745124 - RNA, 16 nt, Human
ucaggugagaagcaga

SEQ ID NO: 1745125 - RNA, 15 nt, Human
ucaggugagaagcag

SEQ ID NO: 1745126 - RNA, 16 nt, Human
ucagggccuggcucag

SEQ ID NO: 1745127 - RNA, 14 nt, Human
ucagggccuggcuc

SEQ ID NO: 1745128 - RNA, 21 nt, Human
ucagggagugggcuaagcacg

SEQ ID NO: 1745129 - RNA, 16 nt, Human
ucagcugaaccugggu

SEQ ID NO: 1745130 - RNA, 15 nt, Human
ucagcugaaccuggg

SEQ ID NO: 1745131 - RNA, 19 nt, Human
ucagccugcuccagcuguu

SEQ ID NO: 1745132 - RNA, 18 nt, Human
ucagccugcuccagcugu

SEQ ID NO: 1745133 - RNA, 22 nt, Human
ucagccuccugaguagcuggga

SEQ ID NO: 1745134 - RNA, 13 nt, Human
ucagccuccugag

SEQ ID NO: 1745135 - RNA, 21 nt, Human
ucagccuccugaguagcugga

SEQ ID NO: 1745136 - RNA, 22 nt, Human
ucagccucccgaguagcuggga

SEQ ID NO: 1745137 - RNA, 21 nt, Human
ucagccucccgaguagcuggg

SEQ ID NO: 1745138 - RNA, 20 nt, Human
ucagccuccugaguagcugg

SEQ ID NO: 1745139 - RNA, 21 nt, Human
ucagccucccaaagugcuggg

SEQ ID NO: 1745140 - RNA, 19 nt, Human
ucagccucccaaagugcug

SEQ ID NO: 1745141 - RNA, 14 nt, Human
ucagccucccaaag

SEQ ID NO: 1745142 - RNA, 23 nt, Human
ucagcauucucacuccuaccugg

SEQ ID NO: 1745143 - RNA, 22 nt, Human
ucagccucccgaauagcuggga

SEQ ID NO: 1745144 - RNA, 21 nt, Human
ucagccucccgaauagcuggg

SEQ ID NO: 1745145 - RNA, 18 nt, Human
ucagccucccgaguagcu

SEQ ID NO: 1745146 - RNA, 20 nt, Human
ucagccucccgaguagcugg

SEQ ID NO: 1745147 - RNA, 20 nt, Human
ucagcauucucacuccuacc

SEQ ID NO: 1745148 - RNA, 17 nt, Human
ucagcauucucacuccu

SEQ ID NO: 1745149 - RNA, 18 nt, Human
ucagauauaaaagacuga

SEQ ID NO: 1745150 - RNA, 20 nt, Human
ucagauauaaaagacugacc

SEQ ID NO: 1745151 - RNA, 17 nt, Human
ucagauauaaaagacug

SEQ ID NO: 1745152 - RNA, 22 nt, Human
ucagaguaauccaagcaaaugu

SEQ ID NO: 1745153 - RNA, 21 nt, Human
ucagaguaauccaagcaaaug

SEQ ID NO: 1745154 - RNA, 14 nt, Human
ucagacagcugccu

SEQ ID NO: 1745155 - RNA, 13 nt, Human
ucagacagcugcc

SEQ ID NO: 1745156 - RNA, 15 nt, Human
ucagaaauguguuau

SEQ ID NO: 1745157 - RNA, 23 nt, Human
ucagaauucucuaguuugauuaa

SEQ ID NO: 1745158 - RNA, 10 nt, Human
ucagaaaugu

SEQ ID NO: 1745159 - RNA, 14 nt, Human
ucacugcuuaacuu

SEQ ID NO: 1745160 - RNA, 22 nt, Human
ucacugcuggcugccuuagaac

SEQ ID NO: 1745161 - RNA, 18 nt, Human
ucacugcuggcugccuua

SEQ ID NO: 1745162 - RNA, 17 nt, Human
ucacugcuggcugccuu

SEQ ID NO: 1745163 - RNA, 12 nt, Human
ucacugcuggcu

SEQ ID NO: 1745164 - RNA, 16 nt, Human
ucacugcuggcugccu

SEQ ID NO: 1745165 - RNA, 15 nt, Human
ucacugcuggcugcc

SEQ ID NO: 1745166 - RNA, 14 nt, Human
ucacugcuggcugc

SEQ ID NO: 1745167 - RNA, 13 nt, Human
ucacugcuggcug

SEQ ID NO: 1745168 - RNA, 16 nt, Human
ucaccagccccagugc

SEQ ID NO: 1745169 - RNA, 13 nt, Human
ucaccagccccag

SEQ ID NO: 1745170 - RNA, 17 nt, Human
ucacucuuauugcccac

SEQ ID NO: 1745171 - RNA, 18 nt, Human
ucacugccaugccagcuu

SEQ ID NO: 1745172 - RNA, 20 nt, Human
ucacucuuauugcccacgcu

SEQ ID NO: 1745173 - RNA, 18 nt, Human
ucacugcauccuccgccu

SEQ ID NO: 1745174 - RNA, 19 nt, Human
ucacugcauccuccgccuc

SEQ ID NO: 1745175 - RNA, 19 nt, Human
gcucagcugucaaggcuca

SEQ ID NO: 1745176 - RNA, 18 nt, Human
gcucauggacuucugcca

SEQ ID NO: 1745177 - RNA, 23 nt, Human
gcucagcggggacagcuccuucu

SEQ ID NO: 1745178 - RNA, 19 nt, Human
gcucagcggggacagcucc

SEQ ID NO: 1745179 - RNA, 18 nt, Human
gcucagcggggacagcuc

SEQ ID NO: 1745180 - RNA, 17 nt, Human
gcucagcggggacagcu

SEQ ID NO: 1745181 - RNA, 21 nt, Human
gcucagcccucccugccccuc

SEQ ID NO: 1745182 - RNA, 19 nt, Human
gcucagcccucccugcccc

SEQ ID NO: 1745183 - RNA, 18 nt, Human
gcucagcccucccugccc

SEQ ID NO: 1745184 - RNA, 17 nt, Human
gcucagcccucccugcc

SEQ ID NO: 1745185 - RNA, 18 nt, Human
gcucaccagccccagugc

SEQ ID NO: 1745186 - RNA, 15 nt, Human
gcucaccagccccag

SEQ ID NO: 1745187 - RNA, 14 nt, Human
gcucaccagcccca

SEQ ID NO: 1745188 - RNA, 13 nt, Human
gcucaccagcccc

SEQ ID NO: 1745189 - RNA, 12 nt, Human
gcucaccagccc

SEQ ID NO: 1745190 - RNA, 16 nt, Human
gcucacauaucuguca

SEQ ID NO: 1745191 - RNA, 22 nt, Human
gcucacagaacccuuggagcca

SEQ ID NO: 1745192 - RNA, 18 nt, Human
gcucaccucucccuugga

SEQ ID NO: 1745193 - RNA, 17 nt, Human
gcucaccucucccuugg

SEQ ID NO: 1745194 - RNA, 16 nt, Human
gcucaccucucccuug

SEQ ID NO: 1745195 - RNA, 14 nt, Human
gcucaccucucccu

SEQ ID NO: 1745196 - RNA, 12 nt, Human
gcucagcccucc

SEQ ID NO: 1745197 - RNA, 16 nt, Human
gcucagcccucccugc

SEQ ID NO: 1745198 - RNA, 15 nt, Human
gcucagcccucccug

SEQ ID NO: 1745199 - RNA, 22 nt, Human
gcggugcuaucucccccagccc

SEQ ID NO: 1745200 - RNA, 19 nt, Human
gcggugcuaucucccccag

SEQ ID NO: 1745201 - RNA, 20 nt, Human
gcuauaacuauguugauaaa

SEQ ID NO: 1745202 - RNA, 22 nt, Human
gcucaaguccucuuuucugaga

SEQ ID NO: 1745203 - RNA, 19 nt, Human
gcucaaguccucuuuucug

SEQ ID NO: 1745204 - RNA, 15 nt, Human
gcuaucucccccagc

SEQ ID NO: 1745205 - RNA, 14 nt, Human
gcuaucucccccag

SEQ ID NO: 1745206 - RNA, 18 nt, Human
gcucaaguccucuuuucu

SEQ ID NO: 1745207 - RNA, 13 nt, Human
gcuaucuccccca

SEQ ID NO: 1745208 - RNA, 17 nt, Human
gcuaucguaaaauuaag

SEQ ID NO: 1745209 - RNA, 16 nt, Human
gcuaucguaaaauuaa

SEQ ID NO: 1745210 - RNA, 15 nt, Human
gcuaucguaaaauua

SEQ ID NO: 1745211 - RNA, 23 nt, Human
gcuccgcuuucuacccagcgagc

SEQ ID NO: 1745212 - RNA, 22 nt, Human
gcuccgcuuucuacccagcgag

SEQ ID NO: 1745213 - RNA, 21 nt, Human
gcuccgcuuucuacccagcga

SEQ ID NO: 1745214 - RNA, 18 nt, Human
gcuccgcuuucuacccag

SEQ ID NO: 1745215 - RNA, 20 nt, Human
gcucccuucccaccucucuc

SEQ ID NO: 1745216 - RNA, 15 nt, Human
gcucccacaggcccu

SEQ ID NO: 1745217 - RNA, 12 nt, Human
gcuccaggcucc

SEQ ID NO: 1745218 - RNA, 18 nt, Human
gcuccaggagcagccaca

SEQ ID NO: 1745219 - RNA, 17 nt, Human
gcuccaggagcagccac

SEQ ID NO: 1745220 - RNA, 16 nt, Human
gcuccaggagcagcca

SEQ ID NO: 1745221 - RNA, 15 nt, Human
gcuccaggagcagcc

SEQ ID NO: 1745222 - RNA, 21 nt, Human
gcuccagcuguucagcugguu

SEQ ID NO: 1745223 - RNA, 13 nt, Human
gcuccaaacccuc

SEQ ID NO: 1745224 - RNA, 14 nt, Human
gcuccaggagcagc

SEQ ID NO: 1745225 - RNA, 12 nt, Human
gcuccaggagca

SEQ ID NO: 1745226 - RNA, 11 nt, Human
gcuccaggagc

SEQ ID NO: 1745227 - RNA, 21 nt, Human
gcucgagcaugccuggauggg

SEQ ID NO: 1745228 - RNA, 19 nt, Human
gcucgagcaugccuggaug

SEQ ID NO: 1745229 - RNA, 17 nt, Human
gcuccuuuagcgcccag

SEQ ID NO: 1745230 - RNA, 13 nt, Human
gcuccuucugucc

SEQ ID NO: 1745231 - RNA, 15 nt, Human
gcuccuucuguccua

SEQ ID NO: 1745232 - RNA, 13 nt, Human
gcuccugugucuu

SEQ ID NO: 1745233 - RNA, 12 nt, Human
gcuccugugucu

SEQ ID NO: 1745234 - RNA, 18 nt, Human
gcuccuuccucugaggcu

SEQ ID NO: 1745235 - RNA, 22 nt, Human
gcuccuuccucugaggcugaaa

SEQ ID NO: 1745236 - RNA, 20 nt, Human
gcuccuuccucugaggcuga

SEQ ID NO: 1745237 - RNA, 24 nt, Human
gcuccgcuuucuacccagcgagcc

SEQ ID NO: 1745238 - RNA, 16 nt, Human
gcuccucccggugccc

SEQ ID NO: 1745239 - RNA, 14 nt, Human
gcuccucccggugc

SEQ ID NO: 1745240 - RNA, 23 nt, Human
gcuccuggggguucuuucuuccu

SEQ ID NO: 1745241 - RNA, 17 nt, Human
gccugagcgacagugag

SEQ ID NO: 1745242 - RNA, 20 nt, Human
gccugagcgacagugagacu

SEQ ID NO: 1745243 - RNA, 18 nt, Human
gccugaagucacacagug

SEQ ID NO: 1745244 - RNA, 17 nt, Human
gccugaagucacacagu

SEQ ID NO: 1745245 - RNA, 16 nt, Human
gccugaagucacacag

SEQ ID NO: 1745246 - RNA, 22 nt, Human
gcccaguuggguggaugccugg

SEQ ID NO: 1745247 - RNA, 21 nt, Human
gcccaguuggguggaugccug

SEQ ID NO: 1745248 - RNA, 19 nt, Human
gcccaguuggguggaugcc

SEQ ID NO: 1745249 - RNA, 12 nt, Human
gccugagcuggg

SEQ ID NO: 1745250 - RNA, 20 nt, Human
gccuggauggggcugcaccg

SEQ ID NO: 1745251 - RNA, 14 nt, Human
gccuggcacagggc

SEQ ID NO: 1745252 - RNA, 13 nt, Human
gccuggcacaggg

SEQ ID NO: 1745253 - RNA, 18 nt, Human
gccuggauggggcugcac

SEQ ID NO: 1745254 - RNA, 16 nt, Human
gccuggauggggcugc

SEQ ID NO: 1745255 - RNA, 15 nt, Human
gccuguaauccuagc

SEQ ID NO: 1745256 - RNA, 20 nt, Human
gccuguaauccuagcacuuu

SEQ ID NO: 1745257 - RNA, 22 nt, Human
gccuggccagaugcaccagccc

SEQ ID NO: 1745258 - RNA, 21 nt, Human
gccuggccagaugcaccagcc

SEQ ID NO: 1745259 - RNA, 20 nt, Human
gccuggccagaugcaccagc

SEQ ID NO: 1745260 - RNA, 22 nt, Human
gccuggcagccgugccuucagc

SEQ ID NO: 1745261 - RNA, 21 nt, Human
gccuggcagccgugccuucag

SEQ ID NO: 1745262 - RNA, 20 nt, Human
gccuggcagccgugccuuca

SEQ ID NO: 1745263 - RNA, 12 nt, Human
gccuggcagccg

SEQ ID NO: 1745264 - RNA, 19 nt, Human
gccuggcacagggcagugg

SEQ ID NO: 1745265 - RNA, 18 nt, Human
gccuggcacagggcagug

SEQ ID NO: 1745266 - RNA, 14 nt, Human
gccuggccccucag

SEQ ID NO: 1745267 - RNA, 13 nt, Human
gccuggccccuca

SEQ ID NO: 1745268 - RNA, 21 nt, Human
gcgacaaugcaaaccaucauu

SEQ ID NO: 1745269 - RNA, 20 nt, Human
gcgacaaugcaaaccaucau

SEQ ID NO: 1745270 - RNA, 13 nt, Human
gcgacaaugcaaa

SEQ ID NO: 1745271 - RNA, 12 nt, Human
gcgacaaugcaa

SEQ ID NO: 1745272 - RNA, 22 nt, Human
gcgcaggcuggcccugcccugg

SEQ ID NO: 1745273 - RNA, 21 nt, Human
gcgcaggcuggcccugcccug

SEQ ID NO: 1745274 - RNA, 20 nt, Human
gcgcaggcuggcccugcccu

SEQ ID NO: 1745275 - RNA, 17 nt, Human
gcgcaggcuggcccugc

SEQ ID NO: 1745276 - RNA, 19 nt, Human
gcgcaggcuggcccugccc

SEQ ID NO: 1745277 - RNA, 18 nt, Human
gcgcaggcuggcccugcc

SEQ ID NO: 1745278 - RNA, 16 nt, Human
gccuuacacaaugguu

SEQ ID NO: 1745279 - RNA, 15 nt, Human
gccuuacacaauggu

SEQ ID NO: 1745280 - RNA, 16 nt, Human
gccugucuuaauuuuc

SEQ ID NO: 1745281 - RNA, 17 nt, Human
gccugucuuaauuuucu

SEQ ID NO: 1745282 - RNA, 14 nt, Human
gcgguccacccagg

SEQ ID NO: 1745283 - RNA, 13 nt, Human
gcgguccacccag

SEQ ID NO: 1745284 - RNA, 19 nt, Human
gcggugagaggggaacaga

SEQ ID NO: 1745285 - RNA, 17 nt, Human
gcggggacagcuccuuc

SEQ ID NO: 1745286 - RNA, 15 nt, Human
gcggggacagcuccu

SEQ ID NO: 1745287 - RNA, 18 nt, Human
gcggggacagcuccuucu

SEQ ID NO: 1745288 - RNA, 21 nt, Human
gcgcugccccuggcagccccu

SEQ ID NO: 1745289 - RNA, 18 nt, Human
gcgcugccccuggcagcc

SEQ ID NO: 1745290 - RNA, 14 nt, Human
gcggggacagcucc

SEQ ID NO: 1745291 - RNA, 19 nt, Human
gcggagacggagucccacc

SEQ ID NO: 1745292 - RNA, 16 nt, Human
gcggagaaaggaaggg

SEQ ID NO: 1745293 - RNA, 23 nt, Human
gcgcccaguuggguggaugccug

SEQ ID NO: 1745294 - RNA, 13 nt, Human
gcgccccuucccc

SEQ ID NO: 1745295 - RNA, 21 nt, Human
gcgccuuaaggauguucuagc

SEQ ID NO: 1745296 - RNA, 15 nt, Human
gcuggaccuugaacu

SEQ ID NO: 1745297 - RNA, 16 nt, Human
gcuggaccuugaacug

SEQ ID NO: 1745298 - RNA, 19 nt, Human
gcuggcccuggcucccaca

SEQ ID NO: 1745299 - RNA, 16 nt, Human
gcuggcccugcccugg

SEQ ID NO: 1745300 - RNA, 15 nt, Human
gcuggcccugcccug

SEQ ID NO: 1745301 - RNA, 14 nt, Human
gcuggcccugcccu

SEQ ID NO: 1745302 - RNA, 23 nt, Human
gcuggaaugauuucagcucacug

SEQ ID NO: 1745303 - RNA, 22 nt, Human
gcugcuuuugucuaugggacuc

SEQ ID NO: 1745304 - RNA, 12 nt, Human
gcugcccugccc

SEQ ID NO: 1745305 - RNA, 14 nt, Human
gcugcccugcccac

SEQ ID NO: 1745306 - RNA, 13 nt, Human
gcugcccugccca

SEQ ID NO: 1745307 - RNA, 24 nt, Human
gcugcccugcccaccuggccucug

SEQ ID NO: 1745308 - RNA, 23 nt, Human
gcugcccugcccaccuggccucu

SEQ ID NO: 1745309 - RNA, 22 nt, Human
gcugcccugcccaccuggccuc

SEQ ID NO: 1745310 - RNA, 21 nt, Human
gcugcccugcccaccuggccu

SEQ ID NO: 1745311 - RNA, 20 nt, Human
gcugcccugcccaccuggcc

SEQ ID NO: 1745312 - RNA, 18 nt, Human
gcugcccugcccaccugg

SEQ ID NO: 1745313 - RNA, 16 nt, Human
gcugcccugcccaccu

SEQ ID NO: 1745314 - RNA, 21 nt, Human
gcugcgguccacccaggagcc

SEQ ID NO: 1745315 - RNA, 16 nt, Human
gcugcgguccacccag

SEQ ID NO: 1745316 - RNA, 22 nt, Human
gcugcgguccacccaggagccc

SEQ ID NO: 1745317 - RNA, 15 nt, Human
gcugcgguccaccca

SEQ ID NO: 1745318 - RNA, 14 nt, Human
gcugcgguccaccc

SEQ ID NO: 1745319 - RNA, 19 nt, Human
gcugccuguucagcuccag

SEQ ID NO: 1745320 - RNA, 18 nt, Human
gcugccuguucagcucca

SEQ ID NO: 1745321 - RNA, 15 nt, Human
gcugcccuggugcug

SEQ ID NO: 1745322 - RNA, 14 nt, Human
gcugcccuggugcu

SEQ ID NO: 1745323 - RNA, 13 nt, Human
gcugcccuggugc

SEQ ID NO: 1745324 - RNA, 12 nt, Human
gcugcccuggug

SEQ ID NO: 1745325 - RNA, 22 nt, Human
gcugccuguucagcuccagcuc

SEQ ID NO: 1745326 - RNA, 20 nt, Human
gcugccuguucagcuccagc

SEQ ID NO: 1745327 - RNA, 20 nt, Human
gcugccuuagaaccuuucuu

SEQ ID NO: 1745328 - RNA, 15 nt, Human
gcugccuuagaaccu

SEQ ID NO: 1745329 - RNA, 17 nt, Human
gcugcccuggugcugcc

SEQ ID NO: 1745330 - RNA, 21 nt, Human
gcugauuaaaccaaggcuaga

SEQ ID NO: 1745331 - RNA, 23 nt, Human
gcugcaaaggguaucaggugcug

SEQ ID NO: 1745332 - RNA, 22 nt, Human
gcugcaaaggguaucaggugcu

SEQ ID NO: 1745333 - RNA, 13 nt, Human
gcugccaccugcc

SEQ ID NO: 1745334 - RNA, 12 nt, Human
gcugccaccugc

SEQ ID NO: 1745335 - RNA, 23 nt, Human
gcugccacacuucaggcucuucu

SEQ ID NO: 1745336 - RNA, 22 nt, Human
gcugccacacuucaggcucuuc

SEQ ID NO: 1745337 - RNA, 21 nt, Human
gcugccacacuucaggcucuu

SEQ ID NO: 1745338 - RNA, 18 nt, Human
gcugccacacuucaggcu

SEQ ID NO: 1745339 - RNA, 17 nt, Human
gcugccacacuucaggc

SEQ ID NO: 1745340 - RNA, 15 nt, Human
gcugccacacuucag

SEQ ID NO: 1745341 - RNA, 14 nt, Human
gcugcaguugccag

SEQ ID NO: 1745342 - RNA, 13 nt, Human
gcugcaguugcca

SEQ ID NO: 1745343 - RNA, 17 nt, Human
gcugcaguugccaguca

SEQ ID NO: 1745344 - RNA, 18 nt, Human
gcugcauuuaaaagauac

SEQ ID NO: 1745345 - RNA, 19 nt, Human
gcugcauuuaaaagauaca

SEQ ID NO: 1745346 - RNA, 19 nt, Human
gcugacagacacaggcccg

SEQ ID NO: 1745347 - RNA, 18 nt, Human
gcugacagacacaggccc

SEQ ID NO: 1745348 - RNA, 20 nt, Human
gcugacagacacaggcccgg

SEQ ID NO: 1745349 - RNA, 22 nt, Human
gcugacuguuuucucuugagag

SEQ ID NO: 1745350 - RNA, 21 nt, Human
gcucucaggccagcugcuugg

SEQ ID NO: 1745351 - RNA, 21 nt, Human
gcucuugaacuccugaccuca

SEQ ID NO: 1745352 - RNA, 19 nt, Human
gcucuugaacuccugaccu

SEQ ID NO: 1745353 - RNA, 16 nt, Human
gcucuugaacuccuga

SEQ ID NO: 1745354 - RNA, 14 nt, Human
gcucuugaacuccu

SEQ ID NO: 1745355 - RNA, 19 nt, Human
gcucuugaugccuggcggg

SEQ ID NO: 1745356 - RNA, 19 nt, Human
gcucuuggcagguacucag

SEQ ID NO: 1745357 - RNA, 13 nt, Human
gcuuaucucaggg

SEQ ID NO: 1745358 - RNA, 20 nt, Human
gcuucaguggcagcugcuuu

SEQ ID NO: 1745359 - RNA, 19 nt, Human
gcuucaguggcagcugcuu

SEQ ID NO: 1745360 - RNA, 19 nt, Human
gcuucuguugcugccucau

SEQ ID NO: 1745361 - RNA, 18 nt, Human
gcuucuguugcugccuca

SEQ ID NO: 1745362 - RNA, 17 nt, Human
gcuucuguugcugccuc

SEQ ID NO: 1745363 - RNA, 22 nt, Human
gcuucucacugccaugccagcu

SEQ ID NO: 1745364 - RNA, 15 nt, Human
gcuuuuaugugaaac

SEQ ID NO: 1745365 - RNA, 13 nt, Human
gcuuuuaugugaa

SEQ ID NO: 1745366 - RNA, 19 nt, Human
gcuuugggcugcccuggug

SEQ ID NO: 1745367 - RNA, 18 nt, Human
gcuuugggcugcccuggu

SEQ ID NO: 1745368 - RNA, 14 nt, Human
gcuuguuggauuuu

SEQ ID NO: 1745369 - RNA, 15 nt, Human
gcuggugucaccuga

SEQ ID NO: 1745370 - RNA, 14 nt, Human
gcuggugucaccug

SEQ ID NO: 1745371 - RNA, 17 nt, Human
gcugucagccauuccug

SEQ ID NO: 1745372 - RNA, 13 nt, Human
gcugucaucucag

SEQ ID NO: 1745373 - RNA, 16 nt, Human
gcugucccuuuuccuu

SEQ ID NO: 1745374 - RNA, 23 nt, Human
gcugucccuuacgugaguccugg

SEQ ID NO: 1745375 - RNA, 15 nt, Human
gcugugucucccuuc

SEQ ID NO: 1745376 - RNA, 16 nt, Human
gcuguguggcagucug

SEQ ID NO: 1745377 - RNA, 23 nt, Human
gcuguuagggguuauugguguaa

SEQ ID NO: 1745378 - RNA, 14 nt, Human
gcuggucccacuca

SEQ ID NO: 1745379 - RNA, 20 nt, Human
gcuggucucaaacuccugac

SEQ ID NO: 1745380 - RNA, 19 nt, Human
gcuggucucaaacuccuga

SEQ ID NO: 1745381 - RNA, 23 nt, Human
gcuggucucgaacuccugaccuu

SEQ ID NO: 1745382 - RNA, 22 nt, Human
gcuggucucgaacuccugaccu

SEQ ID NO: 1745383 - RNA, 19 nt, Human
gcuggucucgaacuccuga

SEQ ID NO: 1745384 - RNA, 18 nt, Human
gcugggggccucagugcc

SEQ ID NO: 1745385 - RNA, 15 nt, Human
gcugggggccucagu

SEQ ID NO: 1745386 - RNA, 14 nt, Human
gcugggggccucag

SEQ ID NO: 1745387 - RNA, 15 nt, Human
gcuggccuggccccu

SEQ ID NO: 1745388 - RNA, 14 nt, Human
gcuggccuggcccc

SEQ ID NO: 1745389 - RNA, 12 nt, Human
gcuggccuggcc

SEQ ID NO: 1745390 - RNA, 13 nt, Human
gcuggccuggccc

SEQ ID NO: 1745391 - RNA, 21 nt, Human
gcugggcucccuucccaccuc

SEQ ID NO: 1745392 - RNA, 19 nt, Human
gcugggaugauuggagggg

SEQ ID NO: 1745393 - RNA, 20 nt, Human
gcugggcuucaguggcagcu

SEQ ID NO: 1745394 - RNA, 21 nt, Human
gcugggaugauuggagggggg

SEQ ID NO: 1745395 - RNA, 22 nt, Human
gcugggcuucaguggcagcugc

SEQ ID NO: 1745396 - RNA, 21 nt, Human
gcugggcuucaguggcagcug

SEQ ID NO: 1745397 - RNA, 13 nt, Human
ggcuuuucacugc

SEQ ID NO: 1745398 - RNA, 21 nt, Human
gggaauguuugccucugccuc

SEQ ID NO: 1745399 - RNA, 19 nt, Human
gggaauguuugccucugcc

SEQ ID NO: 1745400 - RNA, 14 nt, Human
gggacacccuguga

SEQ ID NO: 1745401 - RNA, 21 nt, Human
gggacugaggggaggggagca

SEQ ID NO: 1745402 - RNA, 23 nt, Human
gggacucaaugcacugacauugu

SEQ ID NO: 1745403 - RNA, 15 nt, Human
gggacugagaaauuu

SEQ ID NO: 1745404 - RNA, 23 nt, Human
gggacugccagucccccugcccc

SEQ ID NO: 1745405 - RNA, 19 nt, Human
gggacucaaugcacugaca

SEQ ID NO: 1745406 - RNA, 17 nt, Human
gggacucaaugcacuga

SEQ ID NO: 1745407 - RNA, 16 nt, Human
gggaccccgagccugg

SEQ ID NO: 1745408 - RNA, 17 nt, Human
gggaggacgcucucugg

SEQ ID NO: 1745409 - RNA, 20 nt, Human
gggaggacgcucucuggccu

SEQ ID NO: 1745410 - RNA, 21 nt, Human
gggaggauugcuugagcucag

SEQ ID NO: 1745411 - RNA, 22 nt, Human
gggaggauguucugggacacag

SEQ ID NO: 1745412 - RNA, 23 nt, Human
gggaggaucucuugagccuggga

SEQ ID NO: 1745413 - RNA, 11 nt, Human
gggaggcagag

SEQ ID NO: 1745414 - RNA, 20 nt, Human
gggaggugggauccuccagg

SEQ ID NO: 1745415 - RNA, 23 nt, Human
gggaggauugcuugagcucagga

SEQ ID NO: 1745416 - RNA, 17 nt, Human
gggagugacagaggcag

SEQ ID NO: 1745417 - RNA, 21 nt, Human
gggagugaguugauagcacag

SEQ ID NO: 1745418 - RNA, 22 nt, Human
gggagcugccuguucagcucca

SEQ ID NO: 1745419 - RNA, 21 nt, Human
gggagcugccuguucagcucc

SEQ ID NO: 1745420 - RNA, 13 nt, Human
gggagcugccugu

SEQ ID NO: 1745421 - RNA, 12 nt, Human
gggagcucugca

SEQ ID NO: 1745422 - RNA, 21 nt, Human
gggagccugaucaccugcccu

SEQ ID NO: 1745423 - RNA, 12 nt, Human
ggcuucacagau

SEQ ID NO: 1745424 - RNA, 21 nt, Human
ggcuucacggaagagccuugc

SEQ ID NO: 1745425 - RNA, 20 nt, Human
ggcuucacggaagagccuug

SEQ ID NO: 1745426 - RNA, 15 nt, Human
ggcuuagucacugag

SEQ ID NO: 1745427 - RNA, 14 nt, Human
ggcuuagucacuga

SEQ ID NO: 1745428 - RNA, 19 nt, Human
ggcuuggggaccagagcug

SEQ ID NO: 1745429 - RNA, 18 nt, Human
ggcuuggggaccagagcu

SEQ ID NO: 1745430 - RNA, 17 nt, Human
ggcuuggggaccagagc

SEQ ID NO: 1745431 - RNA, 11 nt, Human
ggcuugcugcc

SEQ ID NO: 1745432 - RNA, 15 nt, Human
ggcuuaaaacaacac

SEQ ID NO: 1745433 - RNA, 20 nt, Human
ggcuguuggcugggggccuc

SEQ ID NO: 1745434 - RNA, 16 nt, Human
ggcuguuggcuggggg

SEQ ID NO: 1745435 - RNA, 15 nt, Human
ggcuguuggcugggg

SEQ ID NO: 1745436 - RNA, 14 nt, Human
ggcuguuggcuggg

SEQ ID NO: 1745437 - RNA, 16 nt, Human
ggcugugccucugccu

SEQ ID NO: 1745438 - RNA, 13 nt, Human
ggcugugccucug

SEQ ID NO: 1745439 - RNA, 17 nt, Human
ggcugucuguuguauuc

SEQ ID NO: 1745440 - RNA, 19 nt, Human
ggcugcuucaaggauccug

SEQ ID NO: 1745441 - RNA, 15 nt, Human
ggcugcuucaaggau

SEQ ID NO: 1745442 - RNA, 17 nt, Human
ggcucugccucccauca

SEQ ID NO: 1745443 - RNA, 23 nt, Human
ggcucuggagcccacuguacuug

SEQ ID NO: 1745444 - RNA, 20 nt, Human
ggcugcuucaaggauccuga

SEQ ID NO: 1745445 - RNA, 21 nt, Human
ggcugcuucaaggauccugag

SEQ ID NO: 1745446 - RNA, 14 nt, Human
ggcugggggccuca

SEQ ID NO: 1745447 - RNA, 16 nt, Human
ggcugggggaagaagc

SEQ ID NO: 1745448 - RNA, 22 nt, Human
ggcugggcuucaguggcagcug

SEQ ID NO: 1745449 - RNA, 21 nt, Human
ggcugggcuucaguggcagcu

SEQ ID NO: 1745450 - RNA, 11 nt, Human
ggcugggcuuc

SEQ ID NO: 1745451 - RNA, 21 nt, Human
ggcugggcucccuucccaccu

SEQ ID NO: 1745452 - RNA, 20 nt, Human
ggcugggcucccuucccacc

SEQ ID NO: 1745453 - RNA, 15 nt, Human
ggcugggagcucugc

SEQ ID NO: 1745454 - RNA, 16 nt, Human
ggcuccacuuggucug

SEQ ID NO: 1745455 - RNA, 9 nt, Human
ggcuccaga

SEQ ID NO: 1745456 - RNA, 12 nt, Human
ggcuaugcauuu

SEQ ID NO: 1745457 - RNA, 13 nt, Human
ggcuaugcauuug

SEQ ID NO: 1745458 - RNA, 14 nt, Human
ggcuaugcauuuga

SEQ ID NO: 1745459 - RNA, 13 nt, Human
ggcuccaggcucc

SEQ ID NO: 1745460 - RNA, 12 nt, Human
ggcuccaggcuc

SEQ ID NO: 1745461 - RNA, 17 nt, Human
ggcuccaggagcagcca

SEQ ID NO: 1745462 - RNA, 18 nt, Human
ggcuccaggagcagccac

SEQ ID NO: 1745463 - RNA, 16 nt, Human
ggcuccaggagcagcc

SEQ ID NO: 1745464 - RNA, 14 nt, Human
ggcuccaggagcag

SEQ ID NO: 1745465 - RNA, 10 nt, Human
ggcuccagac

SEQ ID NO: 1745466 - RNA, 20 nt, Human
ggcuaguaucaaaagaaaga

SEQ ID NO: 1745467 - RNA, 11 nt, Human
ggcgcugcccc

SEQ ID NO: 1745468 - RNA, 17 nt, Human
ggcgcugccccuggcag

SEQ ID NO: 1745469 - RNA, 14 nt, Human
ggcuccaggcuccu

SEQ ID NO: 1745470 - RNA, 15 nt, Human
ggcuccaggcuccuu

SEQ ID NO: 1745471 - RNA, 16 nt, Human
ggcucucaggccagcu

SEQ ID NO: 1745472 - RNA, 15 nt, Human
ggcucucaggccagc

SEQ ID NO: 1745473 - RNA, 20 nt, Human
ggcucucaggccagcugcuu

SEQ ID NO: 1745474 - RNA, 19 nt, Human
ggcucucaggccagcugcu

SEQ ID NO: 1745475 - RNA, 18 nt, Human
ggcucucaggccagcugc

SEQ ID NO: 1745476 - RNA, 17 nt, Human
ggcucucaggccagcug

SEQ ID NO: 1745477 - RNA, 12 nt, Human
ggcucugcccuu

SEQ ID NO: 1745478 - RNA, 15 nt, Human
ggcucugccucccau

SEQ ID NO: 1745479 - RNA, 13 nt, Human
ggcucugccuccc

SEQ ID NO: 1745480 - RNA, 15 nt, Human
ggcucugcccuuggu

SEQ ID NO: 1745481 - RNA, 14 nt, Human
ggcucugcccuugg

SEQ ID NO: 1745482 - RNA, 16 nt, Human
ggcucugccucccauc

SEQ ID NO: 1745483 - RNA, 16 nt, Human
ggcucuggagcccacu

SEQ ID NO: 1745484 - RNA, 19 nt, Human
ggcucuggagcccacugua

SEQ ID NO: 1745485 - RNA, 17 nt, Human
ggcucuggagcccacug

SEQ ID NO: 1745486 - RNA, 24 nt, Human
ggcgcagcauauucaggaagcuca

SEQ ID NO: 1745487 - RNA, 23 nt, Human
ggcgcagcauauucaggaagcuc

SEQ ID NO: 1745488 - RNA, 23 nt, Human
ggccugggggcugggcagaggaa

SEQ ID NO: 1745489 - RNA, 11 nt, Human
ggccugggccc

SEQ ID NO: 1745490 - RNA, 16 nt, Human
ggccuggccugagcug

SEQ ID NO: 1745491 - RNA, 15 nt, Human
ggccuggccugagcu

SEQ ID NO: 1745492 - RNA, 14 nt, Human
ggccuggccugagc

SEQ ID NO: 1745493 - RNA, 13 nt, Human
ggccuggccugag

SEQ ID NO: 1745494 - RNA, 10 nt, Human
ggccuggccu

SEQ ID NO: 1745495 - RNA, 23 nt, Human
ggccuggccccucagggucccug

SEQ ID NO: 1745496 - RNA, 18 nt, Human
ggccuggccccucagggu

SEQ ID NO: 1745497 - RNA, 17 nt, Human
ggccuggccccucaggg

SEQ ID NO: 1745498 - RNA, 15 nt, Human
ggccuggccccucag

SEQ ID NO: 1745499 - RNA, 14 nt, Human
ggccuggccccuca

SEQ ID NO: 1745500 - RNA, 19 nt, Human
ggccucugcacuccccugc

SEQ ID NO: 1745501 - RNA, 18 nt, Human
ggccucugcacuccccug

SEQ ID NO: 1745502 - RNA, 22 nt, Human
ggccucugcacuccccugcugg

SEQ ID NO: 1745503 - RNA, 13 nt, Human
ggccuggccccuc

SEQ ID NO: 1745504 - RNA, 12 nt, Human
ggccugagcugg

SEQ ID NO: 1745505 - RNA, 14 nt, Human
ggccuccugugugu

SEQ ID NO: 1745506 - RNA, 17 nt, Human
ggccucggacuuagcug

SEQ ID NO: 1745507 - RNA, 23 nt, Human
ggccucaagugauucuccugccu

SEQ ID NO: 1745508 - RNA, 22 nt, Human
ggccucaagugauucuccugcc

SEQ ID NO: 1745509 - RNA, 14 nt, Human
ggccucaagugauu

SEQ ID NO: 1745510 - RNA, 20 nt, Human
ggccuagcauacguacacau

SEQ ID NO: 1745511 - RNA, 22 nt, Human
ggccuagcauacguacacauuu

SEQ ID NO: 1745512 - RNA, 23 nt, Human
ggccuagcauacguacacauuuu

SEQ ID NO: 1745513 - RNA, 20 nt, Human
ggcccagagggccugcaagg

SEQ ID NO: 1745514 - RNA, 19 nt, Human
ggcccagagggccugcaag

SEQ ID NO: 1745515 - RNA, 17 nt, Human
ggcccagagggccugca

SEQ ID NO: 1745516 - RNA, 14 nt, Human
ggcccagagggccu

SEQ ID NO: 1745517 - RNA, 15 nt, Human
ggccgggagccugau

SEQ ID NO: 1745518 - RNA, 23 nt, Human
ggccgggaccccgagccuggcuc

SEQ ID NO: 1745519 - RNA, 22 nt, Human
ggccgggaccccgagccuggcu

SEQ ID NO: 1745520 - RNA, 21 nt, Human
ggauucuuccucccucccucu

SEQ ID NO: 1745521 - RNA, 17 nt, Human
ggcaagcaccuccugcc

SEQ ID NO: 1745522 - RNA, 19 nt, Human
ggcaagcaccuccugccuc

SEQ ID NO: 1745523 - RNA, 18 nt, Human
ggcaagcaccuccugccu

SEQ ID NO: 1745524 - RNA, 17 nt, Human
ggcaccagcagccugga

SEQ ID NO: 1745525 - RNA, 21 nt, Human
ggcagagguugcagugagccg

SEQ ID NO: 1745526 - RNA, 22 nt, Human
ggcagagcagagaccaucccug

SEQ ID NO: 1745527 - RNA, 20 nt, Human
ggcacucagaagacacugau

SEQ ID NO: 1745528 - RNA, 19 nt, Human
ggcacucagaagacacuga

SEQ ID NO: 1745529 - RNA, 18 nt, Human
ggcacucagaagacacug

SEQ ID NO: 1745530 - RNA, 20 nt, Human
ggcacccggccccugcuggu

SEQ ID NO: 1745531 - RNA, 19 nt, Human
ggcacccggccccugcugg

SEQ ID NO: 1745532 - RNA, 18 nt, Human
ggcacccggccccugcug

SEQ ID NO: 1745533 - RNA, 20 nt, Human
ggcacccaccaucaugucug

SEQ ID NO: 1745534 - RNA, 23 nt, Human
ggagucccaccuuggcugcaggg

SEQ ID NO: 1745535 - RNA, 22 nt, Human
ggaugaucuaggaagacuuugg

SEQ ID NO: 1745536 - RNA, 18 nt, Human
ggaugaucuaggaagacu

SEQ ID NO: 1745537 - RNA, 16 nt, Human
ggaugaucuaggaaga

SEQ ID NO: 1745538 - RNA, 17 nt, Human
ggaugccugguggcagc

SEQ ID NO: 1745539 - RNA, 13 nt, Human
ggaugccuggugg

SEQ ID NO: 1745540 - RNA, 19 nt, Human
ggaugcccaaagaugcagc

SEQ ID NO: 1745541 - RNA, 17 nt, Human
ggaugccccgucccccu

SEQ ID NO: 1745542 - RNA, 18 nt, Human
ggaugcccaaagaugcag

SEQ ID NO: 1745543 - RNA, 18 nt, Human
ggaugaugacuauggaaa

SEQ ID NO: 1745544 - RNA, 21 nt, Human
ggaugccugguggcagcugcg

SEQ ID NO: 1745545 - RNA, 20 nt, Human
ggaugccugguggcagcugc

SEQ ID NO: 1745546 - RNA, 19 nt, Human
ggaugccugguggcagcug

SEQ ID NO: 1745547 - RNA, 18 nt, Human
ggaugccugguggcagcu

SEQ ID NO: 1745548 - RNA, 12 nt, Human
ggauuauauuau

SEQ ID NO: 1745549 - RNA, 21 nt, Human
ggcagcugcgguccacccagg

SEQ ID NO: 1745550 - RNA, 21 nt, Human
ggcagaguugaagacagagcu

SEQ ID NO: 1745551 - RNA, 19 nt, Human
ggcagaguugaagacagag

SEQ ID NO: 1745552 - RNA, 17 nt, Human
ggcagaguugaagacag

SEQ ID NO: 1745553 - RNA, 12 nt, Human
ggcaggguccua

SEQ ID NO: 1745554 - RNA, 24 nt, Human
ggcagcugcgguccacccaggagc

SEQ ID NO: 1745555 - RNA, 23 nt, Human
ggcagcugcgguccacccaggag

SEQ ID NO: 1745556 - RNA, 18 nt, Human
ggcagggucucacucugu

SEQ ID NO: 1745557 - RNA, 17 nt, Human
ggcagggucucacucug

SEQ ID NO: 1745558 - RNA, 17 nt, Human
ggcagguuggugggggc

SEQ ID NO: 1745559 - RNA, 23 nt, Human
ggcaugugaugagaggaaaucac

SEQ ID NO: 1745560 - RNA, 18 nt, Human
ggcaugugaugagaggaa

SEQ ID NO: 1745561 - RNA, 22 nt, Human
ggcaugacacgaauauugcuga

SEQ ID NO: 1745562 - RNA, 16 nt, Human
ggccaggcccucugcc

SEQ ID NO: 1745563 - RNA, 15 nt, Human
ggccaggcccucugc

SEQ ID NO: 1745564 - RNA, 17 nt, Human
ggccaggcccucugccc

SEQ ID NO: 1745565 - RNA, 14 nt, Human
ggccaggcccucug

SEQ ID NO: 1745566 - RNA, 13 nt, Human
ggccaggagccuc

SEQ ID NO: 1745567 - RNA, 11 nt, Human
ggccaggagcc

SEQ ID NO: 1745568 - RNA, 20 nt, Human
ggccacugugaagagaacca

SEQ ID NO: 1745569 - RNA, 20 nt, Human
ggcauguucucugaggacac

SEQ ID NO: 1745570 - RNA, 22 nt, Human
ggccacagaaaauucuucucca

SEQ ID NO: 1745571 - RNA, 16 nt, Human
ggaggacgcucucugg

SEQ ID NO: 1745572 - RNA, 21 nt, Human
ggaggauguucugggacacag

SEQ ID NO: 1745573 - RNA, 18 nt, Human
ggaggauguucugggaca

SEQ ID NO: 1745574 - RNA, 16 nt, Human
ggagggagggcuccag

SEQ ID NO: 1745575 - RNA, 13 nt, Human
ggagggagggcuc

SEQ ID NO: 1745576 - RNA, 17 nt, Human
ggagggagggcuccaga

SEQ ID NO: 1745577 - RNA, 17 nt, Human
ggaggcaggaguuucgu

SEQ ID NO: 1745578 - RNA, 19 nt, Human
ggaggggagcaugggaagu

SEQ ID NO: 1745579 - RNA, 13 nt, Human
ggagggccugggc

SEQ ID NO: 1745580 - RNA, 13 nt, Human
ggaggggccuggc

SEQ ID NO: 1745581 - RNA, 22 nt, Human
ggagucccaccuuggcugcagg

SEQ ID NO: 1745582 - RNA, 21 nt, Human
ggaggggccuggcagccgugc

SEQ ID NO: 1745583 - RNA, 18 nt, Human
ggaggggccuggcagccg

SEQ ID NO: 1745584 - RNA, 14 nt, Human
ggaggggccuggca

SEQ ID NO: 1745585 - RNA, 19 nt, Human
ggagcccugggaggcucug

SEQ ID NO: 1745586 - RNA, 16 nt, Human
ggagcccugggaggcu

SEQ ID NO: 1745587 - RNA, 14 nt, Human
ggagccuccugccc

SEQ ID NO: 1745588 - RNA, 20 nt, Human
ggagcccugggaggcucugg

SEQ ID NO: 1745589 - RNA, 15 nt, Human
ggagccuccugcccu

SEQ ID NO: 1745590 - RNA, 18 nt, Human
ggacugagaaauuuauaa

SEQ ID NO: 1745591 - RNA, 16 nt, Human
ggacgcucucuggccu

SEQ ID NO: 1745592 - RNA, 19 nt, Human
ggacgcucucuggccuucg

SEQ ID NO: 1745593 - RNA, 14 nt, Human
ggacugagaaauuu

SEQ ID NO: 1745594 - RNA, 18 nt, Human
ggaccuugaacuggguac

SEQ ID NO: 1745595 - RNA, 19 nt, Human
ggaccagagcugccaccug

SEQ ID NO: 1745596 - RNA, 17 nt, Human
ggacagcuccuucuguc

SEQ ID NO: 1745597 - RNA, 16 nt, Human
ggacagcuccuucugu

SEQ ID NO: 1745598 - RNA, 15 nt, Human
ggacagcuccuucug

SEQ ID NO: 1745599 - RNA, 11 nt, Human
ggacagcuccu

SEQ ID NO: 1745600 - RNA, 20 nt, Human
ggacagaggggguggccucc

SEQ ID NO: 1745601 - RNA, 16 nt, Human
ggacagccccuccucc

SEQ ID NO: 1745602 - RNA, 15 nt, Human
ggacagccccuccuc

SEQ ID NO: 1745603 - RNA, 16 nt, Human
ggacagaggggguggc

SEQ ID NO: 1745604 - RNA, 14 nt, Human
ggacagaagcagcu

SEQ ID NO: 1745605 - RNA, 17 nt, Human
ggacagaagcagcucuu

SEQ ID NO: 1745606 - RNA, 16 nt, Human
ggacagaagcagcucu

SEQ ID NO: 1745607 - RNA, 15 nt, Human
ggacagaagcagcuc

SEQ ID NO: 1745608 - RNA, 21 nt, Human
gcuuuuaugugaaacauguuu

SEQ ID NO: 1745609 - RNA, 20 nt, Human
gcuuuuaugugaaacauguu

SEQ ID NO: 1745610 - RNA, 19 nt, Human
gcuuuuaugugaaacaugu

SEQ ID NO: 1745611 - RNA, 12 nt, Human
gcuuuucacugc

SEQ ID NO: 1745612 - RNA, 22 nt, Human
gccacacuucaggcucuucucc

SEQ ID NO: 1745613 - RNA, 20 nt, Human
gccacacuucaggcucuucu

SEQ ID NO: 1745614 - RNA, 20 nt, Human
gccacagagaaaguacuucu

SEQ ID NO: 1745615 - RNA, 14 nt, Human
gccacagagaaagu

SEQ ID NO: 1745616 - RNA, 13 nt, Human
gccacagagaaag

SEQ ID NO: 1745617 - RNA, 23 nt, Human
gccacacuucaggcucuucuccu

SEQ ID NO: 1745618 - RNA, 23 nt, Human
gccacagagaaaguacuucucca

SEQ ID NO: 1745619 - RNA, 22 nt, Human
gccacaagacccuugugguccc

SEQ ID NO: 1745620 - RNA, 16 nt, Human
gccacaagacccuugu

SEQ ID NO: 1745621 - RNA, 21 nt, Human
gccaaggcugggggaagaagc

SEQ ID NO: 1745622 - RNA, 12 nt, Human
gcauuugugaaa

SEQ ID NO: 1745623 - RNA, 21 nt, Human
gcauuugaggucuguucuuuc

SEQ ID NO: 1745624 - RNA, 19 nt, Human
gcauuugaggucuguucuu

SEQ ID NO: 1745625 - RNA, 20 nt, Human
gcauuugaggucuguucuuu

SEQ ID NO: 1745626 - RNA, 22 nt, Human
gcauuuggugguuucagaaaug

SEQ ID NO: 1745627 - RNA, 23 nt, Human
gcauuuggugguuucagaaaugu

SEQ ID NO: 1745628 - RNA, 23 nt, Human
gccaaggugggaggauugcuuga

SEQ ID NO: 1745629 - RNA, 15 nt, Human
gccaaggugggagga

SEQ ID NO: 1745630 - RNA, 14 nt, Human
gccaaggugggagg

SEQ ID NO: 1745631 - RNA, 21 nt, Human
gccaauggagacugucucaag

SEQ ID NO: 1745632 - RNA, 19 nt, Human
gccaauggagacugucuca

SEQ ID NO: 1745633 - RNA, 16 nt, Human
gccaauggagacuguc

SEQ ID NO: 1745634 - RNA, 20 nt, Human
gccaauaauaauaccucccu

SEQ ID NO: 1745635 - RNA, 12 nt, Human
gccaaguucuua

SEQ ID NO: 1745636 - RNA, 20 nt, Human
gccacuauuguuagucucuu

SEQ ID NO: 1745637 - RNA, 16 nt, Human
gccagagacacaagcc

SEQ ID NO: 1745638 - RNA, 19 nt, Human
gccagagacacaagccuuc

SEQ ID NO: 1745639 - RNA, 17 nt, Human
gccagagacacaagccu

SEQ ID NO: 1745640 - RNA, 10 nt, Human
gccagaggag

SEQ ID NO: 1745641 - RNA, 20 nt, Human
gccagagacacaagccuucg

SEQ ID NO: 1745642 - RNA, 18 nt, Human
gccagaugcaccagcccu

SEQ ID NO: 1745643 - RNA, 17 nt, Human
gccagaugcaccagccc

SEQ ID NO: 1745644 - RNA, 16 nt, Human
gccagaugcaccagcc

SEQ ID NO: 1745645 - RNA, 23 nt, Human
gccagagggagugacagaggcag

SEQ ID NO: 1745646 - RNA, 22 nt, Human
gccagagggagugacagaggca

SEQ ID NO: 1745647 - RNA, 21 nt, Human
gccagagggagugacagaggc

SEQ ID NO: 1745648 - RNA, 22 nt, Human
gccagaggagagaggacccccu

SEQ ID NO: 1745649 - RNA, 19 nt, Human
gccagaggagagaggaccc

SEQ ID NO: 1745650 - RNA, 17 nt, Human
gccagaggagagaggac

SEQ ID NO: 1745651 - RNA, 15 nt, Human
gccagaggagagagg

SEQ ID NO: 1745652 - RNA, 13 nt, Human
gccagaggagaga

SEQ ID NO: 1745653 - RNA, 12 nt, Human
gccagaggagag

SEQ ID NO: 1745654 - RNA, 17 nt, Human
gccaccugccuguuggg

SEQ ID NO: 1745655 - RNA, 22 nt, Human
gccaccgugccuggccacgccc

SEQ ID NO: 1745656 - RNA, 17 nt, Human
gccaccgugccuggcca

SEQ ID NO: 1745657 - RNA, 17 nt, Human
gccaccgcgcccagccu

SEQ ID NO: 1745658 - RNA, 18 nt, Human
gccacggccaggccagag

SEQ ID NO: 1745659 - RNA, 20 nt, Human
gccacgcccaacuaauuuuu

SEQ ID NO: 1745660 - RNA, 19 nt, Human
gccacggccaggccagagg

SEQ ID NO: 1745661 - RNA, 20 nt, Human
gccaccugcggugcuaucuc

SEQ ID NO: 1745662 - RNA, 14 nt, Human
gccaccugcggugc

SEQ ID NO: 1745663 - RNA, 22 nt, Human
gccaccugcggugcuaucuccc

SEQ ID NO: 1745664 - RNA, 11 nt, Human
gccaccugggu

SEQ ID NO: 1745665 - RNA, 22 nt, Human
gccaugggacagggaggacgcu

SEQ ID NO: 1745666 - RNA, 23 nt, Human
gccaugggacagggaggacgcuc

SEQ ID NO: 1745667 - RNA, 14 nt, Human
gcccaaccugcucu

SEQ ID NO: 1745668 - RNA, 20 nt, Human
gccaugaggaacaaggcaag

SEQ ID NO: 1745669 - RNA, 18 nt, Human
gccaugaggaacaaggca

SEQ ID NO: 1745670 - RNA, 18 nt, Human
gccaugccagcuuaucuc

SEQ ID NO: 1745671 - RNA, 13 nt, Human
gccaugccagcuu

SEQ ID NO: 1745672 - RNA, 19 nt, Human
gccaugccagcuuaucuca

SEQ ID NO: 1745673 - RNA, 14 nt, Human
gccaggcugcucuu

SEQ ID NO: 1745674 - RNA, 13 nt, Human
gccaggcugcucu

SEQ ID NO: 1745675 - RNA, 13 nt, Human
gccaggcuggguc

SEQ ID NO: 1745676 - RNA, 22 nt, Human
gccaggcugcucuugaacuccu

SEQ ID NO: 1745677 - RNA, 21 nt, Human
gccagauuucacucuccuugg

SEQ ID NO: 1745678 - RNA, 18 nt, Human
gccagauuucacucuccu

SEQ ID NO: 1745679 - RNA, 16 nt, Human
gccagauuucacucuc

SEQ ID NO: 1745680 - RNA, 23 nt, Human
gccagggacagaggggguggccu

SEQ ID NO: 1745681 - RNA, 18 nt, Human
gccagggacagagggggu

SEQ ID NO: 1745682 - RNA, 16 nt, Human
gccagggacagagggg

SEQ ID NO: 1745683 - RNA, 13 nt, Human
gccagggacagag

SEQ ID NO: 1745684 - RNA, 22 nt, Human
gccaggcuggucucgaacuccu

SEQ ID NO: 1745685 - RNA, 18 nt, Human
gccagucaccccggccac

SEQ ID NO: 1745686 - RNA, 17 nt, Human
gccagucaccccggcca

SEQ ID NO: 1745687 - RNA, 20 nt, Human
gccagucaccccggccaccu

SEQ ID NO: 1745688 - RNA, 21 nt, Human
gccagucaccccggccaccug

SEQ ID NO: 1745689 - RNA, 17 nt, Human
gccagguuuuuggucug

SEQ ID NO: 1745690 - RNA, 12 nt, Human
gccaguaaaugg

SEQ ID NO: 1745691 - RNA, 20 nt, Human
gcccagucuggaaugcagug

SEQ ID NO: 1745692 - RNA, 19 nt, Human
gcccagucuggaaugcagu

SEQ ID NO: 1745693 - RNA, 21 nt, Human
gcccaggcuuagucacugaga

SEQ ID NO: 1745694 - RNA, 19 nt, Human
gcccaggcuuagucacuga

SEQ ID NO: 1745695 - RNA, 23 nt, Human
gcccaggcuuagucacugagaca

SEQ ID NO: 1745696 - RNA, 21 nt, Human
gcccaggaaaggcuccaggag

SEQ ID NO: 1745697 - RNA, 20 nt, Human
gcccaggaaaggcuccagga

SEQ ID NO: 1745698 - RNA, 19 nt, Human
gcccaggaaaggcuccagg

SEQ ID NO: 1745699 - RNA, 18 nt, Human
gcccaggaaaggcuccag

SEQ ID NO: 1745700 - RNA, 20 nt, Human
gcccaggcuggcgugcagug

SEQ ID NO: 1745701 - RNA, 19 nt, Human
gcccaggcuggcgugcagu

SEQ ID NO: 1745702 - RNA, 22 nt, Human
gcccaggcuggcgugcaguggu

SEQ ID NO: 1745703 - RNA, 17 nt, Human
gcccagccccuucugac

SEQ ID NO: 1745704 - RNA, 16 nt, Human
gcccagccccuucuga

SEQ ID NO: 1745705 - RNA, 14 nt, Human
gcccagccccuucu

SEQ ID NO: 1745706 - RNA, 13 nt, Human
gcccagccccuuc

SEQ ID NO: 1745707 - RNA, 24 nt, Human
gcccagccccuucugacccaugcu

SEQ ID NO: 1745708 - RNA, 20 nt, Human
gcccagccccuucugaccca

SEQ ID NO: 1745709 - RNA, 21 nt, Human
gcccagcuugaaaccuucacu

SEQ ID NO: 1745710 - RNA, 12 nt, Human
gcccagccccuu

SEQ ID NO: 1745711 - RNA, 11 nt, Human
gcccagccccu

SEQ ID NO: 1745712 - RNA, 9 nt, Human
gcccagccc

SEQ ID NO: 1745713 - RNA, 21 nt, Human
gcccagagggccugcaaggga

SEQ ID NO: 1745714 - RNA, 20 nt, Human
gcccagagggccugcaaggg

SEQ ID NO: 1745715 - RNA, 22 nt, Human
gcccagagggccugcaagggag

SEQ ID NO: 1745716 - RNA, 19 nt, Human
gcccagagggccugcaagg

SEQ ID NO: 1745717 - RNA, 18 nt, Human
gcccagagggccugcaag

SEQ ID NO: 1745718 - RNA, 15 nt, Human
gcccagagggccugc

SEQ ID NO: 1745719 - RNA, 14 nt, Human
gcccagagggccug

SEQ ID NO: 1745720 - RNA, 12 nt, Human
gcccagagggcc

SEQ ID NO: 1745721 - RNA, 15 nt, Human
gcccagagagggugg

SEQ ID NO: 1745722 - RNA, 21 nt, Human
gcccaaugcacuuuguucugg

SEQ ID NO: 1745723 - RNA, 15 nt, Human
gcaucucagcccaca

SEQ ID NO: 1745724 - RNA, 22 nt, Human
gcaugacacgaauauugcugau

SEQ ID NO: 1745725 - RNA, 21 nt, Human
gcaugacacgaauauugcuga

SEQ ID NO: 1745726 - RNA, 23 nt, Human
gcaugaaguaauaugcacacauu

SEQ ID NO: 1745727 - RNA, 20 nt, Human
gcaugaaguaauaugcacac

SEQ ID NO: 1745728 - RNA, 21 nt, Human
gcaugaaguaauaugcacaca

SEQ ID NO: 1745729 - RNA, 22 nt, Human
gcaugaaguaauaugcacacau

SEQ ID NO: 1745730 - RNA, 12 nt, Human
gcaucucagccc

SEQ ID NO: 1745731 - RNA, 14 nt, Human
gcaucucagcccac

SEQ ID NO: 1745732 - RNA, 13 nt, Human
gcaucucagccca

SEQ ID NO: 1745733 - RNA, 23 nt, Human
gcaucagugcccuccaggauaga

SEQ ID NO: 1745734 - RNA, 12 nt, Human
gcaucaggccag

SEQ ID NO: 1745735 - RNA, 18 nt, Human
gcaucaggccaggcccuc

SEQ ID NO: 1745736 - RNA, 23 nt, Human
gcaucaggccaggcccucugccc

SEQ ID NO: 1745737 - RNA, 15 nt, Human
gcaucagugcccucc

SEQ ID NO: 1745738 - RNA, 14 nt, Human
gcaugccuggaugg

SEQ ID NO: 1745739 - RNA, 14 nt, Human
gcauguucucugag

SEQ ID NO: 1745740 - RNA, 13 nt, Human
gcauguuacauaa

SEQ ID NO: 1745741 - RNA, 15 nt, Human
gcaugccuggauggg

SEQ ID NO: 1745742 - RNA, 22 nt, Human
gcauuaucuagauacuguauca

SEQ ID NO: 1745743 - RNA, 24 nt, Human
gcauuaucuagauacuguaucaug

SEQ ID NO: 1745744 - RNA, 21 nt, Human
gcauuccccaggaggccagcc

SEQ ID NO: 1745745 - RNA, 20 nt, Human
gcauuccccaggaggccagc

SEQ ID NO: 1745746 - RNA, 19 nt, Human
gcauuccccaggaggccag

SEQ ID NO: 1745747 - RNA, 18 nt, Human
gcauuccccaggaggcca

SEQ ID NO: 1745748 - RNA, 17 nt, Human
gcauuccccaggaggcc

SEQ ID NO: 1745749 - RNA, 16 nt, Human
gcauuccccaggaggc

SEQ ID NO: 1745750 - RNA, 15 nt, Human
gcauuccccaggagg

SEQ ID NO: 1745751 - RNA, 14 nt, Human
gcauuccccaggag

SEQ ID NO: 1745752 - RNA, 22 nt, Human
gcauuccccaggaggccagccu

SEQ ID NO: 1745753 - RNA, 18 nt, Human
gcauuugaggucuguucu

SEQ ID NO: 1745754 - RNA, 19 nt, Human
gcauacguacacauuuuau

SEQ ID NO: 1745755 - RNA, 22 nt, Human
gcaguggugguuuucuguucuu

SEQ ID NO: 1745756 - RNA, 20 nt, Human
gcaguggugguuuucuguuc

SEQ ID NO: 1745757 - RNA, 21 nt, Human
gcaguggugguuuucuguucu

SEQ ID NO: 1745758 - RNA, 21 nt, Human
gcaguggugcgaucuggguuc

SEQ ID NO: 1745759 - RNA, 20 nt, Human
gcaguggugcgaucuggguu

SEQ ID NO: 1745760 - RNA, 22 nt, Human
gcaguggugcgaucuggguuca

SEQ ID NO: 1745761 - RNA, 19 nt, Human
gcaguggugguuuucuguu

SEQ ID NO: 1745762 - RNA, 19 nt, Human
gcaguggugcgaucugggu

SEQ ID NO: 1745763 - RNA, 18 nt, Human
gcaguggugcgaucuggg

SEQ ID NO: 1745764 - RNA, 12 nt, Human
gcagugggagcu

SEQ ID NO: 1745765 - RNA, 11 nt, Human
gcagugggagc

SEQ ID NO: 1745766 - RNA, 21 nt, Human
gcagugggacagggcauggcc

SEQ ID NO: 1745767 - RNA, 23 nt, Human
gcaggucccuaauaaagcugugu

SEQ ID NO: 1745768 - RNA, 21 nt, Human
gcaggucccuaauaaagcugu

SEQ ID NO: 1745769 - RNA, 20 nt, Human
gcaggucccuaauaaagcug

SEQ ID NO: 1745770 - RNA, 19 nt, Human
gcaggucccuaauaaagcu

SEQ ID NO: 1745771 - RNA, 18 nt, Human
gcaggucccuaauaaagc

SEQ ID NO: 1745772 - RNA, 17 nt, Human
gcaggucccuaauaaag

SEQ ID NO: 1745773 - RNA, 16 nt, Human
gcaggucccuaauaaa

SEQ ID NO: 1745774 - RNA, 22 nt, Human
gcaggggaggguagagcggaga

SEQ ID NO: 1745775 - RNA, 16 nt, Human
gcagggucucacucug

SEQ ID NO: 1745776 - RNA, 19 nt, Human
gcaggguccuagaaauucc

SEQ ID NO: 1745777 - RNA, 15 nt, Human
gcaggucccuaauaa

SEQ ID NO: 1745778 - RNA, 14 nt, Human
gcaggucccuaaua

SEQ ID NO: 1745779 - RNA, 17 nt, Human
gcaggcagccaggccac

SEQ ID NO: 1745780 - RNA, 18 nt, Human
gcaggcagccaggccaca

SEQ ID NO: 1745781 - RNA, 19 nt, Human
gcacuguuuuauuuuaauu

SEQ ID NO: 1745782 - RNA, 14 nt, Human
gcacugggcuuggg

SEQ ID NO: 1745783 - RNA, 12 nt, Human
gcacugggcuug

SEQ ID NO: 1745784 - RNA, 15 nt, Human
gcacugcuuccagug

SEQ ID NO: 1745785 - RNA, 14 nt, Human
gcacugcuuccagu

SEQ ID NO: 1745786 - RNA, 13 nt, Human
gcacugcuuccag

SEQ ID NO: 1745787 - RNA, 12 nt, Human
gcacugcuucca

SEQ ID NO: 1745788 - RNA, 15 nt, Human
gcacuauaauguaag

SEQ ID NO: 1745789 - RNA, 14 nt, Human
gcacuauaauguaa

SEQ ID NO: 1745790 - RNA, 20 nt, Human
gcacuauaauguaagcucua

SEQ ID NO: 1745791 - RNA, 22 nt, Human
gcacuauaauguaagcucuacu

SEQ ID NO: 1745792 - RNA, 20 nt, Human
gcacuaaggugugcucugau

SEQ ID NO: 1745793 - RNA, 14 nt, Human
gcacgugugugcac

SEQ ID NO: 1745794 - RNA, 19 nt, Human
gcacccucaggcagguggg

SEQ ID NO: 1745795 - RNA, 16 nt, Human
gcacccucaggcaggu

SEQ ID NO: 1745796 - RNA, 20 nt, Human
gauugugucucuugguccug

SEQ ID NO: 1745797 - RNA, 23 nt, Human
gcacagcuucauuuccugugucu

SEQ ID NO: 1745798 - RNA, 16 nt, Human
gcacagggcaguggga

SEQ ID NO: 1745799 - RNA, 15 nt, Human
gcaccaucucuccuc

SEQ ID NO: 1745800 - RNA, 14 nt, Human
gcaccaucucuccu

SEQ ID NO: 1745801 - RNA, 13 nt, Human
gcaccagcagccu

SEQ ID NO: 1745802 - RNA, 14 nt, Human
gcaccagcagccug

SEQ ID NO: 1745803 - RNA, 17 nt, Human
gcaccaucucuccuccu

SEQ ID NO: 1745804 - RNA, 22 nt, Human
gcacuucgggaggucgaggcag

SEQ ID NO: 1745805 - RNA, 16 nt, Human
gcacuugcagacucua

SEQ ID NO: 1745806 - RNA, 14 nt, Human
gcacuugcagacuc

SEQ ID NO: 1745807 - RNA, 22 nt, Human
gcagacucuacagaggccaugg

SEQ ID NO: 1745808 - RNA, 19 nt, Human
gcagacucuacagaggcca

SEQ ID NO: 1745809 - RNA, 18 nt, Human
gcagacucuacagaggcc

SEQ ID NO: 1745810 - RNA, 17 nt, Human
gcagacucuacagaggc

SEQ ID NO: 1745811 - RNA, 21 nt, Human
gcagagaccaucccugaaggc

SEQ ID NO: 1745812 - RNA, 20 nt, Human
gcagagaccaucccugaagg

SEQ ID NO: 1745813 - RNA, 22 nt, Human
gcagagaccaucccugaaggcc

SEQ ID NO: 1745814 - RNA, 18 nt, Human
gcagauguccuugaugcu

SEQ ID NO: 1745815 - RNA, 18 nt, Human
gcagauggagaccccuug

SEQ ID NO: 1745816 - RNA, 23 nt, Human
gcagagguugcagugagccgaga

SEQ ID NO: 1745817 - RNA, 18 nt, Human
gcagagguugcagugagc

SEQ ID NO: 1745818 - RNA, 21 nt, Human
gcagagguccacaacacacag

SEQ ID NO: 1745819 - RNA, 19 nt, Human
gcagccucacaguccuuac

SEQ ID NO: 1745820 - RNA, 17 nt, Human
gcagccucacaguccuu

SEQ ID NO: 1745821 - RNA, 15 nt, Human
gcagccucacagucc

SEQ ID NO: 1745822 - RNA, 19 nt, Human
gcagcagggagggcuucug

SEQ ID NO: 1745823 - RNA, 18 nt, Human
gcagcagggagggcuucu

SEQ ID NO: 1745824 - RNA, 20 nt, Human
gcagcagggagggcuucugc

SEQ ID NO: 1745825 - RNA, 14 nt, Human
gcagcccugcuuug

SEQ ID NO: 1745826 - RNA, 24 nt, Human
gcagcccugcuuugggcugcccug

SEQ ID NO: 1745827 - RNA, 14 nt, Human
gcagcucagagagg

SEQ ID NO: 1745828 - RNA, 21 nt, Human
gcagcucaccucucccuugga

SEQ ID NO: 1745829 - RNA, 20 nt, Human
gcagcucaccucucccuugg

SEQ ID NO: 1745830 - RNA, 17 nt, Human
gcagcucaccucucccu

SEQ ID NO: 1745831 - RNA, 16 nt, Human
gcagcucaccucuccc

SEQ ID NO: 1745832 - RNA, 19 nt, Human
gcagcucagagaggguggg

SEQ ID NO: 1745833 - RNA, 18 nt, Human
gcagcucagagagggugg

SEQ ID NO: 1745834 - RNA, 22 nt, Human
gaugggcaacccccagccugcu

SEQ ID NO: 1745835 - RNA, 21 nt, Human
gauggcacuuauaaccaaagc

SEQ ID NO: 1745836 - RNA, 21 nt, Human
gaugccuggcgggguggggug

SEQ ID NO: 1745837 - RNA, 23 nt, Human
gaugagaaauaaaguuucuguug

SEQ ID NO: 1745838 - RNA, 22 nt, Human
gaugagaaagguugaagcacca

SEQ ID NO: 1745839 - RNA, 11 nt, Human
gaugagaaagg

SEQ ID NO: 1745840 - RNA, 14 nt, Human
gaugacuauggaaa

SEQ ID NO: 1745841 - RNA, 16 nt, Human
gaucuuugcagacagg

SEQ ID NO: 1745842 - RNA, 15 nt, Human
gaugaaaaaauaaca

SEQ ID NO: 1745843 - RNA, 17 nt, Human
gaucuuugcagacaggc

SEQ ID NO: 1745844 - RNA, 17 nt, Human
gauccuuuuggagucag

SEQ ID NO: 1745845 - RNA, 15 nt, Human
gauccuuuuggaguc

SEQ ID NO: 1745846 - RNA, 19 nt, Human
gauccugagccagauuuca

SEQ ID NO: 1745847 - RNA, 15 nt, Human
gauccugagccagau

SEQ ID NO: 1745848 - RNA, 14 nt, Human
gauccugagccaga

SEQ ID NO: 1745849 - RNA, 13 nt, Human
gauccugagccag

SEQ ID NO: 1745850 - RNA, 21 nt, Human
gauccucccaccucagccucc

SEQ ID NO: 1745851 - RNA, 20 nt, Human
gauccucccaccucagccuc

SEQ ID NO: 1745852 - RNA, 19 nt, Human
gauccucccaccucagccu

SEQ ID NO: 1745853 - RNA, 12 nt, Human
gauccuccaggu

SEQ ID NO: 1745854 - RNA, 14 nt, Human
gaucacgccacugc

SEQ ID NO: 1745855 - RNA, 13 nt, Human
gaucacgccacug

SEQ ID NO: 1745856 - RNA, 23 nt, Human
gaucaaccccuucgcuccugugu

SEQ ID NO: 1745857 - RNA, 18 nt, Human
gauccuaguuccaccauc

SEQ ID NO: 1745858 - RNA, 15 nt, Human
gaucacgccacugca

SEQ ID NO: 1745859 - RNA, 11 nt, Human
gauccuccagg

SEQ ID NO: 1745860 - RNA, 23 nt, Human
gauugacgggacuguugguauug

SEQ ID NO: 1745861 - RNA, 13 nt, Human
gauugugccccug

SEQ ID NO: 1745862 - RNA, 20 nt, Human
gauuguccccgacccuugcc

SEQ ID NO: 1745863 - RNA, 15 nt, Human
gauuguccccgaccc

SEQ ID NO: 1745864 - RNA, 23 nt, Human
gauuguaauauguaaaugguaug

SEQ ID NO: 1745865 - RNA, 22 nt, Human
gauucccaagcucugcuccucu

SEQ ID NO: 1745866 - RNA, 12 nt, Human
gauucagacagc

SEQ ID NO: 1745867 - RNA, 20 nt, Human
gaugugcuuguuaacugagu

SEQ ID NO: 1745868 - RNA, 16 nt, Human
gauguucugggacaca

SEQ ID NO: 1745869 - RNA, 20 nt, Human
gauggugcaaugaccuuuca

SEQ ID NO: 1745870 - RNA, 23 nt, Human
gauggugcaaugaccuuucaaua

SEQ ID NO: 1745871 - RNA, 19 nt, Human
gaugugcuuguuaacugag

SEQ ID NO: 1745872 - RNA, 19 nt, Human
gauguugaaaaaguucugc

SEQ ID NO: 1745873 - RNA, 21 nt, Human
gauguucuuucacccuuuucu

SEQ ID NO: 1745874 - RNA, 14 nt, Human
gauguuuuccauga

SEQ ID NO: 1745875 - RNA, 23 nt, Human
gauguuuuccaugaguccccugu

SEQ ID NO: 1745876 - RNA, 15 nt, Human
gauguuuuccaugag

SEQ ID NO: 1745877 - RNA, 12 nt, Human
gauuaaauucuu

SEQ ID NO: 1745878 - RNA, 19 nt, Human
gauuaaauucuugcaaagu

SEQ ID NO: 1745879 - RNA, 21 nt, Human
gauuaaccacuucagcugacu

SEQ ID NO: 1745880 - RNA, 19 nt, Human
gauuaaccacuucagcuga

SEQ ID NO: 1745881 - RNA, 18 nt, Human
gauuaaccacuucagcug

SEQ ID NO: 1745882 - RNA, 19 nt, Human
gauucaacagguuuuccug

SEQ ID NO: 1745883 - RNA, 21 nt, Human
gaguugaaaaucuuauaauuu

SEQ ID NO: 1745884 - RNA, 14 nt, Human
gaguugaagacaga

SEQ ID NO: 1745885 - RNA, 23 nt, Human
gaguucaucuugaauuguaagga

SEQ ID NO: 1745886 - RNA, 17 nt, Human
gagugugccugaagucc

SEQ ID NO: 1745887 - RNA, 22 nt, Human
gagugaacaaauuuacagagac

SEQ ID NO: 1745888 - RNA, 23 nt, Human
gagugaacaaauuuacagagaca

SEQ ID NO: 1745889 - RNA, 19 nt, Human
gagugaacaaauuuacaga

SEQ ID NO: 1745890 - RNA, 23 nt, Human
gagugggggaucacagccucuga

SEQ ID NO: 1745891 - RNA, 12 nt, Human
gagugggcccaa

SEQ ID NO: 1745892 - RNA, 15 nt, Human
gaguggcuccucccg

SEQ ID NO: 1745893 - RNA, 13 nt, Human
gaguggcuccucc

SEQ ID NO: 1745894 - RNA, 13 nt, Human
gauacaaugcugu

SEQ ID NO: 1745895 - RNA, 18 nt, Human
gauacaaugcugugcccu

SEQ ID NO: 1745896 - RNA, 18 nt, Human
gauagcacagacccugcc

SEQ ID NO: 1745897 - RNA, 17 nt, Human
gauagcacagacccugc

SEQ ID NO: 1745898 - RNA, 23 nt, Human
gauauaugcucugcauguuacau

SEQ ID NO: 1745899 - RNA, 22 nt, Human
gaucaaccccuucgcuccugug

SEQ ID NO: 1745900 - RNA, 21 nt, Human
gaucaaccccuucgcuccugu

SEQ ID NO: 1745901 - RNA, 20 nt, Human
gauagcacagacccugcccu

SEQ ID NO: 1745902 - RNA, 19 nt, Human
gauagcacagacccugccc

SEQ ID NO: 1745903 - RNA, 12 nt, Human
gauagccaaggc

SEQ ID NO: 1745904 - RNA, 14 nt, Human
gauagccaaggcca

SEQ ID NO: 1745905 - RNA, 13 nt, Human
gauagccaaggcc

SEQ ID NO: 1745906 - RNA, 17 nt, Human
gauauaaguguguguuu

SEQ ID NO: 1745907 - RNA, 21 nt, Human
gauauaaguguguguuuuuca

SEQ ID NO: 1745908 - RNA, 14 nt, Human
gaguagcugggacu

SEQ ID NO: 1745909 - RNA, 12 nt, Human
gaguagcuggga

SEQ ID NO: 1745910 - RNA, 12 nt, Human
gaguccccuguu

SEQ ID NO: 1745911 - RNA, 19 nt, Human
gagucccaggcugagccuc

SEQ ID NO: 1745912 - RNA, 18 nt, Human
gagucccaggcugagccu

SEQ ID NO: 1745913 - RNA, 23 nt, Human
gaguccccuguuuguuucugaaa

SEQ ID NO: 1745914 - RNA, 14 nt, Human
gaguccccuguuug

SEQ ID NO: 1745915 - RNA, 17 nt, Human
gagucgaggacagggag

SEQ ID NO: 1745916 - RNA, 21 nt, Human
gagucucacuguugcccaggc

SEQ ID NO: 1745917 - RNA, 20 nt, Human
gagucucacuguugcccagg

SEQ ID NO: 1745918 - RNA, 19 nt, Human
gagucucacuguugcccag

SEQ ID NO: 1745919 - RNA, 23 nt, Human
gagucucacuguugcccaggcug

SEQ ID NO: 1745920 - RNA, 22 nt, Human
gagucucacuguugcccaggcu

SEQ ID NO: 1745921 - RNA, 12 nt, Human
gagucucuucuc

SEQ ID NO: 1745922 - RNA, 23 nt, Human
gagucucgcuauugucaccaggg

SEQ ID NO: 1745923 - RNA, 21 nt, Human
gagucugaaggcuggguucug

SEQ ID NO: 1745924 - RNA, 18 nt, Human
gagucucuucuccacugg

SEQ ID NO: 1745925 - RNA, 17 nt, Human
gagucucuucuccacug

SEQ ID NO: 1745926 - RNA, 16 nt, Human
gagucucuucuccacu

SEQ ID NO: 1745927 - RNA, 15 nt, Human
gagucucuucuccac

SEQ ID NO: 1745928 - RNA, 14 nt, Human
gagucucuucucca

SEQ ID NO: 1745929 - RNA, 18 nt, Human
gaggugggauccuccagg

SEQ ID NO: 1745930 - RNA, 22 nt, Human
gaggugggauccuccaggugca

SEQ ID NO: 1745931 - RNA, 21 nt, Human
gaggugggauccuccaggugc

SEQ ID NO: 1745932 - RNA, 15 nt, Human
gaggggggagguggg

SEQ ID NO: 1745933 - RNA, 15 nt, Human
gaggggguggccucc

SEQ ID NO: 1745934 - RNA, 18 nt, Human
gagguccacaacacacag

SEQ ID NO: 1745935 - RNA, 22 nt, Human
gaggggggaggugggauccucc

SEQ ID NO: 1745936 - RNA, 19 nt, Human
gaguacuacaguccuccca

SEQ ID NO: 1745937 - RNA, 18 nt, Human
gaguacuacaguccuccc

SEQ ID NO: 1745938 - RNA, 12 nt, Human
gaguagcuggau

SEQ ID NO: 1745939 - RNA, 17 nt, Human
gaguacguugugcauuu

SEQ ID NO: 1745940 - RNA, 18 nt, Human
gaguacguugugcauuug

SEQ ID NO: 1745941 - RNA, 15 nt, Human
gaguacuacaguccu

SEQ ID NO: 1745942 - RNA, 20 nt, Human
gaguacguugugcauuuggu

SEQ ID NO: 1745943 - RNA, 14 nt, Human
gagguucccuuuga

SEQ ID NO: 1745944 - RNA, 19 nt, Human
gagguucaaagauauuuug

SEQ ID NO: 1745945 - RNA, 19 nt, Human
gagguuuuaaaaaaauccc

SEQ ID NO: 1745946 - RNA, 16 nt, Human
gaguacguugugcauu

SEQ ID NO: 1745947 - RNA, 18 nt, Human
gagcagccacauuccuga

SEQ ID NO: 1745948 - RNA, 13 nt, Human
gagccacugcacc

SEQ ID NO: 1745949 - RNA, 20 nt, Human
gagccaccgugccuggccac

SEQ ID NO: 1745950 - RNA, 14 nt, Human
gagccaccgugccu

SEQ ID NO: 1745951 - RNA, 18 nt, Human
gagccaccgcgcccagcc

SEQ ID NO: 1745952 - RNA, 12 nt, Human
gagcccaggccu

SEQ ID NO: 1745953 - RNA, 16 nt, Human
gagcccacgcccccac

SEQ ID NO: 1745954 - RNA, 15 nt, Human
gagcccacgccccca

SEQ ID NO: 1745955 - RNA, 12 nt, Human
gagcccacgccc

SEQ ID NO: 1745956 - RNA, 14 nt, Human
gagcccaggccucc

SEQ ID NO: 1745957 - RNA, 13 nt, Human
gagcccaggccuc

SEQ ID NO: 1745958 - RNA, 13 nt, Human
gagccagauuuca

SEQ ID NO: 1745959 - RNA, 22 nt, Human
gagccacugcaccgggccacag

SEQ ID NO: 1745960 - RNA, 11 nt, Human
gagcccacgcc

SEQ ID NO: 1745961 - RNA, 19 nt, Human
gagcaaaaucgaugcagug

SEQ ID NO: 1745962 - RNA, 23 nt, Human
gagcaagacgcugugcugcccug

SEQ ID NO: 1745963 - RNA, 22 nt, Human
gagcaagacgcugugcugcccu

SEQ ID NO: 1745964 - RNA, 18 nt, Human
gagcaagacgcugugcug

SEQ ID NO: 1745965 - RNA, 21 nt, Human
gagcaagacgcugugcugccc

SEQ ID NO: 1745966 - RNA, 17 nt, Human
gagcaccuuagacaguc

SEQ ID NO: 1745967 - RNA, 19 nt, Human
gagcaccuuagacaguccc

SEQ ID NO: 1745968 - RNA, 20 nt, Human
gagaucaaccccuucgcucc

SEQ ID NO: 1745969 - RNA, 16 nt, Human
gagaucagccugggca

SEQ ID NO: 1745970 - RNA, 14 nt, Human
gagaucagccuggg

SEQ ID NO: 1745971 - RNA, 13 nt, Human
gagaucagccugg

SEQ ID NO: 1745972 - RNA, 14 nt, Human
gagcuacaaaugca

SEQ ID NO: 1745973 - RNA, 23 nt, Human
gagcuacacaggggaaaagagga

SEQ ID NO: 1745974 - RNA, 16 nt, Human
gagcugccaccugccu

SEQ ID NO: 1745975 - RNA, 15 nt, Human
gagcugccaccugcc

SEQ ID NO: 1745976 - RNA, 13 nt, Human
gagcugccaccug

SEQ ID NO: 1745977 - RNA, 16 nt, Human
gagcucugcagagcag

SEQ ID NO: 1745978 - RNA, 15 nt, Human
gagcuuaacagugug

SEQ ID NO: 1745979 - RNA, 18 nt, Human
gagcuucuguugcugccu

SEQ ID NO: 1745980 - RNA, 14 nt, Human
gagcuucuggcacu

SEQ ID NO: 1745981 - RNA, 12 nt, Human
gagcuacaaaug

SEQ ID NO: 1745982 - RNA, 13 nt, Human
gagcuacaaaugc

SEQ ID NO: 1745983 - RNA, 21 nt, Human
gagccugggaggucaaggcug

SEQ ID NO: 1745984 - RNA, 13 nt, Human
gagccugggaggu

SEQ ID NO: 1745985 - RNA, 10 nt, Human
gagccuggca

SEQ ID NO: 1745986 - RNA, 15 nt, Human
gagccuggcaagaau

SEQ ID NO: 1745987 - RNA, 22 nt, Human
gagccuccugcccuuaccugcc

SEQ ID NO: 1745988 - RNA, 20 nt, Human
gagccuccugcccuuaccug

SEQ ID NO: 1745989 - RNA, 17 nt, Human
gagcccugguggcagug

SEQ ID NO: 1745990 - RNA, 19 nt, Human
gagccucagcauccuggca

SEQ ID NO: 1745991 - RNA, 16 nt, Human
gagcccugguggcagu

SEQ ID NO: 1745992 - RNA, 15 nt, Human
gagcccugguggcag

SEQ ID NO: 1745993 - RNA, 21 nt, Human
gagccucagcauccuggcacc

SEQ ID NO: 1745994 - RNA, 20 nt, Human
gagccucagcauccuggcac

SEQ ID NO: 1745995 - RNA, 14 nt, Human
gagccuccugcccu

SEQ ID NO: 1745996 - RNA, 18 nt, Human
gagcccugguggcagugg

SEQ ID NO: 1745997 - RNA, 18 nt, Human
gagccucagucucccucc

SEQ ID NO: 1745998 - RNA, 15 nt, Human
gaggaauccagaccc

SEQ ID NO: 1745999 - RNA, 18 nt, Human
gaggacaagagaaaaaag

SEQ ID NO: 1746000 - RNA, 13 nt, Human
gaggacacagaga

SEQ ID NO: 1746001 - RNA, 14 nt, Human
gaggaauccagacc

SEQ ID NO: 1746002 - RNA, 22 nt, Human
gaggaaggaaacccagcucugg

SEQ ID NO: 1746003 - RNA, 21 nt, Human
gagcuucuguugcugccucau

SEQ ID NO: 1746004 - RNA, 23 nt, Human
gaggacagggaggugaccccagg

SEQ ID NO: 1746005 - RNA, 22 nt, Human
gaggacagggaggugaccccag

SEQ ID NO: 1746006 - RNA, 13 nt, Human
gaggacagggagg

SEQ ID NO: 1746007 - RNA, 13 nt, Human
gaggccagccuug

SEQ ID NO: 1746008 - RNA, 12 nt, Human
gaggccagccuu

SEQ ID NO: 1746009 - RNA, 22 nt, Human
gaggcagccccauucugccugc

SEQ ID NO: 1746010 - RNA, 18 nt, Human
gaggcagccccauucugc

SEQ ID NO: 1746011 - RNA, 23 nt, Human
gaggcagccccauucugccugcc

SEQ ID NO: 1746012 - RNA, 13 nt, Human
gaggcagccccau

SEQ ID NO: 1746013 - RNA, 23 nt, Human
gaggaguuugggguaugggagag

SEQ ID NO: 1746014 - RNA, 16 nt, Human
gaggauugcuugagcu

SEQ ID NO: 1746015 - RNA, 20 nt, Human
gaggauguucugggacacag

SEQ ID NO: 1746016 - RNA, 17 nt, Human
gaggauguucugggaca

SEQ ID NO: 1746017 - RNA, 12 nt, Human
gaggauguucug

SEQ ID NO: 1746018 - RNA, 13 nt, Human
gaggcccggccuc

SEQ ID NO: 1746019 - RNA, 23 nt, Human
gaggcccuucucuccagccccug

SEQ ID NO: 1746020 - RNA, 14 nt, Human
gaggcccuucucuc

SEQ ID NO: 1746021 - RNA, 24 nt, Human
gaggcccuucucuccagccccugg

SEQ ID NO: 1746022 - RNA, 14 nt, Human
gaggccuucucuga

SEQ ID NO: 1746023 - RNA, 19 nt, Human
gaggcggaucuuuggacag

SEQ ID NO: 1746024 - RNA, 20 nt, Human
gaggcggccccggccggggu

SEQ ID NO: 1746025 - RNA, 15 nt, Human
gaggcugggcucccu

SEQ ID NO: 1746026 - RNA, 16 nt, Human
gaggcugggcucccuu

SEQ ID NO: 1746027 - RNA, 14 nt, Human
gaggcugggcuccc

SEQ ID NO: 1746028 - RNA, 13 nt, Human
gaggcugggcucc

SEQ ID NO: 1746029 - RNA, 16 nt, Human
gagggagugacagagg

SEQ ID NO: 1746030 - RNA, 16 nt, Human
gagggagggcuccaga

SEQ ID NO: 1746031 - RNA, 14 nt, Human
gagggagugacaga

SEQ ID NO: 1746032 - RNA, 13 nt, Human
gagggagugacag

SEQ ID NO: 1746033 - RNA, 14 nt, Human
gagggagguaagga

SEQ ID NO: 1746034 - RNA, 22 nt, Human
gagggcacagaaaauggaagac

SEQ ID NO: 1746035 - RNA, 14 nt, Human
gagggcacagaaaa

SEQ ID NO: 1746036 - RNA, 23 nt, Human
gagggcacagaaaauggaagaca

SEQ ID NO: 1746037 - RNA, 12 nt, Human
gagggcacuggu

SEQ ID NO: 1746038 - RNA, 18 nt, Human
gagggcacugguggcccg

SEQ ID NO: 1746039 - RNA, 16 nt, Human
gagggcacugguggcc

SEQ ID NO: 1746040 - RNA, 22 nt, Human
gaggggccucuuaugggcuggg

SEQ ID NO: 1746041 - RNA, 20 nt, Human
gaggggccuggcagccgugc

SEQ ID NO: 1746042 - RNA, 18 nt, Human
gaggggccuggcagccgu

SEQ ID NO: 1746043 - RNA, 14 nt, Human
gaggggccuggcag

SEQ ID NO: 1746044 - RNA, 13 nt, Human
gaggggccuggca

SEQ ID NO: 1746045 - RNA, 15 nt, Human
gagggagggcuccag

SEQ ID NO: 1746046 - RNA, 15 nt, Human
gagggagggagggcu

SEQ ID NO: 1746047 - RNA, 14 nt, Human
gagggagggagggc

SEQ ID NO: 1746048 - RNA, 14 nt, Human
cucacugcagccuc

SEQ ID NO: 1746049 - RNA, 13 nt, Human
cucacugcagccu

SEQ ID NO: 1746050 - RNA, 12 nt, Human
cucacugcagcc

SEQ ID NO: 1746051 - RNA, 21 nt, Human
cucacucugucgcccagucug

SEQ ID NO: 1746052 - RNA, 13 nt, Human
cucacucugucgc

SEQ ID NO: 1746053 - RNA, 22 nt, Human
cucacucugucgcccagucugg

SEQ ID NO: 1746054 - RNA, 12 nt, Human
cucacucugucg

SEQ ID NO: 1746055 - RNA, 11 nt, Human
cucacucuguc

SEQ ID NO: 1746056 - RNA, 13 nt, Human
cucacuccuugaa

SEQ ID NO: 1746057 - RNA, 19 nt, Human
cucacuccuaccugguaau

SEQ ID NO: 1746058 - RNA, 17 nt, Human
cucacuccuaccuggua

SEQ ID NO: 1746059 - RNA, 16 nt, Human
cucacuccuaccuggu

SEQ ID NO: 1746060 - RNA, 22 nt, Human
cucacuauguugcccaggcagg

SEQ ID NO: 1746061 - RNA, 21 nt, Human
cucacuauguugcccaggcag

SEQ ID NO: 1746062 - RNA, 23 nt, Human
cucacuauguugcccaggcaggu

SEQ ID NO: 1746063 - RNA, 15 nt, Human
cucacuccuaccugg

SEQ ID NO: 1746064 - RNA, 13 nt, Human
cucacuccuaccu

SEQ ID NO: 1746065 - RNA, 15 nt, Human
cucaccccagcccca

SEQ ID NO: 1746066 - RNA, 20 nt, Human
cucacuauguugcccaggca

SEQ ID NO: 1746067 - RNA, 19 nt, Human
cucacuauguugcccaggc

SEQ ID NO: 1746068 - RNA, 15 nt, Human
cucagauuguaauau

SEQ ID NO: 1746069 - RNA, 22 nt, Human
cucagauuguaauauguaaaug

SEQ ID NO: 1746070 - RNA, 15 nt, Human
cucagaucuucugug

SEQ ID NO: 1746071 - RNA, 17 nt, Human
cucagcauccuggcacc

SEQ ID NO: 1746072 - RNA, 16 nt, Human
cucagcauccuggcac

SEQ ID NO: 1746073 - RNA, 20 nt, Human
cucacuguugcccaggcugg

SEQ ID NO: 1746074 - RNA, 22 nt, Human
cucacugccaugccagcuuauc

SEQ ID NO: 1746075 - RNA, 19 nt, Human
cucacugccaugccagcuu

SEQ ID NO: 1746076 - RNA, 22 nt, Human
cucacuguugcccaggcuggcg

SEQ ID NO: 1746077 - RNA, 21 nt, Human
cucacuguugcccaggcuggc

SEQ ID NO: 1746078 - RNA, 14 nt, Human
cucagagagggugg

SEQ ID NO: 1746079 - RNA, 18 nt, Human
cucagagagggugggagu

SEQ ID NO: 1746080 - RNA, 17 nt, Human
cucaaccuccugggcua

SEQ ID NO: 1746081 - RNA, 15 nt, Human
cucaaccuccugggc

SEQ ID NO: 1746082 - RNA, 13 nt, Human
cucaaccuccugg

SEQ ID NO: 1746083 - RNA, 21 nt, Human
cucaacaccucugcacaagcu

SEQ ID NO: 1746084 - RNA, 18 nt, Human
cuauuguuagucucuuga

SEQ ID NO: 1746085 - RNA, 19 nt, Human
cuauugucaccagggcugg

SEQ ID NO: 1746086 - RNA, 22 nt, Human
cuauuuaugugauccuuuugga

SEQ ID NO: 1746087 - RNA, 23 nt, Human
cucacaguccuuaccagcagagc

SEQ ID NO: 1746088 - RNA, 22 nt, Human
cucacaguccuuaccagcagag

SEQ ID NO: 1746089 - RNA, 19 nt, Human
cucacaguccuuaccagca

SEQ ID NO: 1746090 - RNA, 17 nt, Human
cucacaguccuuaccag

SEQ ID NO: 1746091 - RNA, 19 nt, Human
cucacauuuauucugcuca

SEQ ID NO: 1746092 - RNA, 15 nt, Human
cucacauuuauucug

SEQ ID NO: 1746093 - RNA, 22 nt, Human
cucacauuuauucugcucacau

SEQ ID NO: 1746094 - RNA, 15 nt, Human
cucaccagccccagu

SEQ ID NO: 1746095 - RNA, 14 nt, Human
cucaccagccccag

SEQ ID NO: 1746096 - RNA, 13 nt, Human
cucaccagcccca

SEQ ID NO: 1746097 - RNA, 18 nt, Human
cucaccagccccagugcc

SEQ ID NO: 1746098 - RNA, 17 nt, Human
cucaccagccccagugc

SEQ ID NO: 1746099 - RNA, 15 nt, Human
cucacaguccuuacc

SEQ ID NO: 1746100 - RNA, 24 nt, Human
cucacacaugagcaucaggccagg

SEQ ID NO: 1746101 - RNA, 22 nt, Human
cucacacaugagcaucaggcca

SEQ ID NO: 1746102 - RNA, 21 nt, Human
cucaaguccucuuuucugaga

SEQ ID NO: 1746103 - RNA, 16 nt, Human
cucaagacuuccagag

SEQ ID NO: 1746104 - RNA, 17 nt, Human
cucaagugauucuccug

SEQ ID NO: 1746105 - RNA, 14 nt, Human
cucaagacuuccag

SEQ ID NO: 1746106 - RNA, 24 nt, Human
cuaggugacagagugagacucugu

SEQ ID NO: 1746107 - RNA, 18 nt, Human
cuaggugacagagugaga

SEQ ID NO: 1746108 - RNA, 14 nt, Human
cuaggugacagagu

SEQ ID NO: 1746109 - RNA, 22 nt, Human
cgcccaguuggguggaugccug

SEQ ID NO: 1746110 - RNA, 15 nt, Human
cgccaugcuccuggc

SEQ ID NO: 1746111 - RNA, 20 nt, Human
cgccaucccagccccaauga

SEQ ID NO: 1746112 - RNA, 23 nt, Human
cgcccaguuggguggaugccugg

SEQ ID NO: 1746113 - RNA, 22 nt, Human
cuagguaaauuacaguuccuag

SEQ ID NO: 1746114 - RNA, 17 nt, Human
cuauagccuaggugaca

SEQ ID NO: 1746115 - RNA, 16 nt, Human
cuauaauguaagcucu

SEQ ID NO: 1746116 - RNA, 22 nt, Human
cuauaauuuaccugaagucuuu

SEQ ID NO: 1746117 - RNA, 21 nt, Human
cuauaauguaagcucuacuga

SEQ ID NO: 1746118 - RNA, 13 nt, Human
cuauggccugugg

SEQ ID NO: 1746119 - RNA, 20 nt, Human
cuaugcagagguccacaaca

SEQ ID NO: 1746120 - RNA, 15 nt, Human
cuauuagagaagaga

SEQ ID NO: 1746121 - RNA, 23 nt, Human
cuaugggacucaaugcacugaca

SEQ ID NO: 1746122 - RNA, 22 nt, Human
cuaugggacucaaugcacugac

SEQ ID NO: 1746123 - RNA, 18 nt, Human
cuaugggacucaaugcac

SEQ ID NO: 1746124 - RNA, 18 nt, Human
cuccaaaauaaaacuuuu

SEQ ID NO: 1746125 - RNA, 18 nt, Human
cucauuugucacacacuu

SEQ ID NO: 1746126 - RNA, 15 nt, Human
cuccaaaauaaaacu

SEQ ID NO: 1746127 - RNA, 16 nt, Human
cuccaaaauaaaacuu

SEQ ID NO: 1746128 - RNA, 17 nt, Human
cucauuugucacacacu

SEQ ID NO: 1746129 - RNA, 13 nt, Human
cucauuaaaaaaa

SEQ ID NO: 1746130 - RNA, 15 nt, Human
cuccaauuuuuuaag

SEQ ID NO: 1746131 - RNA, 23 nt, Human
cuccaauuuuuuaagugaaaaua

SEQ ID NO: 1746132 - RNA, 22 nt, Human
cuccaaucccaccaacccucag

SEQ ID NO: 1746133 - RNA, 13 nt, Human
cuccacccugcuc

SEQ ID NO: 1746134 - RNA, 15 nt, Human
cuccacccugcucuc

SEQ ID NO: 1746135 - RNA, 12 nt, Human
cuccauccugag

SEQ ID NO: 1746136 - RNA, 23 nt, Human
cuccaggagcagccacauuccug

SEQ ID NO: 1746137 - RNA, 18 nt, Human
cuccaggagcagccacau

SEQ ID NO: 1746138 - RNA, 17 nt, Human
cuccaggagcagccaca

SEQ ID NO: 1746139 - RNA, 16 nt, Human
cuccaggagcagccac

SEQ ID NO: 1746140 - RNA, 15 nt, Human
cuccaggagcagcca

SEQ ID NO: 1746141 - RNA, 14 nt, Human
cuccaggagcagcc

SEQ ID NO: 1746142 - RNA, 13 nt, Human
cuccaggagcagc

SEQ ID NO: 1746143 - RNA, 11 nt, Human
cuccaggagca

SEQ ID NO: 1746144 - RNA, 12 nt, Human
cuccagccuggg

SEQ ID NO: 1746145 - RNA, 14 nt, Human
cuccagcucaccag

SEQ ID NO: 1746146 - RNA, 17 nt, Human
cuccagccccuggaugc

SEQ ID NO: 1746147 - RNA, 16 nt, Human
cuccagccccuggaug

SEQ ID NO: 1746148 - RNA, 20 nt, Human
cuccagccccuggaugcagc

SEQ ID NO: 1746149 - RNA, 15 nt, Human
cuccagccccuggau

SEQ ID NO: 1746150 - RNA, 13 nt, Human
cuccaccugccag

SEQ ID NO: 1746151 - RNA, 12 nt, Human
cuccaccugcca

SEQ ID NO: 1746152 - RNA, 14 nt, Human
cuccaccugccagg

SEQ ID NO: 1746153 - RNA, 15 nt, Human
cuccaccugccaggg

SEQ ID NO: 1746154 - RNA, 20 nt, Human
cucaggugagaagcagagga

SEQ ID NO: 1746155 - RNA, 19 nt, Human
cucaggugagaagcagagg

SEQ ID NO: 1746156 - RNA, 16 nt, Human
cucaggugagaagcag

SEQ ID NO: 1746157 - RNA, 18 nt, Human
cucagggucccugguggc

SEQ ID NO: 1746158 - RNA, 17 nt, Human
cucagggucccuggugg

SEQ ID NO: 1746159 - RNA, 16 nt, Human
cucagggucccuggug

SEQ ID NO: 1746160 - RNA, 15 nt, Human
cucagggucccuggu

SEQ ID NO: 1746161 - RNA, 15 nt, Human
cucagggccuggucg

SEQ ID NO: 1746162 - RNA, 16 nt, Human
cucagggccuggcuca

SEQ ID NO: 1746163 - RNA, 13 nt, Human
cucagggccuggc

SEQ ID NO: 1746164 - RNA, 15 nt, Human
cucagggccuggcuc

SEQ ID NO: 1746165 - RNA, 14 nt, Human
cucagggccuggcu

SEQ ID NO: 1746166 - RNA, 18 nt, Human
cucagcauccuggcaccc

SEQ ID NO: 1746167 - RNA, 23 nt, Human
cucaggaguuugagaccaaccug

SEQ ID NO: 1746168 - RNA, 18 nt, Human
cucaggaguuugagacca

SEQ ID NO: 1746169 - RNA, 21 nt, Human
cucagcccacauagugauggu

SEQ ID NO: 1746170 - RNA, 19 nt, Human
cucagcccacauagugaug

SEQ ID NO: 1746171 - RNA, 15 nt, Human
cucauccucauaccc

SEQ ID NO: 1746172 - RNA, 23 nt, Human
cucauaguaugguggcuggguug

SEQ ID NO: 1746173 - RNA, 21 nt, Human
cucaucaccaacgucugugcc

SEQ ID NO: 1746174 - RNA, 22 nt, Human
cucaucaccaacgucugugcca

SEQ ID NO: 1746175 - RNA, 21 nt, Human
cucauacccacccccacccaa

SEQ ID NO: 1746176 - RNA, 19 nt, Human
cucauacccacccccaccc

SEQ ID NO: 1746177 - RNA, 18 nt, Human
cucauacccacccccacc

SEQ ID NO: 1746178 - RNA, 16 nt, Human
cucauacccaccccca

SEQ ID NO: 1746179 - RNA, 19 nt, Human
cucaggugauccacccacc

SEQ ID NO: 1746180 - RNA, 18 nt, Human
cucaggugauccacccac

SEQ ID NO: 1746181 - RNA, 20 nt, Human
cucaggugauccacccaccu

SEQ ID NO: 1746182 - RNA, 22 nt, Human
cucaggugauccacccaccuca

SEQ ID NO: 1746183 - RNA, 21 nt, Human
cucauaguaugguggcugggu

SEQ ID NO: 1746184 - RNA, 21 nt, Human
cucauagcccucacccugggg

SEQ ID NO: 1746185 - RNA, 20 nt, Human
cucauagcccucacccuggg

SEQ ID NO: 1746186 - RNA, 17 nt, Human
cucauagcccucacccu

SEQ ID NO: 1746187 - RNA, 13 nt, Human
cucauagcccuca

SEQ ID NO: 1746188 - RNA, 14 nt, Human
cucauacucaccuc

SEQ ID NO: 1746189 - RNA, 22 nt, Human
cucauacucaccucaccccacu

SEQ ID NO: 1746190 - RNA, 14 nt, Human
cuccauccugaggc

SEQ ID NO: 1746191 - RNA, 13 nt, Human
cuccauccugagg

SEQ ID NO: 1746192 - RNA, 23 nt, Human
cuccccagcaagugagagcuggg

SEQ ID NO: 1746193 - RNA, 22 nt, Human
cuccccagcaagugagagcugg

SEQ ID NO: 1746194 - RNA, 20 nt, Human
cuccccuccuccuggacucc

SEQ ID NO: 1746195 - RNA, 12 nt, Human
cuccccuccucc

SEQ ID NO: 1746196 - RNA, 20 nt, Human
cucccgaguagcugggacua

SEQ ID NO: 1746197 - RNA, 19 nt, Human
cucccgaguagcugggacu

SEQ ID NO: 1746198 - RNA, 21 nt, Human
cucccggugcccaagaauaga

SEQ ID NO: 1746199 - RNA, 15 nt, Human
cucccggugcccaag

SEQ ID NO: 1746200 - RNA, 21 nt, Human
cucccugccccucccuucaac

SEQ ID NO: 1746201 - RNA, 20 nt, Human
cucccugccccucccuucaa

SEQ ID NO: 1746202 - RNA, 18 nt, Human
cucccugccccucccuuc

SEQ ID NO: 1746203 - RNA, 17 nt, Human
cucccugccccucccuu

SEQ ID NO: 1746204 - RNA, 14 nt, Human
cucccugccccucc

SEQ ID NO: 1746205 - RNA, 13 nt, Human
cucccugccccuc

SEQ ID NO: 1746206 - RNA, 23 nt, Human
cucccugccccccagcccuccuu

SEQ ID NO: 1746207 - RNA, 17 nt, Human
cucccugccccccagcc

SEQ ID NO: 1746208 - RNA, 12 nt, Human
cucccuuucaac

SEQ ID NO: 1746209 - RNA, 19 nt, Human
cucccuuggggccuaugca

SEQ ID NO: 1746210 - RNA, 18 nt, Human
cuccucagaucuucugug

SEQ ID NO: 1746211 - RNA, 15 nt, Human
cuccuccagagucag

SEQ ID NO: 1746212 - RNA, 13 nt, Human
cuccuccagaguc

SEQ ID NO: 1746213 - RNA, 15 nt, Human
cuccuccagccgcca

SEQ ID NO: 1746214 - RNA, 22 nt, Human
cuccuccagccgccaugcuccu

SEQ ID NO: 1746215 - RNA, 23 nt, Human
cuccucccaggcgccccuucccc

SEQ ID NO: 1746216 - RNA, 22 nt, Human
cuccucccaggcgccccuuccc

SEQ ID NO: 1746217 - RNA, 17 nt, Human
cuccucccaggcgcccc

SEQ ID NO: 1746218 - RNA, 19 nt, Human
cuccuccuggacuccugca

SEQ ID NO: 1746219 - RNA, 15 nt, Human
cuccuccuggacucc

SEQ ID NO: 1746220 - RNA, 14 nt, Human
cuccuccuggacuc

SEQ ID NO: 1746221 - RNA, 21 nt, Human
cuccugccucgaacuggcugc

SEQ ID NO: 1746222 - RNA, 20 nt, Human
cuccugccucgaacuggcug

SEQ ID NO: 1746223 - RNA, 18 nt, Human
cuccugccucgaacuggc

SEQ ID NO: 1746224 - RNA, 19 nt, Human
cuccugccucagccucccg

SEQ ID NO: 1746225 - RNA, 21 nt, Human
cuccugccucagccuccugag

SEQ ID NO: 1746226 - RNA, 22 nt, Human
cuccugccucgaacuggcugca

SEQ ID NO: 1746227 - RNA, 15 nt, Human
cuccucuccccagca

SEQ ID NO: 1746228 - RNA, 13 nt, Human
cuccucuccccag

SEQ ID NO: 1746229 - RNA, 11 nt, Human
cuccugccuca

SEQ ID NO: 1746230 - RNA, 12 nt, Human
cuccugccucag

SEQ ID NO: 1746231 - RNA, 17 nt, Human
cuccugccucagccucc

SEQ ID NO: 1746232 - RNA, 14 nt, Human
cuccuggaaauauu

SEQ ID NO: 1746233 - RNA, 24 nt, Human
cuccugugugugcgccuacaggag

SEQ ID NO: 1746234 - RNA, 23 nt, Human
cuccugugugugcgccuacagga

SEQ ID NO: 1746235 - RNA, 21 nt, Human
cuccugugugugcgccuacag

SEQ ID NO: 1746236 - RNA, 11 nt, Human
cuccuggacuc

SEQ ID NO: 1746237 - RNA, 22 nt, Human
cuccuuaucaaaggacaccauu

SEQ ID NO: 1746238 - RNA, 17 nt, Human
cuccuuaucaaaggaca

SEQ ID NO: 1746239 - RNA, 12 nt, Human
cuccuggacucc

SEQ ID NO: 1746240 - RNA, 13 nt, Human
cuccuuagaagug

SEQ ID NO: 1746241 - RNA, 17 nt, Human
cuccuuagaaguggaag

SEQ ID NO: 1746242 - RNA, 20 nt, Human
cuccuuagaaguggaaguag

SEQ ID NO: 1746243 - RNA, 23 nt, Human
cuccuuggugucgggcaugacac

SEQ ID NO: 1746244 - RNA, 19 nt, Human
cucgagcaugccuggaugg

SEQ ID NO: 1746245 - RNA, 16 nt, Human
cucgagcaugccugga

SEQ ID NO: 1746246 - RNA, 15 nt, Human
cucgagcaugccugg

SEQ ID NO: 1746247 - RNA, 13 nt, Human
cucgagcaugccu

SEQ ID NO: 1746248 - RNA, 22 nt, Human
cucgagcaugccuggauggggc

SEQ ID NO: 1746249 - RNA, 23 nt, Human
cucgcucugucgcccaggcugga

SEQ ID NO: 1746250 - RNA, 15 nt, Human
cucgccuucaucucc

SEQ ID NO: 1746251 - RNA, 14 nt, Human
cugagccagauuuc

SEQ ID NO: 1746252 - RNA, 13 nt, Human
cugagccagauuu

SEQ ID NO: 1746253 - RNA, 15 nt, Human
cugagccagauuuca

SEQ ID NO: 1746254 - RNA, 22 nt, Human
cugagacagcccgggcucugcc

SEQ ID NO: 1746255 - RNA, 21 nt, Human
cugagacagcccgggcucugc

SEQ ID NO: 1746256 - RNA, 19 nt, Human
cugagacagcccgggcucu

SEQ ID NO: 1746257 - RNA, 20 nt, Human
cugagacagcccgggcucug

SEQ ID NO: 1746258 - RNA, 23 nt, Human
cugagauuauaggcaccuaccac

SEQ ID NO: 1746259 - RNA, 21 nt, Human
cugagcaaauguggcuccugg

SEQ ID NO: 1746260 - RNA, 20 nt, Human
cugagcaaauguggcuccug

SEQ ID NO: 1746261 - RNA, 17 nt, Human
cugagcaaauguggcuc

SEQ ID NO: 1746262 - RNA, 15 nt, Human
cugagcaaauguggc

SEQ ID NO: 1746263 - RNA, 17 nt, Human
cugacuguacuccuccc

SEQ ID NO: 1746264 - RNA, 18 nt, Human
cugacagacacaggcccg

SEQ ID NO: 1746265 - RNA, 17 nt, Human
cugacagacacaggccc

SEQ ID NO: 1746266 - RNA, 17 nt, Human
cugaccagccuccaugc

SEQ ID NO: 1746267 - RNA, 16 nt, Human
cugacagacacaggcc

SEQ ID NO: 1746268 - RNA, 14 nt, Human
cugaauuucuuuug

SEQ ID NO: 1746269 - RNA, 23 nt, Human
cugaccagccuccaugcugccuc

SEQ ID NO: 1746270 - RNA, 21 nt, Human
cugaccagccuccaugcugcc

SEQ ID NO: 1746271 - RNA, 20 nt, Human
cugaaugguuuucaaaauaa

SEQ ID NO: 1746272 - RNA, 19 nt, Human
cugaaugguuuucaaaaua

SEQ ID NO: 1746273 - RNA, 12 nt, Human
cugaauuucuuu

SEQ ID NO: 1746274 - RNA, 12 nt, Human
cugaauuauuuu

SEQ ID NO: 1746275 - RNA, 17 nt, Human
cugaagucacacaguga

SEQ ID NO: 1746276 - RNA, 19 nt, Human
cugaagucacacagugagu

SEQ ID NO: 1746277 - RNA, 18 nt, Human
cugaagucacacagugag

SEQ ID NO: 1746278 - RNA, 21 nt, Human
cugaagucacacagugagucg

SEQ ID NO: 1746279 - RNA, 15 nt, Human
cugaagucacugcac

SEQ ID NO: 1746280 - RNA, 14 nt, Human
cugaagucacugca

SEQ ID NO: 1746281 - RNA, 13 nt, Human
cugaagucacugc

SEQ ID NO: 1746282 - RNA, 20 nt, Human
cugaagucuuuguacagaca

SEQ ID NO: 1746283 - RNA, 17 nt, Human
cugaagucuuuguacag

SEQ ID NO: 1746284 - RNA, 22 nt, Human
cugaagucccagauacuugggg

SEQ ID NO: 1746285 - RNA, 17 nt, Human
cugaaguucagcugcau

SEQ ID NO: 1746286 - RNA, 20 nt, Human
cucuuuguucuaaagaugga

SEQ ID NO: 1746287 - RNA, 23 nt, Human
cugaaagggacgcuacccgggaa

SEQ ID NO: 1746288 - RNA, 14 nt, Human
cucuuuucaaaaca

SEQ ID NO: 1746289 - RNA, 23 nt, Human
cucuuuggucuacacugugcuga

SEQ ID NO: 1746290 - RNA, 22 nt, Human
cucuuuggucuacacugugcug

SEQ ID NO: 1746291 - RNA, 16 nt, Human
cucuucuccaggcugu

SEQ ID NO: 1746292 - RNA, 15 nt, Human
cugaacauuccagag

SEQ ID NO: 1746293 - RNA, 16 nt, Human
cucugacaacagacuu

SEQ ID NO: 1746294 - RNA, 22 nt, Human
cucugaaggacauugcggacag

SEQ ID NO: 1746295 - RNA, 23 nt, Human
cucugacagaagaaccccagggu

SEQ ID NO: 1746296 - RNA, 19 nt, Human
cucugacacacagcucugu

SEQ ID NO: 1746297 - RNA, 18 nt, Human
cucugacacacagcucug

SEQ ID NO: 1746298 - RNA, 17 nt, Human
cucugacacacagcucu

SEQ ID NO: 1746299 - RNA, 16 nt, Human
cucugacacacagcuc

SEQ ID NO: 1746300 - RNA, 15 nt, Human
cucugacacacagcu

SEQ ID NO: 1746301 - RNA, 14 nt, Human
cucugacacacagc

SEQ ID NO: 1746302 - RNA, 22 nt, Human
cucugacaacagacuucugaaa

SEQ ID NO: 1746303 - RNA, 21 nt, Human
cucugacaacagacuucugaa

SEQ ID NO: 1746304 - RNA, 21 nt, Human
cucugagacucgcgacaaugc

SEQ ID NO: 1746305 - RNA, 14 nt, Human
cucugaggacacua

SEQ ID NO: 1746306 - RNA, 12 nt, Human
cucugaggacac

SEQ ID NO: 1746307 - RNA, 16 nt, Human
cucugaggacacuaac

SEQ ID NO: 1746308 - RNA, 23 nt, Human
cucugagacucgcgacaaugcaa

SEQ ID NO: 1746309 - RNA, 12 nt, Human
cucugaggacaa

SEQ ID NO: 1746310 - RNA, 17 nt, Human
cucugccucccaucacc

SEQ ID NO: 1746311 - RNA, 16 nt, Human
cucugccucccaucac

SEQ ID NO: 1746312 - RNA, 14 nt, Human
cucugccucccauc

SEQ ID NO: 1746313 - RNA, 13 nt, Human
cucugccucccau

SEQ ID NO: 1746314 - RNA, 20 nt, Human
cucugcccuaaugcgcaggc

SEQ ID NO: 1746315 - RNA, 22 nt, Human
cucugcccuaaugcgcaggcug

SEQ ID NO: 1746316 - RNA, 17 nt, Human
cucugcccacucccugc

SEQ ID NO: 1746317 - RNA, 16 nt, Human
cucugcccacucccug

SEQ ID NO: 1746318 - RNA, 15 nt, Human
cucugcccacucccu

SEQ ID NO: 1746319 - RNA, 13 nt, Human
cucugcccacucc

SEQ ID NO: 1746320 - RNA, 20 nt, Human
cucugcccacucccugcaac

SEQ ID NO: 1746321 - RNA, 18 nt, Human
cucugcccacucccugca

SEQ ID NO: 1746322 - RNA, 18 nt, Human
cucugcaggucccuaaua

SEQ ID NO: 1746323 - RNA, 22 nt, Human
cucugcaggucccuaauaaagc

SEQ ID NO: 1746324 - RNA, 21 nt, Human
cucugcaggucccuaauaaag

SEQ ID NO: 1746325 - RNA, 15 nt, Human
cucugcacaagcugc

SEQ ID NO: 1746326 - RNA, 14 nt, Human
cucugcacaagcug

SEQ ID NO: 1746327 - RNA, 20 nt, Human
cucugcaggucccuaauaaa

SEQ ID NO: 1746328 - RNA, 19 nt, Human
cucugcaggucccuaauaa

SEQ ID NO: 1746329 - RNA, 13 nt, Human
cucugcacaagcu

SEQ ID NO: 1746330 - RNA, 20 nt, Human
cucuguugcccaggcuggag

SEQ ID NO: 1746331 - RNA, 22 nt, Human
cucuguugcccaggcuggagug

SEQ ID NO: 1746332 - RNA, 23 nt, Human
cucugugucagguggggcagcuu

SEQ ID NO: 1746333 - RNA, 22 nt, Human
cucugugucagguggggcagcu

SEQ ID NO: 1746334 - RNA, 21 nt, Human
cucugugucagguggggcagc

SEQ ID NO: 1746335 - RNA, 20 nt, Human
cucugugucagguggggcag

SEQ ID NO: 1746336 - RNA, 13 nt, Human
cucuucuccaggc

SEQ ID NO: 1746337 - RNA, 15 nt, Human
cucuucuccaggcug

SEQ ID NO: 1746338 - RNA, 13 nt, Human
cucuucuccacug

SEQ ID NO: 1746339 - RNA, 12 nt, Human
cucuucuccacu

SEQ ID NO: 1746340 - RNA, 21 nt, Human
cucuggccuucggccuccauc

SEQ ID NO: 1746341 - RNA, 22 nt, Human
cucuggccuucggccuccaucc

SEQ ID NO: 1746342 - RNA, 23 nt, Human
cucuggcagcucagagagggugg

SEQ ID NO: 1746343 - RNA, 20 nt, Human
cucugccucugacacacagc

SEQ ID NO: 1746344 - RNA, 19 nt, Human
cucugccucugacacacag

SEQ ID NO: 1746345 - RNA, 21 nt, Human
cucugccucccaucacccgcu

SEQ ID NO: 1746346 - RNA, 10 nt, Human
cucugccuga

SEQ ID NO: 1746347 - RNA, 20 nt, Human
cucuggauuauauuaugaag

SEQ ID NO: 1746348 - RNA, 19 nt, Human
cucuggauuauauuaugaa

SEQ ID NO: 1746349 - RNA, 22 nt, Human
cucuguccugggagugagcugg

SEQ ID NO: 1746350 - RNA, 15 nt, Human
cucuguccugggagu

SEQ ID NO: 1746351 - RNA, 14 nt, Human
cucuguccugggag

SEQ ID NO: 1746352 - RNA, 13 nt, Human
cucugucgcccag

SEQ ID NO: 1746353 - RNA, 15 nt, Human
cucugucgcccaggc

SEQ ID NO: 1746354 - RNA, 17 nt, Human
cucugucgcccagucug

SEQ ID NO: 1746355 - RNA, 22 nt, Human
cucugucgcccaggcuggagug

SEQ ID NO: 1746356 - RNA, 18 nt, Human
cucugucgcccaggcugg

SEQ ID NO: 1746357 - RNA, 19 nt, Human
cucugucgcccagucugga

SEQ ID NO: 1746358 - RNA, 18 nt, Human
cucugucgcccagucugg

SEQ ID NO: 1746359 - RNA, 18 nt, Human
cugcgguccacccaggag

SEQ ID NO: 1746360 - RNA, 20 nt, Human
cugcgguccacccaggagcc

SEQ ID NO: 1746361 - RNA, 19 nt, Human
cugcgguccacccaggagc

SEQ ID NO: 1746362 - RNA, 22 nt, Human
cugccugcccaggccccugcca

SEQ ID NO: 1746363 - RNA, 21 nt, Human
cugccugcccaggccccugcc

SEQ ID NO: 1746364 - RNA, 21 nt, Human
cugccucugacacacagcucu

SEQ ID NO: 1746365 - RNA, 18 nt, Human
cugccucugacacacagc

SEQ ID NO: 1746366 - RNA, 17 nt, Human
cugccucugacacacag

SEQ ID NO: 1746367 - RNA, 19 nt, Human
cugccucucugcagguccc

SEQ ID NO: 1746368 - RNA, 22 nt, Human
cugccgcagcccugcagagggc

SEQ ID NO: 1746369 - RNA, 21 nt, Human
cugccgcagcccugcagaggg

SEQ ID NO: 1746370 - RNA, 20 nt, Human
cugccgcagcccugcagagg

SEQ ID NO: 1746371 - RNA, 19 nt, Human
cugccgcagcccugcagag

SEQ ID NO: 1746372 - RNA, 14 nt, Human
cugccgcagcccug

SEQ ID NO: 1746373 - RNA, 23 nt, Human
cugccgcagcccugcagagggca

SEQ ID NO: 1746374 - RNA, 13 nt, Human
cugccgcagcccu

SEQ ID NO: 1746375 - RNA, 12 nt, Human
cugccgcagccc

SEQ ID NO: 1746376 - RNA, 20 nt, Human
cugccccuccucucugcccu

SEQ ID NO: 1746377 - RNA, 21 nt, Human
cugccccuccucucugcccua

SEQ ID NO: 1746378 - RNA, 19 nt, Human
cugccucagccucccaaag

SEQ ID NO: 1746379 - RNA, 17 nt, Human
cugccucagccucccga

SEQ ID NO: 1746380 - RNA, 15 nt, Human
cugccucagccuccc

SEQ ID NO: 1746381 - RNA, 22 nt, Human
cugccuccagaauggucuuucu

SEQ ID NO: 1746382 - RNA, 14 nt, Human
cugccuccagaaug

SEQ ID NO: 1746383 - RNA, 18 nt, Human
cugccucucugcaggucc

SEQ ID NO: 1746384 - RNA, 17 nt, Human
cugccucucugcagguc

SEQ ID NO: 1746385 - RNA, 16 nt, Human
cugccucucugcaggu

SEQ ID NO: 1746386 - RNA, 15 nt, Human
cugccucucugcagg

SEQ ID NO: 1746387 - RNA, 19 nt, Human
cugcaguugccagucaccc

SEQ ID NO: 1746388 - RNA, 23 nt, Human
cugcacuugcagacucuacagag

SEQ ID NO: 1746389 - RNA, 22 nt, Human
cugcaguugccagucaccccgg

SEQ ID NO: 1746390 - RNA, 21 nt, Human
cugcaguugccagucaccccg

SEQ ID NO: 1746391 - RNA, 22 nt, Human
cugcaucguuucaucuuccaac

SEQ ID NO: 1746392 - RNA, 16 nt, Human
cugcaucguuucaucu

SEQ ID NO: 1746393 - RNA, 20 nt, Human
cugcauccuccgccucccgg

SEQ ID NO: 1746394 - RNA, 19 nt, Human
cugcauccuccgccucccg

SEQ ID NO: 1746395 - RNA, 22 nt, Human
cugcaugcgggcuuccuccugg

SEQ ID NO: 1746396 - RNA, 18 nt, Human
cugcaugcgggcuuccuc

SEQ ID NO: 1746397 - RNA, 19 nt, Human
cugccaaugggagcucaug

SEQ ID NO: 1746398 - RNA, 18 nt, Human
cugccaaugggagcucau

SEQ ID NO: 1746399 - RNA, 16 nt, Human
cugcccacucccugca

SEQ ID NO: 1746400 - RNA, 15 nt, Human
cugcccacucccugc

SEQ ID NO: 1746401 - RNA, 14 nt, Human
cugcccacucccug

SEQ ID NO: 1746402 - RNA, 22 nt, Human
cugcccaccuggccucugcacu

SEQ ID NO: 1746403 - RNA, 20 nt, Human
cugcccaccuggccucugca

SEQ ID NO: 1746404 - RNA, 19 nt, Human
cugcccaccuggccucugc

SEQ ID NO: 1746405 - RNA, 18 nt, Human
cugcccaccuggccucug

SEQ ID NO: 1746406 - RNA, 17 nt, Human
cugcccaccuggccucu

SEQ ID NO: 1746407 - RNA, 18 nt, Human
cugcccacucccugcaac

SEQ ID NO: 1746408 - RNA, 17 nt, Human
cugcccagccuccaagc

SEQ ID NO: 1746409 - RNA, 15 nt, Human
cugcccaccuggccu

SEQ ID NO: 1746410 - RNA, 14 nt, Human
cugcccaccuggcc

SEQ ID NO: 1746411 - RNA, 13 nt, Human
cugcccaccuggc

SEQ ID NO: 1746412 - RNA, 15 nt, Human
cugccaugccagcuu

SEQ ID NO: 1746413 - RNA, 14 nt, Human
cugccaugccagcu

SEQ ID NO: 1746414 - RNA, 13 nt, Human
cugccaggcaugg

SEQ ID NO: 1746415 - RNA, 11 nt, Human
cugccaggcau

SEQ ID NO: 1746416 - RNA, 22 nt, Human
cugcacaagcugcacccucagg

SEQ ID NO: 1746417 - RNA, 13 nt, Human
cugcacacagcac

SEQ ID NO: 1746418 - RNA, 18 nt, Human
cugcaauaaggggagagu

SEQ ID NO: 1746419 - RNA, 17 nt, Human
cugcaaagcccagcuug

SEQ ID NO: 1746420 - RNA, 22 nt, Human
cugcacacgcuccuuccucuga

SEQ ID NO: 1746421 - RNA, 20 nt, Human
cugcacacgcuccuuccucu

SEQ ID NO: 1746422 - RNA, 14 nt, Human
cugcacacagcacg

SEQ ID NO: 1746423 - RNA, 15 nt, Human
cugcacuccccugcu

SEQ ID NO: 1746424 - RNA, 12 nt, Human
cugcaccgggcc

SEQ ID NO: 1746425 - RNA, 23 nt, Human
cugcaccggcuggccuggccccu

SEQ ID NO: 1746426 - RNA, 22 nt, Human
cugcaccggcuggccuggcccc

SEQ ID NO: 1746427 - RNA, 16 nt, Human
cugcacccucaggcag

SEQ ID NO: 1746428 - RNA, 14 nt, Human
cugcacccucaggc

SEQ ID NO: 1746429 - RNA, 13 nt, Human
cugcacccucagg

SEQ ID NO: 1746430 - RNA, 18 nt, Human
cugcacuccccugcuggg

SEQ ID NO: 1746431 - RNA, 17 nt, Human
cugcacuccccugcugg

SEQ ID NO: 1746432 - RNA, 16 nt, Human
cugcacuccccugcug

SEQ ID NO: 1746433 - RNA, 18 nt, Human
cugcacuugcagacucua

SEQ ID NO: 1746434 - RNA, 21 nt, Human
cugauugugucucuugguccu

SEQ ID NO: 1746435 - RNA, 21 nt, Human
cugauggugcaaugaccuuuc

SEQ ID NO: 1746436 - RNA, 20 nt, Human
cugauggugcaaugaccuuu

SEQ ID NO: 1746437 - RNA, 19 nt, Human
cugauggugcaaugaccuu

SEQ ID NO: 1746438 - RNA, 17 nt, Human
cugauggugcaaugacc

SEQ ID NO: 1746439 - RNA, 17 nt, Human
cugauugugucucuugg

SEQ ID NO: 1746440 - RNA, 22 nt, Human
cugauuuuuuuuuccuucagug

SEQ ID NO: 1746441 - RNA, 21 nt, Human
cugauuuuuuuuuccuucagu

SEQ ID NO: 1746442 - RNA, 23 nt, Human
cugauuuuuuuuuccuucagugc

SEQ ID NO: 1746443 - RNA, 15 nt, Human
cugcaaagcccagcu

SEQ ID NO: 1746444 - RNA, 13 nt, Human
cugcaaagcccag

SEQ ID NO: 1746445 - RNA, 20 nt, Human
cugauuuuuuuuuccuucag

SEQ ID NO: 1746446 - RNA, 19 nt, Human
cugauuuuuuuuuccuuca

SEQ ID NO: 1746447 - RNA, 18 nt, Human
cugauuuuuuuuuccuuc

SEQ ID NO: 1746448 - RNA, 16 nt, Human
cugauuuuuuuuuccu

SEQ ID NO: 1746449 - RNA, 19 nt, Human
cugagucugaaggcugggu

SEQ ID NO: 1746450 - RNA, 18 nt, Human
cugagucugaaggcuggg

SEQ ID NO: 1746451 - RNA, 20 nt, Human
cugagucccaggcugagccu

SEQ ID NO: 1746452 - RNA, 16 nt, Human
cugauggugcaaugac

SEQ ID NO: 1746453 - RNA, 15 nt, Human
cugauggugcaauga

SEQ ID NO: 1746454 - RNA, 14 nt, Human
cugauggugcaaug

SEQ ID NO: 1746455 - RNA, 21 nt, Human
cugauccuaguuccaccauca

SEQ ID NO: 1746456 - RNA, 20 nt, Human
cugauccuaguuccaccauc

SEQ ID NO: 1746457 - RNA, 15 nt, Human
cugaucaccugcccu

SEQ ID NO: 1746458 - RNA, 15 nt, Human
cugaggcuccacuug

SEQ ID NO: 1746459 - RNA, 21 nt, Human
cugaggcuccacuuggucugu

SEQ ID NO: 1746460 - RNA, 24 nt, Human
cugaggcccuucucuccagccccu

SEQ ID NO: 1746461 - RNA, 22 nt, Human
cugaggcugggcucccuuccca

SEQ ID NO: 1746462 - RNA, 17 nt, Human
cugaggcugggcucccu

SEQ ID NO: 1746463 - RNA, 16 nt, Human
cugaggcugggcuccc

SEQ ID NO: 1746464 - RNA, 15 nt, Human
cugaggcugggcucc

SEQ ID NO: 1746465 - RNA, 13 nt, Human
cugaggcugggcu

SEQ ID NO: 1746466 - RNA, 21 nt, Human
gaacuuguaaaggaauuuaaa

SEQ ID NO: 1746467 - RNA, 23 nt, Human
gaacuugguucccauuugcuccu

SEQ ID NO: 1746468 - RNA, 16 nt, Human
gaacuuggcgcugccc

SEQ ID NO: 1746469 - RNA, 15 nt, Human
gaacuuggcgcugcc

SEQ ID NO: 1746470 - RNA, 13 nt, Human
gaacuuggcgcug

SEQ ID NO: 1746471 - RNA, 15 nt, Human
gaacucccuuucaac

SEQ ID NO: 1746472 - RNA, 22 nt, Human
gaacuggguacuuguggacaca

SEQ ID NO: 1746473 - RNA, 14 nt, Human
gaacucccuuucaa

SEQ ID NO: 1746474 - RNA, 11 nt, Human
gaaccugaccc

SEQ ID NO: 1746475 - RNA, 12 nt, Human
gaaccugacccc

SEQ ID NO: 1746476 - RNA, 17 nt, Human
gaaccaccacacccagc

SEQ ID NO: 1746477 - RNA, 16 nt, Human
gaaccaccacacccag

SEQ ID NO: 1746478 - RNA, 21 nt, Human
gaaccacaucuugcucugcug

SEQ ID NO: 1746479 - RNA, 19 nt, Human
gaacagacuggaagcacag

SEQ ID NO: 1746480 - RNA, 16 nt, Human
gaacagacuggaagca

SEQ ID NO: 1746481 - RNA, 15 nt, Human
gaacagacuggaagc

SEQ ID NO: 1746482 - RNA, 18 nt, Human
gaaauagacagcaugaga

SEQ ID NO: 1746483 - RNA, 17 nt, Human
gaaauacagacuggaug

SEQ ID NO: 1746484 - RNA, 13 nt, Human
gaaauauaauuga

SEQ ID NO: 1746485 - RNA, 21 nt, Human
gaaauaucugaaaauguaugu

SEQ ID NO: 1746486 - RNA, 20 nt, Human
gaaacaugacucguauaugu

SEQ ID NO: 1746487 - RNA, 23 nt, Human
gaaaugcugguuuuucaguuuuc

SEQ ID NO: 1746488 - RNA, 20 nt, Human
gaaaugggcagagcagagac

SEQ ID NO: 1746489 - RNA, 14 nt, Human
gaaaugggcagagc

SEQ ID NO: 1746490 - RNA, 19 nt, Human
gaaauugcauuuccugaca

SEQ ID NO: 1746491 - RNA, 17 nt, Human
gaaauuuguuauaauga

SEQ ID NO: 1746492 - RNA, 20 nt, Human
gaauaauccuaaacauauga

SEQ ID NO: 1746493 - RNA, 14 nt, Human
gaauaacauguaau

SEQ ID NO: 1746494 - RNA, 15 nt, Human
gaauaaauugcuccu

SEQ ID NO: 1746495 - RNA, 14 nt, Human
gaauacuuuauaaa

SEQ ID NO: 1746496 - RNA, 24 nt, Human
gaauacuuugcagcacagcugaga

SEQ ID NO: 1746497 - RNA, 17 nt, Human
gaauagaagcuaagguu

SEQ ID NO: 1746498 - RNA, 12 nt, Human
gaaguuucugcc

SEQ ID NO: 1746499 - RNA, 12 nt, Human
gaauaaaauuuu

SEQ ID NO: 1746500 - RNA, 14 nt, Human
gaauaaagacaccu

SEQ ID NO: 1746501 - RNA, 16 nt, Human
gaaucucaaauaacua

SEQ ID NO: 1746502 - RNA, 21 nt, Human
gaaugaaagggcccagagagg

SEQ ID NO: 1746503 - RNA, 19 nt, Human
gaaugaaagggcccagaga

SEQ ID NO: 1746504 - RNA, 14 nt, Human
gaaugaaagggccc

SEQ ID NO: 1746505 - RNA, 14 nt, Human
gaauagcugggacu

SEQ ID NO: 1746506 - RNA, 15 nt, Human
gaauagaugcugacu

SEQ ID NO: 1746507 - RNA, 18 nt, Human
gaauagaagcuaagguuu

SEQ ID NO: 1746508 - RNA, 15 nt, Human
gaauagcugggacua

SEQ ID NO: 1746509 - RNA, 18 nt, Human
gaauccagacccggcugc

SEQ ID NO: 1746510 - RNA, 15 nt, Human
gaaggccccgcccag

SEQ ID NO: 1746511 - RNA, 14 nt, Human
gaaggccccgccca

SEQ ID NO: 1746512 - RNA, 16 nt, Human
gaaggccccgcccagg

SEQ ID NO: 1746513 - RNA, 14 nt, Human
gaaggcagggaggg

SEQ ID NO: 1746514 - RNA, 13 nt, Human
gaaggcagggagg

SEQ ID NO: 1746515 - RNA, 21 nt, Human
gaaggauacaaaagcauguga

SEQ ID NO: 1746516 - RNA, 12 nt, Human
gaaggauacaaa

SEQ ID NO: 1746517 - RNA, 19 nt, Human
gaaggauacaaaagcaugu

SEQ ID NO: 1746518 - RNA, 18 nt, Human
gaaggaaacccagcucug

SEQ ID NO: 1746519 - RNA, 23 nt, Human
gaaggacccggaggggccuggca

SEQ ID NO: 1746520 - RNA, 17 nt, Human
gaaggaaacccagcucu

SEQ ID NO: 1746521 - RNA, 14 nt, Human
gaaggaaacccagc

SEQ ID NO: 1746522 - RNA, 14 nt, Human
gaagaagcucucuc

SEQ ID NO: 1746523 - RNA, 21 nt, Human
gaagacucauucuucuguacg

SEQ ID NO: 1746524 - RNA, 19 nt, Human
gaagacucauucuucugua

SEQ ID NO: 1746525 - RNA, 16 nt, Human
gaagccagcaggcucu

SEQ ID NO: 1746526 - RNA, 15 nt, Human
gaagccagcaggcuc

SEQ ID NO: 1746527 - RNA, 22 nt, Human
gaagccacgguguucugugaua

SEQ ID NO: 1746528 - RNA, 23 nt, Human
gaagccagcaggcucucaggcca

SEQ ID NO: 1746529 - RNA, 19 nt, Human
gaagccagcaggcucucag

SEQ ID NO: 1746530 - RNA, 14 nt, Human
gaagcggcuggcag

SEQ ID NO: 1746531 - RNA, 11 nt, Human
gaagccuuugu

SEQ ID NO: 1746532 - RNA, 10 nt, Human
gaagccuuug

SEQ ID NO: 1746533 - RNA, 18 nt, Human
gaagcuuuuaugugaaac

SEQ ID NO: 1746534 - RNA, 22 nt, Human
gaagcccaggaaaggcuccagg

SEQ ID NO: 1746535 - RNA, 21 nt, Human
gaagcccaggaaaggcuccag

SEQ ID NO: 1746536 - RNA, 20 nt, Human
gaagcccaggaaaggcucca

SEQ ID NO: 1746537 - RNA, 23 nt, Human
gaagcccaggaaaggcuccagga

SEQ ID NO: 1746538 - RNA, 19 nt, Human
gaaaaccaagccguggcuu

SEQ ID NO: 1746539 - RNA, 18 nt, Human
gaaaaccaagccguggcu

SEQ ID NO: 1746540 - RNA, 21 nt, Human
gaaaaccaagccguggcuucc

SEQ ID NO: 1746541 - RNA, 16 nt, Human
gaaaacguggcugcuu

SEQ ID NO: 1746542 - RNA, 15 nt, Human
gaaaacguggcugcu

SEQ ID NO: 1746543 - RNA, 18 nt, Human
gaaaacguggcugcuuca

SEQ ID NO: 1746544 - RNA, 19 nt, Human
gaaaacguggcugcuucaa

SEQ ID NO: 1746545 - RNA, 22 nt, Human
gaaaacaauaacgauaaaagac

SEQ ID NO: 1746546 - RNA, 13 nt, Human
gaaaacacauuuu

SEQ ID NO: 1746547 - RNA, 14 nt, Human
gaaaacacauuuuu

SEQ ID NO: 1746548 - RNA, 12 nt, Human
gaaaacaugcua

SEQ ID NO: 1746549 - RNA, 14 nt, Human
gaaaacaugcuaca

SEQ ID NO: 1746550 - RNA, 15 nt, Human
gaaaacaugcuacac

SEQ ID NO: 1746551 - RNA, 15 nt, Human
cuuuuuucacuacau

SEQ ID NO: 1746552 - RNA, 14 nt, Human
cuuuuuucuaaagu

SEQ ID NO: 1746553 - RNA, 21 nt, Human
cuuuugagugccuuacacaau

SEQ ID NO: 1746554 - RNA, 16 nt, Human
cuuuugagcauuuaga

SEQ ID NO: 1746555 - RNA, 16 nt, Human
cuuuuuuggcugcuga

SEQ ID NO: 1746556 - RNA, 23 nt, Human
gaaaaaggaugcacagaguuguu

SEQ ID NO: 1746557 - RNA, 17 nt, Human
gaaaaaggaugcacaga

SEQ ID NO: 1746558 - RNA, 15 nt, Human
cuuuuuuggcugcug

SEQ ID NO: 1746559 - RNA, 14 nt, Human
cuuuuuuggcugcu

SEQ ID NO: 1746560 - RNA, 19 nt, Human
gaaaaucuuauaauuuaaa

SEQ ID NO: 1746561 - RNA, 18 nt, Human
gaaaaucagccugcucca

SEQ ID NO: 1746562 - RNA, 16 nt, Human
gaaaaucagccugcuc

SEQ ID NO: 1746563 - RNA, 14 nt, Human
gaaaaucagccugc

SEQ ID NO: 1746564 - RNA, 19 nt, Human
gaaaauaacgauaaaagac

SEQ ID NO: 1746565 - RNA, 17 nt, Human
gaaaagcugcugacagu

SEQ ID NO: 1746566 - RNA, 13 nt, Human
gaaaagcugcuga

SEQ ID NO: 1746567 - RNA, 20 nt, Human
gaaaaucuuauaauuuaaaa

SEQ ID NO: 1746568 - RNA, 22 nt, Human
gaaacacugggcuucuagaacc

SEQ ID NO: 1746569 - RNA, 18 nt, Human
gaaacagcuaaugggaca

SEQ ID NO: 1746570 - RNA, 20 nt, Human
gaaacagcucgacuuuaaaa

SEQ ID NO: 1746571 - RNA, 15 nt, Human
gaaacagcucgacuu

SEQ ID NO: 1746572 - RNA, 16 nt, Human
gaaacacuuugcauaa

SEQ ID NO: 1746573 - RNA, 23 nt, Human
cuuuucuguccgagcuuugaaaa

SEQ ID NO: 1746574 - RNA, 18 nt, Human
cuuuucuguccgagcuuu

SEQ ID NO: 1746575 - RNA, 23 nt, Human
cuuuucuugcaugaggcuagugu

SEQ ID NO: 1746576 - RNA, 18 nt, Human
cuuuucuugcaugaggcu

SEQ ID NO: 1746577 - RNA, 16 nt, Human
cuuuucuuucagccaa

SEQ ID NO: 1746578 - RNA, 20 nt, Human
cuuuucauaaccuagccuua

SEQ ID NO: 1746579 - RNA, 17 nt, Human
cuuuucacugcuggcug

SEQ ID NO: 1746580 - RNA, 20 nt, Human
cuuuucacugcuggcugccu

SEQ ID NO: 1746581 - RNA, 18 nt, Human
cuuuucacugcuggcugc

SEQ ID NO: 1746582 - RNA, 22 nt, Human
cuuuucauaaccuagccuuaga

SEQ ID NO: 1746583 - RNA, 20 nt, Human
cuuuguuuguugucagcuga

SEQ ID NO: 1746584 - RNA, 18 nt, Human
cuuuguuuguugucagcu

SEQ ID NO: 1746585 - RNA, 20 nt, Human
cuuuuacguccaucucuugu

SEQ ID NO: 1746586 - RNA, 15 nt, Human
cuuuguucuggcucu

SEQ ID NO: 1746587 - RNA, 14 nt, Human
cuuuguucuggcuc

SEQ ID NO: 1746588 - RNA, 18 nt, Human
cuuuguucuaaagaugga

SEQ ID NO: 1746589 - RNA, 17 nt, Human
cuuugugauuuuuguaa

SEQ ID NO: 1746590 - RNA, 18 nt, Human
cuuugugauuuuuguaau

SEQ ID NO: 1746591 - RNA, 19 nt, Human
cuuugugauuuuuguaauu

SEQ ID NO: 1746592 - RNA, 18 nt, Human
cuuuguccccaccgcaga

SEQ ID NO: 1746593 - RNA, 13 nt, Human
cuuugggaggcca

SEQ ID NO: 1746594 - RNA, 22 nt, Human
cuuuguccccaccgcagacagg

SEQ ID NO: 1746595 - RNA, 14 nt, Human
cuuugugauuuuug

SEQ ID NO: 1746596 - RNA, 16 nt, Human
cuuucccaucuuccaa

SEQ ID NO: 1746597 - RNA, 16 nt, Human
cuuuggacccugaggc

SEQ ID NO: 1746598 - RNA, 15 nt, Human
cuuuggacccugagg

SEQ ID NO: 1746599 - RNA, 21 nt, Human
cuuuggacagaagcagcucuu

SEQ ID NO: 1746600 - RNA, 20 nt, Human
cuuuggacagaagcagcucu

SEQ ID NO: 1746601 - RNA, 19 nt, Human
cuuuggacagaagcagcuc

SEQ ID NO: 1746602 - RNA, 18 nt, Human
cuuuggacagaagcagcu

SEQ ID NO: 1746603 - RNA, 18 nt, Human
cuuuggacccugaggccc

SEQ ID NO: 1746604 - RNA, 17 nt, Human
cuuuggacccugaggcc

SEQ ID NO: 1746605 - RNA, 19 nt, Human
cuuuggacccugaggccca

SEQ ID NO: 1746606 - RNA, 19 nt, Human
cuuguaaaggaauuuaaaa

SEQ ID NO: 1746607 - RNA, 22 nt, Human
cuuggggggcugaggugggagg

SEQ ID NO: 1746608 - RNA, 16 nt, Human
cuuggggggcugaggu

SEQ ID NO: 1746609 - RNA, 15 nt, Human
cuuggggggcugagg

SEQ ID NO: 1746610 - RNA, 22 nt, Human
cuuggggaccagagcugccacc

SEQ ID NO: 1746611 - RNA, 16 nt, Human
cuuggggaccagagcu

SEQ ID NO: 1746612 - RNA, 22 nt, Human
cuugggcuucauccuccucaga

SEQ ID NO: 1746613 - RNA, 21 nt, Human
cuuggggaccagagcugccac

SEQ ID NO: 1746614 - RNA, 20 nt, Human
cuuggggaccagagcugcca

SEQ ID NO: 1746615 - RNA, 14 nt, Human
cuugggccacugug

SEQ ID NO: 1746616 - RNA, 13 nt, Human
cuugggcuucauc

SEQ ID NO: 1746617 - RNA, 18 nt, Human
cuugggccacugugaaga

SEQ ID NO: 1746618 - RNA, 17 nt, Human
cuuggcugcagggaguc

SEQ ID NO: 1746619 - RNA, 13 nt, Human
cuugggaauuuua

SEQ ID NO: 1746620 - RNA, 16 nt, Human
cuuggcugcagggagu

SEQ ID NO: 1746621 - RNA, 12 nt, Human
cuuggagggcau

SEQ ID NO: 1746622 - RNA, 23 nt, Human
cuuggagggcaugaagacagaua

SEQ ID NO: 1746623 - RNA, 22 nt, Human
cuuggaggaaggaaacccagcu

SEQ ID NO: 1746624 - RNA, 15 nt, Human
cuugccacugccucu

SEQ ID NO: 1746625 - RNA, 14 nt, Human
cuugccacugccuc

SEQ ID NO: 1746626 - RNA, 21 nt, Human
cuucuccacccugcucuccga

SEQ ID NO: 1746627 - RNA, 18 nt, Human
cuucuccacccugcucuc

SEQ ID NO: 1746628 - RNA, 17 nt, Human
cuucuccacccugcucu

SEQ ID NO: 1746629 - RNA, 14 nt, Human
cuugcucugcugac

SEQ ID NO: 1746630 - RNA, 13 nt, Human
cuuggaggaagga

SEQ ID NO: 1746631 - RNA, 14 nt, Human
cuuggaagcuccgc

SEQ ID NO: 1746632 - RNA, 13 nt, Human
cuuggaagcuccg

SEQ ID NO: 1746633 - RNA, 16 nt, Human
cuuggaaaugggagac

SEQ ID NO: 1746634 - RNA, 20 nt, Human
cuugcuucaaccccaugaga

SEQ ID NO: 1746635 - RNA, 17 nt, Human
cuugcucugcugacaga

SEQ ID NO: 1746636 - RNA, 16 nt, Human
cuugcucugcugacag

SEQ ID NO: 1746637 - RNA, 21 nt, Human
cuuuauuuucuauaauuuaaa

SEQ ID NO: 1746638 - RNA, 13 nt, Human
cuuuaguuuuugu

SEQ ID NO: 1746639 - RNA, 15 nt, Human
cuuuaguuuuuguga

SEQ ID NO: 1746640 - RNA, 20 nt, Human
cuuuauucuggcagaggagg

SEQ ID NO: 1746641 - RNA, 17 nt, Human
cuuuauuaaauguagaa

SEQ ID NO: 1746642 - RNA, 16 nt, Human
cuuucauauuuuaaac

SEQ ID NO: 1746643 - RNA, 19 nt, Human
cuuucauauuuuaaacaga

SEQ ID NO: 1746644 - RNA, 23 nt, Human
cuuucauauuuuaaacagaggau

SEQ ID NO: 1746645 - RNA, 14 nt, Human
cuuucauuugcuuu

SEQ ID NO: 1746646 - RNA, 18 nt, Human
cuuucauuugcuuuggaa

SEQ ID NO: 1746647 - RNA, 22 nt, Human
cuuuccaaaugcccagcuuaaa

SEQ ID NO: 1746648 - RNA, 19 nt, Human
cuuuccaaaugcccagcuu

SEQ ID NO: 1746649 - RNA, 18 nt, Human
cuuuccaaaugcccagcu

SEQ ID NO: 1746650 - RNA, 21 nt, Human
cuuguuuuuuuuuuccacuua

SEQ ID NO: 1746651 - RNA, 20 nt, Human
cuuguuuuuuuuuuccacuu

SEQ ID NO: 1746652 - RNA, 19 nt, Human
cuuguuuuuuuuuuccacu

SEQ ID NO: 1746653 - RNA, 14 nt, Human
cuuguuuucuggga

SEQ ID NO: 1746654 - RNA, 21 nt, Human
cuuguguguuuauugucaaag

SEQ ID NO: 1746655 - RNA, 21 nt, Human
cuuguguuucuuuaguuuuug

SEQ ID NO: 1746656 - RNA, 21 nt, Human
cuuguuggauuuuugucuugu

SEQ ID NO: 1746657 - RNA, 23 nt, Human
cuuguuggauuuuugucuugugu

SEQ ID NO: 1746658 - RNA, 16 nt, Human
cuguuucagaggcuca

SEQ ID NO: 1746659 - RNA, 19 nt, Human
cuguuugcuaagugaggau

SEQ ID NO: 1746660 - RNA, 17 nt, Human
cuguuugcuaagugagg

SEQ ID NO: 1746661 - RNA, 18 nt, Human
cuguuuagauaauacacc

SEQ ID NO: 1746662 - RNA, 15 nt, Human
cuguuucaaacuuua

SEQ ID NO: 1746663 - RNA, 17 nt, Human
cuguuucaaacuuuacu

SEQ ID NO: 1746664 - RNA, 14 nt, Human
cuguuuagauaaua

SEQ ID NO: 1746665 - RNA, 17 nt, Human
cuguuuagauaauacac

SEQ ID NO: 1746666 - RNA, 17 nt, Human
cuguugcccaggcuggc

SEQ ID NO: 1746667 - RNA, 18 nt, Human
cuguugcccaggcuggcg

SEQ ID NO: 1746668 - RNA, 13 nt, Human
cuguuuucucuug

SEQ ID NO: 1746669 - RNA, 17 nt, Human
cuuaaaaaguggaaaaa

SEQ ID NO: 1746670 - RNA, 16 nt, Human
cuuaaaaaguggaaaa

SEQ ID NO: 1746671 - RNA, 22 nt, Human
cuguuuuacaaaaaagaaaaga

SEQ ID NO: 1746672 - RNA, 15 nt, Human
cuguucuuuccaaag

SEQ ID NO: 1746673 - RNA, 16 nt, Human
cuguucuuuccaaagu

SEQ ID NO: 1746674 - RNA, 19 nt, Human
cuguucuuuccaaaguaca

SEQ ID NO: 1746675 - RNA, 21 nt, Human
cuguucuuuccaaaguacacu

SEQ ID NO: 1746676 - RNA, 13 nt, Human
cuguucuuucugg

SEQ ID NO: 1746677 - RNA, 14 nt, Human
cuguucuuucuggc

SEQ ID NO: 1746678 - RNA, 21 nt, Human
cuguucuuucuggcuaugcau

SEQ ID NO: 1746679 - RNA, 16 nt, Human
cuguuaauaguucagg

SEQ ID NO: 1746680 - RNA, 18 nt, Human
cuguucuuaagacgugau

SEQ ID NO: 1746681 - RNA, 16 nt, Human
cuguugcccaggcugg

SEQ ID NO: 1746682 - RNA, 15 nt, Human
cuguugcccaggcug

SEQ ID NO: 1746683 - RNA, 14 nt, Human
cuguugcccaggcu

SEQ ID NO: 1746684 - RNA, 13 nt, Human
cuguugcccaggc

SEQ ID NO: 1746685 - RNA, 12 nt, Human
cuguugcccagg

SEQ ID NO: 1746686 - RNA, 23 nt, Human
cuguucuuucuggcuaugcauuu

SEQ ID NO: 1746687 - RNA, 12 nt, Human
cuuaaaaauggu

SEQ ID NO: 1746688 - RNA, 18 nt, Human
cuuaagaauuuugagcag

SEQ ID NO: 1746689 - RNA, 17 nt, Human
cuuaaccagaucauugu

SEQ ID NO: 1746690 - RNA, 20 nt, Human
cuuaauucuuagcucauucu

SEQ ID NO: 1746691 - RNA, 20 nt, Human
cuuagaagucacacaguauu

SEQ ID NO: 1746692 - RNA, 17 nt, Human
cuuagaagucacacagu

SEQ ID NO: 1746693 - RNA, 16 nt, Human
cuuagaaauugcauuu

SEQ ID NO: 1746694 - RNA, 16 nt, Human
cuuagaaguggaagua

SEQ ID NO: 1746695 - RNA, 20 nt, Human
cuuagaaaaaccaccaccau

SEQ ID NO: 1746696 - RNA, 13 nt, Human
cuuacuguacaug

SEQ ID NO: 1746697 - RNA, 20 nt, Human
cuuaccugccaggaagccag

SEQ ID NO: 1746698 - RNA, 21 nt, Human
cuuagguuggcaaaaaggcag

SEQ ID NO: 1746699 - RNA, 23 nt, Human
cuuagguuggcaaaaaggcagga

SEQ ID NO: 1746700 - RNA, 14 nt, Human
cuuagucacugaga

SEQ ID NO: 1746701 - RNA, 11 nt, Human
cuuagacaguc

SEQ ID NO: 1746702 - RNA, 19 nt, Human
cuuagaauuaguggcacuu

SEQ ID NO: 1746703 - RNA, 18 nt, Human
cuuagaaguuuguuguga

SEQ ID NO: 1746704 - RNA, 15 nt, Human
cuuccacaagagccc

SEQ ID NO: 1746705 - RNA, 14 nt, Human
cuuccacaagagcc

SEQ ID NO: 1746706 - RNA, 13 nt, Human
cuuccacaagagc

SEQ ID NO: 1746707 - RNA, 15 nt, Human
cuucaguaagccgug

SEQ ID NO: 1746708 - RNA, 14 nt, Human
cuucagugccaaaa

SEQ ID NO: 1746709 - RNA, 14 nt, Human
cuucagccucccga

SEQ ID NO: 1746710 - RNA, 15 nt, Human
cuucagccugaaaga

SEQ ID NO: 1746711 - RNA, 20 nt, Human
cuucagccucccgaguagcu

SEQ ID NO: 1746712 - RNA, 16 nt, Human
cuucagccucccgagu

SEQ ID NO: 1746713 - RNA, 19 nt, Human
cuucagcugacuuuucugu

SEQ ID NO: 1746714 - RNA, 15 nt, Human
cuucagcugacuuuu

SEQ ID NO: 1746715 - RNA, 14 nt, Human
cuucaguaagccgu

SEQ ID NO: 1746716 - RNA, 17 nt, Human
cuucaacugaccagccu

SEQ ID NO: 1746717 - RNA, 23 nt, Human
cuucaacugaccagccuccaugc

SEQ ID NO: 1746718 - RNA, 20 nt, Human
cuucaacugaccagccucca

SEQ ID NO: 1746719 - RNA, 20 nt, Human
cuucaaggauccugagccag

SEQ ID NO: 1746720 - RNA, 19 nt, Human
cuucaaggauccugagcca

SEQ ID NO: 1746721 - RNA, 18 nt, Human
cuucaaggauccugagcc

SEQ ID NO: 1746722 - RNA, 17 nt, Human
cuucaaggauccugagc

SEQ ID NO: 1746723 - RNA, 22 nt, Human
cuuagucacugagacagcccgg

SEQ ID NO: 1746724 - RNA, 20 nt, Human
cuuagucacugagacagccc

SEQ ID NO: 1746725 - RNA, 21 nt, Human
cuuagucacugagacagcccg

SEQ ID NO: 1746726 - RNA, 15 nt, Human
cuucaaauauuuccc

SEQ ID NO: 1746727 - RNA, 23 nt, Human
cuucaaggauccugagccagauu

SEQ ID NO: 1746728 - RNA, 22 nt, Human
cuucaaggauccugagccagau

SEQ ID NO: 1746729 - RNA, 21 nt, Human
cuucaaggauccugagccaga

SEQ ID NO: 1746730 - RNA, 14 nt, Human
cuucacauauugau

SEQ ID NO: 1746731 - RNA, 23 nt, Human
cuucacauauugauuuccguuaa

SEQ ID NO: 1746732 - RNA, 21 nt, Human
cuucucacugccaugccagcu

SEQ ID NO: 1746733 - RNA, 16 nt, Human
cuucucacugccaugc

SEQ ID NO: 1746734 - RNA, 20 nt, Human
cuucggccuccauccugagg

SEQ ID NO: 1746735 - RNA, 19 nt, Human
cuucgggaggucgaggcag

SEQ ID NO: 1746736 - RNA, 17 nt, Human
cuucgcuccugugucuu

SEQ ID NO: 1746737 - RNA, 15 nt, Human
cuucgccaccugggu

SEQ ID NO: 1746738 - RNA, 16 nt, Human
cuucgauacaccgggc

SEQ ID NO: 1746739 - RNA, 21 nt, Human
cuucgauacaccgggccugga

SEQ ID NO: 1746740 - RNA, 14 nt, Human
cuucgccaccuggg

SEQ ID NO: 1746741 - RNA, 16 nt, Human
cuuccacaagagccca

SEQ ID NO: 1746742 - RNA, 15 nt, Human
cuucccccuccaauc

SEQ ID NO: 1746743 - RNA, 12 nt, Human
cuucccccucca

SEQ ID NO: 1746744 - RNA, 16 nt, Human
cuuccugugacuucag

SEQ ID NO: 1746745 - RNA, 13 nt, Human
cuuccugugacuu

SEQ ID NO: 1746746 - RNA, 15 nt, Human
cugugaaaggaaaga

SEQ ID NO: 1746747 - RNA, 21 nt, Human
cugucuuuuuucuaaaguaaa

SEQ ID NO: 1746748 - RNA, 18 nt, Human
cugucuguuguauucauu

SEQ ID NO: 1746749 - RNA, 19 nt, Human
cugucuguuguauucauug

SEQ ID NO: 1746750 - RNA, 18 nt, Human
cugucuucaguaagccgu

SEQ ID NO: 1746751 - RNA, 14 nt, Human
cugucuuaauuuuc

SEQ ID NO: 1746752 - RNA, 22 nt, Human
cugucauuugagcagggcucag

SEQ ID NO: 1746753 - RNA, 21 nt, Human
cugucauuugagcagggcuca

SEQ ID NO: 1746754 - RNA, 18 nt, Human
cugucaauuacaggaagu

SEQ ID NO: 1746755 - RNA, 23 nt, Human
cugucauuugagcagggcucagc

SEQ ID NO: 1746756 - RNA, 22 nt, Human
cugugaaaggaaagagggaggu

SEQ ID NO: 1746757 - RNA, 16 nt, Human
cugugaaaggaaagag

SEQ ID NO: 1746758 - RNA, 21 nt, Human
cugugauggggcccugccucc

SEQ ID NO: 1746759 - RNA, 16 nt, Human
cugugauggggcccug

SEQ ID NO: 1746760 - RNA, 23 nt, Human
cugugauggggcccugccuccuu

SEQ ID NO: 1746761 - RNA, 15 nt, Human
cugugauggggcccu

SEQ ID NO: 1746762 - RNA, 15 nt, Human
cugugccaugugcca

SEQ ID NO: 1746763 - RNA, 19 nt, Human
cugugcccuaaaguguauu

SEQ ID NO: 1746764 - RNA, 14 nt, Human
cugugccaugugcc

SEQ ID NO: 1746765 - RNA, 22 nt, Human
cuguggguuucuaaagcugcca

SEQ ID NO: 1746766 - RNA, 21 nt, Human
cuguggguuucuaaagcugcc

SEQ ID NO: 1746767 - RNA, 17 nt, Human
cugugccucugccuguc

SEQ ID NO: 1746768 - RNA, 16 nt, Human
cugugccucugccugu

SEQ ID NO: 1746769 - RNA, 15 nt, Human
cugugccucugccug

SEQ ID NO: 1746770 - RNA, 14 nt, Human
cugugccucugccu

SEQ ID NO: 1746771 - RNA, 13 nt, Human
cugugccucugcc

SEQ ID NO: 1746772 - RNA, 12 nt, Human
cugugccucugc

SEQ ID NO: 1746773 - RNA, 24 nt, Human
cuguggaucaaauccagccugcug

SEQ ID NO: 1746774 - RNA, 14 nt, Human
cuguggaucaaauc

SEQ ID NO: 1746775 - RNA, 18 nt, Human
cugugugugcgccuacag

SEQ ID NO: 1746776 - RNA, 20 nt, Human
cugugucuuuuuucacuaca

SEQ ID NO: 1746777 - RNA, 14 nt, Human
cugugugcucagga

SEQ ID NO: 1746778 - RNA, 21 nt, Human
cugggauuacaagcgugagcc

SEQ ID NO: 1746779 - RNA, 18 nt, Human
cugggauuacaggcguga

SEQ ID NO: 1746780 - RNA, 23 nt, Human
cugggccccugccucucugcagg

SEQ ID NO: 1746781 - RNA, 20 nt, Human
cugggccccugccucucugc

SEQ ID NO: 1746782 - RNA, 23 nt, Human
cuggggguucuuucuuccucugc

SEQ ID NO: 1746783 - RNA, 20 nt, Human
cuggggguucuuucuuccuc

SEQ ID NO: 1746784 - RNA, 13 nt, Human
cugggucgcccug

SEQ ID NO: 1746785 - RNA, 16 nt, Human
cugggucgcccuggac

SEQ ID NO: 1746786 - RNA, 15 nt, Human
cugggucgcccugga

SEQ ID NO: 1746787 - RNA, 18 nt, Human
cugggcuugucuguagau

SEQ ID NO: 1746788 - RNA, 22 nt, Human
cugggcuuggggaccagagcug

SEQ ID NO: 1746789 - RNA, 15 nt, Human
cugggcuucaguggc

SEQ ID NO: 1746790 - RNA, 17 nt, Human
cugggcuucaguggcag

SEQ ID NO: 1746791 - RNA, 14 nt, Human
cugggggcugggca

SEQ ID NO: 1746792 - RNA, 18 nt, Human
cugggggcugggcagagg

SEQ ID NO: 1746793 - RNA, 16 nt, Human
cugggggccucuucug

SEQ ID NO: 1746794 - RNA, 21 nt, Human
cugguuagagguucccuuuga

SEQ ID NO: 1746795 - RNA, 22 nt, Human
cugguuagagguucccuuugac

SEQ ID NO: 1746796 - RNA, 19 nt, Human
cuguaauccuagcacuuug

SEQ ID NO: 1746797 - RNA, 22 nt, Human
cuguacagagcccacgccccca

SEQ ID NO: 1746798 - RNA, 18 nt, Human
cuguacagagcccacgcc

SEQ ID NO: 1746799 - RNA, 15 nt, Human
cuguacagagcccac

SEQ ID NO: 1746800 - RNA, 14 nt, Human
cuguacagagccca

SEQ ID NO: 1746801 - RNA, 14 nt, Human
cuguaauuugugau

SEQ ID NO: 1746802 - RNA, 15 nt, Human
cuguaauuugugaua

SEQ ID NO: 1746803 - RNA, 21 nt, Human
cugguggcagcucaccucucc

SEQ ID NO: 1746804 - RNA, 18 nt, Human
cugguggcagugggagcu

SEQ ID NO: 1746805 - RNA, 14 nt, Human
cugguggcaguggg

SEQ ID NO: 1746806 - RNA, 15 nt, Human
cugguggcagcugcg

SEQ ID NO: 1746807 - RNA, 20 nt, Human
cugguggcagcucaccucuc

SEQ ID NO: 1746808 - RNA, 18 nt, Human
cugguggcagcucaccuc

SEQ ID NO: 1746809 - RNA, 17 nt, Human
cugguggcagcucaccu

SEQ ID NO: 1746810 - RNA, 18 nt, Human
cuguacgucugacaggca

SEQ ID NO: 1746811 - RNA, 16 nt, Human
cuguacgucugacagg

SEQ ID NO: 1746812 - RNA, 15 nt, Human
cuguacgucugacag

SEQ ID NO: 1746813 - RNA, 14 nt, Human
cuguacgucugaca

SEQ ID NO: 1746814 - RNA, 17 nt, Human
cuguacaugaaaacaca

SEQ ID NO: 1746815 - RNA, 20 nt, Human
cuguacaugaaaacacauuu

SEQ ID NO: 1746816 - RNA, 21 nt, Human
cuguacaugaaaacacauuuu

SEQ ID NO: 1746817 - RNA, 20 nt, Human
cuguacgucugacaggcaau

SEQ ID NO: 1746818 - RNA, 19 nt, Human
cuguacgucugacaggcaa

SEQ ID NO: 1746819 - RNA, 14 nt, Human
cuguacuccuccca

SEQ ID NO: 1746820 - RNA, 21 nt, Human
cuguacuccucccaggcgccc

SEQ ID NO: 1746821 - RNA, 19 nt, Human
cuguacuccucccaggcgc

SEQ ID NO: 1746822 - RNA, 16 nt, Human
cuguacuccucccagg

SEQ ID NO: 1746823 - RNA, 15 nt, Human
cuguacuccucccag

SEQ ID NO: 1746824 - RNA, 16 nt, Human
cugucaauuacaggaa

SEQ ID NO: 1746825 - RNA, 15 nt, Human
cugucaauuacagga

SEQ ID NO: 1746826 - RNA, 20 nt, Human
cuguauuuuguuuuugucuu

SEQ ID NO: 1746827 - RNA, 20 nt, Human
cuguaucccaugagccucag

SEQ ID NO: 1746828 - RNA, 22 nt, Human
cuguaucccaugagccucagca

SEQ ID NO: 1746829 - RNA, 21 nt, Human
cuguaucccaugagccucagc

SEQ ID NO: 1746830 - RNA, 19 nt, Human
cuguauuagucacagagau

SEQ ID NO: 1746831 - RNA, 17 nt, Human
cuguauuagucacagag

SEQ ID NO: 1746832 - RNA, 22 nt, Human
ccuauauuguuuucaguguaca

SEQ ID NO: 1746833 - RNA, 18 nt, Human
ccuauauuguuuucagug

SEQ ID NO: 1746834 - RNA, 23 nt, Human
ccuaguuccaccaucaagccacc

SEQ ID NO: 1746835 - RNA, 21 nt, Human
ccuaguuccaccaucaagcca

SEQ ID NO: 1746836 - RNA, 13 nt, Human
ccuaguuccacca

SEQ ID NO: 1746837 - RNA, 15 nt, Human
ccuacuuccugugac

SEQ ID NO: 1746838 - RNA, 21 nt, Human
ccuacuuccccuuccuaauuc

SEQ ID NO: 1746839 - RNA, 13 nt, Human
ccuacuuccugug

SEQ ID NO: 1746840 - RNA, 23 nt, Human
ccuaccgagucucuucuccacug

SEQ ID NO: 1746841 - RNA, 22 nt, Human
ccuaccgagucucuucuccacu

SEQ ID NO: 1746842 - RNA, 18 nt, Human
ccuaaauauauuuuaaga

SEQ ID NO: 1746843 - RNA, 15 nt, Human
ccuaaaauucagugg

SEQ ID NO: 1746844 - RNA, 16 nt, Human
ccuaaauauauuuuaa

SEQ ID NO: 1746845 - RNA, 15 nt, Human
ccuacaagacacagu

SEQ ID NO: 1746846 - RNA, 16 nt, Human
ccgggcguggugguga

SEQ ID NO: 1746847 - RNA, 20 nt, Human
ccgggcgcgguggcucacgc

SEQ ID NO: 1746848 - RNA, 18 nt, Human
ccgggaccccgagccugg

SEQ ID NO: 1746849 - RNA, 13 nt, Human
ccgggcucugccu

SEQ ID NO: 1746850 - RNA, 22 nt, Human
ccgggcucugccucccaucacc

SEQ ID NO: 1746851 - RNA, 19 nt, Human
ccgggcugggagcucugca

SEQ ID NO: 1746852 - RNA, 18 nt, Human
ccgggcugggagcucugc

SEQ ID NO: 1746853 - RNA, 13 nt, Human
ccgggcugggagc

SEQ ID NO: 1746854 - RNA, 12 nt, Human
ccgcuuucuacc

SEQ ID NO: 1746855 - RNA, 22 nt, Human
ccgcucagcccucccugccccu

SEQ ID NO: 1746856 - RNA, 21 nt, Human
ccgcucagcccucccugcccc

SEQ ID NO: 1746857 - RNA, 19 nt, Human
ccgcucagcccucccugcc

SEQ ID NO: 1746858 - RNA, 15 nt, Human
ccgcucagcccuccc

SEQ ID NO: 1746859 - RNA, 18 nt, Human
ccggcuggccuggccccu

SEQ ID NO: 1746860 - RNA, 17 nt, Human
ccggcuggccuggcccc

SEQ ID NO: 1746861 - RNA, 23 nt, Human
ccgcuuucuacccagcgagcccu

SEQ ID NO: 1746862 - RNA, 19 nt, Human
ccgcuuucuacccagcgag

SEQ ID NO: 1746863 - RNA, 20 nt, Human
ccgggaagggggcugggaca

SEQ ID NO: 1746864 - RNA, 17 nt, Human
ccgggaccccgagccug

SEQ ID NO: 1746865 - RNA, 19 nt, Human
ccgcacugggcuuggggac

SEQ ID NO: 1746866 - RNA, 14 nt, Human
ccgcacugggcuug

SEQ ID NO: 1746867 - RNA, 23 nt, Human
ccgcuaagagggagggagggcuc

SEQ ID NO: 1746868 - RNA, 13 nt, Human
ccgcucagcccuc

SEQ ID NO: 1746869 - RNA, 12 nt, Human
ccgcucagcccu

SEQ ID NO: 1746870 - RNA, 11 nt, Human
ccgcucagccc

SEQ ID NO: 1746871 - RNA, 21 nt, Human
ccgcuaagagggagggagggc

SEQ ID NO: 1746872 - RNA, 17 nt, Human
ccgaguagcugggacua

SEQ ID NO: 1746873 - RNA, 17 nt, Human
ccgaggccuucucugaa

SEQ ID NO: 1746874 - RNA, 20 nt, Human
ccgaguagcugggacuacag

SEQ ID NO: 1746875 - RNA, 17 nt, Human
cccugguuuccugcccu

SEQ ID NO: 1746876 - RNA, 16 nt, Human
cccugguuuccugccc

SEQ ID NO: 1746877 - RNA, 20 nt, Human
cccugguggcagcucaccuc

SEQ ID NO: 1746878 - RNA, 14 nt, Human
ccgaggccuucucu

SEQ ID NO: 1746879 - RNA, 19 nt, Human
cccugguuuccugcccugg

SEQ ID NO: 1746880 - RNA, 18 nt, Human
cccugguuuccugcccug

SEQ ID NO: 1746881 - RNA, 21 nt, Human
ccuccaggugcacaagcucca

SEQ ID NO: 1746882 - RNA, 19 nt, Human
ccuccaggugcacaagcuc

SEQ ID NO: 1746883 - RNA, 22 nt, Human
ccuccaggugcacaagcuccaa

SEQ ID NO: 1746884 - RNA, 18 nt, Human
ccuccaucuaaacugccc

SEQ ID NO: 1746885 - RNA, 16 nt, Human
ccucccaaagugcugg

SEQ ID NO: 1746886 - RNA, 15 nt, Human
ccucccaaagugcug

SEQ ID NO: 1746887 - RNA, 15 nt, Human
ccuccaugcugccuc

SEQ ID NO: 1746888 - RNA, 23 nt, Human
ccuccaugugggcuaguugggcu

SEQ ID NO: 1746889 - RNA, 14 nt, Human
ccuccaugcugccu

SEQ ID NO: 1746890 - RNA, 14 nt, Human
ccucaucaccaacg

SEQ ID NO: 1746891 - RNA, 13 nt, Human
ccucaucaccaac

SEQ ID NO: 1746892 - RNA, 22 nt, Human
ccucauaguaugguggcugggu

SEQ ID NO: 1746893 - RNA, 21 nt, Human
ccucauaguaugguggcuggg

SEQ ID NO: 1746894 - RNA, 13 nt, Human
ccucauacccacc

SEQ ID NO: 1746895 - RNA, 18 nt, Human
ccucauagcccucacccu

SEQ ID NO: 1746896 - RNA, 17 nt, Human
ccucauagcccucaccc

SEQ ID NO: 1746897 - RNA, 20 nt, Human
ccucauaguaugguggcugg

SEQ ID NO: 1746898 - RNA, 22 nt, Human
ccucauagcccucacccugggg

SEQ ID NO: 1746899 - RNA, 21 nt, Human
ccucauagcccucacccuggg

SEQ ID NO: 1746900 - RNA, 11 nt, Human
ccucagugcca

SEQ ID NO: 1746901 - RNA, 20 nt, Human
ccucagucuggcccuuccuu

SEQ ID NO: 1746902 - RNA, 19 nt, Human
ccuaugcagagguccacaa

SEQ ID NO: 1746903 - RNA, 19 nt, Human
ccucagucuggcccuuccu

SEQ ID NO: 1746904 - RNA, 20 nt, Human
ccucauccucauacccaccc

SEQ ID NO: 1746905 - RNA, 13 nt, Human
ccucauccucaua

SEQ ID NO: 1746906 - RNA, 21 nt, Human
ccucaucuccccaucauuggu

SEQ ID NO: 1746907 - RNA, 23 nt, Human
ccuccaaucccaccaacccucag

SEQ ID NO: 1746908 - RNA, 10 nt, Human
ccucccuccc

SEQ ID NO: 1746909 - RNA, 21 nt, Human
ccucccugccccucccuucaa

SEQ ID NO: 1746910 - RNA, 18 nt, Human
ccucccugccccucccuu

SEQ ID NO: 1746911 - RNA, 14 nt, Human
ccuccucagaucuu

SEQ ID NO: 1746912 - RNA, 24 nt, Human
ccucccugccccucccuucaacca

SEQ ID NO: 1746913 - RNA, 22 nt, Human
ccucccugccccucccuucaac

SEQ ID NO: 1746914 - RNA, 21 nt, Human
ccucccgaguagcugggacua

SEQ ID NO: 1746915 - RNA, 20 nt, Human
ccucccgaguagcugggacu

SEQ ID NO: 1746916 - RNA, 14 nt, Human
ccuccugggcuaag

SEQ ID NO: 1746917 - RNA, 23 nt, Human
ccuccugccucgaacuggcugca

SEQ ID NO: 1746918 - RNA, 18 nt, Human
ccucgguguggagaagcg

SEQ ID NO: 1746919 - RNA, 14 nt, Human
ccucgguguggaga

SEQ ID NO: 1746920 - RNA, 16 nt, Human
ccucggugccuuccuc

SEQ ID NO: 1746921 - RNA, 16 nt, Human
ccucuaggaggucucu

SEQ ID NO: 1746922 - RNA, 17 nt, Human
ccucccgaauagcuggg

SEQ ID NO: 1746923 - RNA, 22 nt, Human
cccugcuggguguggcgcagca

SEQ ID NO: 1746924 - RNA, 17 nt, Human
cccugcuuugggcugcc

SEQ ID NO: 1746925 - RNA, 19 nt, Human
cccugcuuugggcugcccu

SEQ ID NO: 1746926 - RNA, 18 nt, Human
cccugcuuugggcugccc

SEQ ID NO: 1746927 - RNA, 22 nt, Human
cccugcuuugggcugcccuggu

SEQ ID NO: 1746928 - RNA, 20 nt, Human
cccugcuuugggcugcccug

SEQ ID NO: 1746929 - RNA, 17 nt, Human
cccugcccaccuggccu

SEQ ID NO: 1746930 - RNA, 14 nt, Human
cccugcccaccugg

SEQ ID NO: 1746931 - RNA, 13 nt, Human
cccugcccaccug

SEQ ID NO: 1746932 - RNA, 21 nt, Human
cccugcuggguguggcgcagc

SEQ ID NO: 1746933 - RNA, 16 nt, Human
cccugcuggguguggc

SEQ ID NO: 1746934 - RNA, 18 nt, Human
cccugcccaccuggccuc

SEQ ID NO: 1746935 - RNA, 17 nt, Human
cccugguggcagcucac

SEQ ID NO: 1746936 - RNA, 16 nt, Human
cccugguggcagcuca

SEQ ID NO: 1746937 - RNA, 15 nt, Human
cccugguggcagcuc

SEQ ID NO: 1746938 - RNA, 15 nt, Human
cccugggaggcucug

SEQ ID NO: 1746939 - RNA, 15 nt, Human
cccuggacugugugc

SEQ ID NO: 1746940 - RNA, 21 nt, Human
cccuggacugugugcucagga

SEQ ID NO: 1746941 - RNA, 18 nt, Human
cccuggcuuuucacugcu

SEQ ID NO: 1746942 - RNA, 18 nt, Human
cccugggaggcagugaug

SEQ ID NO: 1746943 - RNA, 22 nt, Human
cccuggcuuuucacugcuggcu

SEQ ID NO: 1746944 - RNA, 19 nt, Human
cccuggcuuuucacugcug

SEQ ID NO: 1746945 - RNA, 22 nt, Human
cccuauccuacuuccccuuccu

SEQ ID NO: 1746946 - RNA, 23 nt, Human
cccugaggcccagagggccugca

SEQ ID NO: 1746947 - RNA, 20 nt, Human
cccugaggcccagagggccu

SEQ ID NO: 1746948 - RNA, 19 nt, Human
cccugaggcccagagggcc

SEQ ID NO: 1746949 - RNA, 18 nt, Human
cccugaggcccagagggc

SEQ ID NO: 1746950 - RNA, 17 nt, Human
cccugaggcccagaggg

SEQ ID NO: 1746951 - RNA, 16 nt, Human
cccugaggcccagagg

SEQ ID NO: 1746952 - RNA, 15 nt, Human
cccugaggcccagag

SEQ ID NO: 1746953 - RNA, 14 nt, Human
cccugaggcccaga

SEQ ID NO: 1746954 - RNA, 16 nt, Human
cccugaaagcccugag

SEQ ID NO: 1746955 - RNA, 13 nt, Human
cccugaggcccag

SEQ ID NO: 1746956 - RNA, 15 nt, Human
cccugaaagcccuga

SEQ ID NO: 1746957 - RNA, 16 nt, Human
cccucuggggcuguuc

SEQ ID NO: 1746958 - RNA, 12 nt, Human
cccugcacuugc

SEQ ID NO: 1746959 - RNA, 19 nt, Human
cccugcacuugcagacucu

SEQ ID NO: 1746960 - RNA, 22 nt, Human
cccugcacuugcagacucuaca

SEQ ID NO: 1746961 - RNA, 15 nt, Human
cccugcaaagcccag

SEQ ID NO: 1746962 - RNA, 23 nt, Human
cccugcacaaagcccuuccaugu

SEQ ID NO: 1746963 - RNA, 20 nt, Human
cccugcaaagcccagcuuga

SEQ ID NO: 1746964 - RNA, 19 nt, Human
cccugcaaagcccagcuug

SEQ ID NO: 1746965 - RNA, 17 nt, Human
cccugcaaagcccagcu

SEQ ID NO: 1746966 - RNA, 16 nt, Human
cccugcaaagcccagc

SEQ ID NO: 1746967 - RNA, 15 nt, Human
cccgugggguuccuc

SEQ ID NO: 1746968 - RNA, 22 nt, Human
cccgucucugguuccuccccuc

SEQ ID NO: 1746969 - RNA, 17 nt, Human
cccgucgacguagaacc

SEQ ID NO: 1746970 - RNA, 18 nt, Human
cccggugcccaagaauag

SEQ ID NO: 1746971 - RNA, 16 nt, Human
cccgggcucugccucc

SEQ ID NO: 1746972 - RNA, 20 nt, Human
cccuacaguugaaaaacagc

SEQ ID NO: 1746973 - RNA, 23 nt, Human
cccuaaugcgcaggcuggcccug

SEQ ID NO: 1746974 - RNA, 17 nt, Human
cccuaaugcgcaggcug

SEQ ID NO: 1746975 - RNA, 22 nt, Human
cccuaaugcgcaggcuggcccu

SEQ ID NO: 1746976 - RNA, 21 nt, Human
cccuaaugcgcaggcuggccc

SEQ ID NO: 1746977 - RNA, 18 nt, Human
cccuaccgagucucuucu

SEQ ID NO: 1746978 - RNA, 21 nt, Human
cccuaccgagucucuucucca

SEQ ID NO: 1746979 - RNA, 22 nt, Human
cccgaguagcugggacuacagg

SEQ ID NO: 1746980 - RNA, 20 nt, Human
cccgcugucagccauuccug

SEQ ID NO: 1746981 - RNA, 19 nt, Human
cccgcugucagccauuccu

SEQ ID NO: 1746982 - RNA, 15 nt, Human
cccgggcucugccuc

SEQ ID NO: 1746983 - RNA, 14 nt, Human
cccgggcucugccu

SEQ ID NO: 1746984 - RNA, 12 nt, Human
cccgggcucugc

SEQ ID NO: 1746985 - RNA, 21 nt, Human
cccgaguagcugggacuacag

SEQ ID NO: 1746986 - RNA, 18 nt, Human
cccgaguagcugggacua

SEQ ID NO: 1746987 - RNA, 17 nt, Human
cccgaguagcugggacu

SEQ ID NO: 1746988 - RNA, 16 nt, Human
cccgaguagcugggac

SEQ ID NO: 1746989 - RNA, 15 nt, Human
cccgaguagcuggga

SEQ ID NO: 1746990 - RNA, 14 nt, Human
cccgaguagcuggg

SEQ ID NO: 1746991 - RNA, 13 nt, Human
cccgaguagcugg

SEQ ID NO: 1746992 - RNA, 18 nt, Human
cccagagggccugcaagg

SEQ ID NO: 1746993 - RNA, 15 nt, Human
cccagagggccugca

SEQ ID NO: 1746994 - RNA, 14 nt, Human
cccagagggccugc

SEQ ID NO: 1746995 - RNA, 20 nt, Human
cccacaagaaaugaaagcag

SEQ ID NO: 1746996 - RNA, 13 nt, Human
cccacaagaaaug

SEQ ID NO: 1746997 - RNA, 23 nt, Human
cccaaugcacuuuguucuggcuc

SEQ ID NO: 1746998 - RNA, 20 nt, Human
cccaaugcacuuuguucugg

SEQ ID NO: 1746999 - RNA, 16 nt, Human
cccaaugcacuuuguu

SEQ ID NO: 1747000 - RNA, 19 nt, Human
cccacagcgcuggccggga

SEQ ID NO: 1747001 - RNA, 21 nt, Human
cccacgacugcccggcagggu

SEQ ID NO: 1747002 - RNA, 20 nt, Human
cccacgacugcccggcaggg

SEQ ID NO: 1747003 - RNA, 21 nt, Human
cccaccuggccucugcacucc

SEQ ID NO: 1747004 - RNA, 19 nt, Human
cccaccuggccucugcacu

SEQ ID NO: 1747005 - RNA, 17 nt, Human
cccaccuggccucugca

SEQ ID NO: 1747006 - RNA, 12 nt, Human
cccacuucugcc

SEQ ID NO: 1747007 - RNA, 23 nt, Human
cccacuugagaauuacccuuuug

SEQ ID NO: 1747008 - RNA, 21 nt, Human
cccacgcuggagugcagugag

SEQ ID NO: 1747009 - RNA, 20 nt, Human
cccacgcuggagugcaguga

SEQ ID NO: 1747010 - RNA, 19 nt, Human
cccacgcuggagugcagug

SEQ ID NO: 1747011 - RNA, 20 nt, Human
cccaccgcagacaggaccag

SEQ ID NO: 1747012 - RNA, 19 nt, Human
cccaccgcagacaggacca

SEQ ID NO: 1747013 - RNA, 18 nt, Human
cccaccaucaugucuggc

SEQ ID NO: 1747014 - RNA, 22 nt, Human
cccaccucucucacuccuugaa

SEQ ID NO: 1747015 - RNA, 23 nt, Human
cccaccgggcugggagcucugca

SEQ ID NO: 1747016 - RNA, 15 nt, Human
cgaauagcugggacu

SEQ ID NO: 1747017 - RNA, 14 nt, Human
cgaauagcugggac

SEQ ID NO: 1747018 - RNA, 13 nt, Human
cgaauagcuggga

SEQ ID NO: 1747019 - RNA, 17 nt, Human
cgagaucacgccacugc

SEQ ID NO: 1747020 - RNA, 18 nt, Human
cgagauagccaaggccaa

SEQ ID NO: 1747021 - RNA, 20 nt, Human
cgagcaggcuucuucccccc

SEQ ID NO: 1747022 - RNA, 17 nt, Human
cgagcaugccuggaugg

SEQ ID NO: 1747023 - RNA, 16 nt, Human
cgagcaugccuggaug

SEQ ID NO: 1747024 - RNA, 13 nt, Human
cgagcaugccugg

SEQ ID NO: 1747025 - RNA, 14 nt, Human
cgagcaugccugga

SEQ ID NO: 1747026 - RNA, 20 nt, Human
cgagauugcaccacugcacu

SEQ ID NO: 1747027 - RNA, 20 nt, Human
cgagaucacgccacugcacu

SEQ ID NO: 1747028 - RNA, 18 nt, Human
cgagaucacgccacugca

SEQ ID NO: 1747029 - RNA, 21 nt, Human
ccuuugacgccaucccagccc

SEQ ID NO: 1747030 - RNA, 20 nt, Human
ccuuugacgccaucccagcc

SEQ ID NO: 1747031 - RNA, 22 nt, Human
ccuuugacgccaucccagcccc

SEQ ID NO: 1747032 - RNA, 23 nt, Human
ccuuugacgccaucccagcccca

SEQ ID NO: 1747033 - RNA, 19 nt, Human
cgaaaacguggcugcuuca

SEQ ID NO: 1747034 - RNA, 18 nt, Human
cgaaaacguggcugcuuc

SEQ ID NO: 1747035 - RNA, 15 nt, Human
cgaaaacguggcugc

SEQ ID NO: 1747036 - RNA, 20 nt, Human
cgaaaacguggcugcuucaa

SEQ ID NO: 1747037 - RNA, 14 nt, Human
cgaacuggcugcaa

SEQ ID NO: 1747038 - RNA, 12 nt, Human
cgaacuggcugc

SEQ ID NO: 1747039 - RNA, 14 nt, Human
cgaacuccugaccu

SEQ ID NO: 1747040 - RNA, 19 nt, Human
cgaaagggacuuggaagcu

SEQ ID NO: 1747041 - RNA, 20 nt, Human
cgaaaggaugaaagugacca

SEQ ID NO: 1747042 - RNA, 22 nt, Human
cgaaagggacuuggaagcuccg

SEQ ID NO: 1747043 - RNA, 12 nt, Human
cgaaagaacagu

SEQ ID NO: 1747044 - RNA, 21 nt, Human
cgaaagaacaguccauugaaa

SEQ ID NO: 1747045 - RNA, 17 nt, Human
cgccaugcuccuggccc

SEQ ID NO: 1747046 - RNA, 14 nt, Human
cgcagcccugcaga

SEQ ID NO: 1747047 - RNA, 10 nt, Human
cgcagcccug

SEQ ID NO: 1747048 - RNA, 16 nt, Human
cgcagacaggaccagg

SEQ ID NO: 1747049 - RNA, 15 nt, Human
cgcagacaggaccag

SEQ ID NO: 1747050 - RNA, 21 nt, Human
cgccagauucuuuccugaggc

SEQ ID NO: 1747051 - RNA, 20 nt, Human
cgccagauucuuuccugagg

SEQ ID NO: 1747052 - RNA, 19 nt, Human
cgccagauucuuuccugag

SEQ ID NO: 1747053 - RNA, 22 nt, Human
cgccaggggaaaaucagccugc

SEQ ID NO: 1747054 - RNA, 16 nt, Human
cgagcccugguggcag

SEQ ID NO: 1747055 - RNA, 15 nt, Human
cgagcccugguggca

SEQ ID NO: 1747056 - RNA, 18 nt, Human
cgagcaugccuggauggg

SEQ ID NO: 1747057 - RNA, 18 nt, Human
cgagcccugguggcagug

SEQ ID NO: 1747058 - RNA, 20 nt, Human
cgauuucuguuuagauaaua

SEQ ID NO: 1747059 - RNA, 23 nt, Human
ccuugaccauucuccaccugcca

SEQ ID NO: 1747060 - RNA, 13 nt, Human
ccuugacucuuuc

SEQ ID NO: 1747061 - RNA, 20 nt, Human
ccuugaguugauucagcucu

SEQ ID NO: 1747062 - RNA, 20 nt, Human
ccuugaaaacuuuaugcuaa

SEQ ID NO: 1747063 - RNA, 13 nt, Human
ccuugaacuagga

SEQ ID NO: 1747064 - RNA, 16 nt, Human
ccuucggccuccaucc

SEQ ID NO: 1747065 - RNA, 15 nt, Human
ccuucggcgccuuaa

SEQ ID NO: 1747066 - RNA, 19 nt, Human
ccuucuccuucaccuuugu

SEQ ID NO: 1747067 - RNA, 15 nt, Human
ccuucuccuucaccu

SEQ ID NO: 1747068 - RNA, 14 nt, Human
ccuucuguggcuca

SEQ ID NO: 1747069 - RNA, 21 nt, Human
ccuucuguggcucacagaacc

SEQ ID NO: 1747070 - RNA, 18 nt, Human
ccuuugacgccaucccag

SEQ ID NO: 1747071 - RNA, 17 nt, Human
ccuuugacgccauccca

SEQ ID NO: 1747072 - RNA, 16 nt, Human
ccuuugacgccauccc

SEQ ID NO: 1747073 - RNA, 12 nt, Human
ccuugggacccc

SEQ ID NO: 1747074 - RNA, 22 nt, Human
ccuugguuaggcauugugggaa

SEQ ID NO: 1747075 - RNA, 21 nt, Human
ccuugguuaggcauuguggga

SEQ ID NO: 1747076 - RNA, 22 nt, Human
ccuuggugucgggcaugacacg

SEQ ID NO: 1747077 - RNA, 12 nt, Human
ccuucagccuga

SEQ ID NO: 1747078 - RNA, 14 nt, Human
ccuucagugccaaa

SEQ ID NO: 1747079 - RNA, 19 nt, Human
ccuucauuuggcauucccc

SEQ ID NO: 1747080 - RNA, 11 nt, Human
ccuucagugcc

SEQ ID NO: 1747081 - RNA, 20 nt, Human
ccuucaccuuuguccccacc

SEQ ID NO: 1747082 - RNA, 19 nt, Human
ccuucaccuuuguccccac

SEQ ID NO: 1747083 - RNA, 17 nt, Human
ccuucacagaugggugc

SEQ ID NO: 1747084 - RNA, 14 nt, Human
ccuuagacaguccc

SEQ ID NO: 1747085 - RNA, 21 nt, Human
ccuucaccuuuguccccaccg

SEQ ID NO: 1747086 - RNA, 14 nt, Human
ccuucacuuaggaa

SEQ ID NO: 1747087 - RNA, 14 nt, Human
ccuucggccuccau

SEQ ID NO: 1747088 - RNA, 19 nt, Human
ccuucggccuccauccuga

SEQ ID NO: 1747089 - RNA, 20 nt, Human
ccuucggccuccauccugag

SEQ ID NO: 1747090 - RNA, 22 nt, Human
ccuucauuuggcauuccccacu

SEQ ID NO: 1747091 - RNA, 14 nt, Human
ccuuccucugaggc

SEQ ID NO: 1747092 - RNA, 13 nt, Human
ccuuccucugagg

SEQ ID NO: 1747093 - RNA, 20 nt, Human
ccuuccucugagccuuggga

SEQ ID NO: 1747094 - RNA, 21 nt, Human
ccuuccucuccacugccuucg

SEQ ID NO: 1747095 - RNA, 16 nt, Human
ccuuccucugagccuu

SEQ ID NO: 1747096 - RNA, 15 nt, Human
ccuuccucugagccu

SEQ ID NO: 1747097 - RNA, 18 nt, Human
ccuguuucagaggcucag

SEQ ID NO: 1747098 - RNA, 16 nt, Human
ccuguuucugcagcca

SEQ ID NO: 1747099 - RNA, 18 nt, Human
ccuguuuguuucugaaag

SEQ ID NO: 1747100 - RNA, 14 nt, Human
ccuguuuguuucug

SEQ ID NO: 1747101 - RNA, 15 nt, Human
ccuguuuaagagaca

SEQ ID NO: 1747102 - RNA, 12 nt, Human
ccuguuuaagag

SEQ ID NO: 1747103 - RNA, 23 nt, Human
ccuguugggccaggagccuccug

SEQ ID NO: 1747104 - RNA, 21 nt, Human
ccugugucuugcaauggcagc

SEQ ID NO: 1747105 - RNA, 19 nt, Human
ccugugucuugcaauggca

SEQ ID NO: 1747106 - RNA, 17 nt, Human
ccugugucuugcaaugg

SEQ ID NO: 1747107 - RNA, 22 nt, Human
ccugugucuugcaauggcagcc

SEQ ID NO: 1747108 - RNA, 21 nt, Human
ccugugugugcgccuacagga

SEQ ID NO: 1747109 - RNA, 20 nt, Human
ccugugugugcgccuacagg

SEQ ID NO: 1747110 - RNA, 20 nt, Human
ccuuacacaaugguuuucuu

SEQ ID NO: 1747111 - RNA, 14 nt, Human
ccuuacacaauggu

SEQ ID NO: 1747112 - RNA, 20 nt, Human
ccuuaccagcagagcaccuu

SEQ ID NO: 1747113 - RNA, 20 nt, Human
ccuuaccacugcucugauga

SEQ ID NO: 1747114 - RNA, 15 nt, Human
ccuuacccucauguu

SEQ ID NO: 1747115 - RNA, 13 nt, Human
ccuuaccagcaga

SEQ ID NO: 1747116 - RNA, 17 nt, Human
ccuuaccacugcucuga

SEQ ID NO: 1747117 - RNA, 19 nt, Human
ccuuaccugccaggaagcc

SEQ ID NO: 1747118 - RNA, 19 nt, Human
ccuuacccucauguucuua

SEQ ID NO: 1747119 - RNA, 18 nt, Human
ccuuagaagucacacagu

SEQ ID NO: 1747120 - RNA, 14 nt, Human
ccuuagaaguggaa

SEQ ID NO: 1747121 - RNA, 17 nt, Human
ccuuagaagucacacag

SEQ ID NO: 1747122 - RNA, 12 nt, Human
ccuucagugccu

SEQ ID NO: 1747123 - RNA, 17 nt, Human
ccugcggugcuaucucc

SEQ ID NO: 1747124 - RNA, 16 nt, Human
ccugcggugcuaucuc

SEQ ID NO: 1747125 - RNA, 22 nt, Human
ccugcgggucacaggagggagg

SEQ ID NO: 1747126 - RNA, 18 nt, Human
ccugcgggucacaggagg

SEQ ID NO: 1747127 - RNA, 22 nt, Human
ccugccccucaacucuccucca

SEQ ID NO: 1747128 - RNA, 23 nt, Human
ccugccuguugggccaggagccu

SEQ ID NO: 1747129 - RNA, 11 nt, Human
ccugccucagc

SEQ ID NO: 1747130 - RNA, 14 nt, Human
ccugcuucaaauau

SEQ ID NO: 1747131 - RNA, 15 nt, Human
ccugcugagucccag

SEQ ID NO: 1747132 - RNA, 23 nt, Human
ccugcuuugggcugcccuggugc

SEQ ID NO: 1747133 - RNA, 22 nt, Human
ccugcuuugggcugcccuggug

SEQ ID NO: 1747134 - RNA, 21 nt, Human
ccugcuuugggcugcccuggu

SEQ ID NO: 1747135 - RNA, 20 nt, Human
ccugcuuugggcugcccugg

SEQ ID NO: 1747136 - RNA, 22 nt, Human
ccugcucuccgaccagacaccu

SEQ ID NO: 1747137 - RNA, 21 nt, Human
ccugcucuccucuugccacug

SEQ ID NO: 1747138 - RNA, 19 nt, Human
ccugcucuccucuugccac

SEQ ID NO: 1747139 - RNA, 18 nt, Human
ccugcucuccucuugcca

SEQ ID NO: 1747140 - RNA, 16 nt, Human
ccugcucuccucuugc

SEQ ID NO: 1747141 - RNA, 22 nt, Human
ccugcucuccucuugccacugc

SEQ ID NO: 1747142 - RNA, 21 nt, Human
ccugcucuccgaccagacacc

SEQ ID NO: 1747143 - RNA, 22 nt, Human
ccugcggugcuaucucccccag

SEQ ID NO: 1747144 - RNA, 21 nt, Human
ccuggucacaggacucugccu

SEQ ID NO: 1747145 - RNA, 23 nt, Human
ccuggucacaggacucugccucc

SEQ ID NO: 1747146 - RNA, 22 nt, Human
ccuggucacaggacucugccuc

SEQ ID NO: 1747147 - RNA, 18 nt, Human
ccuggggguucuuucuuc

SEQ ID NO: 1747148 - RNA, 23 nt, Human
ccuggggguucuuucuuccucug

SEQ ID NO: 1747149 - RNA, 22 nt, Human
ccuggggguucuuucuuccucu

SEQ ID NO: 1747150 - RNA, 21 nt, Human
ccuggggguucuuucuuccuc

SEQ ID NO: 1747151 - RNA, 24 nt, Human
ccuggcuuuucacugcuggcugcc

SEQ ID NO: 1747152 - RNA, 23 nt, Human
ccuggcuuuucacugcuggcugc

SEQ ID NO: 1747153 - RNA, 22 nt, Human
ccuggcuuuucacugcuggcug

SEQ ID NO: 1747154 - RNA, 21 nt, Human
ccuggcuuuucacugcuggcu

SEQ ID NO: 1747155 - RNA, 20 nt, Human
ccuggcuuuucacugcuggc

SEQ ID NO: 1747156 - RNA, 20 nt, Human
ccuggccagaugcaccagcc

SEQ ID NO: 1747157 - RNA, 15 nt, Human
ccuggccagaugcac

SEQ ID NO: 1747158 - RNA, 22 nt, Human
ccuggcagccgugccuucagcu

SEQ ID NO: 1747159 - RNA, 21 nt, Human
ccuggcagccgugccuucagc

SEQ ID NO: 1747160 - RNA, 23 nt, Human
ccuggcucccacaggcccuuccu

SEQ ID NO: 1747161 - RNA, 17 nt, Human
ccuggcucccacaggcc

SEQ ID NO: 1747162 - RNA, 22 nt, Human
ccuggcuccaaacccucgaggc

SEQ ID NO: 1747163 - RNA, 13 nt, Human
ccuggcagccccu

SEQ ID NO: 1747164 - RNA, 14 nt, Human
ccuggcagccccug

SEQ ID NO: 1747165 - RNA, 12 nt, Human
ccuggcagcccc

SEQ ID NO: 1747166 - RNA, 22 nt, Human
ccuggcacuauaauguaagcuc

SEQ ID NO: 1747167 - RNA, 23 nt, Human
ccuggcacccggccccugcuggu

SEQ ID NO: 1747168 - RNA, 22 nt, Human
ccuggcacccggccccugcugg

SEQ ID NO: 1747169 - RNA, 18 nt, Human
ccuggaauauauaaccag

SEQ ID NO: 1747170 - RNA, 16 nt, Human
ccugacagaaggacuc

SEQ ID NO: 1747171 - RNA, 11 nt, Human
ccugagcccca

SEQ ID NO: 1747172 - RNA, 14 nt, Human
ccugagcuuucugc

SEQ ID NO: 1747173 - RNA, 12 nt, Human
ccugagccagau

SEQ ID NO: 1747174 - RNA, 16 nt, Human
ccugagcuuucugcua

SEQ ID NO: 1747175 - RNA, 21 nt, Human
ccugaggcccagagggccugc

SEQ ID NO: 1747176 - RNA, 14 nt, Human
ccugcaagaacaag

SEQ ID NO: 1747177 - RNA, 20 nt, Human
ccugcaguacuuuaccuccu

SEQ ID NO: 1747178 - RNA, 18 nt, Human
ccugcaguacuuuaccuc

SEQ ID NO: 1747179 - RNA, 15 nt, Human
ccugcagggccaagc

SEQ ID NO: 1747180 - RNA, 15 nt, Human
ccugauugugucucu

SEQ ID NO: 1747181 - RNA, 14 nt, Human
ccugaggcccuucu

SEQ ID NO: 1747182 - RNA, 22 nt, Human
ccugaugcuucuucagagacuc

SEQ ID NO: 1747183 - RNA, 21 nt, Human
ccugaugcuucuucagagacu

SEQ ID NO: 1747184 - RNA, 20 nt, Human
ccugaugcuucuucagagac

SEQ ID NO: 1747185 - RNA, 19 nt, Human
ccugaugcuucuucagaga

SEQ ID NO: 1747186 - RNA, 12 nt, Human
ccugaggcccuu

SEQ ID NO: 1747187 - RNA, 11 nt, Human
ccugaggcccu

SEQ ID NO: 1747188 - RNA, 21 nt, Human
ccugcaaccugauugugucuc

SEQ ID NO: 1747189 - RNA, 22 nt, Human
ccugcaaccugauugugucucu

SEQ ID NO: 1747190 - RNA, 19 nt, Human
ccugauugugucucuuggu

SEQ ID NO: 1747191 - RNA, 17 nt, Human
ccugauugugucucuug

SEQ ID NO: 1747192 - RNA, 22 nt, Human
ccugccaggaagccagcaggcu

SEQ ID NO: 1747193 - RNA, 21 nt, Human
ccugccaggaagccagcaggc

SEQ ID NO: 1747194 - RNA, 19 nt, Human
ccugccaggaagccagcag

SEQ ID NO: 1747195 - RNA, 18 nt, Human
ccugccaggaagccagca

SEQ ID NO: 1747196 - RNA, 11 nt, Human
ccugccaggga

SEQ ID NO: 1747197 - RNA, 16 nt, Human
ccugccaggcauggug

SEQ ID NO: 1747198 - RNA, 23 nt, Human
ccugccaggaagccagcaggcuc

SEQ ID NO: 1747199 - RNA, 15 nt, Human
ccugccagggacaga

SEQ ID NO: 1747200 - RNA, 14 nt, Human
ccugccagggacag

SEQ ID NO: 1747201 - RNA, 13 nt, Human
ccugccagggaca

SEQ ID NO: 1747202 - RNA, 12 nt, Human
ccugccagggac

SEQ ID NO: 1747203 - RNA, 16 nt, Human
ccugccagggacagag

SEQ ID NO: 1747204 - RNA, 22 nt, Human
ccugccagggacagagggggug

SEQ ID NO: 1747205 - RNA, 17 nt, Human
ccugccaggaagccagc

SEQ ID NO: 1747206 - RNA, 15 nt, Human
ccugccaggaagcca

SEQ ID NO: 1747207 - RNA, 14 nt, Human
ccugccaggaagcc

SEQ ID NO: 1747208 - RNA, 13 nt, Human
ccugccaggaagc

SEQ ID NO: 1747209 - RNA, 11 nt, Human
ccacugcucug

SEQ ID NO: 1747210 - RNA, 16 nt, Human
ccacugcgaccacaag

SEQ ID NO: 1747211 - RNA, 11 nt, Human
ccacugccucu

SEQ ID NO: 1747212 - RNA, 20 nt, Human
ccacugcacuccagccuggg

SEQ ID NO: 1747213 - RNA, 19 nt, Human
ccacugcacuccagccugg

SEQ ID NO: 1747214 - RNA, 15 nt, Human
ccacucccugcaacc

SEQ ID NO: 1747215 - RNA, 23 nt, Human
ccacugcacuccagccuggguga

SEQ ID NO: 1747216 - RNA, 22 nt, Human
ccacuacggaauaguuggcuag

SEQ ID NO: 1747217 - RNA, 18 nt, Human
ccacuacauucuguuaau

SEQ ID NO: 1747218 - RNA, 23 nt, Human
ccacuacggaauaguuggcuagg

SEQ ID NO: 1747219 - RNA, 13 nt, Human
ccacucccugcaa

SEQ ID NO: 1747220 - RNA, 12 nt, Human
ccacucccugca

SEQ ID NO: 1747221 - RNA, 19 nt, Human
ccacuccagaccccuggcu

SEQ ID NO: 1747222 - RNA, 17 nt, Human
ccacuccagaccccugg

SEQ ID NO: 1747223 - RNA, 13 nt, Human
ccacguuucuaaa

SEQ ID NO: 1747224 - RNA, 17 nt, Human
ccaccucccacaaagga

SEQ ID NO: 1747225 - RNA, 20 nt, Human
ccaccugccuguugggccag

SEQ ID NO: 1747226 - RNA, 17 nt, Human
ccaccugccuguugggc

SEQ ID NO: 1747227 - RNA, 12 nt, Human
ccaccugccagg

SEQ ID NO: 1747228 - RNA, 14 nt, Human
ccaccugcccaacc

SEQ ID NO: 1747229 - RNA, 15 nt, Human
ccacggccaggccag

SEQ ID NO: 1747230 - RNA, 14 nt, Human
ccacggccaggcca

SEQ ID NO: 1747231 - RNA, 13 nt, Human
ccacggccaggcc

SEQ ID NO: 1747232 - RNA, 12 nt, Human
ccacggccaggc

SEQ ID NO: 1747233 - RNA, 17 nt, Human
ccaccuggccucugcac

SEQ ID NO: 1747234 - RNA, 16 nt, Human
ccaccuggccucugca

SEQ ID NO: 1747235 - RNA, 15 nt, Human
ccaccuggccucugc

SEQ ID NO: 1747236 - RNA, 22 nt, Human
ccaccugcggugcuaucucccc

SEQ ID NO: 1747237 - RNA, 14 nt, Human
ccacccaggagccc

SEQ ID NO: 1747238 - RNA, 12 nt, Human
ccacccaggagc

SEQ ID NO: 1747239 - RNA, 15 nt, Human
ccaccucagccuccc

SEQ ID NO: 1747240 - RNA, 14 nt, Human
ccaccucagccucc

SEQ ID NO: 1747241 - RNA, 13 nt, Human
ccaccucagccuc

SEQ ID NO: 1747242 - RNA, 12 nt, Human
ccaccucagccu

SEQ ID NO: 1747243 - RNA, 18 nt, Human
ccacccugaaagcccuga

SEQ ID NO: 1747244 - RNA, 17 nt, Human
ccacccugaaagcccug

SEQ ID NO: 1747245 - RNA, 16 nt, Human
ccacccugaaagcccu

SEQ ID NO: 1747246 - RNA, 19 nt, Human
ccaccccucaacaccucug

SEQ ID NO: 1747247 - RNA, 21 nt, Human
ccacccaggagccccgaggcc

SEQ ID NO: 1747248 - RNA, 23 nt, Human
ccacaucuugcucugcugacaga

SEQ ID NO: 1747249 - RNA, 22 nt, Human
ccacaucuugcucugcugacag

SEQ ID NO: 1747250 - RNA, 16 nt, Human
ccacaucuugcucugc

SEQ ID NO: 1747251 - RNA, 18 nt, Human
ccaccaacauacucccau

SEQ ID NO: 1747252 - RNA, 14 nt, Human
ccaccaacauacuc

SEQ ID NO: 1747253 - RNA, 14 nt, Human
ccacaucuugcucu

SEQ ID NO: 1747254 - RNA, 23 nt, Human
ccacauagugaugguuccccugu

SEQ ID NO: 1747255 - RNA, 22 nt, Human
ccacauagugaugguuccccug

SEQ ID NO: 1747256 - RNA, 21 nt, Human
ccacauagugaugguuccccu

SEQ ID NO: 1747257 - RNA, 19 nt, Human
ccacauagugaugguuccc

SEQ ID NO: 1747258 - RNA, 13 nt, Human
ccacccaccucag

SEQ ID NO: 1747259 - RNA, 22 nt, Human
ccacccaagggccuggccugag

SEQ ID NO: 1747260 - RNA, 21 nt, Human
ccacccaagggccuggccuga

SEQ ID NO: 1747261 - RNA, 20 nt, Human
ccacccaagggccuggccug

SEQ ID NO: 1747262 - RNA, 15 nt, Human
ccacccaccucagcc

SEQ ID NO: 1747263 - RNA, 14 nt, Human
ccacccaccucagc

SEQ ID NO: 1747264 - RNA, 16 nt, Human
ccacccaccucagccu

SEQ ID NO: 1747265 - RNA, 16 nt, Human
ccaccacacccagccc

SEQ ID NO: 1747266 - RNA, 14 nt, Human
ccaccacacccagc

SEQ ID NO: 1747267 - RNA, 20 nt, Human
ccaccaacauacucccaucu

SEQ ID NO: 1747268 - RNA, 19 nt, Human
ccacccaagggccuggccu

SEQ ID NO: 1747269 - RNA, 17 nt, Human
ccacccaagggccuggc

SEQ ID NO: 1747270 - RNA, 16 nt, Human
ccacccaagggccugg

SEQ ID NO: 1747271 - RNA, 14 nt, Human
ccacacccagccca

SEQ ID NO: 1747272 - RNA, 13 nt, Human
ccacacccagccc

SEQ ID NO: 1747273 - RNA, 13 nt, Human
ccacacuccagcu

SEQ ID NO: 1747274 - RNA, 17 nt, Human
ccacacuccagcuggga

SEQ ID NO: 1747275 - RNA, 14 nt, Human
ccacacuccagcug

SEQ ID NO: 1747276 - RNA, 12 nt, Human
ccacacccagcc

SEQ ID NO: 1747277 - RNA, 17 nt, Human
ccacuguacuugcucuu

SEQ ID NO: 1747278 - RNA, 19 nt, Human
ccacuguacuugcucuuga

SEQ ID NO: 1747279 - RNA, 18 nt, Human
ccacuguacuugcucuug

SEQ ID NO: 1747280 - RNA, 19 nt, Human
ccagacaccuugacagggc

SEQ ID NO: 1747281 - RNA, 17 nt, Human
ccagacaccuugacagg

SEQ ID NO: 1747282 - RNA, 20 nt, Human
ccacuguacuugcucuugau

SEQ ID NO: 1747283 - RNA, 14 nt, Human
ccagagaggguggu

SEQ ID NO: 1747284 - RNA, 23 nt, Human
ccagagaggguggugaccucugc

SEQ ID NO: 1747285 - RNA, 21 nt, Human
ccagagaggguggugaccucu

SEQ ID NO: 1747286 - RNA, 20 nt, Human
ccagacaccuugacagggca

SEQ ID NO: 1747287 - RNA, 22 nt, Human
ccagaggagagaggacccccug

SEQ ID NO: 1747288 - RNA, 21 nt, Human
ccagaggagagaggacccccu

SEQ ID NO: 1747289 - RNA, 21 nt, Human
ccagagggagugacagaggca

SEQ ID NO: 1747290 - RNA, 20 nt, Human
ccagagggagugacagaggc

SEQ ID NO: 1747291 - RNA, 19 nt, Human
ccagagggagugacagagg

SEQ ID NO: 1747292 - RNA, 18 nt, Human
ccagagggagugacagag

SEQ ID NO: 1747293 - RNA, 17 nt, Human
ccagagggagugacaga

SEQ ID NO: 1747294 - RNA, 16 nt, Human
ccagagggagugacag

SEQ ID NO: 1747295 - RNA, 19 nt, Human
ccagagcugccaccugccu

SEQ ID NO: 1747296 - RNA, 16 nt, Human
ccagagcugccaccug

SEQ ID NO: 1747297 - RNA, 15 nt, Human
ccagagcugccaccu

SEQ ID NO: 1747298 - RNA, 14 nt, Human
ccagagcugccacc

SEQ ID NO: 1747299 - RNA, 13 nt, Human
ccagagcugccac

SEQ ID NO: 1747300 - RNA, 12 nt, Human
ccagagcugcca

SEQ ID NO: 1747301 - RNA, 11 nt, Human
ccagagcugcc

SEQ ID NO: 1747302 - RNA, 22 nt, Human
ccagauucuuuccugaggcugg

SEQ ID NO: 1747303 - RNA, 21 nt, Human
ccagauucuuuccugaggcug

SEQ ID NO: 1747304 - RNA, 20 nt, Human
ccagauucuuuccugaggcu

SEQ ID NO: 1747305 - RNA, 19 nt, Human
ccagauucuuuccugaggc

SEQ ID NO: 1747306 - RNA, 18 nt, Human
ccagauucuuuccugagg

SEQ ID NO: 1747307 - RNA, 23 nt, Human
ccagagggagugacagaggcagc

SEQ ID NO: 1747308 - RNA, 22 nt, Human
ccagagggagugacagaggcag

SEQ ID NO: 1747309 - RNA, 13 nt, Human
ccagagggccugc

SEQ ID NO: 1747310 - RNA, 16 nt, Human
ccagagggccugcaag

SEQ ID NO: 1747311 - RNA, 15 nt, Human
ccagagggccugcaa

SEQ ID NO: 1747312 - RNA, 20 nt, Human
ccagauugcaacaggcuggg

SEQ ID NO: 1747313 - RNA, 19 nt, Human
ccagauugcaacaggcugg

SEQ ID NO: 1747314 - RNA, 23 nt, Human
ccagauucuuuccugaggcuggg

SEQ ID NO: 1747315 - RNA, 21 nt, Human
ccagauugcaacaggcugggc

SEQ ID NO: 1747316 - RNA, 13 nt, Human
ccagauuuaugca

SEQ ID NO: 1747317 - RNA, 12 nt, Human
ccagauuucacu

SEQ ID NO: 1747318 - RNA, 22 nt, Human
ccagauuuaugcauauuauuuu

SEQ ID NO: 1747319 - RNA, 23 nt, Human
ccagcauaauacuugcuuuggaa

SEQ ID NO: 1747320 - RNA, 19 nt, Human
ccagccaaagccuccucca

SEQ ID NO: 1747321 - RNA, 18 nt, Human
ccagccaaagccuccucc

SEQ ID NO: 1747322 - RNA, 15 nt, Human
ccagccaaagccucc

SEQ ID NO: 1747323 - RNA, 15 nt, Human
ccagccccagugccc

SEQ ID NO: 1747324 - RNA, 13 nt, Human
ccagccccagugc

SEQ ID NO: 1747325 - RNA, 23 nt, Human
ccagccccaaaacucuccucugc

SEQ ID NO: 1747326 - RNA, 17 nt, Human
ccagcccuuagcaggga

SEQ ID NO: 1747327 - RNA, 16 nt, Human
ccagcccuuagcaggg

SEQ ID NO: 1747328 - RNA, 21 nt, Human
ccagcccuccuuaucaaagga

SEQ ID NO: 1747329 - RNA, 16 nt, Human
ccagccccagugccca

SEQ ID NO: 1747330 - RNA, 19 nt, Human
ccagccgccaugcuccugg

SEQ ID NO: 1747331 - RNA, 18 nt, Human
ccagccgccaugcuccug

SEQ ID NO: 1747332 - RNA, 14 nt, Human
ccagccgccaugcu

SEQ ID NO: 1747333 - RNA, 21 nt, Human
ccagccuccaagcuccaucuc

SEQ ID NO: 1747334 - RNA, 19 nt, Human
ccagccucaucucuuuguu

SEQ ID NO: 1747335 - RNA, 15 nt, Human
ccagcaagugagagc

SEQ ID NO: 1747336 - RNA, 14 nt, Human
ccagauuucacucu

SEQ ID NO: 1747337 - RNA, 22 nt, Human
ccagcaagugagagcugggugu

SEQ ID NO: 1747338 - RNA, 21 nt, Human
ccagcaagugagagcugggug

SEQ ID NO: 1747339 - RNA, 20 nt, Human
ccagcaagugagagcugggu

SEQ ID NO: 1747340 - RNA, 16 nt, Human
ccagcaagugagagcu

SEQ ID NO: 1747341 - RNA, 18 nt, Human
ccagcaauucuccugccu

SEQ ID NO: 1747342 - RNA, 16 nt, Human
ccagcaauucuccugc

SEQ ID NO: 1747343 - RNA, 21 nt, Human
ccagcaauucuccugccucag

SEQ ID NO: 1747344 - RNA, 20 nt, Human
ccagcaauucuccugccuca

SEQ ID NO: 1747345 - RNA, 19 nt, Human
ccagcaauucuccugccuc

SEQ ID NO: 1747346 - RNA, 14 nt, Human
ccauuuguguuuau

SEQ ID NO: 1747347 - RNA, 20 nt, Human
ccauucuccaccugccaggg

SEQ ID NO: 1747348 - RNA, 19 nt, Human
ccauucuccaccugccagg

SEQ ID NO: 1747349 - RNA, 18 nt, Human
cccaaaacucuccucugc

SEQ ID NO: 1747350 - RNA, 16 nt, Human
cccaaaacucuccucu

SEQ ID NO: 1747351 - RNA, 20 nt, Human
cccaaaacucuccucugcug

SEQ ID NO: 1747352 - RNA, 15 nt, Human
cccaaagugcuggga

SEQ ID NO: 1747353 - RNA, 13 nt, Human
cccaaagugcugg

SEQ ID NO: 1747354 - RNA, 22 nt, Human
cccaaauggaaaugggcagagc

SEQ ID NO: 1747355 - RNA, 18 nt, Human
cccaaauggaaaugggca

SEQ ID NO: 1747356 - RNA, 23 nt, Human
cccaaauggaaaugggcagagca

SEQ ID NO: 1747357 - RNA, 16 nt, Human
cccaaagugcugggau

SEQ ID NO: 1747358 - RNA, 20 nt, Human
cccaaagugguauagaaaug

SEQ ID NO: 1747359 - RNA, 21 nt, Human
cccaaagugguauagaaaugc

SEQ ID NO: 1747360 - RNA, 15 nt, Human
cccaacccuggcacc

SEQ ID NO: 1747361 - RNA, 17 nt, Human
cccaaggcucugagcaa

SEQ ID NO: 1747362 - RNA, 16 nt, Human
ccaugggacagggagg

SEQ ID NO: 1747363 - RNA, 19 nt, Human
ccaugggacagggaggacg

SEQ ID NO: 1747364 - RNA, 16 nt, Human
ccauguuggccaggcu

SEQ ID NO: 1747365 - RNA, 17 nt, Human
ccauguuggccaggcug

SEQ ID NO: 1747366 - RNA, 21 nt, Human
ccauguuggccaggcugcucu

SEQ ID NO: 1747367 - RNA, 18 nt, Human
ccauguuggccaggcugc

SEQ ID NO: 1747368 - RNA, 16 nt, Human
ccaucuaaacugcccc

SEQ ID NO: 1747369 - RNA, 15 nt, Human
ccaucuaaacugccc

SEQ ID NO: 1747370 - RNA, 21 nt, Human
ccaugggaaaugucaacaagu

SEQ ID NO: 1747371 - RNA, 14 nt, Human
ccaucuaaacugcc

SEQ ID NO: 1747372 - RNA, 23 nt, Human
ccauauucuguuggccaguguga

SEQ ID NO: 1747373 - RNA, 21 nt, Human
ccauaguaugggacuggccuc

SEQ ID NO: 1747374 - RNA, 12 nt, Human
ccauaggucacc

SEQ ID NO: 1747375 - RNA, 22 nt, Human
ccaguguuguggauuuaacaga

SEQ ID NO: 1747376 - RNA, 17 nt, Human
ccagugaggcucugccc

SEQ ID NO: 1747377 - RNA, 20 nt, Human
ccagugccgagaaggaagcc

SEQ ID NO: 1747378 - RNA, 22 nt, Human
ccagugguuccuaauccucuag

SEQ ID NO: 1747379 - RNA, 15 nt, Human
ccagugaggcucugc

SEQ ID NO: 1747380 - RNA, 14 nt, Human
ccagugaggcucug

SEQ ID NO: 1747381 - RNA, 16 nt, Human
ccagugaggcucugcc

SEQ ID NO: 1747382 - RNA, 13 nt, Human
ccaucuacccucc

SEQ ID NO: 1747383 - RNA, 21 nt, Human
ccaggcccucugcccacuccc

SEQ ID NO: 1747384 - RNA, 20 nt, Human
ccaggcccucugcccacucc

SEQ ID NO: 1747385 - RNA, 23 nt, Human
ccaggcccucugcccacucccug

SEQ ID NO: 1747386 - RNA, 22 nt, Human
ccaggcccucugcccacucccu

SEQ ID NO: 1747387 - RNA, 24 nt, Human
ccaggcuguaucccaugagccuca

SEQ ID NO: 1747388 - RNA, 17 nt, Human
ccaggcuuagucacuga

SEQ ID NO: 1747389 - RNA, 19 nt, Human
ccaggcgccccuucccccu

SEQ ID NO: 1747390 - RNA, 18 nt, Human
ccaggcgccccuuccccc

SEQ ID NO: 1747391 - RNA, 21 nt, Human
ccaggcauuccccaggaggcc

SEQ ID NO: 1747392 - RNA, 19 nt, Human
ccaggcauuccccaggagg

SEQ ID NO: 1747393 - RNA, 18 nt, Human
ccaggcauuccccaggag

SEQ ID NO: 1747394 - RNA, 12 nt, Human
ccaggagccucc

SEQ ID NO: 1747395 - RNA, 20 nt, Human
ccaggagccccgaggccuuc

SEQ ID NO: 1747396 - RNA, 19 nt, Human
ccaggagccccgaggccuu

SEQ ID NO: 1747397 - RNA, 16 nt, Human
ccagccuccaugcugc

SEQ ID NO: 1747398 - RNA, 15 nt, Human
ccagccuccaugcug

SEQ ID NO: 1747399 - RNA, 22 nt, Human
ccagggacagaggggguggccu

SEQ ID NO: 1747400 - RNA, 21 nt, Human
ccagggacagaggggguggcc

SEQ ID NO: 1747401 - RNA, 15 nt, Human
ccagggacagagggg

SEQ ID NO: 1747402 - RNA, 14 nt, Human
ccagggacagaggg

SEQ ID NO: 1747403 - RNA, 20 nt, Human
ccaggcuuagucacugagac

SEQ ID NO: 1747404 - RNA, 18 nt, Human
ccaggugcacaagcucca

SEQ ID NO: 1747405 - RNA, 20 nt, Human
ccaggugcacaagcuccaag

SEQ ID NO: 1747406 - RNA, 19 nt, Human
ccaggugcacaagcuccaa

SEQ ID NO: 1747407 - RNA, 21 nt, Human
ccagggcuggaaugauuucag

SEQ ID NO: 1747408 - RNA, 20 nt, Human
ccagucuggaaugcaguggu

SEQ ID NO: 1747409 - RNA, 19 nt, Human
ccagucuggaaugcagugg

SEQ ID NO: 1747410 - RNA, 18 nt, Human
ccagucuggaaugcagug

SEQ ID NO: 1747411 - RNA, 24 nt, Human
ccaggugcacaagcuccaagcucc

SEQ ID NO: 1747412 - RNA, 15 nt, Human
ccagguuccacagag

SEQ ID NO: 1747413 - RNA, 18 nt, Human
ccagguuccacagaggac

SEQ ID NO: 1747414 - RNA, 17 nt, Human
ccagguuuuuggucuga

SEQ ID NO: 1747415 - RNA, 22 nt, Human
cauuccugaugcuucuucagag

SEQ ID NO: 1747416 - RNA, 19 nt, Human
cauuccugaugcuucuuca

SEQ ID NO: 1747417 - RNA, 16 nt, Human
cauuccugaugcuucu

SEQ ID NO: 1747418 - RNA, 14 nt, Human
cauuccugaugcuu

SEQ ID NO: 1747419 - RNA, 23 nt, Human
cauuccugaugcuucuucagaga

SEQ ID NO: 1747420 - RNA, 17 nt, Human
cauucuguuaaucauua

SEQ ID NO: 1747421 - RNA, 13 nt, Human
cauucuggaauaa

SEQ ID NO: 1747422 - RNA, 20 nt, Human
cauucugccugcccaggccc

SEQ ID NO: 1747423 - RNA, 19 nt, Human
cauucugccugcccaggcc

SEQ ID NO: 1747424 - RNA, 18 nt, Human
cauucugccugcccaggc

SEQ ID NO: 1747425 - RNA, 17 nt, Human
cauucugccugcccagg

SEQ ID NO: 1747426 - RNA, 16 nt, Human
cauucugccugcccag

SEQ ID NO: 1747427 - RNA, 15 nt, Human
cauucugccugccca

SEQ ID NO: 1747428 - RNA, 13 nt, Human
cauucugccugcc

SEQ ID NO: 1747429 - RNA, 12 nt, Human
cauucugccugc

SEQ ID NO: 1747430 - RNA, 23 nt, Human
cauucuucuguacgucugacagg

SEQ ID NO: 1747431 - RNA, 17 nt, Human
cauuccaccuucccaug

SEQ ID NO: 1747432 - RNA, 22 nt, Human
cauuccaccuucccaugcccug

SEQ ID NO: 1747433 - RNA, 19 nt, Human
cauucauuuucuggguguu

SEQ ID NO: 1747434 - RNA, 19 nt, Human
cauuccccaggaggccagc

SEQ ID NO: 1747435 - RNA, 18 nt, Human
cauuccccaggaggccag

SEQ ID NO: 1747436 - RNA, 20 nt, Human
cauuccccaggaggccagcc

SEQ ID NO: 1747437 - RNA, 13 nt, Human
cauuccccauggg

SEQ ID NO: 1747438 - RNA, 17 nt, Human
cauuccccgucucuggu

SEQ ID NO: 1747439 - RNA, 17 nt, Human
cauuccccaggaggcca

SEQ ID NO: 1747440 - RNA, 15 nt, Human
cauuccccaggaggc

SEQ ID NO: 1747441 - RNA, 13 nt, Human
cauuccccaggag

SEQ ID NO: 1747442 - RNA, 21 nt, Human
cauuuuuaagugcugcauuua

SEQ ID NO: 1747443 - RNA, 17 nt, Human
cauuuuuaguagagaca

SEQ ID NO: 1747444 - RNA, 18 nt, Human
cauuuuuaguagagacag

SEQ ID NO: 1747445 - RNA, 16 nt, Human
ccaaacccuucagugc

SEQ ID NO: 1747446 - RNA, 23 nt, Human
cauuuuaccuuugacaaagguaa

SEQ ID NO: 1747447 - RNA, 23 nt, Human
cauuuuauuuuauuaugcaugaa

SEQ ID NO: 1747448 - RNA, 17 nt, Human
cauuuuacuuuuuccug

SEQ ID NO: 1747449 - RNA, 20 nt, Human
cauuuuacuuuuuccuggcu

SEQ ID NO: 1747450 - RNA, 22 nt, Human
cauuuuacuuuuuccuggcuca

SEQ ID NO: 1747451 - RNA, 14 nt, Human
cauuugcuuuggaa

SEQ ID NO: 1747452 - RNA, 15 nt, Human
cauuugcuuuggaag

SEQ ID NO: 1747453 - RNA, 15 nt, Human
cauugugggaagggg

SEQ ID NO: 1747454 - RNA, 15 nt, Human
cauuuaaaaaaaauc

SEQ ID NO: 1747455 - RNA, 19 nt, Human
cauuuaaaacauuaaaaua

SEQ ID NO: 1747456 - RNA, 17 nt, Human
cauugaccugaggcccu

SEQ ID NO: 1747457 - RNA, 15 nt, Human
cauugaccugaggcc

SEQ ID NO: 1747458 - RNA, 14 nt, Human
cauugaccugaggc

SEQ ID NO: 1747459 - RNA, 18 nt, Human
cauugaccugaggcccuu

SEQ ID NO: 1747460 - RNA, 17 nt, Human
cauuugaaaauuuugau

SEQ ID NO: 1747461 - RNA, 19 nt, Human
cauuugaaaauuuugaugu

SEQ ID NO: 1747462 - RNA, 22 nt, Human
cauuuacccuucuuuucugacu

SEQ ID NO: 1747463 - RNA, 14 nt, Human
caugcagcaucuaa

SEQ ID NO: 1747464 - RNA, 17 nt, Human
caugcgggcuuccuccu

SEQ ID NO: 1747465 - RNA, 15 nt, Human
caugcugucccuuac

SEQ ID NO: 1747466 - RNA, 13 nt, Human
caugcugucccuu

SEQ ID NO: 1747467 - RNA, 17 nt, Human
caugcugucccuuacgu

SEQ ID NO: 1747468 - RNA, 15 nt, Human
cauggacuuccacug

SEQ ID NO: 1747469 - RNA, 22 nt, Human
cauggacuucugccagcauaau

SEQ ID NO: 1747470 - RNA, 18 nt, Human
caugggccuccugugugu

SEQ ID NO: 1747471 - RNA, 23 nt, Human
caugggacagggaggacgcucuc

SEQ ID NO: 1747472 - RNA, 23 nt, Human
cauggucggaaaacaugcuacac

SEQ ID NO: 1747473 - RNA, 17 nt, Human
cauggucggaaaacaug

SEQ ID NO: 1747474 - RNA, 19 nt, Human
cauggucggaaaacaugcu

SEQ ID NO: 1747475 - RNA, 18 nt, Human
cauguguuggcagccucu

SEQ ID NO: 1747476 - RNA, 14 nt, Human
cauguguuccaagg

SEQ ID NO: 1747477 - RNA, 14 nt, Human
caugugcacaugca

SEQ ID NO: 1747478 - RNA, 21 nt, Human
caugugaugagaggaaaucac

SEQ ID NO: 1747479 - RNA, 20 nt, Human
caugugaugagaggaaauca

SEQ ID NO: 1747480 - RNA, 18 nt, Human
caugugaugagaggaaau

SEQ ID NO: 1747481 - RNA, 17 nt, Human
caugugaugagaggaaa

SEQ ID NO: 1747482 - RNA, 16 nt, Human
caugugaugagaggaa

SEQ ID NO: 1747483 - RNA, 15 nt, Human
caugugaugagagga

SEQ ID NO: 1747484 - RNA, 12 nt, Human
caugucuggcua

SEQ ID NO: 1747485 - RNA, 14 nt, Human
caugucucgacuca

SEQ ID NO: 1747486 - RNA, 15 nt, Human
cauguuugugauuga

SEQ ID NO: 1747487 - RNA, 22 nt, Human
cauuaaaaaaaaaaaaaaaagu

SEQ ID NO: 1747488 - RNA, 20 nt, Human
cauguuuuucuucucccuca

SEQ ID NO: 1747489 - RNA, 19 nt, Human
cauguuuuucuucucccuc

SEQ ID NO: 1747490 - RNA, 12 nt, Human
cauguuugugau

SEQ ID NO: 1747491 - RNA, 14 nt, Human
cauguuugugauug

SEQ ID NO: 1747492 - RNA, 20 nt, Human
cauguuucuuuguaaugaaa

SEQ ID NO: 1747493 - RNA, 11 nt, Human
cauuaaaauau

SEQ ID NO: 1747494 - RNA, 14 nt, Human
cauuaaaauauaau

SEQ ID NO: 1747495 - RNA, 23 nt, Human
cauccacugugccaugugccagg

SEQ ID NO: 1747496 - RNA, 17 nt, Human
cauccacugugccaugu

SEQ ID NO: 1747497 - RNA, 14 nt, Human
cauccacugugcca

SEQ ID NO: 1747498 - RNA, 12 nt, Human
cauccauccagg

SEQ ID NO: 1747499 - RNA, 13 nt, Human
caucccuccuggg

SEQ ID NO: 1747500 - RNA, 15 nt, Human
caucccucuggggcu

SEQ ID NO: 1747501 - RNA, 12 nt, Human
caucacccgcua

SEQ ID NO: 1747502 - RNA, 20 nt, Human
caucaccaacgucugugcca

SEQ ID NO: 1747503 - RNA, 15 nt, Human
caucaugucuggcua

SEQ ID NO: 1747504 - RNA, 14 nt, Human
caucaugucuggcu

SEQ ID NO: 1747505 - RNA, 13 nt, Human
caucaugucuggc

SEQ ID NO: 1747506 - RNA, 16 nt, Human
caucauccuaagcuau

SEQ ID NO: 1747507 - RNA, 23 nt, Human
cauauaagauucauauuuacuuc

SEQ ID NO: 1747508 - RNA, 16 nt, Human
cauauaagugauugcu

SEQ ID NO: 1747509 - RNA, 19 nt, Human
cauagugaugguuccccug

SEQ ID NO: 1747510 - RNA, 18 nt, Human
cauagugaugguuccccu

SEQ ID NO: 1747511 - RNA, 15 nt, Human
cauaguaugguggcu

SEQ ID NO: 1747512 - RNA, 17 nt, Human
cauaguaugguggcugg

SEQ ID NO: 1747513 - RNA, 16 nt, Human
cauaguaugguggcug

SEQ ID NO: 1747514 - RNA, 22 nt, Human
cauauucuguuggccaguguga

SEQ ID NO: 1747515 - RNA, 17 nt, Human
cauauugauuuccguua

SEQ ID NO: 1747516 - RNA, 21 nt, Human
cauauugauuuccguuaaaau

SEQ ID NO: 1747517 - RNA, 19 nt, Human
cauauuguuacugguacca

SEQ ID NO: 1747518 - RNA, 13 nt, Human
cauauuguuacug

SEQ ID NO: 1747519 - RNA, 14 nt, Human
caucaacaucuugg

SEQ ID NO: 1747520 - RNA, 16 nt, Human
cauauuuuaaacagag

SEQ ID NO: 1747521 - RNA, 17 nt, Human
cauauuuuaaacagagg

SEQ ID NO: 1747522 - RNA, 18 nt, Human
cauauuuuaaacagagga

SEQ ID NO: 1747523 - RNA, 12 nt, Human
caugaagacaga

SEQ ID NO: 1747524 - RNA, 19 nt, Human
caugaaaacacauuuuucu

SEQ ID NO: 1747525 - RNA, 21 nt, Human
caugaaaacacauuuuucuua

SEQ ID NO: 1747526 - RNA, 13 nt, Human
caugaaaacacau

SEQ ID NO: 1747527 - RNA, 14 nt, Human
caugaaaacacauu

SEQ ID NO: 1747528 - RNA, 15 nt, Human
caugaaaacacauuu

SEQ ID NO: 1747529 - RNA, 16 nt, Human
caugaaaacacauuuu

SEQ ID NO: 1747530 - RNA, 17 nt, Human
caugaaaacacauuuuu

SEQ ID NO: 1747531 - RNA, 18 nt, Human
caugaagauguagaggag

SEQ ID NO: 1747532 - RNA, 19 nt, Human
caugaagauguagaggaga

SEQ ID NO: 1747533 - RNA, 20 nt, Human
caugacucguauaugucuca

SEQ ID NO: 1747534 - RNA, 23 nt, Human
caugacucguauaugucucaggu

SEQ ID NO: 1747535 - RNA, 13 nt, Human
caugagcaucagg

SEQ ID NO: 1747536 - RNA, 21 nt, Human
caugagccucagcauccuggc

SEQ ID NO: 1747537 - RNA, 20 nt, Human
caugagccucagcauccugg

SEQ ID NO: 1747538 - RNA, 19 nt, Human
caugagccucagcauccug

SEQ ID NO: 1747539 - RNA, 18 nt, Human
caugagccucagcauccu

SEQ ID NO: 1747540 - RNA, 17 nt, Human
caugagccucagcaucc

SEQ ID NO: 1747541 - RNA, 15 nt, Human
caugagccucagcau

SEQ ID NO: 1747542 - RNA, 12 nt, Human
caugagccucag

SEQ ID NO: 1747543 - RNA, 23 nt, Human
caugagcaucaggccaggcccuc

SEQ ID NO: 1747544 - RNA, 22 nt, Human
caugagcaucaggccaggcccu

SEQ ID NO: 1747545 - RNA, 21 nt, Human
caugagcaucaggccaggccc

SEQ ID NO: 1747546 - RNA, 20 nt, Human
caugagcaucaggccaggcc

SEQ ID NO: 1747547 - RNA, 18 nt, Human
caugagcaucaggccagg

SEQ ID NO: 1747548 - RNA, 17 nt, Human
caugagcaucaggccag

SEQ ID NO: 1747549 - RNA, 16 nt, Human
caugagcaucaggcca

SEQ ID NO: 1747550 - RNA, 15 nt, Human
caugagcaucaggcc

SEQ ID NO: 1747551 - RNA, 19 nt, Human
caugagguacugagaguga

SEQ ID NO: 1747552 - RNA, 13 nt, Human
caugaguccccug

SEQ ID NO: 1747553 - RNA, 15 nt, Human
caugaguccccuguu

SEQ ID NO: 1747554 - RNA, 14 nt, Human
caugaguccccugu

SEQ ID NO: 1747555 - RNA, 23 nt, Human
caugaguccccuguuuguuucug

SEQ ID NO: 1747556 - RNA, 16 nt, Human
caugagguacugagag

SEQ ID NO: 1747557 - RNA, 23 nt, Human
caugaggaacaaggcaaggcugu

SEQ ID NO: 1747558 - RNA, 21 nt, Human
caugaggaacaaggcaaggcu

SEQ ID NO: 1747559 - RNA, 20 nt, Human
caugaggaacaaggcaaggc

SEQ ID NO: 1747560 - RNA, 17 nt, Human
caugaggaacaaggcaa

SEQ ID NO: 1747561 - RNA, 16 nt, Human
caugaggaacaaggca

SEQ ID NO: 1747562 - RNA, 23 nt, Human
caugagccucagcauccuggcac

SEQ ID NO: 1747563 - RNA, 22 nt, Human
caugagccucagcauccuggca

SEQ ID NO: 1747564 - RNA, 15 nt, Human
caucucuccuccuuu

SEQ ID NO: 1747565 - RNA, 16 nt, Human
caucucuacaaaaagc

SEQ ID NO: 1747566 - RNA, 17 nt, Human
caucucccuuuuccaug

SEQ ID NO: 1747567 - RNA, 19 nt, Human
cauccuacaagacacagug

SEQ ID NO: 1747568 - RNA, 18 nt, Human
cauccuacaagacacagu

SEQ ID NO: 1747569 - RNA, 21 nt, Human
caucuugaauuguaaggaaug

SEQ ID NO: 1747570 - RNA, 16 nt, Human
caucuugaauuguaag

SEQ ID NO: 1747571 - RNA, 17 nt, Human
caucuugcucugcugac

SEQ ID NO: 1747572 - RNA, 16 nt, Human
caucuugcucugcuga

SEQ ID NO: 1747573 - RNA, 19 nt, Human
caucuugcucugcugacag

SEQ ID NO: 1747574 - RNA, 22 nt, Human
cagggaaacagcuaaugggaca

SEQ ID NO: 1747575 - RNA, 20 nt, Human
cagggacagaggggguggcc

SEQ ID NO: 1747576 - RNA, 14 nt, Human
cagggacagagggg

SEQ ID NO: 1747577 - RNA, 13 nt, Human
cagggacagaggg

SEQ ID NO: 1747578 - RNA, 17 nt, Human
cagggaaggggacaagg

SEQ ID NO: 1747579 - RNA, 15 nt, Human
cagggaaggggacaa

SEQ ID NO: 1747580 - RNA, 15 nt, Human
cagggccuggcucag

SEQ ID NO: 1747581 - RNA, 14 nt, Human
cagggccuggcuca

SEQ ID NO: 1747582 - RNA, 13 nt, Human
cagggccuggcuc

SEQ ID NO: 1747583 - RNA, 19 nt, Human
cagggccuggcucaggugg

SEQ ID NO: 1747584 - RNA, 16 nt, Human
cagggccuggcucagg

SEQ ID NO: 1747585 - RNA, 19 nt, Human
caggggaggguagagcgga

SEQ ID NO: 1747586 - RNA, 20 nt, Human
cagggcauggccagguggcc

SEQ ID NO: 1747587 - RNA, 23 nt, Human
cagggacagaggggguggccucc

SEQ ID NO: 1747588 - RNA, 14 nt, Human
cagggcacaccggg

SEQ ID NO: 1747589 - RNA, 21 nt, Human
cagggcacaccgggcacucag

SEQ ID NO: 1747590 - RNA, 19 nt, Human
cagggcacaccgggcacuc

SEQ ID NO: 1747591 - RNA, 17 nt, Human
cagggcacaccgggcac

SEQ ID NO: 1747592 - RNA, 15 nt, Human
cagggcacaccgggc

SEQ ID NO: 1747593 - RNA, 23 nt, Human
cagggcacaccgggcacucagaa

SEQ ID NO: 1747594 - RNA, 22 nt, Human
cagggcacaccgggcacucaga

SEQ ID NO: 1747595 - RNA, 20 nt, Human
caggcuccuuuagcgcccag

SEQ ID NO: 1747596 - RNA, 19 nt, Human
caggcuccuuuagcgccca

SEQ ID NO: 1747597 - RNA, 14 nt, Human
caggcuccuuuagc

SEQ ID NO: 1747598 - RNA, 18 nt, Human
caggcuccugccaccacg

SEQ ID NO: 1747599 - RNA, 16 nt, Human
caggcuccugccacca

SEQ ID NO: 1747600 - RNA, 15 nt, Human
caggcuccugccacc

SEQ ID NO: 1747601 - RNA, 14 nt, Human
caggcuccugccac

SEQ ID NO: 1747602 - RNA, 13 nt, Human
caggcuccugcca

SEQ ID NO: 1747603 - RNA, 20 nt, Human
caggcucucaggccagcugc

SEQ ID NO: 1747604 - RNA, 19 nt, Human
caggcucucaggccagcug

SEQ ID NO: 1747605 - RNA, 18 nt, Human
caggcucucaggccagcu

SEQ ID NO: 1747606 - RNA, 17 nt, Human
caggcucucaggccagc

SEQ ID NO: 1747607 - RNA, 23 nt, Human
caggcucucaggccagcugcuug

SEQ ID NO: 1747608 - RNA, 21 nt, Human
caggcucucaggccagcugcu

SEQ ID NO: 1747609 - RNA, 16 nt, Human
caggcucucaggccag

SEQ ID NO: 1747610 - RNA, 15 nt, Human
caggcucucaggcca

SEQ ID NO: 1747611 - RNA, 14 nt, Human
caggcucucaggcc

SEQ ID NO: 1747612 - RNA, 13 nt, Human
caggcucucaggc

SEQ ID NO: 1747613 - RNA, 12 nt, Human
caggcucucagg

SEQ ID NO: 1747614 - RNA, 20 nt, Human
caggcucgggcuccccagcc

SEQ ID NO: 1747615 - RNA, 21 nt, Human
caggcuccuuuagcgcccagu

SEQ ID NO: 1747616 - RNA, 19 nt, Human
caggcccggcuccaggcuc

SEQ ID NO: 1747617 - RNA, 18 nt, Human
caggcccggcuccaggcu

SEQ ID NO: 1747618 - RNA, 17 nt, Human
caggcccggcuccaggc

SEQ ID NO: 1747619 - RNA, 15 nt, Human
caggcccucugccca

SEQ ID NO: 1747620 - RNA, 14 nt, Human
caggcccucugccc

SEQ ID NO: 1747621 - RNA, 13 nt, Human
caggcccucugcc

SEQ ID NO: 1747622 - RNA, 21 nt, Human
caggcccggcuccaggcuccu

SEQ ID NO: 1747623 - RNA, 20 nt, Human
caggcccggcuccaggcucc

SEQ ID NO: 1747624 - RNA, 22 nt, Human
caggcccggcuccaggcuccuu

SEQ ID NO: 1747625 - RNA, 22 nt, Human
caggcccucugcccacucccug

SEQ ID NO: 1747626 - RNA, 21 nt, Human
caggcccucugcccacucccu

SEQ ID NO: 1747627 - RNA, 20 nt, Human
caggcccucugcccacuccc

SEQ ID NO: 1747628 - RNA, 19 nt, Human
caggcccucugcccacucc

SEQ ID NO: 1747629 - RNA, 17 nt, Human
caggcccucugcccacu

SEQ ID NO: 1747630 - RNA, 16 nt, Human
caggcccucugcccac

SEQ ID NO: 1747631 - RNA, 15 nt, Human
caggcccuuccucuc

SEQ ID NO: 1747632 - RNA, 17 nt, Human
caggcccuuccucucca

SEQ ID NO: 1747633 - RNA, 16 nt, Human
caggcccuuccucucc

SEQ ID NO: 1747634 - RNA, 23 nt, Human
caggcccuuccucuccacugccu

SEQ ID NO: 1747635 - RNA, 21 nt, Human
caggcccuuccucuccacugc

SEQ ID NO: 1747636 - RNA, 20 nt, Human
caggcccuuccucuccacug

SEQ ID NO: 1747637 - RNA, 19 nt, Human
caggcccuuccucuccacu

SEQ ID NO: 1747638 - RNA, 23 nt, Human
caggcuuagucacugagacagcc

SEQ ID NO: 1747639 - RNA, 22 nt, Human
caggcuuagucacugagacagc

SEQ ID NO: 1747640 - RNA, 23 nt, Human
caggcuuuuuuaucaugugaaau

SEQ ID NO: 1747641 - RNA, 16 nt, Human
cagggaaacagcuaau

SEQ ID NO: 1747642 - RNA, 21 nt, Human
caggcuguaucccaugagccu

SEQ ID NO: 1747643 - RNA, 20 nt, Human
caggcuguaucccaugagcc

SEQ ID NO: 1747644 - RNA, 14 nt, Human
caggcuguauccca

SEQ ID NO: 1747645 - RNA, 23 nt, Human
caggcuggucucgaacuccugac

SEQ ID NO: 1747646 - RNA, 19 nt, Human
caggcuggucucaaacucu

SEQ ID NO: 1747647 - RNA, 22 nt, Human
caggcuggucucgaacuccuga

SEQ ID NO: 1747648 - RNA, 20 nt, Human
caggcuggucucgaacuccu

SEQ ID NO: 1747649 - RNA, 12 nt, Human
caggcuggucuc

SEQ ID NO: 1747650 - RNA, 23 nt, Human
caggcuggucucaaacuccugac

SEQ ID NO: 1747651 - RNA, 21 nt, Human
caggcuuagucacugagacag

SEQ ID NO: 1747652 - RNA, 20 nt, Human
caggcuuagucacugagaca

SEQ ID NO: 1747653 - RNA, 17 nt, Human
caggcuuagucacugag

SEQ ID NO: 1747654 - RNA, 16 nt, Human
caggcuuagucacuga

SEQ ID NO: 1747655 - RNA, 23 nt, Human
caggcuguaucccaugagccuca

SEQ ID NO: 1747656 - RNA, 22 nt, Human
caggcuguaucccaugagccuc

SEQ ID NO: 1747657 - RNA, 14 nt, Human
caggcugugaguuu

SEQ ID NO: 1747658 - RNA, 21 nt, Human
caggcugggucgcccuggacu

SEQ ID NO: 1747659 - RNA, 23 nt, Human
caggcugggcuucaguggcagcu

SEQ ID NO: 1747660 - RNA, 23 nt, Human
caggcugggucgcccuggacugu

SEQ ID NO: 1747661 - RNA, 16 nt, Human
caggcuggcccugccc

SEQ ID NO: 1747662 - RNA, 15 nt, Human
caggcuggcccugcc

SEQ ID NO: 1747663 - RNA, 14 nt, Human
caggcuggcccugc

SEQ ID NO: 1747664 - RNA, 12 nt, Human
caggcuggcccu

SEQ ID NO: 1747665 - RNA, 20 nt, Human
caggcugcucuugaacuccu

SEQ ID NO: 1747666 - RNA, 12 nt, Human
caggcugcucuu

SEQ ID NO: 1747667 - RNA, 23 nt, Human
caggcugcucuugaacuccugac

SEQ ID NO: 1747668 - RNA, 21 nt, Human
caggcugagccucagucuccc

SEQ ID NO: 1747669 - RNA, 17 nt, Human
caggcugagccucaguc

SEQ ID NO: 1747670 - RNA, 16 nt, Human
caggcugagccucagu

SEQ ID NO: 1747671 - RNA, 15 nt, Human
caggcugagccucag

SEQ ID NO: 1747672 - RNA, 14 nt, Human
caggcugagccuca

SEQ ID NO: 1747673 - RNA, 13 nt, Human
caggcugagccuc

SEQ ID NO: 1747674 - RNA, 12 nt, Human
caggcucuucuc

SEQ ID NO: 1747675 - RNA, 15 nt, Human
caggcucuucuccuu

SEQ ID NO: 1747676 - RNA, 14 nt, Human
caggcucuucuccu

SEQ ID NO: 1747677 - RNA, 22 nt, Human
caggcucuucuccuuucacaac

SEQ ID NO: 1747678 - RNA, 18 nt, Human
caggcucuucuccuuuca

SEQ ID NO: 1747679 - RNA, 12 nt, Human
caggcugagccu

SEQ ID NO: 1747680 - RNA, 18 nt, Human
caggauucuuccucccuc

SEQ ID NO: 1747681 - RNA, 17 nt, Human
caggauucuuccucccu

SEQ ID NO: 1747682 - RNA, 19 nt, Human
caggauguacaaggacagc

SEQ ID NO: 1747683 - RNA, 23 nt, Human
caggauggccgggcgcgguggcu

SEQ ID NO: 1747684 - RNA, 22 nt, Human
caggaugaugacuauggaaaga

SEQ ID NO: 1747685 - RNA, 20 nt, Human
caggaugaugacuauggaaa

SEQ ID NO: 1747686 - RNA, 18 nt, Human
caggaugaugacuaugga

SEQ ID NO: 1747687 - RNA, 14 nt, Human
caggaucagucuga

SEQ ID NO: 1747688 - RNA, 13 nt, Human
caggaucagucug

SEQ ID NO: 1747689 - RNA, 20 nt, Human
caggauucuuccucccuccc

SEQ ID NO: 1747690 - RNA, 21 nt, Human
caggcaagcaccuccugccuc

SEQ ID NO: 1747691 - RNA, 16 nt, Human
caggcaagcaccuccu

SEQ ID NO: 1747692 - RNA, 15 nt, Human
caggcaagcaccucc

SEQ ID NO: 1747693 - RNA, 14 nt, Human
caggcaagcaccuc

SEQ ID NO: 1747694 - RNA, 15 nt, Human
caggcagccaggcca

SEQ ID NO: 1747695 - RNA, 14 nt, Human
caggcagccaggcc

SEQ ID NO: 1747696 - RNA, 14 nt, Human
caggcaaugcuggc

SEQ ID NO: 1747697 - RNA, 17 nt, Human
caggcagccaggccaca

SEQ ID NO: 1747698 - RNA, 16 nt, Human
caggcagccaggccac

SEQ ID NO: 1747699 - RNA, 20 nt, Human
caggcaggaaggcugagagg

SEQ ID NO: 1747700 - RNA, 13 nt, Human
caggcagguccag

SEQ ID NO: 1747701 - RNA, 17 nt, Human
caggcauuccccaggag

SEQ ID NO: 1747702 - RNA, 16 nt, Human
caggcauuccccagga

SEQ ID NO: 1747703 - RNA, 15 nt, Human
caggcauuccccagg

SEQ ID NO: 1747704 - RNA, 13 nt, Human
caggcauucccca

SEQ ID NO: 1747705 - RNA, 20 nt, Human
caggcauguucucugaggac

SEQ ID NO: 1747706 - RNA, 19 nt, Human
caggcauguucucugagga

SEQ ID NO: 1747707 - RNA, 18 nt, Human
caggcauguucucugagg

SEQ ID NO: 1747708 - RNA, 15 nt, Human
caggcauguucucug

SEQ ID NO: 1747709 - RNA, 21 nt, Human
caggcauuccccaggaggcca

SEQ ID NO: 1747710 - RNA, 20 nt, Human
caggcauuccccaggaggcc

SEQ ID NO: 1747711 - RNA, 19 nt, Human
caggcauuccccaggaggc

SEQ ID NO: 1747712 - RNA, 18 nt, Human
caggcauuccccaggagg

SEQ ID NO: 1747713 - RNA, 23 nt, Human
caggcauuccccaggaggccagc

SEQ ID NO: 1747714 - RNA, 22 nt, Human
caggcauuccccaggaggccag

SEQ ID NO: 1747715 - RNA, 24 nt, Human
caggcauuccccaggaggccagcc

SEQ ID NO: 1747716 - RNA, 15 nt, Human
caggcaggugggaug

SEQ ID NO: 1747717 - RNA, 23 nt, Human
caggcaggucuugaacuccuggc

SEQ ID NO: 1747718 - RNA, 22 nt, Human
caggcaggucuugaacuccugg

SEQ ID NO: 1747719 - RNA, 13 nt, Human
caggcaggucuug

SEQ ID NO: 1747720 - RNA, 12 nt, Human
caggcaggucuu

SEQ ID NO: 1747721 - RNA, 19 nt, Human
caggcagguccaggguuug

SEQ ID NO: 1747722 - RNA, 15 nt, Human
caggcagguccaggg

SEQ ID NO: 1747723 - RNA, 14 nt, Human
caggcagguccagg

SEQ ID NO: 1747724 - RNA, 17 nt, Human
caggcaugguggcccac

SEQ ID NO: 1747725 - RNA, 13 nt, Human
caggccccugcca

SEQ ID NO: 1747726 - RNA, 21 nt, Human
caggccauuccccgucucugg

SEQ ID NO: 1747727 - RNA, 22 nt, Human
caggccaggcccucugcccacu

SEQ ID NO: 1747728 - RNA, 21 nt, Human
caggccaggcccucugcccac

SEQ ID NO: 1747729 - RNA, 20 nt, Human
caggccacaagacccuugug

SEQ ID NO: 1747730 - RNA, 18 nt, Human
caggccauuccccgucuc

SEQ ID NO: 1747731 - RNA, 18 nt, Human
caggccacaagacccuug

SEQ ID NO: 1747732 - RNA, 17 nt, Human
caggccacaagacccuu

SEQ ID NO: 1747733 - RNA, 13 nt, Human
caggccacaagac

SEQ ID NO: 1747734 - RNA, 23 nt, Human
caggccaaacucaccugccccuc

SEQ ID NO: 1747735 - RNA, 18 nt, Human
caggccaaacucaccugc

SEQ ID NO: 1747736 - RNA, 16 nt, Human
caggcccggcuccagg

SEQ ID NO: 1747737 - RNA, 20 nt, Human
caggccccugccacccuggg

SEQ ID NO: 1747738 - RNA, 19 nt, Human
caggccccugccacccugg

SEQ ID NO: 1747739 - RNA, 17 nt, Human
caggccccugccacccu

SEQ ID NO: 1747740 - RNA, 15 nt, Human
caggccccugccacc

SEQ ID NO: 1747741 - RNA, 15 nt, Human
caggcccggcuccag

SEQ ID NO: 1747742 - RNA, 14 nt, Human
caggcccggcucca

SEQ ID NO: 1747743 - RNA, 13 nt, Human
caggcccggcucc

SEQ ID NO: 1747744 - RNA, 16 nt, Human
caggacucugccuccu

SEQ ID NO: 1747745 - RNA, 15 nt, Human
caggacucugccucc

SEQ ID NO: 1747746 - RNA, 13 nt, Human
caggacucugccu

SEQ ID NO: 1747747 - RNA, 12 nt, Human
caggacucugcc

SEQ ID NO: 1747748 - RNA, 21 nt, Human
caggagcccugggaggcucug

SEQ ID NO: 1747749 - RNA, 17 nt, Human
caggagccuccugcccu

SEQ ID NO: 1747750 - RNA, 14 nt, Human
caggagccuccugc

SEQ ID NO: 1747751 - RNA, 20 nt, Human
caggagccuccugcccuuac

SEQ ID NO: 1747752 - RNA, 12 nt, Human
caggagugagca

SEQ ID NO: 1747753 - RNA, 19 nt, Human
caggagcagccacauuccu

SEQ ID NO: 1747754 - RNA, 14 nt, Human
caggagcagccaca

SEQ ID NO: 1747755 - RNA, 13 nt, Human
caggagcagccac

SEQ ID NO: 1747756 - RNA, 12 nt, Human
caggagcagcca

SEQ ID NO: 1747757 - RNA, 18 nt, Human
caggagccccgaggccuu

SEQ ID NO: 1747758 - RNA, 16 nt, Human
caggagccccgaggcc

SEQ ID NO: 1747759 - RNA, 15 nt, Human
caggagccccgaggc

SEQ ID NO: 1747760 - RNA, 22 nt, Human
caggagccccgaggccuucucu

SEQ ID NO: 1747761 - RNA, 20 nt, Human
caggagccccgaggccuucu

SEQ ID NO: 1747762 - RNA, 23 nt, Human
caggagccccgaggccuucucug

SEQ ID NO: 1747763 - RNA, 11 nt, Human
caggagcccug

SEQ ID NO: 1747764 - RNA, 19 nt, Human
caggagcccugggaggcuc

SEQ ID NO: 1747765 - RNA, 18 nt, Human
caggagcccugggaggcu

SEQ ID NO: 1747766 - RNA, 16 nt, Human
caggagcccugggagg

SEQ ID NO: 1747767 - RNA, 14 nt, Human
caggagcccuggga

SEQ ID NO: 1747768 - RNA, 23 nt, Human
caggaguuugagaccaaccuggg

SEQ ID NO: 1747769 - RNA, 22 nt, Human
caggaguuugagaccaaccugg

SEQ ID NO: 1747770 - RNA, 13 nt, Human
caggauagacuuu

SEQ ID NO: 1747771 - RNA, 21 nt, Human
caggaguuugagaccaaccug

SEQ ID NO: 1747772 - RNA, 19 nt, Human
caggaguuucguuuucaaa

SEQ ID NO: 1747773 - RNA, 16 nt, Human
caggaguuggaagugu

SEQ ID NO: 1747774 - RNA, 17 nt, Human
caggaguggguugauuu

SEQ ID NO: 1747775 - RNA, 13 nt, Human
caguaauaacucu

SEQ ID NO: 1747776 - RNA, 12 nt, Human
caguaauaacuc

SEQ ID NO: 1747777 - RNA, 23 nt, Human
caguaccauuuaauggggaggac

SEQ ID NO: 1747778 - RNA, 13 nt, Human
cagguucagcuug

SEQ ID NO: 1747779 - RNA, 15 nt, Human
cagguuccacagagg

SEQ ID NO: 1747780 - RNA, 19 nt, Human
cagguuccacagaggacac

SEQ ID NO: 1747781 - RNA, 12 nt, Human
cagguucagcuu

SEQ ID NO: 1747782 - RNA, 22 nt, Human
caguaaaugggggugcauuuga

SEQ ID NO: 1747783 - RNA, 21 nt, Human
caguaaaugggggugcauuug

SEQ ID NO: 1747784 - RNA, 12 nt, Human
caggugugaacc

SEQ ID NO: 1747785 - RNA, 19 nt, Human
caggugucccugcacuugc

SEQ ID NO: 1747786 - RNA, 18 nt, Human
caggugucccugcacuug

SEQ ID NO: 1747787 - RNA, 16 nt, Human
caggugucccugcacu

SEQ ID NO: 1747788 - RNA, 15 nt, Human
caggugucccugcac

SEQ ID NO: 1747789 - RNA, 23 nt, Human
caggugugaaccaccacacccag

SEQ ID NO: 1747790 - RNA, 22 nt, Human
caggugugaaccaccacaccca

SEQ ID NO: 1747791 - RNA, 19 nt, Human
caggugugaaccaccacac

SEQ ID NO: 1747792 - RNA, 16 nt, Human
caggugugaaccacca

SEQ ID NO: 1747793 - RNA, 21 nt, Human
caggugugagucaccaagccc

SEQ ID NO: 1747794 - RNA, 20 nt, Human
caggugugagucaccaagcc

SEQ ID NO: 1747795 - RNA, 16 nt, Human
caggugugagucacca

SEQ ID NO: 1747796 - RNA, 18 nt, Human
caggugugagccaccacg

SEQ ID NO: 1747797 - RNA, 23 nt, Human
caggugugagucaccaagcccag

SEQ ID NO: 1747798 - RNA, 22 nt, Human
caggugugagucaccaagccca

SEQ ID NO: 1747799 - RNA, 21 nt, Human
caggugugagccaccacgccc

SEQ ID NO: 1747800 - RNA, 14 nt, Human
caggugucccugca

SEQ ID NO: 1747801 - RNA, 11 nt, Human
caggugucccu

SEQ ID NO: 1747802 - RNA, 20 nt, Human
caggugguuauggagagggu

SEQ ID NO: 1747803 - RNA, 22 nt, Human
cagguggggucacucuggcagc

SEQ ID NO: 1747804 - RNA, 21 nt, Human
cagguggggucacucuggcag

SEQ ID NO: 1747805 - RNA, 20 nt, Human
cagguggggucacucuggca

SEQ ID NO: 1747806 - RNA, 19 nt, Human
cagguggggucacucuggc

SEQ ID NO: 1747807 - RNA, 18 nt, Human
caggugguuauggagagg

SEQ ID NO: 1747808 - RNA, 23 nt, Human
cagguggggucacucuggcagcu

SEQ ID NO: 1747809 - RNA, 18 nt, Human
cagguggggucacucugg

SEQ ID NO: 1747810 - RNA, 17 nt, Human
cagguggggcagcuuga

SEQ ID NO: 1747811 - RNA, 16 nt, Human
cagguggggcagcuug

SEQ ID NO: 1747812 - RNA, 15 nt, Human
cagguggggcagcuu

SEQ ID NO: 1747813 - RNA, 14 nt, Human
cagguggggcagcu

SEQ ID NO: 1747814 - RNA, 13 nt, Human
cagguggggcagc

SEQ ID NO: 1747815 - RNA, 20 nt, Human
caggguauuccagagugggg

SEQ ID NO: 1747816 - RNA, 21 nt, Human
caggguauuccagagugggga

SEQ ID NO: 1747817 - RNA, 22 nt, Human
cagggucccugguggcagcuca

SEQ ID NO: 1747818 - RNA, 19 nt, Human
cagggucccugguggcagc

SEQ ID NO: 1747819 - RNA, 18 nt, Human
cagggucccugguggcag

SEQ ID NO: 1747820 - RNA, 15 nt, Human
cagggucccuggugg

SEQ ID NO: 1747821 - RNA, 14 nt, Human
cagggucccuggug

SEQ ID NO: 1747822 - RNA, 12 nt, Human
cagggucccugg

SEQ ID NO: 1747823 - RNA, 15 nt, Human
cagggucucacucug

SEQ ID NO: 1747824 - RNA, 23 nt, Human
cagggucucacuauguugcccag

SEQ ID NO: 1747825 - RNA, 22 nt, Human
cagggucucacuauguugccca

SEQ ID NO: 1747826 - RNA, 21 nt, Human
cagggucucacuauguugccc

SEQ ID NO: 1747827 - RNA, 18 nt, Human
caggguccuguagcccua

SEQ ID NO: 1747828 - RNA, 23 nt, Human
cagggucccugguggcagcucac

SEQ ID NO: 1747829 - RNA, 17 nt, Human
cagguaacaggcagaua

SEQ ID NO: 1747830 - RNA, 16 nt, Human
cagguaacaggcagau

SEQ ID NO: 1747831 - RNA, 15 nt, Human
cagguaacaggcaga

SEQ ID NO: 1747832 - RNA, 14 nt, Human
cagguaacaggcag

SEQ ID NO: 1747833 - RNA, 16 nt, Human
cagggucucacucugu

SEQ ID NO: 1747834 - RNA, 17 nt, Human
cagggucucacucuguc

SEQ ID NO: 1747835 - RNA, 16 nt, Human
caggguuuugccaugu

SEQ ID NO: 1747836 - RNA, 21 nt, Human
caggggugggacacccuguga

SEQ ID NO: 1747837 - RNA, 20 nt, Human
caggggugggacacccugug

SEQ ID NO: 1747838 - RNA, 15 nt, Human
caggggugggacacc

SEQ ID NO: 1747839 - RNA, 14 nt, Human
caggggugggacac

SEQ ID NO: 1747840 - RNA, 18 nt, Human
caggucccuaauaaagcu

SEQ ID NO: 1747841 - RNA, 17 nt, Human
caggucccuaauaaagc

SEQ ID NO: 1747842 - RNA, 16 nt, Human
caggucccuaauaaag

SEQ ID NO: 1747843 - RNA, 15 nt, Human
caggucccuaauaaa

SEQ ID NO: 1747844 - RNA, 14 nt, Human
caggucccuaauaa

SEQ ID NO: 1747845 - RNA, 13 nt, Human
caggucccuaaua

SEQ ID NO: 1747846 - RNA, 12 nt, Human
caggucccuaau

SEQ ID NO: 1747847 - RNA, 11 nt, Human
caggucccuaa

SEQ ID NO: 1747848 - RNA, 21 nt, Human
cagguaacaggcagauacagg

SEQ ID NO: 1747849 - RNA, 20 nt, Human
cagguaacaggcagauacag

SEQ ID NO: 1747850 - RNA, 20 nt, Human
cagguaaucgaccugccucg

SEQ ID NO: 1747851 - RNA, 19 nt, Human
cagguaaucgaccugccuc

SEQ ID NO: 1747852 - RNA, 18 nt, Human
cagguaaucgaccugccu

SEQ ID NO: 1747853 - RNA, 17 nt, Human
cagguaaucgaccugcc

SEQ ID NO: 1747854 - RNA, 20 nt, Human
caggugagaagcagaggaag

SEQ ID NO: 1747855 - RNA, 13 nt, Human
caggugagaagca

SEQ ID NO: 1747856 - RNA, 21 nt, Human
caggugagaagcagaggaagg

SEQ ID NO: 1747857 - RNA, 21 nt, Human
cagguggccacuccagacccc

SEQ ID NO: 1747858 - RNA, 19 nt, Human
cagguggccacuccagacc

SEQ ID NO: 1747859 - RNA, 16 nt, Human
cagguggccacuccag

SEQ ID NO: 1747860 - RNA, 15 nt, Human
cagguggccacucca

SEQ ID NO: 1747861 - RNA, 23 nt, Human
caggucuugaacuccuggccuca

SEQ ID NO: 1747862 - RNA, 22 nt, Human
caggucuugaacuccuggccuc

SEQ ID NO: 1747863 - RNA, 21 nt, Human
caggucuugaacuccuggccu

SEQ ID NO: 1747864 - RNA, 20 nt, Human
caggucuugaacuccuggcc

SEQ ID NO: 1747865 - RNA, 19 nt, Human
caggucuugaacuccuggc

SEQ ID NO: 1747866 - RNA, 18 nt, Human
caggucuugaacuccugg

SEQ ID NO: 1747867 - RNA, 22 nt, Human
caggucccuaauaaagcugugu

SEQ ID NO: 1747868 - RNA, 21 nt, Human
caggucccuaauaaagcugug

SEQ ID NO: 1747869 - RNA, 20 nt, Human
caggucccuaauaaagcugu

SEQ ID NO: 1747870 - RNA, 19 nt, Human
caggucccuaauaaagcug

SEQ ID NO: 1747871 - RNA, 16 nt, Human
cagugaaagaaaauaa

SEQ ID NO: 1747872 - RNA, 20 nt, Human
cagugaaagaaaauaacaau

SEQ ID NO: 1747873 - RNA, 16 nt, Human
cagucuuggcucacug

SEQ ID NO: 1747874 - RNA, 17 nt, Human
cagucuuguauuaaguu

SEQ ID NO: 1747875 - RNA, 19 nt, Human
cagucuggaaugcaguggu

SEQ ID NO: 1747876 - RNA, 21 nt, Human
caguccuuaccagcagagcac

SEQ ID NO: 1747877 - RNA, 20 nt, Human
caguccuuaccagcagagca

SEQ ID NO: 1747878 - RNA, 19 nt, Human
caguccuuaccagcagagc

SEQ ID NO: 1747879 - RNA, 18 nt, Human
caguccuuaccagcagag

SEQ ID NO: 1747880 - RNA, 15 nt, Human
caguccuuaccagca

SEQ ID NO: 1747881 - RNA, 17 nt, Human
caguccucccaucucac

SEQ ID NO: 1747882 - RNA, 16 nt, Human
caguccucccaucuca

SEQ ID NO: 1747883 - RNA, 15 nt, Human
cagugagacagcucu

SEQ ID NO: 1747884 - RNA, 20 nt, Human
cagugaggcucugcccuugg

SEQ ID NO: 1747885 - RNA, 19 nt, Human
cagugaggcucugcccuug

SEQ ID NO: 1747886 - RNA, 18 nt, Human
cagugaggcucugcccuu

SEQ ID NO: 1747887 - RNA, 17 nt, Human
cagugaggcucugcccu

SEQ ID NO: 1747888 - RNA, 18 nt, Human
cagugagucgaggacagg

SEQ ID NO: 1747889 - RNA, 17 nt, Human
cagugagucgaggacag

SEQ ID NO: 1747890 - RNA, 21 nt, Human
cagugaggcucugcccuuggu

SEQ ID NO: 1747891 - RNA, 23 nt, Human
cagugaggguaaguauuuuccug

SEQ ID NO: 1747892 - RNA, 16 nt, Human
cagugaggcucugccc

SEQ ID NO: 1747893 - RNA, 15 nt, Human
cagugaggcucugcc

SEQ ID NO: 1747894 - RNA, 14 nt, Human
cagugaggcucugc

SEQ ID NO: 1747895 - RNA, 13 nt, Human
cagugaggcucug

SEQ ID NO: 1747896 - RNA, 12 nt, Human
cagugaggcucu

SEQ ID NO: 1747897 - RNA, 24 nt, Human
cagugagccgagauugcaccacug

SEQ ID NO: 1747898 - RNA, 17 nt, Human
cagugauuaccagggac

SEQ ID NO: 1747899 - RNA, 18 nt, Human
cagugauuaccagggacu

SEQ ID NO: 1747900 - RNA, 15 nt, Human
cagugcccuccagga

SEQ ID NO: 1747901 - RNA, 23 nt, Human
cagugagucgaggacagggaggu

SEQ ID NO: 1747902 - RNA, 22 nt, Human
cagugagucgaggacagggagg

SEQ ID NO: 1747903 - RNA, 20 nt, Human
cagugagucgaggacaggga

SEQ ID NO: 1747904 - RNA, 19 nt, Human
cagugagucgaggacaggg

SEQ ID NO: 1747905 - RNA, 22 nt, Human
cagugccuuauggaacacucug

SEQ ID NO: 1747906 - RNA, 21 nt, Human
cagugccuuauggaacacucu

SEQ ID NO: 1747907 - RNA, 20 nt, Human
cagugccuuauggaacacuc

SEQ ID NO: 1747908 - RNA, 19 nt, Human
cagugccuuauggaacacu

SEQ ID NO: 1747909 - RNA, 18 nt, Human
cagugccuuauggaacac

SEQ ID NO: 1747910 - RNA, 17 nt, Human
cagugccuuauggaaca

SEQ ID NO: 1747911 - RNA, 16 nt, Human
cagugccuuauggaac

SEQ ID NO: 1747912 - RNA, 15 nt, Human
cagugccuuauggaa

SEQ ID NO: 1747913 - RNA, 13 nt, Human
cagugccuuaugg

SEQ ID NO: 1747914 - RNA, 11 nt, Human
cagugccuuau

SEQ ID NO: 1747915 - RNA, 18 nt, Human
cagugccgagaaggaagc

SEQ ID NO: 1747916 - RNA, 15 nt, Human
cagugccgagaagga

SEQ ID NO: 1747917 - RNA, 23 nt, Human
cagugccuuauggaacacucuga

SEQ ID NO: 1747918 - RNA, 13 nt, Human
caguaucucaggg

SEQ ID NO: 1747919 - RNA, 12 nt, Human
caguauggcagc

SEQ ID NO: 1747920 - RNA, 21 nt, Human
caguaucuugaagacuuuucu

SEQ ID NO: 1747921 - RNA, 18 nt, Human
caguaucuugaagacuuu

SEQ ID NO: 1747922 - RNA, 12 nt, Human
caguaucuugaa

SEQ ID NO: 1747923 - RNA, 15 nt, Human
caguaucucagggcc

SEQ ID NO: 1747924 - RNA, 12 nt, Human
caguagugauag

SEQ ID NO: 1747925 - RNA, 19 nt, Human
caguauuacuucugcuaca

SEQ ID NO: 1747926 - RNA, 18 nt, Human
caguauuacuucugcuac

SEQ ID NO: 1747927 - RNA, 16 nt, Human
caguauuacuucugcu

SEQ ID NO: 1747928 - RNA, 13 nt, Human
caguccaugaaga

SEQ ID NO: 1747929 - RNA, 14 nt, Human
caguccauugaaag

SEQ ID NO: 1747930 - RNA, 16 nt, Human
caguccauagcagaga

SEQ ID NO: 1747931 - RNA, 16 nt, Human
cagucccugccaaugg

SEQ ID NO: 1747932 - RNA, 15 nt, Human
cagucccugccaaug

SEQ ID NO: 1747933 - RNA, 14 nt, Human
cagucccugccaau

SEQ ID NO: 1747934 - RNA, 13 nt, Human
cagucccugccaa

SEQ ID NO: 1747935 - RNA, 12 nt, Human
cagucccugcca

SEQ ID NO: 1747936 - RNA, 15 nt, Human
caguccucccaucuc

SEQ ID NO: 1747937 - RNA, 14 nt, Human
caguccucccaucu

SEQ ID NO: 1747938 - RNA, 13 nt, Human
caguccucccauc

SEQ ID NO: 1747939 - RNA, 12 nt, Human
caguccucccau

SEQ ID NO: 1747940 - RNA, 17 nt, Human
cagucccugccaaugga

SEQ ID NO: 1747941 - RNA, 17 nt, Human
cagucccccugccccag

SEQ ID NO: 1747942 - RNA, 16 nt, Human
cagucccccugcccca

SEQ ID NO: 1747943 - RNA, 23 nt, Human
caguccccgugaaggagagcccu

SEQ ID NO: 1747944 - RNA, 14 nt, Human
cagcuuugauauuu

SEQ ID NO: 1747945 - RNA, 23 nt, Human
cagcuuuguuuguugucagcuga

SEQ ID NO: 1747946 - RNA, 22 nt, Human
cagcuuuguuuguugucagcug

SEQ ID NO: 1747947 - RNA, 21 nt, Human
cagcuuuguuuguugucagcu

SEQ ID NO: 1747948 - RNA, 12 nt, Human
cagcuuuguuug

SEQ ID NO: 1747949 - RNA, 23 nt, Human
cagcuuuccucaaaacuucagac

SEQ ID NO: 1747950 - RNA, 23 nt, Human
cagcuuuccccaugucucgacuc

SEQ ID NO: 1747951 - RNA, 22 nt, Human
cagcuuuaaaaaauuaaucugg

SEQ ID NO: 1747952 - RNA, 20 nt, Human
cagcuuguaaauagcucagg

SEQ ID NO: 1747953 - RNA, 19 nt, Human
cagcuuguaaauagcucag

SEQ ID NO: 1747954 - RNA, 18 nt, Human
cagcuuguaaauagcuca

SEQ ID NO: 1747955 - RNA, 22 nt, Human
cagcuuguaaauagcucaggug

SEQ ID NO: 1747956 - RNA, 21 nt, Human
cagcuuguaaauagcucaggu

SEQ ID NO: 1747957 - RNA, 21 nt, Human
cagcuucauuuccugugucuu

SEQ ID NO: 1747958 - RNA, 20 nt, Human
cagcuucauuuccugugucu

SEQ ID NO: 1747959 - RNA, 21 nt, Human
cagcuugaccgugaggccaga

SEQ ID NO: 1747960 - RNA, 20 nt, Human
cagcuugaccgugaggccag

SEQ ID NO: 1747961 - RNA, 19 nt, Human
cagcuugaccgugaggcca

SEQ ID NO: 1747962 - RNA, 18 nt, Human
cagcuugaccgugaggcc

SEQ ID NO: 1747963 - RNA, 15 nt, Human
cagcuugaggguugg

SEQ ID NO: 1747964 - RNA, 14 nt, Human
cagcuugaggguug

SEQ ID NO: 1747965 - RNA, 21 nt, Human
cagcuugaggguugggcuggu

SEQ ID NO: 1747966 - RNA, 20 nt, Human
cagcuugaggguugggcugg

SEQ ID NO: 1747967 - RNA, 19 nt, Human
cagcuugaggguugggcug

SEQ ID NO: 1747968 - RNA, 18 nt, Human
cagcuugaggguugggcu

SEQ ID NO: 1747969 - RNA, 14 nt, Human
caggaagcagcuuu

SEQ ID NO: 1747970 - RNA, 18 nt, Human
caggaagccagcaggcuc

SEQ ID NO: 1747971 - RNA, 17 nt, Human
caggaagccagcaggcu

SEQ ID NO: 1747972 - RNA, 16 nt, Human
caggaagccagcaggc

SEQ ID NO: 1747973 - RNA, 14 nt, Human
caggaagccagcag

SEQ ID NO: 1747974 - RNA, 21 nt, Human
caggaagccagcaggcucuca

SEQ ID NO: 1747975 - RNA, 19 nt, Human
caggaagccagcaggcucu

SEQ ID NO: 1747976 - RNA, 22 nt, Human
caggaagccagcaggcucucag

SEQ ID NO: 1747977 - RNA, 19 nt, Human
caggaagcucagggccugg

SEQ ID NO: 1747978 - RNA, 18 nt, Human
caggaagcucagggccug

SEQ ID NO: 1747979 - RNA, 17 nt, Human
caggaagcucagggccu

SEQ ID NO: 1747980 - RNA, 16 nt, Human
caggaagcucagggcc

SEQ ID NO: 1747981 - RNA, 15 nt, Human
caggaagcucagggc

SEQ ID NO: 1747982 - RNA, 14 nt, Human
caggaagcucaggg

SEQ ID NO: 1747983 - RNA, 13 nt, Human
caggaagcucagg

SEQ ID NO: 1747984 - RNA, 21 nt, Human
caggaagcucagggccuggcu

SEQ ID NO: 1747985 - RNA, 20 nt, Human
caggaagcucagggccuggc

SEQ ID NO: 1747986 - RNA, 23 nt, Human
caggaagcucagggccuggcuca

SEQ ID NO: 1747987 - RNA, 17 nt, Human
caggaccuguggccaag

SEQ ID NO: 1747988 - RNA, 16 nt, Human
caggaaguagaggagg

SEQ ID NO: 1747989 - RNA, 15 nt, Human
caggaaguagaggag

SEQ ID NO: 1747990 - RNA, 20 nt, Human
caggaaguacuggagaaaau

SEQ ID NO: 1747991 - RNA, 18 nt, Human
caggaaguacuggagaaa

SEQ ID NO: 1747992 - RNA, 17 nt, Human
caggaaguacuggagaa

SEQ ID NO: 1747993 - RNA, 15 nt, Human
caggaaggcuaaagg

SEQ ID NO: 1747994 - RNA, 19 nt, Human
caggaaggcugagaggaga

SEQ ID NO: 1747995 - RNA, 16 nt, Human
caggaaguacuggaga

SEQ ID NO: 1747996 - RNA, 14 nt, Human
caggaaguacugga

SEQ ID NO: 1747997 - RNA, 12 nt, Human
caggaaguacug

SEQ ID NO: 1747998 - RNA, 17 nt, Human
cagcuggguuggaaaac

SEQ ID NO: 1747999 - RNA, 16 nt, Human
cagcuggguuggaaaa

SEQ ID NO: 1748000 - RNA, 18 nt, Human
cagcugguugagguuuca

SEQ ID NO: 1748001 - RNA, 23 nt, Human
cagcugggguggggaccucaggc

SEQ ID NO: 1748002 - RNA, 22 nt, Human
cagcugggguggggaccucagg

SEQ ID NO: 1748003 - RNA, 21 nt, Human
cagcugggguggggaccucag

SEQ ID NO: 1748004 - RNA, 22 nt, Human
cagcuggggccaggcugggucg

SEQ ID NO: 1748005 - RNA, 21 nt, Human
cagcuggggccaggcuggguc

SEQ ID NO: 1748006 - RNA, 22 nt, Human
cagcugcuuuugucuaugggac

SEQ ID NO: 1748007 - RNA, 23 nt, Human
cagcugcuuuugucuaugggacu

SEQ ID NO: 1748008 - RNA, 19 nt, Human
cagcuggccgggagccuga

SEQ ID NO: 1748009 - RNA, 18 nt, Human
cagcuggagaaauauggu

SEQ ID NO: 1748010 - RNA, 20 nt, Human
cagcuggggccaggcugggu

SEQ ID NO: 1748011 - RNA, 19 nt, Human
cagcuggggccaggcuggg

SEQ ID NO: 1748012 - RNA, 18 nt, Human
cagcuggggccaggcugg

SEQ ID NO: 1748013 - RNA, 23 nt, Human
cagcugggaucacauguggacuu

SEQ ID NO: 1748014 - RNA, 17 nt, Human
cagcugcuacuacuccu

SEQ ID NO: 1748015 - RNA, 21 nt, Human
cagcugcucaauaaaguacaa

SEQ ID NO: 1748016 - RNA, 22 nt, Human
cagcugcuugggcuucauccuc

SEQ ID NO: 1748017 - RNA, 21 nt, Human
cagcugcuugggcuucauccu

SEQ ID NO: 1748018 - RNA, 19 nt, Human
cagcugcuugggcuucauc

SEQ ID NO: 1748019 - RNA, 18 nt, Human
cagcugcuugggcuucau

SEQ ID NO: 1748020 - RNA, 16 nt, Human
cagcugcuugggcuuc

SEQ ID NO: 1748021 - RNA, 15 nt, Human
cagcugcuugggcuu

SEQ ID NO: 1748022 - RNA, 14 nt, Human
cagcugcuugggcu

SEQ ID NO: 1748023 - RNA, 13 nt, Human
cagcugcuugggc

SEQ ID NO: 1748024 - RNA, 24 nt, Human
cagcugcgguccacccaggagccc

SEQ ID NO: 1748025 - RNA, 23 nt, Human
cagcugcgguccacccaggagcc

SEQ ID NO: 1748026 - RNA, 22 nt, Human
cagcugcgguccacccaggagc

SEQ ID NO: 1748027 - RNA, 21 nt, Human
cagcugcgguccacccaggag

SEQ ID NO: 1748028 - RNA, 20 nt, Human
cagcugcgguccacccagga

SEQ ID NO: 1748029 - RNA, 19 nt, Human
cagcugcgguccacccagg

SEQ ID NO: 1748030 - RNA, 18 nt, Human
cagcugcgguccacccag

SEQ ID NO: 1748031 - RNA, 23 nt, Human
cagcugccugggaucccucaucc

SEQ ID NO: 1748032 - RNA, 18 nt, Human
cagcugccugggaucccu

SEQ ID NO: 1748033 - RNA, 20 nt, Human
cagcucugcauacucauuag

SEQ ID NO: 1748034 - RNA, 21 nt, Human
cagcucugcaagaauugaagc

SEQ ID NO: 1748035 - RNA, 16 nt, Human
cagcucugcaagaauu

SEQ ID NO: 1748036 - RNA, 15 nt, Human
cagcucugcaagaau

SEQ ID NO: 1748037 - RNA, 23 nt, Human
cagcuccuucuguccuacucugu

SEQ ID NO: 1748038 - RNA, 21 nt, Human
cagcuccuucuguccuacucu

SEQ ID NO: 1748039 - RNA, 17 nt, Human
cagcuccuucuguccua

SEQ ID NO: 1748040 - RNA, 16 nt, Human
cagcuccuucuguccu

SEQ ID NO: 1748041 - RNA, 20 nt, Human
cagcucagagagggugggag

SEQ ID NO: 1748042 - RNA, 19 nt, Human
cagcucagagaggguggga

SEQ ID NO: 1748043 - RNA, 17 nt, Human
cagcucagagagggugg

SEQ ID NO: 1748044 - RNA, 13 nt, Human
cagcucagagagg

SEQ ID NO: 1748045 - RNA, 23 nt, Human
cagcucuucuccaggcuguaucc

SEQ ID NO: 1748046 - RNA, 19 nt, Human
cagcucuucuccaggcugu

SEQ ID NO: 1748047 - RNA, 18 nt, Human
cagcucuucuccaggcug

SEQ ID NO: 1748048 - RNA, 17 nt, Human
cagcucuucuccaggcu

SEQ ID NO: 1748049 - RNA, 16 nt, Human
cagcucuucuccaggc

SEQ ID NO: 1748050 - RNA, 15 nt, Human
cagcucuucuccagg

SEQ ID NO: 1748051 - RNA, 14 nt, Human
cagcucuucuccag

SEQ ID NO: 1748052 - RNA, 13 nt, Human
cagcucuucucca

SEQ ID NO: 1748053 - RNA, 21 nt, Human
cagcucuuauauugccauuuc

SEQ ID NO: 1748054 - RNA, 10 nt, Human
cagcucuuau

SEQ ID NO: 1748055 - RNA, 23 nt, Human
cagcucuguccugggagugagcu

SEQ ID NO: 1748056 - RNA, 18 nt, Human
cagcucuguccugggagu

SEQ ID NO: 1748057 - RNA, 17 nt, Human
cagcucuguccugggag

SEQ ID NO: 1748058 - RNA, 16 nt, Human
cagcucuguccuggga

SEQ ID NO: 1748059 - RNA, 14 nt, Human
cagcucuguccugg

SEQ ID NO: 1748060 - RNA, 13 nt, Human
cagcucuguccug

SEQ ID NO: 1748061 - RNA, 12 nt, Human
cagcucuguccu

SEQ ID NO: 1748062 - RNA, 23 nt, Human
cagcucugguccauagagagcaa

SEQ ID NO: 1748063 - RNA, 22 nt, Human
cagcucugguccauagagagca

SEQ ID NO: 1748064 - RNA, 21 nt, Human
cagcucugguccauagagagc

SEQ ID NO: 1748065 - RNA, 18 nt, Human
cagcucugguccauagag

SEQ ID NO: 1748066 - RNA, 17 nt, Human
cagcucugguccauaga

SEQ ID NO: 1748067 - RNA, 16 nt, Human
cagcucugguccauag

SEQ ID NO: 1748068 - RNA, 13 nt, Human
cagcucuggucca

SEQ ID NO: 1748069 - RNA, 10 nt, Human
cagcucuggu

SEQ ID NO: 1748070 - RNA, 22 nt, Human
caggaagcucagggccuggcuc

SEQ ID NO: 1748071 - RNA, 23 nt, Human
cagccucccgaguagcugggacu

SEQ ID NO: 1748072 - RNA, 22 nt, Human
cagccucccgaguagcugggac

SEQ ID NO: 1748073 - RNA, 21 nt, Human
cagccucccgaguagcuggga

SEQ ID NO: 1748074 - RNA, 20 nt, Human
cagccucccgaguagcuggg

SEQ ID NO: 1748075 - RNA, 19 nt, Human
cagccucccgaguagcugg

SEQ ID NO: 1748076 - RNA, 23 nt, Human
cagccucccgaauagcugggacu

SEQ ID NO: 1748077 - RNA, 20 nt, Human
cagccugcuccagcuguuca

SEQ ID NO: 1748078 - RNA, 15 nt, Human
cagccuccugaguag

SEQ ID NO: 1748079 - RNA, 20 nt, Human
cagccuccugaguagcugga

SEQ ID NO: 1748080 - RNA, 19 nt, Human
cagccuggacccuguggau

SEQ ID NO: 1748081 - RNA, 15 nt, Human
cagccuggacccugu

SEQ ID NO: 1748082 - RNA, 10 nt, Human
cagccuggca

SEQ ID NO: 1748083 - RNA, 21 nt, Human
cagccuggcacagggcagugg

SEQ ID NO: 1748084 - RNA, 20 nt, Human
cagccuggcacagggcagug

SEQ ID NO: 1748085 - RNA, 13 nt, Human
cagccuggcacag

SEQ ID NO: 1748086 - RNA, 19 nt, Human
cagccugggcaaugugaua

SEQ ID NO: 1748087 - RNA, 16 nt, Human
cagccugggcaaugug

SEQ ID NO: 1748088 - RNA, 24 nt, Human
cagccuugaccauucuccaccugc

SEQ ID NO: 1748089 - RNA, 23 nt, Human
cagccuugaccauucuccaccug

SEQ ID NO: 1748090 - RNA, 22 nt, Human
cagccuugaccauucuccaccu

SEQ ID NO: 1748091 - RNA, 21 nt, Human
cagccuugaccauucuccacc

SEQ ID NO: 1748092 - RNA, 20 nt, Human
cagccuugaccauucuccac

SEQ ID NO: 1748093 - RNA, 17 nt, Human
cagccuugaccauucuc

SEQ ID NO: 1748094 - RNA, 19 nt, Human
cagcuacuugggaggcuga

SEQ ID NO: 1748095 - RNA, 16 nt, Human
cagcuaaugggacacu

SEQ ID NO: 1748096 - RNA, 15 nt, Human
cagcuaaugggacac

SEQ ID NO: 1748097 - RNA, 19 nt, Human
cagcuaaucagcauucuca

SEQ ID NO: 1748098 - RNA, 20 nt, Human
cagcuaacauggaaguacua

SEQ ID NO: 1748099 - RNA, 20 nt, Human
cagcgagcccugguggcagu

SEQ ID NO: 1748100 - RNA, 19 nt, Human
cagcgagcccugguggcag

SEQ ID NO: 1748101 - RNA, 17 nt, Human
cagcgagcccugguggc

SEQ ID NO: 1748102 - RNA, 16 nt, Human
cagcgagcccuggugg

SEQ ID NO: 1748103 - RNA, 13 nt, Human
cagcgagcccugg

SEQ ID NO: 1748104 - RNA, 18 nt, Human
cagcuaacauggaaguac

SEQ ID NO: 1748105 - RNA, 19 nt, Human
cagcuaacauggaaguacu

SEQ ID NO: 1748106 - RNA, 21 nt, Human
cagcgagcccugguggcagug

SEQ ID NO: 1748107 - RNA, 19 nt, Human
cagcucaccagccccagug

SEQ ID NO: 1748108 - RNA, 17 nt, Human
cagcucaccagccccag

SEQ ID NO: 1748109 - RNA, 16 nt, Human
cagcucaccagcccca

SEQ ID NO: 1748110 - RNA, 15 nt, Human
cagcucaccagcccc

SEQ ID NO: 1748111 - RNA, 13 nt, Human
cagcucaccagcc

SEQ ID NO: 1748112 - RNA, 17 nt, Human
cagcucaccucucccuu

SEQ ID NO: 1748113 - RNA, 16 nt, Human
cagcucaccucucccu

SEQ ID NO: 1748114 - RNA, 15 nt, Human
cagcucaccucuccc

SEQ ID NO: 1748115 - RNA, 13 nt, Human
cagcucaccucuc

SEQ ID NO: 1748116 - RNA, 21 nt, Human
cagcucaccagccccagugcc

SEQ ID NO: 1748117 - RNA, 20 nt, Human
cagcucaccagccccagugc

SEQ ID NO: 1748118 - RNA, 22 nt, Human
cagcucaccagccccagugccc

SEQ ID NO: 1748119 - RNA, 20 nt, Human
cagcucaccucucccuugga

SEQ ID NO: 1748120 - RNA, 19 nt, Human
cagcucaccucucccuugg

SEQ ID NO: 1748121 - RNA, 14 nt, Human
cagcucacugcaac

SEQ ID NO: 1748122 - RNA, 12 nt, Human
cagcucacugca

SEQ ID NO: 1748123 - RNA, 12 nt, Human
cagcucagagag

SEQ ID NO: 1748124 - RNA, 15 nt, Human
cagcucacugcaacc

SEQ ID NO: 1748125 - RNA, 21 nt, Human
cagcucacugcaaccuucgcc

SEQ ID NO: 1748126 - RNA, 18 nt, Human
cagccucaaccuccuggg

SEQ ID NO: 1748127 - RNA, 17 nt, Human
cagccucaaccuccugg

SEQ ID NO: 1748128 - RNA, 21 nt, Human
cagccucaaccuccugggcua

SEQ ID NO: 1748129 - RNA, 20 nt, Human
cagccucaaccuccugggcu

SEQ ID NO: 1748130 - RNA, 19 nt, Human
cagccucaaccuccugggc

SEQ ID NO: 1748131 - RNA, 20 nt, Human
cagccucacaguccuuacca

SEQ ID NO: 1748132 - RNA, 15 nt, Human
cagccucacaguccu

SEQ ID NO: 1748133 - RNA, 14 nt, Human
cagccucacagucc

SEQ ID NO: 1748134 - RNA, 20 nt, Human
cagccuccaagcuccaucuc

SEQ ID NO: 1748135 - RNA, 14 nt, Human
cagccuccaagcuc

SEQ ID NO: 1748136 - RNA, 22 nt, Human
cagccucccgaauagcugggac

SEQ ID NO: 1748137 - RNA, 21 nt, Human
cagccucccgaauagcuggga

SEQ ID NO: 1748138 - RNA, 20 nt, Human
cagccucccgaauagcuggg

SEQ ID NO: 1748139 - RNA, 23 nt, Human
cagccucccaaagugcugggauu

SEQ ID NO: 1748140 - RNA, 21 nt, Human
cagccucccaaagugcuggga

SEQ ID NO: 1748141 - RNA, 20 nt, Human
cagccucccaaagugcuggg

SEQ ID NO: 1748142 - RNA, 19 nt, Human
cagccucccaaagugcugg

SEQ ID NO: 1748143 - RNA, 14 nt, Human
cagccuccaugcug

SEQ ID NO: 1748144 - RNA, 20 nt, Human
cagccuccaugcugccucca

SEQ ID NO: 1748145 - RNA, 17 nt, Human
cagccuccaugcugccu

SEQ ID NO: 1748146 - RNA, 15 nt, Human
cagccuccaugcugc

SEQ ID NO: 1748147 - RNA, 21 nt, Human
cagccguguaaccauggaccc

SEQ ID NO: 1748148 - RNA, 20 nt, Human
cagccgugccuucagcucua

SEQ ID NO: 1748149 - RNA, 18 nt, Human
cagccgugccuucagcuc

SEQ ID NO: 1748150 - RNA, 16 nt, Human
cagccgugccuucagc

SEQ ID NO: 1748151 - RNA, 14 nt, Human
cagccgugccuuca

SEQ ID NO: 1748152 - RNA, 9 nt, Human
cagccgugc

SEQ ID NO: 1748153 - RNA, 23 nt, Human
cagcccugcuuugggcugcccug

SEQ ID NO: 1748154 - RNA, 22 nt, Human
cagcccugcuuugggcugcccu

SEQ ID NO: 1748155 - RNA, 21 nt, Human
cagcccugcuuugggcugccc

SEQ ID NO: 1748156 - RNA, 20 nt, Human
cagcccugcuuugggcugcc

SEQ ID NO: 1748157 - RNA, 19 nt, Human
cagcccugcuuugggcugc

SEQ ID NO: 1748158 - RNA, 13 nt, Human
cagcccugcuuug

SEQ ID NO: 1748159 - RNA, 11 nt, Human
cagcccugcuu

SEQ ID NO: 1748160 - RNA, 16 nt, Human
cagcccugcagagggc

SEQ ID NO: 1748161 - RNA, 15 nt, Human
cagcccugcagaggg

SEQ ID NO: 1748162 - RNA, 14 nt, Human
cagcccugcagagg

SEQ ID NO: 1748163 - RNA, 13 nt, Human
cagcccugcagag

SEQ ID NO: 1748164 - RNA, 20 nt, Human
cagcccugcagagggcacag

SEQ ID NO: 1748165 - RNA, 18 nt, Human
cagcccugcagagggcac

SEQ ID NO: 1748166 - RNA, 22 nt, Human
cagcccucccugccccucccuu

SEQ ID NO: 1748167 - RNA, 18 nt, Human
cagcccucccugccccuc

SEQ ID NO: 1748168 - RNA, 17 nt, Human
cagcccucccugccccu

SEQ ID NO: 1748169 - RNA, 16 nt, Human
cagcccucccugcccc

SEQ ID NO: 1748170 - RNA, 14 nt, Human
cagccccauucugc

SEQ ID NO: 1748171 - RNA, 13 nt, Human
cagccccauucug

SEQ ID NO: 1748172 - RNA, 22 nt, Human
cagccccauccucuguacagag

SEQ ID NO: 1748173 - RNA, 16 nt, Human
cagccccauccucugu

SEQ ID NO: 1748174 - RNA, 14 nt, Human
cagccccauccucu

SEQ ID NO: 1748175 - RNA, 13 nt, Human
cagccccauccuc

SEQ ID NO: 1748176 - RNA, 12 nt, Human
cagccccauccu

SEQ ID NO: 1748177 - RNA, 22 nt, Human
cagccccaucccaaacccuuca

SEQ ID NO: 1748178 - RNA, 23 nt, Human
cagccccuggaugcagccucaca

SEQ ID NO: 1748179 - RNA, 18 nt, Human
cagccccauucugccugc

SEQ ID NO: 1748180 - RNA, 17 nt, Human
cagccccauucugccug

SEQ ID NO: 1748181 - RNA, 16 nt, Human
cagccccauucugccu

SEQ ID NO: 1748182 - RNA, 21 nt, Human
cagccccuguucuggcagagu

SEQ ID NO: 1748183 - RNA, 20 nt, Human
cagccccuguucuggcagag

SEQ ID NO: 1748184 - RNA, 21 nt, Human
cagccccaucccaaacccuuc

SEQ ID NO: 1748185 - RNA, 11 nt, Human
cagccccaucc

SEQ ID NO: 1748186 - RNA, 18 nt, Human
cagccccagugcccacag

SEQ ID NO: 1748187 - RNA, 17 nt, Human
cagccccagugcccaca

SEQ ID NO: 1748188 - RNA, 16 nt, Human
cagccccagugcccac

SEQ ID NO: 1748189 - RNA, 15 nt, Human
cagccccagugccca

SEQ ID NO: 1748190 - RNA, 14 nt, Human
cagccccagugccc

SEQ ID NO: 1748191 - RNA, 13 nt, Human
cagccccagugcc

SEQ ID NO: 1748192 - RNA, 16 nt, Human
cagcccgggcucugcc

SEQ ID NO: 1748193 - RNA, 15 nt, Human
cagcccgggcucugc

SEQ ID NO: 1748194 - RNA, 14 nt, Human
cagcccgggcucug

SEQ ID NO: 1748195 - RNA, 13 nt, Human
cagcccgggcucu

SEQ ID NO: 1748196 - RNA, 21 nt, Human
cagccccuucugacccaugcu

SEQ ID NO: 1748197 - RNA, 19 nt, Human
cagccccuucugacccaug

SEQ ID NO: 1748198 - RNA, 17 nt, Human
cagccccuucugaccca

SEQ ID NO: 1748199 - RNA, 16 nt, Human
cagccccuucugaccc

SEQ ID NO: 1748200 - RNA, 23 nt, Human
cagccccuucugacccaugcugc

SEQ ID NO: 1748201 - RNA, 22 nt, Human
cagccccuucugacccaugcug

SEQ ID NO: 1748202 - RNA, 24 nt, Human
cagccccuucugacccaugcugcc

SEQ ID NO: 1748203 - RNA, 22 nt, Human
cagcccuccaucuaaacugccc

SEQ ID NO: 1748204 - RNA, 23 nt, Human
cagcccuccaucuaaacugcccc

SEQ ID NO: 1748205 - RNA, 15 nt, Human
cagcccucccugccc

SEQ ID NO: 1748206 - RNA, 13 nt, Human
cagcccucccugc

SEQ ID NO: 1748207 - RNA, 20 nt, Human
cagcccgggcucugccuccc

SEQ ID NO: 1748208 - RNA, 19 nt, Human
cagcccgggcucugccucc

SEQ ID NO: 1748209 - RNA, 18 nt, Human
cagcccgggcucugccuc

SEQ ID NO: 1748210 - RNA, 17 nt, Human
cagcccgggcucugccu

SEQ ID NO: 1748211 - RNA, 22 nt, Human
cagcccgggcucugccucccau

SEQ ID NO: 1748212 - RNA, 21 nt, Human
cagcccgggcucugccuccca

SEQ ID NO: 1748213 - RNA, 20 nt, Human
cagcauccuggcacccggcc

SEQ ID NO: 1748214 - RNA, 19 nt, Human
cagcauccuggcacccggc

SEQ ID NO: 1748215 - RNA, 21 nt, Human
cagcauccuggcacccggccc

SEQ ID NO: 1748216 - RNA, 14 nt, Human
cagcauucucacuc

SEQ ID NO: 1748217 - RNA, 15 nt, Human
cagcauucucacucc

SEQ ID NO: 1748218 - RNA, 16 nt, Human
cagccaaagccuccuc

SEQ ID NO: 1748219 - RNA, 15 nt, Human
cagccaaagccuccu

SEQ ID NO: 1748220 - RNA, 21 nt, Human
cagccaaagccuccuccagcc

SEQ ID NO: 1748221 - RNA, 18 nt, Human
cagccaaagccuccucca

SEQ ID NO: 1748222 - RNA, 18 nt, Human
cagccaacuauggccugu

SEQ ID NO: 1748223 - RNA, 15 nt, Human
cagcaggcucucagg

SEQ ID NO: 1748224 - RNA, 14 nt, Human
cagcaggcucucag

SEQ ID NO: 1748225 - RNA, 12 nt, Human
cagcaggcucuc

SEQ ID NO: 1748226 - RNA, 18 nt, Human
cagcagccuggacccugu

SEQ ID NO: 1748227 - RNA, 15 nt, Human
cagcagccuggaccc

SEQ ID NO: 1748228 - RNA, 14 nt, Human
cagcagccuggacc

SEQ ID NO: 1748229 - RNA, 12 nt, Human
cagcagccugga

SEQ ID NO: 1748230 - RNA, 22 nt, Human
cagcagccuggacccuguggau

SEQ ID NO: 1748231 - RNA, 19 nt, Human
cagcagccuggacccugug

SEQ ID NO: 1748232 - RNA, 18 nt, Human
cagcagggagggcuucug

SEQ ID NO: 1748233 - RNA, 22 nt, Human
cagcaggcucucaggccagcug

SEQ ID NO: 1748234 - RNA, 20 nt, Human
cagcaggcucucaggccagc

SEQ ID NO: 1748235 - RNA, 19 nt, Human
cagcaggcucucaggccag

SEQ ID NO: 1748236 - RNA, 18 nt, Human
cagcaggcucucaggcca

SEQ ID NO: 1748237 - RNA, 17 nt, Human
cagcaggcucucaggcc

SEQ ID NO: 1748238 - RNA, 16 nt, Human
cagcaggcucucaggc

SEQ ID NO: 1748239 - RNA, 17 nt, Human
cagcauccuggcacccg

SEQ ID NO: 1748240 - RNA, 16 nt, Human
cagcauccuggcaccc

SEQ ID NO: 1748241 - RNA, 15 nt, Human
cagcauccuggcacc

SEQ ID NO: 1748242 - RNA, 14 nt, Human
cagcauccuggcac

SEQ ID NO: 1748243 - RNA, 20 nt, Human
cagcagggagggcuucugcc

SEQ ID NO: 1748244 - RNA, 17 nt, Human
cagccacauuccugaug

SEQ ID NO: 1748245 - RNA, 15 nt, Human
cagccacauuccuga

SEQ ID NO: 1748246 - RNA, 19 nt, Human
cagccacauuccugaugcu

SEQ ID NO: 1748247 - RNA, 14 nt, Human
cagccacauuccug

SEQ ID NO: 1748248 - RNA, 22 nt, Human
cagccacggccaggccagaggg

SEQ ID NO: 1748249 - RNA, 21 nt, Human
cagccacggccaggccagagg

SEQ ID NO: 1748250 - RNA, 19 nt, Human
cagccacggccaggccaga

SEQ ID NO: 1748251 - RNA, 18 nt, Human
cagccacggccaggccag

SEQ ID NO: 1748252 - RNA, 17 nt, Human
cagccacggccaggcca

SEQ ID NO: 1748253 - RNA, 16 nt, Human
cagccacggccaggcc

SEQ ID NO: 1748254 - RNA, 15 nt, Human
cagccacggccaggc

SEQ ID NO: 1748255 - RNA, 14 nt, Human
cagccacggccagg

SEQ ID NO: 1748256 - RNA, 22 nt, Human
cagccaguaaaugggggugcau

SEQ ID NO: 1748257 - RNA, 23 nt, Human
cagccacggccaggccagaggga

SEQ ID NO: 1748258 - RNA, 18 nt, Human
cagcccacuucugccaua

SEQ ID NO: 1748259 - RNA, 21 nt, Human
cagccccaaaacucuccucug

SEQ ID NO: 1748260 - RNA, 20 nt, Human
cagccccaaaacucuccucu

SEQ ID NO: 1748261 - RNA, 22 nt, Human
cagccccaaaacucuccucugc

SEQ ID NO: 1748262 - RNA, 15 nt, Human
cagcccacuucugcc

SEQ ID NO: 1748263 - RNA, 15 nt, Human
cagcccaccccucaa

SEQ ID NO: 1748264 - RNA, 19 nt, Human
cagcccacauagugauggu

SEQ ID NO: 1748265 - RNA, 18 nt, Human
cagcaaaagaugcuucuc

SEQ ID NO: 1748266 - RNA, 22 nt, Human
cagauuuuuuacagcugccugc

SEQ ID NO: 1748267 - RNA, 19 nt, Human
cagauuuuuuacagcugcc

SEQ ID NO: 1748268 - RNA, 14 nt, Human
cagauucuuuccug

SEQ ID NO: 1748269 - RNA, 23 nt, Human
cagaugggugcuuggaggaagga

SEQ ID NO: 1748270 - RNA, 18 nt, Human
cagaugggugcuuggagg

SEQ ID NO: 1748271 - RNA, 15 nt, Human
cagaugcugugcaaa

SEQ ID NO: 1748272 - RNA, 23 nt, Human
cagcagccccugcacaaagcccu

SEQ ID NO: 1748273 - RNA, 16 nt, Human
cagcagccccugcaca

SEQ ID NO: 1748274 - RNA, 13 nt, Human
cagcagccccugc

SEQ ID NO: 1748275 - RNA, 19 nt, Human
cagcagaaaugccuuaccc

SEQ ID NO: 1748276 - RNA, 22 nt, Human
cagcagaaaugccuuacccuca

SEQ ID NO: 1748277 - RNA, 13 nt, Human
cagcagagcaccu

SEQ ID NO: 1748278 - RNA, 11 nt, Human
cagcagagcac

SEQ ID NO: 1748279 - RNA, 15 nt, Human
cagcagaaaugccuu

SEQ ID NO: 1748280 - RNA, 17 nt, Human
cagcagaaaugccuuac

SEQ ID NO: 1748281 - RNA, 17 nt, Human
cagcaaggagauuuaca

SEQ ID NO: 1748282 - RNA, 18 nt, Human
cagcaaggagauuuacaa

SEQ ID NO: 1748283 - RNA, 12 nt, Human
cagcaagugaga

SEQ ID NO: 1748284 - RNA, 17 nt, Human
cagcaagugagagcugg

SEQ ID NO: 1748285 - RNA, 16 nt, Human
cagcaagugagagcug

SEQ ID NO: 1748286 - RNA, 15 nt, Human
cagcaagugagagcu

SEQ ID NO: 1748287 - RNA, 14 nt, Human
cagcaagugagagc

SEQ ID NO: 1748288 - RNA, 21 nt, Human
cagcaagugagagcugggugu

SEQ ID NO: 1748289 - RNA, 19 nt, Human
cagcaagugagagcugggu

SEQ ID NO: 1748290 - RNA, 13 nt, Human
cagcaauaaagca

SEQ ID NO: 1748291 - RNA, 21 nt, Human
cagcaauaaagcagcguuucu

SEQ ID NO: 1748292 - RNA, 22 nt, Human
cagcaauaaagcagcguuucua

SEQ ID NO: 1748293 - RNA, 20 nt, Human
cagcaauucuccugccucag

SEQ ID NO: 1748294 - RNA, 19 nt, Human
cagcaauucuccugccuca

SEQ ID NO: 1748295 - RNA, 18 nt, Human
cagcaauucuccugccuc

SEQ ID NO: 1748296 - RNA, 17 nt, Human
cagcaauucuccugccu

SEQ ID NO: 1748297 - RNA, 16 nt, Human
cagcaauucuccugcc

SEQ ID NO: 1748298 - RNA, 15 nt, Human
cagcaauucuccugc

SEQ ID NO: 1748299 - RNA, 14 nt, Human
cagcucaccagccc

SEQ ID NO: 1748300 - RNA, 18 nt, Human
cagccuccaugcugccuc

SEQ ID NO: 1748301 - RNA, 20 nt, Human
cagaccacaaaacuuuucua

SEQ ID NO: 1748302 - RNA, 14 nt, Human
cagaccacaaaacu

SEQ ID NO: 1748303 - RNA, 18 nt, Human
cagaccccuggcuuuuca

SEQ ID NO: 1748304 - RNA, 16 nt, Human
cagaccccuggcuuuu

SEQ ID NO: 1748305 - RNA, 15 nt, Human
cagaccccuggcuuu

SEQ ID NO: 1748306 - RNA, 14 nt, Human
cagaccccuggcuu

SEQ ID NO: 1748307 - RNA, 13 nt, Human
cagaccccuggcu

SEQ ID NO: 1748308 - RNA, 21 nt, Human
cagacccugcccugugggccc

SEQ ID NO: 1748309 - RNA, 17 nt, Human
cagacccugcccugugg

SEQ ID NO: 1748310 - RNA, 16 nt, Human
cagacccugcccugug

SEQ ID NO: 1748311 - RNA, 15 nt, Human
cagacccugcccugu

SEQ ID NO: 1748312 - RNA, 22 nt, Human
cagacccugcccugugggcccc

SEQ ID NO: 1748313 - RNA, 14 nt, Human
cagacccggcugcg

SEQ ID NO: 1748314 - RNA, 12 nt, Human
cagacccggcug

SEQ ID NO: 1748315 - RNA, 23 nt, Human
cagaccccuggcuuuucacugcu

SEQ ID NO: 1748316 - RNA, 22 nt, Human
cagaccccuggcuuuucacugc

SEQ ID NO: 1748317 - RNA, 21 nt, Human
cagaccccuggcuuuucacug

SEQ ID NO: 1748318 - RNA, 12 nt, Human
cagacccugccc

SEQ ID NO: 1748319 - RNA, 16 nt, Human
cagacccggcugcgug

SEQ ID NO: 1748320 - RNA, 14 nt, Human
cagacccugcccug

SEQ ID NO: 1748321 - RNA, 13 nt, Human
cagacccugcccu

SEQ ID NO: 1748322 - RNA, 23 nt, Human
cagagaaaguacuucuccacccu

SEQ ID NO: 1748323 - RNA, 19 nt, Human
cagagaaaguacuucucca

SEQ ID NO: 1748324 - RNA, 20 nt, Human
cagacuuuuuuuaaauagua

SEQ ID NO: 1748325 - RNA, 17 nt, Human
cagacauagaauuaaca

SEQ ID NO: 1748326 - RNA, 19 nt, Human
cagacauagaauuaacaca

SEQ ID NO: 1748327 - RNA, 19 nt, Human
cagacauacuaaccagcag

SEQ ID NO: 1748328 - RNA, 22 nt, Human
cagacaccuugacagggcacac

SEQ ID NO: 1748329 - RNA, 20 nt, Human
cagacaccuugacagggcac

SEQ ID NO: 1748330 - RNA, 19 nt, Human
cagacaccuugacagggca

SEQ ID NO: 1748331 - RNA, 20 nt, Human
cagacaguuaagagaaauga

SEQ ID NO: 1748332 - RNA, 23 nt, Human
cagacacaggcccggcuccaggc

SEQ ID NO: 1748333 - RNA, 22 nt, Human
cagacacaggcccggcuccagg

SEQ ID NO: 1748334 - RNA, 21 nt, Human
cagacacaggcccggcuccag

SEQ ID NO: 1748335 - RNA, 18 nt, Human
cagacacaggcccggcuc

SEQ ID NO: 1748336 - RNA, 17 nt, Human
cagacacaggcccggcu

SEQ ID NO: 1748337 - RNA, 15 nt, Human
cagacacaggcccgg

SEQ ID NO: 1748338 - RNA, 14 nt, Human
cagacacaggcccg

SEQ ID NO: 1748339 - RNA, 13 nt, Human
cagacacaggccc

SEQ ID NO: 1748340 - RNA, 23 nt, Human
cagacacauguccaagaagccca

SEQ ID NO: 1748341 - RNA, 22 nt, Human
cagacacauguccaagaagccc

SEQ ID NO: 1748342 - RNA, 21 nt, Human
cagacacauguccaagaagcc

SEQ ID NO: 1748343 - RNA, 17 nt, Human
cagacacauguccaaga

SEQ ID NO: 1748344 - RNA, 14 nt, Human
cagacacaugucca

SEQ ID NO: 1748345 - RNA, 22 nt, Human
cagacaaagcgugguggacaug

SEQ ID NO: 1748346 - RNA, 20 nt, Human
cagacaacaaaccuguuucu

SEQ ID NO: 1748347 - RNA, 20 nt, Human
cagaauuucccaaagcagug

SEQ ID NO: 1748348 - RNA, 19 nt, Human
cagaauuucccaaagcagu

SEQ ID NO: 1748349 - RNA, 18 nt, Human
cagaauuucccaaagcag

SEQ ID NO: 1748350 - RNA, 17 nt, Human
cagaauuucccaaagca

SEQ ID NO: 1748351 - RNA, 12 nt, Human
cagacaaagcgu

SEQ ID NO: 1748352 - RNA, 24 nt, Human
cagaauuucccaaagcagugcaug

SEQ ID NO: 1748353 - RNA, 15 nt, Human
cagaauucucuaguu

SEQ ID NO: 1748354 - RNA, 18 nt, Human
cagaauucucuaguuuga

SEQ ID NO: 1748355 - RNA, 11 nt, Human
cagaauucuca

SEQ ID NO: 1748356 - RNA, 14 nt, Human
cagaauuucccaaa

SEQ ID NO: 1748357 - RNA, 15 nt, Human
cagaaucucgcucug

SEQ ID NO: 1748358 - RNA, 22 nt, Human
cagaacccuuggagccaaugga

SEQ ID NO: 1748359 - RNA, 19 nt, Human
cagaagcaacccaaauguu

SEQ ID NO: 1748360 - RNA, 20 nt, Human
cagaagcaacccaaauguuc

SEQ ID NO: 1748361 - RNA, 13 nt, Human
cagaagcagcucu

SEQ ID NO: 1748362 - RNA, 14 nt, Human
cagaagcagcucuu

SEQ ID NO: 1748363 - RNA, 21 nt, Human
cagaagacacugaugggcaac

SEQ ID NO: 1748364 - RNA, 19 nt, Human
cagaaggaagacuucaucc

SEQ ID NO: 1748365 - RNA, 18 nt, Human
cagaaggaagacuucauc

SEQ ID NO: 1748366 - RNA, 17 nt, Human
cagaaggaagacuucau

SEQ ID NO: 1748367 - RNA, 16 nt, Human
cagaaggaagacuuca

SEQ ID NO: 1748368 - RNA, 18 nt, Human
cagaaucucaaauaacua

SEQ ID NO: 1748369 - RNA, 17 nt, Human
cagaaucucaaauaacu

SEQ ID NO: 1748370 - RNA, 22 nt, Human
cacuuuuguucuugguuuguaa

SEQ ID NO: 1748371 - RNA, 14 nt, Human
cacuuuuguucuug

SEQ ID NO: 1748372 - RNA, 18 nt, Human
cacuuuuauuuagcacca

SEQ ID NO: 1748373 - RNA, 23 nt, Human
cacuuuguucuggcucuuccagg

SEQ ID NO: 1748374 - RNA, 16 nt, Human
cacuuuguucuggcuc

SEQ ID NO: 1748375 - RNA, 14 nt, Human
cacuuuguucuggc

SEQ ID NO: 1748376 - RNA, 13 nt, Human
cacuuuguucugg

SEQ ID NO: 1748377 - RNA, 13 nt, Human
cacuuugggaggc

SEQ ID NO: 1748378 - RNA, 12 nt, Human
cacuuugggagg

SEQ ID NO: 1748379 - RNA, 16 nt, Human
cacuuugggaggccaa

SEQ ID NO: 1748380 - RNA, 22 nt, Human
cacuuucuagccagaggagaga

SEQ ID NO: 1748381 - RNA, 12 nt, Human
cacuuugcauaa

SEQ ID NO: 1748382 - RNA, 18 nt, Human
cagaaagcagaacaguga

SEQ ID NO: 1748383 - RNA, 24 nt, Human
cagaaagaaguggggacagagcag

SEQ ID NO: 1748384 - RNA, 19 nt, Human
cagaaagcagaacagugau

SEQ ID NO: 1748385 - RNA, 23 nt, Human
cagaacagugauuaccagggacu

SEQ ID NO: 1748386 - RNA, 23 nt, Human
cagaaaauggaagacagcucuua

SEQ ID NO: 1748387 - RNA, 22 nt, Human
cagaaaauggaagacagcucuu

SEQ ID NO: 1748388 - RNA, 21 nt, Human
cagaaaauggaagacagcucu

SEQ ID NO: 1748389 - RNA, 20 nt, Human
cagaaaauggaagacagcuc

SEQ ID NO: 1748390 - RNA, 16 nt, Human
cagaaaauggaagaca

SEQ ID NO: 1748391 - RNA, 16 nt, Human
cagacaacaaaccugu

SEQ ID NO: 1748392 - RNA, 16 nt, Human
cagaugcaccagcccu

SEQ ID NO: 1748393 - RNA, 14 nt, Human
cagaugcaccagcc

SEQ ID NO: 1748394 - RNA, 13 nt, Human
cagaugcaccagc

SEQ ID NO: 1748395 - RNA, 22 nt, Human
cagaugcaccagcccuuagcag

SEQ ID NO: 1748396 - RNA, 17 nt, Human
cagaugcaccagcccuu

SEQ ID NO: 1748397 - RNA, 20 nt, Human
cagaucucuaacuucaccau

SEQ ID NO: 1748398 - RNA, 22 nt, Human
cagauacaggaaaagcugcuga

SEQ ID NO: 1748399 - RNA, 21 nt, Human
cagauacaggaaaagcugcug

SEQ ID NO: 1748400 - RNA, 20 nt, Human
cagauacaggaaaagcugcu

SEQ ID NO: 1748401 - RNA, 23 nt, Human
cagauaaauaguuuaugauucca

SEQ ID NO: 1748402 - RNA, 22 nt, Human
cagauaaagguucaugcaaacu

SEQ ID NO: 1748403 - RNA, 14 nt, Human
cagauaaacaguag

SEQ ID NO: 1748404 - RNA, 15 nt, Human
cagaguuguuacauu

SEQ ID NO: 1748405 - RNA, 18 nt, Human
cagaguuguuacauuuuu

SEQ ID NO: 1748406 - RNA, 19 nt, Human
cagaguuguuacauuuuua

SEQ ID NO: 1748407 - RNA, 16 nt, Human
cagaguugaagacaga

SEQ ID NO: 1748408 - RNA, 15 nt, Human
cagaguugaagacag

SEQ ID NO: 1748409 - RNA, 14 nt, Human
cagaguugaagaca

SEQ ID NO: 1748410 - RNA, 20 nt, Human
cagaguugaagacagagcua

SEQ ID NO: 1748411 - RNA, 19 nt, Human
cagaguugaagacagagcu

SEQ ID NO: 1748412 - RNA, 18 nt, Human
cagaguugaagacagagc

SEQ ID NO: 1748413 - RNA, 17 nt, Human
cagaguugaagacagag

SEQ ID NO: 1748414 - RNA, 14 nt, Human
cagaguuguuacau

SEQ ID NO: 1748415 - RNA, 22 nt, Human
cagaguugaagacagagcuaca

SEQ ID NO: 1748416 - RNA, 20 nt, Human
cagagugagacucugucuca

SEQ ID NO: 1748417 - RNA, 19 nt, Human
cagagugagacucugucuc

SEQ ID NO: 1748418 - RNA, 18 nt, Human
cagagugagacucugucu

SEQ ID NO: 1748419 - RNA, 17 nt, Human
cagagugagacucuguc

SEQ ID NO: 1748420 - RNA, 16 nt, Human
cagagugagacucugu

SEQ ID NO: 1748421 - RNA, 23 nt, Human
cagagucucacuguugcccaggc

SEQ ID NO: 1748422 - RNA, 22 nt, Human
cagagucucacuguugcccagg

SEQ ID NO: 1748423 - RNA, 23 nt, Human
cagagucucgcucuguugcccag

SEQ ID NO: 1748424 - RNA, 23 nt, Human
cagagggagugacagaggcagcc

SEQ ID NO: 1748425 - RNA, 22 nt, Human
cagagggagugacagaggcagc

SEQ ID NO: 1748426 - RNA, 21 nt, Human
cagagggagugacagaggcag

SEQ ID NO: 1748427 - RNA, 20 nt, Human
cagagggagugacagaggca

SEQ ID NO: 1748428 - RNA, 19 nt, Human
cagagggccugcaagggag

SEQ ID NO: 1748429 - RNA, 15 nt, Human
cagagggccugcaag

SEQ ID NO: 1748430 - RNA, 21 nt, Human
cagagucucacuguugcccag

SEQ ID NO: 1748431 - RNA, 20 nt, Human
cagagucucacuguugccca

SEQ ID NO: 1748432 - RNA, 19 nt, Human
cagagucucacuguugccc

SEQ ID NO: 1748433 - RNA, 17 nt, Human
cagagucucacuguugc

SEQ ID NO: 1748434 - RNA, 13 nt, Human
cagagucucacug

SEQ ID NO: 1748435 - RNA, 22 nt, Human
cagaggcagccccauucugccu

SEQ ID NO: 1748436 - RNA, 20 nt, Human
cagaggcagccccauucugc

SEQ ID NO: 1748437 - RNA, 19 nt, Human
cagaggcagccccauucug

SEQ ID NO: 1748438 - RNA, 18 nt, Human
cagaggcagccccauucu

SEQ ID NO: 1748439 - RNA, 15 nt, Human
cagaggcagccccau

SEQ ID NO: 1748440 - RNA, 14 nt, Human
cagaggcagcccca

SEQ ID NO: 1748441 - RNA, 13 nt, Human
cagaggcagcccc

SEQ ID NO: 1748442 - RNA, 12 nt, Human
cagaggcagccc

SEQ ID NO: 1748443 - RNA, 21 nt, Human
cagaggccaugggccuccugu

SEQ ID NO: 1748444 - RNA, 20 nt, Human
cagaggccaugggccuccug

SEQ ID NO: 1748445 - RNA, 19 nt, Human
cagaggccaugggccuccu

SEQ ID NO: 1748446 - RNA, 23 nt, Human
cagaggcagccccauucugccug

SEQ ID NO: 1748447 - RNA, 19 nt, Human
cagagggagugacagaggc

SEQ ID NO: 1748448 - RNA, 18 nt, Human
cagagggagugacagagg

SEQ ID NO: 1748449 - RNA, 16 nt, Human
cagagggagugacaga

SEQ ID NO: 1748450 - RNA, 14 nt, Human
cagagggagugaca

SEQ ID NO: 1748451 - RNA, 23 nt, Human
cagaggcugccucucccaucacu

SEQ ID NO: 1748452 - RNA, 13 nt, Human
cagaggcugccuc

SEQ ID NO: 1748453 - RNA, 21 nt, Human
cagaggcucagauuguaauau

SEQ ID NO: 1748454 - RNA, 23 nt, Human
cagaggcgcaugaauuugugaag

SEQ ID NO: 1748455 - RNA, 19 nt, Human
cagagacuccugcaggcag

SEQ ID NO: 1748456 - RNA, 18 nt, Human
cagagacuccugcaggca

SEQ ID NO: 1748457 - RNA, 17 nt, Human
cagagacuccugcaggc

SEQ ID NO: 1748458 - RNA, 16 nt, Human
cagagacuccugcagg

SEQ ID NO: 1748459 - RNA, 15 nt, Human
cagagacuccugcag

SEQ ID NO: 1748460 - RNA, 14 nt, Human
cagagacuccugca

SEQ ID NO: 1748461 - RNA, 13 nt, Human
cagagacuccugc

SEQ ID NO: 1748462 - RNA, 20 nt, Human
cagagaccaucccugaaggc

SEQ ID NO: 1748463 - RNA, 19 nt, Human
cagagaccaucccugaagg

SEQ ID NO: 1748464 - RNA, 18 nt, Human
cagagaccaucccugaag

SEQ ID NO: 1748465 - RNA, 17 nt, Human
cagagaccaucccugaa

SEQ ID NO: 1748466 - RNA, 21 nt, Human
cagagaccaucccugaaggcc

SEQ ID NO: 1748467 - RNA, 20 nt, Human
cagagcaagugagacccugu

SEQ ID NO: 1748468 - RNA, 14 nt, Human
cagagcaagugaga

SEQ ID NO: 1748469 - RNA, 16 nt, Human
cagagcaccuuagaca

SEQ ID NO: 1748470 - RNA, 18 nt, Human
cagagcacagcagccccu

SEQ ID NO: 1748471 - RNA, 18 nt, Human
cagagaguggcuccuccc

SEQ ID NO: 1748472 - RNA, 15 nt, Human
cagagaguggcuccu

SEQ ID NO: 1748473 - RNA, 14 nt, Human
cagagaguggcucc

SEQ ID NO: 1748474 - RNA, 13 nt, Human
cagagaguggcuc

SEQ ID NO: 1748475 - RNA, 16 nt, Human
cagagaccaucccuga

SEQ ID NO: 1748476 - RNA, 14 nt, Human
cagagaccaucccu

SEQ ID NO: 1748477 - RNA, 13 nt, Human
cagagaccauccc

SEQ ID NO: 1748478 - RNA, 15 nt, Human
cagagacacaagccu

SEQ ID NO: 1748479 - RNA, 14 nt, Human
cagagacacaagcc

SEQ ID NO: 1748480 - RNA, 17 nt, Human
cagagacacaagccuuc

SEQ ID NO: 1748481 - RNA, 16 nt, Human
cagagacacaagccuu

SEQ ID NO: 1748482 - RNA, 15 nt, Human
cagagaauucucuua

SEQ ID NO: 1748483 - RNA, 21 nt, Human
cagagaaugaaagggcccaga

SEQ ID NO: 1748484 - RNA, 20 nt, Human
cagagaaugaaagggcccag

SEQ ID NO: 1748485 - RNA, 19 nt, Human
cagagaaugaaagggccca

SEQ ID NO: 1748486 - RNA, 19 nt, Human
cagaggagagaggaccccc

SEQ ID NO: 1748487 - RNA, 15 nt, Human
cagaggagagaggac

SEQ ID NO: 1748488 - RNA, 13 nt, Human
cagaggagagagg

SEQ ID NO: 1748489 - RNA, 15 nt, Human
cagaggacacagaga

SEQ ID NO: 1748490 - RNA, 17 nt, Human
cagaggacacagagaag

SEQ ID NO: 1748491 - RNA, 11 nt, Human
cagaggcagcc

SEQ ID NO: 1748492 - RNA, 20 nt, Human
cagaggagagaggacccccu

SEQ ID NO: 1748493 - RNA, 21 nt, Human
cagagcccacgcccccacugg

SEQ ID NO: 1748494 - RNA, 20 nt, Human
cagagcccacgcccccacug

SEQ ID NO: 1748495 - RNA, 19 nt, Human
cagagcccacgcccccacu

SEQ ID NO: 1748496 - RNA, 17 nt, Human
cagagcccacgccccca

SEQ ID NO: 1748497 - RNA, 23 nt, Human
cagagcccacgcccccacuggug

SEQ ID NO: 1748498 - RNA, 13 nt, Human
cagagccugcagu

SEQ ID NO: 1748499 - RNA, 13 nt, Human
cagaggaaggaga

SEQ ID NO: 1748500 - RNA, 12 nt, Human
cagagccugcag

SEQ ID NO: 1748501 - RNA, 21 nt, Human
cagagcagagaccaucccuga

SEQ ID NO: 1748502 - RNA, 19 nt, Human
cagagcagagaccaucccu

SEQ ID NO: 1748503 - RNA, 18 nt, Human
cagagcagagaccauccc

SEQ ID NO: 1748504 - RNA, 17 nt, Human
cagagcagagaccaucc

SEQ ID NO: 1748505 - RNA, 15 nt, Human
cagagcagagaccau

SEQ ID NO: 1748506 - RNA, 14 nt, Human
cagagcagagacca

SEQ ID NO: 1748507 - RNA, 13 nt, Human
cagagcagagacc

SEQ ID NO: 1748508 - RNA, 22 nt, Human
cagagcaccuuagacagucccu

SEQ ID NO: 1748509 - RNA, 21 nt, Human
cagagcaccuuagacaguccc

SEQ ID NO: 1748510 - RNA, 19 nt, Human
cagagcaccuuagacaguc

SEQ ID NO: 1748511 - RNA, 18 nt, Human
cagagcaccuuagacagu

SEQ ID NO: 1748512 - RNA, 12 nt, Human
cagagcagagac

SEQ ID NO: 1748513 - RNA, 11 nt, Human
cagagcagaga

SEQ ID NO: 1748514 - RNA, 23 nt, Human
cagagcaccuuagacagucccug

SEQ ID NO: 1748515 - RNA, 16 nt, Human
cagagcccacgccccc

SEQ ID NO: 1748516 - RNA, 20 nt, Human
cagagcccaccuuggcucaa

SEQ ID NO: 1748517 - RNA, 19 nt, Human
cagagcccaccuuggcuca

SEQ ID NO: 1748518 - RNA, 17 nt, Human
cagagcccaccuuggcu

SEQ ID NO: 1748519 - RNA, 15 nt, Human
cagagcccaccuugg

SEQ ID NO: 1748520 - RNA, 22 nt, Human
cagagccaccccuaaagagaua

SEQ ID NO: 1748521 - RNA, 16 nt, Human
cagaggccaugggccu

SEQ ID NO: 1748522 - RNA, 14 nt, Human
caccggcuggccug

SEQ ID NO: 1748523 - RNA, 16 nt, Human
caccggcuggccuggc

SEQ ID NO: 1748524 - RNA, 15 nt, Human
caccggcuggccugg

SEQ ID NO: 1748525 - RNA, 14 nt, Human
caccgggcacucag

SEQ ID NO: 1748526 - RNA, 20 nt, Human
caccggcuggccuggccccu

SEQ ID NO: 1748527 - RNA, 18 nt, Human
caccggcuggccuggccc

SEQ ID NO: 1748528 - RNA, 17 nt, Human
caccggcuggccuggcc

SEQ ID NO: 1748529 - RNA, 21 nt, Human
caccgcagacaggaccaggga

SEQ ID NO: 1748530 - RNA, 18 nt, Human
caccgggccacagagaaa

SEQ ID NO: 1748531 - RNA, 15 nt, Human
caccgggccacagag

SEQ ID NO: 1748532 - RNA, 22 nt, Human
caccgggcacucagaagacacu

SEQ ID NO: 1748533 - RNA, 15 nt, Human
caccgggcacucaga

SEQ ID NO: 1748534 - RNA, 13 nt, Human
caccgggccugga

SEQ ID NO: 1748535 - RNA, 15 nt, Human
caccggggccucgga

SEQ ID NO: 1748536 - RNA, 20 nt, Human
caccgugccuggccacgccc

SEQ ID NO: 1748537 - RNA, 15 nt, Human
caccgugccuggcca

SEQ ID NO: 1748538 - RNA, 21 nt, Human
caccucccccaucucuucugg

SEQ ID NO: 1748539 - RNA, 14 nt, Human
caccucccccaucu

SEQ ID NO: 1748540 - RNA, 11 nt, Human
caccuccugcc

SEQ ID NO: 1748541 - RNA, 13 nt, Human
caccuccugccuc

SEQ ID NO: 1748542 - RNA, 14 nt, Human
caccuccugccucg

SEQ ID NO: 1748543 - RNA, 17 nt, Human
caccucucccuuggauu

SEQ ID NO: 1748544 - RNA, 14 nt, Human
caccucucccuugg

SEQ ID NO: 1748545 - RNA, 13 nt, Human
caccucucccuug

SEQ ID NO: 1748546 - RNA, 19 nt, Human
caccucugcacaagcugca

SEQ ID NO: 1748547 - RNA, 18 nt, Human
caccucugcacaagcugc

SEQ ID NO: 1748548 - RNA, 19 nt, Human
caccucucucacuccuuga

SEQ ID NO: 1748549 - RNA, 18 nt, Human
caccucucucacuccuug

SEQ ID NO: 1748550 - RNA, 17 nt, Human
caccucucucacuccuu

SEQ ID NO: 1748551 - RNA, 15 nt, Human
caccucucucacucc

SEQ ID NO: 1748552 - RNA, 15 nt, Human
caccugaagacucau

SEQ ID NO: 1748553 - RNA, 14 nt, Human
caccugaagacuca

SEQ ID NO: 1748554 - RNA, 23 nt, Human
caccugaagacucauucuucugu

SEQ ID NO: 1748555 - RNA, 23 nt, Human
caccugcggugcuaucuccccca

SEQ ID NO: 1748556 - RNA, 20 nt, Human
caccuggaauauauaaccag

SEQ ID NO: 1748557 - RNA, 15 nt, Human
caccuggccucugca

SEQ ID NO: 1748558 - RNA, 14 nt, Human
caccuggccucugc

SEQ ID NO: 1748559 - RNA, 13 nt, Human
caccuggccucug

SEQ ID NO: 1748560 - RNA, 12 nt, Human
caccuggccucu

SEQ ID NO: 1748561 - RNA, 20 nt, Human
caccuggccucugcacuccc

SEQ ID NO: 1748562 - RNA, 19 nt, Human
caccuggccucugcacucc

SEQ ID NO: 1748563 - RNA, 18 nt, Human
caccuggccucugcacuc

SEQ ID NO: 1748564 - RNA, 17 nt, Human
caccuggccucugcacu

SEQ ID NO: 1748565 - RNA, 23 nt, Human
caccuggccucugcacuccccug

SEQ ID NO: 1748566 - RNA, 20 nt, Human
cacauauugauuuccguuaa

SEQ ID NO: 1748567 - RNA, 20 nt, Human
caccccucaacaccucugca

SEQ ID NO: 1748568 - RNA, 13 nt, Human
cacauauugauuu

SEQ ID NO: 1748569 - RNA, 21 nt, Human
cacccggccccugcugguuca

SEQ ID NO: 1748570 - RNA, 18 nt, Human
cacccggccccugcuggu

SEQ ID NO: 1748571 - RNA, 17 nt, Human
cacccggccccugcugg

SEQ ID NO: 1748572 - RNA, 16 nt, Human
cacccggccccugcug

SEQ ID NO: 1748573 - RNA, 14 nt, Human
cacccggccccugc

SEQ ID NO: 1748574 - RNA, 13 nt, Human
cacccggccccug

SEQ ID NO: 1748575 - RNA, 12 nt, Human
cacccggccccu

SEQ ID NO: 1748576 - RNA, 19 nt, Human
cacccgcuaagagggaggg

SEQ ID NO: 1748577 - RNA, 23 nt, Human
cacccugugauggggcccugccu

SEQ ID NO: 1748578 - RNA, 22 nt, Human
cacccugugauggggcccugcc

SEQ ID NO: 1748579 - RNA, 21 nt, Human
cacccugugauggggcccugc

SEQ ID NO: 1748580 - RNA, 20 nt, Human
cacccugugauggggcccug

SEQ ID NO: 1748581 - RNA, 18 nt, Human
cacccugugauggggccc

SEQ ID NO: 1748582 - RNA, 15 nt, Human
cacccugugaugggg

SEQ ID NO: 1748583 - RNA, 12 nt, Human
cacccugugaug

SEQ ID NO: 1748584 - RNA, 11 nt, Human
cacccugugau

SEQ ID NO: 1748585 - RNA, 21 nt, Human
caccgaaaacguggcugcuuc

SEQ ID NO: 1748586 - RNA, 19 nt, Human
caccgaaaacguggcugcu

SEQ ID NO: 1748587 - RNA, 22 nt, Human
caccgaaaacguggcugcuuca

SEQ ID NO: 1748588 - RNA, 18 nt, Human
caccgaaaacguggcugc

SEQ ID NO: 1748589 - RNA, 15 nt, Human
caccgaaaacguggc

SEQ ID NO: 1748590 - RNA, 18 nt, Human
caccgcagacaggaccag

SEQ ID NO: 1748591 - RNA, 17 nt, Human
caccgcagacaggacca

SEQ ID NO: 1748592 - RNA, 15 nt, Human
caccgcagacaggac

SEQ ID NO: 1748593 - RNA, 14 nt, Human
caccgcagacagga

SEQ ID NO: 1748594 - RNA, 13 nt, Human
caccgcagacagg

SEQ ID NO: 1748595 - RNA, 12 nt, Human
caccgcagacag

SEQ ID NO: 1748596 - RNA, 16 nt, Human
cacgccagauucuuuc

SEQ ID NO: 1748597 - RNA, 14 nt, Human
cacucuacuuagca

SEQ ID NO: 1748598 - RNA, 14 nt, Human
cacucuggcagcuc

SEQ ID NO: 1748599 - RNA, 13 nt, Human
cacucuggcagcu

SEQ ID NO: 1748600 - RNA, 12 nt, Human
cacucuggcagc

SEQ ID NO: 1748601 - RNA, 23 nt, Human
cacucugagacucgcgacaaugc

SEQ ID NO: 1748602 - RNA, 12 nt, Human
cacucugagacu

SEQ ID NO: 1748603 - RNA, 12 nt, Human
cacucuccuugg

SEQ ID NO: 1748604 - RNA, 21 nt, Human
cacuccuucacagaugggugc

SEQ ID NO: 1748605 - RNA, 14 nt, Human
cacuccuucacaga

SEQ ID NO: 1748606 - RNA, 17 nt, Human
cacucccugcaaccuga

SEQ ID NO: 1748607 - RNA, 14 nt, Human
cacuccuaccuggu

SEQ ID NO: 1748608 - RNA, 13 nt, Human
cacuccuaccugg

SEQ ID NO: 1748609 - RNA, 16 nt, Human
cacucccugcaaccug

SEQ ID NO: 1748610 - RNA, 13 nt, Human
cacucccugcaac

SEQ ID NO: 1748611 - RNA, 12 nt, Human
cacucccugcaa

SEQ ID NO: 1748612 - RNA, 22 nt, Human
cacucauugaccugaggcccuu

SEQ ID NO: 1748613 - RNA, 20 nt, Human
cacucauugaccugaggccc

SEQ ID NO: 1748614 - RNA, 19 nt, Human
cacucauugaccugaggcc

SEQ ID NO: 1748615 - RNA, 18 nt, Human
cacucauugaccugaggc

SEQ ID NO: 1748616 - RNA, 16 nt, Human
cacucaguccauagca

SEQ ID NO: 1748617 - RNA, 16 nt, Human
cacucaggucuguuuu

SEQ ID NO: 1748618 - RNA, 15 nt, Human
cacucauugaccuga

SEQ ID NO: 1748619 - RNA, 18 nt, Human
cacuaaccacgcuggacc

SEQ ID NO: 1748620 - RNA, 18 nt, Human
cacuaaggugugcucuga

SEQ ID NO: 1748621 - RNA, 17 nt, Human
cacuaaggugugcucug

SEQ ID NO: 1748622 - RNA, 21 nt, Human
cacuaaauugacacuuaaaaa

SEQ ID NO: 1748623 - RNA, 16 nt, Human
cacuaacaugauuugg

SEQ ID NO: 1748624 - RNA, 16 nt, Human
cacuaaccacgcugga

SEQ ID NO: 1748625 - RNA, 15 nt, Human
cacuaaccacgcugg

SEQ ID NO: 1748626 - RNA, 14 nt, Human
cacuaaccacgcug

SEQ ID NO: 1748627 - RNA, 14 nt, Human
cacuauaauguaag

SEQ ID NO: 1748628 - RNA, 21 nt, Human
cacuauagccuaggugacaga

SEQ ID NO: 1748629 - RNA, 14 nt, Human
cacuauagccuagg

SEQ ID NO: 1748630 - RNA, 18 nt, Human
cacuauaauguaagcucu

SEQ ID NO: 1748631 - RNA, 19 nt, Human
cacuauguugcccaggcag

SEQ ID NO: 1748632 - RNA, 18 nt, Human
cacuauguugcccaggca

SEQ ID NO: 1748633 - RNA, 17 nt, Human
cacuauguugcccaggc

SEQ ID NO: 1748634 - RNA, 16 nt, Human
cacuauguugcccagg

SEQ ID NO: 1748635 - RNA, 15 nt, Human
cacuauguugcccag

SEQ ID NO: 1748636 - RNA, 19 nt, Human
cacuaucccggcugcccuu

SEQ ID NO: 1748637 - RNA, 18 nt, Human
cacuaucccggcugcccu

SEQ ID NO: 1748638 - RNA, 20 nt, Human
cacucaaaagcugggcaggu

SEQ ID NO: 1748639 - RNA, 19 nt, Human
cacucaaaagcugggcagg

SEQ ID NO: 1748640 - RNA, 18 nt, Human
cacucaaaagcugggcag

SEQ ID NO: 1748641 - RNA, 17 nt, Human
cacucaaaagcugggca

SEQ ID NO: 1748642 - RNA, 15 nt, Human
cacucaaaagcuggg

SEQ ID NO: 1748643 - RNA, 21 nt, Human
cacuauguugcccaggcaggu

SEQ ID NO: 1748644 - RNA, 20 nt, Human
cacuauguugcccaggcagg

SEQ ID NO: 1748645 - RNA, 17 nt, Human
cacucagaagacacuga

SEQ ID NO: 1748646 - RNA, 16 nt, Human
cacucagaagacacug

SEQ ID NO: 1748647 - RNA, 12 nt, Human
cacucagaagac

SEQ ID NO: 1748648 - RNA, 20 nt, Human
cacucacauuuauucugcuc

SEQ ID NO: 1748649 - RNA, 19 nt, Human
cacucacauuuauucugcu

SEQ ID NO: 1748650 - RNA, 19 nt, Human
cacucagaagacacugaug

SEQ ID NO: 1748651 - RNA, 18 nt, Human
cacucagaagacacugau

SEQ ID NO: 1748652 - RNA, 22 nt, Human
cacucagaagacacugaugggc

SEQ ID NO: 1748653 - RNA, 13 nt, Human
cacuaaacaaaga

SEQ ID NO: 1748654 - RNA, 12 nt, Human
cacguuucuaaa

SEQ ID NO: 1748655 - RNA, 14 nt, Human
cacguuucuaaagg

SEQ ID NO: 1748656 - RNA, 23 nt, Human
cacguuucuaaaggcuaccuuug

SEQ ID NO: 1748657 - RNA, 22 nt, Human
cacguucuuacuaguuucccuu

SEQ ID NO: 1748658 - RNA, 19 nt, Human
cacgugguccuaaucuucu

SEQ ID NO: 1748659 - RNA, 16 nt, Human
cacgugguccuaaucu

SEQ ID NO: 1748660 - RNA, 14 nt, Human
cacguacacacaca

SEQ ID NO: 1748661 - RNA, 19 nt, Human
cacguacacacacauacac

SEQ ID NO: 1748662 - RNA, 18 nt, Human
cacguacacacacauaca

SEQ ID NO: 1748663 - RNA, 13 nt, Human
cacgugacagccg

SEQ ID NO: 1748664 - RNA, 15 nt, Human
cacgggggccaagga

SEQ ID NO: 1748665 - RNA, 20 nt, Human
cacggcucacugcagccuca

SEQ ID NO: 1748666 - RNA, 19 nt, Human
cacggcucacugcagccuc

SEQ ID NO: 1748667 - RNA, 17 nt, Human
cacggcucacugcagcc

SEQ ID NO: 1748668 - RNA, 16 nt, Human
cacggcucacugcagc

SEQ ID NO: 1748669 - RNA, 17 nt, Human
cacgcuggaccuugaac

SEQ ID NO: 1748670 - RNA, 14 nt, Human
cacgcuccuuccuc

SEQ ID NO: 1748671 - RNA, 20 nt, Human
cacgcuggaccuugaacugg

SEQ ID NO: 1748672 - RNA, 21 nt, Human
cacgcgugcacacaccagagc

SEQ ID NO: 1748673 - RNA, 16 nt, Human
cacgcgugcacacacc

SEQ ID NO: 1748674 - RNA, 15 nt, Human
cacgcgugcacacac

SEQ ID NO: 1748675 - RNA, 23 nt, Human
cacgcgugcacacaccagagccc

SEQ ID NO: 1748676 - RNA, 20 nt, Human
cacgccuguaauccuagcac

SEQ ID NO: 1748677 - RNA, 19 nt, Human
cacgccuguaauccuagca

SEQ ID NO: 1748678 - RNA, 19 nt, Human
caccuuagacagucccugc

SEQ ID NO: 1748679 - RNA, 18 nt, Human
caccuuagacagucccug

SEQ ID NO: 1748680 - RNA, 16 nt, Human
caccuuagacaguccc

SEQ ID NO: 1748681 - RNA, 14 nt, Human
caccuuagacaguc

SEQ ID NO: 1748682 - RNA, 23 nt, Human
caccuuagacagucccugccaau

SEQ ID NO: 1748683 - RNA, 21 nt, Human
caccuuagacagucccugcca

SEQ ID NO: 1748684 - RNA, 22 nt, Human
caccuuagccugcccuccuuuc

SEQ ID NO: 1748685 - RNA, 22 nt, Human
cacgaauauugcugauggugca

SEQ ID NO: 1748686 - RNA, 19 nt, Human
cacgaauauugcugauggu

SEQ ID NO: 1748687 - RNA, 16 nt, Human
cacgaauauugcugau

SEQ ID NO: 1748688 - RNA, 17 nt, Human
cacgacugcccggcagg

SEQ ID NO: 1748689 - RNA, 16 nt, Human
cacgacugcccggcag

SEQ ID NO: 1748690 - RNA, 13 nt, Human
caccuugacaggg

SEQ ID NO: 1748691 - RNA, 14 nt, Human
caccuucccaugcc

SEQ ID NO: 1748692 - RNA, 13 nt, Human
caccuucccaugc

SEQ ID NO: 1748693 - RNA, 16 nt, Human
caccuugacagggcac

SEQ ID NO: 1748694 - RNA, 15 nt, Human
caccuugacagggca

SEQ ID NO: 1748695 - RNA, 18 nt, Human
caccuugacagggcacac

SEQ ID NO: 1748696 - RNA, 17 nt, Human
cacgcacuucgggaggu

SEQ ID NO: 1748697 - RNA, 12 nt, Human
cacgauuucugu

SEQ ID NO: 1748698 - RNA, 14 nt, Human
cacgauuucuguuu

SEQ ID NO: 1748699 - RNA, 16 nt, Human
cacgauuucuguuuag

SEQ ID NO: 1748700 - RNA, 18 nt, Human
cacgcccccacuggugac

SEQ ID NO: 1748701 - RNA, 17 nt, Human
cacgcccccacugguga

SEQ ID NO: 1748702 - RNA, 15 nt, Human
cacgcccccacuggu

SEQ ID NO: 1748703 - RNA, 13 nt, Human
cacgcccccacug

SEQ ID NO: 1748704 - RNA, 23 nt, Human
cacgccagauucuuuccugaggc

SEQ ID NO: 1748705 - RNA, 22 nt, Human
cacgccagauucuuuccugagg

SEQ ID NO: 1748706 - RNA, 20 nt, Human
cacgccagauucuuuccuga

SEQ ID NO: 1748707 - RNA, 19 nt, Human
cacgccagauucuuuccug

SEQ ID NO: 1748708 - RNA, 15 nt, Human
cacgccacugcacua

SEQ ID NO: 1748709 - RNA, 13 nt, Human
cacgccacugcac

SEQ ID NO: 1748710 - RNA, 14 nt, Human
cacuguugcccagg

SEQ ID NO: 1748711 - RNA, 21 nt, Human
cacuucagcugacuuuucugu

SEQ ID NO: 1748712 - RNA, 12 nt, Human
cacuucagcuga

SEQ ID NO: 1748713 - RNA, 20 nt, Human
cacuucaggcucuucuccuu

SEQ ID NO: 1748714 - RNA, 16 nt, Human
cacuucaggcucuucu

SEQ ID NO: 1748715 - RNA, 15 nt, Human
cacuucaggcucuuc

SEQ ID NO: 1748716 - RNA, 14 nt, Human
cacuucaggcucuu

SEQ ID NO: 1748717 - RNA, 23 nt, Human
cacuucaggcucuucuccuuuca

SEQ ID NO: 1748718 - RNA, 16 nt, Human
cacuucccuacaugga

SEQ ID NO: 1748719 - RNA, 20 nt, Human
cacuuccauaaucuggacuc

SEQ ID NO: 1748720 - RNA, 23 nt, Human
cacuucgggaggucgaggcagga

SEQ ID NO: 1748721 - RNA, 21 nt, Human
cacuucgggaggucgaggcag

SEQ ID NO: 1748722 - RNA, 22 nt, Human
cacuucugccauauucuguugg

SEQ ID NO: 1748723 - RNA, 15 nt, Human
cacuuggucugugag

SEQ ID NO: 1748724 - RNA, 20 nt, Human
cacuuucuagccagaggaga

SEQ ID NO: 1748725 - RNA, 19 nt, Human
cacuuucuagccagaggag

SEQ ID NO: 1748726 - RNA, 22 nt, Human
cacuugcagacucuacagaggc

SEQ ID NO: 1748727 - RNA, 19 nt, Human
cacuugcagacucuacaga

SEQ ID NO: 1748728 - RNA, 18 nt, Human
cacuugcagacucuacag

SEQ ID NO: 1748729 - RNA, 14 nt, Human
cacuugcagacucu

SEQ ID NO: 1748730 - RNA, 24 nt, Human
cacuugcagacucuacagaggcca

SEQ ID NO: 1748731 - RNA, 20 nt, Human
cacuugaacccgggaggcag

SEQ ID NO: 1748732 - RNA, 21 nt, Human
cacuugaacccgggaggcaga

SEQ ID NO: 1748733 - RNA, 23 nt, Human
cacuugaacccgggaggcagagg

SEQ ID NO: 1748734 - RNA, 16 nt, Human
cacuugacaucaacug

SEQ ID NO: 1748735 - RNA, 20 nt, Human
cacuugagaauuacccuuuu

SEQ ID NO: 1748736 - RNA, 17 nt, Human
cacuugagaauuacccu

SEQ ID NO: 1748737 - RNA, 19 nt, Human
cacuugacaucaacugcau

SEQ ID NO: 1748738 - RNA, 13 nt, Human
cacuugaguccag

SEQ ID NO: 1748739 - RNA, 19 nt, Human
cacuugaugacccccaacc

SEQ ID NO: 1748740 - RNA, 13 nt, Human
cacuugcagacuc

SEQ ID NO: 1748741 - RNA, 22 nt, Human
cacugugcugagucugaaggcu

SEQ ID NO: 1748742 - RNA, 21 nt, Human
cacugugcugagucugaaggc

SEQ ID NO: 1748743 - RNA, 20 nt, Human
cacugugcugagucugaagg

SEQ ID NO: 1748744 - RNA, 17 nt, Human
cacugugcugagucuga

SEQ ID NO: 1748745 - RNA, 15 nt, Human
cacugugcugagucu

SEQ ID NO: 1748746 - RNA, 13 nt, Human
cacugugcugagu

SEQ ID NO: 1748747 - RNA, 16 nt, Human
cacugugccaugugcc

SEQ ID NO: 1748748 - RNA, 15 nt, Human
cacugugccaugugc

SEQ ID NO: 1748749 - RNA, 18 nt, Human
cacugugccaugugccag

SEQ ID NO: 1748750 - RNA, 22 nt, Human
cacuguucucugcccuccaaga

SEQ ID NO: 1748751 - RNA, 21 nt, Human
cacuguucucugcccuccaag

SEQ ID NO: 1748752 - RNA, 19 nt, Human
cacuguucucugcccucca

SEQ ID NO: 1748753 - RNA, 17 nt, Human
cacuguucucugcccuc

SEQ ID NO: 1748754 - RNA, 16 nt, Human
cacuguucucugcccu

SEQ ID NO: 1748755 - RNA, 15 nt, Human
cacuguucucugccc

SEQ ID NO: 1748756 - RNA, 14 nt, Human
cacuguucucugcc

SEQ ID NO: 1748757 - RNA, 13 nt, Human
cacuguucucugc

SEQ ID NO: 1748758 - RNA, 14 nt, Human
cacugugccaugug

SEQ ID NO: 1748759 - RNA, 13 nt, Human
cacugugaagaga

SEQ ID NO: 1748760 - RNA, 19 nt, Human
cacuguacuugcucuugau

SEQ ID NO: 1748761 - RNA, 18 nt, Human
cacuguacuugcucuuga

SEQ ID NO: 1748762 - RNA, 15 nt, Human
cacuguacuugcucu

SEQ ID NO: 1748763 - RNA, 23 nt, Human
cacugagacagcccgggcucugc

SEQ ID NO: 1748764 - RNA, 23 nt, Human
cacugagaccccaggcuguuagg

SEQ ID NO: 1748765 - RNA, 24 nt, Human
cacugaugggcaacccccagccug

SEQ ID NO: 1748766 - RNA, 18 nt, Human
cacugaugggcaaccccc

SEQ ID NO: 1748767 - RNA, 14 nt, Human
cacugaugggcaac

SEQ ID NO: 1748768 - RNA, 13 nt, Human
cacugcaaccucc

SEQ ID NO: 1748769 - RNA, 16 nt, Human
cacugcaaccuccgcc

SEQ ID NO: 1748770 - RNA, 14 nt, Human
cacugcaaccuccg

SEQ ID NO: 1748771 - RNA, 23 nt, Human
cacugcaaccuccgccucuuggg

SEQ ID NO: 1748772 - RNA, 22 nt, Human
cacugcacagugcaucucagcc

SEQ ID NO: 1748773 - RNA, 21 nt, Human
cacugcacagugcaucucagc

SEQ ID NO: 1748774 - RNA, 19 nt, Human
cacugcacagugcaucuca

SEQ ID NO: 1748775 - RNA, 18 nt, Human
cacugcacagugcaucuc

SEQ ID NO: 1748776 - RNA, 23 nt, Human
cacugcaaccuucgccaccuggg

SEQ ID NO: 1748777 - RNA, 16 nt, Human
cacugcaacuucugcc

SEQ ID NO: 1748778 - RNA, 22 nt, Human
cacugcaaccuucgccaccugg

SEQ ID NO: 1748779 - RNA, 14 nt, Human
cacugcaaccuucg

SEQ ID NO: 1748780 - RNA, 17 nt, Human
cacugcaacuucugccu

SEQ ID NO: 1748781 - RNA, 20 nt, Human
cacucugucgcccagucugg

SEQ ID NO: 1748782 - RNA, 23 nt, Human
cacugacauuguuggccaaagcc

SEQ ID NO: 1748783 - RNA, 19 nt, Human
cacucugucgcccagucug

SEQ ID NO: 1748784 - RNA, 16 nt, Human
cacucugucgcccagu

SEQ ID NO: 1748785 - RNA, 15 nt, Human
cacucugucgcccag

SEQ ID NO: 1748786 - RNA, 19 nt, Human
cacucuggcagcucagaga

SEQ ID NO: 1748787 - RNA, 17 nt, Human
cacucuggcagcucaga

SEQ ID NO: 1748788 - RNA, 16 nt, Human
cacucuggcagcucag

SEQ ID NO: 1748789 - RNA, 15 nt, Human
cacucuggcagcuca

SEQ ID NO: 1748790 - RNA, 21 nt, Human
cacucuggcagcucagagagg

SEQ ID NO: 1748791 - RNA, 20 nt, Human
cacucuggcagcucagagag

SEQ ID NO: 1748792 - RNA, 23 nt, Human
cacucuggcagcucagagagggu

SEQ ID NO: 1748793 - RNA, 13 nt, Human
cacugagacagcc

SEQ ID NO: 1748794 - RNA, 12 nt, Human
cacugagacagc

SEQ ID NO: 1748795 - RNA, 22 nt, Human
cacugagacagcccgggcucug

SEQ ID NO: 1748796 - RNA, 19 nt, Human
cacugagacagcccgggcu

SEQ ID NO: 1748797 - RNA, 17 nt, Human
cacugagacagcccggg

SEQ ID NO: 1748798 - RNA, 14 nt, Human
cacugagacagccc

SEQ ID NO: 1748799 - RNA, 22 nt, Human
cacugccuucgauacaccgggc

SEQ ID NO: 1748800 - RNA, 20 nt, Human
cacugccuucgauacaccgg

SEQ ID NO: 1748801 - RNA, 12 nt, Human
cacugcucuggu

SEQ ID NO: 1748802 - RNA, 20 nt, Human
cacugcucugaugaagagga

SEQ ID NO: 1748803 - RNA, 17 nt, Human
cacugcugcccagccuc

SEQ ID NO: 1748804 - RNA, 15 nt, Human
cacugcugcccagcc

SEQ ID NO: 1748805 - RNA, 18 nt, Human
cacugcacuauagccuag

SEQ ID NO: 1748806 - RNA, 19 nt, Human
cacugcaccgggccacaga

SEQ ID NO: 1748807 - RNA, 18 nt, Human
cacugcaccgggccacag

SEQ ID NO: 1748808 - RNA, 16 nt, Human
cacugcaccgggccac

SEQ ID NO: 1748809 - RNA, 15 nt, Human
cacugcaccgggcca

SEQ ID NO: 1748810 - RNA, 14 nt, Human
cacugcaccgggcc

SEQ ID NO: 1748811 - RNA, 23 nt, Human
cacugcacagugcaucucagccc

SEQ ID NO: 1748812 - RNA, 16 nt, Human
cacugccucuuccucc

SEQ ID NO: 1748813 - RNA, 16 nt, Human
cacugcuuccagugag

SEQ ID NO: 1748814 - RNA, 15 nt, Human
cacugcuuccaguga

SEQ ID NO: 1748815 - RNA, 14 nt, Human
cacugcuuccagug

SEQ ID NO: 1748816 - RNA, 13 nt, Human
cacugcuuaacuu

SEQ ID NO: 1748817 - RNA, 21 nt, Human
cacugcuggcugccuuagaac

SEQ ID NO: 1748818 - RNA, 16 nt, Human
cacugcuggcugccuu

SEQ ID NO: 1748819 - RNA, 15 nt, Human
cacugcuggcugccu

SEQ ID NO: 1748820 - RNA, 14 nt, Human
cacugcuggcugcc

SEQ ID NO: 1748821 - RNA, 13 nt, Human
cacugcuggcugc

SEQ ID NO: 1748822 - RNA, 12 nt, Human
cacugcuggcug

SEQ ID NO: 1748823 - RNA, 21 nt, Human
cacugcuuccagugaggcucu

SEQ ID NO: 1748824 - RNA, 20 nt, Human
cacugcuuccagugaggcuc

SEQ ID NO: 1748825 - RNA, 19 nt, Human
cacugcuuccagugaggcu

SEQ ID NO: 1748826 - RNA, 18 nt, Human
cacugcuuccagugaggc

SEQ ID NO: 1748827 - RNA, 20 nt, Human
cacugcuuuuggucugugug

SEQ ID NO: 1748828 - RNA, 22 nt, Human
cacugcuuccagugaggcucug

SEQ ID NO: 1748829 - RNA, 17 nt, Human
cacuggaacacuaauga

SEQ ID NO: 1748830 - RNA, 21 nt, Human
cacugcuuuuggucuguguga

SEQ ID NO: 1748831 - RNA, 15 nt, Human
cacuggacucaccuc

SEQ ID NO: 1748832 - RNA, 18 nt, Human
cacuggacucaccucccc

SEQ ID NO: 1748833 - RNA, 14 nt, Human
gaauccgcccaucu

SEQ ID NO: 1748834 - RNA, 15 nt, Human
gacagacagcccucc

SEQ ID NO: 1748835 - RNA, 18 nt, Human
gacagcccgggcucugcc

SEQ ID NO: 1748836 - RNA, 13 nt, Human
gacagucccugcc

SEQ ID NO: 1748837 - RNA, 16 nt, Human
gcaggcuggcccugcc

SEQ ID NO: 1748838 - RNA, 22 nt, Human
gcaagacgcugugcugcccugc

SEQ ID NO: 1748839 - RNA, 15 nt, Human
gccuggccugagcug

SEQ ID NO: 1748840 - RNA, 13 nt, Human
gccagucaccccg

SEQ ID NO: 1748841 - RNA, 15 nt, Human
gccagucccccugcc

SEQ ID NO: 1748842 - RNA, 22 nt, Human
cuggacugugugcucaggagcc

SEQ ID NO: 1748843 - RNA, 23 nt, Human
cuggagcagauggagaccccuug

SEQ ID NO: 1748844 - RNA, 15 nt, Human
cuuggcugcagggag

SEQ ID NO: 1748845 - RNA, 22 nt, Human
gaaagauggcugugccucugcc

SEQ ID NO: 1748846 - RNA, 16 nt, Human
cucaggccugggggcu

SEQ ID NO: 1748847 - RNA, 21 nt, Human
aaggaagacuucaucccucug

SEQ ID NO: 1748848 - RNA, 18 nt, Human
aacuuacuuaguguuaug

SEQ ID NO: 1748849 - RNA, 18 nt, Human
acacgaauauugcugaug

SEQ ID NO: 1748850 - RNA, 15 nt, Human
acacgcgugcacaca

SEQ ID NO: 1748851 - RNA, 14 nt, Human
acacuuguguuaug

SEQ ID NO: 1748852 - RNA, 14 nt, Human
agcaagugagagcu

SEQ ID NO: 1748853 - RNA, 16 nt, Human
gucagguggggcagcu

SEQ ID NO: 1748854 - RNA, 20 nt, Human
gugccuguaaucacagcuac

SEQ ID NO: 1748855 - RNA, 11 nt, Human
gugcugggccc

SEQ ID NO: 1748856 - RNA, 13 nt, Human
guucagccugggu

SEQ ID NO: 1748857 - RNA, 19 nt, Human
guuggcaaaauauuuuaaa

SEQ ID NO: 1748858 - RNA, 19 nt, Human
ucccccagcagccuggggu

SEQ ID NO: 1748859 - RNA, 22 nt, Human
uccaggugcacaagcuccaagc

SEQ ID NO: 1748860 - RNA, 12 nt, Human
aacccguggcgc

SEQ ID NO: 1748861 - RNA, 13 nt, Human
aacuauguugaua

SEQ ID NO: 1748862 - RNA, 13 nt, Human
agaggacccccug

SEQ ID NO: 1748863 - RNA, 12 nt, Human
aguagagacagg

SEQ ID NO: 1748864 - RNA, 22 nt, Human
auuacaggugugaaccaccaca

SEQ ID NO: 1748865 - RNA, 15 nt, Human
auucuccaccugcca

SEQ ID NO: 1748866 - RNA, 11 nt, Human
accucgagcca

SEQ ID NO: 1748867 - RNA, 21 nt, Human
cuuuuuuuuuuuugagacaga

SEQ ID NO: 1748868 - RNA, 13 nt, Human
gaaaaaaaauuag

SEQ ID NO: 1748869 - RNA, 15 nt, Human
cucuugagccuggga

SEQ ID NO: 1748870 - RNA, 15 nt, Human
gaaaaugaaaauuag

SEQ ID NO: 1748871 - RNA, 21 nt, Human
cuccucuucaacugaccagcc

SEQ ID NO: 1748872 - RNA, 16 nt, Human
cucccaacucacccca

SEQ ID NO: 1748873 - RNA, 14 nt, Human
ccucaggccugggg

SEQ ID NO: 1748874 - RNA, 22 nt, Human
cccgaccaccugcccaaccugc

SEQ ID NO: 1748875 - RNA, 15 nt, Human
cccucacccuggggc

SEQ ID NO: 1748876 - RNA, 23 nt, Human
ccccagcuggggccaggcugggu

SEQ ID NO: 1748877 - RNA, 22 nt, Human
ccaggccagagggagugacaga

SEQ ID NO: 1748878 - RNA, 13 nt, Human
ccagugagacagc

SEQ ID NO: 1748879 - RNA, 24 nt, Human
cagcgcuggccgggaccccgagcc

SEQ ID NO: 1748880 - RNA, 19 nt, Human
caucuuccaacucaaacuc

SEQ ID NO: 1748881 - RNA, 18 nt, Human
caugggacagggaggacg

SEQ ID NO: 1748882 - RNA, 11 nt, Human
caugugcacau

SEQ ID NO: 1748883 - RNA, 21 nt, Human
ccacugcacuccagccugggu

SEQ ID NO: 1748884 - RNA, 13 nt, Human
cuggccgggaccc

SEQ ID NO: 1748885 - RNA, 19 nt, Human
ccugcugguucaggguugg

SEQ ID NO: 1748886 - RNA, 21 nt, Human
ccuggcuccaaacccucgagg

SEQ ID NO: 1748887 - RNA, 24 nt, Human
cgagcccugguggcagugggagcu

SEQ ID NO: 1748888 - RNA, 20 nt, Human
cgcuacccgggaagggggcu

SEQ ID NO: 1748889 - RNA, 17 nt, Human
cgugaguccuggcaugg

SEQ ID NO: 1748890 - RNA, 15 nt, Human
cuaucguaaaauuaa

SEQ ID NO: 1748891 - RNA, 18 nt, Human
cucccacagcgcuggccg

SEQ ID NO: 1748892 - RNA, 13 nt, Human
cacuggugacaug

SEQ ID NO: 1748893 - RNA, 20 nt, Human
cacuguacuugcucuugaug

SEQ ID NO: 1748894 - RNA, 10 nt, Human
cagagacaga

SEQ ID NO: 1748895 - RNA, 13 nt, Human
cagcacgggggcc

SEQ ID NO: 1748896 - RNA, 16 nt, Human
auuuuuuugagacaga

SEQ ID NO: 1748897 - RNA, 15 nt, Human
caaacucuuaaaacc

SEQ ID NO: 1748898 - RNA, 14 nt, Human
caagcaggacaugg

SEQ ID NO: 1748899 - RNA, 21 nt, Human
caaacccauuuuagagacaga

SEQ ID NO: 1748900 - RNA, 18 nt, Human
cacuggaggcaugugaug

SEQ ID NO: 1748901 - RNA, 17 nt, Human
cagcuuuaaaaaauuaa

SEQ ID NO: 1748902 - RNA, 21 nt, Human
cagggaggacgcucucuggcc

SEQ ID NO: 1748903 - RNA, 19 nt, Human
caucucacacaugagcauc

SEQ ID NO: 1748904 - RNA, 16 nt, Human
ccagcaggcucucagg

SEQ ID NO: 1748905 - RNA, 20 nt, Human
ccacgcuggagugcagugag

SEQ ID NO: 1748906 - RNA, 17 nt, Human
ccagcuggccgggagcc

SEQ ID NO: 1748907 - RNA, 15 nt, Human
cagcuugaggguugg

SEQ ID NO: 1748908 - RNA, 15 nt, Human
cacugaggaccagcc

SEQ ID NO: 1748909 - RNA, 18 nt, Human
cacuuggucugugagaug

SEQ ID NO: 1748910 - RNA, 16 nt, Human
ccaggcugggucgccc

SEQ ID NO: 1748911 - RNA, 20 nt, Human
cauuuaggccaugggacagg

SEQ ID NO: 1748912 - RNA, 22 nt, Human
cauuugauaaaguaaggcaugg

SEQ ID NO: 1748913 - RNA, 15 nt, Human
cacagcgcuggccgg

SEQ ID NO: 1748914 - RNA, 22 nt, Human
cccugggaggcucuggagccca

SEQ ID NO: 1748915 - RNA, 19 nt, Human
ccgcuuucuacccagcgag

SEQ ID NO: 1748916 - RNA, 14 nt, Human
ccgggaccccgagc

SEQ ID NO: 1748917 - RNA, 14 nt, Human
ccccaggaggccag

SEQ ID NO: 1748918 - RNA, 15 nt, Human
cccauaugccugggc

SEQ ID NO: 1748919 - RNA, 23 nt, Human
cacugcuuuuggucugugugaug

SEQ ID NO: 1748920 - RNA, 16 nt, Human
cagcauucucacuccu

SEQ ID NO: 1748921 - RNA, 16 nt, Human
agcgcuggccgggacc

SEQ ID NO: 1748922 - RNA, 13 nt, Human
agaugcagccggu

SEQ ID NO: 1748923 - RNA, 22 nt, Human
agaugcugacuguacuccuccc

SEQ ID NO: 1748924 - RNA, 20 nt, Human
agauggaaaaaccaccccca

SEQ ID NO: 1748925 - RNA, 11 nt, Human
uggccuggggc

SEQ ID NO: 1748926 - RNA, 18 nt, Human
uggcuccucccggugccc

SEQ ID NO: 1748927 - RNA, 15 nt, Human
ugccuggccacgccc

SEQ ID NO: 1748928 - RNA, 15 nt, Human
uuaaaugcccagccc

SEQ ID NO: 1748929 - RNA, 13 nt, Human
ugagucccaggcu

SEQ ID NO: 1748930 - RNA, 16 nt, Human
ugcacaagcugcaccc

SEQ ID NO: 1748931 - RNA, 17 nt, Human
ucuuggaauccugggga

SEQ ID NO: 1748932 - RNA, 20 nt, Human
acacuaacgauuuguuaaug

SEQ ID NO: 1748933 - RNA, 21 nt, Human
aaugauccccagcuguuuaug

SEQ ID NO: 1748934 - RNA, 14 nt, Human
aauaguuguugauu

SEQ ID NO: 1748935 - RNA, 21 nt, Human
accaaaagcuuaccaagggga

SEQ ID NO: 1748936 - RNA, 19 nt, Human
accagccccagugcccaca

SEQ ID NO: 1748937 - RNA, 17 nt, Human
ggucacucuggcagcuc

SEQ ID NO: 1748938 - RNA, 21 nt, Human
gccaccaacauacucccaucu

SEQ ID NO: 1748939 - RNA, 19 nt, Human
gcagcuugaggguugggcu

SEQ ID NO: 1748940 - RNA, 16 nt, Human
gcugcccugcccaccu

SEQ ID NO: 1748941 - RNA, 21 nt, Human
gccucugccugucucccccac

SEQ ID NO: 1748942 - RNA, 17 nt, Human
gcccccucugcccugcg

SEQ ID NO: 1748943 - RNA, 19 nt, Human
guuugauucagacagcugc

SEQ ID NO: 1748944 - RNA, 16 nt, Human
guuaacauggacauga

SEQ ID NO: 1748945 - RNA, 14 nt, Human
uaguuucuccaagc

SEQ ID NO: 1748946 - RNA, 17 nt, Human
ucaccauguuggccagg

SEQ ID NO: 1748947 - RNA, 23 nt, Human
ucaacucccugccccccagcccu

SEQ ID NO: 1748948 - RNA, 11 nt, Human
ucacaaaggau

SEQ ID NO: 1748949 - RNA, 18 nt, Human
ggucccugguggcagcuc

SEQ ID NO: 1748950 - RNA, 15 nt, Human
gggccuggcucaggu

SEQ ID NO: 1748951 - RNA, 21 nt, Human
uccacaagagcccaggccucc

SEQ ID NO: 1748952 - RNA, 13 nt, Human
ggcacaccgggca

SEQ ID NO: 1748953 - RNA, 21 nt, Human
gucucacucugucgcccaguc

SEQ ID NO: 1748954 - RNA, 17 nt, Human
uggcaaggacugcaggg

SEQ ID NO: 1748955 - RNA, 17 nt, Human
uggcccgacagccuggc

SEQ ID NO: 1748956 - RNA, 23 nt, Human
ugggccccugccucucugcaggu

SEQ ID NO: 1748957 - RNA, 23 nt, Human
ugccagccgagauagccaaggcc

SEQ ID NO: 1748958 - RNA, 11 nt, Human
ugccaggggag

SEQ ID NO: 1748959 - RNA, 16 nt, Human
guuggucccccuucca

SEQ ID NO: 1748960 - RNA, 19 nt, Human
guuugagaucagccugggc

SEQ ID NO: 1748961 - RNA, 12 nt, Human
uacaggcaccca

SEQ ID NO: 1748962 - RNA, 23 nt, Human
uacaggcuccugccaccacgccc

SEQ ID NO: 1748963 - RNA, 23 nt, Human
uagacgagcaggcuucuuccccc

SEQ ID NO: 1748964 - RNA, 14 nt, Human
guggacacagcucu

SEQ ID NO: 1748965 - RNA, 13 nt, Human
gugagacagcucu

SEQ ID NO: 1748966 - RNA, 16 nt, Human
gugcuaggaacacucc

SEQ ID NO: 1748967 - RNA, 15 nt, Human
gugcugcccugccca

SEQ ID NO: 1748968 - RNA, 14 nt, Human
cgugguggacaugc

SEQ ID NO: 1748969 - RNA, 19 nt, Human
ugcacaaacagaggccgcc

SEQ ID NO: 1748970 - RNA, 23 nt, Human
cggccuccauccugaggcuccac

SEQ ID NO: 1748971 - RNA, 22 nt, Human
cgggaagggggcugggacaugg

SEQ ID NO: 1748972 - RNA, 18 nt, Human
cgggaccccgagccuggc

SEQ ID NO: 1748973 - RNA, 16 nt, Human
ucugccugcccaggcc

SEQ ID NO: 1748974 - RNA, 14 nt, Human
ucuggggcuguuca

SEQ ID NO: 1748975 - RNA, 22 nt, Human
uccaaggcauuuuagcggggag

SEQ ID NO: 1748976 - RNA, 18 nt, Human
ucaggguuggccccugcc

SEQ ID NO: 1748977 - RNA, 20 nt, Human
uccuccaggugcacaagcuc

SEQ ID NO: 1748978 - RNA, 13 nt, Human
gaacccaaaccca

SEQ ID NO: 1748979 - RNA, 23 nt, Human
gaagacuucaucccucuggggcu

SEQ ID NO: 1748980 - RNA, 17 nt, Human
cuccaagcucccaggca

SEQ ID NO: 1748981 - RNA, 16 nt, Human
cugcccaccuggccuc

SEQ ID NO: 1748982 - RNA, 20 nt, Human
cuguuuuucuaggccugggg

SEQ ID NO: 1748983 - RNA, 14 nt, Human
gagccuggcuccaa

SEQ ID NO: 1748984 - RNA, 17 nt, Human
gagcccugggaggcucu

SEQ ID NO: 1748985 - RNA, 21 nt, Human
gagguaaggaauaccuguccc

SEQ ID NO: 1748986 - RNA, 17 nt, Human
gccagucaccccggcca

SEQ ID NO: 1748987 - RNA, 19 nt, Human
gcacuuugggaggccaagg

SEQ ID NO: 1748988 - RNA, 21 nt, Human
gcaccagggaaggggacaagg

SEQ ID NO: 1748989 - RNA, 20 nt, Human
gcaccccagcuggggccagg

SEQ ID NO: 1748990 - RNA, 20 nt, Human
gccuggcuccaaacccucga

SEQ ID NO: 1748991 - RNA, 21 nt, Human
uuugauguucuuucacccuuu

SEQ ID NO: 1748992 - RNA, 23 nt, Human
uuugauguucuuucacccuuuuc

SEQ ID NO: 1748993 - RNA, 22 nt, Human
ugccauuucuuccacaagagcc

SEQ ID NO: 1748994 - RNA, 21 nt, Human
uggccacuccagaccccuggc

SEQ ID NO: 1748995 - RNA, 19 nt, Human
uggccgggaccccgagccu

SEQ ID NO: 1748996 - RNA, 14 nt, Human
cccuuugacgccau

SEQ ID NO: 1748997 - RNA, 16 nt, Human
ccccagcagccugggg

SEQ ID NO: 1748998 - RNA, 18 nt, Human
ccggagaggccucgaccc

SEQ ID NO: 1748999 - RNA, 15 nt, Human
ccgggaccccgagcc

SEQ ID NO: 1749000 - RNA, 18 nt, Human
ggguuggccccugcccgg

SEQ ID NO: 1749001 - RNA, 13 nt, Human
ggucccugcaggg

SEQ ID NO: 1749002 - RNA, 22 nt, Human
uucggcgccuuaaggauguucu

SEQ ID NO: 1749003 - RNA, 16 nt, Human
gucacugagacagccc

SEQ ID NO: 1749004 - RNA, 22 nt, Human
ggauggaccacacagaggcugc

SEQ ID NO: 1749005 - RNA, 14 nt, Human
ggcccacugcaucg

SEQ ID NO: 1749006 - RNA, 13 nt, Human
ggccuucggccuc

SEQ ID NO: 1749007 - RNA, 22 nt, Human
gggccaggcugggucgcccugg

SEQ ID NO: 1749008 - RNA, 21 nt, Human
gggcuucaguggcagcugcuu

SEQ ID NO: 1749009 - RNA, 18 nt, Human
ggggagaaaguacuucuu

SEQ ID NO: 1749010 - RNA, 21 nt, Human
cgagcaugccuggauggggcu

SEQ ID NO: 1749011 - RNA, 11 nt, Human
cgcgugcacac

SEQ ID NO: 1749012 - RNA, 23 nt, Human
ccuacucugugucagguggggca

SEQ ID NO: 1749013 - RNA, 16 nt, Human
uuugcugucccuuuuc

SEQ ID NO: 1749014 - RNA, 14 nt, Human
cccacacacgccag

SEQ ID NO: 1749015 - RNA, 20 nt, Human
ccccagauagcuggcugggu

SEQ ID NO: 1749016 - RNA, 14 nt, Human
ccccgagccuggcu

SEQ ID NO: 1749017 - RNA, 13 nt, Human
cccggccaccugc

SEQ ID NO: 1749018 - RNA, 13 nt, Human
cccugcaaccuga

SEQ ID NO: 1749019 - RNA, 20 nt, Human
acuuggucugugagaugcua

SEQ ID NO: 1749020 - RNA, 16 nt, Human
aggcugggucgcccug

SEQ ID NO: 1749021 - RNA, 13 nt, Human
aggagugagcacu

SEQ ID NO: 1749022 - RNA, 18 nt, Human
aggcaugugccacccacc

SEQ ID NO: 1749023 - RNA, 22 nt, Human
aggcugggcuucaguggcagcu

SEQ ID NO: 1749024 - RNA, 21 nt, Human
agaaguuucugccgcagcccu

SEQ ID NO: 1749025 - RNA, 13 nt, Human
agcggggacagcu

SEQ ID NO: 1749026 - RNA, 13 nt, Human
ggccaggcccucu

SEQ ID NO: 1749027 - RNA, 14 nt, Human
ggguggaugccugg

SEQ ID NO: 1749028 - RNA, 17 nt, Human
gcgucacaacaaccugg

SEQ ID NO: 1749029 - RNA, 22 nt, Human
gcgugagccacugcaccgggcc

SEQ ID NO: 1749030 - RNA, 12 nt, Human
gcuccaaacccu

SEQ ID NO: 1749031 - RNA, 21 nt, Human
gcugcugaaggcucgagcaug

SEQ ID NO: 1749032 - RNA, 19 nt, Human
gcucagcggggacagcucc

SEQ ID NO: 1749033 - RNA, 18 nt, Human
gaugaaccacauuauaaa

SEQ ID NO: 1749034 - RNA, 14 nt, Human
gcugggucgcccug

SEQ ID NO: 1749035 - RNA, 19 nt, Human
gcugggucgcccuggacug

SEQ ID NO: 1749036 - RNA, 19 nt, Human
ggcuccagacacaugucca

SEQ ID NO: 1749037 - RNA, 21 nt, Human
gggcagaggaaagcaaaggag

SEQ ID NO: 1749038 - RNA, 14 nt, Human
ggggacagcuccuu

SEQ ID NO: 1749039 - RNA, 16 nt, Human
gcgcccagccucaucu

SEQ ID NO: 1749040 - RNA, 9 nt, Human
ggagacaga

SEQ ID NO: 1749041 - RNA, 21 nt, Human
ucagcauccuggcacccggcc

SEQ ID NO: 1749042 - RNA, 14 nt, Human
uaggguccugggga

SEQ ID NO: 1749043 - RNA, 23 nt, Human
uauaggcaccuaccaccacgccc

SEQ ID NO: 1749044 - RNA, 17 nt, Human
uccuuuagcgcccaguu

SEQ ID NO: 1749045 - RNA, 17 nt, Human
ucucuccuucuuccccc

SEQ ID NO: 1749046 - RNA, 19 nt, Human
ugagccugggaggucaagg

SEQ ID NO: 1749047 - RNA, 21 nt, Human
ugccuucgauacaccgggccu

SEQ ID NO: 1749048 - RNA, 15 nt, Human
ugguccugcugcagu

SEQ ID NO: 1749049 - RNA, 16 nt, Human
uacagagcccacgccc

SEQ ID NO: 1749050 - RNA, 14 nt, Human
guuuccuggcacug

SEQ ID NO: 1749051 - RNA, 15 nt, Human
guggacacagcucuu

SEQ ID NO: 1749052 - RNA, 21 nt, Human
guauccugcuucugauaugca

SEQ ID NO: 1749053 - RNA, 16 nt, Human
gucaccaagcccaguu

SEQ ID NO: 1749054 - RNA, 22 nt, Human
guccaggcacugcugcccagcc

SEQ ID NO: 1749055 - RNA, 21 nt, Human
gucccaacuuguaaaaauuaa

SEQ ID NO: 1749056 - RNA, 17 nt, Human
ugugagccaccacgccc

SEQ ID NO: 1749057 - RNA, 18 nt, Human
gcacaugccucucucagg

SEQ ID NO: 1749058 - RNA, 18 nt, Human
cugggaggcucuggagcc

SEQ ID NO: 1749059 - RNA, 19 nt, Human
gccucugacacacagcucu

SEQ ID NO: 1749060 - RNA, 22 nt, Human
gagauagccaaggccaaaggaa

SEQ ID NO: 1749061 - RNA, 14 nt, Human
gauggggcccugcc

SEQ ID NO: 1749062 - RNA, 16 nt, Human
gauacuugaaaauuaa

SEQ ID NO: 1749063 - RNA, 13 nt, Human
gacagcccgggcu

SEQ ID NO: 1749064 - RNA, 15 nt, Human
gagacuccugcaggc

SEQ ID NO: 1749065 - RNA, 19 nt, Human
gaauaucaauagauauuua

SEQ ID NO: 1749066 - RNA, 22 nt, Human
gaccaucccugaaggccccgcc

SEQ ID NO: 1749067 - RNA, 13 nt, Human herpesvirus 1
caguguacccugg

SEQ ID NO: 1749068 - RNA, 14 nt, Human herpesvirus 1
caaacgccagccug

SEQ ID NO: 1749069 - RNA, 16 nt, Human herpesvirus 1
caaagugccccgaccc

SEQ ID NO: 1749070 - RNA, 14 nt, Human herpesvirus 1
gcagucccugaguu

SEQ ID NO: 1749071 - RNA, 22 nt, Human herpesvirus 1
cuagccaaccuguggcagaccg

SEQ ID NO: 1749072 - RNA, 13 nt, Human herpesvirus 1
gagccccccgcug

SEQ ID NO: 1749073 - RNA, 15 nt, Human herpesvirus 1
gccucucgcugcugg

SEQ ID NO: 1749074 - RNA, 15 nt, Human herpesvirus 1
ucccucccccuccgc

SEQ ID NO: 1749075 - RNA, 22 nt, Human herpesvirus 1
cggcaccuauggcgccugacgc

SEQ ID NO: 1749076 - RNA, 22 nt, Human herpesvirus 1
auguguguaaaauaaauuauug

SEQ ID NO: 1749077 - RNA, 16 nt, Human herpesvirus 1
aacucucgcaccaucc

SEQ ID NO: 1749078 - RNA, 20 nt, Human herpesvirus 1
uggcacaccaccgaccucaa

SEQ ID NO: 1749079 - RNA, 23 nt, Human herpesvirus 1
cggacgcgcggcgcgagcucccu

SEQ ID NO: 1749080 - RNA, 18 nt, Human herpesvirus 1
uccacgaacccagcgacc

SEQ ID NO: 1749081 - RNA, 15 nt, Human herpesvirus 1
cgacguccugggcca

SEQ ID NO: 1749082 - RNA, 18 nt, Human herpesvirus 1
ccgaucccaacuccucag

SEQ ID NO: 1749083 - RNA, 14 nt, Human herpesvirus 1
uacacgagcacccu

SEQ ID NO: 1749084 - RNA, 16 nt, Human herpesvirus 1
uaugccccccuggcga

SEQ ID NO: 1749085 - RNA, 23 nt, Human herpesvirus 1
cgguuccucccgcucggcggcag

SEQ ID NO: 1749086 - RNA, 13 nt, Human herpesvirus 1
gggaccuccugga

SEQ ID NO: 1749087 - RNA, 22 nt, Human herpesvirus 1
gucacggugaccgcgugcccac

SEQ ID NO: 1749088 - RNA, 17 nt, Human herpesvirus 1
cagacccaacccccggc

SEQ ID NO: 1749089 - RNA, 15 nt, Human herpesvirus 1
caccugcgcucccuc

SEQ ID NO: 1749090 - RNA, 20 nt, Human herpesvirus 1
acuucccgguaugguaauua

SEQ ID NO: 1749091 - RNA, 15 nt, Human herpesvirus 1
auguuuaugggauuu

SEQ ID NO: 1749092 - RNA, 15 nt, Human herpesvirus 1
gaaccccaacgccau

SEQ ID NO: 1749093 - RNA, 19 nt, Human herpesvirus 1
cacggcuaccuggccccag

SEQ ID NO: 1749094 - RNA, 17 nt, Human herpesvirus 1
gccgugcuccugugagc

SEQ ID NO: 1749095 - RNA, 22 nt, Human herpesvirus 1
accccgcaauuugcacccagcc

SEQ ID NO: 1749096 - RNA, 13 nt, Human herpesvirus 1
ucacagccccgca

SEQ ID NO: 1749097 - RNA, 18 nt, Human herpesvirus 1
cauaccuggguguguuua

SEQ ID NO: 1749098 - RNA, 21 nt, Human herpesvirus 1
cagccugccucuccccccagg

SEQ ID NO: 1749099 - RNA, 20 nt, Human herpesvirus 1
ucgcggagggcggccagccg

SEQ ID NO: 1749100 - RNA, 17 nt, Human herpesvirus 1
uccgcaagccccuagcc

SEQ ID NO: 1749101 - RNA, 16 nt, Human herpesvirus 1
uccgcccgugcugccg

SEQ ID NO: 1749102 - RNA, 19 nt, Human herpesvirus 1
cgccgcuaccgacgcuccc

SEQ ID NO: 1749103 - RNA, 13 nt, Human herpesvirus 1
cuggggagcugua

SEQ ID NO: 1749104 - RNA, 16 nt, Human herpesvirus 1
ucccccacaccaccua

SEQ ID NO: 1749105 - RNA, 21 nt, Human herpesvirus 1
cuggccggccuggcggcggcc

SEQ ID NO: 1749106 - RNA, 23 nt, Human herpesvirus 1
cgugggcgacugcgaccccagcc

SEQ ID NO: 1749107 - RNA, 21 nt, Human herpesvirus 1
cgacaaccccggucucccagg

SEQ ID NO: 1749108 - RNA, 23 nt, Human herpesvirus 1
ccgcagucccugaguugggaaua

SEQ ID NO: 1749109 - RNA, 22 nt, Human herpesvirus 1
ccaaagcugcuggcgcgcaccc

SEQ ID NO: 1749110 - RNA, 17 nt, Human herpesvirus 1
cucuacugcagaugcag

SEQ ID NO: 1749111 - RNA, 20 nt, Human herpesvirus 1
uguacugcggucugucucgu

SEQ ID NO: 1749112 - RNA, 19 nt, Human herpesvirus 1
gaggcaguuaacugucugg

SEQ ID NO: 1749113 - RNA, 16 nt, Human herpesvirus 1
ggcgcgcuucuacccg

SEQ ID NO: 1749114 - RNA, 15 nt, Human herpesvirus 1
aucaccccgcaauuu

SEQ ID NO: 1749115 - RNA, 14 nt, Human herpesvirus 1
uucaucgaccucaa

SEQ ID NO: 1749116 - RNA, 13 nt, Human herpesvirus 1
gcugcgugucaaa

SEQ ID NO: 1749117 - RNA, 16 nt, Human herpesvirus 1
gcguggaucggcgcca

SEQ ID NO: 1749118 - RNA, 17 nt, Human herpesvirus 1
uggugcgauggcgacac

SEQ ID NO: 1749119 - RNA, 15 nt, Human herpesvirus 1
gacucucccaccgcc

SEQ ID NO: 1749120 - RNA, 21 nt, Human herpesvirus 1
cugcugcccccggagcugucc

SEQ ID NO: 1749121 - RNA, 16 nt, Human herpesvirus 1
ggaacuacuaugacag

SEQ ID NO: 1749122 - RNA, 16 nt, Human herpesvirus 1
cccccggccaccccga

SEQ ID NO: 1749123 - RNA, 21 nt, Human herpesvirus 1
ucccccuccgcaucccaggau

SEQ ID NO: 1749124 - RNA, 21 nt, Human herpesvirus 1
ucacgcgggaggccgcccagc

SEQ ID NO: 1749125 - RNA, 16 nt, Human herpesvirus 1
gcugcccuucugucug

SEQ ID NO: 1749126 - RNA, 17 nt, Human herpesvirus 1
cccuacucucccuccag

SEQ ID NO: 1749127 - RNA, 16 nt, Human herpesvirus 1
ccgccguugagccccu

SEQ ID NO: 1749128 - RNA, 14 nt, Human herpesvirus 1
ugucugugggccaa

SEQ ID NO: 1749129 - RNA, 12 nt, Human herpesvirus 1
ggaacccagagu

SEQ ID NO: 1749130 - RNA, 17 nt, Human herpesvirus 1
ccacaacaacgaccagg

SEQ ID NO: 1749131 - RNA, 19 nt, Human herpesvirus 1
uggugcgucgggccucccg

SEQ ID NO: 1749132 - RNA, 13 nt, Human herpesvirus 1
ugcggucugucuc

SEQ ID NO: 1749133 - RNA, 16 nt, Human herpesvirus 1
uccgggagggcgucgc

SEQ ID NO: 1749134 - RNA, 16 nt, Human herpesvirus 1
cacccucacgcgcauc

SEQ ID NO: 1749135 - RNA, 19 nt, Human herpesvirus 1
ucccacgcucuccccugcu

SEQ ID NO: 1749136 - RNA, 23 nt, Human herpesvirus 1
cuuuccgagggcgagcucagcuu

SEQ ID NO: 1749137 - RNA, 21 nt, Human herpesvirus 1
ucccgccaacacccccuuccc

SEQ ID NO: 1749138 - RNA, 12 nt, Human herpesvirus 1
ccgcagccuggu

SEQ ID NO: 1749139 - RNA, 22 nt, Human herpesvirus 1
cgagccgugcaccgugggacac

SEQ ID NO: 1749140 - RNA, 19 nt, Human herpesvirus 1
ggauggggagagcccacau

SEQ ID NO: 1749141 - RNA, 21 nt, Human herpesvirus 1
gccgcgccccgccggcgacaa

SEQ ID NO: 1749142 - RNA, 16 nt, Human herpesvirus 1
gccgcccccuggucag

SEQ ID NO: 1749143 - RNA, 16 nt, Human herpesvirus 1
acggccacuggccggg

SEQ ID NO: 1749144 - RNA, 10 nt, Human herpesvirus 1
uccaucgccc

SEQ ID NO: 1749145 - RNA, 19 nt, Human herpesvirus 1
cggcggucgcgcuccucug

SEQ ID NO: 1749146 - RNA, 17 nt, Human herpesvirus 1
cuuuaagcgcugcugcg

SEQ ID NO: 1749147 - RNA, 14 nt, Human herpesvirus 1
gaccgcagucccug

SEQ ID NO: 1749148 - RNA, 14 nt, Human herpesvirus 1
ccgaccgcaguccc

SEQ ID NO: 1749149 - RNA, 22 nt, Human herpesvirus 1
uuucguccaccaaagucucugu

SEQ ID NO: 1749150 - RNA, 14 nt, Human herpesvirus 1
guggaucuuagccu

SEQ ID NO: 1749151 - RNA, 13 nt, Human herpesvirus 1
auggggagagccc

SEQ ID NO: 1749152 - RNA, 16 nt, Human herpesvirus 1
uacgugugcccacccc

SEQ ID NO: 1749153 - RNA, 23 nt, Human herpesvirus 1
uggggacccggcccuaaccccac

SEQ ID NO: 1749154 - RNA, 17 nt, Human herpesvirus 1
cgagccaacgcccugac

SEQ ID NO: 1749155 - RNA, 21 nt, Human herpesvirus 1
gccccgcuucauccccgagaa

SEQ ID NO: 1749156 - RNA, 15 nt, Human herpesvirus 1
cgcgauguggauaaa

SEQ ID NO: 1749157 - RNA, 13 nt, Human herpesvirus 1
gccgcggcucccg

SEQ ID NO: 1749158 - RNA, 16 nt, Human herpesvirus 1
cucuggacgcccgggc

SEQ ID NO: 1749159 - RNA, 18 nt, Human herpesvirus 1
ucagcuuuuaccgcuucc

SEQ ID NO: 1749160 - RNA, 10 nt, Human herpesvirus 1
caugcgggcu

SEQ ID NO: 1749161 - RNA, 17 nt, Human herpesvirus 1
aucgccgguuccucccg

SEQ ID NO: 1749162 - RNA, 23 nt, Human herpesvirus 1
ccaucgagccaacgcccugacca

SEQ ID NO: 1749163 - RNA, 12 nt, Human herpesvirus 1
cggccccagccc

SEQ ID NO: 1749164 - RNA, 20 nt, Human herpesvirus 1
augcagcgccggccuccccg

SEQ ID NO: 1749165 - RNA, 18 nt, Human herpesvirus 1
ccccgcaauuugcaccca

SEQ ID NO: 1749166 - RNA, 13 nt, Human herpesvirus 1
ccgccggcgaggu

SEQ ID NO: 1749167 - RNA, 18 nt, Human herpesvirus 1
gcgaagacccccccggag

SEQ ID NO: 1749168 - RNA, 15 nt, Human herpesvirus 1
cacaccggucaacga

SEQ ID NO: 1749169 - RNA, 23 nt, Human herpesvirus 1
gacgcguggcggccccugaugga

SEQ ID NO: 1749170 - RNA, 20 nt, Human herpesvirus 1
cuguucaaccccagggaccu

SEQ ID NO: 1749171 - RNA, 19 nt, Human herpesvirus 1
ugccucuccccccaggccu

SEQ ID NO: 1749172 - RNA, 22 nt, Human herpesvirus 1
ccagacgcgggcgacgcacaca

SEQ ID NO: 1749173 - RNA, 13 nt, Human herpesvirus 1
ccagagaccccag

SEQ ID NO: 1749174 - RNA, 13 nt, Human herpesvirus 1
guccagaccacgg

SEQ ID NO: 1749175 - RNA, 13 nt, Human herpesvirus 1
cgaggcggccacg

SEQ ID NO: 1749176 - RNA, 13 nt, Human herpesvirus 1
ccgcaaaucccac

SEQ ID NO: 1749177 - RNA, 21 nt, Human herpesvirus 1
cgcccaccggaagcccaaccc

SEQ ID NO: 1749178 - RNA, 18 nt, Human herpesvirus 1
cggccacuggccgggagc

SEQ ID NO: 1749179 - RNA, 15 nt, Human herpesvirus 1
gauggggagagccca

SEQ ID NO: 1749180 - RNA, 16 nt, Human herpesvirus 1
cacuacaccagccaau

SEQ ID NO: 1749181 - RNA, 20 nt, Human herpesvirus 1
acgagcacccugcugccccc

SEQ ID NO: 1749182 - RNA, 22 nt, Human herpesvirus 1
gcccauuuacguggcuggguuu

SEQ ID NO: 1749183 - RNA, 20 nt, Human herpesvirus 1
ggccugccugcggcucgucg

SEQ ID NO: 1749184 - RNA, 12 nt, Human herpesvirus 1
accccccuggcc

SEQ ID NO: 1749185 - RNA, 15 nt, Human herpesvirus 1
cccacgcccccgccg

SEQ ID NO: 1749186 - RNA, 13 nt, Human herpesvirus 1
cguggagcaggaa

SEQ ID NO: 1749187 - RNA, 17 nt, Human herpesvirus 1
ggugaacgccuccgccc

SEQ ID NO: 1749188 - RNA, 18 nt, Human herpesvirus 1
ccccuguggcccuggcgg

SEQ ID NO: 1749189 - RNA, 17 nt, Human herpesvirus 1
aaccucgggugcauauc

SEQ ID NO: 1749190 - RNA, 13 nt, Human herpesvirus 1
gggccgggccgcc

SEQ ID NO: 1749191 - RNA, 23 nt, Human herpesvirus 1
ggaaaccguaacggcauaugcaa

SEQ ID NO: 1749192 - RNA, 19 nt, Human herpesvirus 1
ccuggccgugguccucgag

SEQ ID NO: 1749193 - RNA, 20 nt, Human herpesvirus 1
ucgggccugccugcggcucg

SEQ ID NO: 1749194 - RNA, 23 nt, Human herpesvirus 1
gacccccccucgcgccacacuca

SEQ ID NO: 1749195 - RNA, 22 nt, Human herpesvirus 1
ggaacuacuaugacagcuucag

SEQ ID NO: 1749196 - RNA, 22 nt, Human herpesvirus 1
acgacccucgagauccccgggg

SEQ ID NO: 1749197 - RNA, 20 nt, Human herpesvirus 1
ucaaccacccggccauccgc

SEQ ID NO: 1749198 - RNA, 19 nt, Human herpesvirus 1
ggaccccggggcucagcca

SEQ ID NO: 1749199 - RNA, 23 nt, Human herpesvirus 1
cgaggugcgguuggggaggcugu

SEQ ID NO: 1749200 - RNA, 14 nt, Human herpesvirus 1
ccugugcuuucugg

SEQ ID NO: 1749201 - RNA, 20 nt, Human herpesvirus 1
agcucgcggagggcggccag

SEQ ID NO: 1749202 - RNA, 22 nt, Human herpesvirus 1
cccaguccccgggcccagccuu

SEQ ID NO: 1749203 - RNA, 18 nt, Human herpesvirus 1
gcagucccugaguuggga

SEQ ID NO: 1749204 - RNA, 13 nt, Human herpesvirus 1
augugauaugcua

SEQ ID NO: 1749205 - RNA, 18 nt, Human herpesvirus 1
cgcaagcuaugcagcccc

SEQ ID NO: 1749206 - RNA, 20 nt, Human herpesvirus 1
cgcgggguuacgcgggcccc

SEQ ID NO: 1749207 - RNA, 14 nt, Human herpesvirus 1
aggacaaacccaac

SEQ ID NO: 1749208 - RNA, 19 nt, Human herpesvirus 1
gcagacgguggugcccagc

SEQ ID NO: 1749209 - RNA, 12 nt, Human herpesvirus 1
cgagcgcgcugc

SEQ ID NO: 1749210 - RNA, 18 nt, Human herpesvirus 1
cagcgccggccuccccgu

SEQ ID NO: 1749211 - RNA, 13 nt, Human herpesvirus 1
acggcauaugcaa

SEQ ID NO: 1749212 - RNA, 12 nt, Human herpesvirus 1
uggcgccccggc

SEQ ID NO: 1749213 - RNA, 12 nt, Human herpesvirus 1
uccagcccccca

SEQ ID NO: 1749214 - RNA, 16 nt, Human herpesvirus 1
gcccaccgcugggcgc

SEQ ID NO: 1749215 - RNA, 14 nt, Human herpesvirus 1
cuccaccacccaac

SEQ ID NO: 1749216 - RNA, 14 nt, Human herpesvirus 1
aucgucgaggaggu

SEQ ID NO: 1749217 - RNA, 19 nt, Human herpesvirus 1
ggccgcgcccacuacacca

SEQ ID NO: 1749218 - RNA, 12 nt, Human herpesvirus 1
gaggaucacgag

SEQ ID NO: 1749219 - RNA, 16 nt, Human herpesvirus 1
cgaggauaaccugggg

SEQ ID NO: 1749220 - RNA, 19 nt, Human herpesvirus 1
gcgggguuacgcgggcccc

SEQ ID NO: 1749221 - RNA, 19 nt, Human herpesvirus 1
ggcucucggggccgcagga

SEQ ID NO: 1749222 - RNA, 21 nt, Human herpesvirus 1
cgcgguacagaucggcgccgc

SEQ ID NO: 1749223 - RNA, 22 nt, Human herpesvirus 1
acgggcgucaccaugcagcgcc

SEQ ID NO: 1749224 - RNA, 21 nt, Human herpesvirus 1
cccaccggaagcccaacccac

SEQ ID NO: 1749225 - RNA, 21 nt, Human herpesvirus 1
gauugguccuugucugugccg

SEQ ID NO: 1749226 - RNA, 21 nt, Human herpesvirus 1
agcauucgcucucgccuuucc

SEQ ID NO: 1749227 - RNA, 18 nt, Human herpesvirus 1
gcgcauacgccuccccca

SEQ ID NO: 1749228 - RNA, 15 nt, Human herpesvirus 1
aacaugacccagacc

SEQ ID NO: 1749229 - RNA, 21 nt, Human herpesvirus 1
ucgcccagacgcccuccgagg

SEQ ID NO: 1749230 - RNA, 14 nt, Human herpesvirus 1
agaccuauguguuu

SEQ ID NO: 1749231 - RNA, 23 nt, Human herpesvirus 1
gagcaaaacgccucccccugagc

SEQ ID NO: 1749232 - RNA, 16 nt, Human herpesvirus 1
uccacuacuacgugga

SEQ ID NO: 1749233 - RNA, 20 nt, Human herpesvirus 1
cuaucacggcaaggagcgcc

SEQ ID NO: 1749234 - RNA, 22 nt, Human herpesvirus 1
ggugccgaccgggucccuccuu

SEQ ID NO: 1749235 - RNA, 20 nt, Human herpesvirus 1
gaugacgucccggcucuccg

SEQ ID NO: 1749236 - RNA, 20 nt, Human herpesvirus 1
ucggccccgcgucuggcccc

SEQ ID NO: 1749237 - RNA, 20 nt, Human herpesvirus 1
gugcccuuccaggucccacc

SEQ ID NO: 1749238 - RNA, 13 nt, Human herpesvirus 1
cgccgccacacuc

SEQ ID NO: 1749239 - RNA, 16 nt, Human herpesvirus 1
uguggacccaaagccc

SEQ ID NO: 1749240 - RNA, 15 nt, Human herpesvirus 1
ccacuacaccagcca

SEQ ID NO: 1749241 - RNA, 13 nt, Human herpesvirus 1
gacgggcagugag

SEQ ID NO: 1749242 - RNA, 20 nt, Human herpesvirus 1
ccauguuugcgggccugggc

SEQ ID NO: 1749243 - RNA, 23 nt, Human herpesvirus 1
acgcacaugggggaggugccccc

SEQ ID NO: 1749244 - RNA, 15 nt, Human herpesvirus 1
uucacgugcugcugc

SEQ ID NO: 1749245 - RNA, 17 nt, Human herpesvirus 1
uccagccuccccuccag

SEQ ID NO: 1749246 - RNA, 21 nt, Human herpesvirus 1
augccccccuggcgagcccag

SEQ ID NO: 1749247 - RNA, 23 nt, Human herpesvirus 1
gacggaccuuggucuggcccacg

SEQ ID NO: 1749248 - RNA, 16 nt, Human herpesvirus 1
aucccgacuccccgga

SEQ ID NO: 1749249 - RNA, 22 nt, Human herpesvirus 1
cacucaccggcggacccccgga

SEQ ID NO: 1749250 - RNA, 16 nt, Human herpesvirus 1
cgucuuuaaccucccc

SEQ ID NO: 1749251 - RNA, 13 nt, Human herpesvirus 1
acgcuuggagcca

SEQ ID NO: 1749252 - RNA, 20 nt, Human herpesvirus 1
cgcguccggggagggcgagg

SEQ ID NO: 1749253 - RNA, 23 nt, Human herpesvirus 1
gccacccgacaacagcccccggg

SEQ ID NO: 1749254 - RNA, 14 nt, Human herpesvirus 1
ccaucuaaugccac

SEQ ID NO: 1749255 - RNA, 15 nt, Human herpesvirus 1
cugcuacgccgcuga

SEQ ID NO: 1749256 - RNA, 15 nt, Human herpesvirus 1
acuugcggcaagacc

SEQ ID NO: 1749257 - RNA, 13 nt, Human herpesvirus 1
agcagcgcccggc

SEQ ID NO: 1749258 - RNA, 13 nt, Human herpesvirus 1
gcucuacugcaga

SEQ ID NO: 1749259 - RNA, 15 nt, Human herpesvirus 1
gccgacggcccgaag

SEQ ID NO: 1749260 - RNA, 20 nt, Human herpesvirus 1
uccccccgucagccugccuc

SEQ ID NO: 1749261 - RNA, 19 nt, Human herpesvirus 1
gcggacgccguggcgcccc

SEQ ID NO: 1749262 - RNA, 14 nt, Human herpesvirus 1
gggggauggggaga

SEQ ID NO: 1749263 - RNA, 19 nt, Human herpesvirus 1
agacgagcgcgcuuguccc

SEQ ID NO: 1749264 - RNA, 14 nt, Human herpesvirus 1
guacauguccccgu

SEQ ID NO: 1749265 - RNA, 14 nt, Human herpesvirus 1
acggcggaccuggc

SEQ ID NO: 1749266 - RNA, 22 nt, Human herpesvirus 1
ccaucgaguucgccaggcugca

SEQ ID NO: 1749267 - RNA, 23 nt, Human herpesvirus 1
caugaagccacuguuuuccgccc

SEQ ID NO: 1749268 - RNA, 13 nt, Human herpesvirus 1
cccauacucccgc

SEQ ID NO: 1749269 - RNA, 20 nt, Human herpesvirus 1
gccccccguggaccccacga

SEQ ID NO: 1749270 - RNA, 14 nt, Human herpesvirus 1
ccaaaauaaaagac

SEQ ID NO: 1749271 - RNA, 13 nt, Human herpesvirus 1
ucggucugcacca

SEQ ID NO: 1749272 - RNA, 19 nt, Human herpesvirus 1
augcgccagggcgcccccg

SEQ ID NO: 1749273 - RNA, 23 nt, Human herpesvirus 1
gacucucccccaccgcccacaga

SEQ ID NO: 1749274 - RNA, 18 nt, Human herpesvirus 1
cagagguguucacgcacc

SEQ ID NO: 1749275 - RNA, 14 nt, Human herpesvirus 1
aaagaccaaaauca

SEQ ID NO: 1749276 - RNA, 16 nt, Human herpesvirus 1
uggcccccggacccgg

SEQ ID NO: 1749277 - RNA, 16 nt, Human herpesvirus 1
cccaauccgacgggga

SEQ ID NO: 1749278 - RNA, 19 nt, Human herpesvirus 1
accccaacgccuccccugu

SEQ ID NO: 1749279 - RNA, 19 nt, Human herpesvirus 1
cugcguucaucggaccccc

SEQ ID NO: 1749280 - RNA, 18 nt, Human herpesvirus 1
gucccgaagaccgccggu

SEQ ID NO: 1749281 - RNA, 15 nt, Human herpesvirus 1
cgcccaaugggccgg

SEQ ID NO: 1749282 - RNA, 20 nt, Human herpesvirus 1
aggacgucuccaagcuuucc

SEQ ID NO: 1749283 - RNA, 16 nt, Human herpesvirus 1
accucaacaucaccau

SEQ ID NO: 1749284 - RNA, 15 nt, Human herpesvirus 1
caagaccccccuggc

SEQ ID NO: 1749285 - RNA, 12 nt, Human herpesvirus 1
acuaccuaggca

SEQ ID NO: 1749286 - RNA, 19 nt, Human herpesvirus 1
cagcccgcccucacagggc

SEQ ID NO: 1749287 - RNA, 14 nt, Human herpesvirus 1
ccccaccccggagg

SEQ ID NO: 1749288 - RNA, 12 nt, Human herpesvirus 1
gggaacccagag

SEQ ID NO: 1749289 - RNA, 19 nt, Human herpesvirus 1
cgcgcggcgcgagcucccu

SEQ ID NO: 1749290 - RNA, 18 nt, Human herpesvirus 1
gcccacaugcggaaagca

SEQ ID NO: 1749291 - RNA, 21 nt, Human herpesvirus 1
ccacacucaccggcggacccc

SEQ ID NO: 1749292 - RNA, 20 nt, Human herpesvirus 1
cgucgcuagaccacgccccu

SEQ ID NO: 1749293 - RNA, 17 nt, Human herpesvirus 1
ggaccggggucccagcg

SEQ ID NO: 1749294 - RNA, 13 nt, Human herpesvirus 1
ggggacccggccc

SEQ ID NO: 1749295 - RNA, 16 nt, Human herpesvirus 1
gccaagauggcccagu

SEQ ID NO: 1749296 - RNA, 15 nt, Human herpesvirus 1
cgaugagccaaccuc

SEQ ID NO: 1749297 - RNA, 16 nt, Human herpesvirus 1
uaaagccgccacccuc

SEQ ID NO: 1749298 - RNA, 15 nt, Human herpesvirus 1
ccucucuucccucag

SEQ ID NO: 1749299 - RNA, 20 nt, Human herpesvirus 1
cauccgaacgcagccccgcu

SEQ ID NO: 1749300 - RNA, 22 nt, Human herpesvirus 1
ugcccauuuacguggcuggguu

SEQ ID NO: 1749301 - RNA, 23 nt, Human herpesvirus 1
ggagccccggucuccccgggagc

SEQ ID NO: 1749302 - RNA, 17 nt, Human herpesvirus 1
ccuggugcucgugggcc

SEQ ID NO: 1749303 - RNA, 17 nt, Human herpesvirus 1
gugcgauucagcgcgga

SEQ ID NO: 1749304 - RNA, 15 nt, Human herpesvirus 1
cgcggaggagggcgu

SEQ ID NO: 1749305 - RNA, 21 nt, Human herpesvirus 1
ggagccccggaccccacgcac

SEQ ID NO: 1749306 - RNA, 17 nt, Human herpesvirus 1
uggccaucgguccccuc

SEQ ID NO: 1749307 - RNA, 19 nt, Human herpesvirus 1
gucgccgcgggccacgcca

SEQ ID NO: 1749308 - RNA, 22 nt, Human herpesvirus 1
uggcguucgucgcccuccacca

SEQ ID NO: 1749309 - RNA, 23 nt, Human herpesvirus 1
cgcacgcucccaucgcgggcgcc

SEQ ID NO: 1749310 - RNA, 14 nt, Human herpesvirus 1
uacuauccccgcag

SEQ ID NO: 1749311 - RNA, 14 nt, Human herpesvirus 1
gccuuuaacuacau

SEQ ID NO: 1749312 - RNA, 17 nt, Human herpesvirus 1
uggcgcgcaccccguuc

SEQ ID NO: 1749313 - RNA, 18 nt, Human herpesvirus 1
ccggaggcgccugccccg

SEQ ID NO: 1749314 - RNA, 21 nt, Human herpesvirus 1
gacucaagcacacacggggga

SEQ ID NO: 1749315 - RNA, 13 nt, Human herpesvirus 1
gguccggcacgga

SEQ ID NO: 1749316 - RNA, 21 nt, Human herpesvirus 1
agacgcugcuccgccuggccu

SEQ ID NO: 1749317 - RNA, 16 nt, Human herpesvirus 1
gggcucuacccucugg

SEQ ID NO: 1749318 - RNA, 18 nt, Human herpesvirus 1
cucuggacgcccgggcgc

SEQ ID NO: 1749319 - RNA, 16 nt, Human herpesvirus 1
ggaccggggucccagc

SEQ ID NO: 1749320 - RNA, 19 nt, Human herpesvirus 1
ccagggggaugcuagccug

SEQ ID NO: 1749321 - RNA, 20 nt, Human herpesvirus 1
acaacccuacaaccugacca

SEQ ID NO: 1749322 - RNA, 14 nt, Human herpesvirus 1
ggaccccagcgacc

SEQ ID NO: 1749323 - RNA, 19 nt, Human herpesvirus 1
gcggcccacccuggcgcca

SEQ ID NO: 1749324 - RNA, 13 nt, Human herpesvirus 1
gccguugucuccc

SEQ ID NO: 1749325 - RNA, 16 nt, Human herpesvirus 1
ggaugggcgaccuggg

SEQ ID NO: 1749326 - RNA, 23 nt, Human herpesvirus 1
aguuguucggucauaagcuucag

SEQ ID NO: 1749327 - RNA, 14 nt, Human herpesvirus 1
gacgacgcccgccg

SEQ ID NO: 1749328 - RNA, 14 nt, Human herpesvirus 1
gagggccgggcccc

SEQ ID NO: 1749329 - RNA, 17 nt, Human herpesvirus 1
ccuguuugucgccuggc

SEQ ID NO: 1749330 - RNA, 21 nt, Human herpesvirus 1
ggccggggagggcagggccgc

SEQ ID NO: 1749331 - RNA, 14 nt, Human herpesvirus 1
gacgcguggcggcc

SEQ ID NO: 1749332 - RNA, 19 nt, Human herpesvirus 1
gucgcccgauuuacagccc

SEQ ID NO: 1749333 - RNA, 14 nt, Human herpesvirus 1
gaccaccccaaaua

SEQ ID NO: 1749334 - RNA, 19 nt, Human herpesvirus 1
cccuccgcaucccaggauc

SEQ ID NO: 1749335 - RNA, 21 nt, Human herpesvirus 1
ggcgggcuccagucccggccc

SEQ ID NO: 1749336 - RNA, 23 nt, Human herpesvirus 1
gcgggacuggccaaucggcggcc

SEQ ID NO: 1749337 - RNA, 18 nt, Human herpesvirus 1
accgcauacuccggccgc

SEQ ID NO: 1749338 - RNA, 15 nt, Human herpesvirus 1
ggagucccgaggacg

SEQ ID NO: 1749339 - RNA, 19 nt, Human herpesvirus 1
gcuggguggucucuggccg

SEQ ID NO: 1749340 - RNA, 17 nt, Human herpesvirus 1
cgccccuaaccaggccu

SEQ ID NO: 1749341 - RNA, 18 nt, Human herpesvirus 1
cguuccuucccccucccc

SEQ ID NO: 1749342 - RNA, 12 nt, Human herpesvirus 1
cuuggcggccgc

SEQ ID NO: 1749343 - RNA, 22 nt, Human herpesvirus 1
gccuggaucccaacgaccccgc

SEQ ID NO: 1749344 - RNA, 14 nt, Human herpesvirus 1
cccagcugggcccg

SEQ ID NO: 1749345 - RNA, 22 nt, Human herpesvirus 1
uccgccggcaacugacgcuggc

SEQ ID NO: 1749346 - RNA, 14 nt, Human herpesvirus 1
cguccccuggggcg

SEQ ID NO: 1749347 - RNA, 19 nt, Human herpesvirus 1
gcccaacucucgcaccauc

SEQ ID NO: 1749348 - RNA, 17 nt, Human herpesvirus 1
cgccagguugggggccg

SEQ ID NO: 1749349 - RNA, 13 nt, Human herpesvirus 1
cuggguggucucu

SEQ ID NO: 1749350 - RNA, 17 nt, Human herpesvirus 1
uucgcaccaacaaccuu

SEQ ID NO: 1749351 - RNA, 17 nt, Human herpesvirus 1
gcggcauaacuccgacc

SEQ ID NO: 1749352 - RNA, 16 nt, Human herpesvirus 1
uggggggggcugccgc

SEQ ID NO: 1749353 - RNA, 14 nt, Human herpesvirus 1
cccgcuggggcggc

SEQ ID NO: 1749354 - RNA, 18 nt, Human herpesvirus 1
cgcuaugacggcaauaaa

SEQ ID NO: 1749355 - RNA, 19 nt, Human herpesvirus 1
gacacacggcguggagcaa

SEQ ID NO: 1749356 - RNA, 15 nt, Human herpesvirus 1
gccccgacccccuug

SEQ ID NO: 1749357 - RNA, 16 nt, Human herpesvirus 1
gccgugauuccucucc

SEQ ID NO: 1749358 - RNA, 14 nt, Human herpesvirus 1
ccaccaccuccacc

SEQ ID NO: 1749359 - RNA, 20 nt, Human herpesvirus 1
gcgggaguuucuccgcgguc

SEQ ID NO: 1749360 - RNA, 14 nt, Human herpesvirus 1
ucgccugcccccug

SEQ ID NO: 1749361 - RNA, 22 nt, Human herpesvirus 1
cgggucuuuuguguuggcccua

SEQ ID NO: 1749362 - RNA, 13 nt, Human herpesvirus 1
cagggcgggccgc

SEQ ID NO: 1749363 - RNA, 18 nt, Human herpesvirus 1
aaugggcggccccggccg

SEQ ID NO: 1749364 - RNA, 21 nt, Human herpesvirus 1
gccugggucuuccgcggagcu

SEQ ID NO: 1749365 - RNA, 21 nt, Human herpesvirus 1
gccugccucuccccccaggcc

SEQ ID NO: 1749366 - RNA, 15 nt, Human herpesvirus 1
caagccgccccagca

SEQ ID NO: 1749367 - RNA, 19 nt, Human herpesvirus 1
cguguuggagcgcgccugc

SEQ ID NO: 1749368 - RNA, 20 nt, Human herpesvirus 1
ggguuggggggguccggcac

SEQ ID NO: 1749369 - RNA, 13 nt, Human herpesvirus 1
gcccccgccccuc

SEQ ID NO: 1749370 - RNA, 19 nt, Human herpesvirus 1
acgcccgaccacacacccc

SEQ ID NO: 1749371 - RNA, 13 nt, Human herpesvirus 1
uccagcacacccc

SEQ ID NO: 1749372 - RNA, 21 nt, Human herpesvirus 1
cgcucgcucucggugccccug

SEQ ID NO: 1749373 - RNA, 18 nt, Human herpesvirus 1
agggcggccagccgcgcg

SEQ ID NO: 1749374 - RNA, 20 nt, Human herpesvirus 1
ccagaauaaugaccaccaca

SEQ ID NO: 1749375 - RNA, 21 nt, Human herpesvirus 1
ggacgcgcggcgcgagcuccc

SEQ ID NO: 1749376 - RNA, 17 nt, Human herpesvirus 1
ccgggccgcaccgggcc

SEQ ID NO: 1749377 - RNA, 13 nt, Human herpesvirus 1
ccugggguuccug

SEQ ID NO: 1749378 - RNA, 14 nt, Human herpesvirus 1
ugaaccagacccua

SEQ ID NO: 1749379 - RNA, 16 nt, Human herpesvirus 1
ggcgccugugugucuu

SEQ ID NO: 1749380 - RNA, 12 nt, Human herpesvirus 1
gcaccgggcccc

SEQ ID NO: 1749381 - RNA, 19 nt, Human herpesvirus 1
ccucucuucccucagguca

SEQ ID NO: 1749382 - RNA, 13 nt, Human herpesvirus 1
gccccgccaccca

SEQ ID NO: 1749383 - RNA, 22 nt, Human herpesvirus 1
ucgggcgcuggguggucucugg

SEQ ID NO: 1749384 - RNA, 19 nt, Human herpesvirus 1
ccguggcgccccggccccu

SEQ ID NO: 1749385 - RNA, 16 nt, Human herpesvirus 1
gcauuuauugacccaa

SEQ ID NO: 1749386 - RNA, 23 nt, Human herpesvirus 1
ccaucccggguuaauguaaauaa

SEQ ID NO: 1749387 - RNA, 20 nt, Human herpesvirus 1
gcccucuuggaggaccccgu

SEQ ID NO: 1749388 - RNA, 15 nt, Human herpesvirus 1
ccuccgaagacgucc

SEQ ID NO: 1749389 - RNA, 16 nt, Human herpesvirus 1
ucgcuucccgaccucc

SEQ ID NO: 1749390 - RNA, 15 nt, Human herpesvirus 1
gugggggugggcauc

SEQ ID NO: 1749391 - RNA, 16 nt, Human herpesvirus 1
ggcccugcugcugccg

SEQ ID NO: 1749392 - RNA, 17 nt, Human herpesvirus 1
aaccuccgggggcggcg

SEQ ID NO: 1749393 - RNA, 21 nt, Human herpesvirus 1
agcaaccccaugaaggcccug

SEQ ID NO: 1749394 - RNA, 19 nt, Human herpesvirus 1
cgccucccccugagccgcu

SEQ ID NO: 1749395 - RNA, 15 nt, Human herpesvirus 1
ggcggcaggcgccag

SEQ ID NO: 1749396 - RNA, 19 nt, Human herpesvirus 1
caccuuugacggcgcggcc

SEQ ID NO: 1749397 - RNA, 23 nt, Human herpesvirus 1
agcgggucuuuuguguuggcccu

SEQ ID NO: 1749398 - RNA, 12 nt, Human herpesvirus 1
uggcccuggcuc

SEQ ID NO: 1749399 - RNA, 15 nt, Human herpesvirus 1
gcagaccuauguguu

SEQ ID NO: 1749400 - RNA, 18 nt, Human herpesvirus 1
guuucuuggccccugggg

SEQ ID NO: 1749401 - RNA, 16 nt, Human herpesvirus 1
cgcgaccucaccacca

SEQ ID NO: 1749402 - RNA, 15 nt, Human herpesvirus 1
cccuaaggcccggcu

SEQ ID NO: 1749403 - RNA, 20 nt, Human herpesvirus 1
gacagcacucacagccccgc

SEQ ID NO: 1749404 - RNA, 17 nt, Human herpesvirus 1
uggcgcggugccugacg

SEQ ID NO: 1749405 - RNA, 13 nt, Human herpesvirus 1
ccuuagcgcggcc

SEQ ID NO: 1749406 - RNA, 14 nt, Human herpesvirus 1
ggucaccugccagu

SEQ ID NO: 1749407 - RNA, 12 nt, Human herpesvirus 1
gacgccccccgu

SEQ ID NO: 1749408 - RNA, 17 nt, Human herpesvirus 1
ccuggcgagcccagacc

SEQ ID NO: 1749409 - RNA, 15 nt, Human herpesvirus 1
ccccggucucccagg

SEQ ID NO: 1749410 - RNA, 19 nt, Human herpesvirus 1
ggaccacgugcacagccug

SEQ ID NO: 1749411 - RNA, 18 nt, Human herpesvirus 1
acgaacgcggaccccccc

SEQ ID NO: 1749412 - RNA, 23 nt, Human herpesvirus 1
cagggccggcggcgcuccucgcc

SEQ ID NO: 1749413 - RNA, 14 nt, Human herpesvirus 1
gccgcaaccagcug

SEQ ID NO: 1749414 - RNA, 20 nt, Human herpesvirus 1
ugaugucccucauuuuacaa

SEQ ID NO: 1749415 - RNA, 18 nt, Human herpesvirus 1
accagguaauaccaaaua

SEQ ID NO: 1749416 - RNA, 21 nt, Human herpesvirus 1
ucacggugaccgcgugcccac

SEQ ID NO: 1749417 - RNA, 15 nt, Human herpesvirus 1
uggcugacccacgcg

SEQ ID NO: 1749418 - RNA, 22 nt, Human herpesvirus 1
caccuccacccccucgaccacc

SEQ ID NO: 1749419 - RNA, 15 nt, Human herpesvirus 1
ggggccuuggggccc

SEQ ID NO: 1749420 - RNA, 13 nt, Human herpesvirus 1
caaaauaaaagac

SEQ ID NO: 1749421 - RNA, 11 nt, Human herpesvirus 1
aaccccaggga

SEQ ID NO: 1749422 - RNA, 17 nt, Human herpesvirus 1
uaccgcgagcucccaga

SEQ ID NO: 1749423 - RNA, 13 nt, Human herpesvirus 1
ucaccaccaaggc

SEQ ID NO: 1749424 - RNA, 17 nt, Human herpesvirus 1
accacgccccuuucccc

SEQ ID NO: 1749425 - RNA, 14 nt, Human herpesvirus 1
gcgcaccuggugau

SEQ ID NO: 1749426 - RNA, 15 nt, Human herpesvirus 1
cccaaaacacacgga

SEQ ID NO: 1749427 - RNA, 13 nt, Human herpesvirus 1
cgucaaaaguugu

SEQ ID NO: 1749428 - RNA, 19 nt, Human herpesvirus 1
ucaccaccauggccccccg

SEQ ID NO: 1749429 - RNA, 16 nt, Human herpesvirus 1
uggucccccggggacc

SEQ ID NO: 1749430 - RNA, 16 nt, Human herpesvirus 1
aucgcaucuuuccugu

SEQ ID NO: 1749431 - RNA, 22 nt, Human herpesvirus 1
gcgggugaacgagccgacggcc

SEQ ID NO: 1749432 - RNA, 15 nt, Human herpesvirus 1
acaacggcucggccu

SEQ ID NO: 1749433 - RNA, 14 nt, Human herpesvirus 1
agcgcccuccugac

SEQ ID NO: 1749434 - RNA, 19 nt, Human herpesvirus 1
ccaggccuaccagcagggg

SEQ ID NO: 1749435 - RNA, 16 nt, Human herpesvirus 1
gcccccagaugcccac

SEQ ID NO: 1749436 - RNA, 18 nt, Human herpesvirus 1
cggcugguccacacccag

SEQ ID NO: 1749437 - RNA, 21 nt, Human herpesvirus 1
guccccgaggaccccgugggc

SEQ ID NO: 1749438 - RNA, 20 nt, Human herpesvirus 1
aggugcccccgcgccucccg

SEQ ID NO: 1749439 - RNA, 15 nt, Human herpesvirus 1
gagcgaaggcugccg

SEQ ID NO: 1749440 - RNA, 13 nt, Human herpesvirus 1
cagcgaccugggg

SEQ ID NO: 1749441 - RNA, 21 nt, Human herpesvirus 1
acaauccccaggacaccgcgu

SEQ ID NO: 1749442 - RNA, 15 nt, Human herpesvirus 1
gggaccgcagccugg

SEQ ID NO: 1749443 - RNA, 20 nt, Human herpesvirus 1
gcgccguuggcccccgccuc

SEQ ID NO: 1749444 - RNA, 13 nt, Human herpesvirus 1
cccucugggcccg

SEQ ID NO: 1749445 - RNA, 15 nt, Human herpesvirus 1
ugcgggucaccugcc

SEQ ID NO: 1749446 - RNA, 16 nt, Human herpesvirus 1
cgcggguugcugcgcg

SEQ ID NO: 1749447 - RNA, 14 nt, Human herpesvirus 1
ugucacgcgggagg

SEQ ID NO: 1749448 - RNA, 20 nt, Human herpesvirus 1
gggacacuuguccggagaac

SEQ ID NO: 1749449 - RNA, 14 nt, Human herpesvirus 1
ccugggucagcucc

SEQ ID NO: 1749450 - RNA, 13 nt, Human herpesvirus 1
agcgcucuugucu

SEQ ID NO: 1749451 - RNA, 16 nt, Human herpesvirus 1
cggcaagcggagcggc

SEQ ID NO: 1749452 - RNA, 14 nt, Human herpesvirus 1
cauauccaccaccu

SEQ ID NO: 1749453 - RNA, 18 nt, Human herpesvirus 1
gagcuguacgugcgggaa

SEQ ID NO: 1749454 - RNA, 22 nt, Human herpesvirus 1
gacuggccaaucggcggccgcc

SEQ ID NO: 1749455 - RNA, 19 nt, Human herpesvirus 1
cccuggacgugggccucac

SEQ ID NO: 1749456 - RNA, 18 nt, Human herpesvirus 1
cucgcaugaagcccccaa

SEQ ID NO: 1749457 - RNA, 10 nt, Human herpesvirus 1
gaccuggggg

SEQ ID NO: 1749458 - RNA, 18 nt, Human herpesvirus 1
cgaaaucguggcgcggcu

SEQ ID NO: 1749459 - RNA, 12 nt, Human herpesvirus 1
cgagaugagcca

SEQ ID NO: 1749460 - RNA, 16 nt, Human herpesvirus 1
accacccaaccccaac

SEQ ID NO: 1749461 - RNA, 22 nt, Human herpesvirus 1
ugcacaacacaaacaucuggag

SEQ ID NO: 1749462 - RNA, 11 nt, Human herpesvirus 1
ccuggccagga

SEQ ID NO: 1749463 - RNA, 14 nt, Human herpesvirus 1
gucccugcgucgcc

SEQ ID NO: 1749464 - RNA, 12 nt, Human herpesvirus 1
ggagagcccaca

SEQ ID NO: 1749465 - RNA, 18 nt, Human herpesvirus 1
aaguucaccguggccugg

SEQ ID NO: 1749466 - RNA, 20 nt, Human herpesvirus 1
ccaaguacgccgccaccgug

SEQ ID NO: 1749467 - RNA, 18 nt, Human herpesvirus 1
cacccggaaccugcucac

SEQ ID NO: 1749468 - RNA, 22 nt, Human herpesvirus 1
ggcgggcccgcgggaggccgcc

SEQ ID NO: 1749469 - RNA, 13 nt, Human herpesvirus 1
ccuagccgcagca

SEQ ID NO: 1749470 - RNA, 14 nt, Human herpesvirus 1
cuccuggccaggau

SEQ ID NO: 1749471 - RNA, 18 nt, Human herpesvirus 1
acgacgacgacgcccgcc

SEQ ID NO: 1749472 - RNA, 11 nt, Human herpesvirus 1
cacccaacaac

SEQ ID NO: 1749473 - RNA, 19 nt, Human herpesvirus 1
cgagcucccagagacccca

SEQ ID NO: 1749474 - RNA, 22 nt, Human herpesvirus 1
uccaggcugucgacgcccccuc

SEQ ID NO: 1749475 - RNA, 23 nt, Human herpesvirus 1
cggaguccugucccugcgucgcc

SEQ ID NO: 1749476 - RNA, 19 nt, Human herpesvirus 1
gcaggcgguugucgggggu

SEQ ID NO: 1749477 - RNA, 15 nt, Human herpesvirus 1
ugggcggccucuccg

SEQ ID NO: 1749478 - RNA, 17 nt, Human herpesvirus 1
ggcccgcguuuggccug

SEQ ID NO: 1749479 - RNA, 15 nt, Human herpesvirus 1
cccgcaucccccguc

SEQ ID NO: 1749480 - RNA, 22 nt, Human herpesvirus 1
cgccgcuaccgacgcucccguc

SEQ ID NO: 1749481 - RNA, 16 nt, Human herpesvirus 1
agcucaaucuggccca

SEQ ID NO: 1749482 - RNA, 16 nt, Human herpesvirus 1
cgggccacggcgccga

SEQ ID NO: 1749483 - RNA, 19 nt, Human herpesvirus 1
gggcucgccagcgacccgc

SEQ ID NO: 1749484 - RNA, 21 nt, Human herpesvirus 1
gccgcgggcccccggccgccg

SEQ ID NO: 1749485 - RNA, 13 nt, Human herpesvirus 1
gucgucagcaccg

SEQ ID NO: 1749486 - RNA, 15 nt, Human herpesvirus 1
agcccggccguguga

SEQ ID NO: 1749487 - RNA, 20 nt, Human herpesvirus 1
cccaacccccuaagacccac

SEQ ID NO: 1749488 - RNA, 14 nt, Human herpesvirus 1
acccucucuucccu

SEQ ID NO: 1749489 - RNA, 14 nt, Human herpesvirus 1
ugaaccccaacgcc

SEQ ID NO: 1749490 - RNA, 17 nt, Human herpesvirus 1
ccgaacaaacgacccac

SEQ ID NO: 1749491 - RNA, 13 nt, Human herpesvirus 1
uacuugcgcggcu

SEQ ID NO: 1749492 - RNA, 11 nt, Human herpesvirus 1
aaauaaagcca

SEQ ID NO: 1749493 - RNA, 16 nt, Human herpesvirus 1
gaucccaacaacuccc

SEQ ID NO: 1749494 - RNA, 19 nt, Human herpesvirus 1
cccuacaccggccacccag

SEQ ID NO: 1749495 - RNA, 19 nt, Human herpesvirus 1
ccgagucuucggggcccgg

SEQ ID NO: 1749496 - RNA, 15 nt, Human herpesvirus 1
agauguccaauccac

SEQ ID NO: 1749497 - RNA, 19 nt, Human herpesvirus 1
ugcguucaucggacccccc

SEQ ID NO: 1749498 - RNA, 13 nt, Human herpesvirus 1
guugguccagacg

SEQ ID NO: 1749499 - RNA, 19 nt, Human herpesvirus 1
ucccaucccccgaucccaa

SEQ ID NO: 1749500 - RNA, 15 nt, Human herpesvirus 1
ggcgaccgccagccg

SEQ ID NO: 1749501 - RNA, 15 nt, Human herpesvirus 1
uggaggcgcggcgcc

SEQ ID NO: 1749502 - RNA, 19 nt, Human herpesvirus 1
ccgcaauuugcacccagcc

SEQ ID NO: 1749503 - RNA, 14 nt, Human herpesvirus 1
ucuuuccugugugu

SEQ ID NO: 1749504 - RNA, 14 nt, Human herpesvirus 1
caagagcgcucccc

SEQ ID NO: 1749505 - RNA, 17 nt, Human herpesvirus 1
ccccggcccccaauaaa

SEQ ID NO: 1749506 - RNA, 14 nt, Human herpesvirus 1
cggcggcgcuccuc

SEQ ID NO: 1749507 - RNA, 22 nt, Human herpesvirus 1
acccgaggcggccugggucuuc

SEQ ID NO: 1749508 - RNA, 11 nt, Human herpesvirus 1
uuaacagacga

SEQ ID NO: 1749509 - RNA, 13 nt, Human herpesvirus 1
agccucuguguca

SEQ ID NO: 1749510 - RNA, 19 nt, Human herpesvirus 1
aaguucaccguggccuggg

SEQ ID NO: 1749511 - RNA, 16 nt, Human herpesvirus 1
ggcucgucuuggccac

SEQ ID NO: 1749512 - RNA, 17 nt, Human herpesvirus 1
ccuccgcuggggccccc

SEQ ID NO: 1749513 - RNA, 22 nt, Human herpesvirus 1
ggcuccggggggcuuccggccu

SEQ ID NO: 1749514 - RNA, 16 nt, Human herpesvirus 1
ugcccccgcgccuccc

SEQ ID NO: 1749515 - RNA, 20 nt, Human herpesvirus 1
ucggccguuucuccgcccga

SEQ ID NO: 1749516 - RNA, 14 nt, Human herpesvirus 1
ggugggcguccugg

SEQ ID NO: 1749517 - RNA, 12 nt, Human herpesvirus 1
uauccugagccc

SEQ ID NO: 1749518 - RNA, 18 nt, Human herpesvirus 1
uggugcugucugacacac

SEQ ID NO: 1749519 - RNA, 22 nt, Human herpesvirus 1
ccauuaucgggccgcuggcaac

SEQ ID NO: 1749520 - RNA, 19 nt, Human herpesvirus 1
gagaaccuagggaacccag

SEQ ID NO: 1749521 - RNA, 16 nt, Human herpesvirus 1
gccaacaauccccagg

SEQ ID NO: 1749522 - RNA, 14 nt, Human herpesvirus 1
uacucgacccacug

SEQ ID NO: 1749523 - RNA, 13 nt, Human herpesvirus 1
ccaagauggccca

SEQ ID NO: 1749524 - RNA, 19 nt, Human herpesvirus 1
cccuccgcuggggccccca

SEQ ID NO: 1749525 - RNA, 12 nt, Human herpesvirus 1
gauggcccugga

SEQ ID NO: 1749526 - RNA, 19 nt, Human herpesvirus 1
caucuuuuuugccgccucg

SEQ ID NO: 1749527 - RNA, 15 nt, Human herpesvirus 1
guagggugguuccug

SEQ ID NO: 1749528 - RNA, 21 nt, Human herpesvirus 1
caucgacacgcgcguccuucu

SEQ ID NO: 1749529 - RNA, 15 nt, Human herpesvirus 1
cucuggacuggacca

SEQ ID NO: 1749530 - RNA, 23 nt, Human herpesvirus 1
gcuccuguaaguacgcccucccg

SEQ ID NO: 1749531 - RNA, 20 nt, Human herpesvirus 1
cggagcuuucuuccggccuc

SEQ ID NO: 1749532 - RNA, 13 nt, Human herpesvirus 1
uuucaccgggacg

SEQ ID NO: 1749533 - RNA, 14 nt, Human herpesvirus 1
accagcgcaccguc

SEQ ID NO: 1749534 - RNA, 20 nt, Human herpesvirus 1
ucgggcauggccccggggcg

SEQ ID NO: 1749535 - RNA, 14 nt, Human herpesvirus 1
cuaagaaauuccaa

SEQ ID NO: 1749536 - RNA, 23 nt, Human herpesvirus 1
gauccgcggcgacaacgcgggcg

SEQ ID NO: 1749537 - RNA, 17 nt, Human herpesvirus 1
aaccccaacuccagacc

SEQ ID NO: 1749538 - RNA, 13 nt, Human herpesvirus 1
gacggcggggcag

SEQ ID NO: 1749539 - RNA, 16 nt, Human herpesvirus 1
ccauaaggucauccga

SEQ ID NO: 1749540 - RNA, 19 nt, Human herpesvirus 1
gaacaauaaaggcgguggu

SEQ ID NO: 1749541 - RNA, 14 nt, Human herpesvirus 1
cgcgccgcugcccg

SEQ ID NO: 1749542 - RNA, 18 nt, Human herpesvirus 1
uauagccuaugccacgcc

SEQ ID NO: 1749543 - RNA, 20 nt, Human herpesvirus 1
accgucccguagucccaucc

SEQ ID NO: 1749544 - RNA, 19 nt, Human herpesvirus 1
caguaacaugcgcacguga

SEQ ID NO: 1749545 - RNA, 21 nt, Human herpesvirus 1
gcugcccuucugucuggacca

SEQ ID NO: 1749546 - RNA, 11 nt, Human herpesvirus 1
cgguccugacg

SEQ ID NO: 1749547 - RNA, 16 nt, Human herpesvirus 1
cccggcacgccugggg

SEQ ID NO: 1749548 - RNA, 15 nt, Human herpesvirus 1
ccgcaccaagccgcu

SEQ ID NO: 1749549 - RNA, 20 nt, Human herpesvirus 1
ccugagcgcccuccugacca

SEQ ID NO: 1749550 - RNA, 22 nt, Human herpesvirus 1
cccggccggauucccgggccgg

SEQ ID NO: 1749551 - RNA, 16 nt, Human herpesvirus 1
cccuguucaaccccag

SEQ ID NO: 1749552 - RNA, 19 nt, Human herpesvirus 1
cgacgccgugggcaauggc

SEQ ID NO: 1749553 - RNA, 23 nt, Human herpesvirus 1
gugcccccccucguucugcugca

SEQ ID NO: 1749554 - RNA, 16 nt, Human herpesvirus 1
cacacaccccccaugc

SEQ ID NO: 1749555 - RNA, 12 nt, Human herpesvirus 1
ggccccgcgucu

SEQ ID NO: 1749556 - RNA, 18 nt, Human herpesvirus 1
ucaccccgcaauuugcac

SEQ ID NO: 1749557 - RNA, 15 nt, Human herpesvirus 1
ggucgggaggccgca

SEQ ID NO: 1749558 - RNA, 23 nt, Human herpesvirus 1
guaauuucuacgugcccccggau

SEQ ID NO: 1749559 - RNA, 17 nt, Human herpesvirus 1
gaccgccugccgcgcgg

SEQ ID NO: 1749560 - RNA, 22 nt, Human herpesvirus 1
cgucuugguggguggguggcug

SEQ ID NO: 1749561 - RNA, 13 nt, Human herpesvirus 1
cgggcccccggcc

SEQ ID NO: 1749562 - RNA, 13 nt, Human herpesvirus 1
ggcacggacccaa

SEQ ID NO: 1749563 - RNA, 17 nt, Human herpesvirus 1
cccgccgcccggggcca

SEQ ID NO: 1749564 - RNA, 12 nt, Human herpesvirus 1
cgccacccaggc

SEQ ID NO: 1749565 - RNA, 21 nt, Human herpesvirus 1
gccccguacaaguucaaggcc

SEQ ID NO: 1749566 - RNA, 16 nt, Human herpesvirus 1
gcccccagcugggccc

SEQ ID NO: 1749567 - RNA, 22 nt, Human herpesvirus 1
cgacccccuuguauguccccaa

SEQ ID NO: 1749568 - RNA, 20 nt, Human herpesvirus 1
cgcagacgaaaagccccggg

SEQ ID NO: 1749569 - RNA, 12 nt, Human herpesvirus 1
ccccgcccgggg

SEQ ID NO: 1749570 - RNA, 19 nt, Human herpesvirus 1
uccguggccccggccccca

SEQ ID NO: 1749571 - RNA, 17 nt, Human herpesvirus 1
ucuuuuguguuggcccu

SEQ ID NO: 1749572 - RNA, 18 nt, Human herpesvirus 1
ccagggaccuccuggacu

SEQ ID NO: 1749573 - RNA, 18 nt, Human herpesvirus 1
ccccagggaccuccugga

SEQ ID NO: 1749574 - RNA, 13 nt, Human herpesvirus 1
cccgcacccccag

SEQ ID NO: 1749575 - RNA, 19 nt, Human herpesvirus 1
gggccccauaaaacccaag

SEQ ID NO: 1749576 - RNA, 14 nt, Human herpesvirus 1
ccaggcgcugggcg

SEQ ID NO: 1749577 - RNA, 14 nt, Human herpesvirus 1
acggcacgcccccu

SEQ ID NO: 1749578 - RNA, 21 nt, Human herpesvirus 1
uggccaggggcauccgggacc

SEQ ID NO: 1749579 - RNA, 19 nt, Human herpesvirus 1
gccccacacagcccucccg

SEQ ID NO: 1749580 - RNA, 15 nt, Human herpesvirus 1
uucgcuggaccucac

SEQ ID NO: 1749581 - RNA, 14 nt, Human herpesvirus 1
ucgaggggcagcug

SEQ ID NO: 1749582 - RNA, 11 nt, Human herpesvirus 1
cuuccccuucc

SEQ ID NO: 1749583 - RNA, 22 nt, Human herpesvirus 1
cuguccugucuuggggcccacc

SEQ ID NO: 1749584 - RNA, 23 nt, Human herpesvirus 1
auggcacgaguucaaccucgggu

SEQ ID NO: 1749585 - RNA, 21 nt, Human herpesvirus 1
ggggguccggcacggacccaa

SEQ ID NO: 1749586 - RNA, 12 nt, Human herpesvirus 1
ccccggccaccu

SEQ ID NO: 1749587 - RNA, 14 nt, Human herpesvirus 1
cucgcaccaucccg

SEQ ID NO: 1749588 - RNA, 23 nt, Human herpesvirus 1
auuuccgacgaacgcggaccccc

SEQ ID NO: 1749589 - RNA, 18 nt, Human herpesvirus 1
gaacaauaaaggcggugg

SEQ ID NO: 1749590 - RNA, 23 nt, Human herpesvirus 1
gcagacgguggugcccagcggcc

SEQ ID NO: 1749591 - RNA, 14 nt, Human herpesvirus 1
cucgaccaccaccu

SEQ ID NO: 1749592 - RNA, 20 nt, Human herpesvirus 1
cugugggccaagauggccca

SEQ ID NO: 1749593 - RNA, 14 nt, Human herpesvirus 1
cucccugcggcugg

SEQ ID NO: 1749594 - RNA, 12 nt, Human herpesvirus 1
uagcgggggacg

SEQ ID NO: 1749595 - RNA, 15 nt, Human herpesvirus 1
cgggcagugagggug

SEQ ID NO: 1749596 - RNA, 20 nt, Human herpesvirus 1
cuaagcgucccugggcccug

SEQ ID NO: 1749597 - RNA, 17 nt, Human herpesvirus 1
cgggcgacgccccggcc

SEQ ID NO: 1749598 - RNA, 20 nt, Human herpesvirus 1
agcgcacggaacacaaggcc

SEQ ID NO: 1749599 - RNA, 21 nt, Human herpesvirus 1
ggacccgcaucccccgucugg

SEQ ID NO: 1749600 - RNA, 15 nt, Human herpesvirus 1
caacagcccccgggu

SEQ ID NO: 1749601 - RNA, 23 nt, Human herpesvirus 1
gaccaucacccgagucucugggc

SEQ ID NO: 1749602 - RNA, 18 nt, Human herpesvirus 1
ccauuuacguggcugggu

SEQ ID NO: 1749603 - RNA, 13 nt, Human herpesvirus 1
cuucggugccagu

SEQ ID NO: 1749604 - RNA, 17 nt, Human herpesvirus 1
acagagggccacucacg

SEQ ID NO: 1749605 - RNA, 14 nt, Human herpesvirus 1
cuguaugacagcgg

SEQ ID NO: 1749606 - RNA, 20 nt, Human herpesvirus 1
cggcccucuuggaggacccc

SEQ ID NO: 1749607 - RNA, 15 nt, Human herpesvirus 1
ggaccuccuggacuu

SEQ ID NO: 1749608 - RNA, 19 nt, Human herpesvirus 1
cccagagguguucacgcac

SEQ ID NO: 1749609 - RNA, 15 nt, Human herpesvirus 1
cuguaggucugggaa

SEQ ID NO: 1749610 - RNA, 14 nt, Human herpesvirus 1
gaccgaguacccgc

SEQ ID NO: 1749611 - RNA, 12 nt, Human herpesvirus 1
cgccccuguggc

SEQ ID NO: 1749612 - RNA, 16 nt, Human herpesvirus 1
gccccggcccccaaua

SEQ ID NO: 1749613 - RNA, 15 nt, Human herpesvirus 1
cccugaucccccgcg

SEQ ID NO: 1749614 - RNA, 22 nt, Human herpesvirus 1
gaccuguugauggccugugcuu

SEQ ID NO: 1749615 - RNA, 12 nt, Human herpesvirus 1
gucucucuuccc

SEQ ID NO: 1749616 - RNA, 20 nt, Human herpesvirus 1
cgcgguuuaccgccaccagc

SEQ ID NO: 1749617 - RNA, 16 nt, Human herpesvirus 1
uuuguguuccgugucu

SEQ ID NO: 1749618 - RNA, 14 nt, Human herpesvirus 1
gccugcggcgcacc

SEQ ID NO: 1749619 - RNA, 20 nt, Human herpesvirus 1
ucagagacaacgcgacaggc

SEQ ID NO: 1749620 - RNA, 14 nt, Human herpesvirus 1
accucgaggacacc

SEQ ID NO: 1749621 - RNA, 16 nt, Human herpesvirus 1
cugucgcacccacagc

SEQ ID NO: 1749622 - RNA, 13 nt, Human herpesvirus 1
cgccucggagccg

SEQ ID NO: 1749623 - RNA, 14 nt, Human herpesvirus 1
acccaccccaacgc

SEQ ID NO: 1749624 - RNA, 23 nt, Human herpesvirus 1
gugguuuuuauuuacaacaaacc

SEQ ID NO: 1749625 - RNA, 16 nt, Human herpesvirus 1
cggagggaaccaccau

SEQ ID NO: 1749626 - RNA, 17 nt, Human herpesvirus 1
aguaugccccccuggcg

SEQ ID NO: 1749627 - RNA, 22 nt, Human herpesvirus 1
cgccggguagcguacggaccgc

SEQ ID NO: 1749628 - RNA, 12 nt, Human herpesvirus 1
cccaacaacacc

SEQ ID NO: 1749629 - RNA, 20 nt, Human herpesvirus 1
gucucccagggagccccggu

SEQ ID NO: 1749630 - RNA, 20 nt, Human herpesvirus 1
ccacgccccuuucccccugu

SEQ ID NO: 1749631 - RNA, 20 nt, Human herpesvirus 1
caguggcuccgggccaacca

SEQ ID NO: 1749632 - RNA, 16 nt, Human herpesvirus 1
gguccccucugggccc

SEQ ID NO: 1749633 - RNA, 15 nt, Human herpesvirus 1
cucgcuuugccggga

SEQ ID NO: 1749634 - RNA, 23 nt, Human herpesvirus 1
gugcguagcauaccugggugugu

SEQ ID NO: 1749635 - RNA, 14 nt, Human herpesvirus 1
caggaccgccugcc

SEQ ID NO: 1749636 - RNA, 19 nt, Human herpesvirus 1
ccuugguuccgacgccuca

SEQ ID NO: 1749637 - RNA, 14 nt, Human herpesvirus 1
uuugcccauaauaa

SEQ ID NO: 1749638 - RNA, 21 nt, Human herpesvirus 1
caggugggugcuuuggaaacu

SEQ ID NO: 1749639 - RNA, 22 nt, Human herpesvirus 1
ucccgguaugguaauuaaaaac

SEQ ID NO: 1749640 - RNA, 13 nt, Human herpesvirus 1
accaccaaggccc

SEQ ID NO: 1749641 - RNA, 23 nt, Human herpesvirus 1
cccuuaauaaauuuuacaaacag

SEQ ID NO: 1749642 - RNA, 13 nt, Human herpesvirus 1
aaacgccagccug

SEQ ID NO: 1749643 - RNA, 17 nt, Human herpesvirus 1
ggcgccacaccacgcca

SEQ ID NO: 1749644 - RNA, 21 nt, Human herpesvirus 1
cgcgcucaaccaccgcucccc

SEQ ID NO: 1749645 - RNA, 18 nt, Human herpesvirus 1
acgcgcaccuguuccgcc

SEQ ID NO: 1749646 - RNA, 11 nt, Human herpesvirus 1
ccaugcuggcg

SEQ ID NO: 1749647 - RNA, 23 nt, Human herpesvirus 1
cgugcccauuuacguggcugggu

SEQ ID NO: 1749648 - RNA, 21 nt, Human herpesvirus 1
cggggacggggaggcgggccc

SEQ ID NO: 1749649 - RNA, 13 nt, Human herpesvirus 1
agugccccgaccc

SEQ ID NO: 1749650 - RNA, 12 nt, Human herpesvirus 1
ggaccaccgccc

SEQ ID NO: 1749651 - RNA, 22 nt, Human herpesvirus 1
gagcccgcuggggcggcugggc

SEQ ID NO: 1749652 - RNA, 23 nt, Human herpesvirus 1
cggaaaaccugggcggccucucc

SEQ ID NO: 1749653 - RNA, 20 nt, Human herpesvirus 1
cgccagcuuuccgcugagcc

SEQ ID NO: 1749654 - RNA, 18 nt, Human herpesvirus 1
gacucucccccaccgccc

SEQ ID NO: 1749655 - RNA, 22 nt, Human herpesvirus 1
agacggcauucgggccugccug

SEQ ID NO: 1749656 - RNA, 14 nt, Human herpesvirus 1
ggcccuggcucccg

SEQ ID NO: 1749657 - RNA, 12 nt, Human herpesvirus 1
cguucugcugca

SEQ ID NO: 1749658 - RNA, 19 nt, Human herpesvirus 1
cgcccgcgacgccauggac

SEQ ID NO: 1749659 - RNA, 17 nt, Human herpesvirus 1
guggcacgggcccaagg

SEQ ID NO: 1749660 - RNA, 11 nt, Human herpesvirus 1
gcccgcccccc

SEQ ID NO: 1749661 - RNA, 14 nt, Human herpesvirus 1
uuuccgcugagccu

SEQ ID NO: 1749662 - RNA, 23 nt, Human herpesvirus 1
ggcacaccgguccccggaggcgu

SEQ ID NO: 1749663 - RNA, 19 nt, Human herpesvirus 1
cgagcagccgcgccgcugc

SEQ ID NO: 1749664 - RNA, 18 nt, Human herpesvirus 1
ccccucgaccaccauccc

SEQ ID NO: 1749665 - RNA, 22 nt, Human herpesvirus 1
gccgcgacccaggcggcgaacg

SEQ ID NO: 1749666 - RNA, 14 nt, Human herpesvirus 1
ggggcauuucagug

SEQ ID NO: 1749667 - RNA, 13 nt, Human herpesvirus 1
ugcaccccagagg

SEQ ID NO: 1749668 - RNA, 23 nt, Human herpesvirus 1
guccccucugggcccgccuggau

SEQ ID NO: 1749669 - RNA, 15 nt, Human herpesvirus 1
cccggcuagacccac

SEQ ID NO: 1749670 - RNA, 19 nt, Human herpesvirus 1
cagagacaacgcgacaggc

SEQ ID NO: 1749671 - RNA, 14 nt, Human herpesvirus 1
caaguucaaggcca

SEQ ID NO: 1749672 - RNA, 19 nt, Human herpesvirus 1
cagccuguuuguccugggg

SEQ ID NO: 1749673 - RNA, 13 nt, Human herpesvirus 1
gcccuccugacca

SEQ ID NO: 1749674 - RNA, 20 nt, Human herpesvirus 1
ggcggacccccggaggcgcc

SEQ ID NO: 1749675 - RNA, 19 nt, Human herpesvirus 1
cgcgacccaccgggcccgg

SEQ ID NO: 1749676 - RNA, 18 nt, Human herpesvirus 1
augcgccagggcgccccc

SEQ ID NO: 1749677 - RNA, 13 nt, Human herpesvirus 1
ccgaggggccaag

SEQ ID NO: 1749678 - RNA, 14 nt, Human herpesvirus 1
cccacgcucucccc

SEQ ID NO: 1749679 - RNA, 19 nt, Human herpesvirus 1
ggcguacaacggcucggcc

SEQ ID NO: 1749680 - RNA, 17 nt, Human herpesvirus 1
cgacggcgucucccggg

SEQ ID NO: 1749681 - RNA, 17 nt, Human herpesvirus 1
cugggauggcuccuggc

SEQ ID NO: 1749682 - RNA, 15 nt, Human herpesvirus 1
aggaggccgccacgc

SEQ ID NO: 1749683 - RNA, 20 nt, Human herpesvirus 1
gaccagccguccucgcacca

SEQ ID NO: 1749684 - RNA, 17 nt, Human herpesvirus 1
cggccgaagccacgccc

SEQ ID NO: 1749685 - RNA, 15 nt, Human herpesvirus 1
uccgcggccccagcc

SEQ ID NO: 1749686 - RNA, 23 nt, Human herpesvirus 1
cgccacgguggugcaguucgagc

SEQ ID NO: 1749687 - RNA, 15 nt, Human herpesvirus 1
cagauagccaucccc

SEQ ID NO: 1749688 - RNA, 19 nt, Human herpesvirus 1
uccacgguaggcccagcau

SEQ ID NO: 1749689 - RNA, 19 nt, Human herpesvirus 1
cccgccaacacccccuucc

SEQ ID NO: 1749690 - RNA, 20 nt, Human herpesvirus 1
auaaagccgccacccucucu

SEQ ID NO: 1749691 - RNA, 21 nt, Human herpesvirus 1
aaagacacgggcaccacacac

SEQ ID NO: 1749692 - RNA, 10 nt, Human herpesvirus 1
gcccggggcc

SEQ ID NO: 1749693 - RNA, 15 nt, Human herpesvirus 1
gaaaagugaaagaca

SEQ ID NO: 1749694 - RNA, 18 nt, Human herpesvirus 1
gagcugcagaaucacgag

SEQ ID NO: 1749695 - RNA, 12 nt, Human herpesvirus 1
acguccuuuggg

SEQ ID NO: 1749696 - RNA, 22 nt, Human herpesvirus 1
caguacauguucuuuaugcgcc

SEQ ID NO: 1749697 - RNA, 13 nt, Human herpesvirus 1
uacacgagcaccc

SEQ ID NO: 1749698 - RNA, 17 nt, Human herpesvirus 1
ggucuguugguccuggc

SEQ ID NO: 1749699 - RNA, 21 nt, Human herpesvirus 1
cggccaacgccgcgacccgca

SEQ ID NO: 1749700 - RNA, 21 nt, Human herpesvirus 1
aaagcugcuggcgcgcacccc

SEQ ID NO: 1749701 - RNA, 22 nt, Human herpesvirus 1
gggggcugcgaguccugcgccc

SEQ ID NO: 1749702 - RNA, 16 nt, Human herpesvirus 1
ccgacucucccaccgc

SEQ ID NO: 1749703 - RNA, 14 nt, Human herpesvirus 1
caccgcugggcgcu

SEQ ID NO: 1749704 - RNA, 21 nt, Human herpesvirus 1
uuggcccccggacccgggccg

SEQ ID NO: 1749705 - RNA, 14 nt, Human herpesvirus 1
agccggccccggca

SEQ ID NO: 1749706 - RNA, 16 nt, Human herpesvirus 1
gcaauuugcacccagc

SEQ ID NO: 1749707 - RNA, 15 nt, Human herpesvirus 1
accgcaucuucgccc

SEQ ID NO: 1749708 - RNA, 21 nt, Human herpesvirus 1
uaaagggccggugguccgccu

SEQ ID NO: 1749709 - RNA, 19 nt, Human herpesvirus 1
cggggcucucggggccgca

SEQ ID NO: 1749710 - RNA, 14 nt, Human herpesvirus 1
cgagcccagacccc

SEQ ID NO: 1749711 - RNA, 18 nt, Human herpesvirus 1
cuccccccaggccuacca

SEQ ID NO: 1749712 - RNA, 22 nt, Human herpesvirus 1
aggaacccgcgcuaugacggca

SEQ ID NO: 1749713 - RNA, 15 nt, Human herpesvirus 1
cccuaaccaggccuc

SEQ ID NO: 1749714 - RNA, 19 nt, Human herpesvirus 1
cagauuccaaagugccccg

SEQ ID NO: 1749715 - RNA, 22 nt, Human herpesvirus 1
caucccacaaacacaaaacaca

SEQ ID NO: 1749716 - RNA, 21 nt, Human herpesvirus 1
cgcccaacucucgcaccaucc

SEQ ID NO: 1749717 - RNA, 14 nt, Human herpesvirus 1
acacggagcugcuc

SEQ ID NO: 1749718 - RNA, 20 nt, Human herpesvirus 1
cugggucugugccaccagcc

SEQ ID NO: 1749719 - RNA, 18 nt, Human herpesvirus 1
cacucgacccccgcgucc

SEQ ID NO: 1749720 - RNA, 16 nt, Human herpesvirus 1
acacccccgugacuca

SEQ ID NO: 1749721 - RNA, 18 nt, Human herpesvirus 1
ccguccucgcaccagccc

SEQ ID NO: 1749722 - RNA, 19 nt, Human herpesvirus 1
cccucacagggcgggccgc

SEQ ID NO: 1749723 - RNA, 22 nt, Human herpesvirus 1
acgcccgccgcaaagccaccca

SEQ ID NO: 1749724 - RNA, 13 nt, Human herpesvirus 1
acgccugccaacc

SEQ ID NO: 1749725 - RNA, 13 nt, Human herpesvirus 1
cucuuccccccca

SEQ ID NO: 1749726 - RNA, 23 nt, Human herpesvirus 1
ggacuacacggagguccagcgcc

SEQ ID NO: 1749727 - RNA, 17 nt, Human herpesvirus 1
cgagucuucggggcccg

SEQ ID NO: 1749728 - RNA, 17 nt, Human herpesvirus 1
cacgauuccgguuuggg

SEQ ID NO: 1749729 - RNA, 16 nt, Human herpesvirus 1
gcacgaucgagguggc

SEQ ID NO: 1749730 - RNA, 13 nt, Human herpesvirus 1
cuagagacagccg

SEQ ID NO: 1749731 - RNA, 12 nt, Human herpesvirus 1
caugcuggagga

SEQ ID NO: 1749732 - RNA, 17 nt, Human herpesvirus 1
ucgcgucccgcccaccg

SEQ ID NO: 1749733 - RNA, 23 nt, Human herpesvirus 1
ccgggccccauaaaacccaagcc

SEQ ID NO: 1749734 - RNA, 16 nt, Human herpesvirus 1
gccgggaacgcuagcc

SEQ ID NO: 1749735 - RNA, 23 nt, Human herpesvirus 1
ggcgcgcgaaaucguggcgcggc

SEQ ID NO: 1749736 - RNA, 20 nt, Human herpesvirus 1
ggcgucuccucugggggcga

SEQ ID NO: 1749737 - RNA, 20 nt, Human herpesvirus 1
accgcgguucgcgucccgcc

SEQ ID NO: 1749738 - RNA, 20 nt, Human herpesvirus 1
acgccuaccggccccugggc

SEQ ID NO: 1749739 - RNA, 15 nt, Human herpesvirus 1
cgccucccccugagc

SEQ ID NO: 1749740 - RNA, 12 nt, Human herpesvirus 1
gcucgucgccug

SEQ ID NO: 1749741 - RNA, 18 nt, Human herpesvirus 1
gccccgguguccgagccc

SEQ ID NO: 1749742 - RNA, 20 nt, Human herpesvirus 1
gaacccccaucuaaugccac

SEQ ID NO: 1749743 - RNA, 13 nt, Human herpesvirus 1
ucgccccaguggc

SEQ ID NO: 1749744 - RNA, 14 nt, Human herpesvirus 1
caccccccaugucc

SEQ ID NO: 1749745 - RNA, 20 nt, Human herpesvirus 1
gacagaccuccccgcgcaug

SEQ ID NO: 1749746 - RNA, 15 nt, Human herpesvirus 1
aauuagaaacucauu

SEQ ID NO: 1749747 - RNA, 17 nt, Human herpesvirus 1
aguacgcccucccgcug

SEQ ID NO: 1749748 - RNA, 21 nt, Human herpesvirus 1
ccccuucuccccacaacaugg

SEQ ID NO: 1749749 - RNA, 14 nt, Human herpesvirus 1
cccuccccccgcgu

SEQ ID NO: 1749750 - RNA, 13 nt, Human herpesvirus 1
cgcggaggagcca

SEQ ID NO: 1749751 - RNA, 17 nt, Human herpesvirus 1
ggauggggagagcccac

SEQ ID NO: 1749752 - RNA, 14 nt, Human herpesvirus 1
gacugcaucggcaa

SEQ ID NO: 1749753 - RNA, 16 nt, Human herpesvirus 1
cgggcaccacacacca

SEQ ID NO: 1749754 - RNA, 13 nt, Human herpesvirus 1
uuggggggguccg

SEQ ID NO: 1749755 - RNA, 17 nt, Human herpesvirus 1
ccuugcggcagcgcucc

SEQ ID NO: 1749756 - RNA, 16 nt, Human herpesvirus 1
aaccccaccccugugc

SEQ ID NO: 1749757 - RNA, 13 nt, Human herpesvirus 1
gcgggggcgccgg

SEQ ID NO: 1749758 - RNA, 16 nt, Human herpesvirus 1
cggccaguugagccgc

SEQ ID NO: 1749759 - RNA, 22 nt, Human herpesvirus 1
gacccgcacgagccggggcugg

SEQ ID NO: 1749760 - RNA, 14 nt, Human herpesvirus 1
ccacgguaggccca

SEQ ID NO: 1749761 - RNA, 16 nt, Human herpesvirus 1
cacggcgucgcuguga

SEQ ID NO: 1749762 - RNA, 13 nt, Human herpesvirus 1
gcacgcccccgcg

SEQ ID NO: 1749763 - RNA, 16 nt, Human herpesvirus 1
ggaugcugccccgcuu

SEQ ID NO: 1749764 - RNA, 15 nt, Human herpesvirus 1
cccacgucgucucgg

SEQ ID NO: 1749765 - RNA, 18 nt, Human herpesvirus 1
uccgccugucgcacccac

SEQ ID NO: 1749766 - RNA, 16 nt, Human herpesvirus 1
cugcucacgaccccca

SEQ ID NO: 1749767 - RNA, 19 nt, Human herpesvirus 1
cgcggacggcgcggggccc

SEQ ID NO: 1749768 - RNA, 18 nt, Human herpesvirus 1
ccuuccuaacccagaccc

SEQ ID NO: 1749769 - RNA, 14 nt, Human herpesvirus 1
gaagaccagggccc

SEQ ID NO: 1749770 - RNA, 13 nt, Human herpesvirus 1
ccucgaggacacc

SEQ ID NO: 1749771 - RNA, 19 nt, Human herpesvirus 1
ucccccuccgcaucccagg

SEQ ID NO: 1749772 - RNA, 14 nt, Human herpesvirus 1
cucuacccucugga

SEQ ID NO: 1749773 - RNA, 13 nt, Human herpesvirus 1
caugcacgaccug

SEQ ID NO: 1749774 - RNA, 14 nt, Human herpesvirus 1
cgccucggccaccg

SEQ ID NO: 1749775 - RNA, 18 nt, Human herpesvirus 1
ggccaggggcauccggga

SEQ ID NO: 1749776 - RNA, 14 nt, Human herpesvirus 1
gcaacggggcgccg

SEQ ID NO: 1749777 - RNA, 17 nt, Human herpesvirus 1
ccaucugggauggcucc

SEQ ID NO: 1749778 - RNA, 23 nt, Human herpesvirus 1
ugccccuggugaagaccacuccc

SEQ ID NO: 1749779 - RNA, 16 nt, Human herpesvirus 1
ccacgcucuccccugc

SEQ ID NO: 1749780 - RNA, 17 nt, Human herpesvirus 1
cgcugcccuucugucug

SEQ ID NO: 1749781 - RNA, 23 nt, Human herpesvirus 1
cccaggcggcgaacgggggcccu

SEQ ID NO: 1749782 - RNA, 22 nt, Human herpesvirus 1
gauuccgccaacgcacuguggc

SEQ ID NO: 1749783 - RNA, 15 nt, Human herpesvirus 1
cacccucucuucccu

SEQ ID NO: 1749784 - RNA, 14 nt, Human herpesvirus 1
gcgggccucguggg

SEQ ID NO: 1749785 - RNA, 17 nt, Human herpesvirus 1
gcaucccccgucugggu

SEQ ID NO: 1749786 - RNA, 15 nt, Human herpesvirus 1
ucaaaaguuguuagc

SEQ ID NO: 1749787 - RNA, 15 nt, Human herpesvirus 1
uggacgcgccucccg

SEQ ID NO: 1749788 - RNA, 20 nt, Human herpesvirus 1
cacccccgaguucccccggg

SEQ ID NO: 1749789 - RNA, 19 nt, Human herpesvirus 1
cggggcuguacucgaccca

SEQ ID NO: 1749790 - RNA, 20 nt, Human herpesvirus 1
ccugcugcaggccccccgcc

SEQ ID NO: 1749791 - RNA, 14 nt, Human herpesvirus 1
agccccccagccuc

SEQ ID NO: 1749792 - RNA, 14 nt, Human herpesvirus 1
cuucuccccuuccc

SEQ ID NO: 1749793 - RNA, 17 nt, Human herpesvirus 1
cugcuuauucucgggga

SEQ ID NO: 1749794 - RNA, 16 nt, Human herpesvirus 1
cgagccggggcuggca

SEQ ID NO: 1749795 - RNA, 22 nt, Human herpesvirus 1
cccgcaauuugcacccagccuu

SEQ ID NO: 1749796 - RNA, 21 nt, Human herpesvirus 1
ccucccggaagagccugccgc

SEQ ID NO: 1749797 - RNA, 17 nt, Human herpesvirus 1
ucccagagaccccaggg

SEQ ID NO: 1749798 - RNA, 16 nt, Human herpesvirus 1
cucacccacgccggca

SEQ ID NO: 1749799 - RNA, 20 nt, Human herpesvirus 1
cucauuuguggacgccgggg

SEQ ID NO: 1749800 - RNA, 21 nt, Human herpesvirus 1
gcaccacggguauaaggacau

SEQ ID NO: 1749801 - RNA, 19 nt, Human herpesvirus 1
ucgagcagccgcgccgcug

SEQ ID NO: 1749802 - RNA, 17 nt, Human herpesvirus 1
cgcggcauaacuccgac

SEQ ID NO: 1749803 - RNA, 19 nt, Human herpesvirus 1
cggccacuggccgggagca

SEQ ID NO: 1749804 - RNA, 13 nt, Human herpesvirus 1
ugacagcggggac

SEQ ID NO: 1749805 - RNA, 21 nt, Human herpesvirus 1
cccucuuuuucuuuaaccgcg

SEQ ID NO: 1749806 - RNA, 23 nt, Human herpesvirus 1
agggaaagcaaagaggggcuggg

SEQ ID NO: 1749807 - RNA, 11 nt, Human herpesvirus 1
uccacggccac

SEQ ID NO: 1749808 - RNA, 23 nt, Human herpesvirus 1
gcggcgaccucggcgccucugga

SEQ ID NO: 1749809 - RNA, 13 nt, Human herpesvirus 1
cuucccucccccu

SEQ ID NO: 1749810 - RNA, 15 nt, Human herpesvirus 1
acgugcucgacagcc

SEQ ID NO: 1749811 - RNA, 11 nt, Human herpesvirus 1
ggauggggccc

SEQ ID NO: 1749812 - RNA, 20 nt, Human herpesvirus 1
gcucgcggagggcggccagc

SEQ ID NO: 1749813 - RNA, 13 nt, Human herpesvirus 1
gcgggggccccgc

SEQ ID NO: 1749814 - RNA, 18 nt, Human herpesvirus 1
gaguccugcgccccgccg

SEQ ID NO: 1749815 - RNA, 24 nt, Human herpesvirus 1
auggcacgaguucaaccucgggug

SEQ ID NO: 1749816 - RNA, 12 nt, Human herpesvirus 1
uuuccccucccg

SEQ ID NO: 1749817 - RNA, 13 nt, Human herpesvirus 1
uggcaggagccgc

SEQ ID NO: 1749818 - RNA, 21 nt, Human herpesvirus 1
gacgagacgaacucguggacg

SEQ ID NO: 1749819 - RNA, 19 nt, Human herpesvirus 1
cgcaugaucuccggacccc

SEQ ID NO: 1749820 - RNA, 18 nt, Human herpesvirus 1
cgaacaaacgacccacca

SEQ ID NO: 1749821 - RNA, 12 nt, Human herpesvirus 1
cgacaacugccu

SEQ ID NO: 1749822 - RNA, 18 nt, Human herpesvirus 1
ccuggucagaggcccacg

SEQ ID NO: 1749823 - RNA, 18 nt, Human herpesvirus 1
aauuugcacccagccuuu

SEQ ID NO: 1749824 - RNA, 14 nt, Human herpesvirus 1
ccucgcgggccucg

SEQ ID NO: 1749825 - RNA, 14 nt, Human herpesvirus 1
gaccucggcgccuc

SEQ ID NO: 1749826 - RNA, 22 nt, Human herpesvirus 1
ccacccaggugacgccuucgag

SEQ ID NO: 1749827 - RNA, 22 nt, Human herpesvirus 1
gcaggcgacggcgucucccggg

SEQ ID NO: 1749828 - RNA, 20 nt, Human herpesvirus 1
uuuaacuacauuaaauuggg

SEQ ID NO: 1749829 - RNA, 21 nt, Human herpesvirus 1
uacaaccacauacagcgccau

SEQ ID NO: 1749830 - RNA, 17 nt, Human herpesvirus 1
gcgggccccggggagac

SEQ ID NO: 1749831 - RNA, 15 nt, Human herpesvirus 1
ccacauacagcgcca

SEQ ID NO: 1749832 - RNA, 18 nt, Human herpesvirus 1
uuccagccccccagccuc

SEQ ID NO: 1749833 - RNA, 13 nt, Human herpesvirus 1
gauguaggcuggu

SEQ ID NO: 1749834 - RNA, 13 nt, Human herpesvirus 1
agggcgaggaggg

SEQ ID NO: 1749835 - RNA, 16 nt, Human herpesvirus 1
ccgacaccaccagcug

SEQ ID NO: 1749836 - RNA, 20 nt, Human herpesvirus 1
aaccucggaugacucagggc

SEQ ID NO: 1749837 - RNA, 13 nt, Human herpesvirus 1
gccgcccagcuca

SEQ ID NO: 1749838 - RNA, 20 nt, Human herpesvirus 1
cuggcgcggugccugacgcc

SEQ ID NO: 1749839 - RNA, 14 nt, Human herpesvirus 1
ggcgucgggcaugg

SEQ ID NO: 1749840 - RNA, 23 nt, Human herpesvirus 1
cgccggcggcgacgugcccccuc

SEQ ID NO: 1749841 - RNA, 19 nt, Human herpesvirus 1
ccgcaucccccgucugggu

SEQ ID NO: 1749842 - RNA, 14 nt, Human herpesvirus 1
gccccggcccccaa

SEQ ID NO: 1749843 - RNA, 21 nt, Human herpesvirus 1
acgguggugcccagcggccug

SEQ ID NO: 1749844 - RNA, 19 nt, Human herpesvirus 1
cucaacaucaccaugcugg

SEQ ID NO: 1749845 - RNA, 17 nt, Human herpesvirus 1
gccccggucuccccggg

SEQ ID NO: 1749846 - RNA, 17 nt, Human herpesvirus 1
cgccccucccccgaccu

SEQ ID NO: 1749847 - RNA, 23 nt, Human herpesvirus 1
caggaucacaccggucaacgagg

SEQ ID NO: 1749848 - RNA, 10 nt, Human herpesvirus 1
cugcgcggcg

SEQ ID NO: 1749849 - RNA, 15 nt, Human herpesvirus 1
gucccuccuuagcac

SEQ ID NO: 1749850 - RNA, 22 nt, Human herpesvirus 1
gccugggaucccacguccccgg

SEQ ID NO: 1749851 - RNA, 22 nt, Human herpesvirus 1
gcggccaucgaaaacuacgugc

SEQ ID NO: 1749852 - RNA, 16 nt, Human herpesvirus 1
acgcacccccugaccc

SEQ ID NO: 1749853 - RNA, 19 nt, Human herpesvirus 1
cccagcauguccgccggga

SEQ ID NO: 1749854 - RNA, 15 nt, Human herpesvirus 1
agccguaacccaacc

SEQ ID NO: 1749855 - RNA, 15 nt, Human herpesvirus 1
gugccgcuguggccu

SEQ ID NO: 1749856 - RNA, 19 nt, Human herpesvirus 1
acaaacccaaccgucccgu

SEQ ID NO: 1749857 - RNA, 18 nt, Human herpesvirus 1
gccgccucacgcccgcaa

SEQ ID NO: 1749858 - RNA, 18 nt, Human herpesvirus 1
gccguccucgcaccagcc

SEQ ID NO: 1749859 - RNA, 16 nt, Human herpesvirus 1
cccuuaauaaauuuua

SEQ ID NO: 1749860 - RNA, 15 nt, Human herpesvirus 1
ccacugccugcaucu

SEQ ID NO: 1749861 - RNA, 18 nt, Human herpesvirus 1
cacccggagguuccggag

SEQ ID NO: 1749862 - RNA, 13 nt, Human herpesvirus 1
cacgagcgccagc

SEQ ID NO: 1749863 - RNA, 16 nt, Human herpesvirus 1
cgagaucaaggacagc

SEQ ID NO: 1749864 - RNA, 18 nt, Human herpesvirus 1
gcgccaaacgccagccug

SEQ ID NO: 1749865 - RNA, 16 nt, Human herpesvirus 1
guaugacagcggggac

SEQ ID NO: 1749866 - RNA, 15 nt, Human herpesvirus 1
gcagacgcacccgcu

SEQ ID NO: 1749867 - RNA, 12 nt, Human herpesvirus 1
aucuugucccca

SEQ ID NO: 1749868 - RNA, 20 nt, Human herpesvirus 1
cagacucaagcacacacggg

SEQ ID NO: 1749869 - RNA, 13 nt, Human herpesvirus 1
ccugauggagccu

SEQ ID NO: 1749870 - RNA, 15 nt, Human herpesvirus 1
ucagccgggacgagg

SEQ ID NO: 1749871 - RNA, 11 nt, Human herpesvirus 1
ggucaccugcc

SEQ ID NO: 1749872 - RNA, 17 nt, Human herpesvirus 1
gcccgcaaacaggagcu

SEQ ID NO: 1749873 - RNA, 11 nt, Human herpesvirus 1
gguccccccuc

SEQ ID NO: 1749874 - RNA, 18 nt, Human herpesvirus 1
ccaccaaggcccgggcca

SEQ ID NO: 1749875 - RNA, 13 nt, Human herpesvirus 1
ugcuucccacgcg

SEQ ID NO: 1749876 - RNA, 16 nt, Human herpesvirus 1
acggccguugucuccc

SEQ ID NO: 1749877 - RNA, 13 nt, Human herpesvirus 1
gccaccagccugg

SEQ ID NO: 1749878 - RNA, 14 nt, Human herpesvirus 1
cccagcgaccccac

SEQ ID NO: 1749879 - RNA, 16 nt, Human herpesvirus 1
ucccguagucccaucc

SEQ ID NO: 1749880 - RNA, 20 nt, Human herpesvirus 1
ugcucuggggucccugucgc

SEQ ID NO: 1749881 - RNA, 15 nt, Human herpesvirus 1
uccacaccugcacca

SEQ ID NO: 1749882 - RNA, 20 nt, Human herpesvirus 1
aaagcaagaacaauaaaggc

SEQ ID NO: 1749883 - RNA, 18 nt, Human herpesvirus 1
ugguccgcggggccuccc

SEQ ID NO: 1749884 - RNA, 12 nt, Human herpesvirus 1
acggaccgucug

SEQ ID NO: 1749885 - RNA, 19 nt, Human herpesvirus 1
ccuggcggacggcggccau

SEQ ID NO: 1749886 - RNA, 13 nt, Human herpesvirus 1
cucaacaucacca

SEQ ID NO: 1749887 - RNA, 17 nt, Human herpesvirus 1
gccaacaauccccagga

SEQ ID NO: 1749888 - RNA, 19 nt, Human herpesvirus 1
ucagcuguggacccgagcu

SEQ ID NO: 1749889 - RNA, 22 nt, Human herpesvirus 1
cggucuccccgggagccccgga

SEQ ID NO: 1749890 - RNA, 17 nt, Human herpesvirus 1
cgcgucucuggggagcc

SEQ ID NO: 1749891 - RNA, 24 nt, Human herpesvirus 1
ccagaucuacugcugggccaugga

SEQ ID NO: 1749892 - RNA, 14 nt, Human herpesvirus 1
gcaagaacaauaaa

SEQ ID NO: 1749893 - RNA, 19 nt, Human herpesvirus 1
acuacauuaaauuggguuc

SEQ ID NO: 1749894 - RNA, 22 nt, Human herpesvirus 1
cuguaccggugggcguccugga

SEQ ID NO: 1749895 - RNA, 12 nt, Human herpesvirus 1
gugcccccgcgc

SEQ ID NO: 1749896 - RNA, 12 nt, Human herpesvirus 1
acgaccacgaga

SEQ ID NO: 1749897 - RNA, 21 nt, Human herpesvirus 1
ccuccgcgccaggcccgccgc

SEQ ID NO: 1749898 - RNA, 21 nt, Human herpesvirus 1
ccggggcucucggggccgcag

SEQ ID NO: 1749899 - RNA, 14 nt, Human herpesvirus 1
gcauacgcucgggc

SEQ ID NO: 1749900 - RNA, 17 nt, Human herpesvirus 1
uggccggggagggcagg

SEQ ID NO: 1749901 - RNA, 16 nt, Human herpesvirus 1
guuccguuuuccggaa

SEQ ID NO: 1749902 - RNA, 12 nt, Human herpesvirus 1
augguugcagug

SEQ ID NO: 1749903 - RNA, 20 nt, Human herpesvirus 1
ggccggggagggcagggccg

SEQ ID NO: 1749904 - RNA, 17 nt, Human herpesvirus 1
ggaccaccgccccccug

SEQ ID NO: 1749905 - RNA, 23 nt, Human herpesvirus 1
ugggccauggacagcgaccuggg

SEQ ID NO: 1749906 - RNA, 14 nt, Human herpesvirus 1
ccuccgaggagauc

SEQ ID NO: 1749907 - RNA, 15 nt, Human herpesvirus 1
caucgccucggccac

SEQ ID NO: 1749908 - RNA, 22 nt, Human herpesvirus 1
ccccguccccuucgaggaggug

SEQ ID NO: 1749909 - RNA, 18 nt, Human herpesvirus 1
caucagccucgucccgcc

SEQ ID NO: 1749910 - RNA, 22 nt, Human herpesvirus 1
cuggggucgcggccgcgaccca

SEQ ID NO: 1749911 - RNA, 12 nt, Human herpesvirus 1
cgggaggaagcc

SEQ ID NO: 1749912 - RNA, 23 nt, Human herpesvirus 1
ggcgcguguacugcggucugucu

SEQ ID NO: 1749913 - RNA, 22 nt, Human herpesvirus 1
ccugggauccgacccccaugga

SEQ ID NO: 1749914 - RNA, 15 nt, Human herpesvirus 1
cccaacuccagacca

SEQ ID NO: 1749915 - RNA, 14 nt, Human herpesvirus 1
guauggggggggcu

SEQ ID NO: 1749916 - RNA, 15 nt, Human herpesvirus 1
gcaguucgagcagcc

SEQ ID NO: 1749917 - RNA, 17 nt, Human herpesvirus 1
cacauaaccgaccgcag

SEQ ID NO: 1749918 - RNA, 12 nt, Human herpesvirus 1
ccgacgccucaa

SEQ ID NO: 1749919 - RNA, 16 nt, Human herpesvirus 1
aucaaggugggccagc

SEQ ID NO: 1749920 - RNA, 15 nt, Human herpesvirus 1
guccugcgccccgcc

SEQ ID NO: 1749921 - RNA, 12 nt, Human herpesvirus 1
ucccugggcccu

SEQ ID NO: 1749922 - RNA, 16 nt, Human herpesvirus 1
gggagcgcucuugucu

SEQ ID NO: 1749923 - RNA, 14 nt, Human herpesvirus 1
cagagccgcccguc

SEQ ID NO: 1749924 - RNA, 18 nt, Human herpesvirus 1
aggucaaaugccgggcca

SEQ ID NO: 1749925 - RNA, 17 nt, Human herpesvirus 1
cccagagaccccagggu

SEQ ID NO: 1749926 - RNA, 14 nt, Human herpesvirus 1
gcgcccuccugacc

SEQ ID NO: 1749927 - RNA, 23 nt, Human herpesvirus 1
cucggggccgcaggacccagcaa

SEQ ID NO: 1749928 - RNA, 15 nt, Human herpesvirus 1
uccgugucggggagg

SEQ ID NO: 1749929 - RNA, 20 nt, Human herpesvirus 1
gaccgggucccuccuuagca

SEQ ID NO: 1749930 - RNA, 23 nt, Human herpesvirus 1
ucugggccaccgacagccugaac

SEQ ID NO: 1749931 - RNA, 17 nt, Human herpesvirus 1
cggcaauucccgcggcc

SEQ ID NO: 1749932 - RNA, 18 nt, Human herpesvirus 1
auggugaucgccugucuc

SEQ ID NO: 1749933 - RNA, 17 nt, Human herpesvirus 1
ccgacaacagcccccgg

SEQ ID NO: 1749934 - RNA, 16 nt, Human herpesvirus 1
cgaccucaacaucacc

SEQ ID NO: 1749935 - RNA, 21 nt, Human herpesvirus 1
gacgcugcuccgccuggccug

SEQ ID NO: 1749936 - RNA, 16 nt, Human herpesvirus 1
ccgcgagauggccgcc

SEQ ID NO: 1749937 - RNA, 19 nt, Human herpesvirus 1
gccgaccgcuucaagcagg

SEQ ID NO: 1749938 - RNA, 22 nt, Human herpesvirus 1
gagaucuauaaggccauccagc

SEQ ID NO: 1749939 - RNA, 21 nt, Human herpesvirus 1
cgcugggcgagguggagcugc

SEQ ID NO: 1749940 - RNA, 14 nt, Human herpesvirus 1
accaccgaccucaa

SEQ ID NO: 1749941 - RNA, 13 nt, Human herpesvirus 1
uacaaccugacca

SEQ ID NO: 1749942 - RNA, 20 nt, Human herpesvirus 1
ccuuugcgcucccgccuucc

SEQ ID NO: 1749943 - RNA, 15 nt, Human herpesvirus 1
cuaucgcucgaccuc

SEQ ID NO: 1749944 - RNA, 19 nt, Human herpesvirus 1
ccaagcuagccgaggcccg

SEQ ID NO: 1749945 - RNA, 23 nt, Human herpesvirus 1
cugacccucuccgggaugggcua

SEQ ID NO: 1749946 - RNA, 15 nt, Human herpesvirus 1
ccuccccgcacagau

SEQ ID NO: 1749947 - RNA, 17 nt, Human herpesvirus 1
agccccucgcccguccu

SEQ ID NO: 1749948 - RNA, 19 nt, Human herpesvirus 1
ccggcggucgcgcuccucu

SEQ ID NO: 1749949 - RNA, 17 nt, Human herpesvirus 1
cgcaucuuuccugugug

SEQ ID NO: 1749950 - RNA, 20 nt, Human herpesvirus 1
cacaaacaucuggaggcuuu

SEQ ID NO: 1749951 - RNA, 15 nt, Human herpesvirus 1
caaccagcugcacga

SEQ ID NO: 1749952 - RNA, 18 nt, Human herpesvirus 1
ucuucggggcccggccca

SEQ ID NO: 1749953 - RNA, 12 nt, Human herpesvirus 1
caguggcuccgg

SEQ ID NO: 1749954 - RNA, 13 nt, Human herpesvirus 1
uuuaaccuccccc

SEQ ID NO: 1749955 - RNA, 15 nt, Human herpesvirus 1
uggucagaggcccac

SEQ ID NO: 1749956 - RNA, 15 nt, Human herpesvirus 1
cacgaacccccaucu

SEQ ID NO: 1749957 - RNA, 14 nt, Human herpesvirus 1
cgggcgcugggugg

SEQ ID NO: 1749958 - RNA, 19 nt, Human herpesvirus 1
cgccccgacccccuuguau

SEQ ID NO: 1749959 - RNA, 20 nt, Human herpesvirus 1
gaguuuguggacccaaagcc

SEQ ID NO: 1749960 - RNA, 12 nt, Human herpesvirus 1
gcgcggcugcca

SEQ ID NO: 1749961 - RNA, 16 nt, Human herpesvirus 1
accaccauccccgcuc

SEQ ID NO: 1749962 - RNA, 20 nt, Human herpesvirus 1
accacgcccgaccacacacc

SEQ ID NO: 1749963 - RNA, 20 nt, Human herpesvirus 1
ucggggaggggaaaagugaa

SEQ ID NO: 1749964 - RNA, 18 nt, Human herpesvirus 1
ccgaacugggcgaccgcc

SEQ ID NO: 1749965 - RNA, 21 nt, Human herpesvirus 1
ccggcgggguuauaggccacg

SEQ ID NO: 1749966 - RNA, 18 nt, Human herpesvirus 1
ccgcguggaucggcgcca

SEQ ID NO: 1749967 - RNA, 19 nt, Human herpesvirus 1
cacccgccccuccauccca

SEQ ID NO: 1749968 - RNA, 19 nt, Human herpesvirus 1
acggggaccgggacugggu

SEQ ID NO: 1749969 - RNA, 20 nt, Human herpesvirus 1
cgaacaaacgacccaccaau

SEQ ID NO: 1749970 - RNA, 22 nt, Human herpesvirus 1
ucugggauggcuccuggccagg

SEQ ID NO: 1749971 - RNA, 14 nt, Human herpesvirus 1
gcggguccagaggg

SEQ ID NO: 1749972 - RNA, 14 nt, Human herpesvirus 1
cucccggaagagcc

SEQ ID NO: 1749973 - RNA, 20 nt, Human herpesvirus 1
ucuuccacgaacccagcgac

SEQ ID NO: 1749974 - RNA, 15 nt, Human herpesvirus 1
ccccgcgcggcugcc

SEQ ID NO: 1749975 - RNA, 23 nt, Human herpesvirus 1
ggucucccagggagccccggucu

SEQ ID NO: 1749976 - RNA, 19 nt, Human herpesvirus 1
ucaacgauauguugggccg

SEQ ID NO: 1749977 - RNA, 15 nt, Human herpesvirus 1
ccuugcggcagcgcu

SEQ ID NO: 1749978 - RNA, 16 nt, Human herpesvirus 1
cgguagcgggggacgc

SEQ ID NO: 1749979 - RNA, 23 nt, Human herpesvirus 1
acagaugucaacgccgcuaccga

SEQ ID NO: 1749980 - RNA, 14 nt, Human herpesvirus 1
ucgagcgccaccug

SEQ ID NO: 1749981 - RNA, 17 nt, Human herpesvirus 1
ugaaaccggccaacgcc

SEQ ID NO: 1749982 - RNA, 22 nt, Human herpesvirus 1
gcugccgucgcuagaccacgcc

SEQ ID NO: 1749983 - RNA, 17 nt, Human herpesvirus 1
uuccaggucccaccuga

SEQ ID NO: 1749984 - RNA, 11 nt, Human herpesvirus 1
cuccuuagcac

SEQ ID NO: 1749985 - RNA, 17 nt, Human herpesvirus 1
ccuuugacggcgcggcc

SEQ ID NO: 1749986 - RNA, 14 nt, Human herpesvirus 1
cccaacuccagacc

SEQ ID NO: 1749987 - RNA, 23 nt, Human herpesvirus 1
gcugcagaaucacgagcugaccc

SEQ ID NO: 1749988 - RNA, 13 nt, Human herpesvirus 1
gauaaaaagccag

SEQ ID NO: 1749989 - RNA, 14 nt, Human herpesvirus 1
cgccccggccgccu

SEQ ID NO: 1749990 - RNA, 22 nt, Human herpesvirus 1
gccccguacaaguucaaggcca

SEQ ID NO: 1749991 - RNA, 10 nt, Human herpesvirus 1
gcgccaggcc

SEQ ID NO: 1749992 - RNA, 21 nt, Human herpesvirus 1
cggaaacugccuccaccgggc

SEQ ID NO: 1749993 - RNA, 17 nt, Human herpesvirus 1
cuuugggcgggaggaag

SEQ ID NO: 1749994 - RNA, 12 nt, Human herpesvirus 1
ggccccccgccg

SEQ ID NO: 1749995 - RNA, 13 nt, Human herpesvirus 1
gcccccagggucc

SEQ ID NO: 1749996 - RNA, 14 nt, Human herpesvirus 1
ucccaggaucacac

SEQ ID NO: 1749997 - RNA, 13 nt, Human herpesvirus 1
ggggccggggacg

SEQ ID NO: 1749998 - RNA, 18 nt, Human herpesvirus 1
agcuugcgucccuccccg

SEQ ID NO: 1749999 - RNA, 19 nt, Human herpesvirus 1
ggccuccgcguacgaggac

SEQ ID NO: 1750000 - RNA, 12 nt, Human herpesvirus 1
cgcgcgcgcuuu

SEQ ID NO: 1750001 - RNA, 15 nt, Human herpesvirus 1
ccgggucuguugggg

SEQ ID NO: 1750002 - RNA, 21 nt, Human herpesvirus 1
guuccgccugucgcacccaca

SEQ ID NO: 1750003 - RNA, 23 nt, Human herpesvirus 1
ggcucaagaucuuucggugucua

SEQ ID NO: 1750004 - RNA, 23 nt, Human herpesvirus 1
gccgcgguacagaucggcgccgc

SEQ ID NO: 1750005 - RNA, 21 nt, Human herpesvirus 1
ggggccccgacgcaccccccc

SEQ ID NO: 1750006 - RNA, 15 nt, Human herpesvirus 1
ggcaugcaccccaga

SEQ ID NO: 1750007 - RNA, 18 nt, Human herpesvirus 1
cgggcgacgcacacaccc

SEQ ID NO: 1750008 - RNA, 13 nt, Human herpesvirus 1
augcacgcccccg

SEQ ID NO: 1750009 - RNA, 18 nt, Human herpesvirus 1
ccgacggcguaguggagg

SEQ ID NO: 1750010 - RNA, 14 nt, Human herpesvirus 1
gcccuaaccccacc

SEQ ID NO: 1750011 - RNA, 23 nt, Human herpesvirus 1
cacgcgcggcugguccacaccca

SEQ ID NO: 1750012 - RNA, 14 nt, Human herpesvirus 1
aucgccugucuccu

SEQ ID NO: 1750013 - RNA, 17 nt, Human herpesvirus 1
aucagcuguggacccga

SEQ ID NO: 1750014 - RNA, 19 nt, Human herpesvirus 1
acccccucgaccaccaucc

SEQ ID NO: 1750015 - RNA, 17 nt, Human herpesvirus 1
ccgcuaucuccuggggg

SEQ ID NO: 1750016 - RNA, 12 nt, Human herpesvirus 1
uuaauguaaaua

SEQ ID NO: 1750017 - RNA, 14 nt, Human herpesvirus 1
guugcagggccugg

SEQ ID NO: 1750018 - RNA, 16 nt, Human herpesvirus 1
agucccgaagaccgcc

SEQ ID NO: 1750019 - RNA, 21 nt, Human herpesvirus 1
agcgccggcggucgcgcuccu

SEQ ID NO: 1750020 - RNA, 13 nt, Human herpesvirus 1
cuuggagccagcc

SEQ ID NO: 1750021 - RNA, 14 nt, Human herpesvirus 1
cuuggucuggccca

SEQ ID NO: 1750022 - RNA, 18 nt, Human herpesvirus 1
ccugcccgacagggccgu

SEQ ID NO: 1750023 - RNA, 18 nt, Human herpesvirus 1
gcccagcggccuggacgu

SEQ ID NO: 1750024 - RNA, 19 nt, Human herpesvirus 1
ccucccccgcccuggacac

SEQ ID NO: 1750025 - RNA, 23 nt, Human herpesvirus 1
cagccuucucccggugccuuucc

SEQ ID NO: 1750026 - RNA, 14 nt, Human herpesvirus 1
cucccgacaccacc

SEQ ID NO: 1750027 - RNA, 20 nt, Human herpesvirus 1
cagcaaauaugccuuggugg

SEQ ID NO: 1750028 - RNA, 12 nt, Human herpesvirus 1
aagcuagccgag

SEQ ID NO: 1750029 - RNA, 14 nt, Human herpesvirus 1
gaccuugccccggc

SEQ ID NO: 1750030 - RNA, 14 nt, Human herpesvirus 1
ggcccgccucggag

SEQ ID NO: 1750031 - RNA, 14 nt, Human herpesvirus 1
caaugggccgggcc

SEQ ID NO: 1750032 - RNA, 22 nt, Human herpesvirus 1
cgcgaagacccccccggagccg

SEQ ID NO: 1750033 - RNA, 18 nt, Human herpesvirus 1
ggcguccuggaugcugug

SEQ ID NO: 1750034 - RNA, 23 nt, Human herpesvirus 1
caaccucgggugcauauccuggg

SEQ ID NO: 1750035 - RNA, 16 nt, Human herpesvirus 1
agccacccacgccgcc

SEQ ID NO: 1750036 - RNA, 19 nt, Human herpesvirus 1
cgcgcgucucuggggagcc

SEQ ID NO: 1750037 - RNA, 17 nt, Human herpesvirus 1
cugcgaguccugcgccc

SEQ ID NO: 1750038 - RNA, 15 nt, Human herpesvirus 1
cuacaccagccaauc

SEQ ID NO: 1750039 - RNA, 13 nt, Human herpesvirus 1
cggaggagccagu

SEQ ID NO: 1750040 - RNA, 13 nt, Human herpesvirus 1
gaaagcaagaaca

SEQ ID NO: 1750041 - RNA, 22 nt, Human herpesvirus 1
ccguccgccggcaugcacccca

SEQ ID NO: 1750042 - RNA, 14 nt, Human herpesvirus 1
cgccguccuugcau

SEQ ID NO: 1750043 - RNA, 21 nt, Human herpesvirus 1
gcugcgcggcguccgcgcccc

SEQ ID NO: 1750044 - RNA, 14 nt, Human herpesvirus 1
caugacccagaccg

SEQ ID NO: 1750045 - RNA, 22 nt, Human herpesvirus 1
gccagaucuacugcugggccau

SEQ ID NO: 1750046 - RNA, 12 nt, Human herpesvirus 1
caauccccagga

SEQ ID NO: 1750047 - RNA, 15 nt, Human herpesvirus 1
cgucgccgcgggcca

SEQ ID NO: 1750048 - RNA, 14 nt, Human herpesvirus 1
ggcgggacuggcca

SEQ ID NO: 1750049 - RNA, 18 nt, Human herpesvirus 1
ugaacgaagcggccaugg

SEQ ID NO: 1750050 - RNA, 19 nt, Human herpesvirus 1
agcggcacgaccggcucca

SEQ ID NO: 1750051 - RNA, 21 nt, Human herpesvirus 1
cgcuauaaagccgccacccuc

SEQ ID NO: 1750052 - RNA, 19 nt, Human herpesvirus 1
uauucccaaacagggccuu

SEQ ID NO: 1750053 - RNA, 19 nt, Human herpesvirus 1
gcugcgaguccugcgcccc

SEQ ID NO: 1750054 - RNA, 23 nt, Human herpesvirus 1
gcacaacacaaacaucuggaggc

SEQ ID NO: 1750055 - RNA, 18 nt, Human herpesvirus 1
cguuccucacugccuccc

SEQ ID NO: 1750056 - RNA, 19 nt, Human herpesvirus 1
cggggaccuugccccggcc

SEQ ID NO: 1750057 - RNA, 16 nt, Human herpesvirus 1
ccgccugucgcucguc

SEQ ID NO: 1750058 - RNA, 14 nt, Human herpesvirus 1
ccggcgccgacacg

SEQ ID NO: 1750059 - RNA, 16 nt, Human herpesvirus 1
ccgauggcccuccagg

SEQ ID NO: 1750060 - RNA, 15 nt, Human herpesvirus 1
agcgccccggcgacc

SEQ ID NO: 1750061 - RNA, 15 nt, Human herpesvirus 1
cucggcgggcacgcc

SEQ ID NO: 1750062 - RNA, 20 nt, Human herpesvirus 1
ucccgcaauuucaccgcccc

SEQ ID NO: 1750063 - RNA, 15 nt, Human herpesvirus 1
gcacgccaaugcccu

SEQ ID NO: 1750064 - RNA, 20 nt, Human herpesvirus 1
ccgucgccgcgggccacgcc

SEQ ID NO: 1750065 - RNA, 15 nt, Human herpesvirus 1
cagccuucucccggu

SEQ ID NO: 1750066 - RNA, 16 nt, Human herpesvirus 1
gaccgcaucgacacgc

SEQ ID NO: 1750067 - RNA, 13 nt, Human herpesvirus 1
cucaaucuggccc

SEQ ID NO: 1750068 - RNA, 22 nt, Human herpesvirus 1
ccuugguuccgacgccucaaca

SEQ ID NO: 1750069 - RNA, 21 nt, Human herpesvirus 1
acgcccccgccgcccggggcc

SEQ ID NO: 1750070 - RNA, 13 nt, Human herpesvirus 1
uccggccugggcc

SEQ ID NO: 1750071 - RNA, 22 nt, Human herpesvirus 1
cggccguuucuccgcccgaccg

SEQ ID NO: 1750072 - RNA, 15 nt, Human herpesvirus 1
ugcucgacagccacu

SEQ ID NO: 1750073 - RNA, 16 nt, Human herpesvirus 1
caggccgacugccagc

SEQ ID NO: 1750074 - RNA, 14 nt, Human herpesvirus 1
cucggaaacugccu

SEQ ID NO: 1750075 - RNA, 18 nt, Human herpesvirus 1
cgucauagugggccucca

SEQ ID NO: 1750076 - RNA, 17 nt, Human herpesvirus 1
uggcgagcccagacccc

SEQ ID NO: 1750077 - RNA, 15 nt, Human herpesvirus 1
ugcacucccugccgc

SEQ ID NO: 1750078 - RNA, 15 nt, Human herpesvirus 1
gcgggauccucggcc

SEQ ID NO: 1750079 - RNA, 20 nt, Human herpesvirus 1
aacucucaguuuaucaugga

SEQ ID NO: 1750080 - RNA, 17 nt, Human herpesvirus 1
gaccccacgacacccac

SEQ ID NO: 1750081 - RNA, 14 nt, Human herpesvirus 1
gaaagcaagaacaa

SEQ ID NO: 1750082 - RNA, 20 nt, Human herpesvirus 1
ccagcccucucccccgcucu

SEQ ID NO: 1750083 - RNA, 22 nt, Human herpesvirus 1
cccaacucucgcaccaucccgg

SEQ ID NO: 1750084 - RNA, 14 nt, Human herpesvirus 1
ccccccgcugcggc

SEQ ID NO: 1750085 - RNA, 17 nt, Human herpesvirus 1
gccaaacgccagccugu

SEQ ID NO: 1750086 - RNA, 18 nt, Human herpesvirus 1
augucggguccaaacucc

SEQ ID NO: 1750087 - RNA, 20 nt, Human herpesvirus 1
ccgcaucccccgucuggguu

SEQ ID NO: 1750088 - RNA, 15 nt, Human herpesvirus 1
cggcucggccuaugg

SEQ ID NO: 1750089 - RNA, 14 nt, Human herpesvirus 1
ccccaaggcgcugc

SEQ ID NO: 1750090 - RNA, 20 nt, Human herpesvirus 1
gcccgacagaccuccccgcg

SEQ ID NO: 1750091 - RNA, 23 nt, Human herpesvirus 1
accccgagaaccuagggaaccca

SEQ ID NO: 1750092 - RNA, 11 nt, Human herpesvirus 1
gauuuggguug

SEQ ID NO: 1750093 - RNA, 17 nt, Human herpesvirus 1
cagggccucgcugacca

SEQ ID NO: 1750094 - RNA, 17 nt, Human herpesvirus 1
ccaccgccaucagccuu

SEQ ID NO: 1750095 - RNA, 17 nt, Human herpesvirus 1
ucccugucgccucccaa

SEQ ID NO: 1750096 - RNA, 21 nt, Human herpesvirus 1
ccuucgacguggaggaaggcg

SEQ ID NO: 1750097 - RNA, 15 nt, Human herpesvirus 1
cucuucuccccuucc

SEQ ID NO: 1750098 - RNA, 14 nt, Human herpesvirus 1
ucccugucgccucc

SEQ ID NO: 1750099 - RNA, 21 nt, Human herpesvirus 1
cagcgacguccugggccaccu

SEQ ID NO: 1750100 - RNA, 22 nt, Human herpesvirus 1
cagccccgcauaucccacccug

SEQ ID NO: 1750101 - RNA, 17 nt, Human herpesvirus 1
uccggagacauggcccc

SEQ ID NO: 1750102 - RNA, 17 nt, Human herpesvirus 1
gccuucacgugcugcug

SEQ ID NO: 1750103 - RNA, 15 nt, Human herpesvirus 1
agggcagggccgcgg

SEQ ID NO: 1750104 - RNA, 12 nt, Human herpesvirus 1
ucucccuguuca

SEQ ID NO: 1750105 - RNA, 19 nt, Human herpesvirus 1
ucccucauuuuacaauaaa

SEQ ID NO: 1750106 - RNA, 23 nt, Human herpesvirus 1
accccccaccauuaucgggccgc

SEQ ID NO: 1750107 - RNA, 22 nt, Human herpesvirus 1
ccgcaauuucaccgccccagca

SEQ ID NO: 1750108 - RNA, 15 nt, Human herpesvirus 1
acgagaugcugcgcu

SEQ ID NO: 1750109 - RNA, 15 nt, Human herpesvirus 1
accgacagcacucac

SEQ ID NO: 1750110 - RNA, 13 nt, Human herpesvirus 1
gacccccuuguau

SEQ ID NO: 1750111 - RNA, 14 nt, Human herpesvirus 1
accgcccgccccuc

SEQ ID NO: 1750112 - RNA, 22 nt, Human herpesvirus 1
gcuccuuagcgcggccgugggc

SEQ ID NO: 1750113 - RNA, 17 nt, Human herpesvirus 1
aggggggaaagguggac

SEQ ID NO: 1750114 - RNA, 23 nt, Human herpesvirus 1
ggccccggggagacagcgccugc

SEQ ID NO: 1750115 - RNA, 22 nt, Human herpesvirus 1
ugcugcaggccccccgccgucc

SEQ ID NO: 1750116 - RNA, 19 nt, Human herpesvirus 1
ccucugggcccgccuggau

SEQ ID NO: 1750117 - RNA, 12 nt, Human herpesvirus 1
caucgccccugg

SEQ ID NO: 1750118 - RNA, 20 nt, Human herpesvirus 1
ccaccgugggccggcgggug

SEQ ID NO: 1750119 - RNA, 21 nt, Human herpesvirus 1
ggagcuguccgagacccccaa

SEQ ID NO: 1750120 - RNA, 14 nt, Human herpesvirus 1
cagcccccccaagc

SEQ ID NO: 1750121 - RNA, 19 nt, Human herpesvirus 1
cugcuccgcaacggggcgc

SEQ ID NO: 1750122 - RNA, 21 nt, Human herpesvirus 1
cggugguccgccuagccgcag

SEQ ID NO: 1750123 - RNA, 14 nt, Human herpesvirus 1
agugggccuccaug

SEQ ID NO: 1750124 - RNA, 14 nt, Human herpesvirus 1
agccacccacccac

SEQ ID NO: 1750125 - RNA, 13 nt, Human herpesvirus 1
cggcgucugggcc

SEQ ID NO: 1750126 - RNA, 21 nt, Human herpesvirus 1
cuccggggggcuuccggccug

SEQ ID NO: 1750127 - RNA, 20 nt, Human herpesvirus 1
gccucugggucugugccacc

SEQ ID NO: 1750128 - RNA, 21 nt, Human herpesvirus 1
accggcaccaccgacucuccc

SEQ ID NO: 1750129 - RNA, 22 nt, Human herpesvirus 1
cgaagcugcucucgcacucgag

SEQ ID NO: 1750130 - RNA, 13 nt, Human herpesvirus 1
ccacccgaaccac

SEQ ID NO: 1750131 - RNA, 21 nt, Human herpesvirus 1
gcgugcuccuaaacgcaccgu

SEQ ID NO: 1750132 - RNA, 18 nt, Human herpesvirus 1
gcccacgucgccccgccg

SEQ ID NO: 1750133 - RNA, 14 nt, Human herpesvirus 1
cugggaccccggcg

SEQ ID NO: 1750134 - RNA, 18 nt, Human herpesvirus 1
uagucccaucccccgauc

SEQ ID NO: 1750135 - RNA, 17 nt, Human herpesvirus 1
uacaccggccacccagg

SEQ ID NO: 1750136 - RNA, 15 nt, Human herpesvirus 1
gugcgggcggcccug

SEQ ID NO: 1750137 - RNA, 19 nt, Human herpesvirus 1
ccggcggcgacgugccccc

SEQ ID NO: 1750138 - RNA, 20 nt, Human herpesvirus 1
uguuggagcgcgccugccgc

SEQ ID NO: 1750139 - RNA, 20 nt, Human herpesvirus 1
ggggcauccgggaccugaac

SEQ ID NO: 1750140 - RNA, 14 nt, Human herpesvirus 1
ggcgcuuggccggg

SEQ ID NO: 1750141 - RNA, 16 nt, Human herpesvirus 1
gggcccgggggccugg

SEQ ID NO: 1750142 - RNA, 17 nt, Human herpesvirus 1
cgcccccagcugggccc

SEQ ID NO: 1750143 - RNA, 21 nt, Human herpesvirus 1
gccgccaccguggccggccug

SEQ ID NO: 1750144 - RNA, 21 nt, Human herpesvirus 1
ucuaacgguccucaccgagcc

SEQ ID NO: 1750145 - RNA, 18 nt, Human herpesvirus 1
cugccgucgcuagaccac

SEQ ID NO: 1750146 - RNA, 15 nt, Human herpesvirus 1
cgcgcgaccucacca

SEQ ID NO: 1750147 - RNA, 16 nt, Human herpesvirus 1
ggcgguucgccgccac

SEQ ID NO: 1750148 - RNA, 17 nt, Human herpesvirus 1
cgugcucgugugguaca

SEQ ID NO: 1750149 - RNA, 21 nt, Human herpesvirus 1
cacucaaaaagccccaaagcg

SEQ ID NO: 1750150 - RNA, 16 nt, Human herpesvirus 1
gcgagcucccagagac

SEQ ID NO: 1750151 - RNA, 19 nt, Human herpesvirus 1
gcccacuacaccagccaau

SEQ ID NO: 1750152 - RNA, 15 nt, Human herpesvirus 1
cacccaguggcuccg

SEQ ID NO: 1750153 - RNA, 13 nt, Human herpesvirus 1
ccugucgcaccca

SEQ ID NO: 1750154 - RNA, 16 nt, Human herpesvirus 1
cgcaucaagaccaccu

SEQ ID NO: 1750155 - RNA, 18 nt, Human herpesvirus 1
cgccggguggcacgggcc

SEQ ID NO: 1750156 - RNA, 15 nt, Human herpesvirus 1
ggaaagcaagaacaa

SEQ ID NO: 1750157 - RNA, 21 nt, Human herpesvirus 1
uauagccuaugccacgccagg

SEQ ID NO: 1750158 - RNA, 21 nt, Human herpesvirus 1
cguuauucccaaacagggccu

SEQ ID NO: 1750159 - RNA, 21 nt, Human herpesvirus 1
cuaaacgcaccgucggaggcc

SEQ ID NO: 1750160 - RNA, 15 nt, Human herpesvirus 1
acgccaacgccgcca

SEQ ID NO: 1750161 - RNA, 19 nt, Human herpesvirus 1
guccaccaaagucucugug

SEQ ID NO: 1750162 - RNA, 22 nt, Human herpesvirus 1
ccugcucgggcaggugcagacc

SEQ ID NO: 1750163 - RNA, 23 nt, Human herpesvirus 1
ggccauuaacuuuaucaccacca

SEQ ID NO: 1750164 - RNA, 18 nt, Human herpesvirus 1
ccagccagggcggcggua

SEQ ID NO: 1750165 - RNA, 15 nt, Human herpesvirus 1
gugcgccaggucggc

SEQ ID NO: 1750166 - RNA, 12 nt, Human herpesvirus 1
uccgcgccccuc

SEQ ID NO: 1750167 - RNA, 21 nt, Human herpesvirus 1
ccgcaauuugcacccagccuu

SEQ ID NO: 1750168 - RNA, 21 nt, Human herpesvirus 1
gugguccgcggggccuccccc

SEQ ID NO: 1750169 - RNA, 17 nt, Human herpesvirus 1
acgccucccccacaucc

SEQ ID NO: 1750170 - RNA, 15 nt, Human herpesvirus 1
uaaaauaaauuauug

SEQ ID NO: 1750171 - RNA, 16 nt, Human herpesvirus 1
cucaacgagcuccugg

SEQ ID NO: 1750172 - RNA, 14 nt, Human herpesvirus 1
cuacugcugggcca

SEQ ID NO: 1750173 - RNA, 18 nt, Human herpesvirus 1
uacgcuucggccgccacc

SEQ ID NO: 1750174 - RNA, 21 nt, Human herpesvirus 1
ugcccucgcgggccucguggg

SEQ ID NO: 1750175 - RNA, 17 nt, Human herpesvirus 1
ucgcagggcgccaugcg

SEQ ID NO: 1750176 - RNA, 18 nt, Human herpesvirus 1
gcccgggccacggcgccg

SEQ ID NO: 1750177 - RNA, 20 nt, Human herpesvirus 1
gccccauacacgagcacccu

SEQ ID NO: 1750178 - RNA, 18 nt, Human herpesvirus 1
acgugcgcgaucccccgc

SEQ ID NO: 1750179 - RNA, 15 nt, Human herpesvirus 1
cccaucagccucguc

SEQ ID NO: 1750180 - RNA, 17 nt, Human herpesvirus 1
ccccgcuucauccccga

SEQ ID NO: 1750181 - RNA, 15 nt, Human herpesvirus 1
gacccgacucaccuc

SEQ ID NO: 1750182 - RNA, 16 nt, Human herpesvirus 1
cgucaccaugcagcgc

SEQ ID NO: 1750183 - RNA, 18 nt, Human herpesvirus 1
ccauccgaacgcagcccc

SEQ ID NO: 1750184 - RNA, 22 nt, Human herpesvirus 1
acgcacaugggggaggugcccc

SEQ ID NO: 1750185 - RNA, 23 nt, Human herpesvirus 1
cccguggggacgguggcgccgca

SEQ ID NO: 1750186 - RNA, 14 nt, Human herpesvirus 1
cgugcgcucgcucu

SEQ ID NO: 1750187 - RNA, 17 nt, Human herpesvirus 1
gccaguccgcugcaccg

SEQ ID NO: 1750188 - RNA, 12 nt, Human herpesvirus 1
aggggggguccg

SEQ ID NO: 1750189 - RNA, 15 nt, Human herpesvirus 1
ccgcgagcagagccg

SEQ ID NO: 1750190 - RNA, 15 nt, Human herpesvirus 1
gucggaccaccgccc

SEQ ID NO: 1750191 - RNA, 20 nt, Human herpesvirus 1
aucacccgagucucugggcg

SEQ ID NO: 1750192 - RNA, 16 nt, Human herpesvirus 1
uccucgcaccagcccu

SEQ ID NO: 1750193 - RNA, 19 nt, Human herpesvirus 1
cgccuccgcccgugcugcc

SEQ ID NO: 1750194 - RNA, 16 nt, Human herpesvirus 1
ccauguccggcagggg

SEQ ID NO: 1750195 - RNA, 22 nt, Human herpesvirus 1
cagaccccuucuccccacaaca

SEQ ID NO: 1750196 - RNA, 18 nt, Human herpesvirus 1
ggcgccucggucacccca

SEQ ID NO: 1750197 - RNA, 12 nt, Human herpesvirus 1
cgcaccugguga

SEQ ID NO: 1750198 - RNA, 18 nt, Human herpesvirus 1
ugcgguuggggaggcugu

SEQ ID NO: 1750199 - RNA, 14 nt, Human herpesvirus 1
ccucgaccaccacc

SEQ ID NO: 1750200 - RNA, 14 nt, Human herpesvirus 1
cgccagcaccccgg

SEQ ID NO: 1750201 - RNA, 14 nt, Human herpesvirus 1
gcccgggggccugg

SEQ ID NO: 1750202 - RNA, 19 nt, Human herpesvirus 1
agcagguccgcggugggcu

SEQ ID NO: 1750203 - RNA, 23 nt, Human herpesvirus 1
ggaccccacgacacccaccccaa

SEQ ID NO: 1750204 - RNA, 21 nt, Human herpesvirus 1
uggccccccgcguccaaaccc

SEQ ID NO: 1750205 - RNA, 19 nt, Human herpesvirus 1
accacugcacucccugccg

SEQ ID NO: 1750206 - RNA, 20 nt, Human herpesvirus 1
gcgggaguuaccgcccaaug

SEQ ID NO: 1750207 - RNA, 14 nt, Human herpesvirus 1
ccuugugugucaau

SEQ ID NO: 1750208 - RNA, 23 nt, Human herpesvirus 1
cugucgggcggauuuggggcgcu

SEQ ID NO: 1750209 - RNA, 14 nt, Human herpesvirus 1
acgccccuuucccc

SEQ ID NO: 1750210 - RNA, 15 nt, Human herpesvirus 1
cccugcugcccccgg

SEQ ID NO: 1750211 - RNA, 18 nt, Human herpesvirus 1
acgugguccgcggggccu

SEQ ID NO: 1750212 - RNA, 14 nt, Human herpesvirus 1
ccccaaccccuucc

SEQ ID NO: 1750213 - RNA, 15 nt, Human herpesvirus 1
agcgggggggcggcc

SEQ ID NO: 1750214 - RNA, 18 nt, Human herpesvirus 1
cacgccuaccggccccug

SEQ ID NO: 1750215 - RNA, 13 nt, Human herpesvirus 1
cagccgcgccgcu

SEQ ID NO: 1750216 - RNA, 18 nt, Human herpesvirus 1
gcccggaggcgcccgcgg

SEQ ID NO: 1750217 - RNA, 22 nt, Human herpesvirus 1
ccacgcucuccccugcugccau

SEQ ID NO: 1750218 - RNA, 15 nt, Human herpesvirus 1
ccaacgccuccccug

SEQ ID NO: 1750219 - RNA, 23 nt, Human herpesvirus 1
gccccgcauaucccacccuggag

SEQ ID NO: 1750220 - RNA, 18 nt, Human herpesvirus 1
ccguggccggccugcgcg

SEQ ID NO: 1750221 - RNA, 22 nt, Human herpesvirus 1
ccaucgccggggaccgcagccu

SEQ ID NO: 1750222 - RNA, 16 nt, Human herpesvirus 1
ucauagugggccucca

SEQ ID NO: 1750223 - RNA, 16 nt, Human herpesvirus 1
ccgauggccgucccgc

SEQ ID NO: 1750224 - RNA, 16 nt, Human herpesvirus 1
ugccgcuuuacgaggc

SEQ ID NO: 1750225 - RNA, 17 nt, Human herpesvirus 1
gccucggagccgagcuc

SEQ ID NO: 1750226 - RNA, 16 nt, Human herpesvirus 1
agacgcugcuccgccu

SEQ ID NO: 1750227 - RNA, 12 nt, Human herpesvirus 1
ggaccacgugca

SEQ ID NO: 1750228 - RNA, 15 nt, Human herpesvirus 1
ugaccgcccacgacu

SEQ ID NO: 1750229 - RNA, 16 nt, Human herpesvirus 1
ggccauggcccgccuc

SEQ ID NO: 1750230 - RNA, 21 nt, Human herpesvirus 1
uauccgaucccaggcgccgac

SEQ ID NO: 1750231 - RNA, 16 nt, Human herpesvirus 1
uacaaccccucgcggg

SEQ ID NO: 1750232 - RNA, 12 nt, Human herpesvirus 1
uguuggggacac

SEQ ID NO: 1750233 - RNA, 14 nt, Human herpesvirus 1
caguaccgccaggg

SEQ ID NO: 1750234 - RNA, 19 nt, Human herpesvirus 1
gcgggccaacuaggagaca

SEQ ID NO: 1750235 - RNA, 23 nt, Human herpesvirus 1
guacuggaugcgccgccacacuc

SEQ ID NO: 1750236 - RNA, 23 nt, Human herpesvirus 1
gcugacccccaccgcgcuccucc

SEQ ID NO: 1750237 - RNA, 14 nt, Human herpesvirus 1
agggccgugcccau

SEQ ID NO: 1750238 - RNA, 14 nt, Human herpesvirus 1
acucucccaccgcc

SEQ ID NO: 1750239 - RNA, 12 nt, Human herpesvirus 1
ccucgcgcggcg

SEQ ID NO: 1750240 - RNA, 13 nt, Human herpesvirus 1
aucgccccuggcg

SEQ ID NO: 1750241 - RNA, 12 nt, Human herpesvirus 1
ugccccugguga

SEQ ID NO: 1750242 - RNA, 14 nt, Human herpesvirus 1
cugauguggcugcu

SEQ ID NO: 1750243 - RNA, 16 nt, Human herpesvirus 1
cugugccaccagccug

SEQ ID NO: 1750244 - RNA, 13 nt, Human herpesvirus 1
ccgcgcggcugcc

SEQ ID NO: 1750245 - RNA, 17 nt, Human herpesvirus 1
cuacgccguguuggagc

SEQ ID NO: 1750246 - RNA, 23 nt, Human herpesvirus 1
cgccaucugggauggcuccuggc

SEQ ID NO: 1750247 - RNA, 17 nt, Human herpesvirus 1
ccaagggggaggggcca

SEQ ID NO: 1750248 - RNA, 21 nt, Human herpesvirus 1
gccacccgaaccaccacugca

SEQ ID NO: 1750249 - RNA, 19 nt, Human herpesvirus 1
ccgcgggcccccggccgcc

SEQ ID NO: 1750250 - RNA, 23 nt, Human herpesvirus 1
gacgccagcuuuccgcugagccu

SEQ ID NO: 1750251 - RNA, 15 nt, Human herpesvirus 1
cgaagagggggaccc

SEQ ID NO: 1750252 - RNA, 14 nt, Human herpesvirus 1
cgcgaucccccgcc

SEQ ID NO: 1750253 - RNA, 15 nt, Human herpesvirus 1
gccgggagcaccaca

SEQ ID NO: 1750254 - RNA, 16 nt, Human herpesvirus 1
ccuccgcgccaggccc

SEQ ID NO: 1750255 - RNA, 15 nt, Human herpesvirus 1
gcucggaaacugccu

SEQ ID NO: 1750256 - RNA, 18 nt, Human herpesvirus 1
cuuaauaaauuuuacaaa

SEQ ID NO: 1750257 - RNA, 14 nt, Human herpesvirus 1
ccaacuccagacca

SEQ ID NO: 1750258 - RNA, 14 nt, Human herpesvirus 1
ccaccgacucuccc

SEQ ID NO: 1750259 - RNA, 19 nt, Human herpesvirus 1
cccucguucugcugcaccg

SEQ ID NO: 1750260 - RNA, 14 nt, Human herpesvirus 1
gguggugcccagcg

SEQ ID NO: 1750261 - RNA, 15 nt, Human herpesvirus 1
ccacgguaggcccag

SEQ ID NO: 1750262 - RNA, 16 nt, Human herpesvirus 1
ccacgguaggcccagc

SEQ ID NO: 1750263 - RNA, 18 nt, Human herpesvirus 1
gccucugggguuugcccu

SEQ ID NO: 1750264 - RNA, 19 nt, Human herpesvirus 1
aggcgcucgucgccuggcu

SEQ ID NO: 1750265 - RNA, 21 nt, Human herpesvirus 1
gccgcccugagcgcccuccug

SEQ ID NO: 1750266 - RNA, 16 nt, Human herpesvirus 1
cggugguccgccuagc

SEQ ID NO: 1750267 - RNA, 13 nt, Human herpesvirus 1
ugccagaccucaa

SEQ ID NO: 1750268 - RNA, 20 nt, Human herpesvirus 1
acuggccgggagcaccacau

SEQ ID NO: 1750269 - RNA, 16 nt, Human herpesvirus 1
guacgccccaccggca

SEQ ID NO: 1750270 - RNA, 17 nt, Human herpesvirus 1
agacgaccagccguccu

SEQ ID NO: 1750271 - RNA, 16 nt, Human herpesvirus 1
ugcggagggcacccaa

SEQ ID NO: 1750272 - RNA, 21 nt, Human herpesvirus 1
agcccugguguuucuggggag

SEQ ID NO: 1750273 - RNA, 12 nt, Human herpesvirus 1
ggggagcuucgc

SEQ ID NO: 1750274 - RNA, 14 nt, Human herpesvirus 1
cgcggcggggcccg

SEQ ID NO: 1750275 - RNA, 19 nt, Human herpesvirus 1
guucgagcagccgcgccgc

SEQ ID NO: 1750276 - RNA, 13 nt, Human herpesvirus 1
ccaucgguccccu

SEQ ID NO: 1750277 - RNA, 13 nt, Human herpesvirus 1
cgcgcauggcagc

SEQ ID NO: 1750278 - RNA, 19 nt, Human herpesvirus 1
cuaucacacccgccccucc

SEQ ID NO: 1750279 - RNA, 19 nt, Human herpesvirus 1
cggcaggcaccgcaccagc

SEQ ID NO: 1750280 - RNA, 17 nt, Human herpesvirus 1
gccgccacgcgcccgag

SEQ ID NO: 1750281 - RNA, 19 nt, Human herpesvirus 1
cacuggccgggagcaccac

SEQ ID NO: 1750282 - RNA, 15 nt, Human herpesvirus 1
acccuccgcuggggc

SEQ ID NO: 1750283 - RNA, 12 nt, Human herpesvirus 1
uugcccgggccg

SEQ ID NO: 1750284 - RNA, 13 nt, Human herpesvirus 1
gcaccaucccggg

SEQ ID NO: 1750285 - RNA, 16 nt, Human herpesvirus 1
cgccacaacagcccug

SEQ ID NO: 1750286 - RNA, 18 nt, Human herpesvirus 1
ggccgucccggggcaggc

SEQ ID NO: 1750287 - RNA, 13 nt, Human herpesvirus 1
uggacccaaagcc

SEQ ID NO: 1750288 - RNA, 16 nt, Human herpesvirus 1
agcuucagcgccguca

SEQ ID NO: 1750289 - RNA, 17 nt, Human herpesvirus 1
agcccccagaugcccac

SEQ ID NO: 1750290 - RNA, 17 nt, Human herpesvirus 1
caccucccagugucccg

SEQ ID NO: 1750291 - RNA, 21 nt, Human herpesvirus 1
ggggcuggcgcaaccacgccc

SEQ ID NO: 1750292 - RNA, 17 nt, Human herpesvirus 1
gggaaaagugaaagaca

SEQ ID NO: 1750293 - RNA, 19 nt, Human herpesvirus 1
ggcccuaaccccaccccug

SEQ ID NO: 1750294 - RNA, 15 nt, Human herpesvirus 1
cgccucagggccucc

SEQ ID NO: 1750295 - RNA, 22 nt, Human herpesvirus 1
gaccccaucagccucgucccgc

SEQ ID NO: 1750296 - RNA, 21 nt, Human herpesvirus 1
ccgcauaucccacccuggagc

SEQ ID NO: 1750297 - RNA, 14 nt, Human herpesvirus 1
cugugccaccagcc

SEQ ID NO: 1750298 - RNA, 16 nt, Human herpesvirus 1
cgagggccgggcccca

SEQ ID NO: 1750299 - RNA, 16 nt, Human herpesvirus 1
cuccucuucuccccuu

SEQ ID NO: 1750300 - RNA, 15 nt, Human herpesvirus 1
cagcuucagcgccgu

SEQ ID NO: 1750301 - RNA, 19 nt, Human herpesvirus 1
acaagaucaacgccaaggg

SEQ ID NO: 1750302 - RNA, 23 nt, Human herpesvirus 1
ggcgucgcugugaugaagcagcg

SEQ ID NO: 1750303 - RNA, 15 nt, Human herpesvirus 1
gguccauuaaagaca

SEQ ID NO: 1750304 - RNA, 17 nt, Human herpesvirus 1
acgccucccccugagcc

SEQ ID NO: 1750305 - RNA, 14 nt, Human herpesvirus 1
ccaccauccccgcu

SEQ ID NO: 1750306 - RNA, 19 nt, Human herpesvirus 1
gcccuccccccgcccccgg

SEQ ID NO: 1750307 - RNA, 15 nt, Human herpesvirus 1
gauagagcugcuccg

SEQ ID NO: 1750308 - RNA, 20 nt, Human herpesvirus 1
gacccccaacgccacgcagc

SEQ ID NO: 1750309 - RNA, 23 nt, Human herpesvirus 1
aggcgacggcgucucccgggggc

SEQ ID NO: 1750310 - RNA, 22 nt, Human herpesvirus 1
gguccgcggggccucccccgga

SEQ ID NO: 1750311 - RNA, 20 nt, Human herpesvirus 1
ccaaggccccauacacgagc

SEQ ID NO: 1750312 - RNA, 21 nt, Human herpesvirus 1
gccgccgaagggacucuggcg

SEQ ID NO: 1750313 - RNA, 22 nt, Human herpesvirus 1
ugggcccugcuccggcggggcc

SEQ ID NO: 1750314 - RNA, 19 nt, Human herpesvirus 1
ugguccuguggagccuguu

SEQ ID NO: 1750315 - RNA, 18 nt, Human herpesvirus 1
ccaucccccggccacccc

SEQ ID NO: 1750316 - RNA, 14 nt, Human herpesvirus 1
cgggaccugaaccc

SEQ ID NO: 1750317 - RNA, 15 nt, Human herpesvirus 1
cuuuaaccucccccg

SEQ ID NO: 1750318 - RNA, 15 nt, Human herpesvirus 1
cccgccgccacuguc

SEQ ID NO: 1750319 - RNA, 22 nt, Human herpesvirus 1
cgcaacaaccuggagaccaccg

SEQ ID NO: 1750320 - RNA, 14 nt, Human herpesvirus 1
augccccccuggcg

SEQ ID NO: 1750321 - RNA, 18 nt, Human herpesvirus 1
ggggaugggcgaccuggg

SEQ ID NO: 1750322 - RNA, 21 nt, Human herpesvirus 1
gcucgcggagggcggccagcc

SEQ ID NO: 1750323 - RNA, 13 nt, Human herpesvirus 1
ccgcgacccccgg

SEQ ID NO: 1750324 - RNA, 15 nt, Human herpesvirus 1
ggguuucacugaaac

SEQ ID NO: 1750325 - RNA, 17 nt, Human herpesvirus 1
cgcggcucguggccagg

SEQ ID NO: 1750326 - RNA, 16 nt, Human herpesvirus 1
cgggggauggggagag

SEQ ID NO: 1750327 - RNA, 22 nt, Human herpesvirus 1
gcggagguccggccugggccgc

SEQ ID NO: 1750328 - RNA, 17 nt, Human herpesvirus 1
cgcucccucgaccacca

SEQ ID NO: 1750329 - RNA, 11 nt, Human herpesvirus 1
guaugucccca

SEQ ID NO: 1750330 - RNA, 19 nt, Human herpesvirus 1
gggcggccucuccggccug

SEQ ID NO: 1750331 - RNA, 12 nt, Human herpesvirus 1
gagagcccacau

SEQ ID NO: 1750332 - RNA, 19 nt, Human herpesvirus 1
ccccaacgccacgcagcca

SEQ ID NO: 1750333 - RNA, 19 nt, Human herpesvirus 1
gggccugccugcggcucgu

SEQ ID NO: 1750334 - RNA, 18 nt, Human herpesvirus 1
gaggucaaaugccgggcc

SEQ ID NO: 1750335 - RNA, 17 nt, Human herpesvirus 1
aucucugggcgggccgu

SEQ ID NO: 1750336 - RNA, 19 nt, Human herpesvirus 1
gacauuaaccaccugcgcu

SEQ ID NO: 1750337 - RNA, 22 nt, Human herpesvirus 1
agcgacguccugggccaccuga

SEQ ID NO: 1750338 - RNA, 13 nt, Human herpesvirus 1
acccccggcccca

SEQ ID NO: 1750339 - RNA, 23 nt, Human herpesvirus 1
ggccgugguccucgaggaggcgg

SEQ ID NO: 1750340 - RNA, 23 nt, Human herpesvirus 1
agcccucccgaccgacaccccca

SEQ ID NO: 1750341 - RNA, 22 nt, Human herpesvirus 1
gccgagucuucggggcccggcc

SEQ ID NO: 1750342 - RNA, 18 nt, Human herpesvirus 1
ccuaugccacgccagggc

SEQ ID NO: 1750343 - RNA, 12 nt, Human herpesvirus 1
cgcgggggcgcc

SEQ ID NO: 1750344 - RNA, 19 nt, Human herpesvirus 1
gacgagaugcugcgcuccg

SEQ ID NO: 1750345 - RNA, 17 nt, Human herpesvirus 1
ccugcucacgaccccca

SEQ ID NO: 1750346 - RNA, 21 nt, Human herpesvirus 1
cgcgcggacggcgcggggccc

SEQ ID NO: 1750347 - RNA, 15 nt, Human herpesvirus 1
acccaaaccccggau

SEQ ID NO: 1750348 - RNA, 15 nt, Human herpesvirus 1
caccguggccuggga

SEQ ID NO: 1750349 - RNA, 16 nt, Human herpesvirus 1
ccgcaagccccuagcc

SEQ ID NO: 1750350 - RNA, 18 nt, Human herpesvirus 1
ccgacuccccgccuccgg

SEQ ID NO: 1750351 - RNA, 21 nt, Human herpesvirus 1
gagaaacggccgaagccacgc

SEQ ID NO: 1750352 - RNA, 17 nt, Human herpesvirus 1
cuugguucggggccgcc

SEQ ID NO: 1750353 - RNA, 18 nt, Human herpesvirus 1
cggucgccccgacccccu

SEQ ID NO: 1750354 - RNA, 20 nt, Human herpesvirus 1
gaccaccggucgucccucgc

SEQ ID NO: 1750355 - RNA, 18 nt, Human herpesvirus 1
ucccccgucuggguuuuc

SEQ ID NO: 1750356 - RNA, 21 nt, Human herpesvirus 1
gugcgcucgcucucggugccc

SEQ ID NO: 1750357 - RNA, 19 nt, Human herpesvirus 1
gcagcaugggacccacaga

SEQ ID NO: 1750358 - RNA, 16 nt, Human herpesvirus 1
gccacggcgccgacca

SEQ ID NO: 1750359 - RNA, 16 nt, Human herpesvirus 1
cuacaccucccagugu

SEQ ID NO: 1750360 - RNA, 23 nt, Human herpesvirus 1
accccgcaauuugcacccagccu

SEQ ID NO: 1750361 - RNA, 19 nt, Human herpesvirus 1
gcaccccccucgucccccu

SEQ ID NO: 1750362 - RNA, 11 nt, Human herpesvirus 1
uucccuccccc

SEQ ID NO: 1750363 - RNA, 19 nt, Human herpesvirus 1
gucgucgggcgccaaagcc

SEQ ID NO: 1750364 - RNA, 17 nt, Human herpesvirus 1
uggcaacucgccccacg

SEQ ID NO: 1750365 - RNA, 17 nt, Human herpesvirus 1
cuucccccccaucaccc

SEQ ID NO: 1750366 - RNA, 19 nt, Human herpesvirus 1
uggaacgaggccgcagccu

SEQ ID NO: 1750367 - RNA, 21 nt, Human herpesvirus 1
acccccucgaccaccaccucc

SEQ ID NO: 1750368 - RNA, 19 nt, Human herpesvirus 1
gacccccaacgccacgcag

SEQ ID NO: 1750369 - RNA, 20 nt, Human herpesvirus 1
cucgccgcccuagaggcugg

SEQ ID NO: 1750370 - RNA, 14 nt, Human herpesvirus 1
gacacaaaugccca

SEQ ID NO: 1750371 - RNA, 14 nt, Human herpesvirus 1
caccgacacaugca

SEQ ID NO: 1750372 - RNA, 14 nt, Human herpesvirus 1
ggggagggcagggc

SEQ ID NO: 1750373 - RNA, 21 nt, Human herpesvirus 1
acaaccccggucucccaggga

SEQ ID NO: 1750374 - RNA, 17 nt, Human herpesvirus 1
ccgcagccuucucccgg

SEQ ID NO: 1750375 - RNA, 16 nt, Human herpesvirus 1
gcccaguguacccugg

SEQ ID NO: 1750376 - RNA, 16 nt, Human herpesvirus 1
guccacgggggggagc

SEQ ID NO: 1750377 - RNA, 19 nt, Human herpesvirus 1
ggccccacggucagucugg

SEQ ID NO: 1750378 - RNA, 14 nt, Human herpesvirus 1
cugacgccucaggg

SEQ ID NO: 1750379 - RNA, 20 nt, Human herpesvirus 1
ucaccgggacgaccacgaga

SEQ ID NO: 1750380 - RNA, 14 nt, Human herpesvirus 1
cagcuaugggcccu

SEQ ID NO: 1750381 - RNA, 15 nt, Human herpesvirus 1
ggauggggagagccc

SEQ ID NO: 1750382 - RNA, 14 nt, Human herpesvirus 1
cgaggggcagcugg

SEQ ID NO: 1750383 - RNA, 21 nt, Human herpesvirus 1
cggacagccauauccugagcc

SEQ ID NO: 1750384 - RNA, 16 nt, Human herpesvirus 1
cggccgccaccauccu

SEQ ID NO: 1750385 - RNA, 19 nt, Human herpesvirus 1
guccccugccccccccacc

SEQ ID NO: 1750386 - RNA, 23 nt, Human herpesvirus 1
cucagagacaacgcgacaggcca

SEQ ID NO: 1750387 - RNA, 13 nt, Human herpesvirus 1
gagccgcuuuccu

SEQ ID NO: 1750388 - RNA, 20 nt, Human herpesvirus 1
cagcuugaagaucgccgggu

SEQ ID NO: 1750389 - RNA, 18 nt, Human herpesvirus 1
cacgagcgcgcugcucag

SEQ ID NO: 1750390 - RNA, 18 nt, Human herpesvirus 1
gcaguccacgggggggag

SEQ ID NO: 1750391 - RNA, 16 nt, Human herpesvirus 1
ucgcauccgagcaccc

SEQ ID NO: 1750392 - RNA, 15 nt, Human herpesvirus 1
cuccuccaccaccca

SEQ ID NO: 1750393 - RNA, 14 nt, Human herpesvirus 1
ugcggcggcgcugc

SEQ ID NO: 1750394 - RNA, 13 nt, Human herpesvirus 1
accgcagccuggu

SEQ ID NO: 1750395 - RNA, 15 nt, Human herpesvirus 1
ucaccaccaaggccc

SEQ ID NO: 1750396 - RNA, 19 nt, Human herpesvirus 1
cucagggccuccgacccca

SEQ ID NO: 1750397 - RNA, 13 nt, Human herpesvirus 1
ccuggcgccgccu

SEQ ID NO: 1750398 - RNA, 13 nt, Human herpesvirus 1
gagggcggccagc

SEQ ID NO: 1750399 - RNA, 15 nt, Human herpesvirus 1
gacggugagcgagga

SEQ ID NO: 1750400 - RNA, 21 nt, Human herpesvirus 1
guggacgggcucgccagcgac

SEQ ID NO: 1750401 - RNA, 15 nt, Human herpesvirus 1
ccggcacgccugggg

SEQ ID NO: 1750402 - RNA, 22 nt, Human herpesvirus 1
gacacguugggguuguugcugg

SEQ ID NO: 1750403 - RNA, 21 nt, Human herpesvirus 1
gccugacgccugccaaccuga

SEQ ID NO: 1750404 - RNA, 16 nt, Human herpesvirus 1
cggugcgucugggccc

SEQ ID NO: 1750405 - RNA, 13 nt, Human herpesvirus 1
aggcgccugcccc

SEQ ID NO: 1750406 - RNA, 16 nt, Human herpesvirus 1
cugcgcgagcaccugc

SEQ ID NO: 1750407 - RNA, 16 nt, Human herpesvirus 1
uucaucgcgccccucg

SEQ ID NO: 1750408 - RNA, 19 nt, Human herpesvirus 1
gcuccggggaucugguccg

SEQ ID NO: 1750409 - RNA, 18 nt, Human herpesvirus 1
cgugacacccuaccccag

SEQ ID NO: 1750410 - RNA, 12 nt, Human herpesvirus 1
gcaccccagagg

SEQ ID NO: 1750411 - RNA, 23 nt, Human herpesvirus 1
uccuuacgcuaaucccccggcuc

SEQ ID NO: 1750412 - RNA, 23 nt, Human herpesvirus 1
gaccagccguccucgcaccagcc

SEQ ID NO: 1750413 - RNA, 21 nt, Human herpesvirus 1
gaccaccauccccgcucccca

SEQ ID NO: 1750414 - RNA, 23 nt, Human herpesvirus 1
cugcaagaggucgucgggggacg

SEQ ID NO: 1750415 - RNA, 12 nt, Human herpesvirus 1
uuagccagcaga

SEQ ID NO: 1750416 - RNA, 14 nt, Human herpesvirus 1
ccgaguucccccgg

SEQ ID NO: 1750417 - RNA, 20 nt, Human herpesvirus 1
caguugggccgggcgaccca

SEQ ID NO: 1750418 - RNA, 23 nt, Human herpesvirus 1
aauucccgcggcccuuaaugggc

SEQ ID NO: 1750419 - RNA, 17 nt, Human herpesvirus 1
aggcgccugccccgcca

SEQ ID NO: 1750420 - RNA, 14 nt, Human herpesvirus 1
guuccguuuggaaa

SEQ ID NO: 1750421 - RNA, 22 nt, Human herpesvirus 1
ucccgacaccaccagcuggcau

SEQ ID NO: 1750422 - RNA, 15 nt, Human herpesvirus 1
auggcccuccaggcu

SEQ ID NO: 1750423 - RNA, 18 nt, Human herpesvirus 1
cuacacccuuguguguca

SEQ ID NO: 1750424 - RNA, 18 nt, Human herpesvirus 1
gcgccccgccgccccaca

SEQ ID NO: 1750425 - RNA, 18 nt, Human herpesvirus 1
uccccaaaauaaaagacc

SEQ ID NO: 1750426 - RNA, 17 nt, Human herpesvirus 1
aggccgcagccuucucc

SEQ ID NO: 1750427 - RNA, 18 nt, Human herpesvirus 1
acacuggguucuccugga

SEQ ID NO: 1750428 - RNA, 14 nt, Human herpesvirus 1
caacgaggguuggg

SEQ ID NO: 1750429 - RNA, 16 nt, Human herpesvirus 1
gugagucacagcgacc

SEQ ID NO: 1750430 - RNA, 13 nt, Human herpesvirus 1
cggccugcuggac

SEQ ID NO: 1750431 - RNA, 13 nt, Human herpesvirus 1
ucgugcccuucca

SEQ ID NO: 1750432 - RNA, 12 nt, Human herpesvirus 1
gcgcuccugaug

SEQ ID NO: 1750433 - RNA, 21 nt, Human herpesvirus 1
gagccagacccaacccccggc

SEQ ID NO: 1750434 - RNA, 22 nt, Human herpesvirus 1
gcauccgucgggaggccacaga

SEQ ID NO: 1750435 - RNA, 22 nt, Human herpesvirus 1
acuacgcuucggccgccaccca

SEQ ID NO: 1750436 - RNA, 19 nt, Human herpesvirus 1
gaggccuuguuccgcuucc

SEQ ID NO: 1750437 - RNA, 18 nt, Human herpesvirus 1
gaccucggcgccucugga

SEQ ID NO: 1750438 - RNA, 16 nt, Human herpesvirus 1
ucaccggcggaccccc

SEQ ID NO: 1750439 - RNA, 23 nt, Human herpesvirus 1
cccgcauaucccacccuggagcu

SEQ ID NO: 1750440 - RNA, 14 nt, Human herpesvirus 1
augggcgaccuggg

SEQ ID NO: 1750441 - RNA, 16 nt, Human herpesvirus 1
uuuuacaaacagauuu

SEQ ID NO: 1750442 - RNA, 21 nt, Human herpesvirus 1
cggcgacgugcccccuccucg

SEQ ID NO: 1750443 - RNA, 17 nt, Human herpesvirus 1
cccgacagaccuccccg

SEQ ID NO: 1750444 - RNA, 16 nt, Human herpesvirus 1
uggugaucgccugucu

SEQ ID NO: 1750445 - RNA, 15 nt, Human herpesvirus 1
ucccaaacagggccu

SEQ ID NO: 1750446 - RNA, 17 nt, Human herpesvirus 1
ccacuacaccagccaau

SEQ ID NO: 1750447 - RNA, 18 nt, Human herpesvirus 1
uccccgauggcccuccag

SEQ ID NO: 1750448 - RNA, 18 nt, Human herpesvirus 1
acgguucgcgaacccuuu

SEQ ID NO: 1750449 - RNA, 15 nt, Human herpesvirus 1
gcggcccacccuggc

SEQ ID NO: 1750450 - RNA, 15 nt, Human herpesvirus 1
aguccgaagaggaag

SEQ ID NO: 1750451 - RNA, 17 nt, Human herpesvirus 1
ggcccggcuagacccac

SEQ ID NO: 1750452 - RNA, 21 nt, Human herpesvirus 1
ugccccggccggauucccggg

SEQ ID NO: 1750453 - RNA, 20 nt, Human herpesvirus 1
cuguacccgcuaaccaccaa

SEQ ID NO: 1750454 - RNA, 21 nt, Human herpesvirus 1
ggcgacccugaucccccgcgc

SEQ ID NO: 1750455 - RNA, 13 nt, Human herpesvirus 1
uaaugaccaccac

SEQ ID NO: 1750456 - RNA, 14 nt, Human herpesvirus 1
gcucgguggcuccg

SEQ ID NO: 1750457 - RNA, 23 nt, Human herpesvirus 1
ugcccucgcgggccucgugggca

SEQ ID NO: 1750458 - RNA, 16 nt, Human herpesvirus 1
ccauccccgcucccca

SEQ ID NO: 1750459 - RNA, 18 nt, Human herpesvirus 1
ggagagcccacaugcgga

SEQ ID NO: 1750460 - RNA, 19 nt, Human herpesvirus 1
cgcgggguuacgcgggccc

SEQ ID NO: 1750461 - RNA, 22 nt, Human herpesvirus 1
acuggaggaggaggaagaggag

SEQ ID NO: 1750462 - RNA, 22 nt, Human herpesvirus 1
cccccguguuuguggggagggg

SEQ ID NO: 1750463 - RNA, 12 nt, Human herpesvirus 1
ccaaccugaccg

SEQ ID NO: 1750464 - RNA, 14 nt, Human herpesvirus 1
ccucagggccuccg

SEQ ID NO: 1750465 - RNA, 17 nt, Human herpesvirus 1
cguacucccaccagcug

SEQ ID NO: 1750466 - RNA, 15 nt, Human herpesvirus 1
ucuguuucuuggccc

SEQ ID NO: 1750467 - RNA, 14 nt, Human herpesvirus 1
ggcgggugggccuu

SEQ ID NO: 1750468 - RNA, 11 nt, Human herpesvirus 1
cccccaaacac

SEQ ID NO: 1750469 - RNA, 20 nt, Human herpesvirus 1
ccguuggcccccgccucugg

SEQ ID NO: 1750470 - RNA, 14 nt, Human herpesvirus 1
acacugaaaugccc

SEQ ID NO: 1750471 - RNA, 22 nt, Human herpesvirus 1
cgugggcgccuugcggcagcgc

SEQ ID NO: 1750472 - RNA, 16 nt, Human herpesvirus 1
ucuccggggcccggcc

SEQ ID NO: 1750473 - RNA, 18 nt, Human herpesvirus 1
caccacccaaccccaacu

SEQ ID NO: 1750474 - RNA, 13 nt, Human herpesvirus 1
ugcccauaauaaa

SEQ ID NO: 1750475 - RNA, 19 nt, Human herpesvirus 1
ccauguuugcgggccuggg

SEQ ID NO: 1750476 - RNA, 17 nt, Human herpesvirus 1
aacacgcucgcggagcu

SEQ ID NO: 1750477 - RNA, 17 nt, Human herpesvirus 1
cugcccgucgcgcgugu

SEQ ID NO: 1750478 - RNA, 18 nt, Human herpesvirus 1
gcguuucugaccugcacc

SEQ ID NO: 1750479 - RNA, 17 nt, Human herpesvirus 1
gcucaagaaccccacca

SEQ ID NO: 1750480 - RNA, 13 nt, Human herpesvirus 1
ggcggaccuggcg

SEQ ID NO: 1750481 - RNA, 18 nt, Human herpesvirus 1
aacugccugacccucucc

SEQ ID NO: 1750482 - RNA, 22 nt, Human herpesvirus 1
uauggggcgggggauggggaga

SEQ ID NO: 1750483 - RNA, 13 nt, Human herpesvirus 1
ccacaugcggaaa

SEQ ID NO: 1750484 - RNA, 16 nt, Human herpesvirus 1
agggcaucgcgguggu

SEQ ID NO: 1750485 - RNA, 23 nt, Human herpesvirus 1
aggcgccugccccgccacccagu

SEQ ID NO: 1750486 - RNA, 19 nt, Human herpesvirus 1
ucuguuggggacacugggu

SEQ ID NO: 1750487 - RNA, 19 nt, Human herpesvirus 1
ccaccgccccgaacccugc

SEQ ID NO: 1750488 - RNA, 15 nt, Human herpesvirus 1
cggcagcgcuccgac

SEQ ID NO: 1750489 - RNA, 17 nt, Human herpesvirus 1
ucccccgcgcgccccga

SEQ ID NO: 1750490 - RNA, 12 nt, Human herpesvirus 1
cagucuccuggc

SEQ ID NO: 1750491 - RNA, 23 nt, Human herpesvirus 1
aucgccggggaccgcagccuggu

SEQ ID NO: 1750492 - RNA, 17 nt, Human herpesvirus 1
uccccaaaauaaaagac

SEQ ID NO: 1750493 - RNA, 16 nt, Human herpesvirus 1
acccaagccgccccag

SEQ ID NO: 1750494 - RNA, 16 nt, Human herpesvirus 1
ucgcgggccucguggg

SEQ ID NO: 1750495 - RNA, 12 nt, Human herpesvirus 1
gcgcguccccgg

SEQ ID NO: 1750496 - RNA, 20 nt, Human herpesvirus 1
cgccauguuugcgggccugg

SEQ ID NO: 1750497 - RNA, 15 nt, Human herpesvirus 1
cagccugccucuccc

SEQ ID NO: 1750498 - RNA, 15 nt, Human herpesvirus 1
ccuggggucgcucug

SEQ ID NO: 1750499 - RNA, 12 nt, Human herpesvirus 1
ccuucuucgccu

SEQ ID NO: 1750500 - RNA, 19 nt, Human herpesvirus 1
aucccggguuaauguaaau

SEQ ID NO: 1750501 - RNA, 22 nt, Human herpesvirus 1
cgcucccaaccgcgacccuccg

SEQ ID NO: 1750502 - RNA, 15 nt, Human herpesvirus 1
cacacggagcugcuc

SEQ ID NO: 1750503 - RNA, 13 nt, Human herpesvirus 1
cacccuaccccag

SEQ ID NO: 1750504 - RNA, 18 nt, Human herpesvirus 1
ccaaaauaaaagaccaaa

SEQ ID NO: 1750505 - RNA, 12 nt, Human herpesvirus 1
gccucacccacg

SEQ ID NO: 1750506 - RNA, 23 nt, Human herpesvirus 1
aacccacacgcacuugcggcaag

SEQ ID NO: 1750507 - RNA, 16 nt, Human herpesvirus 1
aguggcaggaggugga

SEQ ID NO: 1750508 - RNA, 14 nt, Human herpesvirus 1
ccuauguguuucag

SEQ ID NO: 1750509 - RNA, 21 nt, Human herpesvirus 1
cggacgccguggcgccccggc

SEQ ID NO: 1750510 - RNA, 15 nt, Human herpesvirus 1
ggaggaagaccugcu

SEQ ID NO: 1750511 - RNA, 22 nt, Human herpesvirus 1
gccccgcccccuuuguccccgc

SEQ ID NO: 1750512 - RNA, 15 nt, Human herpesvirus 1
gcaggcgccuccggg

SEQ ID NO: 1750513 - RNA, 20 nt, Human herpesvirus 1
gccccuaaccaggccuccac

SEQ ID NO: 1750514 - RNA, 12 nt, Human herpesvirus 1
guaggcccagca

SEQ ID NO: 1750515 - RNA, 15 nt, Human herpesvirus 1
ggaugccagccaggg

SEQ ID NO: 1750516 - RNA, 13 nt, Human herpesvirus 1
guccccgaggacc

SEQ ID NO: 1750517 - RNA, 15 nt, Human herpesvirus 1
ccggugaacgccucc

SEQ ID NO: 1750518 - RNA, 14 nt, Human herpesvirus 1
cccuaaccaccgcu

SEQ ID NO: 1750519 - RNA, 14 nt, Human herpesvirus 1
ccacgugcacagcc

SEQ ID NO: 1750520 - RNA, 19 nt, Human herpesvirus 1
cccggcauggcgcagcugg

SEQ ID NO: 1750521 - RNA, 12 nt, Human herpesvirus 1
uauuauuuaccu

SEQ ID NO: 1750522 - RNA, 15 nt, Human herpesvirus 1
cggucaccccaaucc

SEQ ID NO: 1750523 - RNA, 22 nt, Human herpesvirus 1
cgcgccguuggcccccgccucu

SEQ ID NO: 1750524 - RNA, 20 nt, Human herpesvirus 1
caccuuugacggcgcggccg

SEQ ID NO: 1750525 - RNA, 14 nt, Human herpesvirus 1
ccgcgacccuccgg

SEQ ID NO: 1750526 - RNA, 15 nt, Human herpesvirus 1
aacagcccccggguu

SEQ ID NO: 1750527 - RNA, 13 nt, Human herpesvirus 1
ucugggggccugu

SEQ ID NO: 1750528 - RNA, 20 nt, Human herpesvirus 1
gguucgcgucccgcccaccg

SEQ ID NO: 1750529 - RNA, 13 nt, Human herpesvirus 1
cucgucuccucuu

SEQ ID NO: 1750530 - RNA, 16 nt, Human herpesvirus 1
cggcgccgacacgcgg

SEQ ID NO: 1750531 - RNA, 14 nt, Human herpesvirus 1
cagccgcgccgcug

SEQ ID NO: 1750532 - RNA, 21 nt, Human herpesvirus 1
uucccgaaacuucaucacccc

SEQ ID NO: 1750533 - RNA, 13 nt, Human herpesvirus 1
cgcggggccuccg

SEQ ID NO: 1750534 - RNA, 17 nt, Human herpesvirus 1
uucgcaacaccuccccc

SEQ ID NO: 1750535 - RNA, 20 nt, Human herpesvirus 1
gacggcccuuacggaccaga

SEQ ID NO: 1750536 - RNA, 23 nt, Human herpesvirus 1
ccugcgggacaucaaggcggaga

SEQ ID NO: 1750537 - RNA, 16 nt, Human herpesvirus 1
accuuccgguccugga

SEQ ID NO: 1750538 - RNA, 18 nt, Human herpesvirus 1
cccguuccagccccccag

SEQ ID NO: 1750539 - RNA, 22 nt, Human herpesvirus 1
gggggcuuccggccugggggcc

SEQ ID NO: 1750540 - RNA, 22 nt, Human herpesvirus 1
acauguccgugccgcuuuaucc

SEQ ID NO: 1750541 - RNA, 19 nt, Human herpesvirus 1
ucggccgucccggggcagg

SEQ ID NO: 1750542 - RNA, 14 nt, Human herpesvirus 1
agcgcggaggaggg

SEQ ID NO: 1750543 - RNA, 21 nt, Human herpesvirus 1
cgacccccauggagcacgagc

SEQ ID NO: 1750544 - RNA, 18 nt, Human herpesvirus 1
uggcgccugacgcgccgc

SEQ ID NO: 1750545 - RNA, 16 nt, Human herpesvirus 1
ucagcgacguccuggg

SEQ ID NO: 1750546 - RNA, 18 nt, Human herpesvirus 1
gcgcgcgcaccuccuccg

SEQ ID NO: 1750547 - RNA, 23 nt, Human herpesvirus 1
cggacccucucuucucucccggg

SEQ ID NO: 1750548 - RNA, 12 nt, Human herpesvirus 1
ggguucuccugg

SEQ ID NO: 1750549 - RNA, 18 nt, Human herpesvirus 1
cccgcgucuggccccggc

SEQ ID NO: 1750550 - RNA, 20 nt, Human herpesvirus 1
ccugucuuggggcccaccca

SEQ ID NO: 1750551 - RNA, 23 nt, Human herpesvirus 1
caacucucgcaccaucccggguu

SEQ ID NO: 1750552 - RNA, 20 nt, Human herpesvirus 1
gggccccgggacacccccca

SEQ ID NO: 1750553 - RNA, 19 nt, Human herpesvirus 1
gccccuaaccaggccucca

SEQ ID NO: 1750554 - RNA, 19 nt, Human herpesvirus 1
gcaugaagcccccaacaug

SEQ ID NO: 1750555 - RNA, 13 nt, Human herpesvirus 1
caggcggcgaacg

SEQ ID NO: 1750556 - RNA, 22 nt, Human herpesvirus 1
gaaggaacccgcgcuaugacgg

SEQ ID NO: 1750557 - RNA, 12 nt, Human herpesvirus 1
guucccuggccg

SEQ ID NO: 1750558 - RNA, 14 nt, Human herpesvirus 1
gacggcggaccugg

SEQ ID NO: 1750559 - RNA, 13 nt, Human herpesvirus 1
gauucagcgggcg

SEQ ID NO: 1750560 - RNA, 16 nt, Human herpesvirus 1
gugggcgaggggggag

SEQ ID NO: 1750561 - RNA, 13 nt, Human herpesvirus 1
cgacgaccugggg

SEQ ID NO: 1750562 - RNA, 18 nt, Human herpesvirus 1
cacuggguucuccuggaa

SEQ ID NO: 1750563 - RNA, 17 nt, Human herpesvirus 1
cccuggcggacggcggc

SEQ ID NO: 1750564 - RNA, 21 nt, Human herpesvirus 1
agccaauccgugucggggagg

SEQ ID NO: 1750565 - RNA, 20 nt, Human herpesvirus 1
gcaacggcgggagcuggguu

SEQ ID NO: 1750566 - RNA, 12 nt, Human herpesvirus 1
aggcggccgagg

SEQ ID NO: 1750567 - RNA, 11 nt, Human herpesvirus 1
ccggaaggaac

SEQ ID NO: 1750568 - RNA, 15 nt, Human herpesvirus 1
ucggucgaagccuac

SEQ ID NO: 1750569 - RNA, 19 nt, Human herpesvirus 1
cgcgggcucgucuuggcca

SEQ ID NO: 1750570 - RNA, 17 nt, Human herpesvirus 1
gggcgcuuggucgggag

SEQ ID NO: 1750571 - RNA, 19 nt, Human herpesvirus 1
cggccuguuugagcagaag

SEQ ID NO: 1750572 - RNA, 16 nt, Human herpesvirus 1
uaucccgcccaccgcu

SEQ ID NO: 1750573 - RNA, 19 nt, Human herpesvirus 1
aguuuguggacccaaagcc

SEQ ID NO: 1750574 - RNA, 23 nt, Human herpesvirus 1
ggcaugcaccccagagguguuca

SEQ ID NO: 1750575 - RNA, 23 nt, Human herpesvirus 1
ucuuggaggaccccguggggacg

SEQ ID NO: 1750576 - RNA, 19 nt, Human herpesvirus 1
ggccggauucccgggccgg

SEQ ID NO: 1750577 - RNA, 19 nt, Human herpesvirus 1
accuccuccgacgcccagc

SEQ ID NO: 1750578 - RNA, 17 nt, Human herpesvirus 1
cucccaccgccaucagc

SEQ ID NO: 1750579 - RNA, 22 nt, Human herpesvirus 1
cgucacgcacgccaaugcccuc

SEQ ID NO: 1750580 - RNA, 17 nt, Human herpesvirus 1
caaaucccggcgccggu

SEQ ID NO: 1750581 - RNA, 16 nt, Human herpesvirus 1
cgaggcccgcaagcug

SEQ ID NO: 1750582 - RNA, 13 nt, Human herpesvirus 1
cgcaccgggcccc

SEQ ID NO: 1750583 - RNA, 19 nt, Human herpesvirus 1
ccaaauaaagccacugaaa

SEQ ID NO: 1750584 - RNA, 16 nt, Human herpesvirus 1
gcaccgguucucccug

SEQ ID NO: 1750585 - RNA, 11 nt, Human herpesvirus 1
gaggggggcaa

SEQ ID NO: 1750586 - RNA, 14 nt, Human herpesvirus 1
acuacauuaaauug

SEQ ID NO: 1750587 - RNA, 18 nt, Human herpesvirus 1
gcccacuacaccagccaa

SEQ ID NO: 1750588 - RNA, 22 nt, Human herpesvirus 1
cucguucuccggggcccggccc

SEQ ID NO: 1750589 - RNA, 18 nt, Human herpesvirus 1
cacggcgaaugcagcgcc

SEQ ID NO: 1750590 - RNA, 12 nt, Human herpesvirus 1
ugaccugcaccg

SEQ ID NO: 1750591 - RNA, 19 nt, Human herpesvirus 1
auaaauuuuacaaacagau

SEQ ID NO: 1750592 - RNA, 18 nt, Human herpesvirus 1
cggguuccgcgaccaccc

SEQ ID NO: 1750593 - RNA, 15 nt, Human herpesvirus 1
cacgcaaaaccaggc

SEQ ID NO: 1750594 - RNA, 19 nt, Human herpesvirus 1
cgucucugcuacgccgcug

SEQ ID NO: 1750595 - RNA, 15 nt, Human herpesvirus 1
gccacccgaaccacc

SEQ ID NO: 1750596 - RNA, 19 nt, Human herpesvirus 1
gccgcaguacuaccuggcc

SEQ ID NO: 1750597 - RNA, 23 nt, Human herpesvirus 1
gucuccgugcuguaccggugggc

SEQ ID NO: 1750598 - RNA, 14 nt, Human herpesvirus 1
ccucaggucauccu

SEQ ID NO: 1750599 - RNA, 16 nt, Human herpesvirus 1
gggugacgguggacag

SEQ ID NO: 1750600 - RNA, 23 nt, Human herpesvirus 1
aguacgcguacucccaccagcug

SEQ ID NO: 1750601 - RNA, 13 nt, Human herpesvirus 1
gcgacccuccggg

SEQ ID NO: 1750602 - RNA, 21 nt, Human herpesvirus 1
ggucgaucccgaagcccagcg

SEQ ID NO: 1750603 - RNA, 15 nt, Human herpesvirus 1
gccaacgccgcgacc

SEQ ID NO: 1750604 - RNA, 17 nt, Human herpesvirus 1
cuccugggucagcuccu

SEQ ID NO: 1750605 - RNA, 15 nt, Human herpesvirus 1
uguggacccaaagcc

SEQ ID NO: 1750606 - RNA, 13 nt, Human herpesvirus 1
ugcgaccccagcc

SEQ ID NO: 1750607 - RNA, 21 nt, Human herpesvirus 1
gaucccccgcgcggcugccaa

SEQ ID NO: 1750608 - RNA, 19 nt, Human herpesvirus 1
agucccaucccccgauccc

SEQ ID NO: 1750609 - RNA, 15 nt, Human herpesvirus 1
gcccucuuuuucuuu

SEQ ID NO: 1750610 - RNA, 15 nt, Human herpesvirus 1
cauccagcuggugcu

SEQ ID NO: 1750611 - RNA, 17 nt, Human herpesvirus 1
acgccaucgccucggcc

SEQ ID NO: 1750612 - RNA, 19 nt, Human herpesvirus 1
ucgcgguggucuucaagga

SEQ ID NO: 1750613 - RNA, 13 nt, Human herpesvirus 1
acaccaccagcug

SEQ ID NO: 1750614 - RNA, 20 nt, Human herpesvirus 1
cugcaccgaucgcagcgucc

SEQ ID NO: 1750615 - RNA, 12 nt, Human herpesvirus 1
cccguggcucuc

SEQ ID NO: 1750616 - RNA, 14 nt, Human herpesvirus 1
ggcccggggccugc

SEQ ID NO: 1750617 - RNA, 17 nt, Human herpesvirus 1
gaugucggguccaaacu

SEQ ID NO: 1750618 - RNA, 16 nt, Human herpesvirus 1
acaacaagucucuggg

SEQ ID NO: 1750619 - RNA, 16 nt, Human herpesvirus 1
ccgcuaaaagaccgca

SEQ ID NO: 1750620 - RNA, 13 nt, Human herpesvirus 1
aacaucaaacacg

SEQ ID NO: 1750621 - RNA, 17 nt, Human herpesvirus 1
cggggcggggacgggga

SEQ ID NO: 1750622 - RNA, 23 nt, Human herpesvirus 1
cuacaggggccauguugggccgc

SEQ ID NO: 1750623 - RNA, 19 nt, Human herpesvirus 1
guucgcgucccgcccaccg

SEQ ID NO: 1750624 - RNA, 17 nt, Human herpesvirus 1
gcuggcaacucgcccca

SEQ ID NO: 1750625 - RNA, 20 nt, Human herpesvirus 1
cgccuaccggccccugggcc

SEQ ID NO: 1750626 - RNA, 21 nt, Human herpesvirus 1
agcaccucuaccagcaggucc

SEQ ID NO: 1750627 - RNA, 19 nt, Human herpesvirus 1
caaccgcgacccuccggga

SEQ ID NO: 1750628 - RNA, 17 nt, Human herpesvirus 1
ccacgaugaccgccccc

SEQ ID NO: 1750629 - RNA, 14 nt, Human herpesvirus 1
cgcccagacgcccu

SEQ ID NO: 1750630 - RNA, 21 nt, Human herpesvirus 1
uggccgcucgguggcuccggg

SEQ ID NO: 1750631 - RNA, 15 nt, Human herpesvirus 1
ccguggccccggccc

SEQ ID NO: 1750632 - RNA, 18 nt, Human herpesvirus 1
gggcuguuccgccaggcg

SEQ ID NO: 1750633 - RNA, 18 nt, Human herpesvirus 1
agacggcauucgggccug

SEQ ID NO: 1750634 - RNA, 13 nt, Human herpesvirus 1
gccggcggcgacg

SEQ ID NO: 1750635 - RNA, 20 nt, Human herpesvirus 1
cggcgacuuugacgaggcca

SEQ ID NO: 1750636 - RNA, 17 nt, Human herpesvirus 1
cgucuccucuucucccc

SEQ ID NO: 1750637 - RNA, 16 nt, Human herpesvirus 1
ccggggagggcagggc

SEQ ID NO: 1750638 - RNA, 15 nt, Human herpesvirus 1
gaugcacgcccccgc

SEQ ID NO: 1750639 - RNA, 21 nt, Human herpesvirus 1
cccuaaccaggccuccacccc

SEQ ID NO: 1750640 - RNA, 15 nt, Human herpesvirus 1
acgcccagcagcucc

SEQ ID NO: 1750641 - RNA, 15 nt, Human herpesvirus 1
cagugauguaaaugg

SEQ ID NO: 1750642 - RNA, 19 nt, Human herpesvirus 1
cgcggcgcgagcucccugc

SEQ ID NO: 1750643 - RNA, 17 nt, Human herpesvirus 1
uccgcggagcucccggg

SEQ ID NO: 1750644 - RNA, 21 nt, Human herpesvirus 1
acccaaaacacacggagcugc

SEQ ID NO: 1750645 - RNA, 14 nt, Human herpesvirus 1
cuuccggccucgau

SEQ ID NO: 1750646 - RNA, 16 nt, Human herpesvirus 1
cguccaucaccacgcc

SEQ ID NO: 1750647 - RNA, 19 nt, Human herpesvirus 1
caauccgugucggggaggg

SEQ ID NO: 1750648 - RNA, 13 nt, Human herpesvirus 1
cgggcccaaggcc

SEQ ID NO: 1750649 - RNA, 13 nt, Human herpesvirus 1
cccgccgccccac

SEQ ID NO: 1750650 - RNA, 12 nt, Human herpesvirus 1
guucccccccgu

SEQ ID NO: 1750651 - RNA, 13 nt, Human herpesvirus 1
ccuggcugaccca

SEQ ID NO: 1750652 - RNA, 14 nt, Human herpesvirus 1
cuaccggccccugg

SEQ ID NO: 1750653 - RNA, 14 nt, Human herpesvirus 1
cccaacuccucagc

SEQ ID NO: 1750654 - RNA, 14 nt, Human herpesvirus 1
aacucucgcaccau

SEQ ID NO: 1750655 - RNA, 16 nt, Human herpesvirus 1
ccacugcacucccugc

SEQ ID NO: 1750656 - RNA, 16 nt, Human herpesvirus 1
gacacugaaaugcccc

SEQ ID NO: 1750657 - RNA, 16 nt, Human herpesvirus 1
ugcgcccggcggaccc

SEQ ID NO: 1750658 - RNA, 15 nt, Human herpesvirus 1
uccuggaccagcuga

SEQ ID NO: 1750659 - RNA, 19 nt, Human herpesvirus 1
cgaccgcagucccugaguu

SEQ ID NO: 1750660 - RNA, 23 nt, Human herpesvirus 1
ucgccccguacaaguucaaggcc

SEQ ID NO: 1750661 - RNA, 23 nt, Human herpesvirus 1
cgacgccuuaccaucccccggcc

SEQ ID NO: 1750662 - RNA, 18 nt, Human herpesvirus 1
ugccagcuaugggcccug

SEQ ID NO: 1750663 - RNA, 12 nt, Human herpesvirus 1
gcggggcagagc

SEQ ID NO: 1750664 - RNA, 15 nt, Human herpesvirus 1
cgccucggcccgcga

SEQ ID NO: 1750665 - RNA, 16 nt, Human herpesvirus 1
cuauuuucccccccgg

SEQ ID NO: 1750666 - RNA, 13 nt, Human herpesvirus 1
cccagaugcccac

SEQ ID NO: 1750667 - RNA, 23 nt, Human herpesvirus 1
ggccucgaugacgucccggcucu

SEQ ID NO: 1750668 - RNA, 22 nt, Human herpesvirus 1
cggucagcgagacgaccucccc

SEQ ID NO: 1750669 - RNA, 13 nt, Human herpesvirus 1
ucgggcgcugggu

SEQ ID NO: 1750670 - RNA, 23 nt, Human herpesvirus 1
ccaagauggcccaguguacccug

SEQ ID NO: 1750671 - RNA, 21 nt, Human herpesvirus 1
cguagcgucgcgacagaacug

SEQ ID NO: 1750672 - RNA, 13 nt, Human herpesvirus 1
ccgggcguugggg

SEQ ID NO: 1750673 - RNA, 23 nt, Human herpesvirus 1
cgaccaacgucgccgcccugagc

SEQ ID NO: 1750674 - RNA, 14 nt, Human herpesvirus 1
uuaacuacauuaaa

SEQ ID NO: 1750675 - RNA, 22 nt, Human herpesvirus 1
ccaggucggcgaccgccagccg

SEQ ID NO: 1750676 - RNA, 13 nt, Human herpesvirus 1
gcgcugcccuccc

SEQ ID NO: 1750677 - RNA, 15 nt, Human herpesvirus 1
ggagccugagcuggc

SEQ ID NO: 1750678 - RNA, 11 nt, Human herpesvirus 1
ggauggggaga

SEQ ID NO: 1750679 - RNA, 21 nt, Human herpesvirus 1
accccuuuggggcgcuggccg

SEQ ID NO: 1750680 - RNA, 15 nt, Human herpesvirus 1
gccguuggcccccgc

SEQ ID NO: 1750681 - RNA, 13 nt, Human herpesvirus 1
cggggcucagcca

SEQ ID NO: 1750682 - RNA, 21 nt, Human herpesvirus 1
gaaccacguacggcucgcggg

SEQ ID NO: 1750683 - RNA, 22 nt, Human herpesvirus 1
ccacgacaaccccggucuccca

SEQ ID NO: 1750684 - RNA, 19 nt, Human herpesvirus 1
ccuggccgaggacaccccu

SEQ ID NO: 1750685 - RNA, 15 nt, Human herpesvirus 1
gcuggcaacucgccc

SEQ ID NO: 1750686 - RNA, 17 nt, Human herpesvirus 1
cgcgcguggaccugggg

SEQ ID NO: 1750687 - RNA, 18 nt, Human herpesvirus 1
agcucgcggagggcggcc

SEQ ID NO: 1750688 - RNA, 13 nt, Human herpesvirus 1
gcauucgggccug

SEQ ID NO: 1750689 - RNA, 14 nt, Human herpesvirus 1
cggcgucugggcca

SEQ ID NO: 1750690 - RNA, 12 nt, Human herpesvirus 1
ggcagcuggggg

SEQ ID NO: 1750691 - RNA, 22 nt, Human herpesvirus 1
cccgcguuugagaccgccggca

SEQ ID NO: 1750692 - RNA, 21 nt, Human herpesvirus 1
ccguccccuucgaggagguga

SEQ ID NO: 1750693 - RNA, 20 nt, Human herpesvirus 1
gcaacaaggccguggacggc

SEQ ID NO: 1750694 - RNA, 17 nt, Human herpesvirus 1
gagcacccugcugcccc

SEQ ID NO: 1750695 - RNA, 20 nt, Human herpesvirus 1
auucucgucuguccucggga

SEQ ID NO: 1750696 - RNA, 12 nt, Human herpesvirus 1
gugugcccaccc

SEQ ID NO: 1750697 - RNA, 21 nt, Human herpesvirus 1
ccugugugucguauguuuaug

SEQ ID NO: 1750698 - RNA, 20 nt, Human herpesvirus 1
ugccuugguggaugccucuc

SEQ ID NO: 1750699 - RNA, 15 nt, Human herpesvirus 1
ggaccgcagccuggu

SEQ ID NO: 1750700 - RNA, 16 nt, Human herpesvirus 1
uggcgcagcugggacc

SEQ ID NO: 1750701 - RNA, 16 nt, Human herpesvirus 1
cuccccgccgcggccu

SEQ ID NO: 1750702 - RNA, 15 nt, Human herpesvirus 1
auucgcuggaccuca

SEQ ID NO: 1750703 - RNA, 13 nt, Human herpesvirus 1
gccuccacccccu

SEQ ID NO: 1750704 - RNA, 20 nt, Human herpesvirus 1
cccacgacccgacucaccuc

SEQ ID NO: 1750705 - RNA, 21 nt, Human herpesvirus 1
ucugggcccgacagaccuccc

SEQ ID NO: 1750706 - RNA, 19 nt, Human herpesvirus 1
uaaaugguguccgcggucc

SEQ ID NO: 1750707 - RNA, 20 nt, Human herpesvirus 1
cgagcucccagagaccccag

SEQ ID NO: 1750708 - RNA, 14 nt, Human herpesvirus 1
ccgacauuaaccac

SEQ ID NO: 1750709 - RNA, 19 nt, Human herpesvirus 1
cgccacccaggcgcugggc

SEQ ID NO: 1750710 - RNA, 14 nt, Human herpesvirus 1
uccucguggccguu

SEQ ID NO: 1750711 - RNA, 18 nt, Human herpesvirus 1
gaaucccccaagggggag

SEQ ID NO: 1750712 - RNA, 16 nt, Human herpesvirus 1
cacaacacaaacaucu

SEQ ID NO: 1750713 - RNA, 18 nt, Human herpesvirus 1
ccggaccccacgcacccc

SEQ ID NO: 1750714 - RNA, 14 nt, Human herpesvirus 1
cggcgcugcagcgc

SEQ ID NO: 1750715 - RNA, 16 nt, Human herpesvirus 1
gcuguacucgacccac

SEQ ID NO: 1750716 - RNA, 13 nt, Human herpesvirus 1
acgccucccccug

SEQ ID NO: 1750717 - RNA, 12 nt, Human herpesvirus 1
cccaacagccgc

SEQ ID NO: 1750718 - RNA, 16 nt, Human herpesvirus 1
cggcccgaagccugcu

SEQ ID NO: 1750719 - RNA, 23 nt, Human herpesvirus 1
ccacauccaggcgggccuaccgg

SEQ ID NO: 1750720 - RNA, 17 nt, Human herpesvirus 1
accgcagucccugaguu

SEQ ID NO: 1750721 - RNA, 21 nt, Human herpesvirus 1
cgggccccggggagacagcgc

SEQ ID NO: 1750722 - RNA, 14 nt, Human herpesvirus 1
ccgcuuccaucgcc

SEQ ID NO: 1750723 - RNA, 13 nt, Human herpesvirus 1
ccugcggcuggcg

SEQ ID NO: 1750724 - RNA, 15 nt, Human herpesvirus 1
guaaccccccccaaa

SEQ ID NO: 1750725 - RNA, 17 nt, Human herpesvirus 1
ccgcuguucucguuccu

SEQ ID NO: 1750726 - RNA, 13 nt, Human herpesvirus 1
cuccuccaccacc

SEQ ID NO: 1750727 - RNA, 12 nt, Human herpesvirus 1
gucuccucuucu

SEQ ID NO: 1750728 - RNA, 23 nt, Human herpesvirus 1
ggguauaaauuccggaaggggac

SEQ ID NO: 1750729 - RNA, 16 nt, Human herpesvirus 1
cgcgcgaaaucguggc

SEQ ID NO: 1750730 - RNA, 14 nt, Human herpesvirus 1
cgcggggcccccgc

SEQ ID NO: 1750731 - RNA, 16 nt, Human herpesvirus 1
gaacaacaugggccug

SEQ ID NO: 1750732 - RNA, 16 nt, Human herpesvirus 1
gguucucccuguucaa

SEQ ID NO: 1750733 - RNA, 17 nt, Human herpesvirus 1
cguuggcccccgccucu

SEQ ID NO: 1750734 - RNA, 15 nt, Human herpesvirus 1
ucuaaugccacgcga

SEQ ID NO: 1750735 - RNA, 18 nt, Human herpesvirus 1
ccgacccccauggagcac

SEQ ID NO: 1750736 - RNA, 15 nt, Human herpesvirus 1
ucuucuccccuuccc

SEQ ID NO: 1750737 - RNA, 17 nt, Human herpesvirus 1
ugucgcagggcgccaug

SEQ ID NO: 1750738 - RNA, 17 nt, Human herpesvirus 1
ucaaggugggccagccg

SEQ ID NO: 1750739 - RNA, 19 nt, Human herpesvirus 1
cuuaauaaauuuuacaaac

SEQ ID NO: 1750740 - RNA, 18 nt, Human herpesvirus 1
ccaacgucuccuccacca

SEQ ID NO: 1750741 - RNA, 15 nt, Human herpesvirus 1
caccccgaagccccg

SEQ ID NO: 1750742 - RNA, 16 nt, Human herpesvirus 1
uccaccaccuucacca

SEQ ID NO: 1750743 - RNA, 22 nt, Human herpesvirus 1
gcggcaaagaccuuccgguccu

SEQ ID NO: 1750744 - RNA, 21 nt, Human herpesvirus 1
cacccgacaacagcccccggg

SEQ ID NO: 1750745 - RNA, 12 nt, Human herpesvirus 1
cgacacccccau

SEQ ID NO: 1750746 - RNA, 16 nt, Human herpesvirus 1
guaucugacgcgcccc

SEQ ID NO: 1750747 - RNA, 15 nt, Human herpesvirus 1
guguuuguggggagg

SEQ ID NO: 1750748 - RNA, 20 nt, Human herpesvirus 1
gcccccgccgcccggggcca

SEQ ID NO: 1750749 - RNA, 12 nt, Human herpesvirus 1
uucuguggccuc

SEQ ID NO: 1750750 - RNA, 22 nt, Human herpesvirus 1
acacacgggggagcgcucuugu

SEQ ID NO: 1750751 - RNA, 21 nt, Human herpesvirus 1
accacaggugggugcuuugga

SEQ ID NO: 1750752 - RNA, 16 nt, Human herpesvirus 1
caccgccaucagccuu

SEQ ID NO: 1750753 - RNA, 23 nt, Human herpesvirus 1
gccaugcgccagggcgcccccgc

SEQ ID NO: 1750754 - RNA, 18 nt, Human herpesvirus 1
cuauaagacucuccccca

SEQ ID NO: 1750755 - RNA, 17 nt, Human herpesvirus 1
ggggcccacccacccga

SEQ ID NO: 1750756 - RNA, 16 nt, Human herpesvirus 1
caugccucugcgggca

SEQ ID NO: 1750757 - RNA, 18 nt, Human herpesvirus 1
ggcccuguacagcucgcg

SEQ ID NO: 1750758 - RNA, 14 nt, Human herpesvirus 1
ccacggccucgcca

SEQ ID NO: 1750759 - RNA, 17 nt, Human herpesvirus 1
ccaacgucgccgcccug

SEQ ID NO: 1750760 - RNA, 21 nt, Human herpesvirus 1
ggacacuggguucuccuggaa

SEQ ID NO: 1750761 - RNA, 16 nt, Human herpesvirus 1
cacuggccgggagcac

SEQ ID NO: 1750762 - RNA, 15 nt, Human herpesvirus 1
augccccccuggcga

SEQ ID NO: 1750763 - RNA, 22 nt, Human herpesvirus 1
guauggggcgggggauggggag

SEQ ID NO: 1750764 - RNA, 13 nt, Human herpesvirus 1
cgccccgauggcc

SEQ ID NO: 1750765 - RNA, 15 nt, Human herpesvirus 1
gucuccacgugcgug

SEQ ID NO: 1750766 - RNA, 15 nt, Human herpesvirus 1
gaagacccccccgga

SEQ ID NO: 1750767 - RNA, 14 nt, Human herpesvirus 1
cugcagaugcagag

SEQ ID NO: 1750768 - RNA, 18 nt, Human herpesvirus 1
aacgucuccuccaccacc

SEQ ID NO: 1750769 - RNA, 12 nt, Human herpesvirus 1
cgucgauccagg

SEQ ID NO: 1750770 - RNA, 22 nt, Human herpesvirus 1
uccuguaaguacgcccucccgc

SEQ ID NO: 1750771 - RNA, 16 nt, Human herpesvirus 1
ccgcggucaucacccg

SEQ ID NO: 1750772 - RNA, 14 nt, Human herpesvirus 1
gucuggagacccua

SEQ ID NO: 1750773 - RNA, 13 nt, Human herpesvirus 1
gacccggcccgag

SEQ ID NO: 1750774 - RNA, 13 nt, Human herpesvirus 1
acagcggccugcu

SEQ ID NO: 1750775 - RNA, 14 nt, Human herpesvirus 1
ccucccccacaucc

SEQ ID NO: 1750776 - RNA, 16 nt, Human herpesvirus 1
ucccagagaccccagg

SEQ ID NO: 1750777 - RNA, 22 nt, Human herpesvirus 1
uacuccggccgcgguacagauc

SEQ ID NO: 1750778 - RNA, 15 nt, Human herpesvirus 1
ggagggcggccagcc

SEQ ID NO: 1750779 - RNA, 15 nt, Human herpesvirus 1
gggccgggccccaua

SEQ ID NO: 1750780 - RNA, 16 nt, Human herpesvirus 1
ccccggggcucagcca

SEQ ID NO: 1750781 - RNA, 18 nt, Human herpesvirus 1
cgcuccugugcacccuca

SEQ ID NO: 1750782 - RNA, 14 nt, Human herpesvirus 1
auccaccaccuuca

SEQ ID NO: 1750783 - RNA, 18 nt, Human herpesvirus 1
ggccgcccuggccgcgga

SEQ ID NO: 1750784 - RNA, 23 nt, Human herpesvirus 1
gagcccagaccccuucuccccac

SEQ ID NO: 1750785 - RNA, 16 nt, Human herpesvirus 1
cagccgcgccgcugcc

SEQ ID NO: 1750786 - RNA, 18 nt, Human herpesvirus 1
cgcgcuaugacggcaaua

SEQ ID NO: 1750787 - RNA, 22 nt, Human herpesvirus 1
cugggaacggacacgcggggac

SEQ ID NO: 1750788 - RNA, 19 nt, Human herpesvirus 1
gcuccgaguacggcggcuc

SEQ ID NO: 1750789 - RNA, 13 nt, Human herpesvirus 1
gggcgguucgccg

SEQ ID NO: 1750790 - RNA, 16 nt, Human herpesvirus 1
gccgggcgacccagau

SEQ ID NO: 1750791 - RNA, 14 nt, Human herpesvirus 1
cgcuaucuccuggg

SEQ ID NO: 1750792 - RNA, 14 nt, Human herpesvirus 1
gccaucccguggau

SEQ ID NO: 1750793 - RNA, 16 nt, Human herpesvirus 1
cugucggaccaccgcc

SEQ ID NO: 1750794 - RNA, 14 nt, Human herpesvirus 1
gccacccucucuuc

SEQ ID NO: 1750795 - RNA, 23 nt, Human herpesvirus 1
gccaccugcgcggguugcugcgc

SEQ ID NO: 1750796 - RNA, 18 nt, Human herpesvirus 1
gaaaaugaaccagacccu

SEQ ID NO: 1750797 - RNA, 16 nt, Human herpesvirus 1
acgcaagaccaggccu

SEQ ID NO: 1750798 - RNA, 13 nt, Human herpesvirus 1
ccggucucccagg

SEQ ID NO: 1750799 - RNA, 18 nt, Human herpesvirus 1
ggaggccgcaucgaacgc

SEQ ID NO: 1750800 - RNA, 13 nt, Human herpesvirus 1
ggguggcacagaa

SEQ ID NO: 1750801 - RNA, 17 nt, Human herpesvirus 1
ugcgucgggccucccgg

SEQ ID NO: 1750802 - RNA, 19 nt, Human herpesvirus 1
gccccauaaaacccaagcc

SEQ ID NO: 1750803 - RNA, 17 nt, Human herpesvirus 1
cuggcaacucgccccac

SEQ ID NO: 1750804 - RNA, 12 nt, Human herpesvirus 1
cggcccugcugc

SEQ ID NO: 1750805 - RNA, 17 nt, Human herpesvirus 1
gagcccacaugcggaaa

SEQ ID NO: 1750806 - RNA, 21 nt, Human herpesvirus 1
gccacccgacaacagcccccg

SEQ ID NO: 1750807 - RNA, 22 nt, Human herpesvirus 1
cucgaugacgucccggcucucc

SEQ ID NO: 1750808 - RNA, 22 nt, Human herpesvirus 1
ggcgcgacaacgagcccccgcc

SEQ ID NO: 1750809 - RNA, 19 nt, Human herpesvirus 1
gguagcccggccgugugac

SEQ ID NO: 1750810 - RNA, 21 nt, Human herpesvirus 1
guccacgguaggcccagcaug

SEQ ID NO: 1750811 - RNA, 20 nt, Human herpesvirus 1
gccuucccccggccaccucg

SEQ ID NO: 1750812 - RNA, 19 nt, Human herpesvirus 1
gcggccccagcccucuccc

SEQ ID NO: 1750813 - RNA, 14 nt, Human herpesvirus 1
cagcaucccccgcc

SEQ ID NO: 1750814 - RNA, 14 nt, Human herpesvirus 1
gugcuuucuggugc

SEQ ID NO: 1750815 - RNA, 15 nt, Human herpesvirus 1
aacccaaccaaacca

SEQ ID NO: 1750816 - RNA, 21 nt, Human herpesvirus 1
gucaccgguucguauccacaa

SEQ ID NO: 1750817 - RNA, 14 nt, Human herpesvirus 1
caagaccaccuccu

SEQ ID NO: 1750818 - RNA, 15 nt, Human herpesvirus 1
aucaccaugcuggag

SEQ ID NO: 1750819 - RNA, 23 nt, Human herpesvirus 1
gccaucgcguggugcgagcugca

SEQ ID NO: 1750820 - RNA, 14 nt, Human herpesvirus 1
ggagagcccacaug

SEQ ID NO: 1750821 - RNA, 18 nt, Human herpesvirus 1
cgagcccaccguggcccg

SEQ ID NO: 1750822 - RNA, 16 nt, Human herpesvirus 1
uggcgagcccagaccc

SEQ ID NO: 1750823 - RNA, 14 nt, Human herpesvirus 1
accacacaccagcg

SEQ ID NO: 1750824 - RNA, 16 nt, Human herpesvirus 1
accuccacccccucga

SEQ ID NO: 1750825 - RNA, 17 nt, Human herpesvirus 1
cccuacaaccugaccau

SEQ ID NO: 1750826 - RNA, 18 nt, Human herpesvirus 1
cacgcccgaccacacacc

SEQ ID NO: 1750827 - RNA, 18 nt, Human herpesvirus 1
gaagaacagaaaaccgaa

SEQ ID NO: 1750828 - RNA, 16 nt, Human herpesvirus 1
ggaggcgccgcgcgga

SEQ ID NO: 1750829 - RNA, 19 nt, Human herpesvirus 1
gccauguuugcgggccugg

SEQ ID NO: 1750830 - RNA, 16 nt, Human herpesvirus 1
agucccugaguuggga

SEQ ID NO: 1750831 - RNA, 16 nt, Human herpesvirus 1
ugguaauuagaaacuc

SEQ ID NO: 1750832 - RNA, 12 nt, Human herpesvirus 1
cuccccuucccu

SEQ ID NO: 1750833 - RNA, 21 nt, Human herpesvirus 1
gcgagauuuuucuguaucuga

SEQ ID NO: 1750834 - RNA, 22 nt, Human herpesvirus 1
cgugcccucgcgggccucgugg

SEQ ID NO: 1750835 - RNA, 18 nt, Human herpesvirus 1
accuccgcgagcagagcc

SEQ ID NO: 1750836 - RNA, 18 nt, Human herpesvirus 1
cacgccaaugcccucccu

SEQ ID NO: 1750837 - RNA, 22 nt, Human herpesvirus 1
cccggcucuccgaucccaacuc

SEQ ID NO: 1750838 - RNA, 19 nt, Human herpesvirus 1
ggucugucucgucuccucu

SEQ ID NO: 1750839 - RNA, 20 nt, Human herpesvirus 1
cgcuggggcccccagggucc

SEQ ID NO: 1750840 - RNA, 21 nt, Human herpesvirus 1
accaccccgagaaccuaggga

SEQ ID NO: 1750841 - RNA, 23 nt, Human herpesvirus 1
ccgcuggcuggaaaccgagcuug

SEQ ID NO: 1750842 - RNA, 14 nt, Human herpesvirus 1
cuuccgguccugga

SEQ ID NO: 1750843 - RNA, 14 nt, Human herpesvirus 1
cucucaagauggcc

SEQ ID NO: 1750844 - RNA, 13 nt, Human herpesvirus 1
aguccccgggccc

SEQ ID NO: 1750845 - RNA, 21 nt, Human herpesvirus 1
uguacaacaucauccagcugg

SEQ ID NO: 1750846 - RNA, 22 nt, Human herpesvirus 1
agcugcucgagaugggccaggg

SEQ ID NO: 1750847 - RNA, 17 nt, Human herpesvirus 1
cagcugcacgaccugcg

SEQ ID NO: 1750848 - RNA, 18 nt, Human herpesvirus 1
acccaccgacacaugcac

SEQ ID NO: 1750849 - RNA, 19 nt, Human herpesvirus 1
cgcuggcaacucgccccac

SEQ ID NO: 1750850 - RNA, 21 nt, Human herpesvirus 1
cugcgaguccugcgccccgcc

SEQ ID NO: 1750851 - RNA, 17 nt, Human herpesvirus 1
ccccucgccccauacuc

SEQ ID NO: 1750852 - RNA, 14 nt, Human herpesvirus 1
ugguccgccuagcc

SEQ ID NO: 1750853 - RNA, 16 nt, Human herpesvirus 1
cagucuucggcgguga

SEQ ID NO: 1750854 - RNA, 13 nt, Human herpesvirus 1
guccccucugggc

SEQ ID NO: 1750855 - RNA, 21 nt, Human herpesvirus 1
caacucucgcaccaucccggg

SEQ ID NO: 1750856 - RNA, 18 nt, Human herpesvirus 1
uguccuggggauggccau

SEQ ID NO: 1750857 - RNA, 19 nt, Human herpesvirus 1
cccacuacaccagccaauc

SEQ ID NO: 1750858 - RNA, 19 nt, Human herpesvirus 1
ucgcccgauuuacagcccc

SEQ ID NO: 1750859 - RNA, 20 nt, Human herpesvirus 1
cugggcuuccgacgcccccc

SEQ ID NO: 1750860 - RNA, 21 nt, Human herpesvirus 1
ccgccugucgcacccacagcu

SEQ ID NO: 1750861 - RNA, 19 nt, Human herpesvirus 1
gaaagcaagaacaauaaag

SEQ ID NO: 1750862 - RNA, 21 nt, Human herpesvirus 1
ccgcgacgccuuaccaucccc

SEQ ID NO: 1750863 - RNA, 15 nt, Human herpesvirus 1
gggcucguccccugg

SEQ ID NO: 1750864 - RNA, 15 nt, Human herpesvirus 1
cagaugcccacgggc

SEQ ID NO: 1750865 - RNA, 14 nt, Human herpesvirus 1
aaccccggucuccc

SEQ ID NO: 1750866 - RNA, 20 nt, Human herpesvirus 1
gccuggucagaggcccacgc

SEQ ID NO: 1750867 - RNA, 15 nt, Human herpesvirus 1
ccauauccaccaccu

SEQ ID NO: 1750868 - RNA, 21 nt, Human herpesvirus 1
cgcgaccucaccaccaaggcc

SEQ ID NO: 1750869 - RNA, 22 nt, Human herpesvirus 1
ugggcauccagggagaaacccc

SEQ ID NO: 1750870 - RNA, 15 nt, Human herpesvirus 1
ccggcccugcugcug

SEQ ID NO: 1750871 - RNA, 14 nt, Human herpesvirus 1
ggccauggcccgcc

SEQ ID NO: 1750872 - RNA, 15 nt, Human herpesvirus 1
gggccguggcggcca

SEQ ID NO: 1750873 - RNA, 16 nt, Human herpesvirus 1
ccgcguccaaacccac

SEQ ID NO: 1750874 - RNA, 17 nt, Human herpesvirus 1
ggggcgggggccccgcc

SEQ ID NO: 1750875 - RNA, 16 nt, Human herpesvirus 1
cugcaccgaucgcagc

SEQ ID NO: 1750876 - RNA, 16 nt, Human herpesvirus 1
ccuaccggccccuggg

SEQ ID NO: 1750877 - RNA, 16 nt, Human herpesvirus 1
cggacgacggcggcga

SEQ ID NO: 1750878 - RNA, 23 nt, Human herpesvirus 1
ggucuccccgggagccccggacc

SEQ ID NO: 1750879 - RNA, 16 nt, Human herpesvirus 1
gauccucgggcuacug

SEQ ID NO: 1750880 - RNA, 18 nt, Human herpesvirus 1
guccccggcccggaggag

SEQ ID NO: 1750881 - RNA, 15 nt, Human herpesvirus 1
ccaaggucaccgaca

SEQ ID NO: 1750882 - RNA, 21 nt, Human herpesvirus 1
cauuuauugacccaaaacaca

SEQ ID NO: 1750883 - RNA, 11 nt, Human herpesvirus 1
ggcgccgcgag

SEQ ID NO: 1750884 - RNA, 16 nt, Human herpesvirus 1
cuugguucggggccgc

SEQ ID NO: 1750885 - RNA, 23 nt, Human herpesvirus 1
cucuucuccccuucccucccccu

SEQ ID NO: 1750886 - RNA, 19 nt, Human herpesvirus 1
cagucccugaguugggaau

SEQ ID NO: 1750887 - RNA, 12 nt, Human herpesvirus 1
agggcagggccg

SEQ ID NO: 1750888 - RNA, 14 nt, Human herpesvirus 1
aggaccgcgccccc

SEQ ID NO: 1750889 - RNA, 17 nt, Human herpesvirus 1
cgagauccccggggccc

SEQ ID NO: 1750890 - RNA, 18 nt, Human herpesvirus 1
cacccaguuuccaccccc

SEQ ID NO: 1750891 - RNA, 15 nt, Human herpesvirus 1
uccccgggcccagcc

SEQ ID NO: 1750892 - RNA, 20 nt, Human herpesvirus 1
gggcaaguaugccccccugg

SEQ ID NO: 1750893 - RNA, 13 nt, Human herpesvirus 1
ggcccggccaggc

SEQ ID NO: 1750894 - RNA, 18 nt, Human herpesvirus 1
ggcagcaugggacccaca

SEQ ID NO: 1750895 - RNA, 17 nt, Human herpesvirus 1
acgugcugcugcggccc

SEQ ID NO: 1750896 - RNA, 18 nt, Human herpesvirus 1
cccgccguugagccccuc

SEQ ID NO: 1750897 - RNA, 13 nt, Human herpesvirus 1
ccgccgcccgggg

SEQ ID NO: 1750898 - RNA, 19 nt, Human herpesvirus 1
gccaccccgaacaacaugg

SEQ ID NO: 1750899 - RNA, 13 nt, Human herpesvirus 1
uguucacaggggg

SEQ ID NO: 1750900 - RNA, 16 nt, Human herpesvirus 1
cgacgucgcgccuggg

SEQ ID NO: 1750901 - RNA, 20 nt, Human herpesvirus 1
acccugaucccccgcgcggc

SEQ ID NO: 1750902 - RNA, 12 nt, Human herpesvirus 1
ugaaccccagcc

SEQ ID NO: 1750903 - RNA, 16 nt, Human herpesvirus 1
cccucccccuccgcau

SEQ ID NO: 1750904 - RNA, 19 nt, Human herpesvirus 1
gccaucugggauggcuccu

SEQ ID NO: 1750905 - RNA, 18 nt, Human herpesvirus 1
ugcgucccuccccgguuu

SEQ ID NO: 1750906 - RNA, 13 nt, Human herpesvirus 1
ccgacagaccucc

SEQ ID NO: 1750907 - RNA, 18 nt, Human herpesvirus 1
accucggcgggcacgcca

SEQ ID NO: 1750908 - RNA, 14 nt, Human herpesvirus 1
agccuuuaacuaca

SEQ ID NO: 1750909 - RNA, 19 nt, Human herpesvirus 1
cgacagcacucacagcccc

SEQ ID NO: 1750910 - RNA, 16 nt, Human herpesvirus 1
gcgcggaugcucggcg

SEQ ID NO: 1750911 - RNA, 19 nt, Human herpesvirus 1
cggccgccacccaggcgcu

SEQ ID NO: 1750912 - RNA, 20 nt, Human herpesvirus 1
ccagcagacgcugcuccgcc

SEQ ID NO: 1750913 - RNA, 22 nt, Human herpesvirus 1
uacaccucccagugucccgaca

SEQ ID NO: 1750914 - RNA, 17 nt, Human herpesvirus 1
gacauggucaugcgcaa

SEQ ID NO: 1750915 - RNA, 17 nt, Human herpesvirus 1
uguccccgaacaaacga

SEQ ID NO: 1750916 - RNA, 18 nt, Human herpesvirus 1
cgaucccccgcccccggc

SEQ ID NO: 1750917 - RNA, 21 nt, Human herpesvirus 1
uuccgcggccccagcccucuc

SEQ ID NO: 1750918 - RNA, 18 nt, Human herpesvirus 1
acuuccccgacugccccc

SEQ ID NO: 1750919 - RNA, 17 nt, Human herpesvirus 1
ggcauggcgcagcuggg

SEQ ID NO: 1750920 - RNA, 14 nt, Human herpesvirus 1
cacaaccucccggg

SEQ ID NO: 1750921 - RNA, 15 nt, Human herpesvirus 1
agguccagcgccgca

SEQ ID NO: 1750922 - RNA, 18 nt, Human herpesvirus 1
guccccucugggcccgcc

SEQ ID NO: 1750923 - RNA, 19 nt, Human herpesvirus 1
cgcgaucguccaccuccgg

SEQ ID NO: 1750924 - RNA, 12 nt, Human herpesvirus 1
ccaccggaagcc

SEQ ID NO: 1750925 - RNA, 21 nt, Human herpesvirus 1
cacaaacacaaaacacacggg

SEQ ID NO: 1750926 - RNA, 12 nt, Human herpesvirus 1
cgccgcgggcca

SEQ ID NO: 1750927 - RNA, 20 nt, Human herpesvirus 1
gaagcccaacccacacgcac

SEQ ID NO: 1750928 - RNA, 13 nt, Human herpesvirus 1
cggagcucccggg

SEQ ID NO: 1750929 - RNA, 14 nt, Human herpesvirus 1
ggacggcgccgggg

SEQ ID NO: 1750930 - RNA, 22 nt, Human herpesvirus 1
ccggaagcccaacccacacgca

SEQ ID NO: 1750931 - RNA, 12 nt, Human herpesvirus 1
uaaaaggcauua

SEQ ID NO: 1750932 - RNA, 17 nt, Human herpesvirus 1
ccaacgucuccuccacc

SEQ ID NO: 1750933 - RNA, 16 nt, Human herpesvirus 1
cccaugcgacagcgga

SEQ ID NO: 1750934 - RNA, 16 nt, Human herpesvirus 1
caaaugccgggccaag

SEQ ID NO: 1750935 - RNA, 18 nt, Human herpesvirus 1
uggcggggcaggcgccuc

SEQ ID NO: 1750936 - RNA, 14 nt, Human herpesvirus 1
ccgggcgcgucccc

SEQ ID NO: 1750937 - RNA, 19 nt, Human herpesvirus 1
ccaacgaccccgcccaugg

SEQ ID NO: 1750938 - RNA, 23 nt, Human herpesvirus 1
caccgguuuccgcgacccaccgg

SEQ ID NO: 1750939 - RNA, 20 nt, Human herpesvirus 1
caacgucuccuccaccaccc

SEQ ID NO: 1750940 - RNA, 18 nt, Human herpesvirus 1
ggggaccuugccccggcc

SEQ ID NO: 1750941 - RNA, 22 nt, Human herpesvirus 1
aaauacagcauggcgccacacc

SEQ ID NO: 1750942 - RNA, 12 nt, Human herpesvirus 1
ucaucccacccc

SEQ ID NO: 1750943 - RNA, 18 nt, Human herpesvirus 1
aagcgacggacgugcgcc

SEQ ID NO: 1750944 - RNA, 17 nt, Human herpesvirus 1
auaaccgaccgcagucc

SEQ ID NO: 1750945 - RNA, 14 nt, Human herpesvirus 1
cuggccgcgcccac

SEQ ID NO: 1750946 - RNA, 23 nt, Human herpesvirus 1
agucuucggggcccggcccauug

SEQ ID NO: 1750947 - RNA, 16 nt, Human herpesvirus 1
gcgcagguggugcaug

SEQ ID NO: 1750948 - RNA, 14 nt, Human herpesvirus 1
gccuaccagcaggg

SEQ ID NO: 1750949 - RNA, 15 nt, Human herpesvirus 1
accgccaucagccuu

SEQ ID NO: 1750950 - RNA, 17 nt, Human herpesvirus 1
agcgaccccacggccuc

SEQ ID NO: 1750951 - RNA, 13 nt, Human herpesvirus 1
ccgcgccucccgg

SEQ ID NO: 1750952 - RNA, 12 nt, Human herpesvirus 1
gacgccgcgcag

SEQ ID NO: 1750953 - RNA, 24 nt, Human herpesvirus 1
acggcauucgggccugccugcggc

SEQ ID NO: 1750954 - RNA, 20 nt, Human herpesvirus 1
guccgcggggccucccccgg

SEQ ID NO: 1750955 - RNA, 21 nt, Human herpesvirus 1
gccacacucaaaaagccccaa

SEQ ID NO: 1750956 - RNA, 18 nt, Human herpesvirus 1
uggggauggccauagccg

SEQ ID NO: 1750957 - RNA, 13 nt, Human herpesvirus 1
uaucccacggccu

SEQ ID NO: 1750958 - RNA, 18 nt, Human herpesvirus 1
gggagaacaacgagcugc

SEQ ID NO: 1750959 - RNA, 19 nt, Human herpesvirus 1
acggcccgaagccugcugu

SEQ ID NO: 1750960 - RNA, 16 nt, Human herpesvirus 1
cucccccguguccugg

SEQ ID NO: 1750961 - RNA, 20 nt, Human herpesvirus 1
gcucgucgggguggcacaga

SEQ ID NO: 1750962 - RNA, 15 nt, Human herpesvirus 1
agacacgggcaccac

SEQ ID NO: 1750963 - RNA, 14 nt, Human herpesvirus 1
cuucccucagguca

SEQ ID NO: 1750964 - RNA, 11 nt, Human herpesvirus 1
gcgucuggccc

SEQ ID NO: 1750965 - RNA, 17 nt, Human herpesvirus 1
gacgucaauugcccgag

SEQ ID NO: 1750966 - RNA, 22 nt, Human herpesvirus 1
ccagucgcccgaagacaccccc

SEQ ID NO: 1750967 - RNA, 14 nt, Human herpesvirus 1
cuaggagacaccuu

SEQ ID NO: 1750968 - RNA, 14 nt, Human herpesvirus 1
ugcacagccuggcc

SEQ ID NO: 1750969 - RNA, 21 nt, Human herpesvirus 1
cagccucgucccgcccguguu

SEQ ID NO: 1750970 - RNA, 13 nt, Human herpesvirus 1
ggccccacgguca

SEQ ID NO: 1750971 - RNA, 20 nt, Human herpesvirus 1
uaaaccagguaauaccaaau

SEQ ID NO: 1750972 - RNA, 14 nt, Human herpesvirus 1
ccugggccaccuga

SEQ ID NO: 1750973 - RNA, 16 nt, Human herpesvirus 1
cccggucucccaggga

SEQ ID NO: 1750974 - RNA, 15 nt, Human herpesvirus 1
agccagacccaaccc

SEQ ID NO: 1750975 - RNA, 21 nt, Human herpesvirus 1
gcagggccgcggggggggcgg

SEQ ID NO: 1750976 - RNA, 15 nt, Human herpesvirus 1
ccagcagacgcugcu

SEQ ID NO: 1750977 - RNA, 13 nt, Human herpesvirus 1
ccgcggccugggu

SEQ ID NO: 1750978 - RNA, 20 nt, Human herpesvirus 1
gguccguguuucucgcccca

SEQ ID NO: 1750979 - RNA, 19 nt, Human herpesvirus 1
agccgccccagcaccgaca

SEQ ID NO: 1750980 - RNA, 15 nt, Human herpesvirus 1
cgggcuacacggccg

SEQ ID NO: 1750981 - RNA, 17 nt, Human herpesvirus 1
gcgcaguccacgggggg

SEQ ID NO: 1750982 - RNA, 23 nt, Human herpesvirus 1
cggcugguccacacccaguggcu

SEQ ID NO: 1750983 - RNA, 19 nt, Human herpesvirus 1
cgccccggcgacccugauc

SEQ ID NO: 1750984 - RNA, 16 nt, Human herpesvirus 1
gcguggugcgagcugc

SEQ ID NO: 1750985 - RNA, 20 nt, Human herpesvirus 1
gguggucucuggccgcgccc

SEQ ID NO: 1750986 - RNA, 12 nt, Human herpesvirus 1
caccuccacccc

SEQ ID NO: 1750987 - RNA, 12 nt, Human herpesvirus 1
cggacccgcauc

SEQ ID NO: 1750988 - RNA, 23 nt, Human herpesvirus 1
guggaacgaggcccgcaagcuga

SEQ ID NO: 1750989 - RNA, 12 nt, Human herpesvirus 1
ucccgaagccca

SEQ ID NO: 1750990 - RNA, 22 nt, Human herpesvirus 1
guccggcacggacccaaaauaa

SEQ ID NO: 1750991 - RNA, 18 nt, Human herpesvirus 1
auguggauaaaaagccag

SEQ ID NO: 1750992 - RNA, 13 nt, Human herpesvirus 1
gcaacaaccugga

SEQ ID NO: 1750993 - RNA, 13 nt, Human herpesvirus 1
ugcccucgcgggc

SEQ ID NO: 1750994 - RNA, 17 nt, Human herpesvirus 1
gcggaccggcggcgcug

SEQ ID NO: 1750995 - RNA, 19 nt, Human herpesvirus 1
gcccccagaugcccacggg

SEQ ID NO: 1750996 - RNA, 19 nt, Human herpesvirus 1
cagucgcccgaagacaccc

SEQ ID NO: 1750997 - RNA, 18 nt, Human herpesvirus 1
uggggacgguggcgccgc

SEQ ID NO: 1750998 - RNA, 21 nt, Human herpesvirus 1
agcccacaugcggaaagcaag

SEQ ID NO: 1750999 - RNA, 20 nt, Human herpesvirus 1
ucaaggacagcggccugcug

SEQ ID NO: 1751000 - RNA, 23 nt, Human herpesvirus 1
ugggaacggacacgcggggacac

SEQ ID NO: 1751001 - RNA, 21 nt, Human herpesvirus 1
cggcgaccucggcgccucugg

SEQ ID NO: 1751002 - RNA, 19 nt, Human herpesvirus 1
cucaagauggccgacccca

SEQ ID NO: 1751003 - RNA, 14 nt, Human herpesvirus 1
cgcgccccucuggc

SEQ ID NO: 1751004 - RNA, 15 nt, Human herpesvirus 1
uggccgugggucugu

SEQ ID NO: 1751005 - RNA, 23 nt, Human herpesvirus 1
uccgcuuccaucgccccuggcgc

SEQ ID NO: 1751006 - RNA, 20 nt, Human herpesvirus 1
acgcucuccccugcugccau

SEQ ID NO: 1751007 - RNA, 11 nt, Human herpesvirus 1
cgcaagccccu

SEQ ID NO: 1751008 - RNA, 15 nt, Human herpesvirus 1
ggccggccuggcggc

SEQ ID NO: 1751009 - RNA, 21 nt, Human herpesvirus 1
cccgcgcgccccgagaccagu

SEQ ID NO: 1751010 - RNA, 14 nt, Human herpesvirus 1
guccugcgccccgc

SEQ ID NO: 1751011 - RNA, 23 nt, Human herpesvirus 1
uaccacgcccgaccacacacccc

SEQ ID NO: 1751012 - RNA, 22 nt, Human herpesvirus 1
ggagggcgccucggucacccca

SEQ ID NO: 1751013 - RNA, 21 nt, Human herpesvirus 1
cgaggcgcauaaagggccggu

SEQ ID NO: 1751014 - RNA, 17 nt, Human herpesvirus 1
gcaaaucccaccaaacu

SEQ ID NO: 1751015 - RNA, 17 nt, Human herpesvirus 1
acugugcuauccccauc

SEQ ID NO: 1751016 - RNA, 17 nt, Human herpesvirus 1
ggagccccggaccccac

SEQ ID NO: 1751017 - RNA, 13 nt, Human herpesvirus 1
acucucccaccgc

SEQ ID NO: 1751018 - RNA, 15 nt, Human herpesvirus 1
cgaccaccauccccg

SEQ ID NO: 1751019 - RNA, 16 nt, Human herpesvirus 1
caguuuauccuggagc

SEQ ID NO: 1751020 - RNA, 13 nt, Human herpesvirus 1
aagcgcugcugcg

SEQ ID NO: 1751021 - RNA, 18 nt, Human herpesvirus 1
cagacgagcgcgcuuguc

SEQ ID NO: 1751022 - RNA, 16 nt, Human herpesvirus 1
gcaucuucgcccgcag

SEQ ID NO: 1751023 - RNA, 13 nt, Human herpesvirus 1
cugccagaccuca

SEQ ID NO: 1751024 - RNA, 20 nt, Human herpesvirus 1
cccccuggagguguacaccc

SEQ ID NO: 1751025 - RNA, 13 nt, Human herpesvirus 1
ccacgccacccug

SEQ ID NO: 1751026 - RNA, 13 nt, Human herpesvirus 1
gcgcuccucugcg

SEQ ID NO: 1751027 - RNA, 22 nt, Human herpesvirus 1
ugggugcgggggggucaggucu

SEQ ID NO: 1751028 - RNA, 17 nt, Human herpesvirus 1
gccagggcgcccccgcg

SEQ ID NO: 1751029 - RNA, 15 nt, Human herpesvirus 1
ccugggcccuggccg

SEQ ID NO: 1751030 - RNA, 18 nt, Human herpesvirus 1
ggccuuguuccgcuuccc

SEQ ID NO: 1751031 - RNA, 23 nt, Human herpesvirus 1
cgaggggaugggcgaccuggggc

SEQ ID NO: 1751032 - RNA, 22 nt, Human herpesvirus 1
gccgguugcgguucguucugga

SEQ ID NO: 1751033 - RNA, 17 nt, Human herpesvirus 1
cauccugcggcucgugg

SEQ ID NO: 1751034 - RNA, 19 nt, Human herpesvirus 1
cccucucuucccucagguc

SEQ ID NO: 1751035 - RNA, 16 nt, Human herpesvirus 1
cguggcggccccugau

SEQ ID NO: 1751036 - RNA, 20 nt, Human herpesvirus 1
ggaucuuugaggaccgcgcc

SEQ ID NO: 1751037 - RNA, 11 nt, Human herpesvirus 1
ccggaccccac

SEQ ID NO: 1751038 - RNA, 15 nt, Human herpesvirus 1
gcguccaaacccacc

SEQ ID NO: 1751039 - RNA, 20 nt, Human herpesvirus 1
uggucuucaaggagaacauc

SEQ ID NO: 1751040 - RNA, 18 nt, Human herpesvirus 1
gcgcccacuacaccagcc

SEQ ID NO: 1751041 - RNA, 18 nt, Human herpesvirus 1
gguggagggugucccagg

SEQ ID NO: 1751042 - RNA, 15 nt, Human herpesvirus 1
cgggcucguccccug

SEQ ID NO: 1751043 - RNA, 22 nt, Human herpesvirus 1
caccgucggaggccccccagau

SEQ ID NO: 1751044 - RNA, 19 nt, Human herpesvirus 1
uggcgcgucguucgggcgg

SEQ ID NO: 1751045 - RNA, 15 nt, Human herpesvirus 1
acucucccaccgcca

SEQ ID NO: 1751046 - RNA, 16 nt, Human herpesvirus 1
agaacucgccccggaa

SEQ ID NO: 1751047 - RNA, 19 nt, Human herpesvirus 1
uaccaacccgccccuaacc

SEQ ID NO: 1751048 - RNA, 18 nt, Human herpesvirus 1
gaccccauggaccccagc

SEQ ID NO: 1751049 - RNA, 22 nt, Human herpesvirus 1
gggcacgccaagcccccgcccg

SEQ ID NO: 1751050 - RNA, 13 nt, Human herpesvirus 1
cgccgcugacccc

SEQ ID NO: 1751051 - RNA, 16 nt, Human herpesvirus 1
ccucaagcaggccauc

SEQ ID NO: 1751052 - RNA, 16 nt, Human herpesvirus 1
ucagccugccucuccc

SEQ ID NO: 1751053 - RNA, 14 nt, Human herpesvirus 1
gccaccucgcccac

SEQ ID NO: 1751054 - RNA, 20 nt, Human herpesvirus 1
gaucuacugcugggccaugg

SEQ ID NO: 1751055 - RNA, 12 nt, Human herpesvirus 1
gcagaugcagag

SEQ ID NO: 1751056 - RNA, 19 nt, Human herpesvirus 1
accguaacggcauaugcaa

SEQ ID NO: 1751057 - RNA, 21 nt, Human herpesvirus 1
ccaggguaccgcgugacccca

SEQ ID NO: 1751058 - RNA, 12 nt, Human herpesvirus 1
ccguccccugcc

SEQ ID NO: 1751059 - RNA, 20 nt, Human herpesvirus 1
gcacgccaaugcccucccug

SEQ ID NO: 1751060 - RNA, 18 nt, Human herpesvirus 1
gccugugugucuucucuu

SEQ ID NO: 1751061 - RNA, 13 nt, Human herpesvirus 1
ggaugcugccccg

SEQ ID NO: 1751062 - RNA, 14 nt, Human herpesvirus 1
agguccggccuggg

SEQ ID NO: 1751063 - RNA, 12 nt, Human herpesvirus 1
cacgggcgccac

SEQ ID NO: 1751064 - RNA, 14 nt, Human herpesvirus 1
gacguccugggcca

SEQ ID NO: 1751065 - RNA, 13 nt, Human herpesvirus 1
cuuccccgcuguc

SEQ ID NO: 1751066 - RNA, 15 nt, Human herpesvirus 1
acaacucccccgcgc

SEQ ID NO: 1751067 - RNA, 14 nt, Human herpesvirus 1
gcucacgaccccca

SEQ ID NO: 1751068 - RNA, 19 nt, Human herpesvirus 1
ggaucaccaaccacccggg

SEQ ID NO: 1751069 - RNA, 23 nt, Human herpesvirus 1
acucccccgcgcgccccgagacc

SEQ ID NO: 1751070 - RNA, 18 nt, Human herpesvirus 1
uuguccccgaacaaacga

SEQ ID NO: 1751071 - RNA, 19 nt, Human herpesvirus 1
ccaggaaauccguggcccc

SEQ ID NO: 1751072 - RNA, 22 nt, Human herpesvirus 1
acgcgccgcgggcccccggccg

SEQ ID NO: 1751073 - RNA, 20 nt, Human herpesvirus 1
ucggccgccgacgaccuggu

SEQ ID NO: 1751074 - RNA, 22 nt, Human herpesvirus 1
cccuguuugucgccuggcuggc

SEQ ID NO: 1751075 - RNA, 14 nt, Human herpesvirus 1
guccucgcaccagc

SEQ ID NO: 1751076 - RNA, 16 nt, Human herpesvirus 1
guauccacccccgccc

SEQ ID NO: 1751077 - RNA, 19 nt, Human herpesvirus 1
ugcaugucgucacggugac

SEQ ID NO: 1751078 - RNA, 14 nt, Human herpesvirus 1
cuguggccucccga

SEQ ID NO: 1751079 - RNA, 20 nt, Human herpesvirus 1
ggacugguuggaagcgcggg

SEQ ID NO: 1751080 - RNA, 21 nt, Human herpesvirus 1
ccauggagcacgagcaggcgg

SEQ ID NO: 1751081 - RNA, 22 nt, Human herpesvirus 1
cgaggucaaaugccgggccaag

SEQ ID NO: 1751082 - RNA, 21 nt, Human herpesvirus 1
cguggagcgcaucaagaccac

SEQ ID NO: 1751083 - RNA, 21 nt, Human herpesvirus 1
ccuaccggccccugggccccg

SEQ ID NO: 1751084 - RNA, 19 nt, Human herpesvirus 1
ggcccucuuggaggacccc

SEQ ID NO: 1751085 - RNA, 19 nt, Human herpesvirus 1
cgggggauggggagagccc

SEQ ID NO: 1751086 - RNA, 22 nt, Human herpesvirus 1
ggcggcgugugggggugcccca

SEQ ID NO: 1751087 - RNA, 13 nt, Human herpesvirus 1
cgacgcacacacc

SEQ ID NO: 1751088 - RNA, 18 nt, Human herpesvirus 1
gccggcaugcaccccaga

SEQ ID NO: 1751089 - RNA, 16 nt, Human herpesvirus 1
caucggcaaggacgcc

SEQ ID NO: 1751090 - RNA, 14 nt, Human herpesvirus 1
uccuaacccagacc

SEQ ID NO: 1751091 - RNA, 15 nt, Human herpesvirus 1
accugcgcuucgccg

SEQ ID NO: 1751092 - RNA, 15 nt, Human herpesvirus 1
ccccugauggagccu

SEQ ID NO: 1751093 - RNA, 19 nt, Human herpesvirus 1
acuuccuauaagacucucc

SEQ ID NO: 1751094 - RNA, 21 nt, Human herpesvirus 1
guacauguucuuuaugcgccc

SEQ ID NO: 1751095 - RNA, 18 nt, Human herpesvirus 1
gagucgacgaccugggga

SEQ ID NO: 1751096 - RNA, 18 nt, Human herpesvirus 1
acaccccccaugcgggcu

SEQ ID NO: 1751097 - RNA, 20 nt, Human herpesvirus 1
uggucgucgggcgccaaagc

SEQ ID NO: 1751098 - RNA, 17 nt, Human herpesvirus 1
caauuugcacccagccu

SEQ ID NO: 1751099 - RNA, 19 nt, Human herpesvirus 1
ggacccccccucgcgccac

SEQ ID NO: 1751100 - RNA, 15 nt, Human herpesvirus 1
ugaccgcccccagcu

SEQ ID NO: 1751101 - RNA, 17 nt, Human herpesvirus 1
ugcgggguugggauggg

SEQ ID NO: 1751102 - RNA, 15 nt, Human herpesvirus 1
ggacuuugagcuugc

SEQ ID NO: 1751103 - RNA, 19 nt, Human herpesvirus 1
ccgccaaauaaagccacug

SEQ ID NO: 1751104 - RNA, 17 nt, Human herpesvirus 1
gccgggagcgccaggac

SEQ ID NO: 1751105 - RNA, 15 nt, Human herpesvirus 1
accauggccccccgc

SEQ ID NO: 1751106 - RNA, 16 nt, Human herpesvirus 1
ccagaccggcaccacc

SEQ ID NO: 1751107 - RNA, 21 nt, Human herpesvirus 1
caacggcaugccucugcgggc

SEQ ID NO: 1751108 - RNA, 13 nt, Human herpesvirus 1
gccccgacgcacc

SEQ ID NO: 1751109 - RNA, 23 nt, Human herpesvirus 1
gguggucucuggccgcgcccacu

SEQ ID NO: 1751110 - RNA, 18 nt, Human herpesvirus 1
gccagaacucgccccgga

SEQ ID NO: 1751111 - RNA, 21 nt, Human herpesvirus 1
acgcgcgcgaccucaccacca

SEQ ID NO: 1751112 - RNA, 18 nt, Human herpesvirus 1
cugccugacccucuccgg

SEQ ID NO: 1751113 - RNA, 21 nt, Human herpesvirus 1
ccgcuucucuuuggccauccc

SEQ ID NO: 1751114 - RNA, 18 nt, Human herpesvirus 1
ggcacaccgguccccgga

SEQ ID NO: 1751115 - RNA, 21 nt, Human herpesvirus 1
cuugguucggggccgcccugg

SEQ ID NO: 1751116 - RNA, 20 nt, Human herpesvirus 1
gccucacgaccgcauccacc

SEQ ID NO: 1751117 - RNA, 16 nt, Human herpesvirus 1
acgcgagcgacccgcg

SEQ ID NO: 1751118 - RNA, 15 nt, Human herpesvirus 1
gcaacgcgcuggggc

SEQ ID NO: 1751119 - RNA, 21 nt, Human herpesvirus 1
gaaacuguccugucuuggggc

SEQ ID NO: 1751120 - RNA, 16 nt, Human herpesvirus 1
gacacgggcaccacac

SEQ ID NO: 1751121 - RNA, 21 nt, Human herpesvirus 1
gcuagaccacgccccuuuccc

SEQ ID NO: 1751122 - RNA, 23 nt, Human herpesvirus 1
gcugggggagaacaacgagcugc

SEQ ID NO: 1751123 - RNA, 17 nt, Human herpesvirus 1
ccgguaccaucaaccac

SEQ ID NO: 1751124 - RNA, 23 nt, Human herpesvirus 1
uagaccagaggcgcgcgcaccuc

SEQ ID NO: 1751125 - RNA, 15 nt, Human herpesvirus 1
uccagccccccagcc

SEQ ID NO: 1751126 - RNA, 19 nt, Human herpesvirus 1
acccaguggcuccgggcca

SEQ ID NO: 1751127 - RNA, 22 nt, Human herpesvirus 1
gggcguaacguuccgccuggag

SEQ ID NO: 1751128 - RNA, 19 nt, Human herpesvirus 1
cccucugggcccgccugga

SEQ ID NO: 1751129 - RNA, 11 nt, Human herpesvirus 1
cagggagaaac

SEQ ID NO: 1751130 - RNA, 14 nt, Human herpesvirus 1
cuggggucgcggcc

SEQ ID NO: 1751131 - RNA, 22 nt, Human herpesvirus 1
cuccacuacuacguggagcagg

SEQ ID NO: 1751132 - RNA, 18 nt, Human herpesvirus 1
ugagcccggcggcgcugg

SEQ ID NO: 1751133 - RNA, 19 nt, Human herpesvirus 1
gcacgagcgcgcugcucag

SEQ ID NO: 1751134 - RNA, 18 nt, Human herpesvirus 1
cgggcgucaccaugcagc

SEQ ID NO: 1751135 - RNA, 21 nt, Human herpesvirus 1
aacgccucccccugagccgcu

SEQ ID NO: 1751136 - RNA, 13 nt, Human herpesvirus 1
cgugcaccguggg

SEQ ID NO: 1751137 - RNA, 13 nt, Human herpesvirus 1
agagcaaccccau

SEQ ID NO: 1751138 - RNA, 19 nt, Human herpesvirus 1
cguguacugcggucugucu

SEQ ID NO: 1751139 - RNA, 23 nt, Human herpesvirus 1
ggccuccacccccucgaccacca

SEQ ID NO: 1751140 - RNA, 19 nt, Human herpesvirus 1
cucguacgcaugggccgcc

SEQ ID NO: 1751141 - RNA, 19 nt, Human herpesvirus 1
gcgcucaaccaccgcuccc

SEQ ID NO: 1751142 - RNA, 16 nt, Human herpesvirus 1
cacccuaccccagucc

SEQ ID NO: 1751143 - RNA, 11 nt, Human herpesvirus 1
agggggacccc

SEQ ID NO: 1751144 - RNA, 13 nt, Human herpesvirus 1
cguaaccuccggg

SEQ ID NO: 1751145 - RNA, 23 nt, Human herpesvirus 1
gcuccuggccaggaucaccaacc

SEQ ID NO: 1751146 - RNA, 12 nt, Human herpesvirus 1
aauccccaggac

SEQ ID NO: 1751147 - RNA, 21 nt, Human herpesvirus 1
cacaccaucucccccgugucc

SEQ ID NO: 1751148 - RNA, 21 nt, Human herpesvirus 1
gcccgauuuacagcccccaga

SEQ ID NO: 1751149 - RNA, 18 nt, Human herpesvirus 1
ccacgugaucagcacgcc

SEQ ID NO: 1751150 - RNA, 17 nt, Human herpesvirus 1
uaacaaccacccgcacc

SEQ ID NO: 1751151 - RNA, 21 nt, Human herpesvirus 1
cagucaaacgaccucaucagc

SEQ ID NO: 1751152 - RNA, 14 nt, Human herpesvirus 1
cgggcuccaguccc

SEQ ID NO: 1751153 - RNA, 18 nt, Human herpesvirus 1
cggugaccgcgugcccac

SEQ ID NO: 1751154 - RNA, 16 nt, Human herpesvirus 1
guacccuuaauaaauu

SEQ ID NO: 1751155 - RNA, 18 nt, Human herpesvirus 1
ugaacgacugggccgagg

SEQ ID NO: 1751156 - RNA, 21 nt, Human herpesvirus 1
ccauccgaacgcagccccgcu

SEQ ID NO: 1751157 - RNA, 15 nt, Human herpesvirus 1
cuggguggucucugg

SEQ ID NO: 1751158 - RNA, 15 nt, Human herpesvirus 1
ccggggccagcgcca

SEQ ID NO: 1751159 - RNA, 12 nt, Human herpesvirus 1
gaggauuacuuu

SEQ ID NO: 1751160 - RNA, 13 nt, Human herpesvirus 1
cgagucuggaagg

SEQ ID NO: 1751161 - RNA, 17 nt, Human herpesvirus 1
cauacacgagcacccug

SEQ ID NO: 1751162 - RNA, 12 nt, Human herpesvirus 1
ccgcaacaccaa

SEQ ID NO: 1751163 - RNA, 15 nt, Human herpesvirus 1
acgccugccaaccug

SEQ ID NO: 1751164 - RNA, 21 nt, Human herpesvirus 1
acaccagcagcuugcggggcu

SEQ ID NO: 1751165 - RNA, 20 nt, Human herpesvirus 1
uggagagcgaaggcugccgc

SEQ ID NO: 1751166 - RNA, 20 nt, Human herpesvirus 1
aguguuucguuccuuccccc

SEQ ID NO: 1751167 - RNA, 18 nt, Human herpesvirus 1
ggcugguccacacccagu

SEQ ID NO: 1751168 - RNA, 24 nt, Human herpesvirus 1
acgaggcggccaacgacuuccucg

SEQ ID NO: 1751169 - RNA, 20 nt, Human herpesvirus 1
gucgaccgcgcccucgccac

SEQ ID NO: 1751170 - RNA, 22 nt, Human herpesvirus 1
gaccuccccgcgcaugcucugg

SEQ ID NO: 1751171 - RNA, 23 nt, Human herpesvirus 1
gcccaccggaagcccaacccaca

SEQ ID NO: 1751172 - RNA, 23 nt, Human herpesvirus 1
uggaccccagcgaccccacggcc

SEQ ID NO: 1751173 - RNA, 17 nt, Human herpesvirus 1
ugggccucacccacgcc

SEQ ID NO: 1751174 - RNA, 20 nt, Human herpesvirus 1
cggggcucucggggccgcag

SEQ ID NO: 1751175 - RNA, 20 nt, Human herpesvirus 1
ugcgcgggguuacgcgggcc

SEQ ID NO: 1751176 - RNA, 19 nt, Human herpesvirus 1
augggcuacuaccuaggca

SEQ ID NO: 1751177 - RNA, 14 nt, Human herpesvirus 1
gugggcguccugga

SEQ ID NO: 1751178 - RNA, 13 nt, Human herpesvirus 1
accaccauggccc

SEQ ID NO: 1751179 - RNA, 11 nt, Human herpesvirus 1
gacgcuggggg

SEQ ID NO: 1751180 - RNA, 23 nt, Human herpesvirus 1
aauguuuuuauuggucaaacuca

SEQ ID NO: 1751181 - RNA, 14 nt, Human herpesvirus 1
ugggggccuguccc

SEQ ID NO: 1751182 - RNA, 13 nt, Human herpesvirus 1
cccugcgucgccc

SEQ ID NO: 1751183 - RNA, 16 nt, Human herpesvirus 1
cucucgcaccaucccg

SEQ ID NO: 1751184 - RNA, 21 nt, Human herpesvirus 1
caggugacgccuucgaggguc

SEQ ID NO: 1751185 - RNA, 20 nt, Human herpesvirus 1
caucagcuguggacccgagc

SEQ ID NO: 1751186 - RNA, 20 nt, Human herpesvirus 1
ccgccugucgcacccacagc

SEQ ID NO: 1751187 - RNA, 18 nt, Human herpesvirus 1
cccaacaacucccccgcg

SEQ ID NO: 1751188 - RNA, 18 nt, Human herpesvirus 1
ccggcaauucccgcggcc

SEQ ID NO: 1751189 - RNA, 13 nt, Human herpesvirus 1
cccagcaaggcgu

SEQ ID NO: 1751190 - RNA, 19 nt, Human herpesvirus 1
ccccuucccucccccuccg

SEQ ID NO: 1751191 - RNA, 15 nt, Human herpesvirus 1
ccaaugcccucccug

SEQ ID NO: 1751192 - RNA, 18 nt, Human herpesvirus 1
accgcccgccccucgcca

SEQ ID NO: 1751193 - RNA, 22 nt, Human herpesvirus 1
ucacgcgggaggccgcccagcu

SEQ ID NO: 1751194 - RNA, 16 nt, Human herpesvirus 1
gaucgcguaccagccc

SEQ ID NO: 1751195 - RNA, 23 nt, Human herpesvirus 1
accgccggcggcgacgugccccc

SEQ ID NO: 1751196 - RNA, 13 nt, Human herpesvirus 1
ggucguccgcgga

SEQ ID NO: 1751197 - RNA, 21 nt, Human herpesvirus 1
ugcagaaucacgagcugaccc

SEQ ID NO: 1751198 - RNA, 23 nt, Human herpesvirus 1
uggagcgcacggaacacaaggcc

SEQ ID NO: 1751199 - RNA, 14 nt, Human herpesvirus 1
caauuugcacccag

SEQ ID NO: 1751200 - RNA, 15 nt, Human herpesvirus 1
ggcuccgggccaacc

SEQ ID NO: 1751201 - RNA, 20 nt, Human herpesvirus 1
cgcgaaggacgccggagccg

SEQ ID NO: 1751202 - RNA, 18 nt, Human herpesvirus 1
auaaccacgcccagcgca

SEQ ID NO: 1751203 - RNA, 21 nt, Human herpesvirus 1
ugcggccggcgggacucuggg

SEQ ID NO: 1751204 - RNA, 14 nt, Human herpesvirus 1
uguggggacccgcc

SEQ ID NO: 1751205 - RNA, 21 nt, Human herpesvirus 1
gugcgccaggucggcgaccgc

SEQ ID NO: 1751206 - RNA, 18 nt, Human herpesvirus 1
gggcccccgcccccgccg

SEQ ID NO: 1751207 - RNA, 14 nt, Human herpesvirus 1
accacaggugggug

SEQ ID NO: 1751208 - RNA, 18 nt, Human herpesvirus 1
uccgucuucggccccgcg

SEQ ID NO: 1751209 - RNA, 21 nt, Human herpesvirus 1
gccgaggcgauuagccagcag

SEQ ID NO: 1751210 - RNA, 23 nt, Human herpesvirus 1
aaccuucugcgggucaccugcca

SEQ ID NO: 1751211 - RNA, 23 nt, Human herpesvirus 1
guuccggacgccuucgccccaca

SEQ ID NO: 1751212 - RNA, 20 nt, Human herpesvirus 1
cgaggaccacgugcacagcc

SEQ ID NO: 1751213 - RNA, 16 nt, Human herpesvirus 1
ccuuggucgaucccga

SEQ ID NO: 1751214 - RNA, 20 nt, Human herpesvirus 1
acgguacauggcccuggugu

SEQ ID NO: 1751215 - RNA, 20 nt, Human herpesvirus 1
accccggggcucagccagac

SEQ ID NO: 1751216 - RNA, 13 nt, Human herpesvirus 1
gucuccgugcugu

SEQ ID NO: 1751217 - RNA, 21 nt, Human herpesvirus 1
ccucuucuccccuucccuccc

SEQ ID NO: 1751218 - RNA, 17 nt, Human herpesvirus 1
gcauauccgggggcacg

SEQ ID NO: 1751219 - RNA, 17 nt, Human herpesvirus 1
gcaccagcgcggaggag

SEQ ID NO: 1751220 - RNA, 16 nt, Human herpesvirus 1
acgcacacacccuagc

SEQ ID NO: 1751221 - RNA, 23 nt, Human herpesvirus 1
cccgcaacgcgcuggggcugccg

SEQ ID NO: 1751222 - RNA, 22 nt, Human herpesvirus 1
ugcagggccuggugcucguggg

SEQ ID NO: 1751223 - RNA, 23 nt, Human herpesvirus 1
ccccccacgugaucagcacgcca

SEQ ID NO: 1751224 - RNA, 17 nt, Human herpesvirus 1
cgcaaccagcugcacga

SEQ ID NO: 1751225 - RNA, 24 nt, Human herpesvirus 1
gccucccggggggucggcaggcga

SEQ ID NO: 1751226 - RNA, 13 nt, Human herpesvirus 1
gaugccugugggu

SEQ ID NO: 1751227 - RNA, 14 nt, Human herpesvirus 1
ccuuggcggccgcc

SEQ ID NO: 1751228 - RNA, 23 nt, Human herpesvirus 1
acgccuccgcccgugcugccguc

SEQ ID NO: 1751229 - RNA, 14 nt, Human herpesvirus 1
caacgcgcuggggc

SEQ ID NO: 1751230 - RNA, 22 nt, Human herpesvirus 1
cagucggcaagauccucgggcu

SEQ ID NO: 1751231 - RNA, 19 nt, Human herpesvirus 1
gcguguuccccgggagccc

SEQ ID NO: 1751232 - RNA, 15 nt, Human herpesvirus 1
cgaccggcacccggc

SEQ ID NO: 1751233 - RNA, 13 nt, Human herpesvirus 1
ggguucuccugga

SEQ ID NO: 1751234 - RNA, 23 nt, Human herpesvirus 1
uggucucuggccgcgcccacuac

SEQ ID NO: 1751235 - RNA, 23 nt, Human herpesvirus 1
gcguccaaacccaccgacacaug

SEQ ID NO: 1751236 - RNA, 22 nt, Human herpesvirus 1
gcccgucuuuaaccucccccgg

SEQ ID NO: 1751237 - RNA, 20 nt, Human herpesvirus 1
uccacccccucgaccaccau

SEQ ID NO: 1751238 - RNA, 12 nt, Human herpesvirus 1
uucccacgcuuc

SEQ ID NO: 1751239 - RNA, 18 nt, Human herpesvirus 1
gccccggucuccccggga

SEQ ID NO: 1751240 - RNA, 15 nt, Human herpesvirus 1
ccggcggacccaagc

SEQ ID NO: 1751241 - RNA, 18 nt, Human herpesvirus 1
cacggccacuggccggga

SEQ ID NO: 1751242 - RNA, 12 nt, Human herpesvirus 1
gugcacagccug

SEQ ID NO: 1751243 - RNA, 22 nt, Human herpesvirus 1
ggcccuuccuaacccagacccc

SEQ ID NO: 1751244 - RNA, 17 nt, Human herpesvirus 1
cgcggcguccgcgcccc

SEQ ID NO: 1751245 - RNA, 15 nt, Human herpesvirus 1
gagcaccccccccaa

SEQ ID NO: 1751246 - RNA, 22 nt, Human herpesvirus 1
caagccgcgauuccgagggccg

SEQ ID NO: 1751247 - RNA, 14 nt, Human herpesvirus 1
cgcagccccgcugg

SEQ ID NO: 1751248 - RNA, 15 nt, Human herpesvirus 1
gcgggugucugcucc

SEQ ID NO: 1751249 - RNA, 16 nt, Human herpesvirus 1
ugaccccgcuccugug

SEQ ID NO: 1751250 - RNA, 15 nt, Human herpesvirus 1
caccaaggcccgggc

SEQ ID NO: 1751251 - RNA, 13 nt, Human herpesvirus 1
cugcugggccaug

SEQ ID NO: 1751252 - RNA, 15 nt, Human herpesvirus 1
ccggucggcgggccc

SEQ ID NO: 1751253 - RNA, 19 nt, Human herpesvirus 1
acuacucggaaagcgaaga

SEQ ID NO: 1751254 - RNA, 21 nt, Human herpesvirus 1
cggccgcgacccaggcggcga

SEQ ID NO: 1751255 - RNA, 13 nt, Human herpesvirus 1
cugccauggagcg

SEQ ID NO: 1751256 - RNA, 19 nt, Human herpesvirus 1
cggcaccaccgacucuccc

SEQ ID NO: 1751257 - RNA, 16 nt, Human herpesvirus 1
ccuucccccucccccc

SEQ ID NO: 1751258 - RNA, 20 nt, Human herpesvirus 1
gcccggcccugcugcugccg

SEQ ID NO: 1751259 - RNA, 16 nt, Human herpesvirus 1
aaccccacgcccccgc

SEQ ID NO: 1751260 - RNA, 14 nt, Human herpesvirus 1
uccguggccccggc

SEQ ID NO: 1751261 - RNA, 23 nt, Human herpesvirus 1
gauuuggguugggguuucugugu

SEQ ID NO: 1751262 - RNA, 18 nt, Human herpesvirus 1
cgaucugugagugucgcg

SEQ ID NO: 1751263 - RNA, 16 nt, Human herpesvirus 1
uggccccggcccccaa

SEQ ID NO: 1751264 - RNA, 19 nt, Human herpesvirus 1
cgguaugccgcggccaugg

SEQ ID NO: 1751265 - RNA, 14 nt, Human herpesvirus 1
gccaaagccccgga

SEQ ID NO: 1751266 - RNA, 22 nt, Human herpesvirus 1
ccccggcauggcgcagcuggga

SEQ ID NO: 1751267 - RNA, 18 nt, Human herpesvirus 1
gagcaggcggucggcggc

SEQ ID NO: 1751268 - RNA, 23 nt, Human herpesvirus 1
gucaccgguuuccgcgacccacc

SEQ ID NO: 1751269 - RNA, 15 nt, Human herpesvirus 1
gaggggggagauggg

SEQ ID NO: 1751270 - RNA, 15 nt, Human herpesvirus 1
ccagccccccagccu

SEQ ID NO: 1751271 - RNA, 18 nt, Human herpesvirus 1
cggggaccuugccccggc

SEQ ID NO: 1751272 - RNA, 21 nt, Human herpesvirus 1
cggugccaguccgcugcaccg

SEQ ID NO: 1751273 - RNA, 23 nt, Human herpesvirus 1
ccggggcucucggggccgcagga

SEQ ID NO: 1751274 - RNA, 16 nt, Human herpesvirus 1
cccaacccacacgcac

SEQ ID NO: 1751275 - RNA, 17 nt, Human herpesvirus 1
uccgccugucgcaccca

SEQ ID NO: 1751276 - RNA, 17 nt, Human herpesvirus 1
gucgcgggacccgacag

SEQ ID NO: 1751277 - RNA, 18 nt, Human herpesvirus 1
acugccugacccucuccg

SEQ ID NO: 1751278 - RNA, 20 nt, Human herpesvirus 1
acacaaaaggcguaccaaac

SEQ ID NO: 1751279 - RNA, 16 nt, Human herpesvirus 1
gcguagcauaccuggg

SEQ ID NO: 1751280 - RNA, 14 nt, Human herpesvirus 1
gaugagccagaccc

SEQ ID NO: 1751281 - RNA, 15 nt, Human herpesvirus 1
gucugggcccgacag

SEQ ID NO: 1751282 - RNA, 19 nt, Human herpesvirus 1
cgggauccucggccagcuc

SEQ ID NO: 1751283 - RNA, 21 nt, Human herpesvirus 1
gccguggcgccccggccccuc

SEQ ID NO: 1751284 - RNA, 13 nt, Human herpesvirus 1
ggcggccccggcc

SEQ ID NO: 1751285 - RNA, 17 nt, Human herpesvirus 1
auggggcgggggauggg

SEQ ID NO: 1751286 - RNA, 13 nt, Human herpesvirus 1
gcuaucuccuggg

SEQ ID NO: 1751287 - RNA, 21 nt, Human herpesvirus 1
cgcccucacagggcgggccgc

SEQ ID NO: 1751288 - RNA, 15 nt, Human herpesvirus 1
ccccuggacgugggc

SEQ ID NO: 1751289 - RNA, 16 nt, Human herpesvirus 1
uaacccagaccccggg

SEQ ID NO: 1751290 - RNA, 18 nt, Human herpesvirus 1
ccggugguccguguggag

SEQ ID NO: 1751291 - RNA, 17 nt, Human herpesvirus 1
uuaaaaaucgugaguca

SEQ ID NO: 1751292 - RNA, 18 nt, Human herpesvirus 1
acgugcacagccuggccg

SEQ ID NO: 1751293 - RNA, 18 nt, Human herpesvirus 1
gcuccugauguggcugcu

SEQ ID NO: 1751294 - RNA, 18 nt, Human herpesvirus 1
accccagggaccuccugg

SEQ ID NO: 1751295 - RNA, 15 nt, Human herpesvirus 1
gccucgggggcggga

SEQ ID NO: 1751296 - RNA, 20 nt, Human herpesvirus 1
cguugucuccccgauggccc

SEQ ID NO: 1751297 - RNA, 21 nt, Human herpesvirus 1
cggccggauucccgggccgga

SEQ ID NO: 1751298 - RNA, 11 nt, Human herpesvirus 1
ggccccacggu

SEQ ID NO: 1751299 - RNA, 19 nt, Human herpesvirus 1
cgccaucagccuuaccacg

SEQ ID NO: 1751300 - RNA, 21 nt, Human herpesvirus 1
cgugcugcgccuugggcccgg

SEQ ID NO: 1751301 - RNA, 14 nt, Human herpesvirus 1
cguccaccaaaguc

SEQ ID NO: 1751302 - RNA, 20 nt, Human herpesvirus 1
cgccuccgcccgugcugccg

SEQ ID NO: 1751303 - RNA, 16 nt, Human herpesvirus 1
ggcccuguaugacagc

SEQ ID NO: 1751304 - RNA, 14 nt, Human herpesvirus 1
ucgaccaccauccc

SEQ ID NO: 1751305 - RNA, 18 nt, Human herpesvirus 1
cagcucgcggaggagcca

SEQ ID NO: 1751306 - RNA, 22 nt, Human herpesvirus 1
ucccagcggcacgaccggcucc

SEQ ID NO: 1751307 - RNA, 22 nt, Human herpesvirus 1
aaccuuuaggaugccagccagg

SEQ ID NO: 1751308 - RNA, 13 nt, Human herpesvirus 1
cuacauuaaauug

SEQ ID NO: 1751309 - RNA, 20 nt, Human herpesvirus 1
cuccggggcccggcccugcu

SEQ ID NO: 1751310 - RNA, 12 nt, Human herpesvirus 1
uguuggcccuaa

SEQ ID NO: 1751311 - RNA, 17 nt, Human herpesvirus 1
accaucccccggccacc

SEQ ID NO: 1751312 - RNA, 21 nt, Human herpesvirus 1
gaggccacguguagccuggau

SEQ ID NO: 1751313 - RNA, 19 nt, Human herpesvirus 1
acauucuccacuacuacgu

SEQ ID NO: 1751314 - RNA, 19 nt, Human herpesvirus 1
caggcgacggcgucucccg

SEQ ID NO: 1751315 - RNA, 14 nt, Human herpesvirus 1
gcauccacccuccg

SEQ ID NO: 1751316 - RNA, 23 nt, Human herpesvirus 1
ucccgccuuccggaccugcucuc

SEQ ID NO: 1751317 - RNA, 19 nt, Human herpesvirus 1
cgcgccaaacgccagccug

SEQ ID NO: 1751318 - RNA, 17 nt, Human herpesvirus 1
cggguguggggacccgc

SEQ ID NO: 1751319 - RNA, 23 nt, Human herpesvirus 1
ugcucuggggucccugucgccuc

SEQ ID NO: 1751320 - RNA, 15 nt, Human herpesvirus 1
gcggguagggucgug

SEQ ID NO: 1751321 - RNA, 19 nt, Human herpesvirus 1
aggauggagagcgaaggcu

SEQ ID NO: 1751322 - RNA, 23 nt, Human herpesvirus 1
aguaacaugcgcacgugauguag

SEQ ID NO: 1751323 - RNA, 20 nt, Human herpesvirus 1
cuaaggcccggcuagaccca

SEQ ID NO: 1751324 - RNA, 14 nt, Human herpesvirus 1
cacgugcugcugcg

SEQ ID NO: 1751325 - RNA, 21 nt, Human herpesvirus 1
cgugacacccuaccccagucc

SEQ ID NO: 1751326 - RNA, 19 nt, Human herpesvirus 1
gccaggggcauccgggacc

SEQ ID NO: 1751327 - RNA, 23 nt, Human herpesvirus 1
cguguacaacaucauccagcugg

SEQ ID NO: 1751328 - RNA, 16 nt, Human herpesvirus 1
ggcgagcccagacccc

SEQ ID NO: 1751329 - RNA, 17 nt, Human herpesvirus 1
ccgcauaucccacccug

SEQ ID NO: 1751330 - RNA, 20 nt, Human herpesvirus 1
gccgcccggggccagcgcca

SEQ ID NO: 1751331 - RNA, 16 nt, Human herpesvirus 1
caccauccccgcuccc

SEQ ID NO: 1751332 - RNA, 21 nt, Human herpesvirus 1
ucagcgcgauccgacaugucc

SEQ ID NO: 1751333 - RNA, 13 nt, Human herpesvirus 1
ccugggccaccug

SEQ ID NO: 1751334 - RNA, 18 nt, Human herpesvirus 1
accacccaaccccaacuc

SEQ ID NO: 1751335 - RNA, 15 nt, Human herpesvirus 1
cugcccggcggccag

SEQ ID NO: 1751336 - RNA, 14 nt, Human herpesvirus 1
ccccggagccgggc

SEQ ID NO: 1751337 - RNA, 16 nt, Human herpesvirus 1
uacgcuuggagccagc

SEQ ID NO: 1751338 - RNA, 20 nt, Human herpesvirus 1
ccgaaccaccacugcacucc

SEQ ID NO: 1751339 - RNA, 20 nt, Human herpesvirus 1
ggaucccaacgaccccgccc

SEQ ID NO: 1751340 - RNA, 16 nt, Human herpesvirus 1
ggcggccccggccgcc

SEQ ID NO: 1751341 - RNA, 19 nt, Human herpesvirus 1
uaaauuuuacaaacagauu

SEQ ID NO: 1751342 - RNA, 23 nt, Human herpesvirus 1
cccaucugugcggggaggggggc

SEQ ID NO: 1751343 - RNA, 19 nt, Human herpesvirus 1
gucgccuggcugacccacg

SEQ ID NO: 1751344 - RNA, 21 nt, Human herpesvirus 1
gugcugcugcggcccacccug

SEQ ID NO: 1751345 - RNA, 20 nt, Human herpesvirus 1
cagacgcugcuccgccuggc

SEQ ID NO: 1751346 - RNA, 20 nt, Human herpesvirus 1
ucgacgucgcgccugggugc

SEQ ID NO: 1751347 - RNA, 16 nt, Human herpesvirus 1
acgugcgauucagcgc

SEQ ID NO: 1751348 - RNA, 22 nt, Human herpesvirus 1
cugcagaaucacgagcugaccc

SEQ ID NO: 1751349 - RNA, 16 nt, Human herpesvirus 1
agcccccgccccuccc

SEQ ID NO: 1751350 - RNA, 17 nt, Human herpesvirus 1
acgccaagggggucugu

SEQ ID NO: 1751351 - RNA, 20 nt, Human herpesvirus 1
ccuccgacgcccagcagcuc

SEQ ID NO: 1751352 - RNA, 15 nt, Human herpesvirus 1
gaccccgggcgcgcc

SEQ ID NO: 1751353 - RNA, 16 nt, Human herpesvirus 1
cgggacgaggccgugc

SEQ ID NO: 1751354 - RNA, 21 nt, Human herpesvirus 1
ugcccuccccccgcccccggc

SEQ ID NO: 1751355 - RNA, 16 nt, Human herpesvirus 1
gacaucagcuguggac

SEQ ID NO: 1751356 - RNA, 15 nt, Human herpesvirus 1
uucggacagacucaa

SEQ ID NO: 1751357 - RNA, 13 nt, Human herpesvirus 1
accgaagaggugc

SEQ ID NO: 1751358 - RNA, 18 nt, Human herpesvirus 1
cguccccuuacaguucca

SEQ ID NO: 1751359 - RNA, 16 nt, Human herpesvirus 1
agccauccccgcgucc

SEQ ID NO: 1751360 - RNA, 18 nt, Human herpesvirus 1
gucaucacccgggugcuu

SEQ ID NO: 1751361 - RNA, 15 nt, Human herpesvirus 1
guccuggaccagcug

SEQ ID NO: 1751362 - RNA, 14 nt, Human herpesvirus 1
ccagcccucucccc

SEQ ID NO: 1751363 - RNA, 16 nt, Human herpesvirus 1
gccgccgcgccccgcc

SEQ ID NO: 1751364 - RNA, 16 nt, Human herpesvirus 1
uuguggacccaaagcc

SEQ ID NO: 1751365 - RNA, 11 nt, Human herpesvirus 1
acccccggccc

SEQ ID NO: 1751366 - RNA, 18 nt, Human herpesvirus 1
ggagggugguuccccccc

SEQ ID NO: 1751367 - RNA, 19 nt, Human herpesvirus 1
cccccggcauggcgcagcu

SEQ ID NO: 1751368 - RNA, 16 nt, Human herpesvirus 1
ccagcggcacgaccgg

SEQ ID NO: 1751369 - RNA, 21 nt, Human herpesvirus 1
ggccccccgcguccaaaccca

SEQ ID NO: 1751370 - RNA, 12 nt, Human herpesvirus 1
cacgccgccucg

SEQ ID NO: 1751371 - RNA, 20 nt, Human herpesvirus 1
gcguccuggaugcuguggac

SEQ ID NO: 1751372 - RNA, 14 nt, Human herpesvirus 1
aucuccggaccccc

SEQ ID NO: 1751373 - RNA, 14 nt, Human herpesvirus 1
ugggccugaucgcc

SEQ ID NO: 1751374 - RNA, 22 nt, Human herpesvirus 1
ccggcguuucugaccugcaccg

SEQ ID NO: 1751375 - RNA, 15 nt, Human herpesvirus 1
caccaccaaccugac

SEQ ID NO: 1751376 - RNA, 19 nt, Human herpesvirus 1
cguacggccucgugcucgu

SEQ ID NO: 1751377 - RNA, 12 nt, Human herpesvirus 1
gagcgacccgcg

SEQ ID NO: 1751378 - RNA, 21 nt, Human herpesvirus 1
gcgccgacaucaccaccguca

SEQ ID NO: 1751379 - RNA, 16 nt, Human herpesvirus 1
uccccgggagccccgg

SEQ ID NO: 1751380 - RNA, 18 nt, Human herpesvirus 1
cgcgacccaccgggcccg

SEQ ID NO: 1751381 - RNA, 19 nt, Human herpesvirus 1
cacaacgccagccugcggc

SEQ ID NO: 1751382 - RNA, 15 nt, Human herpesvirus 1
cgcggcguccgcgcc

SEQ ID NO: 1751383 - RNA, 16 nt, Human herpesvirus 1
ggggcuuccggccugg

SEQ ID NO: 1751384 - RNA, 18 nt, Human herpesvirus 1
ccucgcgccacacucacc

SEQ ID NO: 1751385 - RNA, 20 nt, Human herpesvirus 1
cuccugggggcacccacgcc

SEQ ID NO: 1751386 - RNA, 16 nt, Human herpesvirus 1
ucuacugcugggccau

SEQ ID NO: 1751387 - RNA, 14 nt, Human herpesvirus 1
cgacaccgcccucg

SEQ ID NO: 1751388 - RNA, 23 nt, Human herpesvirus 1
cccgcgucgggauccacaccgcg

SEQ ID NO: 1751389 - RNA, 21 nt, Human herpesvirus 1
caagagacgucgccccugugg

SEQ ID NO: 1751390 - RNA, 16 nt, Human herpesvirus 1
ucccagggagccccgg

SEQ ID NO: 1751391 - RNA, 23 nt, Human herpesvirus 1
ccucggcccgcgaacggcacgcc

SEQ ID NO: 1751392 - RNA, 18 nt, Human herpesvirus 1
agcucccagagaccccag

SEQ ID NO: 1751393 - RNA, 13 nt, Human herpesvirus 1
cugaaccccagcc

SEQ ID NO: 1751394 - RNA, 14 nt, Human herpesvirus 1
cggcgggagcuggg

SEQ ID NO: 1751395 - RNA, 17 nt, Human herpesvirus 1
ccucgaugacgucccgg

SEQ ID NO: 1751396 - RNA, 18 nt, Human herpesvirus 1
cucgccacgucgaccgcg

SEQ ID NO: 1751397 - RNA, 19 nt, Human herpesvirus 1
cagggccuccgaccccaga

SEQ ID NO: 1751398 - RNA, 15 nt, Human herpesvirus 1
aggccugggauccca

SEQ ID NO: 1751399 - RNA, 23 nt, Human herpesvirus 1
caaccccagggaccuccuggacu

SEQ ID NO: 1751400 - RNA, 16 nt, Human herpesvirus 1
cccuucccucccccuc

SEQ ID NO: 1751401 - RNA, 16 nt, Human herpesvirus 1
acacccuaccccaguc

SEQ ID NO: 1751402 - RNA, 22 nt, Human herpesvirus 1
gagcucccagagaccccagggu

SEQ ID NO: 1751403 - RNA, 14 nt, Human herpesvirus 1
gcgaaugcagcgcc

SEQ ID NO: 1751404 - RNA, 13 nt, Human herpesvirus 1
cgcuggaccucac

SEQ ID NO: 1751405 - RNA, 15 nt, Human herpesvirus 1
gccuccgaccccaga

SEQ ID NO: 1751406 - RNA, 17 nt, Human herpesvirus 1
aagcugaugucccucau

SEQ ID NO: 1751407 - RNA, 23 nt, Human herpesvirus 1
cgccgagucuucggggcccggcc

SEQ ID NO: 1751408 - RNA, 22 nt, Human herpesvirus 1
gcccguugcagggccuggugcu

SEQ ID NO: 1751409 - RNA, 23 nt, Human herpesvirus 1
cagcaccgacaccgcacugcggc

SEQ ID NO: 1751410 - RNA, 11 nt, Human herpesvirus 1
cucgccccgga

SEQ ID NO: 1751411 - RNA, 17 nt, Human herpesvirus 1
cgaggucccgugcaacc

SEQ ID NO: 1751412 - RNA, 19 nt, Human herpesvirus 1
cgaccgcaacuucccaccc

SEQ ID NO: 1751413 - RNA, 15 nt, Human herpesvirus 1
cuccgacgacgcgca

SEQ ID NO: 1751414 - RNA, 20 nt, Human herpesvirus 1
cuaagacccaccccccgucc

SEQ ID NO: 1751415 - RNA, 14 nt, Human herpesvirus 1
ccccccccacccca

SEQ ID NO: 1751416 - RNA, 13 nt, Human herpesvirus 1
cgguucgccgcca

SEQ ID NO: 1751417 - RNA, 13 nt, Human herpesvirus 1
ccuccgcgccagg

SEQ ID NO: 1751418 - RNA, 17 nt, Human herpesvirus 1
gcggccaacgacuuccu

SEQ ID NO: 1751419 - RNA, 13 nt, Human herpesvirus 1
ccacacccagugg

SEQ ID NO: 1751420 - RNA, 17 nt, Human herpesvirus 1
gaucccaacgaccccgc

SEQ ID NO: 1751421 - RNA, 15 nt, Human herpesvirus 1
cugagcgcccuccug

SEQ ID NO: 1751422 - RNA, 15 nt, Human herpesvirus 1
ugcgguccggagaca

SEQ ID NO: 1751423 - RNA, 13 nt, Human herpesvirus 1
gauacccccccuu

SEQ ID NO: 1751424 - RNA, 17 nt, Human herpesvirus 1
gccgccuggucccccgg

SEQ ID NO: 1751425 - RNA, 12 nt, Human herpesvirus 1
uugcacccagcc

SEQ ID NO: 1751426 - RNA, 13 nt, Human herpesvirus 1
cgcccgucucugc

SEQ ID NO: 1751427 - RNA, 13 nt, Human herpesvirus 1
caggccuccaccc

SEQ ID NO: 1751428 - RNA, 17 nt, Human herpesvirus 1
aucugggauggcuccug

SEQ ID NO: 1751429 - RNA, 21 nt, Human herpesvirus 1
cagggcuacgugcucgacagc

SEQ ID NO: 1751430 - RNA, 21 nt, Human herpesvirus 1
acgccuccgcccgugcugccg

SEQ ID NO: 1751431 - RNA, 17 nt, Human herpesvirus 1
acccagaccccgggcgc

SEQ ID NO: 1751432 - RNA, 18 nt, Human herpesvirus 1
uccgcccgugcugccguc

SEQ ID NO: 1751433 - RNA, 22 nt, Human herpesvirus 1
gacagcccccccaagcgccccc

SEQ ID NO: 1751434 - RNA, 22 nt, Human herpesvirus 1
uguccggcagggggaugggggg

SEQ ID NO: 1751435 - RNA, 18 nt, Human herpesvirus 1
ccccaucuaaugccacgc

SEQ ID NO: 1751436 - RNA, 14 nt, Human herpesvirus 1
gugauuccucuccg

SEQ ID NO: 1751437 - RNA, 22 nt, Human herpesvirus 1
ggggacugcaucggcaaggacg

SEQ ID NO: 1751438 - RNA, 18 nt, Human herpesvirus 1
cuccgcgccaggcccgcc

SEQ ID NO: 1751439 - RNA, 14 nt, Human herpesvirus 1
ccgcgcccucgcca

SEQ ID NO: 1751440 - RNA, 22 nt, Human herpesvirus 1
gggccgugcgauggacaccgca

SEQ ID NO: 1751441 - RNA, 17 nt, Human herpesvirus 1
cccacacagcccucccg

SEQ ID NO: 1751442 - RNA, 12 nt, Human herpesvirus 1
acgcccccgccg

SEQ ID NO: 1751443 - RNA, 14 nt, Human herpesvirus 1
cggugccuuucccc

SEQ ID NO: 1751444 - RNA, 17 nt, Human herpesvirus 1
acccucucuucucuccc

SEQ ID NO: 1751445 - RNA, 16 nt, Human herpesvirus 1
aaccccuuuggggcgc

SEQ ID NO: 1751446 - RNA, 15 nt, Human herpesvirus 1
gcgcaucagcucgcg

SEQ ID NO: 1751447 - RNA, 20 nt, Human herpesvirus 1
ccaacaauccccaggacacc

SEQ ID NO: 1751448 - RNA, 15 nt, Human herpesvirus 1
ggccugggccgcgag

SEQ ID NO: 1751449 - RNA, 19 nt, Human herpesvirus 1
cauaaccgaccgcaguccc

SEQ ID NO: 1751450 - RNA, 19 nt, Human herpesvirus 1
cggcgcguguaccacaucc

SEQ ID NO: 1751451 - RNA, 20 nt, Human herpesvirus 1
cuccggagagacgauggcag

SEQ ID NO: 1751452 - RNA, 16 nt, Human herpesvirus 1
cggcaagauccucggg

SEQ ID NO: 1751453 - RNA, 19 nt, Human herpesvirus 1
cggggcccggcccugcugc

SEQ ID NO: 1751454 - RNA, 19 nt, Human herpesvirus 1
caccgguucguauccacaa

SEQ ID NO: 1751455 - RNA, 21 nt, Human herpesvirus 1
cgcuggguggucucuggccgc

SEQ ID NO: 1751456 - RNA, 14 nt, Human herpesvirus 1
cagcauggcgccac

SEQ ID NO: 1751457 - RNA, 22 nt, Human herpesvirus 1
ggcugccgccagguugggggcc

SEQ ID NO: 1751458 - RNA, 17 nt, Human herpesvirus 1
ccuuguuccgcuucccg

SEQ ID NO: 1751459 - RNA, 18 nt, Human herpesvirus 1
gucgccgugcuccuguga

SEQ ID NO: 1751460 - RNA, 13 nt, Human herpesvirus 1
uucuuccggccuc

SEQ ID NO: 1751461 - RNA, 15 nt, Human herpesvirus 1
ugccgucgcuagacc

SEQ ID NO: 1751462 - RNA, 23 nt, Human herpesvirus 1
cgucgccgcccugagcgcccucc

SEQ ID NO: 1751463 - RNA, 16 nt, Human herpesvirus 1
cacgacaaccccgguc

SEQ ID NO: 1751464 - RNA, 17 nt, Human herpesvirus 1
gcggucugucucgucuc

SEQ ID NO: 1751465 - RNA, 21 nt, Human herpesvirus 1
cagcaccuucaucgaccucaa

SEQ ID NO: 1751466 - RNA, 13 nt, Human herpesvirus 1
cuccaccacccaa

SEQ ID NO: 1751467 - RNA, 14 nt, Human herpesvirus 1
ugcugcgcggcgcc

SEQ ID NO: 1751468 - RNA, 13 nt, Human herpesvirus 1
cgugaccccaggg

SEQ ID NO: 1751469 - RNA, 21 nt, Human herpesvirus 1
ccuaucgcucgaccucuccac

SEQ ID NO: 1751470 - RNA, 21 nt, Human herpesvirus 1
gcccacccacuccuccccgcg

SEQ ID NO: 1751471 - RNA, 15 nt, Human herpesvirus 1
agcucgcggcccggg

SEQ ID NO: 1751472 - RNA, 18 nt, Human herpesvirus 1
cauaucgcuucccgaccu

SEQ ID NO: 1751473 - RNA, 19 nt, Human herpesvirus 1
gagcccccgccccuccccc

SEQ ID NO: 1751474 - RNA, 13 nt, Human herpesvirus 1
ccugggggcaccc

SEQ ID NO: 1751475 - RNA, 19 nt, Human herpesvirus 1
gccggggaccgcagccugg

SEQ ID NO: 1751476 - RNA, 13 nt, Human herpesvirus 1
gccacccccccgg

SEQ ID NO: 1751477 - RNA, 17 nt, Human herpesvirus 1
ucccgcccaccgcuggg

SEQ ID NO: 1751478 - RNA, 19 nt, Human herpesvirus 1
ggucucgcuuugccgggaa

SEQ ID NO: 1751479 - RNA, 23 nt, Human herpesvirus 1
caccggguacggcgucugggcca

SEQ ID NO: 1751480 - RNA, 15 nt, Human herpesvirus 1
uaccccaguccccgg

SEQ ID NO: 1751481 - RNA, 21 nt, Human herpesvirus 1
cgcaugaucuccggacccccg

SEQ ID NO: 1751482 - RNA, 22 nt, Human herpesvirus 1
ccaucgguccccucugggcccg

SEQ ID NO: 1751483 - RNA, 15 nt, Human herpesvirus 1
ugucuguuucuuggc

SEQ ID NO: 1751484 - RNA, 18 nt, Human herpesvirus 1
ccugaugcacgcccccgc

SEQ ID NO: 1751485 - RNA, 14 nt, Human herpesvirus 1
cccggcccugcugc

SEQ ID NO: 1751486 - RNA, 23 nt, Human herpesvirus 1
gccagccuguuuguccuggggau

SEQ ID NO: 1751487 - RNA, 19 nt, Human herpesvirus 1
ccuccucguccggcgcgcg

SEQ ID NO: 1751488 - RNA, 20 nt, Human herpesvirus 1
gcaucggaacacgccuaccg

SEQ ID NO: 1751489 - RNA, 21 nt, Human herpesvirus 1
cugccagcuaugggcccugcu

SEQ ID NO: 1751490 - RNA, 21 nt, Human herpesvirus 1
cggacccgcaucccccgucug

SEQ ID NO: 1751491 - RNA, 18 nt, Human herpesvirus 1
ccaccggaagcccaaccc

SEQ ID NO: 1751492 - RNA, 17 nt, Human herpesvirus 1
gcccucgccacacccgc

SEQ ID NO: 1751493 - RNA, 14 nt, Human herpesvirus 1
gcgcuuccccgcgg

SEQ ID NO: 1751494 - RNA, 20 nt, Human herpesvirus 1
uguuccccgggagccccggg

SEQ ID NO: 1751495 - RNA, 20 nt, Human herpesvirus 1
gcuggggcccccaggguccg

SEQ ID NO: 1751496 - RNA, 18 nt, Human herpesvirus 1
accgguaugccgcggcca

SEQ ID NO: 1751497 - RNA, 20 nt, Human herpesvirus 1
uccccaagaccccccuggcc

SEQ ID NO: 1751498 - RNA, 15 nt, Human herpesvirus 1
ccccgacccucccau

SEQ ID NO: 1751499 - RNA, 17 nt, Human herpesvirus 1
gccccaucccgaggccc

SEQ ID NO: 1751500 - RNA, 17 nt, Human herpesvirus 1
cgcgucuggccccggcg

SEQ ID NO: 1751501 - RNA, 20 nt, Human herpesvirus 1
gcgccuagccaaccuguggc

SEQ ID NO: 1751502 - RNA, 22 nt, Human herpesvirus 1
ggccaucgguccccucugggcc

SEQ ID NO: 1751503 - RNA, 13 nt, Human herpesvirus 1
guuguugcuggcg

SEQ ID NO: 1751504 - RNA, 22 nt, Human herpesvirus 1
caccccgcaauuugcacccagc

SEQ ID NO: 1751505 - RNA, 12 nt, Human herpesvirus 1
cauggaaggaac

SEQ ID NO: 1751506 - RNA, 17 nt, Human herpesvirus 1
cgccugcccccuggacg

SEQ ID NO: 1751507 - RNA, 16 nt, Human herpesvirus 1
ggccuggucagaggcc

SEQ ID NO: 1751508 - RNA, 13 nt, Human herpesvirus 1
auggcgacacacc

SEQ ID NO: 1751509 - RNA, 22 nt, Human herpesvirus 1
gugaacacggcgaaugcagcgc

SEQ ID NO: 1751510 - RNA, 20 nt, Human herpesvirus 1
ccacaugcggaaagcaagaa

SEQ ID NO: 1751511 - RNA, 23 nt, Human herpesvirus 1
uccaccacccaaccccaacucca

SEQ ID NO: 1751512 - RNA, 18 nt, Human herpesvirus 1
gccagacccaacccccgg

SEQ ID NO: 1751513 - RNA, 21 nt, Human herpesvirus 1
cguccuuugggcgggaggaag

SEQ ID NO: 1751514 - RNA, 17 nt, Human herpesvirus 1
ccaccgggaagcagggc

SEQ ID NO: 1751515 - RNA, 20 nt, Human herpesvirus 1
gcgcgcuuguccccgaacaa

SEQ ID NO: 1751516 - RNA, 19 nt, Human herpesvirus 1
gacccagaccggcaccacc

SEQ ID NO: 1751517 - RNA, 14 nt, Human herpesvirus 1
gcgucugggccacc

SEQ ID NO: 1751518 - RNA, 23 nt, Human herpesvirus 1
cgaggacaccccucguggccccg

SEQ ID NO: 1751519 - RNA, 20 nt, Human herpesvirus 1
cgcauccccccgucagccug

SEQ ID NO: 1751520 - RNA, 15 nt, Human herpesvirus 1
ucgggcgcugggugg

SEQ ID NO: 1751521 - RNA, 22 nt, Human herpesvirus 1
cgcacgcauacgggcggccacc

SEQ ID NO: 1751522 - RNA, 15 nt, Human herpesvirus 1
cuccgaaagccacca

SEQ ID NO: 1751523 - RNA, 15 nt, Human herpesvirus 1
gcgacgcacacaccc

SEQ ID NO: 1751524 - RNA, 14 nt, Human herpesvirus 1
gccugccugcggcu

SEQ ID NO: 1751525 - RNA, 15 nt, Human herpesvirus 1
cguuccucacugccu

SEQ ID NO: 1751526 - RNA, 16 nt, Human herpesvirus 1
gcccagcagcucccca

SEQ ID NO: 1751527 - RNA, 20 nt, Human herpesvirus 1
ccaggaaauccguggccccg

SEQ ID NO: 1751528 - RNA, 11 nt, Human herpesvirus 1
cgauggcagga

SEQ ID NO: 1751529 - RNA, 20 nt, Human herpesvirus 1
ccaaacucccgacaccacca

SEQ ID NO: 1751530 - RNA, 17 nt, Human herpesvirus 1
cccccggccgccgcgga

SEQ ID NO: 1751531 - RNA, 22 nt, Human herpesvirus 1
accgccggcggcgacgugcccc

SEQ ID NO: 1751532 - RNA, 13 nt, Human herpesvirus 1
gccauggagcgca

SEQ ID NO: 1751533 - RNA, 19 nt, Human herpesvirus 1
gaauaaaccgguauuauuu

SEQ ID NO: 1751534 - RNA, 22 nt, Human herpesvirus 1
acccggggggcugcgaguccug

SEQ ID NO: 1751535 - RNA, 22 nt, Human herpesvirus 1
gugggggaaccuagggcggggc

SEQ ID NO: 1751536 - RNA, 19 nt, Human herpesvirus 1
cgccgcgcguugggcccug

SEQ ID NO: 1751537 - RNA, 20 nt, Human herpesvirus 1
gcaagaggucgucgggggac

SEQ ID NO: 1751538 - RNA, 22 nt, Human herpesvirus 1
ccuggagcucaaucuggcccaa

SEQ ID NO: 1751539 - RNA, 14 nt, Human herpesvirus 1
cuggccgggagcac

SEQ ID NO: 1751540 - RNA, 17 nt, Human herpesvirus 1
ccagcaucgcgcgcguc

SEQ ID NO: 1751541 - RNA, 20 nt, Human herpesvirus 1
uggcgcgucguucgggcgga

SEQ ID NO: 1751542 - RNA, 23 nt, Human herpesvirus 1
cacgcgccgccgacucccggcuu

SEQ ID NO: 1751543 - RNA, 19 nt, Human herpesvirus 1
ggggccauguugggccgcc

SEQ ID NO: 1751544 - RNA, 20 nt, Human herpesvirus 1
cucugggggccugucccauc

SEQ ID NO: 1751545 - RNA, 18 nt, Human herpesvirus 1
guuccgggaugccgugcc

SEQ ID NO: 1751546 - RNA, 22 nt, Human herpesvirus 1
cgcgcccacuacaccagccaau

SEQ ID NO: 1751547 - RNA, 18 nt, Human herpesvirus 1
cccucuggacgcccgggc

SEQ ID NO: 1751548 - RNA, 18 nt, Human herpesvirus 1
cccggccaccccgaacaa

SEQ ID NO: 1751549 - RNA, 13 nt, Human herpesvirus 1
aguuuauccugga

SEQ ID NO: 1751550 - RNA, 17 nt, Human herpesvirus 1
cccguccucgcccgcca

SEQ ID NO: 1751551 - RNA, 23 nt, Human herpesvirus 1
cgcgguacgccccaccggcacca

SEQ ID NO: 1751552 - RNA, 17 nt, Human herpesvirus 1
caucccaggaucacacc

SEQ ID NO: 1751553 - RNA, 19 nt, Human herpesvirus 1
cgccgcgacccgcacgagc

SEQ ID NO: 1751554 - RNA, 16 nt, Human herpesvirus 1
cgcccgccccucgcca

SEQ ID NO: 1751555 - RNA, 15 nt, Human herpesvirus 1
ccagagaccccaggg

SEQ ID NO: 1751556 - RNA, 16 nt, Human herpesvirus 1
cgcgcccacuacacca

SEQ ID NO: 1751557 - RNA, 22 nt, Human herpesvirus 1
guggcucucgagaugagccaga

SEQ ID NO: 1751558 - RNA, 14 nt, Human herpesvirus 1
gcgccacacucacc

SEQ ID NO: 1751559 - RNA, 15 nt, Human herpesvirus 1
acacaccagcggguc

SEQ ID NO: 1751560 - RNA, 22 nt, Human herpesvirus 1
ucccaccgccaucagccuuacc

SEQ ID NO: 1751561 - RNA, 16 nt, Human herpesvirus 1
cugcgggucaccugcc

SEQ ID NO: 1751562 - RNA, 14 nt, Human herpesvirus 1
cugccucccccgcc

SEQ ID NO: 1751563 - RNA, 23 nt, Human herpesvirus 1
ccccgucuggguuuuccccuccc

SEQ ID NO: 1751564 - RNA, 13 nt, Human herpesvirus 1
guuccgccuggag

SEQ ID NO: 1751565 - RNA, 17 nt, Human herpesvirus 1
ggcaccuccccagcggc

SEQ ID NO: 1751566 - RNA, 16 nt, Human herpesvirus 1
gugcccacgucgcccc

SEQ ID NO: 1751567 - RNA, 19 nt, Human herpesvirus 1
augauccucaucgagggca

SEQ ID NO: 1751568 - RNA, 17 nt, Human herpesvirus 1
agagucgacgaccuggg

SEQ ID NO: 1751569 - RNA, 14 nt, Human herpesvirus 1
gcggcgcgagcucc

SEQ ID NO: 1751570 - RNA, 18 nt, Human herpesvirus 1
ggucucuggccgcgccca

SEQ ID NO: 1751571 - RNA, 13 nt, Human herpesvirus 1
ccacgccucgggc

SEQ ID NO: 1751572 - RNA, 19 nt, Human herpesvirus 1
ccagaggcgcgcgcaccuc

SEQ ID NO: 1751573 - RNA, 18 nt, Human herpesvirus 1
cacaucaaggugggccag

SEQ ID NO: 1751574 - RNA, 20 nt, Human herpesvirus 1
cugcuccgcuaaaagaccgc

SEQ ID NO: 1751575 - RNA, 20 nt, Human herpesvirus 1
accccagcgaccccacggcc

SEQ ID NO: 1751576 - RNA, 16 nt, Human herpesvirus 1
ccauggaccccagcga

SEQ ID NO: 1751577 - RNA, 21 nt, Human herpesvirus 1
cuuggagccagcccgcccuca

SEQ ID NO: 1751578 - RNA, 24 nt, Human herpesvirus 1
ucgcgggacccgacaggcgaccgc

SEQ ID NO: 1751579 - RNA, 19 nt, Human herpesvirus 1
gaaaugcccccccccccuu

SEQ ID NO: 1751580 - RNA, 17 nt, Human herpesvirus 1
gugggcgacugcgaccc

SEQ ID NO: 1751581 - RNA, 22 nt, Human herpesvirus 1
caucagcuguggacccgagcuc

SEQ ID NO: 1751582 - RNA, 21 nt, Human herpesvirus 1
cgcccguguucgagggccaag

SEQ ID NO: 1751583 - RNA, 20 nt, Human herpesvirus 1
ccuucugcgggucaccugcc

SEQ ID NO: 1751584 - RNA, 18 nt, Human herpesvirus 1
acacggccguugucuccc

SEQ ID NO: 1751585 - RNA, 15 nt, Human herpesvirus 1
ccacccccgcccggg

SEQ ID NO: 1751586 - RNA, 19 nt, Human herpesvirus 1
ugccgcccguugcagggcc

SEQ ID NO: 1751587 - RNA, 22 nt, Human herpesvirus 1
ggcagucuccuggcagcccugg

SEQ ID NO: 1751588 - RNA, 13 nt, Human herpesvirus 1
gucucccagggag

SEQ ID NO: 1751589 - RNA, 16 nt, Human herpesvirus 1
gcguagagcuguggca

SEQ ID NO: 1751590 - RNA, 12 nt, Human herpesvirus 1
ccacuguuuucc

SEQ ID NO: 1751591 - RNA, 18 nt, Human herpesvirus 1
uugccgugguccugugga

SEQ ID NO: 1751592 - RNA, 20 nt, Human herpesvirus 1
ccgcucggcggcagcccgga

SEQ ID NO: 1751593 - RNA, 20 nt, Human herpesvirus 1
uguaucgcaucuuuccugug

SEQ ID NO: 1751594 - RNA, 18 nt, Human herpesvirus 1
aaaugguguccgcggucc

SEQ ID NO: 1751595 - RNA, 21 nt, Human herpesvirus 1
gggccccgggacaccccccau

SEQ ID NO: 1751596 - RNA, 19 nt, Human herpesvirus 1
ggucggcgagcuggauggc

SEQ ID NO: 1751597 - RNA, 21 nt, Human herpesvirus 1
ccugcgguccggagccgcgcg

SEQ ID NO: 1751598 - RNA, 21 nt, Human herpesvirus 1
ggcagucuccuggcagcccug

SEQ ID NO: 1751599 - RNA, 14 nt, Human herpesvirus 1
aggucccaccugac

SEQ ID NO: 1751600 - RNA, 17 nt, Human herpesvirus 1
aucuguguucccuggcc

SEQ ID NO: 1751601 - RNA, 19 nt, Human herpesvirus 1
gucccggcucuccgauccc

SEQ ID NO: 1751602 - RNA, 14 nt, Human herpesvirus 1
ggcgcuuaccgcca

SEQ ID NO: 1751603 - RNA, 16 nt, Human herpesvirus 1
gucuccaagcuuuccg

SEQ ID NO: 1751604 - RNA, 16 nt, Human herpesvirus 1
cggcccgggggacuca

SEQ ID NO: 1751605 - RNA, 16 nt, Human herpesvirus 1
cccugaucccccgcgc

SEQ ID NO: 1751606 - RNA, 19 nt, Human herpesvirus 1
ggccaaguuggcccccgga

SEQ ID NO: 1751607 - RNA, 16 nt, Human herpesvirus 1
uucaccccgaagcccc

SEQ ID NO: 1751608 - RNA, 21 nt, Human herpesvirus 1
cgccgagcugcgaucgcuggu

SEQ ID NO: 1751609 - RNA, 15 nt, Human herpesvirus 1
uccccgauggcccuc

SEQ ID NO: 1751610 - RNA, 14 nt, Human herpesvirus 1
cauaccgaccacac

SEQ ID NO: 1751611 - RNA, 20 nt, Human herpesvirus 1
agcaucgaccacgcccuucc

SEQ ID NO: 1751612 - RNA, 23 nt, Human herpesvirus 1
uguauguccccaaaauaaaagac

SEQ ID NO: 1751613 - RNA, 16 nt, Human herpesvirus 1
gcaccgagccaagggc

SEQ ID NO: 1751614 - RNA, 15 nt, Human herpesvirus 1
cgacaccaccagcug

SEQ ID NO: 1751615 - RNA, 22 nt, Human herpesvirus 1
gggcggggacggggaggcgggc

SEQ ID NO: 1751616 - RNA, 20 nt, Human herpesvirus 1
gcccggcccauugggcggga

SEQ ID NO: 1751617 - RNA, 19 nt, Human herpesvirus 1
caaccccggucucccaggg

SEQ ID NO: 1751618 - RNA, 12 nt, Human herpesvirus 1
cagggaccuccu

SEQ ID NO: 1751619 - RNA, 19 nt, Human herpesvirus 1
uagaaacucauuaaugggc

SEQ ID NO: 1751620 - RNA, 22 nt, Human herpesvirus 1
gcugcgcggcguccgcgccccu

SEQ ID NO: 1751621 - RNA, 15 nt, Human herpesvirus 1
ggggacggcggggca

SEQ ID NO: 1751622 - RNA, 22 nt, Human herpesvirus 1
gagcaaccccaugaaggcccug

SEQ ID NO: 1751623 - RNA, 14 nt, Human herpesvirus 1
cuaagcgucccugg

SEQ ID NO: 1751624 - RNA, 19 nt, Human herpesvirus 1
acggcgucugggccaccga

SEQ ID NO: 1751625 - RNA, 21 nt, Human herpesvirus 1
ucacggcuaccuggccccagu

SEQ ID NO: 1751626 - RNA, 16 nt, Human herpesvirus 1
gaccugcaccgaucgc

SEQ ID NO: 1751627 - RNA, 21 nt, Human herpesvirus 1
cucccccuccgcaucccagga

SEQ ID NO: 1751628 - RNA, 16 nt, Human herpesvirus 1
gugccuuuguuuccca

SEQ ID NO: 1751629 - RNA, 17 nt, Human herpesvirus 1
cuuaccaucccccggcc

SEQ ID NO: 1751630 - RNA, 14 nt, Human herpesvirus 1
ccuccccgcacaga

SEQ ID NO: 1751631 - RNA, 20 nt, Human herpesvirus 1
cccucccccuccgcauccca

SEQ ID NO: 1751632 - RNA, 19 nt, Human herpesvirus 1
ucccaccaaacuggcacau

SEQ ID NO: 1751633 - RNA, 14 nt, Human herpesvirus 1
caggcgggccuacc

SEQ ID NO: 1751634 - RNA, 19 nt, Human herpesvirus 1
cugcgccuugggcccgggg

SEQ ID NO: 1751635 - RNA, 14 nt, Human herpesvirus 1
cgggagccccggac

SEQ ID NO: 1751636 - RNA, 17 nt, Human herpesvirus 1
ucgaguucgccaggcug

SEQ ID NO: 1751637 - RNA, 13 nt, Human herpesvirus 1
cguacugcccauu

SEQ ID NO: 1751638 - RNA, 22 nt, Human herpesvirus 1
auggaguccacgguaggcccag

SEQ ID NO: 1751639 - RNA, 14 nt, Human herpesvirus 1
ggauccgaccccca

SEQ ID NO: 1751640 - RNA, 13 nt, Human herpesvirus 1
acccaccgggccc

SEQ ID NO: 1751641 - RNA, 22 nt, Human herpesvirus 1
gcccccggcauggcgcagcugg

SEQ ID NO: 1751642 - RNA, 11 nt, Human herpesvirus 1
ccgcgccaggc

SEQ ID NO: 1751643 - RNA, 17 nt, Human herpesvirus 1
cacaccaccgaccucaa

SEQ ID NO: 1751644 - RNA, 15 nt, Human herpesvirus 1
cucugggcgggccgu

SEQ ID NO: 1751645 - RNA, 20 nt, Human herpesvirus 1
caauguuuuuauuggucaaa

SEQ ID NO: 1751646 - RNA, 23 nt, Human herpesvirus 1
cugcggcucaacgagcuccuggc

SEQ ID NO: 1751647 - RNA, 24 nt, Human herpesvirus 1
cauugccgcguugguccucgugcc

SEQ ID NO: 1751648 - RNA, 15 nt, Human herpesvirus 1
cagaucggcgccgcg

SEQ ID NO: 1751649 - RNA, 15 nt, Human herpesvirus 1
cugcugcggccaguc

SEQ ID NO: 1751650 - RNA, 21 nt, Human herpesvirus 1
acccgcaacgcgcuggggcug

SEQ ID NO: 1751651 - RNA, 16 nt, Human herpesvirus 1
acgucgcgccugggug

SEQ ID NO: 1751652 - RNA, 23 nt, Human herpesvirus 1
gacucagggcucuacccucugga

SEQ ID NO: 1751653 - RNA, 16 nt, Human herpesvirus 1
gcucgucgccuggcug

SEQ ID NO: 1751654 - RNA, 15 nt, Human herpesvirus 1
guacggggccgggag

SEQ ID NO: 1751655 - RNA, 21 nt, Human herpesvirus 1
gcgcucgcucucggugccccu

SEQ ID NO: 1751656 - RNA, 20 nt, Human herpesvirus 1
cgcguguuccccgggagccc

SEQ ID NO: 1751657 - RNA, 11 nt, Human herpesvirus 1
ccaccgggccu

SEQ ID NO: 1751658 - RNA, 16 nt, Human herpesvirus 1
ccccccguggacccca

SEQ ID NO: 1751659 - RNA, 18 nt, Human herpesvirus 1
gcuggcacaccaccgacc

SEQ ID NO: 1751660 - RNA, 16 nt, Human herpesvirus 1
cgucccacgcucuccc

SEQ ID NO: 1751661 - RNA, 15 nt, Human herpesvirus 1
cggcacgccuggggu

SEQ ID NO: 1751662 - RNA, 14 nt, Human herpesvirus 1
gcacuguggcucuc

SEQ ID NO: 1751663 - RNA, 13 nt, Human herpesvirus 1
accagcguccgcc

SEQ ID NO: 1751664 - RNA, 21 nt, Human herpesvirus 1
agacccgggcgaugagccaac

SEQ ID NO: 1751665 - RNA, 16 nt, Human herpesvirus 1
gcacgggcccaaggcc

SEQ ID NO: 1751666 - RNA, 16 nt, Human herpesvirus 1
ggcccgcguuuggccu

SEQ ID NO: 1751667 - RNA, 21 nt, Human herpesvirus 1
ugaacgcaacggcgggagcug

SEQ ID NO: 1751668 - RNA, 15 nt, Human herpesvirus 1
aucccccgcgcggcu

SEQ ID NO: 1751669 - RNA, 14 nt, Human herpesvirus 1
agccccggacccca

SEQ ID NO: 1751670 - RNA, 17 nt, Human herpesvirus 1
gaggggcugggggagcg

SEQ ID NO: 1751671 - RNA, 15 nt, Human herpesvirus 1
gaacgcagccccgcu

SEQ ID NO: 1751672 - RNA, 19 nt, Human herpesvirus 1
gaccgcguguacgggcugu

SEQ ID NO: 1751673 - RNA, 12 nt, Human herpesvirus 1
guccaccaaagu

SEQ ID NO: 1751674 - RNA, 19 nt, Human herpesvirus 1
cgcgcaccuguuccgccug

SEQ ID NO: 1751675 - RNA, 13 nt, Human herpesvirus 1
gccccgacccccu

SEQ ID NO: 1751676 - RNA, 17 nt, Human herpesvirus 1
accccagggaccuccug

SEQ ID NO: 1751677 - RNA, 19 nt, Human herpesvirus 1
ugccggucggcgggcccgc

SEQ ID NO: 1751678 - RNA, 18 nt, Human herpesvirus 1
cuggugcugucugacaca

SEQ ID NO: 1751679 - RNA, 17 nt, Human herpesvirus 1
gagacccccaacgccac

SEQ ID NO: 1751680 - RNA, 17 nt, Human herpesvirus 1
gcuggguggucucuggc

SEQ ID NO: 1751681 - RNA, 22 nt, Human herpesvirus 1
agcauggcgccacaccacgcca

SEQ ID NO: 1751682 - RNA, 14 nt, Human herpesvirus 1
caacaacucccccg

SEQ ID NO: 1751683 - RNA, 18 nt, Human herpesvirus 1
cguggccgguaccaucaa

SEQ ID NO: 1751684 - RNA, 17 nt, Human herpesvirus 1
cggugacgccgacgagg

SEQ ID NO: 1751685 - RNA, 13 nt, Human herpesvirus 1
gagcucccagaga

SEQ ID NO: 1751686 - RNA, 14 nt, Human herpesvirus 1
cgggcgacgcacac

SEQ ID NO: 1751687 - RNA, 18 nt, Human herpesvirus 1
ucgaaacuuaacacacca

SEQ ID NO: 1751688 - RNA, 14 nt, Human herpesvirus 1
cggccccugggccc

SEQ ID NO: 1751689 - RNA, 17 nt, Human herpesvirus 1
ugacacccuaccccagu

SEQ ID NO: 1751690 - RNA, 18 nt, Human herpesvirus 1
aggggcgcuuaccgccac

SEQ ID NO: 1751691 - RNA, 12 nt, Human herpesvirus 1
guccuguggagc

SEQ ID NO: 1751692 - RNA, 19 nt, Human herpesvirus 1
acgcccgcaaacaggagcu

SEQ ID NO: 1751693 - RNA, 24 nt, Human herpesvirus 1
ucccgcugcgcauccccccgucag

SEQ ID NO: 1751694 - RNA, 17 nt, Human herpesvirus 1
gcauggggggggggcgg

SEQ ID NO: 1751695 - RNA, 18 nt, Human herpesvirus 1
cggccccagcccucuccc

SEQ ID NO: 1751696 - RNA, 13 nt, Human herpesvirus 1
gcccgugcugccg

SEQ ID NO: 1751697 - RNA, 18 nt, Human herpesvirus 1
cagucgcccgaagacacc

SEQ ID NO: 1751698 - RNA, 21 nt, Human herpesvirus 1
aaacuguccugucuuggggcc

SEQ ID NO: 1751699 - RNA, 15 nt, Human herpesvirus 1
cacaugcggaaagca

SEQ ID NO: 1751700 - RNA, 21 nt, Human herpesvirus 1
ccagagguguucacgcaccuc

SEQ ID NO: 1751701 - RNA, 13 nt, Human herpesvirus 1
cgaccaccaccuc

SEQ ID NO: 1751702 - RNA, 17 nt, Human herpesvirus 1
ccgucuggguuuucccc

SEQ ID NO: 1751703 - RNA, 15 nt, Human herpesvirus 1
cggccgugggcgccu

SEQ ID NO: 1751704 - RNA, 22 nt, Human herpesvirus 1
uucccacgcgaaucgucgccug

SEQ ID NO: 1751705 - RNA, 14 nt, Human herpesvirus 1
gaucguccaccucc

SEQ ID NO: 1751706 - RNA, 20 nt, Human herpesvirus 1
ggcggauuuggggcgcuccu

SEQ ID NO: 1751707 - RNA, 16 nt, Human herpesvirus 1
uucuccggggcccggc

SEQ ID NO: 1751708 - RNA, 23 nt, Human herpesvirus 1
ggcuccuguaaguacgcccuccc

SEQ ID NO: 1751709 - RNA, 19 nt, Human herpesvirus 1
cagcaccguuaccaccgau

SEQ ID NO: 1751710 - RNA, 15 nt, Human herpesvirus 1
accgcagucccugag

SEQ ID NO: 1751711 - RNA, 17 nt, Human herpesvirus 1
cucgccagcgacccgca

SEQ ID NO: 1751712 - RNA, 16 nt, Human herpesvirus 1
gugggguccucaugga

SEQ ID NO: 1751713 - RNA, 17 nt, Human herpesvirus 1
gcucccgggagcuccgc

SEQ ID NO: 1751714 - RNA, 15 nt, Human herpesvirus 1
gcggauuuggggcgc

SEQ ID NO: 1751715 - RNA, 20 nt, Human herpesvirus 1
guccacggccacuggccggg

SEQ ID NO: 1751716 - RNA, 19 nt, Human herpesvirus 1
caucugaagccguccgacc

SEQ ID NO: 1751717 - RNA, 21 nt, Human herpesvirus 1
agacggcauucgggccugccu

SEQ ID NO: 1751718 - RNA, 13 nt, Human herpesvirus 1
cagcugagccgcg

SEQ ID NO: 1751719 - RNA, 16 nt, Human herpesvirus 1
cgaccacgggcuguca

SEQ ID NO: 1751720 - RNA, 15 nt, Human herpesvirus 1
ccgccgacgaccugg

SEQ ID NO: 1751721 - RNA, 22 nt, Human herpesvirus 1
cggcucaacgagcuccuggccu

SEQ ID NO: 1751722 - RNA, 21 nt, Human herpesvirus 1
gauggcacaccgguccccgga

SEQ ID NO: 1751723 - RNA, 17 nt, Human herpesvirus 1
gguguccgagcccaccg

SEQ ID NO: 1751724 - RNA, 20 nt, Human herpesvirus 1
uccagggagaaaccccagca

SEQ ID NO: 1751725 - RNA, 13 nt, Human herpesvirus 1
gcaaacaggagcu

SEQ ID NO: 1751726 - RNA, 13 nt, Human herpesvirus 1
ggccccugggccc

SEQ ID NO: 1751727 - RNA, 18 nt, Human herpesvirus 1
uggagccugagcuggcga

SEQ ID NO: 1751728 - RNA, 20 nt, Human herpesvirus 1
cgccccccguguuugugggg

SEQ ID NO: 1751729 - RNA, 19 nt, Human herpesvirus 1
gaccuauguguuucagaua

SEQ ID NO: 1751730 - RNA, 16 nt, Human herpesvirus 1
auggcugcccccccgc

SEQ ID NO: 1751731 - RNA, 15 nt, Human herpesvirus 1
cauaccgaccacacc

SEQ ID NO: 1751732 - RNA, 17 nt, Human herpesvirus 1
cgugcacagccuggccg

SEQ ID NO: 1751733 - RNA, 12 nt, Human herpesvirus 1
ggcgccgcgaga

SEQ ID NO: 1751734 - RNA, 14 nt, Human herpesvirus 1
gcccaccgcugggc

SEQ ID NO: 1751735 - RNA, 16 nt, Human herpesvirus 1
gccgcaggacccagca

SEQ ID NO: 1751736 - RNA, 14 nt, Human herpesvirus 1
gcggcagucuccug

SEQ ID NO: 1751737 - RNA, 20 nt, Human herpesvirus 1
ggcgccgcgagauggccgcc

SEQ ID NO: 1751738 - RNA, 20 nt, Human herpesvirus 1
auaaauuuuacaaacagauu

SEQ ID NO: 1751739 - RNA, 13 nt, Human herpesvirus 1
cuggcuggccgcu

SEQ ID NO: 1751740 - RNA, 17 nt, Human herpesvirus 1
ccgcgacccccgggcua

SEQ ID NO: 1751741 - RNA, 23 nt, Human herpesvirus 1
uggucguccgcggaccggcggcg

SEQ ID NO: 1751742 - RNA, 15 nt, Human herpesvirus 1
cgcuucauccccgag

SEQ ID NO: 1751743 - RNA, 22 nt, Human herpesvirus 1
caugcgggcucggcuccccgcc

SEQ ID NO: 1751744 - RNA, 20 nt, Human herpesvirus 1
augcgggauccucggccagc

SEQ ID NO: 1751745 - RNA, 17 nt, Human herpesvirus 1
ggacgggcucgccagcg

SEQ ID NO: 1751746 - RNA, 15 nt, Human herpesvirus 1
cucccagagacccca

SEQ ID NO: 1751747 - RNA, 15 nt, Human herpesvirus 1
cgugggccucaccca

SEQ ID NO: 1751748 - RNA, 20 nt, Human herpesvirus 1
ccugcuuauucucggggagc

SEQ ID NO: 1751749 - RNA, 14 nt, Human herpesvirus 1
ggccucccccggac

SEQ ID NO: 1751750 - RNA, 22 nt, Human herpesvirus 1
cugccgucgcuagaccacgccc

SEQ ID NO: 1751751 - RNA, 20 nt, Human herpesvirus 1
cgcgguggacagccaggagc

SEQ ID NO: 1751752 - RNA, 14 nt, Human herpesvirus 1
gguagcgggggacg

SEQ ID NO: 1751753 - RNA, 13 nt, Human herpesvirus 1
caccgcccacaga

SEQ ID NO: 1751754 - RNA, 20 nt, Human herpesvirus 1
aggaugccagccagggcggc

SEQ ID NO: 1751755 - RNA, 16 nt, Human herpesvirus 1
ucaccaugcuggagga

SEQ ID NO: 1751756 - RNA, 11 nt, Human herpesvirus 1
gucauaugcaa

SEQ ID NO: 1751757 - RNA, 12 nt, Human herpesvirus 1
gcaucccaggau

SEQ ID NO: 1751758 - RNA, 17 nt, Human herpesvirus 1
guccccaaaauaaaaga

SEQ ID NO: 1751759 - RNA, 15 nt, Human herpesvirus 1
cagggagccccgguc

SEQ ID NO: 1751760 - RNA, 17 nt, Human herpesvirus 1
aacgcguccguggagcg

SEQ ID NO: 1751761 - RNA, 16 nt, Human herpesvirus 1
cuuuaacuacauuaaa

SEQ ID NO: 1751762 - RNA, 23 nt, Human herpesvirus 1
ccuccggagcgugacgcaccccc

SEQ ID NO: 1751763 - RNA, 15 nt, Human herpesvirus 1
aggaccgcgcccccg

SEQ ID NO: 1751764 - RNA, 14 nt, Human herpesvirus 1
gucgcccuccacca

SEQ ID NO: 1751765 - RNA, 22 nt, Human herpesvirus 1
ucaccccgaagccccggcccug

SEQ ID NO: 1751766 - RNA, 19 nt, Human herpesvirus 1
cugggcgagguggagcugc

SEQ ID NO: 1751767 - RNA, 18 nt, Human herpesvirus 1
cuggucccccggggaccu

SEQ ID NO: 1751768 - RNA, 17 nt, Human herpesvirus 1
uggccagcggcccgggg

SEQ ID NO: 1751769 - RNA, 17 nt, Human herpesvirus 1
caccgucauccacaccu

SEQ ID NO: 1751770 - RNA, 12 nt, Human herpesvirus 1
ucuuugugccug

SEQ ID NO: 1751771 - RNA, 12 nt, Human herpesvirus 1
ccccccagccuc

SEQ ID NO: 1751772 - RNA, 13 nt, Human herpesvirus 1
cuccccgggagcc

SEQ ID NO: 1751773 - RNA, 14 nt, Human herpesvirus 1
cgccgcgggccacg

SEQ ID NO: 1751774 - RNA, 19 nt, Human herpesvirus 1
gucgaccgcgcccucgcca

SEQ ID NO: 1751775 - RNA, 14 nt, Human herpesvirus 1
ggcggcagcccgga

SEQ ID NO: 1751776 - RNA, 17 nt, Human herpesvirus 1
ucagccagacgccgggu

SEQ ID NO: 1751777 - RNA, 17 nt, Human herpesvirus 1
ggacagcaaccagaagc

SEQ ID NO: 1751778 - RNA, 21 nt, Human herpesvirus 1
auggcacaccgguccccggag

SEQ ID NO: 1751779 - RNA, 14 nt, Human herpesvirus 1
cgcucccgccuucc

SEQ ID NO: 1751780 - RNA, 15 nt, Human herpesvirus 1
guucgagcagccgcg

SEQ ID NO: 1751781 - RNA, 17 nt, Human herpesvirus 1
cucuggggucccugucg

SEQ ID NO: 1751782 - RNA, 12 nt, Human herpesvirus 1
gggaccuccugg

SEQ ID NO: 1751783 - RNA, 15 nt, Human herpesvirus 1
ccgggacgaggccgu

SEQ ID NO: 1751784 - RNA, 12 nt, Human herpesvirus 1
ccccccgcgcuc

SEQ ID NO: 1751785 - RNA, 12 nt, Human herpesvirus 1
aguugccccacc

SEQ ID NO: 1751786 - RNA, 16 nt, Human herpesvirus 1
cccaggaucacaccgg

SEQ ID NO: 1751787 - RNA, 12 nt, Human herpesvirus 1
uucccgaaacuu

SEQ ID NO: 1751788 - RNA, 14 nt, Human herpesvirus 1
cggcuacaggggcc

SEQ ID NO: 1751789 - RNA, 19 nt, Human herpesvirus 1
ggccgccacgcgcccgagu

SEQ ID NO: 1751790 - RNA, 12 nt, Human herpesvirus 1
cgcgccaucugg

SEQ ID NO: 1751791 - RNA, 11 nt, Human herpesvirus 1
ggccugguggc

SEQ ID NO: 1751792 - RNA, 14 nt, Human herpesvirus 1
aacacaaacaucug

SEQ ID NO: 1751793 - RNA, 22 nt, Human herpesvirus 1
cacgcacuugcggcaagacccg

SEQ ID NO: 1751794 - RNA, 12 nt, Human herpesvirus 1
uagagacagccg

SEQ ID NO: 1751795 - RNA, 16 nt, Human herpesvirus 1
gccccugggccccggg

SEQ ID NO: 1751796 - RNA, 22 nt, Human herpesvirus 1
gcucggccuauggcuccugcga

SEQ ID NO: 1751797 - RNA, 14 nt, Human herpesvirus 1
ccccggggcgggug

SEQ ID NO: 1751798 - RNA, 21 nt, Human herpesvirus 1
gcgcgucgacgucgcgccugg

SEQ ID NO: 1751799 - RNA, 18 nt, Human herpesvirus 1
gagaguuugaucguggac

SEQ ID NO: 1751800 - RNA, 13 nt, Human herpesvirus 1
acgacggccucgu

SEQ ID NO: 1751801 - RNA, 21 nt, Human herpesvirus 1
cgggcgcuugcgcaccuggug

SEQ ID NO: 1751802 - RNA, 18 nt, Human herpesvirus 1
ccucccccguagaucucu

SEQ ID NO: 1751803 - RNA, 17 nt, Human herpesvirus 1
ccgaccauccgccggca

SEQ ID NO: 1751804 - RNA, 17 nt, Human herpesvirus 1
cagacgagcgcgcuugu

SEQ ID NO: 1751805 - RNA, 16 nt, Human herpesvirus 1
cgcaccaucccggguu

SEQ ID NO: 1751806 - RNA, 16 nt, Human herpesvirus 1
cuaugacggcaauaaa

SEQ ID NO: 1751807 - RNA, 21 nt, Human herpesvirus 1
ggcguaccaaacaaacaaacc

SEQ ID NO: 1751808 - RNA, 19 nt, Human herpesvirus 1
ggccgcaggacccagcaag

SEQ ID NO: 1751809 - RNA, 16 nt, Human herpesvirus 1
ccgcaacuucccaccc

SEQ ID NO: 1751810 - RNA, 13 nt, Human herpesvirus 1
cgccacacccgcg

SEQ ID NO: 1751811 - RNA, 19 nt, Human herpesvirus 1
acacaacggcaugccucug

SEQ ID NO: 1751812 - RNA, 19 nt, Human herpesvirus 1
caccaucccggguuaaugu

SEQ ID NO: 1751813 - RNA, 14 nt, Human herpesvirus 1
cgggggccuggugg

SEQ ID NO: 1751814 - RNA, 23 nt, Human herpesvirus 1
agucccuccaaucgccgguuccu

SEQ ID NO: 1751815 - RNA, 15 nt, Human herpesvirus 1
ggucuaucacacccg

SEQ ID NO: 1751816 - RNA, 19 nt, Human herpesvirus 1
gggguccggcacggaccca

SEQ ID NO: 1751817 - RNA, 19 nt, Human herpesvirus 1
aucccaccaaacuggcaca

SEQ ID NO: 1751818 - RNA, 14 nt, Human herpesvirus 1
aggcgccugccccg

SEQ ID NO: 1751819 - RNA, 20 nt, Human herpesvirus 1
cggcgggugucugcucccca

SEQ ID NO: 1751820 - RNA, 17 nt, Human herpesvirus 1
cggaaggggacacgggc

SEQ ID NO: 1751821 - RNA, 21 nt, Human herpesvirus 1
ggugccugacgccugccaacc

SEQ ID NO: 1751822 - RNA, 20 nt, Human herpesvirus 1
uggcuggguuuuuggcccug

SEQ ID NO: 1751823 - RNA, 17 nt, Human herpesvirus 1
gcagccgaugccccggg

SEQ ID NO: 1751824 - RNA, 14 nt, Human herpesvirus 1
ugucucgucuccuc

SEQ ID NO: 1751825 - RNA, 15 nt, Human herpesvirus 1
gccgcgguacagauc

SEQ ID NO: 1751826 - RNA, 21 nt, Human herpesvirus 1
accgacagcacucacagcccc

SEQ ID NO: 1751827 - RNA, 15 nt, Human herpesvirus 1
acccagccuuuaacu

SEQ ID NO: 1751828 - RNA, 21 nt, Human herpesvirus 1
cccauaaaacccaagccggga

SEQ ID NO: 1751829 - RNA, 13 nt, Human herpesvirus 1
ugcacucccugcc

SEQ ID NO: 1751830 - RNA, 18 nt, Human herpesvirus 1
cgcggcccggggccugcu

SEQ ID NO: 1751831 - RNA, 14 nt, Human herpesvirus 1
guucggccaccgcu

SEQ ID NO: 1751832 - RNA, 22 nt, Human herpesvirus 1
gccgcgcccacuacaccagcca

SEQ ID NO: 1751833 - RNA, 17 nt, Human herpesvirus 1
gcacccccugaccccgc

SEQ ID NO: 1751834 - RNA, 18 nt, Human herpesvirus 1
gcacaucaaggugggcca

SEQ ID NO: 1751835 - RNA, 18 nt, Human herpesvirus 1
gagccccggucuccccgg

SEQ ID NO: 1751836 - RNA, 17 nt, Human herpesvirus 1
caaccugauccgcggcg

SEQ ID NO: 1751837 - RNA, 18 nt, Human herpesvirus 1
cgcggccgcgacccaggc

SEQ ID NO: 1751838 - RNA, 14 nt, Human herpesvirus 1
ucacgugcugcugc

SEQ ID NO: 1751839 - RNA, 18 nt, Human herpesvirus 1
ccuguuugucgccuggcu

SEQ ID NO: 1751840 - RNA, 15 nt, Human herpesvirus 1
gcgcgccugccgcag

SEQ ID NO: 1751841 - RNA, 15 nt, Human herpesvirus 1
ccgacugccagcuau

SEQ ID NO: 1751842 - RNA, 17 nt, Human herpesvirus 1
acacgagcgccagcgcu

SEQ ID NO: 1751843 - RNA, 20 nt, Human herpesvirus 1
auggcacaccgguccccgga

SEQ ID NO: 1751844 - RNA, 16 nt, Human herpesvirus 1
gccgucgcuagaccac

SEQ ID NO: 1751845 - RNA, 17 nt, Human herpesvirus 1
uguccgcgcauccgacc

SEQ ID NO: 1751846 - RNA, 14 nt, Human herpesvirus 1
ccgcuggggccccc

SEQ ID NO: 1751847 - RNA, 22 nt, Human herpesvirus 1
ccgcagcaccucuaccagcagg

SEQ ID NO: 1751848 - RNA, 16 nt, Human herpesvirus 1
ccaaugggccgggccg

SEQ ID NO: 1751849 - RNA, 15 nt, Human herpesvirus 1
cgcugcugcggccag

SEQ ID NO: 1751850 - RNA, 15 nt, Human herpesvirus 1
cuccccgggagcccc

SEQ ID NO: 1751851 - RNA, 22 nt, Human herpesvirus 1
ccacccccccggaggaaacccc

SEQ ID NO: 1751852 - RNA, 21 nt, Human herpesvirus 1
gucagccugccucucccccca

SEQ ID NO: 1751853 - RNA, 14 nt, Human herpesvirus 1
cuccgacgcccagc

SEQ ID NO: 1751854 - RNA, 16 nt, Human herpesvirus 1
gguggaugccucucuc

SEQ ID NO: 1751855 - RNA, 17 nt, Human herpesvirus 1
cuccgcuggggccccca

SEQ ID NO: 1751856 - RNA, 16 nt, Human herpesvirus 1
acgucaugcggcugca

SEQ ID NO: 1751857 - RNA, 17 nt, Human herpesvirus 1
ccacaugaagccacugu

SEQ ID NO: 1751858 - RNA, 19 nt, Human herpesvirus 1
cacgcaagaccaggccugg

SEQ ID NO: 1751859 - RNA, 16 nt, Human herpesvirus 1
guccugcgccccgccg

SEQ ID NO: 1751860 - RNA, 14 nt, Human herpesvirus 1
cuucuacaccuccc

SEQ ID NO: 1751861 - RNA, 23 nt, Human herpesvirus 1
cuccuggccuacgucuccgugcu

SEQ ID NO: 1751862 - RNA, 22 nt, Human herpesvirus 1
uaagcgucccugggcccuggcc

SEQ ID NO: 1751863 - RNA, 20 nt, Human herpesvirus 1
cgccaagguggacugguugg

SEQ ID NO: 1751864 - RNA, 20 nt, Human herpesvirus 1
cguaacgucgcgggacccga

SEQ ID NO: 1751865 - RNA, 20 nt, Human herpesvirus 1
cgcccccggcuacaggggcc

SEQ ID NO: 1751866 - RNA, 15 nt, Human herpesvirus 1
cuggacgcccgggcg

SEQ ID NO: 1751867 - RNA, 17 nt, Human herpesvirus 1
auguuugcgggccuggg

SEQ ID NO: 1751868 - RNA, 17 nt, Human herpesvirus 1
ccggaagcccaacccac

SEQ ID NO: 1751869 - RNA, 11 nt, Human herpesvirus 1
ucggcauggug

SEQ ID NO: 1751870 - RNA, 21 nt, Human herpesvirus 1
aggagccccugcccgacaggg

SEQ ID NO: 1751871 - RNA, 19 nt, Human herpesvirus 1
caaccuggagaccaccgcg

SEQ ID NO: 1751872 - RNA, 17 nt, Human herpesvirus 1
cggcccuaaccccaccc

SEQ ID NO: 1751873 - RNA, 12 nt, Human herpesvirus 1
uccgcuggggcc

SEQ ID NO: 1751874 - RNA, 18 nt, Human herpesvirus 1
ccgucgggaggccacaga

SEQ ID NO: 1751875 - RNA, 14 nt, Human herpesvirus 1
caccguggccuggg

SEQ ID NO: 1751876 - RNA, 16 nt, Human herpesvirus 1
gcccacuacaccagcc

SEQ ID NO: 1751877 - RNA, 16 nt, Human herpesvirus 1
acauguccgugccgcu

SEQ ID NO: 1751878 - RNA, 20 nt, Human herpesvirus 1
ggaucuuagccuccccgggc

SEQ ID NO: 1751879 - RNA, 13 nt, Human herpesvirus 1
cauuuuacaauaa

SEQ ID NO: 1751880 - RNA, 12 nt, Human herpesvirus 1
aggaacacaccc

SEQ ID NO: 1751881 - RNA, 20 nt, Human herpesvirus 1
acgcacuugcggcaagaccc

SEQ ID NO: 1751882 - RNA, 14 nt, Human herpesvirus 1
cacgguaggcccag

SEQ ID NO: 1751883 - RNA, 21 nt, Human herpesvirus 1
gcaucggcaaggacgcccgcg

SEQ ID NO: 1751884 - RNA, 15 nt, Human herpesvirus 1
cagccccccagccuc

SEQ ID NO: 1751885 - RNA, 17 nt, Human herpesvirus 1
cgcccgccccccgaccg

SEQ ID NO: 1751886 - RNA, 13 nt, Human herpesvirus 1
accagcgcaccgu

SEQ ID NO: 1751887 - RNA, 16 nt, Human herpesvirus 1
gcacgagcaggcgguc

SEQ ID NO: 1751888 - RNA, 15 nt, Human herpesvirus 1
gcgcguuugcacaac

SEQ ID NO: 1751889 - RNA, 14 nt, Human herpesvirus 1
gacccccccgacau

SEQ ID NO: 1751890 - RNA, 22 nt, Human herpesvirus 1
ccguggggacgguggcgccgca

SEQ ID NO: 1751891 - RNA, 20 nt, Human herpesvirus 1
acgcacccgcugcgucggca

SEQ ID NO: 1751892 - RNA, 13 nt, Human herpesvirus 1
cgggcggagaaac

SEQ ID NO: 1751893 - RNA, 18 nt, Human herpesvirus 1
ugcaugucgucacgguga

SEQ ID NO: 1751894 - RNA, 17 nt, Human herpesvirus 1
ucuggccgcgcccacua

SEQ ID NO: 1751895 - RNA, 13 nt, Human herpesvirus 1
ccgcgcgccccga

SEQ ID NO: 1751896 - RNA, 19 nt, Human herpesvirus 1
accauggccccccgcgucc

SEQ ID NO: 1751897 - RNA, 18 nt, Human herpesvirus 1
cggucggcaaggugguga

SEQ ID NO: 1751898 - RNA, 18 nt, Human herpesvirus 1
gcguguaccacauccagg

SEQ ID NO: 1751899 - RNA, 20 nt, Human herpesvirus 1
ugaguuuguggacccaaagc

SEQ ID NO: 1751900 - RNA, 16 nt, Human herpesvirus 1
ugaaggcccuguaccc

SEQ ID NO: 1751901 - RNA, 13 nt, Human herpesvirus 1
cuuccccacggga

SEQ ID NO: 1751902 - RNA, 16 nt, Human herpesvirus 1
cgcuacuucaccuucg

SEQ ID NO: 1751903 - RNA, 12 nt, Human herpesvirus 1
cuccggaccccc

SEQ ID NO: 1751904 - RNA, 18 nt, Human herpesvirus 1
acccgaaacugcuuccgu

SEQ ID NO: 1751905 - RNA, 15 nt, Human herpesvirus 1
caccuguuccgccug

SEQ ID NO: 1751906 - RNA, 17 nt, Human herpesvirus 1
cuucgacguggaggaag

SEQ ID NO: 1751907 - RNA, 16 nt, Human herpesvirus 1
cacacagcccucccga

SEQ ID NO: 1751908 - RNA, 14 nt, Human herpesvirus 1
guuugcccauaaua

SEQ ID NO: 1751909 - RNA, 13 nt, Human herpesvirus 1
ccgaagaggugcu

SEQ ID NO: 1751910 - RNA, 20 nt, Human herpesvirus 1
gccggcacguaccugcggcu

SEQ ID NO: 1751911 - RNA, 12 nt, Human herpesvirus 1
caccaccagcug

SEQ ID NO: 1751912 - RNA, 15 nt, Human herpesvirus 1
gcacacacccuagcg

SEQ ID NO: 1751913 - RNA, 17 nt, Human herpesvirus 1
cgaccagcgccgggugg

SEQ ID NO: 1751914 - RNA, 17 nt, Human herpesvirus 1
ccgaacccggcccgggg

SEQ ID NO: 1751915 - RNA, 16 nt, Human herpesvirus 1
aucccccggccacccc

SEQ ID NO: 1751916 - RNA, 16 nt, Human herpesvirus 1
ccgugguccuguggag

SEQ ID NO: 1751917 - RNA, 15 nt, Human herpesvirus 1
uccacccccucgacc

SEQ ID NO: 1751918 - RNA, 19 nt, Human herpesvirus 1
cgccugcggcgaccucggc

SEQ ID NO: 1751919 - RNA, 15 nt, Human herpesvirus 1
uggucggcgagcugg

SEQ ID NO: 1751920 - RNA, 16 nt, Human herpesvirus 1
gugaaagacacgggca

SEQ ID NO: 1751921 - RNA, 13 nt, Human herpesvirus 1
cgaccuguugaug

SEQ ID NO: 1751922 - RNA, 16 nt, Human herpesvirus 1
ccuccgacgcccagca

SEQ ID NO: 1751923 - RNA, 17 nt, Human herpesvirus 1
gaccaccaccuccaccc

SEQ ID NO: 1751924 - RNA, 21 nt, Human herpesvirus 1
gcaccaccgacucucccaccg

SEQ ID NO: 1751925 - RNA, 20 nt, Human herpesvirus 1
uccgcgccaggcccgccgcc

SEQ ID NO: 1751926 - RNA, 21 nt, Human herpesvirus 1
ucgaccccauggaccccagcg

SEQ ID NO: 1751927 - RNA, 13 nt, Human herpesvirus 1
gucuggccccggc

SEQ ID NO: 1751928 - RNA, 18 nt, Human herpesvirus 1
cgggcccagccuucccgu

SEQ ID NO: 1751929 - RNA, 21 nt, Human herpesvirus 1
ccugagcccggcggcgcuggc

SEQ ID NO: 1751930 - RNA, 14 nt, Human herpesvirus 1
cuggcugacccacg

SEQ ID NO: 1751931 - RNA, 16 nt, Human herpesvirus 1
ggaucggcgccaugcu

SEQ ID NO: 1751932 - RNA, 13 nt, Human herpesvirus 1
gcagucuccuggc

SEQ ID NO: 1751933 - RNA, 17 nt, Human herpesvirus 1
ugccggucggcgggccc

SEQ ID NO: 1751934 - RNA, 17 nt, Human herpesvirus 1
cgcgaccgacagcacuc

SEQ ID NO: 1751935 - RNA, 11 nt, Human herpesvirus 1
cggaagcccaa

SEQ ID NO: 1751936 - RNA, 14 nt, Human herpesvirus 1
cgacuugccccccu

SEQ ID NO: 1751937 - RNA, 16 nt, Human herpesvirus 1
ccgaacgacacacggc

SEQ ID NO: 1751938 - RNA, 16 nt, Human herpesvirus 1
cugcgcgacgcccucc

SEQ ID NO: 1751939 - RNA, 16 nt, Human herpesvirus 1
cgcgucuggccccggc

SEQ ID NO: 1751940 - RNA, 16 nt, Human herpesvirus 1
cgacggcggaccuggc

SEQ ID NO: 1751941 - RNA, 13 nt, Human herpesvirus 1
cgcaccagcccuu

SEQ ID NO: 1751942 - RNA, 18 nt, Human herpesvirus 1
cugucgaucguccaucac

SEQ ID NO: 1751943 - RNA, 16 nt, Human herpesvirus 1
uuaacuacauuaaauu

SEQ ID NO: 1751944 - RNA, 19 nt, Human herpesvirus 1
cugguuguccguggcccca

SEQ ID NO: 1751945 - RNA, 12 nt, Human herpesvirus 1
acuccccggacc

SEQ ID NO: 1751946 - RNA, 21 nt, Human herpesvirus 1
acccguuccagccccccagcc

SEQ ID NO: 1751947 - RNA, 16 nt, Human herpesvirus 1
cccccaucaccccgca

SEQ ID NO: 1751948 - RNA, 15 nt, Human herpesvirus 1
cccuuccccacggga

SEQ ID NO: 1751949 - RNA, 12 nt, Human herpesvirus 1
uuuguggggagg

SEQ ID NO: 1751950 - RNA, 17 nt, Human herpesvirus 1
ucccucgaccaccaucc

SEQ ID NO: 1751951 - RNA, 17 nt, Human herpesvirus 1
cccaccgacacaugcac

SEQ ID NO: 1751952 - RNA, 17 nt, Human herpesvirus 1
ccagaugcccacgggca

SEQ ID NO: 1751953 - RNA, 21 nt, Human herpesvirus 1
cauccgaacgcagccccgcug

SEQ ID NO: 1751954 - RNA, 20 nt, Human herpesvirus 1
gaucccccgcgcggcugcca

SEQ ID NO: 1751955 - RNA, 18 nt, Human herpesvirus 1
cggccgccacccaggcgc

SEQ ID NO: 1751956 - RNA, 15 nt, Human herpesvirus 1
ggcgucugggccacc

SEQ ID NO: 1751957 - RNA, 14 nt, Human herpesvirus 1
cccaaccccaacuc

SEQ ID NO: 1751958 - RNA, 18 nt, Human herpesvirus 1
gccgggccgcccacuucc

SEQ ID NO: 1751959 - RNA, 18 nt, Human herpesvirus 1
caucccccgccuuuuugg

SEQ ID NO: 1751960 - RNA, 17 nt, Human herpesvirus 1
cacacacgggggagcgc

SEQ ID NO: 1751961 - RNA, 15 nt, Human herpesvirus 1
cgcccaccuccuggc

SEQ ID NO: 1751962 - RNA, 13 nt, Human herpesvirus 1
ucaacauaccccg

SEQ ID NO: 1751963 - RNA, 22 nt, Human herpesvirus 1
uacacucgcgcguguacaacau

SEQ ID NO: 1751964 - RNA, 13 nt, Human herpesvirus 1
gccuucucccggu

SEQ ID NO: 1751965 - RNA, 12 nt, Human herpesvirus 1
gccccgaccccc

SEQ ID NO: 1751966 - RNA, 13 nt, Human herpesvirus 1
ccugccgcgcgga

SEQ ID NO: 1751967 - RNA, 21 nt, Human herpesvirus 1
accugacgcgccuagccaacc

SEQ ID NO: 1751968 - RNA, 20 nt, Human herpesvirus 1
gauaacaaccacccgcaccc

SEQ ID NO: 1751969 - RNA, 14 nt, Human herpesvirus 1
uacagcccccagau

SEQ ID NO: 1751970 - RNA, 16 nt, Human herpesvirus 1
cggcggcagcccggag

SEQ ID NO: 1751971 - RNA, 15 nt, Human herpesvirus 1
gcgcgcgaccucacc

SEQ ID NO: 1751972 - RNA, 14 nt, Human herpesvirus 1
ccaacgcccugacc

SEQ ID NO: 1751973 - RNA, 15 nt, Human herpesvirus 1
ucgaggcggccgagg

SEQ ID NO: 1751974 - RNA, 18 nt, Human herpesvirus 1
ugccaccagccugguugu

SEQ ID NO: 1751975 - RNA, 14 nt, Human herpesvirus 1
uugcacccagccuu

SEQ ID NO: 1751976 - RNA, 23 nt, Human herpesvirus 1
cugcgguccggagccgcgcggcc

SEQ ID NO: 1751977 - RNA, 13 nt, Human herpesvirus 1
gaccccuucuccc

SEQ ID NO: 1751978 - RNA, 13 nt, Human herpesvirus 1
ggcccccaggguc

SEQ ID NO: 1751979 - RNA, 21 nt, Human herpesvirus 1
ccaaacccaccgacacaugca

SEQ ID NO: 1751980 - RNA, 18 nt, Human herpesvirus 1
guaccaucaaccacccgg

SEQ ID NO: 1751981 - RNA, 17 nt, Human herpesvirus 1
uaaacccccaaacaccc

SEQ ID NO: 1751982 - RNA, 19 nt, Human herpesvirus 1
gcaaccccaugaaggcccu

SEQ ID NO: 1751983 - RNA, 16 nt, Human herpesvirus 1
cccgggucuguugggg

SEQ ID NO: 1751984 - RNA, 14 nt, Human herpesvirus 1
ccuuuucgccgccc

SEQ ID NO: 1751985 - RNA, 14 nt, Human herpesvirus 1
cggccgcgguacag

SEQ ID NO: 1751986 - RNA, 16 nt, Human herpesvirus 1
cgcucgucgccuggcu

SEQ ID NO: 1751987 - RNA, 15 nt, Human herpesvirus 1
cccggggcucagcca

SEQ ID NO: 1751988 - RNA, 18 nt, Human herpesvirus 1
gugcugccgucgcuagac

SEQ ID NO: 1751989 - RNA, 15 nt, Human herpesvirus 1
caaccccaacuccag

SEQ ID NO: 1751990 - RNA, 13 nt, Human herpesvirus 1
auaaggccuggga

SEQ ID NO: 1751991 - RNA, 17 nt, Human herpesvirus 1
cgcaaagccacccacgc

SEQ ID NO: 1751992 - RNA, 16 nt, Human herpesvirus 1
cggggccuuggcggcc

SEQ ID NO: 1751993 - RNA, 14 nt, Human herpesvirus 1
gcugccaaacagcu

SEQ ID NO: 1751994 - RNA, 15 nt, Human herpesvirus 1
gcggucggcaaggug

SEQ ID NO: 1751995 - RNA, 23 nt, Human herpesvirus 1
ggaugaaaaugaaccagacccua

SEQ ID NO: 1751996 - RNA, 21 nt, Human herpesvirus 1
cgccucggucaccccaauccc

SEQ ID NO: 1751997 - RNA, 15 nt, Human herpesvirus 1
gcccaccgcugggcg

SEQ ID NO: 1751998 - RNA, 11 nt, Human herpesvirus 1
gcgccaaagcc

SEQ ID NO: 1751999 - RNA, 20 nt, Human herpesvirus 1
ccgcgaacggcacgcccccu

SEQ ID NO: 1752000 - RNA, 15 nt, Human herpesvirus 1
gcccgccccucgcca

SEQ ID NO: 1752001 - RNA, 23 nt, Human herpesvirus 1
ccugcgcgacgcccuccaucgga

SEQ ID NO: 1752002 - RNA, 22 nt, Human herpesvirus 1
gacguuuaucggcaggcaccgc

SEQ ID NO: 1752003 - RNA, 18 nt, Human herpesvirus 1
caccgggaagcagggccc

SEQ ID NO: 1752004 - RNA, 13 nt, Human herpesvirus 1
caccuuggcccug

SEQ ID NO: 1752005 - RNA, 15 nt, Human herpesvirus 1
cgucccggcucuccg

SEQ ID NO: 1752006 - RNA, 15 nt, Human herpesvirus 1
ccgguccuggaccag

SEQ ID NO: 1752007 - RNA, 15 nt, Human herpesvirus 1
ccgcgagcucccaga

SEQ ID NO: 1752008 - RNA, 15 nt, Human herpesvirus 1
caacuccagaccacc

SEQ ID NO: 1752009 - RNA, 18 nt, Human herpesvirus 1
gcuacgaguugccccacc

SEQ ID NO: 1752010 - RNA, 15 nt, Human herpesvirus 1
guacgaccaucaccc

SEQ ID NO: 1752011 - RNA, 14 nt, Human herpesvirus 1
acaacggcaugccu

SEQ ID NO: 1752012 - RNA, 16 nt, Human herpesvirus 1
gccgugguccugugga

SEQ ID NO: 1752013 - RNA, 20 nt, Human herpesvirus 1
ccauggacagcgaccugggg

SEQ ID NO: 1752014 - RNA, 22 nt, Human herpesvirus 1
uccuggaacgaggccgcagccu

SEQ ID NO: 1752015 - RNA, 20 nt, Human herpesvirus 1
aggggcuccuuagcgcggcc

SEQ ID NO: 1752016 - RNA, 22 nt, Human herpesvirus 1
cuccugauguggcugcuccgcu

SEQ ID NO: 1752017 - RNA, 23 nt, Human herpesvirus 1
ggccagccgcaguacuaccuggc

SEQ ID NO: 1752018 - RNA, 15 nt, Human herpesvirus 1
gaagacgaggcggcc

SEQ ID NO: 1752019 - RNA, 17 nt, Human herpesvirus 1
gcucuccgaucccaacu

SEQ ID NO: 1752020 - RNA, 21 nt, Human herpesvirus 1
cauaaccgaccgcagucccug

SEQ ID NO: 1752021 - RNA, 17 nt, Human herpesvirus 1
ggcgccugccccgccac

SEQ ID NO: 1752022 - RNA, 17 nt, Human herpesvirus 1
ccucccgcucggcggca

SEQ ID NO: 1752023 - RNA, 13 nt, Human herpesvirus 1
cucccgccacccg

SEQ ID NO: 1752024 - RNA, 14 nt, Human herpesvirus 1
gucuucggccccgc

SEQ ID NO: 1752025 - RNA, 13 nt, Human herpesvirus 1
cgcuggggcugcc

SEQ ID NO: 1752026 - RNA, 13 nt, Human herpesvirus 1
agcagagccgcaa

SEQ ID NO: 1752027 - RNA, 18 nt, Human herpesvirus 1
cgaguucccccggcacgc

SEQ ID NO: 1752028 - RNA, 16 nt, Human herpesvirus 1
aaauuuuacaaacaga

SEQ ID NO: 1752029 - RNA, 18 nt, Human herpesvirus 1
ggccugaacaaacaaacc

SEQ ID NO: 1752030 - RNA, 18 nt, Human herpesvirus 1
gucugugccaccagccug

SEQ ID NO: 1752031 - RNA, 19 nt, Human herpesvirus 1
gcaucccccgucuggguuu

SEQ ID NO: 1752032 - RNA, 15 nt, Human herpesvirus 1
accucaccaccaagg

SEQ ID NO: 1752033 - RNA, 15 nt, Human herpesvirus 1
ggcgccgaccacccg

SEQ ID NO: 1752034 - RNA, 16 nt, Human herpesvirus 1
gacacgcgcguccuuc

SEQ ID NO: 1752035 - RNA, 11 nt, Human herpesvirus 1
ugcacccagcc

SEQ ID NO: 1752036 - RNA, 15 nt, Human herpesvirus 1
ccucguuugccgcca

SEQ ID NO: 1752037 - RNA, 12 nt, Human herpesvirus 1
ucgggaggccac

SEQ ID NO: 1752038 - RNA, 12 nt, Human herpesvirus 1
uccggggguccg

SEQ ID NO: 1752039 - RNA, 15 nt, Human herpesvirus 1
uggaccccagcgacc

SEQ ID NO: 1752040 - RNA, 23 nt, Human herpesvirus 1
gcucgaccucuccacaccugcac

SEQ ID NO: 1752041 - RNA, 17 nt, Human herpesvirus 1
cccguagucccaucccc

SEQ ID NO: 1752042 - RNA, 23 nt, Human herpesvirus 1
ucugggcccgacagaccuccccg

SEQ ID NO: 1752043 - RNA, 16 nt, Human herpesvirus 1
ucguauccacaauaaa

SEQ ID NO: 1752044 - RNA, 18 nt, Human herpesvirus 1
ggcgucucgccggacgac

SEQ ID NO: 1752045 - RNA, 14 nt, Human herpesvirus 1
auguccccaaaaua

SEQ ID NO: 1752046 - RNA, 23 nt, Human herpesvirus 1
gcauaucccacccuggagcucaa

SEQ ID NO: 1752047 - RNA, 17 nt, Human herpesvirus 1
uggcccccgccucuggg

SEQ ID NO: 1752048 - RNA, 18 nt, Human herpesvirus 1
gcacggaacacaaggcca

SEQ ID NO: 1752049 - RNA, 21 nt, Human herpesvirus 1
uccaccacccaaccccaacuc

SEQ ID NO: 1752050 - RNA, 19 nt, Human herpesvirus 1
ucccgcccaccgcugggcg

SEQ ID NO: 1752051 - RNA, 14 nt, Human herpesvirus 1
uaaauuauugcuac

SEQ ID NO: 1752052 - RNA, 19 nt, Human herpesvirus 1
cuuaaccgcccaccuccug

SEQ ID NO: 1752053 - RNA, 18 nt, Human herpesvirus 1
cccgugugccgcgccugg

SEQ ID NO: 1752054 - RNA, 22 nt, Human herpesvirus 1
ggccuucuuucgaaccgugguc

SEQ ID NO: 1752055 - RNA, 19 nt, Human herpesvirus 1
aauaaaccgguauuauuua

SEQ ID NO: 1752056 - RNA, 13 nt, Human herpesvirus 1
acccgccacgaga

SEQ ID NO: 1752057 - RNA, 16 nt, Human herpesvirus 1
cuggccgcgcccacua

SEQ ID NO: 1752058 - RNA, 13 nt, Human herpesvirus 1
gacgagauuuaau

SEQ ID NO: 1752059 - RNA, 13 nt, Human herpesvirus 1
cccccgucugggu

SEQ ID NO: 1752060 - RNA, 17 nt, Human herpesvirus 1
gccccuguggcccuggc

SEQ ID NO: 1752061 - RNA, 15 nt, Human herpesvirus 1
cgguacauggcccug

SEQ ID NO: 1752062 - RNA, 18 nt, Human herpesvirus 1
gagcgcgauccggccggg

SEQ ID NO: 1752063 - RNA, 18 nt, Human herpesvirus 1
gaggccacguguagccug

SEQ ID NO: 1752064 - RNA, 21 nt, Human herpesvirus 1
cgccggggcucucggggccgc

SEQ ID NO: 1752065 - RNA, 18 nt, Human herpesvirus 1
ccacccccucgaccacca

SEQ ID NO: 1752066 - RNA, 18 nt, Human herpesvirus 1
agaucuacugcugggcca

SEQ ID NO: 1752067 - RNA, 19 nt, Human herpesvirus 1
gcguaucugguccccgcga

SEQ ID NO: 1752068 - RNA, 20 nt, Human herpesvirus 1
cuacacccuugugugucaau

SEQ ID NO: 1752069 - RNA, 19 nt, Human herpesvirus 1
ccgcgguggacagccagga

SEQ ID NO: 1752070 - RNA, 22 nt, Human herpesvirus 1
gcccgcaagggggggggggcau

SEQ ID NO: 1752071 - RNA, 22 nt, Human herpesvirus 1
cgccagccuguuuguccugggg

SEQ ID NO: 1752072 - RNA, 21 nt, Human herpesvirus 1
gcugccccgcuucauccccga

SEQ ID NO: 1752073 - RNA, 21 nt, Human herpesvirus 1
gcugacccuguggaacgaggc

SEQ ID NO: 1752074 - RNA, 21 nt, Human herpesvirus 1
cgcgguuuaccgccaccagca

SEQ ID NO: 1752075 - RNA, 13 nt, Human herpesvirus 1
ccgggucccuccu

SEQ ID NO: 1752076 - RNA, 23 nt, Human herpesvirus 1
gggccaauaucgcuagagacagc

SEQ ID NO: 1752077 - RNA, 21 nt, Human herpesvirus 1
cgccuggauucgcuggaccuc

SEQ ID NO: 1752078 - RNA, 17 nt, Human herpesvirus 1
caaccccggucucccag

SEQ ID NO: 1752079 - RNA, 19 nt, Human herpesvirus 1
cuggcguucgucgcccucc

SEQ ID NO: 1752080 - RNA, 16 nt, Human herpesvirus 1
cagcgaccccacggcc

SEQ ID NO: 1752081 - RNA, 16 nt, Human herpesvirus 1
gccggcaugcacccca

SEQ ID NO: 1752082 - RNA, 15 nt, Human herpesvirus 1
aaacugacaucgcga

SEQ ID NO: 1752083 - RNA, 21 nt, Human herpesvirus 1
gcagccagaacucgccccgga

SEQ ID NO: 1752084 - RNA, 21 nt, Human herpesvirus 1
caucgguccccucugggcccg

SEQ ID NO: 1752085 - RNA, 18 nt, Human herpesvirus 1
gccgcuaccgacgcuccc

SEQ ID NO: 1752086 - RNA, 21 nt, Human herpesvirus 1
auugcacccccgacgaggugc

SEQ ID NO: 1752087 - RNA, 20 nt, Human herpesvirus 1
cgggcucgucuuggccacca

SEQ ID NO: 1752088 - RNA, 15 nt, Human herpesvirus 1
ccgacaucaccaccg

SEQ ID NO: 1752089 - RNA, 22 nt, Human herpesvirus 1
acuccucagcgcgauccgacau

SEQ ID NO: 1752090 - RNA, 16 nt, Human herpesvirus 1
ugcccauuuacguggc

SEQ ID NO: 1752091 - RNA, 16 nt, Human herpesvirus 1
ggcggauuuggggcgc

SEQ ID NO: 1752092 - RNA, 14 nt, Human herpesvirus 1
augggcccugcucc

SEQ ID NO: 1752093 - RNA, 19 nt, Human herpesvirus 1
gcgcguccccggcccggag

SEQ ID NO: 1752094 - RNA, 21 nt, Human herpesvirus 1
ucgacccgcaacgcgcugggg

SEQ ID NO: 1752095 - RNA, 16 nt, Human herpesvirus 1
ucauccacaccuuauc

SEQ ID NO: 1752096 - RNA, 15 nt, Human herpesvirus 1
ggaggccacagaaac

SEQ ID NO: 1752097 - RNA, 16 nt, Human herpesvirus 1
gcgggugucugcuccc

SEQ ID NO: 1752098 - RNA, 21 nt, Human herpesvirus 1
ccugcaccacccccgccgucc

SEQ ID NO: 1752099 - RNA, 18 nt, Human herpesvirus 1
auggacagcgaccugggg

SEQ ID NO: 1752100 - RNA, 14 nt, Human herpesvirus 1
cgccccuggcgcgc

SEQ ID NO: 1752101 - RNA, 16 nt, Human herpesvirus 1
accacgccacaacagc

SEQ ID NO: 1752102 - RNA, 23 nt, Human herpesvirus 1
aucccacaaacacaaaacacacg

SEQ ID NO: 1752103 - RNA, 14 nt, Human herpesvirus 1
agcccggaggcgcc

SEQ ID NO: 1752104 - RNA, 16 nt, Human herpesvirus 1
gccgcucgguggcucc

SEQ ID NO: 1752105 - RNA, 13 nt, Human herpesvirus 1
guccagcgccgca

SEQ ID NO: 1752106 - RNA, 20 nt, Human herpesvirus 1
gcacaugggggaggugcccc

SEQ ID NO: 1752107 - RNA, 17 nt, Human herpesvirus 1
ccucgcacauccucacc

SEQ ID NO: 1752108 - RNA, 12 nt, Human herpesvirus 1
gaccuggggcgc

SEQ ID NO: 1752109 - RNA, 14 nt, Human herpesvirus 1
gccccuuucccccu

SEQ ID NO: 1752110 - RNA, 22 nt, Human herpesvirus 1
gaggacaccccucguggccccg

SEQ ID NO: 1752111 - RNA, 13 nt, Human herpesvirus 1
cggcggcgaggcc

SEQ ID NO: 1752112 - RNA, 15 nt, Human herpesvirus 1
cugccccccccaccc

SEQ ID NO: 1752113 - RNA, 23 nt, Human herpesvirus 1
ccaacaacucccccgcgcgcccc

SEQ ID NO: 1752114 - RNA, 15 nt, Human herpesvirus 1
ggacagcgaccuggg

SEQ ID NO: 1752115 - RNA, 11 nt, Human herpesvirus 1
agugaaagaca

SEQ ID NO: 1752116 - RNA, 22 nt, Human herpesvirus 1
ugaagcccccaacaugacccag

SEQ ID NO: 1752117 - RNA, 15 nt, Human herpesvirus 1
cccaucaccccgcaa

SEQ ID NO: 1752118 - RNA, 18 nt, Human herpesvirus 1
agauuguccgcggggccu

SEQ ID NO: 1752119 - RNA, 21 nt, Human herpesvirus 1
cucagcauccuuaaccgcugg

SEQ ID NO: 1752120 - RNA, 17 nt, Human herpesvirus 1
uaaaagaccaaaaucaa

SEQ ID NO: 1752121 - RNA, 23 nt, Human herpesvirus 1
accauguccggcagggggauggg

SEQ ID NO: 1752122 - RNA, 19 nt, Human herpesvirus 1
ggagguggggcgggggccc

SEQ ID NO: 1752123 - RNA, 23 nt, Human herpesvirus 1
gcugggaccccggcggccccugg

SEQ ID NO: 1752124 - RNA, 23 nt, Human herpesvirus 1
caguacuggaaguaccugcagac

SEQ ID NO: 1752125 - RNA, 14 nt, Human herpesvirus 1
auccccaggacacc

SEQ ID NO: 1752126 - RNA, 20 nt, Human herpesvirus 1
guggcuccggggggcuuccg

SEQ ID NO: 1752127 - RNA, 22 nt, Human herpesvirus 1
cccuccgcuggggcccccaggg

SEQ ID NO: 1752128 - RNA, 15 nt, Human herpesvirus 1
ggccgccacccaggc

SEQ ID NO: 1752129 - RNA, 21 nt, Human herpesvirus 1
gacucaccucaaagggacgac

SEQ ID NO: 1752130 - RNA, 17 nt, Human herpesvirus 1
ggcgacggcgucucccg

SEQ ID NO: 1752131 - RNA, 13 nt, Human herpesvirus 1
accccccaugcca

SEQ ID NO: 1752132 - RNA, 22 nt, Human herpesvirus 1
ucccgguaugguaauuagaaac

SEQ ID NO: 1752133 - RNA, 18 nt, Human herpesvirus 1
accacaccaacgcacgag

SEQ ID NO: 1752134 - RNA, 15 nt, Human herpesvirus 1
acagggcgggccgcc

SEQ ID NO: 1752135 - RNA, 17 nt, Human herpesvirus 1
cguccgaacccaggccu

SEQ ID NO: 1752136 - RNA, 17 nt, Human herpesvirus 1
gguaccgcgugacccca

SEQ ID NO: 1752137 - RNA, 23 nt, Human herpesvirus 1
cgaaugcagcgccggccuccccg

SEQ ID NO: 1752138 - RNA, 14 nt, Human herpesvirus 1
cucgugggccucug

SEQ ID NO: 1752139 - RNA, 23 nt, Human herpesvirus 1
aaacaagagccuccguuggguuu

SEQ ID NO: 1752140 - RNA, 14 nt, Human herpesvirus 1
guucgagcgccacc

SEQ ID NO: 1752141 - RNA, 13 nt, Human herpesvirus 1
ccccugagccgcu

SEQ ID NO: 1752142 - RNA, 15 nt, Human herpesvirus 1
cugguggcaccuccc

SEQ ID NO: 1752143 - RNA, 17 nt, Human herpesvirus 1
cgccgcgaguacguggc

SEQ ID NO: 1752144 - RNA, 17 nt, Human herpesvirus 1
cauggagcacgagcagg

SEQ ID NO: 1752145 - RNA, 16 nt, Human herpesvirus 1
cgcggccgugggcgcc

SEQ ID NO: 1752146 - RNA, 21 nt, Human herpesvirus 1
aucaccccgcaauuugcaccc

SEQ ID NO: 1752147 - RNA, 17 nt, Human herpesvirus 1
ccuugccccggccggau

SEQ ID NO: 1752148 - RNA, 17 nt, Human herpesvirus 1
aagcuaugcagccccgu

SEQ ID NO: 1752149 - RNA, 19 nt, Human herpesvirus 1
ucggggagcuucgcuuugu

SEQ ID NO: 1752150 - RNA, 15 nt, Human herpesvirus 1
agggagccccggucu

SEQ ID NO: 1752151 - RNA, 13 nt, Human herpesvirus 1
cuccgaguacggc

SEQ ID NO: 1752152 - RNA, 18 nt, Human herpesvirus 1
ggcgaccgccggcggcga

SEQ ID NO: 1752153 - RNA, 19 nt, Human herpesvirus 1
gcgcgaauugacccuagga

SEQ ID NO: 1752154 - RNA, 10 nt, Human herpesvirus 1
uggcgccccc

SEQ ID NO: 1752155 - RNA, 17 nt, Human herpesvirus 1
ucccaggaucacaccgg

SEQ ID NO: 1752156 - RNA, 19 nt, Human herpesvirus 1
uuucaccgccccagcaccg

SEQ ID NO: 1752157 - RNA, 17 nt, Human herpesvirus 1
cgcccgccccugcgcag

SEQ ID NO: 1752158 - RNA, 22 nt, Human herpesvirus 1
uaccggacccguuccagccccc

SEQ ID NO: 1752159 - RNA, 20 nt, Human herpesvirus 1
gaccccagcgaccccacggc

SEQ ID NO: 1752160 - RNA, 13 nt, Human herpesvirus 1
cccgaagccugcu

SEQ ID NO: 1752161 - RNA, 17 nt, Human herpesvirus 1
gcgggguugggauggga

SEQ ID NO: 1752162 - RNA, 15 nt, Human herpesvirus 1
uaccuuuuuaauauc

SEQ ID NO: 1752163 - RNA, 19 nt, Human herpesvirus 1
gcaacgcgcuggggcugcc

SEQ ID NO: 1752164 - RNA, 14 nt, Human herpesvirus 1
ggagccgagcucaa

SEQ ID NO: 1752165 - RNA, 21 nt, Human herpesvirus 1
caccguggccugggacugggu

SEQ ID NO: 1752166 - RNA, 19 nt, Human herpesvirus 1
caacccccuaagacccacc

SEQ ID NO: 1752167 - RNA, 14 nt, Human herpesvirus 1
ccgcugcgcauccc

SEQ ID NO: 1752168 - RNA, 21 nt, Human herpesvirus 1
gacagccaggagcguuucugu

SEQ ID NO: 1752169 - RNA, 23 nt, Human herpesvirus 1
cuggcuggccgcucgguggcucc

SEQ ID NO: 1752170 - RNA, 21 nt, Human herpesvirus 1
agcguauaccaacccgccccu

SEQ ID NO: 1752171 - RNA, 21 nt, Human herpesvirus 1
gcgccauggcgggacugggca

SEQ ID NO: 1752172 - RNA, 20 nt, Human herpesvirus 1
gccccccuggcgagcccaga

SEQ ID NO: 1752173 - RNA, 13 nt, Human herpesvirus 1
ggcccaaggcccc

SEQ ID NO: 1752174 - RNA, 16 nt, Human herpesvirus 1
aucauagcccuggugu

SEQ ID NO: 1752175 - RNA, 12 nt, Human herpesvirus 1
ccgaacccaggc

SEQ ID NO: 1752176 - RNA, 22 nt, Human herpesvirus 1
ugggccgggccgcccacuuccc

SEQ ID NO: 1752177 - RNA, 12 nt, Human herpesvirus 1
auaaaaagccag

SEQ ID NO: 1752178 - RNA, 15 nt, Human herpesvirus 1
gacgcccagcagcuc

SEQ ID NO: 1752179 - RNA, 21 nt, Human herpesvirus 1
uucgcaccaacaaccuucugc

SEQ ID NO: 1752180 - RNA, 14 nt, Human herpesvirus 1
cgcgcccacuacac

SEQ ID NO: 1752181 - RNA, 15 nt, Human herpesvirus 1
gugcgucugggcccg

SEQ ID NO: 1752182 - RNA, 16 nt, Human herpesvirus 1
cguugcagggccuggu

SEQ ID NO: 1752183 - RNA, 21 nt, Human herpesvirus 1
gcugguccacacccaguggcu

SEQ ID NO: 1752184 - RNA, 15 nt, Human herpesvirus 1
uggugcugucugaca

SEQ ID NO: 1752185 - RNA, 19 nt, Human herpesvirus 1
cguccgcgccccucuggcc

SEQ ID NO: 1752186 - RNA, 13 nt, Human herpesvirus 1
cagugaggguggc

SEQ ID NO: 1752187 - RNA, 14 nt, Human herpesvirus 1
ccgcgggccacgcc

SEQ ID NO: 1752188 - RNA, 19 nt, Human herpesvirus 1
cagacgaaaagccccgggc

SEQ ID NO: 1752189 - RNA, 17 nt, Human herpesvirus 1
ggguucgauuggcaaug

SEQ ID NO: 1752190 - RNA, 14 nt, Human herpesvirus 1
cgcguccccggccc

SEQ ID NO: 1752191 - RNA, 20 nt, Human herpesvirus 1
ccaguggcuccgggccaacc

SEQ ID NO: 1752192 - RNA, 17 nt, Human herpesvirus 1
gcgcguccuucuugucg

SEQ ID NO: 1752193 - RNA, 16 nt, Human herpesvirus 1
accgcagucccugagu

SEQ ID NO: 1752194 - RNA, 12 nt, Human herpesvirus 1
aacgccuccccc

SEQ ID NO: 1752195 - RNA, 20 nt, Human herpesvirus 1
gcgacaacgcgggcguuccc

SEQ ID NO: 1752196 - RNA, 12 nt, Human herpesvirus 1
caccagccuggu

SEQ ID NO: 1752197 - RNA, 15 nt, Human herpesvirus 1
uccauaccgaccaca

SEQ ID NO: 1752198 - RNA, 16 nt, Human herpesvirus 1
cagccuuuaacuacau

SEQ ID NO: 1752199 - RNA, 22 nt, Human herpesvirus 1
accuggggcgcgcggucggcaa

SEQ ID NO: 1752200 - RNA, 16 nt, Human herpesvirus 1
gucgacgucgcgccug

SEQ ID NO: 1752201 - RNA, 19 nt, Human herpesvirus 1
acgcuggggguccuggugg

SEQ ID NO: 1752202 - RNA, 23 nt, Human herpesvirus 1
ugcggacccucucuucucucccg

SEQ ID NO: 1752203 - RNA, 21 nt, Human herpesvirus 1
ccaccgugggccggcggguga

SEQ ID NO: 1752204 - RNA, 14 nt, Human herpesvirus 1
cgccucagggccuc

SEQ ID NO: 1752205 - RNA, 15 nt, Human herpesvirus 1
cucggcgccucugga

SEQ ID NO: 1752206 - RNA, 13 nt, Human herpesvirus 1
ccggugcgccccc

SEQ ID NO: 1752207 - RNA, 22 nt, Human herpesvirus 1
gcaggugugguucggccaccgc

SEQ ID NO: 1752208 - RNA, 21 nt, Human herpesvirus 1
ggccacucacgcauccccagu

SEQ ID NO: 1752209 - RNA, 17 nt, Human herpesvirus 1
cccgggagcuccgcacc

SEQ ID NO: 1752210 - RNA, 17 nt, Human herpesvirus 1
gguggagcugcccggcg

SEQ ID NO: 1752211 - RNA, 22 nt, Human herpesvirus 1
ccaguccaguuaucgcggcuuc

SEQ ID NO: 1752212 - RNA, 20 nt, Human herpesvirus 1
gcaacgcgcuggggcugccg

SEQ ID NO: 1752213 - RNA, 14 nt, Human herpesvirus 1
acgccggggccuug

SEQ ID NO: 1752214 - RNA, 20 nt, Human herpesvirus 1
uucuacgcgcgcgaccucac

SEQ ID NO: 1752215 - RNA, 18 nt, Human herpesvirus 1
ccacgcccccgccgcccg

SEQ ID NO: 1752216 - RNA, 22 nt, Human herpesvirus 1
aggacgcccgcgacgccaugga

SEQ ID NO: 1752217 - RNA, 22 nt, Human herpesvirus 1
cgagggcaucuuuuuugccgcc

SEQ ID NO: 1752218 - RNA, 23 nt, Human herpesvirus 1
ccccacgugaucagcacgccacc

SEQ ID NO: 1752219 - RNA, 20 nt, Human herpesvirus 1
ccaccugacgcgccuagcca

SEQ ID NO: 1752220 - RNA, 15 nt, Human herpesvirus 1
auccucaagcaggcc

SEQ ID NO: 1752221 - RNA, 21 nt, Human herpesvirus 1
cacaugcggaaagcaagaaca

SEQ ID NO: 1752222 - RNA, 16 nt, Human herpesvirus 1
gccaucgccucggcca

SEQ ID NO: 1752223 - RNA, 13 nt, Human herpesvirus 1
gcggcagcgcucc

SEQ ID NO: 1752224 - RNA, 12 nt, Human herpesvirus 1
cuucccuccccc

SEQ ID NO: 1752225 - RNA, 17 nt, Human herpesvirus 1
cgcacauccucacccuc

SEQ ID NO: 1752226 - RNA, 16 nt, Human herpesvirus 1
cucccggcccgggccc

SEQ ID NO: 1752227 - RNA, 15 nt, Human herpesvirus 1
gcgacgggcagugag

SEQ ID NO: 1752228 - RNA, 23 nt, Human herpesvirus 1
ccgucuggguuuuccccucccgu

SEQ ID NO: 1752229 - RNA, 22 nt, Human herpesvirus 1
acuucccgguaugguaauuaaa

SEQ ID NO: 1752230 - RNA, 22 nt, Human herpesvirus 1
cgccucaacauaccccgcuguu

SEQ ID NO: 1752231 - RNA, 19 nt, Human herpesvirus 1
uacgcuaaucccccggcuc

SEQ ID NO: 1752232 - RNA, 13 nt, Human herpesvirus 1
aagaggggcuggg

SEQ ID NO: 1752233 - RNA, 20 nt, Human herpesvirus 1
ggcgccugccccgccaccca

SEQ ID NO: 1752234 - RNA, 12 nt, Human herpesvirus 1
ccggcacggacc

SEQ ID NO: 1752235 - RNA, 17 nt, Human herpesvirus 1
gagcguuucugucggac

SEQ ID NO: 1752236 - RNA, 16 nt, Human herpesvirus 1
cugucucgucuccucu

SEQ ID NO: 1752237 - RNA, 22 nt, Human herpesvirus 1
guucgucgcccuccaccaacgc

SEQ ID NO: 1752238 - RNA, 15 nt, Human herpesvirus 1
cacccccccaacggg

SEQ ID NO: 1752239 - RNA, 13 nt, Human herpesvirus 1
ucccccccaucac

SEQ ID NO: 1752240 - RNA, 22 nt, Human herpesvirus 1
ucuggggucccugucgccuccc

SEQ ID NO: 1752241 - RNA, 18 nt, Human herpesvirus 1
cucuggccaucggucccc

SEQ ID NO: 1752242 - RNA, 17 nt, Human herpesvirus 1
ggcuguuccgccaggcg

SEQ ID NO: 1752243 - RNA, 16 nt, Human herpesvirus 1
aaaccccacgcccccg

SEQ ID NO: 1752244 - RNA, 19 nt, Human herpesvirus 1
cgggguuacgcgggccccg

SEQ ID NO: 1752245 - RNA, 14 nt, Human herpesvirus 1
cauggccagcggcc

SEQ ID NO: 1752246 - RNA, 17 nt, Human herpesvirus 1
ccucuucuccccuuccc

SEQ ID NO: 1752247 - RNA, 17 nt, Human herpesvirus 1
ccacccaggcgcugggc

SEQ ID NO: 1752248 - RNA, 23 nt, Human herpesvirus 1
auaaccgaccgcagucccugagu

SEQ ID NO: 1752249 - RNA, 21 nt, Human herpesvirus 1
ggccgccaccauccucaagca

SEQ ID NO: 1752250 - RNA, 20 nt, Human herpesvirus 1
cacccccucgaccaccaccu

SEQ ID NO: 1752251 - RNA, 12 nt, Human herpesvirus 1
uuucccacgcca

SEQ ID NO: 1752252 - RNA, 23 nt, Human herpesvirus 1
gcgccuggcgucuccucuggggg

SEQ ID NO: 1752253 - RNA, 18 nt, Human herpesvirus 1
ggcgggguuauaggccac

SEQ ID NO: 1752254 - RNA, 15 nt, Human herpesvirus 1
gaaacuggcccgcgc

SEQ ID NO: 1752255 - RNA, 21 nt, Human herpesvirus 1
gcaauuuguacccuuaauaaa

SEQ ID NO: 1752256 - RNA, 15 nt, Human herpesvirus 1
ccaaacgccagccug

SEQ ID NO: 1752257 - RNA, 15 nt, Human herpesvirus 1
gccucccccugagcc

SEQ ID NO: 1752258 - RNA, 22 nt, Human herpesvirus 1
ggacgccgaccgacuccccgcc

SEQ ID NO: 1752259 - RNA, 13 nt, Human herpesvirus 1
gccccauacacga

SEQ ID NO: 1752260 - RNA, 23 nt, Human herpesvirus 1
cucugugucagguggcccuuccu

SEQ ID NO: 1752261 - RNA, 23 nt, Human herpesvirus 1
caucugggauggcuccuggccag

SEQ ID NO: 1752262 - RNA, 17 nt, Human herpesvirus 1
agccccggcccugaugc

SEQ ID NO: 1752263 - RNA, 23 nt, Human herpesvirus 1
gcugccgucgcuagaccacgccc

SEQ ID NO: 1752264 - RNA, 23 nt, Human herpesvirus 1
acguucgcgcgccaucuggaccg

SEQ ID NO: 1752265 - RNA, 16 nt, Human herpesvirus 1
ugauccuuaggggccg

SEQ ID NO: 1752266 - RNA, 18 nt, Human herpesvirus 1
guguucguacgcggggcu

SEQ ID NO: 1752267 - RNA, 22 nt, Human herpesvirus 1
gacccucucuucucucccgggc

SEQ ID NO: 1752268 - RNA, 12 nt, Human herpesvirus 1
cuguggcccugg

SEQ ID NO: 1752269 - RNA, 12 nt, Human herpesvirus 1
ccguggccccgg

SEQ ID NO: 1752270 - RNA, 23 nt, Human herpesvirus 1
gagggcguaacguuccgccugga

SEQ ID NO: 1752271 - RNA, 22 nt, Human herpesvirus 1
ucccuguuugucgccuggcugg

SEQ ID NO: 1752272 - RNA, 20 nt, Human herpesvirus 1
cacgcgcgacgggcagugag

SEQ ID NO: 1752273 - RNA, 17 nt, Human herpesvirus 1
ccaccugcgcucccuca

SEQ ID NO: 1752274 - RNA, 11 nt, Human herpesvirus 1
ugcccucgcgg

SEQ ID NO: 1752275 - RNA, 23 nt, Human herpesvirus 1
gcgggaacaccuccgcgagcaga

SEQ ID NO: 1752276 - RNA, 19 nt, Human herpesvirus 1
ggucggcaagguggugaug

SEQ ID NO: 1752277 - RNA, 23 nt, Human herpesvirus 1
cucuccccccaggccuaccagca

SEQ ID NO: 1752278 - RNA, 21 nt, Human herpesvirus 1
uguccccgaacaaacgaccca

SEQ ID NO: 1752279 - RNA, 13 nt, Human herpesvirus 1
cccucgccacguc

SEQ ID NO: 1752280 - RNA, 14 nt, Human herpesvirus 1
cucguucugcugca

SEQ ID NO: 1752281 - RNA, 21 nt, Human herpesvirus 1
agcugggaccccggcggcccc

SEQ ID NO: 1752282 - RNA, 10 nt, Human herpesvirus 1
ggcgcccccc

SEQ ID NO: 1752283 - RNA, 13 nt, Human herpesvirus 1
gccacgccagggc

SEQ ID NO: 1752284 - RNA, 15 nt, Human herpesvirus 1
gcccgcccuguaccg

SEQ ID NO: 1752285 - RNA, 21 nt, Human herpesvirus 1
cagacgcccuccgaggagauc

SEQ ID NO: 1752286 - RNA, 19 nt, Human herpesvirus 1
gccacuggccgggagcacc

SEQ ID NO: 1752287 - RNA, 17 nt, Human herpesvirus 1
gggugcgggggggucag

SEQ ID NO: 1752288 - RNA, 13 nt, Human herpesvirus 1
guccaaacccacc

SEQ ID NO: 1752289 - RNA, 19 nt, Human herpesvirus 1
caacacaacggcaugccuc

SEQ ID NO: 1752290 - RNA, 17 nt, Human herpesvirus 1
gcagacgcugcuccgcc

SEQ ID NO: 1752291 - RNA, 22 nt, Human herpesvirus 1
cagggauccacgacaaccccgg

SEQ ID NO: 1752292 - RNA, 14 nt, Human herpesvirus 1
cucgcccacccacu

SEQ ID NO: 1752293 - RNA, 18 nt, Human herpesvirus 1
ugcggaaagcaagaacaa

SEQ ID NO: 1752294 - RNA, 20 nt, Human herpesvirus 1
agauuguccgcggggccucc

SEQ ID NO: 1752295 - RNA, 20 nt, Human herpesvirus 1
gcugccccgcuucauccccg

SEQ ID NO: 1752296 - RNA, 19 nt, Human herpesvirus 1
ggacccaagccgccccagc

SEQ ID NO: 1752297 - RNA, 13 nt, Human herpesvirus 1
cugcgugggccgc

SEQ ID NO: 1752298 - RNA, 11 nt, Human herpesvirus 1
aauaaagccac

SEQ ID NO: 1752299 - RNA, 16 nt, Human herpesvirus 1
gugcuugagucugucc

SEQ ID NO: 1752300 - RNA, 17 nt, Human herpesvirus 1
gacggccaacgaggacc

SEQ ID NO: 1752301 - RNA, 18 nt, Human herpesvirus 1
gcaucccccgucuggguu

SEQ ID NO: 1752302 - RNA, 23 nt, Human herpesvirus 1
cagacgcugcuccgccuggccug

SEQ ID NO: 1752303 - RNA, 15 nt, Human herpesvirus 1
ggggccucccccgga

SEQ ID NO: 1752304 - RNA, 15 nt, Human herpesvirus 1
cgcacauccucaccc

SEQ ID NO: 1752305 - RNA, 19 nt, Human herpesvirus 1
cucguuccucacugccucc

SEQ ID NO: 1752306 - RNA, 16 nt, Human herpesvirus 1
ggccaaguacgccgcc

SEQ ID NO: 1752307 - RNA, 21 nt, Human herpesvirus 1
aguugagccgcgccauccuca

SEQ ID NO: 1752308 - RNA, 16 nt, Human herpesvirus 1
cgauggcaggagccgc

SEQ ID NO: 1752309 - RNA, 15 nt, Human herpesvirus 1
gucgccccuguggcc

SEQ ID NO: 1752310 - RNA, 15 nt, Human herpesvirus 1
agcccaacccacacg

SEQ ID NO: 1752311 - RNA, 18 nt, Human herpesvirus 1
cgacgguaaacugcaucg

SEQ ID NO: 1752312 - RNA, 21 nt, Human herpesvirus 1
cacgcaguacuggaaguaccu

SEQ ID NO: 1752313 - RNA, 20 nt, Human herpesvirus 1
cccaucgccgcggcucccgg

SEQ ID NO: 1752314 - RNA, 18 nt, Human herpesvirus 1
acccuaggaggccgccac

SEQ ID NO: 1752315 - RNA, 16 nt, Human herpesvirus 1
agcccugcucgggcag

SEQ ID NO: 1752316 - RNA, 20 nt, Human herpesvirus 1
gaacaucuugaggggggaga

SEQ ID NO: 1752317 - RNA, 15 nt, Human herpesvirus 1
ccaaacucccgacac

SEQ ID NO: 1752318 - RNA, 12 nt, Human herpesvirus 1
caaagcugcugg

SEQ ID NO: 1752319 - RNA, 22 nt, Human herpesvirus 1
cgaggcggccugggucuuccgc

SEQ ID NO: 1752320 - RNA, 13 nt, Human herpesvirus 1
gggaugcugcccc

SEQ ID NO: 1752321 - RNA, 22 nt, Human herpesvirus 1
ggcgucaccaugcagcgccgga

SEQ ID NO: 1752322 - RNA, 19 nt, Human herpesvirus 1
acccgcacuacgaguacau

SEQ ID NO: 1752323 - RNA, 18 nt, Human herpesvirus 1
acgagcacccugcugccc

SEQ ID NO: 1752324 - RNA, 17 nt, Human herpesvirus 1
cccgccguugagccccu

SEQ ID NO: 1752325 - RNA, 17 nt, Human herpesvirus 1
cacggaacacaaggcca

SEQ ID NO: 1752326 - RNA, 18 nt, Human herpesvirus 1
cgguugcccccgaacacc

SEQ ID NO: 1752327 - RNA, 16 nt, Human herpesvirus 1
caccuuggcccuggcu

SEQ ID NO: 1752328 - RNA, 21 nt, Human herpesvirus 1
cgaacacggggacggcggggc

SEQ ID NO: 1752329 - RNA, 19 nt, Human herpesvirus 1
gacuuuuggaugucgcccg

SEQ ID NO: 1752330 - RNA, 15 nt, Human herpesvirus 1
ugccuccaccgggcc

SEQ ID NO: 1752331 - RNA, 19 nt, Human herpesvirus 1
guggcgccgcaaaucccac

SEQ ID NO: 1752332 - RNA, 23 nt, Human herpesvirus 1
agacccgggcgaugagccaaccu

SEQ ID NO: 1752333 - RNA, 20 nt, Human herpesvirus 1
ccuuauccacaugaagccac

SEQ ID NO: 1752334 - RNA, 17 nt, Human herpesvirus 1
gccccggaagaccccga

SEQ ID NO: 1752335 - RNA, 15 nt, Human herpesvirus 1
ccuggauucgcugga

SEQ ID NO: 1752336 - RNA, 18 nt, Human herpesvirus 1
gccucccccugagccgcu

SEQ ID NO: 1752337 - RNA, 21 nt, Human herpesvirus 1
ccaaccucggaugacucaggg

SEQ ID NO: 1752338 - RNA, 18 nt, Human herpesvirus 1
aucccggguuaauguaaa

SEQ ID NO: 1752339 - RNA, 18 nt, Human herpesvirus 1
gaggguuggggggguccg

SEQ ID NO: 1752340 - RNA, 20 nt, Human herpesvirus 1
ccgcguguuccccgggagcc

SEQ ID NO: 1752341 - RNA, 19 nt, Human herpesvirus 1
ccgggccguugcccgggcc

SEQ ID NO: 1752342 - RNA, 18 nt, Human herpesvirus 1
gggucuguugguccuggc

SEQ ID NO: 1752343 - RNA, 15 nt, Human herpesvirus 1
cgccgcggccugggu

SEQ ID NO: 1752344 - RNA, 22 nt, Human herpesvirus 1
cggccagaucuacugcugggcc

SEQ ID NO: 1752345 - RNA, 16 nt, Human herpesvirus 1
cgcugacccccaccgc

SEQ ID NO: 1752346 - RNA, 14 nt, Human herpesvirus 1
cggcacgccugggg

SEQ ID NO: 1752347 - RNA, 21 nt, Human herpesvirus 1
cgggucuuuuguguuggcccu

SEQ ID NO: 1752348 - RNA, 14 nt, Human herpesvirus 1
cacagccggccacg

SEQ ID NO: 1752349 - RNA, 13 nt, Human herpesvirus 1
cacuacaccagcc

SEQ ID NO: 1752350 - RNA, 13 nt, Human herpesvirus 1
aauaaaaacauug

SEQ ID NO: 1752351 - RNA, 23 nt, Human herpesvirus 1
ccgccucguuugccgccaucgcc

SEQ ID NO: 1752352 - RNA, 22 nt, Human herpesvirus 1
ccgcgagcgccgcuacugcgcg

SEQ ID NO: 1752353 - RNA, 22 nt, Human herpesvirus 1
accacccccgccguccgaaccc

SEQ ID NO: 1752354 - RNA, 14 nt, Human herpesvirus 1
gacgcacacacccu

SEQ ID NO: 1752355 - RNA, 13 nt, Human herpesvirus 1
gacaccaccagcu

SEQ ID NO: 1752356 - RNA, 18 nt, Human herpesvirus 1
gucaugcgcaagcgccgc

SEQ ID NO: 1752357 - RNA, 14 nt, Human herpesvirus 1
agcauaccugggug

SEQ ID NO: 1752358 - RNA, 22 nt, Human herpesvirus 1
cggggccuuuucgccgcccucg

SEQ ID NO: 1752359 - RNA, 15 nt, Human herpesvirus 1
ggcgccugccccgcc

SEQ ID NO: 1752360 - RNA, 17 nt, Human herpesvirus 1
ugcggggcggggacggg

SEQ ID NO: 1752361 - RNA, 11 nt, Human herpesvirus 1
guggcgccccg

SEQ ID NO: 1752362 - RNA, 13 nt, Human herpesvirus 1
cgacugccccccc

SEQ ID NO: 1752363 - RNA, 21 nt, Human herpesvirus 1
ggcgaccucggcgccucugga

SEQ ID NO: 1752364 - RNA, 19 nt, Human herpesvirus 1
cccauccggugguccgugu

SEQ ID NO: 1752365 - RNA, 14 nt, Human herpesvirus 1
acacucgacccccg

SEQ ID NO: 1752366 - RNA, 22 nt, Human herpesvirus 1
gcgagcucccagagaccccagg

SEQ ID NO: 1752367 - RNA, 11 nt, Human herpesvirus 1
acacacggguu

SEQ ID NO: 1752368 - RNA, 23 nt, Human herpesvirus 1
ggcgggacucugggcguggugcg

SEQ ID NO: 1752369 - RNA, 22 nt, Human herpesvirus 1
ugaucuuggcguuauucccaaa

SEQ ID NO: 1752370 - RNA, 17 nt, Human herpesvirus 1
accguugcccgggccgu

SEQ ID NO: 1752371 - RNA, 23 nt, Human herpesvirus 1
gggacgcgcaccuguuccgccug

SEQ ID NO: 1752372 - RNA, 14 nt, Human herpesvirus 1
cucacagggcgggc

SEQ ID NO: 1752373 - RNA, 14 nt, Human herpesvirus 1
ugcguagcauaccu

SEQ ID NO: 1752374 - RNA, 15 nt, Human herpesvirus 1
gugcaugucgucacg

SEQ ID NO: 1752375 - RNA, 12 nt, Human herpesvirus 1
ggccgccgcgga

SEQ ID NO: 1752376 - RNA, 17 nt, Human herpesvirus 1
cuagauacccccccuua

SEQ ID NO: 1752377 - RNA, 15 nt, Human herpesvirus 1
cuucgcuuugugggg

SEQ ID NO: 1752378 - RNA, 20 nt, Human herpesvirus 1
ccgggggccugguggcaccu

SEQ ID NO: 1752379 - RNA, 20 nt, Human herpesvirus 1
gcggccccggccgcccuucc

SEQ ID NO: 1752380 - RNA, 16 nt, Human herpesvirus 1
cucugggucugugcca

SEQ ID NO: 1752381 - RNA, 22 nt, Human herpesvirus 1
accuucugcgggucaccugcca

SEQ ID NO: 1752382 - RNA, 18 nt, Human herpesvirus 1
caaggacagcggccugcu

SEQ ID NO: 1752383 - RNA, 18 nt, Human herpesvirus 1
cacggcuaccuggcccca

SEQ ID NO: 1752384 - RNA, 14 nt, Human herpesvirus 1
ggccgaagccacgc

SEQ ID NO: 1752385 - RNA, 13 nt, Human herpesvirus 1
ccguggaccccac

SEQ ID NO: 1752386 - RNA, 21 nt, Human herpesvirus 1
cgcggcuucaucgcgccccuc

SEQ ID NO: 1752387 - RNA, 15 nt, Human herpesvirus 1
cccagcagcucccca

SEQ ID NO: 1752388 - RNA, 19 nt, Human herpesvirus 1
gacggcgcggggcccccgc

SEQ ID NO: 1752389 - RNA, 11 nt, Human herpesvirus 1
auuccucuccg

SEQ ID NO: 1752390 - RNA, 14 nt, Human herpesvirus 1
gauggccugugcuu

SEQ ID NO: 1752391 - RNA, 22 nt, Human herpesvirus 1
cgcuccucugcggccggcggga

SEQ ID NO: 1752392 - RNA, 15 nt, Human herpesvirus 1
cccaucuaaugccac

SEQ ID NO: 1752393 - RNA, 22 nt, Human herpesvirus 1
gcgcauccgucgggaggccaca

SEQ ID NO: 1752394 - RNA, 17 nt, Human herpesvirus 1
cguuucuccgcccgacc

SEQ ID NO: 1752395 - RNA, 21 nt, Human herpesvirus 1
accccgcaauuugcacccagc

SEQ ID NO: 1752396 - RNA, 17 nt, Human herpesvirus 1
cauggugaucgccuguc

SEQ ID NO: 1752397 - RNA, 15 nt, Human herpesvirus 1
accgaggggccaagu

SEQ ID NO: 1752398 - RNA, 17 nt, Human herpesvirus 1
ggucgggcgcugggugg

SEQ ID NO: 1752399 - RNA, 14 nt, Human herpesvirus 1
aggcccgccgccac

SEQ ID NO: 1752400 - RNA, 18 nt, Human herpesvirus 1
accucaccaccaaggccc

SEQ ID NO: 1752401 - RNA, 18 nt, Human herpesvirus 1
accaccaaggcccgggcc

SEQ ID NO: 1752402 - RNA, 13 nt, Human herpesvirus 1
cgggucccgaccg

SEQ ID NO: 1752403 - RNA, 22 nt, Human herpesvirus 1
gcccuggccgcggaucugcucc

SEQ ID NO: 1752404 - RNA, 22 nt, Human herpesvirus 1
aucgccggguggcacgggccca

SEQ ID NO: 1752405 - RNA, 14 nt, Human herpesvirus 1
cuggguuuuccccu

SEQ ID NO: 1752406 - RNA, 17 nt, Human herpesvirus 1
gcucgugggccucuggg

SEQ ID NO: 1752407 - RNA, 13 nt, Human herpesvirus 1
ugcauauccuggg

SEQ ID NO: 1752408 - RNA, 14 nt, Human herpesvirus 1
cccgcgacccggac

SEQ ID NO: 1752409 - RNA, 13 nt, Human herpesvirus 1
uccccgcacagau

SEQ ID NO: 1752410 - RNA, 14 nt, Human herpesvirus 1
ugcgccuugggccc

SEQ ID NO: 1752411 - RNA, 19 nt, Human herpesvirus 1
caggaaauccguggccccg

SEQ ID NO: 1752412 - RNA, 22 nt, Human herpesvirus 1
cacgaggcaguuaacugucugg

SEQ ID NO: 1752413 - RNA, 14 nt, Human herpesvirus 1
gaccgucugcaaga

SEQ ID NO: 1752414 - RNA, 21 nt, Human herpesvirus 1
agcuccuggccuacgucuccg

SEQ ID NO: 1752415 - RNA, 21 nt, Human herpesvirus 1
cggcucggccuauggcuccug

SEQ ID NO: 1752416 - RNA, 15 nt, Human herpesvirus 1
uaaaagaccacacca

SEQ ID NO: 1752417 - RNA, 15 nt, Human herpesvirus 1
ucgaggugucucgca

SEQ ID NO: 1752418 - RNA, 13 nt, Human herpesvirus 1
ccggccgcaccca

SEQ ID NO: 1752419 - RNA, 17 nt, Human herpesvirus 1
cuugcgcaccuggugau

SEQ ID NO: 1752420 - RNA, 13 nt, Human herpesvirus 1
gugcuuuggaaac

SEQ ID NO: 1752421 - RNA, 17 nt, Human herpesvirus 1
gcgcuccgacgacgcgc

SEQ ID NO: 1752422 - RNA, 17 nt, Human herpesvirus 1
gccacccacgccgccuc

SEQ ID NO: 1752423 - RNA, 15 nt, Human herpesvirus 1
ccaguccccgggccc

SEQ ID NO: 1752424 - RNA, 15 nt, Human herpesvirus 1
gcccccgaggccagc

SEQ ID NO: 1752425 - RNA, 14 nt, Human herpesvirus 1
cacugccucccccg

SEQ ID NO: 1752426 - RNA, 17 nt, Human herpesvirus 1
acaauccccaggacacc

SEQ ID NO: 1752427 - RNA, 23 nt, Human herpesvirus 1
uccgccaacgcacuguggcucuc

SEQ ID NO: 1752428 - RNA, 16 nt, Human herpesvirus 1
gcagccuucucccggu

SEQ ID NO: 1752429 - RNA, 20 nt, Human herpesvirus 1
acgggcuguuccgccaggcg

SEQ ID NO: 1752430 - RNA, 20 nt, Human herpesvirus 1
cggcgagcguauaccaaccc

SEQ ID NO: 1752431 - RNA, 14 nt, Human herpesvirus 1
caucgccgcggcuc

SEQ ID NO: 1752432 - RNA, 15 nt, Human herpesvirus 1
acgcgggaggccgcc

SEQ ID NO: 1752433 - RNA, 16 nt, Human herpesvirus 1
aacccgcgcuaugacg

SEQ ID NO: 1752434 - RNA, 15 nt, Human herpesvirus 1
gccgccugguccccc

SEQ ID NO: 1752435 - RNA, 16 nt, Human herpesvirus 1
cccggacgacauggcc

SEQ ID NO: 1752436 - RNA, 19 nt, Human herpesvirus 1
aagcuagccgaggcccggg

SEQ ID NO: 1752437 - RNA, 23 nt, Human herpesvirus 1
accagcagguccgcggugggcug

SEQ ID NO: 1752438 - RNA, 14 nt, Human herpesvirus 1
cgccaaacgccagc

SEQ ID NO: 1752439 - RNA, 20 nt, Human herpesvirus 1
cggcagcaugggacccacag

SEQ ID NO: 1752440 - RNA, 16 nt, Human herpesvirus 1
ucccauuaucccauuc

SEQ ID NO: 1752441 - RNA, 17 nt, Human herpesvirus 1
acaaucgcgaccacccc

SEQ ID NO: 1752442 - RNA, 19 nt, Human herpesvirus 1
aucuuugaggaccgcgccc

SEQ ID NO: 1752443 - RNA, 13 nt, Human herpesvirus 1
augccgugccgcc

SEQ ID NO: 1752444 - RNA, 15 nt, Human herpesvirus 1
caaaauaaaagacca

SEQ ID NO: 1752445 - RNA, 18 nt, Human herpesvirus 1
cugcugcaggccccccgc

SEQ ID NO: 1752446 - RNA, 20 nt, Human herpesvirus 1
ccagccccagaaaccccgga

SEQ ID NO: 1752447 - RNA, 17 nt, Human herpesvirus 1
aucacggcaaggagcgc

SEQ ID NO: 1752448 - RNA, 15 nt, Human herpesvirus 1
cgcgggcccccggcc

SEQ ID NO: 1752449 - RNA, 18 nt, Human herpesvirus 1
cgaucccgaacgacacac

SEQ ID NO: 1752450 - RNA, 15 nt, Human herpesvirus 1
aucccaggaucacac

SEQ ID NO: 1752451 - RNA, 23 nt, Human herpesvirus 1
ggguugacgcuggggguccuggu

SEQ ID NO: 1752452 - RNA, 12 nt, Human herpesvirus 1
guucguuccggg

SEQ ID NO: 1752453 - RNA, 17 nt, Human herpesvirus 1
cauccccgcuccccaag

SEQ ID NO: 1752454 - RNA, 19 nt, Human herpesvirus 1
ugcagcgccggccuccccg

SEQ ID NO: 1752455 - RNA, 19 nt, Human herpesvirus 1
gcgcccacuacaccagcca

SEQ ID NO: 1752456 - RNA, 17 nt, Human herpesvirus 1
ucccccggcacgccugg

SEQ ID NO: 1752457 - RNA, 21 nt, Human herpesvirus 1
ccgcaagcccccaaaccccac

SEQ ID NO: 1752458 - RNA, 16 nt, Human herpesvirus 1
ggccacccccccggag

SEQ ID NO: 1752459 - RNA, 22 nt, Human herpesvirus 1
cuagcucgcggagggcggccag

SEQ ID NO: 1752460 - RNA, 12 nt, Human herpesvirus 1
cgccggagccgg

SEQ ID NO: 1752461 - RNA, 16 nt, Human herpesvirus 1
cgguccugacggccaa

SEQ ID NO: 1752462 - RNA, 15 nt, Human herpesvirus 1
cucccagggagcccc

SEQ ID NO: 1752463 - RNA, 18 nt, Human herpesvirus 1
gcgucgccccgugucugu

SEQ ID NO: 1752464 - RNA, 13 nt, Human herpesvirus 1
cgccggggcucuc

SEQ ID NO: 1752465 - RNA, 23 nt, Human herpesvirus 1
aacuggguggcggggcaggcgcc

SEQ ID NO: 1752466 - RNA, 16 nt, Human herpesvirus 1
augccgcggccauggu

SEQ ID NO: 1752467 - RNA, 13 nt, Human herpesvirus 1
ccauggaccccag

SEQ ID NO: 1752468 - RNA, 12 nt, Human herpesvirus 1
cgagaaggacaa

SEQ ID NO: 1752469 - RNA, 17 nt, Human herpesvirus 1
gcuggggcggcugggcu

SEQ ID NO: 1752470 - RNA, 15 nt, Human herpesvirus 1
acggucacccugcug

SEQ ID NO: 1752471 - RNA, 16 nt, Human herpesvirus 1
ccuucauguccaaccc

SEQ ID NO: 1752472 - RNA, 19 nt, Human herpesvirus 1
aucgcgaccaccccaaaua

SEQ ID NO: 1752473 - RNA, 12 nt, Human herpesvirus 1
guccccuggggc

SEQ ID NO: 1752474 - RNA, 16 nt, Human herpesvirus 1
gccucaacauaccccg

SEQ ID NO: 1752475 - RNA, 23 nt, Human herpesvirus 1
agccgccacccucucuucccuca

SEQ ID NO: 1752476 - RNA, 20 nt, Human herpesvirus 1
guccagcgccgcaaccagcu

SEQ ID NO: 1752477 - RNA, 19 nt, Human herpesvirus 1
gcgaguccugcgccccgcc

SEQ ID NO: 1752478 - RNA, 17 nt, Human herpesvirus 1
ccgcccgugcugccguc

SEQ ID NO: 1752479 - RNA, 18 nt, Human herpesvirus 1
gccccuggcgccgccugg

SEQ ID NO: 1752480 - RNA, 17 nt, Human herpesvirus 1
acccaaccaaaccaggc

SEQ ID NO: 1752481 - RNA, 23 nt, Human herpesvirus 1
uaaccgaccgcagucccugaguu

SEQ ID NO: 1752482 - RNA, 12 nt, Human herpesvirus 1
ggcgacacaccu

SEQ ID NO: 1752483 - RNA, 23 nt, Human herpesvirus 1
gugccgcccguugcagggccugg

SEQ ID NO: 1752484 - RNA, 15 nt, Human herpesvirus 1
gcccacuacaccagc

SEQ ID NO: 1752485 - RNA, 15 nt, Human herpesvirus 1
cuugaggggggagau

SEQ ID NO: 1752486 - RNA, 13 nt, Human herpesvirus 1
cguguuugcccau

SEQ ID NO: 1752487 - RNA, 12 nt, Human herpesvirus 1
cgauuggcaaug

SEQ ID NO: 1752488 - RNA, 13 nt, Human herpesvirus 1
ccggcgccgcccg

SEQ ID NO: 1752489 - RNA, 17 nt, Human herpesvirus 1
cgcgaccucaccaccaa

SEQ ID NO: 1752490 - RNA, 15 nt, Human herpesvirus 1
cgaccgcagucccug

SEQ ID NO: 1752491 - RNA, 14 nt, Human herpesvirus 1
cauaucccacccug

SEQ ID NO: 1752492 - RNA, 21 nt, Human herpesvirus 1
gcccgggggacucacuaccca

SEQ ID NO: 1752493 - RNA, 13 nt, Human herpesvirus 1
cccaccccccguc

SEQ ID NO: 1752494 - RNA, 17 nt, Human herpesvirus 1
ccaggaaauccguggcc

SEQ ID NO: 1752495 - RNA, 12 nt, Human herpesvirus 1
gcugucauuccu

SEQ ID NO: 1752496 - RNA, 14 nt, Human herpesvirus 1
agggaccuccugga

SEQ ID NO: 1752497 - RNA, 20 nt, Human herpesvirus 1
uccacggccacuggccggga

SEQ ID NO: 1752498 - RNA, 17 nt, Human herpesvirus 1
uuuugugccuaccgcuu

SEQ ID NO: 1752499 - RNA, 12 nt, Human herpesvirus 1
agacccccccgg

SEQ ID NO: 1752500 - RNA, 13 nt, Human herpesvirus 1
gcccggggccugc

SEQ ID NO: 1752501 - RNA, 17 nt, Human herpesvirus 1
ugccaucgcgcccccuc

SEQ ID NO: 1752502 - RNA, 22 nt, Human herpesvirus 1
cagcgccgcaaccagcugcacg

SEQ ID NO: 1752503 - RNA, 20 nt, Human herpesvirus 1
caccgacgaaucccccaagg

SEQ ID NO: 1752504 - RNA, 14 nt, Human herpesvirus 1
cccagcgaccucgc

SEQ ID NO: 1752505 - RNA, 13 nt, Human herpesvirus 1
ggucucccaggga

SEQ ID NO: 1752506 - RNA, 15 nt, Human herpesvirus 1
cugguugcggcccgc

SEQ ID NO: 1752507 - RNA, 17 nt, Human herpesvirus 1
accuucaucgaccucaa

SEQ ID NO: 1752508 - RNA, 19 nt, Human herpesvirus 1
cgcguauagccuaugccac

SEQ ID NO: 1752509 - RNA, 20 nt, Human herpesvirus 1
cccaggcggcgaacgggggc

SEQ ID NO: 1752510 - RNA, 14 nt, Human herpesvirus 1
acgcaugggccgcc

SEQ ID NO: 1752511 - RNA, 12 nt, Human herpesvirus 1
gucccgcccacc

SEQ ID NO: 1752512 - RNA, 16 nt, Human herpesvirus 1
gaccagccguccucgc

SEQ ID NO: 1752513 - RNA, 18 nt, Human herpesvirus 1
gcuacgccgcugaccccc

SEQ ID NO: 1752514 - RNA, 22 nt, Human herpesvirus 1
ccgcaauuugcacccagccuuu

SEQ ID NO: 1752515 - RNA, 20 nt, Human herpesvirus 1
cgccucccccacauccggga

SEQ ID NO: 1752516 - RNA, 17 nt, Human herpesvirus 1
acgaugaccgcccccag

SEQ ID NO: 1752517 - RNA, 17 nt, Human herpesvirus 1
caucccccgucuggguu

SEQ ID NO: 1752518 - RNA, 13 nt, Human herpesvirus 1
cccuaccccaguc

SEQ ID NO: 1752519 - RNA, 22 nt, Human herpesvirus 1
gugucugcuccccaccccggag

SEQ ID NO: 1752520 - RNA, 17 nt, Human herpesvirus 1
ccacgugcacagccugg

SEQ ID NO: 1752521 - RNA, 15 nt, Human herpesvirus 1
caccggcggaccccc

SEQ ID NO: 1752522 - RNA, 17 nt, Human herpesvirus 1
gcagcaugggacccaca

SEQ ID NO: 1752523 - RNA, 11 nt, Human herpesvirus 1
gguggagggug

SEQ ID NO: 1752524 - RNA, 20 nt, Human herpesvirus 1
ccggucuccccgggagcccc

SEQ ID NO: 1752525 - RNA, 18 nt, Human herpesvirus 1
gcccgcaaacaggagcug

SEQ ID NO: 1752526 - RNA, 14 nt, Human herpesvirus 1
guccgcggaccggc

SEQ ID NO: 1752527 - RNA, 14 nt, Human herpesvirus 1
guuuucucuucccg

SEQ ID NO: 1752528 - RNA, 16 nt, Human herpesvirus 1
aguccgcugcaccgau

SEQ ID NO: 1752529 - RNA, 17 nt, Human herpesvirus 1
ugauggcacaccggucc

SEQ ID NO: 1752530 - RNA, 18 nt, Human herpesvirus 1
aaggugggccagccgcag

SEQ ID NO: 1752531 - RNA, 15 nt, Human herpesvirus 1
cuggaccgggguccc

SEQ ID NO: 1752532 - RNA, 14 nt, Human herpesvirus 1
guuugcccuccccc

SEQ ID NO: 1752533 - RNA, 21 nt, Human herpesvirus 1
ccaacgucgccgcccugagcg

SEQ ID NO: 1752534 - RNA, 14 nt, Human herpesvirus 1
ccggacgcgcggcg

SEQ ID NO: 1752535 - RNA, 23 nt, Human herpesvirus 1
cuugaggggggagaugggacccg

SEQ ID NO: 1752536 - RNA, 16 nt, Human herpesvirus 1
ccucauguccaccgac

SEQ ID NO: 1752537 - RNA, 22 nt, Human herpesvirus 1
ucuccuccaccacccaacccca

SEQ ID NO: 1752538 - RNA, 13 nt, Human herpesvirus 1
ugaccccagggau

SEQ ID NO: 1752539 - RNA, 15 nt, Human herpesvirus 1
gguccacggccacug

SEQ ID NO: 1752540 - RNA, 17 nt, Human herpesvirus 1
ugauuccucuccgcggu

SEQ ID NO: 1752541 - RNA, 22 nt, Human herpesvirus 1
gcgccaggcccgccgccacugu

SEQ ID NO: 1752542 - RNA, 19 nt, Human herpesvirus 1
acgcaagaccaggccuggu

SEQ ID NO: 1752543 - RNA, 22 nt, Human herpesvirus 1
ccucugggucugugccaccagc

SEQ ID NO: 1752544 - RNA, 14 nt, Human herpesvirus 1
gccaaccugauccg

SEQ ID NO: 1752545 - RNA, 20 nt, Human herpesvirus 1
caauaaaagaccacaccaac

SEQ ID NO: 1752546 - RNA, 17 nt, Human herpesvirus 1
accccaccccugugcua

SEQ ID NO: 1752547 - RNA, 23 nt, Human herpesvirus 1
ucuucggccccgcgucuggcccc

SEQ ID NO: 1752548 - RNA, 22 nt, Human herpesvirus 1
uccgguccuggaccagcugacc

SEQ ID NO: 1752549 - RNA, 23 nt, Human herpesvirus 1
uauguccccaaaauaaaagacca

SEQ ID NO: 1752550 - RNA, 13 nt, Human herpesvirus 1
uuaaccaccugcg

SEQ ID NO: 1752551 - RNA, 14 nt, Human herpesvirus 1
ggccaagcuagccg

SEQ ID NO: 1752552 - RNA, 14 nt, Human herpesvirus 1
uacacagccaccca

SEQ ID NO: 1752553 - RNA, 12 nt, Human herpesvirus 1
uauuccugccga

SEQ ID NO: 1752554 - RNA, 21 nt, Human herpesvirus 1
acaccagcgggucuuuugugu

SEQ ID NO: 1752555 - RNA, 15 nt, Human herpesvirus 1
ccgucggaggccccc

SEQ ID NO: 1752556 - RNA, 19 nt, Human herpesvirus 1
gcacuugcggcaagacccg

SEQ ID NO: 1752557 - RNA, 14 nt, Human herpesvirus 1
gcgccuagccaacc

SEQ ID NO: 1752558 - RNA, 14 nt, Human herpesvirus 1
cacacaccccccau

SEQ ID NO: 1752559 - RNA, 17 nt, Human herpesvirus 1
caggccaucgccgggga

SEQ ID NO: 1752560 - RNA, 23 nt, Human herpesvirus 1
cagggcgacgccgugggcaaugg

SEQ ID NO: 1752561 - RNA, 22 nt, Human herpesvirus 1
agcuguccgagacccccaacgc

SEQ ID NO: 1752562 - RNA, 13 nt, Human herpesvirus 1
gaggggggagggg

SEQ ID NO: 1752563 - RNA, 15 nt, Human herpesvirus 1
ucccccgaccucgcc

SEQ ID NO: 1752564 - RNA, 14 nt, Human herpesvirus 1
cuuaccgccacagg

SEQ ID NO: 1752565 - RNA, 20 nt, Human herpesvirus 1
gaacggacacgcggggacac

SEQ ID NO: 1752566 - RNA, 18 nt, Human herpesvirus 1
cgaagacaccccccacca

SEQ ID NO: 1752567 - RNA, 18 nt, Human herpesvirus 1
gggucugugccaccagcc

SEQ ID NO: 1752568 - RNA, 14 nt, Human herpesvirus 1
ggcccaacagccgc

SEQ ID NO: 1752569 - RNA, 16 nt, Human herpesvirus 1
cucgucgggguggcac

SEQ ID NO: 1752570 - RNA, 16 nt, Human herpesvirus 1
cgucgggccucccgga

SEQ ID NO: 1752571 - RNA, 22 nt, Human herpesvirus 1
ccuccgcgccaggcccgccgcc

SEQ ID NO: 1752572 - RNA, 21 nt, Human herpesvirus 1
gacccccaacgccacgcagcc

SEQ ID NO: 1752573 - RNA, 15 nt, Human herpesvirus 1
cuucaucgaccucaa

SEQ ID NO: 1752574 - RNA, 15 nt, Human herpesvirus 1
gucgucgggcgccaa

SEQ ID NO: 1752575 - RNA, 23 nt, Human herpesvirus 1
cagcucgcggcccggggccugcu

SEQ ID NO: 1752576 - RNA, 20 nt, Human herpesvirus 1
caacuucccacccggagcuu

SEQ ID NO: 1752577 - RNA, 22 nt, Human herpesvirus 1
ggauccgacccccauggagcac

SEQ ID NO: 1752578 - RNA, 15 nt, Human herpesvirus 1
gccacccacccacca

SEQ ID NO: 1752579 - RNA, 17 nt, Human herpesvirus 1
cccguaaaugguugcag

SEQ ID NO: 1752580 - RNA, 20 nt, Human herpesvirus 1
gaagaucgccggguggcacg

SEQ ID NO: 1752581 - RNA, 21 nt, Human herpesvirus 1
cgccggcaugcaccccagagg

SEQ ID NO: 1752582 - RNA, 22 nt, Human herpesvirus 1
cgccgagccccccgcugcggcc

SEQ ID NO: 1752583 - RNA, 12 nt, Human herpesvirus 1
cgcgccucccgg

SEQ ID NO: 1752584 - RNA, 22 nt, Human herpesvirus 1
aacucucgcaccaucccggguu

SEQ ID NO: 1752585 - RNA, 14 nt, Human herpesvirus 1
uuggcugaggacgu

SEQ ID NO: 1752586 - RNA, 21 nt, Human herpesvirus 1
gucuggguuuuccccucccgu

SEQ ID NO: 1752587 - RNA, 15 nt, Human herpesvirus 1
cguggacgggcucgc

SEQ ID NO: 1752588 - RNA, 16 nt, Human herpesvirus 1
gacgagccgcgcgccg

SEQ ID NO: 1752589 - RNA, 21 nt, Human herpesvirus 1
ggaacacacccccgugacuca

SEQ ID NO: 1752590 - RNA, 21 nt, Human herpesvirus 1
ccguugcccgggccuccucaa

SEQ ID NO: 1752591 - RNA, 19 nt, Human herpesvirus 1
cgcggcuucaucgcgcccc

SEQ ID NO: 1752592 - RNA, 15 nt, Human herpesvirus 1
gugggugaugucggg

SEQ ID NO: 1752593 - RNA, 17 nt, Human herpesvirus 1
uggacgcgccucccggg

SEQ ID NO: 1752594 - RNA, 19 nt, Human herpesvirus 1
ggucugggaacggacacgc

SEQ ID NO: 1752595 - RNA, 13 nt, Human herpesvirus 1
gcgccgcgggccc

SEQ ID NO: 1752596 - RNA, 21 nt, Human herpesvirus 1
auccaaaaccacaaccucccg

SEQ ID NO: 1752597 - RNA, 14 nt, Human herpesvirus 1
cauccaccacccgg

SEQ ID NO: 1752598 - RNA, 20 nt, Human herpesvirus 1
gaccgcccccagcugggccc

SEQ ID NO: 1752599 - RNA, 21 nt, Human herpesvirus 1
gggucgcucuguccaccggga

SEQ ID NO: 1752600 - RNA, 19 nt, Human herpesvirus 1
ccuuccccccccccccuua

SEQ ID NO: 1752601 - RNA, 16 nt, Human herpesvirus 1
aucccacguccccggg

SEQ ID NO: 1752602 - RNA, 19 nt, Human herpesvirus 1
gccuucacgugcugcugcg

SEQ ID NO: 1752603 - RNA, 15 nt, Human herpesvirus 1
accgcagccuggucg

SEQ ID NO: 1752604 - RNA, 18 nt, Human herpesvirus 1
cuuggccggggagggcag

SEQ ID NO: 1752605 - RNA, 20 nt, Human herpesvirus 1
gcauccccccgucagccugc

SEQ ID NO: 1752606 - RNA, 16 nt, Human herpesvirus 1
cugcccuucugucugg

SEQ ID NO: 1752607 - RNA, 22 nt, Human herpesvirus 1
acaaccccggucucccagggag

SEQ ID NO: 1752608 - RNA, 13 nt, Human herpesvirus 1
ccgacggacagcc

SEQ ID NO: 1752609 - RNA, 18 nt, Human herpesvirus 1
cgcuggggguccuggugg

SEQ ID NO: 1752610 - RNA, 16 nt, Human herpesvirus 1
uguggacgccggggcc

SEQ ID NO: 1752611 - RNA, 21 nt, Human herpesvirus 1
ggauacacaaacuuccccccc

SEQ ID NO: 1752612 - RNA, 15 nt, Human herpesvirus 1
acagcauggcgccac

SEQ ID NO: 1752613 - RNA, 19 nt, Human herpesvirus 1
cccugcgguccggagccgc

SEQ ID NO: 1752614 - RNA, 19 nt, Human herpesvirus 1
ugucggggaggggaaaagu

SEQ ID NO: 1752615 - RNA, 18 nt, Human herpesvirus 1
ucgcggagggcggccagc

SEQ ID NO: 1752616 - RNA, 14 nt, Human herpesvirus 1
uguccucgggacau

SEQ ID NO: 1752617 - RNA, 14 nt, Human herpesvirus 1
aaauuuuacaaaca

SEQ ID NO: 1752618 - RNA, 15 nt, Human herpesvirus 1
agcacccugcugccc

SEQ ID NO: 1752619 - RNA, 23 nt, Human herpesvirus 1
gacucaagcacacacgggggagc

SEQ ID NO: 1752620 - RNA, 19 nt, Human herpesvirus 1
cugccccccccaccccaga

SEQ ID NO: 1752621 - RNA, 17 nt, Human herpesvirus 1
cgaccuguugauggccu

SEQ ID NO: 1752622 - RNA, 23 nt, Human herpesvirus 1
gcucgucagggccggcggcgcuc

SEQ ID NO: 1752623 - RNA, 12 nt, Human herpesvirus 1
ccaccgggccca

SEQ ID NO: 1752624 - RNA, 20 nt, Human herpesvirus 1
gugugaguuuguggacccaa

SEQ ID NO: 1752625 - RNA, 13 nt, Human herpesvirus 1
cgcccggggccag

SEQ ID NO: 1752626 - RNA, 23 nt, Human herpesvirus 1
accaggaaauccguggccccggc

SEQ ID NO: 1752627 - RNA, 13 nt, Human herpesvirus 1
acgagcuccuggc

SEQ ID NO: 1752628 - RNA, 14 nt, Human herpesvirus 1
gcuuggagccagcc

SEQ ID NO: 1752629 - RNA, 18 nt, Human herpesvirus 1
cccaguccccgggcccag

SEQ ID NO: 1752630 - RNA, 13 nt, Human herpesvirus 1
cucgugugguaca

SEQ ID NO: 1752631 - RNA, 19 nt, Human herpesvirus 1
gacgucgagaaggacaaac

SEQ ID NO: 1752632 - RNA, 18 nt, Human herpesvirus 1
acgcccgcgacccggacg

SEQ ID NO: 1752633 - RNA, 14 nt, Human herpesvirus 1
ggaaggaacccgcg

SEQ ID NO: 1752634 - RNA, 20 nt, Human herpesvirus 1
cagcgaagcagccgccuggc

SEQ ID NO: 1752635 - RNA, 20 nt, Human herpesvirus 1
ccccgcgccucccggcccgu

SEQ ID NO: 1752636 - RNA, 19 nt, Human herpesvirus 1
ccccugccccccccacccc

SEQ ID NO: 1752637 - RNA, 14 nt, Human herpesvirus 1
ccucugggcccgcc

SEQ ID NO: 1752638 - RNA, 17 nt, Human herpesvirus 1
auuuguacccuuaauaa

SEQ ID NO: 1752639 - RNA, 16 nt, Human herpesvirus 1
uggaucuuagccuccc

SEQ ID NO: 1752640 - RNA, 23 nt, Human herpesvirus 1
gccccgacgcacccccccaacgg

SEQ ID NO: 1752641 - RNA, 16 nt, Human herpesvirus 1
cgccguugagccccuc

SEQ ID NO: 1752642 - RNA, 16 nt, Human herpesvirus 1
ucggucccccgaggcc

SEQ ID NO: 1752643 - RNA, 14 nt, Human herpesvirus 1
guuggcccccgccu

SEQ ID NO: 1752644 - RNA, 21 nt, Human herpesvirus 1
gacuaagcgucccugggcccu

SEQ ID NO: 1752645 - RNA, 21 nt, Human herpesvirus 1
ggccgcgguggacagccagga

SEQ ID NO: 1752646 - RNA, 13 nt, Human herpesvirus 1
uaaaagaccaaaa

SEQ ID NO: 1752647 - RNA, 13 nt, Human herpesvirus 1
gaccagauggaag

SEQ ID NO: 1752648 - RNA, 23 nt, Human herpesvirus 1
cgaggaggacgucuccaagcuuu

SEQ ID NO: 1752649 - RNA, 13 nt, Human herpesvirus 1
acccucucuucuc

SEQ ID NO: 1752650 - RNA, 18 nt, Human herpesvirus 1
ucucucccgggccgcccc

SEQ ID NO: 1752651 - RNA, 20 nt, Human herpesvirus 1
ggcgggccuaccggacccgu

SEQ ID NO: 1752652 - RNA, 23 nt, Human herpesvirus 1
cucugggggcgacccguaaaugg

SEQ ID NO: 1752653 - RNA, 20 nt, Human herpesvirus 1
ggcccagcauguccgccggg

SEQ ID NO: 1752654 - RNA, 18 nt, Human herpesvirus 1
gggucuccgaaagccacc

SEQ ID NO: 1752655 - RNA, 17 nt, Human herpesvirus 1
cuuccccccccccccuu

SEQ ID NO: 1752656 - RNA, 16 nt, Human herpesvirus 1
ggcacguacacgggug

SEQ ID NO: 1752657 - RNA, 14 nt, Human herpesvirus 1
gguugcggcccgcg

SEQ ID NO: 1752658 - RNA, 18 nt, Human herpesvirus 1
aggcccgcaagcugaacc

SEQ ID NO: 1752659 - RNA, 20 nt, Human herpesvirus 1
aucgcucgaccucuccacac

SEQ ID NO: 1752660 - RNA, 13 nt, Human herpesvirus 1
gcggcgugugggg

SEQ ID NO: 1752661 - RNA, 16 nt, Human herpesvirus 1
gccugccucucccccc

SEQ ID NO: 1752662 - RNA, 15 nt, Human herpesvirus 1
uauccuggagcaccg

SEQ ID NO: 1752663 - RNA, 17 nt, Human herpesvirus 1
ugcugcggcccacccug

SEQ ID NO: 1752664 - RNA, 23 nt, Human herpesvirus 1
gcccugguguuucuggggagcug

SEQ ID NO: 1752665 - RNA, 20 nt, Human herpesvirus 1
acgaugaccgcccccagcug

SEQ ID NO: 1752666 - RNA, 20 nt, Human herpesvirus 1
gaccgacagcacucacagcc

SEQ ID NO: 1752667 - RNA, 14 nt, Human herpesvirus 1
ccgccuagccgcag

SEQ ID NO: 1752668 - RNA, 23 nt, Human herpesvirus 1
accccaguccccgggcccagccu

SEQ ID NO: 1752669 - RNA, 13 nt, Human herpesvirus 1
ccgacgccagcuu

SEQ ID NO: 1752670 - RNA, 22 nt, Human herpesvirus 1
ccggcccuaaccccaccccugu

SEQ ID NO: 1752671 - RNA, 19 nt, Human herpesvirus 1
uugcacaacacaaacaucu

SEQ ID NO: 1752672 - RNA, 19 nt, Human herpesvirus 1
cuguacucgacccacugcc

SEQ ID NO: 1752673 - RNA, 14 nt, Human herpesvirus 1
guggugcgagcugc

SEQ ID NO: 1752674 - RNA, 21 nt, Human herpesvirus 1
cuaucccgcccaccgcugggc

SEQ ID NO: 1752675 - RNA, 22 nt, Human herpesvirus 1
acggcgaaugcagcgccggccu

SEQ ID NO: 1752676 - RNA, 17 nt, Human herpesvirus 1
uuuucgccgcccucgcc

SEQ ID NO: 1752677 - RNA, 13 nt, Human herpesvirus 1
ccguugcccgggc

SEQ ID NO: 1752678 - RNA, 20 nt, Human herpesvirus 1
caccaccgucagcaccuuca

SEQ ID NO: 1752679 - RNA, 16 nt, Human herpesvirus 1
caaaaaccgccccccc

SEQ ID NO: 1752680 - RNA, 19 nt, Human herpesvirus 1
gaaccccaacgccaucgcc

SEQ ID NO: 1752681 - RNA, 14 nt, Human herpesvirus 1
gcgcgaucccccgc

SEQ ID NO: 1752682 - RNA, 22 nt, Human herpesvirus 1
caccuccggagcgugacgcacc

SEQ ID NO: 1752683 - RNA, 20 nt, Human herpesvirus 1
cuccucuucuccccuucccu

SEQ ID NO: 1752684 - RNA, 20 nt, Human herpesvirus 1
ggguaccgcgugaccccagg

SEQ ID NO: 1752685 - RNA, 19 nt, Human herpesvirus 1
cuugggcccgggggccugg

SEQ ID NO: 1752686 - RNA, 20 nt, Human herpesvirus 1
ucgagccaacgcccugacca

SEQ ID NO: 1752687 - RNA, 20 nt, Human herpesvirus 1
ggcccgccaucugggauggc

SEQ ID NO: 1752688 - RNA, 20 nt, Human herpesvirus 1
cagcuggugcuuuuccacaa

SEQ ID NO: 1752689 - RNA, 12 nt, Human herpesvirus 1
uuccccucccgu

SEQ ID NO: 1752690 - RNA, 18 nt, Human herpesvirus 1
cagcuuuccgcugagccu

SEQ ID NO: 1752691 - RNA, 12 nt, Human herpesvirus 1
acgcgcuaacgg

SEQ ID NO: 1752692 - RNA, 12 nt, Human herpesvirus 1
ugugggguccuc

SEQ ID NO: 1752693 - RNA, 15 nt, Human herpesvirus 1
accgucauccacacc

SEQ ID NO: 1752694 - RNA, 15 nt, Human herpesvirus 1
uccacgaacccagcg

SEQ ID NO: 1752695 - RNA, 14 nt, Human herpesvirus 1
cgccccccccccgu

SEQ ID NO: 1752696 - RNA, 19 nt, Human herpesvirus 1
gccagcagacgcugcuccg

SEQ ID NO: 1752697 - RNA, 17 nt, Human herpesvirus 1
caggguaccgcgugacc

SEQ ID NO: 1752698 - RNA, 21 nt, Human herpesvirus 1
uccccuucccucccccuccgc

SEQ ID NO: 1752699 - RNA, 15 nt, Human herpesvirus 1
gccguccgaacccag

SEQ ID NO: 1752700 - RNA, 16 nt, Human herpesvirus 1
acgagcuccuggccua

SEQ ID NO: 1752701 - RNA, 22 nt, Human herpesvirus 1
ggacgacggcggcgaggccggc

SEQ ID NO: 1752702 - RNA, 18 nt, Human herpesvirus 1
gcaaccagcugcacgacc

SEQ ID NO: 1752703 - RNA, 15 nt, Human herpesvirus 1
cccugaguugggaau

SEQ ID NO: 1752704 - RNA, 14 nt, Human herpesvirus 1
cguguuugcccaua

SEQ ID NO: 1752705 - RNA, 22 nt, Human herpesvirus 1
ucaccggguacggcgucugggc

SEQ ID NO: 1752706 - RNA, 21 nt, Human herpesvirus 1
ccagccuucacgugcugcugc

SEQ ID NO: 1752707 - RNA, 20 nt, Human herpesvirus 1
aacgcaacggcgggagcugg

SEQ ID NO: 1752708 - RNA, 16 nt, Human herpesvirus 1
cgguacgaagaccagg

SEQ ID NO: 1752709 - RNA, 17 nt, Human herpesvirus 1
guuguuagcccugcucg

SEQ ID NO: 1752710 - RNA, 20 nt, Human herpesvirus 1
guagcgccccggcgacccug

SEQ ID NO: 1752711 - RNA, 16 nt, Human herpesvirus 1
gggaugcuagccugug

SEQ ID NO: 1752712 - RNA, 17 nt, Human herpesvirus 1
cuacaacaagucucugg

SEQ ID NO: 1752713 - RNA, 21 nt, Human herpesvirus 1
gcgaggugcgguuggggaggc

SEQ ID NO: 1752714 - RNA, 14 nt, Human herpesvirus 1
gcgcgggggcgccg

SEQ ID NO: 1752715 - RNA, 14 nt, Human herpesvirus 1
uacugcugggccau

SEQ ID NO: 1752716 - RNA, 16 nt, Human herpesvirus 1
gcaacucgccccacga

SEQ ID NO: 1752717 - RNA, 13 nt, Human herpesvirus 1
cagucccugaguu

SEQ ID NO: 1752718 - RNA, 20 nt, Human herpesvirus 1
gagccucugugucagguggc

SEQ ID NO: 1752719 - RNA, 19 nt, Human herpesvirus 1
ucccgacaccaccagcugg

SEQ ID NO: 1752720 - RNA, 18 nt, Human herpesvirus 1
gccggucggcgggcccgc

SEQ ID NO: 1752721 - RNA, 17 nt, Human herpesvirus 1
ggcccagcauguccgcc

SEQ ID NO: 1752722 - RNA, 16 nt, Human herpesvirus 1
aauuucaccgccccag

SEQ ID NO: 1752723 - RNA, 22 nt, Human herpesvirus 1
gcggcauaacuccgaccggcgg

SEQ ID NO: 1752724 - RNA, 13 nt, Human herpesvirus 1
uuacguacaacca

SEQ ID NO: 1752725 - RNA, 22 nt, Human herpesvirus 1
acccgccccuaaccaggccucc

SEQ ID NO: 1752726 - RNA, 12 nt, Human herpesvirus 1
cgacgaccuggg

SEQ ID NO: 1752727 - RNA, 15 nt, Human herpesvirus 1
caucucgcgccccga

SEQ ID NO: 1752728 - RNA, 19 nt, Human herpesvirus 1
ucgagccaacgcccugacc

SEQ ID NO: 1752729 - RNA, 21 nt, Human herpesvirus 1
gucgucucucuucccccccau

SEQ ID NO: 1752730 - RNA, 19 nt, Human herpesvirus 1
cggaggaaacccccgaccc

SEQ ID NO: 1752731 - RNA, 19 nt, Human herpesvirus 1
gccccccccaccccagacg

SEQ ID NO: 1752732 - RNA, 19 nt, Human herpesvirus 1
cgggcgccuucccccggcc

SEQ ID NO: 1752733 - RNA, 13 nt, Human herpesvirus 1
cgagggccgggcc

SEQ ID NO: 1752734 - RNA, 18 nt, Human herpesvirus 1
gcccguugcagggccugg

SEQ ID NO: 1752735 - RNA, 13 nt, Human herpesvirus 1
aauaaauuuuaca

SEQ ID NO: 1752736 - RNA, 21 nt, Human herpesvirus 1
cccgcugcgcauccccccguc

SEQ ID NO: 1752737 - RNA, 16 nt, Human herpesvirus 1
ggucugucucgucucc

SEQ ID NO: 1752738 - RNA, 20 nt, Human herpesvirus 1
agggaccuccuggacuuuga

SEQ ID NO: 1752739 - RNA, 17 nt, Human herpesvirus 1
agucccugaguugggaa

SEQ ID NO: 1752740 - RNA, 21 nt, Human herpesvirus 1
ggaggggaaaagugaaagaca

SEQ ID NO: 1752741 - RNA, 16 nt, Human herpesvirus 1
gcgaagacgaggcggc

SEQ ID NO: 1752742 - RNA, 21 nt, Human herpesvirus 1
gacaaccccggucucccaggg

SEQ ID NO: 1752743 - RNA, 23 nt, Human herpesvirus 1
cacgaccuguugauggccugugc

SEQ ID NO: 1752744 - RNA, 15 nt, Human herpesvirus 1
ccccacgacacccac

SEQ ID NO: 1752745 - RNA, 15 nt, Human herpesvirus 1
gcucgucgccuggcu

SEQ ID NO: 1752746 - RNA, 15 nt, Human herpesvirus 1
cuggaugcgccgcca

SEQ ID NO: 1752747 - RNA, 22 nt, Human herpesvirus 1
cagacgguggugcccagcggcc

SEQ ID NO: 1752748 - RNA, 18 nt, Human herpesvirus 1
gacgucuccaagcuuucc

SEQ ID NO: 1752749 - RNA, 15 nt, Human herpesvirus 1
ccaacgcguccgugg

SEQ ID NO: 1752750 - RNA, 15 nt, Human herpesvirus 1
agccuuuaacuacau

SEQ ID NO: 1752751 - RNA, 20 nt, Human herpesvirus 1
ugcuuauucucggggagcuu

SEQ ID NO: 1752752 - RNA, 13 nt, Human herpesvirus 1
accguggccuggg

SEQ ID NO: 1752753 - RNA, 20 nt, Human herpesvirus 1
ccuaugguacacacgggugc

SEQ ID NO: 1752754 - RNA, 21 nt, Human herpesvirus 1
ccgccagcgcggcggggcccg

SEQ ID NO: 1752755 - RNA, 17 nt, Human herpesvirus 1
gcgaguccugcgccccg

SEQ ID NO: 1752756 - RNA, 13 nt, Human herpesvirus 1
gccgacggcccga

SEQ ID NO: 1752757 - RNA, 14 nt, Human herpesvirus 1
ccgugcaccguggg

SEQ ID NO: 1752758 - RNA, 17 nt, Human herpesvirus 1
gccggucgccgugcucc

SEQ ID NO: 1752759 - RNA, 15 nt, Human herpesvirus 1
gaacgaggcccgcaa

SEQ ID NO: 1752760 - RNA, 21 nt, Human herpesvirus 1
guuaacugucuggagacccua

SEQ ID NO: 1752761 - RNA, 15 nt, Human herpesvirus 1
gccgcgcggaggcgu

SEQ ID NO: 1752762 - RNA, 20 nt, Human herpesvirus 1
cggacccucucuucucuccc

SEQ ID NO: 1752763 - RNA, 18 nt, Human herpesvirus 1
cgggggacucacuaccca

SEQ ID NO: 1752764 - RNA, 13 nt, Human herpesvirus 1
gcccgcuggggcg

SEQ ID NO: 1752765 - RNA, 15 nt, Human herpesvirus 1
auaugccuguguguc

SEQ ID NO: 1752766 - RNA, 17 nt, Human herpesvirus 1
ccgcccccaacaggugg

SEQ ID NO: 1752767 - RNA, 22 nt, Human herpesvirus 1
cgccggcggucgcgcuccucug

SEQ ID NO: 1752768 - RNA, 14 nt, Human herpesvirus 1
ggacaccccccaug

SEQ ID NO: 1752769 - RNA, 16 nt, Human herpesvirus 1
cucaugauccucaucg

SEQ ID NO: 1752770 - RNA, 19 nt, Human herpesvirus 1
acaaacgacccaccaauaa

SEQ ID NO: 1752771 - RNA, 13 nt, Human herpesvirus 1
cggcgcggggccc

SEQ ID NO: 1752772 - RNA, 21 nt, Human herpesvirus 1
ccugcucgggcaggugcagac

SEQ ID NO: 1752773 - RNA, 18 nt, Human herpesvirus 1
acggccacuggccgggag

SEQ ID NO: 1752774 - RNA, 24 nt, Human herpesvirus 1
cccggcgggguuauaggccacgca

SEQ ID NO: 1752775 - RNA, 18 nt, Human herpesvirus 1
gacgcucccgucgcccga

SEQ ID NO: 1752776 - RNA, 20 nt, Human herpesvirus 1
ugguggcaccuccccagcgg

SEQ ID NO: 1752777 - RNA, 18 nt, Human herpesvirus 1
ggcgcuggguggucucug

SEQ ID NO: 1752778 - RNA, 16 nt, Human herpesvirus 1
gaacacaaggccaaga

SEQ ID NO: 1752779 - RNA, 17 nt, Human herpesvirus 1
auggcccuggugucugc

SEQ ID NO: 1752780 - RNA, 15 nt, Human herpesvirus 1
ccgacagcacucaca

SEQ ID NO: 1752781 - RNA, 17 nt, Human herpesvirus 1
agccauauccugagccc

SEQ ID NO: 1752782 - RNA, 15 nt, Human herpesvirus 1
ccgagcuuguuuucg

SEQ ID NO: 1752783 - RNA, 17 nt, Human herpesvirus 1
cgacccccuuguauguc

SEQ ID NO: 1752784 - RNA, 22 nt, Human herpesvirus 1
augaagccacuguuuuccgccc

SEQ ID NO: 1752785 - RNA, 17 nt, Human herpesvirus 1
uacgggcuguuccgcca

SEQ ID NO: 1752786 - RNA, 19 nt, Human herpesvirus 1
ugucugccauggagcgcac

SEQ ID NO: 1752787 - RNA, 17 nt, Human herpesvirus 1
ccgggcgcuuggcaugc

SEQ ID NO: 1752788 - RNA, 18 nt, Human herpesvirus 1
ccagaccgaagaggugcu

SEQ ID NO: 1752789 - RNA, 13 nt, Human herpesvirus 1
cacgagccggggc

SEQ ID NO: 1752790 - RNA, 18 nt, Human herpesvirus 1
ccggggcccggcccugcu

SEQ ID NO: 1752791 - RNA, 16 nt, Human herpesvirus 1
guccucaccgagccuc

SEQ ID NO: 1752792 - RNA, 22 nt, Human herpesvirus 1
cgggcgguucgccgccaccagc

SEQ ID NO: 1752793 - RNA, 15 nt, Human herpesvirus 1
ccgccgcgccccgcc

SEQ ID NO: 1752794 - RNA, 20 nt, Human herpesvirus 1
cucccccguagaucucugua

SEQ ID NO: 1752795 - RNA, 19 nt, Human herpesvirus 1
cgccagcgcggcggggccc

SEQ ID NO: 1752796 - RNA, 14 nt, Human herpesvirus 1
cugguccacaccca

SEQ ID NO: 1752797 - RNA, 16 nt, Human herpesvirus 1
gaaggcgcuuccccgc

SEQ ID NO: 1752798 - RNA, 12 nt, Human herpesvirus 1
ggguaccacagg

SEQ ID NO: 1752799 - RNA, 13 nt, Human herpesvirus 1
cccggggccugcu

SEQ ID NO: 1752800 - RNA, 19 nt, Human herpesvirus 1
cacucaaaaagccccaaag

SEQ ID NO: 1752801 - RNA, 23 nt, Human herpesvirus 1
gugacgcgccaaacgccagccug

SEQ ID NO: 1752802 - RNA, 14 nt, Human herpesvirus 1
gccgcgggccacgc

SEQ ID NO: 1752803 - RNA, 18 nt, Human herpesvirus 1
uccagccuccccuccagg

SEQ ID NO: 1752804 - RNA, 19 nt, Human herpesvirus 1
agucccugaguugggaaua

SEQ ID NO: 1752805 - RNA, 17 nt, Human herpesvirus 1
gcgcccacuacaccagc

SEQ ID NO: 1752806 - RNA, 13 nt, Human herpesvirus 1
cacgaccugcgcu

SEQ ID NO: 1752807 - RNA, 13 nt, Human herpesvirus 1
cacacaccagcgg

SEQ ID NO: 1752808 - RNA, 19 nt, Human herpesvirus 1
gggcuguacucgacccacu

SEQ ID NO: 1752809 - RNA, 12 nt, Human herpesvirus 1
gccacacccgcg

SEQ ID NO: 1752810 - RNA, 15 nt, Human herpesvirus 1
aggugggccagccgc

SEQ ID NO: 1752811 - RNA, 13 nt, Human herpesvirus 1
gauuccgagggcc

SEQ ID NO: 1752812 - RNA, 18 nt, Human herpesvirus 1
ggugacgccgacgaggac

SEQ ID NO: 1752813 - RNA, 13 nt, Human herpesvirus 1
cgggccgcccacu

SEQ ID NO: 1752814 - RNA, 23 nt, Human herpesvirus 1
gcaccgagccaagggcuccugua

SEQ ID NO: 1752815 - RNA, 17 nt, Human herpesvirus 1
uccccuucccucccccu

SEQ ID NO: 1752816 - RNA, 23 nt, Human herpesvirus 1
gcauccacccuccgcuggggccc

SEQ ID NO: 1752817 - RNA, 12 nt, Human herpesvirus 1
ccccgccaccca

SEQ ID NO: 1752818 - RNA, 13 nt, Human herpesvirus 1
guccuucuugucg

SEQ ID NO: 1752819 - RNA, 23 nt, Human herpesvirus 1
ugggccucucguucuccggggcc

SEQ ID NO: 1752820 - RNA, 13 nt, Human herpesvirus 1
cgcgccucccggg

SEQ ID NO: 1752821 - RNA, 13 nt, Human herpesvirus 1
cgcggcucccggc

SEQ ID NO: 1752822 - RNA, 21 nt, Human herpesvirus 1
gcuccagucccggcccggcgg

SEQ ID NO: 1752823 - RNA, 16 nt, Human herpesvirus 1
gccccaguccccaaga

SEQ ID NO: 1752824 - RNA, 19 nt, Human herpesvirus 1
cugccccgcuucauccccg

SEQ ID NO: 1752825 - RNA, 18 nt, Human herpesvirus 1
cccacuacaccagccaau

SEQ ID NO: 1752826 - RNA, 15 nt, Human herpesvirus 1
gcaucggaacacgcc

SEQ ID NO: 1752827 - RNA, 22 nt, Human herpesvirus 1
ggccgccccgaagagggggacc

SEQ ID NO: 1752828 - RNA, 17 nt, Human herpesvirus 1
gaccuggggucgcucug

SEQ ID NO: 1752829 - RNA, 21 nt, Human herpesvirus 1
gggccauggacagcgaccugg

SEQ ID NO: 1752830 - RNA, 18 nt, Human herpesvirus 1
agccccggucuccccggg

SEQ ID NO: 1752831 - RNA, 21 nt, Human herpesvirus 1
cccggcccggaggaggcucuc

SEQ ID NO: 1752832 - RNA, 20 nt, Human herpesvirus 1
gccccggggagacagcgccu

SEQ ID NO: 1752833 - RNA, 22 nt, Human herpesvirus 1
uggucgaucccgaacgacacac

SEQ ID NO: 1752834 - RNA, 11 nt, Human herpesvirus 1
cguuggccccc

SEQ ID NO: 1752835 - RNA, 11 nt, Human herpesvirus 1
augccuguggg

SEQ ID NO: 1752836 - RNA, 16 nt, Human herpesvirus 1
auccgaacgcagcccc

SEQ ID NO: 1752837 - RNA, 19 nt, Human herpesvirus 1
caucgccucggccaccgug

SEQ ID NO: 1752838 - RNA, 19 nt, Human herpesvirus 1
ucggccuauggcuccugcg

SEQ ID NO: 1752839 - RNA, 23 nt, Human herpesvirus 1
ggaggugcuucuguuuggcgccc

SEQ ID NO: 1752840 - RNA, 16 nt, Human herpesvirus 1
cgaucccaacuccuca

SEQ ID NO: 1752841 - RNA, 19 nt, Human herpesvirus 1
acccuaugguacacacggg

SEQ ID NO: 1752842 - RNA, 15 nt, Human herpesvirus 1
gcagaggcggccaga

SEQ ID NO: 1752843 - RNA, 23 nt, Human herpesvirus 1
gaaccguggucgaggugucucgc

SEQ ID NO: 1752844 - RNA, 15 nt, Human herpesvirus 1
gcgccggucgucacg

SEQ ID NO: 1752845 - RNA, 16 nt, Human herpesvirus 1
ggguauauaaggccug

SEQ ID NO: 1752846 - RNA, 16 nt, Human herpesvirus 1
guggucuucaaggaga

SEQ ID NO: 1752847 - RNA, 13 nt, Human herpesvirus 1
gcgugggccgcgc

SEQ ID NO: 1752848 - RNA, 14 nt, Human herpesvirus 1
gaggcccacgccuc

SEQ ID NO: 1752849 - RNA, 18 nt, Human herpesvirus 1
ccgcaauuugcacccagc

SEQ ID NO: 1752850 - RNA, 13 nt, Human herpesvirus 1
gcugcggcccacc

SEQ ID NO: 1752851 - RNA, 19 nt, Human herpesvirus 1
cauguuugcgggccugggc

SEQ ID NO: 1752852 - RNA, 19 nt, Human herpesvirus 1
ccgccaucgagccaacgcc

SEQ ID NO: 1752853 - RNA, 18 nt, Human herpesvirus 1
gcuggccgcucgguggcu

SEQ ID NO: 1752854 - RNA, 15 nt, Human herpesvirus 1
gucccccacaccacc

SEQ ID NO: 1752855 - RNA, 14 nt, Human herpesvirus 1
cgugcuccugugag

SEQ ID NO: 1752856 - RNA, 21 nt, Human herpesvirus 1
gcccguugcagggccuggugc

SEQ ID NO: 1752857 - RNA, 13 nt, Human herpesvirus 1
auccacaccgcgg

SEQ ID NO: 1752858 - RNA, 10 nt, Human herpesvirus 1
ccgugucuau

SEQ ID NO: 1752859 - RNA, 19 nt, Human herpesvirus 1
ugggcgaccuggggcgcgc

SEQ ID NO: 1752860 - RNA, 18 nt, Human herpesvirus 1
ggugccccaaggagggcg

SEQ ID NO: 1752861 - RNA, 18 nt, Human herpesvirus 1
aaaacugauaaaacagcg

SEQ ID NO: 1752862 - RNA, 18 nt, Human herpesvirus 1
cccagcgaccccacggcc

SEQ ID NO: 1752863 - RNA, 17 nt, Human herpesvirus 1
cacgugcugcugcggcc

SEQ ID NO: 1752864 - RNA, 17 nt, Human herpesvirus 1
ucacgcaagaccaggcc

SEQ ID NO: 1752865 - RNA, 16 nt, Human herpesvirus 1
cgcaacaaccuggaga

SEQ ID NO: 1752866 - RNA, 19 nt, Human herpesvirus 1
acgcgccaaacgccagccu

SEQ ID NO: 1752867 - RNA, 16 nt, Human herpesvirus 1
gcgugaccccagggau

SEQ ID NO: 1752868 - RNA, 21 nt, Human herpesvirus 1
gcggccagaucuacugcuggg

SEQ ID NO: 1752869 - RNA, 14 nt, Human herpesvirus 1
ucggaggcccccca

SEQ ID NO: 1752870 - RNA, 14 nt, Human herpesvirus 1
uugagccccucgcc

SEQ ID NO: 1752871 - RNA, 21 nt, Human herpesvirus 1
aguucaccguggccugggacu

SEQ ID NO: 1752872 - RNA, 13 nt, Human herpesvirus 1
augcccucccuga

SEQ ID NO: 1752873 - RNA, 22 nt, Human herpesvirus 1
accgucgccgcgggccacgcca

SEQ ID NO: 1752874 - RNA, 16 nt, Human herpesvirus 1
cucaagaaccccacca

SEQ ID NO: 1752875 - RNA, 22 nt, Human herpesvirus 1
ggcccagcauguccgccgggac

SEQ ID NO: 1752876 - RNA, 16 nt, Human herpesvirus 1
cagcugaccgacccuc

SEQ ID NO: 1752877 - RNA, 16 nt, Human herpesvirus 1
cgucgggaggccacag

SEQ ID NO: 1752878 - RNA, 15 nt, Human herpesvirus 1
ggccucgugggcacu

SEQ ID NO: 1752879 - RNA, 13 nt, Human herpesvirus 1
ugcacagccuggc

SEQ ID NO: 1752880 - RNA, 21 nt, Human herpesvirus 1
cgugacgcacccccugacccc

SEQ ID NO: 1752881 - RNA, 14 nt, Human herpesvirus 1
gccccccagccucc

SEQ ID NO: 1752882 - RNA, 15 nt, Human herpesvirus 1
aauaaauuuuacaaa

SEQ ID NO: 1752883 - RNA, 18 nt, Human herpesvirus 1
ggcagugaggguggcaug

SEQ ID NO: 1752884 - RNA, 14 nt, Human herpesvirus 1
caacgucgccgccc

SEQ ID NO: 1752885 - RNA, 14 nt, Human herpesvirus 1
ccgucccacgcucu

SEQ ID NO: 1752886 - RNA, 21 nt, Human herpesvirus 1
gaggaggaagaggaggagggg

SEQ ID NO: 1752887 - RNA, 19 nt, Human herpesvirus 1
aucguccaucaccacgccc

SEQ ID NO: 1752888 - RNA, 14 nt, Human herpesvirus 1
acgagcugacccug

SEQ ID NO: 1752889 - RNA, 13 nt, Human herpesvirus 1
gggcccgccugga

SEQ ID NO: 1752890 - RNA, 13 nt, Human herpesvirus 1
guccguguggagg

SEQ ID NO: 1752891 - RNA, 20 nt, Human herpesvirus 1
uccugaugcacgcccccgcg

SEQ ID NO: 1752892 - RNA, 17 nt, Human herpesvirus 1
cgcgcuaacggugaccc

SEQ ID NO: 1752893 - RNA, 17 nt, Human herpesvirus 1
augcccacgggucgugc

SEQ ID NO: 1752894 - RNA, 13 nt, Human herpesvirus 1
ccacgcucucccc

SEQ ID NO: 1752895 - RNA, 20 nt, Human herpesvirus 1
ccuccaucgaguucgccagg

SEQ ID NO: 1752896 - RNA, 20 nt, Human herpesvirus 1
caccuccgcgagcagagccg

SEQ ID NO: 1752897 - RNA, 16 nt, Human herpesvirus 1
ucuucccccccaucac

SEQ ID NO: 1752898 - RNA, 16 nt, Human herpesvirus 1
gugggugcuuuggaaa

SEQ ID NO: 1752899 - RNA, 21 nt, Human herpesvirus 1
gggcguaacguuccgccugga

SEQ ID NO: 1752900 - RNA, 15 nt, Human herpesvirus 1
ggggcccggccaacc

SEQ ID NO: 1752901 - RNA, 16 nt, Human herpesvirus 1
accgcgugaccccagg

SEQ ID NO: 1752902 - RNA, 10 nt, Human herpesvirus 1
cacaccaccg

SEQ ID NO: 1752903 - RNA, 17 nt, Human herpesvirus 1
ccgucguauccacggug

SEQ ID NO: 1752904 - RNA, 13 nt, Human herpesvirus 1
gugagcgaggacg

SEQ ID NO: 1752905 - RNA, 16 nt, Human herpesvirus 1
acccguguuugcccau

SEQ ID NO: 1752906 - RNA, 21 nt, Human herpesvirus 1
uuugcggacccucucuucucu

SEQ ID NO: 1752907 - RNA, 22 nt, Human herpesvirus 1
accaacccgccccuaaccaggc

SEQ ID NO: 1752908 - RNA, 13 nt, Human herpesvirus 1
cggacccgggccg

SEQ ID NO: 1752909 - RNA, 21 nt, Human herpesvirus 1
ccccgagaaccagcgcaccgu

SEQ ID NO: 1752910 - RNA, 15 nt, Human herpesvirus 1
gugccaccagccugg

SEQ ID NO: 1752911 - RNA, 19 nt, Human herpesvirus 1
cuaccgcuuuauaggccgg

SEQ ID NO: 1752912 - RNA, 15 nt, Human herpesvirus 1
auucccaaacagggc

SEQ ID NO: 1752913 - RNA, 13 nt, Human herpesvirus 1
gaacgacugggcc

SEQ ID NO: 1752914 - RNA, 13 nt, Human herpesvirus 1
acgcacuguggcu

SEQ ID NO: 1752915 - RNA, 14 nt, Human herpesvirus 1
ggggccagcgccaa

SEQ ID NO: 1752916 - RNA, 19 nt, Human herpesvirus 1
ucugcggccggcgggacuc

SEQ ID NO: 1752917 - RNA, 24 nt, Human herpesvirus 1
cauggaccccagcgaccccacggc

SEQ ID NO: 1752918 - RNA, 15 nt, Human herpesvirus 1
accguggccggccug

SEQ ID NO: 1752919 - RNA, 23 nt, Human herpesvirus 1
gagcccacaugcggaaagcaaga

SEQ ID NO: 1752920 - RNA, 17 nt, Human herpesvirus 1
cccuuguauguccccaa

SEQ ID NO: 1752921 - RNA, 19 nt, Human herpesvirus 1
gcggccuggacguccccga

SEQ ID NO: 1752922 - RNA, 19 nt, Human herpesvirus 1
cggcugccaaacagcuggc

SEQ ID NO: 1752923 - RNA, 17 nt, Human herpesvirus 1
cgguuggggaggcugua

SEQ ID NO: 1752924 - RNA, 20 nt, Human herpesvirus 1
cugcggcccacccuggcgcc

SEQ ID NO: 1752925 - RNA, 14 nt, Human herpesvirus 1
uccccgcugucacu

SEQ ID NO: 1752926 - RNA, 18 nt, Human herpesvirus 1
gacccgccccggagggag

SEQ ID NO: 1752927 - RNA, 21 nt, Human herpesvirus 1
cggcggcuguagcgccccggc

SEQ ID NO: 1752928 - RNA, 16 nt, Human herpesvirus 1
cccgucgaagcugaug

SEQ ID NO: 1752929 - RNA, 22 nt, Human herpesvirus 1
cgcccucgcccagacgcccucc

SEQ ID NO: 1752930 - RNA, 23 nt, Human herpesvirus 1
ggccagaucuacugcugggccau

SEQ ID NO: 1752931 - RNA, 13 nt, Human herpesvirus 1
ccgaccggguccc

SEQ ID NO: 1752932 - RNA, 14 nt, Human herpesvirus 1
caacgucuccucca

SEQ ID NO: 1752933 - RNA, 21 nt, Human herpesvirus 1
aaacgacaucuugucgucaaa

SEQ ID NO: 1752934 - RNA, 20 nt, Human herpesvirus 1
ggcgcguccccggcccggag

SEQ ID NO: 1752935 - RNA, 15 nt, Human herpesvirus 1
cacgcacgcucccau

SEQ ID NO: 1752936 - RNA, 19 nt, Human herpesvirus 1
gccccccguguuugugggg

SEQ ID NO: 1752937 - RNA, 23 nt, Human herpesvirus 1
cuccaggcugucgacgcccccuc

SEQ ID NO: 1752938 - RNA, 15 nt, Human herpesvirus 1
gccccgccacccagu

SEQ ID NO: 1752939 - RNA, 16 nt, Human herpesvirus 1
cgugcuccugugagcu

SEQ ID NO: 1752940 - RNA, 23 nt, Human herpesvirus 1
caagccccuagccccgcccccuu

SEQ ID NO: 1752941 - RNA, 22 nt, Human herpesvirus 1
ugcggcuuaugaacgacugggc

SEQ ID NO: 1752942 - RNA, 22 nt, Human herpesvirus 1
ccacgucgaccgcgcccucgcc

SEQ ID NO: 1752943 - RNA, 21 nt, Human herpesvirus 1
guggccggccugcgcgacgcc

SEQ ID NO: 1752944 - RNA, 14 nt, Human herpesvirus 1
uguuccgccugucg

SEQ ID NO: 1752945 - RNA, 20 nt, Human herpesvirus 1
gcagucuccuggcagcccug

SEQ ID NO: 1752946 - RNA, 14 nt, Human herpesvirus 1
gccgcccggggcca

SEQ ID NO: 1752947 - RNA, 19 nt, Human herpesvirus 1
gucuccucuucuccccuuc

SEQ ID NO: 1752948 - RNA, 17 nt, Human herpesvirus 1
gagccaacgcccugacc

SEQ ID NO: 1752949 - RNA, 15 nt, Human herpesvirus 1
gucacgcacgccgcc

SEQ ID NO: 1752950 - RNA, 15 nt, Human herpesvirus 1
ccggguuccgcgacc

SEQ ID NO: 1752951 - RNA, 13 nt, Human herpesvirus 1
ccguccgaaccca

SEQ ID NO: 1752952 - RNA, 14 nt, Human herpesvirus 1
acagcgaccugggg

SEQ ID NO: 1752953 - RNA, 16 nt, Human herpesvirus 1
gccgcaaaucccacca

SEQ ID NO: 1752954 - RNA, 19 nt, Human herpesvirus 1
ccaggaucacaccggucaa

SEQ ID NO: 1752955 - RNA, 16 nt, Human herpesvirus 1
accaccgucagcaccu

SEQ ID NO: 1752956 - RNA, 14 nt, Human herpesvirus 1
gccacgccagggcc

SEQ ID NO: 1752957 - RNA, 15 nt, Human herpesvirus 1
ucccucgaccaccau

SEQ ID NO: 1752958 - RNA, 18 nt, Human herpesvirus 1
ccgccucgguccaccgca

SEQ ID NO: 1752959 - RNA, 16 nt, Human herpesvirus 1
agacgacaccgugguc

SEQ ID NO: 1752960 - RNA, 14 nt, Human herpesvirus 1
ggccccgacagccc

SEQ ID NO: 1752961 - RNA, 13 nt, Human herpesvirus 1
gggcgucccugga

SEQ ID NO: 1752962 - RNA, 19 nt, Human herpesvirus 1
ucccucccccuccgcaucc

SEQ ID NO: 1752963 - RNA, 15 nt, Human herpesvirus 1
uggcccuggcucccg

SEQ ID NO: 1752964 - RNA, 18 nt, Human herpesvirus 1
cugcugcggcccacccug

SEQ ID NO: 1752965 - RNA, 21 nt, Human herpesvirus 1
gucuggagacccuaugguaca

SEQ ID NO: 1752966 - RNA, 12 nt, Human herpesvirus 1
gcagggcccgcc

SEQ ID NO: 1752967 - RNA, 17 nt, Human herpesvirus 1
augucccucauuuuaca

SEQ ID NO: 1752968 - RNA, 18 nt, Human herpesvirus 1
guggacgccggggccuug

SEQ ID NO: 1752969 - RNA, 22 nt, Human herpesvirus 1
cagcagacgcugcuccgccugg

SEQ ID NO: 1752970 - RNA, 21 nt, Human herpesvirus 1
cgaccgccaacaauccccagg

SEQ ID NO: 1752971 - RNA, 17 nt, Human herpesvirus 1
cgggcccccggccgccg

SEQ ID NO: 1752972 - RNA, 23 nt, Human herpesvirus 1
acccgccccuaaccaggccucca

SEQ ID NO: 1752973 - RNA, 22 nt, Human herpesvirus 1
gaaggagacaauaccggaagga

SEQ ID NO: 1752974 - RNA, 20 nt, Human herpesvirus 1
cacaugggggaggugccccc

SEQ ID NO: 1752975 - RNA, 15 nt, Human herpesvirus 1
gggagggcagggccg

SEQ ID NO: 1752976 - RNA, 13 nt, Human herpesvirus 1
agcauaccugggu

SEQ ID NO: 1752977 - RNA, 21 nt, Human herpesvirus 1
gcaggcgccuccggggguccg

SEQ ID NO: 1752978 - RNA, 23 nt, Human herpesvirus 1
accggacccgcaucccccgucug

SEQ ID NO: 1752979 - RNA, 18 nt, Human herpesvirus 1
caauuugcacccagccuu

SEQ ID NO: 1752980 - RNA, 20 nt, Human herpesvirus 1
gccaccauccucaagcaggc

SEQ ID NO: 1752981 - RNA, 22 nt, Human herpesvirus 1
augggucccaauuggccguccc

SEQ ID NO: 1752982 - RNA, 18 nt, Human herpesvirus 1
cgguggugcccagcggcc

SEQ ID NO: 1752983 - RNA, 16 nt, Human herpesvirus 1
guggaggcgcggcgcc

SEQ ID NO: 1752984 - RNA, 12 nt, Human herpesvirus 1
ggccgggagcgc

SEQ ID NO: 1752985 - RNA, 16 nt, Human herpesvirus 1
cugauguggcugcucc

SEQ ID NO: 1752986 - RNA, 20 nt, Human herpesvirus 1
ccuaaacgcaccgucggagg

SEQ ID NO: 1752987 - RNA, 17 nt, Human herpesvirus 1
acagcuucagcgccguc

SEQ ID NO: 1752988 - RNA, 20 nt, Human herpesvirus 1
agugaaagacacgggcacca

SEQ ID NO: 1752989 - RNA, 20 nt, Human herpesvirus 1
ucugcuccgcaacggggcgc

SEQ ID NO: 1752990 - RNA, 17 nt, Human herpesvirus 1
cccuggugaagaccacu

SEQ ID NO: 1752991 - RNA, 14 nt, Human herpesvirus 1
ccuggaugcugugg

SEQ ID NO: 1752992 - RNA, 12 nt, Human herpesvirus 1
cgaaggcugccg

SEQ ID NO: 1752993 - RNA, 22 nt, Human herpesvirus 1
accgcccaaugggccgggccgc

SEQ ID NO: 1752994 - RNA, 16 nt, Human herpesvirus 1
ugcgguccggagccgc

SEQ ID NO: 1752995 - RNA, 13 nt, Human herpesvirus 1
cuccucuucuccc

SEQ ID NO: 1752996 - RNA, 14 nt, Human herpesvirus 1
cguaaacggcgggc

SEQ ID NO: 1752997 - RNA, 21 nt, Human herpesvirus 1
gccccauacucccgccagcac

SEQ ID NO: 1752998 - RNA, 18 nt, Human herpesvirus 1
gacacaaaugcccacggg

SEQ ID NO: 1752999 - RNA, 20 nt, Human herpesvirus 1
cccucgaccaccauccccgc

SEQ ID NO: 1753000 - RNA, 14 nt, Human herpesvirus 1
gccccuguggcccu

SEQ ID NO: 1753001 - RNA, 18 nt, Human herpesvirus 1
cgcggcggggcccggcca

SEQ ID NO: 1753002 - RNA, 17 nt, Human herpesvirus 1
ggcgaggccggcgccga

SEQ ID NO: 1753003 - RNA, 20 nt, Human herpesvirus 1
cgccucucgcugcuggcgga

SEQ ID NO: 1753004 - RNA, 12 nt, Human herpesvirus 1
ccaucagccucg

SEQ ID NO: 1753005 - RNA, 20 nt, Human herpesvirus 1
ccggcgcguguaccacaucc

SEQ ID NO: 1753006 - RNA, 11 nt, Human herpesvirus 1
gggacugggca

SEQ ID NO: 1753007 - RNA, 17 nt, Human herpesvirus 1
cccaacccccggcccca

SEQ ID NO: 1753008 - RNA, 22 nt, Human herpesvirus 1
ccggucgccccgacccccuugu

SEQ ID NO: 1753009 - RNA, 22 nt, Human herpesvirus 1
gcugaugucccucauuuuacaa

SEQ ID NO: 1753010 - RNA, 18 nt, Human herpesvirus 1
cacuucccgguaugguaa

SEQ ID NO: 1753011 - RNA, 19 nt, Human herpesvirus 1
gcgcggaugcucggcgacg

SEQ ID NO: 1753012 - RNA, 15 nt, Human herpesvirus 1
gcagccuucucccgg

SEQ ID NO: 1753013 - RNA, 20 nt, Human herpesvirus 1
ccaacucucgcaccaucccg

SEQ ID NO: 1753014 - RNA, 17 nt, Human herpesvirus 1
accgucggaggcccccc

SEQ ID NO: 1753015 - RNA, 16 nt, Human herpesvirus 1
cgcacgagccggggcu

SEQ ID NO: 1753016 - RNA, 17 nt, Human herpesvirus 1
gucagcuccucgcgcgg

SEQ ID NO: 1753017 - RNA, 20 nt, Human herpesvirus 1
ucugggauggcuccuggcca

SEQ ID NO: 1753018 - RNA, 21 nt, Human herpesvirus 1
guauguccccaaaauaaaaga

SEQ ID NO: 1753019 - RNA, 18 nt, Human herpesvirus 1
ucugggguuugcccuccc

SEQ ID NO: 1753020 - RNA, 21 nt, Human herpesvirus 1
accagcgggucuuuuguguug

SEQ ID NO: 1753021 - RNA, 18 nt, Human herpesvirus 1
guugcugcgcggcgcccg

SEQ ID NO: 1753022 - RNA, 15 nt, Human herpesvirus 1
acggcgucugggcca

SEQ ID NO: 1753023 - RNA, 20 nt, Human herpesvirus 1
gugccgcccguugcagggcc

SEQ ID NO: 1753024 - RNA, 17 nt, Human herpesvirus 1
acccccaacgccacgca

SEQ ID NO: 1753025 - RNA, 17 nt, Human herpesvirus 1
caccccgcaauuugcac

SEQ ID NO: 1753026 - RNA, 16 nt, Human herpesvirus 1
gagccuguuguggcuc

SEQ ID NO: 1753027 - RNA, 20 nt, Human herpesvirus 1
gcugaagcacaacgccagcc

SEQ ID NO: 1753028 - RNA, 15 nt, Human herpesvirus 1
ucugggggccugucc

SEQ ID NO: 1753029 - RNA, 14 nt, Human herpesvirus 1
uaccgaccacaccg

SEQ ID NO: 1753030 - RNA, 18 nt, Human herpesvirus 1
cucuggccgcgcccacua

SEQ ID NO: 1753031 - RNA, 22 nt, Human herpesvirus 1
guggguuuuuuaaaaacgacac

SEQ ID NO: 1753032 - RNA, 22 nt, Human herpesvirus 1
gagcuucgcuuugugggggacc

SEQ ID NO: 1753033 - RNA, 18 nt, Human herpesvirus 1
agcgcacugcccgacgcc

SEQ ID NO: 1753034 - RNA, 12 nt, Human herpesvirus 1
ccgggagccccg

SEQ ID NO: 1753035 - RNA, 20 nt, Human herpesvirus 1
ugggguggaucuuagccucc

SEQ ID NO: 1753036 - RNA, 22 nt, Human herpesvirus 1
gaacacggggacggcggggcag

SEQ ID NO: 1753037 - RNA, 13 nt, Human herpesvirus 1
gaucggcgccgcg

SEQ ID NO: 1753038 - RNA, 14 nt, Human herpesvirus 1
gcccugaugcagga

SEQ ID NO: 1753039 - RNA, 18 nt, Human herpesvirus 1
agacaccuuggcccuggc

SEQ ID NO: 1753040 - RNA, 11 nt, Human herpesvirus 1
ccuugccgugg

SEQ ID NO: 1753041 - RNA, 14 nt, Human herpesvirus 1
cugccagaccucaa

SEQ ID NO: 1753042 - RNA, 17 nt, Human herpesvirus 1
cgaccgcagucccugag

SEQ ID NO: 1753043 - RNA, 16 nt, Human herpesvirus 1
guuccggaggcgccgc

SEQ ID NO: 1753044 - RNA, 13 nt, Human herpesvirus 1
ccuggacgcggca

SEQ ID NO: 1753045 - RNA, 19 nt, Human herpesvirus 1
cgcgggcgacgccccggcc

SEQ ID NO: 1753046 - RNA, 23 nt, Human herpesvirus 1
ugucccauccgaacgcagccccg

SEQ ID NO: 1753047 - RNA, 19 nt, Human herpesvirus 1
cgcgcgggggcgccggugg

SEQ ID NO: 1753048 - RNA, 22 nt, Human herpesvirus 1
ggcccgggggacucacuaccca

SEQ ID NO: 1753049 - RNA, 16 nt, Human herpesvirus 1
acucgacccacugccu

SEQ ID NO: 1753050 - RNA, 11 nt, Human herpesvirus 1
acuccuccccg

SEQ ID NO: 1753051 - RNA, 18 nt, Human herpesvirus 1
aagucucugggggccugu

SEQ ID NO: 1753052 - RNA, 14 nt, Human herpesvirus 1
cggggcuggcacac

SEQ ID NO: 1753053 - RNA, 21 nt, Human herpesvirus 1
acggcgccggggcucucgggg

SEQ ID NO: 1753054 - RNA, 23 nt, Human herpesvirus 1
aggugcuucuguuuggcgccccc

SEQ ID NO: 1753055 - RNA, 16 nt, Human herpesvirus 1
ccacuacaccagccaa

SEQ ID NO: 1753056 - RNA, 18 nt, Human herpesvirus 1
cacaugcggaaagcaaga

SEQ ID NO: 1753057 - RNA, 14 nt, Human herpesvirus 1
cgccccuuuccccc

SEQ ID NO: 1753058 - RNA, 13 nt, Human herpesvirus 1
cgcgcgaccucac

SEQ ID NO: 1753059 - RNA, 19 nt, Human herpesvirus 1
cccuguggaacgaggcccg

SEQ ID NO: 1753060 - RNA, 19 nt, Human herpesvirus 1
ggcuuccgacgccccccgu

SEQ ID NO: 1753061 - RNA, 22 nt, Human herpesvirus 1
uggaacgaggccgcagccuucu

SEQ ID NO: 1753062 - RNA, 16 nt, Human herpesvirus 1
ccggcggggccucacg

SEQ ID NO: 1753063 - RNA, 15 nt, Human herpesvirus 1
ccaccaaggcccggg

SEQ ID NO: 1753064 - RNA, 16 nt, Human herpesvirus 1
gguuagacccaugggu

SEQ ID NO: 1753065 - RNA, 16 nt, Human herpesvirus 1
gacgaaaagccccggg

SEQ ID NO: 1753066 - RNA, 19 nt, Human herpesvirus 1
ccuggcgguccagggggau

SEQ ID NO: 1753067 - RNA, 20 nt, Human herpesvirus 1
cgcgcccacuacaccagcca

SEQ ID NO: 1753068 - RNA, 19 nt, Human herpesvirus 1
agccccggucuccccggga

SEQ ID NO: 1753069 - RNA, 17 nt, Human herpesvirus 1
acgccuaccggccccug

SEQ ID NO: 1753070 - RNA, 14 nt, Human herpesvirus 1
gcgccucuggacug

SEQ ID NO: 1753071 - RNA, 17 nt, Human herpesvirus 1
accccggagggcugcca

SEQ ID NO: 1753072 - RNA, 22 nt, Human herpesvirus 1
auaagcuugccguuaagaccau

SEQ ID NO: 1753073 - RNA, 19 nt, Human herpesvirus 1
cacgagcacccugcugccc

SEQ ID NO: 1753074 - RNA, 14 nt, Human herpesvirus 1
cauuaucccauucc

SEQ ID NO: 1753075 - RNA, 21 nt, Human herpesvirus 1
gacauuccgcuaucuccuggg

SEQ ID NO: 1753076 - RNA, 20 nt, Human herpesvirus 1
cacucccgucucgcugcccu

SEQ ID NO: 1753077 - RNA, 16 nt, Human herpesvirus 1
gugaucagcacgccac

SEQ ID NO: 1753078 - RNA, 19 nt, Human herpesvirus 1
cugucucgucuccucuucu

SEQ ID NO: 1753079 - RNA, 21 nt, Human herpesvirus 1
guggagcaaaacgccuccccc

SEQ ID NO: 1753080 - RNA, 19 nt, Human herpesvirus 1
cccccguguuuguggggag

SEQ ID NO: 1753081 - RNA, 14 nt, Human herpesvirus 1
gcaccccccccaaa

SEQ ID NO: 1753082 - RNA, 20 nt, Human herpesvirus 1
ccugcuacagccgcccccug

SEQ ID NO: 1753083 - RNA, 17 nt, Human herpesvirus 1
ccagcugagccgcgccg

SEQ ID NO: 1753084 - RNA, 19 nt, Human herpesvirus 1
gcgggguugggaugggacc

SEQ ID NO: 1753085 - RNA, 15 nt, Human herpesvirus 1
gaucgccugucuccu

SEQ ID NO: 1753086 - RNA, 14 nt, Human herpesvirus 1
cuccccccgcguca

SEQ ID NO: 1753087 - RNA, 14 nt, Human herpesvirus 1
acgacgcccgccgc

SEQ ID NO: 1753088 - RNA, 20 nt, Human herpesvirus 1
gccacccaggcgcugggcga

SEQ ID NO: 1753089 - RNA, 18 nt, Human herpesvirus 1
gaaacuuaacacaccaaa

SEQ ID NO: 1753090 - RNA, 15 nt, Human herpesvirus 1
uccugcgccccgccg

SEQ ID NO: 1753091 - RNA, 19 nt, Human herpesvirus 1
aaagggauacacaaacuuc

SEQ ID NO: 1753092 - RNA, 16 nt, Human herpesvirus 1
gccccauacacgagca

SEQ ID NO: 1753093 - RNA, 14 nt, Human herpesvirus 1
cgcagcugggaccc

SEQ ID NO: 1753094 - RNA, 17 nt, Human herpesvirus 1
uaaccgcgagcgccgcu

SEQ ID NO: 1753095 - RNA, 19 nt, Human herpesvirus 1
gcccccaacaugacccaga

SEQ ID NO: 1753096 - RNA, 17 nt, Human herpesvirus 1
ggacgaccugugauggg

SEQ ID NO: 1753097 - RNA, 23 nt, Human herpesvirus 1
cgucucccgggggcgcuuggccg

SEQ ID NO: 1753098 - RNA, 13 nt, Human herpesvirus 1
caggccccccgcc

SEQ ID NO: 1753099 - RNA, 19 nt, Human herpesvirus 1
ggggauggggagagcccac

SEQ ID NO: 1753100 - RNA, 17 nt, Human herpesvirus 1
gcccacgucgccccgcc

SEQ ID NO: 1753101 - RNA, 21 nt, Human herpesvirus 1
ggaguacgcguacucccacca

SEQ ID NO: 1753102 - RNA, 14 nt, Human herpesvirus 1
ccuaccccaguccc

SEQ ID NO: 1753103 - RNA, 14 nt, Human herpesvirus 1
ggcucggcuccccg

SEQ ID NO: 1753104 - RNA, 16 nt, Human herpesvirus 1
caccccgcaauuugca

SEQ ID NO: 1753105 - RNA, 20 nt, Human herpesvirus 1
ucuuccgcggagcucccggg

SEQ ID NO: 1753106 - RNA, 16 nt, Human herpesvirus 1
gcaucccaggaucaca

SEQ ID NO: 1753107 - RNA, 18 nt, Human herpesvirus 1
cuccgacgacgcgcagcc

SEQ ID NO: 1753108 - RNA, 17 nt, Human herpesvirus 1
gcuaagugcccaggacg

SEQ ID NO: 1753109 - RNA, 15 nt, Human herpesvirus 1
accccauggacccca

SEQ ID NO: 1753110 - RNA, 15 nt, Human herpesvirus 1
cgaccgacuccccgc

SEQ ID NO: 1753111 - RNA, 13 nt, Human herpesvirus 1
gccauccccgcgu

SEQ ID NO: 1753112 - RNA, 18 nt, Human herpesvirus 1
cuggccgggagcaccaca

SEQ ID NO: 1753113 - RNA, 13 nt, Human herpesvirus 1
cucccagggagcc

SEQ ID NO: 1753114 - RNA, 20 nt, Human herpesvirus 1
aguucaccguggccugggac

SEQ ID NO: 1753115 - RNA, 18 nt, Human herpesvirus 1
ggcuugguucggggccgc

SEQ ID NO: 1753116 - RNA, 23 nt, Human herpesvirus 1
ucacgcgggaggccgcccagcuc

SEQ ID NO: 1753117 - RNA, 17 nt, Human herpesvirus 1
accgggcccggccaggc

SEQ ID NO: 1753118 - RNA, 14 nt, Human herpesvirus 1
ucgagaugggccag

SEQ ID NO: 1753119 - RNA, 23 nt, Human herpesvirus 1
agggggucugucgguccacggcc

SEQ ID NO: 1753120 - RNA, 21 nt, Human herpesvirus 1
gccgagucuucggggcccggc

SEQ ID NO: 1753121 - RNA, 15 nt, Human herpesvirus 1
aacgccagccugcgg

SEQ ID NO: 1753122 - RNA, 17 nt, Human herpesvirus 1
cacccgggugcuuccca

SEQ ID NO: 1753123 - RNA, 23 nt, Human herpesvirus 1
ccgcgauuccgagggccgggccc

SEQ ID NO: 1753124 - RNA, 17 nt, Human herpesvirus 1
cggcguuaaccgcaccc

SEQ ID NO: 1753125 - RNA, 15 nt, Human herpesvirus 1
ccguuggcccccgcc

SEQ ID NO: 1753126 - RNA, 22 nt, Human herpesvirus 1
gccccgcauaucccacccugga

SEQ ID NO: 1753127 - RNA, 14 nt, Human herpesvirus 1
cccaugggucccaa

SEQ ID NO: 1753128 - RNA, 17 nt, Human herpesvirus 1
gcgcagaggcggccaga

SEQ ID NO: 1753129 - RNA, 16 nt, Human herpesvirus 1
cgguccccucugggcc

SEQ ID NO: 1753130 - RNA, 18 nt, Human herpesvirus 1
cagccauauccugagccc

SEQ ID NO: 1753131 - RNA, 22 nt, Human herpesvirus 1
ccaccugcgcucccucagcauc

SEQ ID NO: 1753132 - RNA, 13 nt, Human herpesvirus 1
ucaccguggccug

SEQ ID NO: 1753133 - RNA, 15 nt, Human herpesvirus 1
ccaggccuccacccc

SEQ ID NO: 1753134 - RNA, 17 nt, Human herpesvirus 1
gccgcggaucugcuccg

SEQ ID NO: 1753135 - RNA, 17 nt, Human herpesvirus 1
ugucgucucucuucccc

SEQ ID NO: 1753136 - RNA, 23 nt, Human herpesvirus 1
cggcuggcgcggugccugacgcc

SEQ ID NO: 1753137 - RNA, 21 nt, Human herpesvirus 1
uccgccgagucuucggggccc

SEQ ID NO: 1753138 - RNA, 21 nt, Human herpesvirus 1
cagucgcccgaagacaccccc

SEQ ID NO: 1753139 - RNA, 18 nt, Human herpesvirus 1
ucgaugacgucccggcuc

SEQ ID NO: 1753140 - RNA, 16 nt, Human herpesvirus 1
ucgccgcggcucccgg

SEQ ID NO: 1753141 - RNA, 22 nt, Human herpesvirus 1
ggcgacaacgcgaccgucgccg

SEQ ID NO: 1753142 - RNA, 22 nt, Human herpesvirus 1
cccggaagagccugccgccuca

SEQ ID NO: 1753143 - RNA, 19 nt, Human herpesvirus 1
cugggucugugccaccagc

SEQ ID NO: 1753144 - RNA, 16 nt, Human herpesvirus 1
gacgccguggcgcccc

SEQ ID NO: 1753145 - RNA, 15 nt, Human herpesvirus 1
acgaguccauccugc

SEQ ID NO: 1753146 - RNA, 22 nt, Human herpesvirus 1
aguacaaccccucgcgggugga

SEQ ID NO: 1753147 - RNA, 18 nt, Human herpesvirus 1
gcauggcgcagcugggac

SEQ ID NO: 1753148 - RNA, 15 nt, Human herpesvirus 1
cagggaccuccugga

SEQ ID NO: 1753149 - RNA, 15 nt, Human herpesvirus 1
ggacccgccccggag

SEQ ID NO: 1753150 - RNA, 14 nt, Human herpesvirus 1
cucgcggcccgggg

SEQ ID NO: 1753151 - RNA, 19 nt, Human herpesvirus 1
accacgugcacagccuggc

SEQ ID NO: 1753152 - RNA, 19 nt, Human herpesvirus 1
acggaacacaaggccaaga

SEQ ID NO: 1753153 - RNA, 11 nt, Human herpesvirus 1
gagcuaugggc

SEQ ID NO: 1753154 - RNA, 16 nt, Human herpesvirus 1
cgccccuaaccaggcc

SEQ ID NO: 1753155 - RNA, 16 nt, Human herpesvirus 1
guuuccgcgacccacc

SEQ ID NO: 1753156 - RNA, 13 nt, Human herpesvirus 1
accacacaccagc

SEQ ID NO: 1753157 - RNA, 17 nt, Human herpesvirus 1
gaaaccccagcauaccu

SEQ ID NO: 1753158 - RNA, 19 nt, Human herpesvirus 1
cugcaagaggucgucgggg

SEQ ID NO: 1753159 - RNA, 13 nt, Human herpesvirus 1
ugccgggaacgcu

SEQ ID NO: 1753160 - RNA, 20 nt, Human herpesvirus 1
ucccccuccgcaucccagga

SEQ ID NO: 1753161 - RNA, 16 nt, Human herpesvirus 1
acgcacgccaaugccc

SEQ ID NO: 1753162 - RNA, 16 nt, Human herpesvirus 1
acccagccuuuaacua

SEQ ID NO: 1753163 - RNA, 13 nt, Human herpesvirus 1
gcgggggaugggg

SEQ ID NO: 1753164 - RNA, 17 nt, Human herpesvirus 1
cugucgguccacggcca

SEQ ID NO: 1753165 - RNA, 16 nt, Human herpesvirus 1
uguuuucguggacucg

SEQ ID NO: 1753166 - RNA, 14 nt, Human herpesvirus 1
cgggcgcgcccucu

SEQ ID NO: 1753167 - RNA, 22 nt, Human herpesvirus 1
cgggcgggugaacgagccgacg

SEQ ID NO: 1753168 - RNA, 14 nt, Human herpesvirus 1
cgucgcgggacccg

SEQ ID NO: 1753169 - RNA, 17 nt, Human herpesvirus 1
gaaugugugcggagguc

SEQ ID NO: 1753170 - RNA, 16 nt, Human herpesvirus 1
ccucuggacuggacca

SEQ ID NO: 1753171 - RNA, 20 nt, Human herpesvirus 1
cgcacucgagcggcgugggc

SEQ ID NO: 1753172 - RNA, 13 nt, Human herpesvirus 1
ucgccgcggcucc

SEQ ID NO: 1753173 - RNA, 20 nt, Human herpesvirus 1
acccucuggacgcccgggcg

SEQ ID NO: 1753174 - RNA, 21 nt, Human herpesvirus 1
ggggacgcgcaccuguuccgc

SEQ ID NO: 1753175 - RNA, 21 nt, Human herpesvirus 1
gcccucgcgggccucgugggc

SEQ ID NO: 1753176 - RNA, 22 nt, Human herpesvirus 1
gccccuaaccaggccuccaccc

SEQ ID NO: 1753177 - RNA, 15 nt, Human herpesvirus 1
gcucggccuauggcu

SEQ ID NO: 1753178 - RNA, 20 nt, Human herpesvirus 1
cugcugcccccggagcuguc

SEQ ID NO: 1753179 - RNA, 19 nt, Human herpesvirus 1
cggcauucgggccugccug

SEQ ID NO: 1753180 - RNA, 20 nt, Human herpesvirus 1
aaccuucgcaacaccucccc

SEQ ID NO: 1753181 - RNA, 16 nt, Human herpesvirus 1
cuuaccgccacaggaa

SEQ ID NO: 1753182 - RNA, 16 nt, Human herpesvirus 1
cgaccgccagccgcgg

SEQ ID NO: 1753183 - RNA, 13 nt, Human herpesvirus 1
caccacccaaccc

SEQ ID NO: 1753184 - RNA, 23 nt, Human herpesvirus 1
caugggaugucuuacuguauauc

SEQ ID NO: 1753185 - RNA, 21 nt, Human herpesvirus 1
gcaacggcgggagcuggguua

SEQ ID NO: 1753186 - RNA, 18 nt, Human herpesvirus 1
guccuggaugcuguggac

SEQ ID NO: 1753187 - RNA, 15 nt, Human herpesvirus 1
gcaccgggcccccgc

SEQ ID NO: 1753188 - RNA, 19 nt, Human herpesvirus 1
aggcgcauaaagggccggu

SEQ ID NO: 1753189 - RNA, 17 nt, Human herpesvirus 1
cuuccggaccugcucuc

SEQ ID NO: 1753190 - RNA, 13 nt, Human herpesvirus 1
cccccgcgcggcu

SEQ ID NO: 1753191 - RNA, 20 nt, Human herpesvirus 1
agcgucccugggcccuggcc

SEQ ID NO: 1753192 - RNA, 16 nt, Human herpesvirus 1
cuaaccaggccuccac

SEQ ID NO: 1753193 - RNA, 15 nt, Human herpesvirus 1
uccccgggagccccg

SEQ ID NO: 1753194 - RNA, 13 nt, Human herpesvirus 1
uccguccccugcc

SEQ ID NO: 1753195 - RNA, 15 nt, Human herpesvirus 1
gugggggugccccaa

SEQ ID NO: 1753196 - RNA, 11 nt, Human herpesvirus 1
uuacagccccc

SEQ ID NO: 1753197 - RNA, 12 nt, Human herpesvirus 1
ccgagccaaggg

SEQ ID NO: 1753198 - RNA, 18 nt, Human herpesvirus 1
ccucgaugacgucccggc

SEQ ID NO: 1753199 - RNA, 13 nt, Human herpesvirus 1
ggcaucggaacac

SEQ ID NO: 1753200 - RNA, 16 nt, Human herpesvirus 1
ccuggcuggccgcucg

SEQ ID NO: 1753201 - RNA, 17 nt, Human herpesvirus 1
ggcgggggauggggaga

SEQ ID NO: 1753202 - RNA, 22 nt, Human herpesvirus 1
ggcaagcccuacaccggccacc

SEQ ID NO: 1753203 - RNA, 15 nt, Human herpesvirus 1
uuccgguaugggggg

SEQ ID NO: 1753204 - RNA, 14 nt, Human herpesvirus 1
gaacgcagccccgc

SEQ ID NO: 1753205 - RNA, 14 nt, Human herpesvirus 1
cggcuaccuggccc

SEQ ID NO: 1753206 - RNA, 20 nt, Human herpesvirus 1
caucgguguguccuuuuggg

SEQ ID NO: 1753207 - RNA, 13 nt, Human herpesvirus 1
cuuuccccaugcg

SEQ ID NO: 1753208 - RNA, 15 nt, Human herpesvirus 1
ugacggccaucgccg

SEQ ID NO: 1753209 - RNA, 14 nt, Human herpesvirus 1
acgcgaaggacgcc

SEQ ID NO: 1753210 - RNA, 23 nt, Human herpesvirus 1
gccccggagggagaacccgacca

SEQ ID NO: 1753211 - RNA, 17 nt, Human herpesvirus 1
ugcgugccggucgccgc

SEQ ID NO: 1753212 - RNA, 17 nt, Human herpesvirus 1
ugccaguccgcugcacc

SEQ ID NO: 1753213 - RNA, 12 nt, Human herpesvirus 1
cucgaccaccau

SEQ ID NO: 1753214 - RNA, 18 nt, Human herpesvirus 1
cccgcaaacaggagcugu

SEQ ID NO: 1753215 - RNA, 16 nt, Human herpesvirus 1
guaacggcauaugcaa

SEQ ID NO: 1753216 - RNA, 22 nt, Human herpesvirus 1
cuuauccacaugaagccacugu

SEQ ID NO: 1753217 - RNA, 15 nt, Human herpesvirus 1
cgcgagcgaggcccc

SEQ ID NO: 1753218 - RNA, 19 nt, Human herpesvirus 1
cgaggcgauuagccagcag

SEQ ID NO: 1753219 - RNA, 13 nt, Human herpesvirus 1
ccccuggcgagcc

SEQ ID NO: 1753220 - RNA, 15 nt, Human herpesvirus 1
gccccuggcgccgcc

SEQ ID NO: 1753221 - RNA, 17 nt, Human herpesvirus 1
gaccgcagucccugagu

SEQ ID NO: 1753222 - RNA, 15 nt, Human herpesvirus 1
cggccucuccggccu

SEQ ID NO: 1753223 - RNA, 15 nt, Human herpesvirus 1
ccagcuaugggcccu

SEQ ID NO: 1753224 - RNA, 16 nt, Human herpesvirus 1
cugccccgccacccag

SEQ ID NO: 1753225 - RNA, 17 nt, Human herpesvirus 1
gcaugaagcccccaaca

SEQ ID NO: 1753226 - RNA, 15 nt, Human herpesvirus 1
cggccguugucuccc

SEQ ID NO: 1753227 - RNA, 14 nt, Human herpesvirus 1
cgcccaccuccugg

SEQ ID NO: 1753228 - RNA, 10 nt, Human herpesvirus 1
cacacacccu

SEQ ID NO: 1753229 - RNA, 17 nt, Human herpesvirus 1
ccgaggcgauuagccag

SEQ ID NO: 1753230 - RNA, 20 nt, Human herpesvirus 1
ccaacccggacgcguccggg

SEQ ID NO: 1753231 - RNA, 17 nt, Human herpesvirus 1
cccucucuucccucagg

SEQ ID NO: 1753232 - RNA, 11 nt, Human herpesvirus 1
cgcccccggca

SEQ ID NO: 1753233 - RNA, 14 nt, Human herpesvirus 1
guggcaccucccca

SEQ ID NO: 1753234 - RNA, 19 nt, Human herpesvirus 1
ccacgacccgacucaccuc

SEQ ID NO: 1753235 - RNA, 21 nt, Human herpesvirus 1
ggaccaggucccccacaccac

SEQ ID NO: 1753236 - RNA, 15 nt, Human herpesvirus 1
cacggcguggagcaa

SEQ ID NO: 1753237 - RNA, 20 nt, Human herpesvirus 1
ugacccuaggaggccgccac

SEQ ID NO: 1753238 - RNA, 18 nt, Human herpesvirus 1
gccccgggccgcgucgcc

SEQ ID NO: 1753239 - RNA, 15 nt, Human herpesvirus 1
uccaggucccaccug

SEQ ID NO: 1753240 - RNA, 15 nt, Human herpesvirus 1
accgcgagcgccgcu

SEQ ID NO: 1753241 - RNA, 16 nt, Human herpesvirus 1
gacaccgcguguuccc

SEQ ID NO: 1753242 - RNA, 19 nt, Human herpesvirus 1
cuguggaacgaggcccgca

SEQ ID NO: 1753243 - RNA, 14 nt, Human herpesvirus 1
ggaccccacgacac

SEQ ID NO: 1753244 - RNA, 23 nt, Human herpesvirus 1
gacgucccggcucuccgauccca

SEQ ID NO: 1753245 - RNA, 18 nt, Human herpesvirus 1
cuggccgacguggcgcac

SEQ ID NO: 1753246 - RNA, 17 nt, Human herpesvirus 1
aacgccuccccuguugg

SEQ ID NO: 1753247 - RNA, 13 nt, Human herpesvirus 1
cagcagcucccca

SEQ ID NO: 1753248 - RNA, 20 nt, Human herpesvirus 1
cacaacggcaugccucugcg

SEQ ID NO: 1753249 - RNA, 15 nt, Human herpesvirus 1
ccuucccucccccuc

SEQ ID NO: 1753250 - RNA, 22 nt, Human herpesvirus 1
acauaaccgaccgcagucccug

SEQ ID NO: 1753251 - RNA, 22 nt, Human herpesvirus 1
gaacgccuccgcccgugcugcc

SEQ ID NO: 1753252 - RNA, 19 nt, Human herpesvirus 1
ggaucugguccgccgcgag

SEQ ID NO: 1753253 - RNA, 20 nt, Human herpesvirus 1
gcggcugguccacacccagu

SEQ ID NO: 1753254 - RNA, 17 nt, Human herpesvirus 1
cuggcgagcccagaccc

SEQ ID NO: 1753255 - RNA, 19 nt, Human herpesvirus 1
acucccgacaccaccagcu

SEQ ID NO: 1753256 - RNA, 13 nt, Human herpesvirus 1
aacaugggccuga

SEQ ID NO: 1753257 - RNA, 18 nt, Human herpesvirus 1
cagggcucuacccucugg

SEQ ID NO: 1753258 - RNA, 19 nt, Human herpesvirus 1
cagaccccuucuccccaca

SEQ ID NO: 1753259 - RNA, 21 nt, Human herpesvirus 1
agugggcguggcuucggccgu

SEQ ID NO: 1753260 - RNA, 22 nt, Human herpesvirus 1
gcuuuaucccacggccucgcca

SEQ ID NO: 1753261 - RNA, 16 nt, Human herpesvirus 1
cgaggaggugaucgac

SEQ ID NO: 1753262 - RNA, 20 nt, Human herpesvirus 1
cuguaaguacgcccucccgc

SEQ ID NO: 1753263 - RNA, 21 nt, Human herpesvirus 1
ggcucguggcgucucgccgga

SEQ ID NO: 1753264 - RNA, 12 nt, Human herpesvirus 1
gagcaccccccc

SEQ ID NO: 1753265 - RNA, 15 nt, Human herpesvirus 1
ccagcgaccucgccg

SEQ ID NO: 1753266 - RNA, 17 nt, Human herpesvirus 1
ccacaugcggaaagcaa

SEQ ID NO: 1753267 - RNA, 15 nt, Human herpesvirus 1
cagauagagcugcuc

SEQ ID NO: 1753268 - RNA, 17 nt, Human herpesvirus 1
gcccgcgggaggccgcc

SEQ ID NO: 1753269 - RNA, 16 nt, Human herpesvirus 1
cucgucuccucuucuc

SEQ ID NO: 1753270 - RNA, 14 nt, Human herpesvirus 1
gcgcgaccucacca

SEQ ID NO: 1753271 - RNA, 12 nt, Human herpesvirus 1
cccucucuuccc

SEQ ID NO: 1753272 - RNA, 14 nt, Human herpesvirus 1
caucgccucggcca

SEQ ID NO: 1753273 - RNA, 14 nt, Human herpesvirus 1
gcggugacgaacgc

SEQ ID NO: 1753274 - RNA, 17 nt, Human herpesvirus 1
gccaaguuggcccccgg

SEQ ID NO: 1753275 - RNA, 20 nt, Human herpesvirus 1
uugccgugguccuguggagc

SEQ ID NO: 1753276 - RNA, 12 nt, Human herpesvirus 1
aggcggccuggg

SEQ ID NO: 1753277 - RNA, 22 nt, Human herpesvirus 1
gacgcgccccaaggcgcugcgg

SEQ ID NO: 1753278 - RNA, 15 nt, Human herpesvirus 1
ggaccaccgcccccc

SEQ ID NO: 1753279 - RNA, 19 nt, Human herpesvirus 1
cgggaccugaaccccagcc

SEQ ID NO: 1753280 - RNA, 12 nt, Human herpesvirus 1
ccccaaggaggg

SEQ ID NO: 1753281 - RNA, 16 nt, Human herpesvirus 1
gcgggcgacgcacaca

SEQ ID NO: 1753282 - RNA, 14 nt, Human herpesvirus 1
gcccugcugcugcc

SEQ ID NO: 1753283 - RNA, 20 nt, Human herpesvirus 1
cggcgggcacgccaagcccc

SEQ ID NO: 1753284 - RNA, 19 nt, Human herpesvirus 1
cgccccccaaaccaugucc

SEQ ID NO: 1753285 - RNA, 17 nt, Human herpesvirus 1
uguaacuucgacccgca

SEQ ID NO: 1753286 - RNA, 16 nt, Human herpesvirus 1
gccauauccugagccc

SEQ ID NO: 1753287 - RNA, 20 nt, Human herpesvirus 1
ccucccggggucaaccacga

SEQ ID NO: 1753288 - RNA, 14 nt, Human herpesvirus 1
cugcuccgccuggc

SEQ ID NO: 1753289 - RNA, 18 nt, Human herpesvirus 1
gccugucgcacccacagc

SEQ ID NO: 1753290 - RNA, 15 nt, Human herpesvirus 1
gcucgcucucggugc

SEQ ID NO: 1753291 - RNA, 14 nt, Human herpesvirus 1
uaaggucauccgag

SEQ ID NO: 1753292 - RNA, 17 nt, Human herpesvirus 1
ccacgacacccacccca

SEQ ID NO: 1753293 - RNA, 20 nt, Human herpesvirus 1
ccgcugcgcauccccccguc

SEQ ID NO: 1753294 - RNA, 14 nt, Human herpesvirus 1
ccucaucccacccc

SEQ ID NO: 1753295 - RNA, 14 nt, Human herpesvirus 1
cgcggcugguccac

SEQ ID NO: 1753296 - RNA, 15 nt, Human herpesvirus 1
cauuaaccaccugcg

SEQ ID NO: 1753297 - RNA, 23 nt, Human herpesvirus 1
gcccccuuuguccccgccgacaa

SEQ ID NO: 1753298 - RNA, 16 nt, Human herpesvirus 1
guuuaggguaccacag

SEQ ID NO: 1753299 - RNA, 19 nt, Human herpesvirus 1
cgcgacgccauggaccgca

SEQ ID NO: 1753300 - RNA, 15 nt, Human herpesvirus 1
ccggcccuaacccca

SEQ ID NO: 1753301 - RNA, 16 nt, Human herpesvirus 1
cgggaggaagccacaa

SEQ ID NO: 1753302 - RNA, 21 nt, Human herpesvirus 1
cgggccgccucgggggcggga

SEQ ID NO: 1753303 - RNA, 18 nt, Human herpesvirus 1
cggucucccagggagccc

SEQ ID NO: 1753304 - RNA, 21 nt, Human herpesvirus 1
gcccgggggccugguggcacc

SEQ ID NO: 1753305 - RNA, 16 nt, Human herpesvirus 1
cgugauuccucuccgc

SEQ ID NO: 1753306 - RNA, 15 nt, Human herpesvirus 1
cguguuuguggggag

SEQ ID NO: 1753307 - RNA, 20 nt, Human herpesvirus 1
uccacgaacccagcgaccuc

SEQ ID NO: 1753308 - RNA, 20 nt, Human herpesvirus 1
ccugccccccccaccccaga

SEQ ID NO: 1753309 - RNA, 15 nt, Human herpesvirus 1
gucuccccggggccc

SEQ ID NO: 1753310 - RNA, 20 nt, Human herpesvirus 1
accuuccguccccugccccc

SEQ ID NO: 1753311 - RNA, 23 nt, Human herpesvirus 1
gcuggucgucgggcgccaaagcc

SEQ ID NO: 1753312 - RNA, 16 nt, Human herpesvirus 1
ggcggccccggcagcc

SEQ ID NO: 1753313 - RNA, 23 nt, Human herpesvirus 1
cacgcaccucgaggacacccgcg

SEQ ID NO: 1753314 - RNA, 20 nt, Human herpesvirus 1
ugcgccuggauucgcuggac

SEQ ID NO: 1753315 - RNA, 17 nt, Human herpesvirus 1
ggccucccccggacgac

SEQ ID NO: 1753316 - RNA, 15 nt, Human herpesvirus 1
cgacugcccccccca

SEQ ID NO: 1753317 - RNA, 19 nt, Human herpesvirus 1
ggccugggucuuccgcgga

SEQ ID NO: 1753318 - RNA, 23 nt, Human herpesvirus 1
cuugguucggggccgcccuggcc

SEQ ID NO: 1753319 - RNA, 21 nt, Human herpesvirus 1
gcucucgcgcguggaccuggg

SEQ ID NO: 1753320 - RNA, 18 nt, Human herpesvirus 1
ccgaagagucggagcccg

SEQ ID NO: 1753321 - RNA, 13 nt, Human herpesvirus 1
augagccagaccc

SEQ ID NO: 1753322 - RNA, 17 nt, Human herpesvirus 1
ccaggcccgccgccacu

SEQ ID NO: 1753323 - RNA, 13 nt, Human herpesvirus 1
gccucgugggcac

SEQ ID NO: 1753324 - RNA, 21 nt, Human herpesvirus 1
agcugaugucccucauuuuac

SEQ ID NO: 1753325 - RNA, 14 nt, Human herpesvirus 1
cucuccccugcugc

SEQ ID NO: 1753326 - RNA, 14 nt, Human herpesvirus 1
caguauaucaucaa

SEQ ID NO: 1753327 - RNA, 19 nt, Human herpesvirus 1
ccacaacauccgcggcuuc

SEQ ID NO: 1753328 - RNA, 18 nt, Human herpesvirus 1
ugguccacacccaguggc

SEQ ID NO: 1753329 - RNA, 19 nt, Human herpesvirus 1
cguugcagggccuggugcu

SEQ ID NO: 1753330 - RNA, 22 nt, Human herpesvirus 1
aucauugccgcguugguccucg

SEQ ID NO: 1753331 - RNA, 15 nt, Human herpesvirus 1
cugggauggcuccug

SEQ ID NO: 1753332 - RNA, 16 nt, Human herpesvirus 1
ccgggcgcuuggcaug

SEQ ID NO: 1753333 - RNA, 13 nt, Human herpesvirus 1
gaucccaggcgcc

SEQ ID NO: 1753334 - RNA, 13 nt, Human herpesvirus 1
uguguuucagaua

SEQ ID NO: 1753335 - RNA, 13 nt, Human herpesvirus 1
cuggagcucaauc

SEQ ID NO: 1753336 - RNA, 10 nt, Human herpesvirus 1
uaaggccugg

SEQ ID NO: 1753337 - RNA, 12 nt, Human herpesvirus 1
acccaaccccaa

SEQ ID NO: 1753338 - RNA, 14 nt, Human herpesvirus 1
accagcgggucuuu

SEQ ID NO: 1753339 - RNA, 19 nt, Human herpesvirus 1
ggcgccggucgucacgcac

SEQ ID NO: 1753340 - RNA, 18 nt, Human herpesvirus 1
cuuggcggccgcccaacu

SEQ ID NO: 1753341 - RNA, 15 nt, Human herpesvirus 1
aucugacgcgcccca

SEQ ID NO: 1753342 - RNA, 22 nt, Human herpesvirus 1
cagacgaaaagccccgggccgc

SEQ ID NO: 1753343 - RNA, 20 nt, Human herpesvirus 1
accgaccgcagucccugagu

SEQ ID NO: 1753344 - RNA, 22 nt, Human herpesvirus 1
cgacugccagcuaugggcccug

SEQ ID NO: 1753345 - RNA, 19 nt, Human herpesvirus 1
gccggggagggcagggccg

SEQ ID NO: 1753346 - RNA, 21 nt, Human herpesvirus 1
aggccuuguuccgcuucccgg

SEQ ID NO: 1753347 - RNA, 13 nt, Human herpesvirus 1
gcucgggcccgcg

SEQ ID NO: 1753348 - RNA, 11 nt, Human herpesvirus 1
cgcgccugggu

SEQ ID NO: 1753349 - RNA, 20 nt, Human herpesvirus 1
ccguacaaguucaaggccac

SEQ ID NO: 1753350 - RNA, 19 nt, Human herpesvirus 1
caggucccccacaccaccu

SEQ ID NO: 1753351 - RNA, 22 nt, Human herpesvirus 1
ccgggccggagcucgcggcacg

SEQ ID NO: 1753352 - RNA, 21 nt, Human herpesvirus 1
cgcgccuagccaaccuguggc

SEQ ID NO: 1753353 - RNA, 17 nt, Human herpesvirus 1
ugcgcucccgccuuccg

SEQ ID NO: 1753354 - RNA, 15 nt, Human herpesvirus 1
gcucaaucuggccca

SEQ ID NO: 1753355 - RNA, 17 nt, Human herpesvirus 1
uccuucuugucgucucu

SEQ ID NO: 1753356 - RNA, 21 nt, Human herpesvirus 1
ccgcguuugagaccgccggca

SEQ ID NO: 1753357 - RNA, 15 nt, Human herpesvirus 1
uggccgggagcacca

SEQ ID NO: 1753358 - RNA, 17 nt, Human herpesvirus 1
ugcggaaagcaagaaca

SEQ ID NO: 1753359 - RNA, 15 nt, Human herpesvirus 1
acgcgucauaugcaa

SEQ ID NO: 1753360 - RNA, 13 nt, Human herpesvirus 1
cuagggaacccag

SEQ ID NO: 1753361 - RNA, 13 nt, Human herpesvirus 1
cccgcccccgccg

SEQ ID NO: 1753362 - RNA, 18 nt, Human herpesvirus 1
caucggggguugcugucc

SEQ ID NO: 1753363 - RNA, 18 nt, Human herpesvirus 1
agcaucgggaugcugccc

SEQ ID NO: 1753364 - RNA, 13 nt, Human herpesvirus 1
uggggcgcuggcc

SEQ ID NO: 1753365 - RNA, 11 nt, Human herpesvirus 1
cgacgccucaa

SEQ ID NO: 1753366 - RNA, 23 nt, Human herpesvirus 1
uggcagccgaugccccgggagac

SEQ ID NO: 1753367 - RNA, 16 nt, Human herpesvirus 1
gccggacgacgugguc

SEQ ID NO: 1753368 - RNA, 14 nt, Human herpesvirus 1
caagaacaauaaag

SEQ ID NO: 1753369 - RNA, 21 nt, Human herpesvirus 1
ccguggccgacaacugccuga

SEQ ID NO: 1753370 - RNA, 23 nt, Human herpesvirus 1
gaccgacagcacucacagccccg

SEQ ID NO: 1753371 - RNA, 13 nt, Human herpesvirus 1
auccgacaugucc

SEQ ID NO: 1753372 - RNA, 20 nt, Human herpesvirus 1
cgcacaucaaggugggccag

SEQ ID NO: 1753373 - RNA, 21 nt, Human herpesvirus 1
ggaggggggggucgggcgcug

SEQ ID NO: 1753374 - RNA, 19 nt, Human herpesvirus 1
agcgcgcugcucagcgcca

SEQ ID NO: 1753375 - RNA, 21 nt, Human herpesvirus 1
ccuggauucgcuggaccucac

SEQ ID NO: 1753376 - RNA, 23 nt, Human herpesvirus 1
ggaucgccuguugggccuuaucc

SEQ ID NO: 1753377 - RNA, 18 nt, Human herpesvirus 1
cguugcagggccuggugc

SEQ ID NO: 1753378 - RNA, 21 nt, Human herpesvirus 1
cgacuugccccccuccccgca

SEQ ID NO: 1753379 - RNA, 15 nt, Human herpesvirus 1
gagccccggucuccc

SEQ ID NO: 1753380 - RNA, 15 nt, Human herpesvirus 1
cgagggccgggcccc

SEQ ID NO: 1753381 - RNA, 14 nt, Human herpesvirus 1
cgggcgaugagcca

SEQ ID NO: 1753382 - RNA, 15 nt, Human herpesvirus 1
acccuaccccagucc

SEQ ID NO: 1753383 - RNA, 17 nt, Human herpesvirus 1
ccagaccggcaccaccg

SEQ ID NO: 1753384 - RNA, 17 nt, Human herpesvirus 1
guacaacggcucggccu

SEQ ID NO: 1753385 - RNA, 16 nt, Human herpesvirus 1
guggacgagaugcugc

SEQ ID NO: 1753386 - RNA, 17 nt, Human herpesvirus 1
accaggucccccacacc

SEQ ID NO: 1753387 - RNA, 21 nt, Human herpesvirus 1
agaccaccggucgucccucgc

SEQ ID NO: 1753388 - RNA, 17 nt, Human herpesvirus 1
cguccaaacccaccgac

SEQ ID NO: 1753389 - RNA, 20 nt, Human herpesvirus 1
gccugccucuccccccaggc

SEQ ID NO: 1753390 - RNA, 11 nt, Human herpesvirus 1
ccgggggcgcu

SEQ ID NO: 1753391 - RNA, 11 nt, Human herpesvirus 1
ccuggggcgcg

SEQ ID NO: 1753392 - RNA, 17 nt, Human herpesvirus 1
cacacgggugcgucugg

SEQ ID NO: 1753393 - RNA, 15 nt, Human herpesvirus 1
ccgcuccccaagcau

SEQ ID NO: 1753394 - RNA, 14 nt, Human herpesvirus 1
gcaucccccgccuu

SEQ ID NO: 1753395 - RNA, 17 nt, Human herpesvirus 1
caugcggcugcagagca

SEQ ID NO: 1753396 - RNA, 12 nt, Human herpesvirus 1
acgccucccccu

SEQ ID NO: 1753397 - RNA, 17 nt, Human herpesvirus 1
cgcccaaugggccgggc

SEQ ID NO: 1753398 - RNA, 17 nt, Human herpesvirus 1
ugggucggugacgcgcc

SEQ ID NO: 1753399 - RNA, 19 nt, Human herpesvirus 1
gugcucgugugguacaccg

SEQ ID NO: 1753400 - RNA, 17 nt, Human herpesvirus 1
acgugcacagccuggcc

SEQ ID NO: 1753401 - RNA, 23 nt, Human herpesvirus 1
ucgcgauacccucgggcaucucg

SEQ ID NO: 1753402 - RNA, 13 nt, Human herpesvirus 1
ccgcagccugguc

SEQ ID NO: 1753403 - RNA, 16 nt, Human herpesvirus 1
ccgacccggcccgagg

SEQ ID NO: 1753404 - RNA, 16 nt, Human herpesvirus 1
cucuccccccaggccu

SEQ ID NO: 1753405 - RNA, 12 nt, Human herpesvirus 1
uccucguggccg

SEQ ID NO: 1753406 - RNA, 18 nt, Human herpesvirus 1
cccgacgccagcuuuccg

SEQ ID NO: 1753407 - RNA, 19 nt, Human herpesvirus 1
caagcuaugcagccccgug

SEQ ID NO: 1753408 - RNA, 13 nt, Human herpesvirus 1
aggagacaauacc

SEQ ID NO: 1753409 - RNA, 14 nt, Human herpesvirus 1
uccacgacaacccc

SEQ ID NO: 1753410 - RNA, 12 nt, Human herpesvirus 1
gggaggccacag

SEQ ID NO: 1753411 - RNA, 12 nt, Human herpesvirus 1
cgaggagcccgc

SEQ ID NO: 1753412 - RNA, 12 nt, Human herpesvirus 1
cggggcccggcc

SEQ ID NO: 1753413 - RNA, 15 nt, Human herpesvirus 1
gcggcagcccggagg

SEQ ID NO: 1753414 - RNA, 16 nt, Human herpesvirus 1
gccuccacccccucga

SEQ ID NO: 1753415 - RNA, 21 nt, Human herpesvirus 1
ccaagcuagccgaggcccggg

SEQ ID NO: 1753416 - RNA, 20 nt, Human herpesvirus 1
cggccggauucccgggccgg

SEQ ID NO: 1753417 - RNA, 18 nt, Human herpesvirus 1
cuccccuucccucccccu

SEQ ID NO: 1753418 - RNA, 17 nt, Human herpesvirus 1
cuagccgaggcccggga

SEQ ID NO: 1753419 - RNA, 18 nt, Human herpesvirus 1
ccggacccguuccagccc

SEQ ID NO: 1753420 - RNA, 20 nt, Human herpesvirus 1
aagacccgggcgaugagcca

SEQ ID NO: 1753421 - RNA, 17 nt, Human herpesvirus 1
ugcgggcgguccauuaa

SEQ ID NO: 1753422 - RNA, 17 nt, Human herpesvirus 1
cucacgcccgcaaacag

SEQ ID NO: 1753423 - RNA, 14 nt, Human herpesvirus 1
uguagcgccccggc

SEQ ID NO: 1753424 - RNA, 13 nt, Human herpesvirus 1
ucgccgagccccc

SEQ ID NO: 1753425 - RNA, 20 nt, Human herpesvirus 1
guuauucccaaacagggccu

SEQ ID NO: 1753426 - RNA, 19 nt, Human herpesvirus 1
ugcccucccugacggccau

SEQ ID NO: 1753427 - RNA, 17 nt, Human herpesvirus 1
ccacgcccccgccgccc

SEQ ID NO: 1753428 - RNA, 14 nt, Human herpesvirus 1
guuucagauagagc

SEQ ID NO: 1753429 - RNA, 21 nt, Human herpesvirus 1
gagccaguggucggcgagcug

SEQ ID NO: 1753430 - RNA, 21 nt, Human herpesvirus 1
cgacccccuuguaugucccca

SEQ ID NO: 1753431 - RNA, 18 nt, Human herpesvirus 1
cggggccguggcggccaa

SEQ ID NO: 1753432 - RNA, 21 nt, Human herpesvirus 1
cguuacuaucaccgucccccc

SEQ ID NO: 1753433 - RNA, 19 nt, Human herpesvirus 1
cagccggaaugaggagcuc

SEQ ID NO: 1753434 - RNA, 14 nt, Human herpesvirus 1
ccgacucaccucaa

SEQ ID NO: 1753435 - RNA, 12 nt, Human herpesvirus 1
auggggagagcc

SEQ ID NO: 1753436 - RNA, 14 nt, Human herpesvirus 1
agagaccccagggu

SEQ ID NO: 1753437 - RNA, 22 nt, Human herpesvirus 1
ggcgcugacggaccuuggucug

SEQ ID NO: 1753438 - RNA, 18 nt, Human herpesvirus 1
ccgcggccuggguuggcg

SEQ ID NO: 1753439 - RNA, 13 nt, Human herpesvirus 1
caucacccgggug

SEQ ID NO: 1753440 - RNA, 19 nt, Human herpesvirus 1
ccugguuguccguggcccc

SEQ ID NO: 1753441 - RNA, 15 nt, Human herpesvirus 1
ccuuucccccuguuu

SEQ ID NO: 1753442 - RNA, 19 nt, Human herpesvirus 1
caagaucuuucggugucua

SEQ ID NO: 1753443 - RNA, 20 nt, Human herpesvirus 1
gcggcaccaccggggccuga

SEQ ID NO: 1753444 - RNA, 23 nt, Human herpesvirus 1
acgcgcauccgucgggaggccac

SEQ ID NO: 1753445 - RNA, 15 nt, Human herpesvirus 1
ccaccauccccgcuc

SEQ ID NO: 1753446 - RNA, 22 nt, Human herpesvirus 1
agacgcgggcgacgcacacacc

SEQ ID NO: 1753447 - RNA, 15 nt, Human herpesvirus 1
accauccccgcuccc

SEQ ID NO: 1753448 - RNA, 17 nt, Human herpesvirus 1
cccugcugcccccggag

SEQ ID NO: 1753449 - RNA, 17 nt, Human herpesvirus 1
cacgugcacagccuggc

SEQ ID NO: 1753450 - RNA, 23 nt, Human herpesvirus 1
cagccugccucuccccccaggcc

SEQ ID NO: 1753451 - RNA, 16 nt, Human herpesvirus 1
ucccugggcccuggcc

SEQ ID NO: 1753452 - RNA, 11 nt, Human herpesvirus 1
ugcccacgggu

SEQ ID NO: 1753453 - RNA, 20 nt, Human herpesvirus 1
guacaacaucauccagcugg

SEQ ID NO: 1753454 - RNA, 12 nt, Human herpesvirus 1
cgcggaccaccg

SEQ ID NO: 1753455 - RNA, 12 nt, Human herpesvirus 1
ccucgcaccagc

SEQ ID NO: 1753456 - RNA, 15 nt, Human herpesvirus 1
ucccacacucucugg

SEQ ID NO: 1753457 - RNA, 20 nt, Human herpesvirus 1
cccgauggcccuccaggcug

SEQ ID NO: 1753458 - RNA, 18 nt, Human herpesvirus 1
aucgcucgaccucuccac

SEQ ID NO: 1753459 - RNA, 19 nt, Human herpesvirus 1
gacaauaccggaaggaacc

SEQ ID NO: 1753460 - RNA, 16 nt, Human herpesvirus 1
gcauucgggccugccu

SEQ ID NO: 1753461 - RNA, 16 nt, Human herpesvirus 1
uguuugucgccuggcu

SEQ ID NO: 1753462 - RNA, 20 nt, Human herpesvirus 1
ucccuguuugucgccuggcu

SEQ ID NO: 1753463 - RNA, 16 nt, Human herpesvirus 1
cgagucuucggggccc

SEQ ID NO: 1753464 - RNA, 11 nt, Human herpesvirus 1
ugguugcagug

SEQ ID NO: 1753465 - RNA, 12 nt, Human herpesvirus 1
uacagcccccag

SEQ ID NO: 1753466 - RNA, 18 nt, Human herpesvirus 1
gucgggaggccacagaaa

SEQ ID NO: 1753467 - RNA, 19 nt, Human herpesvirus 1
augcuggaggaucacgagu

SEQ ID NO: 1753468 - RNA, 13 nt, Human herpesvirus 1
gaugggggggcaa

SEQ ID NO: 1753469 - RNA, 16 nt, Human herpesvirus 1
gcggcucaacgagcuc

SEQ ID NO: 1753470 - RNA, 14 nt, Human herpesvirus 1
caccagccugguug

SEQ ID NO: 1753471 - RNA, 22 nt, Human herpesvirus 1
cgcccgauuuacagcccccaga

SEQ ID NO: 1753472 - RNA, 16 nt, Human herpesvirus 1
gccagcgcggcggggc

SEQ ID NO: 1753473 - RNA, 22 nt, Human herpesvirus 1
cccaugggacacaaaugcccac

SEQ ID NO: 1753474 - RNA, 16 nt, Human herpesvirus 1
gcaagaccaggccugg

SEQ ID NO: 1753475 - RNA, 17 nt, Human herpesvirus 1
ccgcccaccgcugggcg

SEQ ID NO: 1753476 - RNA, 23 nt, Human herpesvirus 1
cgaucuccacgcgaccccauggc

SEQ ID NO: 1753477 - RNA, 18 nt, Human herpesvirus 1
cgcaacuucccacccgga

SEQ ID NO: 1753478 - RNA, 12 nt, Human herpesvirus 1
accgguccccgg

SEQ ID NO: 1753479 - RNA, 21 nt, Human herpesvirus 1
cgccccgugucugugggccaa

SEQ ID NO: 1753480 - RNA, 21 nt, Human herpesvirus 1
cguacaaguucaaggccacca

SEQ ID NO: 1753481 - RNA, 13 nt, Human herpesvirus 1
ggcgggagccacc

SEQ ID NO: 1753482 - RNA, 15 nt, Human herpesvirus 1
cgcugcccgacccgg

SEQ ID NO: 1753483 - RNA, 15 nt, Human herpesvirus 1
acccgccccuccauc

SEQ ID NO: 1753484 - RNA, 14 nt, Human herpesvirus 1
cgcgaacgaccaac

SEQ ID NO: 1753485 - RNA, 15 nt, Human herpesvirus 1
ggccacccccccgga

SEQ ID NO: 1753486 - RNA, 13 nt, Human herpesvirus 1
ucuacaacaacua

SEQ ID NO: 1753487 - RNA, 15 nt, Human herpesvirus 1
gaagacaccccccac

SEQ ID NO: 1753488 - RNA, 21 nt, Human herpesvirus 1
caccacauaaccgaccgcagu

SEQ ID NO: 1753489 - RNA, 22 nt, Human herpesvirus 1
auaaaggcggugguaucuaguu

SEQ ID NO: 1753490 - RNA, 17 nt, Human herpesvirus 1
gccucucgcugcuggcg

SEQ ID NO: 1753491 - RNA, 21 nt, Human herpesvirus 1
gucccguuaccaagaccaacc

SEQ ID NO: 1753492 - RNA, 12 nt, Human herpesvirus 1
gauccggcggga

SEQ ID NO: 1753493 - RNA, 19 nt, Human herpesvirus 1
gacgucgccccuguggccc

SEQ ID NO: 1753494 - RNA, 18 nt, Human herpesvirus 1
ccgucgcuagaccacgcc

SEQ ID NO: 1753495 - RNA, 17 nt, Human herpesvirus 1
cccuggcgccgccuggu

SEQ ID NO: 1753496 - RNA, 22 nt, Human herpesvirus 1
ggccgugauuccucuccgcggu

SEQ ID NO: 1753497 - RNA, 12 nt, Human herpesvirus 1
cgacagaccucc

SEQ ID NO: 1753498 - RNA, 21 nt, Human herpesvirus 1
uacuacaacgggagucgccuc

SEQ ID NO: 1753499 - RNA, 18 nt, Human herpesvirus 1
uacuacucggaaagcgaa

SEQ ID NO: 1753500 - RNA, 19 nt, Human herpesvirus 1
ucuuagccuccccgggcca

SEQ ID NO: 1753501 - RNA, 15 nt, Human herpesvirus 1
ccgcaagcuaugcag

SEQ ID NO: 1753502 - RNA, 19 nt, Human herpesvirus 1
cgggcaaguaugccccccu

SEQ ID NO: 1753503 - RNA, 20 nt, Human herpesvirus 1
gcgguacagaucggcgccgc

SEQ ID NO: 1753504 - RNA, 14 nt, Human herpesvirus 1
caggccuccacccc

SEQ ID NO: 1753505 - RNA, 14 nt, Human herpesvirus 1
gugcacagccuggc

SEQ ID NO: 1753506 - RNA, 18 nt, Human herpesvirus 1
ccgcuuuaucccacggcc

SEQ ID NO: 1753507 - RNA, 22 nt, Human herpesvirus 1
cggcggccaguugagccgcgcc

SEQ ID NO: 1753508 - RNA, 13 nt, Human herpesvirus 1
gggcugccgugag

SEQ ID NO: 1753509 - RNA, 15 nt, Human herpesvirus 1
gcgugaccccaggga

SEQ ID NO: 1753510 - RNA, 18 nt, Human herpesvirus 1
ucgugcgcucgcucucgg

SEQ ID NO: 1753511 - RNA, 20 nt, Human herpesvirus 1
gaggacgucgagaaggacaa

SEQ ID NO: 1753512 - RNA, 18 nt, Human herpesvirus 1
ccgcgaagacccccccgg

SEQ ID NO: 1753513 - RNA, 14 nt, Human herpesvirus 1
ggcugggcuuccga

SEQ ID NO: 1753514 - RNA, 18 nt, Human herpesvirus 1
ggaucugguccgccgcga

SEQ ID NO: 1753515 - RNA, 14 nt, Human herpesvirus 1
cagcggccugcugg

SEQ ID NO: 1753516 - RNA, 20 nt, Human herpesvirus 1
gagucuggaaggggggaaag

SEQ ID NO: 1753517 - RNA, 20 nt, Human herpesvirus 1
gccacaggaauaccagaaua

SEQ ID NO: 1753518 - RNA, 16 nt, Human herpesvirus 1
caacugacgcuggccg

SEQ ID NO: 1753519 - RNA, 15 nt, Human herpesvirus 1
gacacgcgcguccuu

SEQ ID NO: 1753520 - RNA, 11 nt, Human herpesvirus 1
ucccagggagc

SEQ ID NO: 1753521 - RNA, 15 nt, Human herpesvirus 1
accaucccccggcca

SEQ ID NO: 1753522 - RNA, 16 nt, Human herpesvirus 1
ucacggcuaccuggcc

SEQ ID NO: 1753523 - RNA, 16 nt, Human herpesvirus 1
cgccgcgagcccgucu

SEQ ID NO: 1753524 - RNA, 16 nt, Human herpesvirus 1
ccagggcggggcucag

SEQ ID NO: 1753525 - RNA, 23 nt, Human herpesvirus 1
aaacucccgacaccaccagcugg

SEQ ID NO: 1753526 - RNA, 19 nt, Human herpesvirus 1
gccccggccgcccuucccg

SEQ ID NO: 1753527 - RNA, 15 nt, Human herpesvirus 1
cccucgggcaucucg

SEQ ID NO: 1753528 - RNA, 12 nt, Human herpesvirus 1
uccugucccugc

SEQ ID NO: 1753529 - RNA, 17 nt, Human herpesvirus 1
gccgugauuccucuccg

SEQ ID NO: 1753530 - RNA, 19 nt, Human herpesvirus 1
cugguccacacccaguggc

SEQ ID NO: 1753531 - RNA, 14 nt, Human herpesvirus 1
cccuagaggcuggu

SEQ ID NO: 1753532 - RNA, 15 nt, Human herpesvirus 1
gcagucuccuggcag

SEQ ID NO: 1753533 - RNA, 17 nt, Human herpesvirus 1
cgggccguuucccaccc

SEQ ID NO: 1753534 - RNA, 18 nt, Human herpesvirus 1
ucccaccaacgucuccuc

SEQ ID NO: 1753535 - RNA, 14 nt, Human herpesvirus 1
ggccuccacccccu

SEQ ID NO: 1753536 - RNA, 20 nt, Human herpesvirus 1
aacccgccccuaaccaggcc

SEQ ID NO: 1753537 - RNA, 14 nt, Human herpesvirus 1
ccgggacugggugg

SEQ ID NO: 1753538 - RNA, 20 nt, Human herpesvirus 1
acgugcccccuccucguccg

SEQ ID NO: 1753539 - RNA, 16 nt, Human herpesvirus 1
gcuguagcgccccggc

SEQ ID NO: 1753540 - RNA, 13 nt, Human herpesvirus 1
gggccagccgcag

SEQ ID NO: 1753541 - RNA, 18 nt, Human herpesvirus 1
cuccugggggcacccacg

SEQ ID NO: 1753542 - RNA, 14 nt, Human herpesvirus 1
ugggcgcucacgag

SEQ ID NO: 1753543 - RNA, 18 nt, Human herpesvirus 1
uugggcgggaggaagcca

SEQ ID NO: 1753544 - RNA, 18 nt, Human herpesvirus 1
gagcgcgcuuguccccga

SEQ ID NO: 1753545 - RNA, 19 nt, Human herpesvirus 1
aaccuucgcaacaccuccc

SEQ ID NO: 1753546 - RNA, 21 nt, Human herpesvirus 1
gggcucggcuccccgccgcgg

SEQ ID NO: 1753547 - RNA, 21 nt, Human herpesvirus 1
gcacgaguucaaccucgggug

SEQ ID NO: 1753548 - RNA, 22 nt, Human herpesvirus 1
gucgccguuucgggcggcaggc

SEQ ID NO: 1753549 - RNA, 23 nt, Human herpesvirus 1
ggcggcgugugggggugccccaa

SEQ ID NO: 1753550 - RNA, 16 nt, Human herpesvirus 1
cggcccugaugcagga

SEQ ID NO: 1753551 - RNA, 14 nt, Human herpesvirus 1
cgugaccccaggga

SEQ ID NO: 1753552 - RNA, 14 nt, Human herpesvirus 1
uccugggccaccug

SEQ ID NO: 1753553 - RNA, 18 nt, Human herpesvirus 1
gaucccacguccccgggu

SEQ ID NO: 1753554 - RNA, 14 nt, Human herpesvirus 1
caaaaccacaaccu

SEQ ID NO: 1753555 - RNA, 19 nt, Human herpesvirus 1
gcaacacaacacgguuccc

SEQ ID NO: 1753556 - RNA, 15 nt, Human herpesvirus 1
gacgcgcagccggcg

SEQ ID NO: 1753557 - RNA, 14 nt, Human herpesvirus 1
gcucccugcggcug

SEQ ID NO: 1753558 - RNA, 22 nt, Human herpesvirus 1
ccugaccaacgacggcccgacc

SEQ ID NO: 1753559 - RNA, 16 nt, Human herpesvirus 1
ggccgggcgacccaga

SEQ ID NO: 1753560 - RNA, 17 nt, Human herpesvirus 1
gacccgcaacgcgcugg

SEQ ID NO: 1753561 - RNA, 21 nt, Human herpesvirus 1
caccgucggaggccccccaga

SEQ ID NO: 1753562 - RNA, 12 nt, Human herpesvirus 1
ggcccaacagcc

SEQ ID NO: 1753563 - RNA, 18 nt, Human herpesvirus 1
cacguuuaccccgcagcc

SEQ ID NO: 1753564 - RNA, 17 nt, Human herpesvirus 1
auuacuuuaagcgcugc

SEQ ID NO: 1753565 - RNA, 21 nt, Human herpesvirus 1
accccggagggcugccagacc

SEQ ID NO: 1753566 - RNA, 14 nt, Human herpesvirus 1
accgccaucagccu

SEQ ID NO: 1753567 - RNA, 18 nt, Human herpesvirus 1
ccuuuguccccgccgaca

SEQ ID NO: 1753568 - RNA, 16 nt, Human herpesvirus 1
ccgaggcggccugggu

SEQ ID NO: 1753569 - RNA, 16 nt, Human herpesvirus 1
cgccaaagcugcuggc

SEQ ID NO: 1753570 - RNA, 23 nt, Human herpesvirus 1
cugcgggccgcgguggacagcca

SEQ ID NO: 1753571 - RNA, 21 nt, Human herpesvirus 1
cccugcgcgagcaccugcggg

SEQ ID NO: 1753572 - RNA, 22 nt, Human herpesvirus 1
cuccuggacuuugagcuugccu

SEQ ID NO: 1753573 - RNA, 20 nt, Human herpesvirus 1
gccgcccaacucucgcacca

SEQ ID NO: 1753574 - RNA, 11 nt, Human herpesvirus 1
guucaaggcca

SEQ ID NO: 1753575 - RNA, 21 nt, Human herpesvirus 1
gccccggguuccgcgaccacc

SEQ ID NO: 1753576 - RNA, 22 nt, Human herpesvirus 1
gcggagcuguacgugcgggaac

SEQ ID NO: 1753577 - RNA, 14 nt, Human herpesvirus 1
ggaccgcagccugg

SEQ ID NO: 1753578 - RNA, 18 nt, Human herpesvirus 1
ggccuuggcggccgccca

SEQ ID NO: 1753579 - RNA, 11 nt, Human herpesvirus 1
aaacaucugga

SEQ ID NO: 1753580 - RNA, 17 nt, Human herpesvirus 1
cgggcgcguccccggcc

SEQ ID NO: 1753581 - RNA, 17 nt, Human herpesvirus 1
ccgcaauuugcacccag

SEQ ID NO: 1753582 - RNA, 14 nt, Human herpesvirus 1
ccaccaaggcccgg

SEQ ID NO: 1753583 - RNA, 12 nt, Human herpesvirus 1
gaucccccgccc

SEQ ID NO: 1753584 - RNA, 20 nt, Human herpesvirus 1
gcagccggaaugaggagcuc

SEQ ID NO: 1753585 - RNA, 13 nt, Human herpesvirus 1
cggccccagcccu

SEQ ID NO: 1753586 - RNA, 22 nt, Human herpesvirus 1
cuccuacaacaagucucugggg

SEQ ID NO: 1753587 - RNA, 18 nt, Human herpesvirus 1
ggcuggucccgcuggugu

SEQ ID NO: 1753588 - RNA, 18 nt, Human herpesvirus 1
ccgcccggggccagcgcc

SEQ ID NO: 1753589 - RNA, 22 nt, Human herpesvirus 1
agaucaaggacagcggccugcu

SEQ ID NO: 1753590 - RNA, 13 nt, Human herpesvirus 1
gcgucggcggcuc

SEQ ID NO: 1753591 - RNA, 16 nt, Human herpesvirus 1
cugcgccuugggcccg

SEQ ID NO: 1753592 - RNA, 15 nt, Human herpesvirus 1
agcaggucgacggcu

SEQ ID NO: 1753593 - RNA, 22 nt, Human herpesvirus 1
caccggugcgccccccaaacca

SEQ ID NO: 1753594 - RNA, 12 nt, Human herpesvirus 1
ucucccagggag

SEQ ID NO: 1753595 - RNA, 21 nt, Human herpesvirus 1
guuccgggaugccgugccgcc

SEQ ID NO: 1753596 - RNA, 18 nt, Human herpesvirus 1
ucccacgcucuccccugc

SEQ ID NO: 1753597 - RNA, 22 nt, Human herpesvirus 1
accacauaaccgaccgcagucc

SEQ ID NO: 1753598 - RNA, 18 nt, Human herpesvirus 1
cgacugggggggauccgc

SEQ ID NO: 1753599 - RNA, 22 nt, Human herpesvirus 1
cgcgguucgcgucccgcccacc

SEQ ID NO: 1753600 - RNA, 22 nt, Human herpesvirus 1
ccgugcugccgucgcuagacca

SEQ ID NO: 1753601 - RNA, 20 nt, Human herpesvirus 1
ccgggaccugaaccccagcc

SEQ ID NO: 1753602 - RNA, 14 nt, Human herpesvirus 1
caccaccuucacca

SEQ ID NO: 1753603 - RNA, 17 nt, Human herpesvirus 1
ggagguuccggaggcgc

SEQ ID NO: 1753604 - RNA, 16 nt, Human herpesvirus 1
agagcggggccguggc

SEQ ID NO: 1753605 - RNA, 16 nt, Human herpesvirus 1
gcccggggccagcgcc

SEQ ID NO: 1753606 - RNA, 20 nt, Human herpesvirus 1
cugggggggauccgcccuau

SEQ ID NO: 1753607 - RNA, 16 nt, Human herpesvirus 1
cgagcugacccugugg

SEQ ID NO: 1753608 - RNA, 13 nt, Human herpesvirus 1
accgcagucccug

SEQ ID NO: 1753609 - RNA, 17 nt, Human herpesvirus 1
guuuaggguaccacagg

SEQ ID NO: 1753610 - RNA, 17 nt, Human herpesvirus 1
ccgguauuauuuaccua

SEQ ID NO: 1753611 - RNA, 22 nt, Human herpesvirus 1
uaaccaccugcgcucccucagc

SEQ ID NO: 1753612 - RNA, 19 nt, Human herpesvirus 1
cagcuuuuaccgcuuccuc

SEQ ID NO: 1753613 - RNA, 18 nt, Human herpesvirus 1
ccagcagacgcugcuccg

SEQ ID NO: 1753614 - RNA, 17 nt, Human herpesvirus 1
acgacccgaagcugcuc

SEQ ID NO: 1753615 - RNA, 13 nt, Human herpesvirus 1
gcaauuugcaccc

SEQ ID NO: 1753616 - RNA, 18 nt, Human herpesvirus 1
ccaucaccccgcaauuug

SEQ ID NO: 1753617 - RNA, 19 nt, Human herpesvirus 1
gugaaagacacgggcacca

SEQ ID NO: 1753618 - RNA, 19 nt, Human herpesvirus 1
cgagcgcgcuuguccccga

SEQ ID NO: 1753619 - RNA, 15 nt, Human herpesvirus 1
auggcgggacugggc

SEQ ID NO: 1753620 - RNA, 17 nt, Human herpesvirus 1
cacaugaagccacuguu

SEQ ID NO: 1753621 - RNA, 13 nt, Human herpesvirus 1
cugggccgagguc

SEQ ID NO: 1753622 - RNA, 14 nt, Human herpesvirus 1
gaccacgccccuuu

SEQ ID NO: 1753623 - RNA, 15 nt, Human herpesvirus 1
cgggcuacugguggg

SEQ ID NO: 1753624 - RNA, 18 nt, Human herpesvirus 1
ugcgauggcgacacaccu

SEQ ID NO: 1753625 - RNA, 17 nt, Human herpesvirus 1
ucccgacaccaccagcu

SEQ ID NO: 1753626 - RNA, 17 nt, Human herpesvirus 1
cguaaacgccgagcugc

SEQ ID NO: 1753627 - RNA, 20 nt, Human herpesvirus 1
gggcgccucggucaccccaa

SEQ ID NO: 1753628 - RNA, 16 nt, Human herpesvirus 1
uguacugcggucuguc

SEQ ID NO: 1753629 - RNA, 22 nt, Human herpesvirus 1
cgggcuguuccgccaggcgguc

SEQ ID NO: 1753630 - RNA, 15 nt, Human herpesvirus 1
ccgcgggaggccgcc

SEQ ID NO: 1753631 - RNA, 12 nt, Human herpesvirus 1
ccucccccuccg

SEQ ID NO: 1753632 - RNA, 20 nt, Human herpesvirus 1
ugucugugggccaagauggc

SEQ ID NO: 1753633 - RNA, 17 nt, Human herpesvirus 1
cgccaaacgccagccug

SEQ ID NO: 1753634 - RNA, 11 nt, Human herpesvirus 1
ccaccagccug

SEQ ID NO: 1753635 - RNA, 14 nt, Human herpesvirus 1
cgacaccaccagcu

SEQ ID NO: 1753636 - RNA, 21 nt, Human herpesvirus 1
caccucgcccacccacuccuc

SEQ ID NO: 1753637 - RNA, 21 nt, Human herpesvirus 1
uugucugcguauuccagggcg

SEQ ID NO: 1753638 - RNA, 15 nt, Human herpesvirus 1
ccuggagcaccgagc

SEQ ID NO: 1753639 - RNA, 13 nt, Human herpesvirus 1
cgcacccacagcu

SEQ ID NO: 1753640 - RNA, 18 nt, Human herpesvirus 1
gaacaccuucuuugcccu

SEQ ID NO: 1753641 - RNA, 21 nt, Human herpesvirus 1
cgguuuccuuugcgcucccgc

SEQ ID NO: 1753642 - RNA, 23 nt, Human herpesvirus 1
gccgcuguggccucaccugacca

SEQ ID NO: 1753643 - RNA, 19 nt, Human herpesvirus 1
cccgaagacaccccccacc

SEQ ID NO: 1753644 - RNA, 16 nt, Human herpesvirus 1
cgccgcccugagcgcc

SEQ ID NO: 1753645 - RNA, 15 nt, Human herpesvirus 1
ggaugcugccccgcu

SEQ ID NO: 1753646 - RNA, 23 nt, Human herpesvirus 1
ggcguuauucccaaacagggccu

SEQ ID NO: 1753647 - RNA, 18 nt, Human herpesvirus 1
cgagcucccagagacccc

SEQ ID NO: 1753648 - RNA, 18 nt, Human herpesvirus 1
cucccagagaccccaggg

SEQ ID NO: 1753649 - RNA, 20 nt, Human herpesvirus 1
guccgggggcucggaaacug

SEQ ID NO: 1753650 - RNA, 16 nt, Human herpesvirus 1
caagccgcucuccgga

SEQ ID NO: 1753651 - RNA, 19 nt, Human herpesvirus 1
cacgaccuguugauggccu

SEQ ID NO: 1753652 - RNA, 18 nt, Human herpesvirus 1
cacuugcggcaagacccg

SEQ ID NO: 1753653 - RNA, 13 nt, Human herpesvirus 1
cgccaucagccuu

SEQ ID NO: 1753654 - RNA, 13 nt, Human herpesvirus 1
cgcccgccccugc

SEQ ID NO: 1753655 - RNA, 13 nt, Human herpesvirus 1
cgccucagggccu

SEQ ID NO: 1753656 - RNA, 13 nt, Human herpesvirus 1
ggagcccgcccuu

SEQ ID NO: 1753657 - RNA, 19 nt, Human herpesvirus 1
ccgugauccuuaggggccg

SEQ ID NO: 1753658 - RNA, 15 nt, Human herpesvirus 1
uccucacugccuccc

SEQ ID NO: 1753659 - RNA, 11 nt, Human herpesvirus 1
gcaucccagga

SEQ ID NO: 1753660 - RNA, 20 nt, Human herpesvirus 1
gggagccccggucuccccgg

SEQ ID NO: 1753661 - RNA, 16 nt, Human herpesvirus 1
cgcauaucccacccug

SEQ ID NO: 1753662 - RNA, 16 nt, Human herpesvirus 1
gccgcgccgcugcccg

SEQ ID NO: 1753663 - RNA, 13 nt, Human herpesvirus 1
gcgcuuugcggag

SEQ ID NO: 1753664 - RNA, 16 nt, Human herpesvirus 1
uccaaaaccacaaccu

SEQ ID NO: 1753665 - RNA, 20 nt, Human herpesvirus 1
gcugcggccacacagccggc

SEQ ID NO: 1753666 - RNA, 17 nt, Human herpesvirus 1
gucuccccgauggcccu

SEQ ID NO: 1753667 - RNA, 13 nt, Human herpesvirus 1
gauggccugugcu

SEQ ID NO: 1753668 - RNA, 17 nt, Human herpesvirus 1
gcgagcaccugcgggac

SEQ ID NO: 1753669 - RNA, 18 nt, Human herpesvirus 1
cgccaacaauccccagga

SEQ ID NO: 1753670 - RNA, 21 nt, Human herpesvirus 1
uaggaugccagccagggcggc

SEQ ID NO: 1753671 - RNA, 12 nt, Human herpesvirus 1
ccugauggagcc

SEQ ID NO: 1753672 - RNA, 19 nt, Human herpesvirus 1
ucgaagcugaugucccuca

SEQ ID NO: 1753673 - RNA, 22 nt, Human herpesvirus 1
cggaacgcaccgaggggccaag

SEQ ID NO: 1753674 - RNA, 20 nt, Human herpesvirus 1
ggggcgggugggccuugccg

SEQ ID NO: 1753675 - RNA, 13 nt, Human herpesvirus 1
cacagccuggccg

SEQ ID NO: 1753676 - RNA, 18 nt, Human herpesvirus 1
cccgucgaagcugauguc

SEQ ID NO: 1753677 - RNA, 12 nt, Human herpesvirus 1
cccggggccagc

SEQ ID NO: 1753678 - RNA, 18 nt, Human herpesvirus 1
gggcucggcuccccgccg

SEQ ID NO: 1753679 - RNA, 17 nt, Human herpesvirus 1
gaugggcgaccuggggc

SEQ ID NO: 1753680 - RNA, 17 nt, Human herpesvirus 1
guggacgccggggccuu

SEQ ID NO: 1753681 - RNA, 17 nt, Human herpesvirus 1
cccucucuucucucccg

SEQ ID NO: 1753682 - RNA, 16 nt, Human herpesvirus 1
cacccgaggcggccug

SEQ ID NO: 1753683 - RNA, 19 nt, Human herpesvirus 1
accccgcaauuugcaccca

SEQ ID NO: 1753684 - RNA, 13 nt, Human herpesvirus 1
caucgcgccccuc

SEQ ID NO: 1753685 - RNA, 19 nt, Human herpesvirus 1
ccuccgcaucccaggauca

SEQ ID NO: 1753686 - RNA, 20 nt, Human herpesvirus 1
gcgccccggccccucauggg

SEQ ID NO: 1753687 - RNA, 18 nt, Human herpesvirus 1
gguuguccguggccccac

SEQ ID NO: 1753688 - RNA, 15 nt, Human herpesvirus 1
uagcguguucgugga

SEQ ID NO: 1753689 - RNA, 22 nt, Human herpesvirus 1
ucaaggacagcggccugcugga

SEQ ID NO: 1753690 - RNA, 14 nt, Human herpesvirus 1
auacacagccaccc

SEQ ID NO: 1753691 - RNA, 14 nt, Human herpesvirus 1
ggggagagcccaca

SEQ ID NO: 1753692 - RNA, 21 nt, Human herpesvirus 1
cgaccgcgcccucgccacacc

SEQ ID NO: 1753693 - RNA, 22 nt, Human herpesvirus 1
cuccaggcugucgacgcccccu

SEQ ID NO: 1753694 - RNA, 13 nt, Human herpesvirus 1
cgccggggcgguc

SEQ ID NO: 1753695 - RNA, 22 nt, Human herpesvirus 1
ugcccuuccaggucccaccuga

SEQ ID NO: 1753696 - RNA, 17 nt, Human herpesvirus 1
ucccucccccuccgcau

SEQ ID NO: 1753697 - RNA, 17 nt, Human herpesvirus 1
ggucuccccgggagccc

SEQ ID NO: 1753698 - RNA, 21 nt, Human herpesvirus 1
ggcggauuuggggcgcuccug

SEQ ID NO: 1753699 - RNA, 15 nt, Human herpesvirus 1
ggccucuccggccug

SEQ ID NO: 1753700 - RNA, 14 nt, Human herpesvirus 1
ucgggaugcugccc

SEQ ID NO: 1753701 - RNA, 17 nt, Human herpesvirus 1
gcccccgaggccagcau

SEQ ID NO: 1753702 - RNA, 13 nt, Human herpesvirus 1
aucuccggacccc

SEQ ID NO: 1753703 - RNA, 17 nt, Human herpesvirus 1
gcccgaccacacacccc

SEQ ID NO: 1753704 - RNA, 13 nt, Human herpesvirus 1
guccccuggggcg

SEQ ID NO: 1753705 - RNA, 18 nt, Human herpesvirus 1
gccaagaagaagggcacg

SEQ ID NO: 1753706 - RNA, 11 nt, Human herpesvirus 1
ggguccgggcc

SEQ ID NO: 1753707 - RNA, 16 nt, Human herpesvirus 1
gcguccccggcccgga

SEQ ID NO: 1753708 - RNA, 20 nt, Human herpesvirus 1
cagggccuccgaccccagac

SEQ ID NO: 1753709 - RNA, 17 nt, Human herpesvirus 1
cgguccggagccgcgcg

SEQ ID NO: 1753710 - RNA, 17 nt, Human herpesvirus 1
gaaauagcaacaaggcc

SEQ ID NO: 1753711 - RNA, 12 nt, Human herpesvirus 1
ccaccgcugggc

SEQ ID NO: 1753712 - RNA, 16 nt, Human herpesvirus 1
accccgggcgcgcccu

SEQ ID NO: 1753713 - RNA, 19 nt, Human herpesvirus 1
ggguggagggugucccagg

SEQ ID NO: 1753714 - RNA, 21 nt, Human herpesvirus 1
uggccaucgguccccucuggg

SEQ ID NO: 1753715 - RNA, 22 nt, Human herpesvirus 1
cugcggcucaacgagcuccugg

SEQ ID NO: 1753716 - RNA, 11 nt, Human herpesvirus 1
caccuccaccc

SEQ ID NO: 1753717 - RNA, 17 nt, Human herpesvirus 1
cggggccgcccuggccg

SEQ ID NO: 1753718 - RNA, 20 nt, Human herpesvirus 1
gcccgggccacggcgccgac

SEQ ID NO: 1753719 - RNA, 15 nt, Human herpesvirus 1
ucaauaaaaggcauu

SEQ ID NO: 1753720 - RNA, 20 nt, Human herpesvirus 1
ucaucgaccucaacaucacc

SEQ ID NO: 1753721 - RNA, 17 nt, Human herpesvirus 1
ggcggacccaagccgcc

SEQ ID NO: 1753722 - RNA, 17 nt, Human herpesvirus 1
aaagugaaagacacggg

SEQ ID NO: 1753723 - RNA, 19 nt, Human herpesvirus 1
cguucuccggggcccggcc

SEQ ID NO: 1753724 - RNA, 18 nt, Human herpesvirus 1
gccuuguuccgcuucccg

SEQ ID NO: 1753725 - RNA, 14 nt, Human herpesvirus 1
gggcguagagcugu

SEQ ID NO: 1753726 - RNA, 16 nt, Human herpesvirus 1
ggggacccgccccgga

SEQ ID NO: 1753727 - RNA, 21 nt, Human herpesvirus 1
guggaccccacgacacccacc

SEQ ID NO: 1753728 - RNA, 12 nt, Human herpesvirus 1
cccagcugggcc

SEQ ID NO: 1753729 - RNA, 22 nt, Human herpesvirus 1
guccaccaaagucucugugggu

SEQ ID NO: 1753730 - RNA, 14 nt, Human herpesvirus 1
uccugauguggcug

SEQ ID NO: 1753731 - RNA, 15 nt, Human herpesvirus 1
cugucccgcgugcaa

SEQ ID NO: 1753732 - RNA, 14 nt, Human herpesvirus 1
ccgggccgcaccgg

SEQ ID NO: 1753733 - RNA, 20 nt, Human herpesvirus 1
gcgggcucgucuuggccacc

SEQ ID NO: 1753734 - RNA, 19 nt, Human herpesvirus 1
gugguucccccccguggcu

SEQ ID NO: 1753735 - RNA, 21 nt, Human herpesvirus 1
cguccgguuggccgcgcggca

SEQ ID NO: 1753736 - RNA, 16 nt, Human herpesvirus 1
ccuccgcaucccagga

SEQ ID NO: 1753737 - RNA, 18 nt, Human herpesvirus 1
uccgaacgcagccccgcu

SEQ ID NO: 1753738 - RNA, 19 nt, Human herpesvirus 1
cgacagcccccccaagcgc

SEQ ID NO: 1753739 - RNA, 17 nt, Human herpesvirus 1
gcgcgcuuguccccgaa

SEQ ID NO: 1753740 - RNA, 14 nt, Human herpesvirus 1
cggucgggcggaga

SEQ ID NO: 1753741 - RNA, 16 nt, Human herpesvirus 1
acggguguggggaccc

SEQ ID NO: 1753742 - RNA, 16 nt, Human herpesvirus 1
ccaccuccacccccuc

SEQ ID NO: 1753743 - RNA, 15 nt, Human herpesvirus 1
ccgcggugggcugga

SEQ ID NO: 1753744 - RNA, 23 nt, Human herpesvirus 1
ggugcgauggcgacacaccugug

SEQ ID NO: 1753745 - RNA, 21 nt, Human herpesvirus 1
gaaagcaagaacaauaaaggc

SEQ ID NO: 1753746 - RNA, 16 nt, Human herpesvirus 1
gccgcgcgccgcgcgu

SEQ ID NO: 1753747 - RNA, 20 nt, Human herpesvirus 1
cugcgaccccagccuucacg

SEQ ID NO: 1753748 - RNA, 21 nt, Human herpesvirus 1
agcacccugcugcccccggag

SEQ ID NO: 1753749 - RNA, 15 nt, Human herpesvirus 1
ccacccaggcgcugg

SEQ ID NO: 1753750 - RNA, 13 nt, Human herpesvirus 1
aggcccacgccuc

SEQ ID NO: 1753751 - RNA, 22 nt, Human herpesvirus 1
ccgcggccccagcccucucccc

SEQ ID NO: 1753752 - RNA, 15 nt, Human herpesvirus 1
gcuguuguaggcggu

SEQ ID NO: 1753753 - RNA, 24 nt, Human herpesvirus 1
cggaggauuacuuuaagcgcugcu

SEQ ID NO: 1753754 - RNA, 22 nt, Human herpesvirus 1
cucccaacccccuaagacccac

SEQ ID NO: 1753755 - RNA, 19 nt, Human herpesvirus 1
auucucccgaaccaggccg

SEQ ID NO: 1753756 - RNA, 22 nt, Human herpesvirus 1
cugugguguuuuuggcaucaug

SEQ ID NO: 1753757 - RNA, 19 nt, Human herpesvirus 1
aaccccuuuggggcgcugg

SEQ ID NO: 1753758 - RNA, 14 nt, Human herpesvirus 1
cgacgcacacaccc

SEQ ID NO: 1753759 - RNA, 13 nt, Human herpesvirus 1
gccucccccugag

SEQ ID NO: 1753760 - RNA, 15 nt, Human herpesvirus 1
ggucgggcggagaaa

SEQ ID NO: 1753761 - RNA, 17 nt, Human herpesvirus 1
ccagccguccucgcacc

SEQ ID NO: 1753762 - RNA, 22 nt, Human herpesvirus 1
gauggggagagcccacaugcgg

SEQ ID NO: 1753763 - RNA, 15 nt, Human herpesvirus 1
cgccgacgaccuggu

SEQ ID NO: 1753764 - RNA, 19 nt, Human herpesvirus 1
gcccacacaacgcuccgcc

SEQ ID NO: 1753765 - RNA, 17 nt, Human herpesvirus 1
caggaucacaccgguca

SEQ ID NO: 1753766 - RNA, 15 nt, Human herpesvirus 1
ugcacccagccuuua

SEQ ID NO: 1753767 - RNA, 17 nt, Human herpesvirus 1
cuugggcccgggggccu

SEQ ID NO: 1753768 - RNA, 23 nt, Human herpesvirus 1
ucaagcaggccaucgccggggac

SEQ ID NO: 1753769 - RNA, 20 nt, Human herpesvirus 1
cggaacgcaccgaggggcca

SEQ ID NO: 1753770 - RNA, 14 nt, Human herpesvirus 1
ucuucuccccuucc

SEQ ID NO: 1753771 - RNA, 11 nt, Human herpesvirus 1
gcucagccaga

SEQ ID NO: 1753772 - RNA, 18 nt, Human herpesvirus 1
ucuuuuguguuggcccua

SEQ ID NO: 1753773 - RNA, 12 nt, Human herpesvirus 1
ggcggaccuggc

SEQ ID NO: 1753774 - RNA, 23 nt, Human herpesvirus 1
gucacagcgaccgcaacuuccca

SEQ ID NO: 1753775 - RNA, 17 nt, Human herpesvirus 1
aagcgucccugggcccu

SEQ ID NO: 1753776 - RNA, 14 nt, Human herpesvirus 1
cggcccacccuggc

SEQ ID NO: 1753777 - RNA, 21 nt, Human herpesvirus 1
cgcgaccaccccaaauacagc

SEQ ID NO: 1753778 - RNA, 21 nt, Human herpesvirus 1
cggccagaucuacugcugggc

SEQ ID NO: 1753779 - RNA, 15 nt, Human herpesvirus 1
accggcacccggccu

SEQ ID NO: 1753780 - RNA, 18 nt, Human herpesvirus 1
ccagcagcuugcggggcu

SEQ ID NO: 1753781 - RNA, 16 nt, Human herpesvirus 1
cccggaccccacgcac

SEQ ID NO: 1753782 - RNA, 22 nt, Human herpesvirus 1
ccacccucucuucccucagguc

SEQ ID NO: 1753783 - RNA, 16 nt, Human herpesvirus 1
acacgcgcguccuucu

SEQ ID NO: 1753784 - RNA, 16 nt, Human herpesvirus 1
aagcgucccugggccc

SEQ ID NO: 1753785 - RNA, 23 nt, Human herpesvirus 1
gcagacgaaaagccccgggccgc

SEQ ID NO: 1753786 - RNA, 15 nt, Human herpesvirus 1
gagguggagcugccc

SEQ ID NO: 1753787 - RNA, 18 nt, Human herpesvirus 1
gacgccccccguggaccc

SEQ ID NO: 1753788 - RNA, 23 nt, Human herpesvirus 1
ggcggagaaacggccgaagccac

SEQ ID NO: 1753789 - RNA, 15 nt, Human herpesvirus 1
uuccaggucccaccu

SEQ ID NO: 1753790 - RNA, 21 nt, Human herpesvirus 1
gcggcucaacgagcuccuggc

SEQ ID NO: 1753791 - RNA, 19 nt, Human herpesvirus 1
gcucgccagcgacccgcac

SEQ ID NO: 1753792 - RNA, 19 nt, Human herpesvirus 1
gccgguccgcugugccauc

SEQ ID NO: 1753793 - RNA, 15 nt, Human herpesvirus 1
gcgcaccuggugaug

SEQ ID NO: 1753794 - RNA, 16 nt, Human herpesvirus 1
acgccaaugcccuccc

SEQ ID NO: 1753795 - RNA, 12 nt, Human herpesvirus 1
cugcgugucaaa

SEQ ID NO: 1753796 - RNA, 19 nt, Human herpesvirus 1
ggccgcccacuucccggua

SEQ ID NO: 1753797 - RNA, 15 nt, Human herpesvirus 1
uacgcgggccccggg

SEQ ID NO: 1753798 - RNA, 21 nt, Human herpesvirus 1
cacguacacggguggccgggc

SEQ ID NO: 1753799 - RNA, 20 nt, Human herpesvirus 1
ccaaucgccgguuccucccg

SEQ ID NO: 1753800 - RNA, 23 nt, Human herpesvirus 1
cgcuguucucguuccucacugcc

SEQ ID NO: 1753801 - RNA, 17 nt, Human herpesvirus 1
gcggccgcccaacucuc

SEQ ID NO: 1753802 - RNA, 20 nt, Human herpesvirus 1
ucgacccgcaacgcgcuggg

SEQ ID NO: 1753803 - RNA, 17 nt, Human herpesvirus 1
cccacgcaccccccgcg

SEQ ID NO: 1753804 - RNA, 23 nt, Human herpesvirus 1
gcccuaaccccaccccugugcua

SEQ ID NO: 1753805 - RNA, 23 nt, Human herpesvirus 1
accaguuuugcgaggagcccgcc

SEQ ID NO: 1753806 - RNA, 13 nt, Human herpesvirus 1
gcccaacccacac

SEQ ID NO: 1753807 - RNA, 17 nt, Human herpesvirus 1
gccucugggucugugcc

SEQ ID NO: 1753808 - RNA, 18 nt, Human herpesvirus 1
cucuccgggaugggcuac

SEQ ID NO: 1753809 - RNA, 17 nt, Human herpesvirus 1
agcgacguccugggcca

SEQ ID NO: 1753810 - RNA, 21 nt, Human herpesvirus 1
gcuccgcaacggggcgccguc

SEQ ID NO: 1753811 - RNA, 23 nt, Human herpesvirus 1
ccgguuccucccgcucggcggca

SEQ ID NO: 1753812 - RNA, 19 nt, Human herpesvirus 1
gcgcguaucugguccccgc

SEQ ID NO: 1753813 - RNA, 18 nt, Human herpesvirus 1
ucgaccaccauccccgcu

SEQ ID NO: 1753814 - RNA, 13 nt, Human herpesvirus 1
caacaugacccag

SEQ ID NO: 1753815 - RNA, 18 nt, Human herpesvirus 1
ccugucgcacccacagcu

SEQ ID NO: 1753816 - RNA, 22 nt, Human herpesvirus 1
cgaggaccacgugcacagccug

SEQ ID NO: 1753817 - RNA, 16 nt, Human herpesvirus 1
gccucgggggcgggac

SEQ ID NO: 1753818 - RNA, 15 nt, Human herpesvirus 1
gaucuacugcugggc

SEQ ID NO: 1753819 - RNA, 14 nt, Human herpesvirus 1
caucauccagcugg

SEQ ID NO: 1753820 - RNA, 15 nt, Human herpesvirus 1
ccgcaauuugcaccc

SEQ ID NO: 1753821 - RNA, 21 nt, Human herpesvirus 1
ccucgcgccacacucaccggc

SEQ ID NO: 1753822 - RNA, 16 nt, Human herpesvirus 1
gcccgaagacaccccc

SEQ ID NO: 1753823 - RNA, 16 nt, Human herpesvirus 1
acuggguucuccugga

SEQ ID NO: 1753824 - RNA, 18 nt, Human herpesvirus 1
cugggggcacccacgccc

SEQ ID NO: 1753825 - RNA, 15 nt, Human herpesvirus 1
ccuguuugucgccug

SEQ ID NO: 1753826 - RNA, 13 nt, Human herpesvirus 1
acagccgcccccu

SEQ ID NO: 1753827 - RNA, 15 nt, Human herpesvirus 1
ggaugucgcccgucu

SEQ ID NO: 1753828 - RNA, 21 nt, Human herpesvirus 1
ccgcccccagcugggcccgga

SEQ ID NO: 1753829 - RNA, 13 nt, Human herpesvirus 1
acgcgcggcuggu

SEQ ID NO: 1753830 - RNA, 20 nt, Human herpesvirus 1
ccgucgcacgcguccagucg

SEQ ID NO: 1753831 - RNA, 19 nt, Human herpesvirus 1
gcuggacuacacggagguc

SEQ ID NO: 1753832 - RNA, 18 nt, Human herpesvirus 1
ccggucuccccgggagcc

SEQ ID NO: 1753833 - RNA, 13 nt, Human herpesvirus 1
cccccuggaggug

SEQ ID NO: 1753834 - RNA, 14 nt, Human herpesvirus 1
aucguccaccuccg

SEQ ID NO: 1753835 - RNA, 21 nt, Human herpesvirus 1
ggggcgugucuguuucuuggc

SEQ ID NO: 1753836 - RNA, 13 nt, Human herpesvirus 1
cggacgccacacc

SEQ ID NO: 1753837 - RNA, 14 nt, Human herpesvirus 1
cgcgccgcgggccc

SEQ ID NO: 1753838 - RNA, 19 nt, Human herpesvirus 1
ccacgcccgaccacacacc

SEQ ID NO: 1753839 - RNA, 13 nt, Human herpesvirus 1
agugaaagacacg

SEQ ID NO: 1753840 - RNA, 13 nt, Human herpesvirus 1
cgggcaccacaca

SEQ ID NO: 1753841 - RNA, 18 nt, Human herpesvirus 1
cccugaccccgcuccugu

SEQ ID NO: 1753842 - RNA, 14 nt, Human herpesvirus 1
gcccggguccccgc

SEQ ID NO: 1753843 - RNA, 13 nt, Human herpesvirus 1
gcggggcccggcc

SEQ ID NO: 1753844 - RNA, 12 nt, Human herpesvirus 1
cacaaccucccg

SEQ ID NO: 1753845 - RNA, 14 nt, Human herpesvirus 1
auuaaccaccugcg

SEQ ID NO: 1753846 - RNA, 15 nt, Human herpesvirus 1
ggcccgucgugucuu

SEQ ID NO: 1753847 - RNA, 14 nt, Human herpesvirus 1
gucccccuggaggu

SEQ ID NO: 1753848 - RNA, 15 nt, Human herpesvirus 1
gcuccugauguggcu

SEQ ID NO: 1753849 - RNA, 18 nt, Human herpesvirus 1
accugggggacugcaucg

SEQ ID NO: 1753850 - RNA, 16 nt, Human herpesvirus 1
cuuuaaaaagcagggg

SEQ ID NO: 1753851 - RNA, 22 nt, Human herpesvirus 1
cacgagaucaaggacagcggcc

SEQ ID NO: 1753852 - RNA, 12 nt, Human herpesvirus 1
guccgcggggcc

SEQ ID NO: 1753853 - RNA, 23 nt, Human herpesvirus 1
gaggugcuucuguuuggcgcccc

SEQ ID NO: 1753854 - RNA, 19 nt, Human herpesvirus 1
ccugugugucguauguuua

SEQ ID NO: 1753855 - RNA, 18 nt, Human herpesvirus 1
ugaucgcguaccagcccc

SEQ ID NO: 1753856 - RNA, 12 nt, Human herpesvirus 1
cgcggggccccc

SEQ ID NO: 1753857 - RNA, 18 nt, Human herpesvirus 1
acaacccuacaaccugac

SEQ ID NO: 1753858 - RNA, 17 nt, Human herpesvirus 1
cugggauccgaccccca

SEQ ID NO: 1753859 - RNA, 14 nt, Human herpesvirus 1
ccaggccuccaccc

SEQ ID NO: 1753860 - RNA, 19 nt, Human herpesvirus 1
ucuccucuucuccccuucc

SEQ ID NO: 1753861 - RNA, 13 nt, Human herpesvirus 1
caaacgacccacc

SEQ ID NO: 1753862 - RNA, 13 nt, Human herpesvirus 1
gagacaauaccgg

SEQ ID NO: 1753863 - RNA, 17 nt, Human herpesvirus 1
cgcggcggggcccggcc

SEQ ID NO: 1753864 - RNA, 20 nt, Human herpesvirus 1
gguggcgaccacgggcuguc

SEQ ID NO: 1753865 - RNA, 14 nt, Human herpesvirus 1
ccuuccccacggga

SEQ ID NO: 1753866 - RNA, 17 nt, Human herpesvirus 1
uccaccaaagucucugu

SEQ ID NO: 1753867 - RNA, 23 nt, Human herpesvirus 1
gccggcguuucugaccugcaccg

SEQ ID NO: 1753868 - RNA, 18 nt, Human herpesvirus 1
ccuuggucuggcccacgc

SEQ ID NO: 1753869 - RNA, 16 nt, Human herpesvirus 1
gccaacgcccugacca

SEQ ID NO: 1753870 - RNA, 20 nt, Human herpesvirus 1
gcacgcccccuacgaggacg

SEQ ID NO: 1753871 - RNA, 14 nt, Human herpesvirus 1
ggagcucccgggag

SEQ ID NO: 1753872 - RNA, 18 nt, Human herpesvirus 1
ccagaucuacugcugggc

SEQ ID NO: 1753873 - RNA, 21 nt, Human herpesvirus 1
uacauugaggcggaaaauccc

SEQ ID NO: 1753874 - RNA, 12 nt, Human herpesvirus 1
cgaagcccagcg

SEQ ID NO: 1753875 - RNA, 22 nt, Human herpesvirus 1
acagcuggccgccgucgcacgc

SEQ ID NO: 1753876 - RNA, 22 nt, Human herpesvirus 1
cauaaccgaccgcagucccuga

SEQ ID NO: 1753877 - RNA, 19 nt, Human herpesvirus 1
aguucaccguggccuggga

SEQ ID NO: 1753878 - RNA, 18 nt, Human herpesvirus 1
ccaccgcgcuccucccgc

SEQ ID NO: 1753879 - RNA, 16 nt, Human herpesvirus 1
ccgcaauuugcaccca

SEQ ID NO: 1753880 - RNA, 12 nt, Human herpesvirus 1
gcuggaccucac

SEQ ID NO: 1753881 - RNA, 16 nt, Human herpesvirus 1
uacucgaucacggagg

SEQ ID NO: 1753882 - RNA, 17 nt, Human herpesvirus 1
aauuugcacccagccuu

SEQ ID NO: 1753883 - RNA, 13 nt, Human herpesvirus 1
cugacccucuccg

SEQ ID NO: 1753884 - RNA, 22 nt, Human herpesvirus 1
cgaccucuccacaccugcacca

SEQ ID NO: 1753885 - RNA, 21 nt, Human herpesvirus 1
cccccggacgacauggccagc

SEQ ID NO: 1753886 - RNA, 17 nt, Human herpesvirus 1
gucaaacgaccucauca

SEQ ID NO: 1753887 - RNA, 18 nt, Human herpesvirus 1
ggacggcggggcagagcc

SEQ ID NO: 1753888 - RNA, 18 nt, Human herpesvirus 1
caaccccggucucccagg

SEQ ID NO: 1753889 - RNA, 15 nt, Human herpesvirus 1
cccucugggcccgcc

SEQ ID NO: 1753890 - RNA, 21 nt, Human herpesvirus 1
ccgucgcacgcguccagucgg

SEQ ID NO: 1753891 - RNA, 20 nt, Human herpesvirus 1
uggucggcgagcuggauggc

SEQ ID NO: 1753892 - RNA, 16 nt, Human herpesvirus 1
gugguccgccuagccg

SEQ ID NO: 1753893 - RNA, 20 nt, Human herpesvirus 1
ccacccccccggaggaaacc

SEQ ID NO: 1753894 - RNA, 15 nt, Human herpesvirus 1
gccacaacagcccug

SEQ ID NO: 1753895 - RNA, 14 nt, Human herpesvirus 1
agggugucccagga

SEQ ID NO: 1753896 - RNA, 16 nt, Human herpesvirus 1
ucccugucgccuccca

SEQ ID NO: 1753897 - RNA, 19 nt, Human herpesvirus 1
ucagcgacguccugggcca

SEQ ID NO: 1753898 - RNA, 15 nt, Human herpesvirus 1
ccacgcaaacaacac

SEQ ID NO: 1753899 - RNA, 21 nt, Human herpesvirus 1
cgcaauuugcacccagccuuu

SEQ ID NO: 1753900 - RNA, 18 nt, Human herpesvirus 1
cacccugcugcccccgga

SEQ ID NO: 1753901 - RNA, 12 nt, Human herpesvirus 1
guaucaaacuca

SEQ ID NO: 1753902 - RNA, 14 nt, Human herpesvirus 1
aggaaauccguggc

SEQ ID NO: 1753903 - RNA, 17 nt, Human herpesvirus 1
cagaggcgcgcgcaccu

SEQ ID NO: 1753904 - RNA, 18 nt, Human herpesvirus 1
gucgggguggcacagaac

SEQ ID NO: 1753905 - RNA, 13 nt, Human herpesvirus 1
ucuccccugcugc

SEQ ID NO: 1753906 - RNA, 21 nt, Human herpesvirus 1
caugaccgcccgccccucgcc

SEQ ID NO: 1753907 - RNA, 12 nt, Human herpesvirus 1
gcgcccccgccc

SEQ ID NO: 1753908 - RNA, 12 nt, Human herpesvirus 1
gcccccccgcgc

SEQ ID NO: 1753909 - RNA, 16 nt, Human herpesvirus 1
cugcuccgccuggccu

SEQ ID NO: 1753910 - RNA, 16 nt, Human herpesvirus 1
gggaccugaaccccag

SEQ ID NO: 1753911 - RNA, 23 nt, Human herpesvirus 1
ccggagccgggcgcgugcugcgc

SEQ ID NO: 1753912 - RNA, 15 nt, Human herpesvirus 1
cuccccuucccuccc

SEQ ID NO: 1753913 - RNA, 12 nt, Human herpesvirus 1
gccaccgugggc

SEQ ID NO: 1753914 - RNA, 18 nt, Human herpesvirus 1
agcccaacccacacgcac

SEQ ID NO: 1753915 - RNA, 15 nt, Human herpesvirus 1
gcgcgaucguccacc

SEQ ID NO: 1753916 - RNA, 14 nt, Human herpesvirus 1
accgcagucccuga

SEQ ID NO: 1753917 - RNA, 20 nt, Human herpesvirus 1
caucgacacgcgcguccuuc

SEQ ID NO: 1753918 - RNA, 18 nt, Human herpesvirus 1
cccgccccucgccacguc

SEQ ID NO: 1753919 - RNA, 19 nt, Human herpesvirus 1
cgccgaagagucggagccc

SEQ ID NO: 1753920 - RNA, 18 nt, Human herpesvirus 1
cccaccaacgucuccucc

SEQ ID NO: 1753921 - RNA, 11 nt, Human herpesvirus 1
gcgccccgaug

SEQ ID NO: 1753922 - RNA, 14 nt, Human herpesvirus 1
acccugcugcaggc

SEQ ID NO: 1753923 - RNA, 14 nt, Human herpesvirus 1
uuguguuggcccua

SEQ ID NO: 1753924 - RNA, 18 nt, Human herpesvirus 1
cugagccgcuuuccuacc

SEQ ID NO: 1753925 - RNA, 17 nt, Human herpesvirus 1
ggccgcgguggacagcc

SEQ ID NO: 1753926 - RNA, 15 nt, Human herpesvirus 1
gcugccagaccucaa

SEQ ID NO: 1753927 - RNA, 14 nt, Human herpesvirus 1
uccagggcggggcu

SEQ ID NO: 1753928 - RNA, 20 nt, Human herpesvirus 1
cagcccccagaugcccacgg

SEQ ID NO: 1753929 - RNA, 21 nt, Human herpesvirus 1
cuauggcgccugacgcgccgc

SEQ ID NO: 1753930 - RNA, 14 nt, Human herpesvirus 1
cagccugcggccgg

SEQ ID NO: 1753931 - RNA, 19 nt, Human herpesvirus 1
acauccaggcgggccuacc

SEQ ID NO: 1753932 - RNA, 17 nt, Human herpesvirus 1
cgggauccucggccagc

SEQ ID NO: 1753933 - RNA, 16 nt, Human herpesvirus 1
cacaccccccaugcca

SEQ ID NO: 1753934 - RNA, 17 nt, Human herpesvirus 1
ccgcugacccccaccgc

SEQ ID NO: 1753935 - RNA, 21 nt, Human herpesvirus 1
ccguggggacgguggcgccgc

SEQ ID NO: 1753936 - RNA, 15 nt, Human herpesvirus 1
cccgacaccaccagc

SEQ ID NO: 1753937 - RNA, 19 nt, Human herpesvirus 1
ugccugacccucuccggga

SEQ ID NO: 1753938 - RNA, 15 nt, Human herpesvirus 1
acuggaugcgccgcc

SEQ ID NO: 1753939 - RNA, 22 nt, Human herpesvirus 1
ugaugucccucauuuuacaaua

SEQ ID NO: 1753940 - RNA, 20 nt, Human herpesvirus 1
ccaucgccucggccaccgug

SEQ ID NO: 1753941 - RNA, 18 nt, Human herpesvirus 1
acaccuuggcccuggcuc

SEQ ID NO: 1753942 - RNA, 22 nt, Human herpesvirus 1
ccuggcgccaaagcugcuggcg

SEQ ID NO: 1753943 - RNA, 17 nt, Human herpesvirus 1
ccagcgcggcggggccc

SEQ ID NO: 1753944 - RNA, 19 nt, Human herpesvirus 1
uggggagagcccacaugcg

SEQ ID NO: 1753945 - RNA, 15 nt, Human herpesvirus 1
gccuguuugagcaga

SEQ ID NO: 1753946 - RNA, 23 nt, Human herpesvirus 1
ucgaccaccauccccgcucccca

SEQ ID NO: 1753947 - RNA, 13 nt, Human herpesvirus 1
cccagccucccga

SEQ ID NO: 1753948 - RNA, 23 nt, Human herpesvirus 1
guaugucaccggcugagucccuc

SEQ ID NO: 1753949 - RNA, 17 nt, Human herpesvirus 1
gcucagcgccaagguca

SEQ ID NO: 1753950 - RNA, 23 nt, Human herpesvirus 1
ggggaggggggggucgggcgcug

SEQ ID NO: 1753951 - RNA, 18 nt, Human herpesvirus 1
auccccccgucagccugc

SEQ ID NO: 1753952 - RNA, 14 nt, Human herpesvirus 1
ggcgacgugauggc

SEQ ID NO: 1753953 - RNA, 22 nt, Human herpesvirus 1
ggacaccggcgcuacuucaccu

SEQ ID NO: 1753954 - RNA, 14 nt, Human herpesvirus 1
ggagaacccgacca

SEQ ID NO: 1753955 - RNA, 18 nt, Human herpesvirus 1
ucaccggugcgcccccca

SEQ ID NO: 1753956 - RNA, 17 nt, Human herpesvirus 1
ccacccaguuuccaccc

SEQ ID NO: 1753957 - RNA, 13 nt, Human herpesvirus 1
gguaggcccagca

SEQ ID NO: 1753958 - RNA, 20 nt, Human herpesvirus 1
acgaccuguugauggccugu

SEQ ID NO: 1753959 - RNA, 15 nt, Human herpesvirus 1
gcccugaugcaggau

SEQ ID NO: 1753960 - RNA, 23 nt, Human herpesvirus 1
cuggucgucgggcgccaaagccc

SEQ ID NO: 1753961 - RNA, 15 nt, Human herpesvirus 1
gucggaggcccccca

SEQ ID NO: 1753962 - RNA, 18 nt, Human herpesvirus 1
ccccuccgcgccaggccc

SEQ ID NO: 1753963 - RNA, 18 nt, Human herpesvirus 1
ugcgucgggccucccgga

SEQ ID NO: 1753964 - RNA, 20 nt, Human herpesvirus 1
cuggacguccccgaggaccc

SEQ ID NO: 1753965 - RNA, 15 nt, Human herpesvirus 1
cucccugacggccau

SEQ ID NO: 1753966 - RNA, 20 nt, Human herpesvirus 1
cgcaccgucggaggcccccc

SEQ ID NO: 1753967 - RNA, 20 nt, Human herpesvirus 1
guugacgcuggggguccugg

SEQ ID NO: 1753968 - RNA, 12 nt, Human herpesvirus 1
caccgcugggcg

SEQ ID NO: 1753969 - RNA, 21 nt, Human herpesvirus 1
cccgucuggguuuuccccucc

SEQ ID NO: 1753970 - RNA, 23 nt, Human herpesvirus 1
gacccgcaacgcgcuggggcugc

SEQ ID NO: 1753971 - RNA, 13 nt, Human herpesvirus 1
ggggagagcccac

SEQ ID NO: 1753972 - RNA, 20 nt, Human herpesvirus 1
gaccacgcccuuccccacgg

SEQ ID NO: 1753973 - RNA, 22 nt, Human herpesvirus 1
gucccgacauuaaccaccugcg

SEQ ID NO: 1753974 - RNA, 22 nt, Human herpesvirus 1
cauagccgccgaagggacucug

SEQ ID NO: 1753975 - RNA, 20 nt, Human herpesvirus 1
cgacaacgcgggcguucccg

SEQ ID NO: 1753976 - RNA, 20 nt, Human herpesvirus 1
cagauuguccgcggggccuc

SEQ ID NO: 1753977 - RNA, 18 nt, Human herpesvirus 1
uccugggccaccugacgc

SEQ ID NO: 1753978 - RNA, 15 nt, Human herpesvirus 1
cacuccggcgccgcc

SEQ ID NO: 1753979 - RNA, 21 nt, Human herpesvirus 1
cccggguacgaccaucacccg

SEQ ID NO: 1753980 - RNA, 21 nt, Human herpesvirus 1
cgccggcggucgcgcuccucu

SEQ ID NO: 1753981 - RNA, 13 nt, Human herpesvirus 1
acgcaccccccgc

SEQ ID NO: 1753982 - RNA, 21 nt, Human herpesvirus 1
ucacccccgaguucccccggg

SEQ ID NO: 1753983 - RNA, 16 nt, Human herpesvirus 1
cgcuggccgacguggc

SEQ ID NO: 1753984 - RNA, 11 nt, Human herpesvirus 1
accccacgccc

SEQ ID NO: 1753985 - RNA, 14 nt, Human herpesvirus 1
ccugggcccuggcc

SEQ ID NO: 1753986 - RNA, 17 nt, Human herpesvirus 1
ugggccaccgacagccu

SEQ ID NO: 1753987 - RNA, 12 nt, Human herpesvirus 1
ggcgggacucug

SEQ ID NO: 1753988 - RNA, 18 nt, Human herpesvirus 1
ggugucugggaauagagc

SEQ ID NO: 1753989 - RNA, 15 nt, Human herpesvirus 1
cguugcccgggccgu

SEQ ID NO: 1753990 - RNA, 14 nt, Human herpesvirus 1
caaggugggccagc

SEQ ID NO: 1753991 - RNA, 19 nt, Human herpesvirus 1
acccagccuuuaacuacau

SEQ ID NO: 1753992 - RNA, 14 nt, Human herpesvirus 1
ucacagccccgcau

SEQ ID NO: 1753993 - RNA, 18 nt, Human herpesvirus 1
uaaauuuuacaaacagau

SEQ ID NO: 1753994 - RNA, 15 nt, Human herpesvirus 1
cccgugucugugggc

SEQ ID NO: 1753995 - RNA, 18 nt, Human herpesvirus 1
gcuggguggucucuggcc

SEQ ID NO: 1753996 - RNA, 15 nt, Human herpesvirus 1
cagggcccgccaucu

SEQ ID NO: 1753997 - RNA, 13 nt, Human herpesvirus 1
ucccaacaacucc

SEQ ID NO: 1753998 - RNA, 20 nt, Human herpesvirus 1
cucagggccuccgaccccag

SEQ ID NO: 1753999 - RNA, 16 nt, Human herpesvirus 1
uucggaugggaggcaa

SEQ ID NO: 1754000 - RNA, 16 nt, Human herpesvirus 1
cggggaccccaucagc

SEQ ID NO: 1754001 - RNA, 19 nt, Human herpesvirus 1
guccgccaaauaaagccac

SEQ ID NO: 1754002 - RNA, 14 nt, Human herpesvirus 1
guuaauguaaauaa

SEQ ID NO: 1754003 - RNA, 15 nt, Human herpesvirus 1
uggccggggagggca

SEQ ID NO: 1754004 - RNA, 18 nt, Human herpesvirus 1
guggcacuaccccauggg

SEQ ID NO: 1754005 - RNA, 18 nt, Human herpesvirus 1
cuccccgggagccccgga

SEQ ID NO: 1754006 - RNA, 17 nt, Human herpesvirus 1
gggucaccugccaguca

SEQ ID NO: 1754007 - RNA, 19 nt, Human herpesvirus 1
cgccccggaagaccccgag

SEQ ID NO: 1754008 - RNA, 18 nt, Human herpesvirus 1
caagcccccgcccgaccg

SEQ ID NO: 1754009 - RNA, 20 nt, Human herpesvirus 1
cgacugcgaccccagccuuc

SEQ ID NO: 1754010 - RNA, 17 nt, Human herpesvirus 1
ucgguccacggccaagu

SEQ ID NO: 1754011 - RNA, 20 nt, Human herpesvirus 1
auguccccaaaauaaaagac

SEQ ID NO: 1754012 - RNA, 20 nt, Human herpesvirus 1
caugggacacaaaugcccac

SEQ ID NO: 1754013 - RNA, 15 nt, Human herpesvirus 1
ggagacagcgccugc

SEQ ID NO: 1754014 - RNA, 17 nt, Human herpesvirus 1
gcucccgccuuccggac

SEQ ID NO: 1754015 - RNA, 18 nt, Human herpesvirus 1
gcgagguggagcugcccg

SEQ ID NO: 1754016 - RNA, 20 nt, Human herpesvirus 1
ggacagccauauccugagcc

SEQ ID NO: 1754017 - RNA, 12 nt, Human herpesvirus 1
ggcgccccggcc

SEQ ID NO: 1754018 - RNA, 12 nt, Human herpesvirus 1
ggacccccggag

SEQ ID NO: 1754019 - RNA, 22 nt, Human herpesvirus 1
gcccugagacaagagcgcuccc

SEQ ID NO: 1754020 - RNA, 19 nt, Human herpesvirus 1
gaggaccgcgcccccgucc

SEQ ID NO: 1754021 - RNA, 17 nt, Human herpesvirus 1
cagccccccagccuccc

SEQ ID NO: 1754022 - RNA, 22 nt, Human herpesvirus 1
caggaaauccguggccccggcc

SEQ ID NO: 1754023 - RNA, 24 nt, Human herpesvirus 1
gcguccuucuugucgucucucuuc

SEQ ID NO: 1754024 - RNA, 16 nt, Human herpesvirus 1
uccgcuggggccccca

SEQ ID NO: 1754025 - RNA, 12 nt, Human herpesvirus 1
uacauggcccug

SEQ ID NO: 1754026 - RNA, 19 nt, Human herpesvirus 1
cggccccugggccccggga

SEQ ID NO: 1754027 - RNA, 14 nt, Human herpesvirus 1
acgugcccccuccu

SEQ ID NO: 1754028 - RNA, 19 nt, Human herpesvirus 1
cggcaccuauggcgccuga

SEQ ID NO: 1754029 - RNA, 21 nt, Human herpesvirus 1
gcaccacauaaccgaccgcag

SEQ ID NO: 1754030 - RNA, 22 nt, Human herpesvirus 1
cggagguggggcgggggccccg

SEQ ID NO: 1754031 - RNA, 16 nt, Human herpesvirus 1
ggccgcaggacccagc

SEQ ID NO: 1754032 - RNA, 22 nt, Human herpesvirus 1
cggcagucuccuggcagcccug

SEQ ID NO: 1754033 - RNA, 16 nt, Human herpesvirus 1
uggguuucacugaaac

SEQ ID NO: 1754034 - RNA, 15 nt, Human herpesvirus 1
cauccgagcaccccc

SEQ ID NO: 1754035 - RNA, 23 nt, Human herpesvirus 1
cacgguggugcaguucgagcagc

SEQ ID NO: 1754036 - RNA, 15 nt, Human herpesvirus 1
ucuauaucucugggc

SEQ ID NO: 1754037 - RNA, 13 nt, Human herpesvirus 1
aagccacaaaaug

SEQ ID NO: 1754038 - RNA, 15 nt, Human herpesvirus 1
uccaccccccauguc

SEQ ID NO: 1754039 - RNA, 13 nt, Human herpesvirus 1
cccagaccccggg

SEQ ID NO: 1754040 - RNA, 12 nt, Human herpesvirus 1
ucgugagagaau

SEQ ID NO: 1754041 - RNA, 22 nt, Human herpesvirus 1
gccgagcucaaaucgcauccga

SEQ ID NO: 1754042 - RNA, 12 nt, Human herpesvirus 1
cccccgggccgc

SEQ ID NO: 1754043 - RNA, 14 nt, Human herpesvirus 1
gcacaccggucccc

SEQ ID NO: 1754044 - RNA, 19 nt, Human herpesvirus 1
cgguacauggcccuggugu

SEQ ID NO: 1754045 - RNA, 24 nt, Human herpesvirus 1
guugccaucgcguggugcgagcug

SEQ ID NO: 1754046 - RNA, 18 nt, Human herpesvirus 1
gcucaaaucgcauccgag

SEQ ID NO: 1754047 - RNA, 16 nt, Human herpesvirus 1
ggccacuggccgggag

SEQ ID NO: 1754048 - RNA, 20 nt, Human herpesvirus 1
cccaaaacacacggagcugc

SEQ ID NO: 1754049 - RNA, 17 nt, Human herpesvirus 1
caacgcgacccucaccg

SEQ ID NO: 1754050 - RNA, 15 nt, Human herpesvirus 1
accgcgcccucgcca

SEQ ID NO: 1754051 - RNA, 20 nt, Human herpesvirus 1
agggauccacgacaaccccg

SEQ ID NO: 1754052 - RNA, 18 nt, Human herpesvirus 1
cgugcgggaacaccuccg

SEQ ID NO: 1754053 - RNA, 15 nt, Human herpesvirus 1
acgucgcgccugggu

SEQ ID NO: 1754054 - RNA, 14 nt, Human herpesvirus 1
aagccuacuacucg

SEQ ID NO: 1754055 - RNA, 14 nt, Human herpesvirus 1
auccagggagaaac

SEQ ID NO: 1754056 - RNA, 18 nt, Human herpesvirus 1
ggacauccaccacccggc

SEQ ID NO: 1754057 - RNA, 15 nt, Human herpesvirus 1
gcccgaccacacacc

SEQ ID NO: 1754058 - RNA, 14 nt, Human herpesvirus 1
caacgcacuguggc

SEQ ID NO: 1754059 - RNA, 15 nt, Human herpesvirus 1
gcgcuggccgugggu

SEQ ID NO: 1754060 - RNA, 19 nt, Human herpesvirus 1
gccuguguccgcuucucuu

SEQ ID NO: 1754061 - RNA, 12 nt, Human herpesvirus 1
ggcacccacgcc

SEQ ID NO: 1754062 - RNA, 14 nt, Human herpesvirus 1
ucgaccaccaccuc

SEQ ID NO: 1754063 - RNA, 17 nt, Human herpesvirus 1
uuuugucggugggggcu

SEQ ID NO: 1754064 - RNA, 12 nt, Human herpesvirus 1
ccacacagccgg

SEQ ID NO: 1754065 - RNA, 15 nt, Human herpesvirus 1
gccgccgcgccccgc

SEQ ID NO: 1754066 - RNA, 14 nt, Human herpesvirus 1
cuucagcgccguca

SEQ ID NO: 1754067 - RNA, 15 nt, Human herpesvirus 1
cccggaggaggcucu

SEQ ID NO: 1754068 - RNA, 21 nt, Human herpesvirus 1
uggugucugccauggagcgca

SEQ ID NO: 1754069 - RNA, 17 nt, Human herpesvirus 1
cccgacaccaccagcug

SEQ ID NO: 1754070 - RNA, 16 nt, Human herpesvirus 1
gaccaggcgcgccgcg

SEQ ID NO: 1754071 - RNA, 20 nt, Human herpesvirus 1
cggccacgggcugcguguca

SEQ ID NO: 1754072 - RNA, 16 nt, Human herpesvirus 1
ugguccucgaggaggc

SEQ ID NO: 1754073 - RNA, 19 nt, Human herpesvirus 1
gccgccgaagggacucugg

SEQ ID NO: 1754074 - RNA, 19 nt, Human herpesvirus 1
cuaagcgucccugggcccu

SEQ ID NO: 1754075 - RNA, 14 nt, Human herpesvirus 1
guacgccccaccgg

SEQ ID NO: 1754076 - RNA, 13 nt, Human herpesvirus 1
cgacagccccccc

SEQ ID NO: 1754077 - RNA, 14 nt, Human herpesvirus 1
cucaugcgcgguga

SEQ ID NO: 1754078 - RNA, 14 nt, Human herpesvirus 1
acucucgcaccauc

SEQ ID NO: 1754079 - RNA, 22 nt, Human herpesvirus 1
cgguccggagccgcgcggccac

SEQ ID NO: 1754080 - RNA, 17 nt, Human herpesvirus 1
cggcagcccggaggcgc

SEQ ID NO: 1754081 - RNA, 15 nt, Human herpesvirus 1
acuacaccagccaau

SEQ ID NO: 1754082 - RNA, 22 nt, Human herpesvirus 1
cgaagccccggcccugaugcag

SEQ ID NO: 1754083 - RNA, 18 nt, Human herpesvirus 1
cccaccgcgcuccucccg

SEQ ID NO: 1754084 - RNA, 16 nt, Human herpesvirus 1
uccugauguggcugcu

SEQ ID NO: 1754085 - RNA, 20 nt, Human herpesvirus 1
ggagagacgauggcaggagc

SEQ ID NO: 1754086 - RNA, 17 nt, Human herpesvirus 1
cuggccgggagcaccac

SEQ ID NO: 1754087 - RNA, 12 nt, Human herpesvirus 1
caugccacccuc

SEQ ID NO: 1754088 - RNA, 23 nt, Human herpesvirus 1
acugcggucugucucgucuccuc

SEQ ID NO: 1754089 - RNA, 14 nt, Human herpesvirus 1
cccacuccuccccg

SEQ ID NO: 1754090 - RNA, 12 nt, Human herpesvirus 1
cgccccucgggu

SEQ ID NO: 1754091 - RNA, 14 nt, Human herpesvirus 1
gacccgcauccccc

SEQ ID NO: 1754092 - RNA, 22 nt, Human herpesvirus 1
ucccggcgggguuauaggccac

SEQ ID NO: 1754093 - RNA, 21 nt, Human herpesvirus 1
cgcguguuccccgggagcccc

SEQ ID NO: 1754094 - RNA, 19 nt, Human herpesvirus 1
gagugucgcagcaccuccu

SEQ ID NO: 1754095 - RNA, 21 nt, Human herpesvirus 1
gguggaucuuagccuccccgg

SEQ ID NO: 1754096 - RNA, 17 nt, Human herpesvirus 1
cgucaccaugcagcgcc

SEQ ID NO: 1754097 - RNA, 21 nt, Human herpesvirus 1
guuugggagagccggccccgg

SEQ ID NO: 1754098 - RNA, 11 nt, Human herpesvirus 1
cccccuggccu

SEQ ID NO: 1754099 - RNA, 14 nt, Human herpesvirus 1
gccccggaagaccc

SEQ ID NO: 1754100 - RNA, 12 nt, Human herpesvirus 1
ccggaggugggg

SEQ ID NO: 1754101 - RNA, 11 nt, Human herpesvirus 1
ccggccugggc

SEQ ID NO: 1754102 - RNA, 13 nt, Human herpesvirus 1
cccuggcgccgcc

SEQ ID NO: 1754103 - RNA, 12 nt, Human herpesvirus 1
acauccccccga

SEQ ID NO: 1754104 - RNA, 13 nt, Human herpesvirus 1
gcguccacccgga

SEQ ID NO: 1754105 - RNA, 23 nt, Human herpesvirus 1
acaugaccgcccgccccucgcca

SEQ ID NO: 1754106 - RNA, 18 nt, Human herpesvirus 1
cguguuugcccauaauaa

SEQ ID NO: 1754107 - RNA, 21 nt, Human herpesvirus 1
cgggagccccggaccccacgc

SEQ ID NO: 1754108 - RNA, 22 nt, Human herpesvirus 1
agaaccuuuaggaugccagcca

SEQ ID NO: 1754109 - RNA, 19 nt, Human herpesvirus 1
cagucuccuggcagcccug

SEQ ID NO: 1754110 - RNA, 16 nt, Human herpesvirus 1
ggccauguugggccgc

SEQ ID NO: 1754111 - RNA, 14 nt, Human herpesvirus 1
gauggggagagccc

SEQ ID NO: 1754112 - RNA, 14 nt, Human herpesvirus 1
aaagccacugaaac

SEQ ID NO: 1754113 - RNA, 14 nt, Human herpesvirus 1
cuccacccccucga

SEQ ID NO: 1754114 - RNA, 13 nt, Human herpesvirus 1
uucgccccacaca

SEQ ID NO: 1754115 - RNA, 19 nt, Human herpesvirus 1
gugggucuguugguccugg

SEQ ID NO: 1754116 - RNA, 18 nt, Human herpesvirus 1
gacaacgcgacaggccag

SEQ ID NO: 1754117 - RNA, 15 nt, Human herpesvirus 1
ccagcuacgccgccg

SEQ ID NO: 1754118 - RNA, 14 nt, Human herpesvirus 1
guuugguccccccu

SEQ ID NO: 1754119 - RNA, 15 nt, Human herpesvirus 1
cuggccgcgcccacu

SEQ ID NO: 1754120 - RNA, 18 nt, Human herpesvirus 1
acacgagcacccugcugc

SEQ ID NO: 1754121 - RNA, 15 nt, Human herpesvirus 1
cgugcguagcauacc

SEQ ID NO: 1754122 - RNA, 22 nt, Human herpesvirus 1
ccacauaaccgaccgcaguccc

SEQ ID NO: 1754123 - RNA, 19 nt, Human herpesvirus 1
cccgccgcaaagccaccca

SEQ ID NO: 1754124 - RNA, 13 nt, Human herpesvirus 1
auauccugagccc

SEQ ID NO: 1754125 - RNA, 14 nt, Human herpesvirus 1
gggggucggcaggc

SEQ ID NO: 1754126 - RNA, 16 nt, Human herpesvirus 1
cccuccgcaucccagg

SEQ ID NO: 1754127 - RNA, 15 nt, Human herpesvirus 1
cgccagccugcggcc

SEQ ID NO: 1754128 - RNA, 17 nt, Human herpesvirus 1
cccgcccaccgcugggc

SEQ ID NO: 1754129 - RNA, 17 nt, Human herpesvirus 1
ccugggggacugcaucg

SEQ ID NO: 1754130 - RNA, 21 nt, Human herpesvirus 1
cccgcgcuaugacggcaauaa

SEQ ID NO: 1754131 - RNA, 17 nt, Human herpesvirus 1
gacgcucccgucgcccg

SEQ ID NO: 1754132 - RNA, 14 nt, Human herpesvirus 1
cgggcccggccagg

SEQ ID NO: 1754133 - RNA, 14 nt, Human herpesvirus 1
gcagcuccccauga

SEQ ID NO: 1754134 - RNA, 13 nt, Human herpesvirus 1
ggccgugugacac

SEQ ID NO: 1754135 - RNA, 18 nt, Human herpesvirus 1
gugaacgcaacggcggga

SEQ ID NO: 1754136 - RNA, 19 nt, Human herpesvirus 1
ccaagccgggacuccgcgg

SEQ ID NO: 1754137 - RNA, 12 nt, Human herpesvirus 1
cccggcucuccg

SEQ ID NO: 1754138 - RNA, 20 nt, Human herpesvirus 1
ccucccugacggccaucgcc

SEQ ID NO: 1754139 - RNA, 15 nt, Human herpesvirus 1
cuguauagcccgggc

SEQ ID NO: 1754140 - RNA, 18 nt, Human herpesvirus 1
acgcgcguccuucuuguc

SEQ ID NO: 1754141 - RNA, 21 nt, Human herpesvirus 1
aucccacguccccgggucugu

SEQ ID NO: 1754142 - RNA, 13 nt, Human herpesvirus 1
gaugccagccagg

SEQ ID NO: 1754143 - RNA, 17 nt, Human herpesvirus 1
gccggggagggcagggc

SEQ ID NO: 1754144 - RNA, 24 nt, Human herpesvirus 1
cggguccaaacucccgacaccacc

SEQ ID NO: 1754145 - RNA, 21 nt, Human herpesvirus 1
ccccagagguguucacgcacc

SEQ ID NO: 1754146 - RNA, 15 nt, Human herpesvirus 1
caccaacgcacgagc

SEQ ID NO: 1754147 - RNA, 20 nt, Human herpesvirus 1
ccuuuuggguuucacugaaa

SEQ ID NO: 1754148 - RNA, 21 nt, Human herpesvirus 1
aauaacgacccgaagcugcuc

SEQ ID NO: 1754149 - RNA, 14 nt, Human herpesvirus 1
ccggggagggcagg

SEQ ID NO: 1754150 - RNA, 22 nt, Human herpesvirus 1
cagcgaccccacggccuccgcg

SEQ ID NO: 1754151 - RNA, 15 nt, Human herpesvirus 1
cugacgcgccuagcc

SEQ ID NO: 1754152 - RNA, 21 nt, Human herpesvirus 1
gaccuggggucgcucugucca

SEQ ID NO: 1754153 - RNA, 14 nt, Human herpesvirus 1
cgaacccagcgacc

SEQ ID NO: 1754154 - RNA, 15 nt, Human herpesvirus 1
guuacucggcccccg

SEQ ID NO: 1754155 - RNA, 15 nt, Human herpesvirus 1
gggagagcccacaug

SEQ ID NO: 1754156 - RNA, 17 nt, Human herpesvirus 1
gcgaggagggcggcgac

SEQ ID NO: 1754157 - RNA, 16 nt, Human herpesvirus 1
agugaaagacacgggc

SEQ ID NO: 1754158 - RNA, 15 nt, Human herpesvirus 1
cgacccaccaauaaa

SEQ ID NO: 1754159 - RNA, 23 nt, Human herpesvirus 1
cagcuuuuuuugcgaaccguccc

SEQ ID NO: 1754160 - RNA, 13 nt, Human herpesvirus 1
gccgcgggccccc

SEQ ID NO: 1754161 - RNA, 20 nt, Human herpesvirus 1
ugcccuuccaggucccaccu

SEQ ID NO: 1754162 - RNA, 17 nt, Human herpesvirus 1
ccuggccaaugggggcu

SEQ ID NO: 1754163 - RNA, 20 nt, Human herpesvirus 1
ccuucgccccacacagcccu

SEQ ID NO: 1754164 - RNA, 17 nt, Human herpesvirus 1
uccugcgccccgccgcc

SEQ ID NO: 1754165 - RNA, 23 nt, Human herpesvirus 1
gucaccgguucguauccacaaua

SEQ ID NO: 1754166 - RNA, 16 nt, Human herpesvirus 1
cugcacgaccugcgcu

SEQ ID NO: 1754167 - RNA, 19 nt, Human herpesvirus 1
gagcucaucgcgacccugu

SEQ ID NO: 1754168 - RNA, 18 nt, Human herpesvirus 1
acccgcuaaccaccaagg

SEQ ID NO: 1754169 - RNA, 18 nt, Human herpesvirus 1
ccuccccgcgcaugcucu

SEQ ID NO: 1754170 - RNA, 14 nt, Human herpesvirus 1
gcgaccaccccaaa

SEQ ID NO: 1754171 - RNA, 17 nt, Human herpesvirus 1
gguuacgcgggccccgg

SEQ ID NO: 1754172 - RNA, 13 nt, Human herpesvirus 1
ggcgcggggcccc

SEQ ID NO: 1754173 - RNA, 15 nt, Human herpesvirus 1
ucaacauaccccgcu

SEQ ID NO: 1754174 - RNA, 13 nt, Human herpesvirus 1
ccuuuggggcgcu

SEQ ID NO: 1754175 - RNA, 22 nt, Human herpesvirus 1
acgcgcggcugguccacaccca

SEQ ID NO: 1754176 - RNA, 12 nt, Human herpesvirus 1
ucccggcgccgg

SEQ ID NO: 1754177 - RNA, 21 nt, Human herpesvirus 1
ccuggagcucaaucuggccca

SEQ ID NO: 1754178 - RNA, 12 nt, Human herpesvirus 1
cgagccccccgc

SEQ ID NO: 1754179 - RNA, 13 nt, Human herpesvirus 1
ugcacgcccccgc

SEQ ID NO: 1754180 - RNA, 14 nt, Human herpesvirus 1
ccucguggccccga

SEQ ID NO: 1754181 - RNA, 12 nt, Human herpesvirus 1
gccaaccaagag

SEQ ID NO: 1754182 - RNA, 15 nt, Human herpesvirus 1
cagccacuuccccga

SEQ ID NO: 1754183 - RNA, 14 nt, Human herpesvirus 1
cagacucucgguga

SEQ ID NO: 1754184 - RNA, 18 nt, Human herpesvirus 1
aguuggcauuggauccgg

SEQ ID NO: 1754185 - RNA, 20 nt, Human herpesvirus 1
accaaacaaacaaaccaaaa

SEQ ID NO: 1754186 - RNA, 19 nt, Human herpesvirus 1
acggggccgggagcgccag

SEQ ID NO: 1754187 - RNA, 21 nt, Human herpesvirus 1
cccgcuccugugcacccucac

SEQ ID NO: 1754188 - RNA, 12 nt, Human herpesvirus 1
gaagcugauguc

SEQ ID NO: 1754189 - RNA, 22 nt, Human herpesvirus 1
gugcccauuuacguggcugggu

SEQ ID NO: 1754190 - RNA, 16 nt, Human herpesvirus 1
cggcucggccuauggc

SEQ ID NO: 1754191 - RNA, 12 nt, Human herpesvirus 1
cauuagggagaa

SEQ ID NO: 1754192 - RNA, 17 nt, Human herpesvirus 1
ggcgacgcacacacccu

SEQ ID NO: 1754193 - RNA, 15 nt, Human herpesvirus 1
ccgacucaccucaaa

SEQ ID NO: 1754194 - RNA, 18 nt, Human herpesvirus 1
accacgugcacagccugg

SEQ ID NO: 1754195 - RNA, 13 nt, Human herpesvirus 1
aggcccgggccac

SEQ ID NO: 1754196 - RNA, 17 nt, Human herpesvirus 1
uccaugcagugcauggc

SEQ ID NO: 1754197 - RNA, 16 nt, Human herpesvirus 1
cgcgguagcccggccg

SEQ ID NO: 1754198 - RNA, 23 nt, Human herpesvirus 1
caccagccugguuguccguggcc

SEQ ID NO: 1754199 - RNA, 16 nt, Human herpesvirus 1
gcaagguggugauggg

SEQ ID NO: 1754200 - RNA, 18 nt, Human herpesvirus 1
cacaacggcaugccucug

SEQ ID NO: 1754201 - RNA, 18 nt, Human herpesvirus 1
cgaccgcagucccugagu

SEQ ID NO: 1754202 - RNA, 17 nt, Human herpesvirus 1
cggcaaagaccuuccgg

SEQ ID NO: 1754203 - RNA, 18 nt, Human herpesvirus 1
ucgucgggcgccaaagcc

SEQ ID NO: 1754204 - RNA, 17 nt, Human herpesvirus 1
accgcccaccuccuggc

SEQ ID NO: 1754205 - RNA, 21 nt, Human herpesvirus 1
ccgcgccgcugcccgacccgg

SEQ ID NO: 1754206 - RNA, 18 nt, Human herpesvirus 1
cggucuccccgggagccc

SEQ ID NO: 1754207 - RNA, 15 nt, Human herpesvirus 1
ccucaaguacaaccc

SEQ ID NO: 1754208 - RNA, 14 nt, Human herpesvirus 1
cucucccgggccgc

SEQ ID NO: 1754209 - RNA, 17 nt, Human herpesvirus 1
ccucgaccaccaccucc

SEQ ID NO: 1754210 - RNA, 20 nt, Human herpesvirus 1
ucccucgcaugaagccccca

SEQ ID NO: 1754211 - RNA, 15 nt, Human herpesvirus 1
ccgguaugguaauua

SEQ ID NO: 1754212 - RNA, 23 nt, Human herpesvirus 1
gccccauacacgagcacccugcu

SEQ ID NO: 1754213 - RNA, 14 nt, Human herpesvirus 1
uuguuccgcuuccc

SEQ ID NO: 1754214 - RNA, 19 nt, Human herpesvirus 1
gcgggccucgugggcacuu

SEQ ID NO: 1754215 - RNA, 15 nt, Human herpesvirus 1
ccccgauccgcgucu

SEQ ID NO: 1754216 - RNA, 21 nt, Human herpesvirus 1
caggccguuccgaucgcccug

SEQ ID NO: 1754217 - RNA, 22 nt, Human herpesvirus 1
ucagggcucuacccucuggacg

SEQ ID NO: 1754218 - RNA, 16 nt, Human herpesvirus 1
gcucggcuccccgccg

SEQ ID NO: 1754219 - RNA, 21 nt, Human herpesvirus 1
cacaacggcaugccucugcgg

SEQ ID NO: 1754220 - RNA, 22 nt, Human herpesvirus 1
acaggggccauguugggccgcc

SEQ ID NO: 1754221 - RNA, 13 nt, Human herpesvirus 1
uauauccguguau

SEQ ID NO: 1754222 - RNA, 18 nt, Human herpesvirus 1
cugcuccccaccccggag

SEQ ID NO: 1754223 - RNA, 12 nt, Human herpesvirus 1
ggaccuccugga

SEQ ID NO: 1754224 - RNA, 22 nt, Human herpesvirus 1
cgccugcguucaucggaccccc

SEQ ID NO: 1754225 - RNA, 23 nt, Human herpesvirus 1
cgggcgacgcacacacccuagcg

SEQ ID NO: 1754226 - RNA, 15 nt, Human herpesvirus 1
ugccucuccccccag

SEQ ID NO: 1754227 - RNA, 14 nt, Human herpesvirus 1
cgccggccgcaccc

SEQ ID NO: 1754228 - RNA, 13 nt, Human herpesvirus 1
uggcugccccccc

SEQ ID NO: 1754229 - RNA, 20 nt, Human herpesvirus 1
gccauguuugcgggccuggg

SEQ ID NO: 1754230 - RNA, 13 nt, Human herpesvirus 1
aggugcgccaggu

SEQ ID NO: 1754231 - RNA, 20 nt, Human herpesvirus 1
acccccccggagccgggcgc

SEQ ID NO: 1754232 - RNA, 23 nt, Human herpesvirus 1
ccuccgcgccaggcccgccgcca

SEQ ID NO: 1754233 - RNA, 16 nt, Human herpesvirus 1
cgcugcuccgccuggc

SEQ ID NO: 1754234 - RNA, 20 nt, Human herpesvirus 1
uggcgcagcugggaccccgg

SEQ ID NO: 1754235 - RNA, 15 nt, Human herpesvirus 1
cucccgacaccacca

SEQ ID NO: 1754236 - RNA, 18 nt, Human herpesvirus 1
uugcggccacgggcugcg

SEQ ID NO: 1754237 - RNA, 14 nt, Human herpesvirus 1
cguguucagggcga

SEQ ID NO: 1754238 - RNA, 15 nt, Human herpesvirus 1
cacgagcgcgcugcu

SEQ ID NO: 1754239 - RNA, 19 nt, Human herpesvirus 1
ugcgcgaucccccgccccc

SEQ ID NO: 1754240 - RNA, 19 nt, Human herpesvirus 1
ggcccgggggccugguggc

SEQ ID NO: 1754241 - RNA, 18 nt, Human herpesvirus 1
aggguauggggcggggga

SEQ ID NO: 1754242 - RNA, 23 nt, Human herpesvirus 1
gguugcggcccgcguuuggccug

SEQ ID NO: 1754243 - RNA, 18 nt, Human herpesvirus 1
ccaccacccggccggugg

SEQ ID NO: 1754244 - RNA, 22 nt, Human herpesvirus 1
gcccugagcgcccuccugacca

SEQ ID NO: 1754245 - RNA, 20 nt, Human herpesvirus 1
ccggucaacgaggguugggg

SEQ ID NO: 1754246 - RNA, 24 nt, Human herpesvirus 1
gaagaccugcuuauucucggggag

SEQ ID NO: 1754247 - RNA, 23 nt, Human herpesvirus 1
ggacccgugacacccuaccccag

SEQ ID NO: 1754248 - RNA, 16 nt, Human herpesvirus 1
cuccuccccgcgccgu

SEQ ID NO: 1754249 - RNA, 19 nt, Human herpesvirus 1
gaccaguuuugcgaggagc

SEQ ID NO: 1754250 - RNA, 16 nt, Human herpesvirus 1
ggcguaacguuccgcc

SEQ ID NO: 1754251 - RNA, 12 nt, Human herpesvirus 1
cccaccagcuga

SEQ ID NO: 1754252 - RNA, 14 nt, Human herpesvirus 1
ccccuagccccgcc

SEQ ID NO: 1754253 - RNA, 15 nt, Human herpesvirus 1
cccagcggcacgacc

SEQ ID NO: 1754254 - RNA, 17 nt, Human herpesvirus 1
gcgggggauggggagag

SEQ ID NO: 1754255 - RNA, 15 nt, Human herpesvirus 1
ugggcggccccggcc

SEQ ID NO: 1754256 - RNA, 18 nt, Human herpesvirus 1
cgucgccuggcugaccca

SEQ ID NO: 1754257 - RNA, 23 nt, Human herpesvirus 1
cguugggguggaucuuagccucc

SEQ ID NO: 1754258 - RNA, 17 nt, Human herpesvirus 1
ccacccccgccguccga

SEQ ID NO: 1754259 - RNA, 17 nt, Human herpesvirus 1
cgcccgccaucgagcca

SEQ ID NO: 1754260 - RNA, 21 nt, Human herpesvirus 1
cgccccccguggaccccacga

SEQ ID NO: 1754261 - RNA, 17 nt, Human herpesvirus 1
uaacuacauuaaauugg

SEQ ID NO: 1754262 - RNA, 14 nt, Human herpesvirus 1
ccggggcucagcca

SEQ ID NO: 1754263 - RNA, 19 nt, Human herpesvirus 1
cugggccaccugacgcgcc

SEQ ID NO: 1754264 - RNA, 17 nt, Human herpesvirus 1
caaaauaaaagaccaaa

SEQ ID NO: 1754265 - RNA, 22 nt, Human herpesvirus 1
ggccccauacacgagcacccug

SEQ ID NO: 1754266 - RNA, 12 nt, Human herpesvirus 1
gguccacaccca

SEQ ID NO: 1754267 - RNA, 13 nt, Human herpesvirus 1
cauccagggagaa

SEQ ID NO: 1754268 - RNA, 16 nt, Human herpesvirus 1
cacccacccaccaaga

SEQ ID NO: 1754269 - RNA, 13 nt, Human herpesvirus 1
ggucuggcccacg

SEQ ID NO: 1754270 - RNA, 18 nt, Human herpesvirus 1
gcuugguuucggauggga

SEQ ID NO: 1754271 - RNA, 14 nt, Human herpesvirus 1
gaacacaaggccaa

SEQ ID NO: 1754272 - RNA, 19 nt, Human herpesvirus 1
ccccgaggauucggcccuc

SEQ ID NO: 1754273 - RNA, 17 nt, Human herpesvirus 1
gcgccgucgggcguccc

SEQ ID NO: 1754274 - RNA, 22 nt, Human herpesvirus 1
ccgucgcccgauuuacagcccc

SEQ ID NO: 1754275 - RNA, 22 nt, Human herpesvirus 1
gccagcuaugggcccugcuccg

SEQ ID NO: 1754276 - RNA, 17 nt, Human herpesvirus 1
cgaccacgcccuucccc

SEQ ID NO: 1754277 - RNA, 15 nt, Human herpesvirus 1
cgaacgggggcccug

SEQ ID NO: 1754278 - RNA, 17 nt, Human herpesvirus 1
ggcgcaauugcggccac

SEQ ID NO: 1754279 - RNA, 18 nt, Human herpesvirus 1
ccggcccauugggcggga

SEQ ID NO: 1754280 - RNA, 13 nt, Human herpesvirus 1
guccccaaaauaa

SEQ ID NO: 1754281 - RNA, 17 nt, Human herpesvirus 1
guuggcgucgggaccau

SEQ ID NO: 1754282 - RNA, 15 nt, Human herpesvirus 1
accccaugaaggccc

SEQ ID NO: 1754283 - RNA, 24 nt, Human herpesvirus 1
gcccaacucucgcaccaucccggg

SEQ ID NO: 1754284 - RNA, 20 nt, Human herpesvirus 1
ggcccgggccacggcgccga

SEQ ID NO: 1754285 - RNA, 16 nt, Human herpesvirus 1
accccaacuccagacc

SEQ ID NO: 1754286 - RNA, 19 nt, Human herpesvirus 1
ccgcuuuaucccacggccu

SEQ ID NO: 1754287 - RNA, 16 nt, Human herpesvirus 1
gcgcaccuguuccgcc

SEQ ID NO: 1754288 - RNA, 13 nt, Human herpesvirus 1
agaggcccacgcc

SEQ ID NO: 1754289 - RNA, 14 nt, Human herpesvirus 1
cuucccccccauca

SEQ ID NO: 1754290 - RNA, 21 nt, Human herpesvirus 1
ccccaacgccacgcagccaga

SEQ ID NO: 1754291 - RNA, 16 nt, Human herpesvirus 1
uucguggaaccaugac

SEQ ID NO: 1754292 - RNA, 22 nt, Human herpesvirus 1
cagcaucgggaugcugccccgc

SEQ ID NO: 1754293 - RNA, 21 nt, Human herpesvirus 1
agaccggauggaggagccccu

SEQ ID NO: 1754294 - RNA, 17 nt, Human herpesvirus 1
aaaagaccgcaucgaca

SEQ ID NO: 1754295 - RNA, 19 nt, Human herpesvirus 1
cacgcucuccccugcugcc

SEQ ID NO: 1754296 - RNA, 21 nt, Human herpesvirus 1
gacccccuuguauguccccaa

SEQ ID NO: 1754297 - RNA, 17 nt, Human herpesvirus 1
acccugcgcgagcaccu

SEQ ID NO: 1754298 - RNA, 17 nt, Human herpesvirus 1
augaccgcccgccccuc

SEQ ID NO: 1754299 - RNA, 17 nt, Human herpesvirus 1
gacggcccgaagccugc

SEQ ID NO: 1754300 - RNA, 18 nt, Human herpesvirus 1
ccccucugggcccgccug

SEQ ID NO: 1754301 - RNA, 23 nt, Human herpesvirus 1
ggacacuacgaucucgaagccau

SEQ ID NO: 1754302 - RNA, 21 nt, Human herpesvirus 1
cggacccucucuucucucccg

SEQ ID NO: 1754303 - RNA, 19 nt, Human herpesvirus 1
cagcgacguccugggccac

SEQ ID NO: 1754304 - RNA, 21 nt, Human herpesvirus 1
ugcgcgggguuacgcgggccc

SEQ ID NO: 1754305 - RNA, 20 nt, Human herpesvirus 1
gggccucccggaagagccug

SEQ ID NO: 1754306 - RNA, 17 nt, Human herpesvirus 1
cccgggccgcaccgggc

SEQ ID NO: 1754307 - RNA, 17 nt, Human herpesvirus 1
cagccuggucgaggcgg

SEQ ID NO: 1754308 - RNA, 20 nt, Human herpesvirus 1
agaaguaauaguccguguuc

SEQ ID NO: 1754309 - RNA, 16 nt, Human herpesvirus 1
gaccacgagaccgaca

SEQ ID NO: 1754310 - RNA, 23 nt, Human herpesvirus 1
ccacgccgacgccaacgccgcca

SEQ ID NO: 1754311 - RNA, 13 nt, Human herpesvirus 1
gcggggggugggu

SEQ ID NO: 1754312 - RNA, 14 nt, Human herpesvirus 1
aggaccccgugggc

SEQ ID NO: 1754313 - RNA, 23 nt, Human herpesvirus 1
ggagagcccacaugcggaaagca

SEQ ID NO: 1754314 - RNA, 20 nt, Human herpesvirus 1
aacccccuccgcgccaggcc

SEQ ID NO: 1754315 - RNA, 14 nt, Human herpesvirus 1
guggacccaaagcc

SEQ ID NO: 1754316 - RNA, 20 nt, Human herpesvirus 1
ccacacccaguggcuccggg

SEQ ID NO: 1754317 - RNA, 16 nt, Human herpesvirus 1
cguccucgcaccagcc

SEQ ID NO: 1754318 - RNA, 23 nt, Human herpesvirus 1
gucgcccgauuuacagcccccag

SEQ ID NO: 1754319 - RNA, 16 nt, Human herpesvirus 1
guccgcggaccggcgg

SEQ ID NO: 1754320 - RNA, 16 nt, Human herpesvirus 1
accgcgugcccacguc

SEQ ID NO: 1754321 - RNA, 18 nt, Human herpesvirus 1
cgccccuguggcccuggc

SEQ ID NO: 1754322 - RNA, 19 nt, Human herpesvirus 1
gcgcauacgccucccccac

SEQ ID NO: 1754323 - RNA, 17 nt, Human herpesvirus 1
ucccccaagggggaggg

SEQ ID NO: 1754324 - RNA, 22 nt, Human herpesvirus 1
ggcugucgacgcccccucccug

SEQ ID NO: 1754325 - RNA, 21 nt, Human herpesvirus 1
ggggcuguacucgacccacug

SEQ ID NO: 1754326 - RNA, 16 nt, Human herpesvirus 1
ggcggcgacgugcccc

SEQ ID NO: 1754327 - RNA, 13 nt, Human herpesvirus 1
ccucguggccccg

SEQ ID NO: 1754328 - RNA, 20 nt, Human herpesvirus 1
guacaaguucaaggccacca

SEQ ID NO: 1754329 - RNA, 15 nt, Human herpesvirus 1
gugcuuucuggugcu

SEQ ID NO: 1754330 - RNA, 14 nt, Human herpesvirus 1
cauugguguauguu

SEQ ID NO: 1754331 - RNA, 13 nt, Human herpesvirus 1
agguugggggccg

SEQ ID NO: 1754332 - RNA, 14 nt, Human herpesvirus 1
ccgcguccacccgg

SEQ ID NO: 1754333 - RNA, 21 nt, Human herpesvirus 1
cgaagacccccccggagccgg

SEQ ID NO: 1754334 - RNA, 14 nt, Human herpesvirus 1
cggucauccacgcc

SEQ ID NO: 1754335 - RNA, 12 nt, Human herpesvirus 1
ccucggccagcu

SEQ ID NO: 1754336 - RNA, 12 nt, Human herpesvirus 1
ccccuccauccc

SEQ ID NO: 1754337 - RNA, 17 nt, Human herpesvirus 1
caagaccaacccagcca

SEQ ID NO: 1754338 - RNA, 18 nt, Human herpesvirus 1
gaggagcccgcccuucgc

SEQ ID NO: 1754339 - RNA, 14 nt, Human herpesvirus 1
gcgacaacgcgacc

SEQ ID NO: 1754340 - RNA, 11 nt, Human herpesvirus 1
uacaaacagau

SEQ ID NO: 1754341 - RNA, 21 nt, Human herpesvirus 1
ggccuggugcucgugggccuc

SEQ ID NO: 1754342 - RNA, 20 nt, Human herpesvirus 1
uaggagacaccuuggcccug

SEQ ID NO: 1754343 - RNA, 21 nt, Human herpesvirus 1
uggguuggcgucgggaccauc

SEQ ID NO: 1754344 - RNA, 18 nt, Human herpesvirus 1
cucacagggcgggccgcc

SEQ ID NO: 1754345 - RNA, 15 nt, Human herpesvirus 1
ccgcgucuggccccg

SEQ ID NO: 1754346 - RNA, 14 nt, Human herpesvirus 1
agguacggggcggc

SEQ ID NO: 1754347 - RNA, 18 nt, Human herpesvirus 1
uuugcacccagccuuuaa

SEQ ID NO: 1754348 - RNA, 19 nt, Human herpesvirus 1
guccccgggucuguugggg

SEQ ID NO: 1754349 - RNA, 16 nt, Human herpesvirus 1
ggaggugcccccgcgc

SEQ ID NO: 1754350 - RNA, 21 nt, Human herpesvirus 1
caccgacaccgcacugcggcu

SEQ ID NO: 1754351 - RNA, 16 nt, Human herpesvirus 1
gggauccgacccccau

SEQ ID NO: 1754352 - RNA, 13 nt, Human herpesvirus 1
cgccagggccucg

SEQ ID NO: 1754353 - RNA, 14 nt, Human herpesvirus 1
gcccaccuccuggc

SEQ ID NO: 1754354 - RNA, 20 nt, Human herpesvirus 1
cuccuggccuacgucuccgu

SEQ ID NO: 1754355 - RNA, 14 nt, Human herpesvirus 1
gaugcccacgggca

SEQ ID NO: 1754356 - RNA, 17 nt, Human herpesvirus 1
aagcaagaacaauaaag

SEQ ID NO: 1754357 - RNA, 20 nt, Human herpesvirus 1
ugcugcccccggagcugucc

SEQ ID NO: 1754358 - RNA, 18 nt, Human herpesvirus 1
ccugauguggcugcuccg

SEQ ID NO: 1754359 - RNA, 23 nt, Human herpesvirus 1
caggacuuccccuuccucgcgga

SEQ ID NO: 1754360 - RNA, 15 nt, Human herpesvirus 1
gccgcccuagaggcu

SEQ ID NO: 1754361 - RNA, 23 nt, Human herpesvirus 1
ccggugaacgccuccgcccgugc

SEQ ID NO: 1754362 - RNA, 18 nt, Human herpesvirus 1
gccugccucuccccccag

SEQ ID NO: 1754363 - RNA, 18 nt, Human herpesvirus 1
gaccacgugcacagccug

SEQ ID NO: 1754364 - RNA, 13 nt, Human herpesvirus 1
cucggggagcuuc

SEQ ID NO: 1754365 - RNA, 19 nt, Human herpesvirus 1
ccaacacaacggcaugccu

SEQ ID NO: 1754366 - RNA, 19 nt, Human herpesvirus 1
cuucgcuuugugggggacc

SEQ ID NO: 1754367 - RNA, 12 nt, Human herpesvirus 1
uauaaggccugg

SEQ ID NO: 1754368 - RNA, 21 nt, Human herpesvirus 1
cgccgcgaguacguggccggu

SEQ ID NO: 1754369 - RNA, 18 nt, Human herpesvirus 1
ccacggguguggggaccc

SEQ ID NO: 1754370 - RNA, 15 nt, Human herpesvirus 1
gccugacgcgccgcg

SEQ ID NO: 1754371 - RNA, 19 nt, Human herpesvirus 1
gcuauccccaucacgguca

SEQ ID NO: 1754372 - RNA, 21 nt, Human herpesvirus 1
cgcgaucccccgcccccggcu

SEQ ID NO: 1754373 - RNA, 16 nt, Human herpesvirus 1
gcuguccgagaccccc

SEQ ID NO: 1754374 - RNA, 14 nt, Human herpesvirus 1
gggagccccggguu

SEQ ID NO: 1754375 - RNA, 16 nt, Human herpesvirus 1
ccuggguguguuuauu

SEQ ID NO: 1754376 - RNA, 20 nt, Human herpesvirus 1
ugggccucucguucuccggg

SEQ ID NO: 1754377 - RNA, 13 nt, Human herpesvirus 1
ccguuccagcccc

SEQ ID NO: 1754378 - RNA, 16 nt, Human herpesvirus 1
ggcgccaaagcugcug

SEQ ID NO: 1754379 - RNA, 19 nt, Human herpesvirus 1
cuccugauguggcugcucc

SEQ ID NO: 1754380 - RNA, 16 nt, Human herpesvirus 1
ggucggcgggcccgcg

SEQ ID NO: 1754381 - RNA, 21 nt, Human herpesvirus 1
ccaaguacgcuuucgacccca

SEQ ID NO: 1754382 - RNA, 15 nt, Human herpesvirus 1
gacacaaaugcccac

SEQ ID NO: 1754383 - RNA, 16 nt, Human herpesvirus 1
ggcagcccggaggcgc

SEQ ID NO: 1754384 - RNA, 22 nt, Human herpesvirus 1
cuccaaucgccgguuccucccg

SEQ ID NO: 1754385 - RNA, 22 nt, Human herpesvirus 1
cgaggggaugggcgaccugggg

SEQ ID NO: 1754386 - RNA, 21 nt, Human herpesvirus 1
caggcugucgacgcccccucc

SEQ ID NO: 1754387 - RNA, 18 nt, Human herpesvirus 1
uucugcgggucaccugcc

SEQ ID NO: 1754388 - RNA, 20 nt, Human herpesvirus 1
cccugcuccggcggggccuc

SEQ ID NO: 1754389 - RNA, 21 nt, Human herpesvirus 1
ccccgcgagguccgaagacuc

SEQ ID NO: 1754390 - RNA, 19 nt, Human herpesvirus 1
uggagcucaaucuggccca

SEQ ID NO: 1754391 - RNA, 13 nt, Human herpesvirus 1
cucugggggccug

SEQ ID NO: 1754392 - RNA, 17 nt, Human herpesvirus 1
accaccccaaauacagc

SEQ ID NO: 1754393 - RNA, 20 nt, Human herpesvirus 1
cccugguguuucuggggagc

SEQ ID NO: 1754394 - RNA, 15 nt, Human herpesvirus 1
ggccguggcggccaa

SEQ ID NO: 1754395 - RNA, 16 nt, Human herpesvirus 1
ccucucgcugcuggcg

SEQ ID NO: 1754396 - RNA, 23 nt, Human herpesvirus 1
agccuguuuguccuggggauggc

SEQ ID NO: 1754397 - RNA, 14 nt, Human herpesvirus 1
ccgcaucccaggau

SEQ ID NO: 1754398 - RNA, 16 nt, Human herpesvirus 1
ggccuuuuacgagguc

SEQ ID NO: 1754399 - RNA, 15 nt, Human herpesvirus 1
auccgucgggaggcc

SEQ ID NO: 1754400 - RNA, 12 nt, Human herpesvirus 1
gggcccccgccc

SEQ ID NO: 1754401 - RNA, 23 nt, Human herpesvirus 1
ggccccauacacgagcacccugc

SEQ ID NO: 1754402 - RNA, 22 nt, Human herpesvirus 1
uccggaaacaacccuacaaccu

SEQ ID NO: 1754403 - RNA, 21 nt, Human herpesvirus 1
ccaucaccccgcaauuugcac

SEQ ID NO: 1754404 - RNA, 21 nt, Human herpesvirus 1
cggcguccgcgccccucuggc

SEQ ID NO: 1754405 - RNA, 16 nt, Human herpesvirus 1
ccguggccccacgguc

SEQ ID NO: 1754406 - RNA, 13 nt, Human herpesvirus 1
cuccccagcggcc

SEQ ID NO: 1754407 - RNA, 13 nt, Human herpesvirus 1
cugaccagcgcac

SEQ ID NO: 1754408 - RNA, 23 nt, Human herpesvirus 1
gcaccaugaccaaguggcaggag

SEQ ID NO: 1754409 - RNA, 14 nt, Human herpesvirus 1
gcagggggaugggg

SEQ ID NO: 1754410 - RNA, 20 nt, Human herpesvirus 1
ggcggcgaggccggcgccga

SEQ ID NO: 1754411 - RNA, 12 nt, Human herpesvirus 1
agcaccacauaa

SEQ ID NO: 1754412 - RNA, 21 nt, Human herpesvirus 1
accaucccggguuaauguaaa

SEQ ID NO: 1754413 - RNA, 20 nt, Human herpesvirus 1
ggcggggccuuggcggccgc

SEQ ID NO: 1754414 - RNA, 19 nt, Human herpesvirus 1
ggaggcuguaggucuggga

SEQ ID NO: 1754415 - RNA, 18 nt, Human herpesvirus 1
aggacaaacccaaccguc

SEQ ID NO: 1754416 - RNA, 18 nt, Human herpesvirus 1
cuggcccgcgccccaccc

SEQ ID NO: 1754417 - RNA, 20 nt, Human herpesvirus 1
agccuaugccacgccagggc

SEQ ID NO: 1754418 - RNA, 18 nt, Human herpesvirus 1
ggccccgcgucuggcccc

SEQ ID NO: 1754419 - RNA, 17 nt, Human herpesvirus 1
ccucccgucaccgguuc

SEQ ID NO: 1754420 - RNA, 18 nt, Human herpesvirus 1
ggccccuggcgccgccug

SEQ ID NO: 1754421 - RNA, 18 nt, Human herpesvirus 1
cggugucugggaauagag

SEQ ID NO: 1754422 - RNA, 16 nt, Human herpesvirus 1
ccucggccaccguggg

SEQ ID NO: 1754423 - RNA, 14 nt, Human herpesvirus 1
cacccugcugcagg

SEQ ID NO: 1754424 - RNA, 22 nt, Human herpesvirus 1
accccucguggccccgacagcc

SEQ ID NO: 1754425 - RNA, 18 nt, Human herpesvirus 1
ucaccaccgucagcaccu

SEQ ID NO: 1754426 - RNA, 21 nt, Human herpesvirus 1
ugcgauucuagccucgugggg

SEQ ID NO: 1754427 - RNA, 12 nt, Human herpesvirus 1
gcgccgaccacc

SEQ ID NO: 1754428 - RNA, 11 nt, Human herpesvirus 1
auuaaagacaa

SEQ ID NO: 1754429 - RNA, 12 nt, Human herpesvirus 1
cgcgcauggcag

SEQ ID NO: 1754430 - RNA, 11 nt, Human herpesvirus 1
uucccgggccg

SEQ ID NO: 1754431 - RNA, 19 nt, Human herpesvirus 1
cccugguguuucuggggag

SEQ ID NO: 1754432 - RNA, 22 nt, Human herpesvirus 1
ccacguccccgggucuguuggg

SEQ ID NO: 1754433 - RNA, 15 nt, Human herpesvirus 1
gcugaccgacccucc

SEQ ID NO: 1754434 - RNA, 16 nt, Human herpesvirus 1
gucggcggcuguagcg

SEQ ID NO: 1754435 - RNA, 21 nt, Human herpesvirus 1
ggcuucggccguuucuccgcc

SEQ ID NO: 1754436 - RNA, 14 nt, Human herpesvirus 1
uuggucaaacucag

SEQ ID NO: 1754437 - RNA, 15 nt, Human herpesvirus 1
cgaguccgaagagga

SEQ ID NO: 1754438 - RNA, 17 nt, Human herpesvirus 1
ccucgaccaccaucccc

SEQ ID NO: 1754439 - RNA, 14 nt, Human herpesvirus 1
cacccuaccccagu

SEQ ID NO: 1754440 - RNA, 14 nt, Human herpesvirus 1
cgucucucuucccc

SEQ ID NO: 1754441 - RNA, 15 nt, Human herpesvirus 1
ggacgccggggccuu

SEQ ID NO: 1754442 - RNA, 17 nt, Human herpesvirus 1
ggcucguggcgucucgc

SEQ ID NO: 1754443 - RNA, 15 nt, Human herpesvirus 1
cguggugcgagcugc

SEQ ID NO: 1754444 - RNA, 13 nt, Human herpesvirus 1
gauggggagagcc

SEQ ID NO: 1754445 - RNA, 18 nt, Human herpesvirus 1
cggccccggcaccacggg

SEQ ID NO: 1754446 - RNA, 18 nt, Human herpesvirus 1
ggaccccagcgaccccac

SEQ ID NO: 1754447 - RNA, 18 nt, Human herpesvirus 1
gugcacagccuggccgug

SEQ ID NO: 1754448 - RNA, 18 nt, Human herpesvirus 1
cgggaccugaaccccagc

SEQ ID NO: 1754449 - RNA, 18 nt, Human herpesvirus 1
gagccgugcaccguggga

SEQ ID NO: 1754450 - RNA, 17 nt, Human herpesvirus 1
gcgcgcgucgacgucgc

SEQ ID NO: 1754451 - RNA, 15 nt, Human herpesvirus 1
ucccacgcucucccc

SEQ ID NO: 1754452 - RNA, 24 nt, Human herpesvirus 1
cccacgaucaccgcgggagcggug

SEQ ID NO: 1754453 - RNA, 19 nt, Human herpesvirus 1
ggaggcgccugccccgcca

SEQ ID NO: 1754454 - RNA, 21 nt, Human herpesvirus 1
uguggcgcgaggggggguccg

SEQ ID NO: 1754455 - RNA, 19 nt, Human herpesvirus 1
gcgccgcaaaucccaccaa

SEQ ID NO: 1754456 - RNA, 14 nt, Human herpesvirus 1
gcgcauccccccgu

SEQ ID NO: 1754457 - RNA, 17 nt, Human herpesvirus 1
cugccccgcuucauccc

SEQ ID NO: 1754458 - RNA, 17 nt, Human herpesvirus 1
gccggaacgcaccgagg

SEQ ID NO: 1754459 - RNA, 21 nt, Human herpesvirus 1
gcccccgccguugagccccuc

SEQ ID NO: 1754460 - RNA, 20 nt, Human herpesvirus 1
cuggcguucgucgcccucca

SEQ ID NO: 1754461 - RNA, 13 nt, Human herpesvirus 1
acucucgcaccau

SEQ ID NO: 1754462 - RNA, 17 nt, Human herpesvirus 1
uaaaccgguauuauuua

SEQ ID NO: 1754463 - RNA, 14 nt, Human herpesvirus 1
aguucgagcagccg

SEQ ID NO: 1754464 - RNA, 16 nt, Human herpesvirus 1
ggucucuggccgcgcc

SEQ ID NO: 1754465 - RNA, 17 nt, Human herpesvirus 1
cagcucgcggaggagcc

SEQ ID NO: 1754466 - RNA, 14 nt, Human herpesvirus 1
cucgcgccacacuc

SEQ ID NO: 1754467 - RNA, 17 nt, Human herpesvirus 1
cgucauagugggccucc

SEQ ID NO: 1754468 - RNA, 20 nt, Human herpesvirus 1
gccuccgcccgugcugccgu

SEQ ID NO: 1754469 - RNA, 11 nt, Human herpesvirus 1
uucgaggaggu

SEQ ID NO: 1754470 - RNA, 17 nt, Human herpesvirus 1
caccgcccacagagggc

SEQ ID NO: 1754471 - RNA, 22 nt, Human herpesvirus 1
cgcguguacugcggucugucuc

SEQ ID NO: 1754472 - RNA, 15 nt, Human herpesvirus 1
cauggcgggacuggg

SEQ ID NO: 1754473 - RNA, 14 nt, Human herpesvirus 1
cagcagacgcugcu

SEQ ID NO: 1754474 - RNA, 21 nt, Human herpesvirus 1
ccucucguucuccggggcccg

SEQ ID NO: 1754475 - RNA, 19 nt, Human herpesvirus 1
cgcacggaacacaaggcca

SEQ ID NO: 1754476 - RNA, 18 nt, Human herpesvirus 1
cgaggugcgccaggucgg

SEQ ID NO: 1754477 - RNA, 22 nt, Human herpesvirus 1
gcccgggcgcuugcgcaccugg

SEQ ID NO: 1754478 - RNA, 22 nt, Human herpesvirus 1
gaggacggcgccggggcucucg

SEQ ID NO: 1754479 - RNA, 18 nt, Human herpesvirus 1
gaccccggggcucagcca

SEQ ID NO: 1754480 - RNA, 22 nt, Human herpesvirus 1
ggccgaggcgauuagccagcag

SEQ ID NO: 1754481 - RNA, 19 nt, Human herpesvirus 1
cgccgucccacgcucuccc

SEQ ID NO: 1754482 - RNA, 24 nt, Human herpesvirus 1
gcccgccaucugggauggcuccug

SEQ ID NO: 1754483 - RNA, 12 nt, Human herpesvirus 1
cuacgugccccc

SEQ ID NO: 1754484 - RNA, 16 nt, Human herpesvirus 1
gccgagccccccgcug

SEQ ID NO: 1754485 - RNA, 21 nt, Human herpesvirus 1
gcccuaaccccaccccugugc

SEQ ID NO: 1754486 - RNA, 23 nt, Human herpesvirus 1
cguccuuugggcgggaggaagcc

SEQ ID NO: 1754487 - RNA, 12 nt, Human herpesvirus 1
cacgcccgacca

SEQ ID NO: 1754488 - RNA, 22 nt, Human herpesvirus 1
gcggcuuaugaacgacugggcc

SEQ ID NO: 1754489 - RNA, 16 nt, Human herpesvirus 1
guacgccgccaccgug

SEQ ID NO: 1754490 - RNA, 19 nt, Human herpesvirus 1
ccaucaccccgcaauuugc

SEQ ID NO: 1754491 - RNA, 14 nt, Human herpesvirus 1
cagagaccccaggg

SEQ ID NO: 1754492 - RNA, 21 nt, Human herpesvirus 1
ggccacuggccgggagcacca

SEQ ID NO: 1754493 - RNA, 20 nt, Human herpesvirus 1
gaccaccauccccgcucccc

SEQ ID NO: 1754494 - RNA, 20 nt, Human herpesvirus 1
uccccgaggaccccgugggc

SEQ ID NO: 1754495 - RNA, 21 nt, Human herpesvirus 1
cccaguaacaugcgcacguga

SEQ ID NO: 1754496 - RNA, 22 nt, Human herpesvirus 1
cgccaggucggcgaccgccagc

SEQ ID NO: 1754497 - RNA, 14 nt, Human herpesvirus 1
ggcggcgugugggg

SEQ ID NO: 1754498 - RNA, 21 nt, Human herpesvirus 1
ccuugggcccgggggccuggu

SEQ ID NO: 1754499 - RNA, 17 nt, Human herpesvirus 1
augaguacgaggaucug

SEQ ID NO: 1754500 - RNA, 13 nt, Human herpesvirus 1
aaccccaacucca

SEQ ID NO: 1754501 - RNA, 20 nt, Human herpesvirus 1
uggcgcccccgaccucggac

SEQ ID NO: 1754502 - RNA, 19 nt, Human herpesvirus 1
accgguucucccuguucaa

SEQ ID NO: 1754503 - RNA, 22 nt, Human herpesvirus 1
cagggagaaaccccagcauacc

SEQ ID NO: 1754504 - RNA, 18 nt, Human herpesvirus 1
cucggcccccgaggccag

SEQ ID NO: 1754505 - RNA, 13 nt, Human herpesvirus 1
ggcgcuuggcaug

SEQ ID NO: 1754506 - RNA, 13 nt, Human herpesvirus 1
gcagcaaauuaaa

SEQ ID NO: 1754507 - RNA, 23 nt, Human herpesvirus 1
ccucaccaccaaggcccgggcca

SEQ ID NO: 1754508 - RNA, 15 nt, Human herpesvirus 1
ucacgcacgccaaug

SEQ ID NO: 1754509 - RNA, 16 nt, Human herpesvirus 1
uuggacuggaggagga

SEQ ID NO: 1754510 - RNA, 21 nt, Human herpesvirus 1
cacgcaagaccaggccugguc

SEQ ID NO: 1754511 - RNA, 20 nt, Human herpesvirus 1
ggcccgcgucgggauccaca

SEQ ID NO: 1754512 - RNA, 22 nt, Human herpesvirus 1
aucuccugggggcacccacgcc

SEQ ID NO: 1754513 - RNA, 16 nt, Human herpesvirus 1
uccgcuaucuccuggg

SEQ ID NO: 1754514 - RNA, 15 nt, Human herpesvirus 1
guucagggcgacgcc

SEQ ID NO: 1754515 - RNA, 14 nt, Human herpesvirus 1
gccgcgcguccccc

SEQ ID NO: 1754516 - RNA, 19 nt, Human herpesvirus 1
cucucggugaucuuggcgu

SEQ ID NO: 1754517 - RNA, 15 nt, Human herpesvirus 1
ucuccggacccccgc

SEQ ID NO: 1754518 - RNA, 11 nt, Human herpesvirus 1
cggggcgccgu

SEQ ID NO: 1754519 - RNA, 16 nt, Human herpesvirus 1
cccgcaauuugcaccc

SEQ ID NO: 1754520 - RNA, 14 nt, Human herpesvirus 1
aaacaagagccucc

SEQ ID NO: 1754521 - RNA, 12 nt, Human herpesvirus 1
cugccucccccg

SEQ ID NO: 1754522 - RNA, 14 nt, Human herpesvirus 1
aaaccugggcggcc

SEQ ID NO: 1754523 - RNA, 23 nt, Human herpesvirus 1
cgcccgauuuacagcccccagau

SEQ ID NO: 1754524 - RNA, 14 nt, Human herpesvirus 1
cagcgccaagguca

SEQ ID NO: 1754525 - RNA, 20 nt, Human herpesvirus 1
ucccucccccuccgcauccc

SEQ ID NO: 1754526 - RNA, 17 nt, Human herpesvirus 1
uguaaguacgcccuccc

SEQ ID NO: 1754527 - RNA, 17 nt, Human herpesvirus 1
aagcacacacgggggag

SEQ ID NO: 1754528 - RNA, 13 nt, Human herpesvirus 1
aacccaaccgucc

SEQ ID NO: 1754529 - RNA, 14 nt, Human herpesvirus 1
gccgcaccgggccc

SEQ ID NO: 1754530 - RNA, 16 nt, Human herpesvirus 1
ccggcggacccccgga

SEQ ID NO: 1754531 - RNA, 19 nt, Human herpesvirus 1
ccaccaccuccacccccuc

SEQ ID NO: 1754532 - RNA, 20 nt, Human herpesvirus 1
gcccagaccccuucucccca

SEQ ID NO: 1754533 - RNA, 17 nt, Human herpesvirus 1
guacugcggucugucuc

SEQ ID NO: 1754534 - RNA, 22 nt, Human herpesvirus 1
ugggucugugccaccagccugg

SEQ ID NO: 1754535 - RNA, 18 nt, Human herpesvirus 1
gccuggucccccggggac

SEQ ID NO: 1754536 - RNA, 20 nt, Human herpesvirus 1
ggcccugccacuccggcgcc

SEQ ID NO: 1754537 - RNA, 22 nt, Human herpesvirus 1
ggcccggcccauugggcgggag

SEQ ID NO: 1754538 - RNA, 15 nt, Human herpesvirus 1
cuccgcccccaaccc

SEQ ID NO: 1754539 - RNA, 14 nt, Human herpesvirus 1
uggcgucccaucug

SEQ ID NO: 1754540 - RNA, 22 nt, Human herpesvirus 1
acugcaucgucgaggaggugga

SEQ ID NO: 1754541 - RNA, 23 nt, Human herpesvirus 1
caccuguguggcgguugguccag

SEQ ID NO: 1754542 - RNA, 19 nt, Human herpesvirus 1
uacggcuaccgggaggggu

SEQ ID NO: 1754543 - RNA, 13 nt, Human herpesvirus 1
cccagcgacccca

SEQ ID NO: 1754544 - RNA, 18 nt, Human herpesvirus 1
cggcccuaaccccacccc

SEQ ID NO: 1754545 - RNA, 22 nt, Human herpesvirus 1
gacguuaucucgguggaggcgc

SEQ ID NO: 1754546 - RNA, 18 nt, Human herpesvirus 1
ggccccggcaccacgggu

SEQ ID NO: 1754547 - RNA, 18 nt, Human herpesvirus 1
gguacaacgcgacgcaca

SEQ ID NO: 1754548 - RNA, 22 nt, Human herpesvirus 1
agcucgucgggguggcacagaa

SEQ ID NO: 1754549 - RNA, 20 nt, Human herpesvirus 1
gacccgcaacgcgcuggggc

SEQ ID NO: 1754550 - RNA, 18 nt, Human herpesvirus 1
gagcggcaccaccggggc

SEQ ID NO: 1754551 - RNA, 16 nt, Human herpesvirus 1
accucccagugucccg

SEQ ID NO: 1754552 - RNA, 14 nt, Human herpesvirus 1
ccuggucagaggcc

SEQ ID NO: 1754553 - RNA, 11 nt, Human herpesvirus 1
gcggcggggca

SEQ ID NO: 1754554 - RNA, 14 nt, Human herpesvirus 1
cauagcccuggugu

SEQ ID NO: 1754555 - RNA, 22 nt, Human herpesvirus 1
gacacccuaccccaguccccgg

SEQ ID NO: 1754556 - RNA, 17 nt, Human herpesvirus 1
ugccacuccggcgccgc

SEQ ID NO: 1754557 - RNA, 20 nt, Human herpesvirus 1
cuccgcaacggggcgccguc

SEQ ID NO: 1754558 - RNA, 18 nt, Human herpesvirus 1
gggcgaggagggcggcga

SEQ ID NO: 1754559 - RNA, 19 nt, Human herpesvirus 1
cucguccgcgccccccgac

SEQ ID NO: 1754560 - RNA, 15 nt, Human herpesvirus 1
ccggacccgggccgu

SEQ ID NO: 1754561 - RNA, 14 nt, Human herpesvirus 1
ccgacauggucaug

SEQ ID NO: 1754562 - RNA, 15 nt, Human herpesvirus 1
cccuuccccgcuguc

SEQ ID NO: 1754563 - RNA, 15 nt, Human herpesvirus 1
cauguccgugccgcu

SEQ ID NO: 1754564 - RNA, 17 nt, Human herpesvirus 1
cggcacuuucugacgcc

SEQ ID NO: 1754565 - RNA, 17 nt, Human herpesvirus 1
gacccuaugguacacac

SEQ ID NO: 1754566 - RNA, 21 nt, Human herpesvirus 1
gaacccgcgcuaugacggcaa

SEQ ID NO: 1754567 - RNA, 17 nt, Human herpesvirus 1
acucaccggcggacccc

SEQ ID NO: 1754568 - RNA, 13 nt, Human herpesvirus 1
gaacgcaggcgcu

SEQ ID NO: 1754569 - RNA, 18 nt, Human herpesvirus 1
ucugucucgucuccucuu

SEQ ID NO: 1754570 - RNA, 18 nt, Human herpesvirus 1
agccucugugucaggugg

SEQ ID NO: 1754571 - RNA, 16 nt, Human herpesvirus 1
ccccucguucugcugc

SEQ ID NO: 1754572 - RNA, 15 nt, Human herpesvirus 1
cggcgccgaccaccc

SEQ ID NO: 1754573 - RNA, 18 nt, Human herpesvirus 1
gccuaccggccccugggc

SEQ ID NO: 1754574 - RNA, 17 nt, Human herpesvirus 1
agcgccggguggcgccu

SEQ ID NO: 1754575 - RNA, 17 nt, Human herpesvirus 1
ggcuuccgacgcccccc

SEQ ID NO: 1754576 - RNA, 17 nt, Human herpesvirus 1
guugcccgcggaccacc

SEQ ID NO: 1754577 - RNA, 23 nt, Human herpesvirus 1
gcgggggauggggagagcccaca

SEQ ID NO: 1754578 - RNA, 19 nt, Human herpesvirus 1
accccggggcucagccaga

SEQ ID NO: 1754579 - RNA, 18 nt, Human herpesvirus 1
acccuguggaacgaggcc

SEQ ID NO: 1754580 - RNA, 23 nt, Human herpesvirus 1
cccuggacgugggccucacccac

SEQ ID NO: 1754581 - RNA, 18 nt, Human herpesvirus 1
ccugccccccccacccca

SEQ ID NO: 1754582 - RNA, 22 nt, Human herpesvirus 1
acucauuuguggacgccggggc

SEQ ID NO: 1754583 - RNA, 15 nt, Human herpesvirus 1
gaccggcaccaccga

SEQ ID NO: 1754584 - RNA, 16 nt, Human herpesvirus 1
cagccgggacgaggcc

SEQ ID NO: 1754585 - RNA, 20 nt, Human herpesvirus 1
auccguggccccggccccca

SEQ ID NO: 1754586 - RNA, 12 nt, Human herpesvirus 1
uggucucuggcc

SEQ ID NO: 1754587 - RNA, 15 nt, Human herpesvirus 1
caguggcuccgggcc

SEQ ID NO: 1754588 - RNA, 16 nt, Human herpesvirus 1
gcgucagucccgacac

SEQ ID NO: 1754589 - RNA, 14 nt, Human herpesvirus 1
acgacaucuugucg

SEQ ID NO: 1754590 - RNA, 18 nt, Human herpesvirus 1
ggcgccacaccacgccac

SEQ ID NO: 1754591 - RNA, 17 nt, Human herpesvirus 1
gucugcuccccaccccg

SEQ ID NO: 1754592 - RNA, 22 nt, Human herpesvirus 1
caugaccgcccgccccucgcca

SEQ ID NO: 1754593 - RNA, 13 nt, Human herpesvirus 1
cuucggggcccgg

SEQ ID NO: 1754594 - RNA, 13 nt, Human herpesvirus 1
ucccgacaccacc

SEQ ID NO: 1754595 - RNA, 17 nt, Human herpesvirus 1
cuccgcccgugcugccg

SEQ ID NO: 1754596 - RNA, 15 nt, Human herpesvirus 1
ucgccuggcugaccc

SEQ ID NO: 1754597 - RNA, 22 nt, Human herpesvirus 1
acucucccaccgccaucagccu

SEQ ID NO: 1754598 - RNA, 18 nt, Human herpesvirus 1
caucgaccacgcccuucc

SEQ ID NO: 1754599 - RNA, 19 nt, Human herpesvirus 1
cagcaucgggaugcugccc

SEQ ID NO: 1754600 - RNA, 13 nt, Human herpesvirus 1
caaacaggagcug

SEQ ID NO: 1754601 - RNA, 15 nt, Human herpesvirus 1
ccccgcugcggccac

SEQ ID NO: 1754602 - RNA, 16 nt, Human herpesvirus 1
gacguccugggccacc

SEQ ID NO: 1754603 - RNA, 22 nt, Human herpesvirus 1
ggaacgaggcccgcaagcugaa

SEQ ID NO: 1754604 - RNA, 23 nt, Human herpesvirus 1
aagcugaugucccucauuuuaca

SEQ ID NO: 1754605 - RNA, 19 nt, Human herpesvirus 1
uccagccuccccuccaggu

SEQ ID NO: 1754606 - RNA, 17 nt, Human herpesvirus 1
cacgcgccgccgacucc

SEQ ID NO: 1754607 - RNA, 22 nt, Human herpesvirus 1
agccccaaagcgcauacgccuc

SEQ ID NO: 1754608 - RNA, 13 nt, Human herpesvirus 1
ggcgaccgccggc

SEQ ID NO: 1754609 - RNA, 19 nt, Human herpesvirus 1
gagaccagucgcccgaaga

SEQ ID NO: 1754610 - RNA, 19 nt, Human herpesvirus 1
gcucggcggcagcccggag

SEQ ID NO: 1754611 - RNA, 17 nt, Human herpesvirus 1
acuaagcgucccugggc

SEQ ID NO: 1754612 - RNA, 14 nt, Human herpesvirus 1
ccugauguggcugc

SEQ ID NO: 1754613 - RNA, 18 nt, Human herpesvirus 1
cagcaaauaugccuuggu

SEQ ID NO: 1754614 - RNA, 15 nt, Human herpesvirus 1
cguccggggagggcg

SEQ ID NO: 1754615 - RNA, 20 nt, Human herpesvirus 1
ugguauagguccacggccac

SEQ ID NO: 1754616 - RNA, 12 nt, Human herpesvirus 1
gccgcgccccgc

SEQ ID NO: 1754617 - RNA, 11 nt, Human herpesvirus 1
acucugggcgu

SEQ ID NO: 1754618 - RNA, 16 nt, Human herpesvirus 1
gcccacccuggcgcca

SEQ ID NO: 1754619 - RNA, 18 nt, Human herpesvirus 1
gcccugguguuucugggg

SEQ ID NO: 1754620 - RNA, 17 nt, Human herpesvirus 1
ccgacgcccagcagcuc

SEQ ID NO: 1754621 - RNA, 13 nt, Human herpesvirus 1
ccucaucaccgac

SEQ ID NO: 1754622 - RNA, 24 nt, Human herpesvirus 1
cggggaucugguccgccgcgagcc

SEQ ID NO: 1754623 - RNA, 13 nt, Human herpesvirus 1
ccacuggccggga

SEQ ID NO: 1754624 - RNA, 19 nt, Human herpesvirus 1
cccgggcgcgcccucuucu

SEQ ID NO: 1754625 - RNA, 20 nt, Human herpesvirus 1
cucaccaccaaggcccgggc

SEQ ID NO: 1754626 - RNA, 16 nt, Human herpesvirus 1
cugaucccccgcgcgg

SEQ ID NO: 1754627 - RNA, 15 nt, Human herpesvirus 1
cccuccgcuggggcc

SEQ ID NO: 1754628 - RNA, 18 nt, Human herpesvirus 1
auuccgcggccccagccc

SEQ ID NO: 1754629 - RNA, 22 nt, Human herpesvirus 1
cuguccaccgggaagcagggcc

SEQ ID NO: 1754630 - RNA, 19 nt, Human herpesvirus 1
cuagccgaggcccgggaga

SEQ ID NO: 1754631 - RNA, 19 nt, Human herpesvirus 1
cccuggacacccucuucgu

SEQ ID NO: 1754632 - RNA, 12 nt, Human herpesvirus 1
augagccagacc

SEQ ID NO: 1754633 - RNA, 16 nt, Human herpesvirus 1
uggccccaguccccaa

SEQ ID NO: 1754634 - RNA, 14 nt, Human herpesvirus 1
gagacgggcgguuc

SEQ ID NO: 1754635 - RNA, 15 nt, Human herpesvirus 1
ccaaagcgcccgucg

SEQ ID NO: 1754636 - RNA, 22 nt, Human herpesvirus 1
ggcgcccaccccgugugccgcg

SEQ ID NO: 1754637 - RNA, 14 nt, Human herpesvirus 1
acaacccuacaacc

SEQ ID NO: 1754638 - RNA, 23 nt, Human herpesvirus 1
cuucccucccccuccgcauccca

SEQ ID NO: 1754639 - RNA, 20 nt, Human herpesvirus 1
ccugggggacugcaucggca

SEQ ID NO: 1754640 - RNA, 19 nt, Human herpesvirus 1
aacccccuaagacccaccc

SEQ ID NO: 1754641 - RNA, 18 nt, Human herpesvirus 1
aucagccucgucccgccc

SEQ ID NO: 1754642 - RNA, 18 nt, Human herpesvirus 1
cgcagggcgccaugcgug

SEQ ID NO: 1754643 - RNA, 15 nt, Human herpesvirus 1
aaaaccacaaccucc

SEQ ID NO: 1754644 - RNA, 17 nt, Human herpesvirus 1
gacccguuccagccccc

SEQ ID NO: 1754645 - RNA, 21 nt, Human herpesvirus 1
cgccgcggaucgggccuuggu

SEQ ID NO: 1754646 - RNA, 23 nt, Human herpesvirus 1
uccccgauggcccuccaggcugu

SEQ ID NO: 1754647 - RNA, 13 nt, Human herpesvirus 1
gccagcgacccgc

SEQ ID NO: 1754648 - RNA, 16 nt, Human herpesvirus 1
cgggaacaccuccgcg

SEQ ID NO: 1754649 - RNA, 15 nt, Human herpesvirus 1
gcuugagucuguccg

SEQ ID NO: 1754650 - RNA, 15 nt, Human herpesvirus 1
cuucuccccuucccu

SEQ ID NO: 1754651 - RNA, 20 nt, Human herpesvirus 1
cgcaauuugcacccagccuu

SEQ ID NO: 1754652 - RNA, 14 nt, Human herpesvirus 1
auauaaggccuggg

SEQ ID NO: 1754653 - RNA, 22 nt, Human herpesvirus 1
ucggugccaguccgcugcaccg

SEQ ID NO: 1754654 - RNA, 20 nt, Human herpesvirus 1
gucggcaagauccucgggcu

SEQ ID NO: 1754655 - RNA, 14 nt, Human herpesvirus 1
cgcguggaccuggg

SEQ ID NO: 1754656 - RNA, 13 nt, Human herpesvirus 1
acgccacaacagc

SEQ ID NO: 1754657 - RNA, 23 nt, Human herpesvirus 1
acuucccacccggagcuuucuuc

SEQ ID NO: 1754658 - RNA, 21 nt, Human herpesvirus 1
gggcuuggacgcgccucccgg

SEQ ID NO: 1754659 - RNA, 17 nt, Human herpesvirus 1
gcgaugagccaaccucg

SEQ ID NO: 1754660 - RNA, 15 nt, Human herpesvirus 1
cgcgugaccccaggg

SEQ ID NO: 1754661 - RNA, 19 nt, Human herpesvirus 1
ccgggcgcgugcugcgccu

SEQ ID NO: 1754662 - RNA, 20 nt, Human herpesvirus 1
cgacagcggauggcacgagu

SEQ ID NO: 1754663 - RNA, 14 nt, Human herpesvirus 1
agacgucgccccug

SEQ ID NO: 1754664 - RNA, 19 nt, Human herpesvirus 1
cacggagggaaccaccauc

SEQ ID NO: 1754665 - RNA, 21 nt, Human herpesvirus 1
cggucagcgacguccugggcc

SEQ ID NO: 1754666 - RNA, 13 nt, Human herpesvirus 1
guugggaugggac

SEQ ID NO: 1754667 - RNA, 18 nt, Human herpesvirus 1
cgggcuguuccgccaggc

SEQ ID NO: 1754668 - RNA, 17 nt, Human herpesvirus 1
gccuuccggaccugcuc

SEQ ID NO: 1754669 - RNA, 16 nt, Human herpesvirus 1
gucgucacgcacgcca

SEQ ID NO: 1754670 - RNA, 15 nt, Human herpesvirus 1
gccccuguggcccug

SEQ ID NO: 1754671 - RNA, 17 nt, Human herpesvirus 1
gauggaggagccccugc

SEQ ID NO: 1754672 - RNA, 17 nt, Human herpesvirus 1
ccaguugagccgcgcca

SEQ ID NO: 1754673 - RNA, 16 nt, Human herpesvirus 1
cgccguguuggagcgc

SEQ ID NO: 1754674 - RNA, 21 nt, Human herpesvirus 1
cuguacgacugggggggaucc

SEQ ID NO: 1754675 - RNA, 23 nt, Human herpesvirus 1
acgccucagggccuccgacccca

SEQ ID NO: 1754676 - RNA, 17 nt, Human herpesvirus 1
ggucucccagggagccc

SEQ ID NO: 1754677 - RNA, 19 nt, Human herpesvirus 1
cuggccccaguccccaaga

SEQ ID NO: 1754678 - RNA, 17 nt, Human herpesvirus 1
cacaugcggaaagcaag

SEQ ID NO: 1754679 - RNA, 21 nt, Human herpesvirus 1
cgcgugcccacgucgccccgc

SEQ ID NO: 1754680 - RNA, 18 nt, Human herpesvirus 1
cagacccaacccccggcc

SEQ ID NO: 1754681 - RNA, 21 nt, Human herpesvirus 1
ccacuggccgggagcaccaca

SEQ ID NO: 1754682 - RNA, 20 nt, Human herpesvirus 1
ucccgcccaccggaagccca

SEQ ID NO: 1754683 - RNA, 17 nt, Human herpesvirus 1
ucuggugcugucugaca

SEQ ID NO: 1754684 - RNA, 21 nt, Human herpesvirus 1
cacgccuaccggccccugggc

SEQ ID NO: 1754685 - RNA, 22 nt, Human herpesvirus 1
aggcccgcaagcugaaccccaa

SEQ ID NO: 1754686 - RNA, 20 nt, Human herpesvirus 1
auagcaacaaggccguggac

SEQ ID NO: 1754687 - RNA, 21 nt, Human herpesvirus 1
accacguuucggcguguguuu

SEQ ID NO: 1754688 - RNA, 19 nt, Human herpesvirus 1
ccaaagcugcuggcgcgca

SEQ ID NO: 1754689 - RNA, 18 nt, Human herpesvirus 1
gggccccggggagacagc

SEQ ID NO: 1754690 - RNA, 22 nt, Human herpesvirus 1
ggcuccaugcagugcauggcgc

SEQ ID NO: 1754691 - RNA, 17 nt, Human herpesvirus 1
ugggguccgggagggcg

SEQ ID NO: 1754692 - RNA, 19 nt, Human herpesvirus 1
gcagccuggucgaggcggc

SEQ ID NO: 1754693 - RNA, 15 nt, Human herpesvirus 1
cgcaucuuuccugug

SEQ ID NO: 1754694 - RNA, 19 nt, Human herpesvirus 1
gccacacucaaaaagcccc

SEQ ID NO: 1754695 - RNA, 13 nt, Human herpesvirus 1
ucaagcaggccau

SEQ ID NO: 1754696 - RNA, 16 nt, Human herpesvirus 1
gccgccucggcccgcg

SEQ ID NO: 1754697 - RNA, 21 nt, Human herpesvirus 1
guuggguuuucuuugugccug

SEQ ID NO: 1754698 - RNA, 20 nt, Human herpesvirus 1
cccagagguguucacgcacc

SEQ ID NO: 1754699 - RNA, 15 nt, Human herpesvirus 1
ccggucuccccggga

SEQ ID NO: 1754700 - RNA, 15 nt, Human herpesvirus 1
gugcacagccuggcc

SEQ ID NO: 1754701 - RNA, 15 nt, Human herpesvirus 1
ccaaguacgccgcca

SEQ ID NO: 1754702 - RNA, 21 nt, Human herpesvirus 1
uguucguggaaccaugaccuc

SEQ ID NO: 1754703 - RNA, 18 nt, Human herpesvirus 1
gcccgauuuacagccccc

SEQ ID NO: 1754704 - RNA, 16 nt, Human herpesvirus 1
acgugcacagccuggc

SEQ ID NO: 1754705 - RNA, 13 nt, Human herpesvirus 1
uaagacucucccc

SEQ ID NO: 1754706 - RNA, 22 nt, Human herpesvirus 1
cgcuuugugggggaccaggucc

SEQ ID NO: 1754707 - RNA, 14 nt, Human herpesvirus 1
ggaaagcaagaaca

SEQ ID NO: 1754708 - RNA, 16 nt, Human herpesvirus 1
caccaugcuggaggau

SEQ ID NO: 1754709 - RNA, 19 nt, Human herpesvirus 1
uacgcgguacgccccaccg

SEQ ID NO: 1754710 - RNA, 17 nt, Human herpesvirus 1
cccugagccgcuuuccu

SEQ ID NO: 1754711 - RNA, 19 nt, Human herpesvirus 1
ccggcggccccuggcgccg

SEQ ID NO: 1754712 - RNA, 20 nt, Human herpesvirus 1
ucuccgcggugucugggaau

SEQ ID NO: 1754713 - RNA, 15 nt, Human herpesvirus 1
ggggguugcuguccc

SEQ ID NO: 1754714 - RNA, 17 nt, Human herpesvirus 1
ucggcgaccgccagccg

SEQ ID NO: 1754715 - RNA, 20 nt, Human herpesvirus 1
gcccgaccaacgucgccgcc

SEQ ID NO: 1754716 - RNA, 22 nt, Human herpesvirus 1
ucgccggggaccgcagccuggu

SEQ ID NO: 1754717 - RNA, 19 nt, Human herpesvirus 1
gcgcgcugcucagcgccaa

SEQ ID NO: 1754718 - RNA, 23 nt, Human herpesvirus 1
acgaccuguugauggccugugcu

SEQ ID NO: 1754719 - RNA, 15 nt, Human herpesvirus 1
uccucgugcccucgc

SEQ ID NO: 1754720 - RNA, 17 nt, Human herpesvirus 1
gucuccuccaccaccca

SEQ ID NO: 1754721 - RNA, 17 nt, Human herpesvirus 1
cgugccguuguucccau

SEQ ID NO: 1754722 - RNA, 12 nt, Human herpesvirus 1
cccgaaccaggc

SEQ ID NO: 1754723 - RNA, 16 nt, Human herpesvirus 1
cagggggaugcuagcc

SEQ ID NO: 1754724 - RNA, 18 nt, Human herpesvirus 1
accacgccccuuuccccc

SEQ ID NO: 1754725 - RNA, 16 nt, Human herpesvirus 1
ccgugucugugggcca

SEQ ID NO: 1754726 - RNA, 15 nt, Human herpesvirus 1
cagccuuaccacgcc

SEQ ID NO: 1754727 - RNA, 20 nt, Human herpesvirus 1
ccgaguucccccggcacgcc

SEQ ID NO: 1754728 - RNA, 14 nt, Human herpesvirus 1
cgccucggagccga

SEQ ID NO: 1754729 - RNA, 15 nt, Human herpesvirus 1
cgucgggccucccgg

SEQ ID NO: 1754730 - RNA, 22 nt, Human herpesvirus 1
guagggugguuccuguaucugg

SEQ ID NO: 1754731 - RNA, 19 nt, Human herpesvirus 1
ggcggacccccggaggcgc

SEQ ID NO: 1754732 - RNA, 21 nt, Human herpesvirus 1
cggacccccggaggcgccugc

SEQ ID NO: 1754733 - RNA, 22 nt, Human herpesvirus 1
uguggggacccggcccuaaccc

SEQ ID NO: 1754734 - RNA, 18 nt, Human herpesvirus 1
acaagucucugggggccu

SEQ ID NO: 1754735 - RNA, 21 nt, Human herpesvirus 1
cuggccugcgaggugcgccag

SEQ ID NO: 1754736 - RNA, 16 nt, Human herpesvirus 1
ggccccggggagacag

SEQ ID NO: 1754737 - RNA, 14 nt, Human herpesvirus 1
cgccuuaccauccc

SEQ ID NO: 1754738 - RNA, 21 nt, Human herpesvirus 1
cgccagcgcggcggggcccgg

SEQ ID NO: 1754739 - RNA, 19 nt, Human herpesvirus 1
ccaggcugucgacgccccc

SEQ ID NO: 1754740 - RNA, 21 nt, Human herpesvirus 1
aucucuguaacggggacccca

SEQ ID NO: 1754741 - RNA, 21 nt, Human herpesvirus 1
gcgcagcugggaccccggcgg

SEQ ID NO: 1754742 - RNA, 13 nt, Human herpesvirus 1
ccgacccccuugu

SEQ ID NO: 1754743 - RNA, 18 nt, Human herpesvirus 1
gccaacaauccccaggac

SEQ ID NO: 1754744 - RNA, 22 nt, Human herpesvirus 1
ccgccaacgcacuguggcucuc

SEQ ID NO: 1754745 - RNA, 16 nt, Human herpesvirus 1
ucacgagcugacccug

SEQ ID NO: 1754746 - RNA, 19 nt, Human herpesvirus 1
acccgcaacgcgcuggggc

SEQ ID NO: 1754747 - RNA, 13 nt, Human herpesvirus 1
gcugcucagcgcc

SEQ ID NO: 1754748 - RNA, 13 nt, Human herpesvirus 1
ggaccgggguccc

SEQ ID NO: 1754749 - RNA, 16 nt, Human herpesvirus 1
ggauccucggccagcu

SEQ ID NO: 1754750 - RNA, 15 nt, Human herpesvirus 1
ccccgaccagcgccg

SEQ ID NO: 1754751 - RNA, 19 nt, Human herpesvirus 1
cgggcgaugagccaaccuc

SEQ ID NO: 1754752 - RNA, 13 nt, Human herpesvirus 1
aacgguccucacc

SEQ ID NO: 1754753 - RNA, 19 nt, Human herpesvirus 1
caucugggauggcuccugg

SEQ ID NO: 1754754 - RNA, 19 nt, Human herpesvirus 1
cgagccaagggcuccugua

SEQ ID NO: 1754755 - RNA, 16 nt, Human herpesvirus 1
cgcccagcagcucccc

SEQ ID NO: 1754756 - RNA, 13 nt, Human herpesvirus 1
cccaguccccggg

SEQ ID NO: 1754757 - RNA, 19 nt, Human herpesvirus 1
ccaccauggccccccgcgu

SEQ ID NO: 1754758 - RNA, 20 nt, Human herpesvirus 1
cucgcgggccucgugggcac

SEQ ID NO: 1754759 - RNA, 19 nt, Human herpesvirus 1
ugggggccugucccauccg

SEQ ID NO: 1754760 - RNA, 17 nt, Human herpesvirus 1
aggggaaaagugaaaga

SEQ ID NO: 1754761 - RNA, 15 nt, Human herpesvirus 1
gugacgcacccccug

SEQ ID NO: 1754762 - RNA, 11 nt, Human herpesvirus 1
ccacaccaccu

SEQ ID NO: 1754763 - RNA, 23 nt, Human herpesvirus 1
cgcauauauacgcuuggagccag

SEQ ID NO: 1754764 - RNA, 13 nt, Human herpesvirus 1
auaacgcacugaa

SEQ ID NO: 1754765 - RNA, 22 nt, Human herpesvirus 1
ucgcuugguuucggaugggagg

SEQ ID NO: 1754766 - RNA, 22 nt, Human herpesvirus 1
gcgccaacgcguccguggagcg

SEQ ID NO: 1754767 - RNA, 18 nt, Human herpesvirus 1
ucugucgguccacggcca

SEQ ID NO: 1754768 - RNA, 22 nt, Human herpesvirus 1
gccaguccgcugcaccgaugua

SEQ ID NO: 1754769 - RNA, 11 nt, Human herpesvirus 1
ggcccggggcc

SEQ ID NO: 1754770 - RNA, 23 nt, Human herpesvirus 1
gcaaugcggagggcacccaacaa

SEQ ID NO: 1754771 - RNA, 23 nt, Human herpesvirus 1
gaccacaccgacgaaucccccaa

SEQ ID NO: 1754772 - RNA, 18 nt, Human herpesvirus 1
cucccccaccgcccacag

SEQ ID NO: 1754773 - RNA, 21 nt, Human herpesvirus 1
ccaugggacacaaaugcccac

SEQ ID NO: 1754774 - RNA, 13 nt, Human herpesvirus 1
cgacaucuugucg

SEQ ID NO: 1754775 - RNA, 16 nt, Human herpesvirus 1
gccccuaaccaggccu

SEQ ID NO: 1754776 - RNA, 13 nt, Human herpesvirus 1
uuuguuguaaaua

SEQ ID NO: 1754777 - RNA, 20 nt, Human herpesvirus 1
cuccgcuggggcccccaggg

SEQ ID NO: 1754778 - RNA, 15 nt, Human herpesvirus 1
aucgccgcggcuccc

SEQ ID NO: 1754779 - RNA, 22 nt, Human herpesvirus 1
gcaccgucggaggccccccaga

SEQ ID NO: 1754780 - RNA, 19 nt, Human herpesvirus 1
gagggugguucccccccgu

SEQ ID NO: 1754781 - RNA, 18 nt, Human herpesvirus 1
ugggggcguagagcugug

SEQ ID NO: 1754782 - RNA, 19 nt, Human herpesvirus 1
uccaccaaagucucugugg

SEQ ID NO: 1754783 - RNA, 19 nt, Human herpesvirus 1
uaucccuaaggcccggcua

SEQ ID NO: 1754784 - RNA, 14 nt, Human herpesvirus 1
ccgaccacacaccc

SEQ ID NO: 1754785 - RNA, 12 nt, Human herpesvirus 1
auagagcugcuc

SEQ ID NO: 1754786 - RNA, 22 nt, Human herpesvirus 1
aucagccuuaccacgcccgacc

SEQ ID NO: 1754787 - RNA, 15 nt, Human herpesvirus 1
cggcggggcccggcc

SEQ ID NO: 1754788 - RNA, 14 nt, Human herpesvirus 1
aggagaucgccauc

SEQ ID NO: 1754789 - RNA, 22 nt, Human herpesvirus 1
ccuggguuggcgucgggaccau

SEQ ID NO: 1754790 - RNA, 13 nt, Human herpesvirus 1
gguggcacagaac

SEQ ID NO: 1754791 - RNA, 19 nt, Human herpesvirus 1
accgcgugaccccagggau

SEQ ID NO: 1754792 - RNA, 17 nt, Human herpesvirus 1
accaccauccccgcucc

SEQ ID NO: 1754793 - RNA, 18 nt, Human herpesvirus 1
ggcguaccgaaggcgcuu

SEQ ID NO: 1754794 - RNA, 18 nt, Human herpesvirus 1
ggcggccaacgacuuccu

SEQ ID NO: 1754795 - RNA, 18 nt, Human herpesvirus 1
cggcagucuccuggcagc

SEQ ID NO: 1754796 - RNA, 18 nt, Human herpesvirus 1
cuggccuuuuacgagguc

SEQ ID NO: 1754797 - RNA, 21 nt, Human herpesvirus 1
cuguccgagacccccaacgcc

SEQ ID NO: 1754798 - RNA, 15 nt, Human herpesvirus 1
caccacgccacaaca

SEQ ID NO: 1754799 - RNA, 22 nt, Human herpesvirus 1
cucacgcgcauccgcaagcuau

SEQ ID NO: 1754800 - RNA, 19 nt, Human herpesvirus 1
uccggcacggacccaaaau

SEQ ID NO: 1754801 - RNA, 17 nt, Human herpesvirus 1
ccugguuguccguggcc

SEQ ID NO: 1754802 - RNA, 15 nt, Human herpesvirus 1
gcuuuauacacagau

SEQ ID NO: 1754803 - RNA, 21 nt, Human herpesvirus 1
uuauuaacucacaggggcgcu

SEQ ID NO: 1754804 - RNA, 17 nt, Human herpesvirus 1
agggccucgcugaccag

SEQ ID NO: 1754805 - RNA, 16 nt, Human herpesvirus 1
acgcgagcgaggcccc

SEQ ID NO: 1754806 - RNA, 18 nt, Human herpesvirus 1
auugacccaaaacacacg

SEQ ID NO: 1754807 - RNA, 19 nt, Human herpesvirus 1
ccguugcccgggccuccuc

SEQ ID NO: 1754808 - RNA, 14 nt, Human herpesvirus 1
ccccaacgccacgc

SEQ ID NO: 1754809 - RNA, 20 nt, Human herpesvirus 1
cuuaaccgcccaccuccugg

SEQ ID NO: 1754810 - RNA, 21 nt, Human herpesvirus 1
cguccaucauagcccuggugu

SEQ ID NO: 1754811 - RNA, 16 nt, Human herpesvirus 1
cucgcugcuggcggac

SEQ ID NO: 1754812 - RNA, 23 nt, Human herpesvirus 1
gggccuggugcucgugggccucu

SEQ ID NO: 1754813 - RNA, 16 nt, Human herpesvirus 1
ccucggcgggcacgcc

SEQ ID NO: 1754814 - RNA, 18 nt, Human herpesvirus 1
ugguccccccucuauccc

SEQ ID NO: 1754815 - RNA, 13 nt, Human herpesvirus 1
gcggccccuggcg

SEQ ID NO: 1754816 - RNA, 21 nt, Human herpesvirus 1
uggccgacaacugccugaccc

SEQ ID NO: 1754817 - RNA, 22 nt, Human herpesvirus 1
guucuggacgggagucccgagg

SEQ ID NO: 1754818 - RNA, 22 nt, Human herpesvirus 1
gcaucgacacgcgcguccuucu

SEQ ID NO: 1754819 - RNA, 19 nt, Human herpesvirus 1
gggcugccgccagguuggg

SEQ ID NO: 1754820 - RNA, 12 nt, Human herpesvirus 1
gucgcacccaca

SEQ ID NO: 1754821 - RNA, 19 nt, Human herpesvirus 1
cgcugcugcggccagucca

SEQ ID NO: 1754822 - RNA, 23 nt, Human herpesvirus 1
agcgcgcugcucagcgccaaggu

SEQ ID NO: 1754823 - RNA, 13 nt, Human herpesvirus 1
ggagcgccaggac

SEQ ID NO: 1754824 - RNA, 16 nt, Human herpesvirus 1
cgggccucgugggcac

SEQ ID NO: 1754825 - RNA, 23 nt, Human herpesvirus 1
gggcgucaccaugcagcgccgga

SEQ ID NO: 1754826 - RNA, 16 nt, Human herpesvirus 1
cgccgccaccguggcc

SEQ ID NO: 1754827 - RNA, 15 nt, Human herpesvirus 1
gggagaaaccccagc

SEQ ID NO: 1754828 - RNA, 22 nt, Human herpesvirus 1
caugaagcccccaacaugaccc

SEQ ID NO: 1754829 - RNA, 16 nt, Human herpesvirus 1
cgggcccaaggcccca

SEQ ID NO: 1754830 - RNA, 23 nt, Human herpesvirus 1
gagccgggcgcgugcugcgccuu

SEQ ID NO: 1754831 - RNA, 13 nt, Human herpesvirus 1
uccgcgccaggcc

SEQ ID NO: 1754832 - RNA, 22 nt, Human herpesvirus 1
cacuacccaccgcgagaugucc

SEQ ID NO: 1754833 - RNA, 22 nt, Human herpesvirus 1
gagcccacaugcggaaagcaag

SEQ ID NO: 1754834 - RNA, 16 nt, Human herpesvirus 1
gagcuccgcaccaagc

SEQ ID NO: 1754835 - RNA, 22 nt, Human herpesvirus 1
gacagcggggacucgggcgagu

SEQ ID NO: 1754836 - RNA, 15 nt, Human herpesvirus 1
caagccgcucuccgg

SEQ ID NO: 1754837 - RNA, 16 nt, Human herpesvirus 1
cuguugguauaggucc

SEQ ID NO: 1754838 - RNA, 18 nt, Human herpesvirus 1
gcgcuucauagucgccga

SEQ ID NO: 1754839 - RNA, 19 nt, Human herpesvirus 1
acggacccaaaauaauaaa

SEQ ID NO: 1754840 - RNA, 18 nt, Human herpesvirus 1
caccccaacgccuccccu

SEQ ID NO: 1754841 - RNA, 18 nt, Human herpesvirus 1
caaguucaaggccaccau

SEQ ID NO: 1754842 - RNA, 13 nt, Human herpesvirus 1
acuccgucuuggu

SEQ ID NO: 1754843 - RNA, 20 nt, Human herpesvirus 1
ccgacagcacucacagcccc

SEQ ID NO: 1754844 - RNA, 15 nt, Human herpesvirus 1
cccgcgcggcugcca

SEQ ID NO: 1754845 - RNA, 15 nt, Human herpesvirus 1
gccccccagccuccc

SEQ ID NO: 1754846 - RNA, 16 nt, Human herpesvirus 1
agcucccagagacccc

SEQ ID NO: 1754847 - RNA, 17 nt, Human herpesvirus 1
caauccgugucggggag

SEQ ID NO: 1754848 - RNA, 23 nt, Human herpesvirus 1
gccgguauggggcaugaucagac

SEQ ID NO: 1754849 - RNA, 16 nt, Human herpesvirus 1
ccaaguucaccguggc

SEQ ID NO: 1754850 - RNA, 21 nt, Human herpesvirus 1
ugaccgcccgccccucgccac

SEQ ID NO: 1754851 - RNA, 17 nt, Human herpesvirus 1
guccccggcccggagga

SEQ ID NO: 1754852 - RNA, 17 nt, Human herpesvirus 1
acugccugacccucucc

SEQ ID NO: 1754853 - RNA, 23 nt, Human herpesvirus 1
cggccaacgccgcgacccgcacg

SEQ ID NO: 1754854 - RNA, 21 nt, Human herpesvirus 1
uggccggggagggcagggccg

SEQ ID NO: 1754855 - RNA, 23 nt, Human herpesvirus 1
accucgggugcauauccugggau

SEQ ID NO: 1754856 - RNA, 14 nt, Human herpesvirus 1
cacgugcgugccgg

SEQ ID NO: 1754857 - RNA, 16 nt, Human herpesvirus 1
caggccuccacccccu

SEQ ID NO: 1754858 - RNA, 21 nt, Human herpesvirus 1
cagguggcccuuccuaaccca

SEQ ID NO: 1754859 - RNA, 22 nt, Human herpesvirus 1
cccgaccgcguguacgggcugu

SEQ ID NO: 1754860 - RNA, 20 nt, Human herpesvirus 1
ccuaucacggcaaggagcgc

SEQ ID NO: 1754861 - RNA, 16 nt, Human herpesvirus 1
gacgacauggccagcg

SEQ ID NO: 1754862 - RNA, 15 nt, Human herpesvirus 1
ccgcaccgggccccc

SEQ ID NO: 1754863 - RNA, 15 nt, Human herpesvirus 1
cagcugagccgcgcc

SEQ ID NO: 1754864 - RNA, 17 nt, Human herpesvirus 1
ucuagccucguggggcu

SEQ ID NO: 1754865 - RNA, 15 nt, Human herpesvirus 1
cucccugcggcuggc

SEQ ID NO: 1754866 - RNA, 12 nt, Human herpesvirus 1
cgcggggccucc

SEQ ID NO: 1754867 - RNA, 19 nt, Human herpesvirus 1
agggcugccagaccucaac

SEQ ID NO: 1754868 - RNA, 20 nt, Human herpesvirus 1
cgggagccccggucuccccg

SEQ ID NO: 1754869 - RNA, 17 nt, Human herpesvirus 1
gccagccugcggccgga

SEQ ID NO: 1754870 - RNA, 19 nt, Human herpesvirus 1
acaacgccagccugcggcc

SEQ ID NO: 1754871 - RNA, 16 nt, Human herpesvirus 1
cggggccgcccuggcc

SEQ ID NO: 1754872 - RNA, 15 nt, Human herpesvirus 1
accaacgccgaugua

SEQ ID NO: 1754873 - RNA, 19 nt, Human herpesvirus 1
gcgaccccagccuucacgu

SEQ ID NO: 1754874 - RNA, 16 nt, Human herpesvirus 1
cgcuggggcugccgug

SEQ ID NO: 1754875 - RNA, 12 nt, Human herpesvirus 1
gccccccagccu

SEQ ID NO: 1754876 - RNA, 22 nt, Human herpesvirus 1
gccaggucggcgaccgccagcc

SEQ ID NO: 1754877 - RNA, 21 nt, Human herpesvirus 1
ugccgcccguugcagggccug

SEQ ID NO: 1754878 - RNA, 14 nt, Human herpesvirus 1
ucuggacuggacca

SEQ ID NO: 1754879 - RNA, 20 nt, Human herpesvirus 1
gcaguacuggaaguaccugc

SEQ ID NO: 1754880 - RNA, 14 nt, Human herpesvirus 1
ggccucgugggcac

SEQ ID NO: 1754881 - RNA, 20 nt, Human herpesvirus 1
cgcgcgucucuggggagccu

SEQ ID NO: 1754882 - RNA, 15 nt, Human herpesvirus 1
gugacucaggacauc

SEQ ID NO: 1754883 - RNA, 13 nt, Human herpesvirus 1
caagccgccccag

SEQ ID NO: 1754884 - RNA, 20 nt, Human herpesvirus 1
ccucugugucagguggcccu

SEQ ID NO: 1754885 - RNA, 14 nt, Human herpesvirus 1
ggaaagguggacag

SEQ ID NO: 1754886 - RNA, 16 nt, Human herpesvirus 1
cgcuaaucccccggcu

SEQ ID NO: 1754887 - RNA, 17 nt, Human herpesvirus 1
acgcuggggguccuggu

SEQ ID NO: 1754888 - RNA, 13 nt, Human herpesvirus 1
ccgcaaccagcug

SEQ ID NO: 1754889 - RNA, 12 nt, Human herpesvirus 1
cgcuccucugcg

SEQ ID NO: 1754890 - RNA, 21 nt, Human herpesvirus 1
ccagggcgaggugcgguuggg

SEQ ID NO: 1754891 - RNA, 20 nt, Human herpesvirus 1
gcccacaugcggaaagcaag

SEQ ID NO: 1754892 - RNA, 20 nt, Human herpesvirus 1
ucgggccucccggaagagcc

SEQ ID NO: 1754893 - RNA, 17 nt, Human herpesvirus 1
cagcugaccgacccucc

SEQ ID NO: 1754894 - RNA, 14 nt, Human herpesvirus 1
ccgggccgcccacu

SEQ ID NO: 1754895 - RNA, 16 nt, Human herpesvirus 1
ggccucucacacagca

SEQ ID NO: 1754896 - RNA, 22 nt, Human herpesvirus 1
caacgcgaccgucgccgcgggc

SEQ ID NO: 1754897 - RNA, 20 nt, Human herpesvirus 1
ccugugugucuucucuucgu

SEQ ID NO: 1754898 - RNA, 16 nt, Human herpesvirus 1
ucuuuuguguuggccc

SEQ ID NO: 1754899 - RNA, 15 nt, Human herpesvirus 1
acgugggccucaccc

SEQ ID NO: 1754900 - RNA, 18 nt, Human herpesvirus 1
gcggaaagcaagaacaau

SEQ ID NO: 1754901 - RNA, 18 nt, Human herpesvirus 1
ucccccuccgcaucccag

SEQ ID NO: 1754902 - RNA, 16 nt, Human herpesvirus 1
ccgguucguauccaca

SEQ ID NO: 1754903 - RNA, 23 nt, Human herpesvirus 1
cgggauaccgguaugccgcggcc

SEQ ID NO: 1754904 - RNA, 13 nt, Human herpesvirus 1
uacgcgggccccg

SEQ ID NO: 1754905 - RNA, 21 nt, Human herpesvirus 1
ugcgccuggauucgcuggacc

SEQ ID NO: 1754906 - RNA, 22 nt, Human herpesvirus 1
ggccgugggucuguugguccug

SEQ ID NO: 1754907 - RNA, 20 nt, Human herpesvirus 1
acccaaccaaaccaggcgug

SEQ ID NO: 1754908 - RNA, 16 nt, Human herpesvirus 1
cugccgucgcuagacc

SEQ ID NO: 1754909 - RNA, 19 nt, Human herpesvirus 1
gacggcauucgggccugcc

SEQ ID NO: 1754910 - RNA, 15 nt, Human herpesvirus 1
ugcgggcucggcucc

SEQ ID NO: 1754911 - RNA, 22 nt, Human herpesvirus 1
uccgcgccccccgacccuccca

SEQ ID NO: 1754912 - RNA, 17 nt, Human herpesvirus 1
gaaggcccuguacccgc

SEQ ID NO: 1754913 - RNA, 17 nt, Human herpesvirus 1
ggcgaccgccggcgagg

SEQ ID NO: 1754914 - RNA, 14 nt, Human herpesvirus 1
gacggcggggcaga

SEQ ID NO: 1754915 - RNA, 15 nt, Human herpesvirus 1
gcauggcgcagcugg

SEQ ID NO: 1754916 - RNA, 22 nt, Human herpesvirus 1
ucccauccgaacgcagccccgc

SEQ ID NO: 1754917 - RNA, 11 nt, Human herpesvirus 1
gccggccuggc

SEQ ID NO: 1754918 - RNA, 13 nt, Human herpesvirus 1
ugcuacagccgcc

SEQ ID NO: 1754919 - RNA, 13 nt, Human herpesvirus 1
agggugucccagg

SEQ ID NO: 1754920 - RNA, 20 nt, Human herpesvirus 1
cgucggucugcaccaugacc

SEQ ID NO: 1754921 - RNA, 20 nt, Human herpesvirus 1
cgggggauggggagagccca

SEQ ID NO: 1754922 - RNA, 20 nt, Human herpesvirus 1
uggccccaguccccaagacc

SEQ ID NO: 1754923 - RNA, 19 nt, Human herpesvirus 1
ucagccuuaccacgcccga

SEQ ID NO: 1754924 - RNA, 17 nt, Human herpesvirus 1
cuacccguguuugccca

SEQ ID NO: 1754925 - RNA, 16 nt, Human herpesvirus 1
ccucucuucucucccg

SEQ ID NO: 1754926 - RNA, 21 nt, Human herpesvirus 1
cuguaccggugggcguccugg

SEQ ID NO: 1754927 - RNA, 17 nt, Human herpesvirus 1
uccggcgggagccaccc

SEQ ID NO: 1754928 - RNA, 22 nt, Human herpesvirus 1
uacugcgcgaucguccaccucc

SEQ ID NO: 1754929 - RNA, 17 nt, Human herpesvirus 1
ccgcccuggacacccuc

SEQ ID NO: 1754930 - RNA, 15 nt, Human herpesvirus 1
cucgccccacgaccc

SEQ ID NO: 1754931 - RNA, 13 nt, Human herpesvirus 1
ccaccgaccucaa

SEQ ID NO: 1754932 - RNA, 23 nt, Human herpesvirus 1
gccugacgcgccgcgggcccccg

SEQ ID NO: 1754933 - RNA, 16 nt, Human herpesvirus 1
ccugaguugggaauaa

SEQ ID NO: 1754934 - RNA, 15 nt, Human herpesvirus 1
acacucgacccccgc

SEQ ID NO: 1754935 - RNA, 17 nt, Human herpesvirus 1
cccgaucccaacaacuc

SEQ ID NO: 1754936 - RNA, 22 nt, Human herpesvirus 1
gacccccuuguauguccccaaa

SEQ ID NO: 1754937 - RNA, 22 nt, Human herpesvirus 1
gcggcgaacgggggcccugcca

SEQ ID NO: 1754938 - RNA, 14 nt, Human herpesvirus 1
gccugccgccucac

SEQ ID NO: 1754939 - RNA, 18 nt, Human herpesvirus 1
ggcccggcuagacccacg

SEQ ID NO: 1754940 - RNA, 17 nt, Human herpesvirus 1
ggccaagcuagccgagg

SEQ ID NO: 1754941 - RNA, 13 nt, Human herpesvirus 1
gaccucaccacca

SEQ ID NO: 1754942 - RNA, 16 nt, Human herpesvirus 1
ccgaccacacaccccc

SEQ ID NO: 1754943 - RNA, 23 nt, Human herpesvirus 1
cgcacgcauacgggcggccaccc

SEQ ID NO: 1754944 - RNA, 13 nt, Human herpesvirus 1
cggcucaacgagc

SEQ ID NO: 1754945 - RNA, 13 nt, Human herpesvirus 1
ggacgggguuccc

SEQ ID NO: 1754946 - RNA, 18 nt, Human herpesvirus 1
cucguccccuggggcggc

SEQ ID NO: 1754947 - RNA, 21 nt, Human herpesvirus 1
gagcagagccgcaagccccca

SEQ ID NO: 1754948 - RNA, 13 nt, Human herpesvirus 1
accucgcccaccc

SEQ ID NO: 1754949 - RNA, 22 nt, Human herpesvirus 1
cacgacaaccccggucucccag

SEQ ID NO: 1754950 - RNA, 19 nt, Human herpesvirus 1
gacccgcaacgcgcugggg

SEQ ID NO: 1754951 - RNA, 21 nt, Human herpesvirus 1
cagacauuccgcuaucuccug

SEQ ID NO: 1754952 - RNA, 14 nt, Human herpesvirus 1
gcuuccggccuggg

SEQ ID NO: 1754953 - RNA, 15 nt, Human herpesvirus 1
ucgggugugcaccuu

SEQ ID NO: 1754954 - RNA, 19 nt, Human herpesvirus 1
cucgcggagcuguacgugc

SEQ ID NO: 1754955 - RNA, 23 nt, Human herpesvirus 1
gacaaccccggucucccagggag

SEQ ID NO: 1754956 - RNA, 13 nt, Human herpesvirus 1
cgccccuguggcc

SEQ ID NO: 1754957 - RNA, 17 nt, Human herpesvirus 1
acaugcggaaagcaaga

SEQ ID NO: 1754958 - RNA, 20 nt, Human herpesvirus 1
gccgcaguacuaccuggcca

SEQ ID NO: 1754959 - RNA, 11 nt, Human herpesvirus 1
acuccccggac

SEQ ID NO: 1754960 - RNA, 23 nt, Human herpesvirus 1
gcgcuucuacccguguuugccca

SEQ ID NO: 1754961 - RNA, 18 nt, Human herpesvirus 1
gagggcguaacguuccgc

SEQ ID NO: 1754962 - RNA, 23 nt, Human herpesvirus 1
guuucguuccuucccccuccccc

SEQ ID NO: 1754963 - RNA, 23 nt, Human herpesvirus 1
gccagaucuacugcugggccaug

SEQ ID NO: 1754964 - RNA, 13 nt, Human herpesvirus 1
acacgggcuaccc

SEQ ID NO: 1754965 - RNA, 22 nt, Human herpesvirus 1
gucugugccggagguggggcgg

SEQ ID NO: 1754966 - RNA, 14 nt, Human herpesvirus 1
ucgucucucuuccc

SEQ ID NO: 1754967 - RNA, 23 nt, Human herpesvirus 1
cgcuacugcgcgaucguccaccu

SEQ ID NO: 1754968 - RNA, 18 nt, Human herpesvirus 1
uuaaccgcaccccccucg

SEQ ID NO: 1754969 - RNA, 21 nt, Human herpesvirus 1
cggugaacgaagcggccaugg

SEQ ID NO: 1754970 - RNA, 18 nt, Human herpesvirus 1
ccagggagaaaccccagc

SEQ ID NO: 1754971 - RNA, 23 nt, Human herpesvirus 1
cuccccgggagccccggacccca

SEQ ID NO: 1754972 - RNA, 19 nt, Human herpesvirus 1
ccaaccgcgacccuccggg

SEQ ID NO: 1754973 - RNA, 15 nt, Human herpesvirus 1
accccacgacaccca

SEQ ID NO: 1754974 - RNA, 20 nt, Human herpesvirus 1
cagccagaacucgccccgga

SEQ ID NO: 1754975 - RNA, 19 nt, Human herpesvirus 1
ccgagacccccaacgccac

SEQ ID NO: 1754976 - RNA, 13 nt, Human herpesvirus 1
ccguguccuggag

SEQ ID NO: 1754977 - RNA, 13 nt, Human herpesvirus 1
agcgcacugcccg

SEQ ID NO: 1754978 - RNA, 20 nt, Human herpesvirus 1
caacgcgggcguucccgagc

SEQ ID NO: 1754979 - RNA, 15 nt, Human herpesvirus 1
uggugcgagcugcag

SEQ ID NO: 1754980 - RNA, 12 nt, Human herpesvirus 1
gcgccccccaaa

SEQ ID NO: 1754981 - RNA, 18 nt, Human herpesvirus 1
cauccccgcuccccaagc

SEQ ID NO: 1754982 - RNA, 16 nt, Human herpesvirus 1
cgguccuggaccagcu

SEQ ID NO: 1754983 - RNA, 16 nt, Human herpesvirus 1
cgcgacaacgagcccc

SEQ ID NO: 1754984 - RNA, 20 nt, Human herpesvirus 1
acucagggcucuacccucug

SEQ ID NO: 1754985 - RNA, 11 nt, Human herpesvirus 1
auuuggggcgc

SEQ ID NO: 1754986 - RNA, 18 nt, Human herpesvirus 1
cgccuggcgucuccucug

SEQ ID NO: 1754987 - RNA, 18 nt, Human herpesvirus 1
acccguuccagcccccca

SEQ ID NO: 1754988 - RNA, 13 nt, Human herpesvirus 1
acgcgcuggggcu

SEQ ID NO: 1754989 - RNA, 18 nt, Human herpesvirus 1
cccaggccuaccagcagg

SEQ ID NO: 1754990 - RNA, 17 nt, Human herpesvirus 1
cccgggccacggcgccg

SEQ ID NO: 1754991 - RNA, 15 nt, Human herpesvirus 1
agcgaagcagccgcc

SEQ ID NO: 1754992 - RNA, 17 nt, Human herpesvirus 1
gcugcgcauccccccgu

SEQ ID NO: 1754993 - RNA, 21 nt, Human herpesvirus 1
cugagacaagagcgcuccccc

SEQ ID NO: 1754994 - RNA, 16 nt, Human herpesvirus 1
acccccucgaccacca

SEQ ID NO: 1754995 - RNA, 15 nt, Human herpesvirus 1
caacgagcugcggcu

SEQ ID NO: 1754996 - RNA, 10 nt, Human herpesvirus 1
ucccaggacu

SEQ ID NO: 1754997 - RNA, 17 nt, Human herpesvirus 1
gugcgucgggccucccg

SEQ ID NO: 1754998 - RNA, 13 nt, Human herpesvirus 1
gcucacgaccccc

SEQ ID NO: 1754999 - RNA, 20 nt, Human herpesvirus 1
ggcauccagggagaaacccc

SEQ ID NO: 1755000 - RNA, 16 nt, Human herpesvirus 1
cagggaccuccuggac

SEQ ID NO: 1755001 - RNA, 22 nt, Human herpesvirus 1
cuugaggggggagaugggaccc

SEQ ID NO: 1755002 - RNA, 17 nt, Human herpesvirus 1
cagccgcgccgcugccc

SEQ ID NO: 1755003 - RNA, 14 nt, Human herpesvirus 1
cggcgugucggugc

SEQ ID NO: 1755004 - RNA, 15 nt, Human herpesvirus 1
gccaccgugggccgg

SEQ ID NO: 1755005 - RNA, 18 nt, Human herpesvirus 1
ccgggcgcguccccggcc

SEQ ID NO: 1755006 - RNA, 17 nt, Human herpesvirus 1
cguugcagggccuggug

SEQ ID NO: 1755007 - RNA, 17 nt, Human herpesvirus 1
ccgccccuaucgcucga

SEQ ID NO: 1755008 - RNA, 16 nt, Human herpesvirus 1
cuggacgugggccuca

SEQ ID NO: 1755009 - RNA, 20 nt, Human herpesvirus 1
gggcaucucgcgccccgaug

SEQ ID NO: 1755010 - RNA, 18 nt, Human herpesvirus 1
ggugccaauaaaccccca

SEQ ID NO: 1755011 - RNA, 14 nt, Human herpesvirus 1
cccgccgccacugu

SEQ ID NO: 1755012 - RNA, 17 nt, Human herpesvirus 1
gaccggcaagcggagcg

SEQ ID NO: 1755013 - RNA, 17 nt, Human herpesvirus 1
uguccgcggggccuccg

SEQ ID NO: 1755014 - RNA, 13 nt, Human herpesvirus 1
accucuccacacc

SEQ ID NO: 1755015 - RNA, 18 nt, Human herpesvirus 1
agacacgggcaccacaca

SEQ ID NO: 1755016 - RNA, 18 nt, Human herpesvirus 1
acccuaccccaguccccg

SEQ ID NO: 1755017 - RNA, 15 nt, Human herpesvirus 1
gcacccacgcccgcg

SEQ ID NO: 1755018 - RNA, 14 nt, Human herpesvirus 1
ggcccgaagccugc

SEQ ID NO: 1755019 - RNA, 23 nt, Human herpesvirus 1
cacgagcgcgcugcucagcgcca

SEQ ID NO: 1755020 - RNA, 13 nt, Human herpesvirus 1
uccucccgccacc

SEQ ID NO: 1755021 - RNA, 15 nt, Human herpesvirus 1
cacggcuaccuggcc

SEQ ID NO: 1755022 - RNA, 14 nt, Human herpesvirus 1
gaccggcggguccc

SEQ ID NO: 1755023 - RNA, 22 nt, Human herpesvirus 1
ccgcguguuccccgggagcccc

SEQ ID NO: 1755024 - RNA, 21 nt, Human herpesvirus 1
ccaccgccaucagccuuacca

SEQ ID NO: 1755025 - RNA, 15 nt, Human herpesvirus 1
aggcacggcagcaug

SEQ ID NO: 1755026 - RNA, 19 nt, Human herpesvirus 1
ugucuccccgauggcccuc

SEQ ID NO: 1755027 - RNA, 14 nt, Human herpesvirus 1
cgggagccccgguc

SEQ ID NO: 1755028 - RNA, 18 nt, Human herpesvirus 1
gccacgucgaccgcgccc

SEQ ID NO: 1755029 - RNA, 12 nt, Human herpesvirus 1
acccgacacuga

SEQ ID NO: 1755030 - RNA, 15 nt, Human herpesvirus 1
cagagaccccagggu

SEQ ID NO: 1755031 - RNA, 12 nt, Human herpesvirus 1
ccgccccacccc

SEQ ID NO: 1755032 - RNA, 20 nt, Human herpesvirus 1
gucgucauagugggccucca

SEQ ID NO: 1755033 - RNA, 22 nt, Human herpesvirus 1
gccguccucgcaccagcccuug

SEQ ID NO: 1755034 - RNA, 15 nt, Human herpesvirus 1
cgcucaaccaccgcu

SEQ ID NO: 1755035 - RNA, 17 nt, Human herpesvirus 1
ugugccaucgcgccccc

SEQ ID NO: 1755036 - RNA, 16 nt, Human herpesvirus 1
guccccgcgaagaccc

SEQ ID NO: 1755037 - RNA, 14 nt, Human herpesvirus 1
cccaugaaggcccu

SEQ ID NO: 1755038 - RNA, 18 nt, Human herpesvirus 1
gggauugguuagacccau

SEQ ID NO: 1755039 - RNA, 12 nt, Human herpesvirus 1
cgugcccuucca

SEQ ID NO: 1755040 - RNA, 19 nt, Human herpesvirus 1
ccagccuguuuguccuggg

SEQ ID NO: 1755041 - RNA, 22 nt, Human herpesvirus 1
gugggcgacugcgaccccagcc

SEQ ID NO: 1755042 - RNA, 17 nt, Human herpesvirus 1
ccaguggcuccgggcca

SEQ ID NO: 1755043 - RNA, 18 nt, Human herpesvirus 1
aaauuuuacaaacagauu

SEQ ID NO: 1755044 - RNA, 14 nt, Human herpesvirus 1
gccagggcgcuacg

SEQ ID NO: 1755045 - RNA, 14 nt, Human herpesvirus 1
guccguggagcgca

SEQ ID NO: 1755046 - RNA, 19 nt, Human herpesvirus 1
acgaguaucugcgggccgc

SEQ ID NO: 1755047 - RNA, 14 nt, Human herpesvirus 1
ucuucucucccggg

SEQ ID NO: 1755048 - RNA, 19 nt, Human herpesvirus 1
caacuccagaccaccgguc

SEQ ID NO: 1755049 - RNA, 21 nt, Human herpesvirus 1
ugucccgacauuaaccaccug

SEQ ID NO: 1755050 - RNA, 16 nt, Human herpesvirus 1
gucuucggccccgcgu

SEQ ID NO: 1755051 - RNA, 17 nt, Human herpesvirus 1
gccccgugucugugggc

SEQ ID NO: 1755052 - RNA, 15 nt, Human herpesvirus 1
acacccgccccucca

SEQ ID NO: 1755053 - RNA, 23 nt, Human herpesvirus 1
cagcagacgcugcuccgccuggc

SEQ ID NO: 1755054 - RNA, 17 nt, Human herpesvirus 1
gcuuguccccgaacaaa

SEQ ID NO: 1755055 - RNA, 14 nt, Human herpesvirus 1
cuauaaagccgcca

SEQ ID NO: 1755056 - RNA, 16 nt, Human herpesvirus 1
uccgaacgcagccccg

SEQ ID NO: 1755057 - RNA, 23 nt, Human herpesvirus 1
cuucggccccgcgucuggccccg

SEQ ID NO: 1755058 - RNA, 22 nt, Human herpesvirus 1
guucccccggcacgccuggggu

SEQ ID NO: 1755059 - RNA, 23 nt, Human herpesvirus 1
uggcuucggccguuucuccgccc

SEQ ID NO: 1755060 - RNA, 17 nt, Human herpesvirus 1
ccacgagaucaaggaca

SEQ ID NO: 1755061 - RNA, 22 nt, Human herpesvirus 1
cgcgucgacgucgcgccugggu

SEQ ID NO: 1755062 - RNA, 21 nt, Human herpesvirus 1
ucuccgaucccaacuccucag

SEQ ID NO: 1755063 - RNA, 13 nt, Human herpesvirus 1
accagguccccca

SEQ ID NO: 1755064 - RNA, 16 nt, Human herpesvirus 1
gccuagccgcagcaaa

SEQ ID NO: 1755065 - RNA, 13 nt, Human herpesvirus 1
cggcggggccuca

SEQ ID NO: 1755066 - RNA, 23 nt, Human herpesvirus 1
cucucgcaccaucccggguuaau

SEQ ID NO: 1755067 - RNA, 18 nt, Human herpesvirus 1
guacugcggucugucucg

SEQ ID NO: 1755068 - RNA, 17 nt, Human herpesvirus 1
accggacccgcaucccc

SEQ ID NO: 1755069 - RNA, 21 nt, Human herpesvirus 1
caaacacaaaacacacggguu

SEQ ID NO: 1755070 - RNA, 17 nt, Human herpesvirus 1
cguggauacggucaccc

SEQ ID NO: 1755071 - RNA, 20 nt, Human herpesvirus 1
cccugagcgcccuccugacc

SEQ ID NO: 1755072 - RNA, 14 nt, Human herpesvirus 1
ccgaagccccggcc

SEQ ID NO: 1755073 - RNA, 22 nt, Human herpesvirus 1
gcggguaugguggaccgcggac

SEQ ID NO: 1755074 - RNA, 20 nt, Human herpesvirus 1
gauagagucgacgaccuggg

SEQ ID NO: 1755075 - RNA, 17 nt, Human herpesvirus 1
ucgcguggugcgagcug

SEQ ID NO: 1755076 - RNA, 16 nt, Human herpesvirus 1
uggaggucguuuucau

SEQ ID NO: 1755077 - RNA, 17 nt, Human herpesvirus 1
guccgcgcauccgaccc

SEQ ID NO: 1755078 - RNA, 12 nt, Human herpesvirus 1
gcuugcggggcu

SEQ ID NO: 1755079 - RNA, 16 nt, Human herpesvirus 1
cucgagaugggccagg

SEQ ID NO: 1755080 - RNA, 19 nt, Human herpesvirus 1
ccaguccccgggcccagcc

SEQ ID NO: 1755081 - RNA, 22 nt, Human herpesvirus 1
ccucccggggggucggcaggcg

SEQ ID NO: 1755082 - RNA, 20 nt, Human herpesvirus 1
gcgggacccgacaggcgacc

SEQ ID NO: 1755083 - RNA, 14 nt, Human herpesvirus 1
caccaucucccccg

SEQ ID NO: 1755084 - RNA, 22 nt, Human herpesvirus 1
cgcgaccucaccaccaaggccc

SEQ ID NO: 1755085 - RNA, 16 nt, Human herpesvirus 1
gcagcgccggccuccc

SEQ ID NO: 1755086 - RNA, 13 nt, Human herpesvirus 1
gcuccgccgcgga

SEQ ID NO: 1755087 - RNA, 23 nt, Human herpesvirus 1
caauccgugucggggaggggaaa

SEQ ID NO: 1755088 - RNA, 22 nt, Human herpesvirus 1
gguaccgcgugaccccagggau

SEQ ID NO: 1755089 - RNA, 12 nt, Human herpesvirus 1
aucgucggugcc

SEQ ID NO: 1755090 - RNA, 15 nt, Human herpesvirus 1
guccccgaacaaacg

SEQ ID NO: 1755091 - RNA, 21 nt, Human herpesvirus 1
ugcccucccugacggccaucg

SEQ ID NO: 1755092 - RNA, 21 nt, Human herpesvirus 1
ccuggaggacggcgccggggc

SEQ ID NO: 1755093 - RNA, 14 nt, Human herpesvirus 1
ugccugacccucuc

SEQ ID NO: 1755094 - RNA, 16 nt, Human herpesvirus 1
ccggcggacccaagcc

SEQ ID NO: 1755095 - RNA, 22 nt, Human herpesvirus 1
ccucccgcucggcggcagcccg

SEQ ID NO: 1755096 - RNA, 20 nt, Human herpesvirus 1
cgccacccgaaccaccacug

SEQ ID NO: 1755097 - RNA, 13 nt, Human herpesvirus 1
gggcaggugcaga

SEQ ID NO: 1755098 - RNA, 13 nt, Human herpesvirus 1
acccgacucaccu

SEQ ID NO: 1755099 - RNA, 16 nt, Human herpesvirus 1
gauggaggagccccug

SEQ ID NO: 1755100 - RNA, 15 nt, Human herpesvirus 1
agcuuuccgagggcg

SEQ ID NO: 1755101 - RNA, 19 nt, Human herpesvirus 1
cacccugcugcccccggag

SEQ ID NO: 1755102 - RNA, 12 nt, Human herpesvirus 1
cagacgcacccg

SEQ ID NO: 1755103 - RNA, 16 nt, Human herpesvirus 1
gcccccgaggccagca

SEQ ID NO: 1755104 - RNA, 11 nt, Human herpesvirus 1
acggcaaggag

SEQ ID NO: 1755105 - RNA, 16 nt, Human herpesvirus 1
ccgccuggucccccgg

SEQ ID NO: 1755106 - RNA, 14 nt, Human herpesvirus 1
cccuggcgagccca

SEQ ID NO: 1755107 - RNA, 12 nt, Human herpesvirus 1
aacaugacccag

SEQ ID NO: 1755108 - RNA, 21 nt, Human herpesvirus 1
gacccucucuucucucccggg

SEQ ID NO: 1755109 - RNA, 17 nt, Human herpesvirus 1
gggucuguuggggacac

SEQ ID NO: 1755110 - RNA, 17 nt, Human herpesvirus 1
cgucucucuuccccccc

SEQ ID NO: 1755111 - RNA, 15 nt, Human herpesvirus 1
cacgagcacccugcu

SEQ ID NO: 1755112 - RNA, 19 nt, Human herpesvirus 1
acggcauucgggccugccu

SEQ ID NO: 1755113 - RNA, 20 nt, Human herpesvirus 1
aaccaccuuccguccccugc

SEQ ID NO: 1755114 - RNA, 15 nt, Human herpesvirus 1
cccacgacccgacuc

SEQ ID NO: 1755115 - RNA, 15 nt, Human herpesvirus 1
ugacgccucagggcc

SEQ ID NO: 1755116 - RNA, 21 nt, Human herpesvirus 1
ucuggcguucgucgcccucca

SEQ ID NO: 1755117 - RNA, 13 nt, Human herpesvirus 1
cccugucgccucc

SEQ ID NO: 1755118 - RNA, 16 nt, Human herpesvirus 1
uagcucgcggagggcg

SEQ ID NO: 1755119 - RNA, 17 nt, Human herpesvirus 1
caccccgaagccccggc

SEQ ID NO: 1755120 - RNA, 16 nt, Human herpesvirus 1
cauacacagccaccca

SEQ ID NO: 1755121 - RNA, 17 nt, Human herpesvirus 1
uccagagggcaacgcgg

SEQ ID NO: 1755122 - RNA, 13 nt, Human herpesvirus 1
ccagggagccccg

SEQ ID NO: 1755123 - RNA, 18 nt, Human herpesvirus 1
ugggauccgacccccaug

SEQ ID NO: 1755124 - RNA, 13 nt, Human herpesvirus 1
uccgcgccccucu

SEQ ID NO: 1755125 - RNA, 15 nt, Human herpesvirus 1
ccagaugcccacggg

SEQ ID NO: 1755126 - RNA, 15 nt, Human herpesvirus 1
gaccacgugcacagc

SEQ ID NO: 1755127 - RNA, 23 nt, Human herpesvirus 1
guccccccucuaucccgcccacc

SEQ ID NO: 1755128 - RNA, 19 nt, Human herpesvirus 1
acgccuggggucgcggccg

SEQ ID NO: 1755129 - RNA, 16 nt, Human herpesvirus 1
gccagcuaugggcccu

SEQ ID NO: 1755130 - RNA, 12 nt, Human herpesvirus 1
gcggccauggcc

SEQ ID NO: 1755131 - RNA, 13 nt, Human herpesvirus 1
gcggcccccgcga

SEQ ID NO: 1755132 - RNA, 12 nt, Human herpesvirus 1
ucaaucuggccc

SEQ ID NO: 1755133 - RNA, 15 nt, Human herpesvirus 1
ugcagggccuggugc

SEQ ID NO: 1755134 - RNA, 21 nt, Human herpesvirus 1
cuucuugucgucucucuuccc

SEQ ID NO: 1755135 - RNA, 19 nt, Human herpesvirus 1
uccagggggaugcuagccu

SEQ ID NO: 1755136 - RNA, 12 nt, Human herpesvirus 1
auggcaggagcc

SEQ ID NO: 1755137 - RNA, 16 nt, Human herpesvirus 1
cccgcccggguccccg

SEQ ID NO: 1755138 - RNA, 12 nt, Human herpesvirus 1
uguggggacccg

SEQ ID NO: 1755139 - RNA, 16 nt, Human herpesvirus 1
cgccgcggccuggguu

SEQ ID NO: 1755140 - RNA, 21 nt, Human herpesvirus 1
uccacacccaguggcuccggg

SEQ ID NO: 1755141 - RNA, 20 nt, Human herpesvirus 1
gcggggcggggaaugugugu

SEQ ID NO: 1755142 - RNA, 13 nt, Human herpesvirus 1
acugcgaccccag

SEQ ID NO: 1755143 - RNA, 19 nt, Human herpesvirus 1
gccuccgcccgugcugccg

SEQ ID NO: 1755144 - RNA, 22 nt, Human herpesvirus 1
gagccacccgacaacagccccc

SEQ ID NO: 1755145 - RNA, 18 nt, Human herpesvirus 1
cugcaccgguucucccug

SEQ ID NO: 1755146 - RNA, 15 nt, Human herpesvirus 1
ucccuggccgugguc

SEQ ID NO: 1755147 - RNA, 15 nt, Human herpesvirus 1
uuuggguccgggccc

SEQ ID NO: 1755148 - RNA, 12 nt, Human herpesvirus 1
cgccgcgggccc

SEQ ID NO: 1755149 - RNA, 19 nt, Human herpesvirus 1
ccccaugcgggcucggcuc

SEQ ID NO: 1755150 - RNA, 21 nt, Human herpesvirus 1
ccaguggcuccgggccaacca

SEQ ID NO: 1755151 - RNA, 17 nt, Human herpesvirus 1
aguggaggaagaccugc

SEQ ID NO: 1755152 - RNA, 12 nt, Human herpesvirus 1
gcuuggagccag

SEQ ID NO: 1755153 - RNA, 16 nt, Human herpesvirus 1
gcuucggccguuucuc

SEQ ID NO: 1755154 - RNA, 15 nt, Human herpesvirus 1
acguccugggccacc

SEQ ID NO: 1755155 - RNA, 12 nt, Human herpesvirus 1
ccccgcccgggu

SEQ ID NO: 1755156 - RNA, 11 nt, Human herpesvirus 1
guccuggggau

SEQ ID NO: 1755157 - RNA, 21 nt, Human herpesvirus 1
cucggccuauggcuccugcga

SEQ ID NO: 1755158 - RNA, 20 nt, Human herpesvirus 1
accacaaucgcgaccacccc

SEQ ID NO: 1755159 - RNA, 16 nt, Human herpesvirus 1
gcuccuuagcgcggcc

SEQ ID NO: 1755160 - RNA, 13 nt, Human herpesvirus 1
guguucgagggcc

SEQ ID NO: 1755161 - RNA, 20 nt, Human herpesvirus 1
gccuacacucgacccccgcg

SEQ ID NO: 1755162 - RNA, 12 nt, Human herpesvirus 1
ucugggcgggcc

SEQ ID NO: 1755163 - RNA, 13 nt, Human herpesvirus 1
uuggggcccaccc

SEQ ID NO: 1755164 - RNA, 16 nt, Human herpesvirus 1
cccgcgcaugcucugg

SEQ ID NO: 1755165 - RNA, 18 nt, Human herpesvirus 1
ucgagaugagccagaccc

SEQ ID NO: 1755166 - RNA, 22 nt, Human herpesvirus 1
ggccuuguuccgcuucccggua

SEQ ID NO: 1755167 - RNA, 18 nt, Human herpesvirus 1
guggcuccgggccaacca

SEQ ID NO: 1755168 - RNA, 15 nt, Human herpesvirus 1
cccaugaaggcccug

SEQ ID NO: 1755169 - RNA, 14 nt, Human herpesvirus 1
ucuccacaccugca

SEQ ID NO: 1755170 - RNA, 18 nt, Human herpesvirus 1
agagucgacgaccugggg

SEQ ID NO: 1755171 - RNA, 20 nt, Human herpesvirus 1
ggaggagccccugcccgaca

SEQ ID NO: 1755172 - RNA, 22 nt, Human herpesvirus 1
ccucccgauaaaaagcgccccg

SEQ ID NO: 1755173 - RNA, 15 nt, Human herpesvirus 1
ccauggaccgcaucu

SEQ ID NO: 1755174 - RNA, 22 nt, Human herpesvirus 1
cgucuucggccccgcgucuggc

SEQ ID NO: 1755175 - RNA, 20 nt, Human herpesvirus 1
uccgcccccaaccccuuccc

SEQ ID NO: 1755176 - RNA, 17 nt, Human herpesvirus 1
cauggccaugacggguc

SEQ ID NO: 1755177 - RNA, 18 nt, Human herpesvirus 1
cgcuucccgguaugguaa

SEQ ID NO: 1755178 - RNA, 13 nt, Human herpesvirus 1
uuccgcugagccu

SEQ ID NO: 1755179 - RNA, 17 nt, Human herpesvirus 1
caugcgcaagcgccgca

SEQ ID NO: 1755180 - RNA, 21 nt, Human herpesvirus 1
gcacuuuccccaugcgacagc

SEQ ID NO: 1755181 - RNA, 16 nt, Human herpesvirus 1
cucgaucggccacggg

SEQ ID NO: 1755182 - RNA, 16 nt, Human herpesvirus 1
ggaggagccccugccc

SEQ ID NO: 1755183 - RNA, 16 nt, Human herpesvirus 1
auguccccaaaauaaa

SEQ ID NO: 1755184 - RNA, 15 nt, Human herpesvirus 1
cacccgaaccaccac

SEQ ID NO: 1755185 - RNA, 22 nt, Human herpesvirus 1
ccccacgcccccgccgcccggg

SEQ ID NO: 1755186 - RNA, 12 nt, Human herpesvirus 1
gugauuccucuc

SEQ ID NO: 1755187 - RNA, 23 nt, Human herpesvirus 1
caugcgcgggcucgucuuggcca

SEQ ID NO: 1755188 - RNA, 15 nt, Human herpesvirus 1
uccgcaucccaggau

SEQ ID NO: 1755189 - RNA, 20 nt, Human herpesvirus 1
gucgccccgugucugugggc

SEQ ID NO: 1755190 - RNA, 14 nt, Human herpesvirus 1
cgcagccuggucga

SEQ ID NO: 1755191 - RNA, 21 nt, Human herpesvirus 1
acaccgcguguuccccgggag

SEQ ID NO: 1755192 - RNA, 18 nt, Human herpesvirus 1
gcucgcggaggagccagu

SEQ ID NO: 1755193 - RNA, 13 nt, Human herpesvirus 1
aagcugauguccc

SEQ ID NO: 1755194 - RNA, 21 nt, Human herpesvirus 1
ugggcggccccggccgcccuu

SEQ ID NO: 1755195 - RNA, 18 nt, Human herpesvirus 1
cgcgagcucccugcggcu

SEQ ID NO: 1755196 - RNA, 21 nt, Human herpesvirus 1
cgccgcgacccgcacgagccg

SEQ ID NO: 1755197 - RNA, 21 nt, Human herpesvirus 1
ccggguacggcgucugggcca

SEQ ID NO: 1755198 - RNA, 17 nt, Human herpesvirus 1
cgcuuuauaggccggga

SEQ ID NO: 1755199 - RNA, 18 nt, Human herpesvirus 1
cguacaaguucaaggcca

SEQ ID NO: 1755200 - RNA, 14 nt, Human herpesvirus 1
cgcaacggggcgcc

SEQ ID NO: 1755201 - RNA, 18 nt, Human herpesvirus 1
accaccauggccccccgc

SEQ ID NO: 1755202 - RNA, 20 nt, Human herpesvirus 1
gcgaccucggcgccucugga

SEQ ID NO: 1755203 - RNA, 20 nt, Human herpesvirus 1
uggguguguuuauugggcgc

SEQ ID NO: 1755204 - RNA, 18 nt, Human herpesvirus 1
cggacccaaaauaauaaa

SEQ ID NO: 1755205 - RNA, 12 nt, Human herpesvirus 1
ccacccuggagc

SEQ ID NO: 1755206 - RNA, 21 nt, Human herpesvirus 1
acaccggucaacgaggguugg

SEQ ID NO: 1755207 - RNA, 12 nt, Human herpesvirus 1
cgcuagaccacg

SEQ ID NO: 1755208 - RNA, 19 nt, Human herpesvirus 1
gccccggaccccacgcacc

SEQ ID NO: 1755209 - RNA, 16 nt, Human herpesvirus 1
uuucguuccuuccccc

SEQ ID NO: 1755210 - RNA, 20 nt, Human herpesvirus 1
agcucccagagaccccaggg

SEQ ID NO: 1755211 - RNA, 16 nt, Human herpesvirus 1
ugucgcagcaccuccu

SEQ ID NO: 1755212 - RNA, 19 nt, Human herpesvirus 1
cugcgcgagcaccugcggg

SEQ ID NO: 1755213 - RNA, 21 nt, Human herpesvirus 1
uagccagcagacgcugcuccg

SEQ ID NO: 1755214 - RNA, 16 nt, Human herpesvirus 1
ccccuucccucccccu

SEQ ID NO: 1755215 - RNA, 18 nt, Human herpesvirus 1
ccgcaacgcgcuggggcu

SEQ ID NO: 1755216 - RNA, 19 nt, Human herpesvirus 1
gccgccaccguggccggcc

SEQ ID NO: 1755217 - RNA, 17 nt, Human herpesvirus 1
caagccccuagccccgc

SEQ ID NO: 1755218 - RNA, 14 nt, Human herpesvirus 1
cagaccgaagaggu

SEQ ID NO: 1755219 - RNA, 22 nt, Human herpesvirus 1
cacccuccgcuggggcccccag

SEQ ID NO: 1755220 - RNA, 15 nt, Human herpesvirus 1
gucccgcccaccgga

SEQ ID NO: 1755221 - RNA, 14 nt, Human herpesvirus 1
caacgccuccccug

SEQ ID NO: 1755222 - RNA, 19 nt, Human herpesvirus 1
ccgcgcuaugacggcaaua

SEQ ID NO: 1755223 - RNA, 14 nt, Human herpesvirus 1
cucgcugcccuucu

SEQ ID NO: 1755224 - RNA, 13 nt, Human herpesvirus 1
ccacaaccucccg

SEQ ID NO: 1755225 - RNA, 19 nt, Human herpesvirus 1
ugguaucaaacucauuugu

SEQ ID NO: 1755226 - RNA, 17 nt, Human herpesvirus 1
gugguccuguggagccu

SEQ ID NO: 1755227 - RNA, 15 nt, Human herpesvirus 1
cucgucgccuggcug

SEQ ID NO: 1755228 - RNA, 14 nt, Human herpesvirus 1
cgcgacccuccggg

SEQ ID NO: 1755229 - RNA, 23 nt, Human herpesvirus 1
gccccguacaaguucaaggccac

SEQ ID NO: 1755230 - RNA, 20 nt, Human herpesvirus 1
ccccaguccccgggcccagc

SEQ ID NO: 1755231 - RNA, 16 nt, Human herpesvirus 1
ucgugucuuucggugg

SEQ ID NO: 1755232 - RNA, 14 nt, Human herpesvirus 1
cgagcucccagaga

SEQ ID NO: 1755233 - RNA, 19 nt, Human herpesvirus 1
cgcaccaagccgcucuccg

SEQ ID NO: 1755234 - RNA, 18 nt, Human herpesvirus 1
caccuccccagcggccag

SEQ ID NO: 1755235 - RNA, 20 nt, Human herpesvirus 1
gcgaccgccggcgaggugga

SEQ ID NO: 1755236 - RNA, 17 nt, Human herpesvirus 1
gaggcgcgcgcaccucc

SEQ ID NO: 1755237 - RNA, 13 nt, Human herpesvirus 1
ccugcccccugga

SEQ ID NO: 1755238 - RNA, 13 nt, Human herpesvirus 1
cccggucucccag

SEQ ID NO: 1755239 - RNA, 14 nt, Human herpesvirus 1
ggauggggagagcc

SEQ ID NO: 1755240 - RNA, 13 nt, Human herpesvirus 1
aucuccugggggc

SEQ ID NO: 1755241 - RNA, 11 nt, Human herpesvirus 1
acaaacacaaa

SEQ ID NO: 1755242 - RNA, 22 nt, Human herpesvirus 1
uuuguacccuuaauaaauuuua

SEQ ID NO: 1755243 - RNA, 19 nt, Human herpesvirus 1
gucccauccgaacgcagcc

SEQ ID NO: 1755244 - RNA, 24 nt, Human herpesvirus 1
auccgggaagacgaccagccgucc

SEQ ID NO: 1755245 - RNA, 17 nt, Human herpesvirus 1
ggugguccguguggagg

SEQ ID NO: 1755246 - RNA, 21 nt, Human herpesvirus 1
guccuuugggcgggaggaagc

SEQ ID NO: 1755247 - RNA, 17 nt, Human herpesvirus 1
cugccucuccccccagg

SEQ ID NO: 1755248 - RNA, 14 nt, Human herpesvirus 1
cugggccaccugac

SEQ ID NO: 1755249 - RNA, 12 nt, Human herpesvirus 1
gcgggggauggg

SEQ ID NO: 1755250 - RNA, 19 nt, Human herpesvirus 1
ccagggagaaaccccagca

SEQ ID NO: 1755251 - RNA, 13 nt, Human herpesvirus 1
auguccccaaaau

SEQ ID NO: 1755252 - RNA, 23 nt, Human herpesvirus 1
cgccauguuugcgggccugggcg

SEQ ID NO: 1755253 - RNA, 17 nt, Human herpesvirus 1
gucggggcgucccugga

SEQ ID NO: 1755254 - RNA, 19 nt, Human herpesvirus 1
ccacggcgccgaccacccg

SEQ ID NO: 1755255 - RNA, 15 nt, Human herpesvirus 1
gcugcagagcaaccc

SEQ ID NO: 1755256 - RNA, 15 nt, Human herpesvirus 1
ggugacgguggacag

SEQ ID NO: 1755257 - RNA, 16 nt, Human herpesvirus 1
ucccggguuaauguaa

SEQ ID NO: 1755258 - RNA, 21 nt, Human herpesvirus 1
gucgacgcagacgcacccgcu

SEQ ID NO: 1755259 - RNA, 17 nt, Human herpesvirus 1
gcccaccgcugggcgcu

SEQ ID NO: 1755260 - RNA, 20 nt, Human herpesvirus 1
gucuccccgggagccccgga

SEQ ID NO: 1755261 - RNA, 16 nt, Human herpesvirus 1
gaccccgcccaugggu

SEQ ID NO: 1755262 - RNA, 18 nt, Human herpesvirus 1
ugcucgggcaggugcaga

SEQ ID NO: 1755263 - RNA, 14 nt, Human herpesvirus 1
ugcgguuggggagg

SEQ ID NO: 1755264 - RNA, 15 nt, Human herpesvirus 1
agcgcggccgugggc

SEQ ID NO: 1755265 - RNA, 14 nt, Human herpesvirus 1
gcaccaucccgggu

SEQ ID NO: 1755266 - RNA, 16 nt, Human herpesvirus 1
agacagccgaucucca

SEQ ID NO: 1755267 - RNA, 13 nt, Human herpesvirus 1
ccaggccuccacc

SEQ ID NO: 1755268 - RNA, 17 nt, Human herpesvirus 1
ucaccccgcaauuugca

SEQ ID NO: 1755269 - RNA, 17 nt, Human herpesvirus 1
uacagcauggcgccaca

SEQ ID NO: 1755270 - RNA, 22 nt, Human herpesvirus 1
gggcccacgaucaccgcgggag

SEQ ID NO: 1755271 - RNA, 14 nt, Human herpesvirus 1
gccgcgccccgccg

SEQ ID NO: 1755272 - RNA, 15 nt, Human herpesvirus 1
cucagggccuccgac

SEQ ID NO: 1755273 - RNA, 12 nt, Human herpesvirus 1
gacccuccggga

SEQ ID NO: 1755274 - RNA, 20 nt, Human herpesvirus 1
accgcuuuauaggccgggac

SEQ ID NO: 1755275 - RNA, 11 nt, Human herpesvirus 1
ggaacccgcgc

SEQ ID NO: 1755276 - RNA, 17 nt, Human herpesvirus 1
cagcccccccaagcgcc

SEQ ID NO: 1755277 - RNA, 20 nt, Human herpesvirus 1
cacgcucgcggagcuguacg

SEQ ID NO: 1755278 - RNA, 22 nt, Human herpesvirus 1
ccagcggcacgaccggcuccau

SEQ ID NO: 1755279 - RNA, 22 nt, Human herpesvirus 1
acaacucccccgcgcgccccga

SEQ ID NO: 1755280 - RNA, 21 nt, Human herpesvirus 1
gcuccggggaucugguccgcc

SEQ ID NO: 1755281 - RNA, 12 nt, Human herpesvirus 1
cccagcaccgac

SEQ ID NO: 1755282 - RNA, 18 nt, Human herpesvirus 1
ucuggguuuuccccuccc

SEQ ID NO: 1755283 - RNA, 19 nt, Human herpesvirus 1
cccggcccugcugcugccg

SEQ ID NO: 1755284 - RNA, 14 nt, Human herpesvirus 1
cgggcggccacccc

SEQ ID NO: 1755285 - RNA, 15 nt, Human herpesvirus 1
accgacauggagcug

SEQ ID NO: 1755286 - RNA, 13 nt, Human herpesvirus 1
gguugcggcccgc

SEQ ID NO: 1755287 - RNA, 12 nt, Human herpesvirus 1
agaggugcugcc

SEQ ID NO: 1755288 - RNA, 15 nt, Human herpesvirus 1
gccaucgagccaacg

SEQ ID NO: 1755289 - RNA, 17 nt, Human herpesvirus 1
gccugccaaccugaucc

SEQ ID NO: 1755290 - RNA, 14 nt, Human herpesvirus 1
ccuuuccgcccgcc

SEQ ID NO: 1755291 - RNA, 23 nt, Human herpesvirus 1
cgugaacgcucuacugcagaugc

SEQ ID NO: 1755292 - RNA, 19 nt, Human herpesvirus 1
ggccauggacagcgaccug

SEQ ID NO: 1755293 - RNA, 17 nt, Human herpesvirus 1
cccuccgcaucccagga

SEQ ID NO: 1755294 - RNA, 16 nt, Human herpesvirus 1
ccacgggggggugggg

SEQ ID NO: 1755295 - RNA, 16 nt, Human herpesvirus 1
cuauaagacucucccc

SEQ ID NO: 1755296 - RNA, 11 nt, Human herpesvirus 1
cacgcgccgcc

SEQ ID NO: 1755297 - RNA, 13 nt, Human herpesvirus 1
gguagcgggggac

SEQ ID NO: 1755298 - RNA, 23 nt, Human herpesvirus 1
gagggcaacgcgggacuaugccg

SEQ ID NO: 1755299 - RNA, 14 nt, Human herpesvirus 1
gcgacccuccggga

SEQ ID NO: 1755300 - RNA, 16 nt, Human herpesvirus 1
cggcacuuucugacgc

SEQ ID NO: 1755301 - RNA, 21 nt, Human herpesvirus 1
aauacagcauggcgccacacc

SEQ ID NO: 1755302 - RNA, 13 nt, Human herpesvirus 1
gccgcgggccacg

SEQ ID NO: 1755303 - RNA, 23 nt, Human herpesvirus 1
ccgucguaacggaguccuguccc

SEQ ID NO: 1755304 - RNA, 12 nt, Human herpesvirus 1
agccccccagcc

SEQ ID NO: 1755305 - RNA, 20 nt, Human herpesvirus 1
gcggccccugauggagccug

SEQ ID NO: 1755306 - RNA, 19 nt, Human herpesvirus 1
cgccgagucuucggggccc

SEQ ID NO: 1755307 - RNA, 14 nt, Human herpesvirus 1
gacgccagcuuucc

SEQ ID NO: 1755308 - RNA, 22 nt, Human herpesvirus 1
gccacccgacaacagcccccgg

SEQ ID NO: 1755309 - RNA, 14 nt, Human herpesvirus 1
uacaaguucaaggc

SEQ ID NO: 1755310 - RNA, 20 nt, Human herpesvirus 1
gacgcucuggacgucuggga

SEQ ID NO: 1755311 - RNA, 13 nt, Human herpesvirus 1
cccuacaaccuga

SEQ ID NO: 1755312 - RNA, 16 nt, Human herpesvirus 1
gggaccagguccccca

SEQ ID NO: 1755313 - RNA, 19 nt, Human herpesvirus 1
ggcguagagcuguggcacu

SEQ ID NO: 1755314 - RNA, 23 nt, Human herpesvirus 1
gcaaaacgccucccccugagccg

SEQ ID NO: 1755315 - RNA, 21 nt, Human herpesvirus 1
ccagaguaccgcgagcuccca

SEQ ID NO: 1755316 - RNA, 23 nt, Human herpesvirus 1
uggcgcccccccaacgggggacc

SEQ ID NO: 1755317 - RNA, 16 nt, Human herpesvirus 1
gcgcgaauugacccua

SEQ ID NO: 1755318 - RNA, 15 nt, Human herpesvirus 1
auccuggagcaccga

SEQ ID NO: 1755319 - RNA, 17 nt, Human herpesvirus 1
gccaaauuuauguguua

SEQ ID NO: 1755320 - RNA, 14 nt, Human herpesvirus 1
uaucccacccugga

SEQ ID NO: 1755321 - RNA, 16 nt, Human herpesvirus 1
cgucugggccaccgac

SEQ ID NO: 1755322 - RNA, 15 nt, Human herpesvirus 1
cggggcccggcccau

SEQ ID NO: 1755323 - RNA, 11 nt, Human herpesvirus 1
ccacgccaggg

SEQ ID NO: 1755324 - RNA, 23 nt, Human herpesvirus 1
uuguauguccccaaaauaaaaga

SEQ ID NO: 1755325 - RNA, 14 nt, Human herpesvirus 1
aguguacccuggcg

SEQ ID NO: 1755326 - RNA, 17 nt, Human herpesvirus 1
cgcagccccgcuggaac

SEQ ID NO: 1755327 - RNA, 16 nt, Human herpesvirus 1
cgcggaccaccgggcc

SEQ ID NO: 1755328 - RNA, 15 nt, Human herpesvirus 1
ccuguggcccuggcg

SEQ ID NO: 1755329 - RNA, 11 nt, Human herpesvirus 1
accaccagcug

SEQ ID NO: 1755330 - RNA, 22 nt, Human herpesvirus 1
gaccggcaccaccgacucuccc

SEQ ID NO: 1755331 - RNA, 13 nt, Human herpesvirus 1
cacggggacggcg

SEQ ID NO: 1755332 - RNA, 18 nt, Human herpesvirus 1
gcguuugcacaacacaaa

SEQ ID NO: 1755333 - RNA, 23 nt, Human herpesvirus 1
ucccccaccgcccacagagggcc

SEQ ID NO: 1755334 - RNA, 12 nt, Human herpesvirus 1
acacaaggccaa

SEQ ID NO: 1755335 - RNA, 20 nt, Human herpesvirus 1
accugcgcggguugcugcgc

SEQ ID NO: 1755336 - RNA, 19 nt, Human herpesvirus 1
ucacagggcgggccgccuc

SEQ ID NO: 1755337 - RNA, 22 nt, Human herpesvirus 1
uaacaaccacccgcacccccag

SEQ ID NO: 1755338 - RNA, 15 nt, Human herpesvirus 1
gugguucgggugugc

SEQ ID NO: 1755339 - RNA, 13 nt, Human herpesvirus 1
gggacuggccaau

SEQ ID NO: 1755340 - RNA, 19 nt, Human herpesvirus 1
ccuucuugucgucucucuu

SEQ ID NO: 1755341 - RNA, 16 nt, Human herpesvirus 1
cacuguggcucuccuc

SEQ ID NO: 1755342 - RNA, 23 nt, Human herpesvirus 1
gggaggggggggucgggcgcugg

SEQ ID NO: 1755343 - RNA, 15 nt, Human herpesvirus 1
accuuggucuggccc

SEQ ID NO: 1755344 - RNA, 19 nt, Human herpesvirus 1
uccagccccccagccuccc

SEQ ID NO: 1755345 - RNA, 19 nt, Human herpesvirus 1
ucgugggccucugggucug

SEQ ID NO: 1755346 - RNA, 19 nt, Human herpesvirus 1
gccaacgccgcgacccgca

SEQ ID NO: 1755347 - RNA, 18 nt, Human herpesvirus 1
ugagcgcccuccugacca

SEQ ID NO: 1755348 - RNA, 15 nt, Human herpesvirus 1
cccucgaccaccauc

SEQ ID NO: 1755349 - RNA, 14 nt, Human herpesvirus 1
gauccucggccagc

SEQ ID NO: 1755350 - RNA, 18 nt, Human herpesvirus 1
cgcgugcugcgccuuggg

SEQ ID NO: 1755351 - RNA, 20 nt, Human herpesvirus 1
cccccgucgaagcugauguc

SEQ ID NO: 1755352 - RNA, 14 nt, Human herpesvirus 1
ucucuucccucagg

SEQ ID NO: 1755353 - RNA, 22 nt, Human herpesvirus 1
gguuccggaggcgccgcgcgga

SEQ ID NO: 1755354 - RNA, 14 nt, Human herpesvirus 1
ccuucccgcuuccg

SEQ ID NO: 1755355 - RNA, 16 nt, Human herpesvirus 1
ggcgcuugcgcaccug

SEQ ID NO: 1755356 - RNA, 21 nt, Human herpesvirus 1
ggccgcccaacucucgcacca

SEQ ID NO: 1755357 - RNA, 13 nt, Human herpesvirus 1
caacgaccccgcc

SEQ ID NO: 1755358 - RNA, 16 nt, Human herpesvirus 1
cgaggagggguuuggg

SEQ ID NO: 1755359 - RNA, 21 nt, Human herpesvirus 1
ccuguguccgcuucucuuugg

SEQ ID NO: 1755360 - RNA, 17 nt, Human herpesvirus 1
gccuggucagaggccca

SEQ ID NO: 1755361 - RNA, 14 nt, Human herpesvirus 1
ucgggccucccgga

SEQ ID NO: 1755362 - RNA, 21 nt, Human herpesvirus 1
gcggccacgcaaaaccaggcc

SEQ ID NO: 1755363 - RNA, 15 nt, Human herpesvirus 1
ggggcgcuggccgug

SEQ ID NO: 1755364 - RNA, 16 nt, Human herpesvirus 1
gcuccgccuggccugc

SEQ ID NO: 1755365 - RNA, 20 nt, Human herpesvirus 1
ccuggccccaguccccaaga

SEQ ID NO: 1755366 - RNA, 20 nt, Human herpesvirus 1
guggagcugcccggcggcca

SEQ ID NO: 1755367 - RNA, 18 nt, Human herpesvirus 1
cgucagccugccucuccc

SEQ ID NO: 1755368 - RNA, 21 nt, Human herpesvirus 1
gaggacaccccucguggcccc

SEQ ID NO: 1755369 - RNA, 14 nt, Human herpesvirus 1
gccucaccugacca

SEQ ID NO: 1755370 - RNA, 16 nt, Human herpesvirus 1
cggccccugauggagc

SEQ ID NO: 1755371 - RNA, 13 nt, Human herpesvirus 1
acccuaugguaca

SEQ ID NO: 1755372 - RNA, 13 nt, Human herpesvirus 1
gaggagcccgccc

SEQ ID NO: 1755373 - RNA, 23 nt, Human herpesvirus 1
cucaccggguacggcgucugggc

SEQ ID NO: 1755374 - RNA, 20 nt, Human herpesvirus 1
cuuaauaaauuuuacaaaca

SEQ ID NO: 1755375 - RNA, 23 nt, Human herpesvirus 1
ggcggcgacgugcccccuccucg

SEQ ID NO: 1755376 - RNA, 17 nt, Human herpesvirus 1
cccggaaccugcucacg

SEQ ID NO: 1755377 - RNA, 21 nt, Human herpesvirus 1
gacgccuuaccaucccccggc

SEQ ID NO: 1755378 - RNA, 21 nt, Human herpesvirus 1
cccggcaaccccgaaggcgga

SEQ ID NO: 1755379 - RNA, 21 nt, Human herpesvirus 1
ccagacccaacccccggcccc

SEQ ID NO: 1755380 - RNA, 13 nt, Human herpesvirus 1
agauuuuucugua

SEQ ID NO: 1755381 - RNA, 22 nt, Human herpesvirus 1
gcggcucaacgagcuccuggcc

SEQ ID NO: 1755382 - RNA, 20 nt, Human herpesvirus 1
ccuuccuaacccagaccccg

SEQ ID NO: 1755383 - RNA, 22 nt, Human herpesvirus 1
uggcccuuccuaacccagaccc

SEQ ID NO: 1755384 - RNA, 18 nt, Human herpesvirus 1
aggcaguuaacugucugg

SEQ ID NO: 1755385 - RNA, 14 nt, Human herpesvirus 1
cgucaccaugcagc

SEQ ID NO: 1755386 - RNA, 14 nt, Human herpesvirus 1
caaggacagcggcc

SEQ ID NO: 1755387 - RNA, 17 nt, Human herpesvirus 1
uacacagccacccaccc

SEQ ID NO: 1755388 - RNA, 16 nt, Human herpesvirus 1
ccggaucgcgcucguc

SEQ ID NO: 1755389 - RNA, 18 nt, Human herpesvirus 1
aggcugucgacgcccccu

SEQ ID NO: 1755390 - RNA, 13 nt, Human herpesvirus 1
uccccuuccucgc

SEQ ID NO: 1755391 - RNA, 17 nt, Human herpesvirus 1
ccggggggucggcaggc

SEQ ID NO: 1755392 - RNA, 22 nt, Human herpesvirus 1
aauaaagagccguaacccaacc

SEQ ID NO: 1755393 - RNA, 17 nt, Human herpesvirus 1
auacggugcgggcggcc

SEQ ID NO: 1755394 - RNA, 18 nt, Human herpesvirus 1
acggccgaagccacgccc

SEQ ID NO: 1755395 - RNA, 21 nt, Human herpesvirus 1
gcccugccacuccggcgccgc

SEQ ID NO: 1755396 - RNA, 18 nt, Human herpesvirus 1
cugccucuccccccaggc

SEQ ID NO: 1755397 - RNA, 22 nt, Human herpesvirus 1
aaccgcaccccccucguccccc

SEQ ID NO: 1755398 - RNA, 21 nt, Human herpesvirus 1
ccacgccccuuucccccuguu

SEQ ID NO: 1755399 - RNA, 17 nt, Human herpesvirus 1
gcgccuugcggcagcgc

SEQ ID NO: 1755400 - RNA, 15 nt, Human herpesvirus 1
guccuguggagccug

SEQ ID NO: 1755401 - RNA, 16 nt, Human herpesvirus 1
ugccaucgcgcccccu

SEQ ID NO: 1755402 - RNA, 23 nt, Human herpesvirus 1
ggaagcagggcccgccaucuggg

SEQ ID NO: 1755403 - RNA, 21 nt, Human herpesvirus 1
gacccguuccagccccccagc

SEQ ID NO: 1755404 - RNA, 14 nt, Human herpesvirus 1
uccucccgcucggc

SEQ ID NO: 1755405 - RNA, 15 nt, Human herpesvirus 1
gcgagcucccugcgg

SEQ ID NO: 1755406 - RNA, 18 nt, Human herpesvirus 1
gcguccaucauagcccug

SEQ ID NO: 1755407 - RNA, 21 nt, Human herpesvirus 1
cccgggacaccccccaugcgg

SEQ ID NO: 1755408 - RNA, 20 nt, Human herpesvirus 1
caggcugucgacgcccccuc

SEQ ID NO: 1755409 - RNA, 22 nt, Human herpesvirus 1
cgcaggugugguucggccaccg

SEQ ID NO: 1755410 - RNA, 21 nt, Human herpesvirus 1
ccagccuguuuguccugggga

SEQ ID NO: 1755411 - RNA, 14 nt, Human herpesvirus 1
cgggauccacaccg

SEQ ID NO: 1755412 - RNA, 18 nt, Human herpesvirus 1
ccucuucuccccuucccu

SEQ ID NO: 1755413 - RNA, 16 nt, Human herpesvirus 1
cggccaacgaggacca

SEQ ID NO: 1755414 - RNA, 14 nt, Human herpesvirus 1
cagcgccggguggc

SEQ ID NO: 1755415 - RNA, 12 nt, Human herpesvirus 1
agcgcugcugcg

SEQ ID NO: 1755416 - RNA, 13 nt, Human herpesvirus 1
caugcaccccaga

SEQ ID NO: 1755417 - RNA, 18 nt, Human herpesvirus 1
ccucgcccgccaucgagc

SEQ ID NO: 1755418 - RNA, 19 nt, Human herpesvirus 1
guaucggggguucccacca

SEQ ID NO: 1755419 - RNA, 17 nt, Human herpesvirus 1
ucucccagggagccccg

SEQ ID NO: 1755420 - RNA, 16 nt, Human herpesvirus 1
cucauuuuacaauaaa

SEQ ID NO: 1755421 - RNA, 17 nt, Human herpesvirus 1
ccugcgccccgccgccc

SEQ ID NO: 1755422 - RNA, 21 nt, Human herpesvirus 1
gcgccugccccgccacccagu

SEQ ID NO: 1755423 - RNA, 11 nt, Human herpesvirus 1
gccuggaggac

SEQ ID NO: 1755424 - RNA, 14 nt, Human herpesvirus 1
ucgcacccacagcu

SEQ ID NO: 1755425 - RNA, 16 nt, Human herpesvirus 1
cgucgccgcgggccac

SEQ ID NO: 1755426 - RNA, 22 nt, Human herpesvirus 1
ucucccaccgccaucagccuua

SEQ ID NO: 1755427 - RNA, 22 nt, Human herpesvirus 1
cuggucgucgggcgccaaagcc

SEQ ID NO: 1755428 - RNA, 20 nt, Human herpesvirus 1
ggcggcgacuuugacgaggc

SEQ ID NO: 1755429 - RNA, 17 nt, Human herpesvirus 1
uccgagcacccccccca

SEQ ID NO: 1755430 - RNA, 14 nt, Human herpesvirus 1
cgggcacgccaagc

SEQ ID NO: 1755431 - RNA, 23 nt, Human herpesvirus 1
augccaaguauuggacuggagga

SEQ ID NO: 1755432 - RNA, 13 nt, Human herpesvirus 1
ccgcccacuuccc

SEQ ID NO: 1755433 - RNA, 16 nt, Human herpesvirus 1
aggaugccagccaggg

SEQ ID NO: 1755434 - RNA, 21 nt, Human herpesvirus 1
agucggcaagauccucgggcu

SEQ ID NO: 1755435 - RNA, 15 nt, Human herpesvirus 1
gcaccaucccggguu

SEQ ID NO: 1755436 - RNA, 15 nt, Human herpesvirus 1
cacucacagccccgc

SEQ ID NO: 1755437 - RNA, 20 nt, Human herpesvirus 1
guuggggggugggggaaccu

SEQ ID NO: 1755438 - RNA, 18 nt, Human herpesvirus 1
cucgggaacggacggggu

SEQ ID NO: 1755439 - RNA, 13 nt, Human herpesvirus 1
ccacaaaaugcaa

SEQ ID NO: 1755440 - RNA, 15 nt, Human herpesvirus 1
ucgccuaccuucgca

SEQ ID NO: 1755441 - RNA, 22 nt, Human herpesvirus 1
guccccgaacaaacgacccacc

SEQ ID NO: 1755442 - RNA, 14 nt, Human herpesvirus 1
acgucgagaaggac

SEQ ID NO: 1755443 - RNA, 21 nt, Human herpesvirus 1
uacacgagcacccugcugccc

SEQ ID NO: 1755444 - RNA, 11 nt, Human herpesvirus 1
ugccugugugu

SEQ ID NO: 1755445 - RNA, 20 nt, Human herpesvirus 1
gccucgaugacgucccggcu

SEQ ID NO: 1755446 - RNA, 16 nt, Human herpesvirus 1
accccaccccugugcu

SEQ ID NO: 1755447 - RNA, 21 nt, Human herpesvirus 1
cucgcgaguacuuccacgccc

SEQ ID NO: 1755448 - RNA, 16 nt, Human herpesvirus 1
cccacuacaccagcca

SEQ ID NO: 1755449 - RNA, 22 nt, Human herpesvirus 1
ugcggccggcgggacucugggc

SEQ ID NO: 1755450 - RNA, 16 nt, Human herpesvirus 1
ccgguaugccgcggcc

SEQ ID NO: 1755451 - RNA, 16 nt, Human herpesvirus 1
ggagacauggcccccg

SEQ ID NO: 1755452 - RNA, 16 nt, Human herpesvirus 1
gugucagguggcccuu

SEQ ID NO: 1755453 - RNA, 20 nt, Human herpesvirus 1
cgggcgaaaaaaggcggugc

SEQ ID NO: 1755454 - RNA, 22 nt, Human herpesvirus 1
ggccacgcaaaaccaggccgac

SEQ ID NO: 1755455 - RNA, 18 nt, Human herpesvirus 1
cuggccgcucgguggcuc

SEQ ID NO: 1755456 - RNA, 12 nt, Human herpesvirus 1
ucugcgggccgc

SEQ ID NO: 1755457 - RNA, 14 nt, Human herpesvirus 1
ccgaagcccagcgu

SEQ ID NO: 1755458 - RNA, 12 nt, Human herpesvirus 1
gccaugcuggcg

SEQ ID NO: 1755459 - RNA, 14 nt, Human herpesvirus 1
uccgaaagccacca

SEQ ID NO: 1755460 - RNA, 19 nt, Human herpesvirus 1
uccccgcgccguuggcccc

SEQ ID NO: 1755461 - RNA, 22 nt, Human herpesvirus 1
acugccucccccgcccuggaca

SEQ ID NO: 1755462 - RNA, 17 nt, Human herpesvirus 1
aacugucuggagacccu

SEQ ID NO: 1755463 - RNA, 16 nt, Human herpesvirus 1
cucuuggaggaccccg

SEQ ID NO: 1755464 - RNA, 22 nt, Human herpesvirus 1
ucccggcccguaacgucgcggg

SEQ ID NO: 1755465 - RNA, 19 nt, Human herpesvirus 1
cuaacagucuuccgcugac

SEQ ID NO: 1755466 - RNA, 21 nt, Human herpesvirus 1
gcagccuucucccggugccuu

SEQ ID NO: 1755467 - RNA, 15 nt, Human herpesvirus 1
ccaggaucacaccgg

SEQ ID NO: 1755468 - RNA, 16 nt, Human herpesvirus 1
caagauggccgacccc

SEQ ID NO: 1755469 - RNA, 20 nt, Human herpesvirus 1
uccccaagcaucgaccacgc

SEQ ID NO: 1755470 - RNA, 16 nt, Human herpesvirus 1
gcgggacaucaaggcg

SEQ ID NO: 1755471 - RNA, 21 nt, Human herpesvirus 1
caucgaguauguacugcggcu

SEQ ID NO: 1755472 - RNA, 20 nt, Human herpesvirus 1
ggcggccaaguacgccgcca

SEQ ID NO: 1755473 - RNA, 21 nt, Human herpesvirus 1
ccgcaacgcgcuggggcugcc

SEQ ID NO: 1755474 - RNA, 13 nt, Human herpesvirus 1
gcgucugggccac

SEQ ID NO: 1755475 - RNA, 15 nt, Human herpesvirus 1
uggggagccucgauc

SEQ ID NO: 1755476 - RNA, 21 nt, Human herpesvirus 1
uggcacaaaaagaccccgauc

SEQ ID NO: 1755477 - RNA, 18 nt, Human herpesvirus 1
cgcccgauuuacagcccc

SEQ ID NO: 1755478 - RNA, 21 nt, Human herpesvirus 1
auauaguuugguccccccucu

SEQ ID NO: 1755479 - RNA, 15 nt, Human herpesvirus 1
ggggugggggugggc

SEQ ID NO: 1755480 - RNA, 20 nt, Human herpesvirus 1
agcguccgggcgcuuggcau

SEQ ID NO: 1755481 - RNA, 16 nt, Human herpesvirus 1
gcauccgagcaccccc

SEQ ID NO: 1755482 - RNA, 14 nt, Human herpesvirus 1
agacacgggcacca

SEQ ID NO: 1755483 - RNA, 13 nt, Human herpesvirus 1
gcggugguaucua

SEQ ID NO: 1755484 - RNA, 15 nt, Human herpesvirus 1
cugcuccgccuggcc

SEQ ID NO: 1755485 - RNA, 11 nt, Human herpesvirus 1
gaccaggcgcg

SEQ ID NO: 1755486 - RNA, 23 nt, Human herpesvirus 1
cucccaacccccuaagacccacc

SEQ ID NO: 1755487 - RNA, 16 nt, Human herpesvirus 1
ggcggcaggcgccagc

SEQ ID NO: 1755488 - RNA, 17 nt, Human herpesvirus 1
ccucucacacagcaucc

SEQ ID NO: 1755489 - RNA, 18 nt, Human herpesvirus 1
aggggaaaagugaaagac

SEQ ID NO: 1755490 - RNA, 21 nt, Human herpesvirus 1
ugaggacgucgagaaggacaa

SEQ ID NO: 1755491 - RNA, 16 nt, Human herpesvirus 1
gacgacacgcucgccg

SEQ ID NO: 1755492 - RNA, 17 nt, Human herpesvirus 1
guccacgguaggcccag

SEQ ID NO: 1755493 - RNA, 18 nt, Human herpesvirus 1
gacggacgugcgccugga

SEQ ID NO: 1755494 - RNA, 15 nt, Human herpesvirus 1
gaacaacaugggccu

SEQ ID NO: 1755495 - RNA, 17 nt, Human herpesvirus 1
guaggcuggucagcacg

SEQ ID NO: 1755496 - RNA, 12 nt, Human herpesvirus 1
cgucgggaggcc

SEQ ID NO: 1755497 - RNA, 13 nt, Human herpesvirus 1
ugggccagccgca

SEQ ID NO: 1755498 - RNA, 15 nt, Human herpesvirus 1
ccucgaccaccaccu

SEQ ID NO: 1755499 - RNA, 10 nt, Human herpesvirus 1
gaccuggggu

SEQ ID NO: 1755500 - RNA, 16 nt, Human herpesvirus 1
caggaucacaccgguc

SEQ ID NO: 1755501 - RNA, 17 nt, Human herpesvirus 1
gcguggaccugggggac

SEQ ID NO: 1755502 - RNA, 18 nt, Human herpesvirus 1
gagccccggaccccacgc

SEQ ID NO: 1755503 - RNA, 20 nt, Human herpesvirus 1
uccacgccgacgccaacgcc

SEQ ID NO: 1755504 - RNA, 20 nt, Human herpesvirus 1
cggcggcgaggccggcgccg

SEQ ID NO: 1755505 - RNA, 23 nt, Human herpesvirus 1
cccggagggcugccagaccucaa

SEQ ID NO: 1755506 - RNA, 16 nt, Human herpesvirus 1
ccguguucgagggcca

SEQ ID NO: 1755507 - RNA, 20 nt, Human herpesvirus 1
aaacucauuaaugggcggcc

SEQ ID NO: 1755508 - RNA, 17 nt, Human herpesvirus 1
ccucacccacgccggca

SEQ ID NO: 1755509 - RNA, 18 nt, Human herpesvirus 1
gugugggguccucaugga

SEQ ID NO: 1755510 - RNA, 21 nt, Human herpesvirus 1
gaaccuagggaacccagagua

SEQ ID NO: 1755511 - RNA, 19 nt, Human herpesvirus 1
aggauucggcccucuugga

SEQ ID NO: 1755512 - RNA, 17 nt, Human herpesvirus 1
cgagcugacccugugga

SEQ ID NO: 1755513 - RNA, 13 nt, Human herpesvirus 1
uggcgccccggcc

SEQ ID NO: 1755514 - RNA, 14 nt, Human herpesvirus 1
ccccgcucccucga

SEQ ID NO: 1755515 - RNA, 14 nt, Human herpesvirus 1
ccgcguacgaggac

SEQ ID NO: 1755516 - RNA, 13 nt, Human herpesvirus 1
guucggggccgcc

SEQ ID NO: 1755517 - RNA, 14 nt, Human herpesvirus 1
acgccgcugacccc

SEQ ID NO: 1755518 - RNA, 14 nt, Human herpesvirus 1
uccggaggcgccgc

SEQ ID NO: 1755519 - RNA, 23 nt, Human herpesvirus 1
ggcggacccccggaggcgccugc

SEQ ID NO: 1755520 - RNA, 22 nt, Human herpesvirus 1
cggcugguccacacccaguggc

SEQ ID NO: 1755521 - RNA, 16 nt, Human herpesvirus 1
cauggauaacaaccac

SEQ ID NO: 1755522 - RNA, 18 nt, Human herpesvirus 1
gccccuaaccaggccucc

SEQ ID NO: 1755523 - RNA, 12 nt, Human herpesvirus 1
aaccccaccccu

SEQ ID NO: 1755524 - RNA, 18 nt, Human herpesvirus 1
ccgcaacuucccacccgg

SEQ ID NO: 1755525 - RNA, 17 nt, Human herpesvirus 1
acgagcccccgccccuc

SEQ ID NO: 1755526 - RNA, 17 nt, Human herpesvirus 1
cggugcgucugggcccg

SEQ ID NO: 1755527 - RNA, 19 nt, Human herpesvirus 1
ccgcccggggccagcgcca

SEQ ID NO: 1755528 - RNA, 18 nt, Human herpesvirus 1
aggucuccgucaccgcga

SEQ ID NO: 1755529 - RNA, 23 nt, Human herpesvirus 1
gcgcaucuucggcgggugucugc

SEQ ID NO: 1755530 - RNA, 23 nt, Human herpesvirus 1
auggucggggcgucccuggauau

SEQ ID NO: 1755531 - RNA, 16 nt, Human herpesvirus 1
gccccgggacaccccc

SEQ ID NO: 1755532 - RNA, 16 nt, Human herpesvirus 1
cucuggacuggaccac

SEQ ID NO: 1755533 - RNA, 13 nt, Human herpesvirus 1
ccgacccuccggg

SEQ ID NO: 1755534 - RNA, 19 nt, Human herpesvirus 1
cccuguuggucggggagug

SEQ ID NO: 1755535 - RNA, 23 nt, Human herpesvirus 1
gggucagaacuacacggagggca

SEQ ID NO: 1755536 - RNA, 15 nt, Human herpesvirus 1
cgacaacgagccccc

SEQ ID NO: 1755537 - RNA, 15 nt, Human herpesvirus 1
cacgcaagaccaggc

SEQ ID NO: 1755538 - RNA, 19 nt, Human herpesvirus 1
gggccguuucccaccccca

SEQ ID NO: 1755539 - RNA, 17 nt, Human herpesvirus 1
cacgucgaccgcgcccu

SEQ ID NO: 1755540 - RNA, 19 nt, Human herpesvirus 1
ggucuccccgggagccccg

SEQ ID NO: 1755541 - RNA, 17 nt, Human herpesvirus 1
uugucgucucucuuccc

SEQ ID NO: 1755542 - RNA, 15 nt, Human herpesvirus 1
cggggggugggaccu

SEQ ID NO: 1755543 - RNA, 15 nt, Human herpesvirus 1
acgaugaccgccccc

SEQ ID NO: 1755544 - RNA, 14 nt, Human herpesvirus 1
cucucggugccccu

SEQ ID NO: 1755545 - RNA, 17 nt, Human herpesvirus 1
cgcugcgucggcauggu

SEQ ID NO: 1755546 - RNA, 19 nt, Human herpesvirus 1
ccacccuccgcuggggccc

SEQ ID NO: 1755547 - RNA, 16 nt, Human herpesvirus 1
gcccccgcuuccggau

SEQ ID NO: 1755548 - RNA, 22 nt, Human herpesvirus 1
caggacgccgcgacgccuuacc

SEQ ID NO: 1755549 - RNA, 20 nt, Human herpesvirus 1
aguccccgggcccagccuuc

SEQ ID NO: 1755550 - RNA, 21 nt, Human herpesvirus 1
agacacgggcaccacacacca

SEQ ID NO: 1755551 - RNA, 22 nt, Human herpesvirus 1
ccuucaucgaccucaacaucac

SEQ ID NO: 1755552 - RNA, 15 nt, Human herpesvirus 1
uggcuccuggccagg

SEQ ID NO: 1755553 - RNA, 23 nt, Human herpesvirus 1
ccaucgaguucgccaggcugcag

SEQ ID NO: 1755554 - RNA, 17 nt, Human herpesvirus 1
cgccccacacagcccuc

SEQ ID NO: 1755555 - RNA, 18 nt, Human herpesvirus 1
caccgccccccuguuccc

SEQ ID NO: 1755556 - RNA, 15 nt, Human herpesvirus 1
gcccggaggcgcccg

SEQ ID NO: 1755557 - RNA, 18 nt, Human herpesvirus 1
cggccaccucgcccaccc

SEQ ID NO: 1755558 - RNA, 17 nt, Human herpesvirus 1
ugagcgcccuccugacc

SEQ ID NO: 1755559 - RNA, 20 nt, Human herpesvirus 1
ggacgccauacacagccacc

SEQ ID NO: 1755560 - RNA, 17 nt, Human herpesvirus 1
cuccccgauggcccucc

SEQ ID NO: 1755561 - RNA, 16 nt, Human herpesvirus 1
cagacgagcgcgcuug

SEQ ID NO: 1755562 - RNA, 22 nt, Human herpesvirus 1
ucccgcagauuccauucggggu

SEQ ID NO: 1755563 - RNA, 21 nt, Human herpesvirus 1
ggaggggcuccuuagcgcggc

SEQ ID NO: 1755564 - RNA, 17 nt, Human herpesvirus 1
caggccgacugccagcu

SEQ ID NO: 1755565 - RNA, 13 nt, Human herpesvirus 1
cuguggcucuccu

SEQ ID NO: 1755566 - RNA, 16 nt, Human herpesvirus 1
cugaccccgcuccugu

SEQ ID NO: 1755567 - RNA, 14 nt, Human herpesvirus 1
cgccuugcggcagc

SEQ ID NO: 1755568 - RNA, 16 nt, Human herpesvirus 1
ccauaucgcuucccga

SEQ ID NO: 1755569 - RNA, 22 nt, Human herpesvirus 1
ccgccgcaaagccacccacgcc

SEQ ID NO: 1755570 - RNA, 13 nt, Human herpesvirus 1
ccauccgccggca

SEQ ID NO: 1755571 - RNA, 18 nt, Human herpesvirus 1
gcgacguccugggccacc

SEQ ID NO: 1755572 - RNA, 16 nt, Human herpesvirus 1
ugaccgacccuccggg

SEQ ID NO: 1755573 - RNA, 15 nt, Human herpesvirus 1
cucccucgaccacca

SEQ ID NO: 1755574 - RNA, 21 nt, Human herpesvirus 1
cagccaauccgugucggggag

SEQ ID NO: 1755575 - RNA, 19 nt, Human herpesvirus 1
gcgggguuauaggccacgc

SEQ ID NO: 1755576 - RNA, 22 nt, Human herpesvirus 1
ccugccccgccacccaguuucc

SEQ ID NO: 1755577 - RNA, 12 nt, Human herpesvirus 1
ccgcagucccug

SEQ ID NO: 1755578 - RNA, 16 nt, Human herpesvirus 1
gacagcaaccagaagc

SEQ ID NO: 1755579 - RNA, 18 nt, Human herpesvirus 1
ggccguuucuccgcccga

SEQ ID NO: 1755580 - RNA, 19 nt, Human herpesvirus 1
gugcgucgggccucccgga

SEQ ID NO: 1755581 - RNA, 12 nt, Human herpesvirus 1
cgcuuggagcca

SEQ ID NO: 1755582 - RNA, 13 nt, Human herpesvirus 1
ggagcaccacaua

SEQ ID NO: 1755583 - RNA, 23 nt, Human herpesvirus 1
cuggcguucgucgcccuccacca

SEQ ID NO: 1755584 - RNA, 16 nt, Human herpesvirus 1
cgggcaucucgcgccc

SEQ ID NO: 1755585 - RNA, 17 nt, Human herpesvirus 1
uccgggaccugaacccc

SEQ ID NO: 1755586 - RNA, 20 nt, Human herpesvirus 1
gcagugcauggcgcucaggg

SEQ ID NO: 1755587 - RNA, 16 nt, Human herpesvirus 1
cccugggcccuggccg

SEQ ID NO: 1755588 - RNA, 18 nt, Human herpesvirus 1
ccagacgacaucagcugu

SEQ ID NO: 1755589 - RNA, 14 nt, Human herpesvirus 1
ucagcgccaagguc

SEQ ID NO: 1755590 - RNA, 16 nt, Human herpesvirus 1
cgagcuaugggccucu

SEQ ID NO: 1755591 - RNA, 16 nt, Human herpesvirus 1
ucucccgaaccaggcc

SEQ ID NO: 1755592 - RNA, 23 nt, Human herpesvirus 1
cauacacgagcacccugcugccc

SEQ ID NO: 1755593 - RNA, 23 nt, Human herpesvirus 1
ccaggcggcguuaaccgcacccc

SEQ ID NO: 1755594 - RNA, 15 nt, Human herpesvirus 1
cguguuugcccauaa

SEQ ID NO: 1755595 - RNA, 22 nt, Human herpesvirus 1
cgaccaccauccccgcucccuc

SEQ ID NO: 1755596 - RNA, 18 nt, Human herpesvirus 1
cuccuggaacgaggccgc

SEQ ID NO: 1755597 - RNA, 21 nt, Human herpesvirus 1
gagccccucgcccguccucgc

SEQ ID NO: 1755598 - RNA, 14 nt, Human herpesvirus 1
cuggguucuccugg

SEQ ID NO: 1755599 - RNA, 22 nt, Human herpesvirus 1
acgggacacuuguccggagaac

SEQ ID NO: 1755600 - RNA, 14 nt, Human herpesvirus 1
cccggggcucagcc

SEQ ID NO: 1755601 - RNA, 16 nt, Human herpesvirus 1
ggcccggccaaccagc

SEQ ID NO: 1755602 - RNA, 18 nt, Human herpesvirus 1
ggggccuuggcggccgcc

SEQ ID NO: 1755603 - RNA, 13 nt, Human herpesvirus 1
ccccgggccaaua

SEQ ID NO: 1755604 - RNA, 22 nt, Human herpesvirus 1
aacagcucgcggaggagccagu

SEQ ID NO: 1755605 - RNA, 22 nt, Human herpesvirus 1
gcuccuacaacaagucucuggg

SEQ ID NO: 1755606 - RNA, 19 nt, Human herpesvirus 1
gcuaucuccugggggcacc

SEQ ID NO: 1755607 - RNA, 15 nt, Human herpesvirus 1
cgcgaccccauggcc

SEQ ID NO: 1755608 - RNA, 21 nt, Human herpesvirus 1
ucgaucguccaucaccacgcc

SEQ ID NO: 1755609 - RNA, 14 nt, Human herpesvirus 1
ccugggccccggga

SEQ ID NO: 1755610 - RNA, 12 nt, Human herpesvirus 1
ucgcgcuccucu

SEQ ID NO: 1755611 - RNA, 19 nt, Human herpesvirus 1
cgccggggaccgcagccug

SEQ ID NO: 1755612 - RNA, 11 nt, Human herpesvirus 1
gcccucucccc

SEQ ID NO: 1755613 - RNA, 19 nt, Human herpesvirus 1
aggagcucaagaaccccac

SEQ ID NO: 1755614 - RNA, 13 nt, Human herpesvirus 1
gccaccauccuca

SEQ ID NO: 1755615 - RNA, 19 nt, Human herpesvirus 1
uccggggggcuuccggccu

SEQ ID NO: 1755616 - RNA, 20 nt, Human herpesvirus 1
agcaaacgccccgcccacac

SEQ ID NO: 1755617 - RNA, 23 nt, Human herpesvirus 1
caucaaggcggagaacaccgaug

SEQ ID NO: 1755618 - RNA, 18 nt, Human herpesvirus 1
ggccaaccagcguccgcc

SEQ ID NO: 1755619 - RNA, 12 nt, Human herpesvirus 1
auaugccugugu

SEQ ID NO: 1755620 - RNA, 19 nt, Human herpesvirus 1
aguaugccccccuggcgag

SEQ ID NO: 1755621 - RNA, 23 nt, Human herpesvirus 1
acauggcccuggugucugccaug

SEQ ID NO: 1755622 - RNA, 23 nt, Human herpesvirus 1
ccacaugcggaaagcaagaacaa

SEQ ID NO: 1755623 - RNA, 21 nt, Human herpesvirus 1
gcccggguauaaauuccggaa

SEQ ID NO: 1755624 - RNA, 17 nt, Human herpesvirus 1
aagauggccgaccccaa

SEQ ID NO: 1755625 - RNA, 14 nt, Human herpesvirus 1
cuccggcgccgccc

SEQ ID NO: 1755626 - RNA, 19 nt, Human herpesvirus 1
accccggucucccagggag

SEQ ID NO: 1755627 - RNA, 20 nt, Human herpesvirus 1
gcuccugauguggcugcucc

SEQ ID NO: 1755628 - RNA, 17 nt, Human herpesvirus 1
ccauggagcgcacggaa

SEQ ID NO: 1755629 - RNA, 12 nt, Human herpesvirus 1
gggcggccccgg

SEQ ID NO: 1755630 - RNA, 13 nt, Human herpesvirus 1
augcggaaagcaa

SEQ ID NO: 1755631 - RNA, 16 nt, Human herpesvirus 1
cguucgcgcgccaucu

SEQ ID NO: 1755632 - RNA, 16 nt, Human herpesvirus 1
ugggcauccagggaga

SEQ ID NO: 1755633 - RNA, 21 nt, Human herpesvirus 1
cgggaggccgcaucgaacgca

SEQ ID NO: 1755634 - RNA, 23 nt, Human herpesvirus 1
uaucuccugggggcacccacgcc

SEQ ID NO: 1755635 - RNA, 19 nt, Human herpesvirus 1
cgggccgcccacuucccgg

SEQ ID NO: 1755636 - RNA, 22 nt, Human herpesvirus 1
acuggugccggucgugagagaa

SEQ ID NO: 1755637 - RNA, 13 nt, Human herpesvirus 1
cccguggacccca

SEQ ID NO: 1755638 - RNA, 18 nt, Human herpesvirus 1
uggcgcggugccugacgc

SEQ ID NO: 1755639 - RNA, 19 nt, Human herpesvirus 1
ccauggacagcgaccuggg

SEQ ID NO: 1755640 - RNA, 16 nt, Human herpesvirus 1
acucucccccaccgcc

SEQ ID NO: 1755641 - RNA, 14 nt, Human herpesvirus 1
ggaccagguccccc

SEQ ID NO: 1755642 - RNA, 18 nt, Human herpesvirus 1
ccgacgaacgcggacccc

SEQ ID NO: 1755643 - RNA, 15 nt, Human herpesvirus 1
ccagcuuuccgcuga

SEQ ID NO: 1755644 - RNA, 22 nt, Human herpesvirus 1
gcccagcgcagaggcggccaga

SEQ ID NO: 1755645 - RNA, 21 nt, Human herpesvirus 1
ggagcaaaacgccucccccug

SEQ ID NO: 1755646 - RNA, 14 nt, Human herpesvirus 1
cagcgggcgcggcg

SEQ ID NO: 1755647 - RNA, 16 nt, Human herpesvirus 1
cgacagaccuccccgc

SEQ ID NO: 1755648 - RNA, 12 nt, Human herpesvirus 1
cgcugugccauc

SEQ ID NO: 1755649 - RNA, 19 nt, Human herpesvirus 1
cagcguauccacccccgcc

SEQ ID NO: 1755650 - RNA, 15 nt, Human herpesvirus 1
auuccaaagugcccc

SEQ ID NO: 1755651 - RNA, 16 nt, Human herpesvirus 1
gccgccccagcaccga

SEQ ID NO: 1755652 - RNA, 21 nt, Human herpesvirus 1
cuggaucccaacgaccccgcc

SEQ ID NO: 1755653 - RNA, 16 nt, Human herpesvirus 1
gucccugggcccuggc

SEQ ID NO: 1755654 - RNA, 23 nt, Human herpesvirus 1
agcauacgcucgggcccgcgucg

SEQ ID NO: 1755655 - RNA, 21 nt, Human herpesvirus 1
gccccccguguuuguggggag

SEQ ID NO: 1755656 - RNA, 20 nt, Human herpesvirus 1
accaacacaacggcaugccu

SEQ ID NO: 1755657 - RNA, 20 nt, Human herpesvirus 1
ccccggaggcgccugccccg

SEQ ID NO: 1755658 - RNA, 14 nt, Human herpesvirus 1
guuugcgggccugg

SEQ ID NO: 1755659 - RNA, 20 nt, Human herpesvirus 1
cgaggcccgcaagcugaacc

SEQ ID NO: 1755660 - RNA, 23 nt, Human herpesvirus 1
ugccacgcgagcgacccgcgacu

SEQ ID NO: 1755661 - RNA, 13 nt, Human herpesvirus 1
gguuaauguaaau

SEQ ID NO: 1755662 - RNA, 14 nt, Human herpesvirus 1
cgacggcccgacca

SEQ ID NO: 1755663 - RNA, 13 nt, Human herpesvirus 1
guucaaccccagg

SEQ ID NO: 1755664 - RNA, 16 nt, Human herpesvirus 1
agcccccaaaccccac

SEQ ID NO: 1755665 - RNA, 18 nt, Human herpesvirus 1
agagucggagcccgcugg

SEQ ID NO: 1755666 - RNA, 18 nt, Human herpesvirus 1
accccgcaauuugcaccc

SEQ ID NO: 1755667 - RNA, 14 nt, Human herpesvirus 1
ggcccugcuccggc

SEQ ID NO: 1755668 - RNA, 23 nt, Human herpesvirus 1
gcugccccgcuucauccccgaga

SEQ ID NO: 1755669 - RNA, 16 nt, Human herpesvirus 1
ggcccgcaagcugaac

SEQ ID NO: 1755670 - RNA, 20 nt, Human herpesvirus 1
gcccgauuuacagcccccag

SEQ ID NO: 1755671 - RNA, 21 nt, Human herpesvirus 1
cccgagaaccuagggaaccca

SEQ ID NO: 1755672 - RNA, 18 nt, Human herpesvirus 1
auccccaacgcgcugccc

SEQ ID NO: 1755673 - RNA, 13 nt, Human herpesvirus 1
caccgcucccccc

SEQ ID NO: 1755674 - RNA, 12 nt, Human herpesvirus 1
ucgccgcuccgu

SEQ ID NO: 1755675 - RNA, 16 nt, Human herpesvirus 1
ccggcccuaaccccac

SEQ ID NO: 1755676 - RNA, 21 nt, Human herpesvirus 1
cgcggcccuuaaugggcaacc

SEQ ID NO: 1755677 - RNA, 15 nt, Human herpesvirus 1
gcccaccccccacgg

SEQ ID NO: 1755678 - RNA, 21 nt, Human herpesvirus 1
ggcgucuccucugggggcgac

SEQ ID NO: 1755679 - RNA, 17 nt, Human herpesvirus 1
uccauaccgaccacacc

SEQ ID NO: 1755680 - RNA, 23 nt, Human herpesvirus 1
uccccgcgaagacccccccggag

SEQ ID NO: 1755681 - RNA, 21 nt, Human herpesvirus 1
aguugggccgggcgacccaga

SEQ ID NO: 1755682 - RNA, 13 nt, Human herpesvirus 1
aagugaaagacac

SEQ ID NO: 1755683 - RNA, 21 nt, Human herpesvirus 1
caacgucuccuccaccaccca

SEQ ID NO: 1755684 - RNA, 14 nt, Human herpesvirus 1
accccaacgccucc

SEQ ID NO: 1755685 - RNA, 13 nt, Human herpesvirus 1
gcgaggugcgcca

SEQ ID NO: 1755686 - RNA, 20 nt, Human herpesvirus 1
ggccaaccagcguccgccga

SEQ ID NO: 1755687 - RNA, 12 nt, Human herpesvirus 1
cccacacgcacu

SEQ ID NO: 1755688 - RNA, 20 nt, Human herpesvirus 1
gcgaccgucgccgcgggcca

SEQ ID NO: 1755689 - RNA, 12 nt, Human herpesvirus 1
uacggcggcucc

SEQ ID NO: 1755690 - RNA, 23 nt, Human herpesvirus 1
gaccugcaccgaucgcagcgucc

SEQ ID NO: 1755691 - RNA, 23 nt, Human herpesvirus 1
cccagccuucacgugcugcugcg

SEQ ID NO: 1755692 - RNA, 17 nt, Human herpesvirus 1
ucccacggccucgccag

SEQ ID NO: 1755693 - RNA, 19 nt, Human herpesvirus 1
aaucaccggugcgcccccc

SEQ ID NO: 1755694 - RNA, 17 nt, Human herpesvirus 1
ccgagcuaugggccucu

SEQ ID NO: 1755695 - RNA, 14 nt, Human herpesvirus 1
ugcuccgccuggcc

SEQ ID NO: 1755696 - RNA, 17 nt, Human herpesvirus 1
accucggacgccacacc

SEQ ID NO: 1755697 - RNA, 21 nt, Human herpesvirus 1
accugcucacgacccccaagu

SEQ ID NO: 1755698 - RNA, 16 nt, Human herpesvirus 1
ccuggucagaggccca

SEQ ID NO: 1755699 - RNA, 19 nt, Human herpesvirus 1
gacccgacaggcgaccgcc

SEQ ID NO: 1755700 - RNA, 14 nt, Human herpesvirus 1
cgggagcgccagga

SEQ ID NO: 1755701 - RNA, 17 nt, Human herpesvirus 1
cgccuaccggccccugg

SEQ ID NO: 1755702 - RNA, 20 nt, Human herpesvirus 1
ucaaccccagggaccuccug

SEQ ID NO: 1755703 - RNA, 22 nt, Human herpesvirus 1
gcuucauccccgagaaccagcg

SEQ ID NO: 1755704 - RNA, 14 nt, Human herpesvirus 1
uggguggucucugg

SEQ ID NO: 1755705 - RNA, 16 nt, Human herpesvirus 1
uacugcggucugucuc

SEQ ID NO: 1755706 - RNA, 15 nt, Human herpesvirus 1
cgcccccagcugggc

SEQ ID NO: 1755707 - RNA, 13 nt, Human herpesvirus 1
gcguggaccuggg

SEQ ID NO: 1755708 - RNA, 17 nt, Human herpesvirus 1
gugcucgugggccucug

SEQ ID NO: 1755709 - RNA, 19 nt, Human herpesvirus 1
ggucucccagggagccccg

SEQ ID NO: 1755710 - RNA, 21 nt, Human herpesvirus 1
ccgccgcggaucgggccuugg

SEQ ID NO: 1755711 - RNA, 22 nt, Human herpesvirus 1
cccaggcggcguuaaccgcacc

SEQ ID NO: 1755712 - RNA, 15 nt, Human herpesvirus 1
cgguugguccagacg

SEQ ID NO: 1755713 - RNA, 20 nt, Human herpesvirus 1
ccgucccguagucccauccc

SEQ ID NO: 1755714 - RNA, 14 nt, Human herpesvirus 1
ccgacaccaccagc

SEQ ID NO: 1755715 - RNA, 23 nt, Human herpesvirus 1
gacggcccgaccaacgucgccgc

SEQ ID NO: 1755716 - RNA, 16 nt, Human herpesvirus 1
acaugcggaaagcaag

SEQ ID NO: 1755717 - RNA, 20 nt, Human herpesvirus 1
gaacccgcgcuaugacggca

SEQ ID NO: 1755718 - RNA, 20 nt, Human herpesvirus 1
gccgggccgcccacuucccg

SEQ ID NO: 1755719 - RNA, 17 nt, Human herpesvirus 1
cccggaccccacgcacc

SEQ ID NO: 1755720 - RNA, 17 nt, Human herpesvirus 1
ggagagccggccccggc

SEQ ID NO: 1755721 - RNA, 20 nt, Human herpesvirus 1
uggccgacaacugccugacc

SEQ ID NO: 1755722 - RNA, 14 nt, Human herpesvirus 1
ccccaccccugugc

SEQ ID NO: 1755723 - RNA, 14 nt, Human herpesvirus 1
gaaucccccaaggg

SEQ ID NO: 1755724 - RNA, 20 nt, Human herpesvirus 1
gcccacuacaccagccaauc

SEQ ID NO: 1755725 - RNA, 20 nt, Human herpesvirus 1
cacgggcaccacacaccagc

SEQ ID NO: 1755726 - RNA, 12 nt, Human herpesvirus 1
gaccgcagccug

SEQ ID NO: 1755727 - RNA, 17 nt, Human herpesvirus 1
ucuccucuucuccccuu

SEQ ID NO: 1755728 - RNA, 23 nt, Human herpesvirus 1
gcccgggcaaguaugccccccug

SEQ ID NO: 1755729 - RNA, 23 nt, Human herpesvirus 1
ucgccgcccugagcgcccuccug

SEQ ID NO: 1755730 - RNA, 24 nt, Human herpesvirus 1
aaucauaaccacgcccagcgcaga

SEQ ID NO: 1755731 - RNA, 18 nt, Human herpesvirus 1
ggccgccgacgaccuggu

SEQ ID NO: 1755732 - RNA, 14 nt, Human herpesvirus 1
ggcguccuggaugc

SEQ ID NO: 1755733 - RNA, 12 nt, Human herpesvirus 1
ucuccgccucuc

SEQ ID NO: 1755734 - RNA, 14 nt, Human herpesvirus 1
ggacagccaggagc

SEQ ID NO: 1755735 - RNA, 13 nt, Human herpesvirus 1
ccgacgaggugcg

SEQ ID NO: 1755736 - RNA, 22 nt, Human herpesvirus 1
cgccuuuuuggguccgggcccg

SEQ ID NO: 1755737 - RNA, 14 nt, Human herpesvirus 1
gugucaauggacgc

SEQ ID NO: 1755738 - RNA, 14 nt, Human herpesvirus 1
cgcggcccggggcc

SEQ ID NO: 1755739 - RNA, 15 nt, Human herpesvirus 1
aaccccccccaaaaa

SEQ ID NO: 1755740 - RNA, 18 nt, Human herpesvirus 1
gugagcgcgcggaugcuc

SEQ ID NO: 1755741 - RNA, 17 nt, Human herpesvirus 1
ucggccgucccggggca

SEQ ID NO: 1755742 - RNA, 23 nt, Human herpesvirus 1
gcuuccggccugggggccguccu

SEQ ID NO: 1755743 - RNA, 22 nt, Human herpesvirus 1
cgaggacaccccucguggcccc

SEQ ID NO: 1755744 - RNA, 21 nt, Human herpesvirus 1
ccaacgucuccuccaccaccc

SEQ ID NO: 1755745 - RNA, 16 nt, Human herpesvirus 1
ggccgccgacgaccug

SEQ ID NO: 1755746 - RNA, 17 nt, Human herpesvirus 1
aaaguuguuagcccugc

SEQ ID NO: 1755747 - RNA, 22 nt, Human herpesvirus 1
accaucccggguuaauguaaau

SEQ ID NO: 1755748 - RNA, 12 nt, Human herpesvirus 1
ucauccacgccg

SEQ ID NO: 1755749 - RNA, 23 nt, Human herpesvirus 1
gcauucgggccugccugcggcuc

SEQ ID NO: 1755750 - RNA, 16 nt, Human herpesvirus 1
cuguggcagaccggca

SEQ ID NO: 1755751 - RNA, 17 nt, Human herpesvirus 1
agaccaggccuggucag

SEQ ID NO: 1755752 - RNA, 16 nt, Human herpesvirus 1
ccaaugcccucccuga

SEQ ID NO: 1755753 - RNA, 15 nt, Human herpesvirus 1
ucgucucucuucccc

SEQ ID NO: 1755754 - RNA, 18 nt, Human herpesvirus 1
cccuauuuucccccccgg

SEQ ID NO: 1755755 - RNA, 21 nt, Human herpesvirus 1
gcucgucagggccggcggcgc

SEQ ID NO: 1755756 - RNA, 22 nt, Human herpesvirus 1
cacguugggguuguugcuggcg

SEQ ID NO: 1755757 - RNA, 20 nt, Human herpesvirus 1
cucgucuccucuucuccccu

SEQ ID NO: 1755758 - RNA, 17 nt, Human herpesvirus 1
aagccuacuacucggaa

SEQ ID NO: 1755759 - RNA, 21 nt, Human herpesvirus 1
aaggcgcugcgguugcccccg

SEQ ID NO: 1755760 - RNA, 22 nt, Human herpesvirus 1
gccccgaugcggcggcgcugca

SEQ ID NO: 1755761 - RNA, 17 nt, Human herpesvirus 1
ccccuaagacccacccc

SEQ ID NO: 1755762 - RNA, 23 nt, Human herpesvirus 1
cggcgguaaucauaaccacgccc

SEQ ID NO: 1755763 - RNA, 14 nt, Human herpesvirus 1
cucuucgcuuuccu

SEQ ID NO: 1755764 - RNA, 21 nt, Human herpesvirus 1
ggucagcgacguccugggcca

SEQ ID NO: 1755765 - RNA, 17 nt, Human herpesvirus 1
cccaacuccagaccacc

SEQ ID NO: 1755766 - RNA, 18 nt, Human herpesvirus 1
cccaggaucacaccgguc

SEQ ID NO: 1755767 - RNA, 22 nt, Human herpesvirus 1
gccucccaacccccuaagaccc

SEQ ID NO: 1755768 - RNA, 22 nt, Human herpesvirus 1
uggccggggagggcagggccgc

SEQ ID NO: 1755769 - RNA, 13 nt, Human herpesvirus 1
caaucggcggccg

SEQ ID NO: 1755770 - RNA, 13 nt, Human herpesvirus 1
caacagggguuca

SEQ ID NO: 1755771 - RNA, 20 nt, Human herpesvirus 1
aaaacagcgacgacgucugu

SEQ ID NO: 1755772 - RNA, 24 nt, Human herpesvirus 1
uaugguacacacgggugcgucugg

SEQ ID NO: 1755773 - RNA, 15 nt, Human herpesvirus 1
gaccaccauccccgc

SEQ ID NO: 1755774 - RNA, 20 nt, Human herpesvirus 1
cccgcauaucccacccugga

SEQ ID NO: 1755775 - RNA, 14 nt, Human herpesvirus 1
ggcagcccggaggc

SEQ ID NO: 1755776 - RNA, 16 nt, Human herpesvirus 1
gcgacguccugggcca

SEQ ID NO: 1755777 - RNA, 14 nt, Human herpesvirus 1
cuccagccuccccu

SEQ ID NO: 1755778 - RNA, 15 nt, Human herpesvirus 1
cgcccggcggaccca

SEQ ID NO: 1755779 - RNA, 15 nt, Human herpesvirus 1
gucgcgccugggugc

SEQ ID NO: 1755780 - RNA, 23 nt, Human herpesvirus 1
gcgacccguaaaugguugcagug

SEQ ID NO: 1755781 - RNA, 23 nt, Human herpesvirus 1
cccucucuucucucccgggccgc

SEQ ID NO: 1755782 - RNA, 16 nt, Human herpesvirus 1
ggcgguaacaggcgcg

SEQ ID NO: 1755783 - RNA, 18 nt, Human herpesvirus 1
gaccgcaacuucccaccc

SEQ ID NO: 1755784 - RNA, 19 nt, Human herpesvirus 1
gacacuggguucuccugga

SEQ ID NO: 1755785 - RNA, 22 nt, Human herpesvirus 1
ggcugccaaacagcuggccgcc

SEQ ID NO: 1755786 - RNA, 12 nt, Human herpesvirus 1
gcaagcugaacc

SEQ ID NO: 1755787 - RNA, 16 nt, Human herpesvirus 1
ccggggcuggcacacc

SEQ ID NO: 1755788 - RNA, 14 nt, Human herpesvirus 1
ccgcagcaccucua

SEQ ID NO: 1755789 - RNA, 20 nt, Human herpesvirus 1
ccucacagggcgggccgccu

SEQ ID NO: 1755790 - RNA, 20 nt, Human herpesvirus 1
ccaucugggauggcuccugg

SEQ ID NO: 1755791 - RNA, 18 nt, Human herpesvirus 1
accggcgcuacuucaccu

SEQ ID NO: 1755792 - RNA, 15 nt, Human herpesvirus 1
cggggcggggacggg

SEQ ID NO: 1755793 - RNA, 14 nt, Human herpesvirus 1
gccccagaaacccc

SEQ ID NO: 1755794 - RNA, 15 nt, Human herpesvirus 1
aauuugcacccagcc

SEQ ID NO: 1755795 - RNA, 20 nt, Human herpesvirus 1
cauacuccggccgcgguaca

SEQ ID NO: 1755796 - RNA, 14 nt, Human herpesvirus 1
cuaaucccccggcu

SEQ ID NO: 1755797 - RNA, 12 nt, Human herpesvirus 1
gcacgcgccgcc

SEQ ID NO: 1755798 - RNA, 23 nt, Human herpesvirus 1
uuggccgucccguuaccaagacc

SEQ ID NO: 1755799 - RNA, 23 nt, Human herpesvirus 1
ggccaauaucgcuagagacagcc

SEQ ID NO: 1755800 - RNA, 16 nt, Human herpesvirus 1
ccaacaauccccagga

SEQ ID NO: 1755801 - RNA, 14 nt, Human herpesvirus 1
cggccagccgcgcg

SEQ ID NO: 1755802 - RNA, 16 nt, Human herpesvirus 1
ccuucgcaacaccucc

SEQ ID NO: 1755803 - RNA, 19 nt, Human herpesvirus 1
gcccccuuuguccccgccg

SEQ ID NO: 1755804 - RNA, 23 nt, Human herpesvirus 1
ccuguugguauagguccacggcc

SEQ ID NO: 1755805 - RNA, 18 nt, Human herpesvirus 1
uccguccccugccccccc

SEQ ID NO: 1755806 - RNA, 21 nt, Human herpesvirus 1
guccacggccacuggccggga

SEQ ID NO: 1755807 - RNA, 22 nt, Human herpesvirus 1
gcguacaacggcucggccuaug

SEQ ID NO: 1755808 - RNA, 20 nt, Human herpesvirus 1
auccacgguggagguucugu

SEQ ID NO: 1755809 - RNA, 13 nt, Human herpesvirus 1
ugggccgggccgc

SEQ ID NO: 1755810 - RNA, 16 nt, Human herpesvirus 1
ccugacgcgccuagcc

SEQ ID NO: 1755811 - RNA, 19 nt, Human herpesvirus 1
cgcgccaagguggacuggu

SEQ ID NO: 1755812 - RNA, 22 nt, Human herpesvirus 1
ggucgucccucgcaugaagccc

SEQ ID NO: 1755813 - RNA, 12 nt, Human herpesvirus 1
ggccgucgggca

SEQ ID NO: 1755814 - RNA, 20 nt, Human herpesvirus 1
caaccgcgacccuccgggau

SEQ ID NO: 1755815 - RNA, 15 nt, Human herpesvirus 1
cgggggauggggaga

SEQ ID NO: 1755816 - RNA, 18 nt, Human herpesvirus 1
cccgcagucccgggggcu

SEQ ID NO: 1755817 - RNA, 20 nt, Human herpesvirus 1
gcauacgccucccccacauc

SEQ ID NO: 1755818 - RNA, 16 nt, Human herpesvirus 1
uggcuccuggccagga

SEQ ID NO: 1755819 - RNA, 23 nt, Human herpesvirus 1
gcagcguccgguuggccgcgcgg

SEQ ID NO: 1755820 - RNA, 17 nt, Human herpesvirus 1
gcggggacucgggcgag

SEQ ID NO: 1755821 - RNA, 20 nt, Human herpesvirus 1
gcgcccgucggucugcacca

SEQ ID NO: 1755822 - RNA, 12 nt, Human herpesvirus 1
ugggggacgagg

SEQ ID NO: 1755823 - RNA, 19 nt, Human herpesvirus 1
ccuccaccacccaacccca

SEQ ID NO: 1755824 - RNA, 17 nt, Human herpesvirus 1
ccagucccggcccggcg

SEQ ID NO: 1755825 - RNA, 16 nt, Human herpesvirus 1
gcccgaccacacaccc

SEQ ID NO: 1755826 - RNA, 21 nt, Human herpesvirus 1
aguuuguguuggcgacuggcg

SEQ ID NO: 1755827 - RNA, 15 nt, Human herpesvirus 1
ggucagaggcccacg

SEQ ID NO: 1755828 - RNA, 15 nt, Human herpesvirus 1
gcacgagccggggcu

SEQ ID NO: 1755829 - RNA, 23 nt, Human herpesvirus 1
gggucuguuggggacacuggguu

SEQ ID NO: 1755830 - RNA, 21 nt, Human herpesvirus 1
gcgccuagccaaccuguggca

SEQ ID NO: 1755831 - RNA, 23 nt, Human herpesvirus 1
cgcauccgucgggaggccacaga

SEQ ID NO: 1755832 - RNA, 22 nt, Human herpesvirus 1
uccggucgccccgacccccuug

SEQ ID NO: 1755833 - RNA, 21 nt, Human herpesvirus 1
agacgagcgcgcuuguccccg

SEQ ID NO: 1755834 - RNA, 13 nt, Human herpesvirus 1
gccagcuaugggc

SEQ ID NO: 1755835 - RNA, 14 nt, Human herpesvirus 1
gcaugcaccccaga

SEQ ID NO: 1755836 - RNA, 13 nt, Human herpesvirus 1
cccucgucccccu

SEQ ID NO: 1755837 - RNA, 17 nt, Human herpesvirus 1
gguccgcggggccuccc

SEQ ID NO: 1755838 - RNA, 12 nt, Human herpesvirus 1
ucugugggccaa

SEQ ID NO: 1755839 - RNA, 14 nt, Human herpesvirus 1
ggcccggaggaggc

SEQ ID NO: 1755840 - RNA, 20 nt, Human herpesvirus 1
gugcccacgucgccccgccg

SEQ ID NO: 1755841 - RNA, 24 nt, Human herpesvirus 1
cccggacgacauggccagcggccc

SEQ ID NO: 1755842 - RNA, 17 nt, Human herpesvirus 1
cguggaccugggggacu

SEQ ID NO: 1755843 - RNA, 22 nt, Human herpesvirus 1
accgcguguuccccgggagccc

SEQ ID NO: 1755844 - RNA, 21 nt, Human herpesvirus 1
gccgucgcuccacuacgaguc

SEQ ID NO: 1755845 - RNA, 15 nt, Human herpesvirus 1
gccccccccacccca

SEQ ID NO: 1755846 - RNA, 19 nt, Human herpesvirus 1
uggaucuuagccuccccgg

SEQ ID NO: 1755847 - RNA, 19 nt, Human herpesvirus 1
ccgaggcgauuagccagca

SEQ ID NO: 1755848 - RNA, 19 nt, Human herpesvirus 1
uccggccucgaugacgucc

SEQ ID NO: 1755849 - RNA, 18 nt, Human herpesvirus 1
cccccaucuuguccccaa

SEQ ID NO: 1755850 - RNA, 16 nt, Human herpesvirus 1
uguggggacccggccc

SEQ ID NO: 1755851 - RNA, 13 nt, Human herpesvirus 1
aaccgguauuauu

SEQ ID NO: 1755852 - RNA, 21 nt, Human herpesvirus 1
ucuggguuuuccccucccguc

SEQ ID NO: 1755853 - RNA, 15 nt, Human herpesvirus 1
cgcguccacccggag

SEQ ID NO: 1755854 - RNA, 16 nt, Human herpesvirus 1
gcauacgcucgggccc

SEQ ID NO: 1755855 - RNA, 20 nt, Human herpesvirus 1
uuguacccuuaauaaauuuu

SEQ ID NO: 1755856 - RNA, 18 nt, Human herpesvirus 1
ggggaaaagugaaagaca

SEQ ID NO: 1755857 - RNA, 12 nt, Human herpesvirus 1
agauagagcugc

SEQ ID NO: 1755858 - RNA, 19 nt, Human herpesvirus 1
cccgcaucccccgucuggg

SEQ ID NO: 1755859 - RNA, 17 nt, Human herpesvirus 1
gcaauuugcacccagcc

SEQ ID NO: 1755860 - RNA, 18 nt, Human herpesvirus 1
gcucaaccaccgcucccc

SEQ ID NO: 1755861 - RNA, 22 nt, Human herpesvirus 1
uuggccggggagggcagggccg

SEQ ID NO: 1755862 - RNA, 21 nt, Human herpesvirus 1
cacccucucuucccucagguc

SEQ ID NO: 1755863 - RNA, 20 nt, Human herpesvirus 1
ggcggucagcgacguccugg

SEQ ID NO: 1755864 - RNA, 16 nt, Human herpesvirus 1
cacaccgguccccgga

SEQ ID NO: 1755865 - RNA, 14 nt, Human herpesvirus 1
ugacccucuccggg

SEQ ID NO: 1755866 - RNA, 19 nt, Human herpesvirus 1
ucugcuacgccgcugaccc

SEQ ID NO: 1755867 - RNA, 14 nt, Human herpesvirus 1
gaacgggggcccug

SEQ ID NO: 1755868 - RNA, 21 nt, Human herpesvirus 1
cgcggcugccaaacagcuggc

SEQ ID NO: 1755869 - RNA, 14 nt, Human herpesvirus 1
ugcccccggagcug

SEQ ID NO: 1755870 - RNA, 14 nt, Human herpesvirus 1
ugcgauucuagccu

SEQ ID NO: 1755871 - RNA, 14 nt, Human herpesvirus 1
ccgcccaacucucg

SEQ ID NO: 1755872 - RNA, 14 nt, Human herpesvirus 1
ugggcggccccggc

SEQ ID NO: 1755873 - RNA, 16 nt, Human herpesvirus 1
cgccacgcgcggcugg

SEQ ID NO: 1755874 - RNA, 17 nt, Human herpesvirus 1
gccccgcgucuggcccc

SEQ ID NO: 1755875 - RNA, 12 nt, Human herpesvirus 1
aggagcgccggc

SEQ ID NO: 1755876 - RNA, 18 nt, Human herpesvirus 1
cccgagaccagucgcccg

SEQ ID NO: 1755877 - RNA, 16 nt, Human herpesvirus 1
aacgcagccccgcugg

SEQ ID NO: 1755878 - RNA, 16 nt, Human herpesvirus 1
gcaccucgaggacacc

SEQ ID NO: 1755879 - RNA, 23 nt, Human herpesvirus 1
gaaacuguccugucuuggggccc

SEQ ID NO: 1755880 - RNA, 12 nt, Human herpesvirus 1
accugcaccacc

SEQ ID NO: 1755881 - RNA, 17 nt, Human herpesvirus 1
aaucuggcccaacagcc

SEQ ID NO: 1755882 - RNA, 12 nt, Human herpesvirus 1
gccaaauuuaug

SEQ ID NO: 1755883 - RNA, 16 nt, Human herpesvirus 1
cggccacuggccggga

SEQ ID NO: 1755884 - RNA, 15 nt, Human herpesvirus 1
ggcggugcuccgccg

SEQ ID NO: 1755885 - RNA, 17 nt, Human herpesvirus 1
acgcgccggccgcaccc

SEQ ID NO: 1755886 - RNA, 15 nt, Human herpesvirus 1
gcgcuggggcugccg

SEQ ID NO: 1755887 - RNA, 17 nt, Human herpesvirus 1
ugggcacuuuccccaug

SEQ ID NO: 1755888 - RNA, 16 nt, Human herpesvirus 1
ccccggagggcugcca

SEQ ID NO: 1755889 - RNA, 15 nt, Human herpesvirus 1
gacguccugggccac

SEQ ID NO: 1755890 - RNA, 21 nt, Human herpesvirus 1
gaucaugguacggggccggga

SEQ ID NO: 1755891 - RNA, 20 nt, Human herpesvirus 1
cccucgaccaccaccuccac

SEQ ID NO: 1755892 - RNA, 15 nt, Human herpesvirus 1
accuuggcccuggcu

SEQ ID NO: 1755893 - RNA, 15 nt, Human herpesvirus 1
gggggcauuucagug

SEQ ID NO: 1755894 - RNA, 14 nt, Human herpesvirus 1
uccgaacccaggcc

SEQ ID NO: 1755895 - RNA, 12 nt, Human herpesvirus 1
ggaaagcaagaa

SEQ ID NO: 1755896 - RNA, 16 nt, Human herpesvirus 1
cgccguuggcccccgc

SEQ ID NO: 1755897 - RNA, 15 nt, Human herpesvirus 1
ggagcucccgggagc

SEQ ID NO: 1755898 - RNA, 19 nt, Human herpesvirus 1
ggccggggagggcagggcc

SEQ ID NO: 1755899 - RNA, 15 nt, Human herpesvirus 1
guccccuucgaggag

SEQ ID NO: 1755900 - RNA, 21 nt, Human herpesvirus 1
gccgccagcgcggcggggccc

SEQ ID NO: 1755901 - RNA, 14 nt, Human herpesvirus 1
cccgagaccagucg

SEQ ID NO: 1755902 - RNA, 17 nt, Human herpesvirus 1
cgcgcggacgacggcgg

SEQ ID NO: 1755903 - RNA, 13 nt, Human herpesvirus 1
aagcaagaacaau

SEQ ID NO: 1755904 - RNA, 18 nt, Human herpesvirus 1
ugaagaucgccggguggc

SEQ ID NO: 1755905 - RNA, 17 nt, Human herpesvirus 1
cugucgcacccacagcu

SEQ ID NO: 1755906 - RNA, 16 nt, Human herpesvirus 1
gcccauaucugcuacg

SEQ ID NO: 1755907 - RNA, 18 nt, Human herpesvirus 1
gcgccaucuggaccgggg

SEQ ID NO: 1755908 - RNA, 20 nt, Human herpesvirus 1
accacgccccuuucccccug

SEQ ID NO: 1755909 - RNA, 20 nt, Human herpesvirus 1
acgcugcuccgccuggccug

SEQ ID NO: 1755910 - RNA, 14 nt, Human herpesvirus 1
guucguuccgggca

SEQ ID NO: 1755911 - RNA, 16 nt, Human herpesvirus 1
cggcgcgacaacgagc

SEQ ID NO: 1755912 - RNA, 18 nt, Human herpesvirus 1
cguggugcgucgggccuc

SEQ ID NO: 1755913 - RNA, 20 nt, Human herpesvirus 1
gcgugcccacgucgccccgc

SEQ ID NO: 1755914 - RNA, 15 nt, Human herpesvirus 1
cccaacccacacgca

SEQ ID NO: 1755915 - RNA, 22 nt, Human herpesvirus 1
cuuccguccccugcccccccca

SEQ ID NO: 1755916 - RNA, 16 nt, Human herpesvirus 1
cagggccucgcugacc

SEQ ID NO: 1755917 - RNA, 22 nt, Human herpesvirus 1
ggcguugggguggaucuuagcc

SEQ ID NO: 1755918 - RNA, 12 nt, Human herpesvirus 1
gcauccagggag

SEQ ID NO: 1755919 - RNA, 15 nt, Human herpesvirus 1
uaaagccacugaaac

SEQ ID NO: 1755920 - RNA, 17 nt, Human herpesvirus 1
guggccgggcguugggg

SEQ ID NO: 1755921 - RNA, 20 nt, Human herpesvirus 1
gaccggcgggucccgaccga

SEQ ID NO: 1755922 - RNA, 15 nt, Human herpesvirus 1
ccucucacacagcau

SEQ ID NO: 1755923 - RNA, 15 nt, Human herpesvirus 1
gucauagugggccuc

SEQ ID NO: 1755924 - RNA, 17 nt, Human herpesvirus 1
gcacaacgccagccugc

SEQ ID NO: 1755925 - RNA, 12 nt, Human herpesvirus 1
cccaacggggga

SEQ ID NO: 1755926 - RNA, 17 nt, Human herpesvirus 1
gaacaacaugggccuga

SEQ ID NO: 1755927 - RNA, 17 nt, Human herpesvirus 1
gcccguccucgcccgcc

SEQ ID NO: 1755928 - RNA, 14 nt, Human herpesvirus 1
ccgguucucccugu

SEQ ID NO: 1755929 - RNA, 16 nt, Human herpesvirus 1
uggcgucggcggcucc

SEQ ID NO: 1755930 - RNA, 17 nt, Human herpesvirus 1
cgcaugaucuccggacc

SEQ ID NO: 1755931 - RNA, 18 nt, Human herpesvirus 1
cggcccgcguuuggccug

SEQ ID NO: 1755932 - RNA, 18 nt, Human herpesvirus 1
ccacuguuuuccgcccca

SEQ ID NO: 1755933 - RNA, 15 nt, Human herpesvirus 1
ccaccgccccccugu

SEQ ID NO: 1755934 - RNA, 21 nt, Human herpesvirus 1
gcuccggggggcuuccggccu

SEQ ID NO: 1755935 - RNA, 16 nt, Human herpesvirus 1
gccacuggccgggagc

SEQ ID NO: 1755936 - RNA, 20 nt, Human herpesvirus 1
cagcugggaccccggcggcc

SEQ ID NO: 1755937 - RNA, 21 nt, Human herpesvirus 1
acgugcgcaacaaccuggaga

SEQ ID NO: 1755938 - RNA, 18 nt, Human herpesvirus 1
gcgagcucccagagaccc

SEQ ID NO: 1755939 - RNA, 15 nt, Human herpesvirus 1
ccgcucgguggcucc

SEQ ID NO: 1755940 - RNA, 14 nt, Human herpesvirus 1
ggcccuaaccccac

SEQ ID NO: 1755941 - RNA, 14 nt, Human herpesvirus 1
ccuggcugacccac

SEQ ID NO: 1755942 - RNA, 19 nt, Human herpesvirus 1
ucugggccaccgacagccu

SEQ ID NO: 1755943 - RNA, 21 nt, Human herpesvirus 1
ccugacgcgccgcgggccccc

SEQ ID NO: 1755944 - RNA, 18 nt, Human herpesvirus 1
uccggcgcguguaccaca

SEQ ID NO: 1755945 - RNA, 14 nt, Human herpesvirus 1
ucaccguggccugg

SEQ ID NO: 1755946 - RNA, 16 nt, Human herpesvirus 1
gcggcggucagcgacg

SEQ ID NO: 1755947 - RNA, 14 nt, Human herpesvirus 1
ggccccugggcccc

SEQ ID NO: 1755948 - RNA, 16 nt, Human herpesvirus 1
gaccagcgccgggugg

SEQ ID NO: 1755949 - RNA, 17 nt, Human herpesvirus 1
ggggucuccgaaagcca

SEQ ID NO: 1755950 - RNA, 19 nt, Human herpesvirus 1
cgugcuuguuuguguuccg

SEQ ID NO: 1755951 - RNA, 22 nt, Human herpesvirus 1
cccugcugcaggccccccgccg

SEQ ID NO: 1755952 - RNA, 19 nt, Human herpesvirus 1
ggcgucugggccaccgaca

SEQ ID NO: 1755953 - RNA, 23 nt, Human herpesvirus 1
ccgccuggaggacggcgccgggg

SEQ ID NO: 1755954 - RNA, 22 nt, Human herpesvirus 1
cguggaccccacgacacccacc

SEQ ID NO: 1755955 - RNA, 23 nt, Human herpesvirus 1
cccauccgaacgcagccccgcug

SEQ ID NO: 1755956 - RNA, 21 nt, Human herpesvirus 1
ccucuccgcggugucugggaa

SEQ ID NO: 1755957 - RNA, 12 nt, Human herpesvirus 1
ggaggggcuccu

SEQ ID NO: 1755958 - RNA, 15 nt, Human herpesvirus 1
uucccccccaucacc

SEQ ID NO: 1755959 - RNA, 15 nt, Human herpesvirus 1
cauaaccgaccgcag

SEQ ID NO: 1755960 - RNA, 22 nt, Human herpesvirus 1
cuccacccccucgaccaccacc

SEQ ID NO: 1755961 - RNA, 16 nt, Human herpesvirus 1
ccgcggaucugcuccg

SEQ ID NO: 1755962 - RNA, 18 nt, Human herpesvirus 1
guccggagccgcgcggcc

SEQ ID NO: 1755963 - RNA, 12 nt, Human herpesvirus 1
uggcccuccagg

SEQ ID NO: 1755964 - RNA, 17 nt, Human herpesvirus 1
ucgccgcggcucccggc

SEQ ID NO: 1755965 - RNA, 19 nt, Human herpesvirus 1
ccaggcccgccgccacugu

SEQ ID NO: 1755966 - RNA, 18 nt, Human herpesvirus 1
cccgcguccacccggagg

SEQ ID NO: 1755967 - RNA, 19 nt, Human herpesvirus 1
ccccggauggggcccgggu

SEQ ID NO: 1755968 - RNA, 15 nt, Human herpesvirus 1
uauacacagauguca

SEQ ID NO: 1755969 - RNA, 17 nt, Human herpesvirus 1
ccgacaucaccaccguc

SEQ ID NO: 1755970 - RNA, 22 nt, Human herpesvirus 1
agaccguggccgacaacugccu

SEQ ID NO: 1755971 - RNA, 20 nt, Human herpesvirus 1
ggugacguuuaucggcaggc

SEQ ID NO: 1755972 - RNA, 17 nt, Human herpesvirus 1
agggcgacgccgugggc

SEQ ID NO: 1755973 - RNA, 14 nt, Human herpesvirus 1
cccccgucagccug

SEQ ID NO: 1755974 - RNA, 14 nt, Human herpesvirus 1
ccgggcgaugagcc

SEQ ID NO: 1755975 - RNA, 17 nt, Human herpesvirus 1
cucguggcgucucgccg

SEQ ID NO: 1755976 - RNA, 18 nt, Human herpesvirus 1
gacagcggauggcacgag

SEQ ID NO: 1755977 - RNA, 21 nt, Human herpesvirus 1
cuucggccccgcgucuggccc

SEQ ID NO: 1755978 - RNA, 10 nt, Human herpesvirus 1
aaggccuggg

SEQ ID NO: 1755979 - RNA, 21 nt, Human herpesvirus 1
acggccuccgcguacgaggac

SEQ ID NO: 1755980 - RNA, 20 nt, Human herpesvirus 1
ggagcucaagaaccccacca

SEQ ID NO: 1755981 - RNA, 16 nt, Human herpesvirus 1
gcggcagucuccuggc

SEQ ID NO: 1755982 - RNA, 22 nt, Human herpesvirus 1
cggaaagcaagaacaauaaagg

SEQ ID NO: 1755983 - RNA, 22 nt, Human herpesvirus 1
cucccaaccgcgacccuccggg

SEQ ID NO: 1755984 - RNA, 16 nt, Human herpesvirus 1
ugccggucggcgggcc

SEQ ID NO: 1755985 - RNA, 20 nt, Human herpesvirus 1
gcgcggccacgucguccggg

SEQ ID NO: 1755986 - RNA, 19 nt, Human herpesvirus 1
gccuccaugggguccgcag

SEQ ID NO: 1755987 - RNA, 16 nt, Human herpesvirus 1
acgccuaccggccccu

SEQ ID NO: 1755988 - RNA, 20 nt, Human herpesvirus 1
aucgguccccucugggcccg

SEQ ID NO: 1755989 - RNA, 18 nt, Human herpesvirus 1
uccuaacccagaccccgg

SEQ ID NO: 1755990 - RNA, 20 nt, Human herpesvirus 1
cgaucccaacaacucccccg

SEQ ID NO: 1755991 - RNA, 18 nt, Human herpesvirus 1
acccgcgacccccgggcu

SEQ ID NO: 1755992 - RNA, 17 nt, Human herpesvirus 1
gauccucgggcuacugg

SEQ ID NO: 1755993 - RNA, 19 nt, Human herpesvirus 1
cggccuauggcuccugcga

SEQ ID NO: 1755994 - RNA, 17 nt, Human herpesvirus 1
gggccccggggagacag

SEQ ID NO: 1755995 - RNA, 16 nt, Human herpesvirus 1
augcacgaccuguuga

SEQ ID NO: 1755996 - RNA, 22 nt, Human herpesvirus 1
gccacaccacgccacaacagcc

SEQ ID NO: 1755997 - RNA, 17 nt, Human herpesvirus 1
cgaugcgaucgagccgu

SEQ ID NO: 1755998 - RNA, 22 nt, Human herpesvirus 1
uacaccgaaugcuccuacaaca

SEQ ID NO: 1755999 - RNA, 20 nt, Human herpesvirus 1
ggauccgacccccauggagc

SEQ ID NO: 1756000 - RNA, 14 nt, Human herpesvirus 1
gugccaccagccug

SEQ ID NO: 1756001 - RNA, 14 nt, Human herpesvirus 1
cccgugucuguggg

SEQ ID NO: 1756002 - RNA, 13 nt, Human herpesvirus 1
ucgcccuccacca

SEQ ID NO: 1756003 - RNA, 23 nt, Human herpesvirus 1
gcgaccgcaacuucccacccgga

SEQ ID NO: 1756004 - RNA, 21 nt, Human herpesvirus 1
ggccccaguccccaagacccc

SEQ ID NO: 1756005 - RNA, 20 nt, Human herpesvirus 1
acgccguggcgccccggccc

SEQ ID NO: 1756006 - RNA, 20 nt, Human herpesvirus 1
ggacgcguccggggagggcg

SEQ ID NO: 1756007 - RNA, 15 nt, Human herpesvirus 1
ugggguuucuguguu

SEQ ID NO: 1756008 - RNA, 18 nt, Human herpesvirus 1
uuccucuccgcggugucu

SEQ ID NO: 1756009 - RNA, 16 nt, Human herpesvirus 1
ccaucccgaggcccca

SEQ ID NO: 1756010 - RNA, 20 nt, Human herpesvirus 1
cuugguucggggccgcccug

SEQ ID NO: 1756011 - RNA, 18 nt, Human herpesvirus 1
cgaccucggcgccucugg

SEQ ID NO: 1756012 - RNA, 16 nt, Human herpesvirus 1
guugugguuauaugca

SEQ ID NO: 1756013 - RNA, 22 nt, Human herpesvirus 1
gcugagccgcgccgacaucacc

SEQ ID NO: 1756014 - RNA, 12 nt, Human herpesvirus 1
ucacccacgccg

SEQ ID NO: 1756015 - RNA, 17 nt, Human herpesvirus 1
gcggggaggggggcaag

SEQ ID NO: 1756016 - RNA, 15 nt, Human herpesvirus 1
cccgcgcuaugacgg

SEQ ID NO: 1756017 - RNA, 21 nt, Human herpesvirus 1
aggagacaauaccggaaggaa

SEQ ID NO: 1756018 - RNA, 12 nt, Human herpesvirus 1
cuccggcgccgc

SEQ ID NO: 1756019 - RNA, 15 nt, Human herpesvirus 1
ugugccaccagccug

SEQ ID NO: 1756020 - RNA, 23 nt, Human herpesvirus 1
gcaccaccgacucucccaccgcc

SEQ ID NO: 1756021 - RNA, 14 nt, Human herpesvirus 1
ggaccagagcgcga

SEQ ID NO: 1756022 - RNA, 14 nt, Human herpesvirus 1
cggggagggcaggg

SEQ ID NO: 1756023 - RNA, 22 nt, Human herpesvirus 1
ggggucaaccacgaacccccau

SEQ ID NO: 1756024 - RNA, 21 nt, Human herpesvirus 1
aacaagucucugggggccugu

SEQ ID NO: 1756025 - RNA, 18 nt, Human herpesvirus 1
gugcguagcauaccuggg

SEQ ID NO: 1756026 - RNA, 16 nt, Human herpesvirus 1
ucgcuagaccacgccc

SEQ ID NO: 1756027 - RNA, 19 nt, Human herpesvirus 1
uccacggccaaguacgugc

SEQ ID NO: 1756028 - RNA, 18 nt, Human herpesvirus 1
ugaaagacacgggcacca

SEQ ID NO: 1756029 - RNA, 19 nt, Human herpesvirus 1
uccgcgacccaccgggccc

SEQ ID NO: 1756030 - RNA, 17 nt, Human herpesvirus 1
ggggaccagguccccca

SEQ ID NO: 1756031 - RNA, 21 nt, Human herpesvirus 1
cgccauguuugcgggccuggg

SEQ ID NO: 1756032 - RNA, 14 nt, Human herpesvirus 1
guggucucuggccg

SEQ ID NO: 1756033 - RNA, 12 nt, Human herpesvirus 1
cccaacgggggc

SEQ ID NO: 1756034 - RNA, 18 nt, Human herpesvirus 1
ccgccggcaugcacccca

SEQ ID NO: 1756035 - RNA, 20 nt, Human herpesvirus 1
cguuccagccccccagccuc

SEQ ID NO: 1756036 - RNA, 15 nt, Human herpesvirus 1
gcaggccccccgccg

SEQ ID NO: 1756037 - RNA, 19 nt, Human herpesvirus 1
ucccgauaaaaagcgcccc

SEQ ID NO: 1756038 - RNA, 20 nt, Human herpesvirus 1
cagaucuacugcugggccau

SEQ ID NO: 1756039 - RNA, 18 nt, Human herpesvirus 1
acgaugaccgcccccagc

SEQ ID NO: 1756040 - RNA, 18 nt, Human herpesvirus 1
caaggugggccagccgca

SEQ ID NO: 1756041 - RNA, 12 nt, Human herpesvirus 1
acgaggccaagc

SEQ ID NO: 1756042 - RNA, 17 nt, Human herpesvirus 1
ccggggucccagcggca

SEQ ID NO: 1756043 - RNA, 18 nt, Human herpesvirus 1
gcgacggcgucucccggg

SEQ ID NO: 1756044 - RNA, 15 nt, Human herpesvirus 1
guguggguggaggag

SEQ ID NO: 1756045 - RNA, 19 nt, Human herpesvirus 1
ucgacgcccccucccuguu

SEQ ID NO: 1756046 - RNA, 19 nt, Human herpesvirus 1
ucugguccgccgcgagccc

SEQ ID NO: 1756047 - RNA, 22 nt, Human herpesvirus 1
cccaucgcgggcgccauggcgg

SEQ ID NO: 1756048 - RNA, 15 nt, Human herpesvirus 1
cggaccugcucucgc

SEQ ID NO: 1756049 - RNA, 16 nt, Human herpesvirus 1
cacaccacgccacaac

SEQ ID NO: 1756050 - RNA, 20 nt, Human herpesvirus 1
gccgguuccucccgcucggc

SEQ ID NO: 1756051 - RNA, 14 nt, Human herpesvirus 1
ccacggccacuggc

SEQ ID NO: 1756052 - RNA, 20 nt, Human herpesvirus 1
ggacacuggguucuccugga

SEQ ID NO: 1756053 - RNA, 13 nt, Human herpesvirus 1
gcgacgggcagug

SEQ ID NO: 1756054 - RNA, 15 nt, Human herpesvirus 1
ucuggguuuuccccu

SEQ ID NO: 1756055 - RNA, 13 nt, Human herpesvirus 1
cgcgcccucgcca

SEQ ID NO: 1756056 - RNA, 13 nt, Human herpesvirus 1
ccaccuccacccc

SEQ ID NO: 1756057 - RNA, 14 nt, Human herpesvirus 1
uacggaccgccucg

SEQ ID NO: 1756058 - RNA, 22 nt, Human herpesvirus 1
gcccucuuggaggaccccgugg

SEQ ID NO: 1756059 - RNA, 19 nt, Human herpesvirus 1
ccccauacacgagcacccu

SEQ ID NO: 1756060 - RNA, 15 nt, Human herpesvirus 1
ccguuucgggcggca

SEQ ID NO: 1756061 - RNA, 19 nt, Human herpesvirus 1
aaagacacgggcaccacac

SEQ ID NO: 1756062 - RNA, 19 nt, Human herpesvirus 1
accgccaacaauccccagg

SEQ ID NO: 1756063 - RNA, 16 nt, Human herpesvirus 1
cugucuuggggcccac

SEQ ID NO: 1756064 - RNA, 15 nt, Human herpesvirus 1
cuggguucuccugga

SEQ ID NO: 1756065 - RNA, 18 nt, Human herpesvirus 1
cgcgauuccgagggccgg

SEQ ID NO: 1756066 - RNA, 18 nt, Human herpesvirus 1
acagccgcccccugguca

SEQ ID NO: 1756067 - RNA, 16 nt, Human herpesvirus 1
aggcuguaggucuggg

SEQ ID NO: 1756068 - RNA, 15 nt, Human herpesvirus 1
gacgccccggccgcc

SEQ ID NO: 1756069 - RNA, 13 nt, Human herpesvirus 1
ugguuauaugcac

SEQ ID NO: 1756070 - RNA, 22 nt, Human herpesvirus 1
agagucggagcccgcuggggcg

SEQ ID NO: 1756071 - RNA, 20 nt, Human herpesvirus 1
agccccggucuccccgggag

SEQ ID NO: 1756072 - RNA, 13 nt, Human herpesvirus 1
caugcggcugcag

SEQ ID NO: 1756073 - RNA, 12 nt, Human herpesvirus 1
cucucuucucuc

SEQ ID NO: 1756074 - RNA, 19 nt, Human herpesvirus 1
caaggcguccauucucccg

SEQ ID NO: 1756075 - RNA, 21 nt, Human herpesvirus 1
cccauccgaacgcagccccgc

SEQ ID NO: 1756076 - RNA, 16 nt, Human herpesvirus 1
guacucccaccagcug

SEQ ID NO: 1756077 - RNA, 24 nt, Human herpesvirus 1
cagccuggucgaggcggccgaggc

SEQ ID NO: 1756078 - RNA, 19 nt, Human herpesvirus 1
ccccuuaaugggugcgggg

SEQ ID NO: 1756079 - RNA, 23 nt, Human herpesvirus 1
gccgccaccauccucaagcaggc

SEQ ID NO: 1756080 - RNA, 14 nt, Human herpesvirus 1
aucccgaggcccca

SEQ ID NO: 1756081 - RNA, 15 nt, Human herpesvirus 1
gcggggggugggacc

SEQ ID NO: 1756082 - RNA, 12 nt, Human herpesvirus 1
cggccaccgcua

SEQ ID NO: 1756083 - RNA, 23 nt, Human herpesvirus 1
cccgucucgcugcccuucugucu

SEQ ID NO: 1756084 - RNA, 14 nt, Human herpesvirus 1
acccgacucaccuc

SEQ ID NO: 1756085 - RNA, 14 nt, Human herpesvirus 1
gacgccgugggcaa

SEQ ID NO: 1756086 - RNA, 16 nt, Human herpesvirus 1
cggaaacccguccggg

SEQ ID NO: 1756087 - RNA, 23 nt, Human herpesvirus 1
ccugagacaagagcgcucccccg

SEQ ID NO: 1756088 - RNA, 22 nt, Human herpesvirus 1
ucggccguuucuccgcccgacc

SEQ ID NO: 1756089 - RNA, 14 nt, Human herpesvirus 1
ccuggaccagcuga

SEQ ID NO: 1756090 - RNA, 22 nt, Human herpesvirus 1
accaagagacgucgccccugug

SEQ ID NO: 1756091 - RNA, 22 nt, Human herpesvirus 1
cgccccgugucugugggccaag

SEQ ID NO: 1756092 - RNA, 15 nt, Human herpesvirus 1
uccgggaugggcuac

SEQ ID NO: 1756093 - RNA, 16 nt, Human herpesvirus 1
gacccaaagcccucag

SEQ ID NO: 1756094 - RNA, 14 nt, Human herpesvirus 1
gugcuugagucugu

SEQ ID NO: 1756095 - RNA, 16 nt, Human herpesvirus 1
ccgggacuccgcggac

SEQ ID NO: 1756096 - RNA, 20 nt, Human herpesvirus 1
gcccauuuacguggcugggu

SEQ ID NO: 1756097 - RNA, 22 nt, Human herpesvirus 1
gaaugcagcgccggccuccccg

SEQ ID NO: 1756098 - RNA, 19 nt, Human herpesvirus 1
accaucccggguuaaugua

SEQ ID NO: 1756099 - RNA, 15 nt, Human herpesvirus 1
cugcgccuugggccc

SEQ ID NO: 1756100 - RNA, 20 nt, Human herpesvirus 1
acgggcggccacccccccgg

SEQ ID NO: 1756101 - RNA, 15 nt, Human herpesvirus 1
cgggaggauguguuu

SEQ ID NO: 1756102 - RNA, 12 nt, Human herpesvirus 1
cgagcagagccg

SEQ ID NO: 1756103 - RNA, 19 nt, Human herpesvirus 1
cguggccgacaacugccug

SEQ ID NO: 1756104 - RNA, 14 nt, Human herpesvirus 1
ggcccccgcccccg

SEQ ID NO: 1756105 - RNA, 12 nt, Human herpesvirus 1
gaggggggagau

SEQ ID NO: 1756106 - RNA, 17 nt, Human herpesvirus 1
gcggcucaacgagcucc

SEQ ID NO: 1756107 - RNA, 14 nt, Human herpesvirus 1
ucauccacaccuua

SEQ ID NO: 1756108 - RNA, 15 nt, Human herpesvirus 1
caacgaggguugggg

SEQ ID NO: 1756109 - RNA, 20 nt, Human herpesvirus 1
uuguggggaggggggggucg

SEQ ID NO: 1756110 - RNA, 14 nt, Human herpesvirus 1
augcggaaagcaag

SEQ ID NO: 1756111 - RNA, 19 nt, Human herpesvirus 1
gaucacggagggaaccacc

SEQ ID NO: 1756112 - RNA, 15 nt, Human herpesvirus 1
cgaccgacagcacuc

SEQ ID NO: 1756113 - RNA, 18 nt, Human herpesvirus 1
gcaauuugcacccagccu

SEQ ID NO: 1756114 - RNA, 16 nt, Human herpesvirus 1
caggucccccacacca

SEQ ID NO: 1756115 - RNA, 17 nt, Human herpesvirus 1
gggauggggagagccca

SEQ ID NO: 1756116 - RNA, 13 nt, Human herpesvirus 1
gccgggagcacca

SEQ ID NO: 1756117 - RNA, 11 nt, Human herpesvirus 1
ccuccccccgc

SEQ ID NO: 1756118 - RNA, 21 nt, Human herpesvirus 1
cgcgggcgacgccccggccgc

SEQ ID NO: 1756119 - RNA, 20 nt, Human herpesvirus 1
caaucccccccgaccggguu

SEQ ID NO: 1756120 - RNA, 14 nt, Human herpesvirus 1
gucgccccuguggc

SEQ ID NO: 1756121 - RNA, 14 nt, Human herpesvirus 1
uccgacgccccccg

SEQ ID NO: 1756122 - RNA, 20 nt, Human herpesvirus 1
ccccggauaugcgcgggguu

SEQ ID NO: 1756123 - RNA, 15 nt, Human herpesvirus 1
aucgggaugcugccc

SEQ ID NO: 1756124 - RNA, 15 nt, Human herpesvirus 1
cgcucccucagcauc

SEQ ID NO: 1756125 - RNA, 21 nt, Human herpesvirus 1
guccagggggaugcuagccug

SEQ ID NO: 1756126 - RNA, 23 nt, Human herpesvirus 1
agggccacucacgcauccccagu

SEQ ID NO: 1756127 - RNA, 22 nt, Human herpesvirus 1
gcacuugcggcaagacccgggc

SEQ ID NO: 1756128 - RNA, 18 nt, Human herpesvirus 1
ccgcuuuauaggccggga

SEQ ID NO: 1756129 - RNA, 15 nt, Human herpesvirus 1
ggcggcgaggccggc

SEQ ID NO: 1756130 - RNA, 11 nt, Human herpesvirus 1
auccccgcucc

SEQ ID NO: 1756131 - RNA, 14 nt, Human herpesvirus 1
uccccucugggccc

SEQ ID NO: 1756132 - RNA, 17 nt, Human herpesvirus 1
guacuggaugcgccgcc

SEQ ID NO: 1756133 - RNA, 17 nt, Human herpesvirus 1
gaugcgaucgagccgug

SEQ ID NO: 1756134 - RNA, 13 nt, Human herpesvirus 1
ccguccgaccgcc

SEQ ID NO: 1756135 - RNA, 17 nt, Human herpesvirus 1
ccuuaaccgcuggcugg

SEQ ID NO: 1756136 - RNA, 15 nt, Human herpesvirus 1
ccgaucgcagcgucc

SEQ ID NO: 1756137 - RNA, 20 nt, Human herpesvirus 1
gauccaaaaccacaaccucc

SEQ ID NO: 1756138 - RNA, 13 nt, Human herpesvirus 1
cgaagccccggcc

SEQ ID NO: 1756139 - RNA, 15 nt, Human herpesvirus 1
ggugggcguccugga

SEQ ID NO: 1756140 - RNA, 23 nt, Human herpesvirus 1
ugccaaagcgcccgucggucugc

SEQ ID NO: 1756141 - RNA, 17 nt, Human herpesvirus 1
gaccgcccgccccucgc

SEQ ID NO: 1756142 - RNA, 17 nt, Human herpesvirus 1
cgucucuggggagccuc

SEQ ID NO: 1756143 - RNA, 13 nt, Human herpesvirus 1
guuuucucuuccc

SEQ ID NO: 1756144 - RNA, 12 nt, Human herpesvirus 1
ccagggagcccc

SEQ ID NO: 1756145 - RNA, 20 nt, Human herpesvirus 1
ucagggcucuacccucugga

SEQ ID NO: 1756146 - RNA, 17 nt, Human herpesvirus 1
cgccgguuccucccgcu

SEQ ID NO: 1756147 - RNA, 15 nt, Human herpesvirus 1
gccgcggcucccggc

SEQ ID NO: 1756148 - RNA, 12 nt, Human herpesvirus 1
cuggccccggcg

SEQ ID NO: 1756149 - RNA, 16 nt, Human herpesvirus 1
gcgcugcucagcgcca

SEQ ID NO: 1756150 - RNA, 20 nt, Human herpesvirus 1
gcggcguccgcgccccucug

SEQ ID NO: 1756151 - RNA, 15 nt, Human herpesvirus 1
ggcccuccaggcugu

SEQ ID NO: 1756152 - RNA, 10 nt, Human herpesvirus 1
ccccaaggag

SEQ ID NO: 1756153 - RNA, 13 nt, Human herpesvirus 1
caaauaaagccac

SEQ ID NO: 1756154 - RNA, 15 nt, Human herpesvirus 1
cgcccgaccacacac

SEQ ID NO: 1756155 - RNA, 19 nt, Human herpesvirus 1
gcaggcgcugucuccccgg

SEQ ID NO: 1756156 - RNA, 22 nt, Human herpesvirus 1
ucaucgggggaguugugaucau

SEQ ID NO: 1756157 - RNA, 15 nt, Human herpesvirus 1
ggauuuggguugggg

SEQ ID NO: 1756158 - RNA, 17 nt, Human herpesvirus 1
ccauggcgggacugggc

SEQ ID NO: 1756159 - RNA, 22 nt, Human herpesvirus 1
ggucgcccgucucugcuacgcc

SEQ ID NO: 1756160 - RNA, 15 nt, Human herpesvirus 1
aacgcgcuggggcug

SEQ ID NO: 1756161 - RNA, 12 nt, Human herpesvirus 1
ugggcauccagg

SEQ ID NO: 1756162 - RNA, 21 nt, Human herpesvirus 1
ccgcggcuucaucgcgccccu

SEQ ID NO: 1756163 - RNA, 18 nt, Human herpesvirus 1
uacaccggccacccaggu

SEQ ID NO: 1756164 - RNA, 13 nt, Human herpesvirus 1
cccgccccggagg

SEQ ID NO: 1756165 - RNA, 13 nt, Human herpesvirus 1
uccccuucccucc

SEQ ID NO: 1756166 - RNA, 15 nt, Human herpesvirus 1
gcgcccacuacacca

SEQ ID NO: 1756167 - RNA, 19 nt, Human herpesvirus 1
cugcucagcgccaagguca

SEQ ID NO: 1756168 - RNA, 21 nt, Human herpesvirus 1
ggcggucagcgagacgaccuc

SEQ ID NO: 1756169 - RNA, 16 nt, Human herpesvirus 1
cacuguuuuccgcccc

SEQ ID NO: 1756170 - RNA, 19 nt, Human herpesvirus 1
cacaugcggaaagcaagaa

SEQ ID NO: 1756171 - RNA, 16 nt, Human herpesvirus 1
guggucucuggccgcg

SEQ ID NO: 1756172 - RNA, 17 nt, Human herpesvirus 1
cggcaagauccucgggc

SEQ ID NO: 1756173 - RNA, 18 nt, Human herpesvirus 1
ugcaccgguucucccugu

SEQ ID NO: 1756174 - RNA, 14 nt, Human herpesvirus 1
gccucccccugagc

SEQ ID NO: 1756175 - RNA, 18 nt, Human herpesvirus 1
accagcugagccgcgccg

SEQ ID NO: 1756176 - RNA, 18 nt, Human herpesvirus 1
cggcgccucuggacugga

SEQ ID NO: 1756177 - RNA, 13 nt, Human herpesvirus 1
aggagcccgcccu

SEQ ID NO: 1756178 - RNA, 20 nt, Human herpesvirus 1
accaggucccccacaccacc

SEQ ID NO: 1756179 - RNA, 11 nt, Human herpesvirus 1
gucucuggccg

SEQ ID NO: 1756180 - RNA, 17 nt, Human herpesvirus 1
ggcaccgcaccagcgcg

SEQ ID NO: 1756181 - RNA, 19 nt, Human herpesvirus 1
ucccacacucucugggcgg

SEQ ID NO: 1756182 - RNA, 13 nt, Human herpesvirus 1
ccaggucccaccu

SEQ ID NO: 1756183 - RNA, 17 nt, Human herpesvirus 1
accgacucucccaccgc

SEQ ID NO: 1756184 - RNA, 24 nt, Human herpesvirus 1
uugguauagguccacggccacugg

SEQ ID NO: 1756185 - RNA, 13 nt, Human herpesvirus 1
uacacagccaccc

SEQ ID NO: 1756186 - RNA, 15 nt, Human herpesvirus 1
cggcugguccacacc

SEQ ID NO: 1756187 - RNA, 15 nt, Human herpesvirus 1
aucauaaccacgccc

SEQ ID NO: 1756188 - RNA, 15 nt, Human herpesvirus 1
cuucggggcccggcc

SEQ ID NO: 1756189 - RNA, 14 nt, Human herpesvirus 1
cguguuugugggga

SEQ ID NO: 1756190 - RNA, 12 nt, Human herpesvirus 1
aaggccugggau

SEQ ID NO: 1756191 - RNA, 19 nt, Human herpesvirus 1
aagacccccccggagccgg

SEQ ID NO: 1756192 - RNA, 19 nt, Human herpesvirus 1
gacaugaccgcccgccccu

SEQ ID NO: 1756193 - RNA, 22 nt, Human herpesvirus 1
accccaguccccgggcccagcc

SEQ ID NO: 1756194 - RNA, 16 nt, Human herpesvirus 1
accacgugcacagccu

SEQ ID NO: 1756195 - RNA, 21 nt, Human herpesvirus 1
gggcgggggauggggagagcc

SEQ ID NO: 1756196 - RNA, 22 nt, Human herpesvirus 1
gcuccgacgacgcgcagccggc

SEQ ID NO: 1756197 - RNA, 20 nt, Human herpesvirus 1
aacuucaucacccccgaguu

SEQ ID NO: 1756198 - RNA, 16 nt, Human herpesvirus 1
gaggcgccugccccgc

SEQ ID NO: 1756199 - RNA, 17 nt, Human herpesvirus 1
acggcgaaugcagcgcc

SEQ ID NO: 1756200 - RNA, 14 nt, Human herpesvirus 1
agacccaacccccg

SEQ ID NO: 1756201 - RNA, 21 nt, Human herpesvirus 1
caaccccagggaccuccugga

SEQ ID NO: 1756202 - RNA, 14 nt, Human herpesvirus 1
cacccccgcccggg

SEQ ID NO: 1756203 - RNA, 19 nt, Human herpesvirus 1
gcgcuggguggucucuggc

SEQ ID NO: 1756204 - RNA, 19 nt, Human herpesvirus 1
ggcgacgccgugggcaaug

SEQ ID NO: 1756205 - RNA, 12 nt, Human herpesvirus 1
cccacgccgccu

SEQ ID NO: 1756206 - RNA, 14 nt, Human herpesvirus 1
uagggaacccagag

SEQ ID NO: 1756207 - RNA, 15 nt, Human herpesvirus 1
cgccaugcuggcgga

SEQ ID NO: 1756208 - RNA, 16 nt, Human herpesvirus 1
gaacgcggaccccccc

SEQ ID NO: 1756209 - RNA, 20 nt, Human herpesvirus 1
agaacaauaaaggcgguggu

SEQ ID NO: 1756210 - RNA, 15 nt, Human herpesvirus 1
cuggggcccccaggg

SEQ ID NO: 1756211 - RNA, 16 nt, Human herpesvirus 1
ccccggaggggcuccu

SEQ ID NO: 1756212 - RNA, 13 nt, Human herpesvirus 1
gcaggauggagag

SEQ ID NO: 1756213 - RNA, 15 nt, Human herpesvirus 1
cggcaugccucugcg

SEQ ID NO: 1756214 - RNA, 20 nt, Human herpesvirus 1
ccguccgcaucgauccggag

SEQ ID NO: 1756215 - RNA, 13 nt, Human herpesvirus 1
acccugcugcagg

SEQ ID NO: 1756216 - RNA, 14 nt, Human herpesvirus 1
gagcgcccuccuga

SEQ ID NO: 1756217 - RNA, 15 nt, Human herpesvirus 1
gagcaccacauaacc

SEQ ID NO: 1756218 - RNA, 11 nt, Human herpesvirus 1
ccaggaucaca

SEQ ID NO: 1756219 - RNA, 17 nt, Human herpesvirus 1
ggaaccugcucacgacc

SEQ ID NO: 1756220 - RNA, 19 nt, Human herpesvirus 1
gacccccuuguaugucccc

SEQ ID NO: 1756221 - RNA, 21 nt, Human herpesvirus 1
cggccacgcaaaaccaggccg

SEQ ID NO: 1756222 - RNA, 23 nt, Human herpesvirus 1
gcggguugcugcgcggcguccgc

SEQ ID NO: 1756223 - RNA, 14 nt, Human herpesvirus 1
ccgucgaagcugau

SEQ ID NO: 1756224 - RNA, 18 nt, Human herpesvirus 1
gcccaccggaagcccaac

SEQ ID NO: 1756225 - RNA, 16 nt, Human herpesvirus 1
cgucgcugugaugaag

SEQ ID NO: 1756226 - RNA, 14 nt, Human herpesvirus 1
guccugacggccaa

SEQ ID NO: 1756227 - RNA, 14 nt, Human herpesvirus 1
aucgguccccucug

SEQ ID NO: 1756228 - RNA, 22 nt, Human herpesvirus 1
ccaucgccucggccaccguggg

SEQ ID NO: 1756229 - RNA, 20 nt, Human herpesvirus 1
ccgugggcgacugcgacccc

SEQ ID NO: 1756230 - RNA, 17 nt, Human herpesvirus 1
cuggccccaguccccaa

SEQ ID NO: 1756231 - RNA, 17 nt, Human herpesvirus 1
ggcccgcgggaggccgc

SEQ ID NO: 1756232 - RNA, 16 nt, Human herpesvirus 1
cagaacucgccccgga

SEQ ID NO: 1756233 - RNA, 15 nt, Human herpesvirus 1
uggagggugucccag

SEQ ID NO: 1756234 - RNA, 20 nt, Human herpesvirus 1
ugcgguucguucuggacggg

SEQ ID NO: 1756235 - RNA, 15 nt, Human herpesvirus 1
gaccggauggaggag

SEQ ID NO: 1756236 - RNA, 15 nt, Human herpesvirus 1
aagaccaaaaucaaa

SEQ ID NO: 1756237 - RNA, 14 nt, Human herpesvirus 1
gcgagcccagaccc

SEQ ID NO: 1756238 - RNA, 22 nt, Human herpesvirus 1
ggaacacgccuaccggccccug

SEQ ID NO: 1756239 - RNA, 19 nt, Human herpesvirus 1
gacccgcaucccccgucug

SEQ ID NO: 1756240 - RNA, 16 nt, Human herpesvirus 1
gcugcuccgccuggcc

SEQ ID NO: 1756241 - RNA, 18 nt, Human herpesvirus 1
cccgcgugcaacgcggga

SEQ ID NO: 1756242 - RNA, 22 nt, Human herpesvirus 1
agggggggggggcauuucagug

SEQ ID NO: 1756243 - RNA, 19 nt, Human herpesvirus 1
gccccggaagaccccgagg

SEQ ID NO: 1756244 - RNA, 15 nt, Human herpesvirus 1
gugcucgacagccac

SEQ ID NO: 1756245 - RNA, 13 nt, Human herpesvirus 1
cucccccaccgcc

SEQ ID NO: 1756246 - RNA, 22 nt, Human herpesvirus 1
caucggacccccccucgcgcca

SEQ ID NO: 1756247 - RNA, 16 nt, Human herpesvirus 1
acucccgacaccacca

SEQ ID NO: 1756248 - RNA, 19 nt, Human herpesvirus 1
gccuggcugacccacgcgg

SEQ ID NO: 1756249 - RNA, 21 nt, Human herpesvirus 1
gaagcucgaacgcggguggga

SEQ ID NO: 1756250 - RNA, 13 nt, Human herpesvirus 1
gacgguggugccc

SEQ ID NO: 1756251 - RNA, 21 nt, Human herpesvirus 1
cuauuuucccccccgggccgc

SEQ ID NO: 1756252 - RNA, 20 nt, Human herpesvirus 1
ccacgcccuuccccacggga

SEQ ID NO: 1756253 - RNA, 19 nt, Human herpesvirus 1
gcuccgacgacgcgcagcc

SEQ ID NO: 1756254 - RNA, 23 nt, Human herpesvirus 1
ccagggcacccaaggggccgugc

SEQ ID NO: 1756255 - RNA, 22 nt, Human herpesvirus 1
ucugucucgucuccucuucucc

SEQ ID NO: 1756256 - RNA, 15 nt, Human herpesvirus 1
ccagauaauccagau

SEQ ID NO: 1756257 - RNA, 16 nt, Human herpesvirus 1
ccaccgacagccugaa

SEQ ID NO: 1756258 - RNA, 22 nt, Human herpesvirus 1
aacgcaacggcgggagcugggu

SEQ ID NO: 1756259 - RNA, 13 nt, Human herpesvirus 1
agccccggacccc

SEQ ID NO: 1756260 - RNA, 17 nt, Human herpesvirus 1
gaccuguugauggccug

SEQ ID NO: 1756261 - RNA, 16 nt, Human herpesvirus 1
uggaggacggcgccgg

SEQ ID NO: 1756262 - RNA, 12 nt, Human herpesvirus 1
gucgucucucuu

SEQ ID NO: 1756263 - RNA, 11 nt, Human herpesvirus 1
gcuacgacauc

SEQ ID NO: 1756264 - RNA, 19 nt, Human herpesvirus 1
agucucugggggccugucc

SEQ ID NO: 1756265 - RNA, 21 nt, Human herpesvirus 1
acccgugacacccuaccccag

SEQ ID NO: 1756266 - RNA, 22 nt, Human herpesvirus 1
uccggcagggggaugggggggc

SEQ ID NO: 1756267 - RNA, 12 nt, Human herpesvirus 1
gcgaccuggggu

SEQ ID NO: 1756268 - RNA, 11 nt, Human herpesvirus 1
ccccccccuuc

SEQ ID NO: 1756269 - RNA, 15 nt, Human herpesvirus 1
cgugcacagccuggc

SEQ ID NO: 1756270 - RNA, 19 nt, Human herpesvirus 1
gcccaguaacaugcgcacg

SEQ ID NO: 1756271 - RNA, 16 nt, Human herpesvirus 1
gugaccgcgugcccac

SEQ ID NO: 1756272 - RNA, 22 nt, Human herpesvirus 1
cucugggucugugccaccagcc

SEQ ID NO: 1756273 - RNA, 13 nt, Human herpesvirus 1
gggcucggcuccc

SEQ ID NO: 1756274 - RNA, 15 nt, Human herpesvirus 1
gaccggggucccagc

SEQ ID NO: 1756275 - RNA, 19 nt, Human herpesvirus 1
acgaguccauccugcggcu

SEQ ID NO: 1756276 - RNA, 14 nt, Human herpesvirus 1
ccugcgcuucgccg

SEQ ID NO: 1756277 - RNA, 17 nt, Human herpesvirus 1
cggcccccgaggccagc

SEQ ID NO: 1756278 - RNA, 19 nt, Human herpesvirus 1
uccggcgcgcgucucuggg

SEQ ID NO: 1756279 - RNA, 22 nt, Human herpesvirus 1
acccuggcgccaaagcugcugg

SEQ ID NO: 1756280 - RNA, 22 nt, Human herpesvirus 1
ugcgauucuuuuaucccacgcg

SEQ ID NO: 1756281 - RNA, 22 nt, Human herpesvirus 1
cacggguggccgggcguugggg

SEQ ID NO: 1756282 - RNA, 18 nt, Human herpesvirus 1
cgcuggucgucgggcgcc

SEQ ID NO: 1756283 - RNA, 16 nt, Human herpesvirus 1
gucgcgcuccucugcg

SEQ ID NO: 1756284 - RNA, 17 nt, Human herpesvirus 1
gcgucgacgucgcgccu

SEQ ID NO: 1756285 - RNA, 21 nt, Human herpesvirus 1
ugcuccgccgcggaucgggcc

SEQ ID NO: 1756286 - RNA, 17 nt, Human herpesvirus 1
cggcgcgagcucccugc

SEQ ID NO: 1756287 - RNA, 23 nt, Human herpesvirus 1
agcggccauggcccgccucggag

SEQ ID NO: 1756288 - RNA, 18 nt, Human herpesvirus 1
aucaccaaccacccgggg

SEQ ID NO: 1756289 - RNA, 18 nt, Human herpesvirus 1
gcaccuccccagcggcca

SEQ ID NO: 1756290 - RNA, 15 nt, Human herpesvirus 1
cgaccaucacccgag

SEQ ID NO: 1756291 - RNA, 15 nt, Human herpesvirus 1
agggagaaaccccag

SEQ ID NO: 1756292 - RNA, 19 nt, Human herpesvirus 1
cccgcaacgcgcuggggcu

SEQ ID NO: 1756293 - RNA, 17 nt, Human herpesvirus 1
accccaaauacagcaug

SEQ ID NO: 1756294 - RNA, 16 nt, Human herpesvirus 1
accagcuacgccgccg

SEQ ID NO: 1756295 - RNA, 17 nt, Human herpesvirus 1
cgccagcgcggcggggc

SEQ ID NO: 1756296 - RNA, 18 nt, Human herpesvirus 1
cgcggcguccgcgccccu

SEQ ID NO: 1756297 - RNA, 14 nt, Human herpesvirus 1
ccgccucggagccg

SEQ ID NO: 1756298 - RNA, 14 nt, Human herpesvirus 1
guacucgacccacu

SEQ ID NO: 1756299 - RNA, 17 nt, Human herpesvirus 1
gcuccugcgacccgaaa

SEQ ID NO: 1756300 - RNA, 14 nt, Human herpesvirus 1
ggcgcggugccuga

SEQ ID NO: 1756301 - RNA, 21 nt, Human herpesvirus 1
gaccguuuggggcgugucugu

SEQ ID NO: 1756302 - RNA, 20 nt, Human herpesvirus 1
ggaccacgugcacagccugg

SEQ ID NO: 1756303 - RNA, 11 nt, Human herpesvirus 1
ggugcuccgcc

SEQ ID NO: 1756304 - RNA, 19 nt, Human herpesvirus 1
cuuuuuuuauugggaggcg

SEQ ID NO: 1756305 - RNA, 21 nt, Human herpesvirus 1
cggacaacauccccccgacca

SEQ ID NO: 1756306 - RNA, 15 nt, Human herpesvirus 1
cagcccucccgaccg

SEQ ID NO: 1756307 - RNA, 16 nt, Human herpesvirus 1
ccaacgccuccccugu

SEQ ID NO: 1756308 - RNA, 21 nt, Human herpesvirus 1
gcauucgggccugccugcggc

SEQ ID NO: 1756309 - RNA, 17 nt, Human herpesvirus 1
cacugcacucccugccg

SEQ ID NO: 1756310 - RNA, 17 nt, Human herpesvirus 1
agccccgcauaucccac

SEQ ID NO: 1756311 - RNA, 19 nt, Human herpesvirus 1
gccgacucccggcuugccg

SEQ ID NO: 1756312 - RNA, 16 nt, Human herpesvirus 1
cgcucccucgaccacc

SEQ ID NO: 1756313 - RNA, 21 nt, Human herpesvirus 1
cuucauccccgagaaccagcg

SEQ ID NO: 1756314 - RNA, 19 nt, Human herpesvirus 1
gacgcccccucccuguuug

SEQ ID NO: 1756315 - RNA, 14 nt, Human herpesvirus 1
cuccuggcagcccu

SEQ ID NO: 1756316 - RNA, 18 nt, Human herpesvirus 1
ccgguuggccgcgcggca

SEQ ID NO: 1756317 - RNA, 15 nt, Human herpesvirus 1
gcucccucgaccacc

SEQ ID NO: 1756318 - RNA, 14 nt, Human herpesvirus 1
cauggccaugacgg

SEQ ID NO: 1756319 - RNA, 19 nt, Human herpesvirus 1
gaaccuagggaacccagag

SEQ ID NO: 1756320 - RNA, 16 nt, Human herpesvirus 1
ucaccaaccacccggg

SEQ ID NO: 1756321 - RNA, 22 nt, Human herpesvirus 1
guggagcaaaacgccucccccu

SEQ ID NO: 1756322 - RNA, 13 nt, Human herpesvirus 1
caccccccaugcc

SEQ ID NO: 1756323 - RNA, 16 nt, Human herpesvirus 1
uggggacgguggcgcc

SEQ ID NO: 1756324 - RNA, 12 nt, Human herpesvirus 1
cgacgucugucg

SEQ ID NO: 1756325 - RNA, 13 nt, Human herpesvirus 1
cucguuugccgcc

SEQ ID NO: 1756326 - RNA, 22 nt, Human herpesvirus 1
cugcgggccgcgguggacagcc

SEQ ID NO: 1756327 - RNA, 18 nt, Human herpesvirus 1
cugaaccccagccccaga

SEQ ID NO: 1756328 - RNA, 19 nt, Human herpesvirus 1
agucuucggggcccggccc

SEQ ID NO: 1756329 - RNA, 22 nt, Human herpesvirus 1
gcgccggguggcgccugugugu

SEQ ID NO: 1756330 - RNA, 22 nt, Human herpesvirus 1
ugugcuuucuggugcugucuga

SEQ ID NO: 1756331 - RNA, 22 nt, Human herpesvirus 1
ggccacggguguggggacccgc

SEQ ID NO: 1756332 - RNA, 15 nt, Human herpesvirus 1
gucccccuggaggug

SEQ ID NO: 1756333 - RNA, 21 nt, Human herpesvirus 1
gaccacgcccuuccccacggg

SEQ ID NO: 1756334 - RNA, 14 nt, Human herpesvirus 1
ggggauggggagag

SEQ ID NO: 1756335 - RNA, 20 nt, Human herpesvirus 1
uccgcaccaagccgcucucc

SEQ ID NO: 1756336 - RNA, 16 nt, Human herpesvirus 1
ccugaugcacgccccc

SEQ ID NO: 1756337 - RNA, 18 nt, Human herpesvirus 1
acgccauacacagccacc

SEQ ID NO: 1756338 - RNA, 20 nt, Human herpesvirus 1
gggccauguugggccgccac

SEQ ID NO: 1756339 - RNA, 16 nt, Human herpesvirus 1
cuggaaguaccugcag

SEQ ID NO: 1756340 - RNA, 15 nt, Human herpesvirus 1
guuacgcgggccccg

SEQ ID NO: 1756341 - RNA, 15 nt, Human herpesvirus 1
uggaucggcgccaug

SEQ ID NO: 1756342 - RNA, 15 nt, Human herpesvirus 1
cggccgcccuucccg

SEQ ID NO: 1756343 - RNA, 18 nt, Human herpesvirus 1
gggcuggcacaccaccga

SEQ ID NO: 1756344 - RNA, 22 nt, Human herpesvirus 1
cggcucuccgaucccaacuccu

SEQ ID NO: 1756345 - RNA, 18 nt, Human herpesvirus 1
cacauaaauuuggcuggu

SEQ ID NO: 1756346 - RNA, 19 nt, Human herpesvirus 1
gccucaacauaccccgcug

SEQ ID NO: 1756347 - RNA, 17 nt, Human herpesvirus 1
ggaggaaacccccgacc

SEQ ID NO: 1756348 - RNA, 16 nt, Human herpesvirus 1
ucgggcgccaaagccc

SEQ ID NO: 1756349 - RNA, 13 nt, Human herpesvirus 1
cuaagugcccagg

SEQ ID NO: 1756350 - RNA, 13 nt, Human herpesvirus 1
agcgaaggcugcc

SEQ ID NO: 1756351 - RNA, 22 nt, Human herpesvirus 1
gauggccauagccgccgaaggg

SEQ ID NO: 1756352 - RNA, 16 nt, Human herpesvirus 1
ccauccugcggcucgu

SEQ ID NO: 1756353 - RNA, 13 nt, Human herpesvirus 1
ucgagaugagcca

SEQ ID NO: 1756354 - RNA, 18 nt, Human herpesvirus 1
aguuuguggacccaaagc

SEQ ID NO: 1756355 - RNA, 22 nt, Human herpesvirus 1
cgucugggcccgacagaccucc

SEQ ID NO: 1756356 - RNA, 13 nt, Human herpesvirus 1
ccagggcggggcu

SEQ ID NO: 1756357 - RNA, 15 nt, Human herpesvirus 1
gcucggcggcagccc

SEQ ID NO: 1756358 - RNA, 23 nt, Human herpesvirus 1
gcaauuucaccgccccagcaccg

SEQ ID NO: 1756359 - RNA, 23 nt, Human herpesvirus 1
auauuuuucaauaaaaggcauua

SEQ ID NO: 1756360 - RNA, 22 nt, Human herpesvirus 1
ccgacggcccgaagccugcugu

SEQ ID NO: 1756361 - RNA, 16 nt, Human herpesvirus 1
gucuucggggcccggc

SEQ ID NO: 1756362 - RNA, 20 nt, Human herpesvirus 1
caggggccauguugggccgc

SEQ ID NO: 1756363 - RNA, 17 nt, Human herpesvirus 1
ugaguacgaggaucugu

SEQ ID NO: 1756364 - RNA, 15 nt, Human herpesvirus 1
ccucgaccaccaucc

SEQ ID NO: 1756365 - RNA, 12 nt, Human herpesvirus 1
ggggggcuuccg

SEQ ID NO: 1756366 - RNA, 23 nt, Human herpesvirus 1
gaaacucggccgucccggggcag

SEQ ID NO: 1756367 - RNA, 13 nt, Human herpesvirus 1
aggaggccgccac

SEQ ID NO: 1756368 - RNA, 12 nt, Human herpesvirus 1
cucgcaccagcc

SEQ ID NO: 1756369 - RNA, 20 nt, Human herpesvirus 1
uaaauuccggaaggggacac

SEQ ID NO: 1756370 - RNA, 21 nt, Human herpesvirus 1
gccccgcauaucccacccugg

SEQ ID NO: 1756371 - RNA, 21 nt, Human herpesvirus 1
auggguugugguuauaugcac

SEQ ID NO: 1756372 - RNA, 16 nt, Human herpesvirus 1
acgcgcgcgaccucac

SEQ ID NO: 1756373 - RNA, 18 nt, Human herpesvirus 1
gcucuccccugcugccau

SEQ ID NO: 1756374 - RNA, 18 nt, Human herpesvirus 1
cagccuguuuguccuggg

SEQ ID NO: 1756375 - RNA, 14 nt, Human herpesvirus 1
acuggccgggagca

SEQ ID NO: 1756376 - RNA, 18 nt, Human herpesvirus 1
ccuggcgagcccagaccc

SEQ ID NO: 1756377 - RNA, 20 nt, Human herpesvirus 1
gucccgcaauuucaccgccc

SEQ ID NO: 1756378 - RNA, 17 nt, Human herpesvirus 1
guccuggccggccuggc

SEQ ID NO: 1756379 - RNA, 18 nt, Human herpesvirus 1
gacccggcccuaacccca

SEQ ID NO: 1756380 - RNA, 23 nt, Human herpesvirus 1
gccgaggucccgugcaacccuua

SEQ ID NO: 1756381 - RNA, 14 nt, Human herpesvirus 1
auaaaagaccaaaa

SEQ ID NO: 1756382 - RNA, 14 nt, Human herpesvirus 1
cccggucgccgagc

SEQ ID NO: 1756383 - RNA, 22 nt, Human herpesvirus 1
cggcauggugaucgccugucuc

SEQ ID NO: 1756384 - RNA, 18 nt, Human herpesvirus 1
ggcauggggggggggcgg

SEQ ID NO: 1756385 - RNA, 13 nt, Human herpesvirus 1
ucacggcaaggag

SEQ ID NO: 1756386 - RNA, 17 nt, Human herpesvirus 1
gccccccgcugcggcca

SEQ ID NO: 1756387 - RNA, 13 nt, Human herpesvirus 1
ccaacuccagacc

SEQ ID NO: 1756388 - RNA, 13 nt, Human herpesvirus 1
ccuggaccagcug

SEQ ID NO: 1756389 - RNA, 13 nt, Human herpesvirus 1
gcagucccugagu

SEQ ID NO: 1756390 - RNA, 16 nt, Human herpesvirus 1
cccgaggccccacguc

SEQ ID NO: 1756391 - RNA, 13 nt, Human herpesvirus 1
gcgaaggcugccg

SEQ ID NO: 1756392 - RNA, 18 nt, Human herpesvirus 1
ggccgcgguggacagcca

SEQ ID NO: 1756393 - RNA, 19 nt, Human herpesvirus 1
gguccccucugggcccgcc

SEQ ID NO: 1756394 - RNA, 21 nt, Human herpesvirus 1
cugagccgcgccgacaucacc

SEQ ID NO: 1756395 - RNA, 16 nt, Human herpesvirus 1
gaucgcgcucgucacc

SEQ ID NO: 1756396 - RNA, 23 nt, Human herpesvirus 1
ccucugggucugugccaccagcc

SEQ ID NO: 1756397 - RNA, 16 nt, Human herpesvirus 1
cuggucagaggcccac

SEQ ID NO: 1756398 - RNA, 15 nt, Human herpesvirus 1
cacaacgccagccug

SEQ ID NO: 1756399 - RNA, 15 nt, Human herpesvirus 1
ucgggcgccaaagcc

SEQ ID NO: 1756400 - RNA, 20 nt, Human herpesvirus 1
ggcacgcccccuacgaggac

SEQ ID NO: 1756401 - RNA, 19 nt, Human herpesvirus 1
cccccuuguauguccccaa

SEQ ID NO: 1756402 - RNA, 13 nt, Human herpesvirus 1
ggaacgaggcccg

SEQ ID NO: 1756403 - RNA, 18 nt, Human herpesvirus 1
gcucccagagaccccagg

SEQ ID NO: 1756404 - RNA, 21 nt, Human herpesvirus 1
gccggcguuucugaccugcac

SEQ ID NO: 1756405 - RNA, 19 nt, Human herpesvirus 1
gcgccgcaaccagcugcac

SEQ ID NO: 1756406 - RNA, 21 nt, Human herpesvirus 1
ucuacccucuggacgcccggg

SEQ ID NO: 1756407 - RNA, 12 nt, Human herpesvirus 1
aggcgcuucccc

SEQ ID NO: 1756408 - RNA, 13 nt, Human herpesvirus 1
cgccugccccgcc

SEQ ID NO: 1756409 - RNA, 20 nt, Human herpesvirus 1
cccccggugccaauaaaccc

SEQ ID NO: 1756410 - RNA, 20 nt, Human herpesvirus 1
ggcccacgaucaccgcggga

SEQ ID NO: 1756411 - RNA, 17 nt, Human herpesvirus 1
ccccuuccccgcuguca

SEQ ID NO: 1756412 - RNA, 22 nt, Human herpesvirus 1
acgccgccaccguggccggccu

SEQ ID NO: 1756413 - RNA, 15 nt, Human herpesvirus 1
cgacccgaagcugcu

SEQ ID NO: 1756414 - RNA, 15 nt, Human herpesvirus 1
gcgguccugacggcc

SEQ ID NO: 1756415 - RNA, 21 nt, Human herpesvirus 1
acagggcgggccgccucgggg

SEQ ID NO: 1756416 - RNA, 15 nt, Human herpesvirus 1
uggacgcccgggcgc

SEQ ID NO: 1756417 - RNA, 15 nt, Human herpesvirus 1
uggagagcgaaggcu

SEQ ID NO: 1756418 - RNA, 12 nt, Human herpesvirus 1
uggccagcggcc

SEQ ID NO: 1756419 - RNA, 15 nt, Human herpesvirus 1
uggccagcggcccgg

SEQ ID NO: 1756420 - RNA, 21 nt, Human herpesvirus 1
uggccaggggcauccgggacc

SEQ ID NO: 1756421 - RNA, 20 nt, Human herpesvirus 1
uggcccccggacccgggccg

SEQ ID NO: 1756422 - RNA, 15 nt, Human herpesvirus 1
uggcauucgacgaca

SEQ ID NO: 1756423 - RNA, 15 nt, Human herpesvirus 1
uggcacaccgguccc

SEQ ID NO: 1756424 - RNA, 21 nt, Human herpesvirus 1
uggcccuggcggacggcggcc

SEQ ID NO: 1756425 - RNA, 17 nt, Human herpesvirus 1
cgggauccucggccagc

SEQ ID NO: 1756426 - RNA, 22 nt, Human herpesvirus 1
cgggcaaguaugccccccuggc

SEQ ID NO: 1756427 - RNA, 19 nt, Human herpesvirus 1
cgggccccggggagacagc

SEQ ID NO: 1756428 - RNA, 22 nt, Human herpesvirus 1
cgggccccggggagacagcgcc

SEQ ID NO: 1756429 - RNA, 18 nt, Human herpesvirus 1
cgggcaucggaacacgcc

SEQ ID NO: 1756430 - RNA, 18 nt, Human herpesvirus 1
cgggccacgccacccugc

SEQ ID NO: 1756431 - RNA, 21 nt, Human herpesvirus 1
cgggccacgccacccugcgcg

SEQ ID NO: 1756432 - RNA, 17 nt, Human herpesvirus 1
cgggccgccucgggggc

SEQ ID NO: 1756433 - RNA, 21 nt, Human herpesvirus 1
cgggccgugauuccucuccgc

SEQ ID NO: 1756434 - RNA, 19 nt, Human herpesvirus 1
cggcuguagcgccccggcg

SEQ ID NO: 1756435 - RNA, 15 nt, Human herpesvirus 1
cggcggccccuggcg

SEQ ID NO: 1756436 - RNA, 16 nt, Human herpesvirus 1
cggcggacccccggag

SEQ ID NO: 1756437 - RNA, 19 nt, Human herpesvirus 1
cggcguccgcgccccucug

SEQ ID NO: 1756438 - RNA, 16 nt, Human herpesvirus 1
cggcgugggcgcguuu

SEQ ID NO: 1756439 - RNA, 16 nt, Human herpesvirus 1
cggcgagguggacguc

SEQ ID NO: 1756440 - RNA, 21 nt, Human herpesvirus 1
cggcgccggggcucucggggc

SEQ ID NO: 1756441 - RNA, 23 nt, Human herpesvirus 1
cggcgcgacaacgagcccccgcc

SEQ ID NO: 1756442 - RNA, 20 nt, Human herpesvirus 1
cggcgcgcuucuacccgugu

SEQ ID NO: 1756443 - RNA, 10 nt, Human herpesvirus 1
cggcgcggcc

SEQ ID NO: 1756444 - RNA, 20 nt, Human herpesvirus 1
cggcgccgcccgccccuggc

SEQ ID NO: 1756445 - RNA, 15 nt, Human herpesvirus 1
cggcgcuggcggcca

SEQ ID NO: 1756446 - RNA, 17 nt, Human herpesvirus 1
cggccgcgacccaggcg

SEQ ID NO: 1756447 - RNA, 18 nt, Human herpesvirus 1
cggccggauucccgggcc

SEQ ID NO: 1756448 - RNA, 17 nt, Human herpesvirus 1
cggccguugucuccccg

SEQ ID NO: 1756449 - RNA, 13 nt, Human herpesvirus 1
cggccuccgcgua

SEQ ID NO: 1756450 - RNA, 20 nt, Human herpesvirus 1
cggccacgcaaaaccaggcc

SEQ ID NO: 1756451 - RNA, 17 nt, Human herpesvirus 1
cggccgccacccaggcg

SEQ ID NO: 1756452 - RNA, 13 nt, Human herpesvirus 1
cggccgccgcgga

SEQ ID NO: 1756453 - RNA, 20 nt, Human herpesvirus 1
cggccugggucuuccgcgga

SEQ ID NO: 1756454 - RNA, 14 nt, Human herpesvirus 1
cggcgaccgccagc

SEQ ID NO: 1756455 - RNA, 16 nt, Human herpesvirus 1
cggcgaccgccagccg

SEQ ID NO: 1756456 - RNA, 20 nt, Human herpesvirus 1
cggcgacuuugacgaggcca

SEQ ID NO: 1756457 - RNA, 17 nt, Human herpesvirus 1
cggcgcccaccccgugu

SEQ ID NO: 1756458 - RNA, 16 nt, Human herpesvirus 1
cggccaaccagcgucc

SEQ ID NO: 1756459 - RNA, 16 nt, Human herpesvirus 1
cggccaacgccgcgac

SEQ ID NO: 1756460 - RNA, 18 nt, Human herpesvirus 1
cggccacacagccggcca

SEQ ID NO: 1756461 - RNA, 14 nt, Human herpesvirus 1
cggcccacccuggc

SEQ ID NO: 1756462 - RNA, 15 nt, Human herpesvirus 1
cggcccacccuggcg

SEQ ID NO: 1756463 - RNA, 23 nt, Human herpesvirus 1
cggccccgcgucuggccccggcg

SEQ ID NO: 1756464 - RNA, 18 nt, Human herpesvirus 1
cggccccugggccccggg

SEQ ID NO: 1756465 - RNA, 14 nt, Human herpesvirus 1
gcccgccccucgcc

SEQ ID NO: 1756466 - RNA, 17 nt, Human herpesvirus 1
gcccgaagacacccccc

SEQ ID NO: 1756467 - RNA, 18 nt, Human herpesvirus 1
gcccgaagacacccccca

SEQ ID NO: 1756468 - RNA, 19 nt, Human herpesvirus 1
gcccgaccacacacccccc

SEQ ID NO: 1756469 - RNA, 20 nt, Human herpesvirus 1
gcccgaccacacacccccca

SEQ ID NO: 1756470 - RNA, 22 nt, Human herpesvirus 1
gccccgaacccugcgguccgga

SEQ ID NO: 1756471 - RNA, 20 nt, Human herpesvirus 1
gccccgauggcccuggacgc

SEQ ID NO: 1756472 - RNA, 23 nt, Human herpesvirus 1
gccccgauggcccuggacgcggc

SEQ ID NO: 1756473 - RNA, 18 nt, Human herpesvirus 1
gccccggaccccacgcac

SEQ ID NO: 1756474 - RNA, 16 nt, Human herpesvirus 1
gccccggccgccuggu

SEQ ID NO: 1756475 - RNA, 18 nt, Human herpesvirus 1
gccccgggacacccccca

SEQ ID NO: 1756476 - RNA, 11 nt, Human herpesvirus 1
gccccgggccg

SEQ ID NO: 1756477 - RNA, 19 nt, Human herpesvirus 1
gccacguaucugacggccg

SEQ ID NO: 1756478 - RNA, 22 nt, Human herpesvirus 1
gccagcgcggcggggcccggcc

SEQ ID NO: 1756479 - RNA, 23 nt, Human herpesvirus 1
gcccccccccccuugcgggcggu

SEQ ID NO: 1756480 - RNA, 19 nt, Human herpesvirus 1
gcccccggacccgggccgu

SEQ ID NO: 1756481 - RNA, 19 nt, Human herpesvirus 1
gcccccgccccucccccga

SEQ ID NO: 1756482 - RNA, 14 nt, Human herpesvirus 1
gcaggugugguucg

SEQ ID NO: 1756483 - RNA, 14 nt, Human herpesvirus 1
gccaacgcccugac

SEQ ID NO: 1756484 - RNA, 19 nt, Human herpesvirus 1
gccaauccgugucggggag

SEQ ID NO: 1756485 - RNA, 23 nt, Human herpesvirus 1
gccaaugcccucccugacggcca

SEQ ID NO: 1756486 - RNA, 23 nt, Human herpesvirus 1
gccacgagaucaaggacagcggc

SEQ ID NO: 1756487 - RNA, 18 nt, Human herpesvirus 1
gccacgcaaaaccaggcc

SEQ ID NO: 1756488 - RNA, 20 nt, Human herpesvirus 1
gccacuggccgggagcacca

SEQ ID NO: 1756489 - RNA, 14 nt, Human herpesvirus 1
gccacuuccccgac

SEQ ID NO: 1756490 - RNA, 16 nt, Human herpesvirus 1
gccagaacucgccccg

SEQ ID NO: 1756491 - RNA, 18 nt, Human herpesvirus 1
gccagacccaacccccgg

SEQ ID NO: 1756492 - RNA, 13 nt, Human herpesvirus 1
gacucucccccac

SEQ ID NO: 1756493 - RNA, 14 nt, Human herpesvirus 1
gacacgggcaccac

SEQ ID NO: 1756494 - RNA, 21 nt, Human herpesvirus 1
gacucguuauugcacccccga

SEQ ID NO: 1756495 - RNA, 12 nt, Human herpesvirus 1
gacgcccgggcg

SEQ ID NO: 1756496 - RNA, 14 nt, Human herpesvirus 1
gacgcgcagccggc

SEQ ID NO: 1756497 - RNA, 20 nt, Human herpesvirus 1
gacgcuggccgacguggcgc

SEQ ID NO: 1756498 - RNA, 15 nt, Human herpesvirus 1
cguaucugacggccg

SEQ ID NO: 1756499 - RNA, 15 nt, Human herpesvirus 1
gaagggcacgagcgc

SEQ ID NO: 1756500 - RNA, 15 nt, Human herpesvirus 1
cgggccugccugcgg

SEQ ID NO: 1756501 - RNA, 13 nt, Human herpesvirus 1
cgguggacagcca

SEQ ID NO: 1756502 - RNA, 15 nt, Human herpesvirus 1
cguacgcaugggccg

SEQ ID NO: 1756503 - RNA, 17 nt, Human herpesvirus 1
cgguuacucggcccccg

SEQ ID NO: 1756504 - RNA, 18 nt, Human herpesvirus 1
cguagagcuguggcacua

SEQ ID NO: 1756505 - RNA, 22 nt, Human herpesvirus 1
cguauacagaacauuguuuugg

SEQ ID NO: 1756506 - RNA, 19 nt, Human herpesvirus 1
gcccgauuuacagccccca

SEQ ID NO: 1756507 - RNA, 14 nt, Human herpesvirus 1
guucucccuguuca

SEQ ID NO: 1756508 - RNA, 13 nt, Human herpesvirus 1
guucgggcggacg

SEQ ID NO: 1756509 - RNA, 22 nt, Human herpesvirus 1
guuccgcuuccaucgccccugg

SEQ ID NO: 1756510 - RNA, 14 nt, Human herpesvirus 1
guuguggcucgggg

SEQ ID NO: 1756511 - RNA, 17 nt, Human herpesvirus 1
guuuacgcgggcacgca

SEQ ID NO: 1756512 - RNA, 14 nt, Human herpesvirus 1
guucugcugcaccg

SEQ ID NO: 1756513 - RNA, 13 nt, Human herpesvirus 1
uacacccaaguuc

SEQ ID NO: 1756514 - RNA, 23 nt, Human herpesvirus 1
uaaccgcaccccccucguccccc

SEQ ID NO: 1756515 - RNA, 17 nt, Human herpesvirus 1
ucaccgguuuccgcgac

SEQ ID NO: 1756516 - RNA, 17 nt, Human herpesvirus 1
ucacgcaagaccaggcc

SEQ ID NO: 1756517 - RNA, 17 nt, Human herpesvirus 1
ucacccacgccggcacc

SEQ ID NO: 1756518 - RNA, 21 nt, Human herpesvirus 1
ucaccccaaucccccccgacc

SEQ ID NO: 1756519 - RNA, 19 nt, Human herpesvirus 1
ucaccccgaagccccggcc

SEQ ID NO: 1756520 - RNA, 10 nt, Human herpesvirus 1
ucaccccgca

SEQ ID NO: 1756521 - RNA, 20 nt, Human herpesvirus 1
ucaccaccaaggcccgggcc

SEQ ID NO: 1756522 - RNA, 19 nt, Human herpesvirus 1
ucaccaugcagcgccggac

SEQ ID NO: 1756523 - RNA, 19 nt, Human herpesvirus 1
ucacacagcaucccccgcc

SEQ ID NO: 1756524 - RNA, 14 nt, Human herpesvirus 1
ucaaccacccggcc

SEQ ID NO: 1756525 - RNA, 17 nt, Human herpesvirus 1
ugacccagaccggcacc

SEQ ID NO: 1756526 - RNA, 20 nt, Human herpesvirus 1
ugacccuaggaggccgccac

SEQ ID NO: 1756527 - RNA, 12 nt, Human herpesvirus 1
ugaccugcaccg

SEQ ID NO: 1756528 - RNA, 14 nt, Human herpesvirus 1
ugacgaggccaagc

SEQ ID NO: 1756529 - RNA, 22 nt, Human herpesvirus 1
ugacgcacccccugaccccgcu

SEQ ID NO: 1756530 - RNA, 15 nt, Human herpesvirus 1
ugacggccgacgacg

SEQ ID NO: 1756531 - RNA, 16 nt, Human herpesvirus 1
ugacggccgacgacga

SEQ ID NO: 1756532 - RNA, 23 nt, Human herpesvirus 1
ugagccagacccaacccccggcc

SEQ ID NO: 1756533 - RNA, 13 nt, Human herpesvirus 1
ugcaucggcaagg

SEQ ID NO: 1756534 - RNA, 18 nt, Human herpesvirus 1
ugaccaacgacggcccga

SEQ ID NO: 1756535 - RNA, 19 nt, Human herpesvirus 1
ugaccaacgacggcccgac

SEQ ID NO: 1756536 - RNA, 19 nt, Human herpesvirus 1
ugaccagcgcacugcccga

SEQ ID NO: 1756537 - RNA, 17 nt, Human herpesvirus 1
uggaccuugggccgucg

SEQ ID NO: 1756538 - RNA, 15 nt, Human herpesvirus 1
uggaccccagcgacc

SEQ ID NO: 1756539 - RNA, 20 nt, Human herpesvirus 1
ugcucacgacccccaaguuc

SEQ ID NO: 1756540 - RNA, 17 nt, Human herpesvirus 1
ugcucagcgccaagguc

SEQ ID NO: 1756541 - RNA, 12 nt, Human herpesvirus 1
ugcccagcggcc

SEQ ID NO: 1756542 - RNA, 21 nt, Human herpesvirus 1
ugccccaccguugcccgggcc

SEQ ID NO: 1756543 - RNA, 23 nt, Human herpesvirus 1
ugcccccgcgccucccggcccgu

SEQ ID NO: 1756544 - RNA, 20 nt, Human herpesvirus 1
ugcccgacagggccgugccc

SEQ ID NO: 1756545 - RNA, 20 nt, Human herpesvirus 1
ugcccgcggaccaccgggcc

SEQ ID NO: 1756546 - RNA, 16 nt, Human herpesvirus 1
guccgcgggagguucc

SEQ ID NO: 1756547 - RNA, 16 nt, Human herpesvirus 1
gugcgauggcgacaca

SEQ ID NO: 1756548 - RNA, 14 nt, Human herpesvirus 1
gcggaugacggccc

SEQ ID NO: 1756549 - RNA, 22 nt, Human herpesvirus 1
gcggccuggguuggcgucggga

SEQ ID NO: 1756550 - RNA, 15 nt, Human herpesvirus 1
gcggagcucccggga

SEQ ID NO: 1756551 - RNA, 14 nt, Human herpesvirus 1
gcggagggcggcca

SEQ ID NO: 1756552 - RNA, 16 nt, Human herpesvirus 1
gcggagaacaccgaug

SEQ ID NO: 1756553 - RNA, 22 nt, Human herpesvirus 1
gcggacggcgcggggcccccgc

SEQ ID NO: 1756554 - RNA, 16 nt, Human herpesvirus 1
gcggacaacgugaucg

SEQ ID NO: 1756555 - RNA, 12 nt, Human herpesvirus 1
gcggacccccgg

SEQ ID NO: 1756556 - RNA, 23 nt, Human herpesvirus 1
gcgucgcgacagaacugcguuug

SEQ ID NO: 1756557 - RNA, 21 nt, Human herpesvirus 1
gcggcgugguaucggccgugu

SEQ ID NO: 1756558 - RNA, 13 nt, Human herpesvirus 1
gcggcucguggcg

SEQ ID NO: 1756559 - RNA, 14 nt, Human herpesvirus 1
gcggcucguggcgu

SEQ ID NO: 1756560 - RNA, 21 nt, Human herpesvirus 1
gcggcgguacguacgggaccg

SEQ ID NO: 1756561 - RNA, 16 nt, Human herpesvirus 1
gcggcgcuggcggcca

SEQ ID NO: 1756562 - RNA, 20 nt, Human herpesvirus 1
gcggcgaacgggggcccugc

SEQ ID NO: 1756563 - RNA, 14 nt, Human herpesvirus 1
gcggcgaggccggc

SEQ ID NO: 1756564 - RNA, 16 nt, Human herpesvirus 1
gcgugacgcacccccu

SEQ ID NO: 1756565 - RNA, 18 nt, Human herpesvirus 1
gcgugacgcacccccuga

SEQ ID NO: 1756566 - RNA, 21 nt, Human herpesvirus 1
gcguccgguuggccgcgcggc

SEQ ID NO: 1756567 - RNA, 18 nt, Human herpesvirus 1
gcgucggugauccccaac

SEQ ID NO: 1756568 - RNA, 14 nt, Human herpesvirus 1
gcugaggacgucga

SEQ ID NO: 1756569 - RNA, 14 nt, Human herpesvirus 1
gcugccagaccuca

SEQ ID NO: 1756570 - RNA, 21 nt, Human herpesvirus 1
gcugcccgacccggcccgagg

SEQ ID NO: 1756571 - RNA, 20 nt, Human herpesvirus 1
gcuuccgacgccccccgugg

SEQ ID NO: 1756572 - RNA, 20 nt, Human herpesvirus 1
gcuucggccguuucuccgcc

SEQ ID NO: 1756573 - RNA, 20 nt, Human herpesvirus 1
ggagggcguaacguuccgcc

SEQ ID NO: 1756574 - RNA, 13 nt, Human herpesvirus 1
ggagguccagcgc

SEQ ID NO: 1756575 - RNA, 20 nt, Human herpesvirus 1
ggagguccagcgccgcaacc

SEQ ID NO: 1756576 - RNA, 20 nt, Human herpesvirus 1
ggauggagagcgaaggcugc

SEQ ID NO: 1756577 - RNA, 14 nt, Human herpesvirus 1
ggauucccgggccg

SEQ ID NO: 1756578 - RNA, 13 nt, Human herpesvirus 1
gucagcgacgucc

SEQ ID NO: 1756579 - RNA, 20 nt, Human herpesvirus 1
guccaucaccacgcccagua

SEQ ID NO: 1756580 - RNA, 19 nt, Human herpesvirus 1
gucccaucugugcggggag

SEQ ID NO: 1756581 - RNA, 13 nt, Human herpesvirus 1
gucccgcccgugu

SEQ ID NO: 1756582 - RNA, 17 nt, Human herpesvirus 1
gugccugacgccugcca

SEQ ID NO: 1756583 - RNA, 11 nt, Human herpesvirus 1
ggugggggaac

SEQ ID NO: 1756584 - RNA, 12 nt, Human herpesvirus 1
gguguccgcggu

SEQ ID NO: 1756585 - RNA, 17 nt, Human herpesvirus 1
ggugauguugcccgcgg

SEQ ID NO: 1756586 - RNA, 14 nt, Human herpesvirus 1
gguggagcugcccg

SEQ ID NO: 1756587 - RNA, 16 nt, Human herpesvirus 1
gguggcgucgcaucga

SEQ ID NO: 1756588 - RNA, 15 nt, Human herpesvirus 1
ggucggcgaccgcca

SEQ ID NO: 1756589 - RNA, 17 nt, Human herpesvirus 1
ggucgaucccgaacgac

SEQ ID NO: 1756590 - RNA, 22 nt, Human herpesvirus 1
ggcacccaaggggccgugcggg

SEQ ID NO: 1756591 - RNA, 19 nt, Human herpesvirus 1
ggugccaaagcgcccgucg

SEQ ID NO: 1756592 - RNA, 20 nt, Human herpesvirus 1
ggugccaguccgcugcaccg

SEQ ID NO: 1756593 - RNA, 17 nt, Human herpesvirus 1
ggucuguauagcccggg

SEQ ID NO: 1756594 - RNA, 16 nt, Human herpesvirus 1
ggucggugacgcgcca

SEQ ID NO: 1756595 - RNA, 11 nt, Human herpesvirus 1
aaccggccgcc

SEQ ID NO: 1756596 - RNA, 17 nt, Human herpesvirus 1
aaccacccgcaccccca

SEQ ID NO: 1756597 - RNA, 11 nt, Human herpesvirus 1
aaccaggccgu

SEQ ID NO: 1756598 - RNA, 12 nt, Human herpesvirus 1
aacgacggcccg

SEQ ID NO: 1756599 - RNA, 21 nt, Human herpesvirus 1
aacgccgcuaccgacgcuccc

SEQ ID NO: 1756600 - RNA, 17 nt, Human herpesvirus 1
aacgagccgacggcccg

SEQ ID NO: 1756601 - RNA, 12 nt, Human herpesvirus 1
aacgaggcccgc

SEQ ID NO: 1756602 - RNA, 19 nt, Human herpesvirus 1
aacgauauguugggccgcg

SEQ ID NO: 1756603 - RNA, 21 nt, Human herpesvirus 1
acaacgaccaggcgcgccgcg

SEQ ID NO: 1756604 - RNA, 23 nt, Human herpesvirus 1
acaacgaguaucugcgggccgcg

SEQ ID NO: 1756605 - RNA, 21 nt, Human herpesvirus 1
acaacgccagccugcggccgg

SEQ ID NO: 1756606 - RNA, 15 nt, Human herpesvirus 1
acacagccggccacg

SEQ ID NO: 1756607 - RNA, 16 nt, Human herpesvirus 1
acaccgguccccggag

SEQ ID NO: 1756608 - RNA, 18 nt, Human herpesvirus 1
acaccugcaccacccccg

SEQ ID NO: 1756609 - RNA, 15 nt, Human herpesvirus 1
accaggccuccaccc

SEQ ID NO: 1756610 - RNA, 20 nt, Human herpesvirus 1
accauggccccccgcgucca

SEQ ID NO: 1756611 - RNA, 15 nt, Human herpesvirus 1
acccaacccccggcc

SEQ ID NO: 1756612 - RNA, 15 nt, Human herpesvirus 1
acccaagccgggacu

SEQ ID NO: 1756613 - RNA, 22 nt, Human herpesvirus 1
accccgugggcgacugcgaccc

SEQ ID NO: 1756614 - RNA, 18 nt, Human herpesvirus 1
accccgcaauuugcaccc

SEQ ID NO: 1756615 - RNA, 20 nt, Human herpesvirus 1
acccgacaacagcccccggg

SEQ ID NO: 1756616 - RNA, 19 nt, Human herpesvirus 1
accccgcuccugugcaccc

SEQ ID NO: 1756617 - RNA, 13 nt, Human herpesvirus 1
acccgccccggag

SEQ ID NO: 1756618 - RNA, 18 nt, Human herpesvirus 1
acccgccccuaaccaggc

SEQ ID NO: 1756619 - RNA, 16 nt, Human herpesvirus 1
acccacccaccaagac

SEQ ID NO: 1756620 - RNA, 18 nt, Human herpesvirus 1
acccagaccggcaccacc

SEQ ID NO: 1756621 - RNA, 14 nt, Human herpesvirus 1
accccagggaccuc

SEQ ID NO: 1756622 - RNA, 20 nt, Human herpesvirus 1
acccccaucuaaugccacgc

SEQ ID NO: 1756623 - RNA, 19 nt, Human herpesvirus 1
acccccgaguucccccggg

SEQ ID NO: 1756624 - RNA, 18 nt, Human herpesvirus 1
acccccgggcuacacggc

SEQ ID NO: 1756625 - RNA, 17 nt, Human herpesvirus 1
accccgaagccccggcc

SEQ ID NO: 1756626 - RNA, 14 nt, Human herpesvirus 1
acccugcugccccc

SEQ ID NO: 1756627 - RNA, 16 nt, Human herpesvirus 1
acccgcgacccccggg

SEQ ID NO: 1756628 - RNA, 20 nt, Human herpesvirus 1
acccgggccguuucccaccc

SEQ ID NO: 1756629 - RNA, 23 nt, Human herpesvirus 1
accgaagaggugcugccgccgcg

SEQ ID NO: 1756630 - RNA, 14 nt, Human herpesvirus 1
agcaccgacaccgc

SEQ ID NO: 1756631 - RNA, 19 nt, Human herpesvirus 1
agcacgccaccgacaccgc

SEQ ID NO: 1756632 - RNA, 17 nt, Human herpesvirus 1
agcgcccgucggucugc

SEQ ID NO: 1756633 - RNA, 14 nt, Human herpesvirus 1
accugcucacgacc

SEQ ID NO: 1756634 - RNA, 13 nt, Human herpesvirus 1
accuucaucgacc

SEQ ID NO: 1756635 - RNA, 14 nt, Human herpesvirus 1
accuugccccggcc

SEQ ID NO: 1756636 - RNA, 21 nt, Human herpesvirus 1
acgacccucgagauccccggg

SEQ ID NO: 1756637 - RNA, 19 nt, Human herpesvirus 1
acgacggcggcgaggccgg

SEQ ID NO: 1756638 - RNA, 16 nt, Human herpesvirus 1
aguucgagcagccgcg

SEQ ID NO: 1756639 - RNA, 14 nt, Human herpesvirus 1
aguuuccacccccc

SEQ ID NO: 1756640 - RNA, 15 nt, Human herpesvirus 1
agugaaagacacggg

SEQ ID NO: 1756641 - RNA, 15 nt, Human herpesvirus 1
aggacagcggccugc

SEQ ID NO: 1756642 - RNA, 15 nt, Human herpesvirus 1
agcguauccaccccc

SEQ ID NO: 1756643 - RNA, 18 nt, Human herpesvirus 1
ccaauaaagaucgcggua

SEQ ID NO: 1756644 - RNA, 14 nt, Human herpesvirus 1
ccacaaccucccgg

SEQ ID NO: 1756645 - RNA, 20 nt, Human herpesvirus 1
caucggcaaggacgcccgcg

SEQ ID NO: 1756646 - RNA, 19 nt, Human herpesvirus 1
ccacacagcccucccgacc

SEQ ID NO: 1756647 - RNA, 23 nt, Human herpesvirus 1
ccacaccaccuacuacgaugggg

SEQ ID NO: 1756648 - RNA, 23 nt, Human herpesvirus 1
ccacagcuuuggguucguuccgg

SEQ ID NO: 1756649 - RNA, 14 nt, Human herpesvirus 1
ccaccauggccccc

SEQ ID NO: 1756650 - RNA, 18 nt, Human herpesvirus 1
ccaccauuaucgggccgc

SEQ ID NO: 1756651 - RNA, 21 nt, Human herpesvirus 1
ccacccggagcuuucuuccgg

SEQ ID NO: 1756652 - RNA, 19 nt, Human herpesvirus 1
ccacccggccauccgcgcc

SEQ ID NO: 1756653 - RNA, 22 nt, Human herpesvirus 1
ccaccgggaagcagggcccgcc

SEQ ID NO: 1756654 - RNA, 21 nt, Human herpesvirus 1
ccaccuucaccaccaaccuga

SEQ ID NO: 1756655 - RNA, 23 nt, Human herpesvirus 1
ccaccuuccguccccugcccccc

SEQ ID NO: 1756656 - RNA, 20 nt, Human herpesvirus 1
ccaccgauagcguccgggcg

SEQ ID NO: 1756657 - RNA, 19 nt, Human herpesvirus 1
ccaccguugcccgggccgu

SEQ ID NO: 1756658 - RNA, 21 nt, Human herpesvirus 1
ccaccuacuacgaugggggcg

SEQ ID NO: 1756659 - RNA, 13 nt, Human herpesvirus 1
ccaccuccacccc

SEQ ID NO: 1756660 - RNA, 15 nt, Human herpesvirus 1
ccacgccgacgccaa

SEQ ID NO: 1756661 - RNA, 22 nt, Human herpesvirus 1
ccacgcagccagaacucgcccc

SEQ ID NO: 1756662 - RNA, 17 nt, Human herpesvirus 1
auuggcucggacgagac

SEQ ID NO: 1756663 - RNA, 12 nt, Human herpesvirus 1
auugggcgggag

SEQ ID NO: 1756664 - RNA, 21 nt, Human herpesvirus 1
cauccgggaagacgaccagcc

SEQ ID NO: 1756665 - RNA, 15 nt, Human herpesvirus 1
cauccgaacgcagcc

SEQ ID NO: 1756666 - RNA, 15 nt, Human herpesvirus 1
caucgacacgcgcgu

SEQ ID NO: 1756667 - RNA, 12 nt, Human herpesvirus 1
caucacccccga

SEQ ID NO: 1756668 - RNA, 17 nt, Human herpesvirus 1
caucagcucgcggcccg

SEQ ID NO: 1756669 - RNA, 13 nt, Human herpesvirus 1
caucccacccccc

SEQ ID NO: 1756670 - RNA, 19 nt, Human herpesvirus 1
cauccccgagaaccagcgc

SEQ ID NO: 1756671 - RNA, 21 nt, Human herpesvirus 1
ucggcgagcuggauggcgcgu

SEQ ID NO: 1756672 - RNA, 13 nt, Human herpesvirus 1
ucggcuccccgcc

SEQ ID NO: 1756673 - RNA, 19 nt, Human herpesvirus 1
ucgggaccaucaucggggg

SEQ ID NO: 1756674 - RNA, 17 nt, Human herpesvirus 1
ucgggaugcugccccgc

SEQ ID NO: 1756675 - RNA, 14 nt, Human herpesvirus 1
ucggcaggcaccgc

SEQ ID NO: 1756676 - RNA, 17 nt, Human herpesvirus 1
ucggccgccacccaggc

SEQ ID NO: 1756677 - RNA, 15 nt, Human herpesvirus 1
ucggccgccgacgac

SEQ ID NO: 1756678 - RNA, 20 nt, Human herpesvirus 1
ucggccguuucuccgcccga

SEQ ID NO: 1756679 - RNA, 23 nt, Human herpesvirus 1
ucgcucucggugcgucugggccc

SEQ ID NO: 1756680 - RNA, 12 nt, Human herpesvirus 1
ucggaggccccc

SEQ ID NO: 1756681 - RNA, 11 nt, Human herpesvirus 1
gggucgggcgc

SEQ ID NO: 1756682 - RNA, 20 nt, Human herpesvirus 1
gggucagcuccucgcgcggc

SEQ ID NO: 1756683 - RNA, 23 nt, Human herpesvirus 1
gggucccuccuuagcacgaucga

SEQ ID NO: 1756684 - RNA, 16 nt, Human herpesvirus 1
gguaccgcgugacccc

SEQ ID NO: 1756685 - RNA, 23 nt, Human herpesvirus 1
gguacgaagaccagggcccguug

SEQ ID NO: 1756686 - RNA, 14 nt, Human herpesvirus 1
gggccguugcccgg

SEQ ID NO: 1756687 - RNA, 20 nt, Human herpesvirus 1
gguacaacgcgacgcacauc

SEQ ID NO: 1756688 - RNA, 14 nt, Human herpesvirus 1
gguacgugaacgcu

SEQ ID NO: 1756689 - RNA, 19 nt, Human herpesvirus 1
gguauggcugcccccccgc

SEQ ID NO: 1756690 - RNA, 17 nt, Human herpesvirus 1
ggucaaaugccgggcca

SEQ ID NO: 1756691 - RNA, 15 nt, Human herpesvirus 1
ggucccaccugacgc

SEQ ID NO: 1756692 - RNA, 20 nt, Human herpesvirus 1
gguccucgugcccucgcggg

SEQ ID NO: 1756693 - RNA, 17 nt, Human herpesvirus 1
gguccuggccggccugg

SEQ ID NO: 1756694 - RNA, 16 nt, Human herpesvirus 1
ucgcgguagcccggcc

SEQ ID NO: 1756695 - RNA, 21 nt, Human herpesvirus 1
ucgcuagaccacgccccuuuc

SEQ ID NO: 1756696 - RNA, 18 nt, Human herpesvirus 1
gggccucugggucugugc

SEQ ID NO: 1756697 - RNA, 17 nt, Human herpesvirus 1
gggccuggugcucgugg

SEQ ID NO: 1756698 - RNA, 23 nt, Human herpesvirus 1
gggccuucuuucgaaccgugguc

SEQ ID NO: 1756699 - RNA, 16 nt, Human herpesvirus 1
gggccuugccgugguc

SEQ ID NO: 1756700 - RNA, 16 nt, Human herpesvirus 1
gggccuuggcggccgc

SEQ ID NO: 1756701 - RNA, 22 nt, Human herpesvirus 1
gggccggcgggugagcgcgcgg

SEQ ID NO: 1756702 - RNA, 19 nt, Human herpesvirus 1
gggccggggacggcgaaca

SEQ ID NO: 1756703 - RNA, 16 nt, Human herpesvirus 1
ggggucaggucugcgg

SEQ ID NO: 1756704 - RNA, 16 nt, Human herpesvirus 1
gggcaucgcggugguc

SEQ ID NO: 1756705 - RNA, 20 nt, Human herpesvirus 1
gggccaaccaagagacgucg

SEQ ID NO: 1756706 - RNA, 20 nt, Human herpesvirus 1
gggcccacgaucaccgcggg

SEQ ID NO: 1756707 - RNA, 14 nt, Human herpesvirus 1
gggcccgcgucggg

SEQ ID NO: 1756708 - RNA, 18 nt, Human herpesvirus 1
gggcccugcuccggcggg

SEQ ID NO: 1756709 - RNA, 16 nt, Human herpesvirus 1
gggccgccacgcgcgg

SEQ ID NO: 1756710 - RNA, 12 nt, Human herpesvirus 1
gggccgcgcgga

SEQ ID NO: 1756711 - RNA, 14 nt, Human herpesvirus 1
gggccgcgguggac

SEQ ID NO: 1756712 - RNA, 20 nt, Human herpesvirus 1
gggcacccaaggggccgugc

SEQ ID NO: 1756713 - RNA, 19 nt, Human herpesvirus 1
gggagcggugacgaacgcg

SEQ ID NO: 1756714 - RNA, 20 nt, Human herpesvirus 1
gggaggccgcaucgaacgca

SEQ ID NO: 1756715 - RNA, 20 nt, Human herpesvirus 1
ggcuguagcgccccggcgac

SEQ ID NO: 1756716 - RNA, 21 nt, Human herpesvirus 1
ggcuuuuguugcugcgcggcg

SEQ ID NO: 1756717 - RNA, 22 nt, Human herpesvirus 1
ggcgcauaaagggccggugguc

SEQ ID NO: 1756718 - RNA, 21 nt, Human herpesvirus 1
ggccuggacguccccgaggac

SEQ ID NO: 1756719 - RNA, 13 nt, Human herpesvirus 1
ggccuggcggcgg

SEQ ID NO: 1756720 - RNA, 19 nt, Human herpesvirus 1
ggccuccgcguacgaggac

SEQ ID NO: 1756721 - RNA, 14 nt, Human herpesvirus 1
ggccgcucgguggc

SEQ ID NO: 1756722 - RNA, 16 nt, Human herpesvirus 1
ggccggcgggugagcg

SEQ ID NO: 1756723 - RNA, 17 nt, Human herpesvirus 1
ggccacacagccggcca

SEQ ID NO: 1756724 - RNA, 20 nt, Human herpesvirus 1
ggccaacgacuuccucguac

SEQ ID NO: 1756725 - RNA, 18 nt, Human herpesvirus 1
ggccgcgguggacagcca

SEQ ID NO: 1756726 - RNA, 18 nt, Human herpesvirus 1
ggccuaauuguccgcgca

SEQ ID NO: 1756727 - RNA, 19 nt, Human herpesvirus 1
ggccuccacccccucgacc

SEQ ID NO: 1756728 - RNA, 21 nt, Human herpesvirus 1
ggccucucguucuccggggcc

SEQ ID NO: 1756729 - RNA, 20 nt, Human herpesvirus 1
ggccggcggcgcuccucgcc

SEQ ID NO: 1756730 - RNA, 17 nt, Human herpesvirus 1
ggccgugauuccucucc

SEQ ID NO: 1756731 - RNA, 20 nt, Human herpesvirus 1
ggccgugcacacgacggccu

SEQ ID NO: 1756732 - RNA, 14 nt, Human herpesvirus 1
ggccguggacggca

SEQ ID NO: 1756733 - RNA, 14 nt, Human herpesvirus 1
ggccguggcggcca

SEQ ID NO: 1756734 - RNA, 15 nt, Human herpesvirus 1
gcgcagaggcggcca

SEQ ID NO: 1756735 - RNA, 13 nt, Human herpesvirus 1
gcgcgccgcgagu

SEQ ID NO: 1756736 - RNA, 19 nt, Human herpesvirus 1
gcgcagcugggaccccggc

SEQ ID NO: 1756737 - RNA, 22 nt, Human herpesvirus 1
gcgcgccaucuggaccgggguc

SEQ ID NO: 1756738 - RNA, 20 nt, Human herpesvirus 1
ggcacgcccccuacgaggac

SEQ ID NO: 1756739 - RNA, 18 nt, Human herpesvirus 1
gcgcgcggaugcucggcg

SEQ ID NO: 1756740 - RNA, 17 nt, Human herpesvirus 1
ggcagcgcuccgacgac

SEQ ID NO: 1756741 - RNA, 21 nt, Human herpesvirus 1
gcgcaccuccuccgacgccca

SEQ ID NO: 1756742 - RNA, 22 nt, Human herpesvirus 1
ccggcagggggaugggggggca

SEQ ID NO: 1756743 - RNA, 20 nt, Human herpesvirus 1
ccggccccugggccccggga

SEQ ID NO: 1756744 - RNA, 21 nt, Human herpesvirus 1
ccggccccugggccccgggac

SEQ ID NO: 1756745 - RNA, 14 nt, Human herpesvirus 1
ccggccuggcggcg

SEQ ID NO: 1756746 - RNA, 17 nt, Human herpesvirus 1
ccggccuggcggcggcc

SEQ ID NO: 1756747 - RNA, 17 nt, Human herpesvirus 1
ccggccugggggccguc

SEQ ID NO: 1756748 - RNA, 23 nt, Human herpesvirus 1
cgcgcgaugcgaucgagccgugc

SEQ ID NO: 1756749 - RNA, 19 nt, Human herpesvirus 1
cgcggcaaagaccuuccgg

SEQ ID NO: 1756750 - RNA, 15 nt, Human herpesvirus 1
cgcggaucugcuccg

SEQ ID NO: 1756751 - RNA, 17 nt, Human herpesvirus 1
cgcggcccggggccugc

SEQ ID NO: 1756752 - RNA, 16 nt, Human herpesvirus 1
cgcggcgacaacgcgg

SEQ ID NO: 1756753 - RNA, 20 nt, Human herpesvirus 1
cgcgcgauagagucgacgac

SEQ ID NO: 1756754 - RNA, 17 nt, Human herpesvirus 1
cgcggagggcggccagc

SEQ ID NO: 1756755 - RNA, 20 nt, Human herpesvirus 1
cucgcgcguggaccuggggg

SEQ ID NO: 1756756 - RNA, 19 nt, Human herpesvirus 1
cguggacgggcucgccagc

SEQ ID NO: 1756757 - RNA, 20 nt, Human herpesvirus 1
cguggauaucgaguccgaag

SEQ ID NO: 1756758 - RNA, 17 nt, Human herpesvirus 1
cguggaccugggggacu

SEQ ID NO: 1756759 - RNA, 16 nt, Human herpesvirus 1
cguggagcaaaacgcc

SEQ ID NO: 1756760 - RNA, 20 nt, Human herpesvirus 1
cguggagcaaaacgccuccc

SEQ ID NO: 1756761 - RNA, 19 nt, Human herpesvirus 1
cguggcgucucgccggacg

SEQ ID NO: 1756762 - RNA, 16 nt, Human herpesvirus 1
cguggugcgucgggcc

SEQ ID NO: 1756763 - RNA, 17 nt, Human herpesvirus 1
cgugggccucacccacg

SEQ ID NO: 1756764 - RNA, 20 nt, Human herpesvirus 1
cgugugccugccguccgaac

SEQ ID NO: 1756765 - RNA, 13 nt, Human herpesvirus 1
cucgaucggccac

SEQ ID NO: 1756766 - RNA, 14 nt, Human herpesvirus 1
cucgaucggccacg

SEQ ID NO: 1756767 - RNA, 22 nt, Human herpesvirus 1
cucgaugcgcaucagcucgcgg

SEQ ID NO: 1756768 - RNA, 20 nt, Human herpesvirus 1
gcaccgucggaggcccccca

SEQ ID NO: 1756769 - RNA, 18 nt, Human herpesvirus 1
gcaccgugggacaccggc

SEQ ID NO: 1756770 - RNA, 20 nt, Human herpesvirus 1
gcaccuccuacgccggggcg

SEQ ID NO: 1756771 - RNA, 19 nt, Human herpesvirus 1
gaggucguuuucaugcccg

SEQ ID NO: 1756772 - RNA, 22 nt, Human herpesvirus 1
gagguggacgucggagacgagc

SEQ ID NO: 1756773 - RNA, 21 nt, Human herpesvirus 1
gaguacccgcucucgcgcgug

SEQ ID NO: 1756774 - RNA, 16 nt, Human herpesvirus 1
gcacccaaggggccgu

SEQ ID NO: 1756775 - RNA, 20 nt, Human herpesvirus 1
gcaccgcaccagcgcggagg

SEQ ID NO: 1756776 - RNA, 17 nt, Human herpesvirus 1
gcacauccucacccuca

SEQ ID NO: 1756777 - RNA, 13 nt, Human herpesvirus 1
gcaccacccccgc

SEQ ID NO: 1756778 - RNA, 17 nt, Human herpesvirus 1
gcacagaugggacgcca

SEQ ID NO: 1756779 - RNA, 14 nt, Human herpesvirus 1
gaguacgaggaucu

SEQ ID NO: 1756780 - RNA, 22 nt, Human herpesvirus 1
gaguugccccaccguugcccgg

SEQ ID NO: 1756781 - RNA, 15 nt, Human herpesvirus 1
ccggagcgugacgca

SEQ ID NO: 1756782 - RNA, 16 nt, Human herpesvirus 1
ccggagcucgcggcac

SEQ ID NO: 1756783 - RNA, 19 nt, Human herpesvirus 1
ccggagcucgcggcacgcg

SEQ ID NO: 1756784 - RNA, 17 nt, Human herpesvirus 1
ccggaggaaacccccga

SEQ ID NO: 1756785 - RNA, 21 nt, Human herpesvirus 1
ccggaggcgccgcgcggacgg

SEQ ID NO: 1756786 - RNA, 19 nt, Human herpesvirus 1
ccggaggcgccugccccgc

SEQ ID NO: 1756787 - RNA, 17 nt, Human herpesvirus 1
ccggcaccaacaacgac

SEQ ID NO: 1756788 - RNA, 15 nt, Human herpesvirus 1
ccggcacgccugggg

SEQ ID NO: 1756789 - RNA, 12 nt, Human herpesvirus 1
ccggacccccgc

SEQ ID NO: 1756790 - RNA, 19 nt, Human herpesvirus 1
ccggaaccugcucacgacc

SEQ ID NO: 1756791 - RNA, 24 nt, Human herpesvirus 1
ccggacgacgugguccgcggggcc

SEQ ID NO: 1756792 - RNA, 14 nt, Human herpesvirus 1
ccggacgcgcggcg

SEQ ID NO: 1756793 - RNA, 18 nt, Human herpesvirus 1
ccggacgcgcggcgcgag

SEQ ID NO: 1756794 - RNA, 15 nt, Human herpesvirus 1
ccggagccgggcgcg

SEQ ID NO: 1756795 - RNA, 16 nt, Human herpesvirus 1
ucgccccacgacccga

SEQ ID NO: 1756796 - RNA, 17 nt, Human herpesvirus 1
ucgccacacccgcgacc

SEQ ID NO: 1756797 - RNA, 14 nt, Human herpesvirus 1
ucgccacgucgacc

SEQ ID NO: 1756798 - RNA, 19 nt, Human herpesvirus 1
ucgccccuguggcccuggc

SEQ ID NO: 1756799 - RNA, 15 nt, Human herpesvirus 1
ucgccgacaucgaca

SEQ ID NO: 1756800 - RNA, 22 nt, Human herpesvirus 1
uccuacgccggggcggucguca

SEQ ID NO: 1756801 - RNA, 13 nt, Human herpesvirus 1
uccggggcccggc

SEQ ID NO: 1756802 - RNA, 17 nt, Human herpesvirus 1
uccgucuucggccccgc

SEQ ID NO: 1756803 - RNA, 15 nt, Human herpesvirus 1
uccguggccccggcc

SEQ ID NO: 1756804 - RNA, 19 nt, Human herpesvirus 1
uccugaugcacgcccccgc

SEQ ID NO: 1756805 - RNA, 14 nt, Human herpesvirus 1
ucgagcagccgcgc

SEQ ID NO: 1756806 - RNA, 20 nt, Human herpesvirus 1
ucgauccaggacgccgcgac

SEQ ID NO: 1756807 - RNA, 20 nt, Human herpesvirus 1
ucgcacgcguccagucggca

SEQ ID NO: 1756808 - RNA, 16 nt, Human herpesvirus 1
ucgaguucgccaggcu

SEQ ID NO: 1756809 - RNA, 15 nt, Human herpesvirus 1
uccgcggccccagcc

SEQ ID NO: 1756810 - RNA, 21 nt, Human herpesvirus 1
uccgccuggccugcgaggugc

SEQ ID NO: 1756811 - RNA, 16 nt, Human herpesvirus 1
ggcggcggucagcgac

SEQ ID NO: 1756812 - RNA, 21 nt, Human herpesvirus 1
uccgcggggccucccccggac

SEQ ID NO: 1756813 - RNA, 18 nt, Human herpesvirus 1
uccggagacauggccccc

SEQ ID NO: 1756814 - RNA, 19 nt, Human herpesvirus 1
uccggagaucuauaaggcc

SEQ ID NO: 1756815 - RNA, 21 nt, Human herpesvirus 1
uccggaggcgccgcgcggacg

SEQ ID NO: 1756816 - RNA, 19 nt, Human herpesvirus 1
uccggcaauucccgcggcc

SEQ ID NO: 1756817 - RNA, 13 nt, Human herpesvirus 1
uccggccuggggg

SEQ ID NO: 1756818 - RNA, 19 nt, Human herpesvirus 1
uccggccugggggccgucc

SEQ ID NO: 1756819 - RNA, 19 nt, Human herpesvirus 1
ggcgcucagggcggcgguc

SEQ ID NO: 1756820 - RNA, 16 nt, Human herpesvirus 1
ggcggaaaccguaacg

SEQ ID NO: 1756821 - RNA, 21 nt, Human herpesvirus 1
ggcgcuacgaccggugcguug

SEQ ID NO: 1756822 - RNA, 19 nt, Human herpesvirus 1
ggcgcuacuucaccuucgg

SEQ ID NO: 1756823 - RNA, 17 nt, Human herpesvirus 1
ggcggcgcuggcggcca

SEQ ID NO: 1756824 - RNA, 16 nt, Human herpesvirus 1
uccgagggccgggccc

SEQ ID NO: 1756825 - RNA, 17 nt, Human herpesvirus 1
uccgaguucccccggca

SEQ ID NO: 1756826 - RNA, 21 nt, Human herpesvirus 1
uccgcaagccccuagccccgc

SEQ ID NO: 1756827 - RNA, 14 nt, Human herpesvirus 1
ggcgcgcccucuuc

SEQ ID NO: 1756828 - RNA, 14 nt, Human herpesvirus 1
ggcgcggcucgugg

SEQ ID NO: 1756829 - RNA, 19 nt, Human herpesvirus 1
ggcgcgcgaaaucguggcg

SEQ ID NO: 1756830 - RNA, 19 nt, Human herpesvirus 1
ggcgccacaccacgccaca

SEQ ID NO: 1756831 - RNA, 18 nt, Human herpesvirus 1
ggcgccgcccgccccugg

SEQ ID NO: 1756832 - RNA, 22 nt, Human herpesvirus 1
gcgcgugcuguugggcgggacg

SEQ ID NO: 1756833 - RNA, 20 nt, Human herpesvirus 1
ggcgccagcguaaccuccgg

SEQ ID NO: 1756834 - RNA, 17 nt, Human herpesvirus 1
gcgcgucguucgggcgg

SEQ ID NO: 1756835 - RNA, 21 nt, Human herpesvirus 1
gcgccgucuuucuccccaacg

SEQ ID NO: 1756836 - RNA, 17 nt, Human herpesvirus 1
gcgcgaaaucguggcgc

SEQ ID NO: 1756837 - RNA, 14 nt, Human herpesvirus 1
gcgccggugguucg

SEQ ID NO: 1756838 - RNA, 20 nt, Human herpesvirus 1
gcgccgcugcccgacccggc

SEQ ID NO: 1756839 - RNA, 13 nt, Human herpesvirus 1
gcgccgacggaca

SEQ ID NO: 1756840 - RNA, 17 nt, Human herpesvirus 1
gcgcgaccucaccacca

SEQ ID NO: 1756841 - RNA, 22 nt, Human herpesvirus 1
gcgcgauccgacauguccgugc

SEQ ID NO: 1756842 - RNA, 14 nt, Human herpesvirus 1
gcgcgaugcgaucg

SEQ ID NO: 1756843 - RNA, 13 nt, Human herpesvirus 1
gcgcggcguccgc

SEQ ID NO: 1756844 - RNA, 14 nt, Human herpesvirus 1
gcgcggccgugggc

SEQ ID NO: 1756845 - RNA, 19 nt, Human herpesvirus 1
gcgcgggguuacgcgggcc

SEQ ID NO: 1756846 - RNA, 15 nt, Human herpesvirus 1
gaucauuacccccgu

SEQ ID NO: 1756847 - RNA, 14 nt, Human herpesvirus 1
gaucccccgcgcgg

SEQ ID NO: 1756848 - RNA, 15 nt, Human herpesvirus 1
gaucccucgcgaggg

SEQ ID NO: 1756849 - RNA, 21 nt, Human herpesvirus 1
gauccgacauguccgugccgc

SEQ ID NO: 1756850 - RNA, 15 nt, Human herpesvirus 1
gauccgcggcgacaa

SEQ ID NO: 1756851 - RNA, 22 nt, Human herpesvirus 1
gaucgccugucuccucguggcc

SEQ ID NO: 1756852 - RNA, 17 nt, Human herpesvirus 1
gagcgcccuccugacca

SEQ ID NO: 1756853 - RNA, 16 nt, Human herpesvirus 1
gagccgugcaccgugg

SEQ ID NO: 1756854 - RNA, 17 nt, Human herpesvirus 1
gagcggggccguggcgg

SEQ ID NO: 1756855 - RNA, 17 nt, Human herpesvirus 1
gaugcuguggacgacgg

SEQ ID NO: 1756856 - RNA, 17 nt, Human herpesvirus 1
gaugggcaucgugggcg

SEQ ID NO: 1756857 - RNA, 19 nt, Human herpesvirus 1
gaugccgugccgcccguug

SEQ ID NO: 1756858 - RNA, 17 nt, Human herpesvirus 1
cucaccggcggaccccc

SEQ ID NO: 1756859 - RNA, 21 nt, Human herpesvirus 1
cucaagcacacacgggggagc

SEQ ID NO: 1756860 - RNA, 21 nt, Human herpesvirus 1
cucaaguacaaccccucgcgg

SEQ ID NO: 1756861 - RNA, 17 nt, Human herpesvirus 1
cgcgcguggaccugggg

SEQ ID NO: 1756862 - RNA, 12 nt, Human herpesvirus 1
cgcgcuccuccc

SEQ ID NO: 1756863 - RNA, 18 nt, Human herpesvirus 1
cgcgcucaaccaccgcuc

SEQ ID NO: 1756864 - RNA, 18 nt, Human herpesvirus 1
gagccaacgcccugacca

SEQ ID NO: 1756865 - RNA, 23 nt, Human herpesvirus 1
gagccccccgcugcggccacaca

SEQ ID NO: 1756866 - RNA, 22 nt, Human herpesvirus 1
cuccccaagcaucgaccacgcc

SEQ ID NO: 1756867 - RNA, 12 nt, Human herpesvirus 1
cuccccagcggc

SEQ ID NO: 1756868 - RNA, 15 nt, Human herpesvirus 1
cuccccgccgcggcc

SEQ ID NO: 1756869 - RNA, 23 nt, Human herpesvirus 1
cucccaccagcugagccgcgccg

SEQ ID NO: 1756870 - RNA, 14 nt, Human herpesvirus 1
gagcgcaguccacg

SEQ ID NO: 1756871 - RNA, 14 nt, Human herpesvirus 1
gagccgcgcggcca

SEQ ID NO: 1756872 - RNA, 16 nt, Human herpesvirus 1
cucacuaucgagggcg

SEQ ID NO: 1756873 - RNA, 19 nt, Human herpesvirus 1
cucagcaacacgcucgcgg

SEQ ID NO: 1756874 - RNA, 22 nt, Human herpesvirus 1
cucagggccuccgaccccagac

SEQ ID NO: 1756875 - RNA, 14 nt, Human herpesvirus 1
cuccaggugcgccu

SEQ ID NO: 1756876 - RNA, 21 nt, Human herpesvirus 1
cucccaaccgcgacccuccgg

SEQ ID NO: 1756877 - RNA, 16 nt, Human herpesvirus 1
ccgcggccuggguugg

SEQ ID NO: 1756878 - RNA, 18 nt, Human herpesvirus 1
ccggcgcggugggcggca

SEQ ID NO: 1756879 - RNA, 16 nt, Human herpesvirus 1
ccgcgcuaugacggca

SEQ ID NO: 1756880 - RNA, 16 nt, Human herpesvirus 1
ccgcgccgucgggcgu

SEQ ID NO: 1756881 - RNA, 21 nt, Human herpesvirus 1
ccgcgggccacgccacccugc

SEQ ID NO: 1756882 - RNA, 15 nt, Human herpesvirus 1
ccggcggacccccgg

SEQ ID NO: 1756883 - RNA, 23 nt, Human herpesvirus 1
ccggcggacccccggaggcgccu

SEQ ID NO: 1756884 - RNA, 19 nt, Human herpesvirus 1
ccggcggcgacgugccccc

SEQ ID NO: 1756885 - RNA, 15 nt, Human herpesvirus 1
ccggcggcgcuggcg

SEQ ID NO: 1756886 - RNA, 23 nt, Human herpesvirus 1
ccggcgggguuauaggccacgca

SEQ ID NO: 1756887 - RNA, 13 nt, Human herpesvirus 1
ccggcggucgcgc

SEQ ID NO: 1756888 - RNA, 15 nt, Human herpesvirus 1
ccggcuacaggggcc

SEQ ID NO: 1756889 - RNA, 15 nt, Human herpesvirus 1
ccggcuagacccacg

SEQ ID NO: 1756890 - RNA, 18 nt, Human herpesvirus 1
ccgggacgaccacgagac

SEQ ID NO: 1756891 - RNA, 22 nt, Human herpesvirus 1
ccgggacuuuuggaugucgccc

SEQ ID NO: 1756892 - RNA, 15 nt, Human herpesvirus 1
ccgggagccccggac

SEQ ID NO: 1756893 - RNA, 23 nt, Human herpesvirus 1
ccgggaggggucgcacaccgaac

SEQ ID NO: 1756894 - RNA, 16 nt, Human herpesvirus 1
ccgggaagcagggccc

SEQ ID NO: 1756895 - RNA, 14 nt, Human herpesvirus 1
ccgcggaucgggcc

SEQ ID NO: 1756896 - RNA, 16 nt, Human herpesvirus 1
ccgggccacggcgccg

SEQ ID NO: 1756897 - RNA, 19 nt, Human herpesvirus 1
ccgggccggagcucgcggc

SEQ ID NO: 1756898 - RNA, 19 nt, Human herpesvirus 1
ccgggcgcaauugcggcca

SEQ ID NO: 1756899 - RNA, 21 nt, Human herpesvirus 1
ccggggagacagcgccugcgu

SEQ ID NO: 1756900 - RNA, 15 nt, Human herpesvirus 1
ccggggaucuggucc

SEQ ID NO: 1756901 - RNA, 16 nt, Human herpesvirus 1
ccggggaucugguccg

SEQ ID NO: 1756902 - RNA, 23 nt, Human herpesvirus 1
ccggggcaggcgguugucggggg

SEQ ID NO: 1756903 - RNA, 20 nt, Human herpesvirus 1
cgcgaaaucguggcgcggcu

SEQ ID NO: 1756904 - RNA, 21 nt, Human herpesvirus 1
cgccuggcgucuccucugggg

SEQ ID NO: 1756905 - RNA, 19 nt, Human herpesvirus 1
cgccuggcugacccacgcg

SEQ ID NO: 1756906 - RNA, 22 nt, Human herpesvirus 1
cgccuggcuggccgcucggugg

SEQ ID NO: 1756907 - RNA, 18 nt, Human herpesvirus 1
cgccugguugcggcccgc

SEQ ID NO: 1756908 - RNA, 17 nt, Human herpesvirus 1
ccggggcucucggggcc

SEQ ID NO: 1756909 - RNA, 22 nt, Human herpesvirus 1
ccggggcuggcacaccaccgac

SEQ ID NO: 1756910 - RNA, 13 nt, Human herpesvirus 1
ccgggggccuggu

SEQ ID NO: 1756911 - RNA, 15 nt, Human herpesvirus 1
ccggggggcggaacg

SEQ ID NO: 1756912 - RNA, 23 nt, Human herpesvirus 1
cgccugccaaccugauccgcggc

SEQ ID NO: 1756913 - RNA, 22 nt, Human herpesvirus 1
cgccugcguucaucggaccccc

SEQ ID NO: 1756914 - RNA, 14 nt, Human herpesvirus 1
cgcgacccaggcgg

SEQ ID NO: 1756915 - RNA, 20 nt, Human herpesvirus 1
cgcgaccccauggccgcucc

SEQ ID NO: 1756916 - RNA, 17 nt, Human herpesvirus 1
cgcgacccgcacgagcc

SEQ ID NO: 1756917 - RNA, 21 nt, Human herpesvirus 1
cgcgacccucaccggguacgg

SEQ ID NO: 1756918 - RNA, 17 nt, Human herpesvirus 1
cgcgaccaccccgagaa

SEQ ID NO: 1756919 - RNA, 23 nt, Human herpesvirus 1
cgcgacgggcagugaggguggca

SEQ ID NO: 1756920 - RNA, 13 nt, Human herpesvirus 1
ccgcgacccgcac

SEQ ID NO: 1756921 - RNA, 13 nt, Human herpesvirus 1
ccgcgacccggac

SEQ ID NO: 1756922 - RNA, 20 nt, Human herpesvirus 1
ccgcgacccggacgccgauc

SEQ ID NO: 1756923 - RNA, 12 nt, Human herpesvirus 1
ccgcgcgggggc

SEQ ID NO: 1756924 - RNA, 18 nt, Human herpesvirus 1
ccgcgcuccucccgccac

SEQ ID NO: 1756925 - RNA, 15 nt, Human herpesvirus 1
ccgcgaccaccccga

SEQ ID NO: 1756926 - RNA, 22 nt, Human herpesvirus 1
ccgcgacccaccgggcccggcc

SEQ ID NO: 1756927 - RNA, 18 nt, Human herpesvirus 1
ccgcgcauauccgggggc

SEQ ID NO: 1756928 - RNA, 14 nt, Human herpesvirus 1
ccgcgcauccgacc

SEQ ID NO: 1756929 - RNA, 19 nt, Human herpesvirus 1
ccgcgcaugaucuccggac

SEQ ID NO: 1756930 - RNA, 13 nt, Human herpesvirus 1
ccgcgccccccga

SEQ ID NO: 1756931 - RNA, 22 nt, Human herpesvirus 1
ccgcgccgacaucaccaccguc

SEQ ID NO: 1756932 - RNA, 19 nt, Human herpesvirus 1
ccgcgcggacggcgcgggg

SEQ ID NO: 1756933 - RNA, 21 nt, Human herpesvirus 1
ccgcgcggacggcgcggggcc

SEQ ID NO: 1756934 - RNA, 12 nt, Human herpesvirus 1
ccgccggcggcg

SEQ ID NO: 1756935 - RNA, 14 nt, Human herpesvirus 1
ccgccguccgaacc

SEQ ID NO: 1756936 - RNA, 15 nt, Human herpesvirus 1
ccgccucggcccgcg

SEQ ID NO: 1756937 - RNA, 14 nt, Human herpesvirus 1
ccgccuuccggacc

SEQ ID NO: 1756938 - RNA, 21 nt, Human herpesvirus 1
ccgcccucacagggcgggccg

SEQ ID NO: 1756939 - RNA, 14 nt, Human herpesvirus 1
ccgcccuggccgcg

SEQ ID NO: 1756940 - RNA, 19 nt, Human herpesvirus 1
ccgccgagucuucggggcc

SEQ ID NO: 1756941 - RNA, 15 nt, Human herpesvirus 1
ccgccgcccggggcc

SEQ ID NO: 1756942 - RNA, 20 nt, Human herpesvirus 1
ccgcccaaugggccgggccg

SEQ ID NO: 1756943 - RNA, 18 nt, Human herpesvirus 1
ccgccccccccccgucac

SEQ ID NO: 1756944 - RNA, 12 nt, Human herpesvirus 1
ccgcccccggca

SEQ ID NO: 1756945 - RNA, 13 nt, Human herpesvirus 1
ccgcccccggcau

SEQ ID NO: 1756946 - RNA, 12 nt, Human herpesvirus 1
ccgcccgccccu

SEQ ID NO: 1756947 - RNA, 23 nt, Human herpesvirus 1
ccgccauguuugcgggccugggc

SEQ ID NO: 1756948 - RNA, 21 nt, Human herpesvirus 1
ccgcccaacucucgcaccauc

SEQ ID NO: 1756949 - RNA, 11 nt, Human herpesvirus 1
uugcccucuuu

SEQ ID NO: 1756950 - RNA, 15 nt, Human herpesvirus 1
uugucgucucucuuc

SEQ ID NO: 1756951 - RNA, 19 nt, Human herpesvirus 1
uugucgucucucuuccccc

SEQ ID NO: 1756952 - RNA, 20 nt, Human herpesvirus 1
uucugaucgcguaccagccc

SEQ ID NO: 1756953 - RNA, 19 nt, Human herpesvirus 1
uucccccccgaccggcacc

SEQ ID NO: 1756954 - RNA, 16 nt, Human herpesvirus 1
uuccgagggccgggcc

SEQ ID NO: 1756955 - RNA, 22 nt, Human herpesvirus 1
uuaccgcccaaugggccgggcc

SEQ ID NO: 1756956 - RNA, 16 nt, Human herpesvirus 1
uuagccuccccgggcc

SEQ ID NO: 1756957 - RNA, 13 nt, Human herpesvirus 1
uguugggcgggac

SEQ ID NO: 1756958 - RNA, 13 nt, Human herpesvirus 1
ugugggguccuca

SEQ ID NO: 1756959 - RNA, 21 nt, Human herpesvirus 1
ugucucgucuccucuucuccc

SEQ ID NO: 1756960 - RNA, 23 nt, Human herpesvirus 1
uguccccgccgacaagccgcgau

SEQ ID NO: 1756961 - RNA, 22 nt, Human herpesvirus 1
uguccaccgggaagcagggccc

SEQ ID NO: 1756962 - RNA, 13 nt, Human herpesvirus 1
uggguccgggccc

SEQ ID NO: 1756963 - RNA, 22 nt, Human herpesvirus 1
uggucggcgucggugaucccca

SEQ ID NO: 1756964 - RNA, 18 nt, Human herpesvirus 1
uggucucuggccgcgccc

SEQ ID NO: 1756965 - RNA, 13 nt, Human herpesvirus 1
uggggggggggcg

SEQ ID NO: 1756966 - RNA, 15 nt, Human herpesvirus 1
uggggggguccggca

SEQ ID NO: 1756967 - RNA, 15 nt, Human herpesvirus 1
ugggcggccccggcc

SEQ ID NO: 1756968 - RNA, 20 nt, Human herpesvirus 1
ugcgggaguuucuccgcggu

SEQ ID NO: 1756969 - RNA, 16 nt, Human herpesvirus 1
ugcggggaggggggca

SEQ ID NO: 1756970 - RNA, 13 nt, Human herpesvirus 1
ugcggcccgcguu

SEQ ID NO: 1756971 - RNA, 15 nt, Human herpesvirus 1
ugcggccggcgggac

SEQ ID NO: 1756972 - RNA, 23 nt, Human herpesvirus 1
ugcgcgaucccccgcccccggcu

SEQ ID NO: 1756973 - RNA, 21 nt, Human herpesvirus 1
uggccgcucccaaccgcgacc

SEQ ID NO: 1756974 - RNA, 20 nt, Human herpesvirus 1
uggccggggagggcagggcc

SEQ ID NO: 1756975 - RNA, 20 nt, Human herpesvirus 1
uggcgcagcugggaccccgg

SEQ ID NO: 1756976 - RNA, 19 nt, Human herpesvirus 1
uggcgccgccugguccccc

SEQ ID NO: 1756977 - RNA, 13 nt, Human herpesvirus 1
uggcgccccggcc

SEQ ID NO: 1756978 - RNA, 14 nt, Human herpesvirus 1
uggcgccccggccc

SEQ ID NO: 1756979 - RNA, 20 nt, Human herpesvirus 1
uggcgcguaucugguccccg

SEQ ID NO: 1756980 - RNA, 12 nt, Human herpesvirus 1
uggcuccgggcc

SEQ ID NO: 1756981 - RNA, 13 nt, Human herpesvirus 1
uggcuggccgcuc

SEQ ID NO: 1756982 - RNA, 15 nt, Human herpesvirus 1
ugggacaccggcgcu

SEQ ID NO: 1756983 - RNA, 18 nt, Human herpesvirus 1
ugggagagccggccccgg

SEQ ID NO: 1756984 - RNA, 22 nt, Human herpesvirus 1
guggagcugcccggcggccagu

SEQ ID NO: 1756985 - RNA, 19 nt, Human herpesvirus 1
guggcgcacgaauccuucg

SEQ ID NO: 1756986 - RNA, 22 nt, Human herpesvirus 1
guggcgucucgccggacgacgu

SEQ ID NO: 1756987 - RNA, 13 nt, Human herpesvirus 1
guuauaggccacg

SEQ ID NO: 1756988 - RNA, 18 nt, Human herpesvirus 1
uaccgaaggcgcuucccc

SEQ ID NO: 1756989 - RNA, 15 nt, Human herpesvirus 1
gugguauuccugccg

SEQ ID NO: 1756990 - RNA, 19 nt, Human herpesvirus 1
guguaugucuggugugugg

SEQ ID NO: 1756991 - RNA, 14 nt, Human herpesvirus 1
uacgcgggccccgg

SEQ ID NO: 1756992 - RNA, 16 nt, Human herpesvirus 1
uacgcggggcuguacu

SEQ ID NO: 1756993 - RNA, 12 nt, Human herpesvirus 1
uagaccacgccc

SEQ ID NO: 1756994 - RNA, 15 nt, Human herpesvirus 1
uaccaucccccggcc

SEQ ID NO: 1756995 - RNA, 18 nt, Human herpesvirus 1
uaccccaguccccgggcc

SEQ ID NO: 1756996 - RNA, 18 nt, Human herpesvirus 1
uaccggaaggaacccgcg

SEQ ID NO: 1756997 - RNA, 23 nt, Human herpesvirus 1
uacgccgccaccguggccggccu

SEQ ID NO: 1756998 - RNA, 18 nt, Human herpesvirus 1
uacgcuaaucccccggcu

SEQ ID NO: 1756999 - RNA, 14 nt, Human herpesvirus 1
uagccuccccgggc

SEQ ID NO: 1757000 - RNA, 15 nt, Human herpesvirus 1
uagccuccccgggcc

SEQ ID NO: 1757001 - RNA, 12 nt, Human herpesvirus 1
uagcgccccggc

SEQ ID NO: 1757002 - RNA, 16 nt, Human herpesvirus 1
uagcgccccggcgacc

SEQ ID NO: 1757003 - RNA, 21 nt, Human herpesvirus 1
ucucaucgccgcgcguccccc

SEQ ID NO: 1757004 - RNA, 12 nt, Human herpesvirus 1
ucuccgcccgac

SEQ ID NO: 1757005 - RNA, 16 nt, Human herpesvirus 1
ucuccgucaccgcgac

SEQ ID NO: 1757006 - RNA, 14 nt, Human herpesvirus 1
ucugaucgacgacg

SEQ ID NO: 1757007 - RNA, 18 nt, Human herpesvirus 1
ugaucagacgagccgcgc

SEQ ID NO: 1757008 - RNA, 14 nt, Human herpesvirus 1
ugauccgcggcgac

SEQ ID NO: 1757009 - RNA, 20 nt, Human herpesvirus 1
ugauggcacaccgguccccg

SEQ ID NO: 1757010 - RNA, 18 nt, Human herpesvirus 1
ugauggccugugcuuucu

SEQ ID NO: 1757011 - RNA, 18 nt, Human herpesvirus 1
ugcacagccuggccgugc

SEQ ID NO: 1757012 - RNA, 16 nt, Human herpesvirus 1
ugcacgcccccgcguu

SEQ ID NO: 1757013 - RNA, 19 nt, Human herpesvirus 1
ugauaaugaucaagcggcg

SEQ ID NO: 1757014 - RNA, 16 nt, Human herpesvirus 1
ugaaaaucgguccccc

SEQ ID NO: 1757015 - RNA, 15 nt, Human herpesvirus 1
ugaaaccggccaacg

SEQ ID NO: 1757016 - RNA, 18 nt, Human herpesvirus 1
ucuggccaucgguccccu

SEQ ID NO: 1757017 - RNA, 13 nt, Human herpesvirus 1
ucuggccccggcg

SEQ ID NO: 1757018 - RNA, 24 nt, Human herpesvirus 1
ucugaccugcaccgaucgcagcgu

SEQ ID NO: 1757019 - RNA, 16 nt, Human herpesvirus 1
ugccuccaccgggccc

SEQ ID NO: 1757020 - RNA, 21 nt, Human herpesvirus 1
ugcacccccgacgaggugcgc

SEQ ID NO: 1757021 - RNA, 14 nt, Human herpesvirus 1
gccgcugaccccca

SEQ ID NO: 1757022 - RNA, 21 nt, Human herpesvirus 1
gccgcuggcaacucgccccac

SEQ ID NO: 1757023 - RNA, 15 nt, Human herpesvirus 1
gccggcaacugacgc

SEQ ID NO: 1757024 - RNA, 19 nt, Human herpesvirus 1
gccuacacucgacccccgc

SEQ ID NO: 1757025 - RNA, 17 nt, Human herpesvirus 1
gccuacuacucggaaag

SEQ ID NO: 1757026 - RNA, 18 nt, Human herpesvirus 1
gccggauucccgggccgg

SEQ ID NO: 1757027 - RNA, 22 nt, Human herpesvirus 1
gccgagccccccgcugcggcca

SEQ ID NO: 1757028 - RNA, 22 nt, Human herpesvirus 1
gccgagucuucggggcccggcc

SEQ ID NO: 1757029 - RNA, 13 nt, Human herpesvirus 1
gccgacggcccga

SEQ ID NO: 1757030 - RNA, 15 nt, Human herpesvirus 1
gccgaucccucgcga

SEQ ID NO: 1757031 - RNA, 12 nt, Human herpesvirus 1
gccgccacgcgc

SEQ ID NO: 1757032 - RNA, 17 nt, Human herpesvirus 1
gccgacaucgacacggu

SEQ ID NO: 1757033 - RNA, 18 nt, Human herpesvirus 1
gucuucgcgaacccccgu

SEQ ID NO: 1757034 - RNA, 21 nt, Human herpesvirus 1
gugcccccggauaugcgcggg

SEQ ID NO: 1757035 - RNA, 19 nt, Human herpesvirus 1
gucugcuccccaccccgga

SEQ ID NO: 1757036 - RNA, 14 nt, Human herpesvirus 1
gucuguccucggga

SEQ ID NO: 1757037 - RNA, 21 nt, Human herpesvirus 1
gucuccgaaagccaccaauag

SEQ ID NO: 1757038 - RNA, 20 nt, Human herpesvirus 1
gucucuggccgcgcccacua

SEQ ID NO: 1757039 - RNA, 14 nt, Human herpesvirus 1
gucgucgaucgacg

SEQ ID NO: 1757040 - RNA, 18 nt, Human herpesvirus 1
gucgucucucuucccccc

SEQ ID NO: 1757041 - RNA, 14 nt, Human herpesvirus 1
gucgggaggccaca

SEQ ID NO: 1757042 - RNA, 19 nt, Human herpesvirus 1
gucggcaagauccucgggc

SEQ ID NO: 1757043 - RNA, 20 nt, Human herpesvirus 1
guaggcccagcauguccgcc

SEQ ID NO: 1757044 - RNA, 23 nt, Human herpesvirus 1
guacuggaaguaccugcagacgg

SEQ ID NO: 1757045 - RNA, 22 nt, Human herpesvirus 1
guacguggucguccgcggaccg

SEQ ID NO: 1757046 - RNA, 23 nt, Human herpesvirus 1
ggacccaagccgccccagcaccg

SEQ ID NO: 1757047 - RNA, 15 nt, Human herpesvirus 1
ggaccgccucggucc

SEQ ID NO: 1757048 - RNA, 19 nt, Human herpesvirus 1
ggaccgccugccgcgcgga

SEQ ID NO: 1757049 - RNA, 20 nt, Human herpesvirus 1
ggaacgggaggccacagcgc

SEQ ID NO: 1757050 - RNA, 17 nt, Human herpesvirus 1
gcugcgguugcccccga

SEQ ID NO: 1757051 - RNA, 18 nt, Human herpesvirus 1
gcugcugcggccagucca

SEQ ID NO: 1757052 - RNA, 16 nt, Human herpesvirus 1
gcuggccgacguggcg

SEQ ID NO: 1757053 - RNA, 12 nt, Human herpesvirus 1
ggaaacccccga

SEQ ID NO: 1757054 - RNA, 15 nt, Human herpesvirus 1
ggaacacacccccgu

SEQ ID NO: 1757055 - RNA, 13 nt, Human herpesvirus 1
ggaacaccuccgc

SEQ ID NO: 1757056 - RNA, 18 nt, Human herpesvirus 1
gcucgcggagggcggcca

SEQ ID NO: 1757057 - RNA, 21 nt, Human herpesvirus 1
gcuccggggaucugguccgcc

SEQ ID NO: 1757058 - RNA, 21 nt, Human herpesvirus 1
gcguuucugucggaccaccgc

SEQ ID NO: 1757059 - RNA, 21 nt, Human herpesvirus 1
gcuccgaguucccccggcacg

SEQ ID NO: 1757060 - RNA, 17 nt, Human herpesvirus 1
gcgggcccccggccgcc

SEQ ID NO: 1757061 - RNA, 16 nt, Human herpesvirus 1
gcgggccgccucgggg

SEQ ID NO: 1757062 - RNA, 15 nt, Human herpesvirus 1
gccuggaucccaacg

SEQ ID NO: 1757063 - RNA, 15 nt, Human herpesvirus 1
gcgggagacgggcgg

SEQ ID NO: 1757064 - RNA, 13 nt, Human herpesvirus 1
gccuccacccccu

SEQ ID NO: 1757065 - RNA, 14 nt, Human herpesvirus 1
gccuccaccgggcc

SEQ ID NO: 1757066 - RNA, 16 nt, Human herpesvirus 1
gccucccaacccccua

SEQ ID NO: 1757067 - RNA, 12 nt, Human herpesvirus 1
gccucccgauca

SEQ ID NO: 1757068 - RNA, 15 nt, Human herpesvirus 1
gccuccgaccccaga

SEQ ID NO: 1757069 - RNA, 18 nt, Human herpesvirus 1
gccucggcccgcgaacgg

SEQ ID NO: 1757070 - RNA, 23 nt, Human herpesvirus 1
gccucggcccgcgaacggcacgc

SEQ ID NO: 1757071 - RNA, 18 nt, Human herpesvirus 1
gccucguggggcuggacg

SEQ ID NO: 1757072 - RNA, 23 nt, Human herpesvirus 1
gccucucacacagcaucccccgc

SEQ ID NO: 1757073 - RNA, 12 nt, Human herpesvirus 1
gccucucccccc

SEQ ID NO: 1757074 - RNA, 21 nt, Human herpesvirus 1
gccugacccucuccgggaugg

SEQ ID NO: 1757075 - RNA, 14 nt, Human herpesvirus 1
gccugacgccugcc

SEQ ID NO: 1757076 - RNA, 18 nt, Human herpesvirus 1
gcguuaaccgcacccccc

SEQ ID NO: 1757077 - RNA, 18 nt, Human herpesvirus 1
gcguucaucggacccccc

SEQ ID NO: 1757078 - RNA, 13 nt, Human herpesvirus 1
gcgggcgccaugg

SEQ ID NO: 1757079 - RNA, 12 nt, Human herpesvirus 1
gcggggccgugg

SEQ ID NO: 1757080 - RNA, 20 nt, Human herpesvirus 1
gcggggccuuggcggccgcc

SEQ ID NO: 1757081 - RNA, 17 nt, Human herpesvirus 1
gcgggguuauaggccac

SEQ ID NO: 1757082 - RNA, 20 nt, Human herpesvirus 1
cgggcgaaaaaaggcggugc

SEQ ID NO: 1757083 - RNA, 19 nt, Human herpesvirus 1
cggacggcgcggggccccc

SEQ ID NO: 1757084 - RNA, 18 nt, Human herpesvirus 1
cggggcagagccgcccgu

SEQ ID NO: 1757085 - RNA, 13 nt, Human herpesvirus 1
cggggccagcgcc

SEQ ID NO: 1757086 - RNA, 22 nt, Human herpesvirus 1
cggggcggggccuuggcggccg

SEQ ID NO: 1757087 - RNA, 22 nt, Human herpesvirus 1
cggggcggggguguccgggggc

SEQ ID NO: 1757088 - RNA, 20 nt, Human herpesvirus 1
cggggccugcuacagccgcc

SEQ ID NO: 1757089 - RNA, 14 nt, Human herpesvirus 1
cgggggcccugcca

SEQ ID NO: 1757090 - RNA, 12 nt, Human herpesvirus 1
cggguccgcggg

SEQ ID NO: 1757091 - RNA, 18 nt, Human herpesvirus 1
cgggugcuucccacgcga

SEQ ID NO: 1757092 - RNA, 15 nt, Human herpesvirus 1
cggguucccccggca

SEQ ID NO: 1757093 - RNA, 19 nt, Human herpesvirus 1
cggggaccuugccccggcc

SEQ ID NO: 1757094 - RNA, 11 nt, Human herpesvirus 1
cgggcgcggcg

SEQ ID NO: 1757095 - RNA, 12 nt, Human herpesvirus 1
cgggcguccgcc

SEQ ID NO: 1757096 - RNA, 19 nt, Human herpesvirus 1
cgggcuacccucacuaucg

SEQ ID NO: 1757097 - RNA, 22 nt, Human herpesvirus 1
cgggcuacccucacuaucgagg

SEQ ID NO: 1757098 - RNA, 21 nt, Human herpesvirus 1
cgggcuacuggugggugagcg

SEQ ID NO: 1757099 - RNA, 13 nt, Human herpesvirus 1
cgggcgaugagcc

SEQ ID NO: 1757100 - RNA, 18 nt, Human herpesvirus 1
cgggcgcaauugcggcca

SEQ ID NO: 1757101 - RNA, 12 nt, Human herpesvirus 1
cgggcgcguccc

SEQ ID NO: 1757102 - RNA, 17 nt, Human herpesvirus 1
cgggcgcguccccggcc

SEQ ID NO: 1757103 - RNA, 12 nt, Human herpesvirus 1
cgggcgcugggu

SEQ ID NO: 1757104 - RNA, 13 nt, Human herpesvirus 1
cgggcggcccugc

SEQ ID NO: 1757105 - RNA, 23 nt, Human herpesvirus 1
cgucgccuggcugacccacgcgg

SEQ ID NO: 1757106 - RNA, 20 nt, Human herpesvirus 1
cgucgcccuccaccaacgcc

SEQ ID NO: 1757107 - RNA, 19 nt, Human herpesvirus 1
cgucgccgcgggccacgcc

SEQ ID NO: 1757108 - RNA, 17 nt, Human herpesvirus 1
cguccgguuggccgcgc

SEQ ID NO: 1757109 - RNA, 19 nt, Human herpesvirus 1
cgucgacucuaucgcgcgc

SEQ ID NO: 1757110 - RNA, 15 nt, Human herpesvirus 1
cgucgcacgcgucca

SEQ ID NO: 1757111 - RNA, 22 nt, Human herpesvirus 1
cugaucauuacccccguccgca

SEQ ID NO: 1757112 - RNA, 16 nt, Human herpesvirus 1
cugacgccucagggcc

SEQ ID NO: 1757113 - RNA, 17 nt, Human herpesvirus 1
cugacgccucagggccu

SEQ ID NO: 1757114 - RNA, 20 nt, Human herpesvirus 1
cugagcgcccuccugaccaa

SEQ ID NO: 1757115 - RNA, 22 nt, Human herpesvirus 1
cgucagcgaggauaaccugggg

SEQ ID NO: 1757116 - RNA, 17 nt, Human herpesvirus 1
cggugcuccgccgcgga

SEQ ID NO: 1757117 - RNA, 19 nt, Human herpesvirus 1
cgucacgcaagaccaggcc

SEQ ID NO: 1757118 - RNA, 16 nt, Human herpesvirus 1
cguccaucaccacgcc

SEQ ID NO: 1757119 - RNA, 23 nt, Human herpesvirus 1
cguccauucucccgaaccaggcc

SEQ ID NO: 1757120 - RNA, 16 nt, Human herpesvirus 1
cgucccggcucuccga

SEQ ID NO: 1757121 - RNA, 22 nt, Human herpesvirus 1
cgucccguagucccaucccccg

SEQ ID NO: 1757122 - RNA, 21 nt, Human herpesvirus 1
cguccgccgagucuucggggc

SEQ ID NO: 1757123 - RNA, 13 nt, Human herpesvirus 1
cguccgcgccccu

SEQ ID NO: 1757124 - RNA, 14 nt, Human herpesvirus 1
cggugaccgcgugc

SEQ ID NO: 1757125 - RNA, 19 nt, Human herpesvirus 1
cggugacgcgccaaacgcc

SEQ ID NO: 1757126 - RNA, 17 nt, Human herpesvirus 1
cggugauguucgggcgg

SEQ ID NO: 1757127 - RNA, 16 nt, Human herpesvirus 1
cggugcgucugggccc

SEQ ID NO: 1757128 - RNA, 18 nt, Human herpesvirus 1
cggugaacgaagcggcca

SEQ ID NO: 1757129 - RNA, 21 nt, Human herpesvirus 1
cggucauccacgccgacgcca

SEQ ID NO: 1757130 - RNA, 13 nt, Human herpesvirus 1
cgguccacggcca

SEQ ID NO: 1757131 - RNA, 16 nt, Human herpesvirus 1
cgguccccucugggcc

SEQ ID NO: 1757132 - RNA, 20 nt, Human herpesvirus 1
cgguccggagccgcgcggcc

SEQ ID NO: 1757133 - RNA, 21 nt, Human herpesvirus 1
cgguccggagccgcgcggcca

SEQ ID NO: 1757134 - RNA, 15 nt, Human herpesvirus 1
cgguccugacggcca

SEQ ID NO: 1757135 - RNA, 13 nt, Human herpesvirus 1
cugcaucggcaag

SEQ ID NO: 1757136 - RNA, 16 nt, Human herpesvirus 1
cugcacgaccugcgcu

SEQ ID NO: 1757137 - RNA, 16 nt, Human herpesvirus 1
cugcagaaucacgagc

SEQ ID NO: 1757138 - RNA, 18 nt, Human herpesvirus 1
cuggacguccccgaggac

SEQ ID NO: 1757139 - RNA, 22 nt, Human herpesvirus 1
cuggaccggggucccagcggca

SEQ ID NO: 1757140 - RNA, 17 nt, Human herpesvirus 1
cuggccaaucggcggcc

SEQ ID NO: 1757141 - RNA, 18 nt, Human herpesvirus 1
cuggccaaucggcggccg

SEQ ID NO: 1757142 - RNA, 11 nt, Human herpesvirus 1
cuggccggccu

SEQ ID NO: 1757143 - RNA, 21 nt, Human herpesvirus 1
cuggccggccuggcggcggcc

SEQ ID NO: 1757144 - RNA, 23 nt, Human herpesvirus 1
cuuuaagcgcugcugcggccagu

SEQ ID NO: 1757145 - RNA, 13 nt, Human herpesvirus 1
cuuggcggccgcc

SEQ ID NO: 1757146 - RNA, 20 nt, Human herpesvirus 1
cuugggguugacgcuggggg

SEQ ID NO: 1757147 - RNA, 16 nt, Human herpesvirus 1
cuggcgcaaccacgcc

SEQ ID NO: 1757148 - RNA, 23 nt, Human herpesvirus 1
cuggcgcccccccaacgggggac

SEQ ID NO: 1757149 - RNA, 15 nt, Human herpesvirus 1
cuggcguacaacggc

SEQ ID NO: 1757150 - RNA, 16 nt, Human herpesvirus 1
cuucggccccgcgucu

SEQ ID NO: 1757151 - RNA, 13 nt, Human herpesvirus 1
cuucuccgcgugg

SEQ ID NO: 1757152 - RNA, 21 nt, Human herpesvirus 1
cuugaagaucgccggguggca

SEQ ID NO: 1757153 - RNA, 15 nt, Human herpesvirus 1
gaccaacgacggccc

SEQ ID NO: 1757154 - RNA, 15 nt, Human herpesvirus 1
gaccacacacccccc

SEQ ID NO: 1757155 - RNA, 14 nt, Human herpesvirus 1
gacagggccgugcc

SEQ ID NO: 1757156 - RNA, 14 nt, Human herpesvirus 1
gacauccaccaccc

SEQ ID NO: 1757157 - RNA, 16 nt, Human herpesvirus 1
gacaugaccgcccgcc

SEQ ID NO: 1757158 - RNA, 13 nt, Human herpesvirus 1
gacccaaaauaau

SEQ ID NO: 1757159 - RNA, 15 nt, Human herpesvirus 1
gaccagcgcacugcc

SEQ ID NO: 1757160 - RNA, 22 nt, Human herpesvirus 1
gaccagcugaccgacccuccgg

SEQ ID NO: 1757161 - RNA, 15 nt, Human herpesvirus 1
gaccaggucccccac

SEQ ID NO: 1757162 - RNA, 14 nt, Human herpesvirus 1
gacccaacccccgg

SEQ ID NO: 1757163 - RNA, 13 nt, Human herpesvirus 1
gacccaccaauaa

SEQ ID NO: 1757164 - RNA, 14 nt, Human herpesvirus 1
gacccaccgggccc

SEQ ID NO: 1757165 - RNA, 20 nt, Human herpesvirus 1
gaccccagcgaccccacggc

SEQ ID NO: 1757166 - RNA, 11 nt, Human herpesvirus 1
gacccgacuca

SEQ ID NO: 1757167 - RNA, 23 nt, Human herpesvirus 1
gacccuaggaggccgccacgcgc

SEQ ID NO: 1757168 - RNA, 12 nt, Human herpesvirus 1
gacccucuccgg

SEQ ID NO: 1757169 - RNA, 14 nt, Human herpesvirus 1
gaccgacaccccca

SEQ ID NO: 1757170 - RNA, 12 nt, Human herpesvirus 1
gaagagccugcc

SEQ ID NO: 1757171 - RNA, 18 nt, Human herpesvirus 1
gaagaggaggagggggcc

SEQ ID NO: 1757172 - RNA, 19 nt, Human herpesvirus 1
gccccaccccccgacgcca

SEQ ID NO: 1757173 - RNA, 19 nt, Human herpesvirus 1
gcccacgaucaccgcggga

SEQ ID NO: 1757174 - RNA, 15 nt, Human herpesvirus 1
gcccacgccucgggc

SEQ ID NO: 1757175 - RNA, 20 nt, Human herpesvirus 1
gcccagcgcagaggcggcca

SEQ ID NO: 1757176 - RNA, 14 nt, Human herpesvirus 1
gcccacuucccccc

SEQ ID NO: 1757177 - RNA, 15 nt, Human herpesvirus 1
gcccagacgcccucc

SEQ ID NO: 1757178 - RNA, 15 nt, Human herpesvirus 1
gcccacgucgccccg

SEQ ID NO: 1757179 - RNA, 18 nt, Human herpesvirus 1
gcccaaugggccgggccg

SEQ ID NO: 1757180 - RNA, 19 nt, Human herpesvirus 1
gcccaaugggccgggccgc

SEQ ID NO: 1757181 - RNA, 11 nt, Human herpesvirus 1
gcccacccccc

SEQ ID NO: 1757182 - RNA, 14 nt, Human herpesvirus 1
gccaucaaccccgc

SEQ ID NO: 1757183 - RNA, 13 nt, Human herpesvirus 1
gccauccucacgc

SEQ ID NO: 1757184 - RNA, 16 nt, Human herpesvirus 1
gccaguccgcugcacc

SEQ ID NO: 1757185 - RNA, 17 nt, Human herpesvirus 1
gccaugcuggcggacgg

SEQ ID NO: 1757186 - RNA, 14 nt, Human herpesvirus 1
gccaugcgugccgu

SEQ ID NO: 1757187 - RNA, 18 nt, Human herpesvirus 1
gccaggucggcgaccgcc

SEQ ID NO: 1757188 - RNA, 19 nt, Human herpesvirus 1
gccaggucggcgaccgcca

SEQ ID NO: 1757189 - RNA, 22 nt, Human herpesvirus 1
gacucaagcacacacgggggag

SEQ ID NO: 1757190 - RNA, 16 nt, Human herpesvirus 1
gccaggaccgccugcc

SEQ ID NO: 1757191 - RNA, 16 nt, Human herpesvirus 1
gacguuuuccucgucc

SEQ ID NO: 1757192 - RNA, 16 nt, Human herpesvirus 1
gacggguacgugaacg

SEQ ID NO: 1757193 - RNA, 18 nt, Human herpesvirus 1
gacggugagcgaggacgg

SEQ ID NO: 1757194 - RNA, 22 nt, Human herpesvirus 1
gacguccugggccaccugacgc

SEQ ID NO: 1757195 - RNA, 21 nt, Human herpesvirus 1
gacgucugggaacacaggcgc

SEQ ID NO: 1757196 - RNA, 16 nt, Human herpesvirus 1
cggaccaccgcccccc

SEQ ID NO: 1757197 - RNA, 23 nt, Human herpesvirus 1
cggaccaccgccccccuguuccc

SEQ ID NO: 1757198 - RNA, 20 nt, Human herpesvirus 1
cggacccguuccagcccccc

SEQ ID NO: 1757199 - RNA, 17 nt, Human herpesvirus 1
cgcugugccaucgcgcc

SEQ ID NO: 1757200 - RNA, 18 nt, Human herpesvirus 1
cgcuguugccggaacgca

SEQ ID NO: 1757201 - RNA, 16 nt, Human herpesvirus 1
cgcuuccaucgccccu

SEQ ID NO: 1757202 - RNA, 17 nt, Human herpesvirus 1
cggaaacguucgcgcgc

SEQ ID NO: 1757203 - RNA, 15 nt, Human herpesvirus 1
cggaacgggaggcca

SEQ ID NO: 1757204 - RNA, 17 nt, Human herpesvirus 1
cgcgucgacgucgcgcc

SEQ ID NO: 1757205 - RNA, 18 nt, Human herpesvirus 1
cgcgugcccacgucgccc

SEQ ID NO: 1757206 - RNA, 19 nt, Human herpesvirus 1
cgcgugcccacgucgcccc

SEQ ID NO: 1757207 - RNA, 23 nt, Human herpesvirus 1
cgcggggggggcgggcucguccc

SEQ ID NO: 1757208 - RNA, 23 nt, Human herpesvirus 1
cgcgggucuguauagcccgggca

SEQ ID NO: 1757209 - RNA, 13 nt, Human herpesvirus 1
cgcgguucgcguc

SEQ ID NO: 1757210 - RNA, 16 nt, Human herpesvirus 1
cgcagaggcggccaga

SEQ ID NO: 1757211 - RNA, 22 nt, Human herpesvirus 1
cgcagcaccuccuacgccgggg

SEQ ID NO: 1757212 - RNA, 17 nt, Human herpesvirus 1
cgccgaccgacuccccg

SEQ ID NO: 1757213 - RNA, 16 nt, Human herpesvirus 1
cgccgacggacagcca

SEQ ID NO: 1757214 - RNA, 21 nt, Human herpesvirus 1
cgcacgcucccaucgcgggcg

SEQ ID NO: 1757215 - RNA, 22 nt, Human herpesvirus 1
cgcacuugcggcaagacccggg

SEQ ID NO: 1757216 - RNA, 22 nt, Human herpesvirus 1
cgcagacgaaaagccccgggcc

SEQ ID NO: 1757217 - RNA, 13 nt, Human herpesvirus 1
cgccgacucccgg

SEQ ID NO: 1757218 - RNA, 13 nt, Human herpesvirus 1
cgccgagcccccc

SEQ ID NO: 1757219 - RNA, 21 nt, Human herpesvirus 1
cgccgaucccgacuccccgga

SEQ ID NO: 1757220 - RNA, 21 nt, Human herpesvirus 1
cgccgcaaagccacccacgcc

SEQ ID NO: 1757221 - RNA, 22 nt, Human herpesvirus 1
cgccgcaaagccacccacgccg

SEQ ID NO: 1757222 - RNA, 19 nt, Human herpesvirus 1
cgccgccaccguggccggc

SEQ ID NO: 1757223 - RNA, 16 nt, Human herpesvirus 1
cgccgcgacccgcacg

SEQ ID NO: 1757224 - RNA, 16 nt, Human herpesvirus 1
cgccgcgagauggccg

SEQ ID NO: 1757225 - RNA, 19 nt, Human herpesvirus 1
cgccgcgagauggccgccc

SEQ ID NO: 1757226 - RNA, 17 nt, Human herpesvirus 1
cgcgggcguucccgagc

SEQ ID NO: 1757227 - RNA, 19 nt, Human herpesvirus 1
cgcggggacacgauuccgg

SEQ ID NO: 1757228 - RNA, 15 nt, Human herpesvirus 1
cgcggggccuccccc

SEQ ID NO: 1757229 - RNA, 19 nt, Human herpesvirus 1
cgcggggccucccccggac

SEQ ID NO: 1757230 - RNA, 13 nt, Human herpesvirus 1
cgcgggcgacgcc

SEQ ID NO: 1757231 - RNA, 19 nt, Human herpesvirus 1
cgcgguagcccggccgugu

SEQ ID NO: 1757232 - RNA, 23 nt, Human herpesvirus 1
cgccgcggcucccggcccgggcc

SEQ ID NO: 1757233 - RNA, 15 nt, Human herpesvirus 1
cgccgcgccccgccg

SEQ ID NO: 1757234 - RNA, 19 nt, Human herpesvirus 1
cgccgcugacccccaccgc

SEQ ID NO: 1757235 - RNA, 11 nt, Human herpesvirus 1
cgcggcgcgcu

SEQ ID NO: 1757236 - RNA, 16 nt, Human herpesvirus 1
cgcgggaggccgcccc

SEQ ID NO: 1757237 - RNA, 18 nt, Human herpesvirus 1
cgcgggcccccggccgcc

SEQ ID NO: 1757238 - RNA, 21 nt, Human herpesvirus 1
cgaccggacccgcaucccccg

SEQ ID NO: 1757239 - RNA, 17 nt, Human herpesvirus 1
cgaccgccggcggcgac

SEQ ID NO: 1757240 - RNA, 18 nt, Human herpesvirus 1
cgaacaucuugagggggg

SEQ ID NO: 1757241 - RNA, 15 nt, Human herpesvirus 1
cgaacgcggaccccc

SEQ ID NO: 1757242 - RNA, 13 nt, Human herpesvirus 1
ccuugccccggcc

SEQ ID NO: 1757243 - RNA, 18 nt, Human herpesvirus 1
ccugucggccgccgacga

SEQ ID NO: 1757244 - RNA, 22 nt, Human herpesvirus 1
ccuuacgcuaaucccccggcuc

SEQ ID NO: 1757245 - RNA, 17 nt, Human herpesvirus 1
ccugaucgccggcgcgg

SEQ ID NO: 1757246 - RNA, 18 nt, Human herpesvirus 1
ccugaccaacgacggccc

SEQ ID NO: 1757247 - RNA, 16 nt, Human herpesvirus 1
ccugagcccggcggcg

SEQ ID NO: 1757248 - RNA, 18 nt, Human herpesvirus 1
ccugaucauuacccccgu

SEQ ID NO: 1757249 - RNA, 19 nt, Human herpesvirus 1
ccucggacgccacaccauc

SEQ ID NO: 1757250 - RNA, 13 nt, Human herpesvirus 1
ccucgcgcggcga

SEQ ID NO: 1757251 - RNA, 16 nt, Human herpesvirus 1
ccucgccacgucgacc

SEQ ID NO: 1757252 - RNA, 18 nt, Human herpesvirus 1
ccucgccccauacucccg

SEQ ID NO: 1757253 - RNA, 14 nt, Human herpesvirus 1
ccucgaccaccauc

SEQ ID NO: 1757254 - RNA, 13 nt, Human herpesvirus 1
ccucgaugacguc

SEQ ID NO: 1757255 - RNA, 13 nt, Human herpesvirus 1
ccucgcaccagcc

SEQ ID NO: 1757256 - RNA, 15 nt, Human herpesvirus 1
ccgaccacccggaac

SEQ ID NO: 1757257 - RNA, 11 nt, Human herpesvirus 1
ccuccaugggg

SEQ ID NO: 1757258 - RNA, 14 nt, Human herpesvirus 1
ccgaagccccggcc

SEQ ID NO: 1757259 - RNA, 13 nt, Human herpesvirus 1
ccucccgccaccc

SEQ ID NO: 1757260 - RNA, 15 nt, Human herpesvirus 1
ccucccugacggcca

SEQ ID NO: 1757261 - RNA, 17 nt, Human herpesvirus 1
ccuccgcuggggccccc

SEQ ID NO: 1757262 - RNA, 14 nt, Human herpesvirus 1
cgaggagguggacg

SEQ ID NO: 1757263 - RNA, 14 nt, Human herpesvirus 1
cgcacgagccgggg

SEQ ID NO: 1757264 - RNA, 23 nt, Human herpesvirus 1
cgcacgcauacgggcggccaccc

SEQ ID NO: 1757265 - RNA, 16 nt, Human herpesvirus 1
cgaccggguucccccg

SEQ ID NO: 1757266 - RNA, 14 nt, Human herpesvirus 1
cgaccuggggcgcg

SEQ ID NO: 1757267 - RNA, 17 nt, Human herpesvirus 1
cgacgucgcgccugggu

SEQ ID NO: 1757268 - RNA, 16 nt, Human herpesvirus 1
cccagaugcccacggg

SEQ ID NO: 1757269 - RNA, 18 nt, Human herpesvirus 1
cccagauuguccgcgggg

SEQ ID NO: 1757270 - RNA, 12 nt, Human herpesvirus 1
ccccggccccca

SEQ ID NO: 1757271 - RNA, 15 nt, Human herpesvirus 1
cccagaccccgggcg

SEQ ID NO: 1757272 - RNA, 13 nt, Human herpesvirus 1
cccacgucgcccc

SEQ ID NO: 1757273 - RNA, 13 nt, Human herpesvirus 1
ccccuggcgcgcg

SEQ ID NO: 1757274 - RNA, 20 nt, Human herpesvirus 1
cccgaaacuucaucaccccc

SEQ ID NO: 1757275 - RNA, 19 nt, Human herpesvirus 1
cccgaaccaggccguuccg

SEQ ID NO: 1757276 - RNA, 23 nt, Human herpesvirus 1
ccccggguuccgcgaccaccccg

SEQ ID NO: 1757277 - RNA, 14 nt, Human herpesvirus 1
ccccggucuccccg

SEQ ID NO: 1757278 - RNA, 17 nt, Human herpesvirus 1
ccccggucuccccggga

SEQ ID NO: 1757279 - RNA, 12 nt, Human herpesvirus 1
ccccgucacccg

SEQ ID NO: 1757280 - RNA, 19 nt, Human herpesvirus 1
cccgaagccugcuguuucg

SEQ ID NO: 1757281 - RNA, 15 nt, Human herpesvirus 1
cccgaugcggcggcg

SEQ ID NO: 1757282 - RNA, 21 nt, Human herpesvirus 1
cccgcacagaugggacgccau

SEQ ID NO: 1757283 - RNA, 12 nt, Human herpesvirus 1
cccgcccaccgg

SEQ ID NO: 1757284 - RNA, 13 nt, Human herpesvirus 1
cccgcccccggca

SEQ ID NO: 1757285 - RNA, 13 nt, Human herpesvirus 1
cccgcccccggcu

SEQ ID NO: 1757286 - RNA, 18 nt, Human herpesvirus 1
cccgcccgaccgcgugua

SEQ ID NO: 1757287 - RNA, 13 nt, Human herpesvirus 1
cccugugucgcgc

SEQ ID NO: 1757288 - RNA, 16 nt, Human herpesvirus 1
cccuguuugucgacga

SEQ ID NO: 1757289 - RNA, 19 nt, Human herpesvirus 1
cccuguuugucgccuggcu

SEQ ID NO: 1757290 - RNA, 16 nt, Human herpesvirus 1
ccgaacagcucgcgga

SEQ ID NO: 1757291 - RNA, 20 nt, Human herpesvirus 1
ccgaacgcagccccgcugga

SEQ ID NO: 1757292 - RNA, 15 nt, Human herpesvirus 1
ccgacagggccgugc

SEQ ID NO: 1757293 - RNA, 15 nt, Human herpesvirus 1
cccucaaccccggcg

SEQ ID NO: 1757294 - RNA, 23 nt, Human herpesvirus 1
cccucuuggaggaccccgugggg

SEQ ID NO: 1757295 - RNA, 18 nt, Human herpesvirus 1
cccugcugcaggcccccc

SEQ ID NO: 1757296 - RNA, 12 nt, Human herpesvirus 1
cccuggccgugg

SEQ ID NO: 1757297 - RNA, 16 nt, Human herpesvirus 1
cccgcauaucccaccc

SEQ ID NO: 1757298 - RNA, 18 nt, Human herpesvirus 1
cccgccgcaaagccaccc

SEQ ID NO: 1757299 - RNA, 20 nt, Human herpesvirus 1
cccguccgaagaucgcgugu

SEQ ID NO: 1757300 - RNA, 16 nt, Human herpesvirus 1
cccguccgcaucgauc

SEQ ID NO: 1757301 - RNA, 20 nt, Human herpesvirus 1
cccguggggacgguggcgcc

SEQ ID NO: 1757302 - RNA, 15 nt, Human herpesvirus 1
cccgugugccgcgcc

SEQ ID NO: 1757303 - RNA, 15 nt, Human herpesvirus 1
cccuccccccgcccc

SEQ ID NO: 1757304 - RNA, 22 nt, Human herpesvirus 1
cccucccgcugcgcaucccccc

SEQ ID NO: 1757305 - RNA, 13 nt, Human herpesvirus 1
cccucccgucacc

SEQ ID NO: 1757306 - RNA, 22 nt, Human herpesvirus 1
cccuccggggguccggcgcgug

SEQ ID NO: 1757307 - RNA, 17 nt, Human herpesvirus 1
cccacgaucaccgcggg

SEQ ID NO: 1757308 - RNA, 22 nt, Human herpesvirus 1
cccaauaaacguauaucgcuac

SEQ ID NO: 1757309 - RNA, 19 nt, Human herpesvirus 1
cccacacaacgcuccgccc

SEQ ID NO: 1757310 - RNA, 17 nt, Human herpesvirus 1
cccacccacuccucccc

SEQ ID NO: 1757311 - RNA, 15 nt, Human herpesvirus 1
cccaccccccacggg

SEQ ID NO: 1757312 - RNA, 18 nt, Human herpesvirus 1
cccaccccccgacgccag

SEQ ID NO: 1757313 - RNA, 17 nt, Human herpesvirus 1
cccaccgggcccggcca

SEQ ID NO: 1757314 - RNA, 18 nt, Human herpesvirus 1
cccaccguugcccgggcc

SEQ ID NO: 1757315 - RNA, 22 nt, Human herpesvirus 1
cccaacaaagacggugacgccg

SEQ ID NO: 1757316 - RNA, 15 nt, Human herpesvirus 1
cccaacgccacgcag

SEQ ID NO: 1757317 - RNA, 13 nt, Human herpesvirus 1
cccaagccgcccc

SEQ ID NO: 1757318 - RNA, 21 nt, Human herpesvirus 1
ccaucgguccccucugggccc

SEQ ID NO: 1757319 - RNA, 19 nt, Human herpesvirus 1
ccaucuacguugcggggcg

SEQ ID NO: 1757320 - RNA, 18 nt, Human herpesvirus 1
aagcuagccgaggcccgg

SEQ ID NO: 1757321 - RNA, 19 nt, Human herpesvirus 1
aagucgguagcgggggacg

SEQ ID NO: 1757322 - RNA, 14 nt, Human herpesvirus 1
acacgggcaccaca

SEQ ID NO: 1757323 - RNA, 14 nt, Human herpesvirus 1
acacgacggccucg

SEQ ID NO: 1757324 - RNA, 21 nt, Human herpesvirus 1
acacgagcacccugcugcccc

SEQ ID NO: 1757325 - RNA, 14 nt, Human herpesvirus 1
aaucggcggccgcc

SEQ ID NO: 1757326 - RNA, 22 nt, Human herpesvirus 1
aaucagcguucacccggcggcg

SEQ ID NO: 1757327 - RNA, 17 nt, Human herpesvirus 1
accgcaacuucccaccc

SEQ ID NO: 1757328 - RNA, 22 nt, Human herpesvirus 1
accgcagacgaaaagccccggg

SEQ ID NO: 1757329 - RNA, 12 nt, Human herpesvirus 1
accgcaucgaca

SEQ ID NO: 1757330 - RNA, 16 nt, Human herpesvirus 1
accgccggcgaggugg

SEQ ID NO: 1757331 - RNA, 17 nt, Human herpesvirus 1
accgcguguuccccggg

SEQ ID NO: 1757332 - RNA, 17 nt, Human herpesvirus 1
accgcgguucgcguccc

SEQ ID NO: 1757333 - RNA, 15 nt, Human herpesvirus 1
accggaaggaacccg

SEQ ID NO: 1757334 - RNA, 23 nt, Human herpesvirus 1
accggacccgcaucccccgucug

SEQ ID NO: 1757335 - RNA, 23 nt, Human herpesvirus 1
accggccccugggccccgggaca

SEQ ID NO: 1757336 - RNA, 16 nt, Human herpesvirus 1
accgggcccccgcccc

SEQ ID NO: 1757337 - RNA, 18 nt, Human herpesvirus 1
accgugacuaagcguccc

SEQ ID NO: 1757338 - RNA, 22 nt, Human herpesvirus 1
accgucgccgcgggccacgcca

SEQ ID NO: 1757339 - RNA, 17 nt, Human herpesvirus 1
acauggccagcggcccg

SEQ ID NO: 1757340 - RNA, 20 nt, Human herpesvirus 1
acaggcgaccgccggcggcg

SEQ ID NO: 1757341 - RNA, 15 nt, Human herpesvirus 1
accaccaaggcccgg

SEQ ID NO: 1757342 - RNA, 17 nt, Human herpesvirus 1
accaccacugcacuccc

SEQ ID NO: 1757343 - RNA, 16 nt, Human herpesvirus 1
accacgcccgaccaca

SEQ ID NO: 1757344 - RNA, 21 nt, Human herpesvirus 1
accacguacggcucgcggguc

SEQ ID NO: 1757345 - RNA, 21 nt, Human herpesvirus 1
accagaauaaugaccaccaca

SEQ ID NO: 1757346 - RNA, 19 nt, Human herpesvirus 1
cacaccagcuacgccgccg

SEQ ID NO: 1757347 - RNA, 14 nt, Human herpesvirus 1
cagcugagccgcgc

SEQ ID NO: 1757348 - RNA, 15 nt, Human herpesvirus 1
caggacaccgcgugu

SEQ ID NO: 1757349 - RNA, 20 nt, Human herpesvirus 1
caggaaauccguggccccgg

SEQ ID NO: 1757350 - RNA, 18 nt, Human herpesvirus 1
auacagcauggcgccaca

SEQ ID NO: 1757351 - RNA, 19 nt, Human herpesvirus 1
auagccauccccgcgucca

SEQ ID NO: 1757352 - RNA, 20 nt, Human herpesvirus 1
auaguuugguccccccucua

SEQ ID NO: 1757353 - RNA, 19 nt, Human herpesvirus 1
agggcgaggagggcggcga

SEQ ID NO: 1757354 - RNA, 14 nt, Human herpesvirus 1
agggcgcccccgcg

SEQ ID NO: 1757355 - RNA, 16 nt, Human herpesvirus 1
aggcccgggccacggc

SEQ ID NO: 1757356 - RNA, 17 nt, Human herpesvirus 1
aggcccgggccacggcg

SEQ ID NO: 1757357 - RNA, 18 nt, Human herpesvirus 1
aggccggcgccgacacgc

SEQ ID NO: 1757358 - RNA, 15 nt, Human herpesvirus 1
aggccuccacccccu

SEQ ID NO: 1757359 - RNA, 15 nt, Human herpesvirus 1
aggcgaccgccggcg

SEQ ID NO: 1757360 - RNA, 20 nt, Human herpesvirus 1
aggcgcauaaagggccggug

SEQ ID NO: 1757361 - RNA, 18 nt, Human herpesvirus 1
aggcgcugucuccccggg

SEQ ID NO: 1757362 - RNA, 15 nt, Human herpesvirus 1
aggcgcuuccccgcg

SEQ ID NO: 1757363 - RNA, 13 nt, Human herpesvirus 1
aggccccccgccg

SEQ ID NO: 1757364 - RNA, 17 nt, Human herpesvirus 1
acgcaaaaccaggccga

SEQ ID NO: 1757365 - RNA, 17 nt, Human herpesvirus 1
acgcaagaccaggccug

SEQ ID NO: 1757366 - RNA, 13 nt, Human herpesvirus 1
acgaggacgacga

SEQ ID NO: 1757367 - RNA, 20 nt, Human herpesvirus 1
caagaggucgucgggggacg

SEQ ID NO: 1757368 - RNA, 12 nt, Human herpesvirus 1
caacgggggacc

SEQ ID NO: 1757369 - RNA, 20 nt, Human herpesvirus 1
caaguggcaggagguggacg

SEQ ID NO: 1757370 - RNA, 20 nt, Human herpesvirus 1
caagaagaagggcacgagcg

SEQ ID NO: 1757371 - RNA, 19 nt, Human herpesvirus 1
caacgccaucgccucggcc

SEQ ID NO: 1757372 - RNA, 12 nt, Human herpesvirus 1
caacgcgacgca

SEQ ID NO: 1757373 - RNA, 18 nt, Human herpesvirus 1
caaccacccgcaccccca

SEQ ID NO: 1757374 - RNA, 23 nt, Human herpesvirus 1
caaccccuuuggggcgcuggccg

SEQ ID NO: 1757375 - RNA, 16 nt, Human herpesvirus 1
auccguggccccggcc

SEQ ID NO: 1757376 - RNA, 18 nt, Human herpesvirus 1
auccccgcucccucgacc

SEQ ID NO: 1757377 - RNA, 12 nt, Human herpesvirus 1
aucaccacgccc

SEQ ID NO: 1757378 - RNA, 22 nt, Human herpesvirus 1
aucaccccgcaauuugcaccca

SEQ ID NO: 1757379 - RNA, 12 nt, Human herpesvirus 1
ucguggccccga

SEQ ID NO: 1757380 - RNA, 15 nt, Human herpesvirus 1
ucgugcaugucguca

SEQ ID NO: 1757381 - RNA, 15 nt, Human herpesvirus 1
uuuucgagugucgca

SEQ ID NO: 1757382 - RNA, 22 nt, Human herpesvirus 1
uuucggugucuaacgguccuca

SEQ ID NO: 1757383 - RNA, 15 nt, Human herpesvirus 1
uuuuguuugucguca

SEQ ID NO: 1757384 - RNA, 15 nt, Human herpesvirus 1
ucgacgaccugggga

SEQ ID NO: 1757385 - RNA, 23 nt, Human herpesvirus 1
ucgacggcuucuacgcgcgcgac

SEQ ID NO: 1757386 - RNA, 19 nt, Human herpesvirus 1
ucgacucuaucgcgcgcau

SEQ ID NO: 1757387 - RNA, 16 nt, Human herpesvirus 1
ucggggccgcccuggc

SEQ ID NO: 1757388 - RNA, 17 nt, Human herpesvirus 1
ucggggccgcccuggcc

SEQ ID NO: 1757389 - RNA, 20 nt, Human herpesvirus 1
ucggugcgucugggcccgac

SEQ ID NO: 1757390 - RNA, 18 nt, Human herpesvirus 1
ucguacgcaugggccgcc

SEQ ID NO: 1757391 - RNA, 14 nt, Human herpesvirus 1
ucguccccuggggc

SEQ ID NO: 1757392 - RNA, 15 nt, Human herpesvirus 1
ucguccggcgcgcgu

SEQ ID NO: 1757393 - RNA, 17 nt, Human herpesvirus 1
uccgaacgcagccccgc

SEQ ID NO: 1757394 - RNA, 23 nt, Human herpesvirus 1
ucccggggggucggcaggcgacg

SEQ ID NO: 1757395 - RNA, 15 nt, Human herpesvirus 1
ucccuaaggcccggc

SEQ ID NO: 1757396 - RNA, 23 nt, Human herpesvirus 1
ucccgccaacacccccuuccccc

SEQ ID NO: 1757397 - RNA, 14 nt, Human herpesvirus 1
ucccgaaccaggcc

SEQ ID NO: 1757398 - RNA, 19 nt, Human herpesvirus 1
ucccgaccuccggucccga

SEQ ID NO: 1757399 - RNA, 15 nt, Human herpesvirus 1
uccuucuugucgucu

SEQ ID NO: 1757400 - RNA, 23 nt, Human herpesvirus 1
uccccgcuccccaagcaucgacc

SEQ ID NO: 1757401 - RNA, 12 nt, Human herpesvirus 1
uccccggcccgg

SEQ ID NO: 1757402 - RNA, 17 nt, Human herpesvirus 1
ucccccgcgcgccccga

SEQ ID NO: 1757403 - RNA, 20 nt, Human herpesvirus 1
ucccccggcacgccuggggu

SEQ ID NO: 1757404 - RNA, 15 nt, Human herpesvirus 1
ucccaacgaccccgc

SEQ ID NO: 1757405 - RNA, 16 nt, Human herpesvirus 1
ucccagcggcacgacc

SEQ ID NO: 1757406 - RNA, 16 nt, Human herpesvirus 1
caccacacaccagcgg

SEQ ID NO: 1757407 - RNA, 20 nt, Human herpesvirus 1
caccaacaaccuucugcggg

SEQ ID NO: 1757408 - RNA, 20 nt, Human herpesvirus 1
cacccccucgaccaccaccu

SEQ ID NO: 1757409 - RNA, 23 nt, Human herpesvirus 1
caccccgcaauuugcacccagcc

SEQ ID NO: 1757410 - RNA, 14 nt, Human herpesvirus 1
caccccccacgggc

SEQ ID NO: 1757411 - RNA, 18 nt, Human herpesvirus 1
caccccccgacgccagcu

SEQ ID NO: 1757412 - RNA, 14 nt, Human herpesvirus 1
cacccacgccgccu

SEQ ID NO: 1757413 - RNA, 22 nt, Human herpesvirus 1
cacccacgccgccucggcccgc

SEQ ID NO: 1757414 - RNA, 23 nt, Human herpesvirus 1
cacagggcgggccgccucggggg

SEQ ID NO: 1757415 - RNA, 17 nt, Human herpesvirus 1
caccagcagcuugcggg

SEQ ID NO: 1757416 - RNA, 16 nt, Human herpesvirus 1
cacagccuggccgugc

SEQ ID NO: 1757417 - RNA, 18 nt, Human herpesvirus 1
acuucgcgcccgggcgcg

SEQ ID NO: 1757418 - RNA, 18 nt, Human herpesvirus 1
acugggcgaccgccggcg

SEQ ID NO: 1757419 - RNA, 12 nt, Human herpesvirus 1
acuccggccgcg

SEQ ID NO: 1757420 - RNA, 17 nt, Human herpesvirus 1
acuacgcuucggccgcc

SEQ ID NO: 1757421 - RNA, 21 nt, Human herpesvirus 1
acucauuaaugggcggccccg

SEQ ID NO: 1757422 - RNA, 17 nt, Human herpesvirus 1
acguucgagcgccaccu

SEQ ID NO: 1757423 - RNA, 17 nt, Human herpesvirus 1
acguucgcgcgccaucu

SEQ ID NO: 1757424 - RNA, 16 nt, Human herpesvirus 1
cacggguggccgggcg

SEQ ID NO: 1757425 - RNA, 23 nt, Human herpesvirus 1
cacggcgaaugcagcgccggccu

SEQ ID NO: 1757426 - RNA, 15 nt, Human herpesvirus 1
cacgguucccgagag

SEQ ID NO: 1757427 - RNA, 21 nt, Human herpesvirus 1
cacgugaucagcacgccaccg

SEQ ID NO: 1757428 - RNA, 19 nt, Human herpesvirus 1
cacccgaggcggccugggu

SEQ ID NO: 1757429 - RNA, 19 nt, Human herpesvirus 1
cacgcgcguccuucuuguc

SEQ ID NO: 1757430 - RNA, 20 nt, Human herpesvirus 1
cacggcaaggagcgccggcg

SEQ ID NO: 1757431 - RNA, 20 nt, Human herpesvirus 1
cacgccuggggucgcggccg

SEQ ID NO: 1757432 - RNA, 22 nt, Human herpesvirus 1
cacgccuggggucgcggccgcg

SEQ ID NO: 1757433 - RNA, 17 nt, Human herpesvirus 1
cacgcgcgacgggcagu

SEQ ID NO: 1757434 - RNA, 19 nt, Human herpesvirus 1
cagcacggcgucgcuguga

SEQ ID NO: 1757435 - RNA, 12 nt, Human herpesvirus 1
cuagcucgcgga

SEQ ID NO: 1757436 - RNA, 21 nt, Human herpesvirus 1
cuagcucgcggagggcggcca

SEQ ID NO: 1757437 - RNA, 19 nt, Human herpesvirus 1
cuagccgaucccucgcgag

SEQ ID NO: 1757438 - RNA, 17 nt, Human herpesvirus 1
gagcugcccggcggcca

SEQ ID NO: 1757439 - RNA, 23 nt, Human herpesvirus 1
gaggagggggccggggacggcga

SEQ ID NO: 1757440 - RNA, 22 nt, Human herpesvirus 1
gagcuucgcuuugugggggacc

SEQ ID NO: 1757441 - RNA, 13 nt, Human herpesvirus 1
gaggaaacccccg

SEQ ID NO: 1757442 - RNA, 23 nt, Human herpesvirus 1
cuaucuccugggggcacccacgc

SEQ ID NO: 1757443 - RNA, 18 nt, Human herpesvirus 1
cuaccuaggcaucggggg

SEQ ID NO: 1757444 - RNA, 14 nt, Human herpesvirus 1
cuacgcgccggccg

SEQ ID NO: 1757445 - RNA, 15 nt, Human herpesvirus 1
cgugcgugccggucg

SEQ ID NO: 1757446 - RNA, 21 nt, Human herpesvirus 1
cgugcgccuggauucgcugga

SEQ ID NO: 1757447 - RNA, 14 nt, Human herpesvirus 1
cgucguucgggcgg

SEQ ID NO: 1757448 - RNA, 15 nt, Human herpesvirus 1
cgucuccuccaccac

SEQ ID NO: 1757449 - RNA, 23 nt, Human herpesvirus 1
cgugacuaagcgucccugggccc

SEQ ID NO: 1757450 - RNA, 12 nt, Human herpesvirus 1
cgcgcccgggcg

SEQ ID NO: 1757451 - RNA, 23 nt, Human herpesvirus 1
cgcgcccgggcgcguccccggcc

SEQ ID NO: 1757452 - RNA, 13 nt, Human herpesvirus 1
cgcgccgcgagua

SEQ ID NO: 1757453 - RNA, 21 nt, Human herpesvirus 1
cgcgccgcugcccgacccggc

SEQ ID NO: 1757454 - RNA, 22 nt, Human herpesvirus 1
cgcgccgcugcccgacccggcc

SEQ ID NO: 1757455 - RNA, 19 nt, Human herpesvirus 1
cgcgccccaaggcgcugcg

SEQ ID NO: 1757456 - RNA, 13 nt, Human herpesvirus 1
cgcgcccccgucc

SEQ ID NO: 1757457 - RNA, 15 nt, Human herpesvirus 1
cgcgccccgccggcg

SEQ ID NO: 1757458 - RNA, 16 nt, Human herpesvirus 1
cgcgccgcgggccccc

SEQ ID NO: 1757459 - RNA, 20 nt, Human herpesvirus 1
cgcgccgcgggcccccggcc

SEQ ID NO: 1757460 - RNA, 16 nt, Human herpesvirus 1
cgcgccguuggccccc

SEQ ID NO: 1757461 - RNA, 19 nt, Human herpesvirus 1
cgcgccguuggcccccgcc

SEQ ID NO: 1757462 - RNA, 14 nt, Human herpesvirus 1
cgcgccucccggcc

SEQ ID NO: 1757463 - RNA, 17 nt, Human herpesvirus 1
cgucgcuagaccacgcc

SEQ ID NO: 1757464 - RNA, 20 nt, Human herpesvirus 1
cgcgcaccuguuccgccugu

SEQ ID NO: 1757465 - RNA, 19 nt, Human herpesvirus 1
ccgugauccuuaggggccg

SEQ ID NO: 1757466 - RNA, 18 nt, Human herpesvirus 1
ccgugcacacgacggccu

SEQ ID NO: 1757467 - RNA, 22 nt, Human herpesvirus 1
cgcgcauccgucgggaggccac

SEQ ID NO: 1757468 - RNA, 18 nt, Human herpesvirus 1
cgcgccaaacgccagccu

SEQ ID NO: 1757469 - RNA, 17 nt, Human herpesvirus 1
cgcgccacacucaccgg

SEQ ID NO: 1757470 - RNA, 15 nt, Human herpesvirus 1
cgcgccauccucacg

SEQ ID NO: 1757471 - RNA, 18 nt, Human herpesvirus 1
ccgguuggccgcgcggca

SEQ ID NO: 1757472 - RNA, 20 nt, Human herpesvirus 1
ccguaaacgccgagcugcga

SEQ ID NO: 1757473 - RNA, 20 nt, Human herpesvirus 1
ccguccccugccccccccac

SEQ ID NO: 1757474 - RNA, 22 nt, Human herpesvirus 1
ccgucgauccaggacgccgcga

SEQ ID NO: 1757475 - RNA, 15 nt, Human herpesvirus 1
ccgucgccgcgggcc

SEQ ID NO: 1757476 - RNA, 18 nt, Human herpesvirus 1
ccgucgcuagaccacgcc

SEQ ID NO: 1757477 - RNA, 21 nt, Human herpesvirus 1
ccgucgcuagaccacgccccu

SEQ ID NO: 1757478 - RNA, 15 nt, Human herpesvirus 1
ccgucucugcuacgc

SEQ ID NO: 1757479 - RNA, 23 nt, Human herpesvirus 1
ccgugacuaagcgucccugggcc

SEQ ID NO: 1757480 - RNA, 19 nt, Human herpesvirus 1
ccggguccccgcggaagcg

SEQ ID NO: 1757481 - RNA, 17 nt, Human herpesvirus 1
ccgguauggggggggcu

SEQ ID NO: 1757482 - RNA, 18 nt, Human herpesvirus 1
ccggucaacgaggguugg

SEQ ID NO: 1757483 - RNA, 23 nt, Human herpesvirus 1
ccggucucccagggagccccggu

SEQ ID NO: 1757484 - RNA, 23 nt, Human herpesvirus 1
ccggugaacgccuccgcccgugc

SEQ ID NO: 1757485 - RNA, 19 nt, Human herpesvirus 1
ccggguacggcgucugggc

SEQ ID NO: 1757486 - RNA, 21 nt, Human herpesvirus 1
ccggguacggcgucugggcca

SEQ ID NO: 1757487 - RNA, 18 nt, Human herpesvirus 1
ccggguagcguacggacc

SEQ ID NO: 1757488 - RNA, 20 nt, Human herpesvirus 1
gcacaaaaagaccccgaucc

SEQ ID NO: 1757489 - RNA, 21 nt, Human herpesvirus 1
gcacacccccauccggugguc

SEQ ID NO: 1757490 - RNA, 16 nt, Human herpesvirus 1
aacgggggggugucgc

SEQ ID NO: 1757491 - RNA, 15 nt, Human herpesvirus 1
aacgugcgcgauccc

SEQ ID NO: 1757492 - RNA, 18 nt, Human herpesvirus 1
aagaggaggagggggccg

SEQ ID NO: 1757493 - RNA, 16 nt, Human herpesvirus 1
aacuucaucacccccg

SEQ ID NO: 1757494 - RNA, 21 nt, Human herpesvirus 1
aacuucgacccgcaacgcgcu

SEQ ID NO: 1757495 - RNA, 12 nt, Human herpesvirus 1
cauggccaugac

SEQ ID NO: 1757496 - RNA, 20 nt, Human herpesvirus 1
caugggccugaucgccggcg

SEQ ID NO: 1757497 - RNA, 14 nt, Human herpesvirus 1
cauggugccgaccg

SEQ ID NO: 1757498 - RNA, 19 nt, Human herpesvirus 1
cauggcgccacaccacgcc

SEQ ID NO: 1757499 - RNA, 18 nt, Human herpesvirus 1
caguucgagcagccgcgc

SEQ ID NO: 1757500 - RNA, 21 nt, Human herpesvirus 1
caguggcugaagcacaacgcc

SEQ ID NO: 1757501 - RNA, 15 nt, Human herpesvirus 1
caggguaccgcguga

SEQ ID NO: 1757502 - RNA, 19 nt, Human herpesvirus 1
caggucccccacaccaccu

SEQ ID NO: 1757503 - RNA, 22 nt, Human herpesvirus 1
caguaccgccagggcgcuacga

SEQ ID NO: 1757504 - RNA, 19 nt, Human herpesvirus 1
cagcguauccacccccgcc

SEQ ID NO: 1757505 - RNA, 20 nt, Human herpesvirus 1
cagcgcggcggggcccggcc

SEQ ID NO: 1757506 - RNA, 19 nt, Human herpesvirus 1
cagcgccaaggucaccgac

SEQ ID NO: 1757507 - RNA, 15 nt, Human herpesvirus 1
cagcgccugcguuca

SEQ ID NO: 1757508 - RNA, 16 nt, Human herpesvirus 1
cagcgccgcaaccagc

SEQ ID NO: 1757509 - RNA, 21 nt, Human herpesvirus 1
agcgugcgauacuucgcgccc

SEQ ID NO: 1757510 - RNA, 16 nt, Human herpesvirus 1
agccugcggccggaug

SEQ ID NO: 1757511 - RNA, 14 nt, Human herpesvirus 1
agccggccccggca

SEQ ID NO: 1757512 - RNA, 23 nt, Human herpesvirus 1
agcccucccgaccgacaccccca

SEQ ID NO: 1757513 - RNA, 16 nt, Human herpesvirus 1
agccgacggcccgaag

SEQ ID NO: 1757514 - RNA, 23 nt, Human herpesvirus 1
agccgcgauuccgagggccgggc

SEQ ID NO: 1757515 - RNA, 18 nt, Human herpesvirus 1
agccgcgccgacaucacc

SEQ ID NO: 1757516 - RNA, 22 nt, Human herpesvirus 1
aucgcgggcgccauggcgggac

SEQ ID NO: 1757517 - RNA, 18 nt, Human herpesvirus 1
aucgcgguagcccggccg

SEQ ID NO: 1757518 - RNA, 16 nt, Human herpesvirus 1
aucgggaugcugcccc

SEQ ID NO: 1757519 - RNA, 14 nt, Human herpesvirus 1
aucgguccccucug

SEQ ID NO: 1757520 - RNA, 16 nt, Human herpesvirus 1
aucgucgccugccccc

SEQ ID NO: 1757521 - RNA, 19 nt, Human herpesvirus 1
aucgugagucacagcgacc

SEQ ID NO: 1757522 - RNA, 19 nt, Human herpesvirus 1
agguacggggcggcccgug

SEQ ID NO: 1757523 - RNA, 17 nt, Human herpesvirus 1
agcgugacgcacccccu

SEQ ID NO: 1757524 - RNA, 18 nt, Human herpesvirus 1
agcguguucguggaacca

SEQ ID NO: 1757525 - RNA, 16 nt, Human herpesvirus 1
cggcaagacccgggcg

SEQ ID NO: 1757526 - RNA, 22 nt, Human herpesvirus 1
cggcacgccuggggucgcggcc

SEQ ID NO: 1757527 - RNA, 18 nt, Human herpesvirus 1
cggcagcgcuccgacgac

SEQ ID NO: 1757528 - RNA, 18 nt, Human herpesvirus 1
ccugggauccgaccccca

SEQ ID NO: 1757529 - RNA, 20 nt, Human herpesvirus 1
ccugggccaccugacgcgcc

SEQ ID NO: 1757530 - RNA, 17 nt, Human herpesvirus 1
ccuggcggacggcggcc

SEQ ID NO: 1757531 - RNA, 15 nt, Human herpesvirus 1
ccuggcugacccacg

SEQ ID NO: 1757532 - RNA, 16 nt, Human herpesvirus 1
ccugcgaggugcgcca

SEQ ID NO: 1757533 - RNA, 18 nt, Human herpesvirus 1
ccugccacuccggcgccg

SEQ ID NO: 1757534 - RNA, 13 nt, Human herpesvirus 1
ccugcgcgacgcc

SEQ ID NO: 1757535 - RNA, 20 nt, Human herpesvirus 1
ccugccccccccaccccaga

SEQ ID NO: 1757536 - RNA, 13 nt, Human herpesvirus 1
ccugccccgccac

SEQ ID NO: 1757537 - RNA, 18 nt, Human herpesvirus 1
ccugcuccggcggggccu

SEQ ID NO: 1757538 - RNA, 20 nt, Human herpesvirus 1
ccagccuguuuguccugggg

SEQ ID NO: 1757539 - RNA, 17 nt, Human herpesvirus 1
ccagcgaccucgccgaa

SEQ ID NO: 1757540 - RNA, 18 nt, Human herpesvirus 1
ccagacgcgggcgacgca

SEQ ID NO: 1757541 - RNA, 15 nt, Human herpesvirus 1
ccagaggcgcgcgca

SEQ ID NO: 1757542 - RNA, 19 nt, Human herpesvirus 1
ccagaucuacugcugggcc

SEQ ID NO: 1757543 - RNA, 19 nt, Human herpesvirus 1
ccacuccuccccgcgccgu

SEQ ID NO: 1757544 - RNA, 17 nt, Human herpesvirus 1
ccacguguagccuggau

SEQ ID NO: 1757545 - RNA, 17 nt, Human herpesvirus 1
ccacuguuuuccgcccc

SEQ ID NO: 1757546 - RNA, 16 nt, Human herpesvirus 1
ccagaccccgggcgcg

SEQ ID NO: 1757547 - RNA, 15 nt, Human herpesvirus 1
ccacgggggggagca

SEQ ID NO: 1757548 - RNA, 16 nt, Human herpesvirus 1
cgacgugguccgcggg

SEQ ID NO: 1757549 - RNA, 23 nt, Human herpesvirus 1
cgacgugguccgcggggccuccc

SEQ ID NO: 1757550 - RNA, 15 nt, Human herpesvirus 1
cgaccaacuaccccg

SEQ ID NO: 1757551 - RNA, 19 nt, Human herpesvirus 1
cgaccaacuaccccgauca

SEQ ID NO: 1757552 - RNA, 14 nt, Human herpesvirus 1
cgaccaggcgcgcc

SEQ ID NO: 1757553 - RNA, 19 nt, Human herpesvirus 1
cgaccaggcgcgccgcgag

SEQ ID NO: 1757554 - RNA, 13 nt, Human herpesvirus 1
cgaccaucacccg

SEQ ID NO: 1757555 - RNA, 15 nt, Human herpesvirus 1
cgacccgcaacgcgc

SEQ ID NO: 1757556 - RNA, 16 nt, Human herpesvirus 1
cgacccugaucccccg

SEQ ID NO: 1757557 - RNA, 19 nt, Human herpesvirus 1
cgacccugaucccccgcgc

SEQ ID NO: 1757558 - RNA, 20 nt, Human herpesvirus 1
cgacccuguuggucggggag

SEQ ID NO: 1757559 - RNA, 20 nt, Human herpesvirus 1
cgaagcggccauggcccgcc

SEQ ID NO: 1757560 - RNA, 14 nt, Human herpesvirus 1
cgaagcuucggggg

SEQ ID NO: 1757561 - RNA, 12 nt, Human herpesvirus 1
cgacaacagccc

SEQ ID NO: 1757562 - RNA, 17 nt, Human herpesvirus 1
cgacacgcucgccgagc

SEQ ID NO: 1757563 - RNA, 20 nt, Human herpesvirus 1
cgacacggucauccacgccg

SEQ ID NO: 1757564 - RNA, 19 nt, Human herpesvirus 1
cgacacugaaaugcccccc

SEQ ID NO: 1757565 - RNA, 20 nt, Human herpesvirus 1
cgagaucaaggacagcggcc

SEQ ID NO: 1757566 - RNA, 23 nt, Human herpesvirus 1
cgagggcgcuuggucgggaggcc

SEQ ID NO: 1757567 - RNA, 19 nt, Human herpesvirus 1
cgaggggcagcugggggag

SEQ ID NO: 1757568 - RNA, 23 nt, Human herpesvirus 1
cgagguggagcugcccggcggcc

SEQ ID NO: 1757569 - RNA, 21 nt, Human herpesvirus 1
cgacugggggggauccgcccu

SEQ ID NO: 1757570 - RNA, 21 nt, Human herpesvirus 1
cgccagggcgcccccgcgcgg

SEQ ID NO: 1757571 - RNA, 22 nt, Human herpesvirus 1
cgccagggcgcccccgcgcggg

SEQ ID NO: 1757572 - RNA, 18 nt, Human herpesvirus 1
cgccagccugcggccgga

SEQ ID NO: 1757573 - RNA, 18 nt, Human herpesvirus 1
cgccagugcguuccggac

SEQ ID NO: 1757574 - RNA, 14 nt, Human herpesvirus 1
cgccaucaaccccg

SEQ ID NO: 1757575 - RNA, 20 nt, Human herpesvirus 1
cgcccagcucauucaccccg

SEQ ID NO: 1757576 - RNA, 21 nt, Human herpesvirus 1
cgccccaucccgaggccccac

SEQ ID NO: 1757577 - RNA, 23 nt, Human herpesvirus 1
cgccccccaaaccauguccggca

SEQ ID NO: 1757578 - RNA, 18 nt, Human herpesvirus 1
cgccccccccccgucacc

SEQ ID NO: 1757579 - RNA, 20 nt, Human herpesvirus 1
cgcccaaugggccgggccgc

SEQ ID NO: 1757580 - RNA, 21 nt, Human herpesvirus 1
cgcccagacgcccuccgagga

SEQ ID NO: 1757581 - RNA, 13 nt, Human herpesvirus 1
cgccggggaccgc

SEQ ID NO: 1757582 - RNA, 12 nt, Human herpesvirus 1
cgccguccgaac

SEQ ID NO: 1757583 - RNA, 15 nt, Human herpesvirus 1
cgccguccgaaccca

SEQ ID NO: 1757584 - RNA, 21 nt, Human herpesvirus 1
cgccggguagcguacggaccg

SEQ ID NO: 1757585 - RNA, 14 nt, Human herpesvirus 1
cgccguggcgcccc

SEQ ID NO: 1757586 - RNA, 21 nt, Human herpesvirus 1
cgaucccaacaacucccccgc

SEQ ID NO: 1757587 - RNA, 21 nt, Human herpesvirus 1
cgaucugugagugucgcggcg

SEQ ID NO: 1757588 - RNA, 19 nt, Human herpesvirus 1
cgccaccagcaucgcgcgc

SEQ ID NO: 1757589 - RNA, 14 nt, Human herpesvirus 1
cgccacccaggcgc

SEQ ID NO: 1757590 - RNA, 15 nt, Human herpesvirus 1
cggagcgggggggcg

SEQ ID NO: 1757591 - RNA, 23 nt, Human herpesvirus 1
cggaggggcuccuuagcgcggcc

SEQ ID NO: 1757592 - RNA, 15 nt, Human herpesvirus 1
cggagguccagcgcc

SEQ ID NO: 1757593 - RNA, 17 nt, Human herpesvirus 1
cggaggucuccgucacc

SEQ ID NO: 1757594 - RNA, 23 nt, Human herpesvirus 1
cggagguggggcgggggccccgc

SEQ ID NO: 1757595 - RNA, 23 nt, Human herpesvirus 1
cggaucugcuccgcaacggggcg

SEQ ID NO: 1757596 - RNA, 14 nt, Human herpesvirus 1
cggagcccgcuggg

SEQ ID NO: 1757597 - RNA, 16 nt, Human herpesvirus 1
cggagccgcgcggcca

SEQ ID NO: 1757598 - RNA, 17 nt, Human herpesvirus 1
cgccucaacauaccccg

SEQ ID NO: 1757599 - RNA, 20 nt, Human herpesvirus 1
cgccucccggggggucggca

SEQ ID NO: 1757600 - RNA, 12 nt, Human herpesvirus 1
cgccuccgcccg

SEQ ID NO: 1757601 - RNA, 12 nt, Human herpesvirus 1
cgccucgggcga

SEQ ID NO: 1757602 - RNA, 16 nt, Human herpesvirus 1
cgccucggucacccca

SEQ ID NO: 1757603 - RNA, 19 nt, Human herpesvirus 1
cgcucgguguacccguacg

SEQ ID NO: 1757604 - RNA, 14 nt, Human herpesvirus 1
cgcucugacggccc

SEQ ID NO: 1757605 - RNA, 23 nt, Human herpesvirus 1
cgcucuugggguugacgcugggg

SEQ ID NO: 1757606 - RNA, 21 nt, Human herpesvirus 1
gcaugaucuccggacccccgc

SEQ ID NO: 1757607 - RNA, 14 nt, Human herpesvirus 1
gcaugcaccccaga

SEQ ID NO: 1757608 - RNA, 16 nt, Human herpesvirus 1
gcaugcgcgggcucgu

SEQ ID NO: 1757609 - RNA, 21 nt, Human herpesvirus 1
gcagcgccggacgcgcggcgc

SEQ ID NO: 1757610 - RNA, 16 nt, Human herpesvirus 1
gcagcgccggccuccc

SEQ ID NO: 1757611 - RNA, 23 nt, Human herpesvirus 1
gcagcguccgguuggccgcgcgg

SEQ ID NO: 1757612 - RNA, 16 nt, Human herpesvirus 1
gcauacgccuccccca

SEQ ID NO: 1757613 - RNA, 21 nt, Human herpesvirus 1
gcauacgggcggccacccccc

SEQ ID NO: 1757614 - RNA, 17 nt, Human herpesvirus 1
gcaucaaaagcccgaua

SEQ ID NO: 1757615 - RNA, 23 nt, Human herpesvirus 1
gcaucaaggcuugguucggggcc

SEQ ID NO: 1757616 - RNA, 11 nt, Human herpesvirus 1
gcaucgcgcgg

SEQ ID NO: 1757617 - RNA, 17 nt, Human herpesvirus 1
gcauccgagcacccccc

SEQ ID NO: 1757618 - RNA, 20 nt, Human herpesvirus 1
gcaucgaacgcacaccccca

SEQ ID NO: 1757619 - RNA, 23 nt, Human herpesvirus 1
gcauccgggaccugaaccccagc

SEQ ID NO: 1757620 - RNA, 15 nt, Human herpesvirus 1
gcauccacccuccgc

SEQ ID NO: 1757621 - RNA, 22 nt, Human herpesvirus 1
gcauccagggagaaaccccagc

SEQ ID NO: 1757622 - RNA, 21 nt, Human herpesvirus 1
cucggccaccgugggccggcg

SEQ ID NO: 1757623 - RNA, 21 nt, Human herpesvirus 1
cucggcgacgugauggccguc

SEQ ID NO: 1757624 - RNA, 15 nt, Human herpesvirus 1
cucguccggcgcgcg

SEQ ID NO: 1757625 - RNA, 15 nt, Human herpesvirus 1
cucgucgggguggca

SEQ ID NO: 1757626 - RNA, 16 nt, Human herpesvirus 1
cucgugcccucgcggg

SEQ ID NO: 1757627 - RNA, 16 nt, Human herpesvirus 1
cucguggcgucucgcc

SEQ ID NO: 1757628 - RNA, 20 nt, Human herpesvirus 1
cugccugacccucuccggga

SEQ ID NO: 1757629 - RNA, 17 nt, Human herpesvirus 1
cugccaaacagcuggcc

SEQ ID NO: 1757630 - RNA, 17 nt, Human herpesvirus 1
cugcccgucgcgcgugu

SEQ ID NO: 1757631 - RNA, 14 nt, Human herpesvirus 1
cugccccgccaccc

SEQ ID NO: 1757632 - RNA, 21 nt, Human herpesvirus 1
cugcggccacacagccggcca

SEQ ID NO: 1757633 - RNA, 12 nt, Human herpesvirus 1
cugcggccggcg

SEQ ID NO: 1757634 - RNA, 15 nt, Human herpesvirus 1
cugcgcggcgcccgc

SEQ ID NO: 1757635 - RNA, 17 nt, Human herpesvirus 1
cugggaccccggcggcc

SEQ ID NO: 1757636 - RNA, 20 nt, Human herpesvirus 1
cugggccauggacagcgacc

SEQ ID NO: 1757637 - RNA, 23 nt, Human herpesvirus 1
cugggggcacccacgcccgcgac

SEQ ID NO: 1757638 - RNA, 15 nt, Human herpesvirus 1
cuggggucgcggccg

SEQ ID NO: 1757639 - RNA, 17 nt, Human herpesvirus 1
cugggucugugccacca

SEQ ID NO: 1757640 - RNA, 20 nt, Human herpesvirus 1
cugggugccaaagcgcccgu

SEQ ID NO: 1757641 - RNA, 17 nt, Human herpesvirus 1
cuggguggucucuggcc

SEQ ID NO: 1757642 - RNA, 22 nt, Human herpesvirus 1
cuggguggucucuggccgcgcc

SEQ ID NO: 1757643 - RNA, 20 nt, Human herpesvirus 1
cuggguuggcgucgggacca

SEQ ID NO: 1757644 - RNA, 16 nt, Human herpesvirus 1
cuggucgaggcggccg

SEQ ID NO: 1757645 - RNA, 18 nt, Human herpesvirus 1
cuguagcgccccggcgac

SEQ ID NO: 1757646 - RNA, 22 nt, Human herpesvirus 1
cuguccaccgggaagcagggcc

SEQ ID NO: 1757647 - RNA, 20 nt, Human herpesvirus 1
cuguugguccuggccggccu

SEQ ID NO: 1757648 - RNA, 19 nt, Human herpesvirus 1
cuguggccucaccugacca

SEQ ID NO: 1757649 - RNA, 14 nt, Human herpesvirus 1
cuguggacccgagc

SEQ ID NO: 1757650 - RNA, 16 nt, Human herpesvirus 1
cuucgcgcccgggcgc

SEQ ID NO: 1757651 - RNA, 19 nt, Human herpesvirus 1
cuucgcgaacccccgucac

SEQ ID NO: 1757652 - RNA, 22 nt, Human herpesvirus 1
gaccgcuucaagcaggucgacg

SEQ ID NO: 1757653 - RNA, 23 nt, Human herpesvirus 1
gaccggauggaggagccccugcc

SEQ ID NO: 1757654 - RNA, 17 nt, Human herpesvirus 1
gaccggcaagcggagcg

SEQ ID NO: 1757655 - RNA, 18 nt, Human herpesvirus 1
gaccggcaagcggagcgg

SEQ ID NO: 1757656 - RNA, 18 nt, Human herpesvirus 1
cuuccucguacgcauggg

SEQ ID NO: 1757657 - RNA, 14 nt, Human herpesvirus 1
cuuccggccugggg

SEQ ID NO: 1757658 - RNA, 14 nt, Human herpesvirus 1
cuucaucacccccg

SEQ ID NO: 1757659 - RNA, 22 nt, Human herpesvirus 1
cuucgcuuuccugucggccgcc

SEQ ID NO: 1757660 - RNA, 21 nt, Human herpesvirus 1
gaccugcuuauucucggggag

SEQ ID NO: 1757661 - RNA, 15 nt, Human herpesvirus 1
gaccgcgcccucgcc

SEQ ID NO: 1757662 - RNA, 13 nt, Human herpesvirus 1
gacgacgcccgcc

SEQ ID NO: 1757663 - RNA, 17 nt, Human herpesvirus 1
gcacgaccugcgcuucg

SEQ ID NO: 1757664 - RNA, 16 nt, Human herpesvirus 1
gcacgcauacgggcgg

SEQ ID NO: 1757665 - RNA, 21 nt, Human herpesvirus 1
gcacgcgcgauagagucgacg

SEQ ID NO: 1757666 - RNA, 20 nt, Human herpesvirus 1
gcacgaguucaaccucgggu

SEQ ID NO: 1757667 - RNA, 21 nt, Human herpesvirus 1
gcacggaacacaaggccaaga

SEQ ID NO: 1757668 - RNA, 14 nt, Human herpesvirus 1
gcacucccugccgc

SEQ ID NO: 1757669 - RNA, 19 nt, Human herpesvirus 1
gcagaccggcaagcggagc

SEQ ID NO: 1757670 - RNA, 14 nt, Human herpesvirus 1
gcagagcaacccca

SEQ ID NO: 1757671 - RNA, 17 nt, Human herpesvirus 1
gcagacgcugcuccgcc

SEQ ID NO: 1757672 - RNA, 21 nt, Human herpesvirus 1
gcagcccggaggcgcccgcgg

SEQ ID NO: 1757673 - RNA, 21 nt, Human herpesvirus 1
gucgcgcgcgcuuugcggagg

SEQ ID NO: 1757674 - RNA, 20 nt, Human herpesvirus 1
gucgcaacgccgcaggggag

SEQ ID NO: 1757675 - RNA, 19 nt, Human herpesvirus 1
gucgacgaccuggggacgg

SEQ ID NO: 1757676 - RNA, 11 nt, Human herpesvirus 1
gucgacgagau

SEQ ID NO: 1757677 - RNA, 18 nt, Human herpesvirus 1
guccucaucaccgacgac

SEQ ID NO: 1757678 - RNA, 18 nt, Human herpesvirus 1
guccuggagcuccgggga

SEQ ID NO: 1757679 - RNA, 16 nt, Human herpesvirus 1
guccuggggauggcca

SEQ ID NO: 1757680 - RNA, 17 nt, Human herpesvirus 1
guacggcacccgcgcga

SEQ ID NO: 1757681 - RNA, 19 nt, Human herpesvirus 1
guccgcugugccaucgcgc

SEQ ID NO: 1757682 - RNA, 19 nt, Human herpesvirus 1
guacgccccaccggcacca

SEQ ID NO: 1757683 - RNA, 19 nt, Human herpesvirus 1
guacgcccucccgcugcgc

SEQ ID NO: 1757684 - RNA, 19 nt, Human herpesvirus 1
guacgccgccaccguggcc

SEQ ID NO: 1757685 - RNA, 14 nt, Human herpesvirus 1
ggagccuguugugg

SEQ ID NO: 1757686 - RNA, 15 nt, Human herpesvirus 1
gguucccccccgugg

SEQ ID NO: 1757687 - RNA, 15 nt, Human herpesvirus 1
gguuccgcgaccacc

SEQ ID NO: 1757688 - RNA, 22 nt, Human herpesvirus 1
gguuccggaggcgccgcgcgga

SEQ ID NO: 1757689 - RNA, 14 nt, Human herpesvirus 1
guaaggacacgcgc

SEQ ID NO: 1757690 - RNA, 23 nt, Human herpesvirus 1
guaacguuccgccuggaggacgg

SEQ ID NO: 1757691 - RNA, 19 nt, Human herpesvirus 1
guaccugcagacgguggug

SEQ ID NO: 1757692 - RNA, 13 nt, Human herpesvirus 1
gcuaugacggcaa

SEQ ID NO: 1757693 - RNA, 14 nt, Human herpesvirus 1
gcucacgaccccca

SEQ ID NO: 1757694 - RNA, 17 nt, Human herpesvirus 1
ggacgccauacacagcc

SEQ ID NO: 1757695 - RNA, 14 nt, Human herpesvirus 1
ggacugggcaagcc

SEQ ID NO: 1757696 - RNA, 19 nt, Human herpesvirus 1
ggacugggugccaaagcgc

SEQ ID NO: 1757697 - RNA, 17 nt, Human herpesvirus 1
gcuagccgaggcccggg

SEQ ID NO: 1757698 - RNA, 14 nt, Human herpesvirus 1
gcuacuauccccgc

SEQ ID NO: 1757699 - RNA, 14 nt, Human herpesvirus 1
gcggccgcccaacu

SEQ ID NO: 1757700 - RNA, 16 nt, Human herpesvirus 1
gcguauccacccccgc

SEQ ID NO: 1757701 - RNA, 20 nt, Human herpesvirus 1
gcuacgccgcugacccccac

SEQ ID NO: 1757702 - RNA, 14 nt, Human herpesvirus 1
gcggugccugacgc

SEQ ID NO: 1757703 - RNA, 21 nt, Human herpesvirus 1
gcguaccaaacaaacaaacca

SEQ ID NO: 1757704 - RNA, 18 nt, Human herpesvirus 1
gcguagcaaacgccccgc

SEQ ID NO: 1757705 - RNA, 13 nt, Human herpesvirus 1
gcccgcgaacggc

SEQ ID NO: 1757706 - RNA, 20 nt, Human herpesvirus 1
gcccugaccaacgacggccc

SEQ ID NO: 1757707 - RNA, 16 nt, Human herpesvirus 1
gcccugagcgcccucc

SEQ ID NO: 1757708 - RNA, 20 nt, Human herpesvirus 1
gcccucacagggcgggccgc

SEQ ID NO: 1757709 - RNA, 17 nt, Human herpesvirus 1
gcccucccugacggcca

SEQ ID NO: 1757710 - RNA, 15 nt, Human herpesvirus 1
gcccuggccgaggac

SEQ ID NO: 1757711 - RNA, 14 nt, Human herpesvirus 1
gccgccgcggacgc

SEQ ID NO: 1757712 - RNA, 13 nt, Human herpesvirus 1
gcccggguccccg

SEQ ID NO: 1757713 - RNA, 22 nt, Human herpesvirus 1
gcccggccaaccagcguccgcc

SEQ ID NO: 1757714 - RNA, 22 nt, Human herpesvirus 1
gcccgugauccuuaggggccgu

SEQ ID NO: 1757715 - RNA, 21 nt, Human herpesvirus 1
gcccgggcaaguaugcccccc

SEQ ID NO: 1757716 - RNA, 16 nt, Human herpesvirus 1
gcccguuaacccccca

SEQ ID NO: 1757717 - RNA, 18 nt, Human herpesvirus 1
gcccgcgggaggccgccc

SEQ ID NO: 1757718 - RNA, 15 nt, Human herpesvirus 1
gcccgcguaaccccg

SEQ ID NO: 1757719 - RNA, 19 nt, Human herpesvirus 1
gcccgcguuuggccugcgg

SEQ ID NO: 1757720 - RNA, 18 nt, Human herpesvirus 1
gcccggaacgggaggcca

SEQ ID NO: 1757721 - RNA, 22 nt, Human herpesvirus 1
gccggcguuucugaccugcacc

SEQ ID NO: 1757722 - RNA, 14 nt, Human herpesvirus 1
gccgcggccugggu

SEQ ID NO: 1757723 - RNA, 20 nt, Human herpesvirus 1
gccgcggguauagaucgacg

SEQ ID NO: 1757724 - RNA, 19 nt, Human herpesvirus 1
gccgggacuccgcggacgg

SEQ ID NO: 1757725 - RNA, 20 nt, Human herpesvirus 1
gccggggaccgcagccuggu

SEQ ID NO: 1757726 - RNA, 18 nt, Human herpesvirus 1
gccggguggcgccugugu

SEQ ID NO: 1757727 - RNA, 15 nt, Human herpesvirus 1
gccgcgacccgcacg

SEQ ID NO: 1757728 - RNA, 13 nt, Human herpesvirus 1
gccgcgcggacga

SEQ ID NO: 1757729 - RNA, 17 nt, Human herpesvirus 1
gccgcgcggacgacggc

SEQ ID NO: 1757730 - RNA, 15 nt, Human herpesvirus 1
gccgcggaucgggcc

SEQ ID NO: 1757731 - RNA, 19 nt, Human herpesvirus 1
gcggccaguugagccgcgc

SEQ ID NO: 1757732 - RNA, 16 nt, Human herpesvirus 1
gcgguccugacggcca

SEQ ID NO: 1757733 - RNA, 13 nt, Human herpesvirus 1
gcggccgugggcg

SEQ ID NO: 1757734 - RNA, 19 nt, Human herpesvirus 1
gcggugaacgaagcggcca

SEQ ID NO: 1757735 - RNA, 17 nt, Human herpesvirus 1
gcggccacacagccggc

SEQ ID NO: 1757736 - RNA, 17 nt, Human herpesvirus 1
gcgacugcgaccccagc

SEQ ID NO: 1757737 - RNA, 20 nt, Human herpesvirus 1
gcgcuaagugcccaggacgg

SEQ ID NO: 1757738 - RNA, 14 nt, Human herpesvirus 1
gcgcuaugacggca

SEQ ID NO: 1757739 - RNA, 15 nt, Human herpesvirus 1
gcgcucaaccaccgc

SEQ ID NO: 1757740 - RNA, 22 nt, Human herpesvirus 1
gcgcucaaccaccgcucccccc

SEQ ID NO: 1757741 - RNA, 18 nt, Human herpesvirus 1
gccgucuuucuccccaac

SEQ ID NO: 1757742 - RNA, 24 nt, Human herpesvirus 1
gccggugguccgccuagccgcagc

SEQ ID NO: 1757743 - RNA, 19 nt, Human herpesvirus 1
gccgucgggcgucccacac

SEQ ID NO: 1757744 - RNA, 17 nt, Human herpesvirus 1
gccuggcauucgacgac

SEQ ID NO: 1757745 - RNA, 13 nt, Human herpesvirus 1
gccuggccugcga

SEQ ID NO: 1757746 - RNA, 20 nt, Human herpesvirus 1
gccuguuguggcucggggcg

SEQ ID NO: 1757747 - RNA, 12 nt, Human herpesvirus 1
gccuuucccccc

SEQ ID NO: 1757748 - RNA, 12 nt, Human herpesvirus 1
gcgaacccccgu

SEQ ID NO: 1757749 - RNA, 18 nt, Human herpesvirus 1
gcgacaacgagcccccgc

SEQ ID NO: 1757750 - RNA, 15 nt, Human herpesvirus 1
gcgaccacgggcugu

SEQ ID NO: 1757751 - RNA, 18 nt, Human herpesvirus 1
gcgacccugaucccccgc

SEQ ID NO: 1757752 - RNA, 19 nt, Human herpesvirus 1
gcgaccuggggcgcgcggu

SEQ ID NO: 1757753 - RNA, 12 nt, Human herpesvirus 1
ucagggcggcgg

SEQ ID NO: 1757754 - RNA, 11 nt, Human herpesvirus 1
gggggcggcgu

SEQ ID NO: 1757755 - RNA, 14 nt, Human herpesvirus 1
ucauaaccacgccc

SEQ ID NO: 1757756 - RNA, 20 nt, Human herpesvirus 1
ucaugcgcaagcgccgcaac

SEQ ID NO: 1757757 - RNA, 14 nt, Human herpesvirus 1
ucaucaacgcgacc

SEQ ID NO: 1757758 - RNA, 15 nt, Human herpesvirus 1
ucaucaccgacgacg

SEQ ID NO: 1757759 - RNA, 14 nt, Human herpesvirus 1
ucaucagccgggac

SEQ ID NO: 1757760 - RNA, 12 nt, Human herpesvirus 1
ucauccacgccg

SEQ ID NO: 1757761 - RNA, 15 nt, Human herpesvirus 1
ucgccugcggcgacc

SEQ ID NO: 1757762 - RNA, 13 nt, Human herpesvirus 1
uccacggccaagu

SEQ ID NO: 1757763 - RNA, 17 nt, Human herpesvirus 1
uccaggcugucgacgcc

SEQ ID NO: 1757764 - RNA, 18 nt, Human herpesvirus 1
ucgcgauuuccgacgaac

SEQ ID NO: 1757765 - RNA, 13 nt, Human herpesvirus 1
ucgcggccgcgac

SEQ ID NO: 1757766 - RNA, 19 nt, Human herpesvirus 1
ucgcggccgcgacccaggc

SEQ ID NO: 1757767 - RNA, 15 nt, Human herpesvirus 1
ucgcggcuucgcggu

SEQ ID NO: 1757768 - RNA, 23 nt, Human herpesvirus 1
ucgcggcuucgcgguggcggucc

SEQ ID NO: 1757769 - RNA, 21 nt, Human herpesvirus 1
gcgccacgguggugcaguucg

SEQ ID NO: 1757770 - RNA, 21 nt, Human herpesvirus 1
gcgccaggucggcgaccgcca

SEQ ID NO: 1757771 - RNA, 15 nt, Human herpesvirus 1
gcgccaucuggaccg

SEQ ID NO: 1757772 - RNA, 19 nt, Human herpesvirus 1
gcgccaugcuggcggacgg

SEQ ID NO: 1757773 - RNA, 17 nt, Human herpesvirus 1
gcgccauggcgggacug

SEQ ID NO: 1757774 - RNA, 14 nt, Human herpesvirus 1
gcgcccccgcgcgg

SEQ ID NO: 1757775 - RNA, 19 nt, Human herpesvirus 1
gcgcgcuuguccccgaaca

SEQ ID NO: 1757776 - RNA, 20 nt, Human herpesvirus 1
ggcccagcauguccgccggg

SEQ ID NO: 1757777 - RNA, 16 nt, Human herpesvirus 1
gcgcggaugacggccc

SEQ ID NO: 1757778 - RNA, 21 nt, Human herpesvirus 1
gcgcggacaacauccccccga

SEQ ID NO: 1757779 - RNA, 12 nt, Human herpesvirus 1
gcgcggccgugg

SEQ ID NO: 1757780 - RNA, 23 nt, Human herpesvirus 1
ggccaucgguccccucugggccc

SEQ ID NO: 1757781 - RNA, 19 nt, Human herpesvirus 1
ggcccggaacgggaggcca

SEQ ID NO: 1757782 - RNA, 23 nt, Human herpesvirus 1
ggcccgggggggcaucgcgcggg

SEQ ID NO: 1757783 - RNA, 16 nt, Human herpesvirus 1
ggcccugccacuccgg

SEQ ID NO: 1757784 - RNA, 17 nt, Human herpesvirus 1
ggcccgggccacggcgc

SEQ ID NO: 1757785 - RNA, 13 nt, Human herpesvirus 1
ggccgacgacgac

SEQ ID NO: 1757786 - RNA, 21 nt, Human herpesvirus 1
ggccgccacgcgcggcugguc

SEQ ID NO: 1757787 - RNA, 22 nt, Human herpesvirus 1
ggccgccagcgcggcggggccc

SEQ ID NO: 1757788 - RNA, 18 nt, Human herpesvirus 1
ggggcauccgggaccuga

SEQ ID NO: 1757789 - RNA, 12 nt, Human herpesvirus 1
ggggccguggcg

SEQ ID NO: 1757790 - RNA, 20 nt, Human herpesvirus 1
ggggccuccgaagacguccg

SEQ ID NO: 1757791 - RNA, 18 nt, Human herpesvirus 1
ggggcgcuuaccgccaca

SEQ ID NO: 1757792 - RNA, 10 nt, Human herpesvirus 1
ggggcgggac

SEQ ID NO: 1757793 - RNA, 19 nt, Human herpesvirus 1
gggggaugcuagccugugu

SEQ ID NO: 1757794 - RNA, 14 nt, Human herpesvirus 1
gggggcccggaacg

SEQ ID NO: 1757795 - RNA, 16 nt, Human herpesvirus 1
gggcgccacgguggug

SEQ ID NO: 1757796 - RNA, 14 nt, Human herpesvirus 1
gggcgccggugguu

SEQ ID NO: 1757797 - RNA, 16 nt, Human herpesvirus 1
gggcgcggcgcgacaa

SEQ ID NO: 1757798 - RNA, 12 nt, Human herpesvirus 1
gggcggcggcgu

SEQ ID NO: 1757799 - RNA, 15 nt, Human herpesvirus 1
gggcgcuggccgugg

SEQ ID NO: 1757800 - RNA, 15 nt, Human herpesvirus 1
gggcgcugggugguc

SEQ ID NO: 1757801 - RNA, 20 nt, Human herpesvirus 1
gggcgcuuggcaugcgcggg

SEQ ID NO: 1757802 - RNA, 23 nt, Human herpesvirus 1
gggcucuacccucuggacgcccg

SEQ ID NO: 1757803 - RNA, 17 nt, Human herpesvirus 1
ggcuccagucccggccc

SEQ ID NO: 1757804 - RNA, 20 nt, Human herpesvirus 1
ggcuccccgccgcggccugg

SEQ ID NO: 1757805 - RNA, 18 nt, Human herpesvirus 1
ggcucccggcccgggccc

SEQ ID NO: 1757806 - RNA, 14 nt, Human herpesvirus 1
ggcucgccagcgac

SEQ ID NO: 1757807 - RNA, 13 nt, Human herpesvirus 1
ggcugccgugagg

SEQ ID NO: 1757808 - RNA, 10 nt, Human herpesvirus 1
ggcgggccgu

SEQ ID NO: 1757809 - RNA, 17 nt, Human herpesvirus 1
ggcgguccugacggcca

SEQ ID NO: 1757810 - RNA, 17 nt, Human herpesvirus 1
ggccgcgcggcaacaca

SEQ ID NO: 1757811 - RNA, 20 nt, Human herpesvirus 1
ggccgcgacccaggcggcga

SEQ ID NO: 1757812 - RNA, 10 nt, Human herpesvirus 1
ggcgguggua

SEQ ID NO: 1757813 - RNA, 14 nt, Human herpesvirus 1
gcgcaacaaccugg

SEQ ID NO: 1757814 - RNA, 15 nt, Human herpesvirus 1
gcgcaauugcggcca

SEQ ID NO: 1757815 - RNA, 20 nt, Human herpesvirus 1
gcgcauccgucgggaggcca

SEQ ID NO: 1757816 - RNA, 17 nt, Human herpesvirus 1
gcgcaagcgccgcaaca

SEQ ID NO: 1757817 - RNA, 19 nt, Human herpesvirus 1
gcgcauacgccucccccac

SEQ ID NO: 1757818 - RNA, 15 nt, Human herpesvirus 1
gcgcaucagcucgcg

SEQ ID NO: 1757819 - RNA, 21 nt, Human herpesvirus 1
cuccggggguccggcgcgugu

SEQ ID NO: 1757820 - RNA, 18 nt, Human herpesvirus 1
cuccgaguucccccggca

SEQ ID NO: 1757821 - RNA, 13 nt, Human herpesvirus 1
cuccggccgcggu

SEQ ID NO: 1757822 - RNA, 15 nt, Human herpesvirus 1
cuccggcgccgcccg

SEQ ID NO: 1757823 - RNA, 13 nt, Human herpesvirus 1
cucgagaugagcc

SEQ ID NO: 1757824 - RNA, 20 nt, Human herpesvirus 1
acgcccacuuuauucgcguc

SEQ ID NO: 1757825 - RNA, 15 nt, Human herpesvirus 1
acgccgccucggccc

SEQ ID NO: 1757826 - RNA, 23 nt, Human herpesvirus 1
acgccggguagcguacggaccgc

SEQ ID NO: 1757827 - RNA, 19 nt, Human herpesvirus 1
acgccguggcgccccggcc

SEQ ID NO: 1757828 - RNA, 19 nt, Human herpesvirus 1
acgcagccagaacucgccc

SEQ ID NO: 1757829 - RNA, 14 nt, Human herpesvirus 1
acgcacgccgcccc

SEQ ID NO: 1757830 - RNA, 20 nt, Human herpesvirus 1
acgccuggggucgcggccgc

SEQ ID NO: 1757831 - RNA, 21 nt, Human herpesvirus 1
acgccuuaccaucccccggcc

SEQ ID NO: 1757832 - RNA, 17 nt, Human herpesvirus 1
acgcgaccgucgccgcg

SEQ ID NO: 1757833 - RNA, 21 nt, Human herpesvirus 1
acgcgccgcgggcccccggcc

SEQ ID NO: 1757834 - RNA, 11 nt, Human herpesvirus 1
acgcgcguccu

SEQ ID NO: 1757835 - RNA, 21 nt, Human herpesvirus 1
acgcggggcuguacucgaccc

SEQ ID NO: 1757836 - RNA, 19 nt, Human herpesvirus 1
acgcgguauggcugccccc

SEQ ID NO: 1757837 - RNA, 14 nt, Human herpesvirus 1
acgggcggccaccc

SEQ ID NO: 1757838 - RNA, 22 nt, Human herpesvirus 1
acgggcggccacccccccggag

SEQ ID NO: 1757839 - RNA, 20 nt, Human herpesvirus 1
acgucaauugcccgaggcgc

SEQ ID NO: 1757840 - RNA, 22 nt, Human herpesvirus 1
acggggauggucggggcguccc

SEQ ID NO: 1757841 - RNA, 23 nt, Human herpesvirus 1
acgggggcccugccacuccggcg

SEQ ID NO: 1757842 - RNA, 20 nt, Human herpesvirus 1
acgggguaugugauaugcua

SEQ ID NO: 1757843 - RNA, 21 nt, Human herpesvirus 1
acggguguggggacccgcccc

SEQ ID NO: 1757844 - RNA, 14 nt, Human herpesvirus 1
acgcgggccccggg

SEQ ID NO: 1757845 - RNA, 17 nt, Human herpesvirus 1
acgcuaaucccccggcu

SEQ ID NO: 1757846 - RNA, 18 nt, Human herpesvirus 1
acggcagcaugggaccca

SEQ ID NO: 1757847 - RNA, 17 nt, Human herpesvirus 1
acggcauucgggccugc

SEQ ID NO: 1757848 - RNA, 22 nt, Human herpesvirus 1
cacccgggugcuucccacgcga

SEQ ID NO: 1757849 - RNA, 17 nt, Human herpesvirus 1
caccgaacccggcccgg

SEQ ID NO: 1757850 - RNA, 16 nt, Human herpesvirus 1
caccgcaccagcgcgg

SEQ ID NO: 1757851 - RNA, 19 nt, Human herpesvirus 1
agacucucccccaccgccc

SEQ ID NO: 1757852 - RNA, 17 nt, Human herpesvirus 1
agaccgcaucgacacgc

SEQ ID NO: 1757853 - RNA, 20 nt, Human herpesvirus 1
agaccggcaccaccgacucu

SEQ ID NO: 1757854 - RNA, 11 nt, Human herpesvirus 1
agacacccccc

SEQ ID NO: 1757855 - RNA, 22 nt, Human herpesvirus 1
agacgaaaagccccgggccgcg

SEQ ID NO: 1757856 - RNA, 23 nt, Human herpesvirus 1
acgucgccccuguggcccuggcg

SEQ ID NO: 1757857 - RNA, 16 nt, Human herpesvirus 1
acguccugggccaccu

SEQ ID NO: 1757858 - RNA, 15 nt, Human herpesvirus 1
acgucgaccgcgccc

SEQ ID NO: 1757859 - RNA, 19 nt, Human herpesvirus 1
caccgcguguuccccggga

SEQ ID NO: 1757860 - RNA, 16 nt, Human herpesvirus 1
caccggugcgcccccc

SEQ ID NO: 1757861 - RNA, 17 nt, Human herpesvirus 1
caccuacuacgaugggg

SEQ ID NO: 1757862 - RNA, 21 nt, Human herpesvirus 1
caccucgaggacacccgcgca

SEQ ID NO: 1757863 - RNA, 15 nt, Human herpesvirus 1
caccguggccuggga

SEQ ID NO: 1757864 - RNA, 16 nt, Human herpesvirus 1
cacgacacccacccca

SEQ ID NO: 1757865 - RNA, 14 nt, Human herpesvirus 1
cacgcaucgacgug

SEQ ID NO: 1757866 - RNA, 17 nt, Human herpesvirus 1
cacgccaagcccccgcc

SEQ ID NO: 1757867 - RNA, 17 nt, Human herpesvirus 1
cacgcccccgccgcccg

SEQ ID NO: 1757868 - RNA, 15 nt, Human herpesvirus 1
cacgccgccucggcc

SEQ ID NO: 1757869 - RNA, 22 nt, Human herpesvirus 1
cacuacgcuucggccgccaccc

SEQ ID NO: 1757870 - RNA, 16 nt, Human herpesvirus 1
cacugcccgucgcgcg

SEQ ID NO: 1757871 - RNA, 18 nt, Human herpesvirus 1
cagcgacguccugggcca

SEQ ID NO: 1757872 - RNA, 23 nt, Human herpesvirus 1
cagccugccucuccccccaggcc

SEQ ID NO: 1757873 - RNA, 14 nt, Human herpesvirus 1
cagcgaccuggggu

SEQ ID NO: 1757874 - RNA, 15 nt, Human herpesvirus 1
cagcagguccgcggu

SEQ ID NO: 1757875 - RNA, 13 nt, Human herpesvirus 1
cagccccccagcc

SEQ ID NO: 1757876 - RNA, 15 nt, Human herpesvirus 1
cagacgcgggcgacg

SEQ ID NO: 1757877 - RNA, 20 nt, Human herpesvirus 1
cacuggccgggagcaccaca

SEQ ID NO: 1757878 - RNA, 11 nt, Human herpesvirus 1
cacugucgucg

SEQ ID NO: 1757879 - RNA, 23 nt, Human herpesvirus 1
ccuaccggacccguuccagcccc

SEQ ID NO: 1757880 - RNA, 23 nt, Human herpesvirus 1
ccuccaggcugucgacgcccccu

SEQ ID NO: 1757881 - RNA, 17 nt, Human herpesvirus 1
ccucacguucgcacgca

SEQ ID NO: 1757882 - RNA, 16 nt, Human herpesvirus 1
ccucagagacaacgcg

SEQ ID NO: 1757883 - RNA, 18 nt, Human herpesvirus 1
ccucacccacgccggcac

SEQ ID NO: 1757884 - RNA, 16 nt, Human herpesvirus 1
cgcgagcaccugcggg

SEQ ID NO: 1757885 - RNA, 17 nt, Human herpesvirus 1
cgcgagauggccgcccc

SEQ ID NO: 1757886 - RNA, 22 nt, Human herpesvirus 1
cgcgagauggccgccccggugu

SEQ ID NO: 1757887 - RNA, 18 nt, Human herpesvirus 1
cgcgagcagagccgcaag

SEQ ID NO: 1757888 - RNA, 17 nt, Human herpesvirus 1
cgcgagcucccagagac

SEQ ID NO: 1757889 - RNA, 20 nt, Human herpesvirus 1
ccuaaccaggccuccacccc

SEQ ID NO: 1757890 - RNA, 17 nt, Human herpesvirus 1
ccguguuggagcgcgcc

SEQ ID NO: 1757891 - RNA, 15 nt, Human herpesvirus 1
ccguuaaccccccac

SEQ ID NO: 1757892 - RNA, 15 nt, Human herpesvirus 1
ccguuucuccgcccg

SEQ ID NO: 1757893 - RNA, 18 nt, Human herpesvirus 1
ccguggccgacaacugcc

SEQ ID NO: 1757894 - RNA, 16 nt, Human herpesvirus 1
ccguggcgccccggcc

SEQ ID NO: 1757895 - RNA, 15 nt, Human herpesvirus 1
ccgcguuuggccugc

SEQ ID NO: 1757896 - RNA, 21 nt, Human herpesvirus 1
ccgcguuuggccugcggcgca

SEQ ID NO: 1757897 - RNA, 16 nt, Human herpesvirus 1
ccgcgguggacagcca

SEQ ID NO: 1757898 - RNA, 21 nt, Human herpesvirus 1
ccgcgugggugaugucggguc

SEQ ID NO: 1757899 - RNA, 20 nt, Human herpesvirus 1
ccgcguguuccccgggagcc

SEQ ID NO: 1757900 - RNA, 15 nt, Human herpesvirus 1
ccgcucugacggccc

SEQ ID NO: 1757901 - RNA, 18 nt, Human herpesvirus 1
ccgcugcccgacccggcc

SEQ ID NO: 1757902 - RNA, 17 nt, Human herpesvirus 1
ccgcugcgcaucccccc

SEQ ID NO: 1757903 - RNA, 19 nt, Human herpesvirus 1
cguugagccccucgcccgu

SEQ ID NO: 1757904 - RNA, 16 nt, Human herpesvirus 1
cguuucccacccccac

SEQ ID NO: 1757905 - RNA, 22 nt, Human herpesvirus 1
cguuccucacugccucccccgc

SEQ ID NO: 1757906 - RNA, 22 nt, Human herpesvirus 1
cguuccuucccccuccccccgc

SEQ ID NO: 1757907 - RNA, 22 nt, Human herpesvirus 1
cguuuggguguggggacccggc

SEQ ID NO: 1757908 - RNA, 22 nt, Human herpesvirus 1
cuacaacaacuaccucggcggg

SEQ ID NO: 1757909 - RNA, 21 nt, Human herpesvirus 1
cucccgcugcgcauccccccg

SEQ ID NO: 1757910 - RNA, 19 nt, Human herpesvirus 1
cucccggaagagccugccg

SEQ ID NO: 1757911 - RNA, 16 nt, Human herpesvirus 1
cucccggcccguaacg

SEQ ID NO: 1757912 - RNA, 13 nt, Human herpesvirus 1
cuaccccauggga

SEQ ID NO: 1757913 - RNA, 13 nt, Human herpesvirus 1
cgcgcgucccccg

SEQ ID NO: 1757914 - RNA, 17 nt, Human herpesvirus 1
cgcgcguccuucuuguc

SEQ ID NO: 1757915 - RNA, 14 nt, Human herpesvirus 1
cgcgcgucgacguc

SEQ ID NO: 1757916 - RNA, 15 nt, Human herpesvirus 1
cgcgcggucggcaag

SEQ ID NO: 1757917 - RNA, 12 nt, Human herpesvirus 1
cgcgauccggcc

SEQ ID NO: 1757918 - RNA, 17 nt, Human herpesvirus 1
cgcgcggaugacggccc

SEQ ID NO: 1757919 - RNA, 20 nt, Human herpesvirus 1
ccgcaaaucccaccaaacug

SEQ ID NO: 1757920 - RNA, 20 nt, Human herpesvirus 1
ccgcaaccagcugcacgacc

SEQ ID NO: 1757921 - RNA, 16 nt, Human herpesvirus 1
ccgcaacgcgcugggg

SEQ ID NO: 1757922 - RNA, 15 nt, Human herpesvirus 1
ccgcauacuccggcc

SEQ ID NO: 1757923 - RNA, 22 nt, Human herpesvirus 1
ccgcauccacccuccgcugggg

SEQ ID NO: 1757924 - RNA, 14 nt, Human herpesvirus 1
ccgccagcgcggcg

SEQ ID NO: 1757925 - RNA, 16 nt, Human herpesvirus 1
ccgccaucgccuaccu

SEQ ID NO: 1757926 - RNA, 16 nt, Human herpesvirus 1
ccgcgggcccccggcc

SEQ ID NO: 1757927 - RNA, 19 nt, Human herpesvirus 1
ccgcguccaaacccaccga

SEQ ID NO: 1757928 - RNA, 15 nt, Human herpesvirus 1
ccgcgucgccggcac

SEQ ID NO: 1757929 - RNA, 14 nt, Human herpesvirus 1
ccgcgguccagacc

SEQ ID NO: 1757930 - RNA, 16 nt, Human herpesvirus 1
ccgaucccaggcgccg

SEQ ID NO: 1757931 - RNA, 23 nt, Human herpesvirus 1
ccgaucccaggcgccgacggaca

SEQ ID NO: 1757932 - RNA, 19 nt, Human herpesvirus 1
ccgaugcggcggcgcugca

SEQ ID NO: 1757933 - RNA, 21 nt, Human herpesvirus 1
ccgauucucuuccgacgccau

SEQ ID NO: 1757934 - RNA, 15 nt, Human herpesvirus 1
aaacgccucccccug

SEQ ID NO: 1757935 - RNA, 22 nt, Human herpesvirus 1
aaacgccucccccugagccgcu

SEQ ID NO: 1757936 - RNA, 20 nt, Human herpesvirus 1
aaacggccgaagccacgccc

SEQ ID NO: 1757937 - RNA, 20 nt, Human herpesvirus 1
aaacgucagacgagcgcgcu

SEQ ID NO: 1757938 - RNA, 13 nt, Human herpesvirus 1
aaaccccacgccc

SEQ ID NO: 1757939 - RNA, 15 nt, Human herpesvirus 1
aaacccccaaacacc

SEQ ID NO: 1757940 - RNA, 23 nt, Human herpesvirus 1
cgcuggguggucucuggccgcgc

SEQ ID NO: 1757941 - RNA, 18 nt, Human herpesvirus 1
cgccccgccguggcauuc

SEQ ID NO: 1757942 - RNA, 19 nt, Human herpesvirus 1
cgccccucgccacgucgac

SEQ ID NO: 1757943 - RNA, 15 nt, Human herpesvirus 1
cgcccgaccgcgugu

SEQ ID NO: 1757944 - RNA, 14 nt, Human herpesvirus 1
cgcccgccccugcg

SEQ ID NO: 1757945 - RNA, 15 nt, Human herpesvirus 1
cgcccgccccuggcg

SEQ ID NO: 1757946 - RNA, 14 nt, Human herpesvirus 1
cgcccgcgacgcca

SEQ ID NO: 1757947 - RNA, 21 nt, Human herpesvirus 1
cgcccgcgacgccauggaccg

SEQ ID NO: 1757948 - RNA, 16 nt, Human herpesvirus 1
cgcccggggccagcgc

SEQ ID NO: 1757949 - RNA, 17 nt, Human herpesvirus 1
cgcccggggccagcgcc

SEQ ID NO: 1757950 - RNA, 16 nt, Human herpesvirus 1
cgcccggguccccgcg

SEQ ID NO: 1757951 - RNA, 17 nt, Human herpesvirus 1
cgcccggguccccgcgg

SEQ ID NO: 1757952 - RNA, 16 nt, Human herpesvirus 1
cgcccguccucgcccg

SEQ ID NO: 1757953 - RNA, 22 nt, Human herpesvirus 1
cgcccgucuuuaaccucccccg

SEQ ID NO: 1757954 - RNA, 22 nt, Human herpesvirus 1
cgcccuaacagucuuccgcuga

SEQ ID NO: 1757955 - RNA, 21 nt, Human herpesvirus 1
cgcccucacagggcgggccgc

SEQ ID NO: 1757956 - RNA, 21 nt, Human herpesvirus 1
cgcccucgguucgccuucacg

SEQ ID NO: 1757957 - RNA, 15 nt, Human herpesvirus 1
cgcccuggccgcgga

SEQ ID NO: 1757958 - RNA, 16 nt, Human herpesvirus 1
cgcccuuccccacggg

SEQ ID NO: 1757959 - RNA, 13 nt, Human herpesvirus 1
cgccgacacgcgg

SEQ ID NO: 1757960 - RNA, 21 nt, Human herpesvirus 1
cgccgacaucaccaccgucag

SEQ ID NO: 1757961 - RNA, 14 nt, Human herpesvirus 1
cgccgaccacccgg

SEQ ID NO: 1757962 - RNA, 22 nt, Human herpesvirus 1
cgcguguaauacuugcgcggcu

SEQ ID NO: 1757963 - RNA, 22 nt, Human herpesvirus 1
cgcuacugcgugggccgcgcgg

SEQ ID NO: 1757964 - RNA, 22 nt, Human herpesvirus 1
cgcuagccgaucccucgcgagg

SEQ ID NO: 1757965 - RNA, 13 nt, Human herpesvirus 1
cgcuaucggggcc

SEQ ID NO: 1757966 - RNA, 16 nt, Human herpesvirus 1
cgcuccgacgacgcgc

SEQ ID NO: 1757967 - RNA, 20 nt, Human herpesvirus 1
cgcugcuccgccuggccugc

SEQ ID NO: 1757968 - RNA, 14 nt, Human herpesvirus 1
cgcugcugcggcca

SEQ ID NO: 1757969 - RNA, 15 nt, Human herpesvirus 1
cccggaggcguuccg

SEQ ID NO: 1757970 - RNA, 14 nt, Human herpesvirus 1
cccggcaccacggg

SEQ ID NO: 1757971 - RNA, 15 nt, Human herpesvirus 1
cccgcggaccaccgg

SEQ ID NO: 1757972 - RNA, 13 nt, Human herpesvirus 1
cccgcguccaccc

SEQ ID NO: 1757973 - RNA, 15 nt, Human herpesvirus 1
cccgcguccacccgg

SEQ ID NO: 1757974 - RNA, 22 nt, Human herpesvirus 1
cccgcggaaacguucgcgcgcc

SEQ ID NO: 1757975 - RNA, 23 nt, Human herpesvirus 1
cccgcgucuggccccggcgagcg

SEQ ID NO: 1757976 - RNA, 15 nt, Human herpesvirus 1
cccgcucccucgacc

SEQ ID NO: 1757977 - RNA, 14 nt, Human herpesvirus 1
cccgcucucgcgcg

SEQ ID NO: 1757978 - RNA, 16 nt, Human herpesvirus 1
cccgcucugacggccc

SEQ ID NO: 1757979 - RNA, 16 nt, Human herpesvirus 1
ccgacgaaucccccaa

SEQ ID NO: 1757980 - RNA, 16 nt, Human herpesvirus 1
ccgaccucggacgcca

SEQ ID NO: 1757981 - RNA, 17 nt, Human herpesvirus 1
ccgaccucggacgccac

SEQ ID NO: 1757982 - RNA, 20 nt, Human herpesvirus 1
cccggcggccccuggcgccg

SEQ ID NO: 1757983 - RNA, 18 nt, Human herpesvirus 1
cccggcuagacccacggg

SEQ ID NO: 1757984 - RNA, 15 nt, Human herpesvirus 1
ccgacguggcgcacg

SEQ ID NO: 1757985 - RNA, 14 nt, Human herpesvirus 1
ccgacuccccggac

SEQ ID NO: 1757986 - RNA, 17 nt, Human herpesvirus 1
ccgagacccccaacgcc

SEQ ID NO: 1757987 - RNA, 22 nt, Human herpesvirus 1
ccgagaguuugaucguggacgg

SEQ ID NO: 1757988 - RNA, 18 nt, Human herpesvirus 1
ccgagccccccgcugcgg

SEQ ID NO: 1757989 - RNA, 21 nt, Human herpesvirus 1
ccgagccccccgcugcggcca

SEQ ID NO: 1757990 - RNA, 15 nt, Human herpesvirus 1
ccgagcuaugggccu

SEQ ID NO: 1757991 - RNA, 20 nt, Human herpesvirus 1
ccgagcuuguuuucgugggg

SEQ ID NO: 1757992 - RNA, 17 nt, Human herpesvirus 1
ccgaguucccccggcac

SEQ ID NO: 1757993 - RNA, 15 nt, Human herpesvirus 1
ccgagggccgggccc

SEQ ID NO: 1757994 - RNA, 20 nt, Human herpesvirus 1
cgagccaacgcccugaccaa

SEQ ID NO: 1757995 - RNA, 14 nt, Human herpesvirus 1
cgagccgacggccc

SEQ ID NO: 1757996 - RNA, 14 nt, Human herpesvirus 1
cgagcgccagcgcu

SEQ ID NO: 1757997 - RNA, 17 nt, Human herpesvirus 1
cgcaacuucccacccgg

SEQ ID NO: 1757998 - RNA, 21 nt, Human herpesvirus 1
cgauucuuuuaucccacgcgu

SEQ ID NO: 1757999 - RNA, 17 nt, Human herpesvirus 1
cgcaacgcgcuggggcu

SEQ ID NO: 1758000 - RNA, 15 nt, Human herpesvirus 1
cgcaauugcggccac

SEQ ID NO: 1758001 - RNA, 19 nt, Human herpesvirus 1
cgcaccaagccgcucuccg

SEQ ID NO: 1758002 - RNA, 15 nt, Human herpesvirus 1
cgcaccgaggggcca

SEQ ID NO: 1758003 - RNA, 14 nt, Human herpesvirus 1
cgcaccgggccccc

SEQ ID NO: 1758004 - RNA, 19 nt, Human herpesvirus 1
cgcaccgggcccccgcccc

SEQ ID NO: 1758005 - RNA, 19 nt, Human herpesvirus 1
cgcaccgucggaggccccc

SEQ ID NO: 1758006 - RNA, 21 nt, Human herpesvirus 1
cgcaccuccuccgacgcccag

SEQ ID NO: 1758007 - RNA, 22 nt, Human herpesvirus 1
cgcaccucgaggacacccgcgc

SEQ ID NO: 1758008 - RNA, 21 nt, Human herpesvirus 1
cgcagccuauguucgcgggcg

SEQ ID NO: 1758009 - RNA, 16 nt, Human herpesvirus 1
cgcagccuucucccgg

SEQ ID NO: 1758010 - RNA, 22 nt, Human herpesvirus 1
cgcagcguccgguuggccgcgc

SEQ ID NO: 1758011 - RNA, 19 nt, Human herpesvirus 1
cgcaggcgcugucuccccg

SEQ ID NO: 1758012 - RNA, 20 nt, Human herpesvirus 1
cgcaguccacgggggggagc

SEQ ID NO: 1758013 - RNA, 16 nt, Human herpesvirus 1
cgcagucccgggggcu

SEQ ID NO: 1758014 - RNA, 20 nt, Human herpesvirus 1
cgcaugaucuccggaccccc

SEQ ID NO: 1758015 - RNA, 14 nt, Human herpesvirus 1
cgccacaccacgcc

SEQ ID NO: 1758016 - RNA, 19 nt, Human herpesvirus 1
cgccacaccaucucccccg

SEQ ID NO: 1758017 - RNA, 20 nt, Human herpesvirus 1
cgcccccggcuacaggggcc

SEQ ID NO: 1758018 - RNA, 20 nt, Human herpesvirus 1
cgccccgaagagggggaccc

SEQ ID NO: 1758019 - RNA, 15 nt, Human herpesvirus 1
augccgugccgcccg

SEQ ID NO: 1758020 - RNA, 19 nt, Human herpesvirus 1
auggaguccacgguaggcc

SEQ ID NO: 1758021 - RNA, 16 nt, Human herpesvirus 1
auggccauagccgccg

SEQ ID NO: 1758022 - RNA, 21 nt, Human herpesvirus 1
auggcccaguguacccuggcg

SEQ ID NO: 1758023 - RNA, 22 nt, Human herpesvirus 1
caagccccuagccccgcccccu

SEQ ID NO: 1758024 - RNA, 19 nt, Human herpesvirus 1
caaggcuugguucggggcc

SEQ ID NO: 1758025 - RNA, 19 nt, Human herpesvirus 1
caaggacgcccgcgacgcc

SEQ ID NO: 1758026 - RNA, 15 nt, Human herpesvirus 1
caaggagcgccggcg

SEQ ID NO: 1758027 - RNA, 16 nt, Human herpesvirus 1
caaggugggccagccg

SEQ ID NO: 1758028 - RNA, 17 nt, Human herpesvirus 1
caaguacgccgccaccg

SEQ ID NO: 1758029 - RNA, 13 nt, Human herpesvirus 1
caggccccccgcc

SEQ ID NO: 1758030 - RNA, 11 nt, Human herpesvirus 1
caacaaacccc

SEQ ID NO: 1758031 - RNA, 13 nt, Human herpesvirus 1
caaacaaccagcc

SEQ ID NO: 1758032 - RNA, 17 nt, Human herpesvirus 1
augggcggccccggccg

SEQ ID NO: 1758033 - RNA, 20 nt, Human herpesvirus 1
augggcaucgugggcggcgu

SEQ ID NO: 1758034 - RNA, 19 nt, Human herpesvirus 1
augggccagggcgaggugc

SEQ ID NO: 1758035 - RNA, 11 nt, Human herpesvirus 1
ccaagccggga

SEQ ID NO: 1758036 - RNA, 19 nt, Human herpesvirus 1
ccaaagcugcuggcgcgca

SEQ ID NO: 1758037 - RNA, 22 nt, Human herpesvirus 1
ccaaagugccccgaccccgaga

SEQ ID NO: 1758038 - RNA, 15 nt, Human herpesvirus 1
ccaacucucgcacca

SEQ ID NO: 1758039 - RNA, 13 nt, Human herpesvirus 1
ccaacgacggccc

SEQ ID NO: 1758040 - RNA, 22 nt, Human herpesvirus 1
caggcgcugucuccccggggcc

SEQ ID NO: 1758041 - RNA, 16 nt, Human herpesvirus 1
caggcccgccgccacu

SEQ ID NO: 1758042 - RNA, 18 nt, Human herpesvirus 1
caggccuggucagaggcc

SEQ ID NO: 1758043 - RNA, 16 nt, Human herpesvirus 1
caggcgaccgccggcg

SEQ ID NO: 1758044 - RNA, 18 nt, Human herpesvirus 1
caggcgccuccggggguc

SEQ ID NO: 1758045 - RNA, 22 nt, Human herpesvirus 1
cagggcgggccgccucgggggc

SEQ ID NO: 1758046 - RNA, 18 nt, Human herpesvirus 1
ccagguugggggccguga

SEQ ID NO: 1758047 - RNA, 18 nt, Human herpesvirus 1
ccaggucggcgaccgcca

SEQ ID NO: 1758048 - RNA, 22 nt, Human herpesvirus 1
ccagggcgcccccgcgcggggg

SEQ ID NO: 1758049 - RNA, 14 nt, Human herpesvirus 1
cccaggcgcugggc

SEQ ID NO: 1758050 - RNA, 20 nt, Human herpesvirus 1
ccaucgccccuggcgcgcga

SEQ ID NO: 1758051 - RNA, 15 nt, Human herpesvirus 1
cccagccucccgauc

SEQ ID NO: 1758052 - RNA, 15 nt, Human herpesvirus 1
cccaggaucacaccg

SEQ ID NO: 1758053 - RNA, 14 nt, Human herpesvirus 1
ccaucccccgaucc

SEQ ID NO: 1758054 - RNA, 20 nt, Human herpesvirus 1
ccauccugcggcucguggcg

SEQ ID NO: 1758055 - RNA, 16 nt, Human herpesvirus 1
ccaguugagccgcgcc

SEQ ID NO: 1758056 - RNA, 18 nt, Human herpesvirus 1
ccagcgcagaggcggcca

SEQ ID NO: 1758057 - RNA, 16 nt, Human herpesvirus 1
ccagcgcggcggggcc

SEQ ID NO: 1758058 - RNA, 21 nt, Human herpesvirus 1
ccagcuaugggcccugcuccg

SEQ ID NO: 1758059 - RNA, 21 nt, Human herpesvirus 1
ccagcguaaccuccgggggcg

SEQ ID NO: 1758060 - RNA, 16 nt, Human herpesvirus 1
ccagcguccgccgagu

SEQ ID NO: 1758061 - RNA, 12 nt, Human herpesvirus 1
ccagcugggccc

SEQ ID NO: 1758062 - RNA, 17 nt, Human herpesvirus 1
ccaggcgccgacggaca

SEQ ID NO: 1758063 - RNA, 15 nt, Human herpesvirus 1
ccaggcgcgccgcga

SEQ ID NO: 1758064 - RNA, 19 nt, Human herpesvirus 1
ccaggcggcgaacgggggc

SEQ ID NO: 1758065 - RNA, 16 nt, Human herpesvirus 1
cccaucgcgggcgcca

SEQ ID NO: 1758066 - RNA, 18 nt, Human herpesvirus 1
cccaucuaaugccacgcg

SEQ ID NO: 1758067 - RNA, 21 nt, Human herpesvirus 1
ccccaguggguuuugcggacc

SEQ ID NO: 1758068 - RNA, 20 nt, Human herpesvirus 1
ccccauaucgcuucccgacc

SEQ ID NO: 1758069 - RNA, 13 nt, Human herpesvirus 1
ccccaucaccccg

SEQ ID NO: 1758070 - RNA, 21 nt, Human herpesvirus 1
ccccaucgccgcggcucccgg

SEQ ID NO: 1758071 - RNA, 15 nt, Human herpesvirus 1
ccccauggaccccag

SEQ ID NO: 1758072 - RNA, 17 nt, Human herpesvirus 1
cccccaaaccccacgcc

SEQ ID NO: 1758073 - RNA, 19 nt, Human herpesvirus 1
cccccaaaucccggcgccg

SEQ ID NO: 1758074 - RNA, 19 nt, Human herpesvirus 1
cccccauaagguccguccg

SEQ ID NO: 1758075 - RNA, 21 nt, Human herpesvirus 1
cccccaucuaaugccacgcga

SEQ ID NO: 1758076 - RNA, 13 nt, Human herpesvirus 1
cccccccaagcgc

SEQ ID NO: 1758077 - RNA, 13 nt, Human herpesvirus 1
cccccccacccgc

SEQ ID NO: 1758078 - RNA, 13 nt, Human herpesvirus 1
cccccccucgcgc

SEQ ID NO: 1758079 - RNA, 13 nt, Human herpesvirus 1
cccccgcccgggu

SEQ ID NO: 1758080 - RNA, 16 nt, Human herpesvirus 1
cccccgccucuggggu

SEQ ID NO: 1758081 - RNA, 13 nt, Human herpesvirus 1
cccccgucugggu

SEQ ID NO: 1758082 - RNA, 13 nt, Human herpesvirus 1
cccccuccgcgcc

SEQ ID NO: 1758083 - RNA, 22 nt, Human herpesvirus 1
cccccucuaucccgcccaccgc

SEQ ID NO: 1758084 - RNA, 20 nt, Human herpesvirus 1
cccccuguuugucgacgaga

SEQ ID NO: 1758085 - RNA, 16 nt, Human herpesvirus 1
ccccgaacccugcggu

SEQ ID NO: 1758086 - RNA, 18 nt, Human herpesvirus 1
ccccacgaugaccgcccc

SEQ ID NO: 1758087 - RNA, 23 nt, Human herpesvirus 1
cccaucccgaggccccacgucgg

SEQ ID NO: 1758088 - RNA, 14 nt, Human herpesvirus 1
ccccagccuucacg

SEQ ID NO: 1758089 - RNA, 18 nt, Human herpesvirus 1
cccccggcacgccugggg

SEQ ID NO: 1758090 - RNA, 22 nt, Human herpesvirus 1
cccccggccgccgcggacgccg

SEQ ID NO: 1758091 - RNA, 20 nt, Human herpesvirus 1
cccccggguuuucccacgcc

SEQ ID NO: 1758092 - RNA, 16 nt, Human herpesvirus 1
ccccgcuucauccccg

SEQ ID NO: 1758093 - RNA, 15 nt, Human herpesvirus 1
ccccggacccgggcc

SEQ ID NO: 1758094 - RNA, 16 nt, Human herpesvirus 1
ccccggacgacauggc

SEQ ID NO: 1758095 - RNA, 15 nt, Human herpesvirus 1
ccccgauggcccucc

SEQ ID NO: 1758096 - RNA, 15 nt, Human herpesvirus 1
ccccgacagcccccc

SEQ ID NO: 1758097 - RNA, 14 nt, Human herpesvirus 1
ccccgacaugaccg

SEQ ID NO: 1758098 - RNA, 15 nt, Human herpesvirus 1
ccccgacugcccccc

SEQ ID NO: 1758099 - RNA, 14 nt, Human herpesvirus 1
ccccgagaaccagc

SEQ ID NO: 1758100 - RNA, 18 nt, Human herpesvirus 1
cccgcgacccggacgccg

SEQ ID NO: 1758101 - RNA, 13 nt, Human herpesvirus 1
cccgcgacgccau

SEQ ID NO: 1758102 - RNA, 20 nt, Human herpesvirus 1
ccccggaggcguuccgggca

SEQ ID NO: 1758103 - RNA, 14 nt, Human herpesvirus 1
ccccggccaccccg

SEQ ID NO: 1758104 - RNA, 17 nt, Human herpesvirus 1
cccgcgcgggggcgccg

SEQ ID NO: 1758105 - RNA, 16 nt, Human herpesvirus 1
cccgcgcucgcgagua

SEQ ID NO: 1758106 - RNA, 17 nt, Human
cucucuggggcuguguu

SEQ ID NO: 1758107 - RNA, 14 nt, Human
cucuaugcuuucca

SEQ ID NO: 1758108 - RNA, 16 nt, Human
cucuaugcuuuccaaa

SEQ ID NO: 1758109 - RNA, 19 nt, Human
cuccuuucaccccagggcc

SEQ ID NO: 1758110 - RNA, 13 nt, Human
cucugcagggccg

SEQ ID NO: 1758111 - RNA, 19 nt, Human
cucugcagggccgccaggg

SEQ ID NO: 1758112 - RNA, 21 nt, Human
cucugcuccucuccccagcaa

SEQ ID NO: 1758113 - RNA, 13 nt, Human
cucugcucgccuu

SEQ ID NO: 1758114 - RNA, 15 nt, Human
cucugcucgccuuag

SEQ ID NO: 1758115 - RNA, 21 nt, Human
cucugcugacagacacaggcc

SEQ ID NO: 1758116 - RNA, 22 nt, Human
cucugcugacagacacaggccc

SEQ ID NO: 1758117 - RNA, 16 nt, Human
cucugcucgccuuagc

SEQ ID NO: 1758118 - RNA, 17 nt, Human
cucugcucgccuuagca

SEQ ID NO: 1758119 - RNA, 23 nt, Human
cucugcugacagacacaggcccg

SEQ ID NO: 1758120 - RNA, 13 nt, Human
cucuguccuggga

SEQ ID NO: 1758121 - RNA, 14 nt, Human
cuccggacuggugc

SEQ ID NO: 1758122 - RNA, 15 nt, Human
cuccggacuggugcc

SEQ ID NO: 1758123 - RNA, 16 nt, Human
cuccggacuggugccc

SEQ ID NO: 1758124 - RNA, 14 nt, Human
cuccggcucccagc

SEQ ID NO: 1758125 - RNA, 15 nt, Human
cuccggcucccagcc

SEQ ID NO: 1758126 - RNA, 16 nt, Human
cuccggcucccagccu

SEQ ID NO: 1758127 - RNA, 17 nt, Human
cuccggcucccagccuc

SEQ ID NO: 1758128 - RNA, 19 nt, Human
cuccucugaaacagcugcc

SEQ ID NO: 1758129 - RNA, 20 nt, Human
cuccucugaaacagcugccu

SEQ ID NO: 1758130 - RNA, 21 nt, Human
cuccucugaaacagcugccuu

SEQ ID NO: 1758131 - RNA, 22 nt, Human
cuccucugaaacagcugccuua

SEQ ID NO: 1758132 - RNA, 23 nt, Human
cuccucugaaacagcugccuuag

SEQ ID NO: 1758133 - RNA, 13 nt, Human
cuccucugacuca

SEQ ID NO: 1758134 - RNA, 18 nt, Human
cuccucugacucagggcu

SEQ ID NO: 1758135 - RNA, 19 nt, Human
cuccucugacucagggcuc

SEQ ID NO: 1758136 - RNA, 20 nt, Human
cuccucugacucagggcucc

SEQ ID NO: 1758137 - RNA, 22 nt, Human
cuccucugacucagggcuccug

SEQ ID NO: 1758138 - RNA, 18 nt, Human
cuccuguccucccucacc

SEQ ID NO: 1758139 - RNA, 15 nt, Human
cuccuuucaccacau

SEQ ID NO: 1758140 - RNA, 21 nt, Human
cuccugggcccucucugcucu

SEQ ID NO: 1758141 - RNA, 22 nt, Human
cuccugggcccucucugcucug

SEQ ID NO: 1758142 - RNA, 23 nt, Human
cuccuggguuuuguauucucuga

SEQ ID NO: 1758143 - RNA, 22 nt, Human
cuccuggguuuuguauucucug

SEQ ID NO: 1758144 - RNA, 12 nt, Human
cuccuguccucc

SEQ ID NO: 1758145 - RNA, 23 nt, Human
cuccucuucuuuuuuuucauuau

SEQ ID NO: 1758146 - RNA, 12 nt, Human
cuccuggcccag

SEQ ID NO: 1758147 - RNA, 19 nt, Human
cuccuggccucaagugauu

SEQ ID NO: 1758148 - RNA, 14 nt, Human
cuccuggcccaggu

SEQ ID NO: 1758149 - RNA, 18 nt, Human
cuccugggcuaagugauc

SEQ ID NO: 1758150 - RNA, 15 nt, Human
cuccugggcccucuc

SEQ ID NO: 1758151 - RNA, 17 nt, Human
cuccugggcccucucug

SEQ ID NO: 1758152 - RNA, 19 nt, Human
cuccugggcccucucugcu

SEQ ID NO: 1758153 - RNA, 20 nt, Human
cuccugggcccucucugcuc

SEQ ID NO: 1758154 - RNA, 17 nt, Human
cucccagagcuggugga

SEQ ID NO: 1758155 - RNA, 22 nt, Human
cucccagagcugguggacccag

SEQ ID NO: 1758156 - RNA, 15 nt, Human
cuccaggcuccuuua

SEQ ID NO: 1758157 - RNA, 23 nt, Human
cuccaggcuccuuuagcgcccag

SEQ ID NO: 1758158 - RNA, 20 nt, Human
cuccaggcuguaucccauga

SEQ ID NO: 1758159 - RNA, 22 nt, Human
cuccaggcuguaucccaugagc

SEQ ID NO: 1758160 - RNA, 21 nt, Human
cucccaggacucugaccccag

SEQ ID NO: 1758161 - RNA, 18 nt, Human
cuccccccuccucugaaa

SEQ ID NO: 1758162 - RNA, 23 nt, Human
cuccccccuccucugaaacagcu

SEQ ID NO: 1758163 - RNA, 15 nt, Human
cucaaucaagaaaau

SEQ ID NO: 1758164 - RNA, 22 nt, Human
cuauguuuuuguucaaagccag

SEQ ID NO: 1758165 - RNA, 21 nt, Human
cucaagugauucuccugccuc

SEQ ID NO: 1758166 - RNA, 20 nt, Human
cuauguuuuuguucaaagcc

SEQ ID NO: 1758167 - RNA, 15 nt, Human
cuauccguguugcag

SEQ ID NO: 1758168 - RNA, 17 nt, Human
cuauccguguugcaggu

SEQ ID NO: 1758169 - RNA, 14 nt, Human
cuaucauggugaaa

SEQ ID NO: 1758170 - RNA, 22 nt, Human
cuaucauggugaaaagcuccau

SEQ ID NO: 1758171 - RNA, 18 nt, Human
cuauguugcccaggcagg

SEQ ID NO: 1758172 - RNA, 19 nt, Human
cuauguugcccaggcaggu

SEQ ID NO: 1758173 - RNA, 21 nt, Human
cuauguugcccaggcaggucu

SEQ ID NO: 1758174 - RNA, 22 nt, Human
cuauguugcccaggcaggucuu

SEQ ID NO: 1758175 - RNA, 14 nt, Human
cuauguugcccagg

SEQ ID NO: 1758176 - RNA, 23 nt, Human
cucaggugucccugcacuugcag

SEQ ID NO: 1758177 - RNA, 17 nt, Human
cucaugaggaggggccc

SEQ ID NO: 1758178 - RNA, 23 nt, Human
cucaugaggaggggccccccugc

SEQ ID NO: 1758179 - RNA, 14 nt, Human
cucaugaggggaga

SEQ ID NO: 1758180 - RNA, 15 nt, Human
cucaugaggggagag

SEQ ID NO: 1758181 - RNA, 19 nt, Human
cucaugaggggagaggaga

SEQ ID NO: 1758182 - RNA, 15 nt, Human
cucaguccauagcag

SEQ ID NO: 1758183 - RNA, 17 nt, Human
cucaguccauagcagag

SEQ ID NO: 1758184 - RNA, 19 nt, Human
cucaggccggcagccccag

SEQ ID NO: 1758185 - RNA, 20 nt, Human
cucaggccggcagccccagc

SEQ ID NO: 1758186 - RNA, 21 nt, Human
cucaggccggcagccccagcc

SEQ ID NO: 1758187 - RNA, 22 nt, Human
cucaggccggcagccccagccu

SEQ ID NO: 1758188 - RNA, 23 nt, Human
cucaggccggcagccccagccug

SEQ ID NO: 1758189 - RNA, 24 nt, Human
cucaggccggcagccccagccugc

SEQ ID NO: 1758190 - RNA, 21 nt, Human
cucaggcgggacagugcugca

SEQ ID NO: 1758191 - RNA, 14 nt, Human
cucaccuuuguuuu

SEQ ID NO: 1758192 - RNA, 22 nt, Human
cucaccuuuguuuuuuguugga

SEQ ID NO: 1758193 - RNA, 13 nt, Human
cucagaagacacu

SEQ ID NO: 1758194 - RNA, 14 nt, Human
cucagaacccuugg

SEQ ID NO: 1758195 - RNA, 21 nt, Human
cucagaacccuuggcuugccc

SEQ ID NO: 1758196 - RNA, 15 nt, Human
cucagaagacacuga

SEQ ID NO: 1758197 - RNA, 17 nt, Human
cucagaagacacugaug

SEQ ID NO: 1758198 - RNA, 20 nt, Human
cucagaagacacugaugggc

SEQ ID NO: 1758199 - RNA, 22 nt, Human
cucagaagacacugaugggcaa

SEQ ID NO: 1758200 - RNA, 19 nt, Human
cucagccucccgaauagcu

SEQ ID NO: 1758201 - RNA, 21 nt, Human
cucagccucccgaauagcugg

SEQ ID NO: 1758202 - RNA, 22 nt, Human
cucagccucccgaauagcuggg

SEQ ID NO: 1758203 - RNA, 23 nt, Human
cucagaagacacugaugggcaac

SEQ ID NO: 1758204 - RNA, 14 nt, Human
cucagaacuugcug

SEQ ID NO: 1758205 - RNA, 17 nt, Human
cucagaacuugcugcug

SEQ ID NO: 1758206 - RNA, 18 nt, Human
cucagaacuugcugcugu

SEQ ID NO: 1758207 - RNA, 19 nt, Human
cucagaacuugcugcuguc

SEQ ID NO: 1758208 - RNA, 20 nt, Human
cucagaacuugcugcugucu

SEQ ID NO: 1758209 - RNA, 23 nt, Human
cucagaacuugcugcugucuugu

SEQ ID NO: 1758210 - RNA, 15 nt, Human
cucagaagccucugg

SEQ ID NO: 1758211 - RNA, 17 nt, Human
cucagaagccucugggu

SEQ ID NO: 1758212 - RNA, 12 nt, Human
cgguggcugggc

SEQ ID NO: 1758213 - RNA, 13 nt, Human
cgguggcugggca

SEQ ID NO: 1758214 - RNA, 14 nt, Human
cgguggcugggcag

SEQ ID NO: 1758215 - RNA, 21 nt, Human
cgguggcugggcagagcugca

SEQ ID NO: 1758216 - RNA, 12 nt, Human
cgggcugugccc

SEQ ID NO: 1758217 - RNA, 17 nt, Human
cguacaggcuggcgcag

SEQ ID NO: 1758218 - RNA, 13 nt, Human
cgggcuccagcca

SEQ ID NO: 1758219 - RNA, 14 nt, Human
cgggcuccagccau

SEQ ID NO: 1758220 - RNA, 18 nt, Human
cgggcuccagccaucuca

SEQ ID NO: 1758221 - RNA, 13 nt, Human
cgggccagggcug

SEQ ID NO: 1758222 - RNA, 17 nt, Human
cgggccagggcugcccc

SEQ ID NO: 1758223 - RNA, 18 nt, Human
cgggccagggcugccccu

SEQ ID NO: 1758224 - RNA, 21 nt, Human
cgggcccuucccacaggacau

SEQ ID NO: 1758225 - RNA, 20 nt, Human
cggagacggagucccaccuu

SEQ ID NO: 1758226 - RNA, 17 nt, Human
cggagacggagucccac

SEQ ID NO: 1758227 - RNA, 21 nt, Human
cggagucccaccuuggcugca

SEQ ID NO: 1758228 - RNA, 22 nt, Human
cggagucccaccuuggcugcag

SEQ ID NO: 1758229 - RNA, 12 nt, Human
cggagggcugcg

SEQ ID NO: 1758230 - RNA, 11 nt, Human
cggaggggagu

SEQ ID NO: 1758231 - RNA, 14 nt, Human
cggaggggaguaga

SEQ ID NO: 1758232 - RNA, 23 nt, Human
cggagucccaccuuggcugcagg

SEQ ID NO: 1758233 - RNA, 15 nt, Human
cggcguacaggcugg

SEQ ID NO: 1758234 - RNA, 16 nt, Human
cggcguacaggcuggc

SEQ ID NO: 1758235 - RNA, 12 nt, Human
cgccacaggacc

SEQ ID NO: 1758236 - RNA, 13 nt, Human
cgccacaggaccc

SEQ ID NO: 1758237 - RNA, 13 nt, Human
ccuuucgaggccu

SEQ ID NO: 1758238 - RNA, 14 nt, Human
ccuuucgaggccug

SEQ ID NO: 1758239 - RNA, 15 nt, Human
ccuuuccuccucuga

SEQ ID NO: 1758240 - RNA, 11 nt, Human
ccuuuccuguc

SEQ ID NO: 1758241 - RNA, 14 nt, Human
ccuuuccuguccca

SEQ ID NO: 1758242 - RNA, 15 nt, Human
ccuuuccugucccac

SEQ ID NO: 1758243 - RNA, 17 nt, Human
cgcuggagugcagugag

SEQ ID NO: 1758244 - RNA, 18 nt, Human
cgcuggagugcagugagc

SEQ ID NO: 1758245 - RNA, 15 nt, Human
cgcugccugcccaca

SEQ ID NO: 1758246 - RNA, 14 nt, Human
cgcugagccaccug

SEQ ID NO: 1758247 - RNA, 15 nt, Human
cgcugagccaccugc

SEQ ID NO: 1758248 - RNA, 16 nt, Human
cgcugagccaccugcc

SEQ ID NO: 1758249 - RNA, 21 nt, Human
cgcugagccaccugcccuuuu

SEQ ID NO: 1758250 - RNA, 20 nt, Human
cgccugcaaacgcugccugc

SEQ ID NO: 1758251 - RNA, 21 nt, Human
cgccugcaaacgcugccugcc

SEQ ID NO: 1758252 - RNA, 22 nt, Human
cgccugcaaacgcugccugccc

SEQ ID NO: 1758253 - RNA, 22 nt, Human
cgccugcaaacgcugccugccg

SEQ ID NO: 1758254 - RNA, 17 nt, Human
cgccugcauguaaacac

SEQ ID NO: 1758255 - RNA, 22 nt, Human
cgccugcauguaaacacgccug

SEQ ID NO: 1758256 - RNA, 22 nt, Human
cgugagccacugcaccgggcca

SEQ ID NO: 1758257 - RNA, 15 nt, Human
cgugagcucuuguga

SEQ ID NO: 1758258 - RNA, 14 nt, Human
cgugagccacugca

SEQ ID NO: 1758259 - RNA, 15 nt, Human
cgugagccacugcac

SEQ ID NO: 1758260 - RNA, 20 nt, Human
cgugagccacugcaccgggc

SEQ ID NO: 1758261 - RNA, 14 nt, Human
cgugacaacacuug

SEQ ID NO: 1758262 - RNA, 15 nt, Human
cgugacaacacuugu

SEQ ID NO: 1758263 - RNA, 20 nt, Human
cguuagucgugagcucuugu

SEQ ID NO: 1758264 - RNA, 14 nt, Human
cguuagaggaaaaa

SEQ ID NO: 1758265 - RNA, 17 nt, Human
cguuagaggaaaaauau

SEQ ID NO: 1758266 - RNA, 12 nt, Human
cuaauuuuuaag

SEQ ID NO: 1758267 - RNA, 14 nt, Human
cuaagaaccccucu

SEQ ID NO: 1758268 - RNA, 20 nt, Human
ccuuuauuguguuugucauu

SEQ ID NO: 1758269 - RNA, 15 nt, Human
ccuuuauuguguuug

SEQ ID NO: 1758270 - RNA, 12 nt, Human
ccuuuauugugu

SEQ ID NO: 1758271 - RNA, 21 nt, Human
ccuuuauuguguuugucauua

SEQ ID NO: 1758272 - RNA, 18 nt, Human
ccuugccuuucgaggccu

SEQ ID NO: 1758273 - RNA, 19 nt, Human
ccuugccuuucgaggccug

SEQ ID NO: 1758274 - RNA, 20 nt, Human
ccuugccuuucgaggccuga

SEQ ID NO: 1758275 - RNA, 21 nt, Human
ccuuccuauuccaagcuucca

SEQ ID NO: 1758276 - RNA, 12 nt, Human
ccuuccuccugg

SEQ ID NO: 1758277 - RNA, 13 nt, Human
ccuuccuccuggg

SEQ ID NO: 1758278 - RNA, 14 nt, Human
ccuucucugaagga

SEQ ID NO: 1758279 - RNA, 16 nt, Human
ccuucucugaaggaca

SEQ ID NO: 1758280 - RNA, 22 nt, Human
ccuucuguccuacucuguguca

SEQ ID NO: 1758281 - RNA, 20 nt, Human
ccuucuguccuacucugugu

SEQ ID NO: 1758282 - RNA, 21 nt, Human
ccuucuguccuacucuguguc

SEQ ID NO: 1758283 - RNA, 13 nt, Human
ccuguucagcucc

SEQ ID NO: 1758284 - RNA, 23 nt, Human
ccuguuagacguccuccguccau

SEQ ID NO: 1758285 - RNA, 12 nt, Human
ccugcugcuucu

SEQ ID NO: 1758286 - RNA, 14 nt, Human
ccugcugcuucucc

SEQ ID NO: 1758287 - RNA, 15 nt, Human
ccugcugcuucucca

SEQ ID NO: 1758288 - RNA, 16 nt, Human
ccugcugcuucuccaa

SEQ ID NO: 1758289 - RNA, 12 nt, Human
ccugcuggaagc

SEQ ID NO: 1758290 - RNA, 13 nt, Human
ccugcuggaagcc

SEQ ID NO: 1758291 - RNA, 14 nt, Human
ccugcuggaagccc

SEQ ID NO: 1758292 - RNA, 16 nt, Human
ccugcuggaagcccag

SEQ ID NO: 1758293 - RNA, 17 nt, Human
ccugcuggaagcccagc

SEQ ID NO: 1758294 - RNA, 12 nt, Human
ccugcuggaggc

SEQ ID NO: 1758295 - RNA, 13 nt, Human
ccugcuggaggcc

SEQ ID NO: 1758296 - RNA, 14 nt, Human
ccugcuggaggccu

SEQ ID NO: 1758297 - RNA, 15 nt, Human
ccugcuggaggccuc

SEQ ID NO: 1758298 - RNA, 16 nt, Human
ccugcuggaggccuca

SEQ ID NO: 1758299 - RNA, 17 nt, Human
ccugcuggaggccucag

SEQ ID NO: 1758300 - RNA, 18 nt, Human
ccugcuggaggccucagg

SEQ ID NO: 1758301 - RNA, 21 nt, Human
ccugcuggaggccucaggugc

SEQ ID NO: 1758302 - RNA, 22 nt, Human
ccugcuggaggccucaggugcu

SEQ ID NO: 1758303 - RNA, 19 nt, Human
ccuuagcagggaaacagcu

SEQ ID NO: 1758304 - RNA, 20 nt, Human
ccuuagcagggaaacagcua

SEQ ID NO: 1758305 - RNA, 20 nt, Human
ccuuagcacuaccacuccug

SEQ ID NO: 1758306 - RNA, 22 nt, Human
ccuguugcuaagccccagcaag

SEQ ID NO: 1758307 - RNA, 14 nt, Human
ccuguugcuaagcc

SEQ ID NO: 1758308 - RNA, 13 nt, Human
ccuguugcuaagc

SEQ ID NO: 1758309 - RNA, 12 nt, Human
ccuguugcuaag

SEQ ID NO: 1758310 - RNA, 14 nt, Human
ccuguuccuggagg

SEQ ID NO: 1758311 - RNA, 21 nt, Human
ccuguugaauuuuguucucug

SEQ ID NO: 1758312 - RNA, 22 nt, Human
ccuguugaauuuuguucucugg

SEQ ID NO: 1758313 - RNA, 23 nt, Human
ccuguugaauuuuguucucuggg

SEQ ID NO: 1758314 - RNA, 23 nt, Human
ccuguucagcuccagcucaccag

SEQ ID NO: 1758315 - RNA, 20 nt, Human
ccuguucagcuccagcucac

SEQ ID NO: 1758316 - RNA, 21 nt, Human
ccuguucagcuccagcucacc

SEQ ID NO: 1758317 - RNA, 14 nt, Human
ccuguucagcucca

SEQ ID NO: 1758318 - RNA, 15 nt, Human
ccuguucagcuccag

SEQ ID NO: 1758319 - RNA, 16 nt, Human
ccuguucagcuccagc

SEQ ID NO: 1758320 - RNA, 19 nt, Human
ccuguucagcuccagcuca

SEQ ID NO: 1758321 - RNA, 16 nt, Human
ccuuauuagagugucu

SEQ ID NO: 1758322 - RNA, 21 nt, Human
ccuuauuagagugucuuucca

SEQ ID NO: 1758323 - RNA, 19 nt, Human
ccuuaugcuucuuucaaau

SEQ ID NO: 1758324 - RNA, 15 nt, Human
ccuuaucugugcuca

SEQ ID NO: 1758325 - RNA, 17 nt, Human
ccuuaucugugcucagg

SEQ ID NO: 1758326 - RNA, 23 nt, Human
ccuuaucuccacaaccucuuccc

SEQ ID NO: 1758327 - RNA, 12 nt, Human
ccuuagcuucag

SEQ ID NO: 1758328 - RNA, 14 nt, Human
ccuuagcuucagga

SEQ ID NO: 1758329 - RNA, 16 nt, Human
ccuuagcuucaggaac

SEQ ID NO: 1758330 - RNA, 17 nt, Human
ccuuagcuucaggaacc

SEQ ID NO: 1758331 - RNA, 19 nt, Human
ccuuagcuucaggaaccuc

SEQ ID NO: 1758332 - RNA, 13 nt, Human
ccugcugcaugcc

SEQ ID NO: 1758333 - RNA, 16 nt, Human
ccugcugcaugcccuc

SEQ ID NO: 1758334 - RNA, 20 nt, Human
ccugcugcaugcccucucag

SEQ ID NO: 1758335 - RNA, 21 nt, Human
ccugcugcaugcccucucagg

SEQ ID NO: 1758336 - RNA, 23 nt, Human
ccugcugcaugcccucucaggcc

SEQ ID NO: 1758337 - RNA, 14 nt, Human
ccucuuugcugcag

SEQ ID NO: 1758338 - RNA, 20 nt, Human
ccucuucugucccuguuaga

SEQ ID NO: 1758339 - RNA, 13 nt, Human
ccucuucugggag

SEQ ID NO: 1758340 - RNA, 17 nt, Human
ccucuucugggagggca

SEQ ID NO: 1758341 - RNA, 18 nt, Human
ccucuucugggagggcag

SEQ ID NO: 1758342 - RNA, 21 nt, Human
ccucuucugggagggcagcag

SEQ ID NO: 1758343 - RNA, 21 nt, Human
ccucugccugaagucacacag

SEQ ID NO: 1758344 - RNA, 13 nt, Human
ccugacucauucu

SEQ ID NO: 1758345 - RNA, 12 nt, Human
ccuccccagccu

SEQ ID NO: 1758346 - RNA, 13 nt, Human
ccuccccagccug

SEQ ID NO: 1758347 - RNA, 14 nt, Human
ccuccccagccugc

SEQ ID NO: 1758348 - RNA, 15 nt, Human
ccuccccagccugcg

SEQ ID NO: 1758349 - RNA, 16 nt, Human
ccuccccagccugcgc

SEQ ID NO: 1758350 - RNA, 21 nt, Human
ccuccccagccugcgccugcu

SEQ ID NO: 1758351 - RNA, 22 nt, Human
ccuccccagccugcgccugcug

SEQ ID NO: 1758352 - RNA, 23 nt, Human
ccucccagagcugguggacccag

SEQ ID NO: 1758353 - RNA, 19 nt, Human
ccucaggaggcaggaccuu

SEQ ID NO: 1758354 - RNA, 20 nt, Human
ccuagccgguuccugucccu

SEQ ID NO: 1758355 - RNA, 21 nt, Human
ccuagccgguuccugucccug

SEQ ID NO: 1758356 - RNA, 22 nt, Human
ccuagccgguuccugucccugc

SEQ ID NO: 1758357 - RNA, 23 nt, Human
ccuagccgguuccugucccugcg

SEQ ID NO: 1758358 - RNA, 18 nt, Human
ccuccuuuccuccucuga

SEQ ID NO: 1758359 - RNA, 21 nt, Human
ccuccuuuccuccucugacuu

SEQ ID NO: 1758360 - RNA, 16 nt, Human
ccucgaacuggcugca

SEQ ID NO: 1758361 - RNA, 15 nt, Human
ccucgaacuggcugc

SEQ ID NO: 1758362 - RNA, 14 nt, Human
ccuccgccuccagg

SEQ ID NO: 1758363 - RNA, 16 nt, Human
ccuccgccuccaggaa

SEQ ID NO: 1758364 - RNA, 18 nt, Human
ccuccgggaccuggugcu

SEQ ID NO: 1758365 - RNA, 15 nt, Human
ccuccguccauauca

SEQ ID NO: 1758366 - RNA, 19 nt, Human
ccucucuauauuucggguc

SEQ ID NO: 1758367 - RNA, 20 nt, Human
ccucugccucugacacacag

SEQ ID NO: 1758368 - RNA, 21 nt, Human
ccucugccucugacacacagc

SEQ ID NO: 1758369 - RNA, 23 nt, Human
ccucugccucugacacacagcuc

SEQ ID NO: 1758370 - RNA, 11 nt, Human
ccucugccuga

SEQ ID NO: 1758371 - RNA, 20 nt, Human
ccucugccugaagucacaca

SEQ ID NO: 1758372 - RNA, 13 nt, Human
ccucuccuuccug

SEQ ID NO: 1758373 - RNA, 15 nt, Human
ccucuccuuccugug

SEQ ID NO: 1758374 - RNA, 14 nt, Human
ccucuccuuuguuc

SEQ ID NO: 1758375 - RNA, 22 nt, Human
ccucgccggacccucuaaccuc

SEQ ID NO: 1758376 - RNA, 13 nt, Human
ccucgcugccagc

SEQ ID NO: 1758377 - RNA, 14 nt, Human
ccucgcugccagcu

SEQ ID NO: 1758378 - RNA, 19 nt, Human
ccucgcugccagcucugua

SEQ ID NO: 1758379 - RNA, 20 nt, Human
ccucgcugccagcucuguau

SEQ ID NO: 1758380 - RNA, 19 nt, Human
ccucggcuuuucucagcug

SEQ ID NO: 1758381 - RNA, 20 nt, Human
ccucggcuuuucucagcugg

SEQ ID NO: 1758382 - RNA, 18 nt, Human
cccuccggacuggugccc

SEQ ID NO: 1758383 - RNA, 19 nt, Human
cccuccggacuggugcccu

SEQ ID NO: 1758384 - RNA, 13 nt, Human
cccuccgccucca

SEQ ID NO: 1758385 - RNA, 16 nt, Human
cccuccgccuccagga

SEQ ID NO: 1758386 - RNA, 14 nt, Human
cccucgcugccagc

SEQ ID NO: 1758387 - RNA, 14 nt, Human
cccugcccggcugc

SEQ ID NO: 1758388 - RNA, 17 nt, Human
cccugcccggcugcgga

SEQ ID NO: 1758389 - RNA, 13 nt, Human
cccugagcugagg

SEQ ID NO: 1758390 - RNA, 14 nt, Human
cccugagcugaggc

SEQ ID NO: 1758391 - RNA, 16 nt, Human
cccugagcugaggcag

SEQ ID NO: 1758392 - RNA, 17 nt, Human
cccugagcugaggcagc

SEQ ID NO: 1758393 - RNA, 19 nt, Human
cccugagcugaggcagcag

SEQ ID NO: 1758394 - RNA, 21 nt, Human
cccugagcugaggcagcagug

SEQ ID NO: 1758395 - RNA, 14 nt, Human
cccugacuuuucug

SEQ ID NO: 1758396 - RNA, 15 nt, Human
cccugacucauucug

SEQ ID NO: 1758397 - RNA, 19 nt, Human
cccugacucauucugaagg

SEQ ID NO: 1758398 - RNA, 21 nt, Human
cccugacucauucugaaggag

SEQ ID NO: 1758399 - RNA, 13 nt, Human
cccugacugggag

SEQ ID NO: 1758400 - RNA, 16 nt, Human
ccgaauagcugggacu

SEQ ID NO: 1758401 - RNA, 17 nt, Human
ccgaauagcugggacua

SEQ ID NO: 1758402 - RNA, 18 nt, Human
ccgaccagacaccuugac

SEQ ID NO: 1758403 - RNA, 13 nt, Human
ccgaccagacacc

SEQ ID NO: 1758404 - RNA, 17 nt, Human
ccgaccagacaccuuga

SEQ ID NO: 1758405 - RNA, 19 nt, Human
ccgaaagggacuuggaagc

SEQ ID NO: 1758406 - RNA, 22 nt, Human
cccugugcagccgcugagcgag

SEQ ID NO: 1758407 - RNA, 22 nt, Human
ccgcccagagacccaagcugcc

SEQ ID NO: 1758408 - RNA, 21 nt, Human
cccuguccggaaugccaccca

SEQ ID NO: 1758409 - RNA, 22 nt, Human
cccuguccggaaugccacccac

SEQ ID NO: 1758410 - RNA, 15 nt, Human
ccggccccugcuggu

SEQ ID NO: 1758411 - RNA, 18 nt, Human
ccggcccgcgccacagga

SEQ ID NO: 1758412 - RNA, 17 nt, Human
ccggcccgcgccacagg

SEQ ID NO: 1758413 - RNA, 15 nt, Human
ccggcuccaggcucc

SEQ ID NO: 1758414 - RNA, 13 nt, Human
ccggcuccaggcu

SEQ ID NO: 1758415 - RNA, 14 nt, Human
ccggcuccaggcuc

SEQ ID NO: 1758416 - RNA, 17 nt, Human
ccuagccgguuccuguc

SEQ ID NO: 1758417 - RNA, 13 nt, Human
ccuaaucucugua

SEQ ID NO: 1758418 - RNA, 21 nt, Human
ccagcgagcccugguggcagu

SEQ ID NO: 1758419 - RNA, 16 nt, Human
ccagcgaggaggcucc

SEQ ID NO: 1758420 - RNA, 13 nt, Human
ccagcguccuccu

SEQ ID NO: 1758421 - RNA, 19 nt, Human
ccagcguccuccucuguga

SEQ ID NO: 1758422 - RNA, 17 nt, Human
ccagcguccuccucugu

SEQ ID NO: 1758423 - RNA, 11 nt, Human
ccaguccugcu

SEQ ID NO: 1758424 - RNA, 12 nt, Human
ccaguccugcua

SEQ ID NO: 1758425 - RNA, 15 nt, Human
ccaguccugcuaccu

SEQ ID NO: 1758426 - RNA, 21 nt, Human
ccaguccugcuaccucccuug

SEQ ID NO: 1758427 - RNA, 13 nt, Human
ccagagagggugg

SEQ ID NO: 1758428 - RNA, 13 nt, Human
ccagaugcaccag

SEQ ID NO: 1758429 - RNA, 14 nt, Human
ccagaugcaccagc

SEQ ID NO: 1758430 - RNA, 16 nt, Human
ccagauaacugaggag

SEQ ID NO: 1758431 - RNA, 17 nt, Human
ccagacccggcugcgug

SEQ ID NO: 1758432 - RNA, 15 nt, Human
ccagacggcuccacu

SEQ ID NO: 1758433 - RNA, 20 nt, Human
ccagacggcuccacuaggac

SEQ ID NO: 1758434 - RNA, 19 nt, Human
ccacugcacuauagccuag

SEQ ID NO: 1758435 - RNA, 20 nt, Human
ccacugcacuauagccuagg

SEQ ID NO: 1758436 - RNA, 13 nt, Human
ccacugcaccggg

SEQ ID NO: 1758437 - RNA, 14 nt, Human
ccacugcaccgggc

SEQ ID NO: 1758438 - RNA, 17 nt, Human
ccacugcaccgggccac

SEQ ID NO: 1758439 - RNA, 19 nt, Human
ccacugcaccgggccacag

SEQ ID NO: 1758440 - RNA, 13 nt, Human
ccacugagggcag

SEQ ID NO: 1758441 - RNA, 18 nt, Human
cccaggcuggcgugcagu

SEQ ID NO: 1758442 - RNA, 21 nt, Human
cccaggcuggcgugcaguggu

SEQ ID NO: 1758443 - RNA, 23 nt, Human
cccagggcaaggguuaaggccug

SEQ ID NO: 1758444 - RNA, 18 nt, Human
cccagggcaagcuccgca

SEQ ID NO: 1758445 - RNA, 20 nt, Human
cccagggcaagcuccgcagg

SEQ ID NO: 1758446 - RNA, 15 nt, Human
cccagggcaagcucc

SEQ ID NO: 1758447 - RNA, 19 nt, Human
cccaggcuggcgugcagug

SEQ ID NO: 1758448 - RNA, 20 nt, Human
cccaggcuggcgugcagugg

SEQ ID NO: 1758449 - RNA, 17 nt, Human
cccagggcaucuugcug

SEQ ID NO: 1758450 - RNA, 19 nt, Human
cccagggcaucuugcuggc

SEQ ID NO: 1758451 - RNA, 21 nt, Human
cccagggcaucuugcuggcua

SEQ ID NO: 1758452 - RNA, 19 nt, Human
cccagcccacuucugccau

SEQ ID NO: 1758453 - RNA, 11 nt, Human
cccagcccaga

SEQ ID NO: 1758454 - RNA, 12 nt, Human
cccagcccagau

SEQ ID NO: 1758455 - RNA, 20 nt, Human
cccagcccagauuccccugu

SEQ ID NO: 1758456 - RNA, 21 nt, Human
cccagcccagauuccccugug

SEQ ID NO: 1758457 - RNA, 13 nt, Human
cccagcauucuca

SEQ ID NO: 1758458 - RNA, 15 nt, Human
cccagcauucucagg

SEQ ID NO: 1758459 - RNA, 16 nt, Human
cccagcauucucaggc

SEQ ID NO: 1758460 - RNA, 17 nt, Human
cccagcauucucaggca

SEQ ID NO: 1758461 - RNA, 19 nt, Human
cccagcauucucaggcacc

SEQ ID NO: 1758462 - RNA, 21 nt, Human
ccccauucugccugcccaggc

SEQ ID NO: 1758463 - RNA, 12 nt, Human
cccauugcuguu

SEQ ID NO: 1758464 - RNA, 14 nt, Human
ccccaaaacccggg

SEQ ID NO: 1758465 - RNA, 18 nt, Human
ccccagcauucucaggca

SEQ ID NO: 1758466 - RNA, 19 nt, Human
ccccagcauucucaggcac

SEQ ID NO: 1758467 - RNA, 20 nt, Human
ccccagcauucucaggcacc

SEQ ID NO: 1758468 - RNA, 21 nt, Human
ccccagcauucucaggcacca

SEQ ID NO: 1758469 - RNA, 22 nt, Human
ccccagcauucucaggcaccag

SEQ ID NO: 1758470 - RNA, 20 nt, Human
ccaugucugcagugugcccc

SEQ ID NO: 1758471 - RNA, 17 nt, Human
ccaugggcagagcccaa

SEQ ID NO: 1758472 - RNA, 13 nt, Human
ccaugagccucag

SEQ ID NO: 1758473 - RNA, 14 nt, Human
ccaugggcagagcc

SEQ ID NO: 1758474 - RNA, 16 nt, Human
ccaugggcagagccca

SEQ ID NO: 1758475 - RNA, 14 nt, Human
cccaagcagagaag

SEQ ID NO: 1758476 - RNA, 17 nt, Human
cccaagcucugcuccuc

SEQ ID NO: 1758477 - RNA, 19 nt, Human
ccauugugaaccaaugcaa

SEQ ID NO: 1758478 - RNA, 19 nt, Human
ccauuguccaauccuaugu

SEQ ID NO: 1758479 - RNA, 23 nt, Human
cacaucuugcucugcugacagac

SEQ ID NO: 1758480 - RNA, 17 nt, Human
cacauuuauucugcuca

SEQ ID NO: 1758481 - RNA, 18 nt, Human
cacauuuauucugcucac

SEQ ID NO: 1758482 - RNA, 17 nt, Human
caccagccccagugccc

SEQ ID NO: 1758483 - RNA, 19 nt, Human
caccagcccuuagcaggga

SEQ ID NO: 1758484 - RNA, 18 nt, Human
caccagccccagugccca

SEQ ID NO: 1758485 - RNA, 21 nt, Human
caccagccccagugcccacag

SEQ ID NO: 1758486 - RNA, 22 nt, Human
caccagccccagugcccacagg

SEQ ID NO: 1758487 - RNA, 12 nt, Human
cacccagcccac

SEQ ID NO: 1758488 - RNA, 13 nt, Human
cacaucuugcucu

SEQ ID NO: 1758489 - RNA, 14 nt, Human
cacaucuugcucug

SEQ ID NO: 1758490 - RNA, 15 nt, Human
cacaucuugcucugc

SEQ ID NO: 1758491 - RNA, 20 nt, Human
cacaucuugcucugcugaca

SEQ ID NO: 1758492 - RNA, 21 nt, Human
cacaucuugcucugcugacag

SEQ ID NO: 1758493 - RNA, 22 nt, Human
cacaucuugcucugcugacaga

SEQ ID NO: 1758494 - RNA, 19 nt, Human
cacucccaagguuggagcc

SEQ ID NO: 1758495 - RNA, 20 nt, Human
cacucccaagguuggagccc

SEQ ID NO: 1758496 - RNA, 21 nt, Human
cacgcuggagugcagugagcc

SEQ ID NO: 1758497 - RNA, 16 nt, Human
cacgcuggagugcagu

SEQ ID NO: 1758498 - RNA, 17 nt, Human
cacgcuggagugcagug

SEQ ID NO: 1758499 - RNA, 18 nt, Human
cacgcuggagugcaguga

SEQ ID NO: 1758500 - RNA, 20 nt, Human
cacgcuggagugcagugagc

SEQ ID NO: 1758501 - RNA, 15 nt, Human
cacgcuggagugcag

SEQ ID NO: 1758502 - RNA, 15 nt, Human
cacggagccacuccu

SEQ ID NO: 1758503 - RNA, 16 nt, Human
cacggagccacuccuc

SEQ ID NO: 1758504 - RNA, 17 nt, Human
cacggagccacuccucu

SEQ ID NO: 1758505 - RNA, 18 nt, Human
cacggagccacuccucug

SEQ ID NO: 1758506 - RNA, 19 nt, Human
cacggagccacuccucuga

SEQ ID NO: 1758507 - RNA, 21 nt, Human
cacggagccacuccucugacu

SEQ ID NO: 1758508 - RNA, 23 nt, Human
cacggagccacuccucugacuca

SEQ ID NO: 1758509 - RNA, 12 nt, Human
cacccuccuuuc

SEQ ID NO: 1758510 - RNA, 12 nt, Human
cacccugcucuc

SEQ ID NO: 1758511 - RNA, 16 nt, Human
caaggcccagaugugg

SEQ ID NO: 1758512 - RNA, 20 nt, Human
caaggauugcuacuguccua

SEQ ID NO: 1758513 - RNA, 15 nt, Human
caagcucugcuccuc

SEQ ID NO: 1758514 - RNA, 14 nt, Human
caagcuccgcagga

SEQ ID NO: 1758515 - RNA, 15 nt, Human
caagcuccgcaggac

SEQ ID NO: 1758516 - RNA, 16 nt, Human
caagcuccgcaggacu

SEQ ID NO: 1758517 - RNA, 17 nt, Human
caagcuccgcaggacuu

SEQ ID NO: 1758518 - RNA, 16 nt, Human
caagcucugcuccucu

SEQ ID NO: 1758519 - RNA, 12 nt, Human
caaugcuggcug

SEQ ID NO: 1758520 - RNA, 16 nt, Human
caauggcagccuuggc

SEQ ID NO: 1758521 - RNA, 13 nt, Human
caauggcagccuu

SEQ ID NO: 1758522 - RNA, 14 nt, Human
caauggcagccuug

SEQ ID NO: 1758523 - RNA, 15 nt, Human
caauggcagccuugg

SEQ ID NO: 1758524 - RNA, 15 nt, Human
caaucagcuccuucc

SEQ ID NO: 1758525 - RNA, 16 nt, Human
caaucagcuccuuccu

SEQ ID NO: 1758526 - RNA, 18 nt, Human
caaucagcuccuuccugg

SEQ ID NO: 1758527 - RNA, 13 nt, Human
caaugccaucauc

SEQ ID NO: 1758528 - RNA, 14 nt, Human
caaugccaucaucu

SEQ ID NO: 1758529 - RNA, 21 nt, Human
caacuauuuauugacucuggg

SEQ ID NO: 1758530 - RNA, 22 nt, Human
caacuauuuauugacucugggu

SEQ ID NO: 1758531 - RNA, 14 nt, Human
caacccccagccug

SEQ ID NO: 1758532 - RNA, 17 nt, Human
caaccccuucgcuccug

SEQ ID NO: 1758533 - RNA, 21 nt, Human
caacuagugggguuuccuggc

SEQ ID NO: 1758534 - RNA, 14 nt, Human
caaccccuucgcuc

SEQ ID NO: 1758535 - RNA, 16 nt, Human
caaccccuucgcuccu

SEQ ID NO: 1758536 - RNA, 14 nt, Human
caagcaccuccugc

SEQ ID NO: 1758537 - RNA, 13 nt, Human
caagcaccuccug

SEQ ID NO: 1758538 - RNA, 14 nt, Human
caagcaaacccaga

SEQ ID NO: 1758539 - RNA, 17 nt, Human
caagcaaacccagacgg

SEQ ID NO: 1758540 - RNA, 13 nt, Human
caagcaagacuga

SEQ ID NO: 1758541 - RNA, 14 nt, Human
caagcaagacugag

SEQ ID NO: 1758542 - RNA, 21 nt, Human
caagauauuuuaaaaucuguc

SEQ ID NO: 1758543 - RNA, 23 nt, Human
caagauauuuuaaaaucugucac

SEQ ID NO: 1758544 - RNA, 23 nt, Human
auuugcacagaagcacaugcacc

SEQ ID NO: 1758545 - RNA, 22 nt, Human
auuuaauuagugcuaaguguga

SEQ ID NO: 1758546 - RNA, 21 nt, Human
auuuaauuagugcuaagugug

SEQ ID NO: 1758547 - RNA, 20 nt, Human
auuuaauuagugcuaagugu

SEQ ID NO: 1758548 - RNA, 23 nt, Human
auuuaauuagugcuaagugugaa

SEQ ID NO: 1758549 - RNA, 21 nt, Human
caaacaugacccuaaaucuug

SEQ ID NO: 1758550 - RNA, 14 nt, Human
caaaccagcuucau

SEQ ID NO: 1758551 - RNA, 14 nt, Human
auuuuuuuucaugu

SEQ ID NO: 1758552 - RNA, 15 nt, Human
auuuuuuuucauguu

SEQ ID NO: 1758553 - RNA, 16 nt, Human
auuuuuuuucauguuu

SEQ ID NO: 1758554 - RNA, 20 nt, Human
auuuuuuuucauguuuuaac

SEQ ID NO: 1758555 - RNA, 19 nt, Human
caaaagguucacuaaagca

SEQ ID NO: 1758556 - RNA, 18 nt, Human
caaacauccuaucaacaa

SEQ ID NO: 1758557 - RNA, 19 nt, Human
auuuucuauaauuuaaaua

SEQ ID NO: 1758558 - RNA, 18 nt, Human
auuuucuauaauuuaaau

SEQ ID NO: 1758559 - RNA, 17 nt, Human
auuuucuauaauuuaaa

SEQ ID NO: 1758560 - RNA, 15 nt, Human
auuuguguugaagga

SEQ ID NO: 1758561 - RNA, 19 nt, Human
auuuguguugaaggaacuu

SEQ ID NO: 1758562 - RNA, 16 nt, Human
auuuguuauuuugcaa

SEQ ID NO: 1758563 - RNA, 17 nt, Human
auuuguuauuuugcaac

SEQ ID NO: 1758564 - RNA, 20 nt, Human
auucggaacuguccuuuccu

SEQ ID NO: 1758565 - RNA, 21 nt, Human
auucggaacuguccuuuccuu

SEQ ID NO: 1758566 - RNA, 16 nt, Human
auucgagacagaaccu

SEQ ID NO: 1758567 - RNA, 17 nt, Human
auucgagacagaaccuu

SEQ ID NO: 1758568 - RNA, 21 nt, Human
auucggugugcaccaggguug

SEQ ID NO: 1758569 - RNA, 16 nt, Human
auuacaggugugaacc

SEQ ID NO: 1758570 - RNA, 16 nt, Human
auuagagugucuuucc

SEQ ID NO: 1758571 - RNA, 17 nt, Human
auuagagugucuuucca

SEQ ID NO: 1758572 - RNA, 23 nt, Human
auuagagugucuuuccacggagc

SEQ ID NO: 1758573 - RNA, 16 nt, Human
auuagauguucucuau

SEQ ID NO: 1758574 - RNA, 14 nt, Human
auuagauguucucu

SEQ ID NO: 1758575 - RNA, 13 nt, Human
auuagauguucuc

SEQ ID NO: 1758576 - RNA, 17 nt, Human
auucaauaaaguauuua

SEQ ID NO: 1758577 - RNA, 14 nt, Human
auucaauaaaguau

SEQ ID NO: 1758578 - RNA, 13 nt, Human
auucaauaaagua

SEQ ID NO: 1758579 - RNA, 12 nt, Human
auucaauaaagu

SEQ ID NO: 1758580 - RNA, 12 nt, Human
auucauuauuug

SEQ ID NO: 1758581 - RNA, 15 nt, Human
auucauuauuuguca

SEQ ID NO: 1758582 - RNA, 16 nt, Human
auucauuauuugucaa

SEQ ID NO: 1758583 - RNA, 22 nt, Human
caggcacugagauaccagcgag

SEQ ID NO: 1758584 - RNA, 17 nt, Human
caggaccuccaagccac

SEQ ID NO: 1758585 - RNA, 19 nt, Human
caggaccuccaagccacug

SEQ ID NO: 1758586 - RNA, 20 nt, Human
caggaccuccaagccacuga

SEQ ID NO: 1758587 - RNA, 23 nt, Human
caggaccuccaagccacugagca

SEQ ID NO: 1758588 - RNA, 15 nt, Human
caggacccagaggaa

SEQ ID NO: 1758589 - RNA, 16 nt, Human
caggacccagaggaag

SEQ ID NO: 1758590 - RNA, 13 nt, Human
caggacccagagg

SEQ ID NO: 1758591 - RNA, 14 nt, Human
caggacccagagga

SEQ ID NO: 1758592 - RNA, 21 nt, Human
caggaccagucaaccugggca

SEQ ID NO: 1758593 - RNA, 12 nt, Human
caggacauuucu

SEQ ID NO: 1758594 - RNA, 14 nt, Human
caggacauuucucu

SEQ ID NO: 1758595 - RNA, 18 nt, Human
caggacauuucucuaaga

SEQ ID NO: 1758596 - RNA, 10 nt, Human
caggaccagc

SEQ ID NO: 1758597 - RNA, 20 nt, Human
caggaccagccagcagcagc

SEQ ID NO: 1758598 - RNA, 15 nt, Human
caggcaaugcuggcu

SEQ ID NO: 1758599 - RNA, 16 nt, Human
caggcaaugcuggcug

SEQ ID NO: 1758600 - RNA, 17 nt, Human
caggcaaugcuggcugu

SEQ ID NO: 1758601 - RNA, 18 nt, Human
caggaggccaggccggcg

SEQ ID NO: 1758602 - RNA, 21 nt, Human
cagggagaccuggacacaggc

SEQ ID NO: 1758603 - RNA, 20 nt, Human
cagggagaccuggacacagg

SEQ ID NO: 1758604 - RNA, 14 nt, Human
cagggcuacccuga

SEQ ID NO: 1758605 - RNA, 16 nt, Human
cagggcuacccugagc

SEQ ID NO: 1758606 - RNA, 18 nt, Human
cagggcuacccugagcug

SEQ ID NO: 1758607 - RNA, 19 nt, Human
cagggcuacccugagcuga

SEQ ID NO: 1758608 - RNA, 22 nt, Human
cagggcuacccugagcugaggc

SEQ ID NO: 1758609 - RNA, 23 nt, Human
cagggcuacccugagcugaggca

SEQ ID NO: 1758610 - RNA, 24 nt, Human
cagggcuacccugagcugaggcag

SEQ ID NO: 1758611 - RNA, 12 nt, Human
cagggcuccugg

SEQ ID NO: 1758612 - RNA, 13 nt, Human
cagggcuccuggg

SEQ ID NO: 1758613 - RNA, 12 nt, Human
cagcuaaagcaa

SEQ ID NO: 1758614 - RNA, 19 nt, Human
cagcuaaagcaauaugcau

SEQ ID NO: 1758615 - RNA, 22 nt, Human
cagcuaaaccaaggacugagca

SEQ ID NO: 1758616 - RNA, 17 nt, Human
cagcgcggcccucccga

SEQ ID NO: 1758617 - RNA, 12 nt, Human
cagcugaggcug

SEQ ID NO: 1758618 - RNA, 21 nt, Human
cagcugaggcugggggagagc

SEQ ID NO: 1758619 - RNA, 23 nt, Human
cagcugaggcugggggagagccg

SEQ ID NO: 1758620 - RNA, 14 nt, Human
cagcugucaagggc

SEQ ID NO: 1758621 - RNA, 19 nt, Human
cagacagaggaugagcucu

SEQ ID NO: 1758622 - RNA, 16 nt, Human
cagacagacacacaca

SEQ ID NO: 1758623 - RNA, 12 nt, Human
cagacagaggau

SEQ ID NO: 1758624 - RNA, 14 nt, Human
cagacagaggauga

SEQ ID NO: 1758625 - RNA, 14 nt, Human
cagacagacacaca

SEQ ID NO: 1758626 - RNA, 15 nt, Human
cagacagacacacac

SEQ ID NO: 1758627 - RNA, 11 nt, Human
cagacaggcaa

SEQ ID NO: 1758628 - RNA, 13 nt, Human
cagacaggcaagc

SEQ ID NO: 1758629 - RNA, 18 nt, Human
cagacaggcaagcaccuc

SEQ ID NO: 1758630 - RNA, 20 nt, Human
cagacaggcaagcaccuccu

SEQ ID NO: 1758631 - RNA, 21 nt, Human
cagacaggcaagcaccuccug

SEQ ID NO: 1758632 - RNA, 23 nt, Human
cagacucuacagaggccaugggc

SEQ ID NO: 1758633 - RNA, 18 nt, Human
cagacucuacagaggcca

SEQ ID NO: 1758634 - RNA, 19 nt, Human
cagacucuacagaggccau

SEQ ID NO: 1758635 - RNA, 20 nt, Human
cagacucuacagaggccaug

SEQ ID NO: 1758636 - RNA, 21 nt, Human
cagacucuacagaggccaugg

SEQ ID NO: 1758637 - RNA, 17 nt, Human
cagacucuacagaggcc

SEQ ID NO: 1758638 - RNA, 22 nt, Human
cagacaggcaagcaccuccugc

SEQ ID NO: 1758639 - RNA, 23 nt, Human
cagacaggcaagcaccuccugcc

SEQ ID NO: 1758640 - RNA, 13 nt, Human
cagacuggaagca

SEQ ID NO: 1758641 - RNA, 17 nt, Human
cagacugaucaggaccu

SEQ ID NO: 1758642 - RNA, 16 nt, Human
cagacugaucaggacc

SEQ ID NO: 1758643 - RNA, 14 nt, Human
cagacuggaagcac

SEQ ID NO: 1758644 - RNA, 16 nt, Human
cagacuggaagcacag

SEQ ID NO: 1758645 - RNA, 17 nt, Human
cagacuggaagcacagc

SEQ ID NO: 1758646 - RNA, 18 nt, Human
cagacuggaagcacagcu

SEQ ID NO: 1758647 - RNA, 20 nt, Human
cagacuggaagcacagcuuc

SEQ ID NO: 1758648 - RNA, 21 nt, Human
cagacuggaagcacagcuuca

SEQ ID NO: 1758649 - RNA, 19 nt, Human
cagauugcaacaggcuggg

SEQ ID NO: 1758650 - RNA, 20 nt, Human
cagauugcaacaggcugggc

SEQ ID NO: 1758651 - RNA, 17 nt, Human
cagauuguggaauguug

SEQ ID NO: 1758652 - RNA, 18 nt, Human
cagauuguggaauguugg

SEQ ID NO: 1758653 - RNA, 20 nt, Human
cagauuguggaauguuggau

SEQ ID NO: 1758654 - RNA, 21 nt, Human
cagauuguggaauguuggaua

SEQ ID NO: 1758655 - RNA, 18 nt, Human
cagauugcaacaggcugg

SEQ ID NO: 1758656 - RNA, 13 nt, Human
cagcaccugucuc

SEQ ID NO: 1758657 - RNA, 19 nt, Human
cagcacuaugcuuuccuuc

SEQ ID NO: 1758658 - RNA, 20 nt, Human
cagcacuaugcuuuccuucu

SEQ ID NO: 1758659 - RNA, 12 nt, Human
cagagagggugg

SEQ ID NO: 1758660 - RNA, 17 nt, Human
cagagaggguggugacc

SEQ ID NO: 1758661 - RNA, 20 nt, Human
cagagaggguggugaccucu

SEQ ID NO: 1758662 - RNA, 22 nt, Human
cagagaggguggugaccucugc

SEQ ID NO: 1758663 - RNA, 23 nt, Human
cagagaggguggugaccucugcc

SEQ ID NO: 1758664 - RNA, 13 nt, Human
cagagcuuuucag

SEQ ID NO: 1758665 - RNA, 14 nt, Human
cagagcuuuucaga

SEQ ID NO: 1758666 - RNA, 15 nt, Human
cagagcuuuucagau

SEQ ID NO: 1758667 - RNA, 20 nt, Human
cagagcuucuuccaggugcc

SEQ ID NO: 1758668 - RNA, 23 nt, Human
cagagcuucuuccaggugcccag

SEQ ID NO: 1758669 - RNA, 18 nt, Human
cagaucccaggccccugg

SEQ ID NO: 1758670 - RNA, 20 nt, Human
cagaucccaggccccuggag

SEQ ID NO: 1758671 - RNA, 21 nt, Human
cagaucccaggccccuggagg

SEQ ID NO: 1758672 - RNA, 22 nt, Human
cagaucccaggccccuggaggc

SEQ ID NO: 1758673 - RNA, 24 nt, Human
caguuugaaugcagucuguccagg

SEQ ID NO: 1758674 - RNA, 13 nt, Human
caguuugaaauuc

SEQ ID NO: 1758675 - RNA, 16 nt, Human
caguuugaaauucuga

SEQ ID NO: 1758676 - RNA, 17 nt, Human
caguuugaaauucugaa

SEQ ID NO: 1758677 - RNA, 18 nt, Human
caguuugaaauucugaau

SEQ ID NO: 1758678 - RNA, 19 nt, Human
caguuugaaauucugaauu

SEQ ID NO: 1758679 - RNA, 20 nt, Human
caguuugaaauucugaauuu

SEQ ID NO: 1758680 - RNA, 21 nt, Human
caguuugaaauucugaauuug

SEQ ID NO: 1758681 - RNA, 22 nt, Human
caguuugaaauucugaauuugc

SEQ ID NO: 1758682 - RNA, 17 nt, Human
cauauguagccuucaca

SEQ ID NO: 1758683 - RNA, 24 nt, Human
cauauguagccuucacacagauag

SEQ ID NO: 1758684 - RNA, 23 nt, Human
cauagcagagaaugaaagggccc

SEQ ID NO: 1758685 - RNA, 16 nt, Human
cauagguuuaauaauu

SEQ ID NO: 1758686 - RNA, 15 nt, Human
caucuaaccucaucu

SEQ ID NO: 1758687 - RNA, 18 nt, Human
caucuaaccucaucuucu

SEQ ID NO: 1758688 - RNA, 19 nt, Human
caucuaaccucaucuucuu

SEQ ID NO: 1758689 - RNA, 17 nt, Human
caucugguuaggauggc

SEQ ID NO: 1758690 - RNA, 18 nt, Human
caucagcuaaacaccacg

SEQ ID NO: 1758691 - RNA, 20 nt, Human
caucagcuaaacaccacguc

SEQ ID NO: 1758692 - RNA, 22 nt, Human
caguuauuauauuuacaaaugg

SEQ ID NO: 1758693 - RNA, 21 nt, Human
caguucaaaauucuaaaugua

SEQ ID NO: 1758694 - RNA, 21 nt, Human
cagucugauucccaagcucug

SEQ ID NO: 1758695 - RNA, 22 nt, Human
cagucugauucccaagcucugc

SEQ ID NO: 1758696 - RNA, 20 nt, Human
cagugguaugaucacggcuc

SEQ ID NO: 1758697 - RNA, 16 nt, Human
cagugggagcugccug

SEQ ID NO: 1758698 - RNA, 17 nt, Human
cagugggagcugccugu

SEQ ID NO: 1758699 - RNA, 18 nt, Human
cagugggagcugccuguu

SEQ ID NO: 1758700 - RNA, 21 nt, Human
cagugcccacaggaucagucu

SEQ ID NO: 1758701 - RNA, 22 nt, Human
cagugcccacaggaucagucug

SEQ ID NO: 1758702 - RNA, 23 nt, Human
cagucugauucccaagcucugcu

SEQ ID NO: 1758703 - RNA, 21 nt, Human
cagugguaugaucacggcuca

SEQ ID NO: 1758704 - RNA, 20 nt, Human
cagugguccacaucccggga

SEQ ID NO: 1758705 - RNA, 13 nt, Human
caguggucucaca

SEQ ID NO: 1758706 - RNA, 19 nt, Human
caguggugcgaucuggguu

SEQ ID NO: 1758707 - RNA, 20 nt, Human
caguggugcgaucuggguuc

SEQ ID NO: 1758708 - RNA, 21 nt, Human
caguuauuauauuuacaaaug

SEQ ID NO: 1758709 - RNA, 17 nt, Human
caguuauuauauuuaca

SEQ ID NO: 1758710 - RNA, 15 nt, Human
cauggcccucauuaa

SEQ ID NO: 1758711 - RNA, 22 nt, Human
cauggcccucauuaaugacacu

SEQ ID NO: 1758712 - RNA, 19 nt, Human
cauguuaaguccucccuga

SEQ ID NO: 1758713 - RNA, 18 nt, Human
cauguuggccaggcuggu

SEQ ID NO: 1758714 - RNA, 17 nt, Human
cauguuggccaggcugg

SEQ ID NO: 1758715 - RNA, 19 nt, Human
cauguuggccaggcugguc

SEQ ID NO: 1758716 - RNA, 16 nt, Human
cauucucgcuucccug

SEQ ID NO: 1758717 - RNA, 17 nt, Human
cauucucgcuucccuga

SEQ ID NO: 1758718 - RNA, 14 nt, Human
cauucucugucuca

SEQ ID NO: 1758719 - RNA, 19 nt, Human
cauucucugucucauccau

SEQ ID NO: 1758720 - RNA, 23 nt, Human
cauucucugucucauccaucauc

SEQ ID NO: 1758721 - RNA, 16 nt, Human
cauucugaaggagccc

SEQ ID NO: 1758722 - RNA, 14 nt, Human
ccaaagugcuggga

SEQ ID NO: 1758723 - RNA, 14 nt, Human
ccaauuauguuaaa

SEQ ID NO: 1758724 - RNA, 17 nt, Human
ccaauuauguuaaacua

SEQ ID NO: 1758725 - RNA, 15 nt, Human
ccaauuauguuaaac

SEQ ID NO: 1758726 - RNA, 22 nt, Human
ccaauucuaucuuuuguuuccu

SEQ ID NO: 1758727 - RNA, 12 nt, Human
ccaaggaggauu

SEQ ID NO: 1758728 - RNA, 22 nt, Human
ccaaggacugagcacccucugg

SEQ ID NO: 1758729 - RNA, 16 nt, Human
ccaaaucauaguggcu

SEQ ID NO: 1758730 - RNA, 17 nt, Human
ccaagcucugcuccucu

SEQ ID NO: 1758731 - RNA, 16 nt, Human
ccaagcucugcuccuc

SEQ ID NO: 1758732 - RNA, 14 nt, Human
ccaagcucugcucc

SEQ ID NO: 1758733 - RNA, 15 nt, Human
ccaagcucugcuccu

SEQ ID NO: 1758734 - RNA, 23 nt, Human
ccaacuauuuauugacucugggu

SEQ ID NO: 1758735 - RNA, 11 nt, Human
ccaacuauuua

SEQ ID NO: 1758736 - RNA, 16 nt, Human
ccaacuauuuauugac

SEQ ID NO: 1758737 - RNA, 14 nt, Human
ccaacucagaaggg

SEQ ID NO: 1758738 - RNA, 16 nt, Human
cauuggacccuuccau

SEQ ID NO: 1758739 - RNA, 17 nt, Human
cauuggacccuuccaug

SEQ ID NO: 1758740 - RNA, 17 nt, Human
cauuuaguuugauuauu

SEQ ID NO: 1758741 - RNA, 20 nt, Human
ccaaaaaagcuguauuuuga

SEQ ID NO: 1758742 - RNA, 22 nt, Human
ccaaaaaagcuguauuuugaaa

SEQ ID NO: 1758743 - RNA, 23 nt, Human
ccaaaaaagcuguauuuugaaaa

SEQ ID NO: 1758744 - RNA, 18 nt, Human
ccaaaaguggccucuuug

SEQ ID NO: 1758745 - RNA, 21 nt, Human
ccaaaaguggccucuuugucu

SEQ ID NO: 1758746 - RNA, 15 nt, Human
ccaaaaguggccucu

SEQ ID NO: 1758747 - RNA, 19 nt, Human
cauuuggcagagcuucuuc

SEQ ID NO: 1758748 - RNA, 19 nt, Human
ggcuccugagggagcucca

SEQ ID NO: 1758749 - RNA, 17 nt, Human
ggcugcagggaguccga

SEQ ID NO: 1758750 - RNA, 14 nt, Human
ggcuggcgugcagu

SEQ ID NO: 1758751 - RNA, 16 nt, Human
ggcuggcgugcagugg

SEQ ID NO: 1758752 - RNA, 20 nt, Human
ggcuggcgugcaguggugcg

SEQ ID NO: 1758753 - RNA, 16 nt, Human
ggcugcaugauguuug

SEQ ID NO: 1758754 - RNA, 22 nt, Human
ggcugcaugauguuugcccaaa

SEQ ID NO: 1758755 - RNA, 20 nt, Human
ggcugccccuaaucucugua

SEQ ID NO: 1758756 - RNA, 22 nt, Human
ggcugccccuaaucucuguagg

SEQ ID NO: 1758757 - RNA, 23 nt, Human
ggcugccccuaaucucuguagga

SEQ ID NO: 1758758 - RNA, 13 nt, Human
aaaaaaaaaguuc

SEQ ID NO: 1758759 - RNA, 13 nt, Human
aaaaaguauuauu

SEQ ID NO: 1758760 - RNA, 14 nt, Human
aaaaaguauuauuu

SEQ ID NO: 1758761 - RNA, 15 nt, Human
aaaaaguauuauuuu

SEQ ID NO: 1758762 - RNA, 19 nt, Human
aaaaaguauuauuuuccaa

SEQ ID NO: 1758763 - RNA, 13 nt, Human
aaaaaaacacaaa

SEQ ID NO: 1758764 - RNA, 11 nt, Human
aaaaaaaagaa

SEQ ID NO: 1758765 - RNA, 12 nt, Human
aaaaaaaagaau

SEQ ID NO: 1758766 - RNA, 19 nt, Human
ggcuguaucccaugagccu

SEQ ID NO: 1758767 - RNA, 16 nt, Human
ggcuggugucaccuga

SEQ ID NO: 1758768 - RNA, 18 nt, Human
aaaaagugcuucauucuu

SEQ ID NO: 1758769 - RNA, 15 nt, Human
ggcuucaguggcagc

SEQ ID NO: 1758770 - RNA, 20 nt, Human
ggcuguaucccaugagccuc

SEQ ID NO: 1758771 - RNA, 22 nt, Human
ggcuguaucccaugagccucag

SEQ ID NO: 1758772 - RNA, 23 nt, Human
ggcuguaucccaugagccucagc

SEQ ID NO: 1758773 - RNA, 16 nt, Human
ggcuucaguggcagcu

SEQ ID NO: 1758774 - RNA, 17 nt, Human
gggaaaauuauuugcau

SEQ ID NO: 1758775 - RNA, 18 nt, Human
gggaaaauuauuugcaua

SEQ ID NO: 1758776 - RNA, 19 nt, Human
gggaaacagguugggaugg

SEQ ID NO: 1758777 - RNA, 21 nt, Human
gggaaacaucacaccugcccu

SEQ ID NO: 1758778 - RNA, 12 nt, Human
aaaauauaagua

SEQ ID NO: 1758779 - RNA, 16 nt, Human
aaaauauaaguaaagu

SEQ ID NO: 1758780 - RNA, 18 nt, Human
aaaauauaaguaaaguga

SEQ ID NO: 1758781 - RNA, 14 nt, Human
aaaauaacacacau

SEQ ID NO: 1758782 - RNA, 22 nt, Human
aaaauagauaagaguagaaacu

SEQ ID NO: 1758783 - RNA, 14 nt, Human
gggcagcagggcua

SEQ ID NO: 1758784 - RNA, 12 nt, Human
gggcagagccca

SEQ ID NO: 1758785 - RNA, 14 nt, Human
gggcagagcccaag

SEQ ID NO: 1758786 - RNA, 13 nt, Human
gggagggcugcga

SEQ ID NO: 1758787 - RNA, 14 nt, Human
gggagggcugcgac

SEQ ID NO: 1758788 - RNA, 17 nt, Human
gggaggggaagcuucug

SEQ ID NO: 1758789 - RNA, 11 nt, Human
gggagggcagc

SEQ ID NO: 1758790 - RNA, 13 nt, Human
gggagggcagcag

SEQ ID NO: 1758791 - RNA, 14 nt, Human
gggagacugggcug

SEQ ID NO: 1758792 - RNA, 16 nt, Human
gggagacugggcugag

SEQ ID NO: 1758793 - RNA, 19 nt, Human
gggagacugggcugaggga

SEQ ID NO: 1758794 - RNA, 20 nt, Human
gggagacugggcugagggag

SEQ ID NO: 1758795 - RNA, 16 nt, Human
aaaagcgcuuuuccuu

SEQ ID NO: 1758796 - RNA, 18 nt, Human
aaaagcuguauuuugaaa

SEQ ID NO: 1758797 - RNA, 22 nt, Human
aaaagcuccauuuuuagugaaa

SEQ ID NO: 1758798 - RNA, 14 nt, Human
gggaacagacugga

SEQ ID NO: 1758799 - RNA, 22 nt, Human
gggaacagacuggaagcacagc

SEQ ID NO: 1758800 - RNA, 13 nt, Human
gggaacagccacu

SEQ ID NO: 1758801 - RNA, 20 nt, Human
aaaaaugcaaauccuaugug

SEQ ID NO: 1758802 - RNA, 18 nt, Human
aaaaaugcaaauccuaug

SEQ ID NO: 1758803 - RNA, 12 nt, Human
aaaaauuaaaau

SEQ ID NO: 1758804 - RNA, 21 nt, Human
aaaaaugcacaaacaaugcaa

SEQ ID NO: 1758805 - RNA, 22 nt, Human
aaaaaugcaaauccuaugugau

SEQ ID NO: 1758806 - RNA, 23 nt, Human
aaaaaugcaaauccuaugugauu

SEQ ID NO: 1758807 - RNA, 18 nt, Human
aaaaaugcccuuaaauca

SEQ ID NO: 1758808 - RNA, 20 nt, Human
ggguaucaggugcugccauc

SEQ ID NO: 1758809 - RNA, 15 nt, Human
ggggucuguaaaauc

SEQ ID NO: 1758810 - RNA, 19 nt, Human
gggucagacgccugaggaa

SEQ ID NO: 1758811 - RNA, 18 nt, Human
gggucagaaacaggaccg

SEQ ID NO: 1758812 - RNA, 16 nt, Human
gggucagaaacaggac

SEQ ID NO: 1758813 - RNA, 20 nt, Human
gggucagaacccugccaugg

SEQ ID NO: 1758814 - RNA, 23 nt, Human
ggggucugggaggaauggacaga

SEQ ID NO: 1758815 - RNA, 22 nt, Human
ggggucgacuucgggcuggcca

SEQ ID NO: 1758816 - RNA, 17 nt, Human
ggggccuuaucgggcuc

SEQ ID NO: 1758817 - RNA, 16 nt, Human
ggggccugggacuucc

SEQ ID NO: 1758818 - RNA, 23 nt, Human
ggggccugggacuuccaugccuu

SEQ ID NO: 1758819 - RNA, 22 nt, Human
gggucucacuauguugcccagg

SEQ ID NO: 1758820 - RNA, 19 nt, Human
gggucgggggcaggugcug

SEQ ID NO: 1758821 - RNA, 12 nt, Human
gggucucacucu

SEQ ID NO: 1758822 - RNA, 23 nt, Human
gggucucacuauguugcccaggc

SEQ ID NO: 1758823 - RNA, 22 nt, Human
aaacuccgagugaacuggucuu

SEQ ID NO: 1758824 - RNA, 17 nt, Human
aaacuaggaaauuuuuu

SEQ ID NO: 1758825 - RNA, 14 nt, Human
aaacuccuuccugg

SEQ ID NO: 1758826 - RNA, 20 nt, Human
aaacuccuuccuggccugag

SEQ ID NO: 1758827 - RNA, 14 nt, Human
aaacuagcauaucu

SEQ ID NO: 1758828 - RNA, 19 nt, Human
aaacuacugccuuuagaaa

SEQ ID NO: 1758829 - RNA, 21 nt, Human
aaacuacugccuuuagaaaau

SEQ ID NO: 1758830 - RNA, 22 nt, Human
aaacuagcauaucugccuuuau

SEQ ID NO: 1758831 - RNA, 21 nt, Human
aaacuagcauaucugccuuua

SEQ ID NO: 1758832 - RNA, 20 nt, Human
aaacuagcauaucugccuuu

SEQ ID NO: 1758833 - RNA, 19 nt, Human
aaacuagcauaucugccuu

SEQ ID NO: 1758834 - RNA, 14 nt, Human
aaacgcuccuuugu

SEQ ID NO: 1758835 - RNA, 16 nt, Human
aaacgcuccuuugugu

SEQ ID NO: 1758836 - RNA, 12 nt, Human
aaacgcugccug

SEQ ID NO: 1758837 - RNA, 14 nt, Human
aaacgcugccugcc

SEQ ID NO: 1758838 - RNA, 16 nt, Human
aaacgcugccugccca

SEQ ID NO: 1758839 - RNA, 17 nt, Human
ggggaaacagguuggga

SEQ ID NO: 1758840 - RNA, 17 nt, Human
ggggaaaggcaaggucc

SEQ ID NO: 1758841 - RNA, 22 nt, Human
ggggaaaggcaagguccggccc

SEQ ID NO: 1758842 - RNA, 15 nt, Human
aaacaauaaaugugc

SEQ ID NO: 1758843 - RNA, 17 nt, Human
aaacaaaauggcuucag

SEQ ID NO: 1758844 - RNA, 18 nt, Human
aaacaaaauggcuucagu

SEQ ID NO: 1758845 - RNA, 17 nt, Human
aaacaacucuuugagaa

SEQ ID NO: 1758846 - RNA, 17 nt, Human
aaaauguauaugcacuu

SEQ ID NO: 1758847 - RNA, 13 nt, Human
aaaauggauacau

SEQ ID NO: 1758848 - RNA, 14 nt, Human
aaaauggauacaua

SEQ ID NO: 1758849 - RNA, 16 nt, Human
aaaauguagaauauuc

SEQ ID NO: 1758850 - RNA, 14 nt, Human
aaaauguauaugca

SEQ ID NO: 1758851 - RNA, 16 nt, Human
gguauaaaagaugggg

SEQ ID NO: 1758852 - RNA, 12 nt, Human
gguaugucugcc

SEQ ID NO: 1758853 - RNA, 13 nt, Human
gguaugucugcca

SEQ ID NO: 1758854 - RNA, 14 nt, Human
gguaugucugccau

SEQ ID NO: 1758855 - RNA, 13 nt, Human
gguauaaaagaug

SEQ ID NO: 1758856 - RNA, 12 nt, Human
gguauaaaagau

SEQ ID NO: 1758857 - RNA, 19 nt, Human
gguccacccaggagccccg

SEQ ID NO: 1758858 - RNA, 17 nt, Human
gguauuguauuuauuca

SEQ ID NO: 1758859 - RNA, 12 nt, Human
gguauuguauuu

SEQ ID NO: 1758860 - RNA, 20 nt, Human
gguccacccaggagccccga

SEQ ID NO: 1758861 - RNA, 22 nt, Human
gguccacccaggagccccgagg

SEQ ID NO: 1758862 - RNA, 17 nt, Human
gguccaugggcagagcc

SEQ ID NO: 1758863 - RNA, 20 nt, Human
gguccagaaggagacaggca

SEQ ID NO: 1758864 - RNA, 18 nt, Human
gguccaugggcagagccc

SEQ ID NO: 1758865 - RNA, 21 nt, Human
gguccagaaggagacaggcag

SEQ ID NO: 1758866 - RNA, 23 nt, Human
aaagauggggucuguaaaaucuu

SEQ ID NO: 1758867 - RNA, 19 nt, Human
aaagaugggugaaggcugg

SEQ ID NO: 1758868 - RNA, 23 nt, Human
aaagaugguguggguguccugcc

SEQ ID NO: 1758869 - RNA, 23 nt, Human
aaagaugucucugcaaaccaaca

SEQ ID NO: 1758870 - RNA, 18 nt, Human
aaagagagaacaggacua

SEQ ID NO: 1758871 - RNA, 18 nt, Human
aaagaauuccaaagcaaa

SEQ ID NO: 1758872 - RNA, 13 nt, Human
aaagaauguuacu

SEQ ID NO: 1758873 - RNA, 18 nt, Human
aaagaauguuacugccuu

SEQ ID NO: 1758874 - RNA, 19 nt, Human
aaagaauguuacugccuua

SEQ ID NO: 1758875 - RNA, 13 nt, Human
ggugauggggagg

SEQ ID NO: 1758876 - RNA, 21 nt, Human
ggucuugaacuccuggccuca

SEQ ID NO: 1758877 - RNA, 22 nt, Human
ggucuugaacuccuggccucaa

SEQ ID NO: 1758878 - RNA, 14 nt, Human
ggucuguaaaaucu

SEQ ID NO: 1758879 - RNA, 12 nt, Human
ggucuguaaaau

SEQ ID NO: 1758880 - RNA, 21 nt, Human
ggucugggaggaauggacaga

SEQ ID NO: 1758881 - RNA, 18 nt, Human
aaagcuaggccuggccag

SEQ ID NO: 1758882 - RNA, 18 nt, Human
ggugccaugucugcagug

SEQ ID NO: 1758883 - RNA, 17 nt, Human
aaaggaaucauuucuau

SEQ ID NO: 1758884 - RNA, 13 nt, Human
aaaggaauuuaaa

SEQ ID NO: 1758885 - RNA, 12 nt, Human
ggaugagaaagg

SEQ ID NO: 1758886 - RNA, 22 nt, Human
ggaugagaaagguugaagcacc

SEQ ID NO: 1758887 - RNA, 21 nt, Human
ggaugagaauuugagugcucu

SEQ ID NO: 1758888 - RNA, 23 nt, Human
ggaugagaauuugagugcucuga

SEQ ID NO: 1758889 - RNA, 13 nt, Human
ggauguucuggga

SEQ ID NO: 1758890 - RNA, 23 nt, Human
ggauguuauuauccuugggggcu

SEQ ID NO: 1758891 - RNA, 21 nt, Human
ggauuuugauccaagcugguc

SEQ ID NO: 1758892 - RNA, 22 nt, Human
ggauuugcacagaagcacaugc

SEQ ID NO: 1758893 - RNA, 19 nt, Human
ggcaaaggguccagaagga

SEQ ID NO: 1758894 - RNA, 13 nt, Human
ggcaaacccauca

SEQ ID NO: 1758895 - RNA, 14 nt, Human
ggcaggcagguguu

SEQ ID NO: 1758896 - RNA, 17 nt, Human
ggcagaaauacagucuu

SEQ ID NO: 1758897 - RNA, 17 nt, Human
ggcagaaggcaaaccca

SEQ ID NO: 1758898 - RNA, 21 nt, Human
ggcaggaccuucgggcugugc

SEQ ID NO: 1758899 - RNA, 23 nt, Human
ggcaggaccuucgggcugugccc

SEQ ID NO: 1758900 - RNA, 18 nt, Human
ggcaggacgugggcuggg

SEQ ID NO: 1758901 - RNA, 20 nt, Human
ggcccagggcaagcuccgca

SEQ ID NO: 1758902 - RNA, 17 nt, Human
ggcccagggcaagcucc

SEQ ID NO: 1758903 - RNA, 19 nt, Human
ggcccagggcaagcuccgc

SEQ ID NO: 1758904 - RNA, 22 nt, Human
ggcccagggcaagcuccgcagg

SEQ ID NO: 1758905 - RNA, 14 nt, Human
ggcccgcgccacag

SEQ ID NO: 1758906 - RNA, 20 nt, Human
ggcccucauuaaugacacuu

SEQ ID NO: 1758907 - RNA, 17 nt, Human
ggcccgcgccacaggac

SEQ ID NO: 1758908 - RNA, 18 nt, Human
ggcccgcgccacaggacc

SEQ ID NO: 1758909 - RNA, 18 nt, Human
ggccccaggaaaggccca

SEQ ID NO: 1758910 - RNA, 22 nt, Human
ggccccaggcauugccaagggc

SEQ ID NO: 1758911 - RNA, 15 nt, Human
ggccaaagccaaagc

SEQ ID NO: 1758912 - RNA, 23 nt, Human
ggccagagggagugacagaggca

SEQ ID NO: 1758913 - RNA, 19 nt, Human
ggccagaugcaccagcccu

SEQ ID NO: 1758914 - RNA, 20 nt, Human
ggccagaugcaccagcccuu

SEQ ID NO: 1758915 - RNA, 16 nt, Human
ggagccccauuccugg

SEQ ID NO: 1758916 - RNA, 17 nt, Human
ggagccccauuccuggg

SEQ ID NO: 1758917 - RNA, 22 nt, Human
ggagcugccuguucagcuccag

SEQ ID NO: 1758918 - RNA, 20 nt, Human
ggagcuucuuguuuccuugu

SEQ ID NO: 1758919 - RNA, 16 nt, Human
ggaggccagugagcca

SEQ ID NO: 1758920 - RNA, 17 nt, Human
ggaggccagugagccac

SEQ ID NO: 1758921 - RNA, 14 nt, Human
ggaggcccaaccuc

SEQ ID NO: 1758922 - RNA, 14 nt, Human
ggaggccaggccgg

SEQ ID NO: 1758923 - RNA, 23 nt, Human
ggaggccaggccggcgagcccug

SEQ ID NO: 1758924 - RNA, 15 nt, Human
ggaggaaagggagga

SEQ ID NO: 1758925 - RNA, 20 nt, Human
ggagcacugggcucccgggc

SEQ ID NO: 1758926 - RNA, 12 nt, Human
ggagcagagggg

SEQ ID NO: 1758927 - RNA, 18 nt, Human
ggagagcaucggccuagg

SEQ ID NO: 1758928 - RNA, 22 nt, Human
ggagagccaccaagagggacgc

SEQ ID NO: 1758929 - RNA, 20 nt, Human
ggagagcaucggccuagggc

SEQ ID NO: 1758930 - RNA, 15 nt, Human
ggacuuccaugccuu

SEQ ID NO: 1758931 - RNA, 19 nt, Human
ggacuuccccggagggcug

SEQ ID NO: 1758932 - RNA, 20 nt, Human
ggacuuccccggagggcugc

SEQ ID NO: 1758933 - RNA, 20 nt, Human
ggacuacaggugugagucac

SEQ ID NO: 1758934 - RNA, 22 nt, Human
ggacucaaugcacugacauugu

SEQ ID NO: 1758935 - RNA, 17 nt, Human
ggacucagaagccucug

SEQ ID NO: 1758936 - RNA, 18 nt, Human
ggacucagaagccucugg

SEQ ID NO: 1758937 - RNA, 23 nt, Human
ggagacugggcugagggagccug

SEQ ID NO: 1758938 - RNA, 13 nt, Human
ggagacugggcug

SEQ ID NO: 1758939 - RNA, 17 nt, Human
ggagacugggcugaggg

SEQ ID NO: 1758940 - RNA, 20 nt, Human
ggagacugggcugagggagc

SEQ ID NO: 1758941 - RNA, 18 nt, Human
ggagaaaaucaucaagaa

SEQ ID NO: 1758942 - RNA, 15 nt, Human
ggacuuggaagcucc

SEQ ID NO: 1758943 - RNA, 17 nt, Human
ggacuuggaagcuccgc

SEQ ID NO: 1758944 - RNA, 13 nt, Human
gcuuggucuguuu

SEQ ID NO: 1758945 - RNA, 15 nt, Human
gcuuggucuguuuga

SEQ ID NO: 1758946 - RNA, 20 nt, Human
ggaccggguggaagggaugg

SEQ ID NO: 1758947 - RNA, 23 nt, Human
gcuuaaaggcaguauuuuguguc

SEQ ID NO: 1758948 - RNA, 21 nt, Human
gcuguuggcugggggccucag

SEQ ID NO: 1758949 - RNA, 22 nt, Human
gcuguuggcugggggccucagu

SEQ ID NO: 1758950 - RNA, 15 nt, Human
gcugugcugggagaa

SEQ ID NO: 1758951 - RNA, 18 nt, Human
gcugugcuugaaggcccu

SEQ ID NO: 1758952 - RNA, 19 nt, Human
gcugugcuugaaggcccug

SEQ ID NO: 1758953 - RNA, 20 nt, Human
gcugugcuugaaggcccugc

SEQ ID NO: 1758954 - RNA, 23 nt, Human
gcugugcuugaaggcccugcuga

SEQ ID NO: 1758955 - RNA, 21 nt, Human
gcugugcucuggacaggcaug

SEQ ID NO: 1758956 - RNA, 13 nt, Human
gcugugaacccug

SEQ ID NO: 1758957 - RNA, 19 nt, Human
gcugugaacccuggggccu

SEQ ID NO: 1758958 - RNA, 20 nt, Human
gcugugaacccuggggccug

SEQ ID NO: 1758959 - RNA, 21 nt, Human
gcugugaacccuggggccuga

SEQ ID NO: 1758960 - RNA, 22 nt, Human
gcugugaacccuggggccugac

SEQ ID NO: 1758961 - RNA, 23 nt, Human
gcugugaacccuggggccugacu

SEQ ID NO: 1758962 - RNA, 20 nt, Human
gcuguaucccaugagccuca

SEQ ID NO: 1758963 - RNA, 23 nt, Human
gcuguaucccaugagccucagca

SEQ ID NO: 1758964 - RNA, 17 nt, Human
gcuguauuaagccacuu

SEQ ID NO: 1758965 - RNA, 14 nt, Human
gcuggguuggaggg

SEQ ID NO: 1758966 - RNA, 21 nt, Human
gcuggguuggaggguguccca

SEQ ID NO: 1758967 - RNA, 23 nt, Human
gcuucuuucuuugggaauauuug

SEQ ID NO: 1758968 - RNA, 18 nt, Human
gcuucuuucuuugggaau

SEQ ID NO: 1758969 - RNA, 12 nt, Human
gcuucuuucuuu

SEQ ID NO: 1758970 - RNA, 18 nt, Human
gcuucgggcccuucccac

SEQ ID NO: 1758971 - RNA, 20 nt, Human
gcuucgggcccuucccacag

SEQ ID NO: 1758972 - RNA, 16 nt, Human
gcuucuuguuuccuug

SEQ ID NO: 1758973 - RNA, 23 nt, Human
gcuuccuuguagcgacuaaacua

SEQ ID NO: 1758974 - RNA, 15 nt, Human
gcuucccuccauccc

SEQ ID NO: 1758975 - RNA, 17 nt, Human
gcuucccuccauccccc

SEQ ID NO: 1758976 - RNA, 14 nt, Human
gcuucccugacuca

SEQ ID NO: 1758977 - RNA, 18 nt, Human
gcuucccugacucauucu

SEQ ID NO: 1758978 - RNA, 11 nt, Human
gcuucccugaa

SEQ ID NO: 1758979 - RNA, 17 nt, Human
gcuucccugaaagacug

SEQ ID NO: 1758980 - RNA, 12 nt, Human
gcuggagugcag

SEQ ID NO: 1758981 - RNA, 21 nt, Human
gcuggacucucagucucugag

SEQ ID NO: 1758982 - RNA, 22 nt, Human
gcuggacucucagucucugagc

SEQ ID NO: 1758983 - RNA, 19 nt, Human
gcuggacggguuagacagc

SEQ ID NO: 1758984 - RNA, 14 nt, Human
gcuggagugcagug

SEQ ID NO: 1758985 - RNA, 15 nt, Human
gcuggagugcaguga

SEQ ID NO: 1758986 - RNA, 16 nt, Human
gcugggauuacaggug

SEQ ID NO: 1758987 - RNA, 18 nt, Human
gcugggauuacaggugug

SEQ ID NO: 1758988 - RNA, 19 nt, Human
gcugggauuacagguguga

SEQ ID NO: 1758989 - RNA, 14 nt, Human
gcugcucugagcca

SEQ ID NO: 1758990 - RNA, 17 nt, Human
gcugccugcccacacag

SEQ ID NO: 1758991 - RNA, 13 nt, Human
gcugccugcccgu

SEQ ID NO: 1758992 - RNA, 22 nt, Human
gcugccugcccguaaacacgcc

SEQ ID NO: 1758993 - RNA, 22 nt, Human
gcugccugccgguaaacacgcc

SEQ ID NO: 1758994 - RNA, 14 nt, Human
gcugccugcccaca

SEQ ID NO: 1758995 - RNA, 15 nt, Human
gcugccugcccacac

SEQ ID NO: 1758996 - RNA, 18 nt, Human
gcugccugcccacacagg

SEQ ID NO: 1758997 - RNA, 18 nt, Human
gcugccccaucagugcuc

SEQ ID NO: 1758998 - RNA, 21 nt, Human
gcugccccaucuccccucagc

SEQ ID NO: 1758999 - RNA, 22 nt, Human
gcugccccaucuccccucagcu

SEQ ID NO: 1759000 - RNA, 23 nt, Human
gcugccccaucuccccucagcuc

SEQ ID NO: 1759001 - RNA, 12 nt, Human
gcugagggccug

SEQ ID NO: 1759002 - RNA, 13 nt, Human
gcugagggccugc

SEQ ID NO: 1759003 - RNA, 14 nt, Human
gcugagggccugcu

SEQ ID NO: 1759004 - RNA, 15 nt, Human
gcugagggccugcug

SEQ ID NO: 1759005 - RNA, 16 nt, Human
gcugagggccugcugg

SEQ ID NO: 1759006 - RNA, 17 nt, Human
gcugagggccugcugga

SEQ ID NO: 1759007 - RNA, 18 nt, Human
gcugagggccugcuggag

SEQ ID NO: 1759008 - RNA, 22 nt, Human
gcugagggccugcuggaggccu

SEQ ID NO: 1759009 - RNA, 23 nt, Human
gcugagggccugcuggaggccuc

SEQ ID NO: 1759010 - RNA, 15 nt, Human
gcugaggcuggggga

SEQ ID NO: 1759011 - RNA, 22 nt, Human
gcugaggcugggggagagccgu

SEQ ID NO: 1759012 - RNA, 23 nt, Human
gcugaggcugggggagagccgug

SEQ ID NO: 1759013 - RNA, 14 nt, Human
gcugagggagccug

SEQ ID NO: 1759014 - RNA, 21 nt, Human
gcugccauccagguucagcuu

SEQ ID NO: 1759015 - RNA, 17 nt, Human
gcugccagcucuguauc

SEQ ID NO: 1759016 - RNA, 18 nt, Human
gcugccagcucuguauca

SEQ ID NO: 1759017 - RNA, 23 nt, Human
gcugccauccagguucagcuugu

SEQ ID NO: 1759018 - RNA, 16 nt, Human
gcucggcucagcucgg

SEQ ID NO: 1759019 - RNA, 13 nt, Human
gcucggcucagcu

SEQ ID NO: 1759020 - RNA, 13 nt, Human
gcucgcuguugcu

SEQ ID NO: 1759021 - RNA, 16 nt, Human
gcucgcuguugcugaa

SEQ ID NO: 1759022 - RNA, 14 nt, Human
gcucgcuguugcug

SEQ ID NO: 1759023 - RNA, 21 nt, Human
gcucgcuguugcugaauaggc

SEQ ID NO: 1759024 - RNA, 17 nt, Human
gcugacagacacaggcc

SEQ ID NO: 1759025 - RNA, 23 nt, Human
gcugagcgaggagaugcuccuug

SEQ ID NO: 1759026 - RNA, 16 nt, Human
gcugacagacacaggc

SEQ ID NO: 1759027 - RNA, 14 nt, Human
gcugacagacacag

SEQ ID NO: 1759028 - RNA, 15 nt, Human
gcugacagacacagg

SEQ ID NO: 1759029 - RNA, 19 nt, Human
gcugaauaggcgaucacaa

SEQ ID NO: 1759030 - RNA, 16 nt, Human
gcucuguccugggagu

SEQ ID NO: 1759031 - RNA, 15 nt, Human
gcucuguccugggag

SEQ ID NO: 1759032 - RNA, 15 nt, Human
gcucuguuugugggg

SEQ ID NO: 1759033 - RNA, 18 nt, Human
gcucuguuugugggguga

SEQ ID NO: 1759034 - RNA, 21 nt, Human
gcucuguuuguggggugacgg

SEQ ID NO: 1759035 - RNA, 14 nt, Human
gcucuuacucuuuc

SEQ ID NO: 1759036 - RNA, 14 nt, Human
gcuaggccuggcca

SEQ ID NO: 1759037 - RNA, 15 nt, Human
gcuaggccuggccag

SEQ ID NO: 1759038 - RNA, 14 nt, Human
gccuguucagcucc

SEQ ID NO: 1759039 - RNA, 20 nt, Human
gccuguucagcuccagcuca

SEQ ID NO: 1759040 - RNA, 19 nt, Human
gccuguucagcuccagcuc

SEQ ID NO: 1759041 - RNA, 17 nt, Human
gcucaggacucagaagc

SEQ ID NO: 1759042 - RNA, 18 nt, Human
gcucaggacucagaagcc

SEQ ID NO: 1759043 - RNA, 19 nt, Human
gcucaggacucagaagccu

SEQ ID NO: 1759044 - RNA, 12 nt, Human
gccaggccagag

SEQ ID NO: 1759045 - RNA, 19 nt, Human
gccaggccggcgagcccug

SEQ ID NO: 1759046 - RNA, 20 nt, Human
gccaggccggcgagcccugu

SEQ ID NO: 1759047 - RNA, 23 nt, Human
gccaggccggcgagcccugugga

SEQ ID NO: 1759048 - RNA, 13 nt, Human
gccaggccagagg

SEQ ID NO: 1759049 - RNA, 19 nt, Human
gccauauucuguuggccag

SEQ ID NO: 1759050 - RNA, 20 nt, Human
gccauauucuguuggccagu

SEQ ID NO: 1759051 - RNA, 22 nt, Human
gccauauugcacaugucuuaau

SEQ ID NO: 1759052 - RNA, 21 nt, Human
gccauauugcacaugucuuaa

SEQ ID NO: 1759053 - RNA, 21 nt, Human
gccauguaaauccccacuggg

SEQ ID NO: 1759054 - RNA, 22 nt, Human
gccauguaaauccccacuggga

SEQ ID NO: 1759055 - RNA, 15 nt, Human
gccauguuggccagg

SEQ ID NO: 1759056 - RNA, 16 nt, Human
gccauguuggccaggc

SEQ ID NO: 1759057 - RNA, 17 nt, Human
gccauguuggccaggcu

SEQ ID NO: 1759058 - RNA, 18 nt, Human
gccauguuggccaggcug

SEQ ID NO: 1759059 - RNA, 14 nt, Human
gccauguuggccag

SEQ ID NO: 1759060 - RNA, 22 nt, Human
gccaugucugcagugugccccc

SEQ ID NO: 1759061 - RNA, 23 nt, Human
gccaugucugcagugugcccccc

SEQ ID NO: 1759062 - RNA, 18 nt, Human
gcccaccuuggcucaagu

SEQ ID NO: 1759063 - RNA, 15 nt, Human
gcccacgcuggagug

SEQ ID NO: 1759064 - RNA, 16 nt, Human
gcccacgcuggagugc

SEQ ID NO: 1759065 - RNA, 17 nt, Human
gcccacgcuggagugca

SEQ ID NO: 1759066 - RNA, 19 nt, Human
gccauguuggccaggcugg

SEQ ID NO: 1759067 - RNA, 20 nt, Human
gccauguuggccaggcuggu

SEQ ID NO: 1759068 - RNA, 22 nt, Human
gccauguuggccaggcuggucu

SEQ ID NO: 1759069 - RNA, 24 nt, Human
gccauguuggccaggcuggucuca

SEQ ID NO: 1759070 - RNA, 15 nt, Human
gccacaugggaggcu

SEQ ID NO: 1759071 - RNA, 22 nt, Human
gccaccaagagggacgccuggg

SEQ ID NO: 1759072 - RNA, 14 nt, Human
gccaccaagaggga

SEQ ID NO: 1759073 - RNA, 19 nt, Human
gccaccaagagggacgccu

SEQ ID NO: 1759074 - RNA, 18 nt, Human
gccaccaacuuacaaaaa

SEQ ID NO: 1759075 - RNA, 21 nt, Human
gccacugcacuauagccuagg

SEQ ID NO: 1759076 - RNA, 13 nt, Human
gccacccugggga

SEQ ID NO: 1759077 - RNA, 19 nt, Human
gccacccuggggagaaagu

SEQ ID NO: 1759078 - RNA, 23 nt, Human
gccacugcaccgggccacagaga

SEQ ID NO: 1759079 - RNA, 18 nt, Human
gccaccccuaaacuccag

SEQ ID NO: 1759080 - RNA, 20 nt, Human
gccaccccuaaacuccaggg

SEQ ID NO: 1759081 - RNA, 18 nt, Human
gccacuuaaaauguucac

SEQ ID NO: 1759082 - RNA, 13 nt, Human
gccacuuggagug

SEQ ID NO: 1759083 - RNA, 17 nt, Human
gccugggacuuccaugc

SEQ ID NO: 1759084 - RNA, 21 nt, Human
gccugggacuuccaugccuua

SEQ ID NO: 1759085 - RNA, 21 nt, Human
gccugcgccaccgcccagaga

SEQ ID NO: 1759086 - RNA, 13 nt, Human
gccuccugugugu

SEQ ID NO: 1759087 - RNA, 19 nt, Human
gccuccuggcccaggugag

SEQ ID NO: 1759088 - RNA, 15 nt, Human
gccuccuggcccagg

SEQ ID NO: 1759089 - RNA, 14 nt, Human
gccucuucugggag

SEQ ID NO: 1759090 - RNA, 15 nt, Human
gccucuucugggagg

SEQ ID NO: 1759091 - RNA, 18 nt, Human
gccucuucugggagggca

SEQ ID NO: 1759092 - RNA, 16 nt, Human
gccucuucugucccug

SEQ ID NO: 1759093 - RNA, 18 nt, Human
gccugcccaggccccugc

SEQ ID NO: 1759094 - RNA, 19 nt, Human
gccugcccaggccccugcc

SEQ ID NO: 1759095 - RNA, 20 nt, Human
gccugcccaggccccugcca

SEQ ID NO: 1759096 - RNA, 21 nt, Human
gccugccgguaaacacgccug

SEQ ID NO: 1759097 - RNA, 14 nt, Human
gccugccgggcuga

SEQ ID NO: 1759098 - RNA, 17 nt, Human
gccugccgggcugaggg

SEQ ID NO: 1759099 - RNA, 20 nt, Human
gccugccgggcugagggccu

SEQ ID NO: 1759100 - RNA, 16 nt, Human
gccugccgguaaacac

SEQ ID NO: 1759101 - RNA, 18 nt, Human
gcccuaaacccuguuccu

SEQ ID NO: 1759102 - RNA, 15 nt, Human
gccccugcccggcug

SEQ ID NO: 1759103 - RNA, 13 nt, Human
gccccugcccggc

SEQ ID NO: 1759104 - RNA, 14 nt, Human
gccccugcccggcu

SEQ ID NO: 1759105 - RNA, 22 nt, Human
gcccauguuaaguccucccuga

SEQ ID NO: 1759106 - RNA, 23 nt, Human
gcccauguuaaguccucccugac

SEQ ID NO: 1759107 - RNA, 15 nt, Human
gccauguugccccuu

SEQ ID NO: 1759108 - RNA, 17 nt, Human
gcccacucugcucgccu

SEQ ID NO: 1759109 - RNA, 19 nt, Human
gcccugcugagucaucugu

SEQ ID NO: 1759110 - RNA, 13 nt, Human
gcccuguguacuu

SEQ ID NO: 1759111 - RNA, 20 nt, Human
gcccuguugaauuuuguucu

SEQ ID NO: 1759112 - RNA, 17 nt, Human
gccgccaguacuuguca

SEQ ID NO: 1759113 - RNA, 20 nt, Human
gccgccaguacuugucauau

SEQ ID NO: 1759114 - RNA, 15 nt, Human
gccgcugagcgagga

SEQ ID NO: 1759115 - RNA, 17 nt, Human
gccgcugagcgaggaga

SEQ ID NO: 1759116 - RNA, 18 nt, Human
gccggcagccccagccug

SEQ ID NO: 1759117 - RNA, 19 nt, Human
gccggcagccccagccugc

SEQ ID NO: 1759118 - RNA, 20 nt, Human
gccggcagccccagccugcu

SEQ ID NO: 1759119 - RNA, 21 nt, Human
gccggcagccccagccugcua

SEQ ID NO: 1759120 - RNA, 20 nt, Human
gcacaccgggcacucagaag

SEQ ID NO: 1759121 - RNA, 14 nt, Human
gcacaccgggcacu

SEQ ID NO: 1759122 - RNA, 17 nt, Human
gcacacccacucagcuc

SEQ ID NO: 1759123 - RNA, 18 nt, Human
gcacacccacucagcucc

SEQ ID NO: 1759124 - RNA, 23 nt, Human
gcaccgggccacagagaaaguac

SEQ ID NO: 1759125 - RNA, 14 nt, Human
gcaccgggccacag

SEQ ID NO: 1759126 - RNA, 13 nt, Human
gcacucagaagac

SEQ ID NO: 1759127 - RNA, 16 nt, Human
gcacucagaagacacu

SEQ ID NO: 1759128 - RNA, 17 nt, Human
gcacucagaagacacug

SEQ ID NO: 1759129 - RNA, 18 nt, Human
gauucuccugccucagcc

SEQ ID NO: 1759130 - RNA, 15 nt, Human
gauucuccugccuca

SEQ ID NO: 1759131 - RNA, 17 nt, Human
gauucuccugccucagc

SEQ ID NO: 1759132 - RNA, 12 nt, Human
gauucuucugcu

SEQ ID NO: 1759133 - RNA, 16 nt, Human
gauucuucaaaagcau

SEQ ID NO: 1759134 - RNA, 13 nt, Human
gauuauugaaaua

SEQ ID NO: 1759135 - RNA, 13 nt, Human
gauuauucagugu

SEQ ID NO: 1759136 - RNA, 14 nt, Human
gauuauucaguguc

SEQ ID NO: 1759137 - RNA, 15 nt, Human
gauuauucaguguca

SEQ ID NO: 1759138 - RNA, 14 nt, Human
gaugaucuuugcag

SEQ ID NO: 1759139 - RNA, 16 nt, Human
gaguuuaaauuguaau

SEQ ID NO: 1759140 - RNA, 13 nt, Human
gaguuuaaaaauc

SEQ ID NO: 1759141 - RNA, 14 nt, Human
gaguuuaaaaauca

SEQ ID NO: 1759142 - RNA, 13 nt, Human
gaguuuaaagcaa

SEQ ID NO: 1759143 - RNA, 23 nt, Human
gaggugaccccagguuucuaugu

SEQ ID NO: 1759144 - RNA, 23 nt, Human
gaggugaacaagcaaacccagac

SEQ ID NO: 1759145 - RNA, 17 nt, Human
gagucaccaagcccagu

SEQ ID NO: 1759146 - RNA, 16 nt, Human
gagucaccaagcccag

SEQ ID NO: 1759147 - RNA, 14 nt, Human
gagucagcucucug

SEQ ID NO: 1759148 - RNA, 15 nt, Human
gagucagcucucugc

SEQ ID NO: 1759149 - RNA, 17 nt, Human
gagucagcucucugccc

SEQ ID NO: 1759150 - RNA, 18 nt, Human
gagucagcucucugcccu

SEQ ID NO: 1759151 - RNA, 12 nt, Human
gagucccaccuu

SEQ ID NO: 1759152 - RNA, 13 nt, Human
gagucccaccuug

SEQ ID NO: 1759153 - RNA, 18 nt, Human
gagugacagaggcagccc

SEQ ID NO: 1759154 - RNA, 20 nt, Human
gaguggaggugggcugggcc

SEQ ID NO: 1759155 - RNA, 20 nt, Human
gagugacagaggcagcccca

SEQ ID NO: 1759156 - RNA, 15 nt, Human
gagucacuacaacug

SEQ ID NO: 1759157 - RNA, 19 nt, Human
gagugacaguggauugcau

SEQ ID NO: 1759158 - RNA, 13 nt, Human
gagugacucucca

SEQ ID NO: 1759159 - RNA, 14 nt, Human
gaggcagggucuca

SEQ ID NO: 1759160 - RNA, 15 nt, Human
gaggcagggucucac

SEQ ID NO: 1759161 - RNA, 18 nt, Human
gaggcagggucucacucu

SEQ ID NO: 1759162 - RNA, 23 nt, Human
gagggcugcgacgcuugcucugu

SEQ ID NO: 1759163 - RNA, 17 nt, Human
gaggggccccccugccc

SEQ ID NO: 1759164 - RNA, 12 nt, Human
gaacccuuggcu

SEQ ID NO: 1759165 - RNA, 16 nt, Human
gaacccuuggcuugcc

SEQ ID NO: 1759166 - RNA, 14 nt, Human
gaacccugccaugg

SEQ ID NO: 1759167 - RNA, 16 nt, Human
gaacccugccauggaa

SEQ ID NO: 1759168 - RNA, 22 nt, Human
gaacccugccauggaacuguuu

SEQ ID NO: 1759169 - RNA, 16 nt, Human
gaacccuggggccuga

SEQ ID NO: 1759170 - RNA, 17 nt, Human
gaacccuggggccugac

SEQ ID NO: 1759171 - RNA, 20 nt, Human
gaacccuggggccugacugc

SEQ ID NO: 1759172 - RNA, 21 nt, Human
gaacccuggggccugacugcu

SEQ ID NO: 1759173 - RNA, 17 nt, Human
gaacccuuggcuugccc

SEQ ID NO: 1759174 - RNA, 18 nt, Human
gaacccuuggcuugccca

SEQ ID NO: 1759175 - RNA, 20 nt, Human
gaacccuuggcuugcccacg

SEQ ID NO: 1759176 - RNA, 21 nt, Human
gaacccuuggcuugcccacgu

SEQ ID NO: 1759177 - RNA, 11 nt, Human
gaacuggcugc

SEQ ID NO: 1759178 - RNA, 12 nt, Human
gaacuggcugca

SEQ ID NO: 1759179 - RNA, 22 nt, Human
gaacugcuagucaagugcgucc

SEQ ID NO: 1759180 - RNA, 20 nt, Human
gaacuggacccuguugcuaa

SEQ ID NO: 1759181 - RNA, 18 nt, Human
gaacuggacccuguugcu

SEQ ID NO: 1759182 - RNA, 23 nt, Human
gaacuggacccuguugcuaagcc

SEQ ID NO: 1759183 - RNA, 22 nt, Human
gaacuggacccuguugcuaagc

SEQ ID NO: 1759184 - RNA, 19 nt, Human
gaacugcguuaugaagagc

SEQ ID NO: 1759185 - RNA, 19 nt, Human
gaagcuccgcuuucuaccc

SEQ ID NO: 1759186 - RNA, 20 nt, Human
gaagcucuuacucuuuccua

SEQ ID NO: 1759187 - RNA, 18 nt, Human
gaagcugacgaacuucca

SEQ ID NO: 1759188 - RNA, 19 nt, Human
gaagcugacgaacuuccau

SEQ ID NO: 1759189 - RNA, 22 nt, Human
gaagcuccgcuuucuacccagc

SEQ ID NO: 1759190 - RNA, 19 nt, Human
gaagcucucgggcuaggaa

SEQ ID NO: 1759191 - RNA, 13 nt, Human
gaagggcugcaug

SEQ ID NO: 1759192 - RNA, 14 nt, Human
gaagggcugcauga

SEQ ID NO: 1759193 - RNA, 18 nt, Human
gaagggcugcaugauguu

SEQ ID NO: 1759194 - RNA, 22 nt, Human
gaagggcugcaugauguuugcc

SEQ ID NO: 1759195 - RNA, 16 nt, Human
gaaggcuucucucugu

SEQ ID NO: 1759196 - RNA, 16 nt, Human
gaaggcccugcugagu

SEQ ID NO: 1759197 - RNA, 18 nt, Human
gaaggcccugcugaguca

SEQ ID NO: 1759198 - RNA, 14 nt, Human
gaaggcuggcauga

SEQ ID NO: 1759199 - RNA, 18 nt, Human
gaaggcuggcaugaucca

SEQ ID NO: 1759200 - RNA, 13 nt, Human
gaauauuugaauc

SEQ ID NO: 1759201 - RNA, 12 nt, Human
gaauauuugaau

SEQ ID NO: 1759202 - RNA, 11 nt, Human
gaauauuugaa

SEQ ID NO: 1759203 - RNA, 10 nt, Human
gaauauuuga

SEQ ID NO: 1759204 - RNA, 13 nt, Human
gaauauuguccau

SEQ ID NO: 1759205 - RNA, 12 nt, Human
gaauauaaugga

SEQ ID NO: 1759206 - RNA, 14 nt, Human
gaaguuauuuucca

SEQ ID NO: 1759207 - RNA, 15 nt, Human
gaaguuauuuuccag

SEQ ID NO: 1759208 - RNA, 22 nt, Human
gaaguuacacagaaaugcugcu

SEQ ID NO: 1759209 - RNA, 23 nt, Human
gaaguuacacagaaaugcugcug

SEQ ID NO: 1759210 - RNA, 19 nt, Human
gacauuguuggccaaagcc

SEQ ID NO: 1759211 - RNA, 13 nt, Human
gacauuucucuaa

SEQ ID NO: 1759212 - RNA, 16 nt, Human
gacauuucucuaagag

SEQ ID NO: 1759213 - RNA, 21 nt, Human
gacagugcugcagcucccugg

SEQ ID NO: 1759214 - RNA, 22 nt, Human
gacagugcugcagcucccuggc

SEQ ID NO: 1759215 - RNA, 14 nt, Human
gacauugcggacag

SEQ ID NO: 1759216 - RNA, 15 nt, Human
gacauugcggacagc

SEQ ID NO: 1759217 - RNA, 20 nt, Human
gacauucucgcuucccugaa

SEQ ID NO: 1759218 - RNA, 21 nt, Human
gacauuccuucucccaucucu

SEQ ID NO: 1759219 - RNA, 14 nt, Human
gacacagcucuucu

SEQ ID NO: 1759220 - RNA, 16 nt, Human
gacacagcucuucucc

SEQ ID NO: 1759221 - RNA, 13 nt, Human
gacacagcucuuc

SEQ ID NO: 1759222 - RNA, 17 nt, Human
gacacagcucuucucca

SEQ ID NO: 1759223 - RNA, 22 nt, Human
gacacagcucuucuccaggcug

SEQ ID NO: 1759224 - RNA, 23 nt, Human
gacacagcucuucuccaggcugu

SEQ ID NO: 1759225 - RNA, 12 nt, Human
gacacaggcccg

SEQ ID NO: 1759226 - RNA, 17 nt, Human
gacucagaaagccaaca

SEQ ID NO: 1759227 - RNA, 13 nt, Human
gacucagaagccu

SEQ ID NO: 1759228 - RNA, 15 nt, Human
gacucagaagccucu

SEQ ID NO: 1759229 - RNA, 16 nt, Human
gacucagaagccucug

SEQ ID NO: 1759230 - RNA, 17 nt, Human
gacucagaagccucugg

SEQ ID NO: 1759231 - RNA, 19 nt, Human
gacucugucucaaaaaaac

SEQ ID NO: 1759232 - RNA, 21 nt, Human
gacuguugggguggguauaaa

SEQ ID NO: 1759233 - RNA, 19 nt, Human
gacgccugggggugccagg

SEQ ID NO: 1759234 - RNA, 21 nt, Human
gacgccugggggugccaggac

SEQ ID NO: 1759235 - RNA, 12 nt, Human
gacgccuggggg

SEQ ID NO: 1759236 - RNA, 24 nt, Human
gaccaugcgacacugggaggccag

SEQ ID NO: 1759237 - RNA, 19 nt, Human
cuuccauggcccucauuaa

SEQ ID NO: 1759238 - RNA, 13 nt, Human
cuuccaugccuua

SEQ ID NO: 1759239 - RNA, 16 nt, Human
cuuccauggcccucau

SEQ ID NO: 1759240 - RNA, 18 nt, Human
cuucaguggcagcugcuu

SEQ ID NO: 1759241 - RNA, 16 nt, Human
cuucaucuaauaugau

SEQ ID NO: 1759242 - RNA, 10 nt, Human
cuucauggau

SEQ ID NO: 1759243 - RNA, 13 nt, Human
cuucauggaucag

SEQ ID NO: 1759244 - RNA, 18 nt, Human
cuuauugcccacgcugga

SEQ ID NO: 1759245 - RNA, 21 nt, Human
cuucaccugauucaacuaaaa

SEQ ID NO: 1759246 - RNA, 18 nt, Human
cuucaccugauucaacua

SEQ ID NO: 1759247 - RNA, 20 nt, Human
cuucaccugauucaacuaaa

SEQ ID NO: 1759248 - RNA, 12 nt, Human
cuuauugcccac

SEQ ID NO: 1759249 - RNA, 13 nt, Human
cuuauugcccacg

SEQ ID NO: 1759250 - RNA, 18 nt, Human
cuuagcagggaaacagcu

SEQ ID NO: 1759251 - RNA, 21 nt, Human
cuuagcagggaaacagcuaau

SEQ ID NO: 1759252 - RNA, 18 nt, Human
cuguugggguggguauaa

SEQ ID NO: 1759253 - RNA, 17 nt, Human
cuguugggguggguaua

SEQ ID NO: 1759254 - RNA, 20 nt, Human
cuguugggguggguauaaaa

SEQ ID NO: 1759255 - RNA, 24 nt, Human
cuuaaaauguucacuuuugacaaa

SEQ ID NO: 1759256 - RNA, 19 nt, Human
cuuaaacaaaaauuaaaau

SEQ ID NO: 1759257 - RNA, 13 nt, Human
cuuaaacaaaaau

SEQ ID NO: 1759258 - RNA, 14 nt, Human
cuuagauguucuaa

SEQ ID NO: 1759259 - RNA, 18 nt, Human
cuuagauguucuaagucu

SEQ ID NO: 1759260 - RNA, 21 nt, Human
cuuagcacuaccacuccugcc

SEQ ID NO: 1759261 - RNA, 13 nt, Human
cuguucagcucca

SEQ ID NO: 1759262 - RNA, 14 nt, Human
cuguucagcuccag

SEQ ID NO: 1759263 - RNA, 20 nt, Human
cugugucuugcaauggcagc

SEQ ID NO: 1759264 - RNA, 16 nt, Human
cugugucuugcaaugg

SEQ ID NO: 1759265 - RNA, 19 nt, Human
cugugucuugcaauggcag

SEQ ID NO: 1759266 - RNA, 15 nt, Human
cugugaccaaugucu

SEQ ID NO: 1759267 - RNA, 16 nt, Human
cugugaccaaugucuu

SEQ ID NO: 1759268 - RNA, 17 nt, Human
cugugaccaaugucuug

SEQ ID NO: 1759269 - RNA, 12 nt, Human
cugugcucagga

SEQ ID NO: 1759270 - RNA, 15 nt, Human
cugugcucaggacuc

SEQ ID NO: 1759271 - RNA, 16 nt, Human
cugugcucaggacuca

SEQ ID NO: 1759272 - RNA, 17 nt, Human
cugugcucaggacucag

SEQ ID NO: 1759273 - RNA, 21 nt, Human
cugugucagguggggcagcuu

SEQ ID NO: 1759274 - RNA, 16 nt, Human
cuguguacuucccggg

SEQ ID NO: 1759275 - RNA, 19 nt, Human
cugugucagguggggcagc

SEQ ID NO: 1759276 - RNA, 14 nt, Human
cugugucuugcaau

SEQ ID NO: 1759277 - RNA, 16 nt, Human
cuugugaggaaaguca

SEQ ID NO: 1759278 - RNA, 13 nt, Human
cuugugaggaaag

SEQ ID NO: 1759279 - RNA, 23 nt, Human
cuugugaggaaagucauuggcuu

SEQ ID NO: 1759280 - RNA, 19 nt, Human
cuugugaggaaagucauug

SEQ ID NO: 1759281 - RNA, 17 nt, Human
cuugugaggaaagucau

SEQ ID NO: 1759282 - RNA, 16 nt, Human
cuuguggacacagcuc

SEQ ID NO: 1759283 - RNA, 14 nt, Human
cuuguggacacagc

SEQ ID NO: 1759284 - RNA, 15 nt, Human
cuuguggacacagcu

SEQ ID NO: 1759285 - RNA, 13 nt, Human
cuuguggacacag

SEQ ID NO: 1759286 - RNA, 13 nt, Human
cuuuacaaauauu

SEQ ID NO: 1759287 - RNA, 15 nt, Human
cuuuucaaaacauuu

SEQ ID NO: 1759288 - RNA, 13 nt, Human
cuuucgaggccug

SEQ ID NO: 1759289 - RNA, 14 nt, Human
cuuucgaggccuga

SEQ ID NO: 1759290 - RNA, 20 nt, Human
cuuucgaggccugaagccag

SEQ ID NO: 1759291 - RNA, 21 nt, Human
cuuuccuuuucgccuuuccuc

SEQ ID NO: 1759292 - RNA, 17 nt, Human
cuuuccuuuuuuaaaaa

SEQ ID NO: 1759293 - RNA, 18 nt, Human
cuuuccuuuuuuaaaaau

SEQ ID NO: 1759294 - RNA, 21 nt, Human
cuuugagugcaguccugauca

SEQ ID NO: 1759295 - RNA, 20 nt, Human
cuuugauuaaagacuccagu

SEQ ID NO: 1759296 - RNA, 15 nt, Human
cuucugagcacagau

SEQ ID NO: 1759297 - RNA, 19 nt, Human
cuugaauacucugcccucu

SEQ ID NO: 1759298 - RNA, 13 nt, Human
cuugcucugcuga

SEQ ID NO: 1759299 - RNA, 14 nt, Human
cuuggcauuccgca

SEQ ID NO: 1759300 - RNA, 22 nt, Human
cuuggcauuccgcaucccuacc

SEQ ID NO: 1759301 - RNA, 12 nt, Human
cuugcucugcug

SEQ ID NO: 1759302 - RNA, 20 nt, Human
cuugccucuuuuaccugcug

SEQ ID NO: 1759303 - RNA, 21 nt, Human
cuugccucuuuuaccugcugc

SEQ ID NO: 1759304 - RNA, 22 nt, Human
cuugccucuuuuaccugcugcu

SEQ ID NO: 1759305 - RNA, 20 nt, Human
cuugacacauaguuuuucag

SEQ ID NO: 1759306 - RNA, 23 nt, Human
cuugacacauaguuuuucagucu

SEQ ID NO: 1759307 - RNA, 12 nt, Human
cuugacagggca

SEQ ID NO: 1759308 - RNA, 20 nt, Human
cuggugccccccaccccugg

SEQ ID NO: 1759309 - RNA, 21 nt, Human
cuggugccccccaccccugga

SEQ ID NO: 1759310 - RNA, 17 nt, Human
cugggcccacaaaggca

SEQ ID NO: 1759311 - RNA, 13 nt, Human
cuggggagaaagu

SEQ ID NO: 1759312 - RNA, 14 nt, Human
cuggggagaaagua

SEQ ID NO: 1759313 - RNA, 12 nt, Human
cuggggccugac

SEQ ID NO: 1759314 - RNA, 15 nt, Human
cuggggccugacugc

SEQ ID NO: 1759315 - RNA, 16 nt, Human
cuggggccugacugcu

SEQ ID NO: 1759316 - RNA, 18 nt, Human
cuggggccugacugcuca

SEQ ID NO: 1759317 - RNA, 19 nt, Human
cuggggccugacugcucag

SEQ ID NO: 1759318 - RNA, 20 nt, Human
cuggggccugacugcucaga

SEQ ID NO: 1759319 - RNA, 12 nt, Human
cugggagaaaau

SEQ ID NO: 1759320 - RNA, 15 nt, Human
cugggagaaaaucau

SEQ ID NO: 1759321 - RNA, 16 nt, Human
cugggagaaaaucauc

SEQ ID NO: 1759322 - RNA, 17 nt, Human
cugggagaaaaucauca

SEQ ID NO: 1759323 - RNA, 18 nt, Human
cugggagaaaaucaucaa

SEQ ID NO: 1759324 - RNA, 19 nt, Human
cugggagaaaaucaucaag

SEQ ID NO: 1759325 - RNA, 21 nt, Human
cugggagaaaaucaucaagaa

SEQ ID NO: 1759326 - RNA, 13 nt, Human
cugggacuacagg

SEQ ID NO: 1759327 - RNA, 15 nt, Human
cugggacuacaggca

SEQ ID NO: 1759328 - RNA, 16 nt, Human
cugggacuacaggcac

SEQ ID NO: 1759329 - RNA, 20 nt, Human
cuggaugauggucuucagcc

SEQ ID NO: 1759330 - RNA, 15 nt, Human
cuggaucuguuccuu

SEQ ID NO: 1759331 - RNA, 15 nt, Human
cugcugugaacccug

SEQ ID NO: 1759332 - RNA, 17 nt, Human
cugcugugaacccuggg

SEQ ID NO: 1759333 - RNA, 22 nt, Human
cugcugugaacccuggggccug

SEQ ID NO: 1759334 - RNA, 23 nt, Human
cugcugugaacccuggggccuga

SEQ ID NO: 1759335 - RNA, 12 nt, Human
cugcugucuugu

SEQ ID NO: 1759336 - RNA, 16 nt, Human
cugcucacauaucugu

SEQ ID NO: 1759337 - RNA, 19 nt, Human
cugcucacauaucugucau

SEQ ID NO: 1759338 - RNA, 13 nt, Human
cugcugacagugu

SEQ ID NO: 1759339 - RNA, 15 nt, Human
cugcugacaguguug

SEQ ID NO: 1759340 - RNA, 12 nt, Human
cugcugacagug

SEQ ID NO: 1759341 - RNA, 20 nt, Human
cugccccuaaucucuguagg

SEQ ID NO: 1759342 - RNA, 13 nt, Human
cugcccuguguac

SEQ ID NO: 1759343 - RNA, 22 nt, Human
cugcccuguguacuucccgggc

SEQ ID NO: 1759344 - RNA, 16 nt, Human
cugccauauucuguug

SEQ ID NO: 1759345 - RNA, 16 nt, Human
cugccauccagguuca

SEQ ID NO: 1759346 - RNA, 18 nt, Human
cugccauccagguucagc

SEQ ID NO: 1759347 - RNA, 19 nt, Human
cugccauccagguucagcu

SEQ ID NO: 1759348 - RNA, 22 nt, Human
cugccccaucuccccucagcuc

SEQ ID NO: 1759349 - RNA, 19 nt, Human
cugccccccccccccaucu

SEQ ID NO: 1759350 - RNA, 11 nt, Human
cugccagggca

SEQ ID NO: 1759351 - RNA, 12 nt, Human
cugccagggcag

SEQ ID NO: 1759352 - RNA, 13 nt, Human
cugccagggcagg

SEQ ID NO: 1759353 - RNA, 15 nt, Human
cugccagggcagggc

SEQ ID NO: 1759354 - RNA, 16 nt, Human
cugccagggcagggcc

SEQ ID NO: 1759355 - RNA, 14 nt, Human
cugcauuguaaaua

SEQ ID NO: 1759356 - RNA, 22 nt, Human
cugcaggaccugccuguagccc

SEQ ID NO: 1759357 - RNA, 14 nt, Human
cugcaggaccugcc

SEQ ID NO: 1759358 - RNA, 15 nt, Human
cugcaggaccugccu

SEQ ID NO: 1759359 - RNA, 16 nt, Human
cugcaggaccugccug

SEQ ID NO: 1759360 - RNA, 17 nt, Human
cugcaggaccugccugu

SEQ ID NO: 1759361 - RNA, 18 nt, Human
cugcaggaccugccugua

SEQ ID NO: 1759362 - RNA, 21 nt, Human
cugcaggaccugccuguagcc

SEQ ID NO: 1759363 - RNA, 24 nt, Human
cugcagccucaaccuccugggcua

SEQ ID NO: 1759364 - RNA, 23 nt, Human
cugcagccucaaccuccugggcu

SEQ ID NO: 1759365 - RNA, 15 nt, Human
cugcagcucccuggc

SEQ ID NO: 1759366 - RNA, 16 nt, Human
cugcagcucccuggcu

SEQ ID NO: 1759367 - RNA, 17 nt, Human
cugcagcucccuggcuu

SEQ ID NO: 1759368 - RNA, 18 nt, Human
cugcagcucccuggcuuc

SEQ ID NO: 1759369 - RNA, 19 nt, Human
cugcagcucccuggcuucu

SEQ ID NO: 1759370 - RNA, 23 nt, Human
cugcagcucccuggcuucugugg

SEQ ID NO: 1759371 - RNA, 16 nt, Human
cugcacuauagccuag

SEQ ID NO: 1759372 - RNA, 17 nt, Human
cugcacuauagccuagg

SEQ ID NO: 1759373 - RNA, 18 nt, Human
cugcacuauagccuaggu

SEQ ID NO: 1759374 - RNA, 20 nt, Human
cugcacuauagccuagguga

SEQ ID NO: 1759375 - RNA, 22 nt, Human
cugcacuauagccuaggugaca

SEQ ID NO: 1759376 - RNA, 23 nt, Human
cugcacuauagccuaggugacag

SEQ ID NO: 1759377 - RNA, 20 nt, Human
cugcaaccuccgccucuugg

SEQ ID NO: 1759378 - RNA, 12 nt, Human
cugcaacaaaau

SEQ ID NO: 1759379 - RNA, 15 nt, Human
cugcaacaaaaugua

SEQ ID NO: 1759380 - RNA, 21 nt, Human
cugcaacaaaauguagaauau

SEQ ID NO: 1759381 - RNA, 20 nt, Human
cugcaaaguguuuuguacca

SEQ ID NO: 1759382 - RNA, 23 nt, Human
cugcaaaguguuuuguaccagug

SEQ ID NO: 1759383 - RNA, 22 nt, Human
cugcaaccuccgccucuugggu

SEQ ID NO: 1759384 - RNA, 23 nt, Human
cugcaccgggccacagagaaagu

SEQ ID NO: 1759385 - RNA, 18 nt, Human
cugaugggcaacccccag

SEQ ID NO: 1759386 - RNA, 21 nt, Human
cugaugggcaacccccagccu

SEQ ID NO: 1759387 - RNA, 24 nt, Human
cugaugggcaacccccagccugcu

SEQ ID NO: 1759388 - RNA, 22 nt, Human
cugaugggcaacccccagccug

SEQ ID NO: 1759389 - RNA, 23 nt, Human
cugaugggcaacccccagccugc

SEQ ID NO: 1759390 - RNA, 21 nt, Human
cugcaaaggguaucaggugcu

SEQ ID NO: 1759391 - RNA, 22 nt, Human
cugcaaaggguaucaggugcug

SEQ ID NO: 1759392 - RNA, 14 nt, Human
aaauucacuuucau

SEQ ID NO: 1759393 - RNA, 15 nt, Human
aaauucacuuucauu

SEQ ID NO: 1759394 - RNA, 21 nt, Human
guauuuaauuagugcuaagug

SEQ ID NO: 1759395 - RNA, 20 nt, Human
guauuuaauuagugcuaagu

SEQ ID NO: 1759396 - RNA, 19 nt, Human
guauuuaauuagugcuaag

SEQ ID NO: 1759397 - RNA, 18 nt, Human
guauuuaauuagugcuaa

SEQ ID NO: 1759398 - RNA, 12 nt, Human
guauuuaauuag

SEQ ID NO: 1759399 - RNA, 17 nt, Human
guauuuuugcugcuucu

SEQ ID NO: 1759400 - RNA, 16 nt, Human
gucacacacuuuggcu

SEQ ID NO: 1759401 - RNA, 20 nt, Human
gucacacaguauuacuucug

SEQ ID NO: 1759402 - RNA, 14 nt, Human
gucaaccugggcaa

SEQ ID NO: 1759403 - RNA, 19 nt, Human
gucaaccugggcaaagccu

SEQ ID NO: 1759404 - RNA, 15 nt, Human
gucaacccuucugga

SEQ ID NO: 1759405 - RNA, 17 nt, Human
gucaacccuucuggaaa

SEQ ID NO: 1759406 - RNA, 19 nt, Human
gucaacccuucuggaaacu

SEQ ID NO: 1759407 - RNA, 18 nt, Human
aaauuucagcagcugcag

SEQ ID NO: 1759408 - RNA, 17 nt, Human
aaauuucagcagcugca

SEQ ID NO: 1759409 - RNA, 14 nt, Human
guaucaggacccag

SEQ ID NO: 1759410 - RNA, 18 nt, Human
guaucaggacccagagga

SEQ ID NO: 1759411 - RNA, 21 nt, Human
guaucaggacccagaggaagg

SEQ ID NO: 1759412 - RNA, 22 nt, Human
guaucaggacccagaggaaggg

SEQ ID NO: 1759413 - RNA, 13 nt, Human
guaugguggcugg

SEQ ID NO: 1759414 - RNA, 11 nt, Human
guaugucugcc

SEQ ID NO: 1759415 - RNA, 13 nt, Human
guaugucugccau

SEQ ID NO: 1759416 - RNA, 19 nt, Human
guaugucugccauguugcc

SEQ ID NO: 1759417 - RNA, 17 nt, Human
guauucuguucuggagg

SEQ ID NO: 1759418 - RNA, 17 nt, Human
guauugagauauuacac

SEQ ID NO: 1759419 - RNA, 11 nt, Human
guauucucuga

SEQ ID NO: 1759420 - RNA, 12 nt, Human
guauucucugag

SEQ ID NO: 1759421 - RNA, 13 nt, Human
guauucucugagc

SEQ ID NO: 1759422 - RNA, 19 nt, Human
guauucucugagcugugca

SEQ ID NO: 1759423 - RNA, 23 nt, Human
guauaaaagauggggucuguaaa

SEQ ID NO: 1759424 - RNA, 13 nt, Human
guauaaaagaugg

SEQ ID NO: 1759425 - RNA, 23 nt, Human
guauaaaaucagccaauuauguu

SEQ ID NO: 1759426 - RNA, 17 nt, Human
guauaaaaucagccaau

SEQ ID NO: 1759427 - RNA, 15 nt, Human
guauaaaaucagcca

SEQ ID NO: 1759428 - RNA, 12 nt, Human
guauauucacuu

SEQ ID NO: 1759429 - RNA, 15 nt, Human
guauauucauauauu

SEQ ID NO: 1759430 - RNA, 12 nt, Human
guauaaaagaug

SEQ ID NO: 1759431 - RNA, 16 nt, Human
aaauguagaauauuca

SEQ ID NO: 1759432 - RNA, 18 nt, Human
aaauguagaauauucaga

SEQ ID NO: 1759433 - RNA, 20 nt, Human
aaauguagaauauucagaca

SEQ ID NO: 1759434 - RNA, 15 nt, Human
aaaugaaaaugucuu

SEQ ID NO: 1759435 - RNA, 16 nt, Human
aaaugaaaaugucuug

SEQ ID NO: 1759436 - RNA, 17 nt, Human
aaaugaaaaugucuugu

SEQ ID NO: 1759437 - RNA, 17 nt, Human
aaaugaaaaucgugaca

SEQ ID NO: 1759438 - RNA, 23 nt, Human
aaauccuaugugauuuuaacucu

SEQ ID NO: 1759439 - RNA, 15 nt, Human
aaauccgaaccuccu

SEQ ID NO: 1759440 - RNA, 19 nt, Human
aaauccgaaccuccucugu

SEQ ID NO: 1759441 - RNA, 20 nt, Human
aaauccgaaccuccucugug

SEQ ID NO: 1759442 - RNA, 21 nt, Human
aaauccgaaccuccucuguga

SEQ ID NO: 1759443 - RNA, 14 nt, Human
aaauccuaugugau

SEQ ID NO: 1759444 - RNA, 16 nt, Human
aaauccuaugugauuu

SEQ ID NO: 1759445 - RNA, 21 nt, Human
aaauccuaugugauuuuaacu

SEQ ID NO: 1759446 - RNA, 13 nt, Human
aaaggagagcauc

SEQ ID NO: 1759447 - RNA, 15 nt, Human
aaaggagagcaucgg

SEQ ID NO: 1759448 - RNA, 14 nt, Human
guagcugaaaugca

SEQ ID NO: 1759449 - RNA, 12 nt, Human
guagcugggacu

SEQ ID NO: 1759450 - RNA, 18 nt, Human
guagcugggacuacaggc

SEQ ID NO: 1759451 - RNA, 19 nt, Human
guagcugggacuacaggca

SEQ ID NO: 1759452 - RNA, 21 nt, Human
guagcugggacuacaggcacc

SEQ ID NO: 1759453 - RNA, 22 nt, Human
guaggaaccgugguaugucugc

SEQ ID NO: 1759454 - RNA, 18 nt, Human
guaggacccaagcagaga

SEQ ID NO: 1759455 - RNA, 15 nt, Human
guaggaaguaggaag

SEQ ID NO: 1759456 - RNA, 18 nt, Human
guaggagcccagcucuga

SEQ ID NO: 1759457 - RNA, 17 nt, Human
aaaugaggucagagccu

SEQ ID NO: 1759458 - RNA, 19 nt, Human
aaaugaggucagagccugc

SEQ ID NO: 1759459 - RNA, 14 nt, Human
aaaugaaggucuuu

SEQ ID NO: 1759460 - RNA, 14 nt, Human
aaaugcacaaacaa

SEQ ID NO: 1759461 - RNA, 21 nt, Human
aaaugcaaauccuaugugauu

SEQ ID NO: 1759462 - RNA, 14 nt, Human
aaaugcaaauccua

SEQ ID NO: 1759463 - RNA, 13 nt, Human
aaaugcaaauccu

SEQ ID NO: 1759464 - RNA, 12 nt, Human
aaaugcauugua

SEQ ID NO: 1759465 - RNA, 13 nt, Human
aaaugcauuguau

SEQ ID NO: 1759466 - RNA, 20 nt, Human
aaaugcauuguaucgauguu

SEQ ID NO: 1759467 - RNA, 14 nt, Human
aaaugcauuucuaa

SEQ ID NO: 1759468 - RNA, 19 nt, Human
gucucauagguugagcaau

SEQ ID NO: 1759469 - RNA, 15 nt, Human
guccuuccugaaacu

SEQ ID NO: 1759470 - RNA, 15 nt, Human
gucucauccaucauc

SEQ ID NO: 1759471 - RNA, 16 nt, Human
gucucauccaucauca

SEQ ID NO: 1759472 - RNA, 20 nt, Human
aaccacaucuugcucugcug

SEQ ID NO: 1759473 - RNA, 22 nt, Human
aaccacaucuugcucugcugac

SEQ ID NO: 1759474 - RNA, 18 nt, Human
aaccacaucuugcucugc

SEQ ID NO: 1759475 - RNA, 13 nt, Human
aaccaauccugga

SEQ ID NO: 1759476 - RNA, 17 nt, Human
aaccuccgccucuuggg

SEQ ID NO: 1759477 - RNA, 23 nt, Human
aaccuccccagccugcgccugcu

SEQ ID NO: 1759478 - RNA, 17 nt, Human
aaccuccccagccugcg

SEQ ID NO: 1759479 - RNA, 12 nt, Human
aaccuccucugu

SEQ ID NO: 1759480 - RNA, 13 nt, Human
aaccuccucugug

SEQ ID NO: 1759481 - RNA, 14 nt, Human
aaccuccugggcua

SEQ ID NO: 1759482 - RNA, 14 nt, Human
aaccuccucuguga

SEQ ID NO: 1759483 - RNA, 15 nt, Human
aaccuccucugugaa

SEQ ID NO: 1759484 - RNA, 16 nt, Human
aaccuccccagccugc

SEQ ID NO: 1759485 - RNA, 13 nt, Human
aacccccagccug

SEQ ID NO: 1759486 - RNA, 14 nt, Human
aacccccagccugc

SEQ ID NO: 1759487 - RNA, 15 nt, Human
aacccccagccugcu

SEQ ID NO: 1759488 - RNA, 15 nt, Human
aaccuauuuugaagu

SEQ ID NO: 1759489 - RNA, 17 nt, Human
aacccagucacugugag

SEQ ID NO: 1759490 - RNA, 20 nt, Human
aacccaucaacaaaaauugu

SEQ ID NO: 1759491 - RNA, 15 nt, Human
aacccaugagauuca

SEQ ID NO: 1759492 - RNA, 17 nt, Human
aaccauguagaaaauuu

SEQ ID NO: 1759493 - RNA, 19 nt, Human
gugaaccaccacacccagc

SEQ ID NO: 1759494 - RNA, 10 nt, Human
aacuccaggg

SEQ ID NO: 1759495 - RNA, 19 nt, Human
aacuagcauaucugccuuu

SEQ ID NO: 1759496 - RNA, 18 nt, Human
aacuagcauaucugccuu

SEQ ID NO: 1759497 - RNA, 17 nt, Human
aacuagcauaucugccu

SEQ ID NO: 1759498 - RNA, 14 nt, Human
aacuagcauaucug

SEQ ID NO: 1759499 - RNA, 19 nt, Human
aaccugccugacauuugga

SEQ ID NO: 1759500 - RNA, 20 nt, Human
gucugggaggaauggacaga

SEQ ID NO: 1759501 - RNA, 18 nt, Human
aaccucuguucaguguaa

SEQ ID NO: 1759502 - RNA, 18 nt, Human
aaccucuucagaggcccu

SEQ ID NO: 1759503 - RNA, 15 nt, Human
aaccucuguucagug

SEQ ID NO: 1759504 - RNA, 16 nt, Human
aaccucuguucagugu

SEQ ID NO: 1759505 - RNA, 12 nt, Human
aaccucuguuca

SEQ ID NO: 1759506 - RNA, 13 nt, Human
aaccucuguucag

SEQ ID NO: 1759507 - RNA, 19 nt, Human
gucuuauauauuguagaua

SEQ ID NO: 1759508 - RNA, 18 nt, Human
gucuuccugaaaugcagu

SEQ ID NO: 1759509 - RNA, 21 nt, Human
gucauuugagcagggcucagc

SEQ ID NO: 1759510 - RNA, 22 nt, Human
gucauuugagcagggcucagcg

SEQ ID NO: 1759511 - RNA, 17 nt, Human
gucauuugagucucuua

SEQ ID NO: 1759512 - RNA, 20 nt, Human
guccacaaaauaaccaaucc

SEQ ID NO: 1759513 - RNA, 16 nt, Human
guccauuguccaaucc

SEQ ID NO: 1759514 - RNA, 21 nt, Human
guccauuguccaauccuaugu

SEQ ID NO: 1759515 - RNA, 12 nt, Human
guccaauccuau

SEQ ID NO: 1759516 - RNA, 17 nt, Human
guccaauccuauguuuu

SEQ ID NO: 1759517 - RNA, 20 nt, Human
aacacugugcacaucugugu

SEQ ID NO: 1759518 - RNA, 22 nt, Human
aacacugugcacaucugugucu

SEQ ID NO: 1759519 - RNA, 16 nt, Human
gucacaggcaggucca

SEQ ID NO: 1759520 - RNA, 13 nt, Human
gucacaggcaggu

SEQ ID NO: 1759521 - RNA, 15 nt, Human
gucacaggcaggucc

SEQ ID NO: 1759522 - RNA, 14 nt, Human
aacaaggaagucaa

SEQ ID NO: 1759523 - RNA, 21 nt, Human
aacaagccuccuuuuaaagua

SEQ ID NO: 1759524 - RNA, 15 nt, Human
aacaauaaaugugca

SEQ ID NO: 1759525 - RNA, 19 nt, Human
aacaagguuauaugaauau

SEQ ID NO: 1759526 - RNA, 20 nt, Human
aacaagguuauaugaauaua

SEQ ID NO: 1759527 - RNA, 22 nt, Human
aacaauccuagugcuuuccuuu

SEQ ID NO: 1759528 - RNA, 17 nt, Human
aacaauccuagugcuuu

SEQ ID NO: 1759529 - RNA, 16 nt, Human
guccggaaugccaccc

SEQ ID NO: 1759530 - RNA, 19 nt, Human
aacagacuggaagcacagc

SEQ ID NO: 1759531 - RNA, 22 nt, Human
aacaggcugggcuucaguggca

SEQ ID NO: 1759532 - RNA, 13 nt, Human
aacaggcugggcu

SEQ ID NO: 1759533 - RNA, 23 nt, Human
aacaggcugggcuucaguggcag

SEQ ID NO: 1759534 - RNA, 14 nt, Human
aacaguaaaugugc

SEQ ID NO: 1759535 - RNA, 12 nt, Human
aacaguggggaa

SEQ ID NO: 1759536 - RNA, 16 nt, Human
aacaguggggaagagu

SEQ ID NO: 1759537 - RNA, 15 nt, Human
guccugaucagagcc

SEQ ID NO: 1759538 - RNA, 15 nt, Human
guccuuauguuaagc

SEQ ID NO: 1759539 - RNA, 22 nt, Human
guccuuauguuaagcccuggca

SEQ ID NO: 1759540 - RNA, 12 nt, Human
guccugccuguc

SEQ ID NO: 1759541 - RNA, 14 nt, Human
guccugccugucug

SEQ ID NO: 1759542 - RNA, 15 nt, Human
guccugccugucugc

SEQ ID NO: 1759543 - RNA, 16 nt, Human
guccugccugucugcc

SEQ ID NO: 1759544 - RNA, 18 nt, Human
guccugccugucugcccc

SEQ ID NO: 1759545 - RNA, 21 nt, Human
guccugccugucugccccagc

SEQ ID NO: 1759546 - RNA, 18 nt, Human
aagcuuccauagcugcug

SEQ ID NO: 1759547 - RNA, 20 nt, Human
aagcuuccauagcugcugcc

SEQ ID NO: 1759548 - RNA, 22 nt, Human
aagcugacgaacuuccauggcc

SEQ ID NO: 1759549 - RNA, 19 nt, Human
aagcugacgaacuuccaug

SEQ ID NO: 1759550 - RNA, 20 nt, Human
aagcugacgaacuuccaugg

SEQ ID NO: 1759551 - RNA, 17 nt, Human
aagcugacgaacuucca

SEQ ID NO: 1759552 - RNA, 19 nt, Human
guucccuauuuuucucucc

SEQ ID NO: 1759553 - RNA, 22 nt, Human
guucccuauuuuucucuccugu

SEQ ID NO: 1759554 - RNA, 16 nt, Human
guucccgcggggcugu

SEQ ID NO: 1759555 - RNA, 14 nt, Human
guucccggcuggac

SEQ ID NO: 1759556 - RNA, 22 nt, Human
guuccccuuccacugagggcag

SEQ ID NO: 1759557 - RNA, 15 nt, Human
guuccccuuccacug

SEQ ID NO: 1759558 - RNA, 22 nt, Human
aagcuuucauguaaacugugca

SEQ ID NO: 1759559 - RNA, 23 nt, Human
aagcuuucauguaaacugugcac

SEQ ID NO: 1759560 - RNA, 22 nt, Human
guugaugaucuuugcagacagg

SEQ ID NO: 1759561 - RNA, 22 nt, Human
guucucuaucauuuaauaauau

SEQ ID NO: 1759562 - RNA, 18 nt, Human
guucucuaucauuuaaua

SEQ ID NO: 1759563 - RNA, 17 nt, Human
guucucuaucauuuaau

SEQ ID NO: 1759564 - RNA, 14 nt, Human
guucuguagaaaug

SEQ ID NO: 1759565 - RNA, 22 nt, Human
guucuguagaaaugguuguauu

SEQ ID NO: 1759566 - RNA, 17 nt, Human
aagcuaggccuggccag

SEQ ID NO: 1759567 - RNA, 18 nt, Human
aagcuaggccuggccaga

SEQ ID NO: 1759568 - RNA, 22 nt, Human
aagcuaggccuggccagaugca

SEQ ID NO: 1759569 - RNA, 17 nt, Human
guucaggguuggccccu

SEQ ID NO: 1759570 - RNA, 18 nt, Human
guucaggguuggccccug

SEQ ID NO: 1759571 - RNA, 19 nt, Human
guucaggguuggccccugc

SEQ ID NO: 1759572 - RNA, 18 nt, Human
guucagcuccagcucacc

SEQ ID NO: 1759573 - RNA, 16 nt, Human
guucagcuccagcuca

SEQ ID NO: 1759574 - RNA, 17 nt, Human
guucagcuccagcucac

SEQ ID NO: 1759575 - RNA, 12 nt, Human
guguuugucauu

SEQ ID NO: 1759576 - RNA, 15 nt, Human
guguuugucauuagc

SEQ ID NO: 1759577 - RNA, 13 nt, Human
guguuugucauua

SEQ ID NO: 1759578 - RNA, 14 nt, Human
guuaagcccuggca

SEQ ID NO: 1759579 - RNA, 18 nt, Human
guuaaugauagcuacugu

SEQ ID NO: 1759580 - RNA, 17 nt, Human
guuaaguccucccugac

SEQ ID NO: 1759581 - RNA, 23 nt, Human
guuaaguccucccugacuuuucu

SEQ ID NO: 1759582 - RNA, 14 nt, Human
guuaaggaauauaa

SEQ ID NO: 1759583 - RNA, 11 nt, Human
guuaaggccug

SEQ ID NO: 1759584 - RNA, 12 nt, Human
guuaaggccuga

SEQ ID NO: 1759585 - RNA, 16 nt, Human
guuaaggccugaauca

SEQ ID NO: 1759586 - RNA, 15 nt, Human
guuaaggugggcccg

SEQ ID NO: 1759587 - RNA, 21 nt, Human
guuacacacuuuuuaagaaau

SEQ ID NO: 1759588 - RNA, 20 nt, Human
guuacacagaaaugcugcug

SEQ ID NO: 1759589 - RNA, 21 nt, Human
guuacacagaaaugcugcugg

SEQ ID NO: 1759590 - RNA, 22 nt, Human
guuacacagaaaugcugcuggc

SEQ ID NO: 1759591 - RNA, 18 nt, Human
guuagucgugagcucuug

SEQ ID NO: 1759592 - RNA, 22 nt, Human
guuagucgugagcucuugugag

SEQ ID NO: 1759593 - RNA, 20 nt, Human
guuagucgugagcucuugug

SEQ ID NO: 1759594 - RNA, 23 nt, Human
guugaugaucuuugcagacaggc

SEQ ID NO: 1759595 - RNA, 21 nt, Human
aaggccaauuccuauacgcag

SEQ ID NO: 1759596 - RNA, 17 nt, Human
guugcccaggcaggucu

SEQ ID NO: 1759597 - RNA, 18 nt, Human
guugcccaggcaggucuu

SEQ ID NO: 1759598 - RNA, 19 nt, Human
guugcccaggcaggucuug

SEQ ID NO: 1759599 - RNA, 21 nt, Human
guugcccaggcuggcgugcag

SEQ ID NO: 1759600 - RNA, 23 nt, Human
guuuaagaaaaaauaacacacau

SEQ ID NO: 1759601 - RNA, 22 nt, Human
guuuauuaaaauucugaauuuu

SEQ ID NO: 1759602 - RNA, 15 nt, Human
guuguauuagauguu

SEQ ID NO: 1759603 - RNA, 14 nt, Human
guuguauuagaugu

SEQ ID NO: 1759604 - RNA, 23 nt, Human
guuguauacuuccuuaugcuucu

SEQ ID NO: 1759605 - RNA, 13 nt, Human
guuggguggaugc

SEQ ID NO: 1759606 - RNA, 11 nt, Human
guugccccaga

SEQ ID NO: 1759607 - RNA, 19 nt, Human
guugccccuuucucuuuuc

SEQ ID NO: 1759608 - RNA, 18 nt, Human
guugcuggaucaggaagc

SEQ ID NO: 1759609 - RNA, 18 nt, Human
guuuggggaugagaaagg

SEQ ID NO: 1759610 - RNA, 13 nt, Human
guuugccucugcc

SEQ ID NO: 1759611 - RNA, 16 nt, Human
guuugccucugccucu

SEQ ID NO: 1759612 - RNA, 15 nt, Human
guuugccggauacaa

SEQ ID NO: 1759613 - RNA, 23 nt, Human
guuugcccaaaauuuauuuuaua

SEQ ID NO: 1759614 - RNA, 18 nt, Human
aagggcuuuguuuugcac

SEQ ID NO: 1759615 - RNA, 22 nt, Human
aaggggaauguuugccucugcc

SEQ ID NO: 1759616 - RNA, 23 nt, Human
aaggggaauguuugccucugccu

SEQ ID NO: 1759617 - RNA, 17 nt, Human
aaggggucaaaauuugc

SEQ ID NO: 1759618 - RNA, 17 nt, Human
aaggcuucucucugugg

SEQ ID NO: 1759619 - RNA, 18 nt, Human
aaggcuucucucuguggg

SEQ ID NO: 1759620 - RNA, 17 nt, Human
aaggguaucaggugcug

SEQ ID NO: 1759621 - RNA, 16 nt, Human
aaggguaucaggugcu

SEQ ID NO: 1759622 - RNA, 16 nt, Human
aagaggaaguucagau

SEQ ID NO: 1759623 - RNA, 17 nt, Human
aagaggaaguucagauc

SEQ ID NO: 1759624 - RNA, 15 nt, Human
aagaccucagggcac

SEQ ID NO: 1759625 - RNA, 14 nt, Human
gugggguuuccugg

SEQ ID NO: 1759626 - RNA, 16 nt, Human
gugggguuuccuggca

SEQ ID NO: 1759627 - RNA, 18 nt, Human
guggggugacgggacuca

SEQ ID NO: 1759628 - RNA, 13 nt, Human
aagcaagacugag

SEQ ID NO: 1759629 - RNA, 12 nt, Human
aagcaaagggga

SEQ ID NO: 1759630 - RNA, 18 nt, Human
aagcaaaggggacagcug

SEQ ID NO: 1759631 - RNA, 21 nt, Human
aagcaaaggggacagcugugu

SEQ ID NO: 1759632 - RNA, 19 nt, Human
aagauauuuuaaaaucugu

SEQ ID NO: 1759633 - RNA, 13 nt, Human
aagaguagaaacu

SEQ ID NO: 1759634 - RNA, 19 nt, Human
aagauauaagugcuguaua

SEQ ID NO: 1759635 - RNA, 21 nt, Human
aagauauaagugcuguauaaa

SEQ ID NO: 1759636 - RNA, 20 nt, Human
aagauauaagugcuguauaa

SEQ ID NO: 1759637 - RNA, 17 nt, Human
gugucuugcaauggcag

SEQ ID NO: 1759638 - RNA, 18 nt, Human
gugucuugcaauggcagc

SEQ ID NO: 1759639 - RNA, 20 nt, Human
gugucuucuccaccacgcug

SEQ ID NO: 1759640 - RNA, 15 nt, Human
aagcaauccuaggua

SEQ ID NO: 1759641 - RNA, 13 nt, Human
aagcaauaugcau

SEQ ID NO: 1759642 - RNA, 19 nt, Human
aagcaauaugcauuuaaau

SEQ ID NO: 1759643 - RNA, 18 nt, Human
gugucuuuuuucacuaca

SEQ ID NO: 1759644 - RNA, 19 nt, Human
guguguccacgacugucuc

SEQ ID NO: 1759645 - RNA, 20 nt, Human
guguguccacgacugucucc

SEQ ID NO: 1759646 - RNA, 16 nt, Human
gugugucccccucugu

SEQ ID NO: 1759647 - RNA, 17 nt, Human
gugugucccccucuguc

SEQ ID NO: 1759648 - RNA, 18 nt, Human
gugugucccccucugucc

SEQ ID NO: 1759649 - RNA, 22 nt, Human
gugcucacguuaccuugacaca

SEQ ID NO: 1759650 - RNA, 23 nt, Human
gugcucacguuaccuugacacau

SEQ ID NO: 1759651 - RNA, 18 nt, Human
gugcucaggacucagaag

SEQ ID NO: 1759652 - RNA, 22 nt, Human
gugcucaggacucagaagccuc

SEQ ID NO: 1759653 - RNA, 21 nt, Human
gugcugggauuacaagcguga

SEQ ID NO: 1759654 - RNA, 22 nt, Human
gugcugggauuacaagcgugag

SEQ ID NO: 1759655 - RNA, 17 nt, Human
gugcugggagaaauacu

SEQ ID NO: 1759656 - RNA, 20 nt, Human
gugcugggauuacaggugug

SEQ ID NO: 1759657 - RNA, 23 nt, Human
guggacacagcucuucuccaggc

SEQ ID NO: 1759658 - RNA, 18 nt, Human
guggacacagcucuucuc

SEQ ID NO: 1759659 - RNA, 22 nt, Human
guggacacagcucuucuccagg

SEQ ID NO: 1759660 - RNA, 21 nt, Human
guggaugccugguggcagcug

SEQ ID NO: 1759661 - RNA, 18 nt, Human
guggauggccguggaugc

SEQ ID NO: 1759662 - RNA, 16 nt, Human
guggaauguuggauaa

SEQ ID NO: 1759663 - RNA, 17 nt, Human
guggaauguuggauaag

SEQ ID NO: 1759664 - RNA, 20 nt, Human
guggaauguuggauaaggaa

SEQ ID NO: 1759665 - RNA, 14 nt, Human
guggacuaaaagau

SEQ ID NO: 1759666 - RNA, 12 nt, Human
aagaaagaaugu

SEQ ID NO: 1759667 - RNA, 20 nt, Human
aagaaagaauguuacugccu

SEQ ID NO: 1759668 - RNA, 22 nt, Human
aagaaagaauguuacugccuua

SEQ ID NO: 1759669 - RNA, 12 nt, Human
aagaauacuuga

SEQ ID NO: 1759670 - RNA, 13 nt, Human
aagaauacuugaa

SEQ ID NO: 1759671 - RNA, 14 nt, Human
aagaauacuugaac

SEQ ID NO: 1759672 - RNA, 15 nt, Human
aagaauacuugaacu

SEQ ID NO: 1759673 - RNA, 16 nt, Human
aagaauacuugaacuu

SEQ ID NO: 1759674 - RNA, 17 nt, Human
aagaauacuugaacuug

SEQ ID NO: 1759675 - RNA, 16 nt, Human
aacuugggcacaugcu

SEQ ID NO: 1759676 - RNA, 15 nt, Human
aacuugucucuucau

SEQ ID NO: 1759677 - RNA, 21 nt, Human
gugaaccaccacacccagccc

SEQ ID NO: 1759678 - RNA, 14 nt, Human
gugaaccaaugcaa

SEQ ID NO: 1759679 - RNA, 15 nt, Human
gugaaccaaugcaag

SEQ ID NO: 1759680 - RNA, 19 nt, Human
gugccuauuuguguggaca

SEQ ID NO: 1759681 - RNA, 12 nt, Human
uaauuuauagua

SEQ ID NO: 1759682 - RNA, 22 nt, Human
uaauuuauaguaaugaguuuaa

SEQ ID NO: 1759683 - RNA, 14 nt, Human
aaugcaguauggua

SEQ ID NO: 1759684 - RNA, 15 nt, Human
aaugcaguaugguac

SEQ ID NO: 1759685 - RNA, 16 nt, Human
aaugcaguaugguaca

SEQ ID NO: 1759686 - RNA, 17 nt, Human
aaugcaguaugguacau

SEQ ID NO: 1759687 - RNA, 19 nt, Human
aaugcaguaugguacauuu

SEQ ID NO: 1759688 - RNA, 23 nt, Human
aaugcaguaugguacauuuuuca

SEQ ID NO: 1759689 - RNA, 19 nt, Human
aaugcagucuguccaggcu

SEQ ID NO: 1759690 - RNA, 20 nt, Human
aaugcagucuguccaggcuc

SEQ ID NO: 1759691 - RNA, 21 nt, Human
aaugcauuuuguuugguauug

SEQ ID NO: 1759692 - RNA, 20 nt, Human
aaugcauuuuguuugguauu

SEQ ID NO: 1759693 - RNA, 18 nt, Human
aaugcauuuuguuuggua

SEQ ID NO: 1759694 - RNA, 12 nt, Human
aaugcauuuugu

SEQ ID NO: 1759695 - RNA, 12 nt, Human
aaugcauuguau

SEQ ID NO: 1759696 - RNA, 18 nt, Human
aaugcauuguaucgaugu

SEQ ID NO: 1759697 - RNA, 21 nt, Human
aaugcauuguaucgauguuau

SEQ ID NO: 1759698 - RNA, 23 nt, Human
aaugcauuuuguuugguauugua

SEQ ID NO: 1759699 - RNA, 22 nt, Human
aaugcauuguaucgauguuaug

SEQ ID NO: 1759700 - RNA, 16 nt, Human
aaugugaugaauacug

SEQ ID NO: 1759701 - RNA, 12 nt, Human
aaugugaugaau

SEQ ID NO: 1759702 - RNA, 20 nt, Human
aaugugaugaauacuguauu

SEQ ID NO: 1759703 - RNA, 18 nt, Human
uacagaggccaugggccu

SEQ ID NO: 1759704 - RNA, 16 nt, Human
uacagagcuucccuga

SEQ ID NO: 1759705 - RNA, 15 nt, Human
uacagagcuucccug

SEQ ID NO: 1759706 - RNA, 12 nt, Human
uacaggcuggcg

SEQ ID NO: 1759707 - RNA, 21 nt, Human
uacaggcuggcgcagaacgaa

SEQ ID NO: 1759708 - RNA, 20 nt, Human
uacaguaggagcccagcucu

SEQ ID NO: 1759709 - RNA, 22 nt, Human
uacaguaggagcccagcucuga

SEQ ID NO: 1759710 - RNA, 13 nt, Human
uacaguaggagcc

SEQ ID NO: 1759711 - RNA, 14 nt, Human
uacaguaggagccc

SEQ ID NO: 1759712 - RNA, 15 nt, Human
uacaguaggagccca

SEQ ID NO: 1759713 - RNA, 18 nt, Human
uacaguaggagcccagcu

SEQ ID NO: 1759714 - RNA, 17 nt, Human
aauggagcaucaagcca

SEQ ID NO: 1759715 - RNA, 19 nt, Human
aauggacuuuuguacauag

SEQ ID NO: 1759716 - RNA, 21 nt, Human
aaugacauacgcuuuuaauga

SEQ ID NO: 1759717 - RNA, 13 nt, Human
aaugaaaagagaa

SEQ ID NO: 1759718 - RNA, 17 nt, Human
aaugacacuugucccca

SEQ ID NO: 1759719 - RNA, 13 nt, Human
uaaugaguuuaaa

SEQ ID NO: 1759720 - RNA, 13 nt, Human
aaucuugucucaa

SEQ ID NO: 1759721 - RNA, 17 nt, Human
aaucuugucucaaugcu

SEQ ID NO: 1759722 - RNA, 15 nt, Human
aaucuugucucaaug

SEQ ID NO: 1759723 - RNA, 21 nt, Human
aaucuugucucaaugcucaua

SEQ ID NO: 1759724 - RNA, 20 nt, Human
aaucuugucucaaugcucau

SEQ ID NO: 1759725 - RNA, 18 nt, Human
aaucuugucucaaugcuc

SEQ ID NO: 1759726 - RNA, 22 nt, Human
aaucuuucuuucuuagaaauuu

SEQ ID NO: 1759727 - RNA, 21 nt, Human
aaucuuucuuucuuagaaauu

SEQ ID NO: 1759728 - RNA, 20 nt, Human
aaucuuucuuucuuagaaau

SEQ ID NO: 1759729 - RNA, 19 nt, Human
aaucuuucuuucuuagaaa

SEQ ID NO: 1759730 - RNA, 18 nt, Human
aaucuuucuuucuuagaa

SEQ ID NO: 1759731 - RNA, 17 nt, Human
aaucuuucuuucuuaga

SEQ ID NO: 1759732 - RNA, 16 nt, Human
aaucuuucuuucuuag

SEQ ID NO: 1759733 - RNA, 14 nt, Human
aaucuuucuuucuu

SEQ ID NO: 1759734 - RNA, 17 nt, Human
uaauaguaauuuguaaa

SEQ ID NO: 1759735 - RNA, 18 nt, Human
uaauaguaauuuguaaag

SEQ ID NO: 1759736 - RNA, 21 nt, Human
uaauaguaauuuguaaaguug

SEQ ID NO: 1759737 - RNA, 15 nt, Human
uaaugacacuugucc

SEQ ID NO: 1759738 - RNA, 17 nt, Human
uaaguuauuuuuguaca

SEQ ID NO: 1759739 - RNA, 18 nt, Human
uaaguuauuuuuguacau

SEQ ID NO: 1759740 - RNA, 19 nt, Human
uaaguuauuuuuguacaug

SEQ ID NO: 1759741 - RNA, 15 nt, Human
uaaguuauuuuaccu

SEQ ID NO: 1759742 - RNA, 18 nt, Human
uaaguuauuuuaccuguu

SEQ ID NO: 1759743 - RNA, 15 nt, Human
aaucagaucuuuauu

SEQ ID NO: 1759744 - RNA, 13 nt, Human
aaucaugagccug

SEQ ID NO: 1759745 - RNA, 16 nt, Human
aaucaugagccugcug

SEQ ID NO: 1759746 - RNA, 17 nt, Human
aaucaugagccugcugg

SEQ ID NO: 1759747 - RNA, 18 nt, Human
aaucaugagccugcugga

SEQ ID NO: 1759748 - RNA, 15 nt, Human
aaucaucaagucuuu

SEQ ID NO: 1759749 - RNA, 12 nt, Human
aaucaucaagaa

SEQ ID NO: 1759750 - RNA, 14 nt, Human
aaucaucaagaagg

SEQ ID NO: 1759751 - RNA, 18 nt, Human
aaucaucaagaagggcug

SEQ ID NO: 1759752 - RNA, 22 nt, Human
aaucugucacguagaacuugga

SEQ ID NO: 1759753 - RNA, 14 nt, Human
aaucuagaggaaaa

SEQ ID NO: 1759754 - RNA, 19 nt, Human
aaucuagaggaaaagaaag

SEQ ID NO: 1759755 - RNA, 21 nt, Human
aaucuagaggaaaagaaagaa

SEQ ID NO: 1759756 - RNA, 16 nt, Human
aaucuuauaauuuaaa

SEQ ID NO: 1759757 - RNA, 14 nt, Human
aaucuuauaauuua

SEQ ID NO: 1759758 - RNA, 14 nt, Human
aauccuaugugauu

SEQ ID NO: 1759759 - RNA, 20 nt, Human
aauccuaugugauuuuaacu

SEQ ID NO: 1759760 - RNA, 21 nt, Human
aauccuaugugauuuuaacuc

SEQ ID NO: 1759761 - RNA, 14 nt, Human
aauccuaccuugcu

SEQ ID NO: 1759762 - RNA, 17 nt, Human
aauccuaccuugcuuuu

SEQ ID NO: 1759763 - RNA, 20 nt, Human
aauccuaccuugcuuuugcu

SEQ ID NO: 1759764 - RNA, 21 nt, Human
aauccuaccuugcuuuugcuu

SEQ ID NO: 1759765 - RNA, 20 nt, Human
aaucauuucuauuucuccuc

SEQ ID NO: 1759766 - RNA, 12 nt, Human
aaucauuucuau

SEQ ID NO: 1759767 - RNA, 19 nt, Human
aaucauuucuauuucuccu

SEQ ID NO: 1759768 - RNA, 14 nt, Human
uaaccucgcccucu

SEQ ID NO: 1759769 - RNA, 15 nt, Human
uaaccucgcccucuc

SEQ ID NO: 1759770 - RNA, 16 nt, Human
uaaccucgcccucucc

SEQ ID NO: 1759771 - RNA, 17 nt, Human
uaaccucgcccucuccu

SEQ ID NO: 1759772 - RNA, 17 nt, Human
uaaccucuucagaggcc

SEQ ID NO: 1759773 - RNA, 11 nt, Human
uaaccuggagg

SEQ ID NO: 1759774 - RNA, 15 nt, Human
aauaucaauauaaug

SEQ ID NO: 1759775 - RNA, 17 nt, Human
aauaucccggggguggg

SEQ ID NO: 1759776 - RNA, 13 nt, Human
aauaucauuuauu

SEQ ID NO: 1759777 - RNA, 23 nt, Human
aauaucauuuauuuuuuacauua

SEQ ID NO: 1759778 - RNA, 17 nt, Human
aauauaugugugccuau

SEQ ID NO: 1759779 - RNA, 13 nt, Human
aauagcugggacu

SEQ ID NO: 1759780 - RNA, 14 nt, Human
aauagcugggacua

SEQ ID NO: 1759781 - RNA, 20 nt, Human
aauagauaagaguagaaacu

SEQ ID NO: 1759782 - RNA, 18 nt, Human
aauaggcguaacuaauuu

SEQ ID NO: 1759783 - RNA, 22 nt, Human
aauaggcgaucacaacgugcau

SEQ ID NO: 1759784 - RNA, 14 nt, Human
aauagguucuucuu

SEQ ID NO: 1759785 - RNA, 16 nt, Human
aauagguucuucuugu

SEQ ID NO: 1759786 - RNA, 15 nt, Human
aauaguaauuuguaa

SEQ ID NO: 1759787 - RNA, 16 nt, Human
aauaguaauuuguaaa

SEQ ID NO: 1759788 - RNA, 21 nt, Human
aauaguaauuuguaaaguugg

SEQ ID NO: 1759789 - RNA, 13 nt, Human
aauauuguucucu

SEQ ID NO: 1759790 - RNA, 11 nt, Human
aauauuugaau

SEQ ID NO: 1759791 - RNA, 12 nt, Human
aauauuucuauu

SEQ ID NO: 1759792 - RNA, 13 nt, Human
aauauuucuauug

SEQ ID NO: 1759793 - RNA, 14 nt, Human
aauauuucuauuga

SEQ ID NO: 1759794 - RNA, 18 nt, Human
aauauuucuauugaauuc

SEQ ID NO: 1759795 - RNA, 15 nt, Human
aauauuuuacauaca

SEQ ID NO: 1759796 - RNA, 13 nt, Human
aauauuugaaucu

SEQ ID NO: 1759797 - RNA, 12 nt, Human
aauauuugaauc

SEQ ID NO: 1759798 - RNA, 14 nt, Human
aauauuugaaucuu

SEQ ID NO: 1759799 - RNA, 22 nt, Human
aauaagaaacaacucuuugaga

SEQ ID NO: 1759800 - RNA, 13 nt, Human
aauaauuuauagu

SEQ ID NO: 1759801 - RNA, 15 nt, Human
aauaauuuauaguaa

SEQ ID NO: 1759802 - RNA, 16 nt, Human
aauaauuuauaguaau

SEQ ID NO: 1759803 - RNA, 21 nt, Human
uaaauaagaaacaacucuuug

SEQ ID NO: 1759804 - RNA, 22 nt, Human
uaaauaagaaacaacucuuuga

SEQ ID NO: 1759805 - RNA, 13 nt, Human
uaaauacagucuu

SEQ ID NO: 1759806 - RNA, 17 nt, Human
uaaauacagucuuccau

SEQ ID NO: 1759807 - RNA, 20 nt, Human
uaaauacagucuuccauuug

SEQ ID NO: 1759808 - RNA, 22 nt, Human
uaaauacagucuuccauuugca

SEQ ID NO: 1759809 - RNA, 23 nt, Human
uaaauacagucuuccauuugcaa

SEQ ID NO: 1759810 - RNA, 15 nt, Human
aauacaaauugguug

SEQ ID NO: 1759811 - RNA, 18 nt, Human
uaaauagaguauaugcac

SEQ ID NO: 1759812 - RNA, 17 nt, Human
guuuucuuuaugucuuu

SEQ ID NO: 1759813 - RNA, 15 nt, Human
guuuucuuuccuccu

SEQ ID NO: 1759814 - RNA, 16 nt, Human
guuuucuuuccuccuu

SEQ ID NO: 1759815 - RNA, 18 nt, Human
guuuucuuuccuccuuuc

SEQ ID NO: 1759816 - RNA, 20 nt, Human
guuuucuuuccuccuuuccu

SEQ ID NO: 1759817 - RNA, 22 nt, Human
uaaaguauuuaauuagugcuaa

SEQ ID NO: 1759818 - RNA, 21 nt, Human
uaaaguauuuaauuagugcua

SEQ ID NO: 1759819 - RNA, 19 nt, Human
uaaaguauuuaauuagugc

SEQ ID NO: 1759820 - RNA, 17 nt, Human
uaaaguauuuaauuagu

SEQ ID NO: 1759821 - RNA, 16 nt, Human
uaaaguauuuaauuag

SEQ ID NO: 1759822 - RNA, 14 nt, Human
uaaaguauuuaauu

SEQ ID NO: 1759823 - RNA, 12 nt, Human
uaaaguauuuaa

SEQ ID NO: 1759824 - RNA, 23 nt, Human
aauaaaguauuuaauuagugcua

SEQ ID NO: 1759825 - RNA, 22 nt, Human
aauaaaguauuuaauuagugcu

SEQ ID NO: 1759826 - RNA, 21 nt, Human
aauaaaguauuuaauuagugc

SEQ ID NO: 1759827 - RNA, 20 nt, Human
aauaaaguauuuaauuagug

SEQ ID NO: 1759828 - RNA, 19 nt, Human
aauaaaguauuuaauuagu

SEQ ID NO: 1759829 - RNA, 16 nt, Human
aauaaaguauuuaauu

SEQ ID NO: 1759830 - RNA, 15 nt, Human
aauaaaguauuuaau

SEQ ID NO: 1759831 - RNA, 14 nt, Human
aauaaaguauuuaa

SEQ ID NO: 1759832 - RNA, 13 nt, Human
aauaaaguauuua

SEQ ID NO: 1759833 - RNA, 21 nt, Human
aauaacaaugaaaguugauaa

SEQ ID NO: 1759834 - RNA, 18 nt, Human
aauaaauuguauauucac

SEQ ID NO: 1759835 - RNA, 17 nt, Human
aauaaauuguauauuca

SEQ ID NO: 1759836 - RNA, 16 nt, Human
aauaaauuguauauuc

SEQ ID NO: 1759837 - RNA, 15 nt, Human
aauaaauuguauauu

SEQ ID NO: 1759838 - RNA, 13 nt, Human
aauaaauuguaua

SEQ ID NO: 1759839 - RNA, 12 nt, Human
aauaaauuguau

SEQ ID NO: 1759840 - RNA, 19 nt, Human
aauaaauugcuaauguugc

SEQ ID NO: 1759841 - RNA, 20 nt, Human
aauaaauugcuaauguugcu

SEQ ID NO: 1759842 - RNA, 15 nt, Human
aauaacgauaaaaga

SEQ ID NO: 1759843 - RNA, 19 nt, Human
aauaacucuguggcauuau

SEQ ID NO: 1759844 - RNA, 20 nt, Human
aauaacacacauauaaacau

SEQ ID NO: 1759845 - RNA, 12 nt, Human
aauaacacacau

SEQ ID NO: 1759846 - RNA, 17 nt, Human
acaagcgugagccacug

SEQ ID NO: 1759847 - RNA, 16 nt, Human
acaagcaaacccagac

SEQ ID NO: 1759848 - RNA, 15 nt, Human
acaagcaaacccaga

SEQ ID NO: 1759849 - RNA, 16 nt, Human
uagcucaggugucccu

SEQ ID NO: 1759850 - RNA, 16 nt, Human
uagcuacuaauuuuaa

SEQ ID NO: 1759851 - RNA, 15 nt, Human
acaaugaaugucuuu

SEQ ID NO: 1759852 - RNA, 18 nt, Human
acaagcgugagccacugc

SEQ ID NO: 1759853 - RNA, 14 nt, Human
acaauaugugccaa

SEQ ID NO: 1759854 - RNA, 20 nt, Human
acaauaugugccaaucaaua

SEQ ID NO: 1759855 - RNA, 22 nt, Human
acaauaugugccaaucaauagc

SEQ ID NO: 1759856 - RNA, 12 nt, Human
acaauaaaauau

SEQ ID NO: 1759857 - RNA, 15 nt, Human
acaauaaaauauuau

SEQ ID NO: 1759858 - RNA, 20 nt, Human
acaauaaaauuuuuuuucau

SEQ ID NO: 1759859 - RNA, 21 nt, Human
acaauaaaauuuuuuuucaug

SEQ ID NO: 1759860 - RNA, 19 nt, Human
acaauagccgauaucagaa

SEQ ID NO: 1759861 - RNA, 22 nt, Human
acaauagccgauaucagaauuu

SEQ ID NO: 1759862 - RNA, 18 nt, Human
aauuuguuauuuugcaac

SEQ ID NO: 1759863 - RNA, 14 nt, Human
aauuugcugccaaa

SEQ ID NO: 1759864 - RNA, 20 nt, Human
aauuugcugccaaaugcgua

SEQ ID NO: 1759865 - RNA, 20 nt, Human
aauuuuuuuagaaagcauuu

SEQ ID NO: 1759866 - RNA, 18 nt, Human
aauuuuuuuagaaagcau

SEQ ID NO: 1759867 - RNA, 14 nt, Human
aauuuuuuuucaug

SEQ ID NO: 1759868 - RNA, 15 nt, Human
aauuuuuuuagaaag

SEQ ID NO: 1759869 - RNA, 20 nt, Human
aauuuuuaaauguaaaacau

SEQ ID NO: 1759870 - RNA, 13 nt, Human
aauuuuuaagcaa

SEQ ID NO: 1759871 - RNA, 19 nt, Human
aauuuguguugaaggaacu

SEQ ID NO: 1759872 - RNA, 11 nt, Human
aauuuuugcaa

SEQ ID NO: 1759873 - RNA, 12 nt, Human
aauuuuugcaau

SEQ ID NO: 1759874 - RNA, 14 nt, Human
aauuuuugcaauaa

SEQ ID NO: 1759875 - RNA, 15 nt, Human
aauuuuugcaauaau

SEQ ID NO: 1759876 - RNA, 17 nt, Human
aauuuuugcaauaaugc

SEQ ID NO: 1759877 - RNA, 18 nt, Human
aauuuuugcaauaaugca

SEQ ID NO: 1759878 - RNA, 19 nt, Human
aauuuuugcaauaaugcag

SEQ ID NO: 1759879 - RNA, 21 nt, Human
aauuuuugcaauaaugcagua

SEQ ID NO: 1759880 - RNA, 22 nt, Human
uagauaggucagugcaaauacu

SEQ ID NO: 1759881 - RNA, 21 nt, Human
acaaauauugguguugucagu

SEQ ID NO: 1759882 - RNA, 12 nt, Human
acaaauaugcaa

SEQ ID NO: 1759883 - RNA, 11 nt, Human
acaaauaugca

SEQ ID NO: 1759884 - RNA, 19 nt, Human
acaaauaugcaaaagguuc

SEQ ID NO: 1759885 - RNA, 15 nt, Human
aauuuuuuuucaugu

SEQ ID NO: 1759886 - RNA, 23 nt, Human
aauuuuuuuucauguuuuaacaa

SEQ ID NO: 1759887 - RNA, 15 nt, Human
acaaaguuguaugug

SEQ ID NO: 1759888 - RNA, 15 nt, Human
uacgucugacaggca

SEQ ID NO: 1759889 - RNA, 17 nt, Human
uacgcuuuuaaugaaaa

SEQ ID NO: 1759890 - RNA, 21 nt, Human
uacuagggaucccucaucugu

SEQ ID NO: 1759891 - RNA, 16 nt, Human
uacgucugacaggcaa

SEQ ID NO: 1759892 - RNA, 14 nt, Human
uacuuugaagucau

SEQ ID NO: 1759893 - RNA, 18 nt, Human
uacuuugaagucauacca

SEQ ID NO: 1759894 - RNA, 20 nt, Human
uacuucuccacccugcucuc

SEQ ID NO: 1759895 - RNA, 14 nt, Human
uacuucucuauaaa

SEQ ID NO: 1759896 - RNA, 18 nt, Human
uacuucucuauaaaaaau

SEQ ID NO: 1759897 - RNA, 22 nt, Human
uacuucucuauaaaaaauaugu

SEQ ID NO: 1759898 - RNA, 15 nt, Human
uacuucugcuacaua

SEQ ID NO: 1759899 - RNA, 17 nt, Human
uacuuaguagauuaaaa

SEQ ID NO: 1759900 - RNA, 19 nt, Human
uacuucccgggccagggcu

SEQ ID NO: 1759901 - RNA, 20 nt, Human
uacuucccgggccagggcug

SEQ ID NO: 1759902 - RNA, 21 nt, Human
uacuucccgggccagggcugc

SEQ ID NO: 1759903 - RNA, 22 nt, Human
uacuuccuuaugcuucuuucaa

SEQ ID NO: 1759904 - RNA, 13 nt, Human
uacuucuccaccc

SEQ ID NO: 1759905 - RNA, 18 nt, Human
uacuucuccacccugcuc

SEQ ID NO: 1759906 - RNA, 10 nt, Human
aauuugcaaa

SEQ ID NO: 1759907 - RNA, 11 nt, Human
aauuugcaaag

SEQ ID NO: 1759908 - RNA, 12 nt, Human
aauuugcaaagu

SEQ ID NO: 1759909 - RNA, 13 nt, Human
aauuugcaaagua

SEQ ID NO: 1759910 - RNA, 14 nt, Human
aauuugcaaaguac

SEQ ID NO: 1759911 - RNA, 15 nt, Human
aauuugcaaaguacu

SEQ ID NO: 1759912 - RNA, 16 nt, Human
aauuugcaaaguacug

SEQ ID NO: 1759913 - RNA, 17 nt, Human
aauuugcaaaguacugu

SEQ ID NO: 1759914 - RNA, 18 nt, Human
aauuugcaaaguacugua

SEQ ID NO: 1759915 - RNA, 19 nt, Human
aauuugcaaaguacuguaa

SEQ ID NO: 1759916 - RNA, 19 nt, Human
aauuuacuggacaaagaau

SEQ ID NO: 1759917 - RNA, 15 nt, Human
aauuuagaaaaagaa

SEQ ID NO: 1759918 - RNA, 16 nt, Human
aauuuagaaaaagaac

SEQ ID NO: 1759919 - RNA, 17 nt, Human
aauuuagaaaaagaaca

SEQ ID NO: 1759920 - RNA, 21 nt, Human
aauuuagaaaaagaacaugca

SEQ ID NO: 1759921 - RNA, 15 nt, Human
aauuuauacaauauc

SEQ ID NO: 1759922 - RNA, 15 nt, Human
aauuuauaguaauga

SEQ ID NO: 1759923 - RNA, 18 nt, Human
aauuuauaguaaugaguu

SEQ ID NO: 1759924 - RNA, 20 nt, Human
aauuuauaguaaugaguuua

SEQ ID NO: 1759925 - RNA, 17 nt, Human
aauuuauacaauaucau

SEQ ID NO: 1759926 - RNA, 12 nt, Human
aauuuauuaaau

SEQ ID NO: 1759927 - RNA, 14 nt, Human
uauaaggaagauuu

SEQ ID NO: 1759928 - RNA, 23 nt, Human
uauaaguaaagugauuaaagugc

SEQ ID NO: 1759929 - RNA, 16 nt, Human
uauaaggcagccuuga

SEQ ID NO: 1759930 - RNA, 15 nt, Human
acacucacuucucuu

SEQ ID NO: 1759931 - RNA, 19 nt, Human
acacuuugccauauuuuca

SEQ ID NO: 1759932 - RNA, 19 nt, Human
acacuuguccccaaauccg

SEQ ID NO: 1759933 - RNA, 14 nt, Human
acacuuaaauuaug

SEQ ID NO: 1759934 - RNA, 17 nt, Human
acagacuggaagcacag

SEQ ID NO: 1759935 - RNA, 19 nt, Human
acagacuggaagcacagcu

SEQ ID NO: 1759936 - RNA, 21 nt, Human
acagacuggaagcacagcuuc

SEQ ID NO: 1759937 - RNA, 22 nt, Human
acagacuggaagcacagcuuca

SEQ ID NO: 1759938 - RNA, 18 nt, Human
acagacacaggcccggcu

SEQ ID NO: 1759939 - RNA, 22 nt, Human
acagacacaggcccggcuccag

SEQ ID NO: 1759940 - RNA, 17 nt, Human
acagacacaggcccggc

SEQ ID NO: 1759941 - RNA, 12 nt, Human
uauauuuacaaa

SEQ ID NO: 1759942 - RNA, 14 nt, Human
uauauucauauauu

SEQ ID NO: 1759943 - RNA, 14 nt, Human
acagagcuucccug

SEQ ID NO: 1759944 - RNA, 15 nt, Human
acagagcuucccuga

SEQ ID NO: 1759945 - RNA, 16 nt, Human
acagagcuucccugac

SEQ ID NO: 1759946 - RNA, 19 nt, Human
acagccgauucaccugagc

SEQ ID NO: 1759947 - RNA, 12 nt, Human
acagaugcucca

SEQ ID NO: 1759948 - RNA, 14 nt, Human
acagaugcuccagg

SEQ ID NO: 1759949 - RNA, 19 nt, Human
acagauguucccccaucuc

SEQ ID NO: 1759950 - RNA, 13 nt, Human
acagauuaauauu

SEQ ID NO: 1759951 - RNA, 12 nt, Human
uagucgugagcu

SEQ ID NO: 1759952 - RNA, 21 nt, Human
uagucgugagcucuugugagg

SEQ ID NO: 1759953 - RNA, 13 nt, Human
uaguagagacagg

SEQ ID NO: 1759954 - RNA, 13 nt, Human
uagucuuaccuaa

SEQ ID NO: 1759955 - RNA, 11 nt, Human
acacagugagu

SEQ ID NO: 1759956 - RNA, 13 nt, Human
acacagugagucg

SEQ ID NO: 1759957 - RNA, 16 nt, Human
uaguaagcaucuacuu

SEQ ID NO: 1759958 - RNA, 11 nt, Human
acacacagcuc

SEQ ID NO: 1759959 - RNA, 12 nt, Human
acacacagcucu

SEQ ID NO: 1759960 - RNA, 21 nt, Human
acacacauauaaacaucacac

SEQ ID NO: 1759961 - RNA, 14 nt, Human
acacacacauacac

SEQ ID NO: 1759962 - RNA, 17 nt, Human
acaauggggauguugug

SEQ ID NO: 1759963 - RNA, 22 nt, Human
acaaugcaguucugagcaccgu

SEQ ID NO: 1759964 - RNA, 14 nt, Human
acaccugcccuaaa

SEQ ID NO: 1759965 - RNA, 16 nt, Human
acacuaaccacgcugg

SEQ ID NO: 1759966 - RNA, 17 nt, Human
acacuaaccacgcugga

SEQ ID NO: 1759967 - RNA, 19 nt, Human
acacuaaccacgcuggacc

SEQ ID NO: 1759968 - RNA, 14 nt, Human
acaccuugacaggg

SEQ ID NO: 1759969 - RNA, 15 nt, Human
acaccuugacagggc

SEQ ID NO: 1759970 - RNA, 16 nt, Human
acaccuugacagggca

SEQ ID NO: 1759971 - RNA, 17 nt, Human
acacccacucagcuccg

SEQ ID NO: 1759972 - RNA, 21 nt, Human
uauaaaaucagccaauuaugu

SEQ ID NO: 1759973 - RNA, 15 nt, Human
uauaaaauuaagcaa

SEQ ID NO: 1759974 - RNA, 15 nt, Human
acacccacucagcuc

SEQ ID NO: 1759975 - RNA, 12 nt, Human
acacccagccca

SEQ ID NO: 1759976 - RNA, 13 nt, Human
acacccagcccac

SEQ ID NO: 1759977 - RNA, 20 nt, Human
uauaaaaucagccaauuaug

SEQ ID NO: 1759978 - RNA, 19 nt, Human
uauaaaaucagccaauuau

SEQ ID NO: 1759979 - RNA, 17 nt, Human
uauaaaaucagccaauu

SEQ ID NO: 1759980 - RNA, 16 nt, Human
uauaaaaucagccaau

SEQ ID NO: 1759981 - RNA, 14 nt, Human
uauaaaaucagcca

SEQ ID NO: 1759982 - RNA, 20 nt, Human
uaguuuucuuuccuccuuuc

SEQ ID NO: 1759983 - RNA, 18 nt, Human
uaguucagguaacaggca

SEQ ID NO: 1759984 - RNA, 12 nt, Human
ucaccccagggc

SEQ ID NO: 1759985 - RNA, 13 nt, Human
ucaccccagggcc

SEQ ID NO: 1759986 - RNA, 15 nt, Human
ucaccccagggccug

SEQ ID NO: 1759987 - RNA, 16 nt, Human
ucaccccagggccuga

SEQ ID NO: 1759988 - RNA, 19 nt, Human
ucaccccagggccugagcc

SEQ ID NO: 1759989 - RNA, 20 nt, Human
ucaccccagggccugagccu

SEQ ID NO: 1759990 - RNA, 21 nt, Human
ucaccccagggccugagccug

SEQ ID NO: 1759991 - RNA, 20 nt, Human
ucacaaauccuaaaagaagc

SEQ ID NO: 1759992 - RNA, 16 nt, Human
ucacaccugcccuaaa

SEQ ID NO: 1759993 - RNA, 17 nt, Human
ucacaccugcccuaaac

SEQ ID NO: 1759994 - RNA, 12 nt, Human
ucacauaucugu

SEQ ID NO: 1759995 - RNA, 15 nt, Human
ucacauaucugucau

SEQ ID NO: 1759996 - RNA, 16 nt, Human
ucacaguucaaaauuc

SEQ ID NO: 1759997 - RNA, 19 nt, Human
ucacaguucaaaauucuaa

SEQ ID NO: 1759998 - RNA, 23 nt, Human
ucacaguucaaaauucuaaaugu

SEQ ID NO: 1759999 - RNA, 15 nt, Human
ucaauucuugccaaa

SEQ ID NO: 1760000 - RNA, 18 nt, Human
accagaacaguaugaauu

SEQ ID NO: 1760001 - RNA, 12 nt, Human
accagagcccac

SEQ ID NO: 1760002 - RNA, 14 nt, Human
accagagcccaccu

SEQ ID NO: 1760003 - RNA, 16 nt, Human
accagagcccaccuug

SEQ ID NO: 1760004 - RNA, 14 nt, Human
accagacaccuuga

SEQ ID NO: 1760005 - RNA, 12 nt, Human
ucaccugauuca

SEQ ID NO: 1760006 - RNA, 18 nt, Human
ucaccugauucaacuaaa

SEQ ID NO: 1760007 - RNA, 19 nt, Human
ucaccugauucaacuaaaa

SEQ ID NO: 1760008 - RNA, 21 nt, Human
ucaccugauucaacuaaaaaa

SEQ ID NO: 1760009 - RNA, 16 nt, Human
ucaccugaagacucau

SEQ ID NO: 1760010 - RNA, 17 nt, Human
accagagcccaccuugg

SEQ ID NO: 1760011 - RNA, 18 nt, Human
ucacuauguugcccaggc

SEQ ID NO: 1760012 - RNA, 19 nt, Human
ucacuauguugcccaggca

SEQ ID NO: 1760013 - RNA, 20 nt, Human
ucacuauguugcccaggcag

SEQ ID NO: 1760014 - RNA, 19 nt, Human
ucacucccaccugcaucug

SEQ ID NO: 1760015 - RNA, 23 nt, Human
ucacucccaccugcaucuggggc

SEQ ID NO: 1760016 - RNA, 14 nt, Human
ucaccucuuccgac

SEQ ID NO: 1760017 - RNA, 21 nt, Human
ucaccuucguuuacuaugccu

SEQ ID NO: 1760018 - RNA, 16 nt, Human
ucaccuucaguaaccc

SEQ ID NO: 1760019 - RNA, 20 nt, Human
ucaccugugcuucgggcccu

SEQ ID NO: 1760020 - RNA, 21 nt, Human
ucaccugugcuucgggcccuu

SEQ ID NO: 1760021 - RNA, 16 nt, Human
accccuucgcuccugu

SEQ ID NO: 1760022 - RNA, 14 nt, Human
accccuucgcuccu

SEQ ID NO: 1760023 - RNA, 15 nt, Human
accccuucgcuccug

SEQ ID NO: 1760024 - RNA, 20 nt, Human
ucagcuucuauccuugacuu

SEQ ID NO: 1760025 - RNA, 20 nt, Human
ucagcuuguaaauagcucag

SEQ ID NO: 1760026 - RNA, 19 nt, Human
ucagcuauuuacugccaaa

SEQ ID NO: 1760027 - RNA, 20 nt, Human
ucagcuauuuacugccaaag

SEQ ID NO: 1760028 - RNA, 14 nt, Human
ucagcggggacagc

SEQ ID NO: 1760029 - RNA, 15 nt, Human
ucaggaaaggaauca

SEQ ID NO: 1760030 - RNA, 19 nt, Human
acccagcgagcccuggugg

SEQ ID NO: 1760031 - RNA, 23 nt, Human
acccagcgagcccugguggcagu

SEQ ID NO: 1760032 - RNA, 17 nt, Human
ucagcauuugaucuguu

SEQ ID NO: 1760033 - RNA, 18 nt, Human
ucagagcuaaacuccuuc

SEQ ID NO: 1760034 - RNA, 22 nt, Human
ucagagcuaaacuccuuccugg

SEQ ID NO: 1760035 - RNA, 17 nt, Human
ucagagccuuuccucaa

SEQ ID NO: 1760036 - RNA, 20 nt, Human
ucagagccuuuccucaaaac

SEQ ID NO: 1760037 - RNA, 24 nt, Human
acccagcgagcccugguggcagug

SEQ ID NO: 1760038 - RNA, 13 nt, Human
acccagggaacag

SEQ ID NO: 1760039 - RNA, 22 nt, Human
acccagggaacagccacucccc

SEQ ID NO: 1760040 - RNA, 12 nt, Human
acccagggccug

SEQ ID NO: 1760041 - RNA, 13 nt, Human
acccagggccugc

SEQ ID NO: 1760042 - RNA, 14 nt, Human
acccagggccugca

SEQ ID NO: 1760043 - RNA, 10 nt, Human
accccagggc

SEQ ID NO: 1760044 - RNA, 12 nt, Human
ucagagccugca

SEQ ID NO: 1760045 - RNA, 13 nt, Human
ucagagccugcag

SEQ ID NO: 1760046 - RNA, 14 nt, Human
ucagagccugcagu

SEQ ID NO: 1760047 - RNA, 15 nt, Human
ucagagccugcaguu

SEQ ID NO: 1760048 - RNA, 18 nt, Human
ucagagccugcaguuauu

SEQ ID NO: 1760049 - RNA, 14 nt, Human
ucagaagacacuga

SEQ ID NO: 1760050 - RNA, 16 nt, Human
ucagaagccucugggu

SEQ ID NO: 1760051 - RNA, 22 nt, Human
acccagaggaaggggccagagg

SEQ ID NO: 1760052 - RNA, 15 nt, Human
acccagcccucaucc

SEQ ID NO: 1760053 - RNA, 16 nt, Human
acccagcccucauccc

SEQ ID NO: 1760054 - RNA, 21 nt, Human
ucagaagggagcuagccagag

SEQ ID NO: 1760055 - RNA, 23 nt, Human
ucagaagggagcuagccagagga

SEQ ID NO: 1760056 - RNA, 21 nt, Human
ucacucuuauugcccacgcug

SEQ ID NO: 1760057 - RNA, 23 nt, Human
ucacucuuauugcccacgcugga

SEQ ID NO: 1760058 - RNA, 17 nt, Human
accauguagaaaauuug

SEQ ID NO: 1760059 - RNA, 18 nt, Human
accauugaauucuugguu

SEQ ID NO: 1760060 - RNA, 17 nt, Human
acccagacggcuccacu

SEQ ID NO: 1760061 - RNA, 21 nt, Human
acccagacggcuccacuagga

SEQ ID NO: 1760062 - RNA, 22 nt, Human
acccagacggcuccacuaggac

SEQ ID NO: 1760063 - RNA, 13 nt, Human
acccacugcucug

SEQ ID NO: 1760064 - RNA, 14 nt, Human
acccacugcucugg

SEQ ID NO: 1760065 - RNA, 15 nt, Human
acccacugcucuggu

SEQ ID NO: 1760066 - RNA, 11 nt, Human
acccacugcuu

SEQ ID NO: 1760067 - RNA, 10 nt, Human
acccacugcu

SEQ ID NO: 1760068 - RNA, 11 nt, Human
acccacugcuc

SEQ ID NO: 1760069 - RNA, 13 nt, Human
acccacucagcuc

SEQ ID NO: 1760070 - RNA, 15 nt, Human
acccacucgguccca

SEQ ID NO: 1760071 - RNA, 23 nt, Human
accauuucuugagguaaaagcau

SEQ ID NO: 1760072 - RNA, 24 nt, Human
ucaaaacuggagucccaaauguca

SEQ ID NO: 1760073 - RNA, 15 nt, Human
uauuuuucucuccug

SEQ ID NO: 1760074 - RNA, 16 nt, Human
ucaaaagauaauauuu

SEQ ID NO: 1760075 - RNA, 12 nt, Human
ucaaaaucuuuc

SEQ ID NO: 1760076 - RNA, 14 nt, Human
ucaaagcugaaaug

SEQ ID NO: 1760077 - RNA, 17 nt, Human
ucaaaauucuaaaugua

SEQ ID NO: 1760078 - RNA, 13 nt, Human
ucaaaauuugcug

SEQ ID NO: 1760079 - RNA, 23 nt, Human
ucaaaauuugcugccaaaugcgu

SEQ ID NO: 1760080 - RNA, 12 nt, Human
ucaaagccagcg

SEQ ID NO: 1760081 - RNA, 22 nt, Human
ucaaagccagcguccuccucug

SEQ ID NO: 1760082 - RNA, 23 nt, Human
ucaaagccagcguccuccucugu

SEQ ID NO: 1760083 - RNA, 23 nt, Human
ucaaauaaagagagaacaggacu

SEQ ID NO: 1760084 - RNA, 15 nt, Human
acaugaagauucuuu

SEQ ID NO: 1760085 - RNA, 17 nt, Human
acaugaagauucuuucc

SEQ ID NO: 1760086 - RNA, 18 nt, Human
acaugaagauucuuuccc

SEQ ID NO: 1760087 - RNA, 22 nt, Human
acaugaagauucuuucccaauu

SEQ ID NO: 1760088 - RNA, 13 nt, Human
acauucaggagcu

SEQ ID NO: 1760089 - RNA, 12 nt, Human
acaugucuuaau

SEQ ID NO: 1760090 - RNA, 18 nt, Human
ucaacaccuuaauaugcu

SEQ ID NO: 1760091 - RNA, 22 nt, Human
ucaacaccuuaauaugcugcaa

SEQ ID NO: 1760092 - RNA, 14 nt, Human
ucaagaagggcugc

SEQ ID NO: 1760093 - RNA, 15 nt, Human
ucaagaagggcugca

SEQ ID NO: 1760094 - RNA, 18 nt, Human
ucaagaagggcugcauga

SEQ ID NO: 1760095 - RNA, 20 nt, Human
ucaagaagggcugcaugaug

SEQ ID NO: 1760096 - RNA, 19 nt, Human
ucaagaugggggcagggcu

SEQ ID NO: 1760097 - RNA, 20 nt, Human
ucaagaugggggcagggcug

SEQ ID NO: 1760098 - RNA, 21 nt, Human
ucaagaugggggcagggcugu

SEQ ID NO: 1760099 - RNA, 21 nt, Human
acaucuugcucugcugacaga

SEQ ID NO: 1760100 - RNA, 18 nt, Human
acaucuugcucugcugac

SEQ ID NO: 1760101 - RNA, 19 nt, Human
acaucuugcucugcugaca

SEQ ID NO: 1760102 - RNA, 13 nt, Human
acaucuugcucug

SEQ ID NO: 1760103 - RNA, 14 nt, Human
acaucuugcucugc

SEQ ID NO: 1760104 - RNA, 16 nt, Human
acaucuucagcaaaua

SEQ ID NO: 1760105 - RNA, 24 nt, Human
acaucuuccauuuccauguccccu

SEQ ID NO: 1760106 - RNA, 20 nt, Human
acaucuugaauacucugccc

SEQ ID NO: 1760107 - RNA, 15 nt, Human
acaucugugucuugu

SEQ ID NO: 1760108 - RNA, 16 nt, Human
acaucugugucuuguu

SEQ ID NO: 1760109 - RNA, 19 nt, Human
acaucacucucaccuucca

SEQ ID NO: 1760110 - RNA, 16 nt, Human
acaucacaccugcccu

SEQ ID NO: 1760111 - RNA, 13 nt, Human
acaucacacacac

SEQ ID NO: 1760112 - RNA, 20 nt, Human
acauauuagugcagccaagu

SEQ ID NO: 1760113 - RNA, 21 nt, Human
acauauuagugcagccaagua

SEQ ID NO: 1760114 - RNA, 19 nt, Human
acauauggucuccauuuua

SEQ ID NO: 1760115 - RNA, 23 nt, Human
acauauggucuccauuuuacagu

SEQ ID NO: 1760116 - RNA, 15 nt, Human
acauaguuuuucagu

SEQ ID NO: 1760117 - RNA, 20 nt, Human
acauauaaacaucacacaca

SEQ ID NO: 1760118 - RNA, 15 nt, Human
acauacgcuuuuaau

SEQ ID NO: 1760119 - RNA, 16 nt, Human
acaguugcucuaugcu

SEQ ID NO: 1760120 - RNA, 19 nt, Human
acaguugcucuaugcuuuc

SEQ ID NO: 1760121 - RNA, 15 nt, Human
uauuucgaaagcugc

SEQ ID NO: 1760122 - RNA, 21 nt, Human
accugaaaacacugugcacau

SEQ ID NO: 1760123 - RNA, 11 nt, Human
accugaaaaca

SEQ ID NO: 1760124 - RNA, 18 nt, Human
accugaaaacacugugca

SEQ ID NO: 1760125 - RNA, 19 nt, Human
accugaaaacacugugcac

SEQ ID NO: 1760126 - RNA, 20 nt, Human
accugaaaacacugugcaca

SEQ ID NO: 1760127 - RNA, 16 nt, Human
accugcaucuggggcc

SEQ ID NO: 1760128 - RNA, 17 nt, Human
accugcaucuggggccc

SEQ ID NO: 1760129 - RNA, 13 nt, Human
accuccugggcua

SEQ ID NO: 1760130 - RNA, 12 nt, Human
ucauucuucugu

SEQ ID NO: 1760131 - RNA, 14 nt, Human
ucauucuuugcagg

SEQ ID NO: 1760132 - RNA, 18 nt, Human
ucauucucugucucaucc

SEQ ID NO: 1760133 - RNA, 19 nt, Human
ucauucucugucucaucca

SEQ ID NO: 1760134 - RNA, 18 nt, Human
ucauucugaaggagcccc

SEQ ID NO: 1760135 - RNA, 21 nt, Human
ucauuaaugacacuugucccc

SEQ ID NO: 1760136 - RNA, 14 nt, Human
ucauucucugucuc

SEQ ID NO: 1760137 - RNA, 15 nt, Human
ucauucucugucuca

SEQ ID NO: 1760138 - RNA, 16 nt, Human
ucauucucugucucau

SEQ ID NO: 1760139 - RNA, 14 nt, Human
ucauuaaugacacu

SEQ ID NO: 1760140 - RNA, 13 nt, Human
ucauuaaugacac

SEQ ID NO: 1760141 - RNA, 15 nt, Human
ucauuaaugacacuu

SEQ ID NO: 1760142 - RNA, 19 nt, Human
ucauuaaugacacuugucc

SEQ ID NO: 1760143 - RNA, 22 nt, Human
ucauuaaugacacuugucccca

SEQ ID NO: 1760144 - RNA, 18 nt, Human
ucauccuauucuuucgaa

SEQ ID NO: 1760145 - RNA, 21 nt, Human
ucaucccgagcaccuccacau

SEQ ID NO: 1760146 - RNA, 23 nt, Human
ucaucccgagcaccuccacaucc

SEQ ID NO: 1760147 - RNA, 23 nt, Human
accuccugccucgaacuggcugc

SEQ ID NO: 1760148 - RNA, 13 nt, Human
accuccugccucg

SEQ ID NO: 1760149 - RNA, 12 nt, Human
accuccugccuc

SEQ ID NO: 1760150 - RNA, 22 nt, Human
ucaggaaaggaaucauuucuau

SEQ ID NO: 1760151 - RNA, 15 nt, Human
accuacccauacacc

SEQ ID NO: 1760152 - RNA, 19 nt, Human
accuacauguuauucuagu

SEQ ID NO: 1760153 - RNA, 22 nt, Human
accugccacccugggccuggca

SEQ ID NO: 1760154 - RNA, 15 nt, Human
accugcauuguaaau

SEQ ID NO: 1760155 - RNA, 16 nt, Human
uccaagcuggucccac

SEQ ID NO: 1760156 - RNA, 20 nt, Human
uccaagcuggucccacucag

SEQ ID NO: 1760157 - RNA, 16 nt, Human
uccaauccuauguuuu

SEQ ID NO: 1760158 - RNA, 21 nt, Human
uccaagcuggucccacucagu

SEQ ID NO: 1760159 - RNA, 12 nt, Human
uccaagcuucca

SEQ ID NO: 1760160 - RNA, 22 nt, Human
uccaagcuuccauagcugcugc

SEQ ID NO: 1760161 - RNA, 18 nt, Human
uccacccaccucagccuc

SEQ ID NO: 1760162 - RNA, 19 nt, Human
uccacccaccucagccucc

SEQ ID NO: 1760163 - RNA, 12 nt, Human
uccacccaggag

SEQ ID NO: 1760164 - RNA, 14 nt, Human
uccacccaggagcc

SEQ ID NO: 1760165 - RNA, 15 nt, Human
uccacccaggagccc

SEQ ID NO: 1760166 - RNA, 19 nt, Human
uccagacccggcugcgugg

SEQ ID NO: 1760167 - RNA, 15 nt, Human
uccagacccggcugc

SEQ ID NO: 1760168 - RNA, 18 nt, Human
uccagacccggcugcgug

SEQ ID NO: 1760169 - RNA, 17 nt, Human
uccacgacugucuccau

SEQ ID NO: 1760170 - RNA, 18 nt, Human
uccacgacugucuccaug

SEQ ID NO: 1760171 - RNA, 19 nt, Human
uccacgacugucuccaugg

SEQ ID NO: 1760172 - RNA, 13 nt, Human
accuuuuggggga

SEQ ID NO: 1760173 - RNA, 17 nt, Human
accuuuugggggagggc

SEQ ID NO: 1760174 - RNA, 14 nt, Human
uccacgacugucuc

SEQ ID NO: 1760175 - RNA, 15 nt, Human
uccacgacugucucc

SEQ ID NO: 1760176 - RNA, 16 nt, Human
uccacgacugucucca

SEQ ID NO: 1760177 - RNA, 22 nt, Human
accuuagauguucuaagucuuu

SEQ ID NO: 1760178 - RNA, 19 nt, Human
accuucaaacuagggccaa

SEQ ID NO: 1760179 - RNA, 14 nt, Human
uccaggcuguaucc

SEQ ID NO: 1760180 - RNA, 14 nt, Human
uccaggcacugaga

SEQ ID NO: 1760181 - RNA, 16 nt, Human
uccaggcacugagaua

SEQ ID NO: 1760182 - RNA, 21 nt, Human
uccaggcuguaucccaugagc

SEQ ID NO: 1760183 - RNA, 14 nt, Human
acgagaaaacaaua

SEQ ID NO: 1760184 - RNA, 19 nt, Human
acgagcuguuuacuaggga

SEQ ID NO: 1760185 - RNA, 19 nt, Human
acgagcaccuccagccuga

SEQ ID NO: 1760186 - RNA, 15 nt, Human
acuacaggcacccac

SEQ ID NO: 1760187 - RNA, 11 nt, Human
acuacaggcac

SEQ ID NO: 1760188 - RNA, 12 nt, Human
acuaaccacgcu

SEQ ID NO: 1760189 - RNA, 17 nt, Human
acuaacaggauauuuaa

SEQ ID NO: 1760190 - RNA, 22 nt, Human
ucccagcacuaugcuuuccuuc

SEQ ID NO: 1760191 - RNA, 17 nt, Human
ucccagcugugcucugg

SEQ ID NO: 1760192 - RNA, 24 nt, Human
uccccauuagcuuucaauuccgua

SEQ ID NO: 1760193 - RNA, 14 nt, Human
ucccaucaaaacuc

SEQ ID NO: 1760194 - RNA, 23 nt, Human
acgugggcugggcccacaaaggc

SEQ ID NO: 1760195 - RNA, 13 nt, Human
ucccaaagugcug

SEQ ID NO: 1760196 - RNA, 14 nt, Human
ucccaaagugcugg

SEQ ID NO: 1760197 - RNA, 12 nt, Human
uccauuugcaag

SEQ ID NO: 1760198 - RNA, 14 nt, Human
acuccucugacuca

SEQ ID NO: 1760199 - RNA, 20 nt, Human
acuccucugacucagggcuc

SEQ ID NO: 1760200 - RNA, 15 nt, Human
acucauucuucugua

SEQ ID NO: 1760201 - RNA, 15 nt, Human
acucauuccagaucc

SEQ ID NO: 1760202 - RNA, 19 nt, Human
acucauuccagaucccagg

SEQ ID NO: 1760203 - RNA, 15 nt, Human
acucauucugaagga

SEQ ID NO: 1760204 - RNA, 19 nt, Human
acucauucugaaggagccc

SEQ ID NO: 1760205 - RNA, 13 nt, Human
acucagaaagcca

SEQ ID NO: 1760206 - RNA, 14 nt, Human
acucagaaagccaa

SEQ ID NO: 1760207 - RNA, 15 nt, Human
acucagaaagccaac

SEQ ID NO: 1760208 - RNA, 15 nt, Human
ucccuuaaacaaaaa

SEQ ID NO: 1760209 - RNA, 22 nt, Human
ucccuuaaacaaaaauuaaaau

SEQ ID NO: 1760210 - RNA, 13 nt, Human
ucccugucaccuc

SEQ ID NO: 1760211 - RNA, 14 nt, Human
ucccugucaccucu

SEQ ID NO: 1760212 - RNA, 15 nt, Human
ucccugucaccucuu

SEQ ID NO: 1760213 - RNA, 17 nt, Human
ucccugucaccucuucc

SEQ ID NO: 1760214 - RNA, 18 nt, Human
ucccugucaccucuuccg

SEQ ID NO: 1760215 - RNA, 20 nt, Human
uccgggggggcccaucucuu

SEQ ID NO: 1760216 - RNA, 16 nt, Human
uccggcucccagccuc

SEQ ID NO: 1760217 - RNA, 17 nt, Human
uccggcucccagccuca

SEQ ID NO: 1760218 - RNA, 18 nt, Human
uccggcucccagccucag

SEQ ID NO: 1760219 - RNA, 21 nt, Human
uccggcucccagccucagcgc

SEQ ID NO: 1760220 - RNA, 21 nt, Human
uccgggaccuggugcugccuc

SEQ ID NO: 1760221 - RNA, 13 nt, Human
uccggcugugcug

SEQ ID NO: 1760222 - RNA, 15 nt, Human
uccggcugugcuggg

SEQ ID NO: 1760223 - RNA, 16 nt, Human
uccggcugugcuggga

SEQ ID NO: 1760224 - RNA, 19 nt, Human
uccggcugugcugggagaa

SEQ ID NO: 1760225 - RNA, 13 nt, Human
ucccuccaucccc

SEQ ID NO: 1760226 - RNA, 15 nt, Human
ucccggcucuguggg

SEQ ID NO: 1760227 - RNA, 14 nt, Human
ucccugacugggag

SEQ ID NO: 1760228 - RNA, 14 nt, Human
ucccugaggauggg

SEQ ID NO: 1760229 - RNA, 15 nt, Human
ucccugaggaugggu

SEQ ID NO: 1760230 - RNA, 22 nt, Human
ucccugaggaugggucagagcu

SEQ ID NO: 1760231 - RNA, 23 nt, Human
ucccugaggaugggucagagcua

SEQ ID NO: 1760232 - RNA, 15 nt, Human
ucccugacugggagu

SEQ ID NO: 1760233 - RNA, 16 nt, Human
ucccugacuuuucugu

SEQ ID NO: 1760234 - RNA, 20 nt, Human
ucccgaauagcugggacuac

SEQ ID NO: 1760235 - RNA, 12 nt, Human
uccccuuuccug

SEQ ID NO: 1760236 - RNA, 13 nt, Human
uccccuuuccugu

SEQ ID NO: 1760237 - RNA, 14 nt, Human
uccccuuuccuguc

SEQ ID NO: 1760238 - RNA, 17 nt, Human
uccccuuuccuguccca

SEQ ID NO: 1760239 - RNA, 15 nt, Human
ucccgaguagcuggg

SEQ ID NO: 1760240 - RNA, 22 nt, Human
ucccgagcaccuccacauccuc

SEQ ID NO: 1760241 - RNA, 20 nt, Human
ucccgaguagcugggacuac

SEQ ID NO: 1760242 - RNA, 18 nt, Human
ucccgaguagcugggacu

SEQ ID NO: 1760243 - RNA, 16 nt, Human
ucccgaguagcuggga

SEQ ID NO: 1760244 - RNA, 17 nt, Human
ucccgaguagcugggac

SEQ ID NO: 1760245 - RNA, 15 nt, Human
uccccucuccuuccu

SEQ ID NO: 1760246 - RNA, 16 nt, Human
uccccucuccuuccug

SEQ ID NO: 1760247 - RNA, 13 nt, Human
uccccucccagag

SEQ ID NO: 1760248 - RNA, 20 nt, Human
uccccuaagcagaccacuga

SEQ ID NO: 1760249 - RNA, 20 nt, Human
ucuaaagccauuguaguccu

SEQ ID NO: 1760250 - RNA, 12 nt, Human
acuguugcccag

SEQ ID NO: 1760251 - RNA, 13 nt, Human
acuguugcccagg

SEQ ID NO: 1760252 - RNA, 14 nt, Human
acuguugcccaggc

SEQ ID NO: 1760253 - RNA, 17 nt, Human
acuguugcccaggcugg

SEQ ID NO: 1760254 - RNA, 18 nt, Human
acuguugcccaggcuggc

SEQ ID NO: 1760255 - RNA, 22 nt, Human
acuguugggguggguauaaaag

SEQ ID NO: 1760256 - RNA, 21 nt, Human
acuguugggguggguauaaaa

SEQ ID NO: 1760257 - RNA, 20 nt, Human
acuguugggguggguauaaa

SEQ ID NO: 1760258 - RNA, 18 nt, Human
acuguugggguggguaua

SEQ ID NO: 1760259 - RNA, 23 nt, Human
acuuacccaggugggucccggcu

SEQ ID NO: 1760260 - RNA, 16 nt, Human
acuuauauuaauagua

SEQ ID NO: 1760261 - RNA, 22 nt, Human
acuuauauuaauaguaauuugu

SEQ ID NO: 1760262 - RNA, 18 nt, Human
acuuauaaaguagaaaug

SEQ ID NO: 1760263 - RNA, 17 nt, Human
acuuauaauuuuccuaa

SEQ ID NO: 1760264 - RNA, 23 nt, Human
acugggaccaacccuggggaagg

SEQ ID NO: 1760265 - RNA, 18 nt, Human
acuguccuacccacccuc

SEQ ID NO: 1760266 - RNA, 23 nt, Human
acuguccuacccacccuccuuuc

SEQ ID NO: 1760267 - RNA, 17 nt, Human
acuguccuacccacccu

SEQ ID NO: 1760268 - RNA, 21 nt, Human
ucgguacccggggcccagggc

SEQ ID NO: 1760269 - RNA, 22 nt, Human
ucgguacccggggcccagggca

SEQ ID NO: 1760270 - RNA, 11 nt, Human
ucuaaaacaau

SEQ ID NO: 1760271 - RNA, 15 nt, Human
ucuaaaacaauaaaa

SEQ ID NO: 1760272 - RNA, 14 nt, Human
ucggcucagcucgg

SEQ ID NO: 1760273 - RNA, 17 nt, Human
ucggcuuuucucagcug

SEQ ID NO: 1760274 - RNA, 13 nt, Human
ucgggcccuuccc

SEQ ID NO: 1760275 - RNA, 14 nt, Human
ucgggcuccagcca

SEQ ID NO: 1760276 - RNA, 22 nt, Human
acugcugugaacccuggggccu

SEQ ID NO: 1760277 - RNA, 23 nt, Human
acugcugugaacccuggggccug

SEQ ID NO: 1760278 - RNA, 14 nt, Human
acugcuuuuggucu

SEQ ID NO: 1760279 - RNA, 18 nt, Human
uccuagaggcccuuugcu

SEQ ID NO: 1760280 - RNA, 19 nt, Human
uccuagaggcccuuugcug

SEQ ID NO: 1760281 - RNA, 20 nt, Human
uccuagaggcccuuugcugu

SEQ ID NO: 1760282 - RNA, 21 nt, Human
uccuagaggcccuuugcuguc

SEQ ID NO: 1760283 - RNA, 18 nt, Human
uccuacuuauaaaguaga

SEQ ID NO: 1760284 - RNA, 11 nt, Human
acugccuuaau

SEQ ID NO: 1760285 - RNA, 23 nt, Human
acugccuuaauaaaaaaugaaaa

SEQ ID NO: 1760286 - RNA, 15 nt, Human
uccuuccagcccaga

SEQ ID NO: 1760287 - RNA, 15 nt, Human
uccuuuagcgcccag

SEQ ID NO: 1760288 - RNA, 19 nt, Human
uccuuuagcgcccaguugg

SEQ ID NO: 1760289 - RNA, 20 nt, Human
uccuuguagcgacuaaacua

SEQ ID NO: 1760290 - RNA, 14 nt, Human
uccuucucccaucu

SEQ ID NO: 1760291 - RNA, 18 nt, Human
uccuucucccaucucuuc

SEQ ID NO: 1760292 - RNA, 18 nt, Human
ucgcucaaucaagaaaau

SEQ ID NO: 1760293 - RNA, 13 nt, Human
ucgaggacaggga

SEQ ID NO: 1760294 - RNA, 22 nt, Human
uccuuuagcgcccaguugggug

SEQ ID NO: 1760295 - RNA, 23 nt, Human
uccuuuagcgcccaguugggugg

SEQ ID NO: 1760296 - RNA, 17 nt, Human
ucgacuucgggcuggcc

SEQ ID NO: 1760297 - RNA, 14 nt, Human
ucgagacagaaccu

SEQ ID NO: 1760298 - RNA, 12 nt, Human
agaaaaagaaca

SEQ ID NO: 1760299 - RNA, 18 nt, Human
agaaaaagaacaugcagu

SEQ ID NO: 1760300 - RNA, 22 nt, Human
agaaaaagaacaugcaguuuga

SEQ ID NO: 1760301 - RNA, 14 nt, Human
agaaacuuccaaau

SEQ ID NO: 1760302 - RNA, 13 nt, Human
agaaacaggaccg

SEQ ID NO: 1760303 - RNA, 20 nt, Human
ucucuuuaaugucacaggca

SEQ ID NO: 1760304 - RNA, 21 nt, Human
ucucuuuaaugucacaggcag

SEQ ID NO: 1760305 - RNA, 12 nt, Human
ucucugcccugu

SEQ ID NO: 1760306 - RNA, 23 nt, Human
ucucugcucugcgugucaccugu

SEQ ID NO: 1760307 - RNA, 18 nt, Human
ucugauucccaagcucug

SEQ ID NO: 1760308 - RNA, 19 nt, Human
agaaacuuccaaauccccu

SEQ ID NO: 1760309 - RNA, 12 nt, Human
ucugacacacag

SEQ ID NO: 1760310 - RNA, 21 nt, Human
ucugaauuuuggggauuuuca

SEQ ID NO: 1760311 - RNA, 22 nt, Human
ucugaauuuuggggauuuucaa

SEQ ID NO: 1760312 - RNA, 13 nt, Human
ucugaauuugcaa

SEQ ID NO: 1760313 - RNA, 14 nt, Human
ucugaauuugcaaa

SEQ ID NO: 1760314 - RNA, 15 nt, Human
ucugaauuugcaaag

SEQ ID NO: 1760315 - RNA, 16 nt, Human
ucugaauuugcaaagu

SEQ ID NO: 1760316 - RNA, 17 nt, Human
ucugaauuugcaaagua

SEQ ID NO: 1760317 - RNA, 19 nt, Human
ucugaauuugcaaaguacu

SEQ ID NO: 1760318 - RNA, 20 nt, Human
ucugaauuugcaaaguacug

SEQ ID NO: 1760319 - RNA, 21 nt, Human
ucugaauuugcaaaguacugu

SEQ ID NO: 1760320 - RNA, 22 nt, Human
ucugaauuugcaaaguacugua

SEQ ID NO: 1760321 - RNA, 13 nt, Human
acuuggauucucu

SEQ ID NO: 1760322 - RNA, 15 nt, Human
acuuggauucucuaa

SEQ ID NO: 1760323 - RNA, 13 nt, Human
acuugccucuuuu

SEQ ID NO: 1760324 - RNA, 20 nt, Human
acuugccucuuuuaccugcu

SEQ ID NO: 1760325 - RNA, 21 nt, Human
acuugccucuuuuaccugcug

SEQ ID NO: 1760326 - RNA, 22 nt, Human
acuugccucuuuuaccugcugc

SEQ ID NO: 1760327 - RNA, 23 nt, Human
acuugccucuuuuaccugcugcu

SEQ ID NO: 1760328 - RNA, 16 nt, Human
acuuguggacacagcu

SEQ ID NO: 1760329 - RNA, 17 nt, Human
acuuguccccaaauccg

SEQ ID NO: 1760330 - RNA, 22 nt, Human
acuuguccccaaauccgaaccu

SEQ ID NO: 1760331 - RNA, 17 nt, Human
acuuguggacacagcuc

SEQ ID NO: 1760332 - RNA, 18 nt, Human
acuuguggacacagcucu

SEQ ID NO: 1760333 - RNA, 20 nt, Human
acuugucauauguagccuuc

SEQ ID NO: 1760334 - RNA, 15 nt, Human
acuucuccacccugc

SEQ ID NO: 1760335 - RNA, 16 nt, Human
acuucuccacccugcu

SEQ ID NO: 1760336 - RNA, 18 nt, Human
acuucuccacccugcucu

SEQ ID NO: 1760337 - RNA, 18 nt, Human
acuuccuuaugcuucuuu

SEQ ID NO: 1760338 - RNA, 14 nt, Human
acuucgggcuggcc

SEQ ID NO: 1760339 - RNA, 16 nt, Human
ucucacuauguugccc

SEQ ID NO: 1760340 - RNA, 16 nt, Human
ucucacuauaccagua

SEQ ID NO: 1760341 - RNA, 23 nt, Human
ucucacucugcccccccccccca

SEQ ID NO: 1760342 - RNA, 16 nt, Human
ucucacucugucgccc

SEQ ID NO: 1760343 - RNA, 12 nt, Human
ucucacucuguc

SEQ ID NO: 1760344 - RNA, 14 nt, Human
acuucuccacccug

SEQ ID NO: 1760345 - RNA, 15 nt, Human
ucucaccuuccaaau

SEQ ID NO: 1760346 - RNA, 16 nt, Human
ucucaccuuccaaauc

SEQ ID NO: 1760347 - RNA, 17 nt, Human
acuucaggccaacaagg

SEQ ID NO: 1760348 - RNA, 14 nt, Human
ucuauuucuccucc

SEQ ID NO: 1760349 - RNA, 15 nt, Human
ucuauuucuccucca

SEQ ID NO: 1760350 - RNA, 16 nt, Human
ucuauuucuccuccau

SEQ ID NO: 1760351 - RNA, 20 nt, Human
ucuauuucuccuccauggga

SEQ ID NO: 1760352 - RNA, 15 nt, Human
ucuccauggcccugc

SEQ ID NO: 1760353 - RNA, 18 nt, Human
ucuccauggcccugcaaa

SEQ ID NO: 1760354 - RNA, 14 nt, Human
ucuccauggcccug

SEQ ID NO: 1760355 - RNA, 16 nt, Human
ucucccagauaaugug

SEQ ID NO: 1760356 - RNA, 18 nt, Human
ucucccagauaaugugaa

SEQ ID NO: 1760357 - RNA, 21 nt, Human
ucucccagauaaugugaaaau

SEQ ID NO: 1760358 - RNA, 23 nt, Human
ucucccagauaaugugaaaaugg

SEQ ID NO: 1760359 - RNA, 18 nt, Human
ucucccaucucuuccuug

SEQ ID NO: 1760360 - RNA, 19 nt, Human
ucucccaucucuuccuuga

SEQ ID NO: 1760361 - RNA, 20 nt, Human
ucuccuccaugggagaaaau

SEQ ID NO: 1760362 - RNA, 16 nt, Human
ucuccaggcuguaucc

SEQ ID NO: 1760363 - RNA, 21 nt, Human
ucuccagggucagaaacagga

SEQ ID NO: 1760364 - RNA, 18 nt, Human
ucuccagggucagaaaca

SEQ ID NO: 1760365 - RNA, 13 nt, Human
ucuccauccacau

SEQ ID NO: 1760366 - RNA, 19 nt, Human
ucuccauccacaugggagc

SEQ ID NO: 1760367 - RNA, 19 nt, Human
ucucauuggacccuuccau

SEQ ID NO: 1760368 - RNA, 23 nt, Human
agaaauuuauuuccuaguucugu

SEQ ID NO: 1760369 - RNA, 15 nt, Human
agaaauuuauuuccu

SEQ ID NO: 1760370 - RNA, 13 nt, Human
agaaauuuauuuc

SEQ ID NO: 1760371 - RNA, 14 nt, Human
agaaccccucugcu

SEQ ID NO: 1760372 - RNA, 16 nt, Human
agaaccccucugcuuu

SEQ ID NO: 1760373 - RNA, 16 nt, Human
agaacccugccaugga

SEQ ID NO: 1760374 - RNA, 23 nt, Human
agaacccugccauggaacuguuu

SEQ ID NO: 1760375 - RNA, 20 nt, Human
agaacccuuggcuugcccac

SEQ ID NO: 1760376 - RNA, 17 nt, Human
agaauguuacugccuua

SEQ ID NO: 1760377 - RNA, 13 nt, Human
agaauguuccaga

SEQ ID NO: 1760378 - RNA, 14 nt, Human
agaauguuccagac

SEQ ID NO: 1760379 - RNA, 19 nt, Human
agaauguuccagacauucu

SEQ ID NO: 1760380 - RNA, 16 nt, Human
agaauuagcugcuucu

SEQ ID NO: 1760381 - RNA, 15 nt, Human
ucugggucagugguc

SEQ ID NO: 1760382 - RNA, 15 nt, Human
ucuggguccuuccug

SEQ ID NO: 1760383 - RNA, 16 nt, Human
ucuggguccuuccuga

SEQ ID NO: 1760384 - RNA, 14 nt, Human
agaauuagcugcuu

SEQ ID NO: 1760385 - RNA, 14 nt, Human
ucuguggggacucc

SEQ ID NO: 1760386 - RNA, 12 nt, Human
ucuguggggccc

SEQ ID NO: 1760387 - RNA, 19 nt, Human
ucugugaccaaugucuuga

SEQ ID NO: 1760388 - RNA, 23 nt, Human
ucugugggaugggaugguggagg

SEQ ID NO: 1760389 - RNA, 18 nt, Human
ucuguacgucugacaggc

SEQ ID NO: 1760390 - RNA, 13 nt, Human
ucugguagccugc

SEQ ID NO: 1760391 - RNA, 12 nt, Human
ucuguagaaaug

SEQ ID NO: 1760392 - RNA, 21 nt, Human
ucuguagaaaugguuguauua

SEQ ID NO: 1760393 - RNA, 17 nt, Human
ucuguagaaaugguugu

SEQ ID NO: 1760394 - RNA, 22 nt, Human
ucuguagaaaugguuguauuag

SEQ ID NO: 1760395 - RNA, 20 nt, Human
ucuguaucaggacccagagg

SEQ ID NO: 1760396 - RNA, 16 nt, Human
ucugugaccaaugucu

SEQ ID NO: 1760397 - RNA, 18 nt, Human
ucugugaccaaugucuug

SEQ ID NO: 1760398 - RNA, 17 nt, Human
agacagaaccuuguuau

SEQ ID NO: 1760399 - RNA, 18 nt, Human
agacagaaccuuguuauu

SEQ ID NO: 1760400 - RNA, 23 nt, Human
agacacaggcccggcuccaggcu

SEQ ID NO: 1760401 - RNA, 22 nt, Human
agacaccuugacagggcacacc

SEQ ID NO: 1760402 - RNA, 12 nt, Human
agacacacacac

SEQ ID NO: 1760403 - RNA, 19 nt, Human
agacacaggcccggcucca

SEQ ID NO: 1760404 - RNA, 20 nt, Human
agacacaggcccggcuccag

SEQ ID NO: 1760405 - RNA, 21 nt, Human
agacacaggcccggcuccagg

SEQ ID NO: 1760406 - RNA, 22 nt, Human
agacacaggcccggcuccaggc

SEQ ID NO: 1760407 - RNA, 17 nt, Human
agacacaggcccggcuc

SEQ ID NO: 1760408 - RNA, 11 nt, Human
agacacacaca

SEQ ID NO: 1760409 - RNA, 13 nt, Human
ucuuacucuuucc

SEQ ID NO: 1760410 - RNA, 14 nt, Human
ucuuacucuuuccu

SEQ ID NO: 1760411 - RNA, 15 nt, Human
ucuuacucuuuccua

SEQ ID NO: 1760412 - RNA, 16 nt, Human
ucuuacucuuuccuau

SEQ ID NO: 1760413 - RNA, 23 nt, Human
ucuuaaugaaguuugaauguuaa

SEQ ID NO: 1760414 - RNA, 22 nt, Human
ucuuaaugaaguuugaauguua

SEQ ID NO: 1760415 - RNA, 21 nt, Human
ucuuaaugaaguuugaauguu

SEQ ID NO: 1760416 - RNA, 20 nt, Human
ucuuaaugaaguuugaaugu

SEQ ID NO: 1760417 - RNA, 19 nt, Human
ucuuaaugaaguuugaaug

SEQ ID NO: 1760418 - RNA, 18 nt, Human
ucuuaaugaaguuugaau

SEQ ID NO: 1760419 - RNA, 17 nt, Human
ucuuaaugaaguuugaa

SEQ ID NO: 1760420 - RNA, 16 nt, Human
ucuuaaugaaguuuga

SEQ ID NO: 1760421 - RNA, 15 nt, Human
ucuuaaugaaguuug

SEQ ID NO: 1760422 - RNA, 19 nt, Human
ucuuguaauccgaaucucu

SEQ ID NO: 1760423 - RNA, 22 nt, Human
ucuuuaaugucacaggcagguc

SEQ ID NO: 1760424 - RNA, 20 nt, Human
ucuuuaaugucacaggcagg

SEQ ID NO: 1760425 - RNA, 13 nt, Human
ucuugguugagga

SEQ ID NO: 1760426 - RNA, 15 nt, Human
ucuugguugaggaaa

SEQ ID NO: 1760427 - RNA, 16 nt, Human
ucuuucuuagaaauuu

SEQ ID NO: 1760428 - RNA, 15 nt, Human
ucuuucuuagaaauu

SEQ ID NO: 1760429 - RNA, 19 nt, Human
ucuuucuuagaaauuuauu

SEQ ID NO: 1760430 - RNA, 16 nt, Human
agagaauguuccagac

SEQ ID NO: 1760431 - RNA, 21 nt, Human
ucuucuguacgucugacaggc

SEQ ID NO: 1760432 - RNA, 22 nt, Human
ucuucuguacgucugacaggca

SEQ ID NO: 1760433 - RNA, 17 nt, Human
ucuucugggagggcagc

SEQ ID NO: 1760434 - RNA, 20 nt, Human
ucuucugggagggcagcagg

SEQ ID NO: 1760435 - RNA, 22 nt, Human
ucuucugcuucagccucccgag

SEQ ID NO: 1760436 - RNA, 23 nt, Human
ucuucuguacgucugacaggcaa

SEQ ID NO: 1760437 - RNA, 13 nt, Human
ucuucuucaccau

SEQ ID NO: 1760438 - RNA, 14 nt, Human
ucuucuucaccauu

SEQ ID NO: 1760439 - RNA, 15 nt, Human
ucuucuucaccauuu

SEQ ID NO: 1760440 - RNA, 14 nt, Human
agacccggcugcgu

SEQ ID NO: 1760441 - RNA, 13 nt, Human
agaccucagggca

SEQ ID NO: 1760442 - RNA, 14 nt, Human
agaccucagggcac

SEQ ID NO: 1760443 - RNA, 15 nt, Human
agaccucagggcaca

SEQ ID NO: 1760444 - RNA, 16 nt, Human
agaccuggacacaggc

SEQ ID NO: 1760445 - RNA, 18 nt, Human
agaccuggacacaggccu

SEQ ID NO: 1760446 - RNA, 19 nt, Human
agaccuggacacaggccug

SEQ ID NO: 1760447 - RNA, 15 nt, Human
agacucauucuucug

SEQ ID NO: 1760448 - RNA, 20 nt, Human
ugacaggcaaugcuggcugu

SEQ ID NO: 1760449 - RNA, 21 nt, Human
ugacacacagcucuguccugg

SEQ ID NO: 1760450 - RNA, 14 nt, Human
ugacagccugcagc

SEQ ID NO: 1760451 - RNA, 15 nt, Human
ugacagccugcagca

SEQ ID NO: 1760452 - RNA, 11 nt, Human
ugacagggcac

SEQ ID NO: 1760453 - RNA, 16 nt, Human
ugacagggcacaccgg

SEQ ID NO: 1760454 - RNA, 21 nt, Human
ugacagggcacaccgggcacu

SEQ ID NO: 1760455 - RNA, 20 nt, Human
ugacagggcacaccgggcac

SEQ ID NO: 1760456 - RNA, 13 nt, Human
ugaccaaugucuu

SEQ ID NO: 1760457 - RNA, 14 nt, Human
ugaccaaugucuug

SEQ ID NO: 1760458 - RNA, 20 nt, Human
ugacauuguuggccaaagcc

SEQ ID NO: 1760459 - RNA, 21 nt, Human
ugacauuguuggccaaagcca

SEQ ID NO: 1760460 - RNA, 17 nt, Human
agauguucuaagucuuu

SEQ ID NO: 1760461 - RNA, 21 nt, Human
agauguggccuuccauuuaua

SEQ ID NO: 1760462 - RNA, 12 nt, Human
ugacccacugcu

SEQ ID NO: 1760463 - RNA, 13 nt, Human
ugacccacugcuu

SEQ ID NO: 1760464 - RNA, 19 nt, Human
agauguucucuaucauuua

SEQ ID NO: 1760465 - RNA, 18 nt, Human
agauguucucuaucauuu

SEQ ID NO: 1760466 - RNA, 17 nt, Human
agauguucucuaucauu

SEQ ID NO: 1760467 - RNA, 15 nt, Human
agauguucucuauca

SEQ ID NO: 1760468 - RNA, 12 nt, Human
agauguucucua

SEQ ID NO: 1760469 - RNA, 20 nt, Human
agauguucuaagucuuucca

SEQ ID NO: 1760470 - RNA, 21 nt, Human
agauguucuaagucuuuccau

SEQ ID NO: 1760471 - RNA, 22 nt, Human
agauguucuaagucuuuccauu

SEQ ID NO: 1760472 - RNA, 14 nt, Human
agauguucccccau

SEQ ID NO: 1760473 - RNA, 22 nt, Human
agaugcgcauucuaaccuggag

SEQ ID NO: 1760474 - RNA, 23 nt, Human
agaugcgcauucuaaccuggagg

SEQ ID NO: 1760475 - RNA, 14 nt, Human
agaugcaccagccc

SEQ ID NO: 1760476 - RNA, 15 nt, Human
agaugcaccagcccu

SEQ ID NO: 1760477 - RNA, 22 nt, Human
ugaaugucuuuuuucaaacuuu

SEQ ID NO: 1760478 - RNA, 15 nt, Human
agagucagcucucug

SEQ ID NO: 1760479 - RNA, 16 nt, Human
agagucagcucucugc

SEQ ID NO: 1760480 - RNA, 17 nt, Human
agagucagcucucugcc

SEQ ID NO: 1760481 - RNA, 18 nt, Human
agagucagcucucugccc

SEQ ID NO: 1760482 - RNA, 19 nt, Human
agagucagcucucugcccu

SEQ ID NO: 1760483 - RNA, 20 nt, Human
agagucagcucucugcccug

SEQ ID NO: 1760484 - RNA, 21 nt, Human
agagucagcucucugcccugu

SEQ ID NO: 1760485 - RNA, 15 nt, Human
agagucuggcccuag

SEQ ID NO: 1760486 - RNA, 13 nt, Human
agagucuggcccu

SEQ ID NO: 1760487 - RNA, 15 nt, Human
agauacucucuucuu

SEQ ID NO: 1760488 - RNA, 18 nt, Human
agauacucucuucuucuc

SEQ ID NO: 1760489 - RNA, 14 nt, Human
agaucacgccacug

SEQ ID NO: 1760490 - RNA, 15 nt, Human
agaucacgccacugc

SEQ ID NO: 1760491 - RNA, 16 nt, Human
agaucacgccacugca

SEQ ID NO: 1760492 - RNA, 13 nt, Human
agauauucugcuc

SEQ ID NO: 1760493 - RNA, 17 nt, Human
agaucacgccacugcac

SEQ ID NO: 1760494 - RNA, 18 nt, Human
agaucacgccacugcacu

SEQ ID NO: 1760495 - RNA, 13 nt, Human
ugaauuuuugcaa

SEQ ID NO: 1760496 - RNA, 14 nt, Human
ugaauuuuugcaau

SEQ ID NO: 1760497 - RNA, 15 nt, Human
ugaauuuuugcaaua

SEQ ID NO: 1760498 - RNA, 16 nt, Human
ugaauuuuugcaauaa

SEQ ID NO: 1760499 - RNA, 17 nt, Human
ugaauuuuugcaauaau

SEQ ID NO: 1760500 - RNA, 22 nt, Human
ugaauuuuugcaauaaugcagu

SEQ ID NO: 1760501 - RNA, 23 nt, Human
ugaauuuuugcaauaaugcagua

SEQ ID NO: 1760502 - RNA, 15 nt, Human
agagcuucuuccagg

SEQ ID NO: 1760503 - RNA, 12 nt, Human
ugaacuccuggc

SEQ ID NO: 1760504 - RNA, 14 nt, Human
ugaacuccuggccu

SEQ ID NO: 1760505 - RNA, 15 nt, Human
ugaacuccuggccuc

SEQ ID NO: 1760506 - RNA, 22 nt, Human
agaggcucguugacuggcugug

SEQ ID NO: 1760507 - RNA, 19 nt, Human
agaggccaugggccuccug

SEQ ID NO: 1760508 - RNA, 10 nt, Human
agaggcaggg

SEQ ID NO: 1760509 - RNA, 13 nt, Human
agaggcagggucu

SEQ ID NO: 1760510 - RNA, 13 nt, Human
agaggcagcccca

SEQ ID NO: 1760511 - RNA, 19 nt, Human
agaggcagccccauucugc

SEQ ID NO: 1760512 - RNA, 22 nt, Human
agagcuucuuccaggugcccag

SEQ ID NO: 1760513 - RNA, 23 nt, Human
agagcuucuuccaggugcccagc

SEQ ID NO: 1760514 - RNA, 13 nt, Human
agagcuuuucaga

SEQ ID NO: 1760515 - RNA, 14 nt, Human
agagcuuuucagau

SEQ ID NO: 1760516 - RNA, 15 nt, Human
agagcuuuucagauu

SEQ ID NO: 1760517 - RNA, 20 nt, Human
agagcuuuucagauugugga

SEQ ID NO: 1760518 - RNA, 13 nt, Human
agaggaaaaauau

SEQ ID NO: 1760519 - RNA, 12 nt, Human
agaggaaaagaa

SEQ ID NO: 1760520 - RNA, 15 nt, Human
agagccaccaagagg

SEQ ID NO: 1760521 - RNA, 19 nt, Human
agagccaccaagagggacg

SEQ ID NO: 1760522 - RNA, 15 nt, Human
ucuuugggaauauuu

SEQ ID NO: 1760523 - RNA, 20 nt, Human
ucuuugggaauauuugaauc

SEQ ID NO: 1760524 - RNA, 18 nt, Human
ucuuugggaauauuugaa

SEQ ID NO: 1760525 - RNA, 16 nt, Human
ucuuugggaauauuug

SEQ ID NO: 1760526 - RNA, 19 nt, Human
agagcuaaacuccuuccug

SEQ ID NO: 1760527 - RNA, 20 nt, Human
agagcuaaacuccuuccugg

SEQ ID NO: 1760528 - RNA, 19 nt, Human
agagccuuuccucaaaacu

SEQ ID NO: 1760529 - RNA, 15 nt, Human
agagcgcgccccuag

SEQ ID NO: 1760530 - RNA, 20 nt, Human
agagcgcgccccuagccggu

SEQ ID NO: 1760531 - RNA, 15 nt, Human
ugaaauuguauuaca

SEQ ID NO: 1760532 - RNA, 12 nt, Human
ugaaauaugcau

SEQ ID NO: 1760533 - RNA, 20 nt, Human
ugaaauaucccggggguggg

SEQ ID NO: 1760534 - RNA, 13 nt, Human
agcagggaaacag

SEQ ID NO: 1760535 - RNA, 14 nt, Human
agcagggaaacagc

SEQ ID NO: 1760536 - RNA, 15 nt, Human
agcagggaaacagcu

SEQ ID NO: 1760537 - RNA, 22 nt, Human
agcagggcucagcggggacagc

SEQ ID NO: 1760538 - RNA, 23 nt, Human
agcagggcuacccugagcugagg

SEQ ID NO: 1760539 - RNA, 17 nt, Human
agcagguagccugcugg

SEQ ID NO: 1760540 - RNA, 18 nt, Human
agcagguagccugcuggu

SEQ ID NO: 1760541 - RNA, 13 nt, Human
agcagggcucagc

SEQ ID NO: 1760542 - RNA, 14 nt, Human
agcagggcucagcg

SEQ ID NO: 1760543 - RNA, 15 nt, Human
agcagggcucagcgg

SEQ ID NO: 1760544 - RNA, 14 nt, Human
agcagcagcccaag

SEQ ID NO: 1760545 - RNA, 21 nt, Human
agcagcagcccaagcuucccu

SEQ ID NO: 1760546 - RNA, 13 nt, Human
agcagcagguagc

SEQ ID NO: 1760547 - RNA, 20 nt, Human
agcagcagguagccugcugg

SEQ ID NO: 1760548 - RNA, 20 nt, Human
agcaggaauauaugugugcc

SEQ ID NO: 1760549 - RNA, 21 nt, Human
agcaggaauauaugugugccu

SEQ ID NO: 1760550 - RNA, 13 nt, Human
agcaggaccucug

SEQ ID NO: 1760551 - RNA, 22 nt, Human
agcaggaccucugaaacccugg

SEQ ID NO: 1760552 - RNA, 14 nt, Human
agcaggaggccagg

SEQ ID NO: 1760553 - RNA, 15 nt, Human
agcaggaggccaggc

SEQ ID NO: 1760554 - RNA, 18 nt, Human
ugagucaccaagcccagu

SEQ ID NO: 1760555 - RNA, 16 nt, Human
agcauaucugauuguu

SEQ ID NO: 1760556 - RNA, 15 nt, Human
ugagucaucuguuag

SEQ ID NO: 1760557 - RNA, 20 nt, Human
ugagucaucuguuagggccu

SEQ ID NO: 1760558 - RNA, 21 nt, Human
ugagucaucuguuagggccuu

SEQ ID NO: 1760559 - RNA, 15 nt, Human
ugagugcaguccuga

SEQ ID NO: 1760560 - RNA, 18 nt, Human
ugaguucauacccuguua

SEQ ID NO: 1760561 - RNA, 13 nt, Human
agcauaucugccu

SEQ ID NO: 1760562 - RNA, 15 nt, Human
agcauaucugccuuu

SEQ ID NO: 1760563 - RNA, 21 nt, Human
agcaguagaaauaauaugcau

SEQ ID NO: 1760564 - RNA, 22 nt, Human
agcaguagaaauaauaugcauu

SEQ ID NO: 1760565 - RNA, 22 nt, Human
ugaugaaaugaggucagagccu

SEQ ID NO: 1760566 - RNA, 23 nt, Human
ugaugaaaugaggucagagccug

SEQ ID NO: 1760567 - RNA, 19 nt, Human
ugaugaucuuugcagacag

SEQ ID NO: 1760568 - RNA, 20 nt, Human
ugaugaucuuugcagacagg

SEQ ID NO: 1760569 - RNA, 21 nt, Human
ugaugaucuuugcagacaggc

SEQ ID NO: 1760570 - RNA, 21 nt, Human
ugaucuaccuugaauugauau

SEQ ID NO: 1760571 - RNA, 21 nt, Human
ugaugggcaacccccagccug

SEQ ID NO: 1760572 - RNA, 22 nt, Human
ugaugggcaacccccagccugc

SEQ ID NO: 1760573 - RNA, 20 nt, Human
ugauuaaagugcucacguua

SEQ ID NO: 1760574 - RNA, 16 nt, Human
ugauggucuucagccu

SEQ ID NO: 1760575 - RNA, 16 nt, Human
agccacggccaggcca

SEQ ID NO: 1760576 - RNA, 15 nt, Human
agccaauuauguuaa

SEQ ID NO: 1760577 - RNA, 17 nt, Human
agccaauuauguuaaac

SEQ ID NO: 1760578 - RNA, 16 nt, Human
agccaauuauguuaaa

SEQ ID NO: 1760579 - RNA, 20 nt, Human
agccaauuauguuaaacuag

SEQ ID NO: 1760580 - RNA, 18 nt, Human
ugauccucccaccucagc

SEQ ID NO: 1760581 - RNA, 19 nt, Human
ugauccucccaccucagcc

SEQ ID NO: 1760582 - RNA, 20 nt, Human
ugauccucccaccucagccu

SEQ ID NO: 1760583 - RNA, 13 nt, Human
agccacaguggga

SEQ ID NO: 1760584 - RNA, 18 nt, Human
ugaucacggcucacugca

SEQ ID NO: 1760585 - RNA, 15 nt, Human
ugaucacggcucacu

SEQ ID NO: 1760586 - RNA, 13 nt, Human
ugaucacggcuca

SEQ ID NO: 1760587 - RNA, 14 nt, Human
ugaucacggcucac

SEQ ID NO: 1760588 - RNA, 18 nt, Human
agcauucacaacuuguuu

SEQ ID NO: 1760589 - RNA, 16 nt, Human
agcauggguucauccu

SEQ ID NO: 1760590 - RNA, 19 nt, Human
agcauguaacuuauauuaa

SEQ ID NO: 1760591 - RNA, 19 nt, Human
agcauucgagacagaaccu

SEQ ID NO: 1760592 - RNA, 19 nt, Human
agcauucucaggcaccagu

SEQ ID NO: 1760593 - RNA, 15 nt, Human
agcauuugaucuguu

SEQ ID NO: 1760594 - RNA, 22 nt, Human
agcauuugaucuguugcaagcc

SEQ ID NO: 1760595 - RNA, 17 nt, Human
agcauuugaaugcauuu

SEQ ID NO: 1760596 - RNA, 23 nt, Human
agcauuuuagcaauuuauacaau

SEQ ID NO: 1760597 - RNA, 14 nt, Human
agccccgaggccuu

SEQ ID NO: 1760598 - RNA, 17 nt, Human
agccccgguggcugggc

SEQ ID NO: 1760599 - RNA, 19 nt, Human
agccccgguggcugggcag

SEQ ID NO: 1760600 - RNA, 13 nt, Human
ugcaccagcccuu

SEQ ID NO: 1760601 - RNA, 23 nt, Human
ugcaccaggguugaccccagagg

SEQ ID NO: 1760602 - RNA, 13 nt, Human
ugcagaaguaagc

SEQ ID NO: 1760603 - RNA, 11 nt, Human
ugcaagggaaa

SEQ ID NO: 1760604 - RNA, 20 nt, Human
ugcaagggaguuagggaaau

SEQ ID NO: 1760605 - RNA, 13 nt, Human
ugcaacaggcugg

SEQ ID NO: 1760606 - RNA, 14 nt, Human
ugcaacaaaaugua

SEQ ID NO: 1760607 - RNA, 16 nt, Human
ugcaacaaaauguaga

SEQ ID NO: 1760608 - RNA, 17 nt, Human
ugcaacaaaauguagaa

SEQ ID NO: 1760609 - RNA, 20 nt, Human
ugcaacaaaauguagaauau

SEQ ID NO: 1760610 - RNA, 19 nt, Human
ugcaaauccuaugugauuu

SEQ ID NO: 1760611 - RNA, 17 nt, Human
ugcaaauccuaugugau

SEQ ID NO: 1760612 - RNA, 18 nt, Human
ugcaaauccuaugugauu

SEQ ID NO: 1760613 - RNA, 21 nt, Human
ugcaaauccuaugugauuuua

SEQ ID NO: 1760614 - RNA, 10 nt, Human
ugcaaauccu

SEQ ID NO: 1760615 - RNA, 12 nt, Human
ugcaaauccuau

SEQ ID NO: 1760616 - RNA, 14 nt, Human
ugcaaauccuaugu

SEQ ID NO: 1760617 - RNA, 15 nt, Human
ugcaaauccuaugug

SEQ ID NO: 1760618 - RNA, 19 nt, Human
ugcaagccccucuuucugu

SEQ ID NO: 1760619 - RNA, 17 nt, Human
agccacggccaggccag

SEQ ID NO: 1760620 - RNA, 18 nt, Human
agccacggccaggccaga

SEQ ID NO: 1760621 - RNA, 17 nt, Human
ugauuuauuugcuucuu

SEQ ID NO: 1760622 - RNA, 16 nt, Human
ugauuuccccccuccg

SEQ ID NO: 1760623 - RNA, 20 nt, Human
ugauuuccccccuccgccuc

SEQ ID NO: 1760624 - RNA, 16 nt, Human
ugcaaagaaaaucaga

SEQ ID NO: 1760625 - RNA, 12 nt, Human
ugcaaagaaaau

SEQ ID NO: 1760626 - RNA, 21 nt, Human
ugcaaaggguaucaggugcug

SEQ ID NO: 1760627 - RNA, 13 nt, Human
ugcaaaguacugu

SEQ ID NO: 1760628 - RNA, 14 nt, Human
ugcaaaguacugua

SEQ ID NO: 1760629 - RNA, 15 nt, Human
ugcaaaguacuguaa

SEQ ID NO: 1760630 - RNA, 21 nt, Human
ugcaaaguacuguaagaauaa

SEQ ID NO: 1760631 - RNA, 10 nt, Human
ugcaaagugu

SEQ ID NO: 1760632 - RNA, 19 nt, Human
ugcaaaguguuuuguacca

SEQ ID NO: 1760633 - RNA, 21 nt, Human
ugcaaaguguuuuguaccagu

SEQ ID NO: 1760634 - RNA, 22 nt, Human
ugcaaaguguuuuguaccagug

SEQ ID NO: 1760635 - RNA, 13 nt, Human
agccugaguagaa

SEQ ID NO: 1760636 - RNA, 22 nt, Human
agccugaguagaaaggccuuua

SEQ ID NO: 1760637 - RNA, 17 nt, Human
agccugaguagaaaggc

SEQ ID NO: 1760638 - RNA, 16 nt, Human
agccugagucaccugc

SEQ ID NO: 1760639 - RNA, 19 nt, Human
agccugagucaccugcaga

SEQ ID NO: 1760640 - RNA, 23 nt, Human
agccugaguagaaaggccuuuaa

SEQ ID NO: 1760641 - RNA, 22 nt, Human
agccuuagaagucacacaguau

SEQ ID NO: 1760642 - RNA, 20 nt, Human
agccuuagaagucacacagu

SEQ ID NO: 1760643 - RNA, 14 nt, Human
ugccaaucaauagc

SEQ ID NO: 1760644 - RNA, 13 nt, Human
ugcauugugcuuc

SEQ ID NO: 1760645 - RNA, 15 nt, Human
ugcauugugcuucuu

SEQ ID NO: 1760646 - RNA, 12 nt, Human
ugcauugugcuu

SEQ ID NO: 1760647 - RNA, 12 nt, Human
ugcauuguaaau

SEQ ID NO: 1760648 - RNA, 18 nt, Human
ugcauuguaucgauguua

SEQ ID NO: 1760649 - RNA, 13 nt, Human
ugccacagccucc

SEQ ID NO: 1760650 - RNA, 17 nt, Human
ugccacagccuccccug

SEQ ID NO: 1760651 - RNA, 21 nt, Human
ugccacagccuccccugccag

SEQ ID NO: 1760652 - RNA, 22 nt, Human
ugccacagccuccccugccagg

SEQ ID NO: 1760653 - RNA, 22 nt, Human
ugccagcucuguaucaggaccc

SEQ ID NO: 1760654 - RNA, 12 nt, Human
ugcagacaggca

SEQ ID NO: 1760655 - RNA, 13 nt, Human
ugcagacaggcaa

SEQ ID NO: 1760656 - RNA, 21 nt, Human
ugcagacaggcaagcaccucc

SEQ ID NO: 1760657 - RNA, 13 nt, Human
ugcagguggggag

SEQ ID NO: 1760658 - RNA, 23 nt, Human
ugcagguggggguugcuguauaa

SEQ ID NO: 1760659 - RNA, 16 nt, Human
ugcaggugaaacccag

SEQ ID NO: 1760660 - RNA, 21 nt, Human
agccucuuucugucccuucug

SEQ ID NO: 1760661 - RNA, 15 nt, Human
agccucuuucugucc

SEQ ID NO: 1760662 - RNA, 18 nt, Human
agccucuuucugucccuu

SEQ ID NO: 1760663 - RNA, 22 nt, Human
agccucugggucagugguccac

SEQ ID NO: 1760664 - RNA, 23 nt, Human
agccucugggucagugguccaca

SEQ ID NO: 1760665 - RNA, 16 nt, Human
ugcaugcccucucagg

SEQ ID NO: 1760666 - RNA, 19 nt, Human
ugcaugcacuguucccccu

SEQ ID NO: 1760667 - RNA, 22 nt, Human
ugcaugcacuguucccccugug

SEQ ID NO: 1760668 - RNA, 14 nt, Human
ugcaugcccucuca

SEQ ID NO: 1760669 - RNA, 15 nt, Human
ugcaugcccucucag

SEQ ID NO: 1760670 - RNA, 21 nt, Human
ugcaucucacuggaugcaaag

SEQ ID NO: 1760671 - RNA, 18 nt, Human
ugcaucuuuuuuucauuu

SEQ ID NO: 1760672 - RNA, 16 nt, Human
ugcaguaugguacauu

SEQ ID NO: 1760673 - RNA, 17 nt, Human
ugcaguaugguacauuu

SEQ ID NO: 1760674 - RNA, 22 nt, Human
ugcaguaugguacauuuuucaa

SEQ ID NO: 1760675 - RNA, 15 nt, Human
ugcagguucauggau

SEQ ID NO: 1760676 - RNA, 13 nt, Human
aggaucagucuga

SEQ ID NO: 1760677 - RNA, 19 nt, Human
aggaugagcucuacccagg

SEQ ID NO: 1760678 - RNA, 13 nt, Human
aggaggcuccaga

SEQ ID NO: 1760679 - RNA, 16 nt, Human
aggaggcuccagaggg

SEQ ID NO: 1760680 - RNA, 17 nt, Human
aggaggcuccagagggc

SEQ ID NO: 1760681 - RNA, 18 nt, Human
aggaggcuccagagggca

SEQ ID NO: 1760682 - RNA, 19 nt, Human
aggaggcuccagagggcac

SEQ ID NO: 1760683 - RNA, 17 nt, Human
uggaagagcccagucug

SEQ ID NO: 1760684 - RNA, 21 nt, Human
uggaagagcccagucuguuga

SEQ ID NO: 1760685 - RNA, 12 nt, Human
ugcuugaggaaa

SEQ ID NO: 1760686 - RNA, 16 nt, Human
ugcuugaggaaaacaa

SEQ ID NO: 1760687 - RNA, 13 nt, Human
ugcuugaggaaaa

SEQ ID NO: 1760688 - RNA, 23 nt, Human
aggagcccuuaucugugcucagg

SEQ ID NO: 1760689 - RNA, 16 nt, Human
ugcuugaaggcccugc

SEQ ID NO: 1760690 - RNA, 19 nt, Human
ugcuugaaggcccugcuga

SEQ ID NO: 1760691 - RNA, 20 nt, Human
ugcuuuugucuaugggacuc

SEQ ID NO: 1760692 - RNA, 18 nt, Human
ugcuuuuggucuguguga

SEQ ID NO: 1760693 - RNA, 18 nt, Human
aggacucagaagccucug

SEQ ID NO: 1760694 - RNA, 15 nt, Human
aggacgugggcuggg

SEQ ID NO: 1760695 - RNA, 19 nt, Human
aggacgugggcugggccca

SEQ ID NO: 1760696 - RNA, 12 nt, Human
aggacucucagg

SEQ ID NO: 1760697 - RNA, 20 nt, Human
aggaccuucgggcugugccc

SEQ ID NO: 1760698 - RNA, 18 nt, Human
aggaccuucgggcugugc

SEQ ID NO: 1760699 - RNA, 19 nt, Human
aggaccuucgggcugugcc

SEQ ID NO: 1760700 - RNA, 21 nt, Human
aggagcccuuaucugugcuca

SEQ ID NO: 1760701 - RNA, 17 nt, Human
aggagccccgaggccuu

SEQ ID NO: 1760702 - RNA, 15 nt, Human
aggagccccauuccu

SEQ ID NO: 1760703 - RNA, 16 nt, Human
aggagccccauuccug

SEQ ID NO: 1760704 - RNA, 18 nt, Human
aggagccccauuccuggg

SEQ ID NO: 1760705 - RNA, 19 nt, Human
aggagccccauuccuggga

SEQ ID NO: 1760706 - RNA, 21 nt, Human
aggagccccauuccugggaaa

SEQ ID NO: 1760707 - RNA, 17 nt, Human
aggagaugcuccuuggg

SEQ ID NO: 1760708 - RNA, 18 nt, Human
aggagaugcuccuugggc

SEQ ID NO: 1760709 - RNA, 22 nt, Human
aggagaugcuccuugggcccuu

SEQ ID NO: 1760710 - RNA, 15 nt, Human
aggagcacacccagc

SEQ ID NO: 1760711 - RNA, 16 nt, Human
aggagaugcuccuugg

SEQ ID NO: 1760712 - RNA, 22 nt, Human
aggacuuuucuuuguggcuucc

SEQ ID NO: 1760713 - RNA, 17 nt, Human
aggacuuuucuuugugg

SEQ ID NO: 1760714 - RNA, 19 nt, Human
aggacuuuucuuuguggcu

SEQ ID NO: 1760715 - RNA, 12 nt, Human
aggcagggucuc

SEQ ID NO: 1760716 - RNA, 22 nt, Human
aggcaggucuugaacuccuggc

SEQ ID NO: 1760717 - RNA, 13 nt, Human
aggcauugccaag

SEQ ID NO: 1760718 - RNA, 14 nt, Human
aggcauugccaagg

SEQ ID NO: 1760719 - RNA, 16 nt, Human
aggcauugccaagggc

SEQ ID NO: 1760720 - RNA, 18 nt, Human
aggcauugccaagggcuu

SEQ ID NO: 1760721 - RNA, 20 nt, Human
aggcauugccaagggcuuug

SEQ ID NO: 1760722 - RNA, 21 nt, Human
aggcauugccaagggcuuugu

SEQ ID NO: 1760723 - RNA, 18 nt, Human
aggauugcuacuguccua

SEQ ID NO: 1760724 - RNA, 15 nt, Human
aggauugcuacuguc

SEQ ID NO: 1760725 - RNA, 17 nt, Human
aggauugcuacuguccu

SEQ ID NO: 1760726 - RNA, 19 nt, Human
uggagcacugggcucccgg

SEQ ID NO: 1760727 - RNA, 21 nt, Human
uggagcacugggcucccgggc

SEQ ID NO: 1760728 - RNA, 12 nt, Human
uggagcacuggg

SEQ ID NO: 1760729 - RNA, 15 nt, Human
uggagcacugggcuc

SEQ ID NO: 1760730 - RNA, 17 nt, Human
uggagcacugggcuccc

SEQ ID NO: 1760731 - RNA, 12 nt, Human
uggagcagaggg

SEQ ID NO: 1760732 - RNA, 13 nt, Human
uggagcagagggg

SEQ ID NO: 1760733 - RNA, 16 nt, Human
uggagcagaggggcug

SEQ ID NO: 1760734 - RNA, 20 nt, Human
aggcaagcaccuccugccuc

SEQ ID NO: 1760735 - RNA, 18 nt, Human
aggcaagcaccuccugcc

SEQ ID NO: 1760736 - RNA, 19 nt, Human
aggcaagcaccuccugccu

SEQ ID NO: 1760737 - RNA, 15 nt, Human
uggagcaucaagcca

SEQ ID NO: 1760738 - RNA, 17 nt, Human
uggagcaucaagccacu

SEQ ID NO: 1760739 - RNA, 17 nt, Human
uggagcagaggggcuga

SEQ ID NO: 1760740 - RNA, 17 nt, Human
aggcaagcaccuccugc

SEQ ID NO: 1760741 - RNA, 18 nt, Human
uggcacccggccccugcu

SEQ ID NO: 1760742 - RNA, 19 nt, Human
uggcacccggccccugcug

SEQ ID NO: 1760743 - RNA, 20 nt, Human
uggcacccggccccugcugg

SEQ ID NO: 1760744 - RNA, 14 nt, Human
aggcccaaccuccu

SEQ ID NO: 1760745 - RNA, 13 nt, Human
aggcccggcucca

SEQ ID NO: 1760746 - RNA, 14 nt, Human
uggagugcagugag

SEQ ID NO: 1760747 - RNA, 14 nt, Human
uggaguugaaaauc

SEQ ID NO: 1760748 - RNA, 19 nt, Human
uggaguguuccccuuccac

SEQ ID NO: 1760749 - RNA, 22 nt, Human
uggaguguuccccuuccacuga

SEQ ID NO: 1760750 - RNA, 20 nt, Human
uggaguguuucuaauaaacu

SEQ ID NO: 1760751 - RNA, 24 nt, Human
uggaguguuucuaauaaacuugga

SEQ ID NO: 1760752 - RNA, 20 nt, Human
uggaggucagcauuugaucu

SEQ ID NO: 1760753 - RNA, 21 nt, Human
uggaugccugguggcagcugc

SEQ ID NO: 1760754 - RNA, 23 nt, Human
uggaugccugguggcagcugcgg

SEQ ID NO: 1760755 - RNA, 17 nt, Human
uggaugcgcagugccuu

SEQ ID NO: 1760756 - RNA, 17 nt, Human
uggauucucuaaccuuu

SEQ ID NO: 1760757 - RNA, 14 nt, Human
uggauucugaaucu

SEQ ID NO: 1760758 - RNA, 24 nt, Human
ugccugcccaggccccugccaccc

SEQ ID NO: 1760759 - RNA, 20 nt, Human
ugccugcccaggccccugcc

SEQ ID NO: 1760760 - RNA, 22 nt, Human
ugccugcccaggccccugccac

SEQ ID NO: 1760761 - RNA, 23 nt, Human
ugccugcccaggccccugccacc

SEQ ID NO: 1760762 - RNA, 14 nt, Human
ugccucagccuccc

SEQ ID NO: 1760763 - RNA, 18 nt, Human
ugccucugccucugacac

SEQ ID NO: 1760764 - RNA, 20 nt, Human
ugccucugccucugacacac

SEQ ID NO: 1760765 - RNA, 17 nt, Human
ugccucugccucugaca

SEQ ID NO: 1760766 - RNA, 19 nt, Human
agcugccuguucagcucca

SEQ ID NO: 1760767 - RNA, 18 nt, Human
agcugccuguucagcucc

SEQ ID NO: 1760768 - RNA, 14 nt, Human
agcugccuguucag

SEQ ID NO: 1760769 - RNA, 16 nt, Human
agcugccuguucagcu

SEQ ID NO: 1760770 - RNA, 19 nt, Human
agcugugcucuggacaggc

SEQ ID NO: 1760771 - RNA, 17 nt, Human
agcugugcucuggacag

SEQ ID NO: 1760772 - RNA, 18 nt, Human
agcugugcucuggacagg

SEQ ID NO: 1760773 - RNA, 20 nt, Human
agcugggacuacaggcaccc

SEQ ID NO: 1760774 - RNA, 23 nt, Human
agcugggacuacaggcacccacc

SEQ ID NO: 1760775 - RNA, 16 nt, Human
agcugggacuacaggu

SEQ ID NO: 1760776 - RNA, 20 nt, Human
ugccuuaauaaaaaaugaaa

SEQ ID NO: 1760777 - RNA, 23 nt, Human
agcugugugacauuuggagaggg

SEQ ID NO: 1760778 - RNA, 17 nt, Human
agcugcccuaugggccu

SEQ ID NO: 1760779 - RNA, 18 nt, Human
agcugcccuaugggccug

SEQ ID NO: 1760780 - RNA, 19 nt, Human
agcugcccuaugggccugc

SEQ ID NO: 1760781 - RNA, 21 nt, Human
agcugcccuaugggccugccg

SEQ ID NO: 1760782 - RNA, 16 nt, Human
agcucuguccugggag

SEQ ID NO: 1760783 - RNA, 21 nt, Human
agcucuguccugggagugagc

SEQ ID NO: 1760784 - RNA, 23 nt, Human
agcucuguccugggagugagcug

SEQ ID NO: 1760785 - RNA, 11 nt, Human
agcugcaaagu

SEQ ID NO: 1760786 - RNA, 12 nt, Human
agcugcaaagug

SEQ ID NO: 1760787 - RNA, 13 nt, Human
agcugcaaagugu

SEQ ID NO: 1760788 - RNA, 14 nt, Human
agcugcaaaguguu

SEQ ID NO: 1760789 - RNA, 15 nt, Human
agcugcaaaguguuu

SEQ ID NO: 1760790 - RNA, 19 nt, Human
agcugcaaaguguuuugua

SEQ ID NO: 1760791 - RNA, 20 nt, Human
agcugcaaaguguuuuguac

SEQ ID NO: 1760792 - RNA, 12 nt, Human
ugccucagccuc

SEQ ID NO: 1760793 - RNA, 13 nt, Human
ugccucagccucc

SEQ ID NO: 1760794 - RNA, 13 nt, Human
ugccgauuucugu

SEQ ID NO: 1760795 - RNA, 18 nt, Human
ugccgauuucuguaaacu

SEQ ID NO: 1760796 - RNA, 20 nt, Human
ugccgauuucuguaaacucu

SEQ ID NO: 1760797 - RNA, 15 nt, Human
ugcccuuaaaucaua

SEQ ID NO: 1760798 - RNA, 23 nt, Human
agcugcccuccccuccggacugg

SEQ ID NO: 1760799 - RNA, 19 nt, Human
agcucugaaaccaguguua

SEQ ID NO: 1760800 - RNA, 16 nt, Human
agcuccuucuguccua

SEQ ID NO: 1760801 - RNA, 21 nt, Human
agcuccuucuguccuacucug

SEQ ID NO: 1760802 - RNA, 14 nt, Human
agcucggcucagcu

SEQ ID NO: 1760803 - RNA, 13 nt, Human
agcucucugcccu

SEQ ID NO: 1760804 - RNA, 14 nt, Human
agcucucugcccug

SEQ ID NO: 1760805 - RNA, 16 nt, Human
agcucucugcccugug

SEQ ID NO: 1760806 - RNA, 17 nt, Human
agcucucugcccugugu

SEQ ID NO: 1760807 - RNA, 18 nt, Human
agcucucugcccugugua

SEQ ID NO: 1760808 - RNA, 19 nt, Human
agcucucugcccuguguac

SEQ ID NO: 1760809 - RNA, 18 nt, Human
agcucugaaaccaguguu

SEQ ID NO: 1760810 - RNA, 22 nt, Human
agcucgguacccggggcccagg

SEQ ID NO: 1760811 - RNA, 15 nt, Human
agcucgguacccggg

SEQ ID NO: 1760812 - RNA, 22 nt, Human
agcuccaucaaugagguaucuu

SEQ ID NO: 1760813 - RNA, 15 nt, Human
agcucccaggugcag

SEQ ID NO: 1760814 - RNA, 15 nt, Human
agcuccuucuguccu

SEQ ID NO: 1760815 - RNA, 20 nt, Human
agcucccaggugcagccaga

SEQ ID NO: 1760816 - RNA, 21 nt, Human
agcucccaggugcagccagag

SEQ ID NO: 1760817 - RNA, 22 nt, Human
agcucccaggugcagccagagg

SEQ ID NO: 1760818 - RNA, 13 nt, Human
ugccaucaucucc

SEQ ID NO: 1760819 - RNA, 15 nt, Human
ugccaucaucuccug

SEQ ID NO: 1760820 - RNA, 16 nt, Human
ugccaucaucuccugc

SEQ ID NO: 1760821 - RNA, 23 nt, Human
ugccaucaucuccugccuuccuc

SEQ ID NO: 1760822 - RNA, 21 nt, Human
ugccauauugcacaugucuua

SEQ ID NO: 1760823 - RNA, 13 nt, Human
ugccauauuuuca

SEQ ID NO: 1760824 - RNA, 14 nt, Human
ugccauauuuucac

SEQ ID NO: 1760825 - RNA, 17 nt, Human
ugccauauuuucaccau

SEQ ID NO: 1760826 - RNA, 21 nt, Human
aggaagaucucugcagggccg

SEQ ID NO: 1760827 - RNA, 20 nt, Human
aggaagaucucugcagggcc

SEQ ID NO: 1760828 - RNA, 13 nt, Human
aggaagauuugga

SEQ ID NO: 1760829 - RNA, 23 nt, Human
aggaaagucauuggcuuuauccu

SEQ ID NO: 1760830 - RNA, 22 nt, Human
aggaaagucauuggcuuuaucc

SEQ ID NO: 1760831 - RNA, 20 nt, Human
aggaaagucauuggcuuuau

SEQ ID NO: 1760832 - RNA, 19 nt, Human
aggaaagucauuggcuuua

SEQ ID NO: 1760833 - RNA, 17 nt, Human
aggaaagucauuggcuu

SEQ ID NO: 1760834 - RNA, 16 nt, Human
aggaaagucauuggcu

SEQ ID NO: 1760835 - RNA, 13 nt, Human
aggaaagucauug

SEQ ID NO: 1760836 - RNA, 14 nt, Human
aggaaagggaggag

SEQ ID NO: 1760837 - RNA, 22 nt, Human
aggaaagggaggaguggaggug

SEQ ID NO: 1760838 - RNA, 16 nt, Human
aggaaaagcugcugac

SEQ ID NO: 1760839 - RNA, 19 nt, Human
ugcuccagggaugauucaa

SEQ ID NO: 1760840 - RNA, 19 nt, Human
ugcucugaucauccacugu

SEQ ID NO: 1760841 - RNA, 16 nt, Human
ugcucugagccacagu

SEQ ID NO: 1760842 - RNA, 14 nt, Human
ugcucugcugacag

SEQ ID NO: 1760843 - RNA, 15 nt, Human
ugcucugcugacaga

SEQ ID NO: 1760844 - RNA, 16 nt, Human
ugcucugcugacagac

SEQ ID NO: 1760845 - RNA, 22 nt, Human
ugcucugcgugucaccugugcu

SEQ ID NO: 1760846 - RNA, 23 nt, Human
ugcucugcgugucaccugugcuu

SEQ ID NO: 1760847 - RNA, 16 nt, Human
agcuguuuacuaggga

SEQ ID NO: 1760848 - RNA, 22 nt, Human
agcuguuuacuagggaucccuc

SEQ ID NO: 1760849 - RNA, 16 nt, Human
ugcuaagugugaacug

SEQ ID NO: 1760850 - RNA, 15 nt, Human
ugcuaagugugaacu

SEQ ID NO: 1760851 - RNA, 14 nt, Human
ugcuaagugugaac

SEQ ID NO: 1760852 - RNA, 13 nt, Human
ugcuaagugugaa

SEQ ID NO: 1760853 - RNA, 19 nt, Human
ugcuaagugugaacuggac

SEQ ID NO: 1760854 - RNA, 17 nt, Human
ugcuaagugugaacugg

SEQ ID NO: 1760855 - RNA, 14 nt, Human
ugcgguccacccag

SEQ ID NO: 1760856 - RNA, 15 nt, Human
ugcgguccacccagg

SEQ ID NO: 1760857 - RNA, 22 nt, Human
agcuuucauguaaacugugcac

SEQ ID NO: 1760858 - RNA, 14 nt, Human
aggaaaagcugcug

SEQ ID NO: 1760859 - RNA, 23 nt, Human
agguggggcagcuugaggguugg

SEQ ID NO: 1760860 - RNA, 14 nt, Human
aggugauccaccca

SEQ ID NO: 1760861 - RNA, 20 nt, Human
aggugauccacccaccucag

SEQ ID NO: 1760862 - RNA, 21 nt, Human
aggugauccacccaccucagc

SEQ ID NO: 1760863 - RNA, 16 nt, Human
aggugccauggaagag

SEQ ID NO: 1760864 - RNA, 17 nt, Human
aggugccauggaagagg

SEQ ID NO: 1760865 - RNA, 21 nt, Human
aggugccauggaagaggcuac

SEQ ID NO: 1760866 - RNA, 15 nt, Human
agguggggguugcug

SEQ ID NO: 1760867 - RNA, 17 nt, Human
aggugugaaccaccaca

SEQ ID NO: 1760868 - RNA, 15 nt, Human
aggugugcucugauc

SEQ ID NO: 1760869 - RNA, 20 nt, Human
aggugugcucugaucaucca

SEQ ID NO: 1760870 - RNA, 12 nt, Human
ugguuaggaugg

SEQ ID NO: 1760871 - RNA, 22 nt, Human
ugguuaggauggcaggacgugg

SEQ ID NO: 1760872 - RNA, 15 nt, Human
uguaaauagcucagg

SEQ ID NO: 1760873 - RNA, 16 nt, Human
uguaaauagcucaggu

SEQ ID NO: 1760874 - RNA, 18 nt, Human
uguaaauagguucuucuu

SEQ ID NO: 1760875 - RNA, 19 nt, Human
uguaaaguugguuggauaa

SEQ ID NO: 1760876 - RNA, 20 nt, Human
uguaaaguugguuggauaag

SEQ ID NO: 1760877 - RNA, 22 nt, Human
aggugacagagugagacucugu

SEQ ID NO: 1760878 - RNA, 19 nt, Human
aggucagcauuugaucugu

SEQ ID NO: 1760879 - RNA, 13 nt, Human
aggugaccccagg

SEQ ID NO: 1760880 - RNA, 18 nt, Human
aggucuugaacuccuggc

SEQ ID NO: 1760881 - RNA, 17 nt, Human
aggucuugaacuccugg

SEQ ID NO: 1760882 - RNA, 13 nt, Human
aggugacagagug

SEQ ID NO: 1760883 - RNA, 15 nt, Human
aggugacagagugag

SEQ ID NO: 1760884 - RNA, 16 nt, Human
aggucuugaacuccug

SEQ ID NO: 1760885 - RNA, 13 nt, Human
aggucagagccug

SEQ ID NO: 1760886 - RNA, 14 nt, Human
aggucagagccugc

SEQ ID NO: 1760887 - RNA, 15 nt, Human
aggucagagccugca

SEQ ID NO: 1760888 - RNA, 17 nt, Human
aggucagagccugcagu

SEQ ID NO: 1760889 - RNA, 18 nt, Human
aggucagagccugcaguu

SEQ ID NO: 1760890 - RNA, 13 nt, Human
ugguggagggcca

SEQ ID NO: 1760891 - RNA, 14 nt, Human
ugguggcagcugcg

SEQ ID NO: 1760892 - RNA, 13 nt, Human
ugguggcagcugc

SEQ ID NO: 1760893 - RNA, 15 nt, Human
ugguggcagcugcgg

SEQ ID NO: 1760894 - RNA, 12 nt, Human
ugguggcagugg

SEQ ID NO: 1760895 - RNA, 16 nt, Human
uggugcgaucuggguu

SEQ ID NO: 1760896 - RNA, 17 nt, Human
uggugcgaucuggguuc

SEQ ID NO: 1760897 - RNA, 16 nt, Human
uggugcuacgccugca

SEQ ID NO: 1760898 - RNA, 23 nt, Human
agucacacaguauuacuucugcu

SEQ ID NO: 1760899 - RNA, 15 nt, Human
agucacacagugagu

SEQ ID NO: 1760900 - RNA, 23 nt, Human
agucacacagugagucgaggaca

SEQ ID NO: 1760901 - RNA, 15 nt, Human
aguaugguggcuggg

SEQ ID NO: 1760902 - RNA, 16 nt, Human
aguaugguggcugggu

SEQ ID NO: 1760903 - RNA, 15 nt, Human
aguauuacuucugcu

SEQ ID NO: 1760904 - RNA, 17 nt, Human
aguaugguggcuggguu

SEQ ID NO: 1760905 - RNA, 18 nt, Human
aguauuacuucugcuaca

SEQ ID NO: 1760906 - RNA, 13 nt, Human
uguaucauaauua

SEQ ID NO: 1760907 - RNA, 16 nt, Human
uguaucauaauuacca

SEQ ID NO: 1760908 - RNA, 19 nt, Human
uguaucauaauuaccaagu

SEQ ID NO: 1760909 - RNA, 15 nt, Human
uguauccaggccugg

SEQ ID NO: 1760910 - RNA, 13 nt, Human
uguauuacaaauc

SEQ ID NO: 1760911 - RNA, 22 nt, Human
uguauuacaaauccaaugaaau

SEQ ID NO: 1760912 - RNA, 18 nt, Human
ugucaagggcagaaugaa

SEQ ID NO: 1760913 - RNA, 14 nt, Human
ugucaagcugcucu

SEQ ID NO: 1760914 - RNA, 15 nt, Human
ugucaagcugcucug

SEQ ID NO: 1760915 - RNA, 18 nt, Human
ugucaagcugcucugagc

SEQ ID NO: 1760916 - RNA, 19 nt, Human
ugucaagcugcucugagcc

SEQ ID NO: 1760917 - RNA, 11 nt, Human
aguagagacag

SEQ ID NO: 1760918 - RNA, 22 nt, Human
aguagccucuccuguauuuaac

SEQ ID NO: 1760919 - RNA, 22 nt, Human
uguagucagaauuagcugcuuc

SEQ ID NO: 1760920 - RNA, 13 nt, Human
aguaaaauccaca

SEQ ID NO: 1760921 - RNA, 23 nt, Human
uguagaaaauuuguuauuuugca

SEQ ID NO: 1760922 - RNA, 21 nt, Human
uguagaaaugguuguauuaga

SEQ ID NO: 1760923 - RNA, 13 nt, Human
uguagaaaugguu

SEQ ID NO: 1760924 - RNA, 16 nt, Human
uguagagccagggucu

SEQ ID NO: 1760925 - RNA, 18 nt, Human
uguagagccagggucuca

SEQ ID NO: 1760926 - RNA, 20 nt, Human
ugggacucaaugcacugaca

SEQ ID NO: 1760927 - RNA, 14 nt, Human
ugggacuacaggca

SEQ ID NO: 1760928 - RNA, 14 nt, Human
agggaggaguggag

SEQ ID NO: 1760929 - RNA, 15 nt, Human
agggaggaguggagg

SEQ ID NO: 1760930 - RNA, 15 nt, Human
ugggacuacaggcac

SEQ ID NO: 1760931 - RNA, 16 nt, Human
ugggacuacaggcacc

SEQ ID NO: 1760932 - RNA, 21 nt, Human
aggcccggcuccaggcuccuu

SEQ ID NO: 1760933 - RNA, 18 nt, Human
aggcccggcuccaggcuc

SEQ ID NO: 1760934 - RNA, 20 nt, Human
aggcccggcuccaggcuccu

SEQ ID NO: 1760935 - RNA, 15 nt, Human
aggcccucgcugcca

SEQ ID NO: 1760936 - RNA, 18 nt, Human
agggaagggccugccaca

SEQ ID NO: 1760937 - RNA, 13 nt, Human
agggaagggccug

SEQ ID NO: 1760938 - RNA, 14 nt, Human
agggaagggccugc

SEQ ID NO: 1760939 - RNA, 16 nt, Human
agggaagggccugcca

SEQ ID NO: 1760940 - RNA, 16 nt, Human
agggaggaguggaggu

SEQ ID NO: 1760941 - RNA, 19 nt, Human
agggcucagcggggacagc

SEQ ID NO: 1760942 - RNA, 20 nt, Human
agggcucagcggggacagcu

SEQ ID NO: 1760943 - RNA, 22 nt, Human
agggcucagcggggacagcucc

SEQ ID NO: 1760944 - RNA, 23 nt, Human
agggcucagcggggacagcuccu

SEQ ID NO: 1760945 - RNA, 20 nt, Human
agggccacaugggaggcuca

SEQ ID NO: 1760946 - RNA, 21 nt, Human
agggccacaugggaggcucac

SEQ ID NO: 1760947 - RNA, 13 nt, Human
agggcaucuugcu

SEQ ID NO: 1760948 - RNA, 18 nt, Human
agggcaucuugcuggcua

SEQ ID NO: 1760949 - RNA, 13 nt, Human
aggggaauguuug

SEQ ID NO: 1760950 - RNA, 14 nt, Human
aggggaacagacug

SEQ ID NO: 1760951 - RNA, 18 nt, Human
agggcuuuguuuugcaca

SEQ ID NO: 1760952 - RNA, 13 nt, Human
uggggucuguaaa

SEQ ID NO: 1760953 - RNA, 16 nt, Human
uggggucuguaaaauc

SEQ ID NO: 1760954 - RNA, 17 nt, Human
ugggguacccacugcuc

SEQ ID NO: 1760955 - RNA, 18 nt, Human
ugggguacccacugcucu

SEQ ID NO: 1760956 - RNA, 19 nt, Human
ugggguacccacugcucug

SEQ ID NO: 1760957 - RNA, 20 nt, Human
ugggguacccacugcucugg

SEQ ID NO: 1760958 - RNA, 21 nt, Human
uggggagacugggcugaggga

SEQ ID NO: 1760959 - RNA, 17 nt, Human
uggggagacugggcuga

SEQ ID NO: 1760960 - RNA, 15 nt, Human
agggcucuaaaaaaa

SEQ ID NO: 1760961 - RNA, 23 nt, Human
agggcucuaaaaaaagccccaaa

SEQ ID NO: 1760962 - RNA, 13 nt, Human
uggggccugacug

SEQ ID NO: 1760963 - RNA, 17 nt, Human
uggggccugacugcuca

SEQ ID NO: 1760964 - RNA, 18 nt, Human
uggggccugacugcucag

SEQ ID NO: 1760965 - RNA, 19 nt, Human
ugggucccggcucuguggg

SEQ ID NO: 1760966 - RNA, 15 nt, Human
uggguccuuccugaa

SEQ ID NO: 1760967 - RNA, 16 nt, Human
aggguggugaccucug

SEQ ID NO: 1760968 - RNA, 18 nt, Human
uggguccaugggcagagc

SEQ ID NO: 1760969 - RNA, 19 nt, Human
aggggaauguuugccucug

SEQ ID NO: 1760970 - RNA, 20 nt, Human
aggggaauguuugccucugc

SEQ ID NO: 1760971 - RNA, 21 nt, Human
aggggaauguuugccucugcc

SEQ ID NO: 1760972 - RNA, 14 nt, Human
agggucucacucug

SEQ ID NO: 1760973 - RNA, 15 nt, Human
agggucucacucugu

SEQ ID NO: 1760974 - RNA, 16 nt, Human
agggucucacucuguc

SEQ ID NO: 1760975 - RNA, 21 nt, Human
agggucucacucugucgccca

SEQ ID NO: 1760976 - RNA, 23 nt, Human
auaaaaucagccaauuauguuaa

SEQ ID NO: 1760977 - RNA, 22 nt, Human
auaaaaucagccaauuauguua

SEQ ID NO: 1760978 - RNA, 18 nt, Human
auaaaaucagccaauuau

SEQ ID NO: 1760979 - RNA, 16 nt, Human
auaaaaucagccaauu

SEQ ID NO: 1760980 - RNA, 15 nt, Human
uuaagaggcaggguc

SEQ ID NO: 1760981 - RNA, 16 nt, Human
uuaagaggcagggucu

SEQ ID NO: 1760982 - RNA, 13 nt, Human
uuaagaggcaggg

SEQ ID NO: 1760983 - RNA, 20 nt, Human
uuaaguuauuuuaccuguuu

SEQ ID NO: 1760984 - RNA, 14 nt, Human
uuaaugaagaaagu

SEQ ID NO: 1760985 - RNA, 18 nt, Human
uuaaugaagaaaguggaa

SEQ ID NO: 1760986 - RNA, 23 nt, Human
uuaaugaagaaaguggaaaacaa

SEQ ID NO: 1760987 - RNA, 15 nt, Human
uuaaugaaguuugaa

SEQ ID NO: 1760988 - RNA, 14 nt, Human
uuaaugaaguuuga

SEQ ID NO: 1760989 - RNA, 19 nt, Human
uuaauuuuuuugagacaga

SEQ ID NO: 1760990 - RNA, 14 nt, Human
uuacaaaaacacuu

SEQ ID NO: 1760991 - RNA, 19 nt, Human
uuacaaaaacacuucguuc

SEQ ID NO: 1760992 - RNA, 17 nt, Human
auaaaauuuuuuuucau

SEQ ID NO: 1760993 - RNA, 19 nt, Human
auaaaauuuuuuuucaugu

SEQ ID NO: 1760994 - RNA, 23 nt, Human
auaaaauuuuuuuucauguuuua

SEQ ID NO: 1760995 - RNA, 13 nt, Human
uuaccugugugcu

SEQ ID NO: 1760996 - RNA, 11 nt, Human
uuagacagagu

SEQ ID NO: 1760997 - RNA, 19 nt, Human
uuacaguaggagcccagcu

SEQ ID NO: 1760998 - RNA, 16 nt, Human
auaacuaagcauccuu

SEQ ID NO: 1760999 - RNA, 15 nt, Human
auaaaguucuguacu

SEQ ID NO: 1761000 - RNA, 14 nt, Human
auaaacacuacaga

SEQ ID NO: 1761001 - RNA, 12 nt, Human
aguucuguagaa

SEQ ID NO: 1761002 - RNA, 23 nt, Human
aguucuguacucaaauguagcca

SEQ ID NO: 1761003 - RNA, 22 nt, Human
aguucuggauggugugccuucc

SEQ ID NO: 1761004 - RNA, 23 nt, Human
aguucuggauggugugccuucca

SEQ ID NO: 1761005 - RNA, 15 nt, Human
aguucugcugaaugc

SEQ ID NO: 1761006 - RNA, 20 nt, Human
uguuuuauggccuaaauuua

SEQ ID NO: 1761007 - RNA, 18 nt, Human
uguuuggaauauugucca

SEQ ID NO: 1761008 - RNA, 11 nt, Human
uguugcuaagc

SEQ ID NO: 1761009 - RNA, 19 nt, Human
uguugcccaggcaggucuu

SEQ ID NO: 1761010 - RNA, 20 nt, Human
uguugcacacccacucagcu

SEQ ID NO: 1761011 - RNA, 21 nt, Human
uguugcacacccacucagcuc

SEQ ID NO: 1761012 - RNA, 22 nt, Human
uguugcacacccacucagcucc

SEQ ID NO: 1761013 - RNA, 23 nt, Human
uguugcacacccacucagcuccg

SEQ ID NO: 1761014 - RNA, 13 nt, Human
uguugcugaauag

SEQ ID NO: 1761015 - RNA, 11 nt, Human
uguugcugaau

SEQ ID NO: 1761016 - RNA, 22 nt, Human
uguugcuaagccccagcaagca

SEQ ID NO: 1761017 - RNA, 21 nt, Human
uguugcuaagccccagcaagc

SEQ ID NO: 1761018 - RNA, 12 nt, Human
uguugcuaagcc

SEQ ID NO: 1761019 - RNA, 19 nt, Human
uguuuauuaaaauucugaa

SEQ ID NO: 1761020 - RNA, 13 nt, Human
uguuuauuaaaua

SEQ ID NO: 1761021 - RNA, 14 nt, Human
uguuuauuaaauag

SEQ ID NO: 1761022 - RNA, 17 nt, Human
uguuucuguucaccuuc

SEQ ID NO: 1761023 - RNA, 15 nt, Human
aguugguuggauaag

SEQ ID NO: 1761024 - RNA, 16 nt, Human
aguuggcuaggacccc

SEQ ID NO: 1761025 - RNA, 21 nt, Human
aguugcucuaugcuuuccaaa

SEQ ID NO: 1761026 - RNA, 16 nt, Human
aguugcucuaugcuuu

SEQ ID NO: 1761027 - RNA, 17 nt, Human
aguugcucuaugcuuuc

SEQ ID NO: 1761028 - RNA, 14 nt, Human
aguugcucuaugcu

SEQ ID NO: 1761029 - RNA, 23 nt, Human
aguugggaacuucagauggaccu

SEQ ID NO: 1761030 - RNA, 21 nt, Human
aguuggguggaugccuggugg

SEQ ID NO: 1761031 - RNA, 19 nt, Human
uuaacaaaaagugcuucau

SEQ ID NO: 1761032 - RNA, 13 nt, Human
uuaaaauguucac

SEQ ID NO: 1761033 - RNA, 14 nt, Human
uuaaaauucugaau

SEQ ID NO: 1761034 - RNA, 15 nt, Human
uuaaaauucugaauu

SEQ ID NO: 1761035 - RNA, 18 nt, Human
uuaaaauucugaauuuug

SEQ ID NO: 1761036 - RNA, 21 nt, Human
uuaaaggcaguauuuuguguc

SEQ ID NO: 1761037 - RNA, 20 nt, Human
uuaaagggagaugguaagaa

SEQ ID NO: 1761038 - RNA, 17 nt, Human
uuaaauaaauuguauau

SEQ ID NO: 1761039 - RNA, 15 nt, Human
uuaaauaaauuguau

SEQ ID NO: 1761040 - RNA, 13 nt, Human
uuaaauaaauugu

SEQ ID NO: 1761041 - RNA, 20 nt, Human
uuaaauaaauuguauauuca

SEQ ID NO: 1761042 - RNA, 18 nt, Human
uuaaauaaauuguauauu

SEQ ID NO: 1761043 - RNA, 18 nt, Human
uguuacaaaguuguaugu

SEQ ID NO: 1761044 - RNA, 17 nt, Human
aguggugcgaucugggu

SEQ ID NO: 1761045 - RNA, 19 nt, Human
aguggugguauguaaugga

SEQ ID NO: 1761046 - RNA, 21 nt, Human
aguguaaauaguuacuccagu

SEQ ID NO: 1761047 - RNA, 13 nt, Human
uguugcccaggca

SEQ ID NO: 1761048 - RNA, 12 nt, Human
uguugcccaggc

SEQ ID NO: 1761049 - RNA, 16 nt, Human
uguugcaagccccucu

SEQ ID NO: 1761050 - RNA, 15 nt, Human
uguugcccaggcagg

SEQ ID NO: 1761051 - RNA, 16 nt, Human
uguugcccaggcaggu

SEQ ID NO: 1761052 - RNA, 17 nt, Human
uguugcccaggcagguc

SEQ ID NO: 1761053 - RNA, 18 nt, Human
uguugcccaggcaggucu

SEQ ID NO: 1761054 - RNA, 16 nt, Human
uguucugggacacagu

SEQ ID NO: 1761055 - RNA, 12 nt, Human
uguuccagacau

SEQ ID NO: 1761056 - RNA, 19 nt, Human
uguuauagaacuucaugga

SEQ ID NO: 1761057 - RNA, 20 nt, Human
uguuauagaacuucauggau

SEQ ID NO: 1761058 - RNA, 21 nt, Human
ugugucuugcaauggcagccu

SEQ ID NO: 1761059 - RNA, 14 nt, Human
ugugugugucagcu

SEQ ID NO: 1761060 - RNA, 15 nt, Human
uguguugaaggaacu

SEQ ID NO: 1761061 - RNA, 16 nt, Human
uguuaaauaaauugua

SEQ ID NO: 1761062 - RNA, 14 nt, Human
uguuaaauaaauug

SEQ ID NO: 1761063 - RNA, 13 nt, Human
uguuaaauaaauu

SEQ ID NO: 1761064 - RNA, 20 nt, Human
uguuaaauaaauuguauauu

SEQ ID NO: 1761065 - RNA, 18 nt, Human
uguuaaauaaauuguaua

SEQ ID NO: 1761066 - RNA, 15 nt, Human
uguuaaguauuuuca

SEQ ID NO: 1761067 - RNA, 17 nt, Human
uguuaaguauuuucaua

SEQ ID NO: 1761068 - RNA, 20 nt, Human
agugcugggauuacaggugu

SEQ ID NO: 1761069 - RNA, 21 nt, Human
agugcugggauuacaggugug

SEQ ID NO: 1761070 - RNA, 13 nt, Human
agugcuguauaaa

SEQ ID NO: 1761071 - RNA, 12 nt, Human
agugcuguauaa

SEQ ID NO: 1761072 - RNA, 22 nt, Human
agugcuguauaaaaucagccaa

SEQ ID NO: 1761073 - RNA, 19 nt, Human
agugcuguauaaaaucagc

SEQ ID NO: 1761074 - RNA, 17 nt, Human
agugcuguauaaaauca

SEQ ID NO: 1761075 - RNA, 16 nt, Human
agugcuguauaaaauc

SEQ ID NO: 1761076 - RNA, 15 nt, Human
agugcuguauaaaau

SEQ ID NO: 1761077 - RNA, 14 nt, Human
agugcuguauaaaa

SEQ ID NO: 1761078 - RNA, 17 nt, Human
agugcugcagcucccug

SEQ ID NO: 1761079 - RNA, 18 nt, Human
agugcugcagcucccugg

SEQ ID NO: 1761080 - RNA, 21 nt, Human
agugcugcagcucccuggcuu

SEQ ID NO: 1761081 - RNA, 22 nt, Human
agugcugcagcucccuggcuuc

SEQ ID NO: 1761082 - RNA, 23 nt, Human
agugcugcagcucccuggcuucu

SEQ ID NO: 1761083 - RNA, 17 nt, Human
ugugggugauggggagg

SEQ ID NO: 1761084 - RNA, 13 nt, Human
uguggguguccug

SEQ ID NO: 1761085 - RNA, 14 nt, Human
uguggguguccugc

SEQ ID NO: 1761086 - RNA, 15 nt, Human
uguggguguccugcc

SEQ ID NO: 1761087 - RNA, 21 nt, Human
uguggguguccugccugucug

SEQ ID NO: 1761088 - RNA, 23 nt, Human
uguggguguccugccugucugcc

SEQ ID NO: 1761089 - RNA, 14 nt, Human
uguggguucuacag

SEQ ID NO: 1761090 - RNA, 23 nt, Human
uguggugugucccccucugucca

SEQ ID NO: 1761091 - RNA, 18 nt, Human
agucucaggagucucugg

SEQ ID NO: 1761092 - RNA, 19 nt, Human
agucuuccacaaagaaaau

SEQ ID NO: 1761093 - RNA, 20 nt, Human
agucuuccacaaagaaaauu

SEQ ID NO: 1761094 - RNA, 21 nt, Human
agucuuccacaaagaaaauuc

SEQ ID NO: 1761095 - RNA, 24 nt, Human
agucacccuuccaccauuguccua

SEQ ID NO: 1761096 - RNA, 19 nt, Human
ugugaaccaccacacccag

SEQ ID NO: 1761097 - RNA, 20 nt, Human
ugugaaccaccacacccagc

SEQ ID NO: 1761098 - RNA, 21 nt, Human
ugugaaccaccacacccagcc

SEQ ID NO: 1761099 - RNA, 22 nt, Human
ugugaacuggacccuguugcua

SEQ ID NO: 1761100 - RNA, 21 nt, Human
ugugaacuggacccuguugcu

SEQ ID NO: 1761101 - RNA, 15 nt, Human
agugagucgaggaca

SEQ ID NO: 1761102 - RNA, 18 nt, Human
ugugcugggagaaauacu

SEQ ID NO: 1761103 - RNA, 20 nt, Human
ugugccagguuuuuggucug

SEQ ID NO: 1761104 - RNA, 12 nt, Human
ugugccaugugc

SEQ ID NO: 1761105 - RNA, 16 nt, Human
ugugccaugugccagg

SEQ ID NO: 1761106 - RNA, 23 nt, Human
ugugccaaucaauagcaccccua

SEQ ID NO: 1761107 - RNA, 19 nt, Human
ugugccaaccuauuuugaa

SEQ ID NO: 1761108 - RNA, 14 nt, Human
ugugaugaauacug

SEQ ID NO: 1761109 - RNA, 16 nt, Human
ugugaugaauacugua

SEQ ID NO: 1761110 - RNA, 18 nt, Human
ugugaugaauacuguauu

SEQ ID NO: 1761111 - RNA, 13 nt, Human
ugugaucgucuga

SEQ ID NO: 1761112 - RNA, 15 nt, Human
agugaaagaaaauaa

SEQ ID NO: 1761113 - RNA, 21 nt, Human
auauuuucaccauuugauuau

SEQ ID NO: 1761114 - RNA, 22 nt, Human
uuccuguguguccaaaacugcc

SEQ ID NO: 1761115 - RNA, 21 nt, Human
uuccuguguguccaaaacugc

SEQ ID NO: 1761116 - RNA, 22 nt, Human
uuccuaauaaaguucuguacuc

SEQ ID NO: 1761117 - RNA, 11 nt, Human
uuccuccuggg

SEQ ID NO: 1761118 - RNA, 14 nt, Human
uuccuccugggccc

SEQ ID NO: 1761119 - RNA, 15 nt, Human
uuccuccugggcccu

SEQ ID NO: 1761120 - RNA, 21 nt, Human
uuccuccugggcccucucugc

SEQ ID NO: 1761121 - RNA, 23 nt, Human
uuccuccugggcccucucugcuc

SEQ ID NO: 1761122 - RNA, 11 nt, Human
uuccuccuuuc

SEQ ID NO: 1761123 - RNA, 15 nt, Human
uuccuaauaaaguuc

SEQ ID NO: 1761124 - RNA, 16 nt, Human
uuccuaauaaaguucu

SEQ ID NO: 1761125 - RNA, 19 nt, Human
uuccuaauaaaguucugua

SEQ ID NO: 1761126 - RNA, 23 nt, Human
auauuugucaauuuaugaauaua

SEQ ID NO: 1761127 - RNA, 17 nt, Human
aucacguuagaggaaaa

SEQ ID NO: 1761128 - RNA, 21 nt, Human
aucacguuagaggaaaaauau

SEQ ID NO: 1761129 - RNA, 22 nt, Human
aucacguuagaggaaaaauauu

SEQ ID NO: 1761130 - RNA, 22 nt, Human
aucacggcucacugcagccuca

SEQ ID NO: 1761131 - RNA, 22 nt, Human
aucacaacgugcauugugcuuc

SEQ ID NO: 1761132 - RNA, 21 nt, Human
aucacaacgugcauugugcuu

SEQ ID NO: 1761133 - RNA, 18 nt, Human
aucacaacgugcauugug

SEQ ID NO: 1761134 - RNA, 17 nt, Human
aucacaacgugcauugu

SEQ ID NO: 1761135 - RNA, 15 nt, Human
aucacaacgugcauu

SEQ ID NO: 1761136 - RNA, 13 nt, Human
aucaagaagggcu

SEQ ID NO: 1761137 - RNA, 14 nt, Human
aucaagaagggcug

SEQ ID NO: 1761138 - RNA, 16 nt, Human
aucaagaagggcugca

SEQ ID NO: 1761139 - RNA, 19 nt, Human
aucaagaagggcugcauga

SEQ ID NO: 1761140 - RNA, 20 nt, Human
aucaagaagggcugcaugau

SEQ ID NO: 1761141 - RNA, 22 nt, Human
aucaagaagggcugcaugaugu

SEQ ID NO: 1761142 - RNA, 20 nt, Human
aucaacuuuuuauugccuuc

SEQ ID NO: 1761143 - RNA, 21 nt, Human
aucaacuuuuuauugccuucu

SEQ ID NO: 1761144 - RNA, 22 nt, Human
aucaacuuuuuauugccuucuc

SEQ ID NO: 1761145 - RNA, 16 nt, Human
auauucuguuggccag

SEQ ID NO: 1761146 - RNA, 16 nt, Human
auauucugcucuauua

SEQ ID NO: 1761147 - RNA, 21 nt, Human
auauucugcucuauuauauaa

SEQ ID NO: 1761148 - RNA, 17 nt, Human
auauucccuagaaacuu

SEQ ID NO: 1761149 - RNA, 23 nt, Human
auauucccuagaaacuuccaaau

SEQ ID NO: 1761150 - RNA, 16 nt, Human
auauugaaaaaauaga

SEQ ID NO: 1761151 - RNA, 20 nt, Human
auauguuuuaagaggcaggg

SEQ ID NO: 1761152 - RNA, 18 nt, Human
auauguuuuaagaggcag

SEQ ID NO: 1761153 - RNA, 22 nt, Human
uucauguugcacacccacucag

SEQ ID NO: 1761154 - RNA, 15 nt, Human
uucauguuuuaacaa

SEQ ID NO: 1761155 - RNA, 17 nt, Human
uucauguuuuaacaaaa

SEQ ID NO: 1761156 - RNA, 18 nt, Human
uucauguuuuaacaaaaa

SEQ ID NO: 1761157 - RNA, 19 nt, Human
auauuaauaguaauuugua

SEQ ID NO: 1761158 - RNA, 14 nt, Human
auauuugaaucuug

SEQ ID NO: 1761159 - RNA, 13 nt, Human
auauuugaaucuu

SEQ ID NO: 1761160 - RNA, 11 nt, Human
auauuugaauc

SEQ ID NO: 1761161 - RNA, 16 nt, Human
auauuugaaucuuguc

SEQ ID NO: 1761162 - RNA, 15 nt, Human
auauuugaaucuugu

SEQ ID NO: 1761163 - RNA, 14 nt, Human
auauuucuauugaa

SEQ ID NO: 1761164 - RNA, 16 nt, Human
auauuucuauugaauu

SEQ ID NO: 1761165 - RNA, 15 nt, Human
auauuucgaaagcug

SEQ ID NO: 1761166 - RNA, 21 nt, Human
auauugcacaugucuuaauga

SEQ ID NO: 1761167 - RNA, 20 nt, Human
auauugcacaugucuuaaug

SEQ ID NO: 1761168 - RNA, 19 nt, Human
auauugcacaugucuuaau

SEQ ID NO: 1761169 - RNA, 17 nt, Human
auauugcacaugucuua

SEQ ID NO: 1761170 - RNA, 16 nt, Human
auauugcacaugucuu

SEQ ID NO: 1761171 - RNA, 15 nt, Human
auauugcacaugucu

SEQ ID NO: 1761172 - RNA, 13 nt, Human
auauugcacaugu

SEQ ID NO: 1761173 - RNA, 23 nt, Human
uucucacaauagccgauaucaga

SEQ ID NO: 1761174 - RNA, 23 nt, Human
uucucagacuuuggaaaaugcau

SEQ ID NO: 1761175 - RNA, 22 nt, Human
uucucagacuuuggaaaaugca

SEQ ID NO: 1761176 - RNA, 23 nt, Human
aucagaaauacagauuuugauag

SEQ ID NO: 1761177 - RNA, 19 nt, Human
aucagaaauacagauuuug

SEQ ID NO: 1761178 - RNA, 15 nt, Human
aucagaaauacagau

SEQ ID NO: 1761179 - RNA, 14 nt, Human
aucagaaauacaga

SEQ ID NO: 1761180 - RNA, 21 nt, Human
uuccuuuuuuaaaaaugcaaa

SEQ ID NO: 1761181 - RNA, 13 nt, Human
uuccuuuuuuccc

SEQ ID NO: 1761182 - RNA, 15 nt, Human
uuccuuuuuucccau

SEQ ID NO: 1761183 - RNA, 19 nt, Human
uuccuuuuuucccauaaga

SEQ ID NO: 1761184 - RNA, 22 nt, Human
uuccuuuuuucccauaagacaa

SEQ ID NO: 1761185 - RNA, 21 nt, Human
aucagaucuggggcagcaccc

SEQ ID NO: 1761186 - RNA, 13 nt, Human
aucauaauuacca

SEQ ID NO: 1761187 - RNA, 14 nt, Human
aucauaauuaccaa

SEQ ID NO: 1761188 - RNA, 18 nt, Human
aucauaauuaccaaguga

SEQ ID NO: 1761189 - RNA, 23 nt, Human
aucagagccuuuccucaaaacug

SEQ ID NO: 1761190 - RNA, 13 nt, Human
aucagucaagcug

SEQ ID NO: 1761191 - RNA, 23 nt, Human
aucauaguggcuuaaaacaacac

SEQ ID NO: 1761192 - RNA, 12 nt, Human
aucaucaagaag

SEQ ID NO: 1761193 - RNA, 14 nt, Human
aucaucaagaaggg

SEQ ID NO: 1761194 - RNA, 16 nt, Human
aucaucaagaagggcu

SEQ ID NO: 1761195 - RNA, 17 nt, Human
aucaucaagaagggcug

SEQ ID NO: 1761196 - RNA, 18 nt, Human
aucaucaagaagggcugc

SEQ ID NO: 1761197 - RNA, 20 nt, Human
aucaucaagaagggcugcau

SEQ ID NO: 1761198 - RNA, 21 nt, Human
aucaucaagaagggcugcaug

SEQ ID NO: 1761199 - RNA, 22 nt, Human
aucaucaagaagggcugcauga

SEQ ID NO: 1761200 - RNA, 17 nt, Human
uucugccaccccuaaac

SEQ ID NO: 1761201 - RNA, 12 nt, Human
uucugccuccuu

SEQ ID NO: 1761202 - RNA, 13 nt, Human
uucugccuccuuu

SEQ ID NO: 1761203 - RNA, 14 nt, Human
uucugccuccuuua

SEQ ID NO: 1761204 - RNA, 17 nt, Human
uucugccuccuuuagua

SEQ ID NO: 1761205 - RNA, 12 nt, Human
uucugccucucc

SEQ ID NO: 1761206 - RNA, 16 nt, Human
uucugccucuccaggc

SEQ ID NO: 1761207 - RNA, 10 nt, Human
uucugggaca

SEQ ID NO: 1761208 - RNA, 11 nt, Human
uucugggacac

SEQ ID NO: 1761209 - RNA, 22 nt, Human
uucugggacacaguucaauucu

SEQ ID NO: 1761210 - RNA, 22 nt, Human
uucuguaaacucugcauccaga

SEQ ID NO: 1761211 - RNA, 17 nt, Human
uucucugucucauccau

SEQ ID NO: 1761212 - RNA, 14 nt, Human
auccagguaaucca

SEQ ID NO: 1761213 - RNA, 15 nt, Human
auccagguucagcuu

SEQ ID NO: 1761214 - RNA, 16 nt, Human
auccagguucagcuug

SEQ ID NO: 1761215 - RNA, 18 nt, Human
uucuguacucaaauguag

SEQ ID NO: 1761216 - RNA, 13 nt, Human
aucccucaucugu

SEQ ID NO: 1761217 - RNA, 17 nt, Human
aucccucaucugucccu

SEQ ID NO: 1761218 - RNA, 18 nt, Human
aucccaggccccuggagg

SEQ ID NO: 1761219 - RNA, 24 nt, Human
aucccaggccccuggaggcugccu

SEQ ID NO: 1761220 - RNA, 17 nt, Human
aucccucuacagagcuu

SEQ ID NO: 1761221 - RNA, 11 nt, Human
aucccucaucu

SEQ ID NO: 1761222 - RNA, 20 nt, Human
aucccucuacagagcuuccc

SEQ ID NO: 1761223 - RNA, 21 nt, Human
aucccucuacagagcuucccu

SEQ ID NO: 1761224 - RNA, 22 nt, Human
aucccucuacagagcuucccug

SEQ ID NO: 1761225 - RNA, 23 nt, Human
aucccucuacagagcuucccuga

SEQ ID NO: 1761226 - RNA, 14 nt, Human
aucccucuccuccc

SEQ ID NO: 1761227 - RNA, 17 nt, Human
auagcugggacuacagg

SEQ ID NO: 1761228 - RNA, 22 nt, Human
uuauuguguuugucauuagccu

SEQ ID NO: 1761229 - RNA, 20 nt, Human
uuauuguguuugucauuagc

SEQ ID NO: 1761230 - RNA, 19 nt, Human
uuauuguguuugucauuag

SEQ ID NO: 1761231 - RNA, 12 nt, Human
auagcugcugcc

SEQ ID NO: 1761232 - RNA, 19 nt, Human
uuauuuccuaguucuguag

SEQ ID NO: 1761233 - RNA, 18 nt, Human
uuauuuccuaguucugua

SEQ ID NO: 1761234 - RNA, 19 nt, Human
auagcucaggugucccugc

SEQ ID NO: 1761235 - RNA, 18 nt, Human
auagcuacuaauuuuaaa

SEQ ID NO: 1761236 - RNA, 22 nt, Human
auagcucaggugucccugcacu

SEQ ID NO: 1761237 - RNA, 20 nt, Human
auagcucaggugucccugca

SEQ ID NO: 1761238 - RNA, 21 nt, Human
auagcucaggugucccugcac

SEQ ID NO: 1761239 - RNA, 12 nt, Human
auagcugggacu

SEQ ID NO: 1761240 - RNA, 16 nt, Human
auaagaguagaaacug

SEQ ID NO: 1761241 - RNA, 16 nt, Human
auaacuucaagcaaac

SEQ ID NO: 1761242 - RNA, 17 nt, Human
auagcuacuaauuuuaa

SEQ ID NO: 1761243 - RNA, 14 nt, Human
auagcuacuaauuu

SEQ ID NO: 1761244 - RNA, 19 nt, Human
uucaauaaaguauuuaauu

SEQ ID NO: 1761245 - RNA, 18 nt, Human
uucaauaaaguauuuaau

SEQ ID NO: 1761246 - RNA, 14 nt, Human
uucaauaaaguauu

SEQ ID NO: 1761247 - RNA, 21 nt, Human
uucaauaaaguauuuaauuag

SEQ ID NO: 1761248 - RNA, 22 nt, Human
uucaccacaugugcacaugcac

SEQ ID NO: 1761249 - RNA, 19 nt, Human
uucaccagaauggaaagac

SEQ ID NO: 1761250 - RNA, 24 nt, Human
uucaccauuuggcaaugccaucau

SEQ ID NO: 1761251 - RNA, 19 nt, Human
uucaauaaagcacugagca

SEQ ID NO: 1761252 - RNA, 13 nt, Human
uucaacuuugaau

SEQ ID NO: 1761253 - RNA, 15 nt, Human
uucaacuuugaauaa

SEQ ID NO: 1761254 - RNA, 16 nt, Human
uucaacuuugaauaaa

SEQ ID NO: 1761255 - RNA, 19 nt, Human
uucaacuuugaauaaagaa

SEQ ID NO: 1761256 - RNA, 20 nt, Human
uucaacuuugaauaaagaau

SEQ ID NO: 1761257 - RNA, 22 nt, Human
uucaacuuugaauaaagaauac

SEQ ID NO: 1761258 - RNA, 18 nt, Human
uucaaaauucuaaaugua

SEQ ID NO: 1761259 - RNA, 21 nt, Human
uuauuuccuaguucuguagaa

SEQ ID NO: 1761260 - RNA, 22 nt, Human
uuauuucucagacuuuggaaaa

SEQ ID NO: 1761261 - RNA, 22 nt, Human
auauaaauucacuuucauuuuu

SEQ ID NO: 1761262 - RNA, 14 nt, Human
auauaaguaaagug

SEQ ID NO: 1761263 - RNA, 22 nt, Human
auauaaguaaagugauuaaagu

SEQ ID NO: 1761264 - RNA, 19 nt, Human
auauagguuucuauucuug

SEQ ID NO: 1761265 - RNA, 12 nt, Human
auagucccugcc

SEQ ID NO: 1761266 - RNA, 16 nt, Human
uucagccacuaagaac

SEQ ID NO: 1761267 - RNA, 13 nt, Human
uucagaucuuaau

SEQ ID NO: 1761268 - RNA, 19 nt, Human
uucagaucuuaauauaaau

SEQ ID NO: 1761269 - RNA, 21 nt, Human
uucagaucuuaauauaaauuc

SEQ ID NO: 1761270 - RNA, 19 nt, Human
uucagacaaaauggauaca

SEQ ID NO: 1761271 - RNA, 15 nt, Human
auauguauuuaccaa

SEQ ID NO: 1761272 - RNA, 16 nt, Human
auauguauuuaccaaa

SEQ ID NO: 1761273 - RNA, 18 nt, Human
auauguauuuaccaaaaa

SEQ ID NO: 1761274 - RNA, 17 nt, Human
uucauggcagaaggcaa

SEQ ID NO: 1761275 - RNA, 13 nt, Human
uucauggaucaga

SEQ ID NO: 1761276 - RNA, 16 nt, Human
uucauggaucagaucu

SEQ ID NO: 1761277 - RNA, 14 nt, Human
uucauguaaacugu

SEQ ID NO: 1761278 - RNA, 17 nt, Human
uucauguaaacugugca

SEQ ID NO: 1761279 - RNA, 18 nt, Human
uucauguaaacugugcac

SEQ ID NO: 1761280 - RNA, 19 nt, Human
uucauguaaacugugcacc

SEQ ID NO: 1761281 - RNA, 23 nt, Human
auaucugccuuuauuguguuugu

SEQ ID NO: 1761282 - RNA, 14 nt, Human
auaucugauuguug

SEQ ID NO: 1761283 - RNA, 22 nt, Human
auaucugauuguugucaggcca

SEQ ID NO: 1761284 - RNA, 20 nt, Human
auaucugccuuuauuguguu

SEQ ID NO: 1761285 - RNA, 18 nt, Human
auaucugccuuuauugug

SEQ ID NO: 1761286 - RNA, 16 nt, Human
auaucugccuuuauug

SEQ ID NO: 1761287 - RNA, 14 nt, Human
auaucugccuuuau

SEQ ID NO: 1761288 - RNA, 15 nt, Human
uucagccucuuucug

SEQ ID NO: 1761289 - RNA, 20 nt, Human
auaucuaauuauuuugcagu

SEQ ID NO: 1761290 - RNA, 23 nt, Human
aucuaauauguaacaagccaccc

SEQ ID NO: 1761291 - RNA, 16 nt, Human
aucuaauuauuuugca

SEQ ID NO: 1761292 - RNA, 13 nt, Human
uugauagcaaagc

SEQ ID NO: 1761293 - RNA, 14 nt, Human
uugagugcucugau

SEQ ID NO: 1761294 - RNA, 15 nt, Human
uugagugcucugauc

SEQ ID NO: 1761295 - RNA, 16 nt, Human
uugagcagggcucagc

SEQ ID NO: 1761296 - RNA, 19 nt, Human
uugagcaugacagccugca

SEQ ID NO: 1761297 - RNA, 20 nt, Human
uugagcaugacagccugcag

SEQ ID NO: 1761298 - RNA, 21 nt, Human
uugagcaugacagccugcagc

SEQ ID NO: 1761299 - RNA, 12 nt, Human
uugagcagggcu

SEQ ID NO: 1761300 - RNA, 15 nt, Human
uugagcaauuucccc

SEQ ID NO: 1761301 - RNA, 23 nt, Human
uugagcagcagguagccugcugg

SEQ ID NO: 1761302 - RNA, 11 nt, Human
uugagacagag

SEQ ID NO: 1761303 - RNA, 10 nt, Human
uugacagggc

SEQ ID NO: 1761304 - RNA, 12 nt, Human
uugacagggcac

SEQ ID NO: 1761305 - RNA, 19 nt, Human
uugacagggcacaccgggc

SEQ ID NO: 1761306 - RNA, 11 nt, Human
uugacacauag

SEQ ID NO: 1761307 - RNA, 14 nt, Human
auccgaaucucuuu

SEQ ID NO: 1761308 - RNA, 16 nt, Human
auccgaaccuccucug

SEQ ID NO: 1761309 - RNA, 19 nt, Human
auccgaaccuccucuguga

SEQ ID NO: 1761310 - RNA, 20 nt, Human
auccgaaccuccucugugaa

SEQ ID NO: 1761311 - RNA, 13 nt, Human
uugcaauaaugca

SEQ ID NO: 1761312 - RNA, 14 nt, Human
uugcaauaaugcag

SEQ ID NO: 1761313 - RNA, 15 nt, Human
uugcaauaaugcagu

SEQ ID NO: 1761314 - RNA, 16 nt, Human
uugcaauaaugcagua

SEQ ID NO: 1761315 - RNA, 17 nt, Human
uugcaauaaugcaguau

SEQ ID NO: 1761316 - RNA, 21 nt, Human
uugcaauaaugcaguauggua

SEQ ID NO: 1761317 - RNA, 14 nt, Human
uugcaauggcagcc

SEQ ID NO: 1761318 - RNA, 13 nt, Human
uugcccaggcagg

SEQ ID NO: 1761319 - RNA, 14 nt, Human
uugcccaggcaggu

SEQ ID NO: 1761320 - RNA, 16 nt, Human
uugcccaggcaggucu

SEQ ID NO: 1761321 - RNA, 18 nt, Human
uugcccaggcaggucuug

SEQ ID NO: 1761322 - RNA, 11 nt, Human
uugcccaggcu

SEQ ID NO: 1761323 - RNA, 12 nt, Human
uugcccaggcug

SEQ ID NO: 1761324 - RNA, 14 nt, Human
uugcccaggcuggc

SEQ ID NO: 1761325 - RNA, 23 nt, Human
uugcccaggcuggcgugcagugg

SEQ ID NO: 1761326 - RNA, 22 nt, Human
aucucaagaugggggcagggcu

SEQ ID NO: 1761327 - RNA, 23 nt, Human
aucucaagaugggggcagggcug

SEQ ID NO: 1761328 - RNA, 19 nt, Human
aucucuuuuugcuuucgaa

SEQ ID NO: 1761329 - RNA, 17 nt, Human
uugguuuugacuucaga

SEQ ID NO: 1761330 - RNA, 17 nt, Human
uugguuaaaaaaaagaa

SEQ ID NO: 1761331 - RNA, 18 nt, Human
uugggguggguauaaaag

SEQ ID NO: 1761332 - RNA, 20 nt, Human
uugggguggguauaaaagau

SEQ ID NO: 1761333 - RNA, 14 nt, Human
augaagaaagugga

SEQ ID NO: 1761334 - RNA, 20 nt, Human
augaaccagccggggccuua

SEQ ID NO: 1761335 - RNA, 14 nt, Human
uuggagcuucaugg

SEQ ID NO: 1761336 - RNA, 16 nt, Human
uuggagcuauucaaga

SEQ ID NO: 1761337 - RNA, 21 nt, Human
uuggaggcaauccuaccuugc

SEQ ID NO: 1761338 - RNA, 23 nt, Human
augaaccacaucuugcucugcug

SEQ ID NO: 1761339 - RNA, 22 nt, Human
augaaccacaucuugcucugcu

SEQ ID NO: 1761340 - RNA, 18 nt, Human
augaacacuuaaauuaug

SEQ ID NO: 1761341 - RNA, 13 nt, Human
augaaauaugcau

SEQ ID NO: 1761342 - RNA, 15 nt, Human
augaaauaugcaucu

SEQ ID NO: 1761343 - RNA, 20 nt, Human
uugcucuguuugugggguga

SEQ ID NO: 1761344 - RNA, 15 nt, Human
uuggaaaaugcauug

SEQ ID NO: 1761345 - RNA, 15 nt, Human
uuggagcccagggca

SEQ ID NO: 1761346 - RNA, 12 nt, Human
aucugucauuug

SEQ ID NO: 1761347 - RNA, 17 nt, Human
aucugucauuugagcag

SEQ ID NO: 1761348 - RNA, 22 nt, Human
aucugucauuugagcagggcuc

SEQ ID NO: 1761349 - RNA, 19 nt, Human
uugccccuuucucuuuucc

SEQ ID NO: 1761350 - RNA, 12 nt, Human
aucugugucuug

SEQ ID NO: 1761351 - RNA, 13 nt, Human
aucugugucuugu

SEQ ID NO: 1761352 - RNA, 14 nt, Human
aucugugucuuguu

SEQ ID NO: 1761353 - RNA, 19 nt, Human
aucugugcucaggacucag

SEQ ID NO: 1761354 - RNA, 17 nt, Human
aucuugcucugcugaca

SEQ ID NO: 1761355 - RNA, 21 nt, Human
aucuuggacucaugaggaggg

SEQ ID NO: 1761356 - RNA, 15 nt, Human
aucuugcucugcuga

SEQ ID NO: 1761357 - RNA, 16 nt, Human
aucuugcucugcugac

SEQ ID NO: 1761358 - RNA, 15 nt, Human
aucuuauaauuuaaa

SEQ ID NO: 1761359 - RNA, 14 nt, Human
aucuugcucugcug

SEQ ID NO: 1761360 - RNA, 12 nt, Human
aucuuaauauaa

SEQ ID NO: 1761361 - RNA, 13 nt, Human
aucuuaauauaaa

SEQ ID NO: 1761362 - RNA, 14 nt, Human
aucuuaauauaaau

SEQ ID NO: 1761363 - RNA, 16 nt, Human
aucuuauaauuuaaaa

SEQ ID NO: 1761364 - RNA, 20 nt, Human
augcgacacugggaggccag

SEQ ID NO: 1761365 - RNA, 22 nt, Human
uuuacugccaaagggaaauauc

SEQ ID NO: 1761366 - RNA, 19 nt, Human
uuuacuggacaaagaauuc

SEQ ID NO: 1761367 - RNA, 15 nt, Human
uuuacuuaacuguuu

SEQ ID NO: 1761368 - RNA, 16 nt, Human
uuuaguuacuuuagau

SEQ ID NO: 1761369 - RNA, 14 nt, Human
augccaucaucucc

SEQ ID NO: 1761370 - RNA, 15 nt, Human
augccaucaucuccu

SEQ ID NO: 1761371 - RNA, 16 nt, Human
augccaucaucuccug

SEQ ID NO: 1761372 - RNA, 18 nt, Human
augcuacaggauuugaaa

SEQ ID NO: 1761373 - RNA, 13 nt, Human
augcucaggcuac

SEQ ID NO: 1761374 - RNA, 16 nt, Human
augcucauaacggauc

SEQ ID NO: 1761375 - RNA, 21 nt, Human
augcucauaacggaucagaaa

SEQ ID NO: 1761376 - RNA, 18 nt, Human
augcuggcuguuggcugg

SEQ ID NO: 1761377 - RNA, 19 nt, Human
augcuggcuguuggcuggg

SEQ ID NO: 1761378 - RNA, 20 nt, Human
augcuggcuguuggcugggg

SEQ ID NO: 1761379 - RNA, 19 nt, Human
auggaagaggcuacagggc

SEQ ID NO: 1761380 - RNA, 15 nt, Human
uuucaaaccagcuuc

SEQ ID NO: 1761381 - RNA, 12 nt, Human
uuucccaauuca

SEQ ID NO: 1761382 - RNA, 15 nt, Human
uuucccaauucacau

SEQ ID NO: 1761383 - RNA, 18 nt, Human
uuucauguaaacugugca

SEQ ID NO: 1761384 - RNA, 19 nt, Human
uuucauguaaacugugcac

SEQ ID NO: 1761385 - RNA, 16 nt, Human
uugugacauuccuucu

SEQ ID NO: 1761386 - RNA, 17 nt, Human
uugugaggaaagucauu

SEQ ID NO: 1761387 - RNA, 16 nt, Human
uugugaggaaagucau

SEQ ID NO: 1761388 - RNA, 22 nt, Human
uugugaggaaagucauuggcuu

SEQ ID NO: 1761389 - RNA, 13 nt, Human
uuguccauugucc

SEQ ID NO: 1761390 - RNA, 21 nt, Human
uugucccagaggcugccccac

SEQ ID NO: 1761391 - RNA, 23 nt, Human
uuguccccaaauccgaaccuccu

SEQ ID NO: 1761392 - RNA, 19 nt, Human
uuguguccuccaggagcuu

SEQ ID NO: 1761393 - RNA, 22 nt, Human
augaggucagagccugcaguua

SEQ ID NO: 1761394 - RNA, 19 nt, Human
augaggucagagccugcag

SEQ ID NO: 1761395 - RNA, 20 nt, Human
augaggucagagccugcagu

SEQ ID NO: 1761396 - RNA, 16 nt, Human
augagguaucuucuuu

SEQ ID NO: 1761397 - RNA, 15 nt, Human
augaggucagagccu

SEQ ID NO: 1761398 - RNA, 16 nt, Human
augaggucagagccug

SEQ ID NO: 1761399 - RNA, 18 nt, Human
augaggucagagccugca

SEQ ID NO: 1761400 - RNA, 17 nt, Human
uugucacacacuuuggc

SEQ ID NO: 1761401 - RNA, 19 nt, Human
uugucaauuuaugaauaua

SEQ ID NO: 1761402 - RNA, 13 nt, Human
uugucauauguag

SEQ ID NO: 1761403 - RNA, 21 nt, Human
uugucauauguagccuucaca

SEQ ID NO: 1761404 - RNA, 23 nt, Human
uugucauauguagccuucacaca

SEQ ID NO: 1761405 - RNA, 12 nt, Human
augaguuuaaaa

SEQ ID NO: 1761406 - RNA, 13 nt, Human
augaguuuaaaaa

SEQ ID NO: 1761407 - RNA, 15 nt, Human
augaguuuaaaaauc

SEQ ID NO: 1761408 - RNA, 22 nt, Human
augaguuuaaaaaucaacuuuu

SEQ ID NO: 1761409 - RNA, 14 nt, Human
uuuaagaggcaggg

SEQ ID NO: 1761410 - RNA, 16 nt, Human
uuuaaauguaaaacau

SEQ ID NO: 1761411 - RNA, 21 nt, Human
uuuaaauauaugcuaagucuu

SEQ ID NO: 1761412 - RNA, 14 nt, Human
augauuuccccccu

SEQ ID NO: 1761413 - RNA, 19 nt, Human
augauuuccccccuccgcc

SEQ ID NO: 1761414 - RNA, 23 nt, Human
augcaaaagguucacuaaagcag

SEQ ID NO: 1761415 - RNA, 21 nt, Human
augcacuguucccccugugca

SEQ ID NO: 1761416 - RNA, 18 nt, Human
uuuaaaaaaauuccaagu

SEQ ID NO: 1761417 - RNA, 22 nt, Human
augcacuguucccccugugcag

SEQ ID NO: 1761418 - RNA, 15 nt, Human
auuugagcagggcuc

SEQ ID NO: 1761419 - RNA, 16 nt, Human
auuugagcagggcuca

SEQ ID NO: 1761420 - RNA, 21 nt, Human
auuuggaguguuccccuucca

SEQ ID NO: 1761421 - RNA, 19 nt, Human
auuuggcaaugccaucauc

SEQ ID NO: 1761422 - RNA, 22 nt, Human
auuuccuaguucuguagaaaug

SEQ ID NO: 1761423 - RNA, 15 nt, Human
auuuccuaguucugu

SEQ ID NO: 1761424 - RNA, 20 nt, Human
auuuccuaguucuguagaaa

SEQ ID NO: 1761425 - RNA, 18 nt, Human
auuuccuaguucuguaga

SEQ ID NO: 1761426 - RNA, 19 nt, Human
auuuccuacacaaaugaua

SEQ ID NO: 1761427 - RNA, 20 nt, Human
auuuccauguccccucccag

SEQ ID NO: 1761428 - RNA, 23 nt, Human
auuuccauguccccucccagagc

SEQ ID NO: 1761429 - RNA, 15 nt, Human
auuuauuuuauaaga

SEQ ID NO: 1761430 - RNA, 16 nt, Human
auuuauuuuauaagaa

SEQ ID NO: 1761431 - RNA, 20 nt, Human
auuuauuuuauaagaaaaac

SEQ ID NO: 1761432 - RNA, 19 nt, Human
auuuauuuuuuacauuauu

SEQ ID NO: 1761433 - RNA, 14 nt, Human
auuuauuuuuuaca

SEQ ID NO: 1761434 - RNA, 18 nt, Human
auuuauuuuuuacauuau

SEQ ID NO: 1761435 - RNA, 19 nt, Human
auuguuuucuuuuucuacc

SEQ ID NO: 1761436 - RNA, 16 nt, Human
auuguaguccuguaau

SEQ ID NO: 1761437 - RNA, 21 nt, Human
auuuaaauacagucuuccauu

SEQ ID NO: 1761438 - RNA, 20 nt, Human
auuuagaaaaagaacaugca

SEQ ID NO: 1761439 - RNA, 21 nt, Human
auuuagaaaaagaacaugcag

SEQ ID NO: 1761440 - RNA, 22 nt, Human
auuuagaaaaagaacaugcagu

SEQ ID NO: 1761441 - RNA, 23 nt, Human
auuuagaaaaagaacaugcaguu

SEQ ID NO: 1761442 - RNA, 18 nt, Human
auugcaugugacucugaa

SEQ ID NO: 1761443 - RNA, 13 nt, Human
auugcaugugacu

SEQ ID NO: 1761444 - RNA, 14 nt, Human
auugcaugugacuc

SEQ ID NO: 1761445 - RNA, 15 nt, Human
auugcaugugacucu

SEQ ID NO: 1761446 - RNA, 17 nt, Human
auugcaugugacucuga

SEQ ID NO: 1761447 - RNA, 15 nt, Human
auugcaucucccaga

SEQ ID NO: 1761448 - RNA, 22 nt, Human
auugcaucucccagauaaugug

SEQ ID NO: 1761449 - RNA, 23 nt, Human
auugcaucucccagauaauguga

SEQ ID NO: 1761450 - RNA, 15 nt, Human
auugccuucucacca

SEQ ID NO: 1761451 - RNA, 18 nt, Human
auugccuucucaccagcu

SEQ ID NO: 1761452 - RNA, 19 nt, Human
auugccuucucaccagcug

SEQ ID NO: 1761453 - RNA, 20 nt, Human
auugccuucucaccagcugc

SEQ ID NO: 1761454 - RNA, 21 nt, Human
auugccuucucaccagcugca

SEQ ID NO: 1761455 - RNA, 22 nt, Human
auugccuucucaccagcugcaa

SEQ ID NO: 1761456 - RNA, 15 nt, Human
auuggacccuuccau

SEQ ID NO: 1761457 - RNA, 17 nt, Human
auugcaacaggcugggc

SEQ ID NO: 1761458 - RNA, 18 nt, Human
auugcaacaggcugggcu

SEQ ID NO: 1761459 - RNA, 19 nt, Human
auugcaacaggcugggcuu

SEQ ID NO: 1761460 - RNA, 14 nt, Human
auugaauuuuuccu

SEQ ID NO: 1761461 - RNA, 17 nt, Human
auugaauuuuuccuaug

SEQ ID NO: 1761462 - RNA, 23 nt, Human
auugaauuuuuccuaugcuauug

SEQ ID NO: 1761463 - RNA, 20 nt, Human
auugaauucuugguugagga

SEQ ID NO: 1761464 - RNA, 22 nt, Human
auugaauucuugguugaggaaa

SEQ ID NO: 1761465 - RNA, 23 nt, Human
auugaauucuugguugaggaaac

SEQ ID NO: 1761466 - RNA, 21 nt, Human
auuccuauacgcagcgugcuu

SEQ ID NO: 1761467 - RNA, 14 nt, Human
auuacuucugcuac

SEQ ID NO: 1761468 - RNA, 13 nt, Human
auuacuucugcua

SEQ ID NO: 1761469 - RNA, 21 nt, Human
uuuuugguuaaaaaaaagaau

SEQ ID NO: 1761470 - RNA, 11 nt, Human
uuuuugcaaua

SEQ ID NO: 1761471 - RNA, 12 nt, Human
uuuuugcaauaa

SEQ ID NO: 1761472 - RNA, 22 nt, Human
uuuuugcaauaaugcaguaugg

SEQ ID NO: 1761473 - RNA, 15 nt, Human
uuuuugaagcuguau

SEQ ID NO: 1761474 - RNA, 15 nt, Human
uuuuucaaagcaauu

SEQ ID NO: 1761475 - RNA, 16 nt, Human
uuuuucaacuuugaau

SEQ ID NO: 1761476 - RNA, 16 nt, Human
uuuuguugccccagaa

SEQ ID NO: 1761477 - RNA, 13 nt, Human
uuuuguucucugg

SEQ ID NO: 1761478 - RNA, 14 nt, Human
uuuuguucucuggg

SEQ ID NO: 1761479 - RNA, 17 nt, Human
uuuuguucucugggaga

SEQ ID NO: 1761480 - RNA, 13 nt, Human
uuuuguucccuau

SEQ ID NO: 1761481 - RNA, 17 nt, Human
uuuuguuuuucauucag

SEQ ID NO: 1761482 - RNA, 11 nt, Human
uuuuguguccu

SEQ ID NO: 1761483 - RNA, 13 nt, Human
uuuuguguccucc

SEQ ID NO: 1761484 - RNA, 20 nt, Human
uuuuguguccuccaggagcu

SEQ ID NO: 1761485 - RNA, 21 nt, Human
uuuugcuuucgaacugcuagu

SEQ ID NO: 1761486 - RNA, 14 nt, Human
auuaaaauccucaa

SEQ ID NO: 1761487 - RNA, 16 nt, Human
auuaaaauccucaauc

SEQ ID NO: 1761488 - RNA, 14 nt, Human
auuaaaauucugaa

SEQ ID NO: 1761489 - RNA, 17 nt, Human
auuaaaauucugaauuu

SEQ ID NO: 1761490 - RNA, 19 nt, Human
auuaaaauucugaauuuug

SEQ ID NO: 1761491 - RNA, 19 nt, Human
auuaaacagaugugaauau

SEQ ID NO: 1761492 - RNA, 14 nt, Human
auucacuugcauuu

SEQ ID NO: 1761493 - RNA, 15 nt, Human
auucacuuucauuuu

SEQ ID NO: 1761494 - RNA, 18 nt, Human
auucacuuucauuuuuga

SEQ ID NO: 1761495 - RNA, 14 nt, Human
auucagugucacug

SEQ ID NO: 1761496 - RNA, 19 nt, Human
auucaguguuaaaugugau

SEQ ID NO: 1761497 - RNA, 18 nt, Human
auuccagagacaucagca

SEQ ID NO: 1761498 - RNA, 18 nt, Human
auucccaagcucugcucc

SEQ ID NO: 1761499 - RNA, 19 nt, Human
auucccaagcucugcuccu

SEQ ID NO: 1761500 - RNA, 17 nt, Human
auucccaagcucugcuc

SEQ ID NO: 1761501 - RNA, 13 nt, Human
auuccaagcuucc

SEQ ID NO: 1761502 - RNA, 23 nt, Human
auuccaagcuuccauagcugcug

SEQ ID NO: 1761503 - RNA, 17 nt, Human
auuccaagugauugaaa

SEQ ID NO: 1761504 - RNA, 20 nt, Human
auuauauggcuugaguuuaa

SEQ ID NO: 1761505 - RNA, 16 nt, Human
auuauaucuaauuauu

SEQ ID NO: 1761506 - RNA, 13 nt, Human
auuauucaguguc

SEQ ID NO: 1761507 - RNA, 14 nt, Human
auuauucaguguca

SEQ ID NO: 1761508 - RNA, 13 nt, Human
auucaccugagca

SEQ ID NO: 1761509 - RNA, 15 nt, Human
auuauucagugucac

SEQ ID NO: 1761510 - RNA, 12 nt, Human
auuauugcauua

SEQ ID NO: 1761511 - RNA, 15 nt, Human
uuugauccaagcugg

SEQ ID NO: 1761512 - RNA, 13 nt, Human
uuugagacagagu

SEQ ID NO: 1761513 - RNA, 21 nt, Human
uuugagaaacaacaauuucua

SEQ ID NO: 1761514 - RNA, 11 nt, Human
uuugcaaagua

SEQ ID NO: 1761515 - RNA, 13 nt, Human
uuugcaaaguacu

SEQ ID NO: 1761516 - RNA, 14 nt, Human
uuugcaaaguacug

SEQ ID NO: 1761517 - RNA, 15 nt, Human
uuugcaaaguacugu

SEQ ID NO: 1761518 - RNA, 16 nt, Human
uuugcaaaguacugua

SEQ ID NO: 1761519 - RNA, 17 nt, Human
uuugcaaaguacuguaa

SEQ ID NO: 1761520 - RNA, 23 nt, Human
uuugcaaaguacuguaagaauaa

SEQ ID NO: 1761521 - RNA, 19 nt, Human
uuugggauagagaauguuc

SEQ ID NO: 1761522 - RNA, 21 nt, Human
uuugggguacccacugcucug

SEQ ID NO: 1761523 - RNA, 22 nt, Human
uuugggguacccacugcucugg

SEQ ID NO: 1761524 - RNA, 17 nt, Human
augugaugaauacugua

SEQ ID NO: 1761525 - RNA, 19 nt, Human
augugaugaauacuguauu

SEQ ID NO: 1761526 - RNA, 23 nt, Human
augucgucaaagcugaaauggac

SEQ ID NO: 1761527 - RNA, 13 nt, Human
auuaaaaauuaua

SEQ ID NO: 1761528 - RNA, 13 nt, Human
auguuuuuaauau

SEQ ID NO: 1761529 - RNA, 17 nt, Human
auguuggccaggcuggu

SEQ ID NO: 1761530 - RNA, 12 nt, Human
uuuuauugccuu

SEQ ID NO: 1761531 - RNA, 13 nt, Human
uuuuauugccuuc

SEQ ID NO: 1761532 - RNA, 14 nt, Human
uuuuauugccuucu

SEQ ID NO: 1761533 - RNA, 15 nt, Human
uuuuauugccuucuc

SEQ ID NO: 1761534 - RNA, 16 nt, Human
uuuuauugccuucuca

SEQ ID NO: 1761535 - RNA, 22 nt, Human
uuuuauugccuucucaccagcu

SEQ ID NO: 1761536 - RNA, 23 nt, Human
uuuuauugccuucucaccagcug

SEQ ID NO: 1761537 - RNA, 24 nt, Human
uuuuauugccuucucaccagcugc

SEQ ID NO: 1761538 - RNA, 15 nt, Human
uuuuaguagagacag

SEQ ID NO: 1761539 - RNA, 16 nt, Human
uuuucuauaauuuaaa

SEQ ID NO: 1761540 - RNA, 20 nt, Human
uuuuccagcuggaugagaau

SEQ ID NO: 1761541 - RNA, 15 nt, Human
uuuucuagauacaau

SEQ ID NO: 1761542 - RNA, 18 nt, Human
uuuucuagauacaauaaa

SEQ ID NO: 1761543 - RNA, 19 nt, Human
uuuucuagauacaauaaau

SEQ ID NO: 1761544 - RNA, 16 nt, Human
uuuucucuccuguccu

SEQ ID NO: 1761545 - RNA, 18 nt, Human
uuuucucuccuguccucc

SEQ ID NO: 1761546 - RNA, 12 nt, Human
uuuguuuugcac

SEQ ID NO: 1761547 - RNA, 13 nt, Human
uuuguuuuuaauu

SEQ ID NO: 1761548 - RNA, 12 nt, Human
uuuguuuuucau

SEQ ID NO: 1761549 - RNA, 21 nt, Human
augugccagguuuuuggucug

SEQ ID NO: 1761550 - RNA, 17 nt, Human
augugccaaucaauagc

SEQ ID NO: 1761551 - RNA, 23 nt, Human
auguguguccacgacugucucca

SEQ ID NO: 1761552 - RNA, 18 nt, Human
auguguuuuguuuauuaa

SEQ ID NO: 1761553 - RNA, 20 nt, Human
auguguuuuguuuauuaaau

SEQ ID NO: 1761554 - RNA, 13 nt, Human
auguuaaauaaau

SEQ ID NO: 1761555 - RNA, 21 nt, Human
auguguguccacgacugucuc

SEQ ID NO: 1761556 - RNA, 22 nt, Human
auguguguccacgacugucucc

SEQ ID NO: 1761557 - RNA, 14 nt, Human
auguucacuuuuga

SEQ ID NO: 1761558 - RNA, 18 nt, Human
auguucacuuuugacaaa

SEQ ID NO: 1761559 - RNA, 13 nt, Human
auguugcccaggc

SEQ ID NO: 1761560 - RNA, 14 nt, Human
auguugcccaggca

SEQ ID NO: 1761561 - RNA, 15 nt, Human
auguugcccaggcag

SEQ ID NO: 1761562 - RNA, 16 nt, Human
auguugcccaggcagg

SEQ ID NO: 1761563 - RNA, 15 nt, Human
auguugcuggaucag

SEQ ID NO: 1761564 - RNA, 13 nt, Human
auguuggccaggc

SEQ ID NO: 1761565 - RNA, 16 nt, Human
auguuggauaaggaau

SEQ ID NO: 1761566 - RNA, 17 nt, Human
auguuggauaaggaauu

SEQ ID NO: 1761567 - RNA, 22 nt, Human
auguuggauaaggaauuauaga

SEQ ID NO: 1761568 - RNA, 18 nt, Human
auguuaaauaaauuguau

SEQ ID NO: 1761569 - RNA, 17 nt, Human
auguuaaauaaauugua

SEQ ID NO: 1761570 - RNA, 16 nt, Human
auguuaaauaaauugu

SEQ ID NO: 1761571 - RNA, 14 nt, Human
auguuaaauaaauu

SEQ ID NO: 1761572 - RNA, 20 nt, Human
auguuaaauaaauuguauau

SEQ ID NO: 1761573 - RNA, 19 nt, Human
auguuaaauaaauuguaua

SEQ ID NO: 1761574 - RNA, 22 nt, Human
auguuaaauaaauuguauauuc

SEQ ID NO: 1761575 - RNA, 14 nt, Human
auguuauucuagua

SEQ ID NO: 1761576 - RNA, 13 nt, Human
auguuauguaaaa

SEQ ID NO: 1761577 - RNA, 14 nt, Human
auguuauguaaaag

SEQ ID NO: 1761578 - RNA, 21 nt, Human
auguuauguaaaaggccaaac

SEQ ID NO: 1761579 - RNA, 13 nt, Human
aaaacacugugca

SEQ ID NO: 1761580 - RNA, 16 nt, Human
aaaagaacaugcaguu

SEQ ID NO: 1761581 - RNA, 17 nt, Human
aaaagaacaugcaguuu

SEQ ID NO: 1761582 - RNA, 18 nt, Human
aaaagaacaugcaguuug

SEQ ID NO: 1761583 - RNA, 22 nt, Human
aaaagaacaugcaguuugaaau

SEQ ID NO: 1761584 - RNA, 20 nt, Human
aaaagaaagaaguuauuuuc

SEQ ID NO: 1761585 - RNA, 20 nt, Human
aaaagacaaggaaaaaauaa

SEQ ID NO: 1761586 - RNA, 15 nt, Human
aaaagacacugcaga

SEQ ID NO: 1761587 - RNA, 13 nt, Human
aaaagagaaugau

SEQ ID NO: 1761588 - RNA, 23 nt, Human
aaaagauauaagugcuguauaaa

SEQ ID NO: 1761589 - RNA, 19 nt, Human
aaaagauauaagugcugua

SEQ ID NO: 1761590 - RNA, 18 nt, Human
aaaagauauaagugcugu

SEQ ID NO: 1761591 - RNA, 15 nt, Human
aaaagauauaagugc

SEQ ID NO: 1761592 - RNA, 14 nt, Human
aaaagauauaagug

SEQ ID NO: 1761593 - RNA, 13 nt, Human
aaaagauauaagu

SEQ ID NO: 1761594 - RNA, 12 nt, Human
aaaagauauaag

SEQ ID NO: 1761595 - RNA, 15 nt, Human
aaaagauaauauuuu

SEQ ID NO: 1761596 - RNA, 19 nt, Human
aaaagauaauauuuuacau

SEQ ID NO: 1761597 - RNA, 22 nt, Human
aaaagauaauauuuuacauaca

SEQ ID NO: 1761598 - RNA, 22 nt, Human
aaaaucagccaauuauguuaaa

SEQ ID NO: 1761599 - RNA, 24 nt, Human
aaaaucagccaauuauguuaaacu

SEQ ID NO: 1761600 - RNA, 19 nt, Human
aaacccaagauuauuaaaa

SEQ ID NO: 1761601 - RNA, 19 nt, Human
aaaccaguguuagggaagg

SEQ ID NO: 1761602 - RNA, 13 nt, Human
aaauguucacuuu

SEQ ID NO: 1761603 - RNA, 16 nt, Human
aaauguucacuuuuga

SEQ ID NO: 1761604 - RNA, 16 nt, Human
aaauggauacauaaag

SEQ ID NO: 1761605 - RNA, 15 nt, Human
aaauauuuauucauu

SEQ ID NO: 1761606 - RNA, 23 nt, Human
aaauauuuauucauuauuuguca

SEQ ID NO: 1761607 - RNA, 12 nt, Human
aaauagcaaaga

SEQ ID NO: 1761608 - RNA, 21 nt, Human
aaauagauaagaguagaaacu

SEQ ID NO: 1761609 - RNA, 17 nt, Human
aaauagaguauaugcac

SEQ ID NO: 1761610 - RNA, 19 nt, Human
aaauagaguauaugcacuu

SEQ ID NO: 1761611 - RNA, 23 nt, Human
aaaucuuucuuucuuagaaauuu

SEQ ID NO: 1761612 - RNA, 22 nt, Human
aaaucuuucuuucuuagaaauu

SEQ ID NO: 1761613 - RNA, 23 nt, Human
aaauggagucauuugagucucuu

SEQ ID NO: 1761614 - RNA, 14 nt, Human
aaaugcuuuagaaa

SEQ ID NO: 1761615 - RNA, 16 nt, Human
aaccgugguaugucug

SEQ ID NO: 1761616 - RNA, 18 nt, Human
aaccgugguaugucugcc

SEQ ID NO: 1761617 - RNA, 11 nt, Human
aacaggcagau

SEQ ID NO: 1761618 - RNA, 17 nt, Human
aacaggccauugugaac

SEQ ID NO: 1761619 - RNA, 23 nt, Human
aacaggccauugugaaccaaugc

SEQ ID NO: 1761620 - RNA, 15 nt, Human
aacagccacuccccu

SEQ ID NO: 1761621 - RNA, 18 nt, Human
aacagccacuccccucca

SEQ ID NO: 1761622 - RNA, 20 nt, Human
aacaugacccuaaaucuuga

SEQ ID NO: 1761623 - RNA, 21 nt, Human
aacaucuugaauacucugccc

SEQ ID NO: 1761624 - RNA, 15 nt, Human
aauaaacacuacaga

SEQ ID NO: 1761625 - RNA, 21 nt, Human
aauaaacuuggauucucuaac

SEQ ID NO: 1761626 - RNA, 16 nt, Human
aaguugguuggauaag

SEQ ID NO: 1761627 - RNA, 21 nt, Human
aaguuggguuaauaccagcuu

SEQ ID NO: 1761628 - RNA, 22 nt, Human
aagugcugggauuacaggugug

SEQ ID NO: 1761629 - RNA, 12 nt, Human
aagugcugggau

SEQ ID NO: 1761630 - RNA, 13 nt, Human
aaguggccucuuu

SEQ ID NO: 1761631 - RNA, 14 nt, Human
aaguggccucuuug

SEQ ID NO: 1761632 - RNA, 17 nt, Human
aaguggccucuuugucu

SEQ ID NO: 1761633 - RNA, 22 nt, Human
aaguggccucuuugucuaaaac

SEQ ID NO: 1761634 - RNA, 15 nt, Human
aauaaagcacugagc

SEQ ID NO: 1761635 - RNA, 13 nt, Human
aauaaagaauacu

SEQ ID NO: 1761636 - RNA, 14 nt, Human
aauaaagaauacuu

SEQ ID NO: 1761637 - RNA, 15 nt, Human
aauaaagaauacuug

SEQ ID NO: 1761638 - RNA, 19 nt, Human
aauaaagaauacuugaacu

SEQ ID NO: 1761639 - RNA, 21 nt, Human
aauauguauuuaccaaaaauu

SEQ ID NO: 1761640 - RNA, 18 nt, Human
aaugaaguuugaauguua

SEQ ID NO: 1761641 - RNA, 17 nt, Human
aaugaaguuugaauguu

SEQ ID NO: 1761642 - RNA, 20 nt, Human
aaugaauacuuuauaaagga

SEQ ID NO: 1761643 - RNA, 22 nt, Human
aaugaaguuugaauguuaaaua

SEQ ID NO: 1761644 - RNA, 21 nt, Human
aaugaaguuugaauguuaaau

SEQ ID NO: 1761645 - RNA, 20 nt, Human
aaugaaguuugaauguuaaa

SEQ ID NO: 1761646 - RNA, 19 nt, Human
aaugaaguuugaauguuaa

SEQ ID NO: 1761647 - RNA, 16 nt, Human
aagcgugagccacugc

SEQ ID NO: 1761648 - RNA, 15 nt, Human
aagcgugagccacug

SEQ ID NO: 1761649 - RNA, 18 nt, Human
aagauaauauuuuacaua

SEQ ID NO: 1761650 - RNA, 20 nt, Human
aagauacagaacucuuucaa

SEQ ID NO: 1761651 - RNA, 22 nt, Human
aagauacagaacucuuucaaaa

SEQ ID NO: 1761652 - RNA, 18 nt, Human
aaggcaagcacuuguggg

SEQ ID NO: 1761653 - RNA, 19 nt, Human
aagacacugcagaaacccu

SEQ ID NO: 1761654 - RNA, 13 nt, Human
aagaaccccucug

SEQ ID NO: 1761655 - RNA, 14 nt, Human
aagaaccccucugc

SEQ ID NO: 1761656 - RNA, 15 nt, Human
aagaaccccucugcu

SEQ ID NO: 1761657 - RNA, 17 nt, Human
aagaaccccucugcuuu

SEQ ID NO: 1761658 - RNA, 15 nt, Human
aagacaaugacauac

SEQ ID NO: 1761659 - RNA, 21 nt, Human
aagacaaggaaaaaauaacaa

SEQ ID NO: 1761660 - RNA, 19 nt, Human
aagaguaguugauguugca

SEQ ID NO: 1761661 - RNA, 22 nt, Human
aagaguaguugauguugcauuu

SEQ ID NO: 1761662 - RNA, 23 nt, Human
aagaguaguugauguugcauuuu

SEQ ID NO: 1761663 - RNA, 19 nt, Human
acucccaagguuggagccc

SEQ ID NO: 1761664 - RNA, 16 nt, Human
acuccgagugaacugg

SEQ ID NO: 1761665 - RNA, 18 nt, Human
acuccgagugaacugguc

SEQ ID NO: 1761666 - RNA, 13 nt, Human
acuccggcugugc

SEQ ID NO: 1761667 - RNA, 14 nt, Human
acuccggcugugcu

SEQ ID NO: 1761668 - RNA, 15 nt, Human
acuccggcugugcug

SEQ ID NO: 1761669 - RNA, 16 nt, Human
acuccggcugugcugg

SEQ ID NO: 1761670 - RNA, 17 nt, Human
acuccggcugugcuggg

SEQ ID NO: 1761671 - RNA, 18 nt, Human
acuccggcugugcuggga

SEQ ID NO: 1761672 - RNA, 15 nt, Human
acucuacagaggcca

SEQ ID NO: 1761673 - RNA, 23 nt, Human
acugaugggcaacccccagccug

SEQ ID NO: 1761674 - RNA, 22 nt, Human
acugacauuguuggccaaagcc

SEQ ID NO: 1761675 - RNA, 15 nt, Human
acugaucacaaaaac

SEQ ID NO: 1761676 - RNA, 18 nt, Human
acugaucaggaccuccaa

SEQ ID NO: 1761677 - RNA, 17 nt, Human
acugacauuguuggcca

SEQ ID NO: 1761678 - RNA, 18 nt, Human
acugacauuguuggccaa

SEQ ID NO: 1761679 - RNA, 13 nt, Human
acuggugcccucc

SEQ ID NO: 1761680 - RNA, 12 nt, Human
acugcccuggcu

SEQ ID NO: 1761681 - RNA, 17 nt, Human
acugugccaugugccag

SEQ ID NO: 1761682 - RNA, 18 nt, Human
acugugccaugugccagg

SEQ ID NO: 1761683 - RNA, 17 nt, Human
acuguaaaauaauaacu

SEQ ID NO: 1761684 - RNA, 14 nt, Human
acuucagauugaac

SEQ ID NO: 1761685 - RNA, 13 nt, Human
acuguuuccuuca

SEQ ID NO: 1761686 - RNA, 12 nt, Human
accucagccucc

SEQ ID NO: 1761687 - RNA, 11 nt, Human
accucagccuc

SEQ ID NO: 1761688 - RNA, 12 nt, Human
accgggcacuca

SEQ ID NO: 1761689 - RNA, 14 nt, Human
accgggcacucaga

SEQ ID NO: 1761690 - RNA, 16 nt, Human
accgggcacucagaag

SEQ ID NO: 1761691 - RNA, 20 nt, Human
accucaggugauccacccac

SEQ ID NO: 1761692 - RNA, 21 nt, Human
accucaggugauccacccacc

SEQ ID NO: 1761693 - RNA, 17 nt, Human
accuccaagccacugag

SEQ ID NO: 1761694 - RNA, 16 nt, Human
acccuaaaucuugacu

SEQ ID NO: 1761695 - RNA, 16 nt, Human
acccuggggagaaagu

SEQ ID NO: 1761696 - RNA, 15 nt, Human
acccuggggaaggag

SEQ ID NO: 1761697 - RNA, 19 nt, Human
acccuggggaaggagccag

SEQ ID NO: 1761698 - RNA, 13 nt, Human
acccuggggccug

SEQ ID NO: 1761699 - RNA, 14 nt, Human
acccuggggccuga

SEQ ID NO: 1761700 - RNA, 18 nt, Human
acccuggggccugacugc

SEQ ID NO: 1761701 - RNA, 22 nt, Human
acccuggggccugacugcucag

SEQ ID NO: 1761702 - RNA, 15 nt, Human
acccugggccuggca

SEQ ID NO: 1761703 - RNA, 22 nt, Human
acccugggccuggcagcucagc

SEQ ID NO: 1761704 - RNA, 23 nt, Human
accugugcuucgggcccuuccca

SEQ ID NO: 1761705 - RNA, 19 nt, Human
accugugcuucgggcccuu

SEQ ID NO: 1761706 - RNA, 22 nt, Human
accugugcuucgggcccuuccc

SEQ ID NO: 1761707 - RNA, 15 nt, Human
accugugccucggcu

SEQ ID NO: 1761708 - RNA, 16 nt, Human
accugugccucggcuu

SEQ ID NO: 1761709 - RNA, 14 nt, Human
accugugccucggc

SEQ ID NO: 1761710 - RNA, 19 nt, Human
accugugaguuuaaagcaa

SEQ ID NO: 1761711 - RNA, 18 nt, Human
accugugaguuuaaagca

SEQ ID NO: 1761712 - RNA, 12 nt, Human
accucugccuga

SEQ ID NO: 1761713 - RNA, 20 nt, Human
accucugccugaagucacac

SEQ ID NO: 1761714 - RNA, 23 nt, Human
accucugccugaagucacacagu

SEQ ID NO: 1761715 - RNA, 14 nt, Human
accucuguucagug

SEQ ID NO: 1761716 - RNA, 15 nt, Human
accucuguucagugu

SEQ ID NO: 1761717 - RNA, 17 nt, Human
accucuguucaguguaa

SEQ ID NO: 1761718 - RNA, 18 nt, Human
accucuguucaguguaaa

SEQ ID NO: 1761719 - RNA, 19 nt, Human
accucuguucaguguaaau

SEQ ID NO: 1761720 - RNA, 22 nt, Human
accucuguucaguguaaauagu

SEQ ID NO: 1761721 - RNA, 12 nt, Human
accuuggcucaa

SEQ ID NO: 1761722 - RNA, 13 nt, Human
accuuggccuggg

SEQ ID NO: 1761723 - RNA, 14 nt, Human
accuuggccugggc

SEQ ID NO: 1761724 - RNA, 15 nt, Human
accuuggccugggcc

SEQ ID NO: 1761725 - RNA, 16 nt, Human
accuuggccugggccg

SEQ ID NO: 1761726 - RNA, 13 nt, Human
accuugcuuuugc

SEQ ID NO: 1761727 - RNA, 15 nt, Human
accuugcuuuugcuu

SEQ ID NO: 1761728 - RNA, 17 nt, Human
accuugcuuuugcuucu

SEQ ID NO: 1761729 - RNA, 18 nt, Human
accuugcuuuugcuucua

SEQ ID NO: 1761730 - RNA, 18 nt, Human
acuaauggggcggugaga

SEQ ID NO: 1761731 - RNA, 17 nt, Human
acguggacguuuuuaau

SEQ ID NO: 1761732 - RNA, 19 nt, Human
acggaauaguuggcuagga

SEQ ID NO: 1761733 - RNA, 22 nt, Human
acgcuugcucuguuuguggggu

SEQ ID NO: 1761734 - RNA, 19 nt, Human
acagcucuucuccaggcug

SEQ ID NO: 1761735 - RNA, 20 nt, Human
acagcucuucuccaggcugu

SEQ ID NO: 1761736 - RNA, 15 nt, Human
acaggcaaugcuggc

SEQ ID NO: 1761737 - RNA, 16 nt, Human
acaggcaaugcuggcu

SEQ ID NO: 1761738 - RNA, 14 nt, Human
acaggcacccacca

SEQ ID NO: 1761739 - RNA, 17 nt, Human
acaggcaaugcuggcug

SEQ ID NO: 1761740 - RNA, 17 nt, Human
acaguggauugcauuuc

SEQ ID NO: 1761741 - RNA, 20 nt, Human
acagugcugcagcucccugg

SEQ ID NO: 1761742 - RNA, 21 nt, Human
acagugcugcagcucccuggc

SEQ ID NO: 1761743 - RNA, 23 nt, Human
acaggcacccaccaucaugucug

SEQ ID NO: 1761744 - RNA, 13 nt, Human
acaggcagagcug

SEQ ID NO: 1761745 - RNA, 18 nt, Human
accacgcuggaccuugaa

SEQ ID NO: 1761746 - RNA, 16 nt, Human
accacgcuggggucug

SEQ ID NO: 1761747 - RNA, 14 nt, Human
accacgcuggaccu

SEQ ID NO: 1761748 - RNA, 16 nt, Human
accacgcuggaccuug

SEQ ID NO: 1761749 - RNA, 19 nt, Human
accaacccuggggaaggag

SEQ ID NO: 1761750 - RNA, 13 nt, Human
acaugcacgugug

SEQ ID NO: 1761751 - RNA, 18 nt, Human
acaucccgggacgcagca

SEQ ID NO: 1761752 - RNA, 15 nt, Human
acaugccugccccaa

SEQ ID NO: 1761753 - RNA, 21 nt, Human
acaugccugccccaaacaaau

SEQ ID NO: 1761754 - RNA, 22 nt, Human
acaugccugccccaaacaaaua

SEQ ID NO: 1761755 - RNA, 22 nt, Human
acauacacuguauguuauagaa

SEQ ID NO: 1761756 - RNA, 19 nt, Human
acauguggcuccucccagc

SEQ ID NO: 1761757 - RNA, 20 nt, Human
acauguguuaaguauuuuca

SEQ ID NO: 1761758 - RNA, 15 nt, Human
aauucuacauuguca

SEQ ID NO: 1761759 - RNA, 13 nt, Human
aauucuaaaugua

SEQ ID NO: 1761760 - RNA, 22 nt, Human
aauucuaucuuuuguuuccuuu

SEQ ID NO: 1761761 - RNA, 21 nt, Human
aauucucauuugucacacacu

SEQ ID NO: 1761762 - RNA, 14 nt, Human
aauucugaauuugc

SEQ ID NO: 1761763 - RNA, 15 nt, Human
aauucugaauuugca

SEQ ID NO: 1761764 - RNA, 16 nt, Human
aauucugaauuugcaa

SEQ ID NO: 1761765 - RNA, 17 nt, Human
aauucugaauuugcaaa

SEQ ID NO: 1761766 - RNA, 18 nt, Human
aauucugaauuugcaaag

SEQ ID NO: 1761767 - RNA, 19 nt, Human
aauucugaauuugcaaagu

SEQ ID NO: 1761768 - RNA, 20 nt, Human
aauucugaauuugcaaagua

SEQ ID NO: 1761769 - RNA, 15 nt, Human
aauucggugugcacc

SEQ ID NO: 1761770 - RNA, 18 nt, Human
aauuauagaccucuagua

SEQ ID NO: 1761771 - RNA, 21 nt, Human
aauuauaggaauaucaauaua

SEQ ID NO: 1761772 - RNA, 22 nt, Human
aauuauagugauguaaucuuga

SEQ ID NO: 1761773 - RNA, 11 nt, Human
aauuguaauag

SEQ ID NO: 1761774 - RNA, 19 nt, Human
aauuucccccuaaaccaac

SEQ ID NO: 1761775 - RNA, 14 nt, Human
acacagcucuucuc

SEQ ID NO: 1761776 - RNA, 16 nt, Human
acacagcucuucucca

SEQ ID NO: 1761777 - RNA, 19 nt, Human
acacagccgauucaccuga

SEQ ID NO: 1761778 - RNA, 23 nt, Human
acacagccgauucaccugagcag

SEQ ID NO: 1761779 - RNA, 14 nt, Human
acacacuuuuuaag

SEQ ID NO: 1761780 - RNA, 19 nt, Human
acacacuuuuuaagaaaua

SEQ ID NO: 1761781 - RNA, 19 nt, Human
acacagcucuucuccaggc

SEQ ID NO: 1761782 - RNA, 18 nt, Human
acacagcucuucuccagg

SEQ ID NO: 1761783 - RNA, 18 nt, Human
acaccagagcccaccuug

SEQ ID NO: 1761784 - RNA, 23 nt, Human
acaccagagcccaccuuggcuca

SEQ ID NO: 1761785 - RNA, 13 nt, Human
acaccagagccca

SEQ ID NO: 1761786 - RNA, 13 nt, Human
acacgcaggagca

SEQ ID NO: 1761787 - RNA, 14 nt, Human
acacgcaggagcac

SEQ ID NO: 1761788 - RNA, 15 nt, Human
acacgcaggagcaca

SEQ ID NO: 1761789 - RNA, 22 nt, Human
acacgccugcaaacgcugccug

SEQ ID NO: 1761790 - RNA, 19 nt, Human
acaagguuauaugaauaua

SEQ ID NO: 1761791 - RNA, 17 nt, Human
acaaacugguauucugu

SEQ ID NO: 1761792 - RNA, 14 nt, Human
acaaacaugacccu

SEQ ID NO: 1761793 - RNA, 17 nt, Human
acaacauuuacaacuca

SEQ ID NO: 1761794 - RNA, 13 nt, Human
aucaugagccugc

SEQ ID NO: 1761795 - RNA, 15 nt, Human
aucaugagccugcug

SEQ ID NO: 1761796 - RNA, 16 nt, Human
aucaugagccugcugg

SEQ ID NO: 1761797 - RNA, 17 nt, Human
aucaugagccugcugga

SEQ ID NO: 1761798 - RNA, 21 nt, Human
aucaugagccugcuggaagcc

SEQ ID NO: 1761799 - RNA, 15 nt, Human
aucaaauaaagagag

SEQ ID NO: 1761800 - RNA, 17 nt, Human
aucaaauaaagagagaa

SEQ ID NO: 1761801 - RNA, 14 nt, Human
auccacuucuuuca

SEQ ID NO: 1761802 - RNA, 22 nt, Human
auccacuucuuucagcagacug

SEQ ID NO: 1761803 - RNA, 21 nt, Human
auccacugugccaugugccag

SEQ ID NO: 1761804 - RNA, 21 nt, Human
auccccaguaaaauugccaua

SEQ ID NO: 1761805 - RNA, 15 nt, Human
auccccaguaaaauu

SEQ ID NO: 1761806 - RNA, 15 nt, Human
augcuuuccaaaccu

SEQ ID NO: 1761807 - RNA, 12 nt, Human
augcuuuccuuc

SEQ ID NO: 1761808 - RNA, 14 nt, Human
augcuuuccuucuu

SEQ ID NO: 1761809 - RNA, 20 nt, Human
augcuuuccaaaccuuaucu

SEQ ID NO: 1761810 - RNA, 18 nt, Human
auggagcaucaagccacu

SEQ ID NO: 1761811 - RNA, 11 nt, Human
augccuggugg

SEQ ID NO: 1761812 - RNA, 12 nt, Human
augccugguggc

SEQ ID NO: 1761813 - RNA, 13 nt, Human
augccugguggca

SEQ ID NO: 1761814 - RNA, 14 nt, Human
augccugguggcag

SEQ ID NO: 1761815 - RNA, 19 nt, Human
augccugguggcagcugcg

SEQ ID NO: 1761816 - RNA, 18 nt, Human
augccugguggcagcugc

SEQ ID NO: 1761817 - RNA, 21 nt, Human
augccugguggcagcugcggu

SEQ ID NO: 1761818 - RNA, 22 nt, Human
augcaucucacuggaugcaaag

SEQ ID NO: 1761819 - RNA, 16 nt, Human
augaauauaaugaaug

SEQ ID NO: 1761820 - RNA, 21 nt, Human
augagccucagcauccuggca

SEQ ID NO: 1761821 - RNA, 12 nt, Human
augagccugcug

SEQ ID NO: 1761822 - RNA, 14 nt, Human
augagccugcugga

SEQ ID NO: 1761823 - RNA, 17 nt, Human
augagccugcuggaagc

SEQ ID NO: 1761824 - RNA, 20 nt, Human
augagccugcuggaagccca

SEQ ID NO: 1761825 - RNA, 23 nt, Human
augaagcauuuacuuuguguuca

SEQ ID NO: 1761826 - RNA, 21 nt, Human
augaauacuguauuuuguauu

SEQ ID NO: 1761827 - RNA, 14 nt, Human
aguccucuuuucug

SEQ ID NO: 1761828 - RNA, 17 nt, Human
aguccucccugacuuuu

SEQ ID NO: 1761829 - RNA, 19 nt, Human
aguccucccugacuuuucu

SEQ ID NO: 1761830 - RNA, 22 nt, Human
aguccucccugacuuuucugug

SEQ ID NO: 1761831 - RNA, 16 nt, Human
agucauuugagucucu

SEQ ID NO: 1761832 - RNA, 18 nt, Human
agucauuugagucucuua

SEQ ID NO: 1761833 - RNA, 21 nt, Human
agucugauucccaagcucugc

SEQ ID NO: 1761834 - RNA, 22 nt, Human
agucugauucccaagcucugcu

SEQ ID NO: 1761835 - RNA, 19 nt, Human
agucgauagagcuguauua

SEQ ID NO: 1761836 - RNA, 16 nt, Human
agucgaggacagggag

SEQ ID NO: 1761837 - RNA, 13 nt, Human
agucuggcccuag

SEQ ID NO: 1761838 - RNA, 22 nt, Human
agucuggcccuagacucggggu

SEQ ID NO: 1761839 - RNA, 15 nt, Human
agucuguccaggcuc

SEQ ID NO: 1761840 - RNA, 16 nt, Human
agugacagaggcagcc

SEQ ID NO: 1761841 - RNA, 19 nt, Human
agugacagaggcagcccca

SEQ ID NO: 1761842 - RNA, 14 nt, Human
agugacagaggcag

SEQ ID NO: 1761843 - RNA, 16 nt, Human
agugaaugauucagug

SEQ ID NO: 1761844 - RNA, 17 nt, Human
agugaaugauucagugu

SEQ ID NO: 1761845 - RNA, 19 nt, Human
agugaaugauucaguguua

SEQ ID NO: 1761846 - RNA, 13 nt, Human
agugaaugauuca

SEQ ID NO: 1761847 - RNA, 20 nt, Human
agugauccucccaccucagc

SEQ ID NO: 1761848 - RNA, 22 nt, Human
agugauccucccaccucagccu

SEQ ID NO: 1761849 - RNA, 23 nt, Human
agugauccucccaccucagccuc

SEQ ID NO: 1761850 - RNA, 16 nt, Human
agugauguaccaugaa

SEQ ID NO: 1761851 - RNA, 18 nt, Human
agugauucuccugccuca

SEQ ID NO: 1761852 - RNA, 19 nt, Human
agugauucuccugccucag

SEQ ID NO: 1761853 - RNA, 20 nt, Human
agugauucuccugccucagc

SEQ ID NO: 1761854 - RNA, 13 nt, Human
agugcuaagugug

SEQ ID NO: 1761855 - RNA, 15 nt, Human
agugccuucuguggg

SEQ ID NO: 1761856 - RNA, 17 nt, Human
agugccuucugugggga

SEQ ID NO: 1761857 - RNA, 18 nt, Human
agugccuucuguggggac

SEQ ID NO: 1761858 - RNA, 15 nt, Human
agugcguccacgagc

SEQ ID NO: 1761859 - RNA, 20 nt, Human
aguacuucuccacccugcuc

SEQ ID NO: 1761860 - RNA, 19 nt, Human
aguacuucuccacccugcu

SEQ ID NO: 1761861 - RNA, 21 nt, Human
aguacuucuccacccugcucu

SEQ ID NO: 1761862 - RNA, 22 nt, Human
aguacuucuccacccugcucuc

SEQ ID NO: 1761863 - RNA, 22 nt, Human
aguaaaauugccauauugcaca

SEQ ID NO: 1761864 - RNA, 23 nt, Human
aguaaaauugccauauugcacau

SEQ ID NO: 1761865 - RNA, 21 nt, Human
aguaaaauugccauauugcac

SEQ ID NO: 1761866 - RNA, 20 nt, Human
aguaaaauugccauauugca

SEQ ID NO: 1761867 - RNA, 19 nt, Human
aguaaaauugccauauugc

SEQ ID NO: 1761868 - RNA, 17 nt, Human
aguaaaauugccauauu

SEQ ID NO: 1761869 - RNA, 16 nt, Human
aguaaaauugccauau

SEQ ID NO: 1761870 - RNA, 14 nt, Human
aguaaaauugccau

SEQ ID NO: 1761871 - RNA, 17 nt, Human
aggggccagaggcucgu

SEQ ID NO: 1761872 - RNA, 12 nt, Human
aggggccagagg

SEQ ID NO: 1761873 - RNA, 13 nt, Human
aggggccagaggc

SEQ ID NO: 1761874 - RNA, 14 nt, Human
aggggccagaggcu

SEQ ID NO: 1761875 - RNA, 15 nt, Human
aggggccagaggcuc

SEQ ID NO: 1761876 - RNA, 15 nt, Human
aggggcauugcugac

SEQ ID NO: 1761877 - RNA, 22 nt, Human
auacacccccucuucugagcac

SEQ ID NO: 1761878 - RNA, 23 nt, Human
auacacccccucuucugagcaca

SEQ ID NO: 1761879 - RNA, 20 nt, Human
auacacuguauguuauagaa

SEQ ID NO: 1761880 - RNA, 22 nt, Human
auacacuauuugugagcaaagg

SEQ ID NO: 1761881 - RNA, 19 nt, Human
auacuguauuuuguauugu

SEQ ID NO: 1761882 - RNA, 16 nt, Human
auacuuuugcccuuug

SEQ ID NO: 1761883 - RNA, 12 nt, Human
auacuugaacuu

SEQ ID NO: 1761884 - RNA, 13 nt, Human
auacuugaacuug

SEQ ID NO: 1761885 - RNA, 21 nt, Human
auacuugaacuugccucuuuu

SEQ ID NO: 1761886 - RNA, 14 nt, Human
auacuugaacuugu

SEQ ID NO: 1761887 - RNA, 10 nt, Human
auaaaagaug

SEQ ID NO: 1761888 - RNA, 20 nt, Human
auaaagagagaacaggacua

SEQ ID NO: 1761889 - RNA, 15 nt, Human
auacaauucuacauu

SEQ ID NO: 1761890 - RNA, 20 nt, Human
auaagugcuguauaaaauca

SEQ ID NO: 1761891 - RNA, 19 nt, Human
auaagugcuguauaaaauc

SEQ ID NO: 1761892 - RNA, 18 nt, Human
auaagugcuguauaaaau

SEQ ID NO: 1761893 - RNA, 17 nt, Human
auaagugcuguauaaaa

SEQ ID NO: 1761894 - RNA, 22 nt, Human
auaagugcuguauaaaaucagc

SEQ ID NO: 1761895 - RNA, 16 nt, Human
auaagugcuguauaaa

SEQ ID NO: 1761896 - RNA, 15 nt, Human
auaagugcuguauaa

SEQ ID NO: 1761897 - RNA, 14 nt, Human
auaagugcuguaua

SEQ ID NO: 1761898 - RNA, 13 nt, Human
auaagugcuguau

SEQ ID NO: 1761899 - RNA, 23 nt, Human
auaaguaaagugauuaaagugcu

SEQ ID NO: 1761900 - RNA, 20 nt, Human
auaagcuauccguguugcag

SEQ ID NO: 1761901 - RNA, 15 nt, Human
auaaaagacagugaa

SEQ ID NO: 1761902 - RNA, 16 nt, Human
auaaaagacagugaaa

SEQ ID NO: 1761903 - RNA, 13 nt, Human
auaaaaaaugaaa

SEQ ID NO: 1761904 - RNA, 13 nt, Human
auaaaaaauaugu

SEQ ID NO: 1761905 - RNA, 14 nt, Human
auaaaaaauaugua

SEQ ID NO: 1761906 - RNA, 17 nt, Human
auaaaaaauauguauuu

SEQ ID NO: 1761907 - RNA, 20 nt, Human
auaaaaaauauguauuuacc

SEQ ID NO: 1761908 - RNA, 22 nt, Human
aguuugccggauacaaacuggu

SEQ ID NO: 1761909 - RNA, 14 nt, Human
aguucauacccugu

SEQ ID NO: 1761910 - RNA, 20 nt, Human
aguuacacagaaaugcugcu

SEQ ID NO: 1761911 - RNA, 21 nt, Human
aguuacacagaaaugcugcug

SEQ ID NO: 1761912 - RNA, 22 nt, Human
aguuacacagaaaugcugcugg

SEQ ID NO: 1761913 - RNA, 11 nt, Human
agugcucccuc

SEQ ID NO: 1761914 - RNA, 14 nt, Human
agugcucgcuguug

SEQ ID NO: 1761915 - RNA, 14 nt, Human
agugcucccucaca

SEQ ID NO: 1761916 - RNA, 17 nt, Human
agugcucccucacaugu

SEQ ID NO: 1761917 - RNA, 23 nt, Human
aguuaaauagaguauaugcacuu

SEQ ID NO: 1761918 - RNA, 14 nt, Human
aguguuuuguacca

SEQ ID NO: 1761919 - RNA, 16 nt, Human
aguguuuuguaccagu

SEQ ID NO: 1761920 - RNA, 22 nt, Human
aguguuuuguaccagugaauuu

SEQ ID NO: 1761921 - RNA, 16 nt, Human
agaucucugcagggcc

SEQ ID NO: 1761922 - RNA, 17 nt, Human
agaucucugcagggccg

SEQ ID NO: 1761923 - RNA, 17 nt, Human
agaugggugaaggcugg

SEQ ID NO: 1761924 - RNA, 21 nt, Human
agaugggugaaggcuggcaug

SEQ ID NO: 1761925 - RNA, 12 nt, Human
agauucuuuccc

SEQ ID NO: 1761926 - RNA, 19 nt, Human
agauggggucuguaaaauc

SEQ ID NO: 1761927 - RNA, 18 nt, Human
agauggggucuguaaaau

SEQ ID NO: 1761928 - RNA, 16 nt, Human
agauggggucuguaaa

SEQ ID NO: 1761929 - RNA, 22 nt, Human
agaugggggcagggcugugcuu

SEQ ID NO: 1761930 - RNA, 16 nt, Human
agauugcaacaggcug

SEQ ID NO: 1761931 - RNA, 17 nt, Human
agauugcaacaggcugg

SEQ ID NO: 1761932 - RNA, 19 nt, Human
agauugcaacaggcugggc

SEQ ID NO: 1761933 - RNA, 22 nt, Human
agauugcaugugacucugaagc

SEQ ID NO: 1761934 - RNA, 13 nt, Human
agauugcauguga

SEQ ID NO: 1761935 - RNA, 15 nt, Human
agauugcaugugacu

SEQ ID NO: 1761936 - RNA, 16 nt, Human
agauugcaugugacuc

SEQ ID NO: 1761937 - RNA, 18 nt, Human
agauugcaugugacucug

SEQ ID NO: 1761938 - RNA, 19 nt, Human
agauugcaugugacucuga

SEQ ID NO: 1761939 - RNA, 23 nt, Human
agauugcaugugacucugaagcu

SEQ ID NO: 1761940 - RNA, 17 nt, Human
agcaaaggggacagcug

SEQ ID NO: 1761941 - RNA, 19 nt, Human
agcaaauaaacuaggaaau

SEQ ID NO: 1761942 - RNA, 20 nt, Human
agagggucugaggaauccag

SEQ ID NO: 1761943 - RNA, 12 nt, Human
agauagggaaaa

SEQ ID NO: 1761944 - RNA, 15 nt, Human
agauagggaaaaggg

SEQ ID NO: 1761945 - RNA, 22 nt, Human
agauagggaaaaggggcuccuu

SEQ ID NO: 1761946 - RNA, 15 nt, Human
agauauaagugcugu

SEQ ID NO: 1761947 - RNA, 13 nt, Human
agauauaagugcu

SEQ ID NO: 1761948 - RNA, 20 nt, Human
agauagauaggucagugcaa

SEQ ID NO: 1761949 - RNA, 23 nt, Human
agauauaagugcuguauaaaauc

SEQ ID NO: 1761950 - RNA, 22 nt, Human
agauauaagugcuguauaaaau

SEQ ID NO: 1761951 - RNA, 21 nt, Human
agauauaagugcuguauaaaa

SEQ ID NO: 1761952 - RNA, 20 nt, Human
agauauaagugcuguauaaa

SEQ ID NO: 1761953 - RNA, 18 nt, Human
agauauaagugcuguaua

SEQ ID NO: 1761954 - RNA, 17 nt, Human
agauauaagugcuguau

SEQ ID NO: 1761955 - RNA, 16 nt, Human
agauauaagugcugua

SEQ ID NO: 1761956 - RNA, 20 nt, Human
agcaauuuauacaauaucau

SEQ ID NO: 1761957 - RNA, 22 nt, Human
agcaauuucccccuaaaccaac

SEQ ID NO: 1761958 - RNA, 24 nt, Human
agcaauuucccccuaaaccaacug

SEQ ID NO: 1761959 - RNA, 17 nt, Human
agcacugagcaaguuga

SEQ ID NO: 1761960 - RNA, 20 nt, Human
agcagcuaaaccaaggacug

SEQ ID NO: 1761961 - RNA, 11 nt, Human
agcacugagca

SEQ ID NO: 1761962 - RNA, 12 nt, Human
agcacugagcaa

SEQ ID NO: 1761963 - RNA, 17 nt, Human
agcacuaugcuuuccuu

SEQ ID NO: 1761964 - RNA, 18 nt, Human
agcacuaugcuuuccuuc

SEQ ID NO: 1761965 - RNA, 22 nt, Human
agccaagaccucacacacacaa

SEQ ID NO: 1761966 - RNA, 15 nt, Human
agcaucuacuucagg

SEQ ID NO: 1761967 - RNA, 13 nt, Human
agcccaccuuggc

SEQ ID NO: 1761968 - RNA, 16 nt, Human
agccauuuuucaaagc

SEQ ID NO: 1761969 - RNA, 18 nt, Human
agccauuuuucaaagcaa

SEQ ID NO: 1761970 - RNA, 19 nt, Human
agccauuuuucaaagcaau

SEQ ID NO: 1761971 - RNA, 20 nt, Human
agccauuuuucaaagcaauu

SEQ ID NO: 1761972 - RNA, 14 nt, Human
agcaucggccuagg

SEQ ID NO: 1761973 - RNA, 15 nt, Human
agcaucggccuaggg

SEQ ID NO: 1761974 - RNA, 19 nt, Human
agcaucggccuagggcccc

SEQ ID NO: 1761975 - RNA, 21 nt, Human
agcaucggccuagggccccca

SEQ ID NO: 1761976 - RNA, 19 nt, Human
agaagggagcuagccagag

SEQ ID NO: 1761977 - RNA, 18 nt, Human
agaagggagcuagccaga

SEQ ID NO: 1761978 - RNA, 15 nt, Human
agaagggcugcauga

SEQ ID NO: 1761979 - RNA, 16 nt, Human
agaagggcugcaugau

SEQ ID NO: 1761980 - RNA, 20 nt, Human
agaagggcugcaugauguuu

SEQ ID NO: 1761981 - RNA, 14 nt, Human
agaagucacacagu

SEQ ID NO: 1761982 - RNA, 15 nt, Human
agaaguccuuauguu

SEQ ID NO: 1761983 - RNA, 17 nt, Human
agaaguccuuauguuaa

SEQ ID NO: 1761984 - RNA, 13 nt, Human
agaaccaaauuaa

SEQ ID NO: 1761985 - RNA, 22 nt, Human
agaaccaucccuauuuuguauu

SEQ ID NO: 1761986 - RNA, 16 nt, Human
agaaugaaagggccca

SEQ ID NO: 1761987 - RNA, 13 nt, Human
agaaucucuuucg

SEQ ID NO: 1761988 - RNA, 13 nt, Human
agaaugaugcuca

SEQ ID NO: 1761989 - RNA, 13 nt, Human
agaacaugcaguu

SEQ ID NO: 1761990 - RNA, 14 nt, Human
agaacaugcaguuu

SEQ ID NO: 1761991 - RNA, 16 nt, Human
agaacaugcaguuuga

SEQ ID NO: 1761992 - RNA, 17 nt, Human
agaacaugcaguuugaa

SEQ ID NO: 1761993 - RNA, 18 nt, Human
agaacaugcaguuugaaa

SEQ ID NO: 1761994 - RNA, 19 nt, Human
agaacaugcaguuugaaau

SEQ ID NO: 1761995 - RNA, 20 nt, Human
agaacaugcaguuugaaauu

SEQ ID NO: 1761996 - RNA, 21 nt, Human
agaacaugcaguuugaaauuc

SEQ ID NO: 1761997 - RNA, 22 nt, Human
agaacaugcaguuugaaauucu

SEQ ID NO: 1761998 - RNA, 23 nt, Human
agaacaugcaguuugaaauucug

SEQ ID NO: 1761999 - RNA, 14 nt, Human
agaacaguaugaau

SEQ ID NO: 1762000 - RNA, 17 nt, Human
agaacaguaugaauuug

SEQ ID NO: 1762001 - RNA, 20 nt, Human
agaacaguaugaauuugagc

SEQ ID NO: 1762002 - RNA, 11 nt, Human
agaacaggacu

SEQ ID NO: 1762003 - RNA, 12 nt, Human
agaacaggacua

SEQ ID NO: 1762004 - RNA, 15 nt, Human
agaacaaugugcuau

SEQ ID NO: 1762005 - RNA, 21 nt, Human
agaacacagccgauucaccug

SEQ ID NO: 1762006 - RNA, 15 nt, Human
agacucuuugcauau

SEQ ID NO: 1762007 - RNA, 13 nt, Human
agagaacaggacu

SEQ ID NO: 1762008 - RNA, 14 nt, Human
agagaacaggacua

SEQ ID NO: 1762009 - RNA, 15 nt, Human
agagaggcaauggcu

SEQ ID NO: 1762010 - RNA, 13 nt, Human
agagccugaggga

SEQ ID NO: 1762011 - RNA, 14 nt, Human
agagccugagggau

SEQ ID NO: 1762012 - RNA, 11 nt, Human
agagccugagg

SEQ ID NO: 1762013 - RNA, 19 nt, Human
agacaaggaaaaaauaaca

SEQ ID NO: 1762014 - RNA, 16 nt, Human
agacaaaauggauaca

SEQ ID NO: 1762015 - RNA, 22 nt, Human
agacaaaauggauacauaaaga

SEQ ID NO: 1762016 - RNA, 20 nt, Human
agaccauguggagacuucau

SEQ ID NO: 1762017 - RNA, 20 nt, Human
agaccuuuuuuuuuuuucca

SEQ ID NO: 1762018 - RNA, 21 nt, Human
agaccuuuuuuuuuuuuccaa

SEQ ID NO: 1762019 - RNA, 22 nt, Human
agaccuuuuuuuuuuuuccaau

SEQ ID NO: 1762020 - RNA, 22 nt, Human
agcucaccagccccagugccca

SEQ ID NO: 1762021 - RNA, 23 nt, Human
agcucaccagccccagugcccac

SEQ ID NO: 1762022 - RNA, 20 nt, Human
agcugacuugcacagggauu

SEQ ID NO: 1762023 - RNA, 19 nt, Human
agcugacgaacuuccaugg

SEQ ID NO: 1762024 - RNA, 17 nt, Human
agcucuugugaggaaag

SEQ ID NO: 1762025 - RNA, 16 nt, Human
agcucuugugaggaaa

SEQ ID NO: 1762026 - RNA, 13 nt, Human
agcucuugugagg

SEQ ID NO: 1762027 - RNA, 12 nt, Human
agcucuugugag

SEQ ID NO: 1762028 - RNA, 21 nt, Human
agcucuugugaggaaagucau

SEQ ID NO: 1762029 - RNA, 17 nt, Human
agcugguggaacauaug

SEQ ID NO: 1762030 - RNA, 15 nt, Human
agcugguggacccag

SEQ ID NO: 1762031 - RNA, 15 nt, Human
agcugguggcagagu

SEQ ID NO: 1762032 - RNA, 16 nt, Human
agcugguggcagaguc

SEQ ID NO: 1762033 - RNA, 15 nt, Human
agcuggucccacuca

SEQ ID NO: 1762034 - RNA, 13 nt, Human
agcugccuuagcu

SEQ ID NO: 1762035 - RNA, 16 nt, Human
agcugccuuagcuuca

SEQ ID NO: 1762036 - RNA, 17 nt, Human
agcugccuuagcuucag

SEQ ID NO: 1762037 - RNA, 18 nt, Human
agcugccuuagcuucagg

SEQ ID NO: 1762038 - RNA, 20 nt, Human
agcugccuuagcuucaggaa

SEQ ID NO: 1762039 - RNA, 22 nt, Human
agcugccuuagcuucaggaacc

SEQ ID NO: 1762040 - RNA, 23 nt, Human
agcugccuuagcuucaggaaccu

SEQ ID NO: 1762041 - RNA, 15 nt, Human
agcuguauuuugaaa

SEQ ID NO: 1762042 - RNA, 15 nt, Human
aggaagaaagaaugu

SEQ ID NO: 1762043 - RNA, 18 nt, Human
aggaaaaaauaacaauga

SEQ ID NO: 1762044 - RNA, 19 nt, Human
agcuuuguuucaaccaagu

SEQ ID NO: 1762045 - RNA, 11 nt, Human
agccugcugga

SEQ ID NO: 1762046 - RNA, 12 nt, Human
agccugcuggaa

SEQ ID NO: 1762047 - RNA, 14 nt, Human
agccugcuggaagc

SEQ ID NO: 1762048 - RNA, 19 nt, Human
agccugcuggaagcccagc

SEQ ID NO: 1762049 - RNA, 17 nt, Human
agccuggccagccuaca

SEQ ID NO: 1762050 - RNA, 16 nt, Human
agccuggccccauggu

SEQ ID NO: 1762051 - RNA, 17 nt, Human
agccuggccccaugguc

SEQ ID NO: 1762052 - RNA, 23 nt, Human
agccuuuccucaaaacuggaguc

SEQ ID NO: 1762053 - RNA, 18 nt, Human
agcuaaacuccuuccugg

SEQ ID NO: 1762054 - RNA, 23 nt, Human
agcuaaacuccuuccuggccuga

SEQ ID NO: 1762055 - RNA, 17 nt, Human
agcgauucuucugcuuc

SEQ ID NO: 1762056 - RNA, 19 nt, Human
agcgauucuucugcuucag

SEQ ID NO: 1762057 - RNA, 15 nt, Human
agcgauucuucugcu

SEQ ID NO: 1762058 - RNA, 13 nt, Human
agcucaccagccc

SEQ ID NO: 1762059 - RNA, 14 nt, Human
agcucaccagcccc

SEQ ID NO: 1762060 - RNA, 15 nt, Human
agcucaccagcccca

SEQ ID NO: 1762061 - RNA, 21 nt, Human
agcucaccagccccagugccc

SEQ ID NO: 1762062 - RNA, 13 nt, Human
agcuacaaaugca

SEQ ID NO: 1762063 - RNA, 13 nt, Human
agcuaaugggaca

SEQ ID NO: 1762064 - RNA, 14 nt, Human
agcuaaugggacac

SEQ ID NO: 1762065 - RNA, 15 nt, Human
agcuaaugggacacu

SEQ ID NO: 1762066 - RNA, 12 nt, Human
agcuacaaaugc

SEQ ID NO: 1762067 - RNA, 14 nt, Human
agccaaguagccuc

SEQ ID NO: 1762068 - RNA, 13 nt, Human
aggcagauacagg

SEQ ID NO: 1762069 - RNA, 12 nt, Human
aggcauguucuc

SEQ ID NO: 1762070 - RNA, 20 nt, Human
aggcauguucucugaggaca

SEQ ID NO: 1762071 - RNA, 22 nt, Human
aggcauguucucugaggacacu

SEQ ID NO: 1762072 - RNA, 14 nt, Human
aggccaugggccuc

SEQ ID NO: 1762073 - RNA, 16 nt, Human
aggccaugggccuccu

SEQ ID NO: 1762074 - RNA, 17 nt, Human
aggccaugggccuccug

SEQ ID NO: 1762075 - RNA, 12 nt, Human
aggccaggccgg

SEQ ID NO: 1762076 - RNA, 13 nt, Human
aggccagggcaga

SEQ ID NO: 1762077 - RNA, 15 nt, Human
aggccagggcagagu

SEQ ID NO: 1762078 - RNA, 15 nt, Human
aggauggcaggacgu

SEQ ID NO: 1762079 - RNA, 22 nt, Human
aggauggcaggacgugggcugg

SEQ ID NO: 1762080 - RNA, 14 nt, Human
aggagugagcacua

SEQ ID NO: 1762081 - RNA, 12 nt, Human
aggagugagcac

SEQ ID NO: 1762082 - RNA, 16 nt, Human
aggaggguguaaugga

SEQ ID NO: 1762083 - RNA, 19 nt, Human
aggagagcaucggccuagg

SEQ ID NO: 1762084 - RNA, 16 nt, Human
aggagacggaggggag

SEQ ID NO: 1762085 - RNA, 13 nt, Human
aggagacaggcag

SEQ ID NO: 1762086 - RNA, 18 nt, Human
aggagacaggcagagcug

SEQ ID NO: 1762087 - RNA, 16 nt, Human
aggaugggucagagcu

SEQ ID NO: 1762088 - RNA, 17 nt, Human
aggaugggucagagcua

SEQ ID NO: 1762089 - RNA, 15 nt, Human
agggcuacccugagc

SEQ ID NO: 1762090 - RNA, 16 nt, Human
agggauucucacaaua

SEQ ID NO: 1762091 - RNA, 17 nt, Human
agggauucucacaauag

SEQ ID NO: 1762092 - RNA, 17 nt, Human
agggcuacccugagcug

SEQ ID NO: 1762093 - RNA, 18 nt, Human
agggcuacccugagcuga

SEQ ID NO: 1762094 - RNA, 20 nt, Human
agggcuacccugagcugagg

SEQ ID NO: 1762095 - RNA, 21 nt, Human
agggcuacccugagcugaggc

SEQ ID NO: 1762096 - RNA, 22 nt, Human
agggcuacccugagcugaggca

SEQ ID NO: 1762097 - RNA, 23 nt, Human
agggcuacccugagcugaggcag

SEQ ID NO: 1762098 - RNA, 18 nt, Human
agggaugauucaagccau

SEQ ID NO: 1762099 - RNA, 19 nt, Human
agggaugauucaagccauu

SEQ ID NO: 1762100 - RNA, 18 nt, Human
agggauucacaucugcau

SEQ ID NO: 1762101 - RNA, 24 nt, Human
aggcuguaucccaugagccucagc

SEQ ID NO: 1762102 - RNA, 23 nt, Human
aggcuguaucccaugagccucag

SEQ ID NO: 1762103 - RNA, 20 nt, Human
cacccaagaccucagggcac

SEQ ID NO: 1762104 - RNA, 23 nt, Human
caccauacgagcaccuccagccu

SEQ ID NO: 1762105 - RNA, 20 nt, Human
caccauuuuaagucccuguc

SEQ ID NO: 1762106 - RNA, 17 nt, Human
caccauuuggcaaugcc

SEQ ID NO: 1762107 - RNA, 18 nt, Human
cacagcucuucuccaggc

SEQ ID NO: 1762108 - RNA, 14 nt, Human
cacaggcccggcuc

SEQ ID NO: 1762109 - RNA, 17 nt, Human
cacaggaucagucugau

SEQ ID NO: 1762110 - RNA, 15 nt, Human
cacaggacccucgcc

SEQ ID NO: 1762111 - RNA, 15 nt, Human
cacaggacauuucuc

SEQ ID NO: 1762112 - RNA, 17 nt, Human
cacaggacauuucucua

SEQ ID NO: 1762113 - RNA, 21 nt, Human
cacagcucuucuccaggcugu

SEQ ID NO: 1762114 - RNA, 19 nt, Human
cacagcucuucuccaggcu

SEQ ID NO: 1762115 - RNA, 20 nt, Human
cacagcucuucuccaggcug

SEQ ID NO: 1762116 - RNA, 18 nt, Human
cacaugcacgugugugca

SEQ ID NO: 1762117 - RNA, 20 nt, Human
cacaugucaguaccuucaaa

SEQ ID NO: 1762118 - RNA, 20 nt, Human
cacaugcucaggcuacuaua

SEQ ID NO: 1762119 - RNA, 13 nt, Human
caccaagcccagu

SEQ ID NO: 1762120 - RNA, 12 nt, Human
caccaagcccag

SEQ ID NO: 1762121 - RNA, 21 nt, Human
caccaagcaggaaaugaaaau

SEQ ID NO: 1762122 - RNA, 15 nt, Human
caccaacuuacaaaa

SEQ ID NO: 1762123 - RNA, 16 nt, Human
caccaacuuacaaaaa

SEQ ID NO: 1762124 - RNA, 15 nt, Human
caccaagaaagcagg

SEQ ID NO: 1762125 - RNA, 19 nt, Human
caccacgcuggggucuggg

SEQ ID NO: 1762126 - RNA, 19 nt, Human
caccacacccagcccacuu

SEQ ID NO: 1762127 - RNA, 17 nt, Human
caccagagcccaccuug

SEQ ID NO: 1762128 - RNA, 18 nt, Human
caccagagcccaccuugg

SEQ ID NO: 1762129 - RNA, 20 nt, Human
caccagagcccaccuuggcu

SEQ ID NO: 1762130 - RNA, 22 nt, Human
caccagagcccaccuuggcuca

SEQ ID NO: 1762131 - RNA, 15 nt, Human
caccagagcccaccu

SEQ ID NO: 1762132 - RNA, 15 nt, Human
caccaucaugucugg

SEQ ID NO: 1762133 - RNA, 17 nt, Human
caccaucaugucuggcu

SEQ ID NO: 1762134 - RNA, 18 nt, Human
caccaucaugucuggcua

SEQ ID NO: 1762135 - RNA, 13 nt, Human
caccauaugaauu

SEQ ID NO: 1762136 - RNA, 14 nt, Human
caccauaugaauug

SEQ ID NO: 1762137 - RNA, 15 nt, Human
caccauaugaauugu

SEQ ID NO: 1762138 - RNA, 18 nt, Human
caccauaugaauuguaca

SEQ ID NO: 1762139 - RNA, 19 nt, Human
caccauaugaauuguacag

SEQ ID NO: 1762140 - RNA, 20 nt, Human
caccauaugaauuguacaga

SEQ ID NO: 1762141 - RNA, 19 nt, Human
caccaggguugaccccaga

SEQ ID NO: 1762142 - RNA, 22 nt, Human
caccaggguugaccccagagga

SEQ ID NO: 1762143 - RNA, 23 nt, Human
caccaggguugaccccagaggau

SEQ ID NO: 1762144 - RNA, 14 nt, Human
caccagucccuguc

SEQ ID NO: 1762145 - RNA, 20 nt, Human
caccagucccuguccggaau

SEQ ID NO: 1762146 - RNA, 14 nt, Human
cacacccagcccac

SEQ ID NO: 1762147 - RNA, 20 nt, Human
cacacccagcccacuucugc

SEQ ID NO: 1762148 - RNA, 15 nt, Human
cacaccuagccagcu

SEQ ID NO: 1762149 - RNA, 16 nt, Human
cacacagcucuguccu

SEQ ID NO: 1762150 - RNA, 21 nt, Human
cacaccagagcccaccuuggc

SEQ ID NO: 1762151 - RNA, 22 nt, Human
cacaccagagcccaccuuggcu

SEQ ID NO: 1762152 - RNA, 13 nt, Human
cacacagcucugu

SEQ ID NO: 1762153 - RNA, 14 nt, Human
cacacagcucuguc

SEQ ID NO: 1762154 - RNA, 15 nt, Human
cacacagcucugucc

SEQ ID NO: 1762155 - RNA, 15 nt, Human
cacacaccagagccc

SEQ ID NO: 1762156 - RNA, 16 nt, Human
cacacaccagagccca

SEQ ID NO: 1762157 - RNA, 20 nt, Human
cacacaccagagcccaccuu

SEQ ID NO: 1762158 - RNA, 14 nt, Human
cacacacuuuggcu

SEQ ID NO: 1762159 - RNA, 14 nt, Human
cacacaccuagcca

SEQ ID NO: 1762160 - RNA, 12 nt, Human
cacacacacaca

SEQ ID NO: 1762161 - RNA, 15 nt, Human
cacaaucccuuucua

SEQ ID NO: 1762162 - RNA, 12 nt, Human
cacaacuuguuu

SEQ ID NO: 1762163 - RNA, 20 nt, Human
cacaacuuguuuuugguuuu

SEQ ID NO: 1762164 - RNA, 15 nt, Human
caauuauguuaaacu

SEQ ID NO: 1762165 - RNA, 13 nt, Human
caauuauguuaaa

SEQ ID NO: 1762166 - RNA, 13 nt, Human
cacacacacacaa

SEQ ID NO: 1762167 - RNA, 15 nt, Human
caaugaaaaaaugua

SEQ ID NO: 1762168 - RNA, 18 nt, Human
caaugcaagacgcccucu

SEQ ID NO: 1762169 - RNA, 14 nt, Human
caaugcacugacau

SEQ ID NO: 1762170 - RNA, 23 nt, Human
caaucgguguguagugauguuuc

SEQ ID NO: 1762171 - RNA, 16 nt, Human
caagugccugcuuuua

SEQ ID NO: 1762172 - RNA, 20 nt, Human
caacaggcugggcuucagug

SEQ ID NO: 1762173 - RNA, 17 nt, Human
caaagaauuccaaagca

SEQ ID NO: 1762174 - RNA, 18 nt, Human
caaagaauuccaaagcaa

SEQ ID NO: 1762175 - RNA, 19 nt, Human
caaagaauuccaaagcaaa

SEQ ID NO: 1762176 - RNA, 15 nt, Human
auuuuaagucccugu

SEQ ID NO: 1762177 - RNA, 19 nt, Human
auuuuaagucccugucacc

SEQ ID NO: 1762178 - RNA, 20 nt, Human
auuuuaagucccugucaccu

SEQ ID NO: 1762179 - RNA, 22 nt, Human
auuuuaagucccugucaccucu

SEQ ID NO: 1762180 - RNA, 23 nt, Human
auuuuaaugaagaaaguggaaaa

SEQ ID NO: 1762181 - RNA, 20 nt, Human
caaaggguaucaggugcugc

SEQ ID NO: 1762182 - RNA, 21 nt, Human
caaaggguaucaggugcugcc

SEQ ID NO: 1762183 - RNA, 13 nt, Human
caaaggggacagc

SEQ ID NO: 1762184 - RNA, 18 nt, Human
caaaggggacagcugugu

SEQ ID NO: 1762185 - RNA, 23 nt, Human
caaaggguaucaggugcugccau

SEQ ID NO: 1762186 - RNA, 15 nt, Human
caaagggaaauauca

SEQ ID NO: 1762187 - RNA, 17 nt, Human
caaagggaaauaucauu

SEQ ID NO: 1762188 - RNA, 18 nt, Human
caaagggaaauaucauuu

SEQ ID NO: 1762189 - RNA, 16 nt, Human
caaaggguccagaagg

SEQ ID NO: 1762190 - RNA, 16 nt, Human
caaauauugguguugu

SEQ ID NO: 1762191 - RNA, 21 nt, Human
caaauuggagcuucauggcag

SEQ ID NO: 1762192 - RNA, 21 nt, Human
caaccugccugacauuuggag

SEQ ID NO: 1762193 - RNA, 13 nt, Human
caacucuuugaga

SEQ ID NO: 1762194 - RNA, 14 nt, Human
caacucuuugagaa

SEQ ID NO: 1762195 - RNA, 15 nt, Human
caacucuuugagaaa

SEQ ID NO: 1762196 - RNA, 16 nt, Human
caacucuuugagaaac

SEQ ID NO: 1762197 - RNA, 21 nt, Human
caacugaaggcuaaaaagcaa

SEQ ID NO: 1762198 - RNA, 22 nt, Human
caacugaaggcuaaaaagcaac

SEQ ID NO: 1762199 - RNA, 16 nt, Human
caaccuauuuugaagu

SEQ ID NO: 1762200 - RNA, 15 nt, Human
caaccuauuuugaag

SEQ ID NO: 1762201 - RNA, 17 nt, Human
caacaggcugggcuuca

SEQ ID NO: 1762202 - RNA, 17 nt, Human
caacaguggggaagagu

SEQ ID NO: 1762203 - RNA, 14 nt, Human
caacaggcugggcu

SEQ ID NO: 1762204 - RNA, 21 nt, Human
caagcuuccauagcugcugcc

SEQ ID NO: 1762205 - RNA, 12 nt, Human
caagcuucccuc

SEQ ID NO: 1762206 - RNA, 19 nt, Human
caagcuucccuccaucccc

SEQ ID NO: 1762207 - RNA, 12 nt, Human
caaggacugagc

SEQ ID NO: 1762208 - RNA, 13 nt, Human
caaggacugagca

SEQ ID NO: 1762209 - RNA, 20 nt, Human
caaggacugagcacccucug

SEQ ID NO: 1762210 - RNA, 17 nt, Human
caagcccagcacugcuu

SEQ ID NO: 1762211 - RNA, 17 nt, Human
caagcaggaaaugaaaa

SEQ ID NO: 1762212 - RNA, 23 nt, Human
caagcaggaaaugaaaaugucuu

SEQ ID NO: 1762213 - RNA, 13 nt, Human
caagcauguaacu

SEQ ID NO: 1762214 - RNA, 12 nt, Human
caagagggucug

SEQ ID NO: 1762215 - RNA, 16 nt, Human
caagagggucugagga

SEQ ID NO: 1762216 - RNA, 17 nt, Human
caagagggucugaggaa

SEQ ID NO: 1762217 - RNA, 16 nt, Human
caagaccucacacaca

SEQ ID NO: 1762218 - RNA, 15 nt, Human
caagaccucagggca

SEQ ID NO: 1762219 - RNA, 16 nt, Human
caagaccucagggcac

SEQ ID NO: 1762220 - RNA, 23 nt, Human
caagaccucagggcacaaagaug

SEQ ID NO: 1762221 - RNA, 24 nt, Human
caagaccucagggcacaaagaugg

SEQ ID NO: 1762222 - RNA, 13 nt, Human
caagguuggagcc

SEQ ID NO: 1762223 - RNA, 14 nt, Human
caagguuggagccc

SEQ ID NO: 1762224 - RNA, 17 nt, Human
caagguuggagcccagg

SEQ ID NO: 1762225 - RNA, 21 nt, Human
caagguuggagcccagggcau

SEQ ID NO: 1762226 - RNA, 21 nt, Human
caagugauucuccugccucag

SEQ ID NO: 1762227 - RNA, 20 nt, Human
caagugauucuccugccuca

SEQ ID NO: 1762228 - RNA, 19 nt, Human
caagugauucuccugccuc

SEQ ID NO: 1762229 - RNA, 18 nt, Human
caagugauucuccugccu

SEQ ID NO: 1762230 - RNA, 23 nt, Human
caaggggaauguuugccucugcc

SEQ ID NO: 1762231 - RNA, 17 nt, Human
caagguuauaugaauau

SEQ ID NO: 1762232 - RNA, 21 nt, Human
caaggggaauguuugccucug

SEQ ID NO: 1762233 - RNA, 21 nt, Human
caagggcagaaugaaucuaug

SEQ ID NO: 1762234 - RNA, 11 nt, Human
cauuugaaugc

SEQ ID NO: 1762235 - RNA, 10 nt, Human
cauuugaaug

SEQ ID NO: 1762236 - RNA, 20 nt, Human
cauuugagcagggcucagcg

SEQ ID NO: 1762237 - RNA, 17 nt, Human
cauuugagcagggcuca

SEQ ID NO: 1762238 - RNA, 18 nt, Human
cauuugagcagggcucag

SEQ ID NO: 1762239 - RNA, 12 nt, Human
cauuugaaugca

SEQ ID NO: 1762240 - RNA, 14 nt, Human
cauuuuucaaagca

SEQ ID NO: 1762241 - RNA, 17 nt, Human
cauuuuucaaagcaauu

SEQ ID NO: 1762242 - RNA, 14 nt, Human
cauuuuucaacuuu

SEQ ID NO: 1762243 - RNA, 17 nt, Human
cauuuuucaacuuugaa

SEQ ID NO: 1762244 - RNA, 18 nt, Human
cauuuuucaacuuugaau

SEQ ID NO: 1762245 - RNA, 19 nt, Human
cauuuuucaacuuugaaua

SEQ ID NO: 1762246 - RNA, 20 nt, Human
cauuuuucaacuuugaauaa

SEQ ID NO: 1762247 - RNA, 21 nt, Human
cauuuuucaacuuugaauaaa

SEQ ID NO: 1762248 - RNA, 12 nt, Human
cauuuccugugu

SEQ ID NO: 1762249 - RNA, 13 nt, Human
cauuuccuguguc

SEQ ID NO: 1762250 - RNA, 15 nt, Human
cauugccaagggcuu

SEQ ID NO: 1762251 - RNA, 19 nt, Human
cauuguccaauccuauguu

SEQ ID NO: 1762252 - RNA, 21 nt, Human
cauuguccaauccuauguuuu

SEQ ID NO: 1762253 - RNA, 16 nt, Human
cauuguaucgauguua

SEQ ID NO: 1762254 - RNA, 17 nt, Human
cauuguaucgauguuau

SEQ ID NO: 1762255 - RNA, 21 nt, Human
cauuguaucgauguuauguaa

SEQ ID NO: 1762256 - RNA, 22 nt, Human
cauuguaucgauguuauguaaa

SEQ ID NO: 1762257 - RNA, 15 nt, Human
cauugugaaccaaug

SEQ ID NO: 1762258 - RNA, 17 nt, Human
cauugugaaccaaugca

SEQ ID NO: 1762259 - RNA, 18 nt, Human
cauuguuggccaaagcca

SEQ ID NO: 1762260 - RNA, 17 nt, Human
cauuguuggccaaagcc

SEQ ID NO: 1762261 - RNA, 13 nt, Human
cauugugcuucuu

SEQ ID NO: 1762262 - RNA, 17 nt, Human
cauugugcuucuuucuu

SEQ ID NO: 1762263 - RNA, 15 nt, Human
ccaaguagccucucc

SEQ ID NO: 1762264 - RNA, 22 nt, Human
ccaaggggaauguuugccucug

SEQ ID NO: 1762265 - RNA, 21 nt, Human
ccaagggcuuuguuuugcaca

SEQ ID NO: 1762266 - RNA, 12 nt, Human
ccaagccacuga

SEQ ID NO: 1762267 - RNA, 15 nt, Human
ccaagcaagacugag

SEQ ID NO: 1762268 - RNA, 17 nt, Human
ccaacauguggcuccuc

SEQ ID NO: 1762269 - RNA, 22 nt, Human
ccaacauguggcuccucccagc

SEQ ID NO: 1762270 - RNA, 22 nt, Human
ccaacaauccuagugcuuuccu

SEQ ID NO: 1762271 - RNA, 13 nt, Human
ccaacacgcagga

SEQ ID NO: 1762272 - RNA, 21 nt, Human
ccaaagcuaggccuggccaga

SEQ ID NO: 1762273 - RNA, 16 nt, Human
ccaaagcuuucaugua

SEQ ID NO: 1762274 - RNA, 16 nt, Human
ccaaagcuaggccugg

SEQ ID NO: 1762275 - RNA, 17 nt, Human
ccaaagcuaggccuggc

SEQ ID NO: 1762276 - RNA, 15 nt, Human
ccaaagcuaggccug

SEQ ID NO: 1762277 - RNA, 19 nt, Human
ccaaagccaaagcuaggcc

SEQ ID NO: 1762278 - RNA, 23 nt, Human
ccacggccaggccagagggagug

SEQ ID NO: 1762279 - RNA, 18 nt, Human
ccacgcuggagugcagug

SEQ ID NO: 1762280 - RNA, 19 nt, Human
ccacgcuggagugcaguga

SEQ ID NO: 1762281 - RNA, 16 nt, Human
ccacggccaggccaga

SEQ ID NO: 1762282 - RNA, 18 nt, Human
ccacggccaggccagagg

SEQ ID NO: 1762283 - RNA, 16 nt, Human
ccacgcuggagugcag

SEQ ID NO: 1762284 - RNA, 18 nt, Human
ccacucaguccauagcag

SEQ ID NO: 1762285 - RNA, 11 nt, Human
ccacucagcuc

SEQ ID NO: 1762286 - RNA, 15 nt, Human
ccacucagcuccgug

SEQ ID NO: 1762287 - RNA, 21 nt, Human
ccagacaccuugacagggcac

SEQ ID NO: 1762288 - RNA, 13 nt, Human
ccagaacaguaug

SEQ ID NO: 1762289 - RNA, 15 nt, Human
ccagaacaguaugaa

SEQ ID NO: 1762290 - RNA, 13 nt, Human
ccacuuaaaaugu

SEQ ID NO: 1762291 - RNA, 23 nt, Human
ccacccaggagccccgaggccuu

SEQ ID NO: 1762292 - RNA, 14 nt, Human
ccacaguugcucua

SEQ ID NO: 1762293 - RNA, 20 nt, Human
ccacaucccgggacgcagca

SEQ ID NO: 1762294 - RNA, 13 nt, Human
ccacauccuccac

SEQ ID NO: 1762295 - RNA, 11 nt, Human
ccacagggcac

SEQ ID NO: 1762296 - RNA, 19 nt, Human
ccacagggcaccugccacc

SEQ ID NO: 1762297 - RNA, 20 nt, Human
ccacaucuugcucugcugac

SEQ ID NO: 1762298 - RNA, 19 nt, Human
ccacaucuugcucugcuga

SEQ ID NO: 1762299 - RNA, 18 nt, Human
ccacaucuugcucugcug

SEQ ID NO: 1762300 - RNA, 17 nt, Human
ccacaucuugcucugcu

SEQ ID NO: 1762301 - RNA, 16 nt, Human
ccacaugugcacaugc

SEQ ID NO: 1762302 - RNA, 16 nt, Human
ccacaugggaggcuca

SEQ ID NO: 1762303 - RNA, 21 nt, Human
ccaccaagagggacgccuggg

SEQ ID NO: 1762304 - RNA, 17 nt, Human
ccaccaagagggacgcc

SEQ ID NO: 1762305 - RNA, 20 nt, Human
ccacacccagcccacuucug

SEQ ID NO: 1762306 - RNA, 15 nt, Human
ccacacccagcccac

SEQ ID NO: 1762307 - RNA, 21 nt, Human
ccacacccagcccacuucugc

SEQ ID NO: 1762308 - RNA, 22 nt, Human
ccacacccagcccacuucugcc

SEQ ID NO: 1762309 - RNA, 17 nt, Human
ccacaggacccucgccg

SEQ ID NO: 1762310 - RNA, 16 nt, Human
ccacaggaucagucug

SEQ ID NO: 1762311 - RNA, 16 nt, Human
ccacaggacauuucuc

SEQ ID NO: 1762312 - RNA, 21 nt, Human
ccacaggacauuucucuaaga

SEQ ID NO: 1762313 - RNA, 14 nt, Human
cccauuccugggaa

SEQ ID NO: 1762314 - RNA, 15 nt, Human
cccagugcccacagg

SEQ ID NO: 1762315 - RNA, 20 nt, Human
cccagugcccacaggaucag

SEQ ID NO: 1762316 - RNA, 13 nt, Human
cccauucugccug

SEQ ID NO: 1762317 - RNA, 19 nt, Human
ccccaccauaugaauugua

SEQ ID NO: 1762318 - RNA, 18 nt, Human
cccaacacgcaggagcac

SEQ ID NO: 1762319 - RNA, 20 nt, Human
cccagauugcaacaggcugg

SEQ ID NO: 1762320 - RNA, 16 nt, Human
cccagauuccccugug

SEQ ID NO: 1762321 - RNA, 17 nt, Human
cccagauuccccugugu

SEQ ID NO: 1762322 - RNA, 19 nt, Human
cccagauuccccuguguca

SEQ ID NO: 1762323 - RNA, 21 nt, Human
cccagauugcaacaggcuggg

SEQ ID NO: 1762324 - RNA, 22 nt, Human
cccagauugcaacaggcugggc

SEQ ID NO: 1762325 - RNA, 16 nt, Human
cccagcaagugagagc

SEQ ID NO: 1762326 - RNA, 18 nt, Human
cccagcaagugagagcug

SEQ ID NO: 1762327 - RNA, 12 nt, Human
cccagccugcua

SEQ ID NO: 1762328 - RNA, 21 nt, Human
cccagccugcuagcuagcuca

SEQ ID NO: 1762329 - RNA, 11 nt, Human
cccagccugcu

SEQ ID NO: 1762330 - RNA, 14 nt, Human
cccagccugcuagc

SEQ ID NO: 1762331 - RNA, 15 nt, Human
cccagccugcuagcu

SEQ ID NO: 1762332 - RNA, 16 nt, Human
cccagccugcuagcua

SEQ ID NO: 1762333 - RNA, 11 nt, Human
cccagccugcg

SEQ ID NO: 1762334 - RNA, 18 nt, Human
cccagccugcgccugcug

SEQ ID NO: 1762335 - RNA, 19 nt, Human
cccagccugcgccugcugc

SEQ ID NO: 1762336 - RNA, 22 nt, Human
cccagccugcgccugcugcaug

SEQ ID NO: 1762337 - RNA, 23 nt, Human
cccagccugcgccugcugcaugc

SEQ ID NO: 1762338 - RNA, 19 nt, Human
cccagcaagugagagcugg

SEQ ID NO: 1762339 - RNA, 20 nt, Human
cccagcaagugagagcuggg

SEQ ID NO: 1762340 - RNA, 21 nt, Human
cccagcaagugagagcugggu

SEQ ID NO: 1762341 - RNA, 22 nt, Human
cccagcaagugagagcugggug

SEQ ID NO: 1762342 - RNA, 23 nt, Human
cccagcaagugagagcugggugu

SEQ ID NO: 1762343 - RNA, 23 nt, Human
cccagauugcaacaggcugggcu

SEQ ID NO: 1762344 - RNA, 15 nt, Human
cccagccccuacugc

SEQ ID NO: 1762345 - RNA, 18 nt, Human
cccagccccuacugcugu

SEQ ID NO: 1762346 - RNA, 19 nt, Human
cccagccccuacugcugug

SEQ ID NO: 1762347 - RNA, 20 nt, Human
cccagccccgguggcugggc

SEQ ID NO: 1762348 - RNA, 22 nt, Human
cccagccccgguggcugggcag

SEQ ID NO: 1762349 - RNA, 19 nt, Human
cccagcgagcccugguggc

SEQ ID NO: 1762350 - RNA, 23 nt, Human
cccagcgagcccugguggcagug

SEQ ID NO: 1762351 - RNA, 17 nt, Human
cccagcgagcccuggug

SEQ ID NO: 1762352 - RNA, 18 nt, Human
cccagcgagcccuggugg

SEQ ID NO: 1762353 - RNA, 15 nt, Human
cccagcgagcccugg

SEQ ID NO: 1762354 - RNA, 14 nt, Human
cccaggcauugcca

SEQ ID NO: 1762355 - RNA, 21 nt, Human
cccaggcauugccaagggcuu

SEQ ID NO: 1762356 - RNA, 17 nt, Human
cccaggcaggucuugaa

SEQ ID NO: 1762357 - RNA, 11 nt, Human
cccaggccccu

SEQ ID NO: 1762358 - RNA, 16 nt, Human
cccaggccccugccac

SEQ ID NO: 1762359 - RNA, 18 nt, Human
cccaggccccugccaccc

SEQ ID NO: 1762360 - RNA, 21 nt, Human
cccaggccccugccacccugg

SEQ ID NO: 1762361 - RNA, 22 nt, Human
cccaggccccugccacccuggg

SEQ ID NO: 1762362 - RNA, 11 nt, Human
cccaggcaggu

SEQ ID NO: 1762363 - RNA, 13 nt, Human
cccaggcaggucu

SEQ ID NO: 1762364 - RNA, 23 nt, Human
cccaggaucagauugcaugugac

SEQ ID NO: 1762365 - RNA, 21 nt, Human
cccaggagccccgaggccuuc

SEQ ID NO: 1762366 - RNA, 16 nt, Human
cccaggccccuggagg

SEQ ID NO: 1762367 - RNA, 18 nt, Human
cccaggccccuggaggcu

SEQ ID NO: 1762368 - RNA, 23 nt, Human
cccaggccccuggaggcugccuc

SEQ ID NO: 1762369 - RNA, 12 nt, Human
cccaggccccug

SEQ ID NO: 1762370 - RNA, 13 nt, Human
cccagugcccaca

SEQ ID NO: 1762371 - RNA, 20 nt, Human
cccagucuggaaugcagugg

SEQ ID NO: 1762372 - RNA, 21 nt, Human
cccaggugcagccagaggcac

SEQ ID NO: 1762373 - RNA, 15 nt, Human
cccaggugggucccg

SEQ ID NO: 1762374 - RNA, 15 nt, Human
cccaggugcagccag

SEQ ID NO: 1762375 - RNA, 20 nt, Human
cccaggugcagccagaggca

SEQ ID NO: 1762376 - RNA, 16 nt, Human
ccagcugcccuauggg

SEQ ID NO: 1762377 - RNA, 20 nt, Human
ccagcugcccuaugggccug

SEQ ID NO: 1762378 - RNA, 21 nt, Human
ccagcugcccuaugggccugc

SEQ ID NO: 1762379 - RNA, 12 nt, Human
ccagcugcuccc

SEQ ID NO: 1762380 - RNA, 14 nt, Human
ccagcugcucccca

SEQ ID NO: 1762381 - RNA, 22 nt, Human
ccagagcccaccuuggcucaag

SEQ ID NO: 1762382 - RNA, 16 nt, Human
ccagagcccaccuugg

SEQ ID NO: 1762383 - RNA, 14 nt, Human
ccagcgagcccugg

SEQ ID NO: 1762384 - RNA, 15 nt, Human
ccagcgagcccuggu

SEQ ID NO: 1762385 - RNA, 16 nt, Human
ccagcgagcccuggug

SEQ ID NO: 1762386 - RNA, 11 nt, Human
ccaggacucug

SEQ ID NO: 1762387 - RNA, 13 nt, Human
ccaggacucugac

SEQ ID NO: 1762388 - RNA, 14 nt, Human
ccaggacucugacc

SEQ ID NO: 1762389 - RNA, 18 nt, Human
ccaggacucugaccccag

SEQ ID NO: 1762390 - RNA, 22 nt, Human
ccaggacucugaccccagcauu

SEQ ID NO: 1762391 - RNA, 16 nt, Human
ccaggcauugccaagg

SEQ ID NO: 1762392 - RNA, 21 nt, Human
ccaggagcuucuuguuuccuu

SEQ ID NO: 1762393 - RNA, 22 nt, Human
ccaggagcuucuuguuuccuug

SEQ ID NO: 1762394 - RNA, 16 nt, Human
ccaggagccccgaggc

SEQ ID NO: 1762395 - RNA, 15 nt, Human
ccaggagccccgagg

SEQ ID NO: 1762396 - RNA, 12 nt, Human
ccaggcuuggaa

SEQ ID NO: 1762397 - RNA, 19 nt, Human
ccagggcaucuugcuggcu

SEQ ID NO: 1762398 - RNA, 20 nt, Human
ccagggcaucuugcuggcua

SEQ ID NO: 1762399 - RNA, 21 nt, Human
ccagggcaucuugcuggcuac

SEQ ID NO: 1762400 - RNA, 20 nt, Human
ccaggcuguaucccaugagc

SEQ ID NO: 1762401 - RNA, 19 nt, Human
ccaggcuggucucaaacuc

SEQ ID NO: 1762402 - RNA, 13 nt, Human
ccaggccccugcc

SEQ ID NO: 1762403 - RNA, 20 nt, Human
ccaggcauuuagcccucaca

SEQ ID NO: 1762404 - RNA, 13 nt, Human
ccaggugcccagc

SEQ ID NO: 1762405 - RNA, 15 nt, Human
ccaggugcccagcua

SEQ ID NO: 1762406 - RNA, 21 nt, Human
ccaggugaguccuagagcuac

SEQ ID NO: 1762407 - RNA, 13 nt, Human
ccaguacuuguca

SEQ ID NO: 1762408 - RNA, 14 nt, Human
ccaguacuugucau

SEQ ID NO: 1762409 - RNA, 15 nt, Human
ccaguacuugucaua

SEQ ID NO: 1762410 - RNA, 22 nt, Human
ccaggugcuacacccuuuucca

SEQ ID NO: 1762411 - RNA, 22 nt, Human
ccaggugggucccggcucugug

SEQ ID NO: 1762412 - RNA, 14 nt, Human
ccagguucagcuug

SEQ ID NO: 1762413 - RNA, 15 nt, Human
ccagguucagcuugu

SEQ ID NO: 1762414 - RNA, 12 nt, Human
ccauauccuggu

SEQ ID NO: 1762415 - RNA, 15 nt, Human
ccauauccuggugcc

SEQ ID NO: 1762416 - RNA, 12 nt, Human
ccauaugaauug

SEQ ID NO: 1762417 - RNA, 14 nt, Human
ccauaugaauugua

SEQ ID NO: 1762418 - RNA, 17 nt, Human
ccauaugaauuguacag

SEQ ID NO: 1762419 - RNA, 19 nt, Human
ccauaucagaacugugcca

SEQ ID NO: 1762420 - RNA, 18 nt, Human
ccaucuccccucagcucg

SEQ ID NO: 1762421 - RNA, 23 nt, Human
ccaucuccccucagcucggcuca

SEQ ID NO: 1762422 - RNA, 14 nt, Human
ccaucuccccucag

SEQ ID NO: 1762423 - RNA, 15 nt, Human
ccaucuccccucagc

SEQ ID NO: 1762424 - RNA, 16 nt, Human
ccaucuccccucagcu

SEQ ID NO: 1762425 - RNA, 17 nt, Human
ccaucuccccucagcuc

SEQ ID NO: 1762426 - RNA, 18 nt, Human
ccaucucgcucccuccca

SEQ ID NO: 1762427 - RNA, 22 nt, Human
ccaucucgcucccucccaggac

SEQ ID NO: 1762428 - RNA, 12 nt, Human
ccaucagugcuc

SEQ ID NO: 1762429 - RNA, 17 nt, Human
ccaucagugcucccuca

SEQ ID NO: 1762430 - RNA, 16 nt, Human
ccaucaucaugugugu

SEQ ID NO: 1762431 - RNA, 22 nt, Human
ccaucauuuuccauauccuggu

SEQ ID NO: 1762432 - RNA, 17 nt, Human
ccauccacaugggagcc

SEQ ID NO: 1762433 - RNA, 16 nt, Human
ccaucuggucauuugg

SEQ ID NO: 1762434 - RNA, 22 nt, Human
ccaucugguuaggauggcagga

SEQ ID NO: 1762435 - RNA, 23 nt, Human
ccaucugguuaggauggcaggac

SEQ ID NO: 1762436 - RNA, 21 nt, Human
ccauucugccugcccaggccc

SEQ ID NO: 1762437 - RNA, 19 nt, Human
ccauucugccugcccaggc

SEQ ID NO: 1762438 - RNA, 20 nt, Human
ccauucugccugcccaggcc

SEQ ID NO: 1762439 - RNA, 17 nt, Human
ccauucugccugcccag

SEQ ID NO: 1762440 - RNA, 18 nt, Human
ccauucugccugcccagg

SEQ ID NO: 1762441 - RNA, 22 nt, Human
ccauuuugggguacccacugcu

SEQ ID NO: 1762442 - RNA, 20 nt, Human
ccauuuugggguacccacug

SEQ ID NO: 1762443 - RNA, 18 nt, Human
cccaaaauuuauuuuaua

SEQ ID NO: 1762444 - RNA, 17 nt, Human
cccaaacaaauaugcaa

SEQ ID NO: 1762445 - RNA, 20 nt, Human
cccaaacaaauaugcaaaag

SEQ ID NO: 1762446 - RNA, 17 nt, Human
cgcccaggaucagauug

SEQ ID NO: 1762447 - RNA, 23 nt, Human
cgcccaggaucagauugcaugug

SEQ ID NO: 1762448 - RNA, 11 nt, Human
cgcccucuccu

SEQ ID NO: 1762449 - RNA, 20 nt, Human
cgcccucuccuuuguucccg

SEQ ID NO: 1762450 - RNA, 16 nt, Human
cgcgugcacacaccag

SEQ ID NO: 1762451 - RNA, 19 nt, Human
cgcgugcacacaccagagc

SEQ ID NO: 1762452 - RNA, 20 nt, Human
cgcgugcacacaccagagcc

SEQ ID NO: 1762453 - RNA, 14 nt, Human
cgcgaugggucagg

SEQ ID NO: 1762454 - RNA, 14 nt, Human
cgaggacagggagg

SEQ ID NO: 1762455 - RNA, 13 nt, Human
cgaggacagggag

SEQ ID NO: 1762456 - RNA, 12 nt, Human
cgaggacaggga

SEQ ID NO: 1762457 - RNA, 18 nt, Human
cgaggccuucucugaagg

SEQ ID NO: 1762458 - RNA, 19 nt, Human
cgaggccuucucugaagga

SEQ ID NO: 1762459 - RNA, 10 nt, Human
cgaggccuga

SEQ ID NO: 1762460 - RNA, 11 nt, Human
cgaggccugaa

SEQ ID NO: 1762461 - RNA, 19 nt, Human
cgaucuggguucacugcaa

SEQ ID NO: 1762462 - RNA, 21 nt, Human
cgauucuucugcuucagccuc

SEQ ID NO: 1762463 - RNA, 13 nt, Human
cgauucuucugcu

SEQ ID NO: 1762464 - RNA, 19 nt, Human
cgauucuucugcuucagcc

SEQ ID NO: 1762465 - RNA, 13 nt, Human
cgauuucuguaaa

SEQ ID NO: 1762466 - RNA, 17 nt, Human
cgauuucuguaaacucu

SEQ ID NO: 1762467 - RNA, 23 nt, Human
cgcagaacgaaccuuggccuggg

SEQ ID NO: 1762468 - RNA, 19 nt, Human
cgcagaacgaaccuuggcc

SEQ ID NO: 1762469 - RNA, 20 nt, Human
cgcagaacgaaccuuggccu

SEQ ID NO: 1762470 - RNA, 19 nt, Human
ccuuugagugcaguccuga

SEQ ID NO: 1762471 - RNA, 22 nt, Human
ccuuugagugcaguccugauca

SEQ ID NO: 1762472 - RNA, 21 nt, Human
ccuuugauuaaagacuccagu

SEQ ID NO: 1762473 - RNA, 18 nt, Human
ccuuugcugucccauagu

SEQ ID NO: 1762474 - RNA, 11 nt, Human
ccuuugcuguc

SEQ ID NO: 1762475 - RNA, 12 nt, Human
ccuuggcugcag

SEQ ID NO: 1762476 - RNA, 13 nt, Human
ccuuggcugcagg

SEQ ID NO: 1762477 - RNA, 14 nt, Human
ccuuggcugcaggg

SEQ ID NO: 1762478 - RNA, 12 nt, Human
ccuuuaaaauuu

SEQ ID NO: 1762479 - RNA, 21 nt, Human
ccuuuaaaauuuuuuuagaaa

SEQ ID NO: 1762480 - RNA, 20 nt, Human
ccuuuaaaauuuuuuuagaa

SEQ ID NO: 1762481 - RNA, 20 nt, Human
ccuuucucuuuuccccuuuc

SEQ ID NO: 1762482 - RNA, 22 nt, Human
ccuuucucuuuuccccuuuccu

SEQ ID NO: 1762483 - RNA, 19 nt, Human
ccuuucuggcagguccucc

SEQ ID NO: 1762484 - RNA, 21 nt, Human
cgggaggauguucugggacac

SEQ ID NO: 1762485 - RNA, 20 nt, Human
cgggaggauguucugggaca

SEQ ID NO: 1762486 - RNA, 13 nt, Human
cggcugugcuggg

SEQ ID NO: 1762487 - RNA, 14 nt, Human
cggcugugcuggga

SEQ ID NO: 1762488 - RNA, 20 nt, Human
cggcccauccccaggcaccu

SEQ ID NO: 1762489 - RNA, 20 nt, Human
cggaaugaaccacaucuugc

SEQ ID NO: 1762490 - RNA, 17 nt, Human
cggaacuguccuuuccu

SEQ ID NO: 1762491 - RNA, 15 nt, Human
cggacagccacggcc

SEQ ID NO: 1762492 - RNA, 16 nt, Human
cggacagccacggcca

SEQ ID NO: 1762493 - RNA, 18 nt, Human
cggacagccacggccagg

SEQ ID NO: 1762494 - RNA, 13 nt, Human
cgcuccugugucu

SEQ ID NO: 1762495 - RNA, 20 nt, Human
cgcuccuuuguguguguguc

SEQ ID NO: 1762496 - RNA, 20 nt, Human
cggaaccgcccaggaucaga

SEQ ID NO: 1762497 - RNA, 20 nt, Human
cggacagccacggccaggcc

SEQ ID NO: 1762498 - RNA, 16 nt, Human
cggacccucuaaccuc

SEQ ID NO: 1762499 - RNA, 15 nt, Human
cggacuggugcccuc

SEQ ID NO: 1762500 - RNA, 16 nt, Human
cggacuggugcccucc

SEQ ID NO: 1762501 - RNA, 16 nt, Human
cggauggauggaaggu

SEQ ID NO: 1762502 - RNA, 14 nt, Human
cggcacagaugcuc

SEQ ID NO: 1762503 - RNA, 18 nt, Human
cggcacagaugcuccagg

SEQ ID NO: 1762504 - RNA, 20 nt, Human
cguccauaucagaacugugc

SEQ ID NO: 1762505 - RNA, 15 nt, Human
cguaucuccggcucc

SEQ ID NO: 1762506 - RNA, 18 nt, Human
cguaucuccggcucccag

SEQ ID NO: 1762507 - RNA, 21 nt, Human
cguaucuccggcucccagccu

SEQ ID NO: 1762508 - RNA, 22 nt, Human
cguaucuccggcucccagccuc

SEQ ID NO: 1762509 - RNA, 16 nt, Human
cguagccagcugcucc

SEQ ID NO: 1762510 - RNA, 19 nt, Human
cguagccagcugcucccca

SEQ ID NO: 1762511 - RNA, 14 nt, Human
cggggcccagggca

SEQ ID NO: 1762512 - RNA, 20 nt, Human
cggggcccagggcaagcucc

SEQ ID NO: 1762513 - RNA, 21 nt, Human
cggggcccagggcaagcuccg

SEQ ID NO: 1762514 - RNA, 12 nt, Human
cgugacaacacu

SEQ ID NO: 1762515 - RNA, 20 nt, Human
cgugcacacaccagagccca

SEQ ID NO: 1762516 - RNA, 21 nt, Human
cgugcacacaccagagcccac

SEQ ID NO: 1762517 - RNA, 22 nt, Human
cgugcacacaccagagcccacc

SEQ ID NO: 1762518 - RNA, 18 nt, Human
cguccuccguccauauca

SEQ ID NO: 1762519 - RNA, 13 nt, Human
cgucugacaggca

SEQ ID NO: 1762520 - RNA, 14 nt, Human
cgucugacaggcaa

SEQ ID NO: 1762521 - RNA, 16 nt, Human
cguuuuguuuugugcc

SEQ ID NO: 1762522 - RNA, 14 nt, Human
cguucugcucauca

SEQ ID NO: 1762523 - RNA, 21 nt, Human
cguucgcagagcuuuucagau

SEQ ID NO: 1762524 - RNA, 17 nt, Human
cuaaaaaaaaaaaagua

SEQ ID NO: 1762525 - RNA, 15 nt, Human
ccuucaucuuccugu

SEQ ID NO: 1762526 - RNA, 16 nt, Human
ccuucaucuuccugug

SEQ ID NO: 1762527 - RNA, 17 nt, Human
ccuucaucuuccugugu

SEQ ID NO: 1762528 - RNA, 18 nt, Human
ccuucaucuuccuguguc

SEQ ID NO: 1762529 - RNA, 19 nt, Human
ccuucaucuuccugugucc

SEQ ID NO: 1762530 - RNA, 23 nt, Human
ccuucauaugaaaggugccaugg

SEQ ID NO: 1762531 - RNA, 17 nt, Human
ccuucaucaugaguucu

SEQ ID NO: 1762532 - RNA, 21 nt, Human
ccuucaucaugaguucugcug

SEQ ID NO: 1762533 - RNA, 22 nt, Human
ccuucaucaugaguucugcuga

SEQ ID NO: 1762534 - RNA, 13 nt, Human
ccuucagccuuaa

SEQ ID NO: 1762535 - RNA, 16 nt, Human
ccuucaguaaccccca

SEQ ID NO: 1762536 - RNA, 22 nt, Human
ccuucaguaacccccacuggac

SEQ ID NO: 1762537 - RNA, 15 nt, Human
ccuuccacugagggc

SEQ ID NO: 1762538 - RNA, 17 nt, Human
ccuuccacugagggcag

SEQ ID NO: 1762539 - RNA, 10 nt, Human
ccuuccagau

SEQ ID NO: 1762540 - RNA, 22 nt, Human
ccugugcuucgggcccuuccca

SEQ ID NO: 1762541 - RNA, 13 nt, Human
ccuugacagggca

SEQ ID NO: 1762542 - RNA, 14 nt, Human
ccuugacagggcac

SEQ ID NO: 1762543 - RNA, 15 nt, Human
ccuugacagggcaca

SEQ ID NO: 1762544 - RNA, 17 nt, Human
ccuugacagggcacacc

SEQ ID NO: 1762545 - RNA, 19 nt, Human
ccuucuuugggauagagaa

SEQ ID NO: 1762546 - RNA, 13 nt, Human
ccuucgcuccugu

SEQ ID NO: 1762547 - RNA, 14 nt, Human
ccuucgcuccugug

SEQ ID NO: 1762548 - RNA, 15 nt, Human
ccuucgcuccugugu

SEQ ID NO: 1762549 - RNA, 18 nt, Human
ccuucgcuccugugucuu

SEQ ID NO: 1762550 - RNA, 14 nt, Human
ccuugaacugggua

SEQ ID NO: 1762551 - RNA, 16 nt, Human
ccuugaacuggguacu

SEQ ID NO: 1762552 - RNA, 17 nt, Human
ccugcuaauuccccaga

SEQ ID NO: 1762553 - RNA, 13 nt, Human
ccugcugguucag

SEQ ID NO: 1762554 - RNA, 19 nt, Human
ccugcugguucaggguugg

SEQ ID NO: 1762555 - RNA, 13 nt, Human
ccugcugguuuua

SEQ ID NO: 1762556 - RNA, 21 nt, Human
ccuggacaugaagauucuuuc

SEQ ID NO: 1762557 - RNA, 23 nt, Human
ccuggacaugaagauucuuuccc

SEQ ID NO: 1762558 - RNA, 24 nt, Human
ccuggacaugaagauucuuuccca

SEQ ID NO: 1762559 - RNA, 12 nt, Human
ccuggcacugga

SEQ ID NO: 1762560 - RNA, 15 nt, Human
ccuggcacuggaccc

SEQ ID NO: 1762561 - RNA, 16 nt, Human
ccuggcacuggacccc

SEQ ID NO: 1762562 - RNA, 20 nt, Human
ccuggcacuggaccccagca

SEQ ID NO: 1762563 - RNA, 13 nt, Human
ccugggcaaagcc

SEQ ID NO: 1762564 - RNA, 21 nt, Human
ccugggaugagaguuuuggau

SEQ ID NO: 1762565 - RNA, 18 nt, Human
ccuggccccauggucagc

SEQ ID NO: 1762566 - RNA, 12 nt, Human
ccugguggcagc

SEQ ID NO: 1762567 - RNA, 13 nt, Human
ccugguggcagcu

SEQ ID NO: 1762568 - RNA, 15 nt, Human
ccuggugcugccucu

SEQ ID NO: 1762569 - RNA, 20 nt, Human
ccuggugcugccucuaccug

SEQ ID NO: 1762570 - RNA, 13 nt, Human
ccuguccucccag

SEQ ID NO: 1762571 - RNA, 22 nt, Human
ccuguccucccagcuccucacu

SEQ ID NO: 1762572 - RNA, 18 nt, Human
ccugugcagccgcugagc

SEQ ID NO: 1762573 - RNA, 20 nt, Human
ccugugcagccgcugagcga

SEQ ID NO: 1762574 - RNA, 21 nt, Human
ccugugcagccgcugagcgag

SEQ ID NO: 1762575 - RNA, 16 nt, Human
ccugugccuccaucag

SEQ ID NO: 1762576 - RNA, 17 nt, Human
ccucugacacacagcuc

SEQ ID NO: 1762577 - RNA, 18 nt, Human
ccucugacacacagcucu

SEQ ID NO: 1762578 - RNA, 17 nt, Human
ccucugggucagugguc

SEQ ID NO: 1762579 - RNA, 20 nt, Human
ccucugggucagugguccac

SEQ ID NO: 1762580 - RNA, 23 nt, Human
ccuccugugugugcgccuacagg

SEQ ID NO: 1762581 - RNA, 23 nt, Human
ccucucaggccggcagccccagc

SEQ ID NO: 1762582 - RNA, 16 nt, Human
ccucugacacacagcu

SEQ ID NO: 1762583 - RNA, 12 nt, Human
ccucugaaacag

SEQ ID NO: 1762584 - RNA, 13 nt, Human
ccucugaaacagc

SEQ ID NO: 1762585 - RNA, 14 nt, Human
ccucugaaacagcu

SEQ ID NO: 1762586 - RNA, 15 nt, Human
ccucugaaacagcug

SEQ ID NO: 1762587 - RNA, 16 nt, Human
ccucugaaacagcugc

SEQ ID NO: 1762588 - RNA, 17 nt, Human
ccucugaaacagcugcc

SEQ ID NO: 1762589 - RNA, 18 nt, Human
ccucugaaacagcugccu

SEQ ID NO: 1762590 - RNA, 19 nt, Human
ccucugaaacagcugccuu

SEQ ID NO: 1762591 - RNA, 20 nt, Human
ccucugaaacagcugccuua

SEQ ID NO: 1762592 - RNA, 21 nt, Human
ccucugaaacagcugccuuag

SEQ ID NO: 1762593 - RNA, 22 nt, Human
ccucugaaacagcugccuuagc

SEQ ID NO: 1762594 - RNA, 23 nt, Human
ccucugaaacagcugccuuagcu

SEQ ID NO: 1762595 - RNA, 18 nt, Human
ccucucuggggcuguguu

SEQ ID NO: 1762596 - RNA, 17 nt, Human
ccucucuucucaccuuu

SEQ ID NO: 1762597 - RNA, 12 nt, Human
ccucucugcucu

SEQ ID NO: 1762598 - RNA, 15 nt, Human
ccucucugcucugcg

SEQ ID NO: 1762599 - RNA, 16 nt, Human
ccucucugcucugcgu

SEQ ID NO: 1762600 - RNA, 13 nt, Human
ccuccugggcuaa

SEQ ID NO: 1762601 - RNA, 15 nt, Human
ccuccuggcccaggu

SEQ ID NO: 1762602 - RNA, 13 nt, Human
ccuccugugugug

SEQ ID NO: 1762603 - RNA, 21 nt, Human
ccuccugggcccucucugcuc

SEQ ID NO: 1762604 - RNA, 15 nt, Human
ccuccugugugugcg

SEQ ID NO: 1762605 - RNA, 22 nt, Human
ccuccugugugugcgccuacag

SEQ ID NO: 1762606 - RNA, 10 nt, Human
ccuccucuga

SEQ ID NO: 1762607 - RNA, 12 nt, Human
ccuccucugaaa

SEQ ID NO: 1762608 - RNA, 13 nt, Human
ccuccucugaaac

SEQ ID NO: 1762609 - RNA, 15 nt, Human
ccuccucugaaacag

SEQ ID NO: 1762610 - RNA, 16 nt, Human
ccuccucugaaacagc

SEQ ID NO: 1762611 - RNA, 17 nt, Human
ccuccucugaaacagcu

SEQ ID NO: 1762612 - RNA, 18 nt, Human
ccuccucugaaacagcug

SEQ ID NO: 1762613 - RNA, 19 nt, Human
ccuccucugaaacagcugc

SEQ ID NO: 1762614 - RNA, 20 nt, Human
ccuccucugaaacagcugcc

SEQ ID NO: 1762615 - RNA, 21 nt, Human
ccuccucugaaacagcugccu

SEQ ID NO: 1762616 - RNA, 23 nt, Human
ccuccucugaaacagcugccuua

SEQ ID NO: 1762617 - RNA, 18 nt, Human
ccuccucugacuugggga

SEQ ID NO: 1762618 - RNA, 13 nt, Human
ccuccugccucga

SEQ ID NO: 1762619 - RNA, 13 nt, Human
ccuccccucucuu

SEQ ID NO: 1762620 - RNA, 17 nt, Human
ccuccccucuccuuccu

SEQ ID NO: 1762621 - RNA, 22 nt, Human
ccucaggugauccacccaccuc

SEQ ID NO: 1762622 - RNA, 14 nt, Human
ccucaggugcuguc

SEQ ID NO: 1762623 - RNA, 16 nt, Human
ccucaggugcugucca

SEQ ID NO: 1762624 - RNA, 18 nt, Human
ccucaggugcuguccaug

SEQ ID NO: 1762625 - RNA, 17 nt, Human
ccucaggugauccaccc

SEQ ID NO: 1762626 - RNA, 19 nt, Human
ccucaggugauccacccac

SEQ ID NO: 1762627 - RNA, 11 nt, Human
ccucagggcac

SEQ ID NO: 1762628 - RNA, 16 nt, Human
ccucagcauccuggca

SEQ ID NO: 1762629 - RNA, 17 nt, Human
ccucagcauccuggcac

SEQ ID NO: 1762630 - RNA, 22 nt, Human
ccucagaacccuuggcuugccc

SEQ ID NO: 1762631 - RNA, 14 nt, Human
ccucagcauccugg

SEQ ID NO: 1762632 - RNA, 16 nt, Human
ccucagaacccuuggc

SEQ ID NO: 1762633 - RNA, 21 nt, Human
ccucagaacccuuggcuugcc

SEQ ID NO: 1762634 - RNA, 16 nt, Human
ccugauucaacuaaaa

SEQ ID NO: 1762635 - RNA, 15 nt, Human
ccucuguccaggcac

SEQ ID NO: 1762636 - RNA, 19 nt, Human
ccucuguccaggcacugag

SEQ ID NO: 1762637 - RNA, 20 nt, Human
ccucuguccaggcacugaga

SEQ ID NO: 1762638 - RNA, 21 nt, Human
ccucuguccaggcacugagau

SEQ ID NO: 1762639 - RNA, 16 nt, Human
ccucuguucaguguaa

SEQ ID NO: 1762640 - RNA, 22 nt, Human
ccucuguucaguguaaauaguu

SEQ ID NO: 1762641 - RNA, 18 nt, Human
ccucugugaccaaugucu

SEQ ID NO: 1762642 - RNA, 19 nt, Human
ccucugugaccaaugucuu

SEQ ID NO: 1762643 - RNA, 21 nt, Human
ccucugugaccaaugucuuga

SEQ ID NO: 1762644 - RNA, 17 nt, Human
ccucuuccgacucuuuc

SEQ ID NO: 1762645 - RNA, 19 nt, Human
ccucuuccgacucuuucug

SEQ ID NO: 1762646 - RNA, 14 nt, Human
ccucuuccuacccu

SEQ ID NO: 1762647 - RNA, 20 nt, Human
ccucuuccuacccugccucc

SEQ ID NO: 1762648 - RNA, 14 nt, Human
ccucuuugucuaaa

SEQ ID NO: 1762649 - RNA, 15 nt, Human
ccucuuugucuaaaa

SEQ ID NO: 1762650 - RNA, 19 nt, Human
ccucuuugucuaaaacaau

SEQ ID NO: 1762651 - RNA, 22 nt, Human
ccucuuugucuaaaacaauaaa

SEQ ID NO: 1762652 - RNA, 17 nt, Human
ccugaaaacacugugca

SEQ ID NO: 1762653 - RNA, 23 nt, Human
ccucuuugucuaaaacaauaaaa

SEQ ID NO: 1762654 - RNA, 15 nt, Human
ccucuuuuaccugcu

SEQ ID NO: 1762655 - RNA, 16 nt, Human
ccucuuuuaccugcug

SEQ ID NO: 1762656 - RNA, 17 nt, Human
ccucuuuuaccugcugc

SEQ ID NO: 1762657 - RNA, 18 nt, Human
ccucuuuuaccugcugcu

SEQ ID NO: 1762658 - RNA, 19 nt, Human
ccucuuuuaccugcugcuu

SEQ ID NO: 1762659 - RNA, 21 nt, Human
ccucuuuuaccugcugcuucu

SEQ ID NO: 1762660 - RNA, 22 nt, Human
ccucuuuuaccugcugcuucuc

SEQ ID NO: 1762661 - RNA, 21 nt, Human
ccugaagacucauucuucugu

SEQ ID NO: 1762662 - RNA, 14 nt, Human
ccugaacagaagcu

SEQ ID NO: 1762663 - RNA, 15 nt, Human
ccugaagucacacag

SEQ ID NO: 1762664 - RNA, 16 nt, Human
ccugaagucacacagu

SEQ ID NO: 1762665 - RNA, 17 nt, Human
ccugaagucacacagug

SEQ ID NO: 1762666 - RNA, 19 nt, Human
ccugaagucacacagugag

SEQ ID NO: 1762667 - RNA, 13 nt, Human
ccccuacugcugu

SEQ ID NO: 1762668 - RNA, 14 nt, Human
ccccuacugcugug

SEQ ID NO: 1762669 - RNA, 21 nt, Human
cccugguggcagugggagcug

SEQ ID NO: 1762670 - RNA, 16 nt, Human
cccugguggcaguggg

SEQ ID NO: 1762671 - RNA, 19 nt, Human
cccugguggcagugggagc

SEQ ID NO: 1762672 - RNA, 20 nt, Human
ccccuccccauuagcuuuca

SEQ ID NO: 1762673 - RNA, 11 nt, Human
cccuguugcua

SEQ ID NO: 1762674 - RNA, 14 nt, Human
cccuuacaguagga

SEQ ID NO: 1762675 - RNA, 16 nt, Human
cccccaucuucgggac

SEQ ID NO: 1762676 - RNA, 18 nt, Human
cccccaucuucgggacca

SEQ ID NO: 1762677 - RNA, 21 nt, Human
cccccaucuucgggaccagga

SEQ ID NO: 1762678 - RNA, 13 nt, Human
cccccaauccaug

SEQ ID NO: 1762679 - RNA, 23 nt, Human
ccccaccccuggaagagcccagu

SEQ ID NO: 1762680 - RNA, 12 nt, Human
ccccacuggacu

SEQ ID NO: 1762681 - RNA, 19 nt, Human
ccccacuggacugaccugg

SEQ ID NO: 1762682 - RNA, 20 nt, Human
ccccacuggacugaccuggu

SEQ ID NO: 1762683 - RNA, 20 nt, Human
ccccaagaggaaguucagau

SEQ ID NO: 1762684 - RNA, 14 nt, Human
cccuuuuuucugcc

SEQ ID NO: 1762685 - RNA, 19 nt, Human
cccuuuuuucugccuccuu

SEQ ID NO: 1762686 - RNA, 21 nt, Human
cccuuuuuucugccuccuuua

SEQ ID NO: 1762687 - RNA, 17 nt, Human
ccgagugaacuggucuu

SEQ ID NO: 1762688 - RNA, 20 nt, Human
ccgagugaacuggucuuccu

SEQ ID NO: 1762689 - RNA, 22 nt, Human
ccgaguuaaggugggcccggcc

SEQ ID NO: 1762690 - RNA, 17 nt, Human
ccgauaucagaauuugu

SEQ ID NO: 1762691 - RNA, 22 nt, Human
ccgagggaggggaagcuucugu

SEQ ID NO: 1762692 - RNA, 23 nt, Human
ccgagggaggggaagcuucuguc

SEQ ID NO: 1762693 - RNA, 18 nt, Human
ccgagaucacgccacugc

SEQ ID NO: 1762694 - RNA, 9 nt, Human
cccuuuccu

SEQ ID NO: 1762695 - RNA, 12 nt, Human
cccuuuccuguc

SEQ ID NO: 1762696 - RNA, 14 nt, Human
cccuuuccuguccc

SEQ ID NO: 1762697 - RNA, 15 nt, Human
cccuuuccuguccca

SEQ ID NO: 1762698 - RNA, 21 nt, Human
cccuuucucuuuuccccuuuc

SEQ ID NO: 1762699 - RNA, 13 nt, Human
cccuuugcugucc

SEQ ID NO: 1762700 - RNA, 12 nt, Human
cccuuugcuguc

SEQ ID NO: 1762701 - RNA, 12 nt, Human
cccuuugagugc

SEQ ID NO: 1762702 - RNA, 14 nt, Human
cccuuugagugcag

SEQ ID NO: 1762703 - RNA, 22 nt, Human
cccuuccuauuccaagcuucca

SEQ ID NO: 1762704 - RNA, 13 nt, Human
ccuaccuugcuuu

SEQ ID NO: 1762705 - RNA, 14 nt, Human
ccuaaacuccaggg

SEQ ID NO: 1762706 - RNA, 14 nt, Human
ccgugggcucccug

SEQ ID NO: 1762707 - RNA, 12 nt, Human
ccuaaaacaaau

SEQ ID NO: 1762708 - RNA, 20 nt, Human
ccgggcacucagaagacacu

SEQ ID NO: 1762709 - RNA, 13 nt, Human
ccgggccagggcu

SEQ ID NO: 1762710 - RNA, 14 nt, Human
ccgggccagggcug

SEQ ID NO: 1762711 - RNA, 15 nt, Human
ccgggccagggcugc

SEQ ID NO: 1762712 - RNA, 13 nt, Human
ccgggccccacag

SEQ ID NO: 1762713 - RNA, 16 nt, Human
ccggaaugccacccac

SEQ ID NO: 1762714 - RNA, 20 nt, Human
ccggaaugccacccacaucu

SEQ ID NO: 1762715 - RNA, 17 nt, Human
ccggacccucuaaccuc

SEQ ID NO: 1762716 - RNA, 21 nt, Human
ccggacccucuaaccucgccc

SEQ ID NO: 1762717 - RNA, 12 nt, Human
ccggcucugugg

SEQ ID NO: 1762718 - RNA, 15 nt, Human
ccggcucugugggug

SEQ ID NO: 1762719 - RNA, 15 nt, Human
ccgggcacucagaag

SEQ ID NO: 1762720 - RNA, 17 nt, Human
ccgcuuggagcagaggg

SEQ ID NO: 1762721 - RNA, 18 nt, Human
ccgcuuggagcagagggg

SEQ ID NO: 1762722 - RNA, 15 nt, Human
ccgcuuggagcagag

SEQ ID NO: 1762723 - RNA, 17 nt, Human
ccucacccccuccuuca

SEQ ID NO: 1762724 - RNA, 17 nt, Human
ccuaugggccugccggg

SEQ ID NO: 1762725 - RNA, 19 nt, Human
ccuaugggccugccgggcu

SEQ ID NO: 1762726 - RNA, 17 nt, Human
ccuagaggcccuuugcu

SEQ ID NO: 1762727 - RNA, 20 nt, Human
ccuagaggcccuuugcuguc

SEQ ID NO: 1762728 - RNA, 13 nt, Human
ccuagaggcccca

SEQ ID NO: 1762729 - RNA, 15 nt, Human
ccucacaggccccag

SEQ ID NO: 1762730 - RNA, 13 nt, Human
ccucaauccagcu

SEQ ID NO: 1762731 - RNA, 18 nt, Human
ccucaauccagcuauguu

SEQ ID NO: 1762732 - RNA, 17 nt, Human
ccuaugugauuuuaacu

SEQ ID NO: 1762733 - RNA, 22 nt, Human
ccuaugugauuuuaacucuguc

SEQ ID NO: 1762734 - RNA, 20 nt, Human
ccuaugugauuuuaacucug

SEQ ID NO: 1762735 - RNA, 11 nt, Human
cugcccggcug

SEQ ID NO: 1762736 - RNA, 15 nt, Human
cugcccggcugcgga

SEQ ID NO: 1762737 - RNA, 22 nt, Human
cugcccuccccuccggacuggu

SEQ ID NO: 1762738 - RNA, 13 nt, Human
cugcccaggcccc

SEQ ID NO: 1762739 - RNA, 17 nt, Human
cugccauggaacuguuu

SEQ ID NO: 1762740 - RNA, 18 nt, Human
cugccauggaacuguuuc

SEQ ID NO: 1762741 - RNA, 20 nt, Human
cugccauggaacuguuuccu

SEQ ID NO: 1762742 - RNA, 22 nt, Human
cugccauggaacuguuuccuuc

SEQ ID NO: 1762743 - RNA, 18 nt, Human
cugcagggccgccaggga

SEQ ID NO: 1762744 - RNA, 19 nt, Human
cugcagggccgccagggag

SEQ ID NO: 1762745 - RNA, 21 nt, Human
cugccacagccuccccugcca

SEQ ID NO: 1762746 - RNA, 22 nt, Human
cugccacagccuccccugccag

SEQ ID NO: 1762747 - RNA, 23 nt, Human
cugccacagccuccccugccagg

SEQ ID NO: 1762748 - RNA, 15 nt, Human
cugccacccugggga

SEQ ID NO: 1762749 - RNA, 16 nt, Human
cugccacccuggggag

SEQ ID NO: 1762750 - RNA, 20 nt, Human
cugccacccuggggagaaag

SEQ ID NO: 1762751 - RNA, 20 nt, Human
cugcggaaugaaccacaucu

SEQ ID NO: 1762752 - RNA, 14 nt, Human
cugccuuagcuuca

SEQ ID NO: 1762753 - RNA, 15 nt, Human
cugccuuagcuucag

SEQ ID NO: 1762754 - RNA, 16 nt, Human
cugccuuagcuucagg

SEQ ID NO: 1762755 - RNA, 17 nt, Human
cugccuuagcuucagga

SEQ ID NO: 1762756 - RNA, 18 nt, Human
cugccuuagcuucaggaa

SEQ ID NO: 1762757 - RNA, 15 nt, Human
cugcgguccacccag

SEQ ID NO: 1762758 - RNA, 20 nt, Human
cugcggagagaggccuuguc

SEQ ID NO: 1762759 - RNA, 21 nt, Human
cugcggaaugaaccacaucuu

SEQ ID NO: 1762760 - RNA, 17 nt, Human
cugcgguccacccagga

SEQ ID NO: 1762761 - RNA, 19 nt, Human
cugcgugucaccugugcuu

SEQ ID NO: 1762762 - RNA, 16 nt, Human
cugcgguccacccagg

SEQ ID NO: 1762763 - RNA, 14 nt, Human
cugcuaacaaguca

SEQ ID NO: 1762764 - RNA, 21 nt, Human
cugcuccccucugcacggacc

SEQ ID NO: 1762765 - RNA, 16 nt, Human
cugcuccucuccccag

SEQ ID NO: 1762766 - RNA, 17 nt, Human
cugcuccucuccccagc

SEQ ID NO: 1762767 - RNA, 18 nt, Human
cugcuccucuccccagca

SEQ ID NO: 1762768 - RNA, 15 nt, Human
cugcucgccuuagca

SEQ ID NO: 1762769 - RNA, 20 nt, Human
cugcucucuuuuucuccagg

SEQ ID NO: 1762770 - RNA, 24 nt, Human
cugcucucuuuuucuccaggguca

SEQ ID NO: 1762771 - RNA, 16 nt, Human
cugcucgccuuagcac

SEQ ID NO: 1762772 - RNA, 13 nt, Human
cugccugcccagg

SEQ ID NO: 1762773 - RNA, 14 nt, Human
cugccugcccaggc

SEQ ID NO: 1762774 - RNA, 15 nt, Human
cugccugcccaggcc

SEQ ID NO: 1762775 - RNA, 20 nt, Human
cugccugacauuuggagugu

SEQ ID NO: 1762776 - RNA, 23 nt, Human
cugccugacauuuggaguguucc

SEQ ID NO: 1762777 - RNA, 16 nt, Human
cugccugcccacacag

SEQ ID NO: 1762778 - RNA, 14 nt, Human
cugccucagccucc

SEQ ID NO: 1762779 - RNA, 13 nt, Human
cugccucagccuc

SEQ ID NO: 1762780 - RNA, 22 nt, Human
cugccucaggaggcaggaccuu

SEQ ID NO: 1762781 - RNA, 23 nt, Human
cugccucaggaggcaggaccuuc

SEQ ID NO: 1762782 - RNA, 12 nt, Human
cugcagggaaaa

SEQ ID NO: 1762783 - RNA, 22 nt, Human
cugcagggaaaauuauuugcau

SEQ ID NO: 1762784 - RNA, 23 nt, Human
cugcagggaaaauuauuugcaua

SEQ ID NO: 1762785 - RNA, 22 nt, Human
cugcagggaguccgaaagggac

SEQ ID NO: 1762786 - RNA, 22 nt, Human
cugcagccucaaccuccugggc

SEQ ID NO: 1762787 - RNA, 19 nt, Human
cugcagccucaaccuccug

SEQ ID NO: 1762788 - RNA, 20 nt, Human
cugcagccucaaccuccugg

SEQ ID NO: 1762789 - RNA, 11 nt, Human
cugcagccuca

SEQ ID NO: 1762790 - RNA, 14 nt, Human
cugcacuugcagac

SEQ ID NO: 1762791 - RNA, 16 nt, Human
cugcacuugcagacuc

SEQ ID NO: 1762792 - RNA, 17 nt, Human
cugcacuugcagacucu

SEQ ID NO: 1762793 - RNA, 21 nt, Human
cugcagagaaacuuaagcaaa

SEQ ID NO: 1762794 - RNA, 22 nt, Human
cugcagagaaacuuaagcaaag

SEQ ID NO: 1762795 - RNA, 23 nt, Human
cugcagagaaacuuaagcaaagg

SEQ ID NO: 1762796 - RNA, 12 nt, Human
cugcaauuucua

SEQ ID NO: 1762797 - RNA, 15 nt, Human
cugcaauuucuacua

SEQ ID NO: 1762798 - RNA, 18 nt, Human
cugcaaaaggacucucag

SEQ ID NO: 1762799 - RNA, 13 nt, Human
cugcaaacgcugc

SEQ ID NO: 1762800 - RNA, 15 nt, Human
cugcaaacgcugccu

SEQ ID NO: 1762801 - RNA, 16 nt, Human
cugcaaacgcugccug

SEQ ID NO: 1762802 - RNA, 18 nt, Human
cugcaaacgcugccugcc

SEQ ID NO: 1762803 - RNA, 17 nt, Human
cugcaaacgcugccugc

SEQ ID NO: 1762804 - RNA, 12 nt, Human
cugacccacugc

SEQ ID NO: 1762805 - RNA, 15 nt, Human
cugagggccugcugg

SEQ ID NO: 1762806 - RNA, 16 nt, Human
cugagggccugcugga

SEQ ID NO: 1762807 - RNA, 19 nt, Human
cugagggccugcuggaggc

SEQ ID NO: 1762808 - RNA, 16 nt, Human
cugagggcagucgaua

SEQ ID NO: 1762809 - RNA, 13 nt, Human
cugagugccuucu

SEQ ID NO: 1762810 - RNA, 17 nt, Human
cugagugccuucugugg

SEQ ID NO: 1762811 - RNA, 18 nt, Human
cugagugccuucuguggg

SEQ ID NO: 1762812 - RNA, 20 nt, Human
cugagugccuucugugggga

SEQ ID NO: 1762813 - RNA, 21 nt, Human
cugagugccuucuguggggac

SEQ ID NO: 1762814 - RNA, 23 nt, Human
cugagugccuucuguggggacuc

SEQ ID NO: 1762815 - RNA, 19 nt, Human
cugauaaaaccauguagaa

SEQ ID NO: 1762816 - RNA, 23 nt, Human
cugauaaaaccauguagaaaauu

SEQ ID NO: 1762817 - RNA, 12 nt, Human
cugaucccucua

SEQ ID NO: 1762818 - RNA, 13 nt, Human
cugaucccucuac

SEQ ID NO: 1762819 - RNA, 22 nt, Human
cugauucccaagcucugcuccu

SEQ ID NO: 1762820 - RNA, 19 nt, Human
cugauucccaagcucugcu

SEQ ID NO: 1762821 - RNA, 20 nt, Human
cugauucccaagcucugcuc

SEQ ID NO: 1762822 - RNA, 17 nt, Human
cugauucccaagcucug

SEQ ID NO: 1762823 - RNA, 18 nt, Human
cugauucccaagcucugc

SEQ ID NO: 1762824 - RNA, 15 nt, Human
cugauucccaagcuc

SEQ ID NO: 1762825 - RNA, 18 nt, Human
cugauucaacuaaaaaaa

SEQ ID NO: 1762826 - RNA, 15 nt, Human
cugauucaacuaaaa

SEQ ID NO: 1762827 - RNA, 17 nt, Human
cugauucaacuaaaaaa

SEQ ID NO: 1762828 - RNA, 14 nt, Human
cugauucaacuaaa

SEQ ID NO: 1762829 - RNA, 16 nt, Human
cugggaaauauucccu

SEQ ID NO: 1762830 - RNA, 18 nt, Human
cugggaaauauucccuag

SEQ ID NO: 1762831 - RNA, 14 nt, Human
cuggcuucuguggg

SEQ ID NO: 1762832 - RNA, 16 nt, Human
cuggcuucuguggggc

SEQ ID NO: 1762833 - RNA, 17 nt, Human
cuggcuucuguggggcc

SEQ ID NO: 1762834 - RNA, 19 nt, Human
cuggcuucuguggggcccc

SEQ ID NO: 1762835 - RNA, 21 nt, Human
cuggcuucuguggggccccuc

SEQ ID NO: 1762836 - RNA, 23 nt, Human
cuggcuucuguggggccccucac

SEQ ID NO: 1762837 - RNA, 20 nt, Human
cuggcuguuggcugggggcc

SEQ ID NO: 1762838 - RNA, 19 nt, Human
cuggcuguuggcugggggc

SEQ ID NO: 1762839 - RNA, 15 nt, Human
cuggccugagaguca

SEQ ID NO: 1762840 - RNA, 19 nt, Human
cuggccugagagucagcuc

SEQ ID NO: 1762841 - RNA, 20 nt, Human
cuggccugagagucagcucu

SEQ ID NO: 1762842 - RNA, 23 nt, Human
cuggccugagagucagcucucug

SEQ ID NO: 1762843 - RNA, 16 nt, Human
cugggagugagcuggu

SEQ ID NO: 1762844 - RNA, 22 nt, Human
cugggagggcagcagggcuacc

SEQ ID NO: 1762845 - RNA, 23 nt, Human
cugggaguugaucgccuuuccca

SEQ ID NO: 1762846 - RNA, 13 nt, Human
cugggagugagcu

SEQ ID NO: 1762847 - RNA, 15 nt, Human
cugggagggcagcag

SEQ ID NO: 1762848 - RNA, 17 nt, Human
cugggagggcagcaggg

SEQ ID NO: 1762849 - RNA, 19 nt, Human
cugggagggcagcagggcu

SEQ ID NO: 1762850 - RNA, 20 nt, Human
cugggagggcagcagggcua

SEQ ID NO: 1762851 - RNA, 14 nt, Human
cugggaggccagug

SEQ ID NO: 1762852 - RNA, 11 nt, Human
cugggagggca

SEQ ID NO: 1762853 - RNA, 13 nt, Human
cugggagggcagc

SEQ ID NO: 1762854 - RNA, 21 nt, Human
cuggguacuuguggacacagc

SEQ ID NO: 1762855 - RNA, 23 nt, Human
cuggguacuuguggacacagcuc

SEQ ID NO: 1762856 - RNA, 20 nt, Human
cuggguacuuguggacacag

SEQ ID NO: 1762857 - RNA, 13 nt, Human
cugggggccucag

SEQ ID NO: 1762858 - RNA, 17 nt, Human
cugggggccucagugcc

SEQ ID NO: 1762859 - RNA, 18 nt, Human
cugggggccucagugcca

SEQ ID NO: 1762860 - RNA, 18 nt, Human
cugggcucccgggcccca

SEQ ID NO: 1762861 - RNA, 18 nt, Human
cugggcuucaguggcagc

SEQ ID NO: 1762862 - RNA, 17 nt, Human
cugggcuucaguggcag

SEQ ID NO: 1762863 - RNA, 19 nt, Human
cugggcuucaguggcagcu

SEQ ID NO: 1762864 - RNA, 20 nt, Human
cugggcuucaguggcagcug

SEQ ID NO: 1762865 - RNA, 21 nt, Human
cugggcuucaguggcagcugc

SEQ ID NO: 1762866 - RNA, 22 nt, Human
cugggcuucaguggcagcugcu

SEQ ID NO: 1762867 - RNA, 23 nt, Human
cugggcuucaguggcagcugcuu

SEQ ID NO: 1762868 - RNA, 21 nt, Human
cugggcucccgggccccacag

SEQ ID NO: 1762869 - RNA, 19 nt, Human
cugguggcagugggagcug

SEQ ID NO: 1762870 - RNA, 23 nt, Human
cugguggcagugggagcugccug

SEQ ID NO: 1762871 - RNA, 15 nt, Human
cugguggacccaggg

SEQ ID NO: 1762872 - RNA, 13 nt, Human
cuggguuggaggg

SEQ ID NO: 1762873 - RNA, 12 nt, Human
cugggucagugg

SEQ ID NO: 1762874 - RNA, 15 nt, Human
cuggucccacucagu

SEQ ID NO: 1762875 - RNA, 18 nt, Human
cuggucccacucagucca

SEQ ID NO: 1762876 - RNA, 22 nt, Human
cuggccucaagugauucuccug

SEQ ID NO: 1762877 - RNA, 22 nt, Human
cuggccagaugcaccagcccuu

SEQ ID NO: 1762878 - RNA, 21 nt, Human
cuggccagaugcaccagcccu

SEQ ID NO: 1762879 - RNA, 17 nt, Human
cuggccagaugcaccag

SEQ ID NO: 1762880 - RNA, 18 nt, Human
cuggccagaugcaccagc

SEQ ID NO: 1762881 - RNA, 19 nt, Human
cuggccagaugcaccagcc

SEQ ID NO: 1762882 - RNA, 20 nt, Human
cuggccagaugcaccagccc

SEQ ID NO: 1762883 - RNA, 16 nt, Human
cuggccagaugcacca

SEQ ID NO: 1762884 - RNA, 16 nt, Human
cuggccaaauagcaaa

SEQ ID NO: 1762885 - RNA, 17 nt, Human
cuggccaaauagcaaag

SEQ ID NO: 1762886 - RNA, 18 nt, Human
cuggccaaauagcaaaga

SEQ ID NO: 1762887 - RNA, 18 nt, Human
cuggauggugugccuucc

SEQ ID NO: 1762888 - RNA, 21 nt, Human
cuggauggugugccuuccaga

SEQ ID NO: 1762889 - RNA, 13 nt, Human
cuggaggccucag

SEQ ID NO: 1762890 - RNA, 14 nt, Human
cuggaggccucagg

SEQ ID NO: 1762891 - RNA, 15 nt, Human
cuggaggccucaggu

SEQ ID NO: 1762892 - RNA, 16 nt, Human
cuggaggccucaggug

SEQ ID NO: 1762893 - RNA, 18 nt, Human
cuggaggccucaggugcu

SEQ ID NO: 1762894 - RNA, 19 nt, Human
cuggaggccucaggugcug

SEQ ID NO: 1762895 - RNA, 21 nt, Human
cuggaggccucaggugcuguc

SEQ ID NO: 1762896 - RNA, 16 nt, Human
cuggaggcugccuccc

SEQ ID NO: 1762897 - RNA, 18 nt, Human
cuggaggcugccucccaa

SEQ ID NO: 1762898 - RNA, 21 nt, Human
cuggaggcugccucccaacag

SEQ ID NO: 1762899 - RNA, 23 nt, Human
cuggacaugaagauucuuuccca

SEQ ID NO: 1762900 - RNA, 21 nt, Human
cuggagcacugggcucccggg

SEQ ID NO: 1762901 - RNA, 23 nt, Human
cuggagcacugggcucccgggcc

SEQ ID NO: 1762902 - RNA, 16 nt, Human
cuggagcacugggcuc

SEQ ID NO: 1762903 - RNA, 17 nt, Human
cuggagcacugggcucc

SEQ ID NO: 1762904 - RNA, 19 nt, Human
cuggagcacugggcucccg

SEQ ID NO: 1762905 - RNA, 20 nt, Human
cuggagcacugggcucccgg

SEQ ID NO: 1762906 - RNA, 17 nt, Human
cuggaggaaagggagga

SEQ ID NO: 1762907 - RNA, 18 nt, Human
cuggaggaaagggaggag

SEQ ID NO: 1762908 - RNA, 20 nt, Human
cuggaggaaagggaggagug

SEQ ID NO: 1762909 - RNA, 13 nt, Human
cugcucugagcca

SEQ ID NO: 1762910 - RNA, 16 nt, Human
cugcucugagccacag

SEQ ID NO: 1762911 - RNA, 17 nt, Human
cugcuuuuaacucuaga

SEQ ID NO: 1762912 - RNA, 19 nt, Human
cugcuuuuaacucuagaau

SEQ ID NO: 1762913 - RNA, 14 nt, Human
cuggaaugcagugg

SEQ ID NO: 1762914 - RNA, 15 nt, Human
cuggaaugcaguggu

SEQ ID NO: 1762915 - RNA, 15 nt, Human
cuggaagcacagcuu

SEQ ID NO: 1762916 - RNA, 18 nt, Human
cuggaagcacagcuucau

SEQ ID NO: 1762917 - RNA, 23 nt, Human
cuggaauaauccuaaacauauga

SEQ ID NO: 1762918 - RNA, 23 nt, Human
cucccauagauacucucuucuuc

SEQ ID NO: 1762919 - RNA, 13 nt, Human
cucccuggcuucu

SEQ ID NO: 1762920 - RNA, 15 nt, Human
cucccuggcuucugu

SEQ ID NO: 1762921 - RNA, 18 nt, Human
cucccuggcuucuguggg

SEQ ID NO: 1762922 - RNA, 19 nt, Human
cucccuggcuucugugggg

SEQ ID NO: 1762923 - RNA, 23 nt, Human
cucccuugacuuugcuccucaca

SEQ ID NO: 1762924 - RNA, 21 nt, Human
cucccuugccuuucgaggccu

SEQ ID NO: 1762925 - RNA, 22 nt, Human
cucccuugccuuucgaggccug

SEQ ID NO: 1762926 - RNA, 23 nt, Human
cucccuugccuuucgaggccuga

SEQ ID NO: 1762927 - RNA, 19 nt, Human
cuccugacccauugcuguu

SEQ ID NO: 1762928 - RNA, 18 nt, Human
cuccugacccauugcugu

SEQ ID NO: 1762929 - RNA, 20 nt, Human
cuccugagaaaaaagguucc

SEQ ID NO: 1762930 - RNA, 17 nt, Human
cuccucacucaccuuca

SEQ ID NO: 1762931 - RNA, 14 nt, Human
cuccugugugugcg

SEQ ID NO: 1762932 - RNA, 14 nt, Human
cuccugccaaggag

SEQ ID NO: 1762933 - RNA, 15 nt, Human
cuccugugucuugca

SEQ ID NO: 1762934 - RNA, 23 nt, Human
cuccugugucuugcaauggcagc

SEQ ID NO: 1762935 - RNA, 11 nt, Human
cuccugugugu

SEQ ID NO: 1762936 - RNA, 14 nt, Human
cuccuucuguccua

SEQ ID NO: 1762937 - RNA, 22 nt, Human
cuccuucauaugaaaggugcca

SEQ ID NO: 1762938 - RNA, 15 nt, Human
cuccuucuguccuac

SEQ ID NO: 1762939 - RNA, 20 nt, Human
cuccuucuguccuacucugu

SEQ ID NO: 1762940 - RNA, 22 nt, Human
cucgccaagcaggacagugcuu

SEQ ID NO: 1762941 - RNA, 13 nt, Human
cucgaguacugug

SEQ ID NO: 1762942 - RNA, 14 nt, Human
cucgaguacugugg

SEQ ID NO: 1762943 - RNA, 16 nt, Human
cucgaguacugugggc

SEQ ID NO: 1762944 - RNA, 17 nt, Human
cucgaguacugugggca

SEQ ID NO: 1762945 - RNA, 18 nt, Human
cucgaguacugugggcaa

SEQ ID NO: 1762946 - RNA, 20 nt, Human
cucgaguacugugggcaauu

SEQ ID NO: 1762947 - RNA, 22 nt, Human
cucgaguacugugggcaauuua

SEQ ID NO: 1762948 - RNA, 14 nt, Human
cuccacucucuacc

SEQ ID NO: 1762949 - RNA, 19 nt, Human
cuccacucucuaccagaua

SEQ ID NO: 1762950 - RNA, 19 nt, Human
cuccagcucaccagcccca

SEQ ID NO: 1762951 - RNA, 20 nt, Human
cuccagcucaccagccccag

SEQ ID NO: 1762952 - RNA, 11 nt, Human
cuccagccuga

SEQ ID NO: 1762953 - RNA, 12 nt, Human
cuccagccugaa

SEQ ID NO: 1762954 - RNA, 20 nt, Human
cuccagccugaacagaagcu

SEQ ID NO: 1762955 - RNA, 12 nt, Human
cuccacagggcc

SEQ ID NO: 1762956 - RNA, 11 nt, Human
cuccacccugc

SEQ ID NO: 1762957 - RNA, 12 nt, Human
cuccacccugcu

SEQ ID NO: 1762958 - RNA, 14 nt, Human
cuccaugugggcua

SEQ ID NO: 1762959 - RNA, 18 nt, Human
cucccaagguuggagccc

SEQ ID NO: 1762960 - RNA, 21 nt, Human
cucccaagguuggagcccagg

SEQ ID NO: 1762961 - RNA, 12 nt, Human
cuccagcuuccc

SEQ ID NO: 1762962 - RNA, 13 nt, Human
cuccagcuucccg

SEQ ID NO: 1762963 - RNA, 20 nt, Human
cuccaggcauuuagcccuca

SEQ ID NO: 1762964 - RNA, 22 nt, Human
cuccaggcauuuagcccucaca

SEQ ID NO: 1762965 - RNA, 11 nt, Human
cuccaggcucc

SEQ ID NO: 1762966 - RNA, 21 nt, Human
cuaaaagauauaagugcugua

SEQ ID NO: 1762967 - RNA, 20 nt, Human
cuaaaagauauaagugcugu

SEQ ID NO: 1762968 - RNA, 17 nt, Human
cuaaaagauauaagugc

SEQ ID NO: 1762969 - RNA, 16 nt, Human
cuaaaaaaaaaaaagu

SEQ ID NO: 1762970 - RNA, 15 nt, Human
cucaggugucccugc

SEQ ID NO: 1762971 - RNA, 16 nt, Human
cucaggugucccugca

SEQ ID NO: 1762972 - RNA, 17 nt, Human
cucaggugucccugcac

SEQ ID NO: 1762973 - RNA, 18 nt, Human
cucaggugucccugcacu

SEQ ID NO: 1762974 - RNA, 19 nt, Human
cucaggugucccugcacuu

SEQ ID NO: 1762975 - RNA, 20 nt, Human
cucauaguaugguggcuggg

SEQ ID NO: 1762976 - RNA, 16 nt, Human
cucauagguugagcaa

SEQ ID NO: 1762977 - RNA, 19 nt, Human
cucauagguugagcaauuu

SEQ ID NO: 1762978 - RNA, 18 nt, Human
cucauaguaugguggcug

SEQ ID NO: 1762979 - RNA, 19 nt, Human
cucauaguaugguggcugg

SEQ ID NO: 1762980 - RNA, 21 nt, Human
cucauaacggaucagaaauac

SEQ ID NO: 1762981 - RNA, 19 nt, Human
cucauaacggaucagaaau

SEQ ID NO: 1762982 - RNA, 17 nt, Human
cucauaacggaucagaa

SEQ ID NO: 1762983 - RNA, 23 nt, Human
cucaucauucucugucucaucca

SEQ ID NO: 1762984 - RNA, 16 nt, Human
cucauccaucaucaug

SEQ ID NO: 1762985 - RNA, 19 nt, Human
cucauccaucaucaugugu

SEQ ID NO: 1762986 - RNA, 13 nt, Human
cucauuggacccu

SEQ ID NO: 1762987 - RNA, 17 nt, Human
cucauuggacccuucca

SEQ ID NO: 1762988 - RNA, 18 nt, Human
cucauuggacccuuccau

SEQ ID NO: 1762989 - RNA, 23 nt, Human
cucauucuucuguacgucugaca

SEQ ID NO: 1762990 - RNA, 12 nt, Human
cucauuccagau

SEQ ID NO: 1762991 - RNA, 14 nt, Human
cucauuccagaucc

SEQ ID NO: 1762992 - RNA, 13 nt, Human
cucauucuucugu

SEQ ID NO: 1762993 - RNA, 14 nt, Human
cucauucuucugua

SEQ ID NO: 1762994 - RNA, 18 nt, Human
cucauucccuccccagaa

SEQ ID NO: 1762995 - RNA, 14 nt, Human
cucuggacaggcau

SEQ ID NO: 1762996 - RNA, 16 nt, Human
cucuggacaaagcguu

SEQ ID NO: 1762997 - RNA, 14 nt, Human
cucugccucugaca

SEQ ID NO: 1762998 - RNA, 16 nt, Human
cucugccucugacaca

SEQ ID NO: 1762999 - RNA, 16 nt, Human
cucugcccucuagagc

SEQ ID NO: 1763000 - RNA, 13 nt, Human
cucugcccugugu

SEQ ID NO: 1763001 - RNA, 14 nt, Human
cucugcccugugua

SEQ ID NO: 1763002 - RNA, 15 nt, Human
cucugagcugugcag

SEQ ID NO: 1763003 - RNA, 13 nt, Human
cucugagcaguga

SEQ ID NO: 1763004 - RNA, 16 nt, Human
cucugagccacagugg

SEQ ID NO: 1763005 - RNA, 18 nt, Human
cucugagccacaguggga

SEQ ID NO: 1763006 - RNA, 12 nt, Human
cucucugcucug

SEQ ID NO: 1763007 - RNA, 12 nt, Human
cucucugcccug

SEQ ID NO: 1763008 - RNA, 13 nt, Human
cucucugcccugu

SEQ ID NO: 1763009 - RNA, 14 nt, Human
cucucugcccugug

SEQ ID NO: 1763010 - RNA, 15 nt, Human
cucucugcccugugu

SEQ ID NO: 1763011 - RNA, 16 nt, Human
cucucugcccugugua

SEQ ID NO: 1763012 - RNA, 17 nt, Human
cucucugcccuguguac

SEQ ID NO: 1763013 - RNA, 14 nt, Human
cucucugcucugcg

SEQ ID NO: 1763014 - RNA, 22 nt, Human
cucucugcucugcgugucaccu

SEQ ID NO: 1763015 - RNA, 11 nt, Human
cucucugcccu

SEQ ID NO: 1763016 - RNA, 14 nt, Human
cucugacuugggga

SEQ ID NO: 1763017 - RNA, 12 nt, Human
cucugaucccuc

SEQ ID NO: 1763018 - RNA, 21 nt, Human
cucugaucccucuacagagcu

SEQ ID NO: 1763019 - RNA, 22 nt, Human
cucugaucccucuacagagcuu

SEQ ID NO: 1763020 - RNA, 14 nt, Human
cucugcauccagag

SEQ ID NO: 1763021 - RNA, 18 nt, Human
cucuccuuuguucccggc

SEQ ID NO: 1763022 - RNA, 13 nt, Human
cucuccccagcaa

SEQ ID NO: 1763023 - RNA, 10 nt, Human
cucuccaggg

SEQ ID NO: 1763024 - RNA, 18 nt, Human
cucucagucucugagcag

SEQ ID NO: 1763025 - RNA, 18 nt, Human
cucucaggccggcagccc

SEQ ID NO: 1763026 - RNA, 21 nt, Human
cucucaggccggcagccccag

SEQ ID NO: 1763027 - RNA, 13 nt, Human
cucucagucucug

SEQ ID NO: 1763028 - RNA, 14 nt, Human
cucucagucucuga

SEQ ID NO: 1763029 - RNA, 15 nt, Human
cucucagucucugag

SEQ ID NO: 1763030 - RNA, 16 nt, Human
cucucagucucugagc

SEQ ID NO: 1763031 - RNA, 17 nt, Human
cucucagucucugagca

SEQ ID NO: 1763032 - RNA, 16 nt, Human
cucuugaccucaggug

SEQ ID NO: 1763033 - RNA, 13 nt, Human
cucuugaccucag

SEQ ID NO: 1763034 - RNA, 15 nt, Human
cucuugaccucaggu

SEQ ID NO: 1763035 - RNA, 12 nt, Human
cucuuucaaaac

SEQ ID NO: 1763036 - RNA, 21 nt, Human
cucuuguaauccgaaucucuu

SEQ ID NO: 1763037 - RNA, 20 nt, Human
cucuugugaggaaagucauu

SEQ ID NO: 1763038 - RNA, 16 nt, Human
cucuuucugagugccu

SEQ ID NO: 1763039 - RNA, 17 nt, Human
cucuuucugagugccuu

SEQ ID NO: 1763040 - RNA, 18 nt, Human
cucuuucugagugccuuc

SEQ ID NO: 1763041 - RNA, 19 nt, Human
cucuuucugagugccuucu

SEQ ID NO: 1763042 - RNA, 23 nt, Human
cucuuucugagugccuucugugg

SEQ ID NO: 1763043 - RNA, 21 nt, Human
cucuucugggagggcagcagg

SEQ ID NO: 1763044 - RNA, 22 nt, Human
cucuucugggagggcagcaggg

SEQ ID NO: 1763045 - RNA, 12 nt, Human
cucuucuccagg

SEQ ID NO: 1763046 - RNA, 21 nt, Human
cugaagacucauucuucugua

SEQ ID NO: 1763047 - RNA, 14 nt, Human
cugaagucacacag

SEQ ID NO: 1763048 - RNA, 15 nt, Human
cugaagucacacagu

SEQ ID NO: 1763049 - RNA, 16 nt, Human
cugaagucacacagug

SEQ ID NO: 1763050 - RNA, 13 nt, Human
cugaaucaugagc

SEQ ID NO: 1763051 - RNA, 18 nt, Human
cugaaucaugagccugcu

SEQ ID NO: 1763052 - RNA, 20 nt, Human
cugaaucaugagccugcugg

SEQ ID NO: 1763053 - RNA, 21 nt, Human
cugaaucaugagccugcugga

SEQ ID NO: 1763054 - RNA, 18 nt, Human
cugaauaggcgaucacaa

SEQ ID NO: 1763055 - RNA, 15 nt, Human
cugaauagcagaagg

SEQ ID NO: 1763056 - RNA, 23 nt, Human
cugaauaggcgaucacaacgugc

SEQ ID NO: 1763057 - RNA, 21 nt, Human
cugaauaggcgaucacaacgu

SEQ ID NO: 1763058 - RNA, 19 nt, Human
cugacagacacaggcccgg

SEQ ID NO: 1763059 - RNA, 11 nt, Human
cugacaggcaa

SEQ ID NO: 1763060 - RNA, 21 nt, Human
cugacagacacaggcccggcu

SEQ ID NO: 1763061 - RNA, 17 nt, Human
cugacauuguuggccaa

SEQ ID NO: 1763062 - RNA, 20 nt, Human
cugacaggcaaugcuggcug

SEQ ID NO: 1763063 - RNA, 16 nt, Human
cugacaggcaaugcug

SEQ ID NO: 1763064 - RNA, 17 nt, Human
cugacaggcaaugcugg

SEQ ID NO: 1763065 - RNA, 18 nt, Human
cugacaggcaaugcuggc

SEQ ID NO: 1763066 - RNA, 19 nt, Human
cugacaggcaaugcuggcu

SEQ ID NO: 1763067 - RNA, 11 nt, Human
cugacccacug

SEQ ID NO: 1763068 - RNA, 21 nt, Human
cugacauuguuggccaaagcc

SEQ ID NO: 1763069 - RNA, 15 nt, Human
cuguuuuuguuucuu

SEQ ID NO: 1763070 - RNA, 12 nt, Human
cuuaagcaaagg

SEQ ID NO: 1763071 - RNA, 19 nt, Human
cuuaagcaaaggggacagc

SEQ ID NO: 1763072 - RNA, 22 nt, Human
cuuaagcaaaggggacagcugu

SEQ ID NO: 1763073 - RNA, 21 nt, Human
cuguuuucuuuaugucuuuug

SEQ ID NO: 1763074 - RNA, 21 nt, Human
cugguuggcucccgcggugcc

SEQ ID NO: 1763075 - RNA, 15 nt, Human
cuuagaaauuuauuu

SEQ ID NO: 1763076 - RNA, 14 nt, Human
cuuagaaauuuauu

SEQ ID NO: 1763077 - RNA, 15 nt, Human
cuuagaagucacaca

SEQ ID NO: 1763078 - RNA, 15 nt, Human
cuuacuguagccuca

SEQ ID NO: 1763079 - RNA, 16 nt, Human
cuuacuguagccucag

SEQ ID NO: 1763080 - RNA, 17 nt, Human
cuuacuguagccucaga

SEQ ID NO: 1763081 - RNA, 19 nt, Human
cuuaauggaagguuggauc

SEQ ID NO: 1763082 - RNA, 23 nt, Human
cuuacgaauacuuuugcccuuug

SEQ ID NO: 1763083 - RNA, 14 nt, Human
cuuauaauuuaaaa

SEQ ID NO: 1763084 - RNA, 16 nt, Human
cuuaggguuuggagcu

SEQ ID NO: 1763085 - RNA, 13 nt, Human
cuuauaauuuaaa

SEQ ID NO: 1763086 - RNA, 19 nt, Human
cuuaugaaugauuugcaua

SEQ ID NO: 1763087 - RNA, 20 nt, Human
cuuaugaaugauuugcauau

SEQ ID NO: 1763088 - RNA, 18 nt, Human
cuuaugaaugauuugcau

SEQ ID NO: 1763089 - RNA, 18 nt, Human
cuuaucuccacaaccucu

SEQ ID NO: 1763090 - RNA, 22 nt, Human
cuuaucugugcucaggacucag

SEQ ID NO: 1763091 - RNA, 14 nt, Human
cuuaucugugcuca

SEQ ID NO: 1763092 - RNA, 16 nt, Human
cuuaucugugcucagg

SEQ ID NO: 1763093 - RNA, 16 nt, Human
cuuccaggugcccagc

SEQ ID NO: 1763094 - RNA, 19 nt, Human
cuuccaggugcccagcuau

SEQ ID NO: 1763095 - RNA, 13 nt, Human
cuuccagcccaga

SEQ ID NO: 1763096 - RNA, 16 nt, Human
cuuccaaauccccuaa

SEQ ID NO: 1763097 - RNA, 19 nt, Human
cuuccaaauccccuaagca

SEQ ID NO: 1763098 - RNA, 20 nt, Human
cuuccaaauccccuaagcag

SEQ ID NO: 1763099 - RNA, 18 nt, Human
cuucauuuccugugucuu

SEQ ID NO: 1763100 - RNA, 17 nt, Human
cuucuccaggcuguauc

SEQ ID NO: 1763101 - RNA, 14 nt, Human
cuucuccauccaca

SEQ ID NO: 1763102 - RNA, 16 nt, Human
cuucuccauccacaug

SEQ ID NO: 1763103 - RNA, 16 nt, Human
cuucuccacccugcuc

SEQ ID NO: 1763104 - RNA, 19 nt, Human
cuucuccaaaaaucugccu

SEQ ID NO: 1763105 - RNA, 20 nt, Human
cuucuccaaaaaucugccug

SEQ ID NO: 1763106 - RNA, 21 nt, Human
cuucuccaaaaaucugccugg

SEQ ID NO: 1763107 - RNA, 22 nt, Human
cuucuccaaaaaucugccuggg

SEQ ID NO: 1763108 - RNA, 14 nt, Human
cuucuccacccugc

SEQ ID NO: 1763109 - RNA, 15 nt, Human
cuucuccacccugcu

SEQ ID NO: 1763110 - RNA, 16 nt, Human
cuucucgcuuuugcca

SEQ ID NO: 1763111 - RNA, 17 nt, Human
cuucucccaucucuucc

SEQ ID NO: 1763112 - RNA, 18 nt, Human
cuucucccaucucuuccu

SEQ ID NO: 1763113 - RNA, 20 nt, Human
cuucucccaucucuuccuug

SEQ ID NO: 1763114 - RNA, 18 nt, Human
cuucugcuucagccuccc

SEQ ID NO: 1763115 - RNA, 14 nt, Human
cuucuggaaacugu

SEQ ID NO: 1763116 - RNA, 18 nt, Human
cuucuggaaacugugaag

SEQ ID NO: 1763117 - RNA, 16 nt, Human
cuucugcuucagccuc

SEQ ID NO: 1763118 - RNA, 17 nt, Human
cuucugcuucagccucc

SEQ ID NO: 1763119 - RNA, 21 nt, Human
cuucugccauauucuguuggc

SEQ ID NO: 1763120 - RNA, 15 nt, Human
cuucugccauauucu

SEQ ID NO: 1763121 - RNA, 17 nt, Human
cuucugccauauucugu

SEQ ID NO: 1763122 - RNA, 12 nt, Human
cuucucuauaaa

SEQ ID NO: 1763123 - RNA, 13 nt, Human
cuucucuauaaaa

SEQ ID NO: 1763124 - RNA, 15 nt, Human
cuucucuauaaaaaa

SEQ ID NO: 1763125 - RNA, 17 nt, Human
cuucucuauaaaaaaua

SEQ ID NO: 1763126 - RNA, 18 nt, Human
cuucucuauaaaaaauau

SEQ ID NO: 1763127 - RNA, 16 nt, Human
cuucgggcccuuccca

SEQ ID NO: 1763128 - RNA, 17 nt, Human
cuucgggcccuucccac

SEQ ID NO: 1763129 - RNA, 14 nt, Human
cuucgggcugugcc

SEQ ID NO: 1763130 - RNA, 15 nt, Human
cuucgggcugugccc

SEQ ID NO: 1763131 - RNA, 16 nt, Human
cuucgcuccugugucu

SEQ ID NO: 1763132 - RNA, 18 nt, Human
cuucguuuacuaugccug

SEQ ID NO: 1763133 - RNA, 19 nt, Human
cuucgggcuggccaucugg

SEQ ID NO: 1763134 - RNA, 19 nt, Human
cuucguuuacuaugccugu

SEQ ID NO: 1763135 - RNA, 21 nt, Human
cuucguuuacuaugccugugu

SEQ ID NO: 1763136 - RNA, 19 nt, Human
cuucucauagguguccagc

SEQ ID NO: 1763137 - RNA, 14 nt, Human
cuucgcuccugugu

SEQ ID NO: 1763138 - RNA, 15 nt, Human
cuucgcuccuguguc

SEQ ID NO: 1763139 - RNA, 13 nt, Human
cuucgcuccugug

SEQ ID NO: 1763140 - RNA, 14 nt, Human
cuucgaaaaucuag

SEQ ID NO: 1763141 - RNA, 16 nt, Human
cuuccuacccugccuc

SEQ ID NO: 1763142 - RNA, 17 nt, Human
cuuccuacccugccucc

SEQ ID NO: 1763143 - RNA, 22 nt, Human
cuuccuugaccugcauuguaaa

SEQ ID NO: 1763144 - RNA, 23 nt, Human
cuuccuugaccugcauuguaaau

SEQ ID NO: 1763145 - RNA, 15 nt, Human
cuuucugccaccccu

SEQ ID NO: 1763146 - RNA, 18 nt, Human
cuuucugucccuucuguc

SEQ ID NO: 1763147 - RNA, 23 nt, Human
cuuucugucccuucugucccuca

SEQ ID NO: 1763148 - RNA, 13 nt, Human
cuuuccuccucug

SEQ ID NO: 1763149 - RNA, 14 nt, Human
cuuuccuccucuga

SEQ ID NO: 1763150 - RNA, 15 nt, Human
cuuuccuccucugac

SEQ ID NO: 1763151 - RNA, 17 nt, Human
cuuuccuccucugacuu

SEQ ID NO: 1763152 - RNA, 12 nt, Human
cuuuccuccuuu

SEQ ID NO: 1763153 - RNA, 13 nt, Human
cuuuccuccuuuc

SEQ ID NO: 1763154 - RNA, 14 nt, Human
cuuuccuccuuucc

SEQ ID NO: 1763155 - RNA, 16 nt, Human
cuuuccucucuauauu

SEQ ID NO: 1763156 - RNA, 17 nt, Human
cuuuccucucuauauuu

SEQ ID NO: 1763157 - RNA, 18 nt, Human
cuuuccucucuauauuuc

SEQ ID NO: 1763158 - RNA, 16 nt, Human
cuuucugagugccuuc

SEQ ID NO: 1763159 - RNA, 17 nt, Human
cuuucugagugccuucu

SEQ ID NO: 1763160 - RNA, 18 nt, Human
cuuucugagugccuucug

SEQ ID NO: 1763161 - RNA, 19 nt, Human
cuuucugagugccuucugu

SEQ ID NO: 1763162 - RNA, 20 nt, Human
cuuucugagugccuucugug

SEQ ID NO: 1763163 - RNA, 21 nt, Human
cuuucugagugccuucugugg

SEQ ID NO: 1763164 - RNA, 13 nt, Human
cuuucucuuuucc

SEQ ID NO: 1763165 - RNA, 21 nt, Human
cuuucucuuuuccccuuuccu

SEQ ID NO: 1763166 - RNA, 22 nt, Human
cuuucucuuuuccccuuuccug

SEQ ID NO: 1763167 - RNA, 23 nt, Human
cuuucucuuuuccccuuuccugu

SEQ ID NO: 1763168 - RNA, 16 nt, Human
cuuuaggguucugccu

SEQ ID NO: 1763169 - RNA, 18 nt, Human
cuuuaggguucugccucu

SEQ ID NO: 1763170 - RNA, 17 nt, Human
cuuuagaguuagacugu

SEQ ID NO: 1763171 - RNA, 20 nt, Human
cuuuagaguuagacuguugg

SEQ ID NO: 1763172 - RNA, 14 nt, Human
cuuuagaguuagac

SEQ ID NO: 1763173 - RNA, 11 nt, Human
cuuuggcagug

SEQ ID NO: 1763174 - RNA, 20 nt, Human
cuuuggaaaaugcauuguau

SEQ ID NO: 1763175 - RNA, 21 nt, Human
cuuuggaaaaugcauuguauc

SEQ ID NO: 1763176 - RNA, 13 nt, Human
cuuuguggcuucc

SEQ ID NO: 1763177 - RNA, 18 nt, Human
cuuuccucauuaaauuac

SEQ ID NO: 1763178 - RNA, 19 nt, Human
cuuuggaaaaugcauugua

SEQ ID NO: 1763179 - RNA, 17 nt, Human
cuuuugacaaaggcaag

SEQ ID NO: 1763180 - RNA, 19 nt, Human
cuuuuguuuccuuuuuucc

SEQ ID NO: 1763181 - RNA, 20 nt, Human
cuuuuguuuccuuuuuuccc

SEQ ID NO: 1763182 - RNA, 15 nt, Human
cuuuuguuuccuuuu

SEQ ID NO: 1763183 - RNA, 13 nt, Human
cuuuuugcuuucg

SEQ ID NO: 1763184 - RNA, 19 nt, Human
cuuuguuuugcacacuuug

SEQ ID NO: 1763185 - RNA, 23 nt, Human
cuuuguuuugcacacuuugccau

SEQ ID NO: 1763186 - RNA, 21 nt, Human
cuuuuuuacuuaguagauuaa

SEQ ID NO: 1763187 - RNA, 16 nt, Human
gaaaaauauuuauuca

SEQ ID NO: 1763188 - RNA, 18 nt, Human
gaaaaauauuuauucauu

SEQ ID NO: 1763189 - RNA, 12 nt, Human
gaaaacaaggaa

SEQ ID NO: 1763190 - RNA, 14 nt, Human
gaaaacaaggaagu

SEQ ID NO: 1763191 - RNA, 19 nt, Human
gaaaauaacaauaaaagac

SEQ ID NO: 1763192 - RNA, 14 nt, Human
cuugggcccuuuga

SEQ ID NO: 1763193 - RNA, 16 nt, Human
cuugggcccuuugagu

SEQ ID NO: 1763194 - RNA, 17 nt, Human
cuugggcccuuugagug

SEQ ID NO: 1763195 - RNA, 19 nt, Human
cuugggcccuuugagugca

SEQ ID NO: 1763196 - RNA, 11 nt, Human
cuuggacucau

SEQ ID NO: 1763197 - RNA, 21 nt, Human
cuugggcucccuguaaccucu

SEQ ID NO: 1763198 - RNA, 13 nt, Human
cuugggcucccug

SEQ ID NO: 1763199 - RNA, 22 nt, Human
cuuguagcgacuaaacuagauu

SEQ ID NO: 1763200 - RNA, 17 nt, Human
cuuguagcgacuaaacu

SEQ ID NO: 1763201 - RNA, 19 nt, Human
cuuguucugagauucaaua

SEQ ID NO: 1763202 - RNA, 13 nt, Human
cuuguuuccuugu

SEQ ID NO: 1763203 - RNA, 15 nt, Human
cuugcaauggcagcc

SEQ ID NO: 1763204 - RNA, 16 nt, Human
cuugcaauggcagccu

SEQ ID NO: 1763205 - RNA, 17 nt, Human
cuugcaauggcagccuu

SEQ ID NO: 1763206 - RNA, 18 nt, Human
cuugcaauggcagccuug

SEQ ID NO: 1763207 - RNA, 21 nt, Human
cuugcagacucuacagaggcc

SEQ ID NO: 1763208 - RNA, 14 nt, Human
cuugcacagggauu

SEQ ID NO: 1763209 - RNA, 20 nt, Human
cuugcacagggauucucaca

SEQ ID NO: 1763210 - RNA, 15 nt, Human
cuucugggagggcag

SEQ ID NO: 1763211 - RNA, 15 nt, Human
cuugaggguugggcu

SEQ ID NO: 1763212 - RNA, 17 nt, Human
cuugaggguugggcugg

SEQ ID NO: 1763213 - RNA, 18 nt, Human
cuugcucuguuugugggg

SEQ ID NO: 1763214 - RNA, 19 nt, Human
cuugcucuguuuguggggu

SEQ ID NO: 1763215 - RNA, 22 nt, Human
cuugcucugcugacagacacag

SEQ ID NO: 1763216 - RNA, 20 nt, Human
cuuggaagcuccgcuuucua

SEQ ID NO: 1763217 - RNA, 14 nt, Human
cuuggaagcuccgc

SEQ ID NO: 1763218 - RNA, 20 nt, Human
cuugcuugauuguauggugg

SEQ ID NO: 1763219 - RNA, 17 nt, Human
gacagacacaggcccgg

SEQ ID NO: 1763220 - RNA, 20 nt, Human
gacagacacaggcccggcuc

SEQ ID NO: 1763221 - RNA, 22 nt, Human
gacagacacaggcccggcucca

SEQ ID NO: 1763222 - RNA, 12 nt, Human
gacagaggcagc

SEQ ID NO: 1763223 - RNA, 23 nt, Human
gacagaggcagccccauucugcc

SEQ ID NO: 1763224 - RNA, 15 nt, Human
gacagaggaugagcu

SEQ ID NO: 1763225 - RNA, 19 nt, Human
gacagagugagacucuguc

SEQ ID NO: 1763226 - RNA, 21 nt, Human
gacagagucucacuguugccc

SEQ ID NO: 1763227 - RNA, 16 nt, Human
gacagagugagacucu

SEQ ID NO: 1763228 - RNA, 22 nt, Human
gacaggcauguucucugaggac

SEQ ID NO: 1763229 - RNA, 24 nt, Human
gacaggcaaugcuggcuguuggcu

SEQ ID NO: 1763230 - RNA, 23 nt, Human
gacaggcaaugcuggcuguuggc

SEQ ID NO: 1763231 - RNA, 20 nt, Human
gacaggcauguucucugagg

SEQ ID NO: 1763232 - RNA, 21 nt, Human
gacaggcauguucucugagga

SEQ ID NO: 1763233 - RNA, 20 nt, Human
gacaggcaagcaccuccugc

SEQ ID NO: 1763234 - RNA, 21 nt, Human
gacaggcaagcaccuccugcc

SEQ ID NO: 1763235 - RNA, 18 nt, Human
gacaggcaaugcuggcug

SEQ ID NO: 1763236 - RNA, 19 nt, Human
gacaggcaaugcuggcugu

SEQ ID NO: 1763237 - RNA, 13 nt, Human
gacaggcaagcac

SEQ ID NO: 1763238 - RNA, 17 nt, Human
gacaggcaagcaccucc

SEQ ID NO: 1763239 - RNA, 18 nt, Human
gacaggcaagcaccuccu

SEQ ID NO: 1763240 - RNA, 14 nt, Human
gacagauuaauauu

SEQ ID NO: 1763241 - RNA, 23 nt, Human
gaccagacaccuugacagggcac

SEQ ID NO: 1763242 - RNA, 24 nt, Human
gaccagacaccuugacagggcaca

SEQ ID NO: 1763243 - RNA, 22 nt, Human
gaccagacaccuugacagggca

SEQ ID NO: 1763244 - RNA, 19 nt, Human
gaccccagcaagugguccu

SEQ ID NO: 1763245 - RNA, 12 nt, Human
gaccccagagga

SEQ ID NO: 1763246 - RNA, 13 nt, Human
gacccauugcugu

SEQ ID NO: 1763247 - RNA, 14 nt, Human
gacccauugcuguu

SEQ ID NO: 1763248 - RNA, 15 nt, Human
gacccauugcuguug

SEQ ID NO: 1763249 - RNA, 16 nt, Human
gacccagcccucaucc

SEQ ID NO: 1763250 - RNA, 17 nt, Human
gacccagcccucauccc

SEQ ID NO: 1763251 - RNA, 12 nt, Human
gaccagccagca

SEQ ID NO: 1763252 - RNA, 16 nt, Human
gaccagccagcagcag

SEQ ID NO: 1763253 - RNA, 18 nt, Human
gaccagccagcagcagcc

SEQ ID NO: 1763254 - RNA, 15 nt, Human
gacugaccuggucca

SEQ ID NO: 1763255 - RNA, 19 nt, Human
gacugaccugguccacagg

SEQ ID NO: 1763256 - RNA, 20 nt, Human
gacugaccugguccacaggg

SEQ ID NO: 1763257 - RNA, 22 nt, Human
gacugaccugguccacagggca

SEQ ID NO: 1763258 - RNA, 23 nt, Human
gacugaccugguccacagggcac

SEQ ID NO: 1763259 - RNA, 21 nt, Human
gacucuacagaggccaugggc

SEQ ID NO: 1763260 - RNA, 15 nt, Human
gacucuacagaggcc

SEQ ID NO: 1763261 - RNA, 18 nt, Human
gacuacaggcacccacca

SEQ ID NO: 1763262 - RNA, 13 nt, Human
gacuacaggcacc

SEQ ID NO: 1763263 - RNA, 15 nt, Human
gacuacaggcaccca

SEQ ID NO: 1763264 - RNA, 16 nt, Human
gacugagcacccucug

SEQ ID NO: 1763265 - RNA, 17 nt, Human
gacugagcacccucugg

SEQ ID NO: 1763266 - RNA, 18 nt, Human
gacugagcacccucugga

SEQ ID NO: 1763267 - RNA, 15 nt, Human
gacugaucaggaccu

SEQ ID NO: 1763268 - RNA, 12 nt, Human
gacuucagauug

SEQ ID NO: 1763269 - RNA, 15 nt, Human
gacugcucagaacuu

SEQ ID NO: 1763270 - RNA, 19 nt, Human
gacugcucagaacuugcug

SEQ ID NO: 1763271 - RNA, 20 nt, Human
gacugcucagaacuugcugc

SEQ ID NO: 1763272 - RNA, 23 nt, Human
gacugcucagaacuugcugcugu

SEQ ID NO: 1763273 - RNA, 17 nt, Human
gaccugguccacagggc

SEQ ID NO: 1763274 - RNA, 18 nt, Human
gaccugguccacagggca

SEQ ID NO: 1763275 - RNA, 19 nt, Human
gaccugguccacagggcac

SEQ ID NO: 1763276 - RNA, 17 nt, Human
gaccuggugcugccucu

SEQ ID NO: 1763277 - RNA, 22 nt, Human
gaccuggugcugccucuaccug

SEQ ID NO: 1763278 - RNA, 18 nt, Human
gaccuucgggcugugccc

SEQ ID NO: 1763279 - RNA, 19 nt, Human
gaccuucgggcugugcccg

SEQ ID NO: 1763280 - RNA, 14 nt, Human
gaccuugaacuggg

SEQ ID NO: 1763281 - RNA, 16 nt, Human
gaccuucgggcugugc

SEQ ID NO: 1763282 - RNA, 12 nt, Human
gacggaggggag

SEQ ID NO: 1763283 - RNA, 21 nt, Human
gacggaggggaguagagaagu

SEQ ID NO: 1763284 - RNA, 12 nt, Human
gacggcuccacu

SEQ ID NO: 1763285 - RNA, 18 nt, Human
gacggcuccacuaggacu

SEQ ID NO: 1763286 - RNA, 13 nt, Human
gacgcuugcucug

SEQ ID NO: 1763287 - RNA, 13 nt, Human
gacggagucccac

SEQ ID NO: 1763288 - RNA, 13 nt, Human
gacgugggcuggg

SEQ ID NO: 1763289 - RNA, 20 nt, Human
gacgugggcugggcccacaa

SEQ ID NO: 1763290 - RNA, 23 nt, Human
gacuaaaagauauaagugcugua

SEQ ID NO: 1763291 - RNA, 22 nt, Human
gacuaaaagauauaagugcugu

SEQ ID NO: 1763292 - RNA, 21 nt, Human
gacuaaaagauauaagugcug

SEQ ID NO: 1763293 - RNA, 20 nt, Human
gacuaaaagauauaagugcu

SEQ ID NO: 1763294 - RNA, 19 nt, Human
gacuaaaagauauaagugc

SEQ ID NO: 1763295 - RNA, 18 nt, Human
gacuaaaagauauaagug

SEQ ID NO: 1763296 - RNA, 17 nt, Human
gacuaaaagauauaagu

SEQ ID NO: 1763297 - RNA, 13 nt, Human
gacuaaaagauau

SEQ ID NO: 1763298 - RNA, 12 nt, Human
gacuaaaagaua

SEQ ID NO: 1763299 - RNA, 23 nt, Human
gaaauuuauuuccuaguucugua

SEQ ID NO: 1763300 - RNA, 22 nt, Human
gaaauuuauuuccuaguucugu

SEQ ID NO: 1763301 - RNA, 18 nt, Human
gaaauuguauuacaaauc

SEQ ID NO: 1763302 - RNA, 14 nt, Human
gaaaauauaaguaa

SEQ ID NO: 1763303 - RNA, 16 nt, Human
gaaauuguauuacaaa

SEQ ID NO: 1763304 - RNA, 15 nt, Human
gaaccucgaguacug

SEQ ID NO: 1763305 - RNA, 16 nt, Human
gaaccucgaguacugu

SEQ ID NO: 1763306 - RNA, 17 nt, Human
gaaccucgaguacugug

SEQ ID NO: 1763307 - RNA, 20 nt, Human
gaaccucgaguacugugggc

SEQ ID NO: 1763308 - RNA, 22 nt, Human
gaaccucgaguacugugggcaa

SEQ ID NO: 1763309 - RNA, 15 nt, Human
gaaccuccccagccu

SEQ ID NO: 1763310 - RNA, 16 nt, Human
gaaccuccccagccug

SEQ ID NO: 1763311 - RNA, 17 nt, Human
gaaccuccccagccugc

SEQ ID NO: 1763312 - RNA, 18 nt, Human
gaaccuccccagccugcg

SEQ ID NO: 1763313 - RNA, 22 nt, Human
gaaccuccccagccugcgccug

SEQ ID NO: 1763314 - RNA, 13 nt, Human
gaaccuccucugu

SEQ ID NO: 1763315 - RNA, 14 nt, Human
gaaccuccucugug

SEQ ID NO: 1763316 - RNA, 15 nt, Human
gaaccuccucuguga

SEQ ID NO: 1763317 - RNA, 16 nt, Human
gaaccuccucugugaa

SEQ ID NO: 1763318 - RNA, 20 nt, Human
gaacuaccuugguuccccca

SEQ ID NO: 1763319 - RNA, 19 nt, Human
gaacuaccuugguuccccc

SEQ ID NO: 1763320 - RNA, 21 nt, Human
gaacgaaccuuggccugggcc

SEQ ID NO: 1763321 - RNA, 22 nt, Human
gaacgaaccuuggccugggccg

SEQ ID NO: 1763322 - RNA, 14 nt, Human
gaagagcccagucu

SEQ ID NO: 1763323 - RNA, 16 nt, Human
gaagagcccagucugu

SEQ ID NO: 1763324 - RNA, 17 nt, Human
gaagagcccagucuguu

SEQ ID NO: 1763325 - RNA, 17 nt, Human
gaagcauuuacuuugug

SEQ ID NO: 1763326 - RNA, 18 nt, Human
gaagcauuuacuuugugu

SEQ ID NO: 1763327 - RNA, 23 nt, Human
gaagaguaagucaaccugccuga

SEQ ID NO: 1763328 - RNA, 12 nt, Human
gaaguuugaaug

SEQ ID NO: 1763329 - RNA, 18 nt, Human
gaagucauaccaaugaaa

SEQ ID NO: 1763330 - RNA, 13 nt, Human
gaaguaggaagua

SEQ ID NO: 1763331 - RNA, 17 nt, Human
gaaguuugaauguuaaa

SEQ ID NO: 1763332 - RNA, 16 nt, Human
gaaguuugaauguuaa

SEQ ID NO: 1763333 - RNA, 14 nt, Human
gaaguuugaauguu

SEQ ID NO: 1763334 - RNA, 13 nt, Human
gaaguuugaaugu

SEQ ID NO: 1763335 - RNA, 20 nt, Human
gaaguuugaauguuaaauaa

SEQ ID NO: 1763336 - RNA, 19 nt, Human
gaaguuugaauguuaaaua

SEQ ID NO: 1763337 - RNA, 21 nt, Human
gaauaacucuguggcauuauu

SEQ ID NO: 1763338 - RNA, 22 nt, Human
gaauaauuuauaguaaugaguu

SEQ ID NO: 1763339 - RNA, 16 nt, Human
gaauaggcgaucacaa

SEQ ID NO: 1763340 - RNA, 23 nt, Human
gaauagcugggacuacaggugug

SEQ ID NO: 1763341 - RNA, 22 nt, Human
gaauagcugggacuacaggugu

SEQ ID NO: 1763342 - RNA, 16 nt, Human
gaauauuugaaucuug

SEQ ID NO: 1763343 - RNA, 14 nt, Human
gaauauuugaaucu

SEQ ID NO: 1763344 - RNA, 23 nt, Human
gaauaggcgaucacaacgugcau

SEQ ID NO: 1763345 - RNA, 22 nt, Human
gaauaggcgaucacaacgugca

SEQ ID NO: 1763346 - RNA, 22 nt, Human
gaauauuugaaucuugucucaa

SEQ ID NO: 1763347 - RNA, 18 nt, Human
gaauauuugaaucuuguc

SEQ ID NO: 1763348 - RNA, 12 nt, Human
gaauuguacaga

SEQ ID NO: 1763349 - RNA, 16 nt, Human
gaauuuaauaaucugu

SEQ ID NO: 1763350 - RNA, 20 nt, Human
gaauucuugguugaggaaac

SEQ ID NO: 1763351 - RNA, 19 nt, Human
gaauucuugguugaggaaa

SEQ ID NO: 1763352 - RNA, 12 nt, Human
gaauuccaaagc

SEQ ID NO: 1763353 - RNA, 14 nt, Human
gaauuccaaagcaa

SEQ ID NO: 1763354 - RNA, 15 nt, Human
gaauuccaaagcaaa

SEQ ID NO: 1763355 - RNA, 17 nt, Human
gaauucggugugcacca

SEQ ID NO: 1763356 - RNA, 18 nt, Human
gaaugccgcgauggguca

SEQ ID NO: 1763357 - RNA, 19 nt, Human
gaaugccgcgaugggucag

SEQ ID NO: 1763358 - RNA, 14 nt, Human
gaaugcauuuuguu

SEQ ID NO: 1763359 - RNA, 17 nt, Human
gaaugccacccacaucu

SEQ ID NO: 1763360 - RNA, 11 nt, Human
gaaugcagugg

SEQ ID NO: 1763361 - RNA, 22 nt, Human
gaaugaaccacaucuugcucug

SEQ ID NO: 1763362 - RNA, 18 nt, Human
gaaugaaccacaucuugc

SEQ ID NO: 1763363 - RNA, 23 nt, Human
gaaugaaccacaucuugcucugc

SEQ ID NO: 1763364 - RNA, 15 nt, Human
gaaugaaaaaacagu

SEQ ID NO: 1763365 - RNA, 12 nt, Human
gaguucugcuga

SEQ ID NO: 1763366 - RNA, 15 nt, Human
gacuuccaugccuua

SEQ ID NO: 1763367 - RNA, 18 nt, Human
gacuuccccggagggcug

SEQ ID NO: 1763368 - RNA, 19 nt, Human
gacuuccccggagggcugc

SEQ ID NO: 1763369 - RNA, 20 nt, Human
gacuuccccggagggcugcg

SEQ ID NO: 1763370 - RNA, 23 nt, Human
gacuuccccggagggcugcggcg

SEQ ID NO: 1763371 - RNA, 19 nt, Human
gaguguuccccuuccacug

SEQ ID NO: 1763372 - RNA, 17 nt, Human
gagugugugauaaauca

SEQ ID NO: 1763373 - RNA, 21 nt, Human
gacuucaucaaacauggguuu

SEQ ID NO: 1763374 - RNA, 13 nt, Human
gauaucagaauuu

SEQ ID NO: 1763375 - RNA, 17 nt, Human
gauaucagaauuugugu

SEQ ID NO: 1763376 - RNA, 23 nt, Human
gaucacggcucacugcagccuca

SEQ ID NO: 1763377 - RNA, 20 nt, Human
gaucacggcucacugcagcc

SEQ ID NO: 1763378 - RNA, 21 nt, Human
gauaauauuuuacauacacug

SEQ ID NO: 1763379 - RNA, 17 nt, Human
gauaggucagugcaaau

SEQ ID NO: 1763380 - RNA, 16 nt, Human
gauccucccaccucag

SEQ ID NO: 1763381 - RNA, 17 nt, Human
gauccucccaccucagc

SEQ ID NO: 1763382 - RNA, 18 nt, Human
gauccucccaccucagcc

SEQ ID NO: 1763383 - RNA, 13 nt, Human
gaucauccacugu

SEQ ID NO: 1763384 - RNA, 16 nt, Human
gaucauccacugugcc

SEQ ID NO: 1763385 - RNA, 12 nt, Human
gaucccucaucu

SEQ ID NO: 1763386 - RNA, 14 nt, Human
gaucccucaucugu

SEQ ID NO: 1763387 - RNA, 18 nt, Human
gaucccucaucugucccu

SEQ ID NO: 1763388 - RNA, 23 nt, Human
gaucccucuacagagcuucccug

SEQ ID NO: 1763389 - RNA, 12 nt, Human
gauccucucugg

SEQ ID NO: 1763390 - RNA, 16 nt, Human
gauccucucuggggcu

SEQ ID NO: 1763391 - RNA, 14 nt, Human
gaugccugguggca

SEQ ID NO: 1763392 - RNA, 15 nt, Human
gaugccugguggcag

SEQ ID NO: 1763393 - RNA, 16 nt, Human
gaugccugguggcagc

SEQ ID NO: 1763394 - RNA, 14 nt, Human
gaugcaccagcccu

SEQ ID NO: 1763395 - RNA, 15 nt, Human
gaugcaccagcccuu

SEQ ID NO: 1763396 - RNA, 23 nt, Human
gaugcaccagcccuuagcaggga

SEQ ID NO: 1763397 - RNA, 15 nt, Human
gaugaaaugagguca

SEQ ID NO: 1763398 - RNA, 21 nt, Human
gaugaaaugaggucagagccu

SEQ ID NO: 1763399 - RNA, 20 nt, Human
gaugaaccagccggggccuu

SEQ ID NO: 1763400 - RNA, 21 nt, Human
gaugaauagaaguuuuaaauu

SEQ ID NO: 1763401 - RNA, 17 nt, Human
gcaaacgcugccugccg

SEQ ID NO: 1763402 - RNA, 14 nt, Human
gcaaacgcugccug

SEQ ID NO: 1763403 - RNA, 15 nt, Human
gcaaacgcugccugc

SEQ ID NO: 1763404 - RNA, 16 nt, Human
gcaaacgcugccugcc

SEQ ID NO: 1763405 - RNA, 18 nt, Human
gcaaacgcugccugcccg

SEQ ID NO: 1763406 - RNA, 19 nt, Human
gcaaacccaucaacaaaaa

SEQ ID NO: 1763407 - RNA, 15 nt, Human
gcaaacccagacggc

SEQ ID NO: 1763408 - RNA, 12 nt, Human
gcaaaguguuuu

SEQ ID NO: 1763409 - RNA, 14 nt, Human
gcaaaguguuuugu

SEQ ID NO: 1763410 - RNA, 17 nt, Human
gcaaaguguuuuguacc

SEQ ID NO: 1763411 - RNA, 18 nt, Human
gcaaaguguuuuguacca

SEQ ID NO: 1763412 - RNA, 20 nt, Human
gcaagcaauccuagguaggg

SEQ ID NO: 1763413 - RNA, 15 nt, Human
gcaagcaccuccugc

SEQ ID NO: 1763414 - RNA, 16 nt, Human
gcaagcaccuccugcc

SEQ ID NO: 1763415 - RNA, 18 nt, Human
gcaagcaccuccugccuc

SEQ ID NO: 1763416 - RNA, 20 nt, Human
gcaagcaccuccugccucga

SEQ ID NO: 1763417 - RNA, 22 nt, Human
gcaagcauguaacuuauauuaa

SEQ ID NO: 1763418 - RNA, 18 nt, Human
gcaagguccggcccaucc

SEQ ID NO: 1763419 - RNA, 15 nt, Human
gauucccaagcucug

SEQ ID NO: 1763420 - RNA, 20 nt, Human
gauucaguguuaaaugugau

SEQ ID NO: 1763421 - RNA, 13 nt, Human
gauuacaagcgug

SEQ ID NO: 1763422 - RNA, 21 nt, Human
gauuacaagcgugagccacug

SEQ ID NO: 1763423 - RNA, 14 nt, Human
gauguucugggaca

SEQ ID NO: 1763424 - RNA, 13 nt, Human
gauguuucauuuu

SEQ ID NO: 1763425 - RNA, 13 nt, Human
gauguuugcccaa

SEQ ID NO: 1763426 - RNA, 14 nt, Human
gauguuugcccaaa

SEQ ID NO: 1763427 - RNA, 18 nt, Human
gauguuugcccaaaauuu

SEQ ID NO: 1763428 - RNA, 21 nt, Human
gauguucucuaucauuuaaua

SEQ ID NO: 1763429 - RNA, 19 nt, Human
gauguucucuaucauuuaa

SEQ ID NO: 1763430 - RNA, 15 nt, Human
gauguucucuaucau

SEQ ID NO: 1763431 - RNA, 19 nt, Human
gauguucuaagucuuucca

SEQ ID NO: 1763432 - RNA, 14 nt, Human
gaugcgcagugccu

SEQ ID NO: 1763433 - RNA, 23 nt, Human
gaugcgcauucuaaccuggaggu

SEQ ID NO: 1763434 - RNA, 17 nt, Human
gaugccugguggcagcu

SEQ ID NO: 1763435 - RNA, 22 nt, Human
gaugcagugcucgcuguugcug

SEQ ID NO: 1763436 - RNA, 17 nt, Human
gauugcaacaggcuggg

SEQ ID NO: 1763437 - RNA, 18 nt, Human
gauugcaacaggcugggc

SEQ ID NO: 1763438 - RNA, 16 nt, Human
gauugcugccccauca

SEQ ID NO: 1763439 - RNA, 20 nt, Human
gauugcugccccaucagugc

SEQ ID NO: 1763440 - RNA, 21 nt, Human
gauugcugccccaucagugcu

SEQ ID NO: 1763441 - RNA, 16 nt, Human
gauucccaagcucugc

SEQ ID NO: 1763442 - RNA, 17 nt, Human
gauucccaagcucugcu

SEQ ID NO: 1763443 - RNA, 18 nt, Human
gauucccaagcucugcuc

SEQ ID NO: 1763444 - RNA, 18 nt, Human
gauuccaaaaagcacaua

SEQ ID NO: 1763445 - RNA, 16 nt, Human
gauugcaacaggcugg

SEQ ID NO: 1763446 - RNA, 23 nt, Human
gauucuuuuguauguaacaauug

SEQ ID NO: 1763447 - RNA, 22 nt, Human
gauuucuuuuguaauaaacuau

SEQ ID NO: 1763448 - RNA, 23 nt, Human
gauuucuuuuguaauaaacuauu

SEQ ID NO: 1763449 - RNA, 19 nt, Human
gcagccucaaccuccuggg

SEQ ID NO: 1763450 - RNA, 20 nt, Human
gcagccucaaccuccugggc

SEQ ID NO: 1763451 - RNA, 12 nt, Human
gcagcagggcua

SEQ ID NO: 1763452 - RNA, 17 nt, Human
gcagcagggcuacccug

SEQ ID NO: 1763453 - RNA, 19 nt, Human
gcagcagggcuacccugag

SEQ ID NO: 1763454 - RNA, 20 nt, Human
gcagcagggcuacccugagc

SEQ ID NO: 1763455 - RNA, 18 nt, Human
gcagcagguagccugcug

SEQ ID NO: 1763456 - RNA, 19 nt, Human
gcagcagguagccugcugg

SEQ ID NO: 1763457 - RNA, 23 nt, Human
gcagccugcgccaccgcccagag

SEQ ID NO: 1763458 - RNA, 21 nt, Human
gcagccucaaccuccugggcu

SEQ ID NO: 1763459 - RNA, 22 nt, Human
gcagccucaaccuccugggcua

SEQ ID NO: 1763460 - RNA, 16 nt, Human
gcaggagcacacccag

SEQ ID NO: 1763461 - RNA, 17 nt, Human
gcaggagcacacccagc

SEQ ID NO: 1763462 - RNA, 20 nt, Human
gcaggagcacacccagcccc

SEQ ID NO: 1763463 - RNA, 12 nt, Human
gcaggaccucug

SEQ ID NO: 1763464 - RNA, 20 nt, Human
gcaggaccuucgggcugugc

SEQ ID NO: 1763465 - RNA, 20 nt, Human
gcaggaccugccuguagccc

SEQ ID NO: 1763466 - RNA, 20 nt, Human
gcaggaccucugaaacccug

SEQ ID NO: 1763467 - RNA, 14 nt, Human
gcaggaccugccug

SEQ ID NO: 1763468 - RNA, 15 nt, Human
gcaggaccugccugu

SEQ ID NO: 1763469 - RNA, 16 nt, Human
gcaggaccugccugua

SEQ ID NO: 1763470 - RNA, 19 nt, Human
gcagagaaugaaagggccc

SEQ ID NO: 1763471 - RNA, 20 nt, Human
gcagagaaugaaagggccca

SEQ ID NO: 1763472 - RNA, 21 nt, Human
gcagagaaugaaagggcccag

SEQ ID NO: 1763473 - RNA, 22 nt, Human
gcagagaaugaaagggcccaga

SEQ ID NO: 1763474 - RNA, 23 nt, Human
gcagagaaugaaagggcccagag

SEQ ID NO: 1763475 - RNA, 14 nt, Human
gcagaguccuggag

SEQ ID NO: 1763476 - RNA, 17 nt, Human
gcagcacccuauaaauc

SEQ ID NO: 1763477 - RNA, 19 nt, Human
gcagcacccuauaaaucaa

SEQ ID NO: 1763478 - RNA, 14 nt, Human
gcacccggccccug

SEQ ID NO: 1763479 - RNA, 15 nt, Human
gcacccggccccugc

SEQ ID NO: 1763480 - RNA, 17 nt, Human
gcacccggccccugcug

SEQ ID NO: 1763481 - RNA, 14 nt, Human
gcaccuccugccuc

SEQ ID NO: 1763482 - RNA, 15 nt, Human
gcaccuccugccucg

SEQ ID NO: 1763483 - RNA, 22 nt, Human
gcacaugucuuaaugaaguuug

SEQ ID NO: 1763484 - RNA, 21 nt, Human
gcacaugucuuaaugaaguuu

SEQ ID NO: 1763485 - RNA, 20 nt, Human
gcacaugucuuaaugaaguu

SEQ ID NO: 1763486 - RNA, 17 nt, Human
gcacaugucuuaaugaa

SEQ ID NO: 1763487 - RNA, 15 nt, Human
gcacaugucuuaaug

SEQ ID NO: 1763488 - RNA, 13 nt, Human
gcacaugucuuaa

SEQ ID NO: 1763489 - RNA, 16 nt, Human
gcacagcuucauuucc

SEQ ID NO: 1763490 - RNA, 24 nt, Human
gcacuagacugguggcaggggcuu

SEQ ID NO: 1763491 - RNA, 19 nt, Human
gcacuaaggugugcucuga

SEQ ID NO: 1763492 - RNA, 18 nt, Human
gcacuaaggugugcucug

SEQ ID NO: 1763493 - RNA, 21 nt, Human
gcacuaccacuccugccaagg

SEQ ID NO: 1763494 - RNA, 17 nt, Human
gcacuaaggugugcucu

SEQ ID NO: 1763495 - RNA, 18 nt, Human
gcacccggccccugcugg

SEQ ID NO: 1763496 - RNA, 21 nt, Human
gcagugcucgcuguugcugaa

SEQ ID NO: 1763497 - RNA, 19 nt, Human
gcagugcucgcuguugcug

SEQ ID NO: 1763498 - RNA, 18 nt, Human
gcagugcucgcuguugcu

SEQ ID NO: 1763499 - RNA, 17 nt, Human
gcagugcucgcuguugc

SEQ ID NO: 1763500 - RNA, 16 nt, Human
gcagugggagcugccu

SEQ ID NO: 1763501 - RNA, 20 nt, Human
gcaggugcuggagcacuggg

SEQ ID NO: 1763502 - RNA, 21 nt, Human
gcaggugcuggagcacugggc

SEQ ID NO: 1763503 - RNA, 16 nt, Human
gcaggugcuggagcac

SEQ ID NO: 1763504 - RNA, 18 nt, Human
gcaggugcuggagcacug

SEQ ID NO: 1763505 - RNA, 19 nt, Human
gcaggugcuggagcacugg

SEQ ID NO: 1763506 - RNA, 17 nt, Human
gcagguggggagacugg

SEQ ID NO: 1763507 - RNA, 21 nt, Human
gcagguggggagacugggcug

SEQ ID NO: 1763508 - RNA, 13 nt, Human
gcagugccuugca

SEQ ID NO: 1763509 - RNA, 17 nt, Human
gcagggcuacccugagc

SEQ ID NO: 1763510 - RNA, 20 nt, Human
gcagggcuacccugagcuga

SEQ ID NO: 1763511 - RNA, 14 nt, Human
gcagggcucagcgg

SEQ ID NO: 1763512 - RNA, 21 nt, Human
gcagggcuacccugagcugag

SEQ ID NO: 1763513 - RNA, 22 nt, Human
gcagggcuacccugagcugagg

SEQ ID NO: 1763514 - RNA, 12 nt, Human
gcagggcucagc

SEQ ID NO: 1763515 - RNA, 23 nt, Human
gcagggcuacccugagcugaggc

SEQ ID NO: 1763516 - RNA, 17 nt, Human
gcagugggagcugccug

SEQ ID NO: 1763517 - RNA, 18 nt, Human
gcagugggagcugccugu

SEQ ID NO: 1763518 - RNA, 13 nt, Human
gcagugugccccc

SEQ ID NO: 1763519 - RNA, 14 nt, Human
gcagugugcccccc

SEQ ID NO: 1763520 - RNA, 22 nt, Human
gcagugugccccccagccccgg

SEQ ID NO: 1763521 - RNA, 21 nt, Human
gcagugugaggccagggcaga

SEQ ID NO: 1763522 - RNA, 19 nt, Human
gcagugugaggccagggca

SEQ ID NO: 1763523 - RNA, 18 nt, Human
gcauagcccauguuaagu

SEQ ID NO: 1763524 - RNA, 23 nt, Human
gcaugcacuguucccccugugca

SEQ ID NO: 1763525 - RNA, 16 nt, Human
gcaugcacuguucccc

SEQ ID NO: 1763526 - RNA, 17 nt, Human
gcaugcacuguuccccc

SEQ ID NO: 1763527 - RNA, 21 nt, Human
gcaugcacuguucccccugug

SEQ ID NO: 1763528 - RNA, 22 nt, Human
gcaugcacuguucccccugugc

SEQ ID NO: 1763529 - RNA, 12 nt, Human
gcaucaagccac

SEQ ID NO: 1763530 - RNA, 14 nt, Human
gcauugccaagggc

SEQ ID NO: 1763531 - RNA, 17 nt, Human
gcauucuaaccuggagg

SEQ ID NO: 1763532 - RNA, 16 nt, Human
gcauugccaagggcuu

SEQ ID NO: 1763533 - RNA, 16 nt, Human
gcauugcucuggaucu

SEQ ID NO: 1763534 - RNA, 16 nt, Human
gcauugcuggacucug

SEQ ID NO: 1763535 - RNA, 16 nt, Human
gcauuuuguuugguau

SEQ ID NO: 1763536 - RNA, 19 nt, Human
gccagagggagugacagag

SEQ ID NO: 1763537 - RNA, 20 nt, Human
gccagagggagugacagagg

SEQ ID NO: 1763538 - RNA, 12 nt, Human
gccagcguccuc

SEQ ID NO: 1763539 - RNA, 13 nt, Human
gccagcguccucc

SEQ ID NO: 1763540 - RNA, 19 nt, Human
gccagcguccuccucugug

SEQ ID NO: 1763541 - RNA, 22 nt, Human
gccagcguccuccucugugacc

SEQ ID NO: 1763542 - RNA, 14 nt, Human
gccagcugcucccc

SEQ ID NO: 1763543 - RNA, 15 nt, Human
gccagcugcucccca

SEQ ID NO: 1763544 - RNA, 16 nt, Human
gccagcugcuccccag

SEQ ID NO: 1763545 - RNA, 13 nt, Human
gccagcucuguau

SEQ ID NO: 1763546 - RNA, 13 nt, Human
gccagcugcuccc

SEQ ID NO: 1763547 - RNA, 18 nt, Human
gccagagggagugacaga

SEQ ID NO: 1763548 - RNA, 19 nt, Human
gccacugcaccgggccaca

SEQ ID NO: 1763549 - RNA, 17 nt, Human
gccacugcaccgggcca

SEQ ID NO: 1763550 - RNA, 18 nt, Human
gccacugcaccgggccac

SEQ ID NO: 1763551 - RNA, 14 nt, Human
gccacggccaggcc

SEQ ID NO: 1763552 - RNA, 15 nt, Human
gccacggccaggcca

SEQ ID NO: 1763553 - RNA, 19 nt, Human
gccaaagggaaauaucauu

SEQ ID NO: 1763554 - RNA, 14 nt, Human
gccaaauagcaaag

SEQ ID NO: 1763555 - RNA, 15 nt, Human
gccaaauagcaaaga

SEQ ID NO: 1763556 - RNA, 13 nt, Human
gccaaaggcuggc

SEQ ID NO: 1763557 - RNA, 16 nt, Human
gccacggccaggccag

SEQ ID NO: 1763558 - RNA, 23 nt, Human
gccacguguuugugcuguggugu

SEQ ID NO: 1763559 - RNA, 14 nt, Human
gccagggcugcccc

SEQ ID NO: 1763560 - RNA, 15 nt, Human
gccagggcugccccu

SEQ ID NO: 1763561 - RNA, 16 nt, Human
gccagggcugccccua

SEQ ID NO: 1763562 - RNA, 11 nt, Human
gccagggcugc

SEQ ID NO: 1763563 - RNA, 15 nt, Human
gccaguccugcuacc

SEQ ID NO: 1763564 - RNA, 22 nt, Human
gccaguccugcuaccucccuug

SEQ ID NO: 1763565 - RNA, 19 nt, Human
gccauccagguucagcuug

SEQ ID NO: 1763566 - RNA, 20 nt, Human
gccauccagguucagcuugu

SEQ ID NO: 1763567 - RNA, 12 nt, Human
gccauugugaac

SEQ ID NO: 1763568 - RNA, 17 nt, Human
gccauugugaaccaaug

SEQ ID NO: 1763569 - RNA, 19 nt, Human
gccauugugaaccaaugca

SEQ ID NO: 1763570 - RNA, 19 nt, Human
gcccacaggaucagucuga

SEQ ID NO: 1763571 - RNA, 13 nt, Human
gcccacaggauca

SEQ ID NO: 1763572 - RNA, 18 nt, Human
gcccacaggaucagucug

SEQ ID NO: 1763573 - RNA, 23 nt, Human
gcccacaaaggcaaaggguccag

SEQ ID NO: 1763574 - RNA, 22 nt, Human
gcccacaaucccuuucuaagga

SEQ ID NO: 1763575 - RNA, 14 nt, Human
gcccaucucaggac

SEQ ID NO: 1763576 - RNA, 12 nt, Human
gccccagcccag

SEQ ID NO: 1763577 - RNA, 13 nt, Human
gccccagcccaga

SEQ ID NO: 1763578 - RNA, 14 nt, Human
gccccagcccagau

SEQ ID NO: 1763579 - RNA, 11 nt, Human
gccccagccug

SEQ ID NO: 1763580 - RNA, 12 nt, Human
gccccagccugc

SEQ ID NO: 1763581 - RNA, 13 nt, Human
gccccagccugcu

SEQ ID NO: 1763582 - RNA, 14 nt, Human
gccccagccugcua

SEQ ID NO: 1763583 - RNA, 15 nt, Human
gccccagccugcuag

SEQ ID NO: 1763584 - RNA, 17 nt, Human
gccccagccugcuagcu

SEQ ID NO: 1763585 - RNA, 15 nt, Human
gccccaggaaaggcc

SEQ ID NO: 1763586 - RNA, 22 nt, Human
gccccaggaaaggcccagccac

SEQ ID NO: 1763587 - RNA, 22 nt, Human
gccccagccugcuagcuagcuc

SEQ ID NO: 1763588 - RNA, 16 nt, Human
gccccagugcccacag

SEQ ID NO: 1763589 - RNA, 17 nt, Human
gccccagugcccacagg

SEQ ID NO: 1763590 - RNA, 21 nt, Human
gccccagugcccacaggauca

SEQ ID NO: 1763591 - RNA, 12 nt, Human
gccccaucuccc

SEQ ID NO: 1763592 - RNA, 17 nt, Human
gccccaucuccccucag

SEQ ID NO: 1763593 - RNA, 18 nt, Human
gccccaucuccccucagc

SEQ ID NO: 1763594 - RNA, 19 nt, Human
gccccaucuccccucagcu

SEQ ID NO: 1763595 - RNA, 21 nt, Human
gccccaucuccccucagcucg

SEQ ID NO: 1763596 - RNA, 20 nt, Human
gccccaucuccccucagcuc

SEQ ID NO: 1763597 - RNA, 17 nt, Human
gccccauucugccugcc

SEQ ID NO: 1763598 - RNA, 18 nt, Human
gccccauucugccugccc

SEQ ID NO: 1763599 - RNA, 20 nt, Human
gccccauucugccugcccag

SEQ ID NO: 1763600 - RNA, 21 nt, Human
gccccauucugccugcccagg

SEQ ID NO: 1763601 - RNA, 18 nt, Human
gcccauccccaggcaccu

SEQ ID NO: 1763602 - RNA, 14 nt, Human
gcccagucuguuga

SEQ ID NO: 1763603 - RNA, 15 nt, Human
gcccagucuguugag

SEQ ID NO: 1763604 - RNA, 22 nt, Human
gcccagucuggaaugcaguggu

SEQ ID NO: 1763605 - RNA, 21 nt, Human
gcccaggugaguccuagagcu

SEQ ID NO: 1763606 - RNA, 16 nt, Human
gcccaggcuggcgugc

SEQ ID NO: 1763607 - RNA, 14 nt, Human
gcccaggcuggcgu

SEQ ID NO: 1763608 - RNA, 15 nt, Human
gcccaggcuggcgug

SEQ ID NO: 1763609 - RNA, 11 nt, Human
gcccaggcugg

SEQ ID NO: 1763610 - RNA, 13 nt, Human
gcccagcucugaa

SEQ ID NO: 1763611 - RNA, 20 nt, Human
gcccagcuauaccugugccu

SEQ ID NO: 1763612 - RNA, 17 nt, Human
gcccgcgccacaggacc

SEQ ID NO: 1763613 - RNA, 23 nt, Human
gcccgcgccacaggacccucgcc

SEQ ID NO: 1763614 - RNA, 13 nt, Human
gcccggcuccagg

SEQ ID NO: 1763615 - RNA, 14 nt, Human
gcccggcuccaggc

SEQ ID NO: 1763616 - RNA, 15 nt, Human
gcccggcuccaggcu

SEQ ID NO: 1763617 - RNA, 22 nt, Human
gcccuccccuccggacuggugc

SEQ ID NO: 1763618 - RNA, 23 nt, Human
gcccuccccuccggacuggugcc

SEQ ID NO: 1763619 - RNA, 18 nt, Human
gccccuagccgguuccug

SEQ ID NO: 1763620 - RNA, 19 nt, Human
gccccuagccgguuccugu

SEQ ID NO: 1763621 - RNA, 13 nt, Human
gccccuacugcug

SEQ ID NO: 1763622 - RNA, 14 nt, Human
gccccuacugcugu

SEQ ID NO: 1763623 - RNA, 15 nt, Human
gccccuacugcugug

SEQ ID NO: 1763624 - RNA, 19 nt, Human
gccccuacugcugugaacc

SEQ ID NO: 1763625 - RNA, 15 nt, Human
gccccuaaucucugu

SEQ ID NO: 1763626 - RNA, 17 nt, Human
gccccuaaucucuguag

SEQ ID NO: 1763627 - RNA, 19 nt, Human
gccccuaaucucuguagga

SEQ ID NO: 1763628 - RNA, 20 nt, Human
gccccuagccgguuccuguc

SEQ ID NO: 1763629 - RNA, 22 nt, Human
gccccauucugccugcccaggc

SEQ ID NO: 1763630 - RNA, 23 nt, Human
gccccauucugccugcccaggcc

SEQ ID NO: 1763631 - RNA, 23 nt, Human
gccccgaggccuucucugaagga

SEQ ID NO: 1763632 - RNA, 17 nt, Human
gccccgguggcugggca

SEQ ID NO: 1763633 - RNA, 18 nt, Human
gccccgguggcugggcag

SEQ ID NO: 1763634 - RNA, 19 nt, Human
gccccgguggcugggcaga

SEQ ID NO: 1763635 - RNA, 17 nt, Human
gccgauucaccugagca

SEQ ID NO: 1763636 - RNA, 17 nt, Human
gccgauuucuguaaacu

SEQ ID NO: 1763637 - RNA, 14 nt, Human
gccgggucugccuc

SEQ ID NO: 1763638 - RNA, 21 nt, Human
gccgggucugccucuucuggg

SEQ ID NO: 1763639 - RNA, 22 nt, Human
gccucaagugauucuccugccu

SEQ ID NO: 1763640 - RNA, 24 nt, Human
gccucaagugauucuccugccuca

SEQ ID NO: 1763641 - RNA, 18 nt, Human
gccucagcauccuggcac

SEQ ID NO: 1763642 - RNA, 21 nt, Human
gccucagcauccuggcacccg

SEQ ID NO: 1763643 - RNA, 13 nt, Human
gccuauuugugug

SEQ ID NO: 1763644 - RNA, 23 nt, Human
gccggggccuuaucgggcuccag

SEQ ID NO: 1763645 - RNA, 12 nt, Human
gccucagccucc

SEQ ID NO: 1763646 - RNA, 14 nt, Human
gccucagccuccca

SEQ ID NO: 1763647 - RNA, 22 nt, Human
gccucagccucccaaagugcug

SEQ ID NO: 1763648 - RNA, 18 nt, Human
gccucccgaauagcuggg

SEQ ID NO: 1763649 - RNA, 19 nt, Human
gccucccgaauagcuggga

SEQ ID NO: 1763650 - RNA, 21 nt, Human
gccucccgaguagcugggacu

SEQ ID NO: 1763651 - RNA, 23 nt, Human
gccucccgaguagcugggacuac

SEQ ID NO: 1763652 - RNA, 20 nt, Human
gccucccgaauagcugggac

SEQ ID NO: 1763653 - RNA, 11 nt, Human
gccugcccagg

SEQ ID NO: 1763654 - RNA, 12 nt, Human
gccugcccaggc

SEQ ID NO: 1763655 - RNA, 17 nt, Human
gccugcuggaagcccag

SEQ ID NO: 1763656 - RNA, 18 nt, Human
gccugcuggaagcccagc

SEQ ID NO: 1763657 - RNA, 19 nt, Human
gccugcuggaagcccagcc

SEQ ID NO: 1763658 - RNA, 13 nt, Human
gccugcuggaggc

SEQ ID NO: 1763659 - RNA, 15 nt, Human
gccugcuggaggccu

SEQ ID NO: 1763660 - RNA, 17 nt, Human
gccugcuggaggccuca

SEQ ID NO: 1763661 - RNA, 18 nt, Human
gccugcuggaggccucag

SEQ ID NO: 1763662 - RNA, 19 nt, Human
gccugcuggaggccucagg

SEQ ID NO: 1763663 - RNA, 23 nt, Human
gccugcuggaggccucaggugcu

SEQ ID NO: 1763664 - RNA, 14 nt, Human
gccugcaggaccug

SEQ ID NO: 1763665 - RNA, 16 nt, Human
gccugcaggaccugcc

SEQ ID NO: 1763666 - RNA, 17 nt, Human
gccugcaggaccugccu

SEQ ID NO: 1763667 - RNA, 18 nt, Human
gccugcaggaccugccug

SEQ ID NO: 1763668 - RNA, 19 nt, Human
gccugcaggaccugccugu

SEQ ID NO: 1763669 - RNA, 20 nt, Human
gccugcaggaccugccugua

SEQ ID NO: 1763670 - RNA, 21 nt, Human
gccugcaggaccugccuguag

SEQ ID NO: 1763671 - RNA, 14 nt, Human
gccugagccuggcc

SEQ ID NO: 1763672 - RNA, 13 nt, Human
gccugcagcagga

SEQ ID NO: 1763673 - RNA, 14 nt, Human
gccugaaaggagcc

SEQ ID NO: 1763674 - RNA, 17 nt, Human
gccugaaaggagcccuu

SEQ ID NO: 1763675 - RNA, 23 nt, Human
gccugaaaggagcccuuaucugu

SEQ ID NO: 1763676 - RNA, 15 nt, Human
gccugaacagaagcu

SEQ ID NO: 1763677 - RNA, 20 nt, Human
gccugaacagaagcucuuac

SEQ ID NO: 1763678 - RNA, 15 nt, Human
gccugaagucacaca

SEQ ID NO: 1763679 - RNA, 15 nt, Human
gccugaagccagcug

SEQ ID NO: 1763680 - RNA, 16 nt, Human
gccugaagccagcugc

SEQ ID NO: 1763681 - RNA, 20 nt, Human
gccugagagucagcucucug

SEQ ID NO: 1763682 - RNA, 16 nt, Human
gccucugacacacagc

SEQ ID NO: 1763683 - RNA, 15 nt, Human
gccucugacacacag

SEQ ID NO: 1763684 - RNA, 20 nt, Human
gcgccuacaggagugagcac

SEQ ID NO: 1763685 - RNA, 21 nt, Human
gcgccuacaggagugagcacu

SEQ ID NO: 1763686 - RNA, 23 nt, Human
gcgcugccccaucuccccucagc

SEQ ID NO: 1763687 - RNA, 13 nt, Human
gcgccaguccugc

SEQ ID NO: 1763688 - RNA, 14 nt, Human
gcgccaguccugcu

SEQ ID NO: 1763689 - RNA, 22 nt, Human
gcgacguuagucgugagcucuu

SEQ ID NO: 1763690 - RNA, 21 nt, Human
gcgacguuagucgugagcucu

SEQ ID NO: 1763691 - RNA, 17 nt, Human
gcgacuaaacuagauuu

SEQ ID NO: 1763692 - RNA, 19 nt, Human
gcggaaugaaccacaucuu

SEQ ID NO: 1763693 - RNA, 19 nt, Human
gcggacagccacggccagg

SEQ ID NO: 1763694 - RNA, 23 nt, Human
gcggacagccacggccaggccag

SEQ ID NO: 1763695 - RNA, 19 nt, Human
gcggggacagcuccuucug

SEQ ID NO: 1763696 - RNA, 23 nt, Human
gcggggacagcuccuucuguccu

SEQ ID NO: 1763697 - RNA, 23 nt, Human
gcgguccacccaggagccccgag

SEQ ID NO: 1763698 - RNA, 14 nt, Human
gcguccuccucugu

SEQ ID NO: 1763699 - RNA, 15 nt, Human
gcguccuccucugug

SEQ ID NO: 1763700 - RNA, 16 nt, Human
gcguccuccucuguga

SEQ ID NO: 1763701 - RNA, 17 nt, Human
gcuacacccuuuuccag

SEQ ID NO: 1763702 - RNA, 19 nt, Human
gcuacacccuuuuccagcu

SEQ ID NO: 1763703 - RNA, 14 nt, Human
gcgugagccacugc

SEQ ID NO: 1763704 - RNA, 16 nt, Human
gcgugagccacugcac

SEQ ID NO: 1763705 - RNA, 15 nt, Human
gcgugagccacugca

SEQ ID NO: 1763706 - RNA, 21 nt, Human
gcuaccaacuuguauccaggc

SEQ ID NO: 1763707 - RNA, 12 nt, Human
gcuacccugagc

SEQ ID NO: 1763708 - RNA, 14 nt, Human
gcuacccugagcug

SEQ ID NO: 1763709 - RNA, 16 nt, Human
gcuacccugagcugag

SEQ ID NO: 1763710 - RNA, 20 nt, Human
gcuacccugagcugaggcag

SEQ ID NO: 1763711 - RNA, 19 nt, Human
gcuacccugagcugaggca

SEQ ID NO: 1763712 - RNA, 20 nt, Human
gccuuagaagucacacagua

SEQ ID NO: 1763713 - RNA, 19 nt, Human
gccuuauuagagugucuuu

SEQ ID NO: 1763714 - RNA, 12 nt, Human
gccuuagcuuca

SEQ ID NO: 1763715 - RNA, 14 nt, Human
gccuuagcuucagg

SEQ ID NO: 1763716 - RNA, 15 nt, Human
gccuuagcuucagga

SEQ ID NO: 1763717 - RNA, 16 nt, Human
gccuuagcuucaggaa

SEQ ID NO: 1763718 - RNA, 17 nt, Human
gccuuagcuucaggaac

SEQ ID NO: 1763719 - RNA, 18 nt, Human
gccuuagcuucaggaacc

SEQ ID NO: 1763720 - RNA, 19 nt, Human
gccuuagcuucaggaaccu

SEQ ID NO: 1763721 - RNA, 15 nt, Human
gccugguggcagcug

SEQ ID NO: 1763722 - RNA, 16 nt, Human
gccugguggcagcugc

SEQ ID NO: 1763723 - RNA, 17 nt, Human
gccugguggcagcugcg

SEQ ID NO: 1763724 - RNA, 22 nt, Human
gccuucacacagauagaccuuu

SEQ ID NO: 1763725 - RNA, 21 nt, Human
gccuuuaaaauuuuuuuagaa

SEQ ID NO: 1763726 - RNA, 14 nt, Human
gccuuuagaaaaua

SEQ ID NO: 1763727 - RNA, 13 nt, Human
gccuuuauugugu

SEQ ID NO: 1763728 - RNA, 20 nt, Human
gccuuuauuguguuugucau

SEQ ID NO: 1763729 - RNA, 14 nt, Human
gccuuuauuguguu

SEQ ID NO: 1763730 - RNA, 23 nt, Human
gccuuuauuguguuugucauuag

SEQ ID NO: 1763731 - RNA, 22 nt, Human
gccuuuauuguguuugucauua

SEQ ID NO: 1763732 - RNA, 21 nt, Human
ggucucacuauguugcccagg

SEQ ID NO: 1763733 - RNA, 22 nt, Human
ggucucacucugucgcccaguc

SEQ ID NO: 1763734 - RNA, 23 nt, Human
ggucucacucugucgcccagucu

SEQ ID NO: 1763735 - RNA, 14 nt, Human
ggucugacccacug

SEQ ID NO: 1763736 - RNA, 23 nt, Human
ggucugccucuucugggagggca

SEQ ID NO: 1763737 - RNA, 21 nt, Human
ggugacgggacucaggcggga

SEQ ID NO: 1763738 - RNA, 15 nt, Human
ggugcugccauccag

SEQ ID NO: 1763739 - RNA, 21 nt, Human
ggugcugccauccagguucag

SEQ ID NO: 1763740 - RNA, 19 nt, Human
gguggcagugggagcugcc

SEQ ID NO: 1763741 - RNA, 22 nt, Human
gguggcagugggagcugccugu

SEQ ID NO: 1763742 - RNA, 15 nt, Human
ggugcgaucuggguu

SEQ ID NO: 1763743 - RNA, 23 nt, Human
ggugcuacacccuuuuccagcug

SEQ ID NO: 1763744 - RNA, 15 nt, Human
ggugcuacgccugca

SEQ ID NO: 1763745 - RNA, 22 nt, Human
ggugcuacacccuuuuccagcu

SEQ ID NO: 1763746 - RNA, 16 nt, Human
ggugagaggggaacag

SEQ ID NO: 1763747 - RNA, 16 nt, Human
gguggugaccucugcc

SEQ ID NO: 1763748 - RNA, 14 nt, Human
gguggugaccucug

SEQ ID NO: 1763749 - RNA, 15 nt, Human
gguggugaccucugc

SEQ ID NO: 1763750 - RNA, 14 nt, Human
gguggguauaaaag

SEQ ID NO: 1763751 - RNA, 10 nt, Human
ggugggucca

SEQ ID NO: 1763752 - RNA, 14 nt, Human
gguggguccauggg

SEQ ID NO: 1763753 - RNA, 11 nt, Human
gguggcugggc

SEQ ID NO: 1763754 - RNA, 12 nt, Human
gguggcugggca

SEQ ID NO: 1763755 - RNA, 13 nt, Human
gguggcugggcag

SEQ ID NO: 1763756 - RNA, 17 nt, Human
gguggguccaugggcag

SEQ ID NO: 1763757 - RNA, 20 nt, Human
gguggguccaugggcagagc

SEQ ID NO: 1763758 - RNA, 18 nt, Human
ggugggucccggcucugu

SEQ ID NO: 1763759 - RNA, 19 nt, Human
ggugggucccggcucugug

SEQ ID NO: 1763760 - RNA, 20 nt, Human
ggugggucccggcucugugg

SEQ ID NO: 1763761 - RNA, 19 nt, Human
ggugucaccugaagacuca

SEQ ID NO: 1763762 - RNA, 14 nt, Human
gguguaauggagca

SEQ ID NO: 1763763 - RNA, 21 nt, Human
gguguccagcauugcuggacu

SEQ ID NO: 1763764 - RNA, 19 nt, Human
ggugucaagagggucugag

SEQ ID NO: 1763765 - RNA, 17 nt, Human
ggugucaagagggucug

SEQ ID NO: 1763766 - RNA, 23 nt, Human
gguguagcucuuagaggaaggag

SEQ ID NO: 1763767 - RNA, 22 nt, Human
gguuagacagccaaaggcuggc

SEQ ID NO: 1763768 - RNA, 15 nt, Human
gguuaauaccagcuu

SEQ ID NO: 1763769 - RNA, 22 nt, Human
gguuaacccuucaucuuccugu

SEQ ID NO: 1763770 - RNA, 13 nt, Human
gguuaaggccuga

SEQ ID NO: 1763771 - RNA, 14 nt, Human
gguuaaggccugaa

SEQ ID NO: 1763772 - RNA, 15 nt, Human
gguguccugccuguc

SEQ ID NO: 1763773 - RNA, 18 nt, Human
gguguccugccugucugc

SEQ ID NO: 1763774 - RNA, 19 nt, Human
gguguccugccugucugcc

SEQ ID NO: 1763775 - RNA, 20 nt, Human
gguguccugccugucugccc

SEQ ID NO: 1763776 - RNA, 21 nt, Human
gguguccugccugucugcccc

SEQ ID NO: 1763777 - RNA, 20 nt, Human
gguucacgugcagcucaagg

SEQ ID NO: 1763778 - RNA, 15 nt, Human
gguucacuaaagcag

SEQ ID NO: 1763779 - RNA, 11 nt, Human
gguugaggaaa

SEQ ID NO: 1763780 - RNA, 23 nt, Human
gguauuguauuuauucaauaaag

SEQ ID NO: 1763781 - RNA, 22 nt, Human
gguauuguauuuauucaauaaa

SEQ ID NO: 1763782 - RNA, 20 nt, Human
gguauuguauuuauucaaua

SEQ ID NO: 1763783 - RNA, 19 nt, Human
gguauuguauuuauucaau

SEQ ID NO: 1763784 - RNA, 11 nt, Human
gguacccacug

SEQ ID NO: 1763785 - RNA, 16 nt, Human
gguacccacugcucug

SEQ ID NO: 1763786 - RNA, 13 nt, Human
gguacccacugcu

SEQ ID NO: 1763787 - RNA, 20 nt, Human
gguacuuguggacacagcuc

SEQ ID NO: 1763788 - RNA, 16 nt, Human
gguacuuguggacaca

SEQ ID NO: 1763789 - RNA, 17 nt, Human
gguacuuguggacacag

SEQ ID NO: 1763790 - RNA, 11 nt, Human
ggucagagccu

SEQ ID NO: 1763791 - RNA, 15 nt, Human
ggucagaaacaggac

SEQ ID NO: 1763792 - RNA, 16 nt, Human
ggucagaaacaggacc

SEQ ID NO: 1763793 - RNA, 17 nt, Human
ggucagaaacaggaccg

SEQ ID NO: 1763794 - RNA, 18 nt, Human
ggucagaaacaggaccgg

SEQ ID NO: 1763795 - RNA, 12 nt, Human
gggugaaggcug

SEQ ID NO: 1763796 - RNA, 13 nt, Human
gggugaaggcugg

SEQ ID NO: 1763797 - RNA, 14 nt, Human
gggugaaggcuggc

SEQ ID NO: 1763798 - RNA, 15 nt, Human
gggugaaggcuggca

SEQ ID NO: 1763799 - RNA, 20 nt, Human
gggucuguaaaaucuuucuu

SEQ ID NO: 1763800 - RNA, 17 nt, Human
gggucuguaaaaucuuu

SEQ ID NO: 1763801 - RNA, 16 nt, Human
gggucuguaaaaucuu

SEQ ID NO: 1763802 - RNA, 15 nt, Human
gggucuguaaaaucu

SEQ ID NO: 1763803 - RNA, 21 nt, Human
gggucuguaaaaucuuucuuu

SEQ ID NO: 1763804 - RNA, 18 nt, Human
gggugacgggacucaggc

SEQ ID NO: 1763805 - RNA, 22 nt, Human
gggugacgggacucaggcggga

SEQ ID NO: 1763806 - RNA, 15 nt, Human
gggugauggggaggg

SEQ ID NO: 1763807 - RNA, 11 nt, Human
ggguguggguu

SEQ ID NO: 1763808 - RNA, 22 nt, Human
ggguucaagcgauucuucugcu

SEQ ID NO: 1763809 - RNA, 14 nt, Human
ggguuaaggccuga

SEQ ID NO: 1763810 - RNA, 15 nt, Human
ggguuaaggccugaa

SEQ ID NO: 1763811 - RNA, 22 nt, Human
ggguuaacccuucaucuuccug

SEQ ID NO: 1763812 - RNA, 23 nt, Human
ggguucaagcgauucuucugcuu

SEQ ID NO: 1763813 - RNA, 20 nt, Human
ggguugcuguauaaguuauu

SEQ ID NO: 1763814 - RNA, 14 nt, Human
ggggagggcugcga

SEQ ID NO: 1763815 - RNA, 15 nt, Human
gggguggguauaaaa

SEQ ID NO: 1763816 - RNA, 14 nt, Human
ggggugcuuccuug

SEQ ID NO: 1763817 - RNA, 16 nt, Human
ggggugcuuccuugua

SEQ ID NO: 1763818 - RNA, 12 nt, Human
gggucugaggaa

SEQ ID NO: 1763819 - RNA, 21 nt, Human
gggucugaggaauccagaccc

SEQ ID NO: 1763820 - RNA, 14 nt, Human
gggucuguaaaauc

SEQ ID NO: 1763821 - RNA, 13 nt, Human
gggucuguaaaau

SEQ ID NO: 1763822 - RNA, 14 nt, Human
gggucucacucugu

SEQ ID NO: 1763823 - RNA, 19 nt, Human
gggguuuccuggcacugga

SEQ ID NO: 1763824 - RNA, 11 nt, Human
gggguggguca

SEQ ID NO: 1763825 - RNA, 13 nt, Human
gggcccaucucuu

SEQ ID NO: 1763826 - RNA, 13 nt, Human
gggccccccugcc

SEQ ID NO: 1763827 - RNA, 15 nt, Human
gggccccccugcccu

SEQ ID NO: 1763828 - RNA, 17 nt, Human
gggccccccugcccugu

SEQ ID NO: 1763829 - RNA, 14 nt, Human
gggcccucucuucu

SEQ ID NO: 1763830 - RNA, 21 nt, Human
gggccugggacuuccaugccu

SEQ ID NO: 1763831 - RNA, 16 nt, Human
gggcaucuugcuggcu

SEQ ID NO: 1763832 - RNA, 17 nt, Human
gggcaucuugcuggcua

SEQ ID NO: 1763833 - RNA, 17 nt, Human
gggcagucauuauccag

SEQ ID NO: 1763834 - RNA, 23 nt, Human
gggccacagagaaaguacuucuc

SEQ ID NO: 1763835 - RNA, 19 nt, Human
gggccacaugggaggcuca

SEQ ID NO: 1763836 - RNA, 16 nt, Human
gggccacagagaaagu

SEQ ID NO: 1763837 - RNA, 13 nt, Human
gggccaagcccag

SEQ ID NO: 1763838 - RNA, 15 nt, Human
gggccaaacgcugag

SEQ ID NO: 1763839 - RNA, 17 nt, Human
gggccaaacgcugagcc

SEQ ID NO: 1763840 - RNA, 18 nt, Human
gggccaaacgcugagcca

SEQ ID NO: 1763841 - RNA, 17 nt, Human
gggcccagagagggugg

SEQ ID NO: 1763842 - RNA, 22 nt, Human
gggauacuuuagaaguagaauu

SEQ ID NO: 1763843 - RNA, 14 nt, Human
gggcaauuuagaaa

SEQ ID NO: 1763844 - RNA, 18 nt, Human
gggcaauuuagaaaaaga

SEQ ID NO: 1763845 - RNA, 20 nt, Human
gggcaaggguuaaggccuga

SEQ ID NO: 1763846 - RNA, 20 nt, Human
gggcaagcuccgcaggacuu

SEQ ID NO: 1763847 - RNA, 13 nt, Human
gggauagagagag

SEQ ID NO: 1763848 - RNA, 17 nt, Human
gggacuccggcugugcu

SEQ ID NO: 1763849 - RNA, 18 nt, Human
gggacuccggcugugcug

SEQ ID NO: 1763850 - RNA, 19 nt, Human
gggacuccggcugugcugg

SEQ ID NO: 1763851 - RNA, 20 nt, Human
gggacuccggcugugcuggg

SEQ ID NO: 1763852 - RNA, 16 nt, Human
gggaggugaccccagg

SEQ ID NO: 1763853 - RNA, 18 nt, Human
gggagugacagaggcagc

SEQ ID NO: 1763854 - RNA, 11 nt, Human
gggagugagcu

SEQ ID NO: 1763855 - RNA, 14 nt, Human
gggagugagcuggu

SEQ ID NO: 1763856 - RNA, 22 nt, Human
gggcaggugcuggagcacuggg

SEQ ID NO: 1763857 - RNA, 11 nt, Human
gggcagggcug

SEQ ID NO: 1763858 - RNA, 12 nt, Human
gggcagggcugu

SEQ ID NO: 1763859 - RNA, 16 nt, Human
gggcagggcugugcuu

SEQ ID NO: 1763860 - RNA, 20 nt, Human
gggcacucagaagacacuga

SEQ ID NO: 1763861 - RNA, 12 nt, Human
gggcaccugcca

SEQ ID NO: 1763862 - RNA, 16 nt, Human
gggcacucagaagaca

SEQ ID NO: 1763863 - RNA, 19 nt, Human
gggcacucagaagacacug

SEQ ID NO: 1763864 - RNA, 23 nt, Human
gggcacaccgggcacucagaaga

SEQ ID NO: 1763865 - RNA, 12 nt, Human
ggcugcagggag

SEQ ID NO: 1763866 - RNA, 13 nt, Human
ggcugcagggagu

SEQ ID NO: 1763867 - RNA, 20 nt, Human
ggccccugcccggcugcgga

SEQ ID NO: 1763868 - RNA, 16 nt, Human
ggccccugcccggcug

SEQ ID NO: 1763869 - RNA, 17 nt, Human
ggccccugcccggcugc

SEQ ID NO: 1763870 - RNA, 16 nt, Human
ggcugagggagccugg

SEQ ID NO: 1763871 - RNA, 12 nt, Human
ggcugagggccu

SEQ ID NO: 1763872 - RNA, 13 nt, Human
ggcugagggccug

SEQ ID NO: 1763873 - RNA, 14 nt, Human
ggcugagggccugc

SEQ ID NO: 1763874 - RNA, 15 nt, Human
ggcugagggccugcu

SEQ ID NO: 1763875 - RNA, 16 nt, Human
ggcugagggccugcug

SEQ ID NO: 1763876 - RNA, 17 nt, Human
ggcugagggccugcugg

SEQ ID NO: 1763877 - RNA, 18 nt, Human
ggcugagggccugcugga

SEQ ID NO: 1763878 - RNA, 21 nt, Human
ggcugagggccugcuggaggc

SEQ ID NO: 1763879 - RNA, 24 nt, Human
ggcugcaaaggguaucaggugcug

SEQ ID NO: 1763880 - RNA, 22 nt, Human
ggcugcaaaggguaucaggugc

SEQ ID NO: 1763881 - RNA, 23 nt, Human
ggcugcaaaggguaucaggugcu

SEQ ID NO: 1763882 - RNA, 18 nt, Human
ggcugcaaaggguaucag

SEQ ID NO: 1763883 - RNA, 18 nt, Human
ggcugggcuucaguggca

SEQ ID NO: 1763884 - RNA, 13 nt, Human
ggcugggcuucag

SEQ ID NO: 1763885 - RNA, 17 nt, Human
ggcugggcuucaguggc

SEQ ID NO: 1763886 - RNA, 12 nt, Human
ggcugggcuuca

SEQ ID NO: 1763887 - RNA, 14 nt, Human
ggcuuuucucagcu

SEQ ID NO: 1763888 - RNA, 15 nt, Human
ggcuuuucucagcug

SEQ ID NO: 1763889 - RNA, 22 nt, Human
ggcuugaguuuaaauuguaaua

SEQ ID NO: 1763890 - RNA, 21 nt, Human
ggcuuuauccucuuuagaguu

SEQ ID NO: 1763891 - RNA, 20 nt, Human
ggcuuuauccucuuuagagu

SEQ ID NO: 1763892 - RNA, 18 nt, Human
ggcuuuauccucuuuaga

SEQ ID NO: 1763893 - RNA, 15 nt, Human
ggcuuuauccucuuu

SEQ ID NO: 1763894 - RNA, 14 nt, Human
ggcuuuauccucuu

SEQ ID NO: 1763895 - RNA, 17 nt, Human
gggacuacaggcaccca

SEQ ID NO: 1763896 - RNA, 16 nt, Human
gggacucaaugcacug

SEQ ID NO: 1763897 - RNA, 19 nt, Human
gcugggacuacagguguga

SEQ ID NO: 1763898 - RNA, 13 nt, Human
gcugggacuacag

SEQ ID NO: 1763899 - RNA, 18 nt, Human
gcugggacuacaggcacc

SEQ ID NO: 1763900 - RNA, 19 nt, Human
gcugggacuacaggcaccc

SEQ ID NO: 1763901 - RNA, 20 nt, Human
gcugggacuacaggcaccca

SEQ ID NO: 1763902 - RNA, 18 nt, Human
gcuggaccuugaacuggg

SEQ ID NO: 1763903 - RNA, 21 nt, Human
gcuggaccuugaacuggguac

SEQ ID NO: 1763904 - RNA, 22 nt, Human
gcuggaccuugaacuggguacu

SEQ ID NO: 1763905 - RNA, 20 nt, Human
gcuggaugagaauuugagug

SEQ ID NO: 1763906 - RNA, 15 nt, Human
gcuggaugauggucu

SEQ ID NO: 1763907 - RNA, 19 nt, Human
gcugcgguccacccaggag

SEQ ID NO: 1763908 - RNA, 17 nt, Human
gcugcgguccacccagg

SEQ ID NO: 1763909 - RNA, 18 nt, Human
gcugcgguccacccagga

SEQ ID NO: 1763910 - RNA, 18 nt, Human
gcugcgacgcuugcucug

SEQ ID NO: 1763911 - RNA, 18 nt, Human
gcugggcuucaguggcag

SEQ ID NO: 1763912 - RNA, 19 nt, Human
gcugggcuucaguggcagc

SEQ ID NO: 1763913 - RNA, 13 nt, Human
gcugggggccuca

SEQ ID NO: 1763914 - RNA, 15 nt, Human
gcuggucccacucag

SEQ ID NO: 1763915 - RNA, 19 nt, Human
gcuggucccacucagucca

SEQ ID NO: 1763916 - RNA, 19 nt, Human
gcugggggccucagugcca

SEQ ID NO: 1763917 - RNA, 20 nt, Human
gcugggggccucagugccac

SEQ ID NO: 1763918 - RNA, 17 nt, Human
gcugggcuucaguggca

SEQ ID NO: 1763919 - RNA, 23 nt, Human
gcugucuuguugcggauggaugg

SEQ ID NO: 1763920 - RNA, 15 nt, Human
gcugguucaggguug

SEQ ID NO: 1763921 - RNA, 13 nt, Human
gcuguauuuugaa

SEQ ID NO: 1763922 - RNA, 22 nt, Human
gcugguucaggguuggccccug

SEQ ID NO: 1763923 - RNA, 16 nt, Human
gcuggugucaccugaa

SEQ ID NO: 1763924 - RNA, 18 nt, Human
gcuggugucaccugaaga

SEQ ID NO: 1763925 - RNA, 20 nt, Human
gcuggucccacucaguccau

SEQ ID NO: 1763926 - RNA, 16 nt, Human
gcugguggacccaggg

SEQ ID NO: 1763927 - RNA, 21 nt, Human
gcugguggacccagggaacag

SEQ ID NO: 1763928 - RNA, 14 nt, Human
gcugguggcagagu

SEQ ID NO: 1763929 - RNA, 14 nt, Human
gcuucucucugugg

SEQ ID NO: 1763930 - RNA, 16 nt, Human
gcuucucucuguggga

SEQ ID NO: 1763931 - RNA, 18 nt, Human
gcuucuguggggccccuc

SEQ ID NO: 1763932 - RNA, 11 nt, Human
gcuucugucuc

SEQ ID NO: 1763933 - RNA, 12 nt, Human
gcuucugucucc

SEQ ID NO: 1763934 - RNA, 13 nt, Human
gcuucugucucca

SEQ ID NO: 1763935 - RNA, 15 nt, Human
gcuucugucuccagc

SEQ ID NO: 1763936 - RNA, 13 nt, Human
gcuugauacagga

SEQ ID NO: 1763937 - RNA, 15 nt, Human
gcuuuggcagugcca

SEQ ID NO: 1763938 - RNA, 16 nt, Human
gcuuuggcagugccau

SEQ ID NO: 1763939 - RNA, 19 nt, Human
gcuuuauccucuuuagagu

SEQ ID NO: 1763940 - RNA, 17 nt, Human
gcuuuauccucuuuaga

SEQ ID NO: 1763941 - RNA, 16 nt, Human
gcuuuauccucuuuag

SEQ ID NO: 1763942 - RNA, 15 nt, Human
gcuuuauccucuuua

SEQ ID NO: 1763943 - RNA, 20 nt, Human
gcuuuauccucuuuagaguu

SEQ ID NO: 1763944 - RNA, 16 nt, Human
gcuuggagcagagggg

SEQ ID NO: 1763945 - RNA, 18 nt, Human
gcuuggagcagaggggcu

SEQ ID NO: 1763946 - RNA, 13 nt, Human
ggaaaaauaaaca

SEQ ID NO: 1763947 - RNA, 17 nt, Human
ggaaaagaaagaaguua

SEQ ID NO: 1763948 - RNA, 20 nt, Human
gcuuuuaaugaaaaggaauc

SEQ ID NO: 1763949 - RNA, 20 nt, Human
ggaaaaaauaacaaugaaag

SEQ ID NO: 1763950 - RNA, 19 nt, Human
ggaagaggcuacagggcca

SEQ ID NO: 1763951 - RNA, 19 nt, Human
ggaagagugacucuccagg

SEQ ID NO: 1763952 - RNA, 20 nt, Human
ggaagagugacucuccaggg

SEQ ID NO: 1763953 - RNA, 15 nt, Human
ggaagagcccagucu

SEQ ID NO: 1763954 - RNA, 16 nt, Human
ggaagagcccagucug

SEQ ID NO: 1763955 - RNA, 20 nt, Human
ggaagagcccagucuguuga

SEQ ID NO: 1763956 - RNA, 17 nt, Human
ggaagcacagcuucauu

SEQ ID NO: 1763957 - RNA, 17 nt, Human
ggaagauuuggaagcuc

SEQ ID NO: 1763958 - RNA, 19 nt, Human
ggaagaucucugcagggcc

SEQ ID NO: 1763959 - RNA, 20 nt, Human
ggaagaucucugcagggccg

SEQ ID NO: 1763960 - RNA, 17 nt, Human
ggaacagacuggaagca

SEQ ID NO: 1763961 - RNA, 21 nt, Human
ggaaagucauuggcuuuaucc

SEQ ID NO: 1763962 - RNA, 16 nt, Human
ggaaagucauuggcuu

SEQ ID NO: 1763963 - RNA, 19 nt, Human
ggaacagacuggaagcaca

SEQ ID NO: 1763964 - RNA, 20 nt, Human
ggaacagacuggaagcacag

SEQ ID NO: 1763965 - RNA, 24 nt, Human
ggaacccuuacaguaggagcccag

SEQ ID NO: 1763966 - RNA, 21 nt, Human
ggaaccgugguaugucugcca

SEQ ID NO: 1763967 - RNA, 16 nt, Human
ggaaccguaggaccca

SEQ ID NO: 1763968 - RNA, 21 nt, Human
ggaaccguaggacccaagcag

SEQ ID NO: 1763969 - RNA, 14 nt, Human
ggaaccuccccagc

SEQ ID NO: 1763970 - RNA, 20 nt, Human
ggagcccuuaucugugcuca

SEQ ID NO: 1763971 - RNA, 22 nt, Human
ggagcccuuaucugugcucagg

SEQ ID NO: 1763972 - RNA, 15 nt, Human
ggagaugcuccuugg

SEQ ID NO: 1763973 - RNA, 9 nt, Human
ggacuggug

SEQ ID NO: 1763974 - RNA, 11 nt, Human
ggacuggugcc

SEQ ID NO: 1763975 - RNA, 14 nt, Human
ggacuggugcccuc

SEQ ID NO: 1763976 - RNA, 15 nt, Human
ggacuggugcccucc

SEQ ID NO: 1763977 - RNA, 17 nt, Human
ggacuggugcccuccuc

SEQ ID NO: 1763978 - RNA, 21 nt, Human
ggacuggugcccuccucacuc

SEQ ID NO: 1763979 - RNA, 21 nt, Human
ggagaccuggacacaggccug

SEQ ID NO: 1763980 - RNA, 17 nt, Human
ggacucucagucucuga

SEQ ID NO: 1763981 - RNA, 18 nt, Human
ggacucucagucucugag

SEQ ID NO: 1763982 - RNA, 20 nt, Human
ggacucucagucucugagca

SEQ ID NO: 1763983 - RNA, 21 nt, Human
ggacucucagucucugagcag

SEQ ID NO: 1763984 - RNA, 20 nt, Human
ggacucugaaauaucccggg

SEQ ID NO: 1763985 - RNA, 21 nt, Human
ggaccccagcaagugguccua

SEQ ID NO: 1763986 - RNA, 17 nt, Human
ggaccuggugcugccuc

SEQ ID NO: 1763987 - RNA, 14 nt, Human
ggaccugccuguag

SEQ ID NO: 1763988 - RNA, 15 nt, Human
ggaccugccuguagc

SEQ ID NO: 1763989 - RNA, 12 nt, Human
ggaaggagccag

SEQ ID NO: 1763990 - RNA, 13 nt, Human
ggaaggagccagu

SEQ ID NO: 1763991 - RNA, 21 nt, Human
ggaaggagccaguuugccgga

SEQ ID NO: 1763992 - RNA, 16 nt, Human
ggacccagggaacagc

SEQ ID NO: 1763993 - RNA, 22 nt, Human
ggacccagggaacagccacucc

SEQ ID NO: 1763994 - RNA, 21 nt, Human
ggacccagaggaaggggccag

SEQ ID NO: 1763995 - RNA, 11 nt, Human
ggagugacaga

SEQ ID NO: 1763996 - RNA, 16 nt, Human
ggagugacagaggcag

SEQ ID NO: 1763997 - RNA, 20 nt, Human
ggagucccaccuuggcugca

SEQ ID NO: 1763998 - RNA, 21 nt, Human
ggagucccaccuuggcugcag

SEQ ID NO: 1763999 - RNA, 18 nt, Human
ggagucauuugagucucu

SEQ ID NO: 1764000 - RNA, 21 nt, Human
ggagucauuugagucucuuaa

SEQ ID NO: 1764001 - RNA, 16 nt, Human
ggaucagaaauacaga

SEQ ID NO: 1764002 - RNA, 14 nt, Human
ggaucagaaauaca

SEQ ID NO: 1764003 - RNA, 17 nt, Human
ggagugacagaggcagc

SEQ ID NO: 1764004 - RNA, 18 nt, Human
ggagugacagaggcagcc

SEQ ID NO: 1764005 - RNA, 19 nt, Human
ggagugacagaggcagccc

SEQ ID NO: 1764006 - RNA, 21 nt, Human
ggagugacagaggcagcccca

SEQ ID NO: 1764007 - RNA, 12 nt, Human
ggagugagcugg

SEQ ID NO: 1764008 - RNA, 14 nt, Human
ggagugagcugguu

SEQ ID NO: 1764009 - RNA, 13 nt, Human
ggagggcagcagg

SEQ ID NO: 1764010 - RNA, 15 nt, Human
ggagggcagcagggc

SEQ ID NO: 1764011 - RNA, 16 nt, Human
ggagggcagcagggcu

SEQ ID NO: 1764012 - RNA, 17 nt, Human
ggagggcagcagggcua

SEQ ID NO: 1764013 - RNA, 15 nt, Human
ggaggauguucuggg

SEQ ID NO: 1764014 - RNA, 15 nt, Human
ggccccucaccuacu

SEQ ID NO: 1764015 - RNA, 17 nt, Human
ggccccugccacccugg

SEQ ID NO: 1764016 - RNA, 18 nt, Human
ggccccugccacccuggg

SEQ ID NO: 1764017 - RNA, 13 nt, Human
ggccccugcccgg

SEQ ID NO: 1764018 - RNA, 13 nt, Human
ggccccugccacc

SEQ ID NO: 1764019 - RNA, 16 nt, Human
ggccccugccacccug

SEQ ID NO: 1764020 - RNA, 12 nt, Human
ggccccugccac

SEQ ID NO: 1764021 - RNA, 12 nt, Human
ggccaggcuggu

SEQ ID NO: 1764022 - RNA, 13 nt, Human
ggccaugggccuc

SEQ ID NO: 1764023 - RNA, 16 nt, Human
ggccccccugcccugu

SEQ ID NO: 1764024 - RNA, 14 nt, Human
ggccccccugcccu

SEQ ID NO: 1764025 - RNA, 14 nt, Human
ggccaggccagagg

SEQ ID NO: 1764026 - RNA, 16 nt, Human
ggccaggccagaggga

SEQ ID NO: 1764027 - RNA, 11 nt, Human
ggccaggcugg

SEQ ID NO: 1764028 - RNA, 22 nt, Human
ggcagguguuuauuaaaauucu

SEQ ID NO: 1764029 - RNA, 23 nt, Human
ggcauguucucugaggacacuaa

SEQ ID NO: 1764030 - RNA, 21 nt, Human
ggcagcuugaggguugggcug

SEQ ID NO: 1764031 - RNA, 19 nt, Human
ggcagcugcgguccaccca

SEQ ID NO: 1764032 - RNA, 23 nt, Human
ggcaggucuugaacuccuggccu

SEQ ID NO: 1764033 - RNA, 18 nt, Human
ggcagguccuccccucuc

SEQ ID NO: 1764034 - RNA, 19 nt, Human
ggcaggugcuggagcacug

SEQ ID NO: 1764035 - RNA, 20 nt, Human
ggcaggugcuggagcacugg

SEQ ID NO: 1764036 - RNA, 21 nt, Human
ggcaggugcuggagcacuggg

SEQ ID NO: 1764037 - RNA, 13 nt, Human
ggcagguccaggg

SEQ ID NO: 1764038 - RNA, 13 nt, Human
ggcagagcuucuu

SEQ ID NO: 1764039 - RNA, 23 nt, Human
ggcagauacaggaaaagcugcug

SEQ ID NO: 1764040 - RNA, 17 nt, Human
ggcagcacccuauaaau

SEQ ID NO: 1764041 - RNA, 19 nt, Human
ggcagcacccuauaaauca

SEQ ID NO: 1764042 - RNA, 21 nt, Human
ggcagcaccugucuccuuuca

SEQ ID NO: 1764043 - RNA, 17 nt, Human
ggcaaggguuaaggccu

SEQ ID NO: 1764044 - RNA, 19 nt, Human
ggcaaggguuaaggccuga

SEQ ID NO: 1764045 - RNA, 17 nt, Human
ggcacccggccccugcu

SEQ ID NO: 1764046 - RNA, 15 nt, Human
ggcacccggccccug

SEQ ID NO: 1764047 - RNA, 16 nt, Human
ggcacccggccccugc

SEQ ID NO: 1764048 - RNA, 16 nt, Human
ggcaccucacaggccc

SEQ ID NO: 1764049 - RNA, 19 nt, Human
ggcaccucacaggccccag

SEQ ID NO: 1764050 - RNA, 22 nt, Human
ggcaccugccacccugggccug

SEQ ID NO: 1764051 - RNA, 21 nt, Human
ggaucagucugauucccaagc

SEQ ID NO: 1764052 - RNA, 13 nt, Human
ggaucaggaagcc

SEQ ID NO: 1764053 - RNA, 21 nt, Human
ggaucagaucuggggcagcac

SEQ ID NO: 1764054 - RNA, 16 nt, Human
ggaucagauugcaugu

SEQ ID NO: 1764055 - RNA, 19 nt, Human
ggcaacccccagccugcua

SEQ ID NO: 1764056 - RNA, 23 nt, Human
uauaaaucaacaccuuaauaugc

SEQ ID NO: 1764057 - RNA, 21 nt, Human
uaguuugauuauucaguguca

SEQ ID NO: 1764058 - RNA, 19 nt, Human
uauaauggacagauuaaua

SEQ ID NO: 1764059 - RNA, 20 nt, Human
uauaauggacagauuaauau

SEQ ID NO: 1764060 - RNA, 14 nt, Human
uauaccugugccuc

SEQ ID NO: 1764061 - RNA, 13 nt, Human
uauaccugugccu

SEQ ID NO: 1764062 - RNA, 14 nt, Human
uagugcuaagugug

SEQ ID NO: 1764063 - RNA, 19 nt, Human
uagugcuaagugugaacug

SEQ ID NO: 1764064 - RNA, 18 nt, Human
uagugcuaagugugaacu

SEQ ID NO: 1764065 - RNA, 17 nt, Human
uagugcuaagugugaac

SEQ ID NO: 1764066 - RNA, 15 nt, Human
uagugcuaaguguga

SEQ ID NO: 1764067 - RNA, 23 nt, Human
uagugcuuuccuuuuuuaaaaau

SEQ ID NO: 1764068 - RNA, 13 nt, Human
uaggcgaucacaa

SEQ ID NO: 1764069 - RNA, 23 nt, Human
uaggcgaucacaacgugcauugu

SEQ ID NO: 1764070 - RNA, 16 nt, Human
uaguuggcagaaauac

SEQ ID NO: 1764071 - RNA, 17 nt, Human
uaguuggcagaaauaca

SEQ ID NO: 1764072 - RNA, 18 nt, Human
uaguuggcagaaauacag

SEQ ID NO: 1764073 - RNA, 17 nt, Human
uaucaggugcugccauc

SEQ ID NO: 1764074 - RNA, 20 nt, Human
uaucaggacccagaggaagg

SEQ ID NO: 1764075 - RNA, 21 nt, Human
uaucaggacccagaggaaggg

SEQ ID NO: 1764076 - RNA, 16 nt, Human
uaucaguuacccacuc

SEQ ID NO: 1764077 - RNA, 11 nt, Human
uauccuggugc

SEQ ID NO: 1764078 - RNA, 18 nt, Human
uauccugccaaaaucauu

SEQ ID NO: 1764079 - RNA, 19 nt, Human
uaucgauguuauguaaaag

SEQ ID NO: 1764080 - RNA, 21 nt, Human
uauaugcacuuauaauuuucc

SEQ ID NO: 1764081 - RNA, 15 nt, Human
uauaccugugccucg

SEQ ID NO: 1764082 - RNA, 21 nt, Human
uauacuuguggacuaaaagau

SEQ ID NO: 1764083 - RNA, 17 nt, Human
uauacuuguggacuaaa

SEQ ID NO: 1764084 - RNA, 23 nt, Human
uauacuuguggacuaaaagauau

SEQ ID NO: 1764085 - RNA, 22 nt, Human
uauacuuguggacuaaaagaua

SEQ ID NO: 1764086 - RNA, 23 nt, Human
uagcagaagguugcaccuccccc

SEQ ID NO: 1764087 - RNA, 23 nt, Human
uagauguucucuaucauuuaaua

SEQ ID NO: 1764088 - RNA, 12 nt, Human
uagauguuuccu

SEQ ID NO: 1764089 - RNA, 16 nt, Human
uagauuaaaaauuaua

SEQ ID NO: 1764090 - RNA, 19 nt, Human
uagcagagaaugaaagggc

SEQ ID NO: 1764091 - RNA, 23 nt, Human
uagcagagaaugaaagggcccag

SEQ ID NO: 1764092 - RNA, 12 nt, Human
uagauacaauaa

SEQ ID NO: 1764093 - RNA, 13 nt, Human
uagauacaauaaa

SEQ ID NO: 1764094 - RNA, 14 nt, Human
uagauacaauaaau

SEQ ID NO: 1764095 - RNA, 16 nt, Human
uagauacaauaaauug

SEQ ID NO: 1764096 - RNA, 17 nt, Human
uagauacaauaaauugc

SEQ ID NO: 1764097 - RNA, 22 nt, Human
uagauguucucuaucauuuaau

SEQ ID NO: 1764098 - RNA, 21 nt, Human
uagauguucucuaucauuuaa

SEQ ID NO: 1764099 - RNA, 19 nt, Human
uagauguucucuaucauuu

SEQ ID NO: 1764100 - RNA, 18 nt, Human
uagauguucucuaucauu

SEQ ID NO: 1764101 - RNA, 14 nt, Human
uagauguucucuau

SEQ ID NO: 1764102 - RNA, 21 nt, Human
uagauguucuaagucuuucca

SEQ ID NO: 1764103 - RNA, 16 nt, Human
uagagagagaccacuu

SEQ ID NO: 1764104 - RNA, 14 nt, Human
uagaguauaugcac

SEQ ID NO: 1764105 - RNA, 14 nt, Human
uagaaauucuuuau

SEQ ID NO: 1764106 - RNA, 22 nt, Human
uaggaaccgugguaugucugcc

SEQ ID NO: 1764107 - RNA, 14 nt, Human
uaggccuggccaga

SEQ ID NO: 1764108 - RNA, 13 nt, Human
uaggccuggccag

SEQ ID NO: 1764109 - RNA, 20 nt, Human
uaggccucaacuccucccau

SEQ ID NO: 1764110 - RNA, 22 nt, Human
uaggccucaacuccucccauag

SEQ ID NO: 1764111 - RNA, 16 nt, Human
uaggaaguaaauuaua

SEQ ID NO: 1764112 - RNA, 16 nt, Human
uagcccucacauuaga

SEQ ID NO: 1764113 - RNA, 20 nt, Human
uagccucagaugauuucccc

SEQ ID NO: 1764114 - RNA, 15 nt, Human
uagccugaguagaaa

SEQ ID NO: 1764115 - RNA, 18 nt, Human
uagccauuuuucaaagca

SEQ ID NO: 1764116 - RNA, 19 nt, Human
uagccauuuuucaaagcaa

SEQ ID NO: 1764117 - RNA, 20 nt, Human
uagccauuuuucaaagcaau

SEQ ID NO: 1764118 - RNA, 22 nt, Human
uagccauuuuucaaagcaauug

SEQ ID NO: 1764119 - RNA, 15 nt, Human
uagcccacucugcuc

SEQ ID NO: 1764120 - RNA, 11 nt, Human
uagcugggacu

SEQ ID NO: 1764121 - RNA, 23 nt, Human
uagccugcagaaguaagccucau

SEQ ID NO: 1764122 - RNA, 18 nt, Human
uagcugggacuacaggug

SEQ ID NO: 1764123 - RNA, 12 nt, Human
uagcugggacua

SEQ ID NO: 1764124 - RNA, 20 nt, Human
uagcugggacuacaggcacc

SEQ ID NO: 1764125 - RNA, 21 nt, Human
uacacacacacgcgugcacac

SEQ ID NO: 1764126 - RNA, 15 nt, Human
uacacacacauacac

SEQ ID NO: 1764127 - RNA, 20 nt, Human
uacacuguauguuauagaac

SEQ ID NO: 1764128 - RNA, 15 nt, Human
uacacagaaaugcug

SEQ ID NO: 1764129 - RNA, 17 nt, Human
uacacagaaaugcugcu

SEQ ID NO: 1764130 - RNA, 18 nt, Human
uacacagaaaugcugcug

SEQ ID NO: 1764131 - RNA, 19 nt, Human
uacacagaaaugcugcugg

SEQ ID NO: 1764132 - RNA, 20 nt, Human
uacacagaaaugcugcuggc

SEQ ID NO: 1764133 - RNA, 21 nt, Human
uacacagaaaugcugcuggcc

SEQ ID NO: 1764134 - RNA, 22 nt, Human
uacacagaaaugcugcuggcca

SEQ ID NO: 1764135 - RNA, 23 nt, Human
uacacagaaaugcugcuggccaa

SEQ ID NO: 1764136 - RNA, 23 nt, Human
uacacaaaugauagcauaacaua

SEQ ID NO: 1764137 - RNA, 17 nt, Human
uacaggaaaagcugcug

SEQ ID NO: 1764138 - RNA, 18 nt, Human
uacaggaaaagcugcuga

SEQ ID NO: 1764139 - RNA, 19 nt, Human
uacaggaaaagcugcugac

SEQ ID NO: 1764140 - RNA, 16 nt, Human
uacaggcacccaccau

SEQ ID NO: 1764141 - RNA, 14 nt, Human
uacaggauuugaaa

SEQ ID NO: 1764142 - RNA, 13 nt, Human
uacagaauuuuau

SEQ ID NO: 1764143 - RNA, 13 nt, Human
uacagaauauuuc

SEQ ID NO: 1764144 - RNA, 18 nt, Human
uacagaauauuucuauug

SEQ ID NO: 1764145 - RNA, 21 nt, Human
uacagaauauuucuauugaau

SEQ ID NO: 1764146 - RNA, 16 nt, Human
uacagaacucuuucaa

SEQ ID NO: 1764147 - RNA, 17 nt, Human
uacagaacucuuucaaa

SEQ ID NO: 1764148 - RNA, 19 nt, Human
uacagaacucuuucaaaac

SEQ ID NO: 1764149 - RNA, 11 nt, Human
uacccacugcu

SEQ ID NO: 1764150 - RNA, 12 nt, Human
uacccacugcuc

SEQ ID NO: 1764151 - RNA, 13 nt, Human
uacccacugcucu

SEQ ID NO: 1764152 - RNA, 14 nt, Human
uacccacugcucug

SEQ ID NO: 1764153 - RNA, 18 nt, Human
uacccagcgagcccuggu

SEQ ID NO: 1764154 - RNA, 13 nt, Human
uaccaaugaaaaa

SEQ ID NO: 1764155 - RNA, 15 nt, Human
uaccaaugaaaaaau

SEQ ID NO: 1764156 - RNA, 17 nt, Human
uaccaaugaaaaaaugu

SEQ ID NO: 1764157 - RNA, 23 nt, Human
uaccauuuugggguacccacugc

SEQ ID NO: 1764158 - RNA, 18 nt, Human
uacaguuaaggaauauaa

SEQ ID NO: 1764159 - RNA, 16 nt, Human
uacaugacauuuauuu

SEQ ID NO: 1764160 - RNA, 21 nt, Human
uacaugacauuuauuuuucau

SEQ ID NO: 1764161 - RNA, 15 nt, Human
uaccaaaaauuuugu

SEQ ID NO: 1764162 - RNA, 14 nt, Human
uacgaauacuuuug

SEQ ID NO: 1764163 - RNA, 13 nt, Human
uaccuugguuccc

SEQ ID NO: 1764164 - RNA, 22 nt, Human
uaccuugguucccccacugauc

SEQ ID NO: 1764165 - RNA, 18 nt, Human
uaccuugccaauuaguaa

SEQ ID NO: 1764166 - RNA, 16 nt, Human
uaccuugcuuuugcuu

SEQ ID NO: 1764167 - RNA, 18 nt, Human
uaccuugcuuuugcuucu

SEQ ID NO: 1764168 - RNA, 21 nt, Human
uaccuugcuuuugcuucuaga

SEQ ID NO: 1764169 - RNA, 23 nt, Human
uacccauacacccccucuucuga

SEQ ID NO: 1764170 - RNA, 16 nt, Human
uacccauacacccccu

SEQ ID NO: 1764171 - RNA, 16 nt, Human
uacccagggccugcag

SEQ ID NO: 1764172 - RNA, 17 nt, Human
uacccacucggucccag

SEQ ID NO: 1764173 - RNA, 15 nt, Human
uacccaggugggucc

SEQ ID NO: 1764174 - RNA, 18 nt, Human
uaccuugacacauaguuu

SEQ ID NO: 1764175 - RNA, 17 nt, Human
uacuccucuuuacacug

SEQ ID NO: 1764176 - RNA, 15 nt, Human
uagaaacuuccaaau

SEQ ID NO: 1764177 - RNA, 14 nt, Human
uagaaagcauuuga

SEQ ID NO: 1764178 - RNA, 13 nt, Human
uagaaagcauuug

SEQ ID NO: 1764179 - RNA, 21 nt, Human
uacuuuagauggcaagcaugu

SEQ ID NO: 1764180 - RNA, 16 nt, Human
uagaaaggccuuuaaa

SEQ ID NO: 1764181 - RNA, 15 nt, Human
uagaaaggccuuuaa

SEQ ID NO: 1764182 - RNA, 14 nt, Human
uagaaaggccuuua

SEQ ID NO: 1764183 - RNA, 13 nt, Human
uagaaaggccuuu

SEQ ID NO: 1764184 - RNA, 22 nt, Human
uagaaagcauuugaaugcauuu

SEQ ID NO: 1764185 - RNA, 21 nt, Human
uagaaagcauuugaaugcauu

SEQ ID NO: 1764186 - RNA, 20 nt, Human
uagaaagcauuugaaugcau

SEQ ID NO: 1764187 - RNA, 19 nt, Human
uagaaagcauuugaaugca

SEQ ID NO: 1764188 - RNA, 18 nt, Human
uagaaagcauuugaaugc

SEQ ID NO: 1764189 - RNA, 17 nt, Human
uagaaagcauuugaaug

SEQ ID NO: 1764190 - RNA, 16 nt, Human
uagaaagcauuugaau

SEQ ID NO: 1764191 - RNA, 15 nt, Human
uagaaagcauuugaa

SEQ ID NO: 1764192 - RNA, 15 nt, Human
uagaaauaauaugca

SEQ ID NO: 1764193 - RNA, 16 nt, Human
uagaaauaauaugcau

SEQ ID NO: 1764194 - RNA, 23 nt, Human
uagaaaugguuguauuagauguu

SEQ ID NO: 1764195 - RNA, 20 nt, Human
uagaaaugguuguauuagau

SEQ ID NO: 1764196 - RNA, 19 nt, Human
uagaaaugguuguauuaga

SEQ ID NO: 1764197 - RNA, 17 nt, Human
uagaaaugguuguauua

SEQ ID NO: 1764198 - RNA, 16 nt, Human
uagaaaugguuguauu

SEQ ID NO: 1764199 - RNA, 15 nt, Human
uagaaaugguuguau

SEQ ID NO: 1764200 - RNA, 23 nt, Human
uagaaauuuauuuccuaguucug

SEQ ID NO: 1764201 - RNA, 19 nt, Human
uacuuguggacacagcucu

SEQ ID NO: 1764202 - RNA, 15 nt, Human
uacuuguggacacag

SEQ ID NO: 1764203 - RNA, 18 nt, Human
uacuuguggacacagcuc

SEQ ID NO: 1764204 - RNA, 23 nt, Human
uacuugccuuauuagagugucuu

SEQ ID NO: 1764205 - RNA, 19 nt, Human
uacuuacccaggugggucc

SEQ ID NO: 1764206 - RNA, 17 nt, Human
uacuguauuuuguauug

SEQ ID NO: 1764207 - RNA, 23 nt, Human
uacuguauuuuguauuguuucaa

SEQ ID NO: 1764208 - RNA, 12 nt, Human
uacugugggcaa

SEQ ID NO: 1764209 - RNA, 16 nt, Human
uacugugggcaauuua

SEQ ID NO: 1764210 - RNA, 17 nt, Human
uacugugggcaauuuag

SEQ ID NO: 1764211 - RNA, 18 nt, Human
uacugugggcaauuuaga

SEQ ID NO: 1764212 - RNA, 19 nt, Human
uacugugggcaauuuagaa

SEQ ID NO: 1764213 - RNA, 17 nt, Human
uaauuuuccuaauaaag

SEQ ID NO: 1764214 - RNA, 12 nt, Human
uaauuuguaaag

SEQ ID NO: 1764215 - RNA, 13 nt, Human
uaauuuguaaagu

SEQ ID NO: 1764216 - RNA, 16 nt, Human
uaauuuguaaaguugg

SEQ ID NO: 1764217 - RNA, 18 nt, Human
uaauugggucauagaaau

SEQ ID NO: 1764218 - RNA, 21 nt, Human
uaauaguucagguaacaggca

SEQ ID NO: 1764219 - RNA, 13 nt, Human
uaauauaaauuca

SEQ ID NO: 1764220 - RNA, 14 nt, Human
uaauauaaauucac

SEQ ID NO: 1764221 - RNA, 18 nt, Human
uaauauaaauucacuuuc

SEQ ID NO: 1764222 - RNA, 21 nt, Human
uaauauaaauucacuuucauu

SEQ ID NO: 1764223 - RNA, 14 nt, Human
uaauaauauacuug

SEQ ID NO: 1764224 - RNA, 13 nt, Human
uaauaauauacuu

SEQ ID NO: 1764225 - RNA, 22 nt, Human
uaauaauauacuuguggacuaa

SEQ ID NO: 1764226 - RNA, 19 nt, Human
uaauaauauacuuguggac

SEQ ID NO: 1764227 - RNA, 16 nt, Human
uaauaauauacuugug

SEQ ID NO: 1764228 - RNA, 21 nt, Human
uaauaauauacuuguggacua

SEQ ID NO: 1764229 - RNA, 23 nt, Human
uaagugcuguauaaaaucagcca

SEQ ID NO: 1764230 - RNA, 19 nt, Human
uaaggccauuauuguacuu

SEQ ID NO: 1764231 - RNA, 14 nt, Human
uaaggccugaauca

SEQ ID NO: 1764232 - RNA, 22 nt, Human
uaagugcuguauaaaaucagcc

SEQ ID NO: 1764233 - RNA, 20 nt, Human
uaagugcuguauaaaaucag

SEQ ID NO: 1764234 - RNA, 19 nt, Human
uaagugcuguauaaaauca

SEQ ID NO: 1764235 - RNA, 18 nt, Human
uaagugcuguauaaaauc

SEQ ID NO: 1764236 - RNA, 17 nt, Human
uaagugcuguauaaaau

SEQ ID NO: 1764237 - RNA, 15 nt, Human
uaagugcuguauaaa

SEQ ID NO: 1764238 - RNA, 16 nt, Human
uaaugcaguaugguac

SEQ ID NO: 1764239 - RNA, 17 nt, Human
uaaugcaguaugguaca

SEQ ID NO: 1764240 - RNA, 20 nt, Human
uaaugcaguaugguacauuu

SEQ ID NO: 1764241 - RNA, 21 nt, Human
uaaugcaguaugguacauuuu

SEQ ID NO: 1764242 - RNA, 21 nt, Human
uaauauacuuguggacuaaaa

SEQ ID NO: 1764243 - RNA, 17 nt, Human
uaauauacuuguggacu

SEQ ID NO: 1764244 - RNA, 15 nt, Human
uaauauacuugugga

SEQ ID NO: 1764245 - RNA, 13 nt, Human
uaauauacuugug

SEQ ID NO: 1764246 - RNA, 21 nt, Human
uaagaguagaaacugcaggga

SEQ ID NO: 1764247 - RNA, 22 nt, Human
uaagaggcagggucucacucug

SEQ ID NO: 1764248 - RNA, 19 nt, Human
uaagccucaucaucagagc

SEQ ID NO: 1764249 - RNA, 20 nt, Human
uaagccacuuaaaauguuca

SEQ ID NO: 1764250 - RNA, 17 nt, Human
uaagccacuuaaaaugu

SEQ ID NO: 1764251 - RNA, 19 nt, Human
uaagccacuuaaaauguuc

SEQ ID NO: 1764252 - RNA, 15 nt, Human
uaagcaucuacuuca

SEQ ID NO: 1764253 - RNA, 17 nt, Human
uaagcaucuacuucagg

SEQ ID NO: 1764254 - RNA, 14 nt, Human
uaaccucaucuucu

SEQ ID NO: 1764255 - RNA, 18 nt, Human
uaaccucaucuucuucac

SEQ ID NO: 1764256 - RNA, 18 nt, Human
uaacccuucaucuuccug

SEQ ID NO: 1764257 - RNA, 19 nt, Human
uaacccuucaucuuccugu

SEQ ID NO: 1764258 - RNA, 20 nt, Human
uaacccuucaucuuccugug

SEQ ID NO: 1764259 - RNA, 21 nt, Human
uaacccuucaucuuccugugu

SEQ ID NO: 1764260 - RNA, 19 nt, Human
uaacaggcagauacaggaa

SEQ ID NO: 1764261 - RNA, 16 nt, Human
uaaauugcuaauguug

SEQ ID NO: 1764262 - RNA, 17 nt, Human
uaaauugcuaauguugc

SEQ ID NO: 1764263 - RNA, 19 nt, Human
uaaauuguauauucacuuu

SEQ ID NO: 1764264 - RNA, 18 nt, Human
uaaauuguauauucacuu

SEQ ID NO: 1764265 - RNA, 17 nt, Human
uaaauuguauauucacu

SEQ ID NO: 1764266 - RNA, 14 nt, Human
uaaauuguauauuc

SEQ ID NO: 1764267 - RNA, 13 nt, Human
uaaauuguauauu

SEQ ID NO: 1764268 - RNA, 13 nt, Human
uaacaauuccucu

SEQ ID NO: 1764269 - RNA, 14 nt, Human
uaacaauuccucua

SEQ ID NO: 1764270 - RNA, 22 nt, Human
uaaaucagucaagcuguugaag

SEQ ID NO: 1764271 - RNA, 22 nt, Human
uaaauaaaaugcacaaaacuuu

SEQ ID NO: 1764272 - RNA, 18 nt, Human
uaaauauaugcuaagucu

SEQ ID NO: 1764273 - RNA, 17 nt, Human
uaaauaaaaauaauccu

SEQ ID NO: 1764274 - RNA, 14 nt, Human
uaaaggaauuuaaa

SEQ ID NO: 1764275 - RNA, 22 nt, Human
uaaaagauauaagugcuguaua

SEQ ID NO: 1764276 - RNA, 19 nt, Human
uaaaaaugcaaauccuaug

SEQ ID NO: 1764277 - RNA, 20 nt, Human
uaaaaaugcaaauccuaugu

SEQ ID NO: 1764278 - RNA, 16 nt, Human
uaaaaaugcaaauccu

SEQ ID NO: 1764279 - RNA, 23 nt, Human
uaaaaauggaaaaauaaacacua

SEQ ID NO: 1764280 - RNA, 19 nt, Human
uaaaagauggggucuguaa

SEQ ID NO: 1764281 - RNA, 18 nt, Human
uaaaagauggggucugua

SEQ ID NO: 1764282 - RNA, 22 nt, Human
uaaaagauggggucuguaaaau

SEQ ID NO: 1764283 - RNA, 21 nt, Human
uaaaagauggggucuguaaaa

SEQ ID NO: 1764284 - RNA, 20 nt, Human
uaaaagauggggucuguaaa

SEQ ID NO: 1764285 - RNA, 18 nt, Human
uaaaaucuuucuuucuua

SEQ ID NO: 1764286 - RNA, 22 nt, Human
uaaaaucuuucuuucuuagaaa

SEQ ID NO: 1764287 - RNA, 21 nt, Human
uaaaaucuuucuuucuuagaa

SEQ ID NO: 1764288 - RNA, 20 nt, Human
uaaaaucuuucuuucuuaga

SEQ ID NO: 1764289 - RNA, 19 nt, Human
uaaaaucuuucuuucuuag

SEQ ID NO: 1764290 - RNA, 23 nt, Human
uaaaaucagccaauuauguuaaa

SEQ ID NO: 1764291 - RNA, 22 nt, Human
uaaaaucagccaauuauguuaa

SEQ ID NO: 1764292 - RNA, 21 nt, Human
uaaaaucagccaauuauguua

SEQ ID NO: 1764293 - RNA, 15 nt, Human
uaaaauccucaaucc

SEQ ID NO: 1764294 - RNA, 17 nt, Human
uaaaaucagccaauuau

SEQ ID NO: 1764295 - RNA, 15 nt, Human
uaaaaucagccaauu

SEQ ID NO: 1764296 - RNA, 14 nt, Human
uaaaaucagccaau

SEQ ID NO: 1764297 - RNA, 13 nt, Human
uaaaaucagccaa

SEQ ID NO: 1764298 - RNA, 17 nt, Human
guuugaaauucugaauu

SEQ ID NO: 1764299 - RNA, 18 nt, Human
guuugaaauucugaauuu

SEQ ID NO: 1764300 - RNA, 19 nt, Human
guuugaaauucugaauuug

SEQ ID NO: 1764301 - RNA, 21 nt, Human
guuugaaauucugaauuugca

SEQ ID NO: 1764302 - RNA, 22 nt, Human
guuugaaauucugaauuugcaa

SEQ ID NO: 1764303 - RNA, 23 nt, Human
guuugaaauucugaauuugcaaa

SEQ ID NO: 1764304 - RNA, 14 nt, Human
guuugaauguuaaa

SEQ ID NO: 1764305 - RNA, 15 nt, Human
guuugaauguuaaau

SEQ ID NO: 1764306 - RNA, 19 nt, Human
guuuccuggcacuggaccc

SEQ ID NO: 1764307 - RNA, 17 nt, Human
guuuccuuccagcccag

SEQ ID NO: 1764308 - RNA, 14 nt, Human
guuuccuuuuuucc

SEQ ID NO: 1764309 - RNA, 15 nt, Human
guuuccuuuuuuccc

SEQ ID NO: 1764310 - RNA, 17 nt, Human
guuuccuggcacuggac

SEQ ID NO: 1764311 - RNA, 14 nt, Human
guuucauuuugguu

SEQ ID NO: 1764312 - RNA, 21 nt, Human
gguuggccccugcccggcugc

SEQ ID NO: 1764313 - RNA, 13 nt, Human
gguuggcucccgc

SEQ ID NO: 1764314 - RNA, 12 nt, Human
guuuuguauucu

SEQ ID NO: 1764315 - RNA, 15 nt, Human
guuuuguauucucug

SEQ ID NO: 1764316 - RNA, 11 nt, Human
uaaaaaugcaa

SEQ ID NO: 1764317 - RNA, 14 nt, Human
ucaaugcacugaca

SEQ ID NO: 1764318 - RNA, 18 nt, Human
ucaaugcacugacauugu

SEQ ID NO: 1764319 - RNA, 14 nt, Human
ucaaugcucauaac

SEQ ID NO: 1764320 - RNA, 13 nt, Human
ucaaugcucauaa

SEQ ID NO: 1764321 - RNA, 12 nt, Human
ucaaugcucaua

SEQ ID NO: 1764322 - RNA, 21 nt, Human
ucacaauagccgauaucagaa

SEQ ID NO: 1764323 - RNA, 22 nt, Human
ucacaauagccgauaucagaau

SEQ ID NO: 1764324 - RNA, 21 nt, Human
ucacacaguauuacuucugcu

SEQ ID NO: 1764325 - RNA, 10 nt, Human
ucacacacac

SEQ ID NO: 1764326 - RNA, 22 nt, Human
ucacacaguauuacuucugcua

SEQ ID NO: 1764327 - RNA, 13 nt, Human
ucacacagugagu

SEQ ID NO: 1764328 - RNA, 24 nt, Human
ucacacacacaaaaaaugcacaaa

SEQ ID NO: 1764329 - RNA, 22 nt, Human
ucacacagugagucgaggacag

SEQ ID NO: 1764330 - RNA, 23 nt, Human
ucacacagugagucgaggacagg

SEQ ID NO: 1764331 - RNA, 11 nt, Human
ucacaggcagg

SEQ ID NO: 1764332 - RNA, 16 nt, Human
ucaagcgauucuucug

SEQ ID NO: 1764333 - RNA, 17 nt, Human
ucaagcgauucuucugc

SEQ ID NO: 1764334 - RNA, 14 nt, Human
ucaagcugcucuga

SEQ ID NO: 1764335 - RNA, 22 nt, Human
ucaagugauucuccugccucag

SEQ ID NO: 1764336 - RNA, 19 nt, Human
ucaagcuguugaagucuca

SEQ ID NO: 1764337 - RNA, 22 nt, Human
ucaaacucuugaccucagguga

SEQ ID NO: 1764338 - RNA, 13 nt, Human
ucaaccuccuggg

SEQ ID NO: 1764339 - RNA, 14 nt, Human
ucaaccuccugggc

SEQ ID NO: 1764340 - RNA, 19 nt, Human
ucaacuaaaaaaaaaaaag

SEQ ID NO: 1764341 - RNA, 20 nt, Human
ucaacuaaaaaaaaaaaagu

SEQ ID NO: 1764342 - RNA, 21 nt, Human
ucaacuagugggguuuccugg

SEQ ID NO: 1764343 - RNA, 22 nt, Human
ucaacuagugggguuuccuggc

SEQ ID NO: 1764344 - RNA, 15 nt, Human
ucaaaaccuuuugaa

SEQ ID NO: 1764345 - RNA, 13 nt, Human
uauuuucaccauu

SEQ ID NO: 1764346 - RNA, 14 nt, Human
uauuuucaccauuu

SEQ ID NO: 1764347 - RNA, 12 nt, Human
uauuuauucauu

SEQ ID NO: 1764348 - RNA, 22 nt, Human
uauuuauucauuauuugucaaa

SEQ ID NO: 1764349 - RNA, 23 nt, Human
uauuuauucauuauuugucaaau

SEQ ID NO: 1764350 - RNA, 11 nt, Human
uauuucuauug

SEQ ID NO: 1764351 - RNA, 22 nt, Human
uauuucucagacuuuggaaaau

SEQ ID NO: 1764352 - RNA, 14 nt, Human
uauuuuauaagaaa

SEQ ID NO: 1764353 - RNA, 15 nt, Human
uauuuuauaagaaaa

SEQ ID NO: 1764354 - RNA, 17 nt, Human
uauuuuauaagaaaaac

SEQ ID NO: 1764355 - RNA, 16 nt, Human
ucacgccacugcacua

SEQ ID NO: 1764356 - RNA, 13 nt, Human
ucacgccacugca

SEQ ID NO: 1764357 - RNA, 14 nt, Human
ucacgccacugcac

SEQ ID NO: 1764358 - RNA, 14 nt, Human
ucacgcaccugggu

SEQ ID NO: 1764359 - RNA, 12 nt, Human
ucacaggcaggu

SEQ ID NO: 1764360 - RNA, 15 nt, Human
ucacaggcaggucca

SEQ ID NO: 1764361 - RNA, 19 nt, Human
ucacaggccccaggaaagg

SEQ ID NO: 1764362 - RNA, 22 nt, Human
ucaccuucguuuacuaugccug

SEQ ID NO: 1764363 - RNA, 13 nt, Human
ucacggcucacug

SEQ ID NO: 1764364 - RNA, 15 nt, Human
ucacggcucacugca

SEQ ID NO: 1764365 - RNA, 20 nt, Human
ucacggcucacugcagccuc

SEQ ID NO: 1764366 - RNA, 17 nt, Human
ucacuccugacugcccg

SEQ ID NO: 1764367 - RNA, 18 nt, Human
ucagaggcccucgcugcc

SEQ ID NO: 1764368 - RNA, 21 nt, Human
ucagaggcccucgcugccagc

SEQ ID NO: 1764369 - RNA, 22 nt, Human
ucagaggcccucgcugccagcu

SEQ ID NO: 1764370 - RNA, 22 nt, Human
ucacucugucgcccagucugga

SEQ ID NO: 1764371 - RNA, 19 nt, Human
ucacucugucgcccagucu

SEQ ID NO: 1764372 - RNA, 12 nt, Human
ucacucugucgc

SEQ ID NO: 1764373 - RNA, 16 nt, Human
ucacucugucgcccag

SEQ ID NO: 1764374 - RNA, 20 nt, Human
ucacuggcgacacguagcag

SEQ ID NO: 1764375 - RNA, 22 nt, Human
ucacuggcgacacguagcagcu

SEQ ID NO: 1764376 - RNA, 13 nt, Human
ucacuuucauuuu

SEQ ID NO: 1764377 - RNA, 14 nt, Human
ucacuuucauuuuu

SEQ ID NO: 1764378 - RNA, 18 nt, Human
ucacuuuugacaaaggca

SEQ ID NO: 1764379 - RNA, 16 nt, Human
ucagaaaaaaauucau

SEQ ID NO: 1764380 - RNA, 20 nt, Human
ucagaaauacagauuuugau

SEQ ID NO: 1764381 - RNA, 16 nt, Human
ucagaaauacagauuu

SEQ ID NO: 1764382 - RNA, 13 nt, Human
ucagaaauacaga

SEQ ID NO: 1764383 - RNA, 24 nt, Human
ucagucugauucccaagcucugcu

SEQ ID NO: 1764384 - RNA, 13 nt, Human
ucagcagacugau

SEQ ID NO: 1764385 - RNA, 21 nt, Human
ucagugguccacaucccggga

SEQ ID NO: 1764386 - RNA, 23 nt, Human
ucaguguaaauaguuacuccagu

SEQ ID NO: 1764387 - RNA, 12 nt, Human
ucauaauuacca

SEQ ID NO: 1764388 - RNA, 15 nt, Human
ucauaccaaugaaaa

SEQ ID NO: 1764389 - RNA, 15 nt, Human
ucauagguugagcaa

SEQ ID NO: 1764390 - RNA, 17 nt, Human
ucauagguugagcaauu

SEQ ID NO: 1764391 - RNA, 21 nt, Human
ucaucuccugccuuccuccug

SEQ ID NO: 1764392 - RNA, 22 nt, Human
ucaucuccugccuuccuccugg

SEQ ID NO: 1764393 - RNA, 23 nt, Human
ucaucuccugccuuccuccuggg

SEQ ID NO: 1764394 - RNA, 12 nt, Human
ucaucugucccu

SEQ ID NO: 1764395 - RNA, 17 nt, Human
ucaucugucccuccggg

SEQ ID NO: 1764396 - RNA, 18 nt, Human
ucaucugucccuccggga

SEQ ID NO: 1764397 - RNA, 16 nt, Human
ucaucuguuagggccu

SEQ ID NO: 1764398 - RNA, 19 nt, Human
ucaucuguuagggccuugg

SEQ ID NO: 1764399 - RNA, 13 nt, Human
ucauguaaacugu

SEQ ID NO: 1764400 - RNA, 14 nt, Human
ucauguaaacugug

SEQ ID NO: 1764401 - RNA, 17 nt, Human
ucauguaaacugugcac

SEQ ID NO: 1764402 - RNA, 16 nt, Human
ucauguaaacugugca

SEQ ID NO: 1764403 - RNA, 13 nt, Human
ucauuauuuguca

SEQ ID NO: 1764404 - RNA, 14 nt, Human
ucauuauuugucaa

SEQ ID NO: 1764405 - RNA, 15 nt, Human
ucauuauuugucaaa

SEQ ID NO: 1764406 - RNA, 19 nt, Human
ucauuauuugucaaauugu

SEQ ID NO: 1764407 - RNA, 22 nt, Human
uccacaaccucuuccccccaaa

SEQ ID NO: 1764408 - RNA, 12 nt, Human
uccacaaaauaa

SEQ ID NO: 1764409 - RNA, 20 nt, Human
uccacaaaauaaccaauccu

SEQ ID NO: 1764410 - RNA, 14 nt, Human
uccacaaagaaaau

SEQ ID NO: 1764411 - RNA, 19 nt, Human
uccacaaagaaaauuccua

SEQ ID NO: 1764412 - RNA, 20 nt, Human
uccacaaagaaaauuccuau

SEQ ID NO: 1764413 - RNA, 21 nt, Human
uccacaaagaaaauuccuaua

SEQ ID NO: 1764414 - RNA, 20 nt, Human
uccacuucuuucagcagacu

SEQ ID NO: 1764415 - RNA, 19 nt, Human
uccagaaggagacaggcag

SEQ ID NO: 1764416 - RNA, 14 nt, Human
uccagaaggagaca

SEQ ID NO: 1764417 - RNA, 18 nt, Human
uccaagauauuuuaaaau

SEQ ID NO: 1764418 - RNA, 22 nt, Human
uccaagauauuuuaaaaucugu

SEQ ID NO: 1764419 - RNA, 19 nt, Human
uccaaaaguggccucuuug

SEQ ID NO: 1764420 - RNA, 23 nt, Human
uccaaaaguggccucuuugucua

SEQ ID NO: 1764421 - RNA, 11 nt, Human
uccaaagcaaa

SEQ ID NO: 1764422 - RNA, 19 nt, Human
uccaaagcaaaaccagaac

SEQ ID NO: 1764423 - RNA, 15 nt, Human
ucauuucuuaugaau

SEQ ID NO: 1764424 - RNA, 20 nt, Human
uccauggcccugcaaaagga

SEQ ID NO: 1764425 - RNA, 15 nt, Human
uccauccacauggga

SEQ ID NO: 1764426 - RNA, 23 nt, Human
uccagcucaccagccccagugcc

SEQ ID NO: 1764427 - RNA, 17 nt, Human
uccagcauugcuggacu

SEQ ID NO: 1764428 - RNA, 17 nt, Human
ucccaagcucugcuccu

SEQ ID NO: 1764429 - RNA, 12 nt, Human
ucccaagcucug

SEQ ID NO: 1764430 - RNA, 13 nt, Human
ucccaagcucugc

SEQ ID NO: 1764431 - RNA, 14 nt, Human
ucccaagcucugcu

SEQ ID NO: 1764432 - RNA, 15 nt, Human
ucccaagcucugcuc

SEQ ID NO: 1764433 - RNA, 13 nt, Human
ucccaccucagcc

SEQ ID NO: 1764434 - RNA, 17 nt, Human
ucccaagguuggagccc

SEQ ID NO: 1764435 - RNA, 20 nt, Human
ucccaagguuggagcccagg

SEQ ID NO: 1764436 - RNA, 21 nt, Human
ucccaagguuggagcccaggg

SEQ ID NO: 1764437 - RNA, 23 nt, Human
ucccaagguuggagcccagggca

SEQ ID NO: 1764438 - RNA, 14 nt, Human
ucccaccucagccu

SEQ ID NO: 1764439 - RNA, 15 nt, Human
ucccaccucagccuc

SEQ ID NO: 1764440 - RNA, 15 nt, Human
ucccaucuggucauu

SEQ ID NO: 1764441 - RNA, 17 nt, Human
ucccaucuggucauuug

SEQ ID NO: 1764442 - RNA, 20 nt, Human
ucccaucuggucauuugguu

SEQ ID NO: 1764443 - RNA, 15 nt, Human
ucccaucucuuccuu

SEQ ID NO: 1764444 - RNA, 16 nt, Human
ucccaucucuuccuug

SEQ ID NO: 1764445 - RNA, 17 nt, Human
uccccagaauggaggca

SEQ ID NO: 1764446 - RNA, 23 nt, Human
ucccccaucucgcucccucccag

SEQ ID NO: 1764447 - RNA, 15 nt, Human
uccccccuccucuga

SEQ ID NO: 1764448 - RNA, 17 nt, Human
uccccccuccucugaaa

SEQ ID NO: 1764449 - RNA, 18 nt, Human
uccccccuccucugaaac

SEQ ID NO: 1764450 - RNA, 19 nt, Human
uccccccuccucugaaaca

SEQ ID NO: 1764451 - RNA, 22 nt, Human
uccccccuccucugaaacagcu

SEQ ID NO: 1764452 - RNA, 17 nt, Human
ucccccuaaaccaacug

SEQ ID NO: 1764453 - RNA, 15 nt, Human
ucccccucuguccag

SEQ ID NO: 1764454 - RNA, 12 nt, Human
ucccccucuguc

SEQ ID NO: 1764455 - RNA, 19 nt, Human
uccccagccugcgccugcu

SEQ ID NO: 1764456 - RNA, 20 nt, Human
uccccagccugcgccugcug

SEQ ID NO: 1764457 - RNA, 11 nt, Human
uccccagccug

SEQ ID NO: 1764458 - RNA, 12 nt, Human
uccccagccugc

SEQ ID NO: 1764459 - RNA, 13 nt, Human
uccccagccugcg

SEQ ID NO: 1764460 - RNA, 14 nt, Human
uccccagccugcgc

SEQ ID NO: 1764461 - RNA, 17 nt, Human
uccccagccugcgccug

SEQ ID NO: 1764462 - RNA, 20 nt, Human
uccccugccagggcagggcc

SEQ ID NO: 1764463 - RNA, 12 nt, Human
uccccugccagg

SEQ ID NO: 1764464 - RNA, 14 nt, Human
uccccugccagggc

SEQ ID NO: 1764465 - RNA, 15 nt, Human
uccccugccagggca

SEQ ID NO: 1764466 - RNA, 13 nt, Human
uccccuuccacug

SEQ ID NO: 1764467 - RNA, 17 nt, Human
uccccuuccacugaggg

SEQ ID NO: 1764468 - RNA, 18 nt, Human
uccccuuccacugagggc

SEQ ID NO: 1764469 - RNA, 12 nt, Human
uccccuguguca

SEQ ID NO: 1764470 - RNA, 11 nt, Human
ucucucugugg

SEQ ID NO: 1764471 - RNA, 22 nt, Human
ucucuaucauuuaauaauauac

SEQ ID NO: 1764472 - RNA, 20 nt, Human
ucucuaucauuuaauaauau

SEQ ID NO: 1764473 - RNA, 14 nt, Human
ucucugaggacacu

SEQ ID NO: 1764474 - RNA, 13 nt, Human
ucucugaggacac

SEQ ID NO: 1764475 - RNA, 14 nt, Human
ucucugagcaguga

SEQ ID NO: 1764476 - RNA, 15 nt, Human
ucucugagcugugca

SEQ ID NO: 1764477 - RNA, 16 nt, Human
ucucugagcugugcag

SEQ ID NO: 1764478 - RNA, 13 nt, Human
ucucuaccagaua

SEQ ID NO: 1764479 - RNA, 13 nt, Human
ucucuauaaaaaa

SEQ ID NO: 1764480 - RNA, 16 nt, Human
ucucuauaaaaaauau

SEQ ID NO: 1764481 - RNA, 17 nt, Human
ucucuaucauuuaauaa

SEQ ID NO: 1764482 - RNA, 16 nt, Human
ucucuaucauuuaaua

SEQ ID NO: 1764483 - RNA, 15 nt, Human
ucucuaucauuuaau

SEQ ID NO: 1764484 - RNA, 14 nt, Human
ucucuaucauuuaa

SEQ ID NO: 1764485 - RNA, 13 nt, Human
ucucuaucauuua

SEQ ID NO: 1764486 - RNA, 12 nt, Human
ucucuaucauuu

SEQ ID NO: 1764487 - RNA, 22 nt, Human
ucuccugccucagccucccaaa

SEQ ID NO: 1764488 - RNA, 16 nt, Human
ucuccugccuuccucc

SEQ ID NO: 1764489 - RNA, 17 nt, Human
ucuccugccuuccuccu

SEQ ID NO: 1764490 - RNA, 18 nt, Human
ucuccugccuuccuccug

SEQ ID NO: 1764491 - RNA, 20 nt, Human
ucuccugccuuccuccuggg

SEQ ID NO: 1764492 - RNA, 12 nt, Human
ucugagcacaga

SEQ ID NO: 1764493 - RNA, 18 nt, Human
ucugagauucaauauuga

SEQ ID NO: 1764494 - RNA, 23 nt, Human
ucugauucccaagcucugcuccu

SEQ ID NO: 1764495 - RNA, 19 nt, Human
ucugagcagugaaugauuc

SEQ ID NO: 1764496 - RNA, 16 nt, Human
ucugaggaauccagac

SEQ ID NO: 1764497 - RNA, 17 nt, Human
ucugaggaauccagacc

SEQ ID NO: 1764498 - RNA, 20 nt, Human
ucugaggacacuaaccacgc

SEQ ID NO: 1764499 - RNA, 23 nt, Human
ucugaggacacuaaccacgcugg

SEQ ID NO: 1764500 - RNA, 16 nt, Human
ucugaaauaucccggg

SEQ ID NO: 1764501 - RNA, 15 nt, Human
ucucuuuucaaaaca

SEQ ID NO: 1764502 - RNA, 16 nt, Human
ucucuuuucaaaacau

SEQ ID NO: 1764503 - RNA, 18 nt, Human
ucucuuuuugcuuucgaa

SEQ ID NO: 1764504 - RNA, 20 nt, Human
ucucuuuuccccuuuccugu

SEQ ID NO: 1764505 - RNA, 21 nt, Human
ucucuuuuccccuuuccuguc

SEQ ID NO: 1764506 - RNA, 22 nt, Human
ucucuuuuccccuuuccugucc

SEQ ID NO: 1764507 - RNA, 12 nt, Human
ucucuuccuuga

SEQ ID NO: 1764508 - RNA, 21 nt, Human
ucucuuccuugaccugcauug

SEQ ID NO: 1764509 - RNA, 13 nt, Human
ucuaaccucaucu

SEQ ID NO: 1764510 - RNA, 18 nt, Human
ucuaaccucaucuucuuc

SEQ ID NO: 1764511 - RNA, 20 nt, Human
ucuaaccucaucuucuucac

SEQ ID NO: 1764512 - RNA, 18 nt, Human
ucuaaccucgcccucucc

SEQ ID NO: 1764513 - RNA, 13 nt, Human
ucuaaccuggagg

SEQ ID NO: 1764514 - RNA, 18 nt, Human
ucucacuguugcccaggc

SEQ ID NO: 1764515 - RNA, 19 nt, Human
ucucacuguugcccaggcu

SEQ ID NO: 1764516 - RNA, 20 nt, Human
ucucacuguugcccaggcug

SEQ ID NO: 1764517 - RNA, 21 nt, Human
ucucacuguugcccaggcugg

SEQ ID NO: 1764518 - RNA, 18 nt, Human
ucucacucugucgcccag

SEQ ID NO: 1764519 - RNA, 22 nt, Human
ucucacucugucgcccagucug

SEQ ID NO: 1764520 - RNA, 17 nt, Human
ucucacucugucgccca

SEQ ID NO: 1764521 - RNA, 22 nt, Human
ucucaaacucuugaccucaggu

SEQ ID NO: 1764522 - RNA, 13 nt, Human
ucucaaacucuug

SEQ ID NO: 1764523 - RNA, 21 nt, Human
ucucaaacucuugaccucagg

SEQ ID NO: 1764524 - RNA, 16 nt, Human
ucuaguagcugaaaug

SEQ ID NO: 1764525 - RNA, 18 nt, Human
ucuaguagcugaaaugca

SEQ ID NO: 1764526 - RNA, 19 nt, Human
ucuaguagcugaaaugcaa

SEQ ID NO: 1764527 - RNA, 14 nt, Human
ucuaguacuagaaa

SEQ ID NO: 1764528 - RNA, 17 nt, Human
ucgcagagcuuuucaga

SEQ ID NO: 1764529 - RNA, 19 nt, Human
ucgcagagcuuuucagauu

SEQ ID NO: 1764530 - RNA, 18 nt, Human
ucggaacuguccuuuccu

SEQ ID NO: 1764531 - RNA, 19 nt, Human
ucggaacuguccuuuccuu

SEQ ID NO: 1764532 - RNA, 17 nt, Human
ucgcuguugcugaauag

SEQ ID NO: 1764533 - RNA, 15 nt, Human
ucgcuguugcugaau

SEQ ID NO: 1764534 - RNA, 14 nt, Human
ucgcuguugcugaa

SEQ ID NO: 1764535 - RNA, 12 nt, Human
ucgcuguugcug

SEQ ID NO: 1764536 - RNA, 19 nt, Human
ucgcuucccugaaagacug

SEQ ID NO: 1764537 - RNA, 19 nt, Human
uccuuuuuaaccauuccaa

SEQ ID NO: 1764538 - RNA, 21 nt, Human
uccuugcagguggggguugcu

SEQ ID NO: 1764539 - RNA, 20 nt, Human
uccuuggcuuuaugcacauu

SEQ ID NO: 1764540 - RNA, 13 nt, Human
uccuugggcccuu

SEQ ID NO: 1764541 - RNA, 14 nt, Human
uccuugggcccuuu

SEQ ID NO: 1764542 - RNA, 16 nt, Human
uccuugggcccuuuga

SEQ ID NO: 1764543 - RNA, 16 nt, Human
uccuuuuugguuuuua

SEQ ID NO: 1764544 - RNA, 11 nt, Human
uccuuuuuucc

SEQ ID NO: 1764545 - RNA, 12 nt, Human
uccuuuuuuccc

SEQ ID NO: 1764546 - RNA, 22 nt, Human
uccuuuuuucccauaagacaau

SEQ ID NO: 1764547 - RNA, 12 nt, Human
uccuucuguccu

SEQ ID NO: 1764548 - RNA, 19 nt, Human
uccuucuguccuacucugu

SEQ ID NO: 1764549 - RNA, 20 nt, Human
ugaacuggacccuguugcua

SEQ ID NO: 1764550 - RNA, 19 nt, Human
ugaacuggacccuguugcu

SEQ ID NO: 1764551 - RNA, 18 nt, Human
ugaacuggacccuguugc

SEQ ID NO: 1764552 - RNA, 17 nt, Human
ugaacuggacccuguug

SEQ ID NO: 1764553 - RNA, 20 nt, Human
ugaaccacaucuugcucugc

SEQ ID NO: 1764554 - RNA, 21 nt, Human
ugaaccacaucuugcucugcu

SEQ ID NO: 1764555 - RNA, 22 nt, Human
ugaaccacaucuugcucugcug

SEQ ID NO: 1764556 - RNA, 16 nt, Human
ugaacagaagcucuua

SEQ ID NO: 1764557 - RNA, 21 nt, Human
ugaacagaagcucuuacucuu

SEQ ID NO: 1764558 - RNA, 14 nt, Human
ugaacacuuaaauu

SEQ ID NO: 1764559 - RNA, 17 nt, Human
ugaacacuuaaauuaug

SEQ ID NO: 1764560 - RNA, 19 nt, Human
ugaaauggacuuuuguaca

SEQ ID NO: 1764561 - RNA, 17 nt, Human
ugaaggcuaaaaagcaa

SEQ ID NO: 1764562 - RNA, 18 nt, Human
ugaaggcuaaaaagcaac

SEQ ID NO: 1764563 - RNA, 11 nt, Human
ugaaggcuggc

SEQ ID NO: 1764564 - RNA, 12 nt, Human
ugaaggcuggca

SEQ ID NO: 1764565 - RNA, 13 nt, Human
ugaaggcuggcau

SEQ ID NO: 1764566 - RNA, 16 nt, Human
ugaaggcuggcaugau

SEQ ID NO: 1764567 - RNA, 11 nt, Human
ugaaggagccc

SEQ ID NO: 1764568 - RNA, 22 nt, Human
ugaaggagccccauuccuggga

SEQ ID NO: 1764569 - RNA, 23 nt, Human
ugaaggagccccauuccugggaa

SEQ ID NO: 1764570 - RNA, 19 nt, Human
ugaacuggguacuugugga

SEQ ID NO: 1764571 - RNA, 23 nt, Human
ugaacuggacccuguugcuaagc

SEQ ID NO: 1764572 - RNA, 22 nt, Human
ugaacuggacccuguugcuaag

SEQ ID NO: 1764573 - RNA, 21 nt, Human
ugaacuggacccuguugcuaa

SEQ ID NO: 1764574 - RNA, 22 nt, Human
ugaacuuguaaaggaauuuaaa

SEQ ID NO: 1764575 - RNA, 23 nt, Human
ugaacuggguacuuguggacaca

SEQ ID NO: 1764576 - RNA, 16 nt, Human
ugaacuugccucuuuu

SEQ ID NO: 1764577 - RNA, 20 nt, Human
ugaacuugccucuuuuaccu

SEQ ID NO: 1764578 - RNA, 19 nt, Human
ucuuuuguaauaaacuauu

SEQ ID NO: 1764579 - RNA, 12 nt, Human
ucuuuuucuacc

SEQ ID NO: 1764580 - RNA, 17 nt, Human
ucuuucacauuuaaaua

SEQ ID NO: 1764581 - RNA, 23 nt, Human
ugaaaugaggucagagccugcag

SEQ ID NO: 1764582 - RNA, 21 nt, Human
ugaaaugaggucagagccugc

SEQ ID NO: 1764583 - RNA, 22 nt, Human
ugaaaugaggucagagccugca

SEQ ID NO: 1764584 - RNA, 19 nt, Human
ugaaaugaggucagagccu

SEQ ID NO: 1764585 - RNA, 20 nt, Human
ugaaaugaggucagagccug

SEQ ID NO: 1764586 - RNA, 22 nt, Human
ugaaaggagagcaucggccuag

SEQ ID NO: 1764587 - RNA, 14 nt, Human
ugaaaggagcccuu

SEQ ID NO: 1764588 - RNA, 16 nt, Human
ugaaagggcccagaga

SEQ ID NO: 1764589 - RNA, 17 nt, Human
ugaaagggcccagagag

SEQ ID NO: 1764590 - RNA, 18 nt, Human
ugaaagggcccagagagg

SEQ ID NO: 1764591 - RNA, 16 nt, Human
ugaaaagagaaugaug

SEQ ID NO: 1764592 - RNA, 21 nt, Human
ugaaaagagaaugaugcucaa

SEQ ID NO: 1764593 - RNA, 17 nt, Human
ugaaagcugguggcaga

SEQ ID NO: 1764594 - RNA, 13 nt, Human
ucugggacacagu

SEQ ID NO: 1764595 - RNA, 12 nt, Human
ucugggacacag

SEQ ID NO: 1764596 - RNA, 12 nt, Human
ucuguaaaaucu

SEQ ID NO: 1764597 - RNA, 11 nt, Human
ucuguaaaauc

SEQ ID NO: 1764598 - RNA, 17 nt, Human
ucuguaaaaucuuucuu

SEQ ID NO: 1764599 - RNA, 14 nt, Human
ucuguaaaaucuuu

SEQ ID NO: 1764600 - RNA, 13 nt, Human
ucuguaaaaucuu

SEQ ID NO: 1764601 - RNA, 15 nt, Human
ucugcaauuucuacu

SEQ ID NO: 1764602 - RNA, 14 nt, Human
ucuggaggaaaggg

SEQ ID NO: 1764603 - RNA, 18 nt, Human
ucuggaggaaagggagga

SEQ ID NO: 1764604 - RNA, 19 nt, Human
ucuggaggaaagggaggag

SEQ ID NO: 1764605 - RNA, 12 nt, Human
ucuguucagugu

SEQ ID NO: 1764606 - RNA, 14 nt, Human
ucuguuagggccuu

SEQ ID NO: 1764607 - RNA, 13 nt, Human
ucuguucaccuuc

SEQ ID NO: 1764608 - RNA, 16 nt, Human
ucuguucaguguaaau

SEQ ID NO: 1764609 - RNA, 12 nt, Human
ucugugucuugu

SEQ ID NO: 1764610 - RNA, 17 nt, Human
ucuguacgucugacagg

SEQ ID NO: 1764611 - RNA, 14 nt, Human
ucugucccucacag

SEQ ID NO: 1764612 - RNA, 15 nt, Human
ucugucccucacagc

SEQ ID NO: 1764613 - RNA, 15 nt, Human
ucugucccuguuaga

SEQ ID NO: 1764614 - RNA, 19 nt, Human
ucugucccuucugucccuc

SEQ ID NO: 1764615 - RNA, 20 nt, Human
ucugucccuucugucccuca

SEQ ID NO: 1764616 - RNA, 22 nt, Human
ucugucccuucugucccucaca

SEQ ID NO: 1764617 - RNA, 23 nt, Human
ucugucccuucugucccucacag

SEQ ID NO: 1764618 - RNA, 22 nt, Human
ucugugggugauggggaggggc

SEQ ID NO: 1764619 - RNA, 12 nt, Human
ucuugcucugcu

SEQ ID NO: 1764620 - RNA, 13 nt, Human
ucuugcucugcug

SEQ ID NO: 1764621 - RNA, 11 nt, Human
ucuugcucugc

SEQ ID NO: 1764622 - RNA, 13 nt, Human
ucuugaauuuaau

SEQ ID NO: 1764623 - RNA, 21 nt, Human
ucuugaauuuaauaaucugua

SEQ ID NO: 1764624 - RNA, 23 nt, Human
ucuugaauuuaauaaucuguagg

SEQ ID NO: 1764625 - RNA, 15 nt, Human
ucuucuccaggcugu

SEQ ID NO: 1764626 - RNA, 16 nt, Human
ucuugaacuccuggcc

SEQ ID NO: 1764627 - RNA, 17 nt, Human
ucuugaacuccuggccu

SEQ ID NO: 1764628 - RNA, 18 nt, Human
ucuugaacuccuggccuc

SEQ ID NO: 1764629 - RNA, 13 nt, Human
ucuucuccaggcu

SEQ ID NO: 1764630 - RNA, 14 nt, Human
ucuucuccaggcug

SEQ ID NO: 1764631 - RNA, 12 nt, Human
ucuucuccaggc

SEQ ID NO: 1764632 - RNA, 17 nt, Human
ucuuccacaaagaaaau

SEQ ID NO: 1764633 - RNA, 18 nt, Human
ucuuccacaaagaaaauu

SEQ ID NO: 1764634 - RNA, 23 nt, Human
ucuuccacaaagaaaauuccuau

SEQ ID NO: 1764635 - RNA, 14 nt, Human
ugcucaggacucag

SEQ ID NO: 1764636 - RNA, 17 nt, Human
ugcucaggacucagaag

SEQ ID NO: 1764637 - RNA, 23 nt, Human
ugcucaggacucagaagccucug

SEQ ID NO: 1764638 - RNA, 19 nt, Human
ugcuccucuccccagcaag

SEQ ID NO: 1764639 - RNA, 15 nt, Human
ugcucaucauucucu

SEQ ID NO: 1764640 - RNA, 17 nt, Human
ugcucaucauucucugu

SEQ ID NO: 1764641 - RNA, 19 nt, Human
ugcucaucauucucugucu

SEQ ID NO: 1764642 - RNA, 20 nt, Human
ugcucaucauucucugucuc

SEQ ID NO: 1764643 - RNA, 21 nt, Human
ugcucaucauucucugucuca

SEQ ID NO: 1764644 - RNA, 23 nt, Human
ugcucaucauucucugucucauc

SEQ ID NO: 1764645 - RNA, 13 nt, Human
ugcuagcuagcuc

SEQ ID NO: 1764646 - RNA, 19 nt, Human
ugcguccacgagcuguuua

SEQ ID NO: 1764647 - RNA, 20 nt, Human
ugcguaugccaccaacuuac

SEQ ID NO: 1764648 - RNA, 12 nt, Human
ugcuccuugggc

SEQ ID NO: 1764649 - RNA, 14 nt, Human
ugcuccuugggccc

SEQ ID NO: 1764650 - RNA, 15 nt, Human
ugcuccuugggcccu

SEQ ID NO: 1764651 - RNA, 16 nt, Human
ugcuccuugggcccuu

SEQ ID NO: 1764652 - RNA, 18 nt, Human
ugcuccuugggcccuuug

SEQ ID NO: 1764653 - RNA, 19 nt, Human
ugcuccuugggcccuuuga

SEQ ID NO: 1764654 - RNA, 21 nt, Human
ugcuccuugggcccuuugagu

SEQ ID NO: 1764655 - RNA, 21 nt, Human
ugcugaauaggcgaucacaac

SEQ ID NO: 1764656 - RNA, 18 nt, Human
ugcugaauaggcgaucac

SEQ ID NO: 1764657 - RNA, 11 nt, Human
ugcugaauagg

SEQ ID NO: 1764658 - RNA, 23 nt, Human
ugcugaaugccgcgaugggucag

SEQ ID NO: 1764659 - RNA, 22 nt, Human
ugcugcagagaaacuuaagcaa

SEQ ID NO: 1764660 - RNA, 14 nt, Human
ugcugcagcucccu

SEQ ID NO: 1764661 - RNA, 15 nt, Human
ugcugcagcucccug

SEQ ID NO: 1764662 - RNA, 16 nt, Human
ugcugcagcucccugg

SEQ ID NO: 1764663 - RNA, 19 nt, Human
ugcugcagcucccuggcuu

SEQ ID NO: 1764664 - RNA, 21 nt, Human
ugcugcagcucccuggcuucu

SEQ ID NO: 1764665 - RNA, 15 nt, Human
ugcugacagacacag

SEQ ID NO: 1764666 - RNA, 16 nt, Human
ugcugacagacacagg

SEQ ID NO: 1764667 - RNA, 19 nt, Human
ugcugacagacacaggccc

SEQ ID NO: 1764668 - RNA, 21 nt, Human
ugccuuauuagagugucuuuc

SEQ ID NO: 1764669 - RNA, 23 nt, Human
ugccuuauuagagugucuuucca

SEQ ID NO: 1764670 - RNA, 12 nt, Human
ugccuuccagau

SEQ ID NO: 1764671 - RNA, 15 nt, Human
ugccuuccagauccu

SEQ ID NO: 1764672 - RNA, 17 nt, Human
ugccuuccagauccucu

SEQ ID NO: 1764673 - RNA, 20 nt, Human
ugccuuccagauccucucug

SEQ ID NO: 1764674 - RNA, 22 nt, Human
ugccuuccagauccucucuggg

SEQ ID NO: 1764675 - RNA, 14 nt, Human
ugccuuccuccugg

SEQ ID NO: 1764676 - RNA, 15 nt, Human
ugccuuccuccuggg

SEQ ID NO: 1764677 - RNA, 16 nt, Human
ugccuuccuccugggc

SEQ ID NO: 1764678 - RNA, 13 nt, Human
ugcgccuacagga

SEQ ID NO: 1764679 - RNA, 13 nt, Human
ugccuucucacca

SEQ ID NO: 1764680 - RNA, 16 nt, Human
ugccuucucaccagcu

SEQ ID NO: 1764681 - RNA, 17 nt, Human
ugccuucucaccagcug

SEQ ID NO: 1764682 - RNA, 18 nt, Human
ugccuucucaccagcugc

SEQ ID NO: 1764683 - RNA, 19 nt, Human
ugccuucucaccagcugca

SEQ ID NO: 1764684 - RNA, 20 nt, Human
ugccuucucaccagcugcaa

SEQ ID NO: 1764685 - RNA, 21 nt, Human
ugccuucucaccagcugcaaa

SEQ ID NO: 1764686 - RNA, 22 nt, Human
ugccuucucaccagcugcaaag

SEQ ID NO: 1764687 - RNA, 23 nt, Human
ugccuucucaccagcugcaaagu

SEQ ID NO: 1764688 - RNA, 11 nt, Human
ugccuucugug

SEQ ID NO: 1764689 - RNA, 14 nt, Human
ugccuucugugggg

SEQ ID NO: 1764690 - RNA, 22 nt, Human
ugccuucuguggggacuccggc

SEQ ID NO: 1764691 - RNA, 20 nt, Human
ugccuuccuccugggcccuc

SEQ ID NO: 1764692 - RNA, 17 nt, Human
ugccuuccuccugggcc

SEQ ID NO: 1764693 - RNA, 19 nt, Human
ugccuuccuccugggcccu

SEQ ID NO: 1764694 - RNA, 23 nt, Human
ugcccaggcuggcgugcaguggu

SEQ ID NO: 1764695 - RNA, 17 nt, Human
ugccuccccucuccuuc

SEQ ID NO: 1764696 - RNA, 15 nt, Human
ugccuagaggcccca

SEQ ID NO: 1764697 - RNA, 22 nt, Human
ugccugaagucacacagugagu

SEQ ID NO: 1764698 - RNA, 18 nt, Human
ugccugaagucacacagu

SEQ ID NO: 1764699 - RNA, 17 nt, Human
ugccugaagucacacag

SEQ ID NO: 1764700 - RNA, 18 nt, Human
ugccuccccucuccuucc

SEQ ID NO: 1764701 - RNA, 18 nt, Human
ugccauggaacuguuucc

SEQ ID NO: 1764702 - RNA, 20 nt, Human
ugccauggaacuguuuccuu

SEQ ID NO: 1764703 - RNA, 14 nt, Human
ugccauggaagagg

SEQ ID NO: 1764704 - RNA, 16 nt, Human
ugccauggaagaggcu

SEQ ID NO: 1764705 - RNA, 22 nt, Human
ugccauggaagaggcuacaggg

SEQ ID NO: 1764706 - RNA, 23 nt, Human
ugccauggaagaggcuacagggc

SEQ ID NO: 1764707 - RNA, 18 nt, Human
ugccauguaaauccccac

SEQ ID NO: 1764708 - RNA, 20 nt, Human
ugccauguaaauccccacug

SEQ ID NO: 1764709 - RNA, 11 nt, Human
ugccagggcag

SEQ ID NO: 1764710 - RNA, 12 nt, Human
ugccagggcagg

SEQ ID NO: 1764711 - RNA, 13 nt, Human
ugccaccccuaaa

SEQ ID NO: 1764712 - RNA, 20 nt, Human
ugccaccccuaaacuccagg

SEQ ID NO: 1764713 - RNA, 21 nt, Human
ugccaccccuaaacuccaggg

SEQ ID NO: 1764714 - RNA, 24 nt, Human
ugccagguuuuuggucugacccac

SEQ ID NO: 1764715 - RNA, 20 nt, Human
ugcauccagagauucauuuu

SEQ ID NO: 1764716 - RNA, 16 nt, Human
ugcaucauccuugcag

SEQ ID NO: 1764717 - RNA, 13 nt, Human
ugcaugugacucu

SEQ ID NO: 1764718 - RNA, 14 nt, Human
ugcaugugacucug

SEQ ID NO: 1764719 - RNA, 15 nt, Human
ugcaugugacucuga

SEQ ID NO: 1764720 - RNA, 16 nt, Human
ugcaugugacucugaa

SEQ ID NO: 1764721 - RNA, 20 nt, Human
ugcaugugacucugaagcug

SEQ ID NO: 1764722 - RNA, 17 nt, Human
ugcaugugacucugaag

SEQ ID NO: 1764723 - RNA, 16 nt, Human
ugcaggaccugccugu

SEQ ID NO: 1764724 - RNA, 17 nt, Human
ugcaggaccugccugua

SEQ ID NO: 1764725 - RNA, 18 nt, Human
ugcaggaccugccuguag

SEQ ID NO: 1764726 - RNA, 19 nt, Human
ugcaggaccugccuguagc

SEQ ID NO: 1764727 - RNA, 19 nt, Human
ugccaaaaucauuuuaaug

SEQ ID NO: 1764728 - RNA, 17 nt, Human
ugccaaccuauuuugaa

SEQ ID NO: 1764729 - RNA, 23 nt, Human
ugcauuuuguuugguauuguauu

SEQ ID NO: 1764730 - RNA, 21 nt, Human
ugcagccaaguagccucuccu

SEQ ID NO: 1764731 - RNA, 11 nt, Human
ugcagccagag

SEQ ID NO: 1764732 - RNA, 13 nt, Human
ugcagccagaggc

SEQ ID NO: 1764733 - RNA, 14 nt, Human
ugcagccagaggca

SEQ ID NO: 1764734 - RNA, 15 nt, Human
ugcaggaccugccug

SEQ ID NO: 1764735 - RNA, 21 nt, Human
ugcacuugcagacucuacaga

SEQ ID NO: 1764736 - RNA, 16 nt, Human
ugcacuugcagacucu

SEQ ID NO: 1764737 - RNA, 19 nt, Human
ugcacguacacacacauac

SEQ ID NO: 1764738 - RNA, 16 nt, Human
ugcacguacacacaca

SEQ ID NO: 1764739 - RNA, 22 nt, Human
ugcacacuuugccauauuuuca

SEQ ID NO: 1764740 - RNA, 14 nt, Human
ugcacacuuugcca

SEQ ID NO: 1764741 - RNA, 14 nt, Human
ugcacagaagcaca

SEQ ID NO: 1764742 - RNA, 20 nt, Human
ugaaggcuggcaugauccaa

SEQ ID NO: 1764743 - RNA, 18 nt, Human
ugcacagggauucucaca

SEQ ID NO: 1764744 - RNA, 19 nt, Human
ugcacagggauucucacaa

SEQ ID NO: 1764745 - RNA, 15 nt, Human
ugcacaucugugucu

SEQ ID NO: 1764746 - RNA, 16 nt, Human
ugcacaucugugucuu

SEQ ID NO: 1764747 - RNA, 18 nt, Human
ugcacaucugugucuugu

SEQ ID NO: 1764748 - RNA, 19 nt, Human
ugcacaucugugucuuguu

SEQ ID NO: 1764749 - RNA, 23 nt, Human
ugcaccuacccauacacccccuc

SEQ ID NO: 1764750 - RNA, 15 nt, Human
uggaauauuguccau

SEQ ID NO: 1764751 - RNA, 20 nt, Human
uggaauauuguccauugucc

SEQ ID NO: 1764752 - RNA, 15 nt, Human
uggaauguuggauaa

SEQ ID NO: 1764753 - RNA, 16 nt, Human
uggaauguuggauaag

SEQ ID NO: 1764754 - RNA, 21 nt, Human
uggaauguuggauaaggaauu

SEQ ID NO: 1764755 - RNA, 16 nt, Human
uggaaaaauaaacacu

SEQ ID NO: 1764756 - RNA, 13 nt, Human
uggaacuguuucc

SEQ ID NO: 1764757 - RNA, 15 nt, Human
uggaacuguuuccuu

SEQ ID NO: 1764758 - RNA, 14 nt, Human
uggaacuuagccau

SEQ ID NO: 1764759 - RNA, 16 nt, Human
uggaacuuagccauuu

SEQ ID NO: 1764760 - RNA, 21 nt, Human
uggaacuuagccauuuuucaa

SEQ ID NO: 1764761 - RNA, 21 nt, Human
uggaacugcguuaugaagagc

SEQ ID NO: 1764762 - RNA, 15 nt, Human
ugcuucgggcccuuc

SEQ ID NO: 1764763 - RNA, 18 nt, Human
ugcuucgggcccuuccca

SEQ ID NO: 1764764 - RNA, 14 nt, Human
ugcuucuagagcuu

SEQ ID NO: 1764765 - RNA, 16 nt, Human
ugcuucugaauacaaa

SEQ ID NO: 1764766 - RNA, 19 nt, Human
ugcuucuuucuuugggaau

SEQ ID NO: 1764767 - RNA, 14 nt, Human
ugcuuuccaaaccu

SEQ ID NO: 1764768 - RNA, 20 nt, Human
ugcuuuccaaaccuuaucuc

SEQ ID NO: 1764769 - RNA, 16 nt, Human
uggagagggggccugg

SEQ ID NO: 1764770 - RNA, 12 nt, Human
uggacaggcaug

SEQ ID NO: 1764771 - RNA, 16 nt, Human
uggacaggcauguucu

SEQ ID NO: 1764772 - RNA, 17 nt, Human
uggacaggcauguucuc

SEQ ID NO: 1764773 - RNA, 13 nt, Human
uggauacauaaag

SEQ ID NO: 1764774 - RNA, 14 nt, Human
uggauacauaaaga

SEQ ID NO: 1764775 - RNA, 16 nt, Human
uggauacauaaagacu

SEQ ID NO: 1764776 - RNA, 17 nt, Human
uggauacauaaagacua

SEQ ID NO: 1764777 - RNA, 23 nt, Human
uggauagaacaugggauacuuua

SEQ ID NO: 1764778 - RNA, 17 nt, Human
uggaugagcccucagaa

SEQ ID NO: 1764779 - RNA, 20 nt, Human
uggaugauggucuucagccu

SEQ ID NO: 1764780 - RNA, 21 nt, Human
uggaugauggucuucagccuc

SEQ ID NO: 1764781 - RNA, 15 nt, Human
uggaugagcccucag

SEQ ID NO: 1764782 - RNA, 16 nt, Human
uggaggcugccuccca

SEQ ID NO: 1764783 - RNA, 17 nt, Human
uggaggcugccucccaa

SEQ ID NO: 1764784 - RNA, 20 nt, Human
uggaggcugccucccaacag

SEQ ID NO: 1764785 - RNA, 14 nt, Human
uggaggccucaggu

SEQ ID NO: 1764786 - RNA, 17 nt, Human
uggaggccucaggugcu

SEQ ID NO: 1764787 - RNA, 20 nt, Human
uggaggccucaggugcuguc

SEQ ID NO: 1764788 - RNA, 24 nt, Human
uggaggccucaggugcuguccaug

SEQ ID NO: 1764789 - RNA, 23 nt, Human
uggcagcugcgguccacccagga

SEQ ID NO: 1764790 - RNA, 21 nt, Human
uggcagcugcgguccacccag

SEQ ID NO: 1764791 - RNA, 22 nt, Human
uggcagcugcgguccacccagg

SEQ ID NO: 1764792 - RNA, 23 nt, Human
uggcagaaauacagucuuccaca

SEQ ID NO: 1764793 - RNA, 14 nt, Human
uggaugccuggugg

SEQ ID NO: 1764794 - RNA, 15 nt, Human
uggaugccugguggc

SEQ ID NO: 1764795 - RNA, 22 nt, Human
uggaugccgauuucuguaaacu

SEQ ID NO: 1764796 - RNA, 23 nt, Human
uggaugcagugcucgcuguugcu

SEQ ID NO: 1764797 - RNA, 14 nt, Human
uggcagugggagcu

SEQ ID NO: 1764798 - RNA, 15 nt, Human
uggcagugggagcug

SEQ ID NO: 1764799 - RNA, 16 nt, Human
uggcagugggagcugc

SEQ ID NO: 1764800 - RNA, 19 nt, Human
uggcagugggagcugccug

SEQ ID NO: 1764801 - RNA, 20 nt, Human
uggcagugggagcugccugu

SEQ ID NO: 1764802 - RNA, 14 nt, Human
ugggccuccugugu

SEQ ID NO: 1764803 - RNA, 16 nt, Human
ugggccuccugugugu

SEQ ID NO: 1764804 - RNA, 22 nt, Human
ugggccuccugugugugcgccu

SEQ ID NO: 1764805 - RNA, 24 nt, Human
ugggagcugccuguucagcuccag

SEQ ID NO: 1764806 - RNA, 18 nt, Human
ugggcuucaguggcagcu

SEQ ID NO: 1764807 - RNA, 19 nt, Human
ugggcuucaguggcagcug

SEQ ID NO: 1764808 - RNA, 20 nt, Human
ugggcuucaguggcagcugc

SEQ ID NO: 1764809 - RNA, 16 nt, Human
uggggcagcuugaggg

SEQ ID NO: 1764810 - RNA, 21 nt, Human
ugggugucaagagggucugag

SEQ ID NO: 1764811 - RNA, 23 nt, Human
ugggugucaagagggucugagga

SEQ ID NO: 1764812 - RNA, 14 nt, Human
uggguccaugggca

SEQ ID NO: 1764813 - RNA, 17 nt, Human
uggguccaugggcagag

SEQ ID NO: 1764814 - RNA, 12 nt, Human
uggguguccugc

SEQ ID NO: 1764815 - RNA, 13 nt, Human
uggguguccugcc

SEQ ID NO: 1764816 - RNA, 15 nt, Human
uggguguccugccug

SEQ ID NO: 1764817 - RNA, 17 nt, Human
uggguguccugccuguc

SEQ ID NO: 1764818 - RNA, 19 nt, Human
uggguguccugccugucug

SEQ ID NO: 1764819 - RNA, 23 nt, Human
uggguguccugccugucugcccc

SEQ ID NO: 1764820 - RNA, 23 nt, Human
uggguucaagcgauucuucugcu

SEQ ID NO: 1764821 - RNA, 16 nt, Human
uggguucacugcaacc

SEQ ID NO: 1764822 - RNA, 21 nt, Human
uggguucauccuauucuuucg

SEQ ID NO: 1764823 - RNA, 12 nt, Human
uggguauaaaag

SEQ ID NO: 1764824 - RNA, 9 nt, Human
ugggucaga

SEQ ID NO: 1764825 - RNA, 17 nt, Human
ugggucagaacccugcc

SEQ ID NO: 1764826 - RNA, 18 nt, Human
ugggucagaacccugcca

SEQ ID NO: 1764827 - RNA, 19 nt, Human
ugggucagaacccugccau

SEQ ID NO: 1764828 - RNA, 14 nt, Human
ugggucauagaaau

SEQ ID NO: 1764829 - RNA, 16 nt, Human
ugggucauagaaauuc

SEQ ID NO: 1764830 - RNA, 23 nt, Human
ugggagcugccuguucagcucca

SEQ ID NO: 1764831 - RNA, 23 nt, Human
ugggagccgggucugccucuucu

SEQ ID NO: 1764832 - RNA, 14 nt, Human
ugggagccgggucu

SEQ ID NO: 1764833 - RNA, 18 nt, Human
ugggagccgggucugccu

SEQ ID NO: 1764834 - RNA, 23 nt, Human
ugggaccaacccuggggaaggag

SEQ ID NO: 1764835 - RNA, 22 nt, Human
ugggacccacgaaacugcccug

SEQ ID NO: 1764836 - RNA, 14 nt, Human
uggcugggggccuc

SEQ ID NO: 1764837 - RNA, 15 nt, Human
uggcugggggccuca

SEQ ID NO: 1764838 - RNA, 22 nt, Human
uggcgugcaguggugcgaucug

SEQ ID NO: 1764839 - RNA, 15 nt, Human
uggccagaugcacca

SEQ ID NO: 1764840 - RNA, 12 nt, Human
uggcugggggcc

SEQ ID NO: 1764841 - RNA, 16 nt, Human
uuaaauguaaauaauc

SEQ ID NO: 1764842 - RNA, 11 nt, Human
uguuuuucauu

SEQ ID NO: 1764843 - RNA, 11 nt, Human
uuaaggccuga

SEQ ID NO: 1764844 - RNA, 15 nt, Human
uuaaggccugaauca

SEQ ID NO: 1764845 - RNA, 18 nt, Human
uuaaugucacaggcaggu

SEQ ID NO: 1764846 - RNA, 16 nt, Human
uuaauuagugcuaagu

SEQ ID NO: 1764847 - RNA, 20 nt, Human
uuaauuagugcuaaguguga

SEQ ID NO: 1764848 - RNA, 18 nt, Human
uuaauuagugcuaagugu

SEQ ID NO: 1764849 - RNA, 21 nt, Human
uuaauuagugcuaagugugaa

SEQ ID NO: 1764850 - RNA, 17 nt, Human
uuaaugucacaggcagg

SEQ ID NO: 1764851 - RNA, 22 nt, Human
uuaaugucaauucuugccaaau

SEQ ID NO: 1764852 - RNA, 15 nt, Human
uuaauaguaauuugu

SEQ ID NO: 1764853 - RNA, 17 nt, Human
uuaauaguaauuuguaa

SEQ ID NO: 1764854 - RNA, 18 nt, Human
uuaauaguaauuuguaaa

SEQ ID NO: 1764855 - RNA, 19 nt, Human
uuaauaguaauuuguaaag

SEQ ID NO: 1764856 - RNA, 18 nt, Human
uuaauaugcugcaacaaa

SEQ ID NO: 1764857 - RNA, 19 nt, Human
uuaauaugcugcaacaaaa

SEQ ID NO: 1764858 - RNA, 20 nt, Human
uuaauaugcugcaacaaaau

SEQ ID NO: 1764859 - RNA, 22 nt, Human
uuacaugguuaagguaaaguaa

SEQ ID NO: 1764860 - RNA, 15 nt, Human
uguucaguguaaaua

SEQ ID NO: 1764861 - RNA, 16 nt, Human
uguucucugaggacac

SEQ ID NO: 1764862 - RNA, 18 nt, Human
uguucucugaggacacua

SEQ ID NO: 1764863 - RNA, 13 nt, Human
uguucucugggag

SEQ ID NO: 1764864 - RNA, 14 nt, Human
uguucucugggaga

SEQ ID NO: 1764865 - RNA, 15 nt, Human
uguucucugggagaa

SEQ ID NO: 1764866 - RNA, 16 nt, Human
uguucucugggagaaa

SEQ ID NO: 1764867 - RNA, 17 nt, Human
uguucucugggagaaaa

SEQ ID NO: 1764868 - RNA, 23 nt, Human
uguugcugaauaggcgaucacaa

SEQ ID NO: 1764869 - RNA, 14 nt, Human
uguugcugaauagg

SEQ ID NO: 1764870 - RNA, 22 nt, Human
uguugaguuaguuaaguugggu

SEQ ID NO: 1764871 - RNA, 20 nt, Human
uguugagcaugacagccugc

SEQ ID NO: 1764872 - RNA, 16 nt, Human
uguuggaguguuucua

SEQ ID NO: 1764873 - RNA, 11 nt, Human
uguuggauaag

SEQ ID NO: 1764874 - RNA, 21 nt, Human
uguuggauaaggaauuauaga

SEQ ID NO: 1764875 - RNA, 11 nt, Human
uguuggccagg

SEQ ID NO: 1764876 - RNA, 16 nt, Human
uguugcuggaucagga

SEQ ID NO: 1764877 - RNA, 14 nt, Human
uguuggccaggcug

SEQ ID NO: 1764878 - RNA, 21 nt, Human
uguucugagauucaauauuga

SEQ ID NO: 1764879 - RNA, 19 nt, Human
uguuaaacuagcauaucug

SEQ ID NO: 1764880 - RNA, 18 nt, Human
uguuaaacuagcauaucu

SEQ ID NO: 1764881 - RNA, 23 nt, Human
uguuaaacuagcauaucugccuu

SEQ ID NO: 1764882 - RNA, 22 nt, Human
uguuaaacuagcauaucugccu

SEQ ID NO: 1764883 - RNA, 20 nt, Human
uguuaaacuagcauaucugc

SEQ ID NO: 1764884 - RNA, 17 nt, Human
uguguuugucauuagcc

SEQ ID NO: 1764885 - RNA, 14 nt, Human
uguguuugucauua

SEQ ID NO: 1764886 - RNA, 19 nt, Human
uguguuugucauuagccug

SEQ ID NO: 1764887 - RNA, 15 nt, Human
uguucagcuccagcu

SEQ ID NO: 1764888 - RNA, 16 nt, Human
uguucagcuccagcuc

SEQ ID NO: 1764889 - RNA, 18 nt, Human
uguucagcuccagcucac

SEQ ID NO: 1764890 - RNA, 14 nt, Human
uguucagcuccagc

SEQ ID NO: 1764891 - RNA, 16 nt, Human
uguucaauguuuaaug

SEQ ID NO: 1764892 - RNA, 22 nt, Human
uguguguccacgacugucucca

SEQ ID NO: 1764893 - RNA, 12 nt, Human
ugugugauaaau

SEQ ID NO: 1764894 - RNA, 16 nt, Human
uguguguccaaaacug

SEQ ID NO: 1764895 - RNA, 19 nt, Human
uguguguccaaaacugccu

SEQ ID NO: 1764896 - RNA, 21 nt, Human
ugucauuagccugaguagaaa

SEQ ID NO: 1764897 - RNA, 20 nt, Human
ugucauuagccugaguagaa

SEQ ID NO: 1764898 - RNA, 17 nt, Human
ugucauuagccugagua

SEQ ID NO: 1764899 - RNA, 14 nt, Human
ugucauuagccuga

SEQ ID NO: 1764900 - RNA, 13 nt, Human
ugucauuagccug

SEQ ID NO: 1764901 - RNA, 20 nt, Human
ugucauauguagccuucaca

SEQ ID NO: 1764902 - RNA, 23 nt, Human
ugucccaaaaagaaaggagggga

SEQ ID NO: 1764903 - RNA, 14 nt, Human
uguccauuguccaa

SEQ ID NO: 1764904 - RNA, 17 nt, Human
uguccauuguccaaucc

SEQ ID NO: 1764905 - RNA, 18 nt, Human
ugucccauagucccugcc

SEQ ID NO: 1764906 - RNA, 19 nt, Human
ugucccaucuggucauuug

SEQ ID NO: 1764907 - RNA, 20 nt, Human
ugucccaucuggucauuugg

SEQ ID NO: 1764908 - RNA, 19 nt, Human
ugucccauagucccugcca

SEQ ID NO: 1764909 - RNA, 20 nt, Human
ugucccagaggcugccccac

SEQ ID NO: 1764910 - RNA, 20 nt, Human
ugucacguuuuguuuugugc

SEQ ID NO: 1764911 - RNA, 21 nt, Human
uguauuuaacaaaaagugcuu

SEQ ID NO: 1764912 - RNA, 13 nt, Human
uguauuuaccaaa

SEQ ID NO: 1764913 - RNA, 19 nt, Human
uguaucccaugagccucag

SEQ ID NO: 1764914 - RNA, 23 nt, Human
uguaucccaugagccucagcauc

SEQ ID NO: 1764915 - RNA, 13 nt, Human
uguauaaguuauu

SEQ ID NO: 1764916 - RNA, 23 nt, Human
uguauaaguuauuuuuguacaug

SEQ ID NO: 1764917 - RNA, 17 nt, Human
uguacgucugacaggca

SEQ ID NO: 1764918 - RNA, 16 nt, Human
uguacgucugacaggc

SEQ ID NO: 1764919 - RNA, 17 nt, Human
uguagauaauacaguuc

SEQ ID NO: 1764920 - RNA, 18 nt, Human
uguaccugcccccaaucc

SEQ ID NO: 1764921 - RNA, 20 nt, Human
uguaauggagcaucaagcca

SEQ ID NO: 1764922 - RNA, 22 nt, Human
uguaauggagcaucaagccacu

SEQ ID NO: 1764923 - RNA, 19 nt, Human
uguaaccucuucagaggcc

SEQ ID NO: 1764924 - RNA, 16 nt, Human
ugucuuuuuucacuac

SEQ ID NO: 1764925 - RNA, 22 nt, Human
ugucucaaugcucauaacggau

SEQ ID NO: 1764926 - RNA, 19 nt, Human
ugucucaaugcucauaacg

SEQ ID NO: 1764927 - RNA, 17 nt, Human
ugucucaaugcucauaa

SEQ ID NO: 1764928 - RNA, 16 nt, Human
ugucucaaugcucaua

SEQ ID NO: 1764929 - RNA, 15 nt, Human
ugucucaaugcucau

SEQ ID NO: 1764930 - RNA, 14 nt, Human
ugucucaaugcuca

SEQ ID NO: 1764931 - RNA, 21 nt, Human
uguccccaaauccgaaccucc

SEQ ID NO: 1764932 - RNA, 22 nt, Human
uguccccaaauccgaaccuccu

SEQ ID NO: 1764933 - RNA, 14 nt, Human
uguccccaaauccg

SEQ ID NO: 1764934 - RNA, 19 nt, Human
uguccccaaauccgaaccu

SEQ ID NO: 1764935 - RNA, 16 nt, Human
ugucugcagugugccc

SEQ ID NO: 1764936 - RNA, 19 nt, Human
ugucugcagugugcccccc

SEQ ID NO: 1764937 - RNA, 18 nt, Human
ugucugccauguugcccc

SEQ ID NO: 1764938 - RNA, 14 nt, Human
ugucugccccagcc

SEQ ID NO: 1764939 - RNA, 19 nt, Human
ugucugccccagcccagau

SEQ ID NO: 1764940 - RNA, 16 nt, Human
ugugauaaaucaguca

SEQ ID NO: 1764941 - RNA, 21 nt, Human
ugugacaaggauugcuacugu

SEQ ID NO: 1764942 - RNA, 15 nt, Human
uguggacacagcucu

SEQ ID NO: 1764943 - RNA, 16 nt, Human
uguggacacagcucuu

SEQ ID NO: 1764944 - RNA, 21 nt, Human
uguggacuaaaagauauaagu

SEQ ID NO: 1764945 - RNA, 14 nt, Human
uguggacacagcuc

SEQ ID NO: 1764946 - RNA, 13 nt, Human
uguggacacagcu

SEQ ID NO: 1764947 - RNA, 13 nt, Human
uguggggacuccg

SEQ ID NO: 1764948 - RNA, 20 nt, Human
uguggcuccucccagcccau

SEQ ID NO: 1764949 - RNA, 12 nt, Human
uguggggccccu

SEQ ID NO: 1764950 - RNA, 20 nt, Human
uguggggugacgggacucag

SEQ ID NO: 1764951 - RNA, 22 nt, Human
ugugcacaugcacgugugugca

SEQ ID NO: 1764952 - RNA, 13 nt, Human
ugugcaccagggu

SEQ ID NO: 1764953 - RNA, 14 nt, Human
ugugcaccaggguu

SEQ ID NO: 1764954 - RNA, 19 nt, Human
ugugcagccgcugagcgag

SEQ ID NO: 1764955 - RNA, 16 nt, Human
ugugcagguggggaga

SEQ ID NO: 1764956 - RNA, 23 nt, Human
ugugcagguggggagacugggcu

SEQ ID NO: 1764957 - RNA, 19 nt, Human
ugugcuucgggcccuuccc

SEQ ID NO: 1764958 - RNA, 15 nt, Human
ugugcuugaaggccc

SEQ ID NO: 1764959 - RNA, 21 nt, Human
ugugcuucuuucuuugggaau

SEQ ID NO: 1764960 - RNA, 14 nt, Human
ugugcuucuuucuu

SEQ ID NO: 1764961 - RNA, 14 nt, Human
uugaaucuugucuc

SEQ ID NO: 1764962 - RNA, 23 nt, Human
uugaaucuugucucaaugcucau

SEQ ID NO: 1764963 - RNA, 22 nt, Human
uugaaucuugucucaaugcuca

SEQ ID NO: 1764964 - RNA, 20 nt, Human
uugaaucuugucucaaugcu

SEQ ID NO: 1764965 - RNA, 17 nt, Human
uugaaucuugucucaau

SEQ ID NO: 1764966 - RNA, 16 nt, Human
uugaaucuugucucaa

SEQ ID NO: 1764967 - RNA, 15 nt, Human
uugaaucuugucuca

SEQ ID NO: 1764968 - RNA, 19 nt, Human
uucuguccuacucuguguc

SEQ ID NO: 1764969 - RNA, 17 nt, Human
uucuguccuacucugug

SEQ ID NO: 1764970 - RNA, 18 nt, Human
uucuguggggacuccggc

SEQ ID NO: 1764971 - RNA, 16 nt, Human
uucuguggggccccuc

SEQ ID NO: 1764972 - RNA, 19 nt, Human
uucuguggggccccucacc

SEQ ID NO: 1764973 - RNA, 20 nt, Human
uucuguggggccccucaccu

SEQ ID NO: 1764974 - RNA, 22 nt, Human
uucuguggggccccucaccuac

SEQ ID NO: 1764975 - RNA, 23 nt, Human
uucuguggggccccucaccuacu

SEQ ID NO: 1764976 - RNA, 22 nt, Human
uucuguggaugccgauuucugu

SEQ ID NO: 1764977 - RNA, 14 nt, Human
uucugagcauuuaa

SEQ ID NO: 1764978 - RNA, 15 nt, Human
uucuguucuggagga

SEQ ID NO: 1764979 - RNA, 16 nt, Human
uucuguucuggaggaa

SEQ ID NO: 1764980 - RNA, 16 nt, Human
uucuugguugaggaaa

SEQ ID NO: 1764981 - RNA, 22 nt, Human
uucuugguugaggaaacaaaca

SEQ ID NO: 1764982 - RNA, 19 nt, Human
uugaggggagagggaacgg

SEQ ID NO: 1764983 - RNA, 13 nt, Human
uugaggaaaacaa

SEQ ID NO: 1764984 - RNA, 23 nt, Human
uugaggaaaacaagcauucacaa

SEQ ID NO: 1764985 - RNA, 15 nt, Human
uugaccucaggugau

SEQ ID NO: 1764986 - RNA, 16 nt, Human
uugaaugcauuuuguu

SEQ ID NO: 1764987 - RNA, 23 nt, Human
uugaaugcauuuuguuugguauu

SEQ ID NO: 1764988 - RNA, 13 nt, Human
uugaaugcauuuu

SEQ ID NO: 1764989 - RNA, 12 nt, Human
uugaaugcauuu

SEQ ID NO: 1764990 - RNA, 17 nt, Human
uugaccugcauuguaaa

SEQ ID NO: 1764991 - RNA, 19 nt, Human
uugaccugcauuguaaaua

SEQ ID NO: 1764992 - RNA, 22 nt, Human
uugaucuguugcaagccccucu

SEQ ID NO: 1764993 - RNA, 14 nt, Human
uugcaacaggcugg

SEQ ID NO: 1764994 - RNA, 17 nt, Human
uugcaacaggcugggcu

SEQ ID NO: 1764995 - RNA, 16 nt, Human
uugcagacaggcaagc

SEQ ID NO: 1764996 - RNA, 14 nt, Human
uugcaaccucgcug

SEQ ID NO: 1764997 - RNA, 22 nt, Human
uugcagacaggcaagcaccucc

SEQ ID NO: 1764998 - RNA, 23 nt, Human
uugcagguggggguugcuguaua

SEQ ID NO: 1764999 - RNA, 16 nt, Human
uugcagguucauggau

SEQ ID NO: 1765000 - RNA, 14 nt, Human
uuggccaggcuggu

SEQ ID NO: 1765001 - RNA, 24 nt, Human
uuggccaaagccaaagcuaggccu

SEQ ID NO: 1765002 - RNA, 13 nt, Human
uuggcauuccgca

SEQ ID NO: 1765003 - RNA, 18 nt, Human
uuggcugggggccucagu

SEQ ID NO: 1765004 - RNA, 21 nt, Human
uuggcugggggccucagugcc

SEQ ID NO: 1765005 - RNA, 22 nt, Human
uuggcugggggccucagugcca

SEQ ID NO: 1765006 - RNA, 16 nt, Human
uuggguggaugccugg

SEQ ID NO: 1765007 - RNA, 17 nt, Human
uuguacagaauauuucu

SEQ ID NO: 1765008 - RNA, 21 nt, Human
uuguacagaauauuucuauug

SEQ ID NO: 1765009 - RNA, 22 nt, Human
uuguacagaauauuucuauuga

SEQ ID NO: 1765010 - RNA, 21 nt, Human
uuguaaaguugguuggauaag

SEQ ID NO: 1765011 - RNA, 16 nt, Human
uuguaaaggaauuuaa

SEQ ID NO: 1765012 - RNA, 14 nt, Human
uuguagagccaggg

SEQ ID NO: 1765013 - RNA, 15 nt, Human
uuguagagccagggu

SEQ ID NO: 1765014 - RNA, 17 nt, Human
uuguauuagauguucuc

SEQ ID NO: 1765015 - RNA, 16 nt, Human
uuguauuagauguucu

SEQ ID NO: 1765016 - RNA, 15 nt, Human
uuguauuagauguuc

SEQ ID NO: 1765017 - RNA, 13 nt, Human
uuguauuagaugu

SEQ ID NO: 1765018 - RNA, 14 nt, Human
uuguauuacaaauc

SEQ ID NO: 1765019 - RNA, 18 nt, Human
uuguaucgauguuaugua

SEQ ID NO: 1765020 - RNA, 21 nt, Human
uuguaucgauguuauguaaaa

SEQ ID NO: 1765021 - RNA, 19 nt, Human
uugcugccccaucagugcu

SEQ ID NO: 1765022 - RNA, 20 nt, Human
uugcugccccaucagugcuc

SEQ ID NO: 1765023 - RNA, 12 nt, Human
uugcugcagaga

SEQ ID NO: 1765024 - RNA, 21 nt, Human
uugcugcagagaaacuuaagc

SEQ ID NO: 1765025 - RNA, 20 nt, Human
uugccucuuuuaccugcugc

SEQ ID NO: 1765026 - RNA, 21 nt, Human
uugccucuuuuaccugcugcu

SEQ ID NO: 1765027 - RNA, 16 nt, Human
uugccucugccucuga

SEQ ID NO: 1765028 - RNA, 18 nt, Human
uugccucugccucugaca

SEQ ID NO: 1765029 - RNA, 11 nt, Human
uugccucugcc

SEQ ID NO: 1765030 - RNA, 14 nt, Human
uugccucugccucu

SEQ ID NO: 1765031 - RNA, 17 nt, Human
uugccauauugcacaug

SEQ ID NO: 1765032 - RNA, 15 nt, Human
uugccauauugcaca

SEQ ID NO: 1765033 - RNA, 13 nt, Human
uugccauauugca

SEQ ID NO: 1765034 - RNA, 23 nt, Human
uugcccacgcuggagugcaguga

SEQ ID NO: 1765035 - RNA, 23 nt, Human
uugccauauugcacaugucuuaa

SEQ ID NO: 1765036 - RNA, 22 nt, Human
uugccauauugcacaugucuua

SEQ ID NO: 1765037 - RNA, 11 nt, Human
uugcccaggca

SEQ ID NO: 1765038 - RNA, 16 nt, Human
uugcuguauaaguuau

SEQ ID NO: 1765039 - RNA, 17 nt, Human
uuggaaccaugccuucc

SEQ ID NO: 1765040 - RNA, 14 nt, Human
uuggaccagaucua

SEQ ID NO: 1765041 - RNA, 12 nt, Human
uucucugucuca

SEQ ID NO: 1765042 - RNA, 12 nt, Human
uucucugggaga

SEQ ID NO: 1765043 - RNA, 15 nt, Human
uucucugggagaaaa

SEQ ID NO: 1765044 - RNA, 16 nt, Human
uucucugggagaaaau

SEQ ID NO: 1765045 - RNA, 19 nt, Human
uucucugggagaaaaucau

SEQ ID NO: 1765046 - RNA, 20 nt, Human
uucucugggagaaaaucauc

SEQ ID NO: 1765047 - RNA, 23 nt, Human
uucucugggagaaaaucaucaag

SEQ ID NO: 1765048 - RNA, 13 nt, Human
uucucugucucau

SEQ ID NO: 1765049 - RNA, 11 nt, Human
uucuccaggcu

SEQ ID NO: 1765050 - RNA, 13 nt, Human
uucuccacccugc

SEQ ID NO: 1765051 - RNA, 20 nt, Human
uucuccauccacaugggagc

SEQ ID NO: 1765052 - RNA, 14 nt, Human
uucuccagggucag

SEQ ID NO: 1765053 - RNA, 17 nt, Human
uucucuccuguccuccc

SEQ ID NO: 1765054 - RNA, 19 nt, Human
uucucuccuguccucccuc

SEQ ID NO: 1765055 - RNA, 21 nt, Human
uucucuccuguccucccucac

SEQ ID NO: 1765056 - RNA, 22 nt, Human
uucucuccuguccucccucacc

SEQ ID NO: 1765057 - RNA, 19 nt, Human
uucuccaaaaaucugccug

SEQ ID NO: 1765058 - RNA, 21 nt, Human
uucuccaaaaaucugccuggg

SEQ ID NO: 1765059 - RNA, 17 nt, Human
uucuauuucuccuccau

SEQ ID NO: 1765060 - RNA, 19 nt, Human
uucuauuucuccuccaugg

SEQ ID NO: 1765061 - RNA, 14 nt, Human
uucuauugaauucg

SEQ ID NO: 1765062 - RNA, 13 nt, Human
uuccuucucccau

SEQ ID NO: 1765063 - RNA, 15 nt, Human
uuccuucucccaucu

SEQ ID NO: 1765064 - RNA, 20 nt, Human
uuccuucucccaucucuucc

SEQ ID NO: 1765065 - RNA, 14 nt, Human
uuccuuccagccca

SEQ ID NO: 1765066 - RNA, 16 nt, Human
uucccuuguaaacaga

SEQ ID NO: 1765067 - RNA, 20 nt, Human
uuccuccucugacuugggga

SEQ ID NO: 1765068 - RNA, 23 nt, Human
uuccucauaguaugguggcuggg

SEQ ID NO: 1765069 - RNA, 20 nt, Human
uuccuaguucuguagaaaug

SEQ ID NO: 1765070 - RNA, 17 nt, Human
uuccuaguucuguagaa

SEQ ID NO: 1765071 - RNA, 16 nt, Human
uuccuaguucuguaga

SEQ ID NO: 1765072 - RNA, 17 nt, Human
uucauaaguauuucaaa

SEQ ID NO: 1765073 - RNA, 13 nt, Human
uucaguggcagcu

SEQ ID NO: 1765074 - RNA, 13 nt, Human
uucaucuuccugu

SEQ ID NO: 1765075 - RNA, 14 nt, Human
uucaucuuccugug

SEQ ID NO: 1765076 - RNA, 15 nt, Human
uucaucuuccugugu

SEQ ID NO: 1765077 - RNA, 17 nt, Human
uucaucuuccugugucc

SEQ ID NO: 1765078 - RNA, 18 nt, Human
uucaucuuccuguguccu

SEQ ID NO: 1765079 - RNA, 20 nt, Human
uucaucuuccuguguccuga

SEQ ID NO: 1765080 - RNA, 13 nt, Human
uuccauuugcaag

SEQ ID NO: 1765081 - RNA, 17 nt, Human
uuccauuugcaagggaa

SEQ ID NO: 1765082 - RNA, 20 nt, Human
uuccacugucaagaaagagc

SEQ ID NO: 1765083 - RNA, 16 nt, Human
uuccacugagggcagu

SEQ ID NO: 1765084 - RNA, 14 nt, Human
uucauuuucuagau

SEQ ID NO: 1765085 - RNA, 19 nt, Human
uucauuuucuagauacaau

SEQ ID NO: 1765086 - RNA, 20 nt, Human
uucauuuucuagauacaaua

SEQ ID NO: 1765087 - RNA, 21 nt, Human
uucauuuucuagauacaauaa

SEQ ID NO: 1765088 - RNA, 22 nt, Human
uucauuuucuagauacaauaaa

SEQ ID NO: 1765089 - RNA, 15 nt, Human
uuccacugagggcag

SEQ ID NO: 1765090 - RNA, 14 nt, Human
uucauuuuuaaaug

SEQ ID NO: 1765091 - RNA, 16 nt, Human
uucauuuuuaaaugug

SEQ ID NO: 1765092 - RNA, 23 nt, Human
uucagcuccagcucaccagcccc

SEQ ID NO: 1765093 - RNA, 17 nt, Human
uucaccccagggccuga

SEQ ID NO: 1765094 - RNA, 20 nt, Human
uucaccccagggccugagcc

SEQ ID NO: 1765095 - RNA, 22 nt, Human
uucaccccagggccugagccug

SEQ ID NO: 1765096 - RNA, 23 nt, Human
uucagaggcccucgcugccagcu

SEQ ID NO: 1765097 - RNA, 22 nt, Human
uucagaggcccucgcugccagc

SEQ ID NO: 1765098 - RNA, 13 nt, Human
uuauuuuccaaaa

SEQ ID NO: 1765099 - RNA, 21 nt, Human
uucaaauugugugugcucugc

SEQ ID NO: 1765100 - RNA, 14 nt, Human
uucaaauugugugu

SEQ ID NO: 1765101 - RNA, 16 nt, Human
uucaaagccaagaccu

SEQ ID NO: 1765102 - RNA, 21 nt, Human
uucaaagccaagaccucacac

SEQ ID NO: 1765103 - RNA, 13 nt, Human
uucaaagccagcg

SEQ ID NO: 1765104 - RNA, 21 nt, Human
uucaaagccagcguccuccuc

SEQ ID NO: 1765105 - RNA, 12 nt, Human
uucaaagcaauu

SEQ ID NO: 1765106 - RNA, 19 nt, Human
uucaaagcaauugaaaugc

SEQ ID NO: 1765107 - RNA, 22 nt, Human
uucaaagcaauugaaaugcauu

SEQ ID NO: 1765108 - RNA, 18 nt, Human
uucaauucucauuuguca

SEQ ID NO: 1765109 - RNA, 18 nt, Human
uuuagaguuagacuguug

SEQ ID NO: 1765110 - RNA, 17 nt, Human
uuuagaguuagacuguu

SEQ ID NO: 1765111 - RNA, 16 nt, Human
uuuagaguuagacugu

SEQ ID NO: 1765112 - RNA, 14 nt, Human
uuuaugaauauaau

SEQ ID NO: 1765113 - RNA, 18 nt, Human
uuuaugaaagguuuacau

SEQ ID NO: 1765114 - RNA, 19 nt, Human
uuuaugaaagguuuacauu

SEQ ID NO: 1765115 - RNA, 17 nt, Human
uuuauuguguuugucau

SEQ ID NO: 1765116 - RNA, 16 nt, Human
uuuauuguguuuguca

SEQ ID NO: 1765117 - RNA, 22 nt, Human
uuuauuguguuugucauuagcc

SEQ ID NO: 1765118 - RNA, 21 nt, Human
uuuauuguguuugucauuagc

SEQ ID NO: 1765119 - RNA, 13 nt, Human
uuuauucaauaaa

SEQ ID NO: 1765120 - RNA, 12 nt, Human
uuuauugccuuc

SEQ ID NO: 1765121 - RNA, 13 nt, Human
uuuauugccuucu

SEQ ID NO: 1765122 - RNA, 22 nt, Human
uuuauugccuucucaccagcug

SEQ ID NO: 1765123 - RNA, 15 nt, Human
uuuacuuuguguuca

SEQ ID NO: 1765124 - RNA, 19 nt, Human
uuuagaaaaagaacaugca

SEQ ID NO: 1765125 - RNA, 20 nt, Human
uuuagaaaaagaacaugcag

SEQ ID NO: 1765126 - RNA, 21 nt, Human
uuuagaaaaagaacaugcagu

SEQ ID NO: 1765127 - RNA, 22 nt, Human
uuuagaaaaagaacaugcaguu

SEQ ID NO: 1765128 - RNA, 11 nt, Human
uuuagaaaaua

SEQ ID NO: 1765129 - RNA, 13 nt, Human
uuuagaaaauaua

SEQ ID NO: 1765130 - RNA, 14 nt, Human
uuuagaaguagaau

SEQ ID NO: 1765131 - RNA, 15 nt, Human
uuguauuguuucaau

SEQ ID NO: 1765132 - RNA, 14 nt, Human
uuguauucucugag

SEQ ID NO: 1765133 - RNA, 15 nt, Human
uuguauucucugagc

SEQ ID NO: 1765134 - RNA, 16 nt, Human
uuguauucucugagcu

SEQ ID NO: 1765135 - RNA, 20 nt, Human
uuguauucucugagcugugc

SEQ ID NO: 1765136 - RNA, 22 nt, Human
uuguauucucugagcugugcag

SEQ ID NO: 1765137 - RNA, 20 nt, Human
uuguauuuauucaauaaagu

SEQ ID NO: 1765138 - RNA, 16 nt, Human
uuguauuuauucaaua

SEQ ID NO: 1765139 - RNA, 15 nt, Human
uuguauuuauucaau

SEQ ID NO: 1765140 - RNA, 14 nt, Human
uuguauuuauucaa

SEQ ID NO: 1765141 - RNA, 16 nt, Human
uuguauuguuucaauu

SEQ ID NO: 1765142 - RNA, 22 nt, Human
uuuaauccccaguaaaauugcc

SEQ ID NO: 1765143 - RNA, 16 nt, Human
uuuaauccccaguaaa

SEQ ID NO: 1765144 - RNA, 15 nt, Human
uuuaauccccaguaa

SEQ ID NO: 1765145 - RNA, 16 nt, Human
uuuccaaaccuuaucu

SEQ ID NO: 1765146 - RNA, 24 nt, Human
uuuccaaaaguggccucuuugucu

SEQ ID NO: 1765147 - RNA, 15 nt, Human
uuucagcagcugcag

SEQ ID NO: 1765148 - RNA, 13 nt, Human
uuuauuugguucc

SEQ ID NO: 1765149 - RNA, 14 nt, Human
uuuauuugcuucuu

SEQ ID NO: 1765150 - RNA, 21 nt, Human
uuucuaauaaacuuggauucu

SEQ ID NO: 1765151 - RNA, 15 nt, Human
uuucuagauacaaua

SEQ ID NO: 1765152 - RNA, 16 nt, Human
uuucuagauacaauaa

SEQ ID NO: 1765153 - RNA, 17 nt, Human
uuucuagauacaauaaa

SEQ ID NO: 1765154 - RNA, 18 nt, Human
uuucuagauacaauaaau

SEQ ID NO: 1765155 - RNA, 20 nt, Human
uuucuagauacaauaaauug

SEQ ID NO: 1765156 - RNA, 23 nt, Human
uuucuagauacaauaaauugcua

SEQ ID NO: 1765157 - RNA, 14 nt, Human
uuucuccuccaugg

SEQ ID NO: 1765158 - RNA, 16 nt, Human
uuuccuauuucagugu

SEQ ID NO: 1765159 - RNA, 17 nt, Human
uuuccucuuccugccua

SEQ ID NO: 1765160 - RNA, 15 nt, Human
uuuccuaugcuauug

SEQ ID NO: 1765161 - RNA, 21 nt, Human
uuuccuaguucuguagaaaug

SEQ ID NO: 1765162 - RNA, 20 nt, Human
uuuccuacuuauaaaguaga

SEQ ID NO: 1765163 - RNA, 13 nt, Human
uuuuaugcauguu

SEQ ID NO: 1765164 - RNA, 13 nt, Human
uuuucaacuuuga

SEQ ID NO: 1765165 - RNA, 15 nt, Human
uuuucaacuuugaau

SEQ ID NO: 1765166 - RNA, 16 nt, Human
uuuucaacuuugaaua

SEQ ID NO: 1765167 - RNA, 18 nt, Human
uuuucaacuuugaauaaa

SEQ ID NO: 1765168 - RNA, 21 nt, Human
uuuucaacuuugaauaaagaa

SEQ ID NO: 1765169 - RNA, 24 nt, Human
uuuucaacuuugaauaaagaauac

SEQ ID NO: 1765170 - RNA, 14 nt, Human
uuuucacuuaugaa

SEQ ID NO: 1765171 - RNA, 18 nt, Human
uuuuccauuaugcuguag

SEQ ID NO: 1765172 - RNA, 15 nt, Human
uuuuccuaugcuauu

SEQ ID NO: 1765173 - RNA, 19 nt, Human
uuuuccuaugcuauugaca

SEQ ID NO: 1765174 - RNA, 20 nt, Human
uuuuccuaugcuauugacaa

SEQ ID NO: 1765175 - RNA, 14 nt, Human
uuuucgccuuuccu

SEQ ID NO: 1765176 - RNA, 17 nt, Human
uuuguuuauuaaauagu

SEQ ID NO: 1765177 - RNA, 18 nt, Human
uuugguuaaaaaaaagaa

SEQ ID NO: 1765178 - RNA, 13 nt, Human
uuuggaauaaagu

SEQ ID NO: 1765179 - RNA, 19 nt, Human
uuugucaauuuaugaauau

SEQ ID NO: 1765180 - RNA, 23 nt, Human
uuugucauuagccugaguagaaa

SEQ ID NO: 1765181 - RNA, 20 nt, Human
uuugucauuagccugaguag

SEQ ID NO: 1765182 - RNA, 13 nt, Human
uuugucauaucaa

SEQ ID NO: 1765183 - RNA, 20 nt, Human
uuuguguuguuggaaaaagu

SEQ ID NO: 1765184 - RNA, 21 nt, Human
uuuguguuguuggaaaaaguc

SEQ ID NO: 1765185 - RNA, 16 nt, Human
uuuguuauuuugcaac

SEQ ID NO: 1765186 - RNA, 14 nt, Human
uuucuuagaaauuu

SEQ ID NO: 1765187 - RNA, 22 nt, Human
uuucuuagaaauuuauuuccua

SEQ ID NO: 1765188 - RNA, 15 nt, Human
uuugagcagggcuca

SEQ ID NO: 1765189 - RNA, 16 nt, Human
uuugagcauggguuca

SEQ ID NO: 1765190 - RNA, 17 nt, Human
uuucugagugccuucug

SEQ ID NO: 1765191 - RNA, 14 nt, Human
uuugcagacaggca

SEQ ID NO: 1765192 - RNA, 18 nt, Human
uuugccauguuggccagg

SEQ ID NO: 1765193 - RNA, 15 nt, Human
uuuggaagcucuucu

SEQ ID NO: 1765194 - RNA, 23 nt, Human
uuuuuuagaaagcauuugaaugc

SEQ ID NO: 1765195 - RNA, 12 nt, Human
uuuuucugccuc

SEQ ID NO: 1765196 - RNA, 13 nt, Human
uuuuucugccucc

SEQ ID NO: 1765197 - RNA, 14 nt, Human
uuuuucugccuccu

SEQ ID NO: 1765198 - RNA, 15 nt, Human
cugacagacacaggc

SEQ ID NO: 1765199 - RNA, 12 nt, Human
cugacagacaca

SEQ ID NO: 1765200 - RNA, 14 nt, Human
cugacagacacagg

SEQ ID NO: 1765201 - RNA, 23 nt, Human
cucuuagaggaaggagauaggga

SEQ ID NO: 1765202 - RNA, 17 nt, Human
cugaaaacacugugcac

SEQ ID NO: 1765203 - RNA, 19 nt, Human
cugaaggacauugcggaca

SEQ ID NO: 1765204 - RNA, 20 nt, Human
cugaaggacauugcggacag

SEQ ID NO: 1765205 - RNA, 21 nt, Human
cugaaggacauugcggacagc

SEQ ID NO: 1765206 - RNA, 22 nt, Human
cucugcgugucaccugugcuuc

SEQ ID NO: 1765207 - RNA, 17 nt, Human
cucugcugacagacaca

SEQ ID NO: 1765208 - RNA, 18 nt, Human
cucugcugacagacacag

SEQ ID NO: 1765209 - RNA, 19 nt, Human
cucugcugacagacacagg

SEQ ID NO: 1765210 - RNA, 20 nt, Human
cucugcugacagacacaggc

SEQ ID NO: 1765211 - RNA, 22 nt, Human
cucuguaucaggacccagagga

SEQ ID NO: 1765212 - RNA, 13 nt, Human
cuccguccauauc

SEQ ID NO: 1765213 - RNA, 23 nt, Human
cuccguccauaucagaacugugc

SEQ ID NO: 1765214 - RNA, 19 nt, Human
cucggcuuuucucagcugg

SEQ ID NO: 1765215 - RNA, 15 nt, Human
cucugaaggacauug

SEQ ID NO: 1765216 - RNA, 19 nt, Human
cuccgcuuucuacccagcg

SEQ ID NO: 1765217 - RNA, 12 nt, Human
cucccaccucag

SEQ ID NO: 1765218 - RNA, 13 nt, Human
cucccaccucagc

SEQ ID NO: 1765219 - RNA, 13 nt, Human
cuccagugaaacu

SEQ ID NO: 1765220 - RNA, 24 nt, Human
cuccccuccggacuggugcccucc

SEQ ID NO: 1765221 - RNA, 14 nt, Human
cucccugacuuuuc

SEQ ID NO: 1765222 - RNA, 16 nt, Human
cucccugacuuuucug

SEQ ID NO: 1765223 - RNA, 21 nt, Human
cuccagggucagaaacaggac

SEQ ID NO: 1765224 - RNA, 19 nt, Human
cuccaggggggacaauaug

SEQ ID NO: 1765225 - RNA, 20 nt, Human
cuccagggguccuaggccuc

SEQ ID NO: 1765226 - RNA, 22 nt, Human
cuccagggguccuaggccucaa

SEQ ID NO: 1765227 - RNA, 20 nt, Human
cuccagggucagaaacagga

SEQ ID NO: 1765228 - RNA, 14 nt, Human
cucagucucugagc

SEQ ID NO: 1765229 - RNA, 20 nt, Human
cucagucucugagcagugaa

SEQ ID NO: 1765230 - RNA, 13 nt, Human
cucagugccacua

SEQ ID NO: 1765231 - RNA, 17 nt, Human
cucaucuucuucaccau

SEQ ID NO: 1765232 - RNA, 13 nt, Human
cucagucucugag

SEQ ID NO: 1765233 - RNA, 22 nt, Human
cucagccucccaaagugcuggg

SEQ ID NO: 1765234 - RNA, 13 nt, Human
cucagccucccga

SEQ ID NO: 1765235 - RNA, 23 nt, Human
cucagccucccgaauagcuggga

SEQ ID NO: 1765236 - RNA, 21 nt, Human
cucagccucccaaagugcugg

SEQ ID NO: 1765237 - RNA, 14 nt, Human
cucagccucccaaa

SEQ ID NO: 1765238 - RNA, 16 nt, Human
cucagccucccaaagu

SEQ ID NO: 1765239 - RNA, 13 nt, Human
cucagccucccaa

SEQ ID NO: 1765240 - RNA, 13 nt, Human
cucagcggggaca

SEQ ID NO: 1765241 - RNA, 14 nt, Human
cucagcgcggcccu

SEQ ID NO: 1765242 - RNA, 16 nt, Human
cucagcgcggcccucc

SEQ ID NO: 1765243 - RNA, 20 nt, Human
cggcucugugggugaugggg

SEQ ID NO: 1765244 - RNA, 22 nt, Human
cggcucugugggugauggggag

SEQ ID NO: 1765245 - RNA, 15 nt, Human
cgugguaugucugcc

SEQ ID NO: 1765246 - RNA, 16 nt, Human
cgugguaugucugcca

SEQ ID NO: 1765247 - RNA, 17 nt, Human
cgugguaugucugccau

SEQ ID NO: 1765248 - RNA, 16 nt, Human
cguggucccugaggau

SEQ ID NO: 1765249 - RNA, 14 nt, Human
cuaagucuuuccau

SEQ ID NO: 1765250 - RNA, 16 nt, Human
cuaagucuuuccauug

SEQ ID NO: 1765251 - RNA, 20 nt, Human
cuaagugauccucccaccuc

SEQ ID NO: 1765252 - RNA, 22 nt, Human
cuaagugauccucccaccucag

SEQ ID NO: 1765253 - RNA, 23 nt, Human
cuaauuuuuaagaaauuuugccu

SEQ ID NO: 1765254 - RNA, 17 nt, Human
cuaauuuuuaagcaaaa

SEQ ID NO: 1765255 - RNA, 19 nt, Human
cuaccugacacucccuugg

SEQ ID NO: 1765256 - RNA, 20 nt, Human
cuaccugacacucccuuggg

SEQ ID NO: 1765257 - RNA, 15 nt, Human
cuagccgguuccugu

SEQ ID NO: 1765258 - RNA, 16 nt, Human
cuagccgguuccuguc

SEQ ID NO: 1765259 - RNA, 19 nt, Human
cuagccgguuccugucccu

SEQ ID NO: 1765260 - RNA, 13 nt, Human
cuagggaucccuc

SEQ ID NO: 1765261 - RNA, 17 nt, Human
cuagggaucccucaucu

SEQ ID NO: 1765262 - RNA, 23 nt, Human
cuagggaucccucaucugucccu

SEQ ID NO: 1765263 - RNA, 16 nt, Human
cuagggccaagcccag

SEQ ID NO: 1765264 - RNA, 17 nt, Human
cuagggccaagcccagc

SEQ ID NO: 1765265 - RNA, 18 nt, Human
cuagggccaagcccagca

SEQ ID NO: 1765266 - RNA, 16 nt, Human
cuaguucuguagaaau

SEQ ID NO: 1765267 - RNA, 23 nt, Human
cuaguucuguagaaaugguugua

SEQ ID NO: 1765268 - RNA, 17 nt, Human
cuaguucuguagaaaug

SEQ ID NO: 1765269 - RNA, 22 nt, Human
cuauaaaucaacaccuuaauau

SEQ ID NO: 1765270 - RNA, 23 nt, Human
cuauaagauuccaaaaagcacau

SEQ ID NO: 1765271 - RNA, 14 nt, Human
cgccuacaggagug

SEQ ID NO: 1765272 - RNA, 13 nt, Human
cgaguagcuggga

SEQ ID NO: 1765273 - RNA, 14 nt, Human
cgaguagcugggac

SEQ ID NO: 1765274 - RNA, 15 nt, Human
cgaguagcugggacu

SEQ ID NO: 1765275 - RNA, 16 nt, Human
cgaguagcugggacua

SEQ ID NO: 1765276 - RNA, 14 nt, Human
cggagucccaccuu

SEQ ID NO: 1765277 - RNA, 19 nt, Human
cggcucacugcagccucaa

SEQ ID NO: 1765278 - RNA, 18 nt, Human
cggcucacugcagccuca

SEQ ID NO: 1765279 - RNA, 11 nt, Human
cggagccacuc

SEQ ID NO: 1765280 - RNA, 13 nt, Human
cggagccacuccu

SEQ ID NO: 1765281 - RNA, 17 nt, Human
cggagccacuccucuga

SEQ ID NO: 1765282 - RNA, 18 nt, Human
cggagccacuccucugac

SEQ ID NO: 1765283 - RNA, 21 nt, Human
cggagccacuccucugacuca

SEQ ID NO: 1765284 - RNA, 16 nt, Human
ccuucuggaaacugug

SEQ ID NO: 1765285 - RNA, 19 nt, Human
ccuucuggaaacugugaag

SEQ ID NO: 1765286 - RNA, 13 nt, Human
ccuggccugagag

SEQ ID NO: 1765287 - RNA, 16 nt, Human
ccuggccugagaguca

SEQ ID NO: 1765288 - RNA, 19 nt, Human
ccuucugucccucacagca

SEQ ID NO: 1765289 - RNA, 18 nt, Human
ccuucugucccucacagc

SEQ ID NO: 1765290 - RNA, 14 nt, Human
ccuuuagcgcccag

SEQ ID NO: 1765291 - RNA, 20 nt, Human
ccuuuagcgcccaguugggu

SEQ ID NO: 1765292 - RNA, 18 nt, Human
ccuuuaggguucugccuc

SEQ ID NO: 1765293 - RNA, 19 nt, Human
ccuuuaggguucugccucu

SEQ ID NO: 1765294 - RNA, 13 nt, Human
ccuugcuuuugcu

SEQ ID NO: 1765295 - RNA, 15 nt, Human
ccuugcuuuugcuuc

SEQ ID NO: 1765296 - RNA, 16 nt, Human
ccuugcuuuugcuucu

SEQ ID NO: 1765297 - RNA, 17 nt, Human
ccuugcuuuugcuucua

SEQ ID NO: 1765298 - RNA, 18 nt, Human
ccuugcuuuugcuucuag

SEQ ID NO: 1765299 - RNA, 21 nt, Human
ccuugcuuuugcuucuagagc

SEQ ID NO: 1765300 - RNA, 19 nt, Human
ccuuucccaggugcuacac

SEQ ID NO: 1765301 - RNA, 17 nt, Human
ccuuuucgccuuuccuc

SEQ ID NO: 1765302 - RNA, 19 nt, Human
ccuuuucgccuuuccucuc

SEQ ID NO: 1765303 - RNA, 21 nt, Human
ccuuuugaaauuaaccucuca

SEQ ID NO: 1765304 - RNA, 19 nt, Human
ccuuuucuuuguucaagau

SEQ ID NO: 1765305 - RNA, 23 nt, Human
cgaccagacaccuugacagggca

SEQ ID NO: 1765306 - RNA, 12 nt, Human
ccuuuuggggga

SEQ ID NO: 1765307 - RNA, 23 nt, Human
ccagaugcaccagcccuuagcag

SEQ ID NO: 1765308 - RNA, 18 nt, Human
ccagaugcaccagcccuu

SEQ ID NO: 1765309 - RNA, 17 nt, Human
ccagaugcaccagcccu

SEQ ID NO: 1765310 - RNA, 15 nt, Human
ccagaugcaccagcc

SEQ ID NO: 1765311 - RNA, 16 nt, Human
ccaccuuggcucaagu

SEQ ID NO: 1765312 - RNA, 13 nt, Human
ccagaucccaggc

SEQ ID NO: 1765313 - RNA, 18 nt, Human
ccagaucccaggccccug

SEQ ID NO: 1765314 - RNA, 19 nt, Human
ccagaucccaggccccugg

SEQ ID NO: 1765315 - RNA, 22 nt, Human
ccagaucccaggccccuggagg

SEQ ID NO: 1765316 - RNA, 16 nt, Human
ccagauccucucuggg

SEQ ID NO: 1765317 - RNA, 15 nt, Human
ccagcucaccagccc

SEQ ID NO: 1765318 - RNA, 16 nt, Human
ccagcucaccagcccc

SEQ ID NO: 1765319 - RNA, 22 nt, Human
ccagcucaccagccccagugcc

SEQ ID NO: 1765320 - RNA, 24 nt, Human
ccagcagcggaaccgcccaggauc

SEQ ID NO: 1765321 - RNA, 15 nt, Human
ccagcagcagcccaa

SEQ ID NO: 1765322 - RNA, 23 nt, Human
ccagcagcagcccaagcuucccu

SEQ ID NO: 1765323 - RNA, 20 nt, Human
ccaggcuccuuuagcgccca

SEQ ID NO: 1765324 - RNA, 21 nt, Human
ccaggcuccuuuagcgcccag

SEQ ID NO: 1765325 - RNA, 19 nt, Human
ccaggcuggcgugcagugg

SEQ ID NO: 1765326 - RNA, 17 nt, Human
ccaggcuggcgugcagu

SEQ ID NO: 1765327 - RNA, 18 nt, Human
ccaggcuggcgugcagug

SEQ ID NO: 1765328 - RNA, 10 nt, Human
ccagggucag

SEQ ID NO: 1765329 - RNA, 17 nt, Human
ccagggucagaaacagg

SEQ ID NO: 1765330 - RNA, 18 nt, Human
ccagggucagaaacagga

SEQ ID NO: 1765331 - RNA, 19 nt, Human
ccagggucagaaacaggac

SEQ ID NO: 1765332 - RNA, 17 nt, Human
ccaguuggguggaugcc

SEQ ID NO: 1765333 - RNA, 19 nt, Human
ccaguuggguggaugccug

SEQ ID NO: 1765334 - RNA, 20 nt, Human
ccaguuggguggaugccugg

SEQ ID NO: 1765335 - RNA, 21 nt, Human
ccaugagccucagcauccugg

SEQ ID NO: 1765336 - RNA, 23 nt, Human
ccaugagccucagcauccuggca

SEQ ID NO: 1765337 - RNA, 18 nt, Human
ccauggugugaucgucug

SEQ ID NO: 1765338 - RNA, 19 nt, Human
ccauggugugaucgucuga

SEQ ID NO: 1765339 - RNA, 23 nt, Human
ccauguaaauccccacugggacc

SEQ ID NO: 1765340 - RNA, 22 nt, Human
cccacugcuuuuggucugugug

SEQ ID NO: 1765341 - RNA, 19 nt, Human
cccacugcuuuuggucugu

SEQ ID NO: 1765342 - RNA, 12 nt, Human
cccacugcucug

SEQ ID NO: 1765343 - RNA, 13 nt, Human
cccacugcucugg

SEQ ID NO: 1765344 - RNA, 18 nt, Human
cccacucagcuccgugaa

SEQ ID NO: 1765345 - RNA, 16 nt, Human
cccaggaaaggcccag

SEQ ID NO: 1765346 - RNA, 13 nt, Human
cccaggcuggcgu

SEQ ID NO: 1765347 - RNA, 17 nt, Human
cccaggcuggcgugcag

SEQ ID NO: 1765348 - RNA, 15 nt, Human
cccauagucccugcc

SEQ ID NO: 1765349 - RNA, 20 nt, Human
cccauagauacucucuucuu

SEQ ID NO: 1765350 - RNA, 13 nt, Human
cccagggccugag

SEQ ID NO: 1765351 - RNA, 15 nt, Human
cccagggccugagcc

SEQ ID NO: 1765352 - RNA, 19 nt, Human
cccagggccugagccuggc

SEQ ID NO: 1765353 - RNA, 14 nt, Human
cccagggccugcag

SEQ ID NO: 1765354 - RNA, 16 nt, Human
cccagggccugcagga

SEQ ID NO: 1765355 - RNA, 19 nt, Human
cccagggccugcaggaccu

SEQ ID NO: 1765356 - RNA, 12 nt, Human
ccccucugucca

SEQ ID NO: 1765357 - RNA, 14 nt, Human
cccgaauagcuggg

SEQ ID NO: 1765358 - RNA, 14 nt, Human
ccccucuguccagg

SEQ ID NO: 1765359 - RNA, 22 nt, Human
ccccucuguccaggcacugaga

SEQ ID NO: 1765360 - RNA, 14 nt, Human
ccccucuucugagc

SEQ ID NO: 1765361 - RNA, 13 nt, Human
ccccuuuccuguc

SEQ ID NO: 1765362 - RNA, 12 nt, Human
cccggcuccagg

SEQ ID NO: 1765363 - RNA, 13 nt, Human
cccggcuccaggc

SEQ ID NO: 1765364 - RNA, 14 nt, Human
cccggcuccaggcu

SEQ ID NO: 1765365 - RNA, 15 nt, Human
cccggcuccaggcuc

SEQ ID NO: 1765366 - RNA, 16 nt, Human
cccggcuccaggcucc

SEQ ID NO: 1765367 - RNA, 18 nt, Human
cccgggacgcagcaggag

SEQ ID NO: 1765368 - RNA, 16 nt, Human
cccggcucugugggug

SEQ ID NO: 1765369 - RNA, 22 nt, Human
cccggcucugugggugaugggg

SEQ ID NO: 1765370 - RNA, 20 nt, Human
ccccuuuacccucuuugcug

SEQ ID NO: 1765371 - RNA, 23 nt, Human
ccccgaggccuucucugaaggac

SEQ ID NO: 1765372 - RNA, 15 nt, Human
ccccggagggcugcg

SEQ ID NO: 1765373 - RNA, 19 nt, Human
ccccaucuccccucagcuc

SEQ ID NO: 1765374 - RNA, 22 nt, Human
ccccaucucgcucccucccagg

SEQ ID NO: 1765375 - RNA, 22 nt, Human
ccccagcaagugagagcugggu

SEQ ID NO: 1765376 - RNA, 22 nt, Human
ccccagcaagugguccuagagg

SEQ ID NO: 1765377 - RNA, 14 nt, Human
ccugcccaggcccc

SEQ ID NO: 1765378 - RNA, 15 nt, Human
ccugcccaggccccu

SEQ ID NO: 1765379 - RNA, 16 nt, Human
ccugcccaggccccug

SEQ ID NO: 1765380 - RNA, 18 nt, Human
ccugcccaggccccugcc

SEQ ID NO: 1765381 - RNA, 16 nt, Human
ccuggaggcugccucc

SEQ ID NO: 1765382 - RNA, 17 nt, Human
ccuggaggcugccuccc

SEQ ID NO: 1765383 - RNA, 18 nt, Human
ccuggaggcugccuccca

SEQ ID NO: 1765384 - RNA, 19 nt, Human
ccuggaggcugccucccaa

SEQ ID NO: 1765385 - RNA, 21 nt, Human
ccuggaggcugccucccaaca

SEQ ID NO: 1765386 - RNA, 18 nt, Human
ccuggcacccggccccug

SEQ ID NO: 1765387 - RNA, 13 nt, Human
ccucuuggguuca

SEQ ID NO: 1765388 - RNA, 19 nt, Human
ccucuuuagaguuagacug

SEQ ID NO: 1765389 - RNA, 17 nt, Human
ccucuuuagaguuagac

SEQ ID NO: 1765390 - RNA, 12 nt, Human
ccucuuuagagu

SEQ ID NO: 1765391 - RNA, 13 nt, Human
ccugacugcucag

SEQ ID NO: 1765392 - RNA, 14 nt, Human
ccugacugcucaga

SEQ ID NO: 1765393 - RNA, 13 nt, Human
ccugacuuuucug

SEQ ID NO: 1765394 - RNA, 18 nt, Human
ccugacuuuucuguggau

SEQ ID NO: 1765395 - RNA, 22 nt, Human
ccugcacuugcagacucuacag

SEQ ID NO: 1765396 - RNA, 22 nt, Human
ccugcagaaguaagccucauca

SEQ ID NO: 1765397 - RNA, 20 nt, Human
ccugaguagaaaggccuuua

SEQ ID NO: 1765398 - RNA, 14 nt, Human
ccugaguagaaagg

SEQ ID NO: 1765399 - RNA, 21 nt, Human
ccugaguagaaaggccuuuaa

SEQ ID NO: 1765400 - RNA, 15 nt, Human
ccugagagucagcuc

SEQ ID NO: 1765401 - RNA, 20 nt, Human
ccugagagucagcucucugc

SEQ ID NO: 1765402 - RNA, 22 nt, Human
ccugagagucagcucucugccc

SEQ ID NO: 1765403 - RNA, 23 nt, Human
ccugagagucagcucucugcccu

SEQ ID NO: 1765404 - RNA, 15 nt, Human
ccugcaggaccugcc

SEQ ID NO: 1765405 - RNA, 16 nt, Human
ccugcaggaccugccu

SEQ ID NO: 1765406 - RNA, 17 nt, Human
ccugcaggaccugccug

SEQ ID NO: 1765407 - RNA, 18 nt, Human
ccugcaggaccugccugu

SEQ ID NO: 1765408 - RNA, 22 nt, Human
ccucugccugaagucacacagu

SEQ ID NO: 1765409 - RNA, 16 nt, Human
cccuucgcuccugugu

SEQ ID NO: 1765410 - RNA, 18 nt, Human
cccuucgcuccugugucu

SEQ ID NO: 1765411 - RNA, 21 nt, Human
ccgacccaggguucccgcggg

SEQ ID NO: 1765412 - RNA, 20 nt, Human
ccgccagggagaccuggaca

SEQ ID NO: 1765413 - RNA, 20 nt, Human
ccgaauagcugggacuacag

SEQ ID NO: 1765414 - RNA, 16 nt, Human
cccuucugucccucac

SEQ ID NO: 1765415 - RNA, 17 nt, Human
cccuucugucccucaca

SEQ ID NO: 1765416 - RNA, 23 nt, Human
ccgaaucucuuuuugcuuucgaa

SEQ ID NO: 1765417 - RNA, 20 nt, Human
ccgaauguugagguggacuc

SEQ ID NO: 1765418 - RNA, 14 nt, Human
cccugcccuguggg

SEQ ID NO: 1765419 - RNA, 12 nt, Human
cccugcccugug

SEQ ID NO: 1765420 - RNA, 13 nt, Human
cccugcccugugg

SEQ ID NO: 1765421 - RNA, 17 nt, Human
cccucacccccuccuuc

SEQ ID NO: 1765422 - RNA, 13 nt, Human
cccuggcuucugu

SEQ ID NO: 1765423 - RNA, 14 nt, Human
cccuggcuucugug

SEQ ID NO: 1765424 - RNA, 15 nt, Human
cccuggcuucugugg

SEQ ID NO: 1765425 - RNA, 17 nt, Human
cccuggcuucugugggg

SEQ ID NO: 1765426 - RNA, 22 nt, Human
cccuggcuucuguggggccccu

SEQ ID NO: 1765427 - RNA, 20 nt, Human
cccuauuuuucucuccuguc

SEQ ID NO: 1765428 - RNA, 19 nt, Human
ccuauuucaguguuaccug

SEQ ID NO: 1765429 - RNA, 23 nt, Human
ccuauuucaguguuaccugugug

SEQ ID NO: 1765430 - RNA, 16 nt, Human
ccucaacuccucccau

SEQ ID NO: 1765431 - RNA, 17 nt, Human
ccucaacuccucccaua

SEQ ID NO: 1765432 - RNA, 15 nt, Human
ccuauuuuuaaauaa

SEQ ID NO: 1765433 - RNA, 19 nt, Human
ccuauuuuucucuccuguc

SEQ ID NO: 1765434 - RNA, 12 nt, Human
ccuauuugugug

SEQ ID NO: 1765435 - RNA, 11 nt, Human
ccucagccucc

SEQ ID NO: 1765436 - RNA, 22 nt, Human
ccucagccucccaaagugcugg

SEQ ID NO: 1765437 - RNA, 22 nt, Human
ccucccaggacucugaccccag

SEQ ID NO: 1765438 - RNA, 17 nt, Human
ccucccaggacucugac

SEQ ID NO: 1765439 - RNA, 15 nt, Human
ccucccacacuccca

SEQ ID NO: 1765440 - RNA, 16 nt, Human
ccucccacacucccaa

SEQ ID NO: 1765441 - RNA, 19 nt, Human
ccucccacacucccaaggu

SEQ ID NO: 1765442 - RNA, 15 nt, Human
ccucccagcccauaa

SEQ ID NO: 1765443 - RNA, 12 nt, Human
ccucauuaaauu

SEQ ID NO: 1765444 - RNA, 15 nt, Human
ccucauuaaugacac

SEQ ID NO: 1765445 - RNA, 17 nt, Human
ccucauuaaugacacuu

SEQ ID NO: 1765446 - RNA, 23 nt, Human
ccucagccucccaaagugcuggg

SEQ ID NO: 1765447 - RNA, 22 nt, Human
ccucagccucccgaauagcugg

SEQ ID NO: 1765448 - RNA, 16 nt, Human
ccuaauaaaguucugu

SEQ ID NO: 1765449 - RNA, 21 nt, Human
ccuaauaaaguucuguacuca

SEQ ID NO: 1765450 - RNA, 12 nt, Human
ccggcuccaggc

SEQ ID NO: 1765451 - RNA, 17 nt, Human
ccguaggacccaagcag

SEQ ID NO: 1765452 - RNA, 20 nt, Human
ccguaucuccggcucccagc

SEQ ID NO: 1765453 - RNA, 22 nt, Human
ccguaucuccggcucccagccu

SEQ ID NO: 1765454 - RNA, 16 nt, Human
ccguagguuauuuuca

SEQ ID NO: 1765455 - RNA, 20 nt, Human
auugcuacuguccuacccac

SEQ ID NO: 1765456 - RNA, 22 nt, Human
auugcuacuguccuacccaccc

SEQ ID NO: 1765457 - RNA, 15 nt, Human
auugcuacuguccua

SEQ ID NO: 1765458 - RNA, 15 nt, Human
auugaguuuucagug

SEQ ID NO: 1765459 - RNA, 16 nt, Human
auugaguuuucagugg

SEQ ID NO: 1765460 - RNA, 21 nt, Human
auucuuucccaauucacaucu

SEQ ID NO: 1765461 - RNA, 14 nt, Human
auucugaauuugca

SEQ ID NO: 1765462 - RNA, 15 nt, Human
auucugaauuugcaa

SEQ ID NO: 1765463 - RNA, 16 nt, Human
auucugaauuugcaaa

SEQ ID NO: 1765464 - RNA, 17 nt, Human
auucugaauuugcaaag

SEQ ID NO: 1765465 - RNA, 18 nt, Human
auucugaauuugcaaagu

SEQ ID NO: 1765466 - RNA, 19 nt, Human
auucugaauuugcaaagua

SEQ ID NO: 1765467 - RNA, 20 nt, Human
auucugaauuugcaaaguac

SEQ ID NO: 1765468 - RNA, 22 nt, Human
auucugaauuugcaaaguacug

SEQ ID NO: 1765469 - RNA, 23 nt, Human
auucugaauuugcaaaguacugu

SEQ ID NO: 1765470 - RNA, 14 nt, Human
auucugaaucucaa

SEQ ID NO: 1765471 - RNA, 11 nt, Human
auucuucugcu

SEQ ID NO: 1765472 - RNA, 12 nt, Human
auucuucugcuu

SEQ ID NO: 1765473 - RNA, 15 nt, Human
auucugaaggagccc

SEQ ID NO: 1765474 - RNA, 16 nt, Human
auucugaaggagcccc

SEQ ID NO: 1765475 - RNA, 14 nt, Human
auucuucugcuuca

SEQ ID NO: 1765476 - RNA, 15 nt, Human
auugcugacugugua

SEQ ID NO: 1765477 - RNA, 12 nt, Human
auugcugacugu

SEQ ID NO: 1765478 - RNA, 20 nt, Human
auugcugccccaucagugcu

SEQ ID NO: 1765479 - RNA, 21 nt, Human
auugcugccccaucagugcuc

SEQ ID NO: 1765480 - RNA, 19 nt, Human
auugugugugcucugcuuc

SEQ ID NO: 1765481 - RNA, 18 nt, Human
auuagguuucagcagagc

SEQ ID NO: 1765482 - RNA, 19 nt, Human
auuagguuucagcagagcu

SEQ ID NO: 1765483 - RNA, 21 nt, Human
auuagcugcuucuauguuuca

SEQ ID NO: 1765484 - RNA, 13 nt, Human
auuagcugcuucu

SEQ ID NO: 1765485 - RNA, 18 nt, Human
auguuugccucugccucu

SEQ ID NO: 1765486 - RNA, 22 nt, Human
auuacaagcgugagccacugca

SEQ ID NO: 1765487 - RNA, 23 nt, Human
auuagauguucucuaucauuuaa

SEQ ID NO: 1765488 - RNA, 21 nt, Human
auuagauguucucuaucauuu

SEQ ID NO: 1765489 - RNA, 19 nt, Human
auuagauguucucuaucau

SEQ ID NO: 1765490 - RNA, 17 nt, Human
auuagccugaguagaaa

SEQ ID NO: 1765491 - RNA, 12 nt, Human
auuagcugcuuc

SEQ ID NO: 1765492 - RNA, 16 nt, Human
auuagccugaguagaa

SEQ ID NO: 1765493 - RNA, 14 nt, Human
auuagccugaguag

SEQ ID NO: 1765494 - RNA, 14 nt, Human
auuugcugccaaau

SEQ ID NO: 1765495 - RNA, 15 nt, Human
auuugcugccaaaug

SEQ ID NO: 1765496 - RNA, 19 nt, Human
auuugcugccaaaugcgua

SEQ ID NO: 1765497 - RNA, 20 nt, Human
auuugcugccaaaugcguau

SEQ ID NO: 1765498 - RNA, 19 nt, Human
auuuuauagcuacuaauuu

SEQ ID NO: 1765499 - RNA, 17 nt, Human
auuuuauagcuacuaau

SEQ ID NO: 1765500 - RNA, 21 nt, Human
auuuuaugaaagguuuacauu

SEQ ID NO: 1765501 - RNA, 15 nt, Human
auuugcaagggaaaa

SEQ ID NO: 1765502 - RNA, 20 nt, Human
auuugcaagggaaaagucuc

SEQ ID NO: 1765503 - RNA, 21 nt, Human
auuugcauaacaauuccucua

SEQ ID NO: 1765504 - RNA, 22 nt, Human
auuugcauaacaauuccucuac

SEQ ID NO: 1765505 - RNA, 11 nt, Human
auuugcaaagu

SEQ ID NO: 1765506 - RNA, 13 nt, Human
auuugcaaaguac

SEQ ID NO: 1765507 - RNA, 15 nt, Human
auuugcaaaguacug

SEQ ID NO: 1765508 - RNA, 16 nt, Human
auuugcaaaguacugu

SEQ ID NO: 1765509 - RNA, 17 nt, Human
auuugcaaaguacugua

SEQ ID NO: 1765510 - RNA, 18 nt, Human
auuugcaaaguacuguaa

SEQ ID NO: 1765511 - RNA, 19 nt, Human
auuugcaaaguacuguaag

SEQ ID NO: 1765512 - RNA, 11 nt, Human
caaaguacugu

SEQ ID NO: 1765513 - RNA, 12 nt, Human
caaaguacugua

SEQ ID NO: 1765514 - RNA, 13 nt, Human
caaaguacuguaa

SEQ ID NO: 1765515 - RNA, 14 nt, Human
caaaguacuguaag

SEQ ID NO: 1765516 - RNA, 17 nt, Human
caaaguacuguaagaau

SEQ ID NO: 1765517 - RNA, 22 nt, Human
caaaguacuguaagaauaauuu

SEQ ID NO: 1765518 - RNA, 22 nt, Human
caaauccgaaccuccucuguga

SEQ ID NO: 1765519 - RNA, 16 nt, Human
caaauccgaaccuccu

SEQ ID NO: 1765520 - RNA, 21 nt, Human
caaauccgaaccuccucugug

SEQ ID NO: 1765521 - RNA, 13 nt, Human
caaauccuaugug

SEQ ID NO: 1765522 - RNA, 15 nt, Human
caaauccuaugugau

SEQ ID NO: 1765523 - RNA, 16 nt, Human
caaauccuaugugauu

SEQ ID NO: 1765524 - RNA, 17 nt, Human
caaauccuaugugauuu

SEQ ID NO: 1765525 - RNA, 18 nt, Human
caaauccuaugugauuuu

SEQ ID NO: 1765526 - RNA, 20 nt, Human
caaagaugggugaaggcugg

SEQ ID NO: 1765527 - RNA, 21 nt, Human
caaagaugggugaaggcuggc

SEQ ID NO: 1765528 - RNA, 22 nt, Human
caaagaugggugaaggcuggca

SEQ ID NO: 1765529 - RNA, 18 nt, Human
caaagcaauugaaaugca

SEQ ID NO: 1765530 - RNA, 15 nt, Human
caaagcaaaaccaga

SEQ ID NO: 1765531 - RNA, 13 nt, Human
caaagcaaggaaa

SEQ ID NO: 1765532 - RNA, 15 nt, Human
caaagcaaggaaacu

SEQ ID NO: 1765533 - RNA, 15 nt, Human
caacacgcaggagca

SEQ ID NO: 1765534 - RNA, 16 nt, Human
caacacgcaggagcac

SEQ ID NO: 1765535 - RNA, 18 nt, Human
caacaauccuagugcuuu

SEQ ID NO: 1765536 - RNA, 15 nt, Human
caacaauccuagugc

SEQ ID NO: 1765537 - RNA, 17 nt, Human
caacaauccuagugcuu

SEQ ID NO: 1765538 - RNA, 19 nt, Human
caacaagguuauaugaaua

SEQ ID NO: 1765539 - RNA, 21 nt, Human
caaauccuaugugauuuuaac

SEQ ID NO: 1765540 - RNA, 22 nt, Human
caaauccuaugugauuuuaacu

SEQ ID NO: 1765541 - RNA, 23 nt, Human
caaauccuaugugauuuuaacuc

SEQ ID NO: 1765542 - RNA, 20 nt, Human
caaacccagacggcuccacu

SEQ ID NO: 1765543 - RNA, 24 nt, Human
caaacccagacggcuccacuagga

SEQ ID NO: 1765544 - RNA, 13 nt, Human
caaaagauaauau

SEQ ID NO: 1765545 - RNA, 20 nt, Human
caaaagauaauauuuuacau

SEQ ID NO: 1765546 - RNA, 19 nt, Human
auuuuuuuuuuaaauuauu

SEQ ID NO: 1765547 - RNA, 13 nt, Human
caccugcccuuuu

SEQ ID NO: 1765548 - RNA, 22 nt, Human
caccugcccuuuuuucugccuc

SEQ ID NO: 1765549 - RNA, 23 nt, Human
caccugcccuuuuuucugccucc

SEQ ID NO: 1765550 - RNA, 17 nt, Human
cacccuggggagaaagu

SEQ ID NO: 1765551 - RNA, 14 nt, Human
caccucagccuccc

SEQ ID NO: 1765552 - RNA, 13 nt, Human
caccucagccucc

SEQ ID NO: 1765553 - RNA, 15 nt, Human
cacccuggggagaaa

SEQ ID NO: 1765554 - RNA, 16 nt, Human
cacccuggggagaaag

SEQ ID NO: 1765555 - RNA, 14 nt, Human
caccuuggcugcag

SEQ ID NO: 1765556 - RNA, 15 nt, Human
caccuuggcucaagu

SEQ ID NO: 1765557 - RNA, 13 nt, Human
caccuuggcugca

SEQ ID NO: 1765558 - RNA, 21 nt, Human
cacuuaugaaugauuugcaua

SEQ ID NO: 1765559 - RNA, 13 nt, Human
cacugcagccuca

SEQ ID NO: 1765560 - RNA, 17 nt, Human
cacugcagaaacccuga

SEQ ID NO: 1765561 - RNA, 19 nt, Human
cacugcacuauagccuagg

SEQ ID NO: 1765562 - RNA, 12 nt, Human
cacugcagccuc

SEQ ID NO: 1765563 - RNA, 15 nt, Human
caauaaagcacugag

SEQ ID NO: 1765564 - RNA, 16 nt, Human
caauaaagcacugagc

SEQ ID NO: 1765565 - RNA, 17 nt, Human
caauaaagcacugagca

SEQ ID NO: 1765566 - RNA, 13 nt, Human
caauaaaguauuu

SEQ ID NO: 1765567 - RNA, 13 nt, Human
caagcucugcucc

SEQ ID NO: 1765568 - RNA, 14 nt, Human
caagcucugcuccu

SEQ ID NO: 1765569 - RNA, 20 nt, Human
caagucaccaaaagacacug

SEQ ID NO: 1765570 - RNA, 20 nt, Human
cacaguauuacuucugcuac

SEQ ID NO: 1765571 - RNA, 21 nt, Human
cacaguauuacuucugcuaca

SEQ ID NO: 1765572 - RNA, 20 nt, Human
cacagguucacgugcagcuc

SEQ ID NO: 1765573 - RNA, 18 nt, Human
cacacagugagucgagga

SEQ ID NO: 1765574 - RNA, 20 nt, Human
cacacaguauuacuucugcu

SEQ ID NO: 1765575 - RNA, 23 nt, Human
cacacaguauuacuucugcuaca

SEQ ID NO: 1765576 - RNA, 15 nt, Human
cacacauacacacac

SEQ ID NO: 1765577 - RNA, 21 nt, Human
cacacauauaaacaucacaca

SEQ ID NO: 1765578 - RNA, 23 nt, Human
cacacauauaaacaucacacaca

SEQ ID NO: 1765579 - RNA, 21 nt, Human
cacacagugagucgaggacag

SEQ ID NO: 1765580 - RNA, 23 nt, Human
cacacagugagucgaggacaggg

SEQ ID NO: 1765581 - RNA, 17 nt, Human
cacacagcucuguccug

SEQ ID NO: 1765582 - RNA, 20 nt, Human
cacacagcucuguccuggga

SEQ ID NO: 1765583 - RNA, 11 nt, Human
caauggcagcc

SEQ ID NO: 1765584 - RNA, 12 nt, Human
caauggcagccu

SEQ ID NO: 1765585 - RNA, 15 nt, Human
caauucuugccaaau

SEQ ID NO: 1765586 - RNA, 11 nt, Human
caauuuagaaa

SEQ ID NO: 1765587 - RNA, 14 nt, Human
caauugaaaugcau

SEQ ID NO: 1765588 - RNA, 21 nt, Human
caguuugccggauacaaacug

SEQ ID NO: 1765589 - RNA, 19 nt, Human
cauagcccauguuaagucc

SEQ ID NO: 1765590 - RNA, 19 nt, Human
cauccugugccuccaucag

SEQ ID NO: 1765591 - RNA, 21 nt, Human
cauccuuuaggguucugccuc

SEQ ID NO: 1765592 - RNA, 22 nt, Human
cauccuuuaggguucugccucu

SEQ ID NO: 1765593 - RNA, 16 nt, Human
caucugucccuccggg

SEQ ID NO: 1765594 - RNA, 17 nt, Human
caucugucccuccggga

SEQ ID NO: 1765595 - RNA, 18 nt, Human
caucugucccuccgggac

SEQ ID NO: 1765596 - RNA, 20 nt, Human
caucugucccuccgggaccu

SEQ ID NO: 1765597 - RNA, 14 nt, Human
ccaccuuggcucaa

SEQ ID NO: 1765598 - RNA, 15 nt, Human
ccaccuuggcucaag

SEQ ID NO: 1765599 - RNA, 13 nt, Human
ccacccugcucuc

SEQ ID NO: 1765600 - RNA, 15 nt, Human
ccaaauccccuaagc

SEQ ID NO: 1765601 - RNA, 23 nt, Human
ccaaauccgaaccuccucuguga

SEQ ID NO: 1765602 - RNA, 17 nt, Human
ccaaauccgaaccuccu

SEQ ID NO: 1765603 - RNA, 21 nt, Human
ccaaauccgaaccuccucugu

SEQ ID NO: 1765604 - RNA, 22 nt, Human
ccaaauccgaaccuccucugug

SEQ ID NO: 1765605 - RNA, 24 nt, Human
ccaaauccgaaccuccucugugaa

SEQ ID NO: 1765606 - RNA, 21 nt, Human
ccaagcuuccauagcugcugc

SEQ ID NO: 1765607 - RNA, 22 nt, Human
ccaagcuuccauagcugcugcc

SEQ ID NO: 1765608 - RNA, 11 nt, Human
ccaagcuuccc

SEQ ID NO: 1765609 - RNA, 12 nt, Human
ccaagcuucccu

SEQ ID NO: 1765610 - RNA, 13 nt, Human
ccaagcuucccuc

SEQ ID NO: 1765611 - RNA, 15 nt, Human
cauguucucugagga

SEQ ID NO: 1765612 - RNA, 23 nt, Human
cauuagccugaguagaaaggccu

SEQ ID NO: 1765613 - RNA, 19 nt, Human
cauuagccugaguagaaag

SEQ ID NO: 1765614 - RNA, 18 nt, Human
cauuagccugaguagaaa

SEQ ID NO: 1765615 - RNA, 17 nt, Human
cauuagccugaguagaa

SEQ ID NO: 1765616 - RNA, 14 nt, Human
cauuagccugagua

SEQ ID NO: 1765617 - RNA, 9 nt, Human
cauuagccu

SEQ ID NO: 1765618 - RNA, 12 nt, Human
cauuagccaagg

SEQ ID NO: 1765619 - RNA, 14 nt, Human
cauuagccaaggau

SEQ ID NO: 1765620 - RNA, 13 nt, Human
cauucucaggcac

SEQ ID NO: 1765621 - RNA, 14 nt, Human
cauucucaggcacc

SEQ ID NO: 1765622 - RNA, 15 nt, Human
cauucucaggcacca

SEQ ID NO: 1765623 - RNA, 16 nt, Human
cauucucaggcaccag

SEQ ID NO: 1765624 - RNA, 17 nt, Human
cauucucaggcaccagu

SEQ ID NO: 1765625 - RNA, 14 nt, Human
cauugcggacagcc

SEQ ID NO: 1765626 - RNA, 15 nt, Human
cauugcggacagcca

SEQ ID NO: 1765627 - RNA, 17 nt, Human
cauugcggacagccacg

SEQ ID NO: 1765628 - RNA, 21 nt, Human
cauugcggacagccacggcca

SEQ ID NO: 1765629 - RNA, 17 nt, Human
cauuuauuuuuuacauu

SEQ ID NO: 1765630 - RNA, 19 nt, Human
cauuuauuuuuuacauuau

SEQ ID NO: 1765631 - RNA, 16 nt, Human
cauuuauucugcucac

SEQ ID NO: 1765632 - RNA, 22 nt, Human
cauuggcuuuauccucuuuaga

SEQ ID NO: 1765633 - RNA, 13 nt, Human
cauuggcuuuauc

SEQ ID NO: 1765634 - RNA, 16 nt, Human
cauugcuggacucuga

SEQ ID NO: 1765635 - RNA, 19 nt, Human
cauugcuguuguccaacua

SEQ ID NO: 1765636 - RNA, 21 nt, Human
cauugcuguuguccaacuauu

SEQ ID NO: 1765637 - RNA, 22 nt, Human
cauugcuguuguccaacuauuu

SEQ ID NO: 1765638 - RNA, 16 nt, Human
cauuugguuggcacua

SEQ ID NO: 1765639 - RNA, 16 nt, Human
ccaaaaaucugccugg

SEQ ID NO: 1765640 - RNA, 17 nt, Human
ccaaaaaucugccuggg

SEQ ID NO: 1765641 - RNA, 13 nt, Human
ccaaaaagcacau

SEQ ID NO: 1765642 - RNA, 14 nt, Human
ccaaaaagcacaua

SEQ ID NO: 1765643 - RNA, 21 nt, Human
cagauugcaacaggcugggcu

SEQ ID NO: 1765644 - RNA, 12 nt, Human
cagauugcaugu

SEQ ID NO: 1765645 - RNA, 13 nt, Human
cagauugcaugug

SEQ ID NO: 1765646 - RNA, 15 nt, Human
cagauugcaugugac

SEQ ID NO: 1765647 - RNA, 16 nt, Human
cagauugcaugugacu

SEQ ID NO: 1765648 - RNA, 18 nt, Human
cagauugcaugugacucu

SEQ ID NO: 1765649 - RNA, 20 nt, Human
cagauugcaugugacucuga

SEQ ID NO: 1765650 - RNA, 23 nt, Human
cagauugcaugugacucugaagc

SEQ ID NO: 1765651 - RNA, 21 nt, Human
cagauugcaugugacucugaa

SEQ ID NO: 1765652 - RNA, 16 nt, Human
cagcacugcuugagga

SEQ ID NO: 1765653 - RNA, 18 nt, Human
cagcacugcuugaggaaa

SEQ ID NO: 1765654 - RNA, 19 nt, Human
cagcacugcuugaggaaaa

SEQ ID NO: 1765655 - RNA, 13 nt, Human
cagccagcagcag

SEQ ID NO: 1765656 - RNA, 17 nt, Human
cagccagcagcagccca

SEQ ID NO: 1765657 - RNA, 13 nt, Human
cagccagaggcac

SEQ ID NO: 1765658 - RNA, 14 nt, Human
cagcggggacagcu

SEQ ID NO: 1765659 - RNA, 19 nt, Human
cagcgugcuuuaaaaaaua

SEQ ID NO: 1765660 - RNA, 13 nt, Human
cagccugcgccug

SEQ ID NO: 1765661 - RNA, 15 nt, Human
cagccugcgccugcu

SEQ ID NO: 1765662 - RNA, 16 nt, Human
cagccugcgccugcug

SEQ ID NO: 1765663 - RNA, 18 nt, Human
cagccugcgccugcugca

SEQ ID NO: 1765664 - RNA, 17 nt, Human
cagccugcgccugcugc

SEQ ID NO: 1765665 - RNA, 13 nt, Human
cagcccuuagcag

SEQ ID NO: 1765666 - RNA, 15 nt, Human
cagcccuuagcaggg

SEQ ID NO: 1765667 - RNA, 23 nt, Human
cagccccauucugccugcccagg

SEQ ID NO: 1765668 - RNA, 24 nt, Human
cagccccauucugccugcccaggc

SEQ ID NO: 1765669 - RNA, 17 nt, Human
cagcccccacauccugu

SEQ ID NO: 1765670 - RNA, 19 nt, Human
cagccccauucugccugcc

SEQ ID NO: 1765671 - RNA, 20 nt, Human
cagccccauucugccugccc

SEQ ID NO: 1765672 - RNA, 22 nt, Human
cagccccauucugccugcccag

SEQ ID NO: 1765673 - RNA, 14 nt, Human
cagccccuacugcu

SEQ ID NO: 1765674 - RNA, 15 nt, Human
cagccccuacugcug

SEQ ID NO: 1765675 - RNA, 16 nt, Human
cagccccuacugcugu

SEQ ID NO: 1765676 - RNA, 17 nt, Human
cagccccuacugcugug

SEQ ID NO: 1765677 - RNA, 20 nt, Human
cagccccuacugcugugaac

SEQ ID NO: 1765678 - RNA, 18 nt, Human
cagccccgguggcugggc

SEQ ID NO: 1765679 - RNA, 19 nt, Human
cagccccgguggcugggca

SEQ ID NO: 1765680 - RNA, 20 nt, Human
cagccccgguggcugggcag

SEQ ID NO: 1765681 - RNA, 17 nt, Human
cagagcgcgccccuagc

SEQ ID NO: 1765682 - RNA, 18 nt, Human
cagagcgcgccccuagcc

SEQ ID NO: 1765683 - RNA, 19 nt, Human
cagagcgcgccccuagccg

SEQ ID NO: 1765684 - RNA, 18 nt, Human
cagagcuaaacuccuucc

SEQ ID NO: 1765685 - RNA, 19 nt, Human
cagagcuaaacuccuuccu

SEQ ID NO: 1765686 - RNA, 20 nt, Human
cagagcuaaacuccuuccug

SEQ ID NO: 1765687 - RNA, 21 nt, Human
cagagcuaaacuccuuccugg

SEQ ID NO: 1765688 - RNA, 22 nt, Human
cagagcuaaacuccuuccuggc

SEQ ID NO: 1765689 - RNA, 14 nt, Human
cagagccugcaguu

SEQ ID NO: 1765690 - RNA, 23 nt, Human
cagauacaggaaaagcugcugac

SEQ ID NO: 1765691 - RNA, 19 nt, Human
caggaaaagcugcugacag

SEQ ID NO: 1765692 - RNA, 20 nt, Human
caggaaaagcugcugacagu

SEQ ID NO: 1765693 - RNA, 23 nt, Human
cagcugugugacauuuggagagg

SEQ ID NO: 1765694 - RNA, 23 nt, Human
caggcacugagauaccagcgagg

SEQ ID NO: 1765695 - RNA, 21 nt, Human
caggcaaugcuggcuguuggc

SEQ ID NO: 1765696 - RNA, 19 nt, Human
caggcaaugcuggcuguug

SEQ ID NO: 1765697 - RNA, 20 nt, Human
caggcaaugcuggcuguugg

SEQ ID NO: 1765698 - RNA, 15 nt, Human
caggaggcaggaccu

SEQ ID NO: 1765699 - RNA, 18 nt, Human
caggaggcaggaccuucg

SEQ ID NO: 1765700 - RNA, 17 nt, Human
caggcuggcgugcagug

SEQ ID NO: 1765701 - RNA, 18 nt, Human
caggcuggcgugcagugg

SEQ ID NO: 1765702 - RNA, 19 nt, Human
caggcuggcgugcaguggu

SEQ ID NO: 1765703 - RNA, 20 nt, Human
cagggcucagcggggacagc

SEQ ID NO: 1765704 - RNA, 12 nt, Human
cagggcucagcg

SEQ ID NO: 1765705 - RNA, 15 nt, Human
cagggcucagcgggg

SEQ ID NO: 1765706 - RNA, 14 nt, Human
caggcugggcuuca

SEQ ID NO: 1765707 - RNA, 15 nt, Human
caggcugggcuucag

SEQ ID NO: 1765708 - RNA, 13 nt, Human
cagggcugugcuu

SEQ ID NO: 1765709 - RNA, 14 nt, Human
cagggcugugcuug

SEQ ID NO: 1765710 - RNA, 19 nt, Human
cagggcugugcuugaaggc

SEQ ID NO: 1765711 - RNA, 23 nt, Human
cagggcugugcuugaaggcccug

SEQ ID NO: 1765712 - RNA, 15 nt, Human
caggguuggccccug

SEQ ID NO: 1765713 - RNA, 16 nt, Human
caggguuggccccugc

SEQ ID NO: 1765714 - RNA, 23 nt, Human
cagggucucacucugucgcccag

SEQ ID NO: 1765715 - RNA, 18 nt, Human
caguaaaauugccauauu

SEQ ID NO: 1765716 - RNA, 16 nt, Human
caguaaaauugccaua

SEQ ID NO: 1765717 - RNA, 15 nt, Human
caguaaaauugccau

SEQ ID NO: 1765718 - RNA, 11 nt, Human
caguaaaauug

SEQ ID NO: 1765719 - RNA, 13 nt, Human
caggugcugccau

SEQ ID NO: 1765720 - RNA, 14 nt, Human
caggugcugccauc

SEQ ID NO: 1765721 - RNA, 17 nt, Human
caggguuggccccugcc

SEQ ID NO: 1765722 - RNA, 21 nt, Human
caggguuggccccugcccggc

SEQ ID NO: 1765723 - RNA, 23 nt, Human
cagguuuuuggucugacccacug

SEQ ID NO: 1765724 - RNA, 21 nt, Human
gggaagagugacucuccaggg

SEQ ID NO: 1765725 - RNA, 20 nt, Human
gggaagcuucugucuccagc

SEQ ID NO: 1765726 - RNA, 21 nt, Human
gggaagcuucugucuccagcu

SEQ ID NO: 1765727 - RNA, 21 nt, Human
gggacagcuccuucuguccua

SEQ ID NO: 1765728 - RNA, 13 nt, Human
gggaaggagccag

SEQ ID NO: 1765729 - RNA, 18 nt, Human
gggaccaacccuggggaa

SEQ ID NO: 1765730 - RNA, 11 nt, Human
gggacagcugu

SEQ ID NO: 1765731 - RNA, 12 nt, Human
aaaaauauguau

SEQ ID NO: 1765732 - RNA, 11 nt, Human
aaaaauauuua

SEQ ID NO: 1765733 - RNA, 22 nt, Human
aaaaaucaacuuuuuauugccu

SEQ ID NO: 1765734 - RNA, 23 nt, Human
aaaaaucaacuuuuuauugccuu

SEQ ID NO: 1765735 - RNA, 16 nt, Human
aaaaaucaauuaacca

SEQ ID NO: 1765736 - RNA, 13 nt, Human
aaaaccugacaaa

SEQ ID NO: 1765737 - RNA, 19 nt, Human
aaaaauggaaaaauaaaca

SEQ ID NO: 1765738 - RNA, 13 nt, Human
aaaaggggcuccu

SEQ ID NO: 1765739 - RNA, 18 nt, Human
gggcagaucuuggacuca

SEQ ID NO: 1765740 - RNA, 20 nt, Human
gggcagaucuuggacucaug

SEQ ID NO: 1765741 - RNA, 22 nt, Human
gggcagaucuuggacucaugag

SEQ ID NO: 1765742 - RNA, 17 nt, Human
gggcagagugagaccca

SEQ ID NO: 1765743 - RNA, 15 nt, Human
gggauuacaggugug

SEQ ID NO: 1765744 - RNA, 14 nt, Human
gggcaaagccuagu

SEQ ID NO: 1765745 - RNA, 16 nt, Human
gggcaacccccagccu

SEQ ID NO: 1765746 - RNA, 18 nt, Human
gggcaacccccagccugc

SEQ ID NO: 1765747 - RNA, 20 nt, Human
gggcaacccccagccugcua

SEQ ID NO: 1765748 - RNA, 18 nt, Human
gggaugguggagggccac

SEQ ID NO: 1765749 - RNA, 17 nt, Human
gggaugguggagggcca

SEQ ID NO: 1765750 - RNA, 19 nt, Human
aaaagauggggucuguaaa

SEQ ID NO: 1765751 - RNA, 21 nt, Human
aaaagauggggucuguaaaau

SEQ ID NO: 1765752 - RNA, 17 nt, Human
gggaggccagugagcca

SEQ ID NO: 1765753 - RNA, 13 nt, Human
gggagaccuggac

SEQ ID NO: 1765754 - RNA, 13 nt, Human
gggcuacccugag

SEQ ID NO: 1765755 - RNA, 16 nt, Human
gggcuacccugagcug

SEQ ID NO: 1765756 - RNA, 19 nt, Human
gggcuacccugagcugagg

SEQ ID NO: 1765757 - RNA, 15 nt, Human
gggcgggaggauguu

SEQ ID NO: 1765758 - RNA, 21 nt, Human
gggccugcaggaccugccugu

SEQ ID NO: 1765759 - RNA, 15 nt, Human
gggccuccugugugu

SEQ ID NO: 1765760 - RNA, 13 nt, Human
gggccuccugugu

SEQ ID NO: 1765761 - RNA, 14 nt, Human
gggccugacugcuc

SEQ ID NO: 1765762 - RNA, 17 nt, Human
gggccugacugcucaga

SEQ ID NO: 1765763 - RNA, 15 nt, Human
gggccugagccuggc

SEQ ID NO: 1765764 - RNA, 16 nt, Human
gggccugagccuggcc

SEQ ID NO: 1765765 - RNA, 18 nt, Human
gggccugagccuggccag

SEQ ID NO: 1765766 - RNA, 18 nt, Human
gggccugcaggaccugcc

SEQ ID NO: 1765767 - RNA, 17 nt, Human
gggcccuuugagugcag

SEQ ID NO: 1765768 - RNA, 14 nt, Human
gggccgccagggag

SEQ ID NO: 1765769 - RNA, 20 nt, Human
gggccgccagggagaccugg

SEQ ID NO: 1765770 - RNA, 16 nt, Human
gggccguaucuccggc

SEQ ID NO: 1765771 - RNA, 19 nt, Human
gggccguaucuccggcucc

SEQ ID NO: 1765772 - RNA, 20 nt, Human
gggccguaucuccggcuccc

SEQ ID NO: 1765773 - RNA, 23 nt, Human
gggccguaucuccggcucccagc

SEQ ID NO: 1765774 - RNA, 24 nt, Human
gggccguaucuccggcucccagcc

SEQ ID NO: 1765775 - RNA, 23 nt, Human
aaaaucuuucuuucuuagaaauu

SEQ ID NO: 1765776 - RNA, 22 nt, Human
aaaaucuuucuuucuuagaaau

SEQ ID NO: 1765777 - RNA, 21 nt, Human
aaaaucuuucuuucuuagaaa

SEQ ID NO: 1765778 - RNA, 20 nt, Human
aaaaucuuucuuucuuagaa

SEQ ID NO: 1765779 - RNA, 19 nt, Human
aaaaucuuucuuucuuaga

SEQ ID NO: 1765780 - RNA, 17 nt, Human
aaaaucuuucuuucuua

SEQ ID NO: 1765781 - RNA, 14 nt, Human
aaaaguauuauuuu

SEQ ID NO: 1765782 - RNA, 20 nt, Human
aaaaguauuauuuuccaaaa

SEQ ID NO: 1765783 - RNA, 22 nt, Human
aaaaguauuauuuuccaaaagu

SEQ ID NO: 1765784 - RNA, 16 nt, Human
gggccagggcugcccc

SEQ ID NO: 1765785 - RNA, 12 nt, Human
gggccagggcug

SEQ ID NO: 1765786 - RNA, 13 nt, Human
gggccagggcugc

SEQ ID NO: 1765787 - RNA, 20 nt, Human
gggcugccccuaaucucugu

SEQ ID NO: 1765788 - RNA, 20 nt, Human
gggcuacccugagcugaggc

SEQ ID NO: 1765789 - RNA, 11 nt, Human
gggcugcauga

SEQ ID NO: 1765790 - RNA, 16 nt, Human
gggcugcaugauguuu

SEQ ID NO: 1765791 - RNA, 20 nt, Human
gggcugcaugauguuugccc

SEQ ID NO: 1765792 - RNA, 18 nt, Human
aaaaugucuuguguuacc

SEQ ID NO: 1765793 - RNA, 14 nt, Human
aaaauuuuuuuaga

SEQ ID NO: 1765794 - RNA, 18 nt, Human
aaaauuuguuauuuugca

SEQ ID NO: 1765795 - RNA, 19 nt, Human
aaacaaaaauuaaaauccu

SEQ ID NO: 1765796 - RNA, 16 nt, Human
aaaauuuuuuuagaaa

SEQ ID NO: 1765797 - RNA, 15 nt, Human
aaaauuuuuuuucau

SEQ ID NO: 1765798 - RNA, 16 nt, Human
aaaauuuuuuuucaug

SEQ ID NO: 1765799 - RNA, 17 nt, Human
aaaauuuuuuuucaugu

SEQ ID NO: 1765800 - RNA, 18 nt, Human
aaaauuuuuuuucauguu

SEQ ID NO: 1765801 - RNA, 19 nt, Human
aaaauuuuuuuucauguuu

SEQ ID NO: 1765802 - RNA, 20 nt, Human
aaacaagcacuaaacaaaga

SEQ ID NO: 1765803 - RNA, 14 nt, Human
aaacaucacacaca

SEQ ID NO: 1765804 - RNA, 22 nt, Human
aaacaucacacacacagacaga

SEQ ID NO: 1765805 - RNA, 12 nt, Human
ggggacagcucc

SEQ ID NO: 1765806 - RNA, 19 nt, Human
aaacaugacccuaaaucuu

SEQ ID NO: 1765807 - RNA, 21 nt, Human
aaacaugacccuaaaucuuga

SEQ ID NO: 1765808 - RNA, 14 nt, Human
ggggacagcuccuu

SEQ ID NO: 1765809 - RNA, 20 nt, Human
ggggacagcuccuucugucc

SEQ ID NO: 1765810 - RNA, 13 nt, Human
ggggacagcugug

SEQ ID NO: 1765811 - RNA, 14 nt, Human
ggggacagcugugu

SEQ ID NO: 1765812 - RNA, 12 nt, Human
ggggccagaggc

SEQ ID NO: 1765813 - RNA, 14 nt, Human
ggggcauugcugac

SEQ ID NO: 1765814 - RNA, 21 nt, Human
ggggcauugcugacuguguau

SEQ ID NO: 1765815 - RNA, 14 nt, Human
ggggccugacugcu

SEQ ID NO: 1765816 - RNA, 13 nt, Human
ggggccagaggcu

SEQ ID NO: 1765817 - RNA, 21 nt, Human
aaaguuucucuuuucaaaaca

SEQ ID NO: 1765818 - RNA, 23 nt, Human
aaaguuucucuuuucaaaacauu

SEQ ID NO: 1765819 - RNA, 21 nt, Human
guaaaaucuuucuuucuuaga

SEQ ID NO: 1765820 - RNA, 15 nt, Human
guaaaaucuuucuuu

SEQ ID NO: 1765821 - RNA, 14 nt, Human
guaaaaucuuucuu

SEQ ID NO: 1765822 - RNA, 13 nt, Human
gguggggcagcuu

SEQ ID NO: 1765823 - RNA, 22 nt, Human
ggugggcccggcccgcgccaca

SEQ ID NO: 1765824 - RNA, 17 nt, Human
gguggggcagcuugagg

SEQ ID NO: 1765825 - RNA, 16 nt, Human
ggugggggugggucag

SEQ ID NO: 1765826 - RNA, 17 nt, Human
ggugggggugggucaga

SEQ ID NO: 1765827 - RNA, 18 nt, Human
ggugugagucaccaagcc

SEQ ID NO: 1765828 - RNA, 15 nt, Human
ggugugaucgucuga

SEQ ID NO: 1765829 - RNA, 18 nt, Human
ggugugaucgucugacug

SEQ ID NO: 1765830 - RNA, 16 nt, Human
ggugugcaccaggguu

SEQ ID NO: 1765831 - RNA, 17 nt, Human
ggugugcaccaggguug

SEQ ID NO: 1765832 - RNA, 17 nt, Human
ggugugccuuccagauc

SEQ ID NO: 1765833 - RNA, 18 nt, Human
ggugugccuuccagaucc

SEQ ID NO: 1765834 - RNA, 13 nt, Human
ggugugcucugau

SEQ ID NO: 1765835 - RNA, 22 nt, Human
gguucaggguuggccccugccc

SEQ ID NO: 1765836 - RNA, 18 nt, Human
gguucaggguuggccccu

SEQ ID NO: 1765837 - RNA, 21 nt, Human
gguucaggguuggccccugcc

SEQ ID NO: 1765838 - RNA, 12 nt, Human
gguucccuuccu

SEQ ID NO: 1765839 - RNA, 16 nt, Human
gguucccuuccuauuc

SEQ ID NO: 1765840 - RNA, 12 nt, Human
gguucugccucu

SEQ ID NO: 1765841 - RNA, 13 nt, Human
gguagccugcugg

SEQ ID NO: 1765842 - RNA, 14 nt, Human
gguccacagggcac

SEQ ID NO: 1765843 - RNA, 22 nt, Human
gguaugaucacggcucacugca

SEQ ID NO: 1765844 - RNA, 17 nt, Human
gguccacccaggagccc

SEQ ID NO: 1765845 - RNA, 17 nt, Human
gguccacaucccgggac

SEQ ID NO: 1765846 - RNA, 15 nt, Human
gguccacagggcacc

SEQ ID NO: 1765847 - RNA, 12 nt, Human
gguccacccagg

SEQ ID NO: 1765848 - RNA, 13 nt, Human
gguccacccagga

SEQ ID NO: 1765849 - RNA, 15 nt, Human
gguccacccaggagc

SEQ ID NO: 1765850 - RNA, 16 nt, Human
gguccacccaggagcc

SEQ ID NO: 1765851 - RNA, 18 nt, Human
aaagaaguuauuuuccag

SEQ ID NO: 1765852 - RNA, 13 nt, Human
aaagaauacuuga

SEQ ID NO: 1765853 - RNA, 14 nt, Human
aaagaauacuugaa

SEQ ID NO: 1765854 - RNA, 15 nt, Human
aaagaauacuugaac

SEQ ID NO: 1765855 - RNA, 16 nt, Human
aaagaauacuugaacu

SEQ ID NO: 1765856 - RNA, 17 nt, Human
aaagaauacuugaacuu

SEQ ID NO: 1765857 - RNA, 14 nt, Human
gguccaugggcaga

SEQ ID NO: 1765858 - RNA, 16 nt, Human
gguccaugggcagagc

SEQ ID NO: 1765859 - RNA, 13 nt, Human
gguccaugggcag

SEQ ID NO: 1765860 - RNA, 12 nt, Human
ggguggugaccu

SEQ ID NO: 1765861 - RNA, 12 nt, Human
ggguggguauaa

SEQ ID NO: 1765862 - RNA, 11 nt, Human
gggugggggug

SEQ ID NO: 1765863 - RNA, 16 nt, Human
ggguggggguggguca

SEQ ID NO: 1765864 - RNA, 11 nt, Human
gggugggucag

SEQ ID NO: 1765865 - RNA, 20 nt, Human
gggugggucagaacccugcc

SEQ ID NO: 1765866 - RNA, 21 nt, Human
gggugggucagaacccugcca

SEQ ID NO: 1765867 - RNA, 17 nt, Human
ggguguccugccugucu

SEQ ID NO: 1765868 - RNA, 19 nt, Human
ggguguccugccugucugc

SEQ ID NO: 1765869 - RNA, 22 nt, Human
ggguguccugccugucugcccc

SEQ ID NO: 1765870 - RNA, 13 nt, Human
ggguggaugccug

SEQ ID NO: 1765871 - RNA, 17 nt, Human
ggguggaugccuggugg

SEQ ID NO: 1765872 - RNA, 16 nt, Human
gguacauuuuucaacu

SEQ ID NO: 1765873 - RNA, 17 nt, Human
gguacauuuuucaacuu

SEQ ID NO: 1765874 - RNA, 23 nt, Human
gguacauuuuucaacuuugaaua

SEQ ID NO: 1765875 - RNA, 14 nt, Human
gguaacaggcagau

SEQ ID NO: 1765876 - RNA, 20 nt, Human
gguaacaggcagauacagga

SEQ ID NO: 1765877 - RNA, 18 nt, Human
ggucuucagccucuuucu

SEQ ID NO: 1765878 - RNA, 11 nt, Human
ggugcugucca

SEQ ID NO: 1765879 - RNA, 14 nt, Human
gguggaugccuggu

SEQ ID NO: 1765880 - RNA, 21 nt, Human
gguggaugccugguggcagcu

SEQ ID NO: 1765881 - RNA, 16 nt, Human
gguccuccccucucuu

SEQ ID NO: 1765882 - RNA, 17 nt, Human
gguccuccccucucuug

SEQ ID NO: 1765883 - RNA, 22 nt, Human
gguccuagaggcccuuugcugu

SEQ ID NO: 1765884 - RNA, 15 nt, Human
ggagugcagugagcc

SEQ ID NO: 1765885 - RNA, 12 nt, Human
ggauggccgugg

SEQ ID NO: 1765886 - RNA, 18 nt, Human
ggauggccguggauggcc

SEQ ID NO: 1765887 - RNA, 21 nt, Human
ggauggcaggacgugggcugg

SEQ ID NO: 1765888 - RNA, 22 nt, Human
ggauggcaggacgugggcuggg

SEQ ID NO: 1765889 - RNA, 20 nt, Human
ggaguugaucgccuuuccca

SEQ ID NO: 1765890 - RNA, 23 nt, Human
ggaguugaucgccuuucccaggu

SEQ ID NO: 1765891 - RNA, 23 nt, Human
ggauaagcuauccguguugcagg

SEQ ID NO: 1765892 - RNA, 15 nt, Human
ggauguucugggaca

SEQ ID NO: 1765893 - RNA, 16 nt, Human
ggauguucugggacac

SEQ ID NO: 1765894 - RNA, 13 nt, Human
ggcaauuuagaaa

SEQ ID NO: 1765895 - RNA, 16 nt, Human
ggcaauuuagaaaaag

SEQ ID NO: 1765896 - RNA, 15 nt, Human
ggcacagaugcucca

SEQ ID NO: 1765897 - RNA, 15 nt, Human
ggagcaucaagccac

SEQ ID NO: 1765898 - RNA, 16 nt, Human
ggagcaucaagccacu

SEQ ID NO: 1765899 - RNA, 17 nt, Human
ggagcaucaagccacuc

SEQ ID NO: 1765900 - RNA, 13 nt, Human
ggaggccucaggu

SEQ ID NO: 1765901 - RNA, 15 nt, Human
ggaggccucaggugc

SEQ ID NO: 1765902 - RNA, 16 nt, Human
ggaggccucaggugcu

SEQ ID NO: 1765903 - RNA, 17 nt, Human
ggaggccucaggugcug

SEQ ID NO: 1765904 - RNA, 19 nt, Human
ggaggccucaggugcuguc

SEQ ID NO: 1765905 - RNA, 17 nt, Human
ggaggcccgcagagcgc

SEQ ID NO: 1765906 - RNA, 14 nt, Human
ggaggugaccccag

SEQ ID NO: 1765907 - RNA, 23 nt, Human
ggaggugaacaagcaaacccaga

SEQ ID NO: 1765908 - RNA, 20 nt, Human
ggagcuucauggcagaaggc

SEQ ID NO: 1765909 - RNA, 19 nt, Human
ggagcuuccuguccuccca

SEQ ID NO: 1765910 - RNA, 16 nt, Human
ggagccacuccucuga

SEQ ID NO: 1765911 - RNA, 19 nt, Human
ggagccacuccucugacuc

SEQ ID NO: 1765912 - RNA, 21 nt, Human
ggagccacuccucugacucag

SEQ ID NO: 1765913 - RNA, 16 nt, Human
ggagcccagcucugaa

SEQ ID NO: 1765914 - RNA, 16 nt, Human
ggagccccgaggccuu

SEQ ID NO: 1765915 - RNA, 12 nt, Human
ggagcccagggc

SEQ ID NO: 1765916 - RNA, 13 nt, Human
ggagcccagggca

SEQ ID NO: 1765917 - RNA, 15 nt, Human
ggagcccagggcauc

SEQ ID NO: 1765918 - RNA, 22 nt, Human
ggagccccgaggccuucucuga

SEQ ID NO: 1765919 - RNA, 12 nt, Human
ggagcugccugu

SEQ ID NO: 1765920 - RNA, 21 nt, Human
ggagcugccuguucagcucca

SEQ ID NO: 1765921 - RNA, 18 nt, Human
ggccggcagccccagccu

SEQ ID NO: 1765922 - RNA, 20 nt, Human
ggccggcagccccagccugc

SEQ ID NO: 1765923 - RNA, 21 nt, Human
ggccggcagccccagccugcu

SEQ ID NO: 1765924 - RNA, 15 nt, Human
ggccuucucugaagg

SEQ ID NO: 1765925 - RNA, 16 nt, Human
ggccuucucugaagga

SEQ ID NO: 1765926 - RNA, 22 nt, Human
ggccuuuaaaauuuuuuuagaa

SEQ ID NO: 1765927 - RNA, 14 nt, Human
ggccuuuaaaauuu

SEQ ID NO: 1765928 - RNA, 12 nt, Human
ggccuuguccca

SEQ ID NO: 1765929 - RNA, 14 nt, Human
ggcguacaggcugg

SEQ ID NO: 1765930 - RNA, 21 nt, Human
ggccuggccagaugcaccagc

SEQ ID NO: 1765931 - RNA, 12 nt, Human
ggccuucucuga

SEQ ID NO: 1765932 - RNA, 17 nt, Human
ggcucacugcagccuca

SEQ ID NO: 1765933 - RNA, 16 nt, Human
ggcucacugcagccuc

SEQ ID NO: 1765934 - RNA, 14 nt, Human
ggcgugcaguggug

SEQ ID NO: 1765935 - RNA, 19 nt, Human
ggcgugcaguggugcgauc

SEQ ID NO: 1765936 - RNA, 21 nt, Human
ggcucagcggggacagcuccu

SEQ ID NO: 1765937 - RNA, 22 nt, Human
ggcucagcggggacagcuccuu

SEQ ID NO: 1765938 - RNA, 23 nt, Human
ggcucagcggggacagcuccuuc

SEQ ID NO: 1765939 - RNA, 15 nt, Human
ggcccaggugagucc

SEQ ID NO: 1765940 - RNA, 12 nt, Human
ggccccuggagg

SEQ ID NO: 1765941 - RNA, 14 nt, Human
ggccccuggaggcu

SEQ ID NO: 1765942 - RNA, 22 nt, Human
ggccccuggaggcugccuccca

SEQ ID NO: 1765943 - RNA, 19 nt, Human
ggcccuucccacaggacau

SEQ ID NO: 1765944 - RNA, 18 nt, Human
ggcagugggagcugccug

SEQ ID NO: 1765945 - RNA, 19 nt, Human
ggcagugggagcugccugu

SEQ ID NO: 1765946 - RNA, 15 nt, Human
ggcaucuugcuggcu

SEQ ID NO: 1765947 - RNA, 16 nt, Human
ggcaucuugcuggcua

SEQ ID NO: 1765948 - RNA, 17 nt, Human
ggcaucuugcuggcuac

SEQ ID NO: 1765949 - RNA, 17 nt, Human
ggcagugggagcugccu

SEQ ID NO: 1765950 - RNA, 17 nt, Human
ggcacuggaccccagca

SEQ ID NO: 1765951 - RNA, 21 nt, Human
ggccaucugguuaggauggca

SEQ ID NO: 1765952 - RNA, 22 nt, Human
ggccaucugguuaggauggcag

SEQ ID NO: 1765953 - RNA, 16 nt, Human
ggccagugugacaagg

SEQ ID NO: 1765954 - RNA, 11 nt, Human
ggccagggcug

SEQ ID NO: 1765955 - RNA, 13 nt, Human
ggccagggcagag

SEQ ID NO: 1765956 - RNA, 16 nt, Human
ggccaggcuggucuca

SEQ ID NO: 1765957 - RNA, 18 nt, Human
ggccaggcuggucucaaa

SEQ ID NO: 1765958 - RNA, 14 nt, Human
ggccaggcuggucu

SEQ ID NO: 1765959 - RNA, 15 nt, Human
ggccaaaccucuguu

SEQ ID NO: 1765960 - RNA, 16 nt, Human
ggccaaaccucuguuc

SEQ ID NO: 1765961 - RNA, 12 nt, Human
ggccaaaccucu

SEQ ID NO: 1765962 - RNA, 14 nt, Human
gcuggagcacuggg

SEQ ID NO: 1765963 - RNA, 15 nt, Human
gcuggagcacugggc

SEQ ID NO: 1765964 - RNA, 16 nt, Human
gcuggagcacugggcu

SEQ ID NO: 1765965 - RNA, 18 nt, Human
gcuggagcacugggcucc

SEQ ID NO: 1765966 - RNA, 21 nt, Human
gcuggagcacugggcucccgg

SEQ ID NO: 1765967 - RNA, 14 nt, Human
gcugcugucuuguu

SEQ ID NO: 1765968 - RNA, 19 nt, Human
gcugcuccccagcagcgga

SEQ ID NO: 1765969 - RNA, 16 nt, Human
gcugcuccccagcagc

SEQ ID NO: 1765970 - RNA, 17 nt, Human
gcugccauccagguuca

SEQ ID NO: 1765971 - RNA, 12 nt, Human
gcugcugacagu

SEQ ID NO: 1765972 - RNA, 15 nt, Human
gcugagucaucuguu

SEQ ID NO: 1765973 - RNA, 23 nt, Human
gcugagucaucuguuagggccuu

SEQ ID NO: 1765974 - RNA, 13 nt, Human
gcugcagagaaac

SEQ ID NO: 1765975 - RNA, 20 nt, Human
gcugcagagaaacuuaagca

SEQ ID NO: 1765976 - RNA, 12 nt, Human
gcugccauccag

SEQ ID NO: 1765977 - RNA, 13 nt, Human
gcugccauccagg

SEQ ID NO: 1765978 - RNA, 14 nt, Human
gcugcagcucccug

SEQ ID NO: 1765979 - RNA, 15 nt, Human
gcugcagcucccugg

SEQ ID NO: 1765980 - RNA, 16 nt, Human
gcugcagcucccuggc

SEQ ID NO: 1765981 - RNA, 19 nt, Human
gcugcagcucccuggcuuc

SEQ ID NO: 1765982 - RNA, 23 nt, Human
gcugcagcucccuggcuucugug

SEQ ID NO: 1765983 - RNA, 21 nt, Human
gcugcagccugcgccaccgcc

SEQ ID NO: 1765984 - RNA, 20 nt, Human
gcucugaucauccacugugc

SEQ ID NO: 1765985 - RNA, 16 nt, Human
gcucugaaaccagugu

SEQ ID NO: 1765986 - RNA, 22 nt, Human
gcucucuuuuucuccaggguca

SEQ ID NO: 1765987 - RNA, 23 nt, Human
gcucucuuuuucuccagggucag

SEQ ID NO: 1765988 - RNA, 21 nt, Human
gcucugaucauccacugugcc

SEQ ID NO: 1765989 - RNA, 22 nt, Human
gcucugaucauccacugugcca

SEQ ID NO: 1765990 - RNA, 13 nt, Human
gcugacagacaca

SEQ ID NO: 1765991 - RNA, 14 nt, Human
gcucuguccuggga

SEQ ID NO: 1765992 - RNA, 18 nt, Human
gcucuguaucaggaccca

SEQ ID NO: 1765993 - RNA, 19 nt, Human
gcucuguaucaggacccag

SEQ ID NO: 1765994 - RNA, 22 nt, Human
gcucuguaucaggacccagagg

SEQ ID NO: 1765995 - RNA, 23 nt, Human
gcucuguaucaggacccagagga

SEQ ID NO: 1765996 - RNA, 19 nt, Human
gcugaaagcugguggcaga

SEQ ID NO: 1765997 - RNA, 13 nt, Human
gcucuguggguga

SEQ ID NO: 1765998 - RNA, 16 nt, Human
gcucugugggugaugg

SEQ ID NO: 1765999 - RNA, 23 nt, Human
gcucugugggugauggggagggg

SEQ ID NO: 1766000 - RNA, 12 nt, Human
gcuccagagggc

SEQ ID NO: 1766001 - RNA, 20 nt, Human
gcuccagagggcacucugcu

SEQ ID NO: 1766002 - RNA, 21 nt, Human
gcuccagagggcacucugcuu

SEQ ID NO: 1766003 - RNA, 15 nt, Human
gcuccucuccccagc

SEQ ID NO: 1766004 - RNA, 17 nt, Human
gcuccagcucaccagcc

SEQ ID NO: 1766005 - RNA, 12 nt, Human
gcucccagggca

SEQ ID NO: 1766006 - RNA, 14 nt, Human
gcucccaggugcag

SEQ ID NO: 1766007 - RNA, 19 nt, Human
gcucccaggugcagccaga

SEQ ID NO: 1766008 - RNA, 20 nt, Human
gcucccaggugcagccagag

SEQ ID NO: 1766009 - RNA, 22 nt, Human
gcucccaggugcagccagaggc

SEQ ID NO: 1766010 - RNA, 13 nt, Human
gcuccagcucacc

SEQ ID NO: 1766011 - RNA, 14 nt, Human
gcuccagcucacca

SEQ ID NO: 1766012 - RNA, 13 nt, Human
gcuccagccaucu

SEQ ID NO: 1766013 - RNA, 14 nt, Human
gcuccagccaucuc

SEQ ID NO: 1766014 - RNA, 17 nt, Human
gcucuaugcuuuccaaa

SEQ ID NO: 1766015 - RNA, 21 nt, Human
gcucuauuauauaaacuuuau

SEQ ID NO: 1766016 - RNA, 14 nt, Human
gcucuacccagggc

SEQ ID NO: 1766017 - RNA, 15 nt, Human
gcucuacccagggcc

SEQ ID NO: 1766018 - RNA, 18 nt, Human
gcucuacccagggccugc

SEQ ID NO: 1766019 - RNA, 19 nt, Human
gcucuacccagggccugca

SEQ ID NO: 1766020 - RNA, 16 nt, Human
gcuccucuccccagca

SEQ ID NO: 1766021 - RNA, 19 nt, Human
gcuccucuccccagcaagu

SEQ ID NO: 1766022 - RNA, 23 nt, Human
gcugguucaggguuggccccugc

SEQ ID NO: 1766023 - RNA, 15 nt, Human
gcuucaguggcagcu

SEQ ID NO: 1766024 - RNA, 14 nt, Human
gcuucaguggcagc

SEQ ID NO: 1766025 - RNA, 13 nt, Human
gcuguuggcuggg

SEQ ID NO: 1766026 - RNA, 19 nt, Human
gcuguugcugaauaggcga

SEQ ID NO: 1766027 - RNA, 16 nt, Human
gcuguugcugaauagg

SEQ ID NO: 1766028 - RNA, 14 nt, Human
gcuguuggcugggg

SEQ ID NO: 1766029 - RNA, 15 nt, Human
gcuguugcugaauag

SEQ ID NO: 1766030 - RNA, 14 nt, Human
gcuguugcugaaua

SEQ ID NO: 1766031 - RNA, 16 nt, Human
gcuuccauagcugcug

SEQ ID NO: 1766032 - RNA, 18 nt, Human
gcuuccauagcugcugcc

SEQ ID NO: 1766033 - RNA, 20 nt, Human
gcuuccauagcugcugcccu

SEQ ID NO: 1766034 - RNA, 16 nt, Human
gcuuccuguccuccca

SEQ ID NO: 1766035 - RNA, 21 nt, Human
gcuuccuguccucccagcucc

SEQ ID NO: 1766036 - RNA, 15 nt, Human
gcuugaaggcccugc

SEQ ID NO: 1766037 - RNA, 16 nt, Human
gcuugaaggcccugcu

SEQ ID NO: 1766038 - RNA, 18 nt, Human
gcuugaaggcccugcuga

SEQ ID NO: 1766039 - RNA, 20 nt, Human
gcuugaaggcccugcugagu

SEQ ID NO: 1766040 - RNA, 13 nt, Human
gcuuucugccacc

SEQ ID NO: 1766041 - RNA, 18 nt, Human
gcuuguaaauagcucagg

SEQ ID NO: 1766042 - RNA, 19 nt, Human
gcuuguaaauagcucaggu

SEQ ID NO: 1766043 - RNA, 17 nt, Human
gcuuguaaauagcucag

SEQ ID NO: 1766044 - RNA, 11 nt, Human
ggaacuugucu

SEQ ID NO: 1766045 - RNA, 18 nt, Human
ggaacuugucucuucauc

SEQ ID NO: 1766046 - RNA, 15 nt, Human
ggaagaaagaauguu

SEQ ID NO: 1766047 - RNA, 18 nt, Human
ggaaaugucacagaagca

SEQ ID NO: 1766048 - RNA, 16 nt, Human
ggaaacuacugccuuu

SEQ ID NO: 1766049 - RNA, 14 nt, Human
gcuuuucucagcug

SEQ ID NO: 1766050 - RNA, 15 nt, Human
gcuuuuggucugugu

SEQ ID NO: 1766051 - RNA, 18 nt, Human
gcuuuugucuaugggacu

SEQ ID NO: 1766052 - RNA, 13 nt, Human
gccagugugacaa

SEQ ID NO: 1766053 - RNA, 16 nt, Human
gccauaugaaaaggcu

SEQ ID NO: 1766054 - RNA, 17 nt, Human
gccauauuuucaccauu

SEQ ID NO: 1766055 - RNA, 15 nt, Human
gccaggccagaggga

SEQ ID NO: 1766056 - RNA, 22 nt, Human
gccaggccagagggagugacag

SEQ ID NO: 1766057 - RNA, 17 nt, Human
gcccaggccccugccac

SEQ ID NO: 1766058 - RNA, 18 nt, Human
gcccaggccccugccacc

SEQ ID NO: 1766059 - RNA, 13 nt, Human
gcccaggcagguc

SEQ ID NO: 1766060 - RNA, 14 nt, Human
gcccaggcaggucu

SEQ ID NO: 1766061 - RNA, 16 nt, Human
gcccaggcaggucuug

SEQ ID NO: 1766062 - RNA, 15 nt, Human
gcccaggccccugcc

SEQ ID NO: 1766063 - RNA, 13 nt, Human
gcccaggccccug

SEQ ID NO: 1766064 - RNA, 14 nt, Human
gccaugugccaggu

SEQ ID NO: 1766065 - RNA, 12 nt, Human
gcccucaucccg

SEQ ID NO: 1766066 - RNA, 19 nt, Human
gcccucagaacccuuggcu

SEQ ID NO: 1766067 - RNA, 14 nt, Human
gcccucagaacccu

SEQ ID NO: 1766068 - RNA, 17 nt, Human
gcccucagaacccuugg

SEQ ID NO: 1766069 - RNA, 18 nt, Human
gcccucagaacccuuggc

SEQ ID NO: 1766070 - RNA, 23 nt, Human
gcccucagaacccuuggcuugcc

SEQ ID NO: 1766071 - RNA, 13 nt, Human
gcccuaugggccu

SEQ ID NO: 1766072 - RNA, 14 nt, Human
gcccuaugggccug

SEQ ID NO: 1766073 - RNA, 15 nt, Human
gcccuaugggccugc

SEQ ID NO: 1766074 - RNA, 16 nt, Human
gcccuaugggccugcc

SEQ ID NO: 1766075 - RNA, 19 nt, Human
gcccuaugggccugccggg

SEQ ID NO: 1766076 - RNA, 21 nt, Human
gcccuaugggccugccgggcu

SEQ ID NO: 1766077 - RNA, 11 nt, Human
gccccuggagg

SEQ ID NO: 1766078 - RNA, 19 nt, Human
gccccuggaggcugccucc

SEQ ID NO: 1766079 - RNA, 20 nt, Human
gccccuggaggcugccuccc

SEQ ID NO: 1766080 - RNA, 21 nt, Human
gccccuggaggcugccuccca

SEQ ID NO: 1766081 - RNA, 22 nt, Human
gccccuggaggcugccucccaa

SEQ ID NO: 1766082 - RNA, 22 nt, Human
gccccugcugguucaggguugg

SEQ ID NO: 1766083 - RNA, 14 nt, Human
gccccccugcccug

SEQ ID NO: 1766084 - RNA, 15 nt, Human
gccccccugcccugu

SEQ ID NO: 1766085 - RNA, 22 nt, Human
gcggagagaggccuugucccag

SEQ ID NO: 1766086 - RNA, 19 nt, Human
gcgugcacacaccagagcc

SEQ ID NO: 1766087 - RNA, 18 nt, Human
gcgugcacacaccagagc

SEQ ID NO: 1766088 - RNA, 14 nt, Human
gcgugcacacacca

SEQ ID NO: 1766089 - RNA, 19 nt, Human
gcuacuguccuacccaccc

SEQ ID NO: 1766090 - RNA, 20 nt, Human
gcuacuguccuacccacccu

SEQ ID NO: 1766091 - RNA, 16 nt, Human
gcuaauuuuucauuuu

SEQ ID NO: 1766092 - RNA, 17 nt, Human
gcgauucuucugcuuca

SEQ ID NO: 1766093 - RNA, 14 nt, Human
gcgauucuucugcu

SEQ ID NO: 1766094 - RNA, 13 nt, Human
gcgauucuucugc

SEQ ID NO: 1766095 - RNA, 16 nt, Human
gccugcccguaaacac

SEQ ID NO: 1766096 - RNA, 21 nt, Human
gccugcccguaaacacgccug

SEQ ID NO: 1766097 - RNA, 10 nt, Human
gccuccuuua

SEQ ID NO: 1766098 - RNA, 17 nt, Human
gccugcuaauuccccag

SEQ ID NO: 1766099 - RNA, 23 nt, Human
gccugcuaauuccccagauugca

SEQ ID NO: 1766100 - RNA, 23 nt, Human
gccugcuagcuagcucaacuagu

SEQ ID NO: 1766101 - RNA, 16 nt, Human
gccugcuagcuagcuc

SEQ ID NO: 1766102 - RNA, 20 nt, Human
gccugcuagcuagcucaacu

SEQ ID NO: 1766103 - RNA, 22 nt, Human
gccugcuagcuagcucaacuag

SEQ ID NO: 1766104 - RNA, 13 nt, Human
gccugcgccugcu

SEQ ID NO: 1766105 - RNA, 14 nt, Human
gccugcgccugcug

SEQ ID NO: 1766106 - RNA, 16 nt, Human
gccugcgccugcugca

SEQ ID NO: 1766107 - RNA, 22 nt, Human
gccugcgccugcugcaugcccu

SEQ ID NO: 1766108 - RNA, 12 nt, Human
gagauucauuuu

SEQ ID NO: 1766109 - RNA, 13 nt, Human
gagauucauuuuc

SEQ ID NO: 1766110 - RNA, 21 nt, Human
gagauucauuuucuagauaca

SEQ ID NO: 1766111 - RNA, 18 nt, Human
gagcugggugucaagagg

SEQ ID NO: 1766112 - RNA, 13 nt, Human
gagccccgaggcc

SEQ ID NO: 1766113 - RNA, 21 nt, Human
gagcugccuguucagcuccag

SEQ ID NO: 1766114 - RNA, 22 nt, Human
gagcugccuguucagcuccagc

SEQ ID NO: 1766115 - RNA, 14 nt, Human
gagcagggcucagc

SEQ ID NO: 1766116 - RNA, 17 nt, Human
gagcauggguucauccu

SEQ ID NO: 1766117 - RNA, 21 nt, Human
gagcagggcucagcggggaca

SEQ ID NO: 1766118 - RNA, 16 nt, Human
gagccccauuccuggg

SEQ ID NO: 1766119 - RNA, 17 nt, Human
gagccccauuccuggga

SEQ ID NO: 1766120 - RNA, 18 nt, Human
gagccccauuccugggaa

SEQ ID NO: 1766121 - RNA, 21 nt, Human
gacuuuucuuuguggcuuccu

SEQ ID NO: 1766122 - RNA, 19 nt, Human
gacugguggcaggggcuuc

SEQ ID NO: 1766123 - RNA, 10 nt, Human
gacuggugcc

SEQ ID NO: 1766124 - RNA, 16 nt, Human
gacuggugcccuccuc

SEQ ID NO: 1766125 - RNA, 18 nt, Human
gagacccagcccucaucc

SEQ ID NO: 1766126 - RNA, 12 nt, Human
gacucugucuca

SEQ ID NO: 1766127 - RNA, 13 nt, Human
gacucuggguccu

SEQ ID NO: 1766128 - RNA, 14 nt, Human
gacucuggguccuu

SEQ ID NO: 1766129 - RNA, 18 nt, Human
gacucuggguccuuccug

SEQ ID NO: 1766130 - RNA, 19 nt, Human
gacucuggguccuuccuga

SEQ ID NO: 1766131 - RNA, 20 nt, Human
gacucuggguccuuccugaa

SEQ ID NO: 1766132 - RNA, 19 nt, Human
gacucugaaauaucccggg

SEQ ID NO: 1766133 - RNA, 16 nt, Human
gacucuuucugagugc

SEQ ID NO: 1766134 - RNA, 19 nt, Human
gacucuuucugagugccuu

SEQ ID NO: 1766135 - RNA, 21 nt, Human
gacucuuucugagugccuucu

SEQ ID NO: 1766136 - RNA, 13 nt, Human
gacacugaugggc

SEQ ID NO: 1766137 - RNA, 15 nt, Human
gacacugaugggcaa

SEQ ID NO: 1766138 - RNA, 12 nt, Human
gacagacacagg

SEQ ID NO: 1766139 - RNA, 20 nt, Human
gacaggguuuugccauguug

SEQ ID NO: 1766140 - RNA, 22 nt, Human
gacaggguuuugccauguuggc

SEQ ID NO: 1766141 - RNA, 23 nt, Human
gacacugcagaaacccugagcag

SEQ ID NO: 1766142 - RNA, 13 nt, Human
gacagacacacac

SEQ ID NO: 1766143 - RNA, 15 nt, Human
gacagacacacacac

SEQ ID NO: 1766144 - RNA, 11 nt, Human
gacagcuccuu

SEQ ID NO: 1766145 - RNA, 14 nt, Human
gacagugaaagaaa

SEQ ID NO: 1766146 - RNA, 17 nt, Human
gacaaaauggauacaua

SEQ ID NO: 1766147 - RNA, 21 nt, Human
gacacacagcucuguccuggg

SEQ ID NO: 1766148 - RNA, 21 nt, Human
gaauuuguguugaaggaacuu

SEQ ID NO: 1766149 - RNA, 20 nt, Human
gaauuuuggggauuuucaaa

SEQ ID NO: 1766150 - RNA, 16 nt, Human
gaauuuuguucucugg

SEQ ID NO: 1766151 - RNA, 17 nt, Human
gaauuuuguucucuggg

SEQ ID NO: 1766152 - RNA, 18 nt, Human
gaauuuuguucucuggga

SEQ ID NO: 1766153 - RNA, 20 nt, Human
gaauuuuguucucugggaga

SEQ ID NO: 1766154 - RNA, 23 nt, Human
gaauuuuguucucugggagaaaa

SEQ ID NO: 1766155 - RNA, 14 nt, Human
gaauuuuuccuaug

SEQ ID NO: 1766156 - RNA, 22 nt, Human
gaauuuuuccuaugcuauugac

SEQ ID NO: 1766157 - RNA, 13 nt, Human
gaauuuuugcaau

SEQ ID NO: 1766158 - RNA, 14 nt, Human
gaauuuuugcaaua

SEQ ID NO: 1766159 - RNA, 15 nt, Human
gaauuuuugcaauaa

SEQ ID NO: 1766160 - RNA, 15 nt, Human
gacacacagcucugu

SEQ ID NO: 1766161 - RNA, 17 nt, Human
gacacacagcucugucc

SEQ ID NO: 1766162 - RNA, 18 nt, Human
gacacacagcucuguccu

SEQ ID NO: 1766163 - RNA, 19 nt, Human
gacacacagcucuguccug

SEQ ID NO: 1766164 - RNA, 14 nt, Human
gacacacagcucug

SEQ ID NO: 1766165 - RNA, 14 nt, Human
gaagugaacauuuc

SEQ ID NO: 1766166 - RNA, 17 nt, Human
gaagggagcuagccaga

SEQ ID NO: 1766167 - RNA, 14 nt, Human
gaaggcuaaaaagc

SEQ ID NO: 1766168 - RNA, 16 nt, Human
gaaggcuaaaaagcaa

SEQ ID NO: 1766169 - RNA, 17 nt, Human
gaaggcuaaaaagcaac

SEQ ID NO: 1766170 - RNA, 16 nt, Human
gaagugcaucuacuug

SEQ ID NO: 1766171 - RNA, 14 nt, Human
gaaugagaaaugga

SEQ ID NO: 1766172 - RNA, 19 nt, Human
gcaccgugucaagcugcuc

SEQ ID NO: 1766173 - RNA, 20 nt, Human
gcaccgugucaagcugcucu

SEQ ID NO: 1766174 - RNA, 21 nt, Human
gcaccgugucaagcugcucug

SEQ ID NO: 1766175 - RNA, 12 nt, Human
gcacugacauug

SEQ ID NO: 1766176 - RNA, 16 nt, Human
gcagaaauacagucuu

SEQ ID NO: 1766177 - RNA, 13 nt, Human
gcaagugagagcu

SEQ ID NO: 1766178 - RNA, 11 nt, Human
gcaagucucuu

SEQ ID NO: 1766179 - RNA, 17 nt, Human
gcacaugcaccuaccca

SEQ ID NO: 1766180 - RNA, 19 nt, Human
gcacauauuagugcagcca

SEQ ID NO: 1766181 - RNA, 20 nt, Human
gcacauauuagugcagccaa

SEQ ID NO: 1766182 - RNA, 22 nt, Human
gcacauauuagugcagccaagu

SEQ ID NO: 1766183 - RNA, 17 nt, Human
gcacaucugugucuugu

SEQ ID NO: 1766184 - RNA, 18 nt, Human
gcacaucugugucuuguu

SEQ ID NO: 1766185 - RNA, 18 nt, Human
gcauacccaaaccaggug

SEQ ID NO: 1766186 - RNA, 19 nt, Human
gcaguccugaucagagccg

SEQ ID NO: 1766187 - RNA, 19 nt, Human
gcagucauuauccagguaa

SEQ ID NO: 1766188 - RNA, 11 nt, Human
gcaguuugaaa

SEQ ID NO: 1766189 - RNA, 13 nt, Human
gcaguuugaaauu

SEQ ID NO: 1766190 - RNA, 14 nt, Human
gcaguuugaaauuc

SEQ ID NO: 1766191 - RNA, 17 nt, Human
gcaguuugaaauucuga

SEQ ID NO: 1766192 - RNA, 18 nt, Human
gcaguuugaaauucugaa

SEQ ID NO: 1766193 - RNA, 19 nt, Human
gcaguuugaaauucugaau

SEQ ID NO: 1766194 - RNA, 21 nt, Human
gcaguuugaaauucugaauuu

SEQ ID NO: 1766195 - RNA, 22 nt, Human
gcaguuugaaauucugaauuug

SEQ ID NO: 1766196 - RNA, 17 nt, Human
gcagcugcgguccaccc

SEQ ID NO: 1766197 - RNA, 19 nt, Human
gcagcugcgguccacccag

SEQ ID NO: 1766198 - RNA, 13 nt, Human
gcagggaaacagc

SEQ ID NO: 1766199 - RNA, 21 nt, Human
gcagggaaaauuauuugcaua

SEQ ID NO: 1766200 - RNA, 13 nt, Human
gcaguaugguaca

SEQ ID NO: 1766201 - RNA, 17 nt, Human
gcaguaugguacauuuu

SEQ ID NO: 1766202 - RNA, 16 nt, Human
gcaguauuuugugucc

SEQ ID NO: 1766203 - RNA, 17 nt, Human
gcaguauuuuguguccu

SEQ ID NO: 1766204 - RNA, 23 nt, Human
gcaguauuuuguguccuccagga

SEQ ID NO: 1766205 - RNA, 19 nt, Human
gcaguagaaauaauaugca

SEQ ID NO: 1766206 - RNA, 20 nt, Human
gcaguagaaauaauaugcau

SEQ ID NO: 1766207 - RNA, 21 nt, Human
gcaguagaaauaauaugcauu

SEQ ID NO: 1766208 - RNA, 16 nt, Human
gcagagcccaagggaa

SEQ ID NO: 1766209 - RNA, 18 nt, Human
gcagagcgcgccccuagc

SEQ ID NO: 1766210 - RNA, 19 nt, Human
gcagagcgcgccccuagcc

SEQ ID NO: 1766211 - RNA, 12 nt, Human
gcagccagaggc

SEQ ID NO: 1766212 - RNA, 14 nt, Human
gcagccagaggcac

SEQ ID NO: 1766213 - RNA, 14 nt, Human
gcagccccagccug

SEQ ID NO: 1766214 - RNA, 15 nt, Human
gcagccccagccugc

SEQ ID NO: 1766215 - RNA, 16 nt, Human
gcagccccagccugcu

SEQ ID NO: 1766216 - RNA, 17 nt, Human
gcagccccagccugcua

SEQ ID NO: 1766217 - RNA, 13 nt, Human
gcagccccagccu

SEQ ID NO: 1766218 - RNA, 12 nt, Human
gauucugaaucu

SEQ ID NO: 1766219 - RNA, 19 nt, Human
gauuauguagcaaaauaca

SEQ ID NO: 1766220 - RNA, 19 nt, Human
gauuagguuucagcagagc

SEQ ID NO: 1766221 - RNA, 20 nt, Human
gauuagguuucagcagagcu

SEQ ID NO: 1766222 - RNA, 20 nt, Human
gauuacaggugugaaccacc

SEQ ID NO: 1766223 - RNA, 13 nt, Human
gauuaccuccuga

SEQ ID NO: 1766224 - RNA, 14 nt, Human
gauuaccuccugag

SEQ ID NO: 1766225 - RNA, 17 nt, Human
gauuaccuccugagaaa

SEQ ID NO: 1766226 - RNA, 14 nt, Human
gauuacaugcaugu

SEQ ID NO: 1766227 - RNA, 18 nt, Human
gauuacuucucuauaaaa

SEQ ID NO: 1766228 - RNA, 19 nt, Human
gauuacuucucuauaaaaa

SEQ ID NO: 1766229 - RNA, 20 nt, Human
gauuacuucucuauaaaaaa

SEQ ID NO: 1766230 - RNA, 21 nt, Human
gaucucauuggacccuuccau

SEQ ID NO: 1766231 - RNA, 18 nt, Human
gaugagaguuuuggaugc

SEQ ID NO: 1766232 - RNA, 13 nt, Human
gaugagaguuuug

SEQ ID NO: 1766233 - RNA, 21 nt, Human
gaugaugaaaugaggucagag

SEQ ID NO: 1766234 - RNA, 20 nt, Human
gaugaucuuugcagacaggc

SEQ ID NO: 1766235 - RNA, 21 nt, Human
gaugaucuuugcagacaggca

SEQ ID NO: 1766236 - RNA, 21 nt, Human
gaugagaguuuuggaugcagu

SEQ ID NO: 1766237 - RNA, 15 nt, Human
gaugagcccucagaa

SEQ ID NO: 1766238 - RNA, 19 nt, Human
gaugagcccucagaacccu

SEQ ID NO: 1766239 - RNA, 22 nt, Human
gaugagcccucagaacccuugg

SEQ ID NO: 1766240 - RNA, 14 nt, Human
gauacucauuucuu

SEQ ID NO: 1766241 - RNA, 12 nt, Human
gauacucucuuc

SEQ ID NO: 1766242 - RNA, 20 nt, Human
gauauguauguugugaauua

SEQ ID NO: 1766243 - RNA, 13 nt, Human
gagugcagugagc

SEQ ID NO: 1766244 - RNA, 17 nt, Human
gagugcaguccugauca

SEQ ID NO: 1766245 - RNA, 18 nt, Human
gagugcaguccugaucag

SEQ ID NO: 1766246 - RNA, 22 nt, Human
gagugcaguccugaucagagcc

SEQ ID NO: 1766247 - RNA, 14 nt, Human
gagugccuucugug

SEQ ID NO: 1766248 - RNA, 15 nt, Human
gagugccuucugugg

SEQ ID NO: 1766249 - RNA, 16 nt, Human
gagugccuucuguggg

SEQ ID NO: 1766250 - RNA, 16 nt, Human
gagucccaccuuggcu

SEQ ID NO: 1766251 - RNA, 20 nt, Human
gagucccaccuuggcugcag

SEQ ID NO: 1766252 - RNA, 15 nt, Human
gagucaccaagccca

SEQ ID NO: 1766253 - RNA, 13 nt, Human
gagucaccaagcc

SEQ ID NO: 1766254 - RNA, 14 nt, Human
gagucaccaagccc

SEQ ID NO: 1766255 - RNA, 11 nt, Human
gagugcaguga

SEQ ID NO: 1766256 - RNA, 12 nt, Human
gagugcagugag

SEQ ID NO: 1766257 - RNA, 14 nt, Human
gagugcaguccuga

SEQ ID NO: 1766258 - RNA, 24 nt, Human
gagugagcacuaaggugugcucug

SEQ ID NO: 1766259 - RNA, 21 nt, Human
gagucccaccuuggcugcagg

SEQ ID NO: 1766260 - RNA, 12 nt, Human
gagugagcuggu

SEQ ID NO: 1766261 - RNA, 15 nt, Human
cuuccauagcugcug

SEQ ID NO: 1766262 - RNA, 17 nt, Human
cuuccauagcugcugcc

SEQ ID NO: 1766263 - RNA, 21 nt, Human
cuuccauagcugcugcccuag

SEQ ID NO: 1766264 - RNA, 22 nt, Human
cuucaugcaggugaaacccagu

SEQ ID NO: 1766265 - RNA, 20 nt, Human
cuucauaugaaaggugccau

SEQ ID NO: 1766266 - RNA, 22 nt, Human
cuucauaugaaaggugccaugg

SEQ ID NO: 1766267 - RNA, 23 nt, Human
cuucauaugaaaggugccaugga

SEQ ID NO: 1766268 - RNA, 13 nt, Human
cuucaucuuccug

SEQ ID NO: 1766269 - RNA, 14 nt, Human
cuucaucuuccugu

SEQ ID NO: 1766270 - RNA, 15 nt, Human
cuucaucuuccugug

SEQ ID NO: 1766271 - RNA, 16 nt, Human
cuucaucuuccugugu

SEQ ID NO: 1766272 - RNA, 19 nt, Human
cuucaucuuccuguguccu

SEQ ID NO: 1766273 - RNA, 20 nt, Human
cuucaucuuccuguguccug

SEQ ID NO: 1766274 - RNA, 21 nt, Human
cuucaucuuccuguguccuga

SEQ ID NO: 1766275 - RNA, 22 nt, Human
cuucaucuuccuguguccugaa

SEQ ID NO: 1766276 - RNA, 15 nt, Human
cuucacuguaaaaua

SEQ ID NO: 1766277 - RNA, 17 nt, Human
cuuauuagagugucuuu

SEQ ID NO: 1766278 - RNA, 20 nt, Human
cuuauuagagugucuuucca

SEQ ID NO: 1766279 - RNA, 21 nt, Human
cuuauuagagugucuuuccac

SEQ ID NO: 1766280 - RNA, 18 nt, Human
cuugccuuauuagagugu

SEQ ID NO: 1766281 - RNA, 20 nt, Human
cuugccuuauuagagugucu

SEQ ID NO: 1766282 - RNA, 21 nt, Human
cuugaugcaugcacuguuccc

SEQ ID NO: 1766283 - RNA, 21 nt, Human
cuugccuuauuagagugucuu

SEQ ID NO: 1766284 - RNA, 17 nt, Human
cuugccuuucgaggccu

SEQ ID NO: 1766285 - RNA, 18 nt, Human
cuugccuuucgaggccug

SEQ ID NO: 1766286 - RNA, 19 nt, Human
cuugccuuucgaggccuga

SEQ ID NO: 1766287 - RNA, 20 nt, Human
cuugccuuucgaggccugaa

SEQ ID NO: 1766288 - RNA, 21 nt, Human
cuuggcacccaagaccucagg

SEQ ID NO: 1766289 - RNA, 18 nt, Human
cuuggcagcaccugucuc

SEQ ID NO: 1766290 - RNA, 19 nt, Human
cuuggcagcaccugucucc

SEQ ID NO: 1766291 - RNA, 20 nt, Human
cuuggcagcaccugucuccu

SEQ ID NO: 1766292 - RNA, 14 nt, Human
cuugacagggcaca

SEQ ID NO: 1766293 - RNA, 15 nt, Human
cuugacagggcacac

SEQ ID NO: 1766294 - RNA, 13 nt, Human
cuugacagggcac

SEQ ID NO: 1766295 - RNA, 20 nt, Human
cuugacagggcacaccgggc

SEQ ID NO: 1766296 - RNA, 19 nt, Human
cuucuuccaggugcccagc

SEQ ID NO: 1766297 - RNA, 13 nt, Human
cuucuagagcuua

SEQ ID NO: 1766298 - RNA, 17 nt, Human
cuucuagcugacuugca

SEQ ID NO: 1766299 - RNA, 15 nt, Human
cuuccuccugggccc

SEQ ID NO: 1766300 - RNA, 22 nt, Human
cuuccuccugggcccucucugc

SEQ ID NO: 1766301 - RNA, 12 nt, Human
cuuccuccuggg

SEQ ID NO: 1766302 - RNA, 14 nt, Human
cuuccuccugggcc

SEQ ID NO: 1766303 - RNA, 19 nt, Human
gaaagggacuuggaagcuc

SEQ ID NO: 1766304 - RNA, 22 nt, Human
gaaagggacuuggaagcuccgc

SEQ ID NO: 1766305 - RNA, 18 nt, Human
gaaaggugccauggaaga

SEQ ID NO: 1766306 - RNA, 22 nt, Human
gaaaggugccauggaagaggcu

SEQ ID NO: 1766307 - RNA, 23 nt, Human
gaaaggugccauggaagaggcua

SEQ ID NO: 1766308 - RNA, 15 nt, Human
cuuuugcccuuugau

SEQ ID NO: 1766309 - RNA, 18 nt, Human
cuuuugucuaugggacuc

SEQ ID NO: 1766310 - RNA, 12 nt, Human
cuuuuguaauaa

SEQ ID NO: 1766311 - RNA, 14 nt, Human
cuuuuguaauaaac

SEQ ID NO: 1766312 - RNA, 15 nt, Human
cuuuuuuuuuuuucc

SEQ ID NO: 1766313 - RNA, 16 nt, Human
cuuuuuuuuuuuucca

SEQ ID NO: 1766314 - RNA, 11 nt, Human
cuuuuuuuccc

SEQ ID NO: 1766315 - RNA, 17 nt, Human
gaaaauuuguuauuuug

SEQ ID NO: 1766316 - RNA, 21 nt, Human
gaaaauuuguuauuuugcaac

SEQ ID NO: 1766317 - RNA, 18 nt, Human
gaaaauuccuauaaggaa

SEQ ID NO: 1766318 - RNA, 18 nt, Human
gaaaauggaaccaggcuu

SEQ ID NO: 1766319 - RNA, 18 nt, Human
gaaaaugguccaggagaa

SEQ ID NO: 1766320 - RNA, 21 nt, Human
gaaaaugcauuguaucgaugu

SEQ ID NO: 1766321 - RNA, 15 nt, Human
gaaaauggaaccagg

SEQ ID NO: 1766322 - RNA, 15 nt, Human
cuuuccuuggcuuua

SEQ ID NO: 1766323 - RNA, 17 nt, Human
cuuuccuuggcuuuaug

SEQ ID NO: 1766324 - RNA, 17 nt, Human
cuuucuacccagcgagc

SEQ ID NO: 1766325 - RNA, 16 nt, Human
cuuuuauagaugguca

SEQ ID NO: 1766326 - RNA, 9 nt, Human
cuuuccugu

SEQ ID NO: 1766327 - RNA, 10 nt, Human
cuuuccuguc

SEQ ID NO: 1766328 - RNA, 13 nt, Human
cuuuccuguccca

SEQ ID NO: 1766329 - RNA, 21 nt, Human
cuuucaauuccguagccagcu

SEQ ID NO: 1766330 - RNA, 14 nt, Human
cuggguucacugca

SEQ ID NO: 1766331 - RNA, 12 nt, Human
cuggggaaggag

SEQ ID NO: 1766332 - RNA, 15 nt, Human
cuggggaaggagcca

SEQ ID NO: 1766333 - RNA, 16 nt, Human
cuggggaaggagccag

SEQ ID NO: 1766334 - RNA, 17 nt, Human
cuggggaaggagccagu

SEQ ID NO: 1766335 - RNA, 18 nt, Human
cuggggaaggagccaguu

SEQ ID NO: 1766336 - RNA, 12 nt, Human
cuggcagcucag

SEQ ID NO: 1766337 - RNA, 17 nt, Human
cuggcuccagugaaacu

SEQ ID NO: 1766338 - RNA, 12 nt, Human
cugggacacagu

SEQ ID NO: 1766339 - RNA, 13 nt, Human
cugggacacaguu

SEQ ID NO: 1766340 - RNA, 20 nt, Human
cugucauuugagcagggcuc

SEQ ID NO: 1766341 - RNA, 17 nt, Human
cugucauuugagcaggg

SEQ ID NO: 1766342 - RNA, 18 nt, Human
cugucauuugagcagggc

SEQ ID NO: 1766343 - RNA, 16 nt, Human
cugucauuugagcagg

SEQ ID NO: 1766344 - RNA, 22 nt, Human
cuguaaaaucuuucuuucuuag

SEQ ID NO: 1766345 - RNA, 11 nt, Human
cuguaaaaucu

SEQ ID NO: 1766346 - RNA, 10 nt, Human
cuguaaaauc

SEQ ID NO: 1766347 - RNA, 13 nt, Human
cugucaccucuuc

SEQ ID NO: 1766348 - RNA, 15 nt, Human
cugucaccucuuccg

SEQ ID NO: 1766349 - RNA, 21 nt, Human
cugugaagcauucgagacaga

SEQ ID NO: 1766350 - RNA, 23 nt, Human
cugugaagcauucgagacagaac

SEQ ID NO: 1766351 - RNA, 14 nt, Human
cugugaagaucuca

SEQ ID NO: 1766352 - RNA, 20 nt, Human
cugugaagaucucacucugc

SEQ ID NO: 1766353 - RNA, 21 nt, Human
cugugaagaucucacucugcc

SEQ ID NO: 1766354 - RNA, 14 nt, Human
cugugcucuggaca

SEQ ID NO: 1766355 - RNA, 15 nt, Human
cugugcucuggacag

SEQ ID NO: 1766356 - RNA, 18 nt, Human
cugugcucaggacucaga

SEQ ID NO: 1766357 - RNA, 19 nt, Human
cugugcucaggacucagaa

SEQ ID NO: 1766358 - RNA, 23 nt, Human
cugugcucaggacucagaagccu

SEQ ID NO: 1766359 - RNA, 13 nt, Human
cugucgcccaguc

SEQ ID NO: 1766360 - RNA, 14 nt, Human
cugcuucagccucc

SEQ ID NO: 1766361 - RNA, 16 nt, Human
cugcuucagccucccg

SEQ ID NO: 1766362 - RNA, 13 nt, Human
cugcuucagccuc

SEQ ID NO: 1766363 - RNA, 23 nt, Human
cugcuucagccucccgaguagcu

SEQ ID NO: 1766364 - RNA, 15 nt, Human
cugcugacagacaca

SEQ ID NO: 1766365 - RNA, 18 nt, Human
cugcugacagacacaggc

SEQ ID NO: 1766366 - RNA, 19 nt, Human
cugcugacagacacaggcc

SEQ ID NO: 1766367 - RNA, 20 nt, Human
cugcugacagacacaggccc

SEQ ID NO: 1766368 - RNA, 21 nt, Human
cugcugacagacacaggcccg

SEQ ID NO: 1766369 - RNA, 23 nt, Human
cugcugacagacacaggcccggc

SEQ ID NO: 1766370 - RNA, 11 nt, Human
cugcugacagu

SEQ ID NO: 1766371 - RNA, 15 nt, Human
cugccucgaacuggc

SEQ ID NO: 1766372 - RNA, 17 nt, Human
cugccucgaacuggcug

SEQ ID NO: 1766373 - RNA, 18 nt, Human
cugccucgaacuggcugc

SEQ ID NO: 1766374 - RNA, 19 nt, Human
cugccucgaacuggcugca

SEQ ID NO: 1766375 - RNA, 14 nt, Human
cugccuguucagcu

SEQ ID NO: 1766376 - RNA, 15 nt, Human
cugccuguucagcuc

SEQ ID NO: 1766377 - RNA, 12 nt, Human
cugccuggguuu

SEQ ID NO: 1766378 - RNA, 20 nt, Human
cugccuggguuuuguucccu

SEQ ID NO: 1766379 - RNA, 17 nt, Human
cugcucagaacuugcug

SEQ ID NO: 1766380 - RNA, 18 nt, Human
cugcucagaacuugcugc

SEQ ID NO: 1766381 - RNA, 19 nt, Human
cugcucagaacuugcugcu

SEQ ID NO: 1766382 - RNA, 22 nt, Human
cugcucagaacuugcugcuguc

SEQ ID NO: 1766383 - RNA, 16 nt, Human
cugcuaauuccccaga

SEQ ID NO: 1766384 - RNA, 21 nt, Human
cugccaaagggaaauaucauu

SEQ ID NO: 1766385 - RNA, 13 nt, Human
cugccccaucucc

SEQ ID NO: 1766386 - RNA, 16 nt, Human
cugccccaucuccccu

SEQ ID NO: 1766387 - RNA, 17 nt, Human
cugccccaucuccccuc

SEQ ID NO: 1766388 - RNA, 19 nt, Human
cugccccaucuccccucag

SEQ ID NO: 1766389 - RNA, 20 nt, Human
cugccccaucuccccucagc

SEQ ID NO: 1766390 - RNA, 21 nt, Human
cugccccaucuccccucagcu

SEQ ID NO: 1766391 - RNA, 12 nt, Human
cugccauccagg

SEQ ID NO: 1766392 - RNA, 20 nt, Human
cugccauauucuguuggcca

SEQ ID NO: 1766393 - RNA, 21 nt, Human
cugccauauucuguuggccag

SEQ ID NO: 1766394 - RNA, 22 nt, Human
cugccauauucuguuggccagu

SEQ ID NO: 1766395 - RNA, 23 nt, Human
cugccauauucuguuggccagug

SEQ ID NO: 1766396 - RNA, 14 nt, Human
gugaugaauacugu

SEQ ID NO: 1766397 - RNA, 16 nt, Human
gugaugcccugcccuu

SEQ ID NO: 1766398 - RNA, 12 nt, Human
aacuucauggau

SEQ ID NO: 1766399 - RNA, 15 nt, Human
aacuucauggaucag

SEQ ID NO: 1766400 - RNA, 14 nt, Human
aacuggucuuccuu

SEQ ID NO: 1766401 - RNA, 15 nt, Human
aacuggucuuccuuu

SEQ ID NO: 1766402 - RNA, 17 nt, Human
aacuggucuuccuuuuu

SEQ ID NO: 1766403 - RNA, 19 nt, Human
aacuggucuuccuuuuugg

SEQ ID NO: 1766404 - RNA, 21 nt, Human
aacugguauucuguucuggag

SEQ ID NO: 1766405 - RNA, 22 nt, Human
aacugguauucuguucuggagg

SEQ ID NO: 1766406 - RNA, 18 nt, Human
aacuguacuuuuaaggca

SEQ ID NO: 1766407 - RNA, 22 nt, Human
gugccucggcuuuucucagcug

SEQ ID NO: 1766408 - RNA, 21 nt, Human
gugcacacaccagagcccacc

SEQ ID NO: 1766409 - RNA, 20 nt, Human
gugcaugggacccacgaaac

SEQ ID NO: 1766410 - RNA, 18 nt, Human
gugcacaucugugucuug

SEQ ID NO: 1766411 - RNA, 22 nt, Human
gugagucgaggacagggaggug

SEQ ID NO: 1766412 - RNA, 14 nt, Human
gugaggccagggca

SEQ ID NO: 1766413 - RNA, 15 nt, Human
gugaggccagggcag

SEQ ID NO: 1766414 - RNA, 17 nt, Human
gugaggccagggcagag

SEQ ID NO: 1766415 - RNA, 23 nt, Human
gugaacuggacccuguugcuaag

SEQ ID NO: 1766416 - RNA, 22 nt, Human
gugaacuggacccuguugcuaa

SEQ ID NO: 1766417 - RNA, 21 nt, Human
gugaacuggacccuguugcua

SEQ ID NO: 1766418 - RNA, 20 nt, Human
gugaacuggacccuguugcu

SEQ ID NO: 1766419 - RNA, 19 nt, Human
gugaacuggacccuguugc

SEQ ID NO: 1766420 - RNA, 11 nt, Human
aacuggcugca

SEQ ID NO: 1766421 - RNA, 22 nt, Human
aacuggacccuguugcuaagcc

SEQ ID NO: 1766422 - RNA, 21 nt, Human
aacuggacccuguugcuaagc

SEQ ID NO: 1766423 - RNA, 20 nt, Human
aacuggacccuguugcuaag

SEQ ID NO: 1766424 - RNA, 19 nt, Human
aacuggacccuguugcuaa

SEQ ID NO: 1766425 - RNA, 18 nt, Human
aacuggacccuguugcua

SEQ ID NO: 1766426 - RNA, 17 nt, Human
aacuggacccuguugcu

SEQ ID NO: 1766427 - RNA, 14 nt, Human
aacuggacccuguu

SEQ ID NO: 1766428 - RNA, 16 nt, Human
aacuggguacuugugg

SEQ ID NO: 1766429 - RNA, 21 nt, Human
aacuggguacuuguggacaca

SEQ ID NO: 1766430 - RNA, 21 nt, Human
aacccagacggcuccacuagg

SEQ ID NO: 1766431 - RNA, 12 nt, Human
aacccccacugg

SEQ ID NO: 1766432 - RNA, 16 nt, Human
aacccccacuggacug

SEQ ID NO: 1766433 - RNA, 20 nt, Human
aacccccacuggacugaccu

SEQ ID NO: 1766434 - RNA, 16 nt, Human
aaccucaucuucuuca

SEQ ID NO: 1766435 - RNA, 14 nt, Human
aaccuccccagccu

SEQ ID NO: 1766436 - RNA, 15 nt, Human
aaccuccccagccug

SEQ ID NO: 1766437 - RNA, 19 nt, Human
aaccugacaaaaaaaaagu

SEQ ID NO: 1766438 - RNA, 14 nt, Human
aaccucgcuggacu

SEQ ID NO: 1766439 - RNA, 19 nt, Human
aaccucgcuggacucucag

SEQ ID NO: 1766440 - RNA, 14 nt, Human
aaccucgaguacug

SEQ ID NO: 1766441 - RNA, 15 nt, Human
aaccucgaguacugu

SEQ ID NO: 1766442 - RNA, 16 nt, Human
aaccucgaguacugug

SEQ ID NO: 1766443 - RNA, 17 nt, Human
aaccucgaguacugugg

SEQ ID NO: 1766444 - RNA, 19 nt, Human
aaccucgaguacugugggc

SEQ ID NO: 1766445 - RNA, 14 nt, Human
aaccucgcccucuc

SEQ ID NO: 1766446 - RNA, 17 nt, Human
aaccucgcccucuccuu

SEQ ID NO: 1766447 - RNA, 20 nt, Human
aaccucgcccucuccuuugu

SEQ ID NO: 1766448 - RNA, 20 nt, Human
aaccaagucaugugcauuuc

SEQ ID NO: 1766449 - RNA, 21 nt, Human
aaccaccacacccagcccacu

SEQ ID NO: 1766450 - RNA, 20 nt, Human
gucuccuuucaccccagggc

SEQ ID NO: 1766451 - RNA, 19 nt, Human
aaccaccacacccagccca

SEQ ID NO: 1766452 - RNA, 16 nt, Human
aaccaagucaugugca

SEQ ID NO: 1766453 - RNA, 18 nt, Human
gucuccuuucaccccagg

SEQ ID NO: 1766454 - RNA, 20 nt, Human
gucuggcccuagacucgggg

SEQ ID NO: 1766455 - RNA, 12 nt, Human
gucuguaaaauc

SEQ ID NO: 1766456 - RNA, 11 nt, Human
gucuguaaaau

SEQ ID NO: 1766457 - RNA, 18 nt, Human
gucuguaaaaucuuucuu

SEQ ID NO: 1766458 - RNA, 15 nt, Human
gucuguaaaaucuuu

SEQ ID NO: 1766459 - RNA, 14 nt, Human
gucuguaaaaucuu

SEQ ID NO: 1766460 - RNA, 13 nt, Human
gucuguaaaaucu

SEQ ID NO: 1766461 - RNA, 16 nt, Human
gucuuucacauuuaaa

SEQ ID NO: 1766462 - RNA, 18 nt, Human
gucuucucacaagccagc

SEQ ID NO: 1766463 - RNA, 22 nt, Human
gugaaccaccacacccagccca

SEQ ID NO: 1766464 - RNA, 23 nt, Human
gugaaccaccacacccagcccac

SEQ ID NO: 1766465 - RNA, 14 nt, Human
gugaacccuggggc

SEQ ID NO: 1766466 - RNA, 18 nt, Human
gugaacccuggggccuga

SEQ ID NO: 1766467 - RNA, 19 nt, Human
gugaacccuggggccugac

SEQ ID NO: 1766468 - RNA, 21 nt, Human
gugaacccuggggccugacug

SEQ ID NO: 1766469 - RNA, 12 nt, Human
aacuccuggccu

SEQ ID NO: 1766470 - RNA, 14 nt, Human
aacucauuccagau

SEQ ID NO: 1766471 - RNA, 15 nt, Human
aacucauuccagauc

SEQ ID NO: 1766472 - RNA, 21 nt, Human
aacucauuccagaucccaggc

SEQ ID NO: 1766473 - RNA, 14 nt, Human
aacuccuuccuggc

SEQ ID NO: 1766474 - RNA, 17 nt, Human
aacuccuuccuggccug

SEQ ID NO: 1766475 - RNA, 20 nt, Human
aacuccuuccuggccugaga

SEQ ID NO: 1766476 - RNA, 17 nt, Human
aacuacugccuuuagaa

SEQ ID NO: 1766477 - RNA, 19 nt, Human
aacuacugccuuuagaaaa

SEQ ID NO: 1766478 - RNA, 20 nt, Human
aacuacugccuuuagaaaau

SEQ ID NO: 1766479 - RNA, 17 nt, Human
aaccuuggccugggccg

SEQ ID NO: 1766480 - RNA, 21 nt, Human
aaaugugaugaauacuguauu

SEQ ID NO: 1766481 - RNA, 22 nt, Human
aaauguguuuuguuuauuaaau

SEQ ID NO: 1766482 - RNA, 23 nt, Human
aaauguguuuuguuuauuaaaua

SEQ ID NO: 1766483 - RNA, 13 nt, Human
aaaugucuugugu

SEQ ID NO: 1766484 - RNA, 13 nt, Human
aaaugugaugaau

SEQ ID NO: 1766485 - RNA, 20 nt, Human
guaugccaccaacuuacaaa

SEQ ID NO: 1766486 - RNA, 16 nt, Human
guauguaacaauuguu

SEQ ID NO: 1766487 - RNA, 16 nt, Human
guauguaauggaacuu

SEQ ID NO: 1766488 - RNA, 17 nt, Human
aaaugucacagaagcag

SEQ ID NO: 1766489 - RNA, 21 nt, Human
aaaugucacguuuuguuuugu

SEQ ID NO: 1766490 - RNA, 13 nt, Human
aaauuuauuuccu

SEQ ID NO: 1766491 - RNA, 20 nt, Human
aaauuuauuuccuaguucug

SEQ ID NO: 1766492 - RNA, 18 nt, Human
aaauuuauuuuauaagaa

SEQ ID NO: 1766493 - RNA, 19 nt, Human
aaauuuauuuuauaagaaa

SEQ ID NO: 1766494 - RNA, 22 nt, Human
aaauuuauuuuauaagaaaaac

SEQ ID NO: 1766495 - RNA, 23 nt, Human
aaauuuauuuuauaagaaaaacu

SEQ ID NO: 1766496 - RNA, 13 nt, Human
gucaaaauuugcu

SEQ ID NO: 1766497 - RNA, 13 nt, Human
aaauuauuugcau

SEQ ID NO: 1766498 - RNA, 12 nt, Human
aaauucugaauu

SEQ ID NO: 1766499 - RNA, 13 nt, Human
aaauucugaauuu

SEQ ID NO: 1766500 - RNA, 14 nt, Human
aaauucugaauuug

SEQ ID NO: 1766501 - RNA, 16 nt, Human
aaauucugaauuugca

SEQ ID NO: 1766502 - RNA, 17 nt, Human
aaauucugaauuugcaa

SEQ ID NO: 1766503 - RNA, 18 nt, Human
aaauucugaauuugcaaa

SEQ ID NO: 1766504 - RNA, 19 nt, Human
aaauucugaauuugcaaag

SEQ ID NO: 1766505 - RNA, 20 nt, Human
aaauucugaauuugcaaagu

SEQ ID NO: 1766506 - RNA, 21 nt, Human
aaauucugaauuugcaaagua

SEQ ID NO: 1766507 - RNA, 22 nt, Human
aaauucugaauuugcaaaguac

SEQ ID NO: 1766508 - RNA, 15 nt, Human
aaauucugaauuuug

SEQ ID NO: 1766509 - RNA, 16 nt, Human
aaauuguauauucacu

SEQ ID NO: 1766510 - RNA, 15 nt, Human
aaauuguauauucac

SEQ ID NO: 1766511 - RNA, 14 nt, Human
aaauuguauauuca

SEQ ID NO: 1766512 - RNA, 13 nt, Human
aaauugugugugc

SEQ ID NO: 1766513 - RNA, 21 nt, Human
aaauugugugugcucugcuuc

SEQ ID NO: 1766514 - RNA, 22 nt, Human
aaauugugugugcucugcuuca

SEQ ID NO: 1766515 - RNA, 14 nt, Human
aaauuuauuaaaua

SEQ ID NO: 1766516 - RNA, 19 nt, Human
aaaugguuguauuagaugu

SEQ ID NO: 1766517 - RNA, 17 nt, Human
aaaugguuguauuagau

SEQ ID NO: 1766518 - RNA, 16 nt, Human
aaaugguuguauuaga

SEQ ID NO: 1766519 - RNA, 14 nt, Human
aaaugguuguauua

SEQ ID NO: 1766520 - RNA, 22 nt, Human
aaaugguuguauuagauguucu

SEQ ID NO: 1766521 - RNA, 20 nt, Human
aaaugguuguauuagauguu

SEQ ID NO: 1766522 - RNA, 12 nt, Human
guaacaggcaga

SEQ ID NO: 1766523 - RNA, 13 nt, Human
aaaugguuguauu

SEQ ID NO: 1766524 - RNA, 14 nt, Human
aaaugguccaggag

SEQ ID NO: 1766525 - RNA, 19 nt, Human
guaucccaugagccucagc

SEQ ID NO: 1766526 - RNA, 11 nt, Human
guauccaguca

SEQ ID NO: 1766527 - RNA, 22 nt, Human
guaucaggugcugccauccagg

SEQ ID NO: 1766528 - RNA, 19 nt, Human
guaucauaauuaccaagug

SEQ ID NO: 1766529 - RNA, 21 nt, Human
guaucccaugagccucagcau

SEQ ID NO: 1766530 - RNA, 15 nt, Human
guaugguggcugggu

SEQ ID NO: 1766531 - RNA, 16 nt, Human
guaugguggcuggguu

SEQ ID NO: 1766532 - RNA, 14 nt, Human
guaugguggcuggg

SEQ ID NO: 1766533 - RNA, 11 nt, Human
guauaaaagau

SEQ ID NO: 1766534 - RNA, 12 nt, Human
guauaaguuauu

SEQ ID NO: 1766535 - RNA, 21 nt, Human
guauaaguuauuuuuguacau

SEQ ID NO: 1766536 - RNA, 22 nt, Human
guauaaguuauuuuuguacaug

SEQ ID NO: 1766537 - RNA, 23 nt, Human
guauaaguuauuuuuguacaugu

SEQ ID NO: 1766538 - RNA, 16 nt, Human
guaucaggugcugcca

SEQ ID NO: 1766539 - RNA, 18 nt, Human
guaucaggugcugccauc

SEQ ID NO: 1766540 - RNA, 16 nt, Human
guccuacccacccucc

SEQ ID NO: 1766541 - RNA, 15 nt, Human
guccuacccacccuc

SEQ ID NO: 1766542 - RNA, 12 nt, Human
guccuacucugu

SEQ ID NO: 1766543 - RNA, 22 nt, Human
aacagaagcucuuacucuuucc

SEQ ID NO: 1766544 - RNA, 14 nt, Human
gucccaccuuggcu

SEQ ID NO: 1766545 - RNA, 15 nt, Human
gucccaccuuggcug

SEQ ID NO: 1766546 - RNA, 16 nt, Human
gucccaccuuggcugc

SEQ ID NO: 1766547 - RNA, 22 nt, Human
gucaguaccuucaaacuagggc

SEQ ID NO: 1766548 - RNA, 19 nt, Human
aaauuuguuauuuugcaac

SEQ ID NO: 1766549 - RNA, 19 nt, Human
gucagaauuagcugcuucu

SEQ ID NO: 1766550 - RNA, 21 nt, Human
gucacacaguauuacuucugc

SEQ ID NO: 1766551 - RNA, 22 nt, Human
gucacacaguauuacuucugcu

SEQ ID NO: 1766552 - RNA, 12 nt, Human
aacaauaaaaga

SEQ ID NO: 1766553 - RNA, 23 nt, Human
aacaauaaaauuuuuuuucaugu

SEQ ID NO: 1766554 - RNA, 21 nt, Human
aaauuuuauaaaauuaagcaa

SEQ ID NO: 1766555 - RNA, 15 nt, Human
aaauuuuuuuagaaa

SEQ ID NO: 1766556 - RNA, 13 nt, Human
aaauuuuuuuaga

SEQ ID NO: 1766557 - RNA, 21 nt, Human
aaauuuuuuuagaaagcauuu

SEQ ID NO: 1766558 - RNA, 14 nt, Human
aaggaaaggccuga

SEQ ID NO: 1766559 - RNA, 15 nt, Human
aagcuccaucaauga

SEQ ID NO: 1766560 - RNA, 13 nt, Human
aaggaacuugucu

SEQ ID NO: 1766561 - RNA, 20 nt, Human
aaggaggggauagagagaga

SEQ ID NO: 1766562 - RNA, 17 nt, Human
aaggagauagggaaaag

SEQ ID NO: 1766563 - RNA, 13 nt, Human
aaggaauauaaug

SEQ ID NO: 1766564 - RNA, 17 nt, Human
aaggauagaagcugcag

SEQ ID NO: 1766565 - RNA, 17 nt, Human
aaggccaaaccucuguu

SEQ ID NO: 1766566 - RNA, 16 nt, Human
aaggccaaaccucugu

SEQ ID NO: 1766567 - RNA, 13 nt, Human
aaggcccugcuga

SEQ ID NO: 1766568 - RNA, 18 nt, Human
aaggcccugcugagucau

SEQ ID NO: 1766569 - RNA, 23 nt, Human
guugcccaggcaggucuugaacu

SEQ ID NO: 1766570 - RNA, 12 nt, Human
guugcccaggcu

SEQ ID NO: 1766571 - RNA, 13 nt, Human
guugcccaggcug

SEQ ID NO: 1766572 - RNA, 20 nt, Human
guugcggauggauggaaggu

SEQ ID NO: 1766573 - RNA, 13 nt, Human
guugggcuggugu

SEQ ID NO: 1766574 - RNA, 15 nt, Human
guugggcugguguca

SEQ ID NO: 1766575 - RNA, 21 nt, Human
guuuaauccccaguaaaauug

SEQ ID NO: 1766576 - RNA, 19 nt, Human
guuuaauccccaguaaaau

SEQ ID NO: 1766577 - RNA, 14 nt, Human
aaggucaaauuuau

SEQ ID NO: 1766578 - RNA, 19 nt, Human
guuucuauguguagggcgg

SEQ ID NO: 1766579 - RNA, 17 nt, Human
aaggggccagaggcucg

SEQ ID NO: 1766580 - RNA, 16 nt, Human
guuuugccauguuggc

SEQ ID NO: 1766581 - RNA, 20 nt, Human
guuuugccauguuggccagg

SEQ ID NO: 1766582 - RNA, 21 nt, Human
guuuugccauguuggccaggc

SEQ ID NO: 1766583 - RNA, 22 nt, Human
guuuugccauguuggccaggcu

SEQ ID NO: 1766584 - RNA, 18 nt, Human
aaguauuuaauuagugcu

SEQ ID NO: 1766585 - RNA, 17 nt, Human
aaguauuuaauuagugc

SEQ ID NO: 1766586 - RNA, 16 nt, Human
aaguauuuaauuagug

SEQ ID NO: 1766587 - RNA, 23 nt, Human
aaguauuuaauuagugcuaagug

SEQ ID NO: 1766588 - RNA, 22 nt, Human
aaguauuuaauuagugcuaagu

SEQ ID NO: 1766589 - RNA, 21 nt, Human
aaguauuuaauuagugcuaag

SEQ ID NO: 1766590 - RNA, 20 nt, Human
aaguauuuaauuagugcuaa

SEQ ID NO: 1766591 - RNA, 19 nt, Human
aaguauuuaauuagugcua

SEQ ID NO: 1766592 - RNA, 15 nt, Human
aagugagagcugggu

SEQ ID NO: 1766593 - RNA, 14 nt, Human
aagugagagcuggg

SEQ ID NO: 1766594 - RNA, 17 nt, Human
aaguauuuucauaagua

SEQ ID NO: 1766595 - RNA, 22 nt, Human
aaguauuuucauaaguauuuca

SEQ ID NO: 1766596 - RNA, 13 nt, Human
aaguauuucaaau

SEQ ID NO: 1766597 - RNA, 21 nt, Human
aaguauuucaaauuggagcuu

SEQ ID NO: 1766598 - RNA, 22 nt, Human
aaguauuucaaauuggagcuuc

SEQ ID NO: 1766599 - RNA, 20 nt, Human
aagucauuggcuuuauccuc

SEQ ID NO: 1766600 - RNA, 13 nt, Human
aagucauuggcuu

SEQ ID NO: 1766601 - RNA, 14 nt, Human
aagucaugugcauu

SEQ ID NO: 1766602 - RNA, 15 nt, Human
aagucaugugcauuu

SEQ ID NO: 1766603 - RNA, 16 nt, Human
aagucuuucacauuua

SEQ ID NO: 1766604 - RNA, 13 nt, Human
uaaaaaucaacuu

SEQ ID NO: 1766605 - RNA, 14 nt, Human
uaaaaaucaacuuu

SEQ ID NO: 1766606 - RNA, 15 nt, Human
uaaaaaucaacuuuu

SEQ ID NO: 1766607 - RNA, 15 nt, Human
uaaaauauuauugaa

SEQ ID NO: 1766608 - RNA, 16 nt, Human
uaaaauauuauugaac

SEQ ID NO: 1766609 - RNA, 20 nt, Human
aagugauucuccugccucag

SEQ ID NO: 1766610 - RNA, 19 nt, Human
aagugauucuccugccuca

SEQ ID NO: 1766611 - RNA, 15 nt, Human
aagugauucuccugc

SEQ ID NO: 1766612 - RNA, 16 nt, Human
aagugauucuccugcc

SEQ ID NO: 1766613 - RNA, 17 nt, Human
aagugauucuccugccu

SEQ ID NO: 1766614 - RNA, 18 nt, Human
aagugauucuccugccuc

SEQ ID NO: 1766615 - RNA, 20 nt, Human
uaaaagacagugaaagaaaa

SEQ ID NO: 1766616 - RNA, 23 nt, Human
aagcccugauuguguauauucau

SEQ ID NO: 1766617 - RNA, 14 nt, Human
aagccccucuuucu

SEQ ID NO: 1766618 - RNA, 15 nt, Human
aagccaagaccucac

SEQ ID NO: 1766619 - RNA, 14 nt, Human
aagccccagcaagc

SEQ ID NO: 1766620 - RNA, 22 nt, Human
aagccaaagcuaggccuggcca

SEQ ID NO: 1766621 - RNA, 17 nt, Human
aagcauuugaaugcauu

SEQ ID NO: 1766622 - RNA, 16 nt, Human
aagcauuugaaugcau

SEQ ID NO: 1766623 - RNA, 15 nt, Human
aagcauuugaaugca

SEQ ID NO: 1766624 - RNA, 12 nt, Human
aagcauuugaau

SEQ ID NO: 1766625 - RNA, 14 nt, Human
aagcauuugaaugc

SEQ ID NO: 1766626 - RNA, 13 nt, Human
aagcauuugaaug

SEQ ID NO: 1766627 - RNA, 16 nt, Human
aagcauuuacuuugug

SEQ ID NO: 1766628 - RNA, 23 nt, Human
aagcauccuuuaggguucugccu

SEQ ID NO: 1766629 - RNA, 12 nt, Human
aagcaucuacuu

SEQ ID NO: 1766630 - RNA, 13 nt, Human
aagcaucuacuuc

SEQ ID NO: 1766631 - RNA, 13 nt, Human
aagcauucacaac

SEQ ID NO: 1766632 - RNA, 12 nt, Human
aagcauucacaa

SEQ ID NO: 1766633 - RNA, 20 nt, Human
aagcaguagaaauaauaugc

SEQ ID NO: 1766634 - RNA, 21 nt, Human
aagcaguagaaauaauaugca

SEQ ID NO: 1766635 - RNA, 22 nt, Human
aagcaguagaaauaauaugcau

SEQ ID NO: 1766636 - RNA, 21 nt, Human
gugugugcgccuacaggagug

SEQ ID NO: 1766637 - RNA, 17 nt, Human
gugugugcucugcuuca

SEQ ID NO: 1766638 - RNA, 22 nt, Human
aagccucaacuagucauuuuuu

SEQ ID NO: 1766639 - RNA, 22 nt, Human
aagccuagugaaggcuucucuc

SEQ ID NO: 1766640 - RNA, 15 nt, Human
guucagcuccagcuc

SEQ ID NO: 1766641 - RNA, 13 nt, Human
guucagcuccagc

SEQ ID NO: 1766642 - RNA, 12 nt, Human
aagcuaggccug

SEQ ID NO: 1766643 - RNA, 16 nt, Human
aagcuaggccuggcca

SEQ ID NO: 1766644 - RNA, 15 nt, Human
guuaggauggcagga

SEQ ID NO: 1766645 - RNA, 18 nt, Human
guucaagcgauucuucug

SEQ ID NO: 1766646 - RNA, 12 nt, Human
guucaaagccag

SEQ ID NO: 1766647 - RNA, 13 nt, Human
guucaaagccagc

SEQ ID NO: 1766648 - RNA, 14 nt, Human
guucaaaauucuaa

SEQ ID NO: 1766649 - RNA, 13 nt, Human
guuauuuugcaac

SEQ ID NO: 1766650 - RNA, 14 nt, Human
guuauuuuuguaca

SEQ ID NO: 1766651 - RNA, 15 nt, Human
guuauuuuuguacau

SEQ ID NO: 1766652 - RNA, 20 nt, Human
guuauucuaguacuagaaac

SEQ ID NO: 1766653 - RNA, 20 nt, Human
aagaguagaaacugcaggga

SEQ ID NO: 1766654 - RNA, 22 nt, Human
aagagggucugaggaauccaga

SEQ ID NO: 1766655 - RNA, 15 nt, Human
aagaggcuacagggc

SEQ ID NO: 1766656 - RNA, 12 nt, Human
gugggggugggu

SEQ ID NO: 1766657 - RNA, 14 nt, Human
guggggguggguca

SEQ ID NO: 1766658 - RNA, 15 nt, Human
gugggggugggucag

SEQ ID NO: 1766659 - RNA, 18 nt, Human
guggggguugcuguauaa

SEQ ID NO: 1766660 - RNA, 18 nt, Human
aagaucucugcagggccg

SEQ ID NO: 1766661 - RNA, 21 nt, Human
aagaucucacucugccccccc

SEQ ID NO: 1766662 - RNA, 14 nt, Human
gugucagcugaggc

SEQ ID NO: 1766663 - RNA, 16 nt, Human
gugucagcugaggcug

SEQ ID NO: 1766664 - RNA, 17 nt, Human
gugucagcugaggcugg

SEQ ID NO: 1766665 - RNA, 18 nt, Human
gugucagcugaggcuggg

SEQ ID NO: 1766666 - RNA, 16 nt, Human
gugucaagcugcucug

SEQ ID NO: 1766667 - RNA, 17 nt, Human
gugucaagcugcucuga

SEQ ID NO: 1766668 - RNA, 21 nt, Human
gugucaagcugcucugagcca

SEQ ID NO: 1766669 - RNA, 20 nt, Human
gugucaagagggucugagga

SEQ ID NO: 1766670 - RNA, 22 nt, Human
aagauggggucuguaaaaucuu

SEQ ID NO: 1766671 - RNA, 18 nt, Human
aagaugggugaaggcugg

SEQ ID NO: 1766672 - RNA, 21 nt, Human
aagauggggucuguaaaaucu

SEQ ID NO: 1766673 - RNA, 20 nt, Human
aagauggggucuguaaaauc

SEQ ID NO: 1766674 - RNA, 19 nt, Human
aagauggggucuguaaaau

SEQ ID NO: 1766675 - RNA, 18 nt, Human
aagauggggucuguaaaa

SEQ ID NO: 1766676 - RNA, 17 nt, Human
aagauggggucuguaaa

SEQ ID NO: 1766677 - RNA, 15 nt, Human
aagauggggucugua

SEQ ID NO: 1766678 - RNA, 18 nt, Human
aagaugggggcagggcug

SEQ ID NO: 1766679 - RNA, 19 nt, Human
aagaugggggcagggcugu

SEQ ID NO: 1766680 - RNA, 21 nt, Human
aagaugggggcagggcugugc

SEQ ID NO: 1766681 - RNA, 23 nt, Human
aagaugggggcagggcugugcuu

SEQ ID NO: 1766682 - RNA, 20 nt, Human
aagaugguguggguguccug

SEQ ID NO: 1766683 - RNA, 16 nt, Human
gugugucagcugaggc

SEQ ID NO: 1766684 - RNA, 19 nt, Human
guguguccaaaacugccuc

SEQ ID NO: 1766685 - RNA, 18 nt, Human
guguguccaaaacugccu

SEQ ID NO: 1766686 - RNA, 14 nt, Human
guguggguguccug

SEQ ID NO: 1766687 - RNA, 23 nt, Human
guguggguguccugccugucugc

SEQ ID NO: 1766688 - RNA, 15 nt, Human
guguggguucuacag

SEQ ID NO: 1766689 - RNA, 22 nt, Human
gugugacaaggauugcuacugu

SEQ ID NO: 1766690 - RNA, 18 nt, Human
gugugacauuuggagagg

SEQ ID NO: 1766691 - RNA, 19 nt, Human
gugugacauuuggagaggg

SEQ ID NO: 1766692 - RNA, 14 nt, Human
gugggagcugccug

SEQ ID NO: 1766693 - RNA, 15 nt, Human
gugggagcugccugu

SEQ ID NO: 1766694 - RNA, 18 nt, Human
gugggagcugccuguuca

SEQ ID NO: 1766695 - RNA, 12 nt, Human
guggggccccuc

SEQ ID NO: 1766696 - RNA, 13 nt, Human
guggccucuuugu

SEQ ID NO: 1766697 - RNA, 16 nt, Human
guggccucuuugucua

SEQ ID NO: 1766698 - RNA, 19 nt, Human
guggccucuuugucuaaaa

SEQ ID NO: 1766699 - RNA, 14 nt, Human
aagacgcccucuau

SEQ ID NO: 1766700 - RNA, 14 nt, Human
aacuugcugcuguc

SEQ ID NO: 1766701 - RNA, 16 nt, Human
aacuugcugcugucuu

SEQ ID NO: 1766702 - RNA, 13 nt, Human
aacuugccucuuu

SEQ ID NO: 1766703 - RNA, 18 nt, Human
aacuugccucuuuuaccu

SEQ ID NO: 1766704 - RNA, 22 nt, Human
aacuugccucuuuuaccugcug

SEQ ID NO: 1766705 - RNA, 23 nt, Human
aacuugccucuuuuaccugcugc

SEQ ID NO: 1766706 - RNA, 22 nt, Human
uaacauguguuaaguauuuuca

SEQ ID NO: 1766707 - RNA, 15 nt, Human
uaacauguaggaagu

SEQ ID NO: 1766708 - RNA, 21 nt, Human
aauaguucagguaacaggcag

SEQ ID NO: 1766709 - RNA, 13 nt, Human
aauaguuaauaua

SEQ ID NO: 1766710 - RNA, 15 nt, Human
aauaguuacuccagu

SEQ ID NO: 1766711 - RNA, 18 nt, Human
aauaguuacuccagugcc

SEQ ID NO: 1766712 - RNA, 20 nt, Human
aauaguuacuccagugccaa

SEQ ID NO: 1766713 - RNA, 15 nt, Human
uaacuuauauuaaua

SEQ ID NO: 1766714 - RNA, 14 nt, Human
uaacuuacuuccaa

SEQ ID NO: 1766715 - RNA, 13 nt, Human
uaacggaucagaa

SEQ ID NO: 1766716 - RNA, 19 nt, Human
uaacggaucagaaauacag

SEQ ID NO: 1766717 - RNA, 14 nt, Human
uaacggaucagaaa

SEQ ID NO: 1766718 - RNA, 21 nt, Human
uaacggaucagaaauacagau

SEQ ID NO: 1766719 - RNA, 15 nt, Human
uaaauguguuuuguu

SEQ ID NO: 1766720 - RNA, 21 nt, Human
uaaauguguuuuguuuauuaa

SEQ ID NO: 1766721 - RNA, 18 nt, Human
uaaaugaaaaucgugaca

SEQ ID NO: 1766722 - RNA, 22 nt, Human
aagugcguccacgagcuguuua

SEQ ID NO: 1766723 - RNA, 14 nt, Human
uaacaaucagcucc

SEQ ID NO: 1766724 - RNA, 20 nt, Human
aauacagauuuugauagcaa

SEQ ID NO: 1766725 - RNA, 19 nt, Human
aauacagauuuugauagca

SEQ ID NO: 1766726 - RNA, 23 nt, Human
aauacagauuuugauagcaaagc

SEQ ID NO: 1766727 - RNA, 21 nt, Human
aauacagauuuugauagcaaa

SEQ ID NO: 1766728 - RNA, 17 nt, Human
aauacaugacauuuauu

SEQ ID NO: 1766729 - RNA, 23 nt, Human
aauacaugacauuuauuuuucau

SEQ ID NO: 1766730 - RNA, 13 nt, Human
aauacaugcaucu

SEQ ID NO: 1766731 - RNA, 14 nt, Human
aauagagccugagg

SEQ ID NO: 1766732 - RNA, 18 nt, Human
aauagaguauaugcacuu

SEQ ID NO: 1766733 - RNA, 16 nt, Human
aauagagccugaggga

SEQ ID NO: 1766734 - RNA, 15 nt, Human
aauagaguauaugca

SEQ ID NO: 1766735 - RNA, 16 nt, Human
aauagaguauaugcac

SEQ ID NO: 1766736 - RNA, 17 nt, Human
aauagaguauaugcacu

SEQ ID NO: 1766737 - RNA, 23 nt, Human
aaucagcuauuuacugccaaagg

SEQ ID NO: 1766738 - RNA, 20 nt, Human
aaucagcuccuuccuggaga

SEQ ID NO: 1766739 - RNA, 21 nt, Human
aaucagccaauuauguuaaac

SEQ ID NO: 1766740 - RNA, 20 nt, Human
aaucagccaauuauguuaaa

SEQ ID NO: 1766741 - RNA, 19 nt, Human
aaucagccaauuauguuaa

SEQ ID NO: 1766742 - RNA, 18 nt, Human
aaucagccaauuauguua

SEQ ID NO: 1766743 - RNA, 14 nt, Human
aaucagccaauuau

SEQ ID NO: 1766744 - RNA, 14 nt, Human
aauauuuauucauu

SEQ ID NO: 1766745 - RNA, 20 nt, Human
aauauuuauucauuauuugu

SEQ ID NO: 1766746 - RNA, 22 nt, Human
aauauuuauucauuauuuguca

SEQ ID NO: 1766747 - RNA, 21 nt, Human
uaaguuuccuuccagcccaga

SEQ ID NO: 1766748 - RNA, 19 nt, Human
uaaguuuccuuccagccca

SEQ ID NO: 1766749 - RNA, 15 nt, Human
uaaguuacaauguuu

SEQ ID NO: 1766750 - RNA, 13 nt, Human
uaaguauuucaaa

SEQ ID NO: 1766751 - RNA, 17 nt, Human
uaaggauacuuuacaug

SEQ ID NO: 1766752 - RNA, 20 nt, Human
aauccucaguuuuugugaaa

SEQ ID NO: 1766753 - RNA, 15 nt, Human
aauccccaguaaaau

SEQ ID NO: 1766754 - RNA, 21 nt, Human
aauccccaguaaaauugccau

SEQ ID NO: 1766755 - RNA, 17 nt, Human
aauccccaguaaaauug

SEQ ID NO: 1766756 - RNA, 16 nt, Human
aauccccaguaaaauu

SEQ ID NO: 1766757 - RNA, 12 nt, Human
uacaauguuuua

SEQ ID NO: 1766758 - RNA, 13 nt, Human
uacaauguuuuau

SEQ ID NO: 1766759 - RNA, 18 nt, Human
uacaauucuacauuguca

SEQ ID NO: 1766760 - RNA, 18 nt, Human
uaauuuuuuugagacaga

SEQ ID NO: 1766761 - RNA, 21 nt, Human
aaugcuggcuguuggcugggg

SEQ ID NO: 1766762 - RNA, 22 nt, Human
aaugcuggcuguuggcuggggg

SEQ ID NO: 1766763 - RNA, 16 nt, Human
aauggaaccaggcuug

SEQ ID NO: 1766764 - RNA, 17 nt, Human
aauggaaccaggcuugg

SEQ ID NO: 1766765 - RNA, 18 nt, Human
aaugcuuuagaaagguuu

SEQ ID NO: 1766766 - RNA, 19 nt, Human
aaugcuuuagaaagguuuu

SEQ ID NO: 1766767 - RNA, 14 nt, Human
aauggaaccaggcu

SEQ ID NO: 1766768 - RNA, 19 nt, Human
aauggagucaguuugcagu

SEQ ID NO: 1766769 - RNA, 22 nt, Human
aauggagucauuugagucucuu

SEQ ID NO: 1766770 - RNA, 16 nt, Human
aauggauacauaaaga

SEQ ID NO: 1766771 - RNA, 17 nt, Human
aauggauacauaaagac

SEQ ID NO: 1766772 - RNA, 18 nt, Human
aauggauacauaaagacu

SEQ ID NO: 1766773 - RNA, 20 nt, Human
aauggaggccauauuuccau

SEQ ID NO: 1766774 - RNA, 20 nt, Human
uacacccccucuucugagca

SEQ ID NO: 1766775 - RNA, 22 nt, Human
uacacccccucuucugagcaca

SEQ ID NO: 1766776 - RNA, 15 nt, Human
uacacccuuuuccag

SEQ ID NO: 1766777 - RNA, 16 nt, Human
uacacccuuuuccagc

SEQ ID NO: 1766778 - RNA, 21 nt, Human
aaugauucaguguuaaaugug

SEQ ID NO: 1766779 - RNA, 22 nt, Human
aaugauucaguguuaaauguga

SEQ ID NO: 1766780 - RNA, 23 nt, Human
aaugauucaguguuaaaugugau

SEQ ID NO: 1766781 - RNA, 13 nt, Human
aaugauucagugu

SEQ ID NO: 1766782 - RNA, 14 nt, Human
aaugauucaguguu

SEQ ID NO: 1766783 - RNA, 14 nt, Human
aaugaguuuaaaaa

SEQ ID NO: 1766784 - RNA, 17 nt, Human
aaugaguuuaaaaauca

SEQ ID NO: 1766785 - RNA, 21 nt, Human
aaugaguuuaaaaaucaacuu

SEQ ID NO: 1766786 - RNA, 16 nt, Human
aaugaggucagagccu

SEQ ID NO: 1766787 - RNA, 18 nt, Human
aaugaggucagagccugc

SEQ ID NO: 1766788 - RNA, 22 nt, Human
aaugagaagaaaauggaaccag

SEQ ID NO: 1766789 - RNA, 13 nt, Human
aaugagaaaugga

SEQ ID NO: 1766790 - RNA, 22 nt, Human
uaauuccguagguuauuuucag

SEQ ID NO: 1766791 - RNA, 20 nt, Human
uaauuuacuggacaaagaau

SEQ ID NO: 1766792 - RNA, 13 nt, Human
uaccagcgaggag

SEQ ID NO: 1766793 - RNA, 15 nt, Human
uaccagcgaggaggc

SEQ ID NO: 1766794 - RNA, 20 nt, Human
uaccagcgaggaggcuccag

SEQ ID NO: 1766795 - RNA, 13 nt, Human
uaccagugaauuu

SEQ ID NO: 1766796 - RNA, 14 nt, Human
uaccagugaauuuu

SEQ ID NO: 1766797 - RNA, 18 nt, Human
uaccagugaauuuuugca

SEQ ID NO: 1766798 - RNA, 19 nt, Human
uaccagugaauuuuugcaa

SEQ ID NO: 1766799 - RNA, 20 nt, Human
uaccagugaauuuuugcaau

SEQ ID NO: 1766800 - RNA, 21 nt, Human
uaccagugaauuuuugcaaua

SEQ ID NO: 1766801 - RNA, 22 nt, Human
uaccagugaauuuuugcaauaa

SEQ ID NO: 1766802 - RNA, 23 nt, Human
uaccagugaauuuuugcaauaau

SEQ ID NO: 1766803 - RNA, 13 nt, Human
aauguuggauaag

SEQ ID NO: 1766804 - RNA, 16 nt, Human
aauguuggauaaggaa

SEQ ID NO: 1766805 - RNA, 17 nt, Human
aauguuggauaaggaau

SEQ ID NO: 1766806 - RNA, 18 nt, Human
aauguuggauaaggaauu

SEQ ID NO: 1766807 - RNA, 12 nt, Human
aauguuccagac

SEQ ID NO: 1766808 - RNA, 17 nt, Human
aauguuccagacauucu

SEQ ID NO: 1766809 - RNA, 17 nt, Human
uacagggguucuggaaa

SEQ ID NO: 1766810 - RNA, 22 nt, Human
uacagggccaaacgcugagcca

SEQ ID NO: 1766811 - RNA, 13 nt, Human
aauguuacugccu

SEQ ID NO: 1766812 - RNA, 15 nt, Human
aauguuacugccuua

SEQ ID NO: 1766813 - RNA, 17 nt, Human
aauguuacugccuuaau

SEQ ID NO: 1766814 - RNA, 20 nt, Human
uaccugacacucccuugggc

SEQ ID NO: 1766815 - RNA, 13 nt, Human
uaccugugugcuu

SEQ ID NO: 1766816 - RNA, 16 nt, Human
uaccugugccucggcu

SEQ ID NO: 1766817 - RNA, 17 nt, Human
aauuacauguaaaacau

SEQ ID NO: 1766818 - RNA, 18 nt, Human
uacccggggcccagggca

SEQ ID NO: 1766819 - RNA, 13 nt, Human
uaccugaaaacac

SEQ ID NO: 1766820 - RNA, 20 nt, Human
uaccugaaaacacugugcac

SEQ ID NO: 1766821 - RNA, 21 nt, Human
uaccugaaaacacugugcaca

SEQ ID NO: 1766822 - RNA, 17 nt, Human
uaccugacacucccuug

SEQ ID NO: 1766823 - RNA, 12 nt, Human
aauuauuugcau

SEQ ID NO: 1766824 - RNA, 23 nt, Human
aauuauguuaaacuagcauaucu

SEQ ID NO: 1766825 - RNA, 19 nt, Human
aauuauguuaaacuagcau

SEQ ID NO: 1766826 - RNA, 13 nt, Human
aauuauguuaaac

SEQ ID NO: 1766827 - RNA, 15 nt, Human
aauuauguuaaacua

SEQ ID NO: 1766828 - RNA, 14 nt, Human
aauuauguuaaacu

SEQ ID NO: 1766829 - RNA, 13 nt, Human
uaucagaauuugu

SEQ ID NO: 1766830 - RNA, 20 nt, Human
uaucagaauuuguguugaag

SEQ ID NO: 1766831 - RNA, 19 nt, Human
uaucaccgugggcucccug

SEQ ID NO: 1766832 - RNA, 23 nt, Human
uaucaccgugggcucccugacug

SEQ ID NO: 1766833 - RNA, 19 nt, Human
acacuuaggguuuggagcu

SEQ ID NO: 1766834 - RNA, 14 nt, Human
acagaaaugcugcu

SEQ ID NO: 1766835 - RNA, 15 nt, Human
acagaaaugcugcug

SEQ ID NO: 1766836 - RNA, 16 nt, Human
acagaaaugcugcugg

SEQ ID NO: 1766837 - RNA, 19 nt, Human
acagaaaugcugcuggcca

SEQ ID NO: 1766838 - RNA, 20 nt, Human
acagaaaugcugcuggccaa

SEQ ID NO: 1766839 - RNA, 21 nt, Human
acagaaaugcugcuggccaaa

SEQ ID NO: 1766840 - RNA, 17 nt, Human
acacuuuuggaaccaug

SEQ ID NO: 1766841 - RNA, 16 nt, Human
acacuucguucgcaga

SEQ ID NO: 1766842 - RNA, 21 nt, Human
uauaagugcuguauaaaauca

SEQ ID NO: 1766843 - RNA, 20 nt, Human
uauaagugcuguauaaaauc

SEQ ID NO: 1766844 - RNA, 19 nt, Human
uauaagugcuguauaaaau

SEQ ID NO: 1766845 - RNA, 17 nt, Human
uauaagugcuguauaaa

SEQ ID NO: 1766846 - RNA, 16 nt, Human
uauaagugcuguauaa

SEQ ID NO: 1766847 - RNA, 15 nt, Human
uauaagugcuguaua

SEQ ID NO: 1766848 - RNA, 14 nt, Human
uauaagugcuguau

SEQ ID NO: 1766849 - RNA, 13 nt, Human
uauaagugcugua

SEQ ID NO: 1766850 - RNA, 18 nt, Human
uauagccuaggugacaga

SEQ ID NO: 1766851 - RNA, 14 nt, Human
uaguaauuuguaaa

SEQ ID NO: 1766852 - RNA, 14 nt, Human
uaugucugccaugu

SEQ ID NO: 1766853 - RNA, 16 nt, Human
uaugugauuuuaacuc

SEQ ID NO: 1766854 - RNA, 18 nt, Human
uaugugauuuuaacucug

SEQ ID NO: 1766855 - RNA, 19 nt, Human
uaugugauuuuaacucugu

SEQ ID NO: 1766856 - RNA, 21 nt, Human
uaugugauuuuaacucugucu

SEQ ID NO: 1766857 - RNA, 18 nt, Human
acaggcccggcuccaggc

SEQ ID NO: 1766858 - RNA, 20 nt, Human
acaggcccggcuccaggcuc

SEQ ID NO: 1766859 - RNA, 21 nt, Human
acaggcccggcuccaggcucc

SEQ ID NO: 1766860 - RNA, 22 nt, Human
acaggcccggcuccaggcuccu

SEQ ID NO: 1766861 - RNA, 13 nt, Human
acaggcaggucca

SEQ ID NO: 1766862 - RNA, 16 nt, Human
acaggcccggcuccag

SEQ ID NO: 1766863 - RNA, 17 nt, Human
acaggcccggcuccagg

SEQ ID NO: 1766864 - RNA, 19 nt, Human
acaggccauugugaaccaa

SEQ ID NO: 1766865 - RNA, 15 nt, Human
acaggcagauacagg

SEQ ID NO: 1766866 - RNA, 19 nt, Human
acaggaaaagcugcugaca

SEQ ID NO: 1766867 - RNA, 20 nt, Human
acaggaaaagcugcugacag

SEQ ID NO: 1766868 - RNA, 21 nt, Human
acaggaaaagcugcugacagu

SEQ ID NO: 1766869 - RNA, 17 nt, Human
acagcuucauuuccugu

SEQ ID NO: 1766870 - RNA, 19 nt, Human
acagcuucauuuccugugu

SEQ ID NO: 1766871 - RNA, 21 nt, Human
acagcuucauuuccugugucu

SEQ ID NO: 1766872 - RNA, 15 nt, Human
acagcuaaugggaca

SEQ ID NO: 1766873 - RNA, 16 nt, Human
acagcuaaugggacac

SEQ ID NO: 1766874 - RNA, 17 nt, Human
acagcuaaugggacacu

SEQ ID NO: 1766875 - RNA, 19 nt, Human
acagcuaaugggacacuaa

SEQ ID NO: 1766876 - RNA, 10 nt, Human
acagcugugu

SEQ ID NO: 1766877 - RNA, 23 nt, Human
acagcugugugacauuuggagag

SEQ ID NO: 1766878 - RNA, 20 nt, Human
acagauuuugauagcaaagc

SEQ ID NO: 1766879 - RNA, 19 nt, Human
acagauuuugauagcaaag

SEQ ID NO: 1766880 - RNA, 17 nt, Human
acagauuuugauagcaa

SEQ ID NO: 1766881 - RNA, 17 nt, Human
uaugcuauugacaauaa

SEQ ID NO: 1766882 - RNA, 18 nt, Human
uaugcuauugacaauaaa

SEQ ID NO: 1766883 - RNA, 20 nt, Human
uaugcuauugacaauaaaau

SEQ ID NO: 1766884 - RNA, 21 nt, Human
uaugccaccaacuuacaaaaa

SEQ ID NO: 1766885 - RNA, 20 nt, Human
uaugauagcgggaaaaggag

SEQ ID NO: 1766886 - RNA, 16 nt, Human
uaugggacucaaugca

SEQ ID NO: 1766887 - RNA, 23 nt, Human
uaugggacucaaugcacugacau

SEQ ID NO: 1766888 - RNA, 15 nt, Human
acaaaaagugcuuca

SEQ ID NO: 1766889 - RNA, 23 nt, Human
acaaaaagugcuucauucuuugc

SEQ ID NO: 1766890 - RNA, 14 nt, Human
acaaaaauuaaaau

SEQ ID NO: 1766891 - RNA, 14 nt, Human
uagagccagggucu

SEQ ID NO: 1766892 - RNA, 14 nt, Human
uagagccugaggga

SEQ ID NO: 1766893 - RNA, 22 nt, Human
acaaaauaaccaauccuggaca

SEQ ID NO: 1766894 - RNA, 16 nt, Human
uagcacuaccacuccu

SEQ ID NO: 1766895 - RNA, 20 nt, Human
uagcacuaccacuccugcca

SEQ ID NO: 1766896 - RNA, 19 nt, Human
uagaaaaagaacaugcagu

SEQ ID NO: 1766897 - RNA, 20 nt, Human
uagaaaaagaacaugcaguu

SEQ ID NO: 1766898 - RNA, 21 nt, Human
uagaaaaagaacaugcaguuu

SEQ ID NO: 1766899 - RNA, 23 nt, Human
uagaaaaagaacaugcaguuuga

SEQ ID NO: 1766900 - RNA, 15 nt, Human
uacuuuugcccuuug

SEQ ID NO: 1766901 - RNA, 22 nt, Human
uagaaaauuuguuauuuugcaa

SEQ ID NO: 1766902 - RNA, 23 nt, Human
uagaaaauuuguuauuuugcaac

SEQ ID NO: 1766903 - RNA, 14 nt, Human
uagaaaauauaagu

SEQ ID NO: 1766904 - RNA, 22 nt, Human
uagaaaauauaaguaaagugau

SEQ ID NO: 1766905 - RNA, 10 nt, Human
uagacagagu

SEQ ID NO: 1766906 - RNA, 14 nt, Human
uagaaguagaauug

SEQ ID NO: 1766907 - RNA, 17 nt, Human
uagaaguagaauugaca

SEQ ID NO: 1766908 - RNA, 16 nt, Human
aauuuuaaugaagaaa

SEQ ID NO: 1766909 - RNA, 21 nt, Human
uagacagagucucacuguugc

SEQ ID NO: 1766910 - RNA, 15 nt, Human
uaguaaugaguuuaa

SEQ ID NO: 1766911 - RNA, 17 nt, Human
uaguaaugaguuuaaaa

SEQ ID NO: 1766912 - RNA, 14 nt, Human
uaguagagacaggg

SEQ ID NO: 1766913 - RNA, 15 nt, Human
uaguagagacagggu

SEQ ID NO: 1766914 - RNA, 22 nt, Human
uaguagagacaggguuuugcca

SEQ ID NO: 1766915 - RNA, 21 nt, Human
uaguaaaaaaucaauuaacca

SEQ ID NO: 1766916 - RNA, 16 nt, Human
acacaguauuacuucu

SEQ ID NO: 1766917 - RNA, 16 nt, Human
acacagguucacgugc

SEQ ID NO: 1766918 - RNA, 16 nt, Human
acacaggcccggcucc

SEQ ID NO: 1766919 - RNA, 17 nt, Human
acacaggcccggcucca

SEQ ID NO: 1766920 - RNA, 18 nt, Human
acacaggcccggcuccag

SEQ ID NO: 1766921 - RNA, 23 nt, Human
acacaggcccggcuccaggcucc

SEQ ID NO: 1766922 - RNA, 24 nt, Human
acacaggcccggcuccaggcuccu

SEQ ID NO: 1766923 - RNA, 16 nt, Human
acacaggccugcucuc

SEQ ID NO: 1766924 - RNA, 19 nt, Human
acacaggcccggcuccagg

SEQ ID NO: 1766925 - RNA, 20 nt, Human
acacaggcccggcuccaggc

SEQ ID NO: 1766926 - RNA, 21 nt, Human
acacaggcccggcuccaggcu

SEQ ID NO: 1766927 - RNA, 22 nt, Human
acacaggcccggcuccaggcuc

SEQ ID NO: 1766928 - RNA, 21 nt, Human
uaggguuuaauccccaguaaa

SEQ ID NO: 1766929 - RNA, 19 nt, Human
uaggguuuaauccccagua

SEQ ID NO: 1766930 - RNA, 12 nt, Human
uaggguuuaauc

SEQ ID NO: 1766931 - RNA, 14 nt, Human
uaggguucugccuc

SEQ ID NO: 1766932 - RNA, 15 nt, Human
uaggguucugccucu

SEQ ID NO: 1766933 - RNA, 16 nt, Human
uaggguggagagccac

SEQ ID NO: 1766934 - RNA, 12 nt, Human
acacaaaugaua

SEQ ID NO: 1766935 - RNA, 17 nt, Human
uagggaucccucaucug

SEQ ID NO: 1766936 - RNA, 16 nt, Human
uagggccaagcccagc

SEQ ID NO: 1766937 - RNA, 23 nt, Human
uagggccaagcccagcacugcuu

SEQ ID NO: 1766938 - RNA, 13 nt, Human
uagggccuugguu

SEQ ID NO: 1766939 - RNA, 11 nt, Human
uagcuucagga

SEQ ID NO: 1766940 - RNA, 12 nt, Human
uagcuucaggaa

SEQ ID NO: 1766941 - RNA, 15 nt, Human
uagcuucaggaaccu

SEQ ID NO: 1766942 - RNA, 18 nt, Human
uagcuucaggaaccucga

SEQ ID NO: 1766943 - RNA, 17 nt, Human
uagcuuucaauuccgua

SEQ ID NO: 1766944 - RNA, 23 nt, Human
uagcuuucaauuccguagccagc

SEQ ID NO: 1766945 - RNA, 15 nt, Human
uagcuuucaauuccg

SEQ ID NO: 1766946 - RNA, 20 nt, Human
uagccuuagaagucacacag

SEQ ID NO: 1766947 - RNA, 18 nt, Human
acaaucagcuccuuccug

SEQ ID NO: 1766948 - RNA, 22 nt, Human
acaaucagcuccuuccuggaga

SEQ ID NO: 1766949 - RNA, 21 nt, Human
uagccuuagaagucacacagu

SEQ ID NO: 1766950 - RNA, 14 nt, Human
uagcgcccaguugg

SEQ ID NO: 1766951 - RNA, 17 nt, Human
uagcgcccaguugggug

SEQ ID NO: 1766952 - RNA, 20 nt, Human
uagcgacuaaacuagauuuu

SEQ ID NO: 1766953 - RNA, 22 nt, Human
ucccugacucauucugaaggag

SEQ ID NO: 1766954 - RNA, 14 nt, Human
ucccugacucauuc

SEQ ID NO: 1766955 - RNA, 16 nt, Human
ucccugacucauucug

SEQ ID NO: 1766956 - RNA, 19 nt, Human
ucccugacucauucugaag

SEQ ID NO: 1766957 - RNA, 13 nt, Human
ucccucccaggac

SEQ ID NO: 1766958 - RNA, 14 nt, Human
ucccucccaggacu

SEQ ID NO: 1766959 - RNA, 23 nt, Human
uccccucuuccuacccugccucc

SEQ ID NO: 1766960 - RNA, 14 nt, Human
acucagaagacacu

SEQ ID NO: 1766961 - RNA, 15 nt, Human
acucagaagacacug

SEQ ID NO: 1766962 - RNA, 16 nt, Human
acucagaagacacuga

SEQ ID NO: 1766963 - RNA, 17 nt, Human
acucagaagacacugau

SEQ ID NO: 1766964 - RNA, 18 nt, Human
acucagaagacacugaug

SEQ ID NO: 1766965 - RNA, 12 nt, Human
acucagaagccu

SEQ ID NO: 1766966 - RNA, 15 nt, Human
acucagaagccucug

SEQ ID NO: 1766967 - RNA, 16 nt, Human
acucagaagccucugg

SEQ ID NO: 1766968 - RNA, 20 nt, Human
acucagaagccucuggguca

SEQ ID NO: 1766969 - RNA, 17 nt, Human
acucagaagggagcuag

SEQ ID NO: 1766970 - RNA, 14 nt, Human
acuauguaacaugu

SEQ ID NO: 1766971 - RNA, 12 nt, Human
acuaugccugug

SEQ ID NO: 1766972 - RNA, 21 nt, Human
acucacauuuauucugcucac

SEQ ID NO: 1766973 - RNA, 15 nt, Human
uccccggagggcugc

SEQ ID NO: 1766974 - RNA, 19 nt, Human
acucacauuuauucugcuc

SEQ ID NO: 1766975 - RNA, 20 nt, Human
acucacauuuauucugcuca

SEQ ID NO: 1766976 - RNA, 14 nt, Human
acucaaugcacuga

SEQ ID NO: 1766977 - RNA, 21 nt, Human
uccccucucuugucagaugcc

SEQ ID NO: 1766978 - RNA, 14 nt, Human
uccccaguaaaauu

SEQ ID NO: 1766979 - RNA, 15 nt, Human
uccccaguaaaauug

SEQ ID NO: 1766980 - RNA, 13 nt, Human
acguacacacaca

SEQ ID NO: 1766981 - RNA, 18 nt, Human
acuaccuugguuccccca

SEQ ID NO: 1766982 - RNA, 18 nt, Human
acuacggaauaguuggcu

SEQ ID NO: 1766983 - RNA, 16 nt, Human
uccugacccauugcug

SEQ ID NO: 1766984 - RNA, 17 nt, Human
uccugacccauugcugu

SEQ ID NO: 1766985 - RNA, 18 nt, Human
uccugacccauugcuguu

SEQ ID NO: 1766986 - RNA, 15 nt, Human
acucuuucugagugc

SEQ ID NO: 1766987 - RNA, 17 nt, Human
acucuuucugagugccu

SEQ ID NO: 1766988 - RNA, 18 nt, Human
acucuuucugagugccuu

SEQ ID NO: 1766989 - RNA, 20 nt, Human
acucuuucugagugccuucu

SEQ ID NO: 1766990 - RNA, 21 nt, Human
acucuuucugagugccuucug

SEQ ID NO: 1766991 - RNA, 22 nt, Human
acucuuucugagugccuucugu

SEQ ID NO: 1766992 - RNA, 13 nt, Human
acucuuugagaaa

SEQ ID NO: 1766993 - RNA, 16 nt, Human
acucuuugagaaacaa

SEQ ID NO: 1766994 - RNA, 18 nt, Human
acucuuugagaaacaaca

SEQ ID NO: 1766995 - RNA, 18 nt, Human
uccucugacucagggcuc

SEQ ID NO: 1766996 - RNA, 21 nt, Human
uccucuuuagaguuagacugu

SEQ ID NO: 1766997 - RNA, 20 nt, Human
uccucuuuagaguuagacug

SEQ ID NO: 1766998 - RNA, 15 nt, Human
uccucuuuagaguua

SEQ ID NO: 1766999 - RNA, 14 nt, Human
uccucccaccucag

SEQ ID NO: 1767000 - RNA, 15 nt, Human
uccucccaccucagc

SEQ ID NO: 1767001 - RNA, 16 nt, Human
uccucccaccucagcc

SEQ ID NO: 1767002 - RNA, 18 nt, Human
uccucccaccucagccuc

SEQ ID NO: 1767003 - RNA, 20 nt, Human
uccucccaccucagccuccc

SEQ ID NO: 1767004 - RNA, 21 nt, Human
uccucccaccucagccucccg

SEQ ID NO: 1767005 - RNA, 20 nt, Human
uccuccccccuccucugaaa

SEQ ID NO: 1767006 - RNA, 21 nt, Human
uccuccccccuccucugaaac

SEQ ID NO: 1767007 - RNA, 16 nt, Human
uccucugacucagggc

SEQ ID NO: 1767008 - RNA, 17 nt, Human
uccucugacucagggcu

SEQ ID NO: 1767009 - RNA, 19 nt, Human
uccucucuggggcuguguu

SEQ ID NO: 1767010 - RNA, 23 nt, Human
uccucucuggggcuguguuuuga

SEQ ID NO: 1767011 - RNA, 14 nt, Human
uccucucuauauuu

SEQ ID NO: 1767012 - RNA, 15 nt, Human
uccucugacucaggg

SEQ ID NO: 1767013 - RNA, 10 nt, Human
uccucugaaa

SEQ ID NO: 1767014 - RNA, 11 nt, Human
uccucugaaac

SEQ ID NO: 1767015 - RNA, 12 nt, Human
uccucugaaaca

SEQ ID NO: 1767016 - RNA, 13 nt, Human
uccucugaaacag

SEQ ID NO: 1767017 - RNA, 14 nt, Human
uccucugaaacagc

SEQ ID NO: 1767018 - RNA, 15 nt, Human
uccucugaaacagcu

SEQ ID NO: 1767019 - RNA, 16 nt, Human
uccucugaaacagcug

SEQ ID NO: 1767020 - RNA, 17 nt, Human
uccucugaaacagcugc

SEQ ID NO: 1767021 - RNA, 18 nt, Human
uccucugaaacagcugcc

SEQ ID NO: 1767022 - RNA, 19 nt, Human
uccucugaaacagcugccu

SEQ ID NO: 1767023 - RNA, 20 nt, Human
uccucugaaacagcugccuu

SEQ ID NO: 1767024 - RNA, 21 nt, Human
uccucugaaacagcugccuua

SEQ ID NO: 1767025 - RNA, 13 nt, Human
uccucucuauauu

SEQ ID NO: 1767026 - RNA, 17 nt, Human
acucucagucucugagc

SEQ ID NO: 1767027 - RNA, 18 nt, Human
acucucagucucugagca

SEQ ID NO: 1767028 - RNA, 22 nt, Human
acucucaggaccaaagcuuuca

SEQ ID NO: 1767029 - RNA, 13 nt, Human
acucucagucucu

SEQ ID NO: 1767030 - RNA, 14 nt, Human
acucucagucucug

SEQ ID NO: 1767031 - RNA, 16 nt, Human
acucucagucucugag

SEQ ID NO: 1767032 - RNA, 18 nt, Human
acucugcucgccuuagca

SEQ ID NO: 1767033 - RNA, 21 nt, Human
acucuuauugcccacgcugga

SEQ ID NO: 1767034 - RNA, 12 nt, Human
uccuacucugug

SEQ ID NO: 1767035 - RNA, 14 nt, Human
uccuaccuugcuuu

SEQ ID NO: 1767036 - RNA, 22 nt, Human
uccguguugcagguucauggau

SEQ ID NO: 1767037 - RNA, 12 nt, Human
uccggcucccag

SEQ ID NO: 1767038 - RNA, 15 nt, Human
uccggcucccagccu

SEQ ID NO: 1767039 - RNA, 14 nt, Human
accuucgggcugug

SEQ ID NO: 1767040 - RNA, 15 nt, Human
accuucgggcugugc

SEQ ID NO: 1767041 - RNA, 21 nt, Human
accuucguuuacuaugccugu

SEQ ID NO: 1767042 - RNA, 18 nt, Human
accuucgggcugugcccg

SEQ ID NO: 1767043 - RNA, 16 nt, Human
accuucgggcugugcc

SEQ ID NO: 1767044 - RNA, 17 nt, Human
accuucgggcugugccc

SEQ ID NO: 1767045 - RNA, 22 nt, Human
accuucaguaacccccacugga

SEQ ID NO: 1767046 - RNA, 22 nt, Human
accuucguuuacuaugccugug

SEQ ID NO: 1767047 - RNA, 23 nt, Human
accuucguuuacuaugccugugu

SEQ ID NO: 1767048 - RNA, 17 nt, Human
accuugccaauuaguaa

SEQ ID NO: 1767049 - RNA, 12 nt, Human
uccacccaccuc

SEQ ID NO: 1767050 - RNA, 13 nt, Human
uccacccaccuca

SEQ ID NO: 1767051 - RNA, 17 nt, Human
uccacccaccucagccu

SEQ ID NO: 1767052 - RNA, 17 nt, Human
uccacccaggagccccg

SEQ ID NO: 1767053 - RNA, 20 nt, Human
uccacccaggagccccgagg

SEQ ID NO: 1767054 - RNA, 14 nt, Human
uccacaucccggga

SEQ ID NO: 1767055 - RNA, 12 nt, Human
uccacauccucc

SEQ ID NO: 1767056 - RNA, 13 nt, Human
uccacauccucca

SEQ ID NO: 1767057 - RNA, 19 nt, Human
uccacauccuccacguucu

SEQ ID NO: 1767058 - RNA, 15 nt, Human
uccacaugggagccg

SEQ ID NO: 1767059 - RNA, 11 nt, Human
accugccugua

SEQ ID NO: 1767060 - RNA, 14 nt, Human
accugccuguagcc

SEQ ID NO: 1767061 - RNA, 21 nt, Human
accugccugacauuuggagug

SEQ ID NO: 1767062 - RNA, 11 nt, Human
accugcugcuu

SEQ ID NO: 1767063 - RNA, 13 nt, Human
accugcugcuucu

SEQ ID NO: 1767064 - RNA, 14 nt, Human
accugcugcuucuc

SEQ ID NO: 1767065 - RNA, 15 nt, Human
accugcugcuucucc

SEQ ID NO: 1767066 - RNA, 17 nt, Human
accugcugcuucuccaa

SEQ ID NO: 1767067 - RNA, 17 nt, Human
accuggacacaggccug

SEQ ID NO: 1767068 - RNA, 14 nt, Human
accuggacacaggc

SEQ ID NO: 1767069 - RNA, 16 nt, Human
ucauuugucacacacu

SEQ ID NO: 1767070 - RNA, 17 nt, Human
ucauuugguuggcacua

SEQ ID NO: 1767071 - RNA, 12 nt, Human
ucauuuucuaga

SEQ ID NO: 1767072 - RNA, 14 nt, Human
ucauuuucuagaua

SEQ ID NO: 1767073 - RNA, 20 nt, Human
ucauuuucuagauacaauaa

SEQ ID NO: 1767074 - RNA, 21 nt, Human
ucauuuucuagauacaauaaa

SEQ ID NO: 1767075 - RNA, 23 nt, Human
ucauuuucuagauacaauaaauu

SEQ ID NO: 1767076 - RNA, 14 nt, Human
ucauuugucacaca

SEQ ID NO: 1767077 - RNA, 19 nt, Human
ucauuuuuaguagagacag

SEQ ID NO: 1767078 - RNA, 14 nt, Human
ucauuuuuaaaugu

SEQ ID NO: 1767079 - RNA, 15 nt, Human
ucauuuuuaaaugug

SEQ ID NO: 1767080 - RNA, 19 nt, Human
accugauucaacuaaaaaa

SEQ ID NO: 1767081 - RNA, 17 nt, Human
accugauuaacugaggc

SEQ ID NO: 1767082 - RNA, 22 nt, Human
accugauuaacugaggcaucca

SEQ ID NO: 1767083 - RNA, 11 nt, Human
accugauucaa

SEQ ID NO: 1767084 - RNA, 19 nt, Human
accugacacucccuugggc

SEQ ID NO: 1767085 - RNA, 18 nt, Human
accugagcaggaccucug

SEQ ID NO: 1767086 - RNA, 16 nt, Human
accugacacucccuug

SEQ ID NO: 1767087 - RNA, 17 nt, Human
accugacacucccuugg

SEQ ID NO: 1767088 - RNA, 18 nt, Human
accugaagacucauucuu

SEQ ID NO: 1767089 - RNA, 16 nt, Human
ucauaauaaguugcau

SEQ ID NO: 1767090 - RNA, 12 nt, Human
acgacugucucc

SEQ ID NO: 1767091 - RNA, 22 nt, Human
uccacgagcuguuuacuaggga

SEQ ID NO: 1767092 - RNA, 14 nt, Human
uccacggagccacu

SEQ ID NO: 1767093 - RNA, 15 nt, Human
uccacggagccacuc

SEQ ID NO: 1767094 - RNA, 20 nt, Human
uccacggagccacuccucug

SEQ ID NO: 1767095 - RNA, 21 nt, Human
uccacggagccacuccucuga

SEQ ID NO: 1767096 - RNA, 22 nt, Human
uccacggagccacuccucugac

SEQ ID NO: 1767097 - RNA, 14 nt, Human
acgaauacuuuugc

SEQ ID NO: 1767098 - RNA, 22 nt, Human
acgaauacuuuugcccuuugau

SEQ ID NO: 1767099 - RNA, 18 nt, Human
uccagggaugauucaagc

SEQ ID NO: 1767100 - RNA, 22 nt, Human
uccagggaugauucaagccauu

SEQ ID NO: 1767101 - RNA, 23 nt, Human
uccagggaugauucaagccauuc

SEQ ID NO: 1767102 - RNA, 18 nt, Human
acgaaccuuggccugggc

SEQ ID NO: 1767103 - RNA, 14 nt, Human
acgaacuuccaugg

SEQ ID NO: 1767104 - RNA, 19 nt, Human
acggagucccaccuuggcu

SEQ ID NO: 1767105 - RNA, 21 nt, Human
acggagccacuccucugacuc

SEQ ID NO: 1767106 - RNA, 14 nt, Human
acgcugagccaccu

SEQ ID NO: 1767107 - RNA, 15 nt, Human
acgcugagccaccug

SEQ ID NO: 1767108 - RNA, 17 nt, Human
acgcugagccaccugcc

SEQ ID NO: 1767109 - RNA, 22 nt, Human
acgcugagccaccugcccuuuu

SEQ ID NO: 1767110 - RNA, 12 nt, Human
acgcugccugcc

SEQ ID NO: 1767111 - RNA, 13 nt, Human
acgcugccugccc

SEQ ID NO: 1767112 - RNA, 15 nt, Human
acgcugccugcccac

SEQ ID NO: 1767113 - RNA, 14 nt, Human
acgcugccugcccg

SEQ ID NO: 1767114 - RNA, 16 nt, Human
acggccaggccagagg

SEQ ID NO: 1767115 - RNA, 21 nt, Human
acggagucccaccuuggcugc

SEQ ID NO: 1767116 - RNA, 15 nt, Human
acgcccaucucagga

SEQ ID NO: 1767117 - RNA, 23 nt, Human
acgcgugcacacaccagagccca

SEQ ID NO: 1767118 - RNA, 21 nt, Human
acgcccucuaucauggugaaa

SEQ ID NO: 1767119 - RNA, 15 nt, Human
acggcucacugcagc

SEQ ID NO: 1767120 - RNA, 18 nt, Human
uccagugaaacuugggca

SEQ ID NO: 1767121 - RNA, 14 nt, Human
acggcucacugcag

SEQ ID NO: 1767122 - RNA, 18 nt, Human
acggaggggaguagagaa

SEQ ID NO: 1767123 - RNA, 16 nt, Human
uccauuggaucucauu

SEQ ID NO: 1767124 - RNA, 23 nt, Human
acggguuagacagccaaaggcug

SEQ ID NO: 1767125 - RNA, 17 nt, Human
ucccacaggacauuucu

SEQ ID NO: 1767126 - RNA, 18 nt, Human
ucccacaggacauuucuc

SEQ ID NO: 1767127 - RNA, 21 nt, Human
ucccacaggacauuucucuaa

SEQ ID NO: 1767128 - RNA, 21 nt, Human
ucccaaagugcugggauuaca

SEQ ID NO: 1767129 - RNA, 15 nt, Human
ucccaauucacaucu

SEQ ID NO: 1767130 - RNA, 16 nt, Human
ucccaaagugcuggga

SEQ ID NO: 1767131 - RNA, 15 nt, Human
ucccaaagugcuggg

SEQ ID NO: 1767132 - RNA, 15 nt, Human
uccauuugcaaggga

SEQ ID NO: 1767133 - RNA, 17 nt, Human
uauuuuuguagagccag

SEQ ID NO: 1767134 - RNA, 13 nt, Human
uauuuuuguacau

SEQ ID NO: 1767135 - RNA, 14 nt, Human
uauuuuuguacaug

SEQ ID NO: 1767136 - RNA, 14 nt, Human
uauuuuuccuuuuu

SEQ ID NO: 1767137 - RNA, 16 nt, Human
uauuuuugcugcuucu

SEQ ID NO: 1767138 - RNA, 18 nt, Human
uauuuuugcugcuucuga

SEQ ID NO: 1767139 - RNA, 13 nt, Human
uauuuuuaaauaa

SEQ ID NO: 1767140 - RNA, 23 nt, Human
uauuuuguguccuccaggagcuu

SEQ ID NO: 1767141 - RNA, 16 nt, Human
uauuuugucauaucaa

SEQ ID NO: 1767142 - RNA, 18 nt, Human
uauuuugucauaucaaau

SEQ ID NO: 1767143 - RNA, 22 nt, Human
acaucuugcucugcugacagac

SEQ ID NO: 1767144 - RNA, 17 nt, Human
acaucuugcucugcuga

SEQ ID NO: 1767145 - RNA, 15 nt, Human
acaucuugcucugcu

SEQ ID NO: 1767146 - RNA, 16 nt, Human
acaucuugcucugcug

SEQ ID NO: 1767147 - RNA, 10 nt, Human
uauuugucaa

SEQ ID NO: 1767148 - RNA, 12 nt, Human
uauuugucaaau

SEQ ID NO: 1767149 - RNA, 18 nt, Human
uauuuuaaaaucugucac

SEQ ID NO: 1767150 - RNA, 23 nt, Human
acaugucuuaaugaaguuugaau

SEQ ID NO: 1767151 - RNA, 22 nt, Human
acaugucuuaaugaaguuugaa

SEQ ID NO: 1767152 - RNA, 21 nt, Human
acaugucuuaaugaaguuuga

SEQ ID NO: 1767153 - RNA, 20 nt, Human
acaugucuuaaugaaguuug

SEQ ID NO: 1767154 - RNA, 18 nt, Human
acaugucuuaaugaaguu

SEQ ID NO: 1767155 - RNA, 16 nt, Human
acaugucuuaaugaag

SEQ ID NO: 1767156 - RNA, 15 nt, Human
acaugucuuaaugaa

SEQ ID NO: 1767157 - RNA, 23 nt, Human
acauggugcuacgccugcaugua

SEQ ID NO: 1767158 - RNA, 19 nt, Human
acauggugcuacgccugca

SEQ ID NO: 1767159 - RNA, 18 nt, Human
acaugguggguccauggg

SEQ ID NO: 1767160 - RNA, 19 nt, Human
acaugguggguccaugggc

SEQ ID NO: 1767161 - RNA, 15 nt, Human
ucaaagcaaggaaac

SEQ ID NO: 1767162 - RNA, 16 nt, Human
ucaaagcaaggaaacu

SEQ ID NO: 1767163 - RNA, 20 nt, Human
ucaaagcaaggaaacuaugu

SEQ ID NO: 1767164 - RNA, 12 nt, Human
ucaaagcaauug

SEQ ID NO: 1767165 - RNA, 19 nt, Human
ucaaagcaauugaaaugca

SEQ ID NO: 1767166 - RNA, 21 nt, Human
ucaaagcaauugaaaugcauu

SEQ ID NO: 1767167 - RNA, 19 nt, Human
acaugacccuaaaucuuga

SEQ ID NO: 1767168 - RNA, 21 nt, Human
acaugacccuaaaucuugacu

SEQ ID NO: 1767169 - RNA, 17 nt, Human
ucaccagccccagugcc

SEQ ID NO: 1767170 - RNA, 13 nt, Human
ucacauuagaucu

SEQ ID NO: 1767171 - RNA, 21 nt, Human
ucacaugucaguaccuucaaa

SEQ ID NO: 1767172 - RNA, 21 nt, Human
ucacauggugcuacgccugca

SEQ ID NO: 1767173 - RNA, 15 nt, Human
accacacccagccca

SEQ ID NO: 1767174 - RNA, 16 nt, Human
accacacccagcccac

SEQ ID NO: 1767175 - RNA, 20 nt, Human
accacacccagcccacuucu

SEQ ID NO: 1767176 - RNA, 21 nt, Human
accacacccagcccacuucug

SEQ ID NO: 1767177 - RNA, 23 nt, Human
accacacccagcccacuucugcc

SEQ ID NO: 1767178 - RNA, 13 nt, Human
accaauccuggac

SEQ ID NO: 1767179 - RNA, 14 nt, Human
accaaugaaaaaau

SEQ ID NO: 1767180 - RNA, 17 nt, Human
accaaugaaaaaaugua

SEQ ID NO: 1767181 - RNA, 13 nt, Human
accaaugucuuga

SEQ ID NO: 1767182 - RNA, 12 nt, Human
accaaugucuug

SEQ ID NO: 1767183 - RNA, 20 nt, Human
accaaauuaacuuacuucca

SEQ ID NO: 1767184 - RNA, 21 nt, Human
acauugcggacagccacggcc

SEQ ID NO: 1767185 - RNA, 22 nt, Human
acauugcggacagccacggcca

SEQ ID NO: 1767186 - RNA, 14 nt, Human
acauuuuucaacuu

SEQ ID NO: 1767187 - RNA, 15 nt, Human
acauuuuucaacuuu

SEQ ID NO: 1767188 - RNA, 16 nt, Human
acauuuuucaacuuug

SEQ ID NO: 1767189 - RNA, 19 nt, Human
acauuuuucaacuuugaau

SEQ ID NO: 1767190 - RNA, 21 nt, Human
acauuuuucaacuuugaauaa

SEQ ID NO: 1767191 - RNA, 22 nt, Human
acauuuuucaacuuugaauaaa

SEQ ID NO: 1767192 - RNA, 23 nt, Human
acauuuuucaacuuugaauaaag

SEQ ID NO: 1767193 - RNA, 21 nt, Human
accaaaaaagcuguauuuuga

SEQ ID NO: 1767194 - RNA, 16 nt, Human
ucaagugauucuccug

SEQ ID NO: 1767195 - RNA, 17 nt, Human
ucaagugauucuccugc

SEQ ID NO: 1767196 - RNA, 15 nt, Human
ucaauccagcuaugu

SEQ ID NO: 1767197 - RNA, 17 nt, Human
ucaagagggucugagga

SEQ ID NO: 1767198 - RNA, 16 nt, Human
ucagguaggggggaaa

SEQ ID NO: 1767199 - RNA, 23 nt, Human
ucaggguuggccccugcccggcu

SEQ ID NO: 1767200 - RNA, 18 nt, Human
ucaggguuggccccugcc

SEQ ID NO: 1767201 - RNA, 19 nt, Human
ucaggguuggccccugccc

SEQ ID NO: 1767202 - RNA, 12 nt, Human
acccccagccug

SEQ ID NO: 1767203 - RNA, 17 nt, Human
acccccacuggacugac

SEQ ID NO: 1767204 - RNA, 13 nt, Human
acccccagccugc

SEQ ID NO: 1767205 - RNA, 13 nt, Human
acccugccaugga

SEQ ID NO: 1767206 - RNA, 14 nt, Human
acccugccauggaa

SEQ ID NO: 1767207 - RNA, 22 nt, Human
acccugccauggaacuguuucc

SEQ ID NO: 1767208 - RNA, 23 nt, Human
acccugccauggaacuguuuccu

SEQ ID NO: 1767209 - RNA, 17 nt, Human
acccugagcugaggcag

SEQ ID NO: 1767210 - RNA, 22 nt, Human
acccugagcugaggcagcagug

SEQ ID NO: 1767211 - RNA, 23 nt, Human
acccugagcugaggcagcagugu

SEQ ID NO: 1767212 - RNA, 21 nt, Human
acccuccuuucaccacaugug

SEQ ID NO: 1767213 - RNA, 15 nt, Human
ucaggugucccugca

SEQ ID NO: 1767214 - RNA, 17 nt, Human
ucaggugucccugcacu

SEQ ID NO: 1767215 - RNA, 18 nt, Human
ucaggugucccugcacuu

SEQ ID NO: 1767216 - RNA, 17 nt, Human
acccuggaccagugguc

SEQ ID NO: 1767217 - RNA, 20 nt, Human
acccuggaccaguggucuca

SEQ ID NO: 1767218 - RNA, 23 nt, Human
acccugccucccuugacuuugcu

SEQ ID NO: 1767219 - RNA, 17 nt, Human
acccuuggcuugcccac

SEQ ID NO: 1767220 - RNA, 22 nt, Human
ucaggugucccugcacuugcag

SEQ ID NO: 1767221 - RNA, 15 nt, Human
ucauaaguauuucaa

SEQ ID NO: 1767222 - RNA, 20 nt, Human
ucauaaguauuucaaauugg

SEQ ID NO: 1767223 - RNA, 14 nt, Human
ucaguggcagcugc

SEQ ID NO: 1767224 - RNA, 15 nt, Human
ucaguggcagcugcu

SEQ ID NO: 1767225 - RNA, 16 nt, Human
ucaguggcagcugcuu

SEQ ID NO: 1767226 - RNA, 12 nt, Human
ucagugcucccu

SEQ ID NO: 1767227 - RNA, 13 nt, Human
ucagugcucccuc

SEQ ID NO: 1767228 - RNA, 19 nt, Human
ucagugcucccucacaugu

SEQ ID NO: 1767229 - RNA, 18 nt, Human
ucagaauuagcugcuucu

SEQ ID NO: 1767230 - RNA, 15 nt, Human
acccagcccacuucu

SEQ ID NO: 1767231 - RNA, 16 nt, Human
ucagagccgugguccu

SEQ ID NO: 1767232 - RNA, 20 nt, Human
ucagagccgugguccuuugg

SEQ ID NO: 1767233 - RNA, 13 nt, Human
accccagguuucu

SEQ ID NO: 1767234 - RNA, 17 nt, Human
accccagggccugagcc

SEQ ID NO: 1767235 - RNA, 24 nt, Human
accccagggccugagccuggccag

SEQ ID NO: 1767236 - RNA, 11 nt, Human
accccagggcc

SEQ ID NO: 1767237 - RNA, 13 nt, Human
accccagggccug

SEQ ID NO: 1767238 - RNA, 14 nt, Human
accccagggccuga

SEQ ID NO: 1767239 - RNA, 15 nt, Human
accccagggccugag

SEQ ID NO: 1767240 - RNA, 17 nt, Human
acccagggccugcagga

SEQ ID NO: 1767241 - RNA, 21 nt, Human
acccaggguucccgcggggcu

SEQ ID NO: 1767242 - RNA, 22 nt, Human
acccaggguucccgcggggcug

SEQ ID NO: 1767243 - RNA, 13 nt, Human
acccaggagcccc

SEQ ID NO: 1767244 - RNA, 15 nt, Human
acccaggagccccga

SEQ ID NO: 1767245 - RNA, 15 nt, Human
acccagggccugcag

SEQ ID NO: 1767246 - RNA, 13 nt, Human
acccagcgagccc

SEQ ID NO: 1767247 - RNA, 23 nt, Human
ucagcccuaggguggagagccac

SEQ ID NO: 1767248 - RNA, 16 nt, Human
acccagcgagcccugg

SEQ ID NO: 1767249 - RNA, 17 nt, Human
acccagcgagcccuggu

SEQ ID NO: 1767250 - RNA, 14 nt, Human
ucagauugcaugug

SEQ ID NO: 1767251 - RNA, 15 nt, Human
ucagauugcauguga

SEQ ID NO: 1767252 - RNA, 16 nt, Human
ucagauugcaugugac

SEQ ID NO: 1767253 - RNA, 17 nt, Human
ucagauugcaugugacu

SEQ ID NO: 1767254 - RNA, 18 nt, Human
ucagauugcaugugacuc

SEQ ID NO: 1767255 - RNA, 19 nt, Human
ucagauugcaugugacucu

SEQ ID NO: 1767256 - RNA, 21 nt, Human
ucagauugcaugugacucuga

SEQ ID NO: 1767257 - RNA, 22 nt, Human
ucagauugcaugugacucugaa

SEQ ID NO: 1767258 - RNA, 18 nt, Human
ucagauuguggaauguug

SEQ ID NO: 1767259 - RNA, 23 nt, Human
ucagauuguggaauguuggauaa

SEQ ID NO: 1767260 - RNA, 19 nt, Human
ucagcccuaggguggagag

SEQ ID NO: 1767261 - RNA, 21 nt, Human
accauuuugggguacccacug

SEQ ID NO: 1767262 - RNA, 20 nt, Human
acccacugcuuuuggucugu

SEQ ID NO: 1767263 - RNA, 22 nt, Human
accauuuugggguacccacugc

SEQ ID NO: 1767264 - RNA, 22 nt, Human
accaugcgacacugggaggcca

SEQ ID NO: 1767265 - RNA, 23 nt, Human
accaugcgacacugggaggccag

SEQ ID NO: 1767266 - RNA, 14 nt, Human
accaggugggagcg

SEQ ID NO: 1767267 - RNA, 22 nt, Human
accaggugggagcguuuuguug

SEQ ID NO: 1767268 - RNA, 20 nt, Human
accaggguugaccccagagg

SEQ ID NO: 1767269 - RNA, 21 nt, Human
accaggguugaccccagagga

SEQ ID NO: 1767270 - RNA, 15 nt, Human
ucacuguugcccagg

SEQ ID NO: 1767271 - RNA, 22 nt, Human
ucacuuaugaaugauuugcaua

SEQ ID NO: 1767272 - RNA, 14 nt, Human
ucacuguugcccag

SEQ ID NO: 1767273 - RNA, 18 nt, Human
ucacugcaaccuccgccu

SEQ ID NO: 1767274 - RNA, 22 nt, Human
ucaccagccccagugcccacag

SEQ ID NO: 1767275 - RNA, 21 nt, Human
ucacuauguugcccaggcagg

SEQ ID NO: 1767276 - RNA, 12 nt, Human
ucaccagcugca

SEQ ID NO: 1767277 - RNA, 13 nt, Human
ucaccagcugcaa

SEQ ID NO: 1767278 - RNA, 14 nt, Human
ucaccagcugcaaa

SEQ ID NO: 1767279 - RNA, 15 nt, Human
ucaccagcugcaaag

SEQ ID NO: 1767280 - RNA, 16 nt, Human
ucaccagcugcaaagu

SEQ ID NO: 1767281 - RNA, 17 nt, Human
ucaccagcugcaaagug

SEQ ID NO: 1767282 - RNA, 18 nt, Human
ucaccagcugcaaagugu

SEQ ID NO: 1767283 - RNA, 19 nt, Human
ucaccagcugcaaaguguu

SEQ ID NO: 1767284 - RNA, 21 nt, Human
ucaccagcugcaaaguguuuu

SEQ ID NO: 1767285 - RNA, 22 nt, Human
ucucacauggugcuacgccugc

SEQ ID NO: 1767286 - RNA, 23 nt, Human
ucucacauggugcuacgccugca

SEQ ID NO: 1767287 - RNA, 13 nt, Human
ucucaccagcugc

SEQ ID NO: 1767288 - RNA, 14 nt, Human
ucucaccagcugca

SEQ ID NO: 1767289 - RNA, 15 nt, Human
ucucaccagcugcaa

SEQ ID NO: 1767290 - RNA, 16 nt, Human
ucucaccagcugcaaa

SEQ ID NO: 1767291 - RNA, 17 nt, Human
ucucaccagcugcaaag

SEQ ID NO: 1767292 - RNA, 18 nt, Human
ucucaccagcugcaaagu

SEQ ID NO: 1767293 - RNA, 19 nt, Human
ucucaccagcugcaaagug

SEQ ID NO: 1767294 - RNA, 20 nt, Human
ucucaccagcugcaaagugu

SEQ ID NO: 1767295 - RNA, 19 nt, Human
acuucucuauaaaaaauau

SEQ ID NO: 1767296 - RNA, 21 nt, Human
acuucucuauaaaaaauaugu

SEQ ID NO: 1767297 - RNA, 23 nt, Human
acuucucuauaaaaaauauguau

SEQ ID NO: 1767298 - RNA, 14 nt, Human
acuucucuuccuug

SEQ ID NO: 1767299 - RNA, 20 nt, Human
acuuguauccaggccuggga

SEQ ID NO: 1767300 - RNA, 14 nt, Human
acuuggaagcuccg

SEQ ID NO: 1767301 - RNA, 11 nt, Human
acuugcauuuc

SEQ ID NO: 1767302 - RNA, 14 nt, Human
acuugaacuugccu

SEQ ID NO: 1767303 - RNA, 15 nt, Human
acuugaacuugccuc

SEQ ID NO: 1767304 - RNA, 16 nt, Human
acuugaacuugccucu

SEQ ID NO: 1767305 - RNA, 12 nt, Human
acuugaacuugu

SEQ ID NO: 1767306 - RNA, 20 nt, Human
acuuccauggcccucauuaa

SEQ ID NO: 1767307 - RNA, 13 nt, Human
ucuauaauuuaaa

SEQ ID NO: 1767308 - RNA, 15 nt, Human
ucuauaaaaaauaug

SEQ ID NO: 1767309 - RNA, 19 nt, Human
acuuccaaauccccuaagc

SEQ ID NO: 1767310 - RNA, 21 nt, Human
acuuccaaauccccuaagcag

SEQ ID NO: 1767311 - RNA, 12 nt, Human
acuuccaugccu

SEQ ID NO: 1767312 - RNA, 14 nt, Human
acuuccaugccuua

SEQ ID NO: 1767313 - RNA, 20 nt, Human
acuuccaugccuuaaaccua

SEQ ID NO: 1767314 - RNA, 17 nt, Human
acuuccauggcccucau

SEQ ID NO: 1767315 - RNA, 18 nt, Human
acuuccauggcccucauu

SEQ ID NO: 1767316 - RNA, 16 nt, Human
acuucaugcaggugaa

SEQ ID NO: 1767317 - RNA, 12 nt, Human
ucuacaucacuc

SEQ ID NO: 1767318 - RNA, 22 nt, Human
acuuagccauuuuucaaagcaa

SEQ ID NO: 1767319 - RNA, 23 nt, Human
acuuagccauuuuucaaagcaau

SEQ ID NO: 1767320 - RNA, 18 nt, Human
acuuauccuaaaacaaau

SEQ ID NO: 1767321 - RNA, 19 nt, Human
acuuauccuaaaacaaaua

SEQ ID NO: 1767322 - RNA, 14 nt, Human
ucgcuccugugucu

SEQ ID NO: 1767323 - RNA, 15 nt, Human
acuggguacuugugg

SEQ ID NO: 1767324 - RNA, 13 nt, Human
acugggcugaggg

SEQ ID NO: 1767325 - RNA, 14 nt, Human
acugggcugaggga

SEQ ID NO: 1767326 - RNA, 17 nt, Human
acugggcugagggagcc

SEQ ID NO: 1767327 - RNA, 19 nt, Human
ucgcugccagcucuguauc

SEQ ID NO: 1767328 - RNA, 20 nt, Human
ucgcugccagcucuguauca

SEQ ID NO: 1767329 - RNA, 20 nt, Human
ucgcuggacucucagucucu

SEQ ID NO: 1767330 - RNA, 22 nt, Human
ucgcuggacucucagucucuga

SEQ ID NO: 1767331 - RNA, 23 nt, Human
ucgcuggacucucagucucugag

SEQ ID NO: 1767332 - RNA, 16 nt, Human
acugggcucccgggcc

SEQ ID NO: 1767333 - RNA, 22 nt, Human
acugggcucccgggccccacag

SEQ ID NO: 1767334 - RNA, 17 nt, Human
acuggguacuuguggac

SEQ ID NO: 1767335 - RNA, 18 nt, Human
acuggguacuuguggaca

SEQ ID NO: 1767336 - RNA, 12 nt, Human
acuguauguuau

SEQ ID NO: 1767337 - RNA, 16 nt, Human
acuguauguuauagaa

SEQ ID NO: 1767338 - RNA, 21 nt, Human
acuguauguuauagaacuuca

SEQ ID NO: 1767339 - RNA, 21 nt, Human
acuguauuuuguauuguuuca

SEQ ID NO: 1767340 - RNA, 20 nt, Human
ucuaagagaacaaugugcua

SEQ ID NO: 1767341 - RNA, 13 nt, Human
ucuaagucuuucc

SEQ ID NO: 1767342 - RNA, 14 nt, Human
ucuaagucuuucca

SEQ ID NO: 1767343 - RNA, 17 nt, Human
acuguuaauaguucagg

SEQ ID NO: 1767344 - RNA, 21 nt, Human
acuguuaauaguucagguaac

SEQ ID NO: 1767345 - RNA, 10 nt, Human
ucgggaccag

SEQ ID NO: 1767346 - RNA, 11 nt, Human
ucgggaccagg

SEQ ID NO: 1767347 - RNA, 14 nt, Human
acugugggcaauuu

SEQ ID NO: 1767348 - RNA, 15 nt, Human
acugugggcaauuua

SEQ ID NO: 1767349 - RNA, 17 nt, Human
acugugggcaauuuaga

SEQ ID NO: 1767350 - RNA, 18 nt, Human
acugugggcaauuuagaa

SEQ ID NO: 1767351 - RNA, 19 nt, Human
acugugggcaauuuagaaa

SEQ ID NO: 1767352 - RNA, 20 nt, Human
acugugggcaauuuagaaaa

SEQ ID NO: 1767353 - RNA, 13 nt, Human
ucgggcugugccc

SEQ ID NO: 1767354 - RNA, 12 nt, Human
ucgggcugugcc

SEQ ID NO: 1767355 - RNA, 22 nt, Human
ucguucgcagagcuuuucagau

SEQ ID NO: 1767356 - RNA, 15 nt, Human
ucguuuacuaugccu

SEQ ID NO: 1767357 - RNA, 13 nt, Human
ucucgccaagcag

SEQ ID NO: 1767358 - RNA, 15 nt, Human
ucucgcucccuccca

SEQ ID NO: 1767359 - RNA, 16 nt, Human
ucucgcucccucccag

SEQ ID NO: 1767360 - RNA, 18 nt, Human
ucucgcucccucccagga

SEQ ID NO: 1767361 - RNA, 15 nt, Human
ucucgcuucccugaa

SEQ ID NO: 1767362 - RNA, 15 nt, Human
ucuccuguccucccu

SEQ ID NO: 1767363 - RNA, 17 nt, Human
ucuccuguccucccuca

SEQ ID NO: 1767364 - RNA, 13 nt, Human
agaaaaaaauuca

SEQ ID NO: 1767365 - RNA, 15 nt, Human
agaaaaaaauucaug

SEQ ID NO: 1767366 - RNA, 18 nt, Human
acuuuguguucaccuugu

SEQ ID NO: 1767367 - RNA, 17 nt, Human
agaaaaaaagauuuauu

SEQ ID NO: 1767368 - RNA, 16 nt, Human
acuuuguguucaccuu

SEQ ID NO: 1767369 - RNA, 13 nt, Human
acuuugcuccuca

SEQ ID NO: 1767370 - RNA, 15 nt, Human
acuuugcuccucaca

SEQ ID NO: 1767371 - RNA, 15 nt, Human
acuuuggaaaaugca

SEQ ID NO: 1767372 - RNA, 18 nt, Human
acuuuggaaaaugcauug

SEQ ID NO: 1767373 - RNA, 21 nt, Human
acuuuagaaguagaauugaca

SEQ ID NO: 1767374 - RNA, 15 nt, Human
acuuuacgcccaucu

SEQ ID NO: 1767375 - RNA, 20 nt, Human
acuugucucuucaucuaaua

SEQ ID NO: 1767376 - RNA, 15 nt, Human
acuuguggacacagc

SEQ ID NO: 1767377 - RNA, 16 nt, Human
acuuuaaaaggagcca

SEQ ID NO: 1767378 - RNA, 14 nt, Human
acuuguggacacag

SEQ ID NO: 1767379 - RNA, 16 nt, Human
agaaacuuaagcaaag

SEQ ID NO: 1767380 - RNA, 18 nt, Human
agaaacuuaagcaaaggg

SEQ ID NO: 1767381 - RNA, 13 nt, Human
agaaagcauuuga

SEQ ID NO: 1767382 - RNA, 14 nt, Human
agaaagcauuugaa

SEQ ID NO: 1767383 - RNA, 19 nt, Human
agaaauacaauucuacauu

SEQ ID NO: 1767384 - RNA, 16 nt, Human
agaaaugguuguauua

SEQ ID NO: 1767385 - RNA, 15 nt, Human
agaaaugguuguauu

SEQ ID NO: 1767386 - RNA, 20 nt, Human
ucugaaggagccccauuccu

SEQ ID NO: 1767387 - RNA, 19 nt, Human
agaaauggugagauuguuu

SEQ ID NO: 1767388 - RNA, 21 nt, Human
ucugaaggagccccauuccug

SEQ ID NO: 1767389 - RNA, 13 nt, Human
agaaaugcugcug

SEQ ID NO: 1767390 - RNA, 14 nt, Human
agaaaugcugcugg

SEQ ID NO: 1767391 - RNA, 15 nt, Human
agaaaugcugcuggc

SEQ ID NO: 1767392 - RNA, 17 nt, Human
agaaaugcugcuggcca

SEQ ID NO: 1767393 - RNA, 21 nt, Human
agaaauacagauuuugauagc

SEQ ID NO: 1767394 - RNA, 16 nt, Human
agaaauacagauuuug

SEQ ID NO: 1767395 - RNA, 12 nt, Human
agaaauacaguc

SEQ ID NO: 1767396 - RNA, 14 nt, Human
agaaauacagucuu

SEQ ID NO: 1767397 - RNA, 19 nt, Human
agaaauacagucuuccaca

SEQ ID NO: 1767398 - RNA, 14 nt, Human
agaaacaaugaaug

SEQ ID NO: 1767399 - RNA, 20 nt, Human
agaaacaacucuuugagaaa

SEQ ID NO: 1767400 - RNA, 20 nt, Human
agaagcucuuacucuuuccu

SEQ ID NO: 1767401 - RNA, 19 nt, Human
agaagcucucgggcuagga

SEQ ID NO: 1767402 - RNA, 16 nt, Human
agaaggagacaggcag

SEQ ID NO: 1767403 - RNA, 18 nt, Human
agaagugagaauaggcag

SEQ ID NO: 1767404 - RNA, 21 nt, Human
agaagugagaauaggcagccc

SEQ ID NO: 1767405 - RNA, 20 nt, Human
agaauaaagguaugaaaggg

SEQ ID NO: 1767406 - RNA, 16 nt, Human
agaaguuuuaaauuuu

SEQ ID NO: 1767407 - RNA, 17 nt, Human
agaaguuuuaaauuuug

SEQ ID NO: 1767408 - RNA, 13 nt, Human
agaauaauuuaua

SEQ ID NO: 1767409 - RNA, 16 nt, Human
agaauaauuuauagua

SEQ ID NO: 1767410 - RNA, 17 nt, Human
agaauaauuuauaguaa

SEQ ID NO: 1767411 - RNA, 22 nt, Human
agaauaauuuauaguaaugagu

SEQ ID NO: 1767412 - RNA, 15 nt, Human
ucugcccuguguacu

SEQ ID NO: 1767413 - RNA, 16 nt, Human
ucuggauucugaaucu

SEQ ID NO: 1767414 - RNA, 21 nt, Human
ucuggauucugaaucucaaga

SEQ ID NO: 1767415 - RNA, 21 nt, Human
ucuggccguccuugucucugg

SEQ ID NO: 1767416 - RNA, 22 nt, Human
agaagccucugggucagugguc

SEQ ID NO: 1767417 - RNA, 23 nt, Human
agaagccucugggucaguggucc

SEQ ID NO: 1767418 - RNA, 22 nt, Human
agaagccauggaaaaacuuccu

SEQ ID NO: 1767419 - RNA, 18 nt, Human
agaacuuggauguaccug

SEQ ID NO: 1767420 - RNA, 23 nt, Human
agaacuuggauguaccugccccc

SEQ ID NO: 1767421 - RNA, 20 nt, Human
ucugccccccccccccaucu

SEQ ID NO: 1767422 - RNA, 15 nt, Human
ucugccccagcccag

SEQ ID NO: 1767423 - RNA, 16 nt, Human
ucugccccagcccaga

SEQ ID NO: 1767424 - RNA, 17 nt, Human
ucugccccagcccagau

SEQ ID NO: 1767425 - RNA, 20 nt, Human
ucugccccagcccagauucc

SEQ ID NO: 1767426 - RNA, 16 nt, Human
agaacuugcugcuguc

SEQ ID NO: 1767427 - RNA, 19 nt, Human
ucugaaucucaagaugggg

SEQ ID NO: 1767428 - RNA, 16 nt, Human
agagcaucggccuagg

SEQ ID NO: 1767429 - RNA, 15 nt, Human
ugaaagacugaagaa

SEQ ID NO: 1767430 - RNA, 16 nt, Human
ugaaagacugaagaaa

SEQ ID NO: 1767431 - RNA, 22 nt, Human
ugaaagacugaagaaaguguag

SEQ ID NO: 1767432 - RNA, 22 nt, Human
agagaucaaccccuucgcuccu

SEQ ID NO: 1767433 - RNA, 16 nt, Human
agagagaacaggacua

SEQ ID NO: 1767434 - RNA, 18 nt, Human
ucuuucugagugccuucu

SEQ ID NO: 1767435 - RNA, 22 nt, Human
ucuuucugagugccuucugugg

SEQ ID NO: 1767436 - RNA, 14 nt, Human
ucuuucuuagaaau

SEQ ID NO: 1767437 - RNA, 13 nt, Human
ucuuucuuagaaa

SEQ ID NO: 1767438 - RNA, 14 nt, Human
ucuuucugucccuu

SEQ ID NO: 1767439 - RNA, 16 nt, Human
ucuuucuguccccucu

SEQ ID NO: 1767440 - RNA, 19 nt, Human
ucuuucuguccccucuucc

SEQ ID NO: 1767441 - RNA, 13 nt, Human
ucuuucugucccu

SEQ ID NO: 1767442 - RNA, 18 nt, Human
ugaaaaaauguauaugca

SEQ ID NO: 1767443 - RNA, 22 nt, Human
ugaaaaaauagagccugaggga

SEQ ID NO: 1767444 - RNA, 14 nt, Human
ucuuuguucaagau

SEQ ID NO: 1767445 - RNA, 16 nt, Human
ucuuuguucaagauga

SEQ ID NO: 1767446 - RNA, 13 nt, Human
ucuuuuaccugcu

SEQ ID NO: 1767447 - RNA, 14 nt, Human
ucuuuuaccugcug

SEQ ID NO: 1767448 - RNA, 15 nt, Human
ucuuuuaccugcugc

SEQ ID NO: 1767449 - RNA, 20 nt, Human
ucuuuuaccugcugcuucuc

SEQ ID NO: 1767450 - RNA, 21 nt, Human
ucuuuuaccugcugcuucucc

SEQ ID NO: 1767451 - RNA, 16 nt, Human
ugaaaaucgugacaac

SEQ ID NO: 1767452 - RNA, 12 nt, Human
ugaaaaggaauc

SEQ ID NO: 1767453 - RNA, 14 nt, Human
ugaaaaugucuugu

SEQ ID NO: 1767454 - RNA, 15 nt, Human
ugaaaaugucuugug

SEQ ID NO: 1767455 - RNA, 13 nt, Human
ugaaaaugucuug

SEQ ID NO: 1767456 - RNA, 19 nt, Human
ugaaaaucgugacaacacu

SEQ ID NO: 1767457 - RNA, 20 nt, Human
ugaaaaucuuauaauuuaaa

SEQ ID NO: 1767458 - RNA, 21 nt, Human
ugaaacuauauuuugucauau

SEQ ID NO: 1767459 - RNA, 20 nt, Human
ugaaacgcuccuuugugugu

SEQ ID NO: 1767460 - RNA, 13 nt, Human
ugaaacuauauuu

SEQ ID NO: 1767461 - RNA, 19 nt, Human
ugaaacuauauuuugucau

SEQ ID NO: 1767462 - RNA, 18 nt, Human
ucuugauuuauuugcuuc

SEQ ID NO: 1767463 - RNA, 16 nt, Human
ucuugacuacagucag

SEQ ID NO: 1767464 - RNA, 19 nt, Human
ucuugcaauggcagccuug

SEQ ID NO: 1767465 - RNA, 18 nt, Human
ucuugcaauggcagccuu

SEQ ID NO: 1767466 - RNA, 22 nt, Human
ucuugcaauggcagccuuggca

SEQ ID NO: 1767467 - RNA, 23 nt, Human
ucuugcaauggcagccuuggcaa

SEQ ID NO: 1767468 - RNA, 18 nt, Human
ucuuggcagcaccugucu

SEQ ID NO: 1767469 - RNA, 19 nt, Human
ucuuggcagcaccugucuc

SEQ ID NO: 1767470 - RNA, 12 nt, Human
ucuucugcuuca

SEQ ID NO: 1767471 - RNA, 19 nt, Human
ucuucugcuucagccuccc

SEQ ID NO: 1767472 - RNA, 22 nt, Human
ucuucugggagggcagcagggc

SEQ ID NO: 1767473 - RNA, 23 nt, Human
ucuucugggagggcagcagggcu

SEQ ID NO: 1767474 - RNA, 12 nt, Human
ucuucugucccu

SEQ ID NO: 1767475 - RNA, 13 nt, Human
ucuucugucccug

SEQ ID NO: 1767476 - RNA, 15 nt, Human
ucuucugucccuguu

SEQ ID NO: 1767477 - RNA, 15 nt, Human
ucuucuguacgucug

SEQ ID NO: 1767478 - RNA, 20 nt, Human
ucuucuguacgucugacagg

SEQ ID NO: 1767479 - RNA, 20 nt, Human
agacauucucgcuucccuga

SEQ ID NO: 1767480 - RNA, 21 nt, Human
agacauucucgcuucccugaa

SEQ ID NO: 1767481 - RNA, 13 nt, Human
ucuuccauuugca

SEQ ID NO: 1767482 - RNA, 14 nt, Human
ucuuccauuugcaa

SEQ ID NO: 1767483 - RNA, 23 nt, Human
ucuucccagcacuaugcuuuccu

SEQ ID NO: 1767484 - RNA, 14 nt, Human
agaggcccucgcug

SEQ ID NO: 1767485 - RNA, 19 nt, Human
agaggcccucgcugccagc

SEQ ID NO: 1767486 - RNA, 19 nt, Human
agaggcuggccucuacauc

SEQ ID NO: 1767487 - RNA, 13 nt, Human
agaguauaugcac

SEQ ID NO: 1767488 - RNA, 19 nt, Human
ugaauaggcgaucacaacg

SEQ ID NO: 1767489 - RNA, 18 nt, Human
ugaauaggcgaucacaac

SEQ ID NO: 1767490 - RNA, 17 nt, Human
ugaauaggcgaucacaa

SEQ ID NO: 1767491 - RNA, 15 nt, Human
ugaauacuuuauaaa

SEQ ID NO: 1767492 - RNA, 16 nt, Human
ugaauacuguauuuug

SEQ ID NO: 1767493 - RNA, 20 nt, Human
ugaauacucugcccucuaga

SEQ ID NO: 1767494 - RNA, 22 nt, Human
ugaauacucugcccucuagagc

SEQ ID NO: 1767495 - RNA, 14 nt, Human
ugaagucacacagu

SEQ ID NO: 1767496 - RNA, 20 nt, Human
agauacaggaaaagcugcug

SEQ ID NO: 1767497 - RNA, 20 nt, Human
agauaauauuuuacauacac

SEQ ID NO: 1767498 - RNA, 19 nt, Human
agaguuuuggaugcagugc

SEQ ID NO: 1767499 - RNA, 18 nt, Human
agaguuuuggaugcagug

SEQ ID NO: 1767500 - RNA, 17 nt, Human
agaguuuuggaugcagu

SEQ ID NO: 1767501 - RNA, 13 nt, Human
agaguuuuggaug

SEQ ID NO: 1767502 - RNA, 21 nt, Human
agaguuuuggaugcagugcuc

SEQ ID NO: 1767503 - RNA, 20 nt, Human
agaguuuuggaugcagugcu

SEQ ID NO: 1767504 - RNA, 19 nt, Human
ugacacacagcucuguccu

SEQ ID NO: 1767505 - RNA, 20 nt, Human
ugacacacagcucuguccug

SEQ ID NO: 1767506 - RNA, 17 nt, Human
ugacaaaggcaagcacu

SEQ ID NO: 1767507 - RNA, 16 nt, Human
ugacacacagcucugu

SEQ ID NO: 1767508 - RNA, 18 nt, Human
ugacacacagcucugucc

SEQ ID NO: 1767509 - RNA, 17 nt, Human
ugacacauaguuuuuca

SEQ ID NO: 1767510 - RNA, 20 nt, Human
ugacacgucucgccaagcag

SEQ ID NO: 1767511 - RNA, 22 nt, Human
ugacacucccuugggcucccug

SEQ ID NO: 1767512 - RNA, 11 nt, Human
ugaauuugcaa

SEQ ID NO: 1767513 - RNA, 12 nt, Human
ugaauuugcaaa

SEQ ID NO: 1767514 - RNA, 14 nt, Human
ugaauuugcaaagu

SEQ ID NO: 1767515 - RNA, 15 nt, Human
ugaauuugcaaagua

SEQ ID NO: 1767516 - RNA, 17 nt, Human
ugaauuugcaaaguacu

SEQ ID NO: 1767517 - RNA, 18 nt, Human
ugaauuugcaaaguacug

SEQ ID NO: 1767518 - RNA, 19 nt, Human
ugaauuugcaaaguacugu

SEQ ID NO: 1767519 - RNA, 20 nt, Human
ugaauuugcaaaguacugua

SEQ ID NO: 1767520 - RNA, 21 nt, Human
ugaauuugcaaaguacuguaa

SEQ ID NO: 1767521 - RNA, 17 nt, Human
ugaauuuuguucucugg

SEQ ID NO: 1767522 - RNA, 18 nt, Human
ugaauuuuguucucuggg

SEQ ID NO: 1767523 - RNA, 19 nt, Human
ugaauuuuguucucuggga

SEQ ID NO: 1767524 - RNA, 20 nt, Human
ugaauuuuguucucugggag

SEQ ID NO: 1767525 - RNA, 22 nt, Human
ugaauuuuguucucugggagaa

SEQ ID NO: 1767526 - RNA, 13 nt, Human
ugaauuuugggga

SEQ ID NO: 1767527 - RNA, 20 nt, Human
ugaauuuuggggauuuucaa

SEQ ID NO: 1767528 - RNA, 21 nt, Human
ugaauuuuggggauuuucaaa

SEQ ID NO: 1767529 - RNA, 22 nt, Human
ugaauuuuggggauuuucaaaa

SEQ ID NO: 1767530 - RNA, 15 nt, Human
ugaauuuuuccuaug

SEQ ID NO: 1767531 - RNA, 20 nt, Human
ugagaagaaaauggaaccag

SEQ ID NO: 1767532 - RNA, 22 nt, Human
ugagaagaaaauggaaccaggc

SEQ ID NO: 1767533 - RNA, 18 nt, Human
agcaagaagggaguucca

SEQ ID NO: 1767534 - RNA, 16 nt, Human
agauucgcuuuccaug

SEQ ID NO: 1767535 - RNA, 15 nt, Human
agauuccccuguguc

SEQ ID NO: 1767536 - RNA, 16 nt, Human
agauuccccuguguca

SEQ ID NO: 1767537 - RNA, 15 nt, Human
agauucauuuucuag

SEQ ID NO: 1767538 - RNA, 16 nt, Human
agauucauuuucuaga

SEQ ID NO: 1767539 - RNA, 17 nt, Human
agauucauuuucuagau

SEQ ID NO: 1767540 - RNA, 19 nt, Human
agauuuugauagcaaagcg

SEQ ID NO: 1767541 - RNA, 18 nt, Human
agauuuugauagcaaagc

SEQ ID NO: 1767542 - RNA, 15 nt, Human
agauuuugauagcaa

SEQ ID NO: 1767543 - RNA, 14 nt, Human
ugacacucccuugg

SEQ ID NO: 1767544 - RNA, 15 nt, Human
ugacacuugucccca

SEQ ID NO: 1767545 - RNA, 15 nt, Human
agaugcuccuugggc

SEQ ID NO: 1767546 - RNA, 20 nt, Human
agaugcuccuugggcccuuu

SEQ ID NO: 1767547 - RNA, 18 nt, Human
agaugcccgagggagggg

SEQ ID NO: 1767548 - RNA, 19 nt, Human
agaugcccgagggagggga

SEQ ID NO: 1767549 - RNA, 14 nt, Human
ugacccauugcugu

SEQ ID NO: 1767550 - RNA, 15 nt, Human
ugacccauugcuguu

SEQ ID NO: 1767551 - RNA, 13 nt, Human
ugacccauugcug

SEQ ID NO: 1767552 - RNA, 15 nt, Human
agauuaaaaauuaua

SEQ ID NO: 1767553 - RNA, 16 nt, Human
agauuaaaaauuauag

SEQ ID NO: 1767554 - RNA, 21 nt, Human
agauuaaaaauuauaggaaua

SEQ ID NO: 1767555 - RNA, 13 nt, Human
agaugcuccaggg

SEQ ID NO: 1767556 - RNA, 20 nt, Human
agauguucucuaucauuuaa

SEQ ID NO: 1767557 - RNA, 21 nt, Human
agauguucucuaucauuuaau

SEQ ID NO: 1767558 - RNA, 13 nt, Human
ugaccccagagga

SEQ ID NO: 1767559 - RNA, 22 nt, Human
ugaccccagcauucucaggcac

SEQ ID NO: 1767560 - RNA, 15 nt, Human
ugauacuuuuaagag

SEQ ID NO: 1767561 - RNA, 16 nt, Human
ugauacucauuucuua

SEQ ID NO: 1767562 - RNA, 20 nt, Human
ugaucacggcucacugcagc

SEQ ID NO: 1767563 - RNA, 21 nt, Human
ugaucacggcucacugcagcc

SEQ ID NO: 1767564 - RNA, 13 nt, Human
agcaucaagccac

SEQ ID NO: 1767565 - RNA, 20 nt, Human
agcaucacaugaacuuguaa

SEQ ID NO: 1767566 - RNA, 19 nt, Human
ugaucacggcucacugcag

SEQ ID NO: 1767567 - RNA, 16 nt, Human
ugauauuuuuucucuc

SEQ ID NO: 1767568 - RNA, 15 nt, Human
agcauugcuggacuc

SEQ ID NO: 1767569 - RNA, 18 nt, Human
agcauggcucaaagugca

SEQ ID NO: 1767570 - RNA, 20 nt, Human
agcaugucgucaaagcugaa

SEQ ID NO: 1767571 - RNA, 17 nt, Human
agcaugucgucaaagcu

SEQ ID NO: 1767572 - RNA, 14 nt, Human
ugagucaccaagcc

SEQ ID NO: 1767573 - RNA, 16 nt, Human
ugagucaccaagccca

SEQ ID NO: 1767574 - RNA, 17 nt, Human
ugagucaccaagcccag

SEQ ID NO: 1767575 - RNA, 12 nt, Human
ugagugcucuga

SEQ ID NO: 1767576 - RNA, 13 nt, Human
ugagugcucugau

SEQ ID NO: 1767577 - RNA, 19 nt, Human
ugagugcucugaucccucu

SEQ ID NO: 1767578 - RNA, 12 nt, Human
ugagugccuucu

SEQ ID NO: 1767579 - RNA, 13 nt, Human
ugagugccuucug

SEQ ID NO: 1767580 - RNA, 18 nt, Human
ugagugccuucugugggg

SEQ ID NO: 1767581 - RNA, 21 nt, Human
ugagugccuucuguggggacu

SEQ ID NO: 1767582 - RNA, 17 nt, Human
ugaguucauacccuguu

SEQ ID NO: 1767583 - RNA, 23 nt, Human
agcauaucugccuuuauuguguu

SEQ ID NO: 1767584 - RNA, 22 nt, Human
agcauaucugccuuuauugugu

SEQ ID NO: 1767585 - RNA, 20 nt, Human
agcauaucugccuuuauugu

SEQ ID NO: 1767586 - RNA, 17 nt, Human
agcauaucugccuuuau

SEQ ID NO: 1767587 - RNA, 13 nt, Human
agcauaacauaug

SEQ ID NO: 1767588 - RNA, 20 nt, Human
ugagaauuugagugcucuga

SEQ ID NO: 1767589 - RNA, 23 nt, Human
ugaguagaaaggccuuuaaaauu

SEQ ID NO: 1767590 - RNA, 18 nt, Human
ugaguagaaaggccuuua

SEQ ID NO: 1767591 - RNA, 17 nt, Human
ugaguagaaaggccuuu

SEQ ID NO: 1767592 - RNA, 16 nt, Human
agcauaucugccuuua

SEQ ID NO: 1767593 - RNA, 22 nt, Human
ugaguaacugauuuguaacaag

SEQ ID NO: 1767594 - RNA, 22 nt, Human
agccaccgaagccgccugugga

SEQ ID NO: 1767595 - RNA, 14 nt, Human
agccacggccaggc

SEQ ID NO: 1767596 - RNA, 15 nt, Human
agccaccgaagccgc

SEQ ID NO: 1767597 - RNA, 20 nt, Human
agccaccgaagccgccugug

SEQ ID NO: 1767598 - RNA, 21 nt, Human
agccaccgaagccgccugugg

SEQ ID NO: 1767599 - RNA, 16 nt, Human
agcauuugaaugcauu

SEQ ID NO: 1767600 - RNA, 15 nt, Human
agcauuugaaugcau

SEQ ID NO: 1767601 - RNA, 14 nt, Human
agcauuugaaugca

SEQ ID NO: 1767602 - RNA, 13 nt, Human
agcauuugaaugc

SEQ ID NO: 1767603 - RNA, 12 nt, Human
agcauuugaaug

SEQ ID NO: 1767604 - RNA, 11 nt, Human
agcauuugaau

SEQ ID NO: 1767605 - RNA, 15 nt, Human
ugaucgccuuuccca

SEQ ID NO: 1767606 - RNA, 17 nt, Human
ugaucgccuuucccagg

SEQ ID NO: 1767607 - RNA, 14 nt, Human
ugaugaauacugua

SEQ ID NO: 1767608 - RNA, 15 nt, Human
agccacggccaggcc

SEQ ID NO: 1767609 - RNA, 14 nt, Human
agccacuccucuga

SEQ ID NO: 1767610 - RNA, 15 nt, Human
agccacuccucugac

SEQ ID NO: 1767611 - RNA, 21 nt, Human
agccacuccucugacucaggg

SEQ ID NO: 1767612 - RNA, 22 nt, Human
agccacuccucugacucagggc

SEQ ID NO: 1767613 - RNA, 15 nt, Human
agccacugagcaaug

SEQ ID NO: 1767614 - RNA, 12 nt, Human
ugauuaaagugc

SEQ ID NO: 1767615 - RNA, 13 nt, Human
agccacugcaccg

SEQ ID NO: 1767616 - RNA, 21 nt, Human
agccacugcaccgggccacag

SEQ ID NO: 1767617 - RNA, 22 nt, Human
agccacugcaccgggccacaga

SEQ ID NO: 1767618 - RNA, 17 nt, Human
agccacuuaaaauguuc

SEQ ID NO: 1767619 - RNA, 20 nt, Human
agccacuggcugcuaacaag

SEQ ID NO: 1767620 - RNA, 13 nt, Human
ugauguuucauuu

SEQ ID NO: 1767621 - RNA, 15 nt, Human
ugauguuugcccaaa

SEQ ID NO: 1767622 - RNA, 19 nt, Human
ugauguuugcccaaaauuu

SEQ ID NO: 1767623 - RNA, 19 nt, Human
ugauucccaagcucugcuc

SEQ ID NO: 1767624 - RNA, 21 nt, Human
ugauucccaagcucugcuccu

SEQ ID NO: 1767625 - RNA, 15 nt, Human
ugauucccaagcucu

SEQ ID NO: 1767626 - RNA, 16 nt, Human
ugauucccaagcucug

SEQ ID NO: 1767627 - RNA, 18 nt, Human
ugauucccaagcucugcu

SEQ ID NO: 1767628 - RNA, 24 nt, Human
ugauucaguguuaaaugugaugaa

SEQ ID NO: 1767629 - RNA, 12 nt, Human
ugauucaguguu

SEQ ID NO: 1767630 - RNA, 21 nt, Human
ugauucaguguuaaaugugau

SEQ ID NO: 1767631 - RNA, 14 nt, Human
agcccagcucugaa

SEQ ID NO: 1767632 - RNA, 12 nt, Human
agcccagccccu

SEQ ID NO: 1767633 - RNA, 17 nt, Human
agcccagccccuacugc

SEQ ID NO: 1767634 - RNA, 19 nt, Human
agcccagccccuacugcug

SEQ ID NO: 1767635 - RNA, 20 nt, Human
agcccagccccuacugcugu

SEQ ID NO: 1767636 - RNA, 12 nt, Human
agcccagacaaa

SEQ ID NO: 1767637 - RNA, 14 nt, Human
agccagcugcccua

SEQ ID NO: 1767638 - RNA, 16 nt, Human
agccagcugcucccca

SEQ ID NO: 1767639 - RNA, 12 nt, Human
agccagggucuc

SEQ ID NO: 1767640 - RNA, 21 nt, Human
agccaguuugccggauacaaa

SEQ ID NO: 1767641 - RNA, 18 nt, Human
agcggagacggaguccca

SEQ ID NO: 1767642 - RNA, 15 nt, Human
agccuugucccccuc

SEQ ID NO: 1767643 - RNA, 21 nt, Human
ugccaagggcuuuguuuugca

SEQ ID NO: 1767644 - RNA, 20 nt, Human
ugcauugcucuggaucuguu

SEQ ID NO: 1767645 - RNA, 16 nt, Human
agccuucagccuuaau

SEQ ID NO: 1767646 - RNA, 18 nt, Human
ugcauaagguuuuuaugc

SEQ ID NO: 1767647 - RNA, 12 nt, Human
agcuagccagag

SEQ ID NO: 1767648 - RNA, 17 nt, Human
agcuagccagaggacug

SEQ ID NO: 1767649 - RNA, 19 nt, Human
agcuagccagaggacugug

SEQ ID NO: 1767650 - RNA, 15 nt, Human
agcuagcucaacuag

SEQ ID NO: 1767651 - RNA, 16 nt, Human
agcuagcucaacuagu

SEQ ID NO: 1767652 - RNA, 20 nt, Human
agcgggggaggcccgcagag

SEQ ID NO: 1767653 - RNA, 14 nt, Human
agcgggggaggccc

SEQ ID NO: 1767654 - RNA, 19 nt, Human
agcgugagccacugcaccg

SEQ ID NO: 1767655 - RNA, 22 nt, Human
agcgugagccacugcaccgggc

SEQ ID NO: 1767656 - RNA, 19 nt, Human
agcuacuaauuuuaaaaug

SEQ ID NO: 1767657 - RNA, 12 nt, Human
agcuaggccugg

SEQ ID NO: 1767658 - RNA, 16 nt, Human
agcuaggccuggccag

SEQ ID NO: 1767659 - RNA, 14 nt, Human
agcuaggccuggcc

SEQ ID NO: 1767660 - RNA, 15 nt, Human
agcuaggccuggcca

SEQ ID NO: 1767661 - RNA, 18 nt, Human
agcucaggugucccugca

SEQ ID NO: 1767662 - RNA, 22 nt, Human
agcucaggugucccugcacuug

SEQ ID NO: 1767663 - RNA, 20 nt, Human
agcucaggugucccugcacu

SEQ ID NO: 1767664 - RNA, 21 nt, Human
agcucaggugucccugcacuu

SEQ ID NO: 1767665 - RNA, 20 nt, Human
ugcccacaggaucagucuga

SEQ ID NO: 1767666 - RNA, 19 nt, Human
ugcccacaggaucagucug

SEQ ID NO: 1767667 - RNA, 16 nt, Human
ugcccacaggaucagu

SEQ ID NO: 1767668 - RNA, 18 nt, Human
ugcacacccacucagcuc

SEQ ID NO: 1767669 - RNA, 16 nt, Human
ugcacacccacucagc

SEQ ID NO: 1767670 - RNA, 17 nt, Human
ugcacacccacucagcu

SEQ ID NO: 1767671 - RNA, 14 nt, Human
ugcacacccacuca

SEQ ID NO: 1767672 - RNA, 14 nt, Human
ugcacgugugugca

SEQ ID NO: 1767673 - RNA, 15 nt, Human
ugcacgugugugcac

SEQ ID NO: 1767674 - RNA, 21 nt, Human
agcccugguggcagugggagc

SEQ ID NO: 1767675 - RNA, 22 nt, Human
agcccugguggcagugggagcu

SEQ ID NO: 1767676 - RNA, 23 nt, Human
agcccugguggcagugggagcug

SEQ ID NO: 1767677 - RNA, 15 nt, Human
ugauucuccugccuc

SEQ ID NO: 1767678 - RNA, 19 nt, Human
ugauucuccugccucagcc

SEQ ID NO: 1767679 - RNA, 20 nt, Human
ugauucuccugccucagccu

SEQ ID NO: 1767680 - RNA, 14 nt, Human
agcccauaaccagu

SEQ ID NO: 1767681 - RNA, 17 nt, Human
agccccgaggccuucuc

SEQ ID NO: 1767682 - RNA, 22 nt, Human
agccccgaggccuucucugaag

SEQ ID NO: 1767683 - RNA, 16 nt, Human
agccccgaggccuucu

SEQ ID NO: 1767684 - RNA, 15 nt, Human
agccccuacugcugu

SEQ ID NO: 1767685 - RNA, 16 nt, Human
agccccuacugcugug

SEQ ID NO: 1767686 - RNA, 17 nt, Human
agccccuacugcuguga

SEQ ID NO: 1767687 - RNA, 23 nt, Human
agccccuacugcugugaacccug

SEQ ID NO: 1767688 - RNA, 16 nt, Human
agccugaacagaagcu

SEQ ID NO: 1767689 - RNA, 19 nt, Human
ugcaguccugaucagagcc

SEQ ID NO: 1767690 - RNA, 22 nt, Human
ugcaguccugaucagagccgug

SEQ ID NO: 1767691 - RNA, 14 nt, Human
ugcagccugcgcca

SEQ ID NO: 1767692 - RNA, 21 nt, Human
ugcagcucaaggaaaggccug

SEQ ID NO: 1767693 - RNA, 17 nt, Human
agccucccaaagugcug

SEQ ID NO: 1767694 - RNA, 17 nt, Human
agccucagcauccuggc

SEQ ID NO: 1767695 - RNA, 19 nt, Human
agccucagcauccuggcac

SEQ ID NO: 1767696 - RNA, 20 nt, Human
agccucagcauccuggcacc

SEQ ID NO: 1767697 - RNA, 21 nt, Human
agccucagcauccuggcaccc

SEQ ID NO: 1767698 - RNA, 15 nt, Human
agccguggucccuga

SEQ ID NO: 1767699 - RNA, 22 nt, Human
agccucagcauccuggcacccg

SEQ ID NO: 1767700 - RNA, 23 nt, Human
agccucagcauccuggcacccgg

SEQ ID NO: 1767701 - RNA, 16 nt, Human
agccucccaaagugcu

SEQ ID NO: 1767702 - RNA, 16 nt, Human
agccgugguccuuugg

SEQ ID NO: 1767703 - RNA, 23 nt, Human
ugcacuauagccuaggugacaga

SEQ ID NO: 1767704 - RNA, 14 nt, Human
ugcuuuuggucugu

SEQ ID NO: 1767705 - RNA, 17 nt, Human
ugcuuuuggucugugug

SEQ ID NO: 1767706 - RNA, 14 nt, Human
ugcuuuugcuucua

SEQ ID NO: 1767707 - RNA, 13 nt, Human
ugcuuggucuguu

SEQ ID NO: 1767708 - RNA, 15 nt, Human
ugcuuggucuguuug

SEQ ID NO: 1767709 - RNA, 16 nt, Human
ugcuuggucuguuuga

SEQ ID NO: 1767710 - RNA, 13 nt, Human
ugcuugauacagg

SEQ ID NO: 1767711 - RNA, 21 nt, Human
aggacagugcuugauacagga

SEQ ID NO: 1767712 - RNA, 11 nt, Human
aggagcuuccu

SEQ ID NO: 1767713 - RNA, 16 nt, Human
aggagcuuccuguccu

SEQ ID NO: 1767714 - RNA, 19 nt, Human
aggagcuucuuguuuccuu

SEQ ID NO: 1767715 - RNA, 20 nt, Human
aggagcuucuuguuuccuug

SEQ ID NO: 1767716 - RNA, 22 nt, Human
aggagcuucuuguuuccuuguu

SEQ ID NO: 1767717 - RNA, 20 nt, Human
aggagcuuccuguccuccca

SEQ ID NO: 1767718 - RNA, 19 nt, Human
uggaagggauggggugcca

SEQ ID NO: 1767719 - RNA, 16 nt, Human
uggaagcacagcuuca

SEQ ID NO: 1767720 - RNA, 14 nt, Human
uggagcccagggca

SEQ ID NO: 1767721 - RNA, 22 nt, Human
uggagcccagggcaucuugcug

SEQ ID NO: 1767722 - RNA, 20 nt, Human
aggcaccucacaggccccag

SEQ ID NO: 1767723 - RNA, 12 nt, Human
aggcaccucaag

SEQ ID NO: 1767724 - RNA, 18 nt, Human
aggcaccucaagaagaag

SEQ ID NO: 1767725 - RNA, 14 nt, Human
aggcaaugcuggcu

SEQ ID NO: 1767726 - RNA, 20 nt, Human
aggcacccaccaucaugucu

SEQ ID NO: 1767727 - RNA, 21 nt, Human
aggcacccaccaucaugucug

SEQ ID NO: 1767728 - RNA, 22 nt, Human
aggcacccaccaucaugucugg

SEQ ID NO: 1767729 - RNA, 15 nt, Human
aggcaauccuaccuu

SEQ ID NO: 1767730 - RNA, 23 nt, Human
uggacacagcucuucuccaggcu

SEQ ID NO: 1767731 - RNA, 13 nt, Human
uggacacaggccu

SEQ ID NO: 1767732 - RNA, 15 nt, Human
uggacacaggccugc

SEQ ID NO: 1767733 - RNA, 20 nt, Human
uggaccuugaacuggguacu

SEQ ID NO: 1767734 - RNA, 16 nt, Human
uggacccuguugcuaa

SEQ ID NO: 1767735 - RNA, 15 nt, Human
uggacccuguugcua

SEQ ID NO: 1767736 - RNA, 14 nt, Human
uggacccuguugcu

SEQ ID NO: 1767737 - RNA, 13 nt, Human
uggacccuguugc

SEQ ID NO: 1767738 - RNA, 22 nt, Human
uggacacagcucuucuccaggc

SEQ ID NO: 1767739 - RNA, 13 nt, Human
uggacacagcucu

SEQ ID NO: 1767740 - RNA, 14 nt, Human
uggacacagcucuu

SEQ ID NO: 1767741 - RNA, 16 nt, Human
uggacaaucaugaaau

SEQ ID NO: 1767742 - RNA, 22 nt, Human
aggcaaacccaucaacaaaaau

SEQ ID NO: 1767743 - RNA, 16 nt, Human
aggcaaaggguccaga

SEQ ID NO: 1767744 - RNA, 19 nt, Human
aggcaaaggguccagaagg

SEQ ID NO: 1767745 - RNA, 20 nt, Human
aggcaaaggguccagaagga

SEQ ID NO: 1767746 - RNA, 20 nt, Human
uggauuacuucucuauaaaa

SEQ ID NO: 1767747 - RNA, 20 nt, Human
uggauggaagguuggaugga

SEQ ID NO: 1767748 - RNA, 18 nt, Human
uggauggccguggaugcg

SEQ ID NO: 1767749 - RNA, 16 nt, Human
aggcagccccauucug

SEQ ID NO: 1767750 - RNA, 17 nt, Human
aggcagccccauucugc

SEQ ID NO: 1767751 - RNA, 20 nt, Human
aggccagagggagugacaga

SEQ ID NO: 1767752 - RNA, 17 nt, Human
uggcagccuuggcaaac

SEQ ID NO: 1767753 - RNA, 14 nt, Human
aggccagagggagu

SEQ ID NO: 1767754 - RNA, 19 nt, Human
uggcaaugccaucaucucc

SEQ ID NO: 1767755 - RNA, 17 nt, Human
uggccguggaugcgcag

SEQ ID NO: 1767756 - RNA, 14 nt, Human
uggccguggauggc

SEQ ID NO: 1767757 - RNA, 14 nt, Human
uggccucuuugucu

SEQ ID NO: 1767758 - RNA, 22 nt, Human
uggccucuuugucuaaaacaau

SEQ ID NO: 1767759 - RNA, 19 nt, Human
uggccugagagucagcucu

SEQ ID NO: 1767760 - RNA, 18 nt, Human
uggccuuccauuuauaug

SEQ ID NO: 1767761 - RNA, 18 nt, Human
uggccuguuucaacacag

SEQ ID NO: 1767762 - RNA, 21 nt, Human
uggccaaagccaaagcuaggc

SEQ ID NO: 1767763 - RNA, 23 nt, Human
uggccaaagccaaagcuaggccu

SEQ ID NO: 1767764 - RNA, 23 nt, Human
uggccagugugacaaggauugcu

SEQ ID NO: 1767765 - RNA, 12 nt, Human
aggccccugcca

SEQ ID NO: 1767766 - RNA, 16 nt, Human
uggcaugauccaagca

SEQ ID NO: 1767767 - RNA, 16 nt, Human
ugcuguauaaguuauu

SEQ ID NO: 1767768 - RNA, 18 nt, Human
ugcuucauucuuugcagg

SEQ ID NO: 1767769 - RNA, 18 nt, Human
aggacacuaaccacgcug

SEQ ID NO: 1767770 - RNA, 14 nt, Human
aggacacuuccgua

SEQ ID NO: 1767771 - RNA, 19 nt, Human
ugcugggauuacaagcgug

SEQ ID NO: 1767772 - RNA, 19 nt, Human
ugcuggcuguuggcugggg

SEQ ID NO: 1767773 - RNA, 21 nt, Human
ugcuggcuguuggcugggggc

SEQ ID NO: 1767774 - RNA, 21 nt, Human
ugcugggauuacaagcgugag

SEQ ID NO: 1767775 - RNA, 17 nt, Human
ugcugggauuacaggug

SEQ ID NO: 1767776 - RNA, 16 nt, Human
ugcuguauaaaaucag

SEQ ID NO: 1767777 - RNA, 15 nt, Human
ugcuguauaaaauca

SEQ ID NO: 1767778 - RNA, 14 nt, Human
ugcuguauaaaauc

SEQ ID NO: 1767779 - RNA, 13 nt, Human
ugcuguauaaaau

SEQ ID NO: 1767780 - RNA, 18 nt, Human
ugcuguauaaaaucagcc

SEQ ID NO: 1767781 - RNA, 17 nt, Human
ugcuguauaaaaucagc

SEQ ID NO: 1767782 - RNA, 22 nt, Human
aggaauggaggccauauuucca

SEQ ID NO: 1767783 - RNA, 13 nt, Human
ugcuggccaaaua

SEQ ID NO: 1767784 - RNA, 18 nt, Human
ugcuggccaaauagcaaa

SEQ ID NO: 1767785 - RNA, 19 nt, Human
ugcuggccaaauagcaaag

SEQ ID NO: 1767786 - RNA, 20 nt, Human
ugcuggccaaauagcaaaga

SEQ ID NO: 1767787 - RNA, 20 nt, Human
aggaauggacagacagagga

SEQ ID NO: 1767788 - RNA, 12 nt, Human
aggaauggacag

SEQ ID NO: 1767789 - RNA, 15 nt, Human
agcuuucaauuccgu

SEQ ID NO: 1767790 - RNA, 13 nt, Human
ugcuauugacaau

SEQ ID NO: 1767791 - RNA, 16 nt, Human
ugcuauugacaauaaa

SEQ ID NO: 1767792 - RNA, 17 nt, Human
ugcuauugacaauaaaa

SEQ ID NO: 1767793 - RNA, 18 nt, Human
ugcuauugacaauaaaau

SEQ ID NO: 1767794 - RNA, 20 nt, Human
ugcuauugacaauaaaauau

SEQ ID NO: 1767795 - RNA, 21 nt, Human
ugcuauugacaauaaaauauu

SEQ ID NO: 1767796 - RNA, 15 nt, Human
ugcucuggacaggca

SEQ ID NO: 1767797 - RNA, 16 nt, Human
ugcucuggacaggcau

SEQ ID NO: 1767798 - RNA, 14 nt, Human
ugcucuggacaggc

SEQ ID NO: 1767799 - RNA, 15 nt, Human
ugcucccucacaugu

SEQ ID NO: 1767800 - RNA, 18 nt, Human
aggaagccgccaguacuu

SEQ ID NO: 1767801 - RNA, 22 nt, Human
aggaagccgccaguacuuguca

SEQ ID NO: 1767802 - RNA, 21 nt, Human
agcugugcucuggacaggcau

SEQ ID NO: 1767803 - RNA, 23 nt, Human
agcugugcucuggacaggcaugu

SEQ ID NO: 1767804 - RNA, 20 nt, Human
agcugugcucuggacaggca

SEQ ID NO: 1767805 - RNA, 15 nt, Human
agcugggacuacagg

SEQ ID NO: 1767806 - RNA, 23 nt, Human
agcugucccaucuggucauuugg

SEQ ID NO: 1767807 - RNA, 22 nt, Human
agcuggcucuauaaggcagccu

SEQ ID NO: 1767808 - RNA, 21 nt, Human
ugccuguucagcuccagcuca

SEQ ID NO: 1767809 - RNA, 13 nt, Human
ugccuuagcuuca

SEQ ID NO: 1767810 - RNA, 14 nt, Human
ugccuuagcuucag

SEQ ID NO: 1767811 - RNA, 16 nt, Human
ugccuuagcuucagga

SEQ ID NO: 1767812 - RNA, 17 nt, Human
ugccuuagcuucaggaa

SEQ ID NO: 1767813 - RNA, 17 nt, Human
ugccuuaaaccuaccuc

SEQ ID NO: 1767814 - RNA, 18 nt, Human
ugccuuaaaccuaccucc

SEQ ID NO: 1767815 - RNA, 18 nt, Human
ugccuguucagcuccagc

SEQ ID NO: 1767816 - RNA, 20 nt, Human
ugccuguucagcuccagcuc

SEQ ID NO: 1767817 - RNA, 18 nt, Human
ugccugccccaaacaaau

SEQ ID NO: 1767818 - RNA, 20 nt, Human
ugccugccccaaacaaauau

SEQ ID NO: 1767819 - RNA, 14 nt, Human
ugccugcccaggcc

SEQ ID NO: 1767820 - RNA, 15 nt, Human
ugccugcccaggccc

SEQ ID NO: 1767821 - RNA, 16 nt, Human
ugccugcccaggcccc

SEQ ID NO: 1767822 - RNA, 12 nt, Human
ugcccaggcagg

SEQ ID NO: 1767823 - RNA, 13 nt, Human
ugcccaggcaggu

SEQ ID NO: 1767824 - RNA, 14 nt, Human
ugcccaggcagguc

SEQ ID NO: 1767825 - RNA, 13 nt, Human
ugccucugccucu

SEQ ID NO: 1767826 - RNA, 14 nt, Human
ugccucugccucug

SEQ ID NO: 1767827 - RNA, 15 nt, Human
ugccucugccucuga

SEQ ID NO: 1767828 - RNA, 14 nt, Human
agcuggaugagaau

SEQ ID NO: 1767829 - RNA, 20 nt, Human
agcuggaugauggucuucag

SEQ ID NO: 1767830 - RNA, 21 nt, Human
agcugcuuuugucuaugggac

SEQ ID NO: 1767831 - RNA, 21 nt, Human
agcugccuguucagcuccagc

SEQ ID NO: 1767832 - RNA, 22 nt, Human
agcugccuguucagcuccagcu

SEQ ID NO: 1767833 - RNA, 20 nt, Human
agcugccuguucagcuccag

SEQ ID NO: 1767834 - RNA, 14 nt, Human
agcuugaggguugg

SEQ ID NO: 1767835 - RNA, 18 nt, Human
agcuugaggguugggcug

SEQ ID NO: 1767836 - RNA, 22 nt, Human
agcuugaggguugggcuggugu

SEQ ID NO: 1767837 - RNA, 18 nt, Human
agcuuguaaauagcucag

SEQ ID NO: 1767838 - RNA, 20 nt, Human
agcuucuuccaggugcccag

SEQ ID NO: 1767839 - RNA, 22 nt, Human
agcuucuuccaggugcccagcu

SEQ ID NO: 1767840 - RNA, 13 nt, Human
agcuucuuguuuc

SEQ ID NO: 1767841 - RNA, 14 nt, Human
agcuucuuguuucc

SEQ ID NO: 1767842 - RNA, 16 nt, Human
agcuucuuguuuccuu

SEQ ID NO: 1767843 - RNA, 17 nt, Human
agcuucuuguuuccuug

SEQ ID NO: 1767844 - RNA, 18 nt, Human
agcuucuuguuuccuugu

SEQ ID NO: 1767845 - RNA, 19 nt, Human
agcuucuuguuuccuuguu

SEQ ID NO: 1767846 - RNA, 15 nt, Human
agcuuagacuaaggc

SEQ ID NO: 1767847 - RNA, 12 nt, Human
agcuucuuccag

SEQ ID NO: 1767848 - RNA, 22 nt, Human
agcuguugaagucucaggaguc

SEQ ID NO: 1767849 - RNA, 20 nt, Human
ugcuaagccccagcaagcaa

SEQ ID NO: 1767850 - RNA, 16 nt, Human
ugcggcguacaggcug

SEQ ID NO: 1767851 - RNA, 18 nt, Human
ugcggcguacaggcuggc

SEQ ID NO: 1767852 - RNA, 17 nt, Human
ugcgguccacccaggag

SEQ ID NO: 1767853 - RNA, 18 nt, Human
ugcgguccacccaggagc

SEQ ID NO: 1767854 - RNA, 23 nt, Human
ugcggacagccacggccaggcca

SEQ ID NO: 1767855 - RNA, 22 nt, Human
ugcggacagccacggccaggcc

SEQ ID NO: 1767856 - RNA, 16 nt, Human
ugccuuucgaggccug

SEQ ID NO: 1767857 - RNA, 17 nt, Human
ugccuuucgaggccuga

SEQ ID NO: 1767858 - RNA, 12 nt, Human
uggggagaaagu

SEQ ID NO: 1767859 - RNA, 19 nt, Human
uggggacuccggcugugcu

SEQ ID NO: 1767860 - RNA, 22 nt, Human
uggggacuccggcugugcuggg

SEQ ID NO: 1767861 - RNA, 23 nt, Human
uggggacuccggcugugcuggga

SEQ ID NO: 1767862 - RNA, 18 nt, Human
uggggcggugagagggga

SEQ ID NO: 1767863 - RNA, 15 nt, Human
ugggguacccacugc

SEQ ID NO: 1767864 - RNA, 16 nt, Human
ugggguacccacugcu

SEQ ID NO: 1767865 - RNA, 12 nt, Human
uggggguugcug

SEQ ID NO: 1767866 - RNA, 14 nt, Human
ugggguacccacug

SEQ ID NO: 1767867 - RNA, 12 nt, Human
uggggcuguguu

SEQ ID NO: 1767868 - RNA, 16 nt, Human
ugggcugggcccacaa

SEQ ID NO: 1767869 - RNA, 14 nt, Human
ugggcugggcccuc

SEQ ID NO: 1767870 - RNA, 20 nt, Human
ugggcugggcccucucuucu

SEQ ID NO: 1767871 - RNA, 21 nt, Human
ugggcugggcccucucuucuc

SEQ ID NO: 1767872 - RNA, 22 nt, Human
ugggcugggcccucucuucuca

SEQ ID NO: 1767873 - RNA, 11 nt, Human
uggggaagagu

SEQ ID NO: 1767874 - RNA, 11 nt, Human
uggggaaggag

SEQ ID NO: 1767875 - RNA, 15 nt, Human
uggggaaggagccag

SEQ ID NO: 1767876 - RNA, 16 nt, Human
uggggaaggagccagu

SEQ ID NO: 1767877 - RNA, 15 nt, Human
agggccugagccugg

SEQ ID NO: 1767878 - RNA, 18 nt, Human
agggccugagccuggcca

SEQ ID NO: 1767879 - RNA, 17 nt, Human
agggaggugaccccagg

SEQ ID NO: 1767880 - RNA, 17 nt, Human
agggagugacagaggca

SEQ ID NO: 1767881 - RNA, 18 nt, Human
agggagugacagaggcag

SEQ ID NO: 1767882 - RNA, 19 nt, Human
agggagugacagaggcagc

SEQ ID NO: 1767883 - RNA, 19 nt, Human
agggcagagugagacccag

SEQ ID NO: 1767884 - RNA, 18 nt, Human
ugggcccacaaaggcaaa

SEQ ID NO: 1767885 - RNA, 23 nt, Human
agggcccagagaggguggugacc

SEQ ID NO: 1767886 - RNA, 20 nt, Human
agggccgccagggagaccug

SEQ ID NO: 1767887 - RNA, 23 nt, Human
agggccgccagggagaccuggac

SEQ ID NO: 1767888 - RNA, 14 nt, Human
agggcagcagggcu

SEQ ID NO: 1767889 - RNA, 15 nt, Human
agggcagcagggcua

SEQ ID NO: 1767890 - RNA, 12 nt, Human
agggcagggccc

SEQ ID NO: 1767891 - RNA, 17 nt, Human
agggcagggccccaggc

SEQ ID NO: 1767892 - RNA, 15 nt, Human
ugggcacaugcucag

SEQ ID NO: 1767893 - RNA, 16 nt, Human
ugggcacaugcucagg

SEQ ID NO: 1767894 - RNA, 17 nt, Human
ugggcaacccccagccu

SEQ ID NO: 1767895 - RNA, 20 nt, Human
ugggcaacccccagccugcu

SEQ ID NO: 1767896 - RNA, 21 nt, Human
ugggcaacccccagccugcua

SEQ ID NO: 1767897 - RNA, 16 nt, Human
ugggcaacccccagcc

SEQ ID NO: 1767898 - RNA, 16 nt, Human
ugggauugagucugug

SEQ ID NO: 1767899 - RNA, 19 nt, Human
ugggauugagucugugcca

SEQ ID NO: 1767900 - RNA, 14 nt, Human
ugggaguacaaaag

SEQ ID NO: 1767901 - RNA, 21 nt, Human
agggucucacuauguugccca

SEQ ID NO: 1767902 - RNA, 22 nt, Human
agggucucacuauguugcccag

SEQ ID NO: 1767903 - RNA, 23 nt, Human
agggucucacuauguugcccagg

SEQ ID NO: 1767904 - RNA, 22 nt, Human
agggucucacucugucgcccag

SEQ ID NO: 1767905 - RNA, 17 nt, Human
uggucucaaacucuuga

SEQ ID NO: 1767906 - RNA, 23 nt, Human
uggucucaaacucuugaccucag

SEQ ID NO: 1767907 - RNA, 16 nt, Human
uggucucaaacucuug

SEQ ID NO: 1767908 - RNA, 13 nt, Human
uggucccacucag

SEQ ID NO: 1767909 - RNA, 20 nt, Human
ugguacuauaaaagcuuucu

SEQ ID NO: 1767910 - RNA, 15 nt, Human
uggucagcccuaggg

SEQ ID NO: 1767911 - RNA, 19 nt, Human
uggucagcccuagggugga

SEQ ID NO: 1767912 - RNA, 22 nt, Human
uggucagcccuaggguggagag

SEQ ID NO: 1767913 - RNA, 16 nt, Human
uggucugacccacugc

SEQ ID NO: 1767914 - RNA, 17 nt, Human
uggucugacccacugcu

SEQ ID NO: 1767915 - RNA, 15 nt, Human
uggucuucagccucu

SEQ ID NO: 1767916 - RNA, 14 nt, Human
uggucuuccuuuuu

SEQ ID NO: 1767917 - RNA, 17 nt, Human
uggucuuggcagcaccu

SEQ ID NO: 1767918 - RNA, 20 nt, Human
uggucuuggcagcaccuguc

SEQ ID NO: 1767919 - RNA, 15 nt, Human
aggguuaaggccuga

SEQ ID NO: 1767920 - RNA, 16 nt, Human
aggguuaaggccugaa

SEQ ID NO: 1767921 - RNA, 12 nt, Human
aggucagagccu

SEQ ID NO: 1767922 - RNA, 15 nt, Human
agguaggguuuaauc

SEQ ID NO: 1767923 - RNA, 12 nt, Human
agguaggguuua

SEQ ID NO: 1767924 - RNA, 18 nt, Human
aggguuggccccugcccg

SEQ ID NO: 1767925 - RNA, 23 nt, Human
aggguuggccccugcccggcugc

SEQ ID NO: 1767926 - RNA, 13 nt, Human
aggguugggcugg

SEQ ID NO: 1767927 - RNA, 16 nt, Human
uguacuuuuaaggcag

SEQ ID NO: 1767928 - RNA, 16 nt, Human
uguaccagugaauuuu

SEQ ID NO: 1767929 - RNA, 19 nt, Human
uguaccagugaauuuuugc

SEQ ID NO: 1767930 - RNA, 20 nt, Human
uguaccagugaauuuuugca

SEQ ID NO: 1767931 - RNA, 21 nt, Human
uguaccagugaauuuuugcaa

SEQ ID NO: 1767932 - RNA, 22 nt, Human
uguaccagugaauuuuugcaau

SEQ ID NO: 1767933 - RNA, 21 nt, Human
uguaccaugaaacaaagcugc

SEQ ID NO: 1767934 - RNA, 21 nt, Human
agguuuuguuuuuuuucagcc

SEQ ID NO: 1767935 - RNA, 12 nt, Human
aguaagccucau

SEQ ID NO: 1767936 - RNA, 17 nt, Human
aguaagccucaucauca

SEQ ID NO: 1767937 - RNA, 21 nt, Human
aguaagccucaucaucagagc

SEQ ID NO: 1767938 - RNA, 17 nt, Human
aguagaaaggccuuuaa

SEQ ID NO: 1767939 - RNA, 16 nt, Human
aguagaaaggccuuua

SEQ ID NO: 1767940 - RNA, 15 nt, Human
aguagaaaggccuuu

SEQ ID NO: 1767941 - RNA, 14 nt, Human
aguagaaaggccuu

SEQ ID NO: 1767942 - RNA, 14 nt, Human
aguaauuuguaaag

SEQ ID NO: 1767943 - RNA, 12 nt, Human
aguagagacagg

SEQ ID NO: 1767944 - RNA, 19 nt, Human
aguagaaauaauaugcauu

SEQ ID NO: 1767945 - RNA, 18 nt, Human
aguagaaaggccuuuaaa

SEQ ID NO: 1767946 - RNA, 18 nt, Human
aguagaaauaauaugcau

SEQ ID NO: 1767947 - RNA, 12 nt, Human
aggugggcccgg

SEQ ID NO: 1767948 - RNA, 14 nt, Human
aggugcagccagag

SEQ ID NO: 1767949 - RNA, 15 nt, Human
aggugcagccagagg

SEQ ID NO: 1767950 - RNA, 16 nt, Human
aggugcagccagaggc

SEQ ID NO: 1767951 - RNA, 17 nt, Human
aggugcagccagaggca

SEQ ID NO: 1767952 - RNA, 18 nt, Human
aggugcagccagaggcac

SEQ ID NO: 1767953 - RNA, 13 nt, Human
aggugcagccaga

SEQ ID NO: 1767954 - RNA, 23 nt, Human
aggucuugaacuccuggccucaa

SEQ ID NO: 1767955 - RNA, 12 nt, Human
uguaagaauaau

SEQ ID NO: 1767956 - RNA, 16 nt, Human
uguaagaauaauuuau

SEQ ID NO: 1767957 - RNA, 20 nt, Human
agguugagcaauuucccccu

SEQ ID NO: 1767958 - RNA, 14 nt, Human
agguugggauggga

SEQ ID NO: 1767959 - RNA, 12 nt, Human
agucaggaaagg

SEQ ID NO: 1767960 - RNA, 14 nt, Human
agucccugucaccu

SEQ ID NO: 1767961 - RNA, 16 nt, Human
agucccugucaccucu

SEQ ID NO: 1767962 - RNA, 17 nt, Human
agucccugucaccucuu

SEQ ID NO: 1767963 - RNA, 18 nt, Human
agucccugucaccucuuc

SEQ ID NO: 1767964 - RNA, 19 nt, Human
agucccugucaccucuucc

SEQ ID NO: 1767965 - RNA, 16 nt, Human
agucucacuguugccc

SEQ ID NO: 1767966 - RNA, 17 nt, Human
agucucacuguugccca

SEQ ID NO: 1767967 - RNA, 23 nt, Human
aguccgaaagggacuuggaagcu

SEQ ID NO: 1767968 - RNA, 18 nt, Human
agucgugagcucuuguga

SEQ ID NO: 1767969 - RNA, 21 nt, Human
agucgugagcucuugugagga

SEQ ID NO: 1767970 - RNA, 17 nt, Human
uguccggaaugccaccc

SEQ ID NO: 1767971 - RNA, 15 nt, Human
uguccaaaacugccu

SEQ ID NO: 1767972 - RNA, 12 nt, Human
uguccuuuccuu

SEQ ID NO: 1767973 - RNA, 16 nt, Human
uguccuacccacccuc

SEQ ID NO: 1767974 - RNA, 14 nt, Human
ugucgcccagucug

SEQ ID NO: 1767975 - RNA, 15 nt, Human
ugucgcccagucugg

SEQ ID NO: 1767976 - RNA, 13 nt, Human
ugucuaaaacaau

SEQ ID NO: 1767977 - RNA, 15 nt, Human
ugucuaaaacaauaa

SEQ ID NO: 1767978 - RNA, 17 nt, Human
ugucuaaaacaauaaaa

SEQ ID NO: 1767979 - RNA, 19 nt, Human
agucagaauuagcugcuuc

SEQ ID NO: 1767980 - RNA, 13 nt, Human
agucaccaagccc

SEQ ID NO: 1767981 - RNA, 14 nt, Human
agucaccaagccca

SEQ ID NO: 1767982 - RNA, 22 nt, Human
agucaccaaaagacacugcaga

SEQ ID NO: 1767983 - RNA, 20 nt, Human
aguauuucaaauuggagcuu

SEQ ID NO: 1767984 - RNA, 13 nt, Human
ugucagcugaggc

SEQ ID NO: 1767985 - RNA, 14 nt, Human
ugucagcugaggcu

SEQ ID NO: 1767986 - RNA, 19 nt, Human
ugucagcugaggcuggggg

SEQ ID NO: 1767987 - RNA, 24 nt, Human
ugucagcugaggcugggggagagc

SEQ ID NO: 1767988 - RNA, 16 nt, Human
ugucagguggggcagc

SEQ ID NO: 1767989 - RNA, 20 nt, Human
ugucaguaccuucaaacuag

SEQ ID NO: 1767990 - RNA, 13 nt, Human
aguaggagcccag

SEQ ID NO: 1767991 - RNA, 14 nt, Human
ugucaagaaagagc

SEQ ID NO: 1767992 - RNA, 19 nt, Human
ugucaagagggucugagga

SEQ ID NO: 1767993 - RNA, 16 nt, Human
ugugcucuggacaggc

SEQ ID NO: 1767994 - RNA, 18 nt, Human
ugugcucuggacaggcau

SEQ ID NO: 1767995 - RNA, 19 nt, Human
ugugcucuggacaggcaug

SEQ ID NO: 1767996 - RNA, 14 nt, Human
ugugcucugcuuca

SEQ ID NO: 1767997 - RNA, 21 nt, Human
agucucacuguugcccaggcu

SEQ ID NO: 1767998 - RNA, 20 nt, Human
agucucacuguugcccaggc

SEQ ID NO: 1767999 - RNA, 18 nt, Human
agucucacuguugcccag

SEQ ID NO: 1768000 - RNA, 19 nt, Human
agucucacuguugcccagg

SEQ ID NO: 1768001 - RNA, 12 nt, Human
ugugccucggcu

SEQ ID NO: 1768002 - RNA, 21 nt, Human
ugugccucggcuuuucucagc

SEQ ID NO: 1768003 - RNA, 22 nt, Human
ugugcucugaucauccacugug

SEQ ID NO: 1768004 - RNA, 23 nt, Human
ugugcucugaucauccacugugc

SEQ ID NO: 1768005 - RNA, 15 nt, Human
ugugcucuggacagg

SEQ ID NO: 1768006 - RNA, 16 nt, Human
agugcaguccugauca

SEQ ID NO: 1768007 - RNA, 22 nt, Human
agugcaguccugaucagagccg

SEQ ID NO: 1768008 - RNA, 16 nt, Human
agugccaacaauccua

SEQ ID NO: 1768009 - RNA, 21 nt, Human
agugccaacaauccuagugcu

SEQ ID NO: 1768010 - RNA, 14 nt, Human
agugcccacaggau

SEQ ID NO: 1768011 - RNA, 16 nt, Human
agugagucgaggacag

SEQ ID NO: 1768012 - RNA, 22 nt, Human
agugauucuccugccucagccu

SEQ ID NO: 1768013 - RNA, 24 nt, Human
agugauucuccugccucagccucc

SEQ ID NO: 1768014 - RNA, 22 nt, Human
agugcaaugguauaaauuucaa

SEQ ID NO: 1768015 - RNA, 20 nt, Human
agugauuuucaagucugugu

SEQ ID NO: 1768016 - RNA, 14 nt, Human
uguguuaugaagca

SEQ ID NO: 1768017 - RNA, 20 nt, Human
ugugucagguggggcagcuu

SEQ ID NO: 1768018 - RNA, 14 nt, Human
ugugucagcugagg

SEQ ID NO: 1768019 - RNA, 15 nt, Human
ugugucagcugaggc

SEQ ID NO: 1768020 - RNA, 17 nt, Human
ugugucagcugaggcug

SEQ ID NO: 1768021 - RNA, 17 nt, Human
ugugucagguggggcag

SEQ ID NO: 1768022 - RNA, 19 nt, Human
ugugucagguggggcagcu

SEQ ID NO: 1768023 - RNA, 19 nt, Human
agugcuuuccuuuuuuaaa

SEQ ID NO: 1768024 - RNA, 22 nt, Human
agugcuuuccuuuuuuaaaaau

SEQ ID NO: 1768025 - RNA, 19 nt, Human
uguuaaugauagcuacugu

SEQ ID NO: 1768026 - RNA, 22 nt, Human
uguguugggauugagucugugc

SEQ ID NO: 1768027 - RNA, 20 nt, Human
agugcugggauuacaagcgu

SEQ ID NO: 1768028 - RNA, 19 nt, Human
agugcugggauuacaggug

SEQ ID NO: 1768029 - RNA, 14 nt, Human
uguuguguuucugu

SEQ ID NO: 1768030 - RNA, 23 nt, Human
uguugggguggguauaaaagaug

SEQ ID NO: 1768031 - RNA, 22 nt, Human
uguugggguggguauaaaagau

SEQ ID NO: 1768032 - RNA, 16 nt, Human
aguucaauucucauuu

SEQ ID NO: 1768033 - RNA, 20 nt, Human
uguugggguggguauaaaag

SEQ ID NO: 1768034 - RNA, 18 nt, Human
uguugggguggguauaaa

SEQ ID NO: 1768035 - RNA, 17 nt, Human
uguugggguggguauaa

SEQ ID NO: 1768036 - RNA, 19 nt, Human
aguucggugagcuacaaau

SEQ ID NO: 1768037 - RNA, 20 nt, Human
aguucggugagcuacaaaug

SEQ ID NO: 1768038 - RNA, 15 nt, Human
aguguuagggaaggg

SEQ ID NO: 1768039 - RNA, 18 nt, Human
aguguuagggaagggccu

SEQ ID NO: 1768040 - RNA, 19 nt, Human
aguguuagggaagggccug

SEQ ID NO: 1768041 - RNA, 23 nt, Human
aguguuagggaagggccugccac

SEQ ID NO: 1768042 - RNA, 15 nt, Human
aguguuaaaugugau

SEQ ID NO: 1768043 - RNA, 15 nt, Human
aguguuaccugugug

SEQ ID NO: 1768044 - RNA, 17 nt, Human
aguguuaccugugugcu

SEQ ID NO: 1768045 - RNA, 13 nt, Human
uguucuugaauuu

SEQ ID NO: 1768046 - RNA, 23 nt, Human
uguucuugaauuuaauaaucugu

SEQ ID NO: 1768047 - RNA, 13 nt, Human
uguugcccaggcu

SEQ ID NO: 1768048 - RNA, 15 nt, Human
uguugcccaggcugg

SEQ ID NO: 1768049 - RNA, 17 nt, Human
aguuacuccagugccaa

SEQ ID NO: 1768050 - RNA, 13 nt, Human
aguuacuuuagau

SEQ ID NO: 1768051 - RNA, 14 nt, Human
aguuacuuuagaug

SEQ ID NO: 1768052 - RNA, 15 nt, Human
aguuacuuuagaugg

SEQ ID NO: 1768053 - RNA, 21 nt, Human
aguuacuuuagauggcaagca

SEQ ID NO: 1768054 - RNA, 12 nt, Human
aguuagacuguu

SEQ ID NO: 1768055 - RNA, 21 nt, Human
aguuacuccagugccaacaau

SEQ ID NO: 1768056 - RNA, 21 nt, Human
uguucccuauuuuucucuccu

SEQ ID NO: 1768057 - RNA, 22 nt, Human
uguucccuauuuuucucuccug

SEQ ID NO: 1768058 - RNA, 23 nt, Human
uguucccuauuuuucucuccugu

SEQ ID NO: 1768059 - RNA, 17 nt, Human
uguucuaagucuuucca

SEQ ID NO: 1768060 - RNA, 13 nt, Human
uguuauuucucag

SEQ ID NO: 1768061 - RNA, 17 nt, Human
uguuauuucucagacuu

SEQ ID NO: 1768062 - RNA, 14 nt, Human
uguuccccuuccac

SEQ ID NO: 1768063 - RNA, 17 nt, Human
uguuccccuuccacuga

SEQ ID NO: 1768064 - RNA, 23 nt, Human
uguuccccuuccacugagggcag

SEQ ID NO: 1768065 - RNA, 20 nt, Human
uguuccccuuccacugaggg

SEQ ID NO: 1768066 - RNA, 21 nt, Human
uguuccccuuccacugagggc

SEQ ID NO: 1768067 - RNA, 19 nt, Human
aguggaggugggcugggcc

SEQ ID NO: 1768068 - RNA, 23 nt, Human
aguggaggugggcugggcccucu

SEQ ID NO: 1768069 - RNA, 21 nt, Human
uguuauuagagauuaccuccu

SEQ ID NO: 1768070 - RNA, 23 nt, Human
uguuauuagagauuaccuccuga

SEQ ID NO: 1768071 - RNA, 19 nt, Human
uguuaucaccgugggcucc

SEQ ID NO: 1768072 - RNA, 15 nt, Human
auaaaaucagccaau

SEQ ID NO: 1768073 - RNA, 11 nt, Human
auaaaaucagc

SEQ ID NO: 1768074 - RNA, 16 nt, Human
auaaaauauuauugaa

SEQ ID NO: 1768075 - RNA, 18 nt, Human
auaaaauauuauugaacu

SEQ ID NO: 1768076 - RNA, 21 nt, Human
auaaaagauggggucuguaaa

SEQ ID NO: 1768077 - RNA, 19 nt, Human
auaaaagauggggucugua

SEQ ID NO: 1768078 - RNA, 22 nt, Human
auaaaagauggggucuguaaaa

SEQ ID NO: 1768079 - RNA, 19 nt, Human
aguuuuggaugcagugcuc

SEQ ID NO: 1768080 - RNA, 18 nt, Human
aguuuuggaugcagugcu

SEQ ID NO: 1768081 - RNA, 17 nt, Human
aguuuuggaugcagugc

SEQ ID NO: 1768082 - RNA, 15 nt, Human
aguuuuggaugcagu

SEQ ID NO: 1768083 - RNA, 18 nt, Human
aguuuucuuuccuccuuu

SEQ ID NO: 1768084 - RNA, 19 nt, Human
aguuuucuuuccuccuuuc

SEQ ID NO: 1768085 - RNA, 14 nt, Human
uuaaugaaaaggaa

SEQ ID NO: 1768086 - RNA, 16 nt, Human
uuaaugaaaaggaauc

SEQ ID NO: 1768087 - RNA, 19 nt, Human
uuaauauuuuuucuuuucc

SEQ ID NO: 1768088 - RNA, 18 nt, Human
uuaagaaauuuugccuuu

SEQ ID NO: 1768089 - RNA, 23 nt, Human
uuaagaaauuuugccuuuaaguu

SEQ ID NO: 1768090 - RNA, 19 nt, Human
uuaagucccugucaccucu

SEQ ID NO: 1768091 - RNA, 20 nt, Human
uuaagucccugucaccucuu

SEQ ID NO: 1768092 - RNA, 17 nt, Human
aguuggguggaugccug

SEQ ID NO: 1768093 - RNA, 19 nt, Human
aguugggcuuccucauagu

SEQ ID NO: 1768094 - RNA, 21 nt, Human
aguuggcagaaauacagucuu

SEQ ID NO: 1768095 - RNA, 13 nt, Human
aguugggcuuccu

SEQ ID NO: 1768096 - RNA, 12 nt, Human
uuaaaaaaaaga

SEQ ID NO: 1768097 - RNA, 13 nt, Human
uuaaaaaaaagaa

SEQ ID NO: 1768098 - RNA, 12 nt, Human
uuaaaaaucaac

SEQ ID NO: 1768099 - RNA, 15 nt, Human
uuaaaaaucaacuuu

SEQ ID NO: 1768100 - RNA, 23 nt, Human
uuaaaaaucaacuuuuuauugcc

SEQ ID NO: 1768101 - RNA, 14 nt, Human
aguuuaaauuguaa

SEQ ID NO: 1768102 - RNA, 12 nt, Human
aguuuaaagcaa

SEQ ID NO: 1768103 - RNA, 16 nt, Human
aguuuaaaaaucaacu

SEQ ID NO: 1768104 - RNA, 17 nt, Human
aguuuaaaaaucaacuu

SEQ ID NO: 1768105 - RNA, 18 nt, Human
aguuuaaaaaucaacuuu

SEQ ID NO: 1768106 - RNA, 19 nt, Human
aguuuaaaaaucaacuuuu

SEQ ID NO: 1768107 - RNA, 20 nt, Human
aguuuaaaaaucaacuuuuu

SEQ ID NO: 1768108 - RNA, 15 nt, Human
uuaaauaauuuccua

SEQ ID NO: 1768109 - RNA, 13 nt, Human
uuaaauacagucu

SEQ ID NO: 1768110 - RNA, 19 nt, Human
uuaaauagaguauaugcac

SEQ ID NO: 1768111 - RNA, 18 nt, Human
uuaaaauuuuuuuagaaa

SEQ ID NO: 1768112 - RNA, 14 nt, Human
auaaauaaaaauaa

SEQ ID NO: 1768113 - RNA, 13 nt, Human
auaaaguagaaau

SEQ ID NO: 1768114 - RNA, 14 nt, Human
auaaaguagaaaug

SEQ ID NO: 1768115 - RNA, 13 nt, Human
auaaauaaaaaua

SEQ ID NO: 1768116 - RNA, 21 nt, Human
auaacggaucagaaauacaga

SEQ ID NO: 1768117 - RNA, 20 nt, Human
auaacggaucagaaauacag

SEQ ID NO: 1768118 - RNA, 22 nt, Human
auaacgauaaaagacagugaaa

SEQ ID NO: 1768119 - RNA, 15 nt, Human
auaaaucagucaagc

SEQ ID NO: 1768120 - RNA, 14 nt, Human
auaaauucacuuuc

SEQ ID NO: 1768121 - RNA, 15 nt, Human
auaaauucacuuuca

SEQ ID NO: 1768122 - RNA, 23 nt, Human
auaaauucacuuucauuuuugau

SEQ ID NO: 1768123 - RNA, 13 nt, Human
uuacucuuuccua

SEQ ID NO: 1768124 - RNA, 16 nt, Human
uuagaaagcauuugaa

SEQ ID NO: 1768125 - RNA, 15 nt, Human
uuagaaagcauuuga

SEQ ID NO: 1768126 - RNA, 14 nt, Human
uuagaaagcauuug

SEQ ID NO: 1768127 - RNA, 13 nt, Human
uuagaaagcauuu

SEQ ID NO: 1768128 - RNA, 12 nt, Human
uuagaaagcauu

SEQ ID NO: 1768129 - RNA, 23 nt, Human
uuagaaagcauuugaaugcauuu

SEQ ID NO: 1768130 - RNA, 21 nt, Human
uuagaaagcauuugaaugcau

SEQ ID NO: 1768131 - RNA, 19 nt, Human
uuagaaagcauuugaaugc

SEQ ID NO: 1768132 - RNA, 18 nt, Human
uuagaaagcauuugaaug

SEQ ID NO: 1768133 - RNA, 17 nt, Human
uuagaaagcauuugaau

SEQ ID NO: 1768134 - RNA, 13 nt, Human
uuagacagagucu

SEQ ID NO: 1768135 - RNA, 17 nt, Human
uuagaaauuuauuuccu

SEQ ID NO: 1768136 - RNA, 20 nt, Human
uuagacagagucucacuguu

SEQ ID NO: 1768137 - RNA, 13 nt, Human
uuacccucuuugc

SEQ ID NO: 1768138 - RNA, 15 nt, Human
uuacccucuuugcug

SEQ ID NO: 1768139 - RNA, 17 nt, Human
uuacccucuuugcugca

SEQ ID NO: 1768140 - RNA, 11 nt, Human
uuaccuccuga

SEQ ID NO: 1768141 - RNA, 19 nt, Human
uuaccuccugagaaaaaag

SEQ ID NO: 1768142 - RNA, 18 nt, Human
uuacccacucggucccag

SEQ ID NO: 1768143 - RNA, 16 nt, Human
uuacccaggugggucc

SEQ ID NO: 1768144 - RNA, 13 nt, Human
uuagacagccaaa

SEQ ID NO: 1768145 - RNA, 21 nt, Human
auaagacaaugacauacgcuu

SEQ ID NO: 1768146 - RNA, 11 nt, Human
auaaugcagua

SEQ ID NO: 1768147 - RNA, 13 nt, Human
auaaugcaguaug

SEQ ID NO: 1768148 - RNA, 14 nt, Human
auaaugcaguaugg

SEQ ID NO: 1768149 - RNA, 15 nt, Human
auaaugcaguauggu

SEQ ID NO: 1768150 - RNA, 18 nt, Human
auaaugcaguaugguaca

SEQ ID NO: 1768151 - RNA, 19 nt, Human
auaaugcaguaugguacau

SEQ ID NO: 1768152 - RNA, 18 nt, Human
auaauccuaaacauauga

SEQ ID NO: 1768153 - RNA, 17 nt, Human
uuaguaaaaaaucaauu

SEQ ID NO: 1768154 - RNA, 22 nt, Human
uuaguaaaaaaucaauuaacca

SEQ ID NO: 1768155 - RNA, 12 nt, Human
uuaguaacaugu

SEQ ID NO: 1768156 - RNA, 23 nt, Human
uuaguaacauguguuaaguauuu

SEQ ID NO: 1768157 - RNA, 14 nt, Human
uuagggaagggccu

SEQ ID NO: 1768158 - RNA, 14 nt, Human
uuagcggagacgga

SEQ ID NO: 1768159 - RNA, 15 nt, Human
uuuuaagcaaaauau

SEQ ID NO: 1768160 - RNA, 16 nt, Human
uuuuaagaggcagggu

SEQ ID NO: 1768161 - RNA, 20 nt, Human
uuuuaagaaauuuugccuuu

SEQ ID NO: 1768162 - RNA, 15 nt, Human
uuuuaagaggcaggg

SEQ ID NO: 1768163 - RNA, 14 nt, Human
uuuuaacucugucu

SEQ ID NO: 1768164 - RNA, 18 nt, Human
uuuguuugguauuguauu

SEQ ID NO: 1768165 - RNA, 16 nt, Human
uuuguuugguauugua

SEQ ID NO: 1768166 - RNA, 15 nt, Human
uuuguuugguauugu

SEQ ID NO: 1768167 - RNA, 13 nt, Human
uuuuaaaacccag

SEQ ID NO: 1768168 - RNA, 14 nt, Human
uuuuaaaaaugcaa

SEQ ID NO: 1768169 - RNA, 12 nt, Human
uuuguaccagug

SEQ ID NO: 1768170 - RNA, 17 nt, Human
uuuguaccagugaauuu

SEQ ID NO: 1768171 - RNA, 19 nt, Human
uuuguaccagugaauuuuu

SEQ ID NO: 1768172 - RNA, 22 nt, Human
uuuguaccagugaauuuuugca

SEQ ID NO: 1768173 - RNA, 23 nt, Human
uuuguaccagugaauuuuugcaa

SEQ ID NO: 1768174 - RNA, 13 nt, Human
uuuguagagccag

SEQ ID NO: 1768175 - RNA, 11 nt, Human
uuuguacaugu

SEQ ID NO: 1768176 - RNA, 12 nt, Human
augucuuaauga

SEQ ID NO: 1768177 - RNA, 19 nt, Human
augucuuaaugaaguuuga

SEQ ID NO: 1768178 - RNA, 18 nt, Human
augucuuaaugaaguuug

SEQ ID NO: 1768179 - RNA, 16 nt, Human
augucuuaaugaaguu

SEQ ID NO: 1768180 - RNA, 13 nt, Human
augucuuaaugaa

SEQ ID NO: 1768181 - RNA, 15 nt, Human
augucugccauguug

SEQ ID NO: 1768182 - RNA, 19 nt, Human
augucugcagugugccccc

SEQ ID NO: 1768183 - RNA, 20 nt, Human
augucugcagugugcccccc

SEQ ID NO: 1768184 - RNA, 14 nt, Human
uuugucuaaaacaa

SEQ ID NO: 1768185 - RNA, 16 nt, Human
uuugucuaaaacaaua

SEQ ID NO: 1768186 - RNA, 19 nt, Human
uuugucuaaaacaauaaaa

SEQ ID NO: 1768187 - RNA, 17 nt, Human
augucaguaccuucaaa

SEQ ID NO: 1768188 - RNA, 14 nt, Human
auguccccucccag

SEQ ID NO: 1768189 - RNA, 17 nt, Human
auguaucauaauuacca

SEQ ID NO: 1768190 - RNA, 21 nt, Human
auguaucauaauuaccaagug

SEQ ID NO: 1768191 - RNA, 21 nt, Human
auguagucagaauuagcugcu

SEQ ID NO: 1768192 - RNA, 22 nt, Human
uuugccauguuggccaggcugg

SEQ ID NO: 1768193 - RNA, 21 nt, Human
uuugcccaaaauuuauuuuau

SEQ ID NO: 1768194 - RNA, 13 nt, Human
uuugcaauaaugc

SEQ ID NO: 1768195 - RNA, 14 nt, Human
uuugcaauaaugca

SEQ ID NO: 1768196 - RNA, 15 nt, Human
uuugcaauaaugcag

SEQ ID NO: 1768197 - RNA, 16 nt, Human
uuugcaauaaugcagu

SEQ ID NO: 1768198 - RNA, 17 nt, Human
uuugcaauaaugcagua

SEQ ID NO: 1768199 - RNA, 22 nt, Human
uuugcaauaaugcaguauggua

SEQ ID NO: 1768200 - RNA, 12 nt, Human
uuugcccuuuga

SEQ ID NO: 1768201 - RNA, 20 nt, Human
uuuggggauuuucaaaagau

SEQ ID NO: 1768202 - RNA, 17 nt, Human
uuugggaauauuugaau

SEQ ID NO: 1768203 - RNA, 16 nt, Human
uuugggaauauuugaa

SEQ ID NO: 1768204 - RNA, 23 nt, Human
uuugcugucccauagucccugcc

SEQ ID NO: 1768205 - RNA, 23 nt, Human
auuaaaagaugucucugcaaacc

SEQ ID NO: 1768206 - RNA, 19 nt, Human
auguuuuuguucaaagcca

SEQ ID NO: 1768207 - RNA, 21 nt, Human
auguuguguuucuguucaccu

SEQ ID NO: 1768208 - RNA, 12 nt, Human
uuuucucagcug

SEQ ID NO: 1768209 - RNA, 13 nt, Human
auuaaccucucac

SEQ ID NO: 1768210 - RNA, 16 nt, Human
uuuuccauauccuggu

SEQ ID NO: 1768211 - RNA, 19 nt, Human
uuuucauguuuuaacaaaa

SEQ ID NO: 1768212 - RNA, 20 nt, Human
uuuucauguuuuaacaaaaa

SEQ ID NO: 1768213 - RNA, 16 nt, Human
uuuucauguuuuaaca

SEQ ID NO: 1768214 - RNA, 13 nt, Human
uuuuauaagaaaa

SEQ ID NO: 1768215 - RNA, 14 nt, Human
uuuuauaagaaaaa

SEQ ID NO: 1768216 - RNA, 16 nt, Human
uuuuauaagaaaaacu

SEQ ID NO: 1768217 - RNA, 17 nt, Human
uuuuauaagaaaaacuu

SEQ ID NO: 1768218 - RNA, 14 nt, Human
auguuggccaggcu

SEQ ID NO: 1768219 - RNA, 21 nt, Human
auguugcacacccacucagcu

SEQ ID NO: 1768220 - RNA, 22 nt, Human
auguugcacacccacucagcuc

SEQ ID NO: 1768221 - RNA, 16 nt, Human
auguuggccaggcugg

SEQ ID NO: 1768222 - RNA, 13 nt, Human
auguugaggugga

SEQ ID NO: 1768223 - RNA, 21 nt, Human
uuuuagcaauuuauacaauau

SEQ ID NO: 1768224 - RNA, 14 nt, Human
auguuauagaacuu

SEQ ID NO: 1768225 - RNA, 15 nt, Human
auguuauagaacuuc

SEQ ID NO: 1768226 - RNA, 20 nt, Human
auuccccagauugcaacagg

SEQ ID NO: 1768227 - RNA, 14 nt, Human
auuccgcaucccua

SEQ ID NO: 1768228 - RNA, 16 nt, Human
auuccguagccagcug

SEQ ID NO: 1768229 - RNA, 23 nt, Human
auuccguagccagcugcucccca

SEQ ID NO: 1768230 - RNA, 14 nt, Human
auuauuuuccaaaa

SEQ ID NO: 1768231 - RNA, 13 nt, Human
auuauuuuccaaa

SEQ ID NO: 1768232 - RNA, 15 nt, Human
auuauugaaauauua

SEQ ID NO: 1768233 - RNA, 17 nt, Human
auuauauuuacaaaugg

SEQ ID NO: 1768234 - RNA, 17 nt, Human
auuauccagguaaucca

SEQ ID NO: 1768235 - RNA, 21 nt, Human
auuauccuuuccucauuaaau

SEQ ID NO: 1768236 - RNA, 16 nt, Human
auuauauuuacaaaug

SEQ ID NO: 1768237 - RNA, 19 nt, Human
auuauaggaauaucaauau

SEQ ID NO: 1768238 - RNA, 21 nt, Human
auuauaggaauaucaauauaa

SEQ ID NO: 1768239 - RNA, 20 nt, Human
auuagagauuaccuccugag

SEQ ID NO: 1768240 - RNA, 12 nt, Human
auuaccuccuga

SEQ ID NO: 1768241 - RNA, 13 nt, Human
auuaccuccugag

SEQ ID NO: 1768242 - RNA, 17 nt, Human
auuaccuccugagaaaa

SEQ ID NO: 1768243 - RNA, 16 nt, Human
auuaaugacacuuguc

SEQ ID NO: 1768244 - RNA, 20 nt, Human
auuaaugacacuugucccca

SEQ ID NO: 1768245 - RNA, 14 nt, Human
uuuuuguuggagug

SEQ ID NO: 1768246 - RNA, 19 nt, Human
uuuuuguuggaguguuucu

SEQ ID NO: 1768247 - RNA, 16 nt, Human
auuaauaguaauuugu

SEQ ID NO: 1768248 - RNA, 18 nt, Human
auuaauaguaauuuguaa

SEQ ID NO: 1768249 - RNA, 20 nt, Human
auuaauaguaauuuguaaag

SEQ ID NO: 1768250 - RNA, 21 nt, Human
auuaauaguaauuuguaaagu

SEQ ID NO: 1768251 - RNA, 14 nt, Human
auuuuacaguuaag

SEQ ID NO: 1768252 - RNA, 22 nt, Human
auuuuacaguuaaggaauauaa

SEQ ID NO: 1768253 - RNA, 21 nt, Human
auuuuacuuuaaaaggagcca

SEQ ID NO: 1768254 - RNA, 14 nt, Human
auuuccugugucuu

SEQ ID NO: 1768255 - RNA, 12 nt, Human
auuuauuaaaua

SEQ ID NO: 1768256 - RNA, 13 nt, Human
auuuagcccucac

SEQ ID NO: 1768257 - RNA, 16 nt, Human
auuuagcccucacauu

SEQ ID NO: 1768258 - RNA, 21 nt, Human
auuugggcuuggaccagaucu

SEQ ID NO: 1768259 - RNA, 13 nt, Human
auuuguaaaguug

SEQ ID NO: 1768260 - RNA, 22 nt, Human
auuuguaaaguugguuggauaa

SEQ ID NO: 1768261 - RNA, 14 nt, Human
auuugaaugcauuu

SEQ ID NO: 1768262 - RNA, 12 nt, Human
auuugaaugcau

SEQ ID NO: 1768263 - RNA, 18 nt, Human
auuugaaugcauuuuguu

SEQ ID NO: 1768264 - RNA, 16 nt, Human
auuugaaugcauuuug

SEQ ID NO: 1768265 - RNA, 15 nt, Human
auuugaaugcauuuu

SEQ ID NO: 1768266 - RNA, 17 nt, Human
auuugagcagggcucag

SEQ ID NO: 1768267 - RNA, 14 nt, Human
auuugagugcucug

SEQ ID NO: 1768268 - RNA, 16 nt, Human
auuugagugcucugau

SEQ ID NO: 1768269 - RNA, 13 nt, Human
auuugagucucuu

SEQ ID NO: 1768270 - RNA, 21 nt, Human
auuugagucucuuaauagcca

SEQ ID NO: 1768271 - RNA, 21 nt, Human
auuggcuuuauccucuuuaga

SEQ ID NO: 1768272 - RNA, 17 nt, Human
auuggcuuuauccucuu

SEQ ID NO: 1768273 - RNA, 14 nt, Human
auuggcuuuauccu

SEQ ID NO: 1768274 - RNA, 14 nt, Human
auugcuaauguugc

SEQ ID NO: 1768275 - RNA, 15 nt, Human
auugcuaauguugcu

SEQ ID NO: 1768276 - RNA, 16 nt, Human
auugcuaauguugcug

SEQ ID NO: 1768277 - RNA, 18 nt, Human
auugcuaauguugcugga

SEQ ID NO: 1768278 - RNA, 14 nt, Human
auuguauauucacu

SEQ ID NO: 1768279 - RNA, 13 nt, Human
auuguauauucac

SEQ ID NO: 1768280 - RNA, 15 nt, Human
auuguauauucacuu

SEQ ID NO: 1768281 - RNA, 15 nt, Human
auuguaucgauguua

SEQ ID NO: 1768282 - RNA, 15 nt, Human
auuguauuacaaauc

SEQ ID NO: 1768283 - RNA, 14 nt, Human
auuguauuacaaau

SEQ ID NO: 1768284 - RNA, 17 nt, Human
auugugaaccaaugcaa

SEQ ID NO: 1768285 - RNA, 15 nt, Human
auugugcuucuuucu

SEQ ID NO: 1768286 - RNA, 14 nt, Human
auuguggaauguug

SEQ ID NO: 1768287 - RNA, 15 nt, Human
auuguggaauguugg

SEQ ID NO: 1768288 - RNA, 17 nt, Human
auuguggaauguuggau

SEQ ID NO: 1768289 - RNA, 20 nt, Human
auuguggaauguuggauaag

SEQ ID NO: 1768290 - RNA, 22 nt, Human
auuguuucaauugcaucuccca

SEQ ID NO: 1768291 - RNA, 13 nt, Human
auuguuucaauug

SEQ ID NO: 1768292 - RNA, 19 nt, Human
auuuaauuuuuuugagaca

SEQ ID NO: 1768293 - RNA, 23 nt, Human
auuuaauuuuuuugagacagagu

SEQ ID NO: 1768294 - RNA, 16 nt, Human
auuuacaaaugggaaa

SEQ ID NO: 1768295 - RNA, 19 nt, Human
auuuacccaacucuguaca

SEQ ID NO: 1768296 - RNA, 19 nt, Human
auuuaaacaauaaaugugc

SEQ ID NO: 1768297 - RNA, 14 nt, Human
auugcuacuguccu

SEQ ID NO: 1768298 - RNA, 20 nt, Human
auucuagaugcaagucucuu

SEQ ID NO: 1768299 - RNA, 16 nt, Human
auugcggacagccacg

SEQ ID NO: 1768300 - RNA, 18 nt, Human
auugcggacagccacggc

SEQ ID NO: 1768301 - RNA, 19 nt, Human
auugcggacagccacggcc

SEQ ID NO: 1768302 - RNA, 17 nt, Human
auugcccacgcuggagu

SEQ ID NO: 1768303 - RNA, 21 nt, Human
auugcccacgcuggagugcag

SEQ ID NO: 1768304 - RNA, 22 nt, Human
auugccauauugcacaugucuu

SEQ ID NO: 1768305 - RNA, 19 nt, Human
auugccauauugcacaugu

SEQ ID NO: 1768306 - RNA, 18 nt, Human
auugccauauugcacaug

SEQ ID NO: 1768307 - RNA, 17 nt, Human
auugccauauugcacau

SEQ ID NO: 1768308 - RNA, 16 nt, Human
auugccauauugcaca

SEQ ID NO: 1768309 - RNA, 15 nt, Human
auugccauauugcac

SEQ ID NO: 1768310 - RNA, 12 nt, Human
auugccauauug

SEQ ID NO: 1768311 - RNA, 14 nt, Human
auugccaagggcuu

SEQ ID NO: 1768312 - RNA, 16 nt, Human
auugcaacaggcuggg

SEQ ID NO: 1768313 - RNA, 21 nt, Human
auugcaacaggcugggcuuca

SEQ ID NO: 1768314 - RNA, 20 nt, Human
auugcacaugucuuaaugaa

SEQ ID NO: 1768315 - RNA, 18 nt, Human
auugcacaugucuuaaug

SEQ ID NO: 1768316 - RNA, 16 nt, Human
auugcacaugucuuaa

SEQ ID NO: 1768317 - RNA, 21 nt, Human
auugcacaugucuuaaugaag

SEQ ID NO: 1768318 - RNA, 15 nt, Human
auugcaacaggcugg

SEQ ID NO: 1768319 - RNA, 13 nt, Human
auauaugugugcc

SEQ ID NO: 1768320 - RNA, 17 nt, Human
auauguaacaagccacc

SEQ ID NO: 1768321 - RNA, 16 nt, Human
auauguaacaagccac

SEQ ID NO: 1768322 - RNA, 20 nt, Human
auaugauagcgggaaaagga

SEQ ID NO: 1768323 - RNA, 22 nt, Human
auaugauagcgggaaaaggaga

SEQ ID NO: 1768324 - RNA, 19 nt, Human
auaugugccaaucaauagc

SEQ ID NO: 1768325 - RNA, 9 nt, Human
uucauucag

SEQ ID NO: 1768326 - RNA, 18 nt, Human
uuccagcuggaugagaau

SEQ ID NO: 1768327 - RNA, 23 nt, Human
uuccaagcuuccauagcugcugc

SEQ ID NO: 1768328 - RNA, 18 nt, Human
uucccaagcucugcuccu

SEQ ID NO: 1768329 - RNA, 18 nt, Human
uucccacaggacauuucu

SEQ ID NO: 1768330 - RNA, 14 nt, Human
uucccaauucacau

SEQ ID NO: 1768331 - RNA, 13 nt, Human
uucccaagcucug

SEQ ID NO: 1768332 - RNA, 14 nt, Human
uucccaagcucugc

SEQ ID NO: 1768333 - RNA, 15 nt, Human
uucccaagcucugcu

SEQ ID NO: 1768334 - RNA, 16 nt, Human
uucccaagcucugcuc

SEQ ID NO: 1768335 - RNA, 21 nt, Human
uuccagguacccuucucgcuu

SEQ ID NO: 1768336 - RNA, 16 nt, Human
uuccauagcugcugcc

SEQ ID NO: 1768337 - RNA, 17 nt, Human
uuccauagcugcugccc

SEQ ID NO: 1768338 - RNA, 14 nt, Human
auaguuaauauagu

SEQ ID NO: 1768339 - RNA, 20 nt, Human
auaguuacuccagugccaac

SEQ ID NO: 1768340 - RNA, 22 nt, Human
auaguuggcuaggaccccucca

SEQ ID NO: 1768341 - RNA, 20 nt, Human
auagugauguaaucuugaau

SEQ ID NO: 1768342 - RNA, 21 nt, Human
auaggcgaucacaacgugcau

SEQ ID NO: 1768343 - RNA, 17 nt, Human
auaguggcuuaaaacaa

SEQ ID NO: 1768344 - RNA, 22 nt, Human
uucacuuaugaaugauuugcau

SEQ ID NO: 1768345 - RNA, 17 nt, Human
auaggcguaacuaauuu

SEQ ID NO: 1768346 - RNA, 21 nt, Human
auaggaaaguauuuuuuuaag

SEQ ID NO: 1768347 - RNA, 20 nt, Human
uucacaucuaaccucaucuu

SEQ ID NO: 1768348 - RNA, 18 nt, Human
uucacaucuaaccucauc

SEQ ID NO: 1768349 - RNA, 19 nt, Human
uucacaucuaaccucaucu

SEQ ID NO: 1768350 - RNA, 14 nt, Human
uucacacagauaga

SEQ ID NO: 1768351 - RNA, 15 nt, Human
uucaaaagauaauau

SEQ ID NO: 1768352 - RNA, 21 nt, Human
uucaagcgauucuucugcuuc

SEQ ID NO: 1768353 - RNA, 14 nt, Human
uucaagccauucca

SEQ ID NO: 1768354 - RNA, 18 nt, Human
uuauuuuuagacagaguc

SEQ ID NO: 1768355 - RNA, 17 nt, Human
uuauuuuuagacagagu

SEQ ID NO: 1768356 - RNA, 17 nt, Human
uucaaaaccuuuugaaa

SEQ ID NO: 1768357 - RNA, 14 nt, Human
uuauuuuuguacau

SEQ ID NO: 1768358 - RNA, 16 nt, Human
uuauuuuuguacaugu

SEQ ID NO: 1768359 - RNA, 17 nt, Human
uuauuuuuguacauguu

SEQ ID NO: 1768360 - RNA, 14 nt, Human
uuauuuuuuacauu

SEQ ID NO: 1768361 - RNA, 18 nt, Human
uuauuuuuuacauuauua

SEQ ID NO: 1768362 - RNA, 15 nt, Human
uucuguagaaauggu

SEQ ID NO: 1768363 - RNA, 14 nt, Human
uucuguagaaaugg

SEQ ID NO: 1768364 - RNA, 13 nt, Human
uucuguagaaaug

SEQ ID NO: 1768365 - RNA, 22 nt, Human
uucuguagaaaugguuguauua

SEQ ID NO: 1768366 - RNA, 21 nt, Human
uucuguagaaaugguuguauu

SEQ ID NO: 1768367 - RNA, 20 nt, Human
uucuguagaaaugguuguau

SEQ ID NO: 1768368 - RNA, 18 nt, Human
uucuguagaaaugguugu

SEQ ID NO: 1768369 - RNA, 13 nt, Human
aucauuuaauaau

SEQ ID NO: 1768370 - RNA, 12 nt, Human
aucauuuaauaa

SEQ ID NO: 1768371 - RNA, 19 nt, Human
uucucuaagagaacaaugu

SEQ ID NO: 1768372 - RNA, 15 nt, Human
aucauuucuauuucu

SEQ ID NO: 1768373 - RNA, 22 nt, Human
aucauuuauuuuuuacauuauu

SEQ ID NO: 1768374 - RNA, 21 nt, Human
aucauuuaauaauauacuugu

SEQ ID NO: 1768375 - RNA, 19 nt, Human
aucauuuauuuuuuacauu

SEQ ID NO: 1768376 - RNA, 19 nt, Human
aucauuuaauaauauacuu

SEQ ID NO: 1768377 - RNA, 18 nt, Human
aucauuuaauaauauacu

SEQ ID NO: 1768378 - RNA, 17 nt, Human
aucauuuaauaauauac

SEQ ID NO: 1768379 - RNA, 14 nt, Human
aucauuuaauaaua

SEQ ID NO: 1768380 - RNA, 16 nt, Human
uucucuuuucaaaaca

SEQ ID NO: 1768381 - RNA, 22 nt, Human
uucugaauuugcaaaguacugu

SEQ ID NO: 1768382 - RNA, 20 nt, Human
uucucuuuuccccuuuccug

SEQ ID NO: 1768383 - RNA, 21 nt, Human
uucucuuuuccccuuuccugu

SEQ ID NO: 1768384 - RNA, 22 nt, Human
uucucuuuuccccuuuccuguc

SEQ ID NO: 1768385 - RNA, 24 nt, Human
uucucuaagagaacaaugugcuau

SEQ ID NO: 1768386 - RNA, 20 nt, Human
auccuagguaggguuuaauc

SEQ ID NO: 1768387 - RNA, 21 nt, Human
uucuguuggccagugugacaa

SEQ ID NO: 1768388 - RNA, 15 nt, Human
uucuuucuuagaaau

SEQ ID NO: 1768389 - RNA, 14 nt, Human
uucuuucuuagaaa

SEQ ID NO: 1768390 - RNA, 13 nt, Human
uucuuucuuagaa

SEQ ID NO: 1768391 - RNA, 16 nt, Human
uucuuucuuugggaau

SEQ ID NO: 1768392 - RNA, 20 nt, Human
uucuuucuuagaaauuuauu

SEQ ID NO: 1768393 - RNA, 21 nt, Human
uucuugaauuuaauaaucugu

SEQ ID NO: 1768394 - RNA, 14 nt, Human
uucuucgaaaaucu

SEQ ID NO: 1768395 - RNA, 17 nt, Human
uucuucgaaaaucuaga

SEQ ID NO: 1768396 - RNA, 13 nt, Human
uucgcuccugugu

SEQ ID NO: 1768397 - RNA, 13 nt, Human
uucgccuuuccuc

SEQ ID NO: 1768398 - RNA, 16 nt, Human
uucgccuuuccucucu

SEQ ID NO: 1768399 - RNA, 14 nt, Human
uucuaaccuggagg

SEQ ID NO: 1768400 - RNA, 13 nt, Human
uucuaaggaagac

SEQ ID NO: 1768401 - RNA, 20 nt, Human
uucgcagagcuuuucagauu

SEQ ID NO: 1768402 - RNA, 11 nt, Human
uucgaggccug

SEQ ID NO: 1768403 - RNA, 12 nt, Human
uucgaggccuga

SEQ ID NO: 1768404 - RNA, 13 nt, Human
uucgaggccugaa

SEQ ID NO: 1768405 - RNA, 15 nt, Human
uucgaggccugaagc

SEQ ID NO: 1768406 - RNA, 20 nt, Human
uucgaggccugaagccagcu

SEQ ID NO: 1768407 - RNA, 13 nt, Human
aucagaauuugug

SEQ ID NO: 1768408 - RNA, 14 nt, Human
aucagaauuugugu

SEQ ID NO: 1768409 - RNA, 16 nt, Human
aucaggacccagagga

SEQ ID NO: 1768410 - RNA, 18 nt, Human
aucaggacccagaggaag

SEQ ID NO: 1768411 - RNA, 20 nt, Human
aucaggacccagaggaaggg

SEQ ID NO: 1768412 - RNA, 14 nt, Human
uucuauaauuuaaa

SEQ ID NO: 1768413 - RNA, 13 nt, Human
uucuauaauuuaa

SEQ ID NO: 1768414 - RNA, 16 nt, Human
uucuagauacaauaaa

SEQ ID NO: 1768415 - RNA, 18 nt, Human
uucuagauacaauaaauu

SEQ ID NO: 1768416 - RNA, 19 nt, Human
uucuagauacaauaaauug

SEQ ID NO: 1768417 - RNA, 20 nt, Human
uucuagauacaauaaauugc

SEQ ID NO: 1768418 - RNA, 11 nt, Human
uuccuguccca

SEQ ID NO: 1768419 - RNA, 23 nt, Human
uuccugucccaccauacgagcac

SEQ ID NO: 1768420 - RNA, 14 nt, Human
uuccugucccugcg

SEQ ID NO: 1768421 - RNA, 15 nt, Human
uuccugucccugcgc

SEQ ID NO: 1768422 - RNA, 21 nt, Human
uuccugucccugcgccuuucc

SEQ ID NO: 1768423 - RNA, 23 nt, Human
uuccugucccugcgccuuuccuu

SEQ ID NO: 1768424 - RNA, 22 nt, Human
uuccugucccugcgccuuuccu

SEQ ID NO: 1768425 - RNA, 19 nt, Human
aucaaccccuucgcuccug

SEQ ID NO: 1768426 - RNA, 20 nt, Human
aucaaccccuucgcuccugu

SEQ ID NO: 1768427 - RNA, 22 nt, Human
aucaaccccuucgcuccugugu

SEQ ID NO: 1768428 - RNA, 21 nt, Human
auauuuugucauaucaaauaa

SEQ ID NO: 1768429 - RNA, 14 nt, Human
auauuuuacauaca

SEQ ID NO: 1768430 - RNA, 22 nt, Human
uuccccucagaaaaaaauucau

SEQ ID NO: 1768431 - RNA, 21 nt, Human
uucccagcacuaugcuuuccu

SEQ ID NO: 1768432 - RNA, 22 nt, Human
uucccagcacuaugcuuuccuu

SEQ ID NO: 1768433 - RNA, 23 nt, Human
uucccagcacuaugcuuuccuuc

SEQ ID NO: 1768434 - RNA, 15 nt, Human
uuccuacccugccuc

SEQ ID NO: 1768435 - RNA, 16 nt, Human
uuccuacccugccucc

SEQ ID NO: 1768436 - RNA, 22 nt, Human
uucccuagaaacuuccaaaucc

SEQ ID NO: 1768437 - RNA, 21 nt, Human
uuccccuuccacugagggcag

SEQ ID NO: 1768438 - RNA, 14 nt, Human
uuccccuuccacug

SEQ ID NO: 1768439 - RNA, 15 nt, Human
uuccccuuccacuga

SEQ ID NO: 1768440 - RNA, 11 nt, Human
uuccccugugu

SEQ ID NO: 1768441 - RNA, 12 nt, Human
uuccccuguguc

SEQ ID NO: 1768442 - RNA, 13 nt, Human
uuccccuguguca

SEQ ID NO: 1768443 - RNA, 15 nt, Human
uuccccugugucauc

SEQ ID NO: 1768444 - RNA, 21 nt, Human
uuguucucugggagaaaauca

SEQ ID NO: 1768445 - RNA, 20 nt, Human
uugugugugugucagcugag

SEQ ID NO: 1768446 - RNA, 13 nt, Human
augcaccagcccu

SEQ ID NO: 1768447 - RNA, 11 nt, Human
augcaaauccu

SEQ ID NO: 1768448 - RNA, 18 nt, Human
augcaaauccuaugugau

SEQ ID NO: 1768449 - RNA, 19 nt, Human
augcaaauccuaugugauu

SEQ ID NO: 1768450 - RNA, 14 nt, Human
augcaccagcccuu

SEQ ID NO: 1768451 - RNA, 19 nt, Human
augcacuuauaauuuuccu

SEQ ID NO: 1768452 - RNA, 12 nt, Human
augauucaagcc

SEQ ID NO: 1768453 - RNA, 13 nt, Human
augauucaagcca

SEQ ID NO: 1768454 - RNA, 14 nt, Human
augauucaagccau

SEQ ID NO: 1768455 - RNA, 15 nt, Human
augauucaagccauu

SEQ ID NO: 1768456 - RNA, 16 nt, Human
augauucaagccauuc

SEQ ID NO: 1768457 - RNA, 16 nt, Human
augauucaguguuaaa

SEQ ID NO: 1768458 - RNA, 15 nt, Human
augcaguucugagca

SEQ ID NO: 1768459 - RNA, 11 nt, Human
augcaguuuga

SEQ ID NO: 1768460 - RNA, 13 nt, Human
augcaguuugaaa

SEQ ID NO: 1768461 - RNA, 14 nt, Human
augcaguuugaaau

SEQ ID NO: 1768462 - RNA, 15 nt, Human
augcaguuugaaauu

SEQ ID NO: 1768463 - RNA, 16 nt, Human
augcaguuugaaauuc

SEQ ID NO: 1768464 - RNA, 17 nt, Human
augcaguuugaaauucu

SEQ ID NO: 1768465 - RNA, 18 nt, Human
augcaguuugaaauucug

SEQ ID NO: 1768466 - RNA, 19 nt, Human
augcaguuugaaauucuga

SEQ ID NO: 1768467 - RNA, 21 nt, Human
augcaguuugaaauucugaau

SEQ ID NO: 1768468 - RNA, 22 nt, Human
augcaguuugaaauucugaauu

SEQ ID NO: 1768469 - RNA, 23 nt, Human
augcaguuugaaauucugaauuu

SEQ ID NO: 1768470 - RNA, 17 nt, Human
augcaggugaaacccag

SEQ ID NO: 1768471 - RNA, 19 nt, Human
augcagucuguccaggcuc

SEQ ID NO: 1768472 - RNA, 20 nt, Human
augcagucuguccaggcucg

SEQ ID NO: 1768473 - RNA, 18 nt, Human
augcaggugaaacccagu

SEQ ID NO: 1768474 - RNA, 15 nt, Human
augcaguaugguaca

SEQ ID NO: 1768475 - RNA, 22 nt, Human
augcaguaugguacauuuuuca

SEQ ID NO: 1768476 - RNA, 23 nt, Human
augcaguaugguacauuuuucaa

SEQ ID NO: 1768477 - RNA, 18 nt, Human
augcagucuguccaggcu

SEQ ID NO: 1768478 - RNA, 24 nt, Human
augcagugcucgcuguugcugaau

SEQ ID NO: 1768479 - RNA, 23 nt, Human
augcagugcucgcuguugcugaa

SEQ ID NO: 1768480 - RNA, 21 nt, Human
augcagugcucgcuguugcug

SEQ ID NO: 1768481 - RNA, 20 nt, Human
augcagugcucgcuguugcu

SEQ ID NO: 1768482 - RNA, 19 nt, Human
augcagugcucgcuguugc

SEQ ID NO: 1768483 - RNA, 17 nt, Human
augcagugcucgcuguu

SEQ ID NO: 1768484 - RNA, 13 nt, Human
augcagugcucgc

SEQ ID NO: 1768485 - RNA, 13 nt, Human
auggcagaaggca

SEQ ID NO: 1768486 - RNA, 14 nt, Human
auggccaaacccaa

SEQ ID NO: 1768487 - RNA, 15 nt, Human
auggcagaaggcaaa

SEQ ID NO: 1768488 - RNA, 20 nt, Human
auggcagaaggcaaacccau

SEQ ID NO: 1768489 - RNA, 21 nt, Human
auggcagaaggcaaacccauc

SEQ ID NO: 1768490 - RNA, 14 nt, Human
auggccguggaugc

SEQ ID NO: 1768491 - RNA, 16 nt, Human
auggccguggauggcc

SEQ ID NO: 1768492 - RNA, 20 nt, Human
auggccguggauggccgugg

SEQ ID NO: 1768493 - RNA, 15 nt, Human
auggccuaaauuuau

SEQ ID NO: 1768494 - RNA, 14 nt, Human
auggacagauuaau

SEQ ID NO: 1768495 - RNA, 16 nt, Human
auggacagauuaauau

SEQ ID NO: 1768496 - RNA, 23 nt, Human
uuucauguugcacacccacucag

SEQ ID NO: 1768497 - RNA, 16 nt, Human
uuucauguuuuaacaa

SEQ ID NO: 1768498 - RNA, 17 nt, Human
uuucauguuuuaacaaa

SEQ ID NO: 1768499 - RNA, 19 nt, Human
uuucauguuuuaacaaaaa

SEQ ID NO: 1768500 - RNA, 14 nt, Human
auggaacuuagcca

SEQ ID NO: 1768501 - RNA, 16 nt, Human
auggaacuuagccauu

SEQ ID NO: 1768502 - RNA, 15 nt, Human
augcuccuugggccc

SEQ ID NO: 1768503 - RNA, 16 nt, Human
augcuccuugggcccu

SEQ ID NO: 1768504 - RNA, 13 nt, Human
uuuauaguaauga

SEQ ID NO: 1768505 - RNA, 17 nt, Human
aucuugacuacagucag

SEQ ID NO: 1768506 - RNA, 19 nt, Human
aucuugcucugcugacaga

SEQ ID NO: 1768507 - RNA, 15 nt, Human
aucugugucuuguuu

SEQ ID NO: 1768508 - RNA, 14 nt, Human
aucuguuagggccu

SEQ ID NO: 1768509 - RNA, 15 nt, Human
aucuguuagggccuu

SEQ ID NO: 1768510 - RNA, 16 nt, Human
aucuguuagggccuug

SEQ ID NO: 1768511 - RNA, 17 nt, Human
aucuguuagggccuugg

SEQ ID NO: 1768512 - RNA, 16 nt, Human
aucuguuccuuggcag

SEQ ID NO: 1768513 - RNA, 19 nt, Human
aucuguugcaagccccucu

SEQ ID NO: 1768514 - RNA, 17 nt, Human
aucuggguucacugcaa

SEQ ID NO: 1768515 - RNA, 19 nt, Human
aucuggguucacugcaacc

SEQ ID NO: 1768516 - RNA, 14 nt, Human
aucuggucauuugg

SEQ ID NO: 1768517 - RNA, 22 nt, Human
aucugauuguugucaggccaua

SEQ ID NO: 1768518 - RNA, 18 nt, Human
aucugcaauuucuacuac

SEQ ID NO: 1768519 - RNA, 11 nt, Human
aucucuuccuu

SEQ ID NO: 1768520 - RNA, 12 nt, Human
aucucuuccuug

SEQ ID NO: 1768521 - RNA, 20 nt, Human
uugcaucucccagauaaugu

SEQ ID NO: 1768522 - RNA, 22 nt, Human
uugcacaugucuuaaugaaguu

SEQ ID NO: 1768523 - RNA, 21 nt, Human
uugcacaugucuuaaugaagu

SEQ ID NO: 1768524 - RNA, 17 nt, Human
uugcacaugucuuaaug

SEQ ID NO: 1768525 - RNA, 15 nt, Human
uugcaugugacucug

SEQ ID NO: 1768526 - RNA, 16 nt, Human
uugcaugugacucuga

SEQ ID NO: 1768527 - RNA, 17 nt, Human
uugcaugugacucugaa

SEQ ID NO: 1768528 - RNA, 19 nt, Human
uugcacacccacucagcuc

SEQ ID NO: 1768529 - RNA, 21 nt, Human
uugcacacccacucagcuccg

SEQ ID NO: 1768530 - RNA, 16 nt, Human
uugcacaugucuuaau

SEQ ID NO: 1768531 - RNA, 15 nt, Human
uugcacaugucuuaa

SEQ ID NO: 1768532 - RNA, 13 nt, Human
uugcacaugucuu

SEQ ID NO: 1768533 - RNA, 13 nt, Human
uugcacagggauu

SEQ ID NO: 1768534 - RNA, 19 nt, Human
uugcacagggauucucaca

SEQ ID NO: 1768535 - RNA, 19 nt, Human
aucucccagauaaugugaa

SEQ ID NO: 1768536 - RNA, 20 nt, Human
aucucccagauaaugugaaa

SEQ ID NO: 1768537 - RNA, 18 nt, Human
aucucaugaggggagagg

SEQ ID NO: 1768538 - RNA, 13 nt, Human
auccuagugcuuu

SEQ ID NO: 1768539 - RNA, 19 nt, Human
auccuaucaacaacaaggu

SEQ ID NO: 1768540 - RNA, 12 nt, Human
aucucacucugc

SEQ ID NO: 1768541 - RNA, 14 nt, Human
aucucacucugccc

SEQ ID NO: 1768542 - RNA, 16 nt, Human
aucucacucugccccc

SEQ ID NO: 1768543 - RNA, 19 nt, Human
aucucaggacacuuccgua

SEQ ID NO: 1768544 - RNA, 13 nt, Human
augaauuguacag

SEQ ID NO: 1768545 - RNA, 14 nt, Human
augaauuguacaga

SEQ ID NO: 1768546 - RNA, 22 nt, Human
augaauuguacagaauauuucu

SEQ ID NO: 1768547 - RNA, 21 nt, Human
augagaagaaaauggaaccag

SEQ ID NO: 1768548 - RNA, 21 nt, Human
augagaaagguugaagcacca

SEQ ID NO: 1768549 - RNA, 22 nt, Human
augagaaagguugaagcaccaa

SEQ ID NO: 1768550 - RNA, 23 nt, Human
augagaagaaaauggaaccaggc

SEQ ID NO: 1768551 - RNA, 21 nt, Human
augagaauuugagugcucuga

SEQ ID NO: 1768552 - RNA, 18 nt, Human
augacauuuauuuuucau

SEQ ID NO: 1768553 - RNA, 20 nt, Human
augacauuggauagaacaug

SEQ ID NO: 1768554 - RNA, 13 nt, Human
uuggcugcaggga

SEQ ID NO: 1768555 - RNA, 16 nt, Human
aucuuuuguuuccuuu

SEQ ID NO: 1768556 - RNA, 22 nt, Human
aucuuuuguuuccuuuuuuccc

SEQ ID NO: 1768557 - RNA, 23 nt, Human
aucuuuuguuuccuuuuuuccca

SEQ ID NO: 1768558 - RNA, 12 nt, Human
augaaaggagag

SEQ ID NO: 1768559 - RNA, 15 nt, Human
augaaaggagagcau

SEQ ID NO: 1768560 - RNA, 12 nt, Human
aucuugcuggcu

SEQ ID NO: 1768561 - RNA, 13 nt, Human
uuggauccaagga

SEQ ID NO: 1768562 - RNA, 24 nt, Human
uuggaugcagugcucgcuguugcu

SEQ ID NO: 1768563 - RNA, 23 nt, Human
uuggaugcagugcucgcuguugc

SEQ ID NO: 1768564 - RNA, 19 nt, Human
uuggaguguuccccuucca

SEQ ID NO: 1768565 - RNA, 22 nt, Human
uuggaguguuccccuuccacug

SEQ ID NO: 1768566 - RNA, 14 nt, Human
uuggaguguuucua

SEQ ID NO: 1768567 - RNA, 15 nt, Human
uuggggauuuucaaa

SEQ ID NO: 1768568 - RNA, 15 nt, Human
augaaagggcccaga

SEQ ID NO: 1768569 - RNA, 22 nt, Human
augaaugucuuuuuucaaacuu

SEQ ID NO: 1768570 - RNA, 17 nt, Human
augaaugauuugcauau

SEQ ID NO: 1768571 - RNA, 15 nt, Human
augaaugauuugcau

SEQ ID NO: 1768572 - RNA, 15 nt, Human
auguuugccucugcc

SEQ ID NO: 1768573 - RNA, 17 nt, Human
auguuugccucugccuc

SEQ ID NO: 1768574 - RNA, 14 nt, Human
auguuugccucugc

SEQ ID NO: 1768575 - RNA, 15 nt, Human
auguucugggacaca

SEQ ID NO: 1768576 - RNA, 21 nt, Human
auguucugugccuguaaacau

SEQ ID NO: 1768577 - RNA, 17 nt, Human
auguucucugaggacac

SEQ ID NO: 1768578 - RNA, 14 nt, Human
auguucugggacac

SEQ ID NO: 1768579 - RNA, 13 nt, Human
auguucucugagg

SEQ ID NO: 1768580 - RNA, 17 nt, Human
auguuccagacauucuc

SEQ ID NO: 1768581 - RNA, 12 nt, Human
augguacauuuu

SEQ ID NO: 1768582 - RNA, 16 nt, Human
augguacauuuuucaa

SEQ ID NO: 1768583 - RNA, 19 nt, Human
augguacauuuuucaacuu

SEQ ID NO: 1768584 - RNA, 13 nt, Human
augguccaggaga

SEQ ID NO: 1768585 - RNA, 16 nt, Human
augguccaggagaagg

SEQ ID NO: 1768586 - RNA, 18 nt, Human
augguccaggagaaggcc

SEQ ID NO: 1768587 - RNA, 19 nt, Human
augguccaggagaaggcca

SEQ ID NO: 1768588 - RNA, 21 nt, Human
augugaaaaugguccaggaga

SEQ ID NO: 1768589 - RNA, 19 nt, Human
augucuuuugaugaauaga

SEQ ID NO: 1768590 - RNA, 21 nt, Human
augucuuuuuucaaacuuuau

SEQ ID NO: 1768591 - RNA, 19 nt, Human
augucacaggcagguccag

SEQ ID NO: 1768592 - RNA, 22 nt, Human
augugaaaaugguccaggagaa

SEQ ID NO: 1768593 - RNA, 17 nt, Human
auguauuuaccaaaaau

SEQ ID NO: 1768594 - RNA, 21 nt, Human
auguauuuaccaaaaauuuug

SEQ ID NO: 1768595 - RNA, 22 nt, Human
auguauuuaccaaaaauuuugu

SEQ ID NO: 1768596 - RNA, 13 nt, Human
augucacaggcag

SEQ ID NO: 1768597 - RNA, 21 nt, Human
auggagucauuugagucucuu

SEQ ID NO: 1768598 - RNA, 18 nt, Human
augcuuuagaaagguuuu

SEQ ID NO: 1768599 - RNA, 13 nt, Human
auggauacauaaa

SEQ ID NO: 1768600 - RNA, 14 nt, Human
auggauacauaaag

SEQ ID NO: 1768601 - RNA, 14 nt, Human
auggaucagaucug

SEQ ID NO: 1768602 - RNA, 19 nt, Human
augccugccccaaacaaau

SEQ ID NO: 1768603 - RNA, 15 nt, Human
augcauugcucugga

SEQ ID NO: 1768604 - RNA, 21 nt, Human
augcauugcucuggaucuguu

SEQ ID NO: 1768605 - RNA, 18 nt, Human
augaucuuugcagacagg

SEQ ID NO: 1768606 - RNA, 19 nt, Human
augaucuuugcagacaggc

SEQ ID NO: 1768607 - RNA, 21 nt, Human
augaucuuugcagacaggcaa

SEQ ID NO: 1768608 - RNA, 17 nt, Human
augaucuuugcagacag

SEQ ID NO: 1768609 - RNA, 23 nt, Human
augaugaaaugaggucagagccu

SEQ ID NO: 1768610 - RNA, 18 nt, Human
augaugaaaugaggucag

SEQ ID NO: 1768611 - RNA, 11 nt, Human
augaggggaga

SEQ ID NO: 1768612 - RNA, 12 nt, Human
augaggggagag

SEQ ID NO: 1768613 - RNA, 14 nt, Human
augaggggagagga

SEQ ID NO: 1768614 - RNA, 15 nt, Human
augaaaaugucuugu

SEQ ID NO: 1768615 - RNA, 13 nt, Human
augaaaaugucuu

SEQ ID NO: 1768616 - RNA, 14 nt, Human
augaaaaugucuug

SEQ ID NO: 1768617 - RNA, 22 nt, Human
aucuggggcagcacccuauaaa

SEQ ID NO: 1768618 - RNA, 23 nt, Human
aucuggggcagcacccuauaaau

SEQ ID NO: 1768619 - RNA, 18 nt, Human
aucuucgggaccaggauu

SEQ ID NO: 1768620 - RNA, 12 nt, Human
aucuuccugugu

SEQ ID NO: 1768621 - RNA, 13 nt, Human
aucuuccuguguc

SEQ ID NO: 1768622 - RNA, 14 nt, Human
aucuuccugugucc

SEQ ID NO: 1768623 - RNA, 15 nt, Human
aucuuccuguguccu

SEQ ID NO: 1768624 - RNA, 15 nt, Human
aucuucgggaccagg

SEQ ID NO: 1768625 - RNA, 14 nt, Human
aucuccggcuccca

SEQ ID NO: 1768626 - RNA, 16 nt, Human
aucuccggcucccagc

SEQ ID NO: 1768627 - RNA, 18 nt, Human
aucuccggcucccagccu

SEQ ID NO: 1768628 - RNA, 19 nt, Human
aucuccggcucccagccuc

SEQ ID NO: 1768629 - RNA, 21 nt, Human
aucuccggcucccagccucag

SEQ ID NO: 1768630 - RNA, 16 nt, Human
aucuccugccuuccuc

SEQ ID NO: 1768631 - RNA, 17 nt, Human
aucuccugccuuccucc

SEQ ID NO: 1768632 - RNA, 22 nt, Human
aucuccggcucccagccucagc

SEQ ID NO: 1768633 - RNA, 20 nt, Human
aucuccugccuuccuccugg

SEQ ID NO: 1768634 - RNA, 18 nt, Human
aucaaacauggguuuagu

SEQ ID NO: 1768635 - RNA, 11 nt, Human
aucacacacac

SEQ ID NO: 1768636 - RNA, 14 nt, Human
aucacaccugcccu

SEQ ID NO: 1768637 - RNA, 19 nt, Human
aucaccgugggcucccuga

SEQ ID NO: 1768638 - RNA, 20 nt, Human
aucaccgugggcucccugac

SEQ ID NO: 1768639 - RNA, 22 nt, Human
aucaccgugggcucccugacug

SEQ ID NO: 1768640 - RNA, 14 nt, Human
aucaugucuggcua

SEQ ID NO: 1768641 - RNA, 18 nt, Human
aucaugaaauaugcaucu

SEQ ID NO: 1768642 - RNA, 15 nt, Human
aucaugaaauaugca

SEQ ID NO: 1768643 - RNA, 16 nt, Human
aucaugaaauaugcau

SEQ ID NO: 1768644 - RNA, 21 nt, Human
aucagcuucuauccuugacuu

SEQ ID NO: 1768645 - RNA, 14 nt, Human
aucaugaaauaugc

SEQ ID NO: 1768646 - RNA, 19 nt, Human
auccagacccggcugcgug

SEQ ID NO: 1768647 - RNA, 19 nt, Human
aucccaugagccucagcau

SEQ ID NO: 1768648 - RNA, 17 nt, Human
auccagagauucauuuu

SEQ ID NO: 1768649 - RNA, 19 nt, Human
auccagagauucauuuucu

SEQ ID NO: 1768650 - RNA, 22 nt, Human
auccagagauucauuuucuaga

SEQ ID NO: 1768651 - RNA, 23 nt, Human
auccagagauucauuuucuagau

SEQ ID NO: 1768652 - RNA, 19 nt, Human
auccccacugggaccaacc

SEQ ID NO: 1768653 - RNA, 14 nt, Human
aucccggggguggg

SEQ ID NO: 1768654 - RNA, 19 nt, Human
auccucaguuuuugugaaa

SEQ ID NO: 1768655 - RNA, 17 nt, Human
aucccuaccgacccagg

SEQ ID NO: 1768656 - RNA, 19 nt, Human
aucccuaccgacccagggu

SEQ ID NO: 1768657 - RNA, 12 nt, Human
auccucaaucca

SEQ ID NO: 1768658 - RNA, 15 nt, Human
auccucaauccagcu

SEQ ID NO: 1768659 - RNA, 17 nt, Human
auccuugggggcuccca

SEQ ID NO: 1768660 - RNA, 18 nt, Human
auccuugggggcucccag

SEQ ID NO: 1768661 - RNA, 22 nt, Human
auccuugggggcucccagggca

SEQ ID NO: 1768662 - RNA, 12 nt, Human
aucgccuuuccc

SEQ ID NO: 1768663 - RNA, 19 nt, Human
auccuuuaggguucugccu

SEQ ID NO: 1768664 - RNA, 21 nt, Human
auccuuuaggguucugccucu

SEQ ID NO: 1768665 - RNA, 19 nt, Human
auccuuuccucauuaaauu

SEQ ID NO: 1768666 - RNA, 15 nt, Human
auaugcugcaacaaa

SEQ ID NO: 1768667 - RNA, 13 nt, Human
auaugcacuuaua

SEQ ID NO: 1768668 - RNA, 14 nt, Human
auaugcacuuauaa

SEQ ID NO: 1768669 - RNA, 17 nt, Human
auaguaaugaguuuaaa

SEQ ID NO: 1768670 - RNA, 23 nt, Human
auaguaaugaguuuaaaaaucaa

SEQ ID NO: 1768671 - RNA, 15 nt, Human
auagccuaggugaca

SEQ ID NO: 1768672 - RNA, 17 nt, Human
auagccuaggugacaga

SEQ ID NO: 1768673 - RNA, 19 nt, Human
auagccgauaucagaauuu

SEQ ID NO: 1768674 - RNA, 13 nt, Human
auaguaauuugua

SEQ ID NO: 1768675 - RNA, 14 nt, Human
auaguaauuuguaa

SEQ ID NO: 1768676 - RNA, 16 nt, Human
auaguaauuuguaaag

SEQ ID NO: 1768677 - RNA, 17 nt, Human
auaguaauuuguaaagu

SEQ ID NO: 1768678 - RNA, 19 nt, Human
auaguaauuuguaaaguug

SEQ ID NO: 1768679 - RNA, 17 nt, Human
auauaaucuuucaaacc

SEQ ID NO: 1768680 - RNA, 18 nt, Human
auagcaccccuacucaca

SEQ ID NO: 1768681 - RNA, 21 nt, Human
auacuuguggacuaaaagaua

SEQ ID NO: 1768682 - RNA, 20 nt, Human
auacuuguggacuaaaagau

SEQ ID NO: 1768683 - RNA, 14 nt, Human
auacuuguggacua

SEQ ID NO: 1768684 - RNA, 13 nt, Human
auacuuguggacu

SEQ ID NO: 1768685 - RNA, 12 nt, Human
auacuuuacaug

SEQ ID NO: 1768686 - RNA, 23 nt, Human
auacuuuagaaguagaauugaca

SEQ ID NO: 1768687 - RNA, 12 nt, Human
aguuugaaauuc

SEQ ID NO: 1768688 - RNA, 13 nt, Human
aguuugaaauucu

SEQ ID NO: 1768689 - RNA, 14 nt, Human
aguuugaaauucug

SEQ ID NO: 1768690 - RNA, 15 nt, Human
aguuugaaauucuga

SEQ ID NO: 1768691 - RNA, 17 nt, Human
aguuugaaauucugaau

SEQ ID NO: 1768692 - RNA, 18 nt, Human
aguuugaaauucugaauu

SEQ ID NO: 1768693 - RNA, 19 nt, Human
aguuugaaauucugaauuu

SEQ ID NO: 1768694 - RNA, 20 nt, Human
aguuugaaauucugaauuug

SEQ ID NO: 1768695 - RNA, 22 nt, Human
aguuugaaauucugaauuugca

SEQ ID NO: 1768696 - RNA, 23 nt, Human
aguuugaaauucugaauuugcaa

SEQ ID NO: 1768697 - RNA, 15 nt, Human
aguuugaauguuaaa

SEQ ID NO: 1768698 - RNA, 14 nt, Human
aguuugaauguuaa

SEQ ID NO: 1768699 - RNA, 12 nt, Human
aguuugaauguu

SEQ ID NO: 1768700 - RNA, 21 nt, Human
aguuugaauguuaaauaaauu

SEQ ID NO: 1768701 - RNA, 16 nt, Human
aguuugaauguuaaau

SEQ ID NO: 1768702 - RNA, 14 nt, Human
aguuugauuauuca

SEQ ID NO: 1768703 - RNA, 17 nt, Human
aguuugauuauucagug

SEQ ID NO: 1768704 - RNA, 18 nt, Human
aguuugauuauucagugu

SEQ ID NO: 1768705 - RNA, 23 nt, Human
aguuugauuauucagugucacug

SEQ ID NO: 1768706 - RNA, 14 nt, Human
auaacaauuccucu

SEQ ID NO: 1768707 - RNA, 15 nt, Human
auaacaauuccucua

SEQ ID NO: 1768708 - RNA, 11 nt, Human
auaacacacau

SEQ ID NO: 1768709 - RNA, 14 nt, Human
auaacaaugaaagu

SEQ ID NO: 1768710 - RNA, 19 nt, Human
auaaauuguauauucacuu

SEQ ID NO: 1768711 - RNA, 18 nt, Human
auaaauuguauauucacu

SEQ ID NO: 1768712 - RNA, 17 nt, Human
auaaauuguauauucac

SEQ ID NO: 1768713 - RNA, 16 nt, Human
auaaauuguauauuca

SEQ ID NO: 1768714 - RNA, 15 nt, Human
auacaauaucaucca

SEQ ID NO: 1768715 - RNA, 21 nt, Human
auaaggggucaaaauuugcug

SEQ ID NO: 1768716 - RNA, 18 nt, Human
aguucagguaacaggcag

SEQ ID NO: 1768717 - RNA, 11 nt, Human
aguucagaucu

SEQ ID NO: 1768718 - RNA, 13 nt, Human
aguucagaucuua

SEQ ID NO: 1768719 - RNA, 16 nt, Human
aguucagaucuuaaua

SEQ ID NO: 1768720 - RNA, 22 nt, Human
aguucagaucuuaauauaaauu

SEQ ID NO: 1768721 - RNA, 20 nt, Human
agugcucgcuguugcugaau

SEQ ID NO: 1768722 - RNA, 19 nt, Human
agugcucgcuguugcugaa

SEQ ID NO: 1768723 - RNA, 18 nt, Human
agugcucgcuguugcuga

SEQ ID NO: 1768724 - RNA, 17 nt, Human
agugcucgcuguugcug

SEQ ID NO: 1768725 - RNA, 16 nt, Human
agugcucgcuguugcu

SEQ ID NO: 1768726 - RNA, 15 nt, Human
agugcucgcuguugc

SEQ ID NO: 1768727 - RNA, 22 nt, Human
agugcuaagugugaacuggacc

SEQ ID NO: 1768728 - RNA, 19 nt, Human
agugcuaagugugaacugg

SEQ ID NO: 1768729 - RNA, 23 nt, Human
agugcucgcuguugcugaauagg

SEQ ID NO: 1768730 - RNA, 22 nt, Human
agugcucgcuguugcugaauag

SEQ ID NO: 1768731 - RNA, 11 nt, Human
agugcucugau

SEQ ID NO: 1768732 - RNA, 16 nt, Human
agugcucugaucccuc

SEQ ID NO: 1768733 - RNA, 17 nt, Human
agugcucugaucccucu

SEQ ID NO: 1768734 - RNA, 21 nt, Human
agugcucugaucccucuacag

SEQ ID NO: 1768735 - RNA, 18 nt, Human
agugcuaagugugaacug

SEQ ID NO: 1768736 - RNA, 17 nt, Human
agugcuaagugugaacu

SEQ ID NO: 1768737 - RNA, 16 nt, Human
agugcuaagugugaac

SEQ ID NO: 1768738 - RNA, 15 nt, Human
agugcuaagugugaa

SEQ ID NO: 1768739 - RNA, 14 nt, Human
agugcuaaguguga

SEQ ID NO: 1768740 - RNA, 14 nt, Human
agugauucuccugc

SEQ ID NO: 1768741 - RNA, 15 nt, Human
agugauucuccugcc

SEQ ID NO: 1768742 - RNA, 17 nt, Human
agugauucuccugccuc

SEQ ID NO: 1768743 - RNA, 14 nt, Human
agugauccucccac

SEQ ID NO: 1768744 - RNA, 15 nt, Human
agugauccucccacc

SEQ ID NO: 1768745 - RNA, 18 nt, Human
agugauccucccaccuca

SEQ ID NO: 1768746 - RNA, 19 nt, Human
agugauccucccaccucag

SEQ ID NO: 1768747 - RNA, 24 nt, Human
agugauccucccaccucagccucc

SEQ ID NO: 1768748 - RNA, 14 nt, Human
aguggccucuuugu

SEQ ID NO: 1768749 - RNA, 15 nt, Human
aguggccucuuuguc

SEQ ID NO: 1768750 - RNA, 21 nt, Human
aguggccucuuugucuaaaac

SEQ ID NO: 1768751 - RNA, 23 nt, Human
aguggccucuuugucuaaaacaa

SEQ ID NO: 1768752 - RNA, 15 nt, Human
agugggaugaaccag

SEQ ID NO: 1768753 - RNA, 13 nt, Human
agucaugugcauu

SEQ ID NO: 1768754 - RNA, 22 nt, Human
aguccucuuuucugagaggacu

SEQ ID NO: 1768755 - RNA, 20 nt, Human
aguccugaucagagccgugg

SEQ ID NO: 1768756 - RNA, 19 nt, Human
aguccucuuuucugagagg

SEQ ID NO: 1768757 - RNA, 21 nt, Human
agucuguguucaaaaauauau

SEQ ID NO: 1768758 - RNA, 20 nt, Human
agucugugccacguguuugu

SEQ ID NO: 1768759 - RNA, 23 nt, Human
aguccuuauguuaagcccuggca

SEQ ID NO: 1768760 - RNA, 18 nt, Human
aguaacccccacuggacu

SEQ ID NO: 1768761 - RNA, 20 nt, Human
aguaacccccacuggacuga

SEQ ID NO: 1768762 - RNA, 14 nt, Human
aguacuagaaacug

SEQ ID NO: 1768763 - RNA, 17 nt, Human
aguacuucuccacccug

SEQ ID NO: 1768764 - RNA, 12 nt, Human
aguacuucuuuu

SEQ ID NO: 1768765 - RNA, 23 nt, Human
aguacuguaagaauaauuuauag

SEQ ID NO: 1768766 - RNA, 13 nt, Human
aguacugugggca

SEQ ID NO: 1768767 - RNA, 17 nt, Human
aguacugugggcaauuu

SEQ ID NO: 1768768 - RNA, 18 nt, Human
aguacugugggcaauuua

SEQ ID NO: 1768769 - RNA, 19 nt, Human
aguacugugggcaauuuag

SEQ ID NO: 1768770 - RNA, 20 nt, Human
aguacugugggcaauuuaga

SEQ ID NO: 1768771 - RNA, 21 nt, Human
aguacugugggcaauuuagaa

SEQ ID NO: 1768772 - RNA, 22 nt, Human
aguacugugggcaauuuagaaa

SEQ ID NO: 1768773 - RNA, 23 nt, Human
aguacugugggcaauuuagaaaa

SEQ ID NO: 1768774 - RNA, 22 nt, Human
agucacacaguauuacuucugc

SEQ ID NO: 1768775 - RNA, 18 nt, Human
aguauuuuuccuuuuuaa

SEQ ID NO: 1768776 - RNA, 14 nt, Human
aguauuuuugcugc

SEQ ID NO: 1768777 - RNA, 16 nt, Human
aguauuuuugcugcuu

SEQ ID NO: 1768778 - RNA, 19 nt, Human
aguauuuuugcugcuucug

SEQ ID NO: 1768779 - RNA, 14 nt, Human
aguacuugucauau

SEQ ID NO: 1768780 - RNA, 15 nt, Human
aguacuugucauaug

SEQ ID NO: 1768781 - RNA, 17 nt, Human
aguacuugucauaugua

SEQ ID NO: 1768782 - RNA, 16 nt, Human
agagccguggucccug

SEQ ID NO: 1768783 - RNA, 21 nt, Human
agagccguggucccugaggau

SEQ ID NO: 1768784 - RNA, 13 nt, Human
agagcccaccuug

SEQ ID NO: 1768785 - RNA, 13 nt, Human
agagccagggucu

SEQ ID NO: 1768786 - RNA, 15 nt, Human
agagagaggcaaugg

SEQ ID NO: 1768787 - RNA, 16 nt, Human
agagaggccuuguccc

SEQ ID NO: 1768788 - RNA, 16 nt, Human
agagagaccacuuuuc

SEQ ID NO: 1768789 - RNA, 18 nt, Human
agacucugucucaaaaaa

SEQ ID NO: 1768790 - RNA, 15 nt, Human
agacugaggggucga

SEQ ID NO: 1768791 - RNA, 21 nt, Human
agaggacuuuucuuuguggcu

SEQ ID NO: 1768792 - RNA, 22 nt, Human
agaggacuuuucuuuguggcuu

SEQ ID NO: 1768793 - RNA, 23 nt, Human
agaggacuuuucuuuguggcuuc

SEQ ID NO: 1768794 - RNA, 12 nt, Human
agagggggccug

SEQ ID NO: 1768795 - RNA, 19 nt, Human
agagggggccugggacuuc

SEQ ID NO: 1768796 - RNA, 22 nt, Human
agagggggccugggacuuccau

SEQ ID NO: 1768797 - RNA, 23 nt, Human
agaggaaggggccagaggcucgu

SEQ ID NO: 1768798 - RNA, 15 nt, Human
agaggaaguucagau

SEQ ID NO: 1768799 - RNA, 16 nt, Human
agaggaaguucagauc

SEQ ID NO: 1768800 - RNA, 18 nt, Human
agaggaaguucagaucuu

SEQ ID NO: 1768801 - RNA, 16 nt, Human
agaggaaggggccaga

SEQ ID NO: 1768802 - RNA, 18 nt, Human
agaggaaggggccagagg

SEQ ID NO: 1768803 - RNA, 20 nt, Human
agaggaaggggccagaggcu

SEQ ID NO: 1768804 - RNA, 13 nt, Human
agaagacacugau

SEQ ID NO: 1768805 - RNA, 21 nt, Human
agaagacacugaugggcaacc

SEQ ID NO: 1768806 - RNA, 18 nt, Human
acuuuccucuuccugccu

SEQ ID NO: 1768807 - RNA, 18 nt, Human
agaagagacucuuugcau

SEQ ID NO: 1768808 - RNA, 18 nt, Human
agaaugaaagggcccaga

SEQ ID NO: 1768809 - RNA, 11 nt, Human
agacagagucu

SEQ ID NO: 1768810 - RNA, 19 nt, Human
agacagagucucacuguug

SEQ ID NO: 1768811 - RNA, 20 nt, Human
agacagagucucacuguugc

SEQ ID NO: 1768812 - RNA, 18 nt, Human
agacagccaaaggcuggc

SEQ ID NO: 1768813 - RNA, 19 nt, Human
agacagccaaaggcuggcg

SEQ ID NO: 1768814 - RNA, 23 nt, Human
agacagagucucacuguugccca

SEQ ID NO: 1768815 - RNA, 21 nt, Human
agacagagucucacuguugcc

SEQ ID NO: 1768816 - RNA, 13 nt, Human
agacgccugagga

SEQ ID NO: 1768817 - RNA, 15 nt, Human
agacgccugaggaac

SEQ ID NO: 1768818 - RNA, 18 nt, Human
agacccagcccucauccc

SEQ ID NO: 1768819 - RNA, 19 nt, Human
agacccagcccucaucccg

SEQ ID NO: 1768820 - RNA, 17 nt, Human
agacccagcccucaucc

SEQ ID NO: 1768821 - RNA, 17 nt, Human
agccccauucugccugc

SEQ ID NO: 1768822 - RNA, 18 nt, Human
agccccauucugccugcc

SEQ ID NO: 1768823 - RNA, 19 nt, Human
agccccauucugccugccc

SEQ ID NO: 1768824 - RNA, 20 nt, Human
agccccauucugccugccca

SEQ ID NO: 1768825 - RNA, 13 nt, Human
agcauccuggcac

SEQ ID NO: 1768826 - RNA, 23 nt, Human
agcaggaaaugaaaaugucuugu

SEQ ID NO: 1768827 - RNA, 15 nt, Human
agcaggaaaugaaaa

SEQ ID NO: 1768828 - RNA, 21 nt, Human
agcaggaaaugaaaaugucuu

SEQ ID NO: 1768829 - RNA, 16 nt, Human
agcccaccuuggcuca

SEQ ID NO: 1768830 - RNA, 14 nt, Human
agcccaccuuggcu

SEQ ID NO: 1768831 - RNA, 15 nt, Human
agcccacucugcucg

SEQ ID NO: 1768832 - RNA, 13 nt, Human
agcccacucugcu

SEQ ID NO: 1768833 - RNA, 14 nt, Human
agcccacucugcuc

SEQ ID NO: 1768834 - RNA, 16 nt, Human
agccagcagcagccca

SEQ ID NO: 1768835 - RNA, 18 nt, Human
agccagcagcagcccaag

SEQ ID NO: 1768836 - RNA, 21 nt, Human
agccagcagcagcccaagcuu

SEQ ID NO: 1768837 - RNA, 17 nt, Human
agccaaggauagaagcu

SEQ ID NO: 1768838 - RNA, 22 nt, Human
agccaaggauagaagcugcagu

SEQ ID NO: 1768839 - RNA, 16 nt, Human
agccaaagcuaggccu

SEQ ID NO: 1768840 - RNA, 18 nt, Human
agccaaagcuaggccugg

SEQ ID NO: 1768841 - RNA, 14 nt, Human
agcauccuggcacc

SEQ ID NO: 1768842 - RNA, 17 nt, Human
agcauccuggcacccgg

SEQ ID NO: 1768843 - RNA, 18 nt, Human
agcauccuggcacccggc

SEQ ID NO: 1768844 - RNA, 23 nt, Human
agauugcaacaggcugggcuuca

SEQ ID NO: 1768845 - RNA, 20 nt, Human
agauugcaacaggcugggcu

SEQ ID NO: 1768846 - RNA, 21 nt, Human
agauugcaacaggcugggcuu

SEQ ID NO: 1768847 - RNA, 13 nt, Human
agcaaacccagac

SEQ ID NO: 1768848 - RNA, 15 nt, Human
agcaaacccagacgg

SEQ ID NO: 1768849 - RNA, 19 nt, Human
agauggucacgcaccuggg

SEQ ID NO: 1768850 - RNA, 21 nt, Human
agauggucacgcaccugggug

SEQ ID NO: 1768851 - RNA, 21 nt, Human
agaugguguggguguccugcc

SEQ ID NO: 1768852 - RNA, 22 nt, Human
agaugguguggguguccugccu

SEQ ID NO: 1768853 - RNA, 12 nt, Human
aggcuacagggc

SEQ ID NO: 1768854 - RNA, 14 nt, Human
aggcuacagggcca

SEQ ID NO: 1768855 - RNA, 23 nt, Human
aggcuaccaacuuguauccaggc

SEQ ID NO: 1768856 - RNA, 20 nt, Human
aggcuguaucccaugagccu

SEQ ID NO: 1768857 - RNA, 21 nt, Human
aggcuguaucccaugagccuc

SEQ ID NO: 1768858 - RNA, 22 nt, Human
aggcuguaucccaugagccuca

SEQ ID NO: 1768859 - RNA, 19 nt, Human
aggcggugcacucacuccu

SEQ ID NO: 1768860 - RNA, 18 nt, Human
aggcgggacagugcugca

SEQ ID NO: 1768861 - RNA, 20 nt, Human
aggccggcgagcccugugga

SEQ ID NO: 1768862 - RNA, 23 nt, Human
aggcacugagauaccagcgagga

SEQ ID NO: 1768863 - RNA, 19 nt, Human
aggcagcagugugaggcca

SEQ ID NO: 1768864 - RNA, 20 nt, Human
aggcagcagugugaggccag

SEQ ID NO: 1768865 - RNA, 22 nt, Human
aggcagcagugugaggccaggg

SEQ ID NO: 1768866 - RNA, 23 nt, Human
aggcagcagugugaggccagggc

SEQ ID NO: 1768867 - RNA, 17 nt, Human
aggcauguucucugagg

SEQ ID NO: 1768868 - RNA, 18 nt, Human
aggcauguucucugagga

SEQ ID NO: 1768869 - RNA, 19 nt, Human
aggcauguucucugaggac

SEQ ID NO: 1768870 - RNA, 15 nt, Human
aggccauauuuccau

SEQ ID NO: 1768871 - RNA, 14 nt, Human
aggccagugagcca

SEQ ID NO: 1768872 - RNA, 13 nt, Human
aggccggcagccc

SEQ ID NO: 1768873 - RNA, 15 nt, Human
aggccggcagcccca

SEQ ID NO: 1768874 - RNA, 16 nt, Human
aggccggcagccccag

SEQ ID NO: 1768875 - RNA, 19 nt, Human
aggccggcagccccagccu

SEQ ID NO: 1768876 - RNA, 20 nt, Human
aggccggcagccccagccug

SEQ ID NO: 1768877 - RNA, 21 nt, Human
aggccggcagccccagccugc

SEQ ID NO: 1768878 - RNA, 22 nt, Human
aggccggcagccccagccugcu

SEQ ID NO: 1768879 - RNA, 23 nt, Human
aggccggcagccccagccugcua

SEQ ID NO: 1768880 - RNA, 19 nt, Human
aggccggcgagcccugugg

SEQ ID NO: 1768881 - RNA, 16 nt, Human
aggcccugcugaguca

SEQ ID NO: 1768882 - RNA, 13 nt, Human
agggccugcugga

SEQ ID NO: 1768883 - RNA, 14 nt, Human
agggccugcuggag

SEQ ID NO: 1768884 - RNA, 15 nt, Human
agggccugcuggagg

SEQ ID NO: 1768885 - RNA, 16 nt, Human
agggccugcuggaggc

SEQ ID NO: 1768886 - RNA, 17 nt, Human
agggccugcuggaggcc

SEQ ID NO: 1768887 - RNA, 18 nt, Human
agggccugcuggaggccu

SEQ ID NO: 1768888 - RNA, 19 nt, Human
agggccugcuggaggccuc

SEQ ID NO: 1768889 - RNA, 21 nt, Human
agggccugcuggaggccucag

SEQ ID NO: 1768890 - RNA, 22 nt, Human
agggccugcuggaggccucagg

SEQ ID NO: 1768891 - RNA, 23 nt, Human
agggccugcuggaggccucaggu

SEQ ID NO: 1768892 - RNA, 16 nt, Human
aggggccccccugccc

SEQ ID NO: 1768893 - RNA, 12 nt, Human
agggccugcugg

SEQ ID NO: 1768894 - RNA, 18 nt, Human
aggggccccccugcccug

SEQ ID NO: 1768895 - RNA, 20 nt, Human
aggggccccccugcccugug

SEQ ID NO: 1768896 - RNA, 21 nt, Human
aggggccccccugcccugugg

SEQ ID NO: 1768897 - RNA, 22 nt, Human
aggggccccccugcccuguggg

SEQ ID NO: 1768898 - RNA, 15 nt, Human
agggucagaaacagg

SEQ ID NO: 1768899 - RNA, 19 nt, Human
agggucagacgccugagga

SEQ ID NO: 1768900 - RNA, 19 nt, Human
agggucagaaacaggaccg

SEQ ID NO: 1768901 - RNA, 23 nt, Human
agggccugcaggaccugccugua

SEQ ID NO: 1768902 - RNA, 20 nt, Human
agggccugcaggaccugccu

SEQ ID NO: 1768903 - RNA, 22 nt, Human
agggccugcaggaccugccugu

SEQ ID NO: 1768904 - RNA, 22 nt, Human
agggccugagccuggccagccu

SEQ ID NO: 1768905 - RNA, 17 nt, Human
agggcaagcuccgcagg

SEQ ID NO: 1768906 - RNA, 19 nt, Human
agggcaagcuccgcaggac

SEQ ID NO: 1768907 - RNA, 20 nt, Human
agggcaagcuccgcaggacu

SEQ ID NO: 1768908 - RNA, 21 nt, Human
agggcaagcuccgcaggacuu

SEQ ID NO: 1768909 - RNA, 20 nt, Human
agggccugagccuggccagc

SEQ ID NO: 1768910 - RNA, 21 nt, Human
agggauguuauuauccuuggg

SEQ ID NO: 1768911 - RNA, 15 nt, Human
agggaucccucaucu

SEQ ID NO: 1768912 - RNA, 16 nt, Human
agggaucccucaucug

SEQ ID NO: 1768913 - RNA, 19 nt, Human
agggaucccucaucugucc

SEQ ID NO: 1768914 - RNA, 22 nt, Human
agggaucccucaucugucccuc

SEQ ID NO: 1768915 - RNA, 20 nt, Human
agggucucacuauguugccc

SEQ ID NO: 1768916 - RNA, 22 nt, Human
aggguuuugccauguuggccag

SEQ ID NO: 1768917 - RNA, 23 nt, Human
aggguuuugccauguuggccagg

SEQ ID NO: 1768918 - RNA, 16 nt, Human
agguaacaggcagaua

SEQ ID NO: 1768919 - RNA, 13 nt, Human
agguaacaggcag

SEQ ID NO: 1768920 - RNA, 14 nt, Human
agguaacaggcaga

SEQ ID NO: 1768921 - RNA, 17 nt, Human
agguccuccccucucuu

SEQ ID NO: 1768922 - RNA, 18 nt, Human
agguccuccccucucuug

SEQ ID NO: 1768923 - RNA, 20 nt, Human
aggucucauagguugagcaa

SEQ ID NO: 1768924 - RNA, 22 nt, Human
agcugguuuuuagcggagacgg

SEQ ID NO: 1768925 - RNA, 18 nt, Human
agcuggucccacucaguc

SEQ ID NO: 1768926 - RNA, 19 nt, Human
agcuggucccacucagucc

SEQ ID NO: 1768927 - RNA, 13 nt, Human
agcugcugacagu

SEQ ID NO: 1768928 - RNA, 14 nt, Human
agcugcugacagug

SEQ ID NO: 1768929 - RNA, 16 nt, Human
agcuggucccacucag

SEQ ID NO: 1768930 - RNA, 17 nt, Human
agcuggucccacucagu

SEQ ID NO: 1768931 - RNA, 21 nt, Human
agcugcgguccacccaggagc

SEQ ID NO: 1768932 - RNA, 12 nt, Human
agcugcugacag

SEQ ID NO: 1768933 - RNA, 19 nt, Human
agcugcgguccacccagga

SEQ ID NO: 1768934 - RNA, 20 nt, Human
agcugcgguccacccaggag

SEQ ID NO: 1768935 - RNA, 13 nt, Human
agcugcgguccac

SEQ ID NO: 1768936 - RNA, 16 nt, Human
agcugcgguccaccca

SEQ ID NO: 1768937 - RNA, 17 nt, Human
agcugcgguccacccag

SEQ ID NO: 1768938 - RNA, 18 nt, Human
agcugcgguccacccagg

SEQ ID NO: 1768939 - RNA, 15 nt, Human
agcugaggcagcagu

SEQ ID NO: 1768940 - RNA, 16 nt, Human
agcugaggcagcagug

SEQ ID NO: 1768941 - RNA, 17 nt, Human
agcugaggcagcagugu

SEQ ID NO: 1768942 - RNA, 13 nt, Human
agcuaauuuacug

SEQ ID NO: 1768943 - RNA, 13 nt, Human
agcgagcccuggu

SEQ ID NO: 1768944 - RNA, 19 nt, Human
agcgagcccugguggcagu

SEQ ID NO: 1768945 - RNA, 12 nt, Human
agcgacuaaacu

SEQ ID NO: 1768946 - RNA, 20 nt, Human
agcgaggagaugcuccuugg

SEQ ID NO: 1768947 - RNA, 15 nt, Human
agcgaggaggcucca

SEQ ID NO: 1768948 - RNA, 19 nt, Human
agcgaggaggcuccagagg

SEQ ID NO: 1768949 - RNA, 19 nt, Human
agcucaccagccccagugc

SEQ ID NO: 1768950 - RNA, 20 nt, Human
agcucaccagccccagugcc

SEQ ID NO: 1768951 - RNA, 18 nt, Human
agcguuuuguugagcaug

SEQ ID NO: 1768952 - RNA, 17 nt, Human
agcuaaaccaaggacug

SEQ ID NO: 1768953 - RNA, 18 nt, Human
agcuaaaccaaggacuga

SEQ ID NO: 1768954 - RNA, 19 nt, Human
agcuaaaccaaggacugag

SEQ ID NO: 1768955 - RNA, 16 nt, Human
agcucaccagccccag

SEQ ID NO: 1768956 - RNA, 19 nt, Human
agcucaaggaaaggccuga

SEQ ID NO: 1768957 - RNA, 23 nt, Human
agcucaacuagugggguuuccug

SEQ ID NO: 1768958 - RNA, 20 nt, Human
aggaaccgugguaugucugc

SEQ ID NO: 1768959 - RNA, 22 nt, Human
aggaaccgugguaugucugcca

SEQ ID NO: 1768960 - RNA, 23 nt, Human
aggaaccgugguaugucugccau

SEQ ID NO: 1768961 - RNA, 19 nt, Human
aggaacccuuacaguagga

SEQ ID NO: 1768962 - RNA, 16 nt, Human
aggaaccucgaguacu

SEQ ID NO: 1768963 - RNA, 17 nt, Human
aggaaccucgaguacug

SEQ ID NO: 1768964 - RNA, 18 nt, Human
aggaaccucgaguacugu

SEQ ID NO: 1768965 - RNA, 20 nt, Human
aggaaccucgaguacugugg

SEQ ID NO: 1768966 - RNA, 14 nt, Human
aggaaguucagauc

SEQ ID NO: 1768967 - RNA, 16 nt, Human
aggaaggggccagagg

SEQ ID NO: 1768968 - RNA, 18 nt, Human
aggaaggggccagaggcu

SEQ ID NO: 1768969 - RNA, 20 nt, Human
aggaaggggccagaggcucg

SEQ ID NO: 1768970 - RNA, 14 nt, Human
aggaaguaggaagu

SEQ ID NO: 1768971 - RNA, 15 nt, Human
aggaaguaggaagua

SEQ ID NO: 1768972 - RNA, 18 nt, Human
aggaagucaaagcaagga

SEQ ID NO: 1768973 - RNA, 19 nt, Human
agcuucauuuccugugucu

SEQ ID NO: 1768974 - RNA, 18 nt, Human
agcuucauuuccuguguc

SEQ ID NO: 1768975 - RNA, 19 nt, Human
agcuucauggcagaaggca

SEQ ID NO: 1768976 - RNA, 16 nt, Human
agcuucauguggcuuc

SEQ ID NO: 1768977 - RNA, 20 nt, Human
agcuucauguggcuucccuu

SEQ ID NO: 1768978 - RNA, 18 nt, Human
agcuucacuguaaaauaa

SEQ ID NO: 1768979 - RNA, 13 nt, Human
aggaccugccugu

SEQ ID NO: 1768980 - RNA, 14 nt, Human
aggaccugccugua

SEQ ID NO: 1768981 - RNA, 19 nt, Human
aggaccagucaaccugggc

SEQ ID NO: 1768982 - RNA, 20 nt, Human
aggaccagucaaccugggca

SEQ ID NO: 1768983 - RNA, 12 nt, Human
aggacccaagca

SEQ ID NO: 1768984 - RNA, 17 nt, Human
aggaauauaugugugcc

SEQ ID NO: 1768985 - RNA, 22 nt, Human
aggaauaucaauauaauguuuu

SEQ ID NO: 1768986 - RNA, 19 nt, Human
aggaaucacguuagaggaa

SEQ ID NO: 1768987 - RNA, 17 nt, Human
aaacagcuaaugggaca

SEQ ID NO: 1768988 - RNA, 11 nt, Human
aaacagcugcc

SEQ ID NO: 1768989 - RNA, 12 nt, Human
aaacagcugccu

SEQ ID NO: 1768990 - RNA, 13 nt, Human
aaacagcugccuu

SEQ ID NO: 1768991 - RNA, 14 nt, Human
aaacagcugccuua

SEQ ID NO: 1768992 - RNA, 15 nt, Human
aaacagcugccuuag

SEQ ID NO: 1768993 - RNA, 17 nt, Human
aaacagcugccuuagcu

SEQ ID NO: 1768994 - RNA, 18 nt, Human
aaacagcugccuuagcuu

SEQ ID NO: 1768995 - RNA, 19 nt, Human
aaacagcugccuuagcuuc

SEQ ID NO: 1768996 - RNA, 21 nt, Human
aaacagcugccuuagcuucag

SEQ ID NO: 1768997 - RNA, 22 nt, Human
aaacagcugccuuagcuucagg

SEQ ID NO: 1768998 - RNA, 13 nt, Human
aaaauucugaauu

SEQ ID NO: 1768999 - RNA, 15 nt, Human
aaaauucugaauuuu

SEQ ID NO: 1769000 - RNA, 21 nt, Human
aaaauucugaauuuuggggau

SEQ ID NO: 1769001 - RNA, 15 nt, Human
aaaauucuaaaugua

SEQ ID NO: 1769002 - RNA, 21 nt, Human
aaaaucagccaauuauguuaa

SEQ ID NO: 1769003 - RNA, 20 nt, Human
aaaaucagccaauuauguua

SEQ ID NO: 1769004 - RNA, 19 nt, Human
aaaaucagccaauuauguu

SEQ ID NO: 1769005 - RNA, 18 nt, Human
aaaaucagccaauuaugu

SEQ ID NO: 1769006 - RNA, 17 nt, Human
aaaaucagccaauuaug

SEQ ID NO: 1769007 - RNA, 14 nt, Human
aaaaucagccaauu

SEQ ID NO: 1769008 - RNA, 15 nt, Human
aaaaucaauuaacca

SEQ ID NO: 1769009 - RNA, 12 nt, Human
aaaaucaacuuu

SEQ ID NO: 1769010 - RNA, 13 nt, Human
aaaaucaacuuuu

SEQ ID NO: 1769011 - RNA, 20 nt, Human
aaaaucaacuuuuuauugcc

SEQ ID NO: 1769012 - RNA, 21 nt, Human
aaaaucaacuuuuuauugccu

SEQ ID NO: 1769013 - RNA, 22 nt, Human
aaaaucaacuuuuuauugccuu

SEQ ID NO: 1769014 - RNA, 23 nt, Human
aaaaucaacuuuuuauugccuuc

SEQ ID NO: 1769015 - RNA, 23 nt, Human
aaaauuauaggaauaucaauaua

SEQ ID NO: 1769016 - RNA, 13 nt, Human
aaaauuauuugca

SEQ ID NO: 1769017 - RNA, 14 nt, Human
aaaauuauuugcau

SEQ ID NO: 1769018 - RNA, 21 nt, Human
aaagauacagaacucuuucaa

SEQ ID NO: 1769019 - RNA, 21 nt, Human
aaagauaauauuuuacauaca

SEQ ID NO: 1769020 - RNA, 13 nt, Human
aaagaaaauuccu

SEQ ID NO: 1769021 - RNA, 16 nt, Human
aaagaaaauuccuaua

SEQ ID NO: 1769022 - RNA, 17 nt, Human
aaacucuugaccucagg

SEQ ID NO: 1769023 - RNA, 23 nt, Human
aaagcauuugaaugcauuuuguu

SEQ ID NO: 1769024 - RNA, 22 nt, Human
aaagcauuugaaugcauuuugu

SEQ ID NO: 1769025 - RNA, 20 nt, Human
aaagcauuugaaugcauuuu

SEQ ID NO: 1769026 - RNA, 19 nt, Human
aaagcauuugaaugcauuu

SEQ ID NO: 1769027 - RNA, 17 nt, Human
aaagcauuugaaugcau

SEQ ID NO: 1769028 - RNA, 15 nt, Human
aaagccaaagcuagg

SEQ ID NO: 1769029 - RNA, 15 nt, Human
aaagcauuugaaugc

SEQ ID NO: 1769030 - RNA, 14 nt, Human
aaagcauuugaaug

SEQ ID NO: 1769031 - RNA, 13 nt, Human
aaagcauuugaau

SEQ ID NO: 1769032 - RNA, 17 nt, Human
aaaggccaaaccucugu

SEQ ID NO: 1769033 - RNA, 14 nt, Human
aaaggccaaaccuc

SEQ ID NO: 1769034 - RNA, 15 nt, Human
aaaggccaaaccucu

SEQ ID NO: 1769035 - RNA, 16 nt, Human
aaaggcaguauuuugu

SEQ ID NO: 1769036 - RNA, 18 nt, Human
aaaggcaguauuuugugu

SEQ ID NO: 1769037 - RNA, 19 nt, Human
aaaggcaguauuuuguguc

SEQ ID NO: 1769038 - RNA, 16 nt, Human
aaauaaacacuacaga

SEQ ID NO: 1769039 - RNA, 13 nt, Human
aaauaaauuguau

SEQ ID NO: 1769040 - RNA, 19 nt, Human
aaauaaauuguauauucac

SEQ ID NO: 1769041 - RNA, 18 nt, Human
aaauaaauuguauauuca

SEQ ID NO: 1769042 - RNA, 15 nt, Human
aaauaaauuguauau

SEQ ID NO: 1769043 - RNA, 14 nt, Human
aaauaaauuguaua

SEQ ID NO: 1769044 - RNA, 22 nt, Human
aaauaaauuguauauucacuuu

SEQ ID NO: 1769045 - RNA, 21 nt, Human
aaauaaauuguauauucacuu

SEQ ID NO: 1769046 - RNA, 20 nt, Human
aaauaaauuguauauucacu

SEQ ID NO: 1769047 - RNA, 23 nt, Human
aaagugcagcuccguuuggcagu

SEQ ID NO: 1769048 - RNA, 14 nt, Human
aacgcuccuuugug

SEQ ID NO: 1769049 - RNA, 21 nt, Human
aacugaaggcuaaaaagcaac

SEQ ID NO: 1769050 - RNA, 15 nt, Human
aacgaaccuuggccu

SEQ ID NO: 1769051 - RNA, 18 nt, Human
aacgaaccuuggccuggg

SEQ ID NO: 1769052 - RNA, 21 nt, Human
aacgaaccuuggccugggccg

SEQ ID NO: 1769053 - RNA, 22 nt, Human
aacauccuaucaacaacaaggu

SEQ ID NO: 1769054 - RNA, 22 nt, Human
aacaggaaaggcucgaaauaca

SEQ ID NO: 1769055 - RNA, 12 nt, Human
aacaggaccggg

SEQ ID NO: 1769056 - RNA, 17 nt, Human
aacaggaccggguggaa

SEQ ID NO: 1769057 - RNA, 16 nt, Human
aacagcuaaugggaca

SEQ ID NO: 1769058 - RNA, 16 nt, Human
aacccuucaucuuccu

SEQ ID NO: 1769059 - RNA, 19 nt, Human
aacccuucaucuuccugug

SEQ ID NO: 1769060 - RNA, 22 nt, Human
aacccuucaucuuccugugucc

SEQ ID NO: 1769061 - RNA, 12 nt, Human
aacaaauaugca

SEQ ID NO: 1769062 - RNA, 13 nt, Human
aacaaauaugcaa

SEQ ID NO: 1769063 - RNA, 11 nt, Human
aaaucugccug

SEQ ID NO: 1769064 - RNA, 13 nt, Human
aaaucugccuggg

SEQ ID NO: 1769065 - RNA, 15 nt, Human
aaaucugccuggguu

SEQ ID NO: 1769066 - RNA, 18 nt, Human
aauaaaauuuuuuuucau

SEQ ID NO: 1769067 - RNA, 19 nt, Human
aauaaaauuuuuuuucaug

SEQ ID NO: 1769068 - RNA, 22 nt, Human
aauaaaauuuuuuuucauguuu

SEQ ID NO: 1769069 - RNA, 18 nt, Human
aauaaagccuucaaacuc

SEQ ID NO: 1769070 - RNA, 19 nt, Human
aaguucuguacucaaaugu

SEQ ID NO: 1769071 - RNA, 13 nt, Human
aaguaggaaguaa

SEQ ID NO: 1769072 - RNA, 17 nt, Human
aauaauaugcauuguca

SEQ ID NO: 1769073 - RNA, 11 nt, Human
aauaauaugca

SEQ ID NO: 1769074 - RNA, 12 nt, Human
aauaauaugcau

SEQ ID NO: 1769075 - RNA, 13 nt, Human
aauaauaugcauu

SEQ ID NO: 1769076 - RNA, 15 nt, Human
aauaauaugcauugu

SEQ ID NO: 1769077 - RNA, 16 nt, Human
aauaauauacuugugg

SEQ ID NO: 1769078 - RNA, 13 nt, Human
aauaauauacuug

SEQ ID NO: 1769079 - RNA, 12 nt, Human
aauaauauacuu

SEQ ID NO: 1769080 - RNA, 23 nt, Human
aauauacuuguggacuaaaagau

SEQ ID NO: 1769081 - RNA, 22 nt, Human
aauauacuuguggacuaaaaga

SEQ ID NO: 1769082 - RNA, 17 nt, Human
aauauacuuguggacua

SEQ ID NO: 1769083 - RNA, 17 nt, Human
aauauaaauucacuuuc

SEQ ID NO: 1769084 - RNA, 17 nt, Human
aauaugcugcaacaaaa

SEQ ID NO: 1769085 - RNA, 18 nt, Human
aauaugcugcaacaaaau

SEQ ID NO: 1769086 - RNA, 21 nt, Human
aauaugcugcaacaaaaugua

SEQ ID NO: 1769087 - RNA, 13 nt, Human
aauacuugaacuu

SEQ ID NO: 1769088 - RNA, 14 nt, Human
aauacuugaacuug

SEQ ID NO: 1769089 - RNA, 18 nt, Human
aauacuugaacuugccuc

SEQ ID NO: 1769090 - RNA, 19 nt, Human
aauacuugaacuugccucu

SEQ ID NO: 1769091 - RNA, 20 nt, Human
aauacuugaacuugccucuu

SEQ ID NO: 1769092 - RNA, 15 nt, Human
aauacuugaacuugu

SEQ ID NO: 1769093 - RNA, 16 nt, Human
aaugcccuuaaaucau

SEQ ID NO: 1769094 - RNA, 18 nt, Human
aaugccgcgaugggucag

SEQ ID NO: 1769095 - RNA, 23 nt, Human
aaugccgcgaugggucagguagg

SEQ ID NO: 1769096 - RNA, 14 nt, Human
aaugguccaggaga

SEQ ID NO: 1769097 - RNA, 19 nt, Human
aaugguccaggagaaggcc

SEQ ID NO: 1769098 - RNA, 13 nt, Human
aaugggacacuaa

SEQ ID NO: 1769099 - RNA, 16 nt, Human
aaugcucauaacggau

SEQ ID NO: 1769100 - RNA, 15 nt, Human
aaugauagcuacugu

SEQ ID NO: 1769101 - RNA, 22 nt, Human
aauccaagauauuuuaaaaucu

SEQ ID NO: 1769102 - RNA, 15 nt, Human
aagcgauucuucugc

SEQ ID NO: 1769103 - RNA, 14 nt, Human
aagcgauucuucug

SEQ ID NO: 1769104 - RNA, 16 nt, Human
aagcgauucuucugcu

SEQ ID NO: 1769105 - RNA, 17 nt, Human
aagcgauucuucugcuu

SEQ ID NO: 1769106 - RNA, 16 nt, Human
aagcugcugacagugu

SEQ ID NO: 1769107 - RNA, 21 nt, Human
aagcugcuuuaaaaaaauaca

SEQ ID NO: 1769108 - RNA, 19 nt, Human
aaggaaucacguuagagga

SEQ ID NO: 1769109 - RNA, 18 nt, Human
aaggaauuauagaccucu

SEQ ID NO: 1769110 - RNA, 21 nt, Human
aagcgugagccacugcaccgg

SEQ ID NO: 1769111 - RNA, 17 nt, Human
aagcgugagccacugca

SEQ ID NO: 1769112 - RNA, 20 nt, Human
aagcgugagccacugcaccg

SEQ ID NO: 1769113 - RNA, 14 nt, Human
aagcugcugacagu

SEQ ID NO: 1769114 - RNA, 15 nt, Human
aaggcaaacccauca

SEQ ID NO: 1769115 - RNA, 20 nt, Human
aaggcaaacccaucaacaaa

SEQ ID NO: 1769116 - RNA, 21 nt, Human
aaggcaaaggguccagaagga

SEQ ID NO: 1769117 - RNA, 14 nt, Human
aaguagccucuccu

SEQ ID NO: 1769118 - RNA, 22 nt, Human
aagguguucauucacuugcauu

SEQ ID NO: 1769119 - RNA, 17 nt, Human
aagguucacuaaagcag

SEQ ID NO: 1769120 - RNA, 23 nt, Human
aagguuccgcuuggagcagaggg

SEQ ID NO: 1769121 - RNA, 22 nt, Human
aagguuccaaucagaucuuuau

SEQ ID NO: 1769122 - RNA, 20 nt, Human
aagggacuuggaagcuccgc

SEQ ID NO: 1769123 - RNA, 13 nt, Human
aagggcagaauga

SEQ ID NO: 1769124 - RNA, 22 nt, Human
aagggauguuauuauccuuggg

SEQ ID NO: 1769125 - RNA, 20 nt, Human
aagagaaugaugcucaaaau

SEQ ID NO: 1769126 - RNA, 17 nt, Human
aagagagaacaggacua

SEQ ID NO: 1769127 - RNA, 16 nt, Human
aacuguuucaaagcca

SEQ ID NO: 1769128 - RNA, 23 nt, Human
aagacagugaaagaaaauaacaa

SEQ ID NO: 1769129 - RNA, 12 nt, Human
aagauuccaaaa

SEQ ID NO: 1769130 - RNA, 17 nt, Human
aagauuccaaaaagcac

SEQ ID NO: 1769131 - RNA, 20 nt, Human
aagauuccaaaaagcacaua

SEQ ID NO: 1769132 - RNA, 16 nt, Human
aagauucuuucccaau

SEQ ID NO: 1769133 - RNA, 13 nt, Human
aagauucuuuccc

SEQ ID NO: 1769134 - RNA, 14 nt, Human
accaugaaacaaag

SEQ ID NO: 1769135 - RNA, 15 nt, Human
accaugaaacaaagc

SEQ ID NO: 1769136 - RNA, 15 nt, Human
acccaucaacaaaaa

SEQ ID NO: 1769137 - RNA, 15 nt, Human
acccacccuccuuuc

SEQ ID NO: 1769138 - RNA, 14 nt, Human
acccauacaccccc

SEQ ID NO: 1769139 - RNA, 14 nt, Human
acauuuauucugcu

SEQ ID NO: 1769140 - RNA, 16 nt, Human
accagccccagugccc

SEQ ID NO: 1769141 - RNA, 17 nt, Human
accagccccagugccca

SEQ ID NO: 1769142 - RNA, 18 nt, Human
accagccccagugcccac

SEQ ID NO: 1769143 - RNA, 19 nt, Human
accagccccagugcccaca

SEQ ID NO: 1769144 - RNA, 20 nt, Human
accagccccagugcccacag

SEQ ID NO: 1769145 - RNA, 15 nt, Human
accaaggacugagca

SEQ ID NO: 1769146 - RNA, 23 nt, Human
acauuucucuaagagaacaaugu

SEQ ID NO: 1769147 - RNA, 14 nt, Human
accaagaaagcagg

SEQ ID NO: 1769148 - RNA, 20 nt, Human
acaggcaagcaccuccugcc

SEQ ID NO: 1769149 - RNA, 23 nt, Human
acaggcaagcaccuccugccucg

SEQ ID NO: 1769150 - RNA, 16 nt, Human
acagcucuguccuggg

SEQ ID NO: 1769151 - RNA, 17 nt, Human
acagcucuguccuggga

SEQ ID NO: 1769152 - RNA, 16 nt, Human
acagcuccuucugucc

SEQ ID NO: 1769153 - RNA, 18 nt, Human
acagcuccuucuguccua

SEQ ID NO: 1769154 - RNA, 23 nt, Human
acagcuccuucuguccuacucug

SEQ ID NO: 1769155 - RNA, 14 nt, Human
acagcucuguccug

SEQ ID NO: 1769156 - RNA, 22 nt, Human
acagugagucgaggacagggag

SEQ ID NO: 1769157 - RNA, 19 nt, Human
acaggugugaaccaccaca

SEQ ID NO: 1769158 - RNA, 22 nt, Human
acaggugugagucaccaagccc

SEQ ID NO: 1769159 - RNA, 23 nt, Human
acaggugugagucaccaagccca

SEQ ID NO: 1769160 - RNA, 14 nt, Human
acaggcaaugcugg

SEQ ID NO: 1769161 - RNA, 20 nt, Human
acagggcccuguugaauuuu

SEQ ID NO: 1769162 - RNA, 15 nt, Human
acaguggggaagagu

SEQ ID NO: 1769163 - RNA, 23 nt, Human
acagugagucgaggacagggagg

SEQ ID NO: 1769164 - RNA, 21 nt, Human
acauccuccacguucugcuca

SEQ ID NO: 1769165 - RNA, 14 nt, Human
acacugggaggcca

SEQ ID NO: 1769166 - RNA, 15 nt, Human
acacugggaggccag

SEQ ID NO: 1769167 - RNA, 20 nt, Human
acacugggaggccagugagc

SEQ ID NO: 1769168 - RNA, 16 nt, Human
acagaaccuuguuauu

SEQ ID NO: 1769169 - RNA, 18 nt, Human
acagaacucuuucaaaac

SEQ ID NO: 1769170 - RNA, 20 nt, Human
acagaacucuuucaaaaccu

SEQ ID NO: 1769171 - RNA, 23 nt, Human
acagaaccuuguuauuucucaga

SEQ ID NO: 1769172 - RNA, 17 nt, Human
acagaaccuuguuauuu

SEQ ID NO: 1769173 - RNA, 19 nt, Human
acagaaccuuguuauuucu

SEQ ID NO: 1769174 - RNA, 22 nt, Human
acagaaccuuguuauuucucag

SEQ ID NO: 1769175 - RNA, 13 nt, Human
acagaggcagccc

SEQ ID NO: 1769176 - RNA, 16 nt, Human
acagaggaugagcucu

SEQ ID NO: 1769177 - RNA, 17 nt, Human
acagaggccaugggccu

SEQ ID NO: 1769178 - RNA, 20 nt, Human
acagaggaugagcucuaccc

SEQ ID NO: 1769179 - RNA, 21 nt, Human
acagaggccaugggccuccug

SEQ ID NO: 1769180 - RNA, 23 nt, Human
acagaggccaugggccuccugug

SEQ ID NO: 1769181 - RNA, 12 nt, Human
acagacacacac

SEQ ID NO: 1769182 - RNA, 13 nt, Human
acagacacacaca

SEQ ID NO: 1769183 - RNA, 14 nt, Human
acagacacacacac

SEQ ID NO: 1769184 - RNA, 22 nt, Human
acagaagcucuuacucuuuccu

SEQ ID NO: 1769185 - RNA, 19 nt, Human
acacaaaaguuucucuuuu

SEQ ID NO: 1769186 - RNA, 22 nt, Human
acacagcucuucuccaggcugu

SEQ ID NO: 1769187 - RNA, 20 nt, Human
acacagcucuucuccaggcu

SEQ ID NO: 1769188 - RNA, 21 nt, Human
acacagcucuucuccaggcug

SEQ ID NO: 1769189 - RNA, 16 nt, Human
acaaggauugcuacug

SEQ ID NO: 1769190 - RNA, 12 nt, Human
acaaagaaaauu

SEQ ID NO: 1769191 - RNA, 12 nt, Human
acaauuguuugu

SEQ ID NO: 1769192 - RNA, 15 nt, Human
acaauucuacauugu

SEQ ID NO: 1769193 - RNA, 23 nt, Human
acaauuccucuacuaacaaucag

SEQ ID NO: 1769194 - RNA, 22 nt, Human
acaauuccucuacuaacaauca

SEQ ID NO: 1769195 - RNA, 12 nt, Human
aauuguauauuc

SEQ ID NO: 1769196 - RNA, 14 nt, Human
aauuguaacuguuc

SEQ ID NO: 1769197 - RNA, 16 nt, Human
aauuguaacuguucuu

SEQ ID NO: 1769198 - RNA, 17 nt, Human
aauuguauauucacuuu

SEQ ID NO: 1769199 - RNA, 16 nt, Human
aauuguauauucacuu

SEQ ID NO: 1769200 - RNA, 14 nt, Human
aauuguauauucac

SEQ ID NO: 1769201 - RNA, 13 nt, Human
aauuguauauuca

SEQ ID NO: 1769202 - RNA, 16 nt, Human
aaugucacaggcaggu

SEQ ID NO: 1769203 - RNA, 19 nt, Human
aaugucacaggcaggucca

SEQ ID NO: 1769204 - RNA, 18 nt, Human
aauugggucauagaaauu

SEQ ID NO: 1769205 - RNA, 16 nt, Human
aauuuauuuccuaguu

SEQ ID NO: 1769206 - RNA, 22 nt, Human
aauuuauuuccuaguucuguag

SEQ ID NO: 1769207 - RNA, 19 nt, Human
aauuuauuuccuaguucug

SEQ ID NO: 1769208 - RNA, 16 nt, Human
aauuuauuuuauaaga

SEQ ID NO: 1769209 - RNA, 17 nt, Human
aauuuauuuuauaagaa

SEQ ID NO: 1769210 - RNA, 18 nt, Human
aauuuauuuuauaagaaa

SEQ ID NO: 1769211 - RNA, 21 nt, Human
aauuuauuuuauaagaaaaac

SEQ ID NO: 1769212 - RNA, 22 nt, Human
aauuuauuuuauaagaaaaacu

SEQ ID NO: 1769213 - RNA, 23 nt, Human
aauuuauuuuauaagaaaaacuu

SEQ ID NO: 1769214 - RNA, 20 nt, Human
aauugugccgagaaaagcau

SEQ ID NO: 1769215 - RNA, 11 nt, Human
aauugucccuu

SEQ ID NO: 1769216 - RNA, 16 nt, Human
aauugucccuuaaaca

SEQ ID NO: 1769217 - RNA, 18 nt, Human
aauugucccuuaaacaaa

SEQ ID NO: 1769218 - RNA, 18 nt, Human
aauuuuggggauuuucaa

SEQ ID NO: 1769219 - RNA, 22 nt, Human
aauuuuggggauuuucaaaaga

SEQ ID NO: 1769220 - RNA, 16 nt, Human
acugcuuuuggucugu

SEQ ID NO: 1769221 - RNA, 20 nt, Human
acugcuuuuggucuguguga

SEQ ID NO: 1769222 - RNA, 15 nt, Human
acugcuuuuggucug

SEQ ID NO: 1769223 - RNA, 19 nt, Human
acucugucucaaaaaaaca

SEQ ID NO: 1769224 - RNA, 21 nt, Human
acucugugucagguggggcag

SEQ ID NO: 1769225 - RNA, 19 nt, Human
acucugugucagguggggc

SEQ ID NO: 1769226 - RNA, 23 nt, Human
acugacauuguuggccaaagcca

SEQ ID NO: 1769227 - RNA, 12 nt, Human
acugaugggcaa

SEQ ID NO: 1769228 - RNA, 22 nt, Human
acugaugggcaacccccagccu

SEQ ID NO: 1769229 - RNA, 20 nt, Human
acuucugccauauucuguug

SEQ ID NO: 1769230 - RNA, 22 nt, Human
acugcccggcacagaugcucca

SEQ ID NO: 1769231 - RNA, 14 nt, Human
acuggacaaagaau

SEQ ID NO: 1769232 - RNA, 15 nt, Human
acuggacccuguugc

SEQ ID NO: 1769233 - RNA, 13 nt, Human
acuggaccccagc

SEQ ID NO: 1769234 - RNA, 17 nt, Human
accugcccuaaacccug

SEQ ID NO: 1769235 - RNA, 15 nt, Human
accucaucuucuuca

SEQ ID NO: 1769236 - RNA, 12 nt, Human
accucagggcac

SEQ ID NO: 1769237 - RNA, 20 nt, Human
accgggcacucagaagacac

SEQ ID NO: 1769238 - RNA, 20 nt, Human
accgggccacagagaaagua

SEQ ID NO: 1769239 - RNA, 15 nt, Human
accgggccacagaga

SEQ ID NO: 1769240 - RNA, 19 nt, Human
accgggccacagagaaagu

SEQ ID NO: 1769241 - RNA, 16 nt, Human
accccaagaggaaguu

SEQ ID NO: 1769242 - RNA, 19 nt, Human
accccaagauuucagauau

SEQ ID NO: 1769243 - RNA, 17 nt, Human
acccuguuaccauuuug

SEQ ID NO: 1769244 - RNA, 12 nt, Human
acccuguugcua

SEQ ID NO: 1769245 - RNA, 15 nt, Human
acccuguuccuggag

SEQ ID NO: 1769246 - RNA, 18 nt, Human
acccuguuccuggagguc

SEQ ID NO: 1769247 - RNA, 15 nt, Human
acccuguugcuaagc

SEQ ID NO: 1769248 - RNA, 14 nt, Human
acccuguugcuaag

SEQ ID NO: 1769249 - RNA, 13 nt, Human
acccuuacaguag

SEQ ID NO: 1769250 - RNA, 19 nt, Human
acccuuacaguaggagccc

SEQ ID NO: 1769251 - RNA, 16 nt, Human
acuagggaucccucau

SEQ ID NO: 1769252 - RNA, 11 nt, Human
accugugugcu

SEQ ID NO: 1769253 - RNA, 13 nt, Human
accugugugcuug

SEQ ID NO: 1769254 - RNA, 19 nt, Human
acgcuggagugcagugagc

SEQ ID NO: 1769255 - RNA, 21 nt, Human
acgcagcaggaggccaggccg

SEQ ID NO: 1769256 - RNA, 14 nt, Human
acgcagcaggaggc

SEQ ID NO: 1769257 - RNA, 15 nt, Human
acggaauaguuggcu

SEQ ID NO: 1769258 - RNA, 23 nt, Human
acgucugacaggcaaugcuggcu

SEQ ID NO: 1769259 - RNA, 18 nt, Human
acggagccacuccucuga

SEQ ID NO: 1769260 - RNA, 19 nt, Human
acggagccacuccucugac

SEQ ID NO: 1769261 - RNA, 20 nt, Human
acggagccacuccucugacu

SEQ ID NO: 1769262 - RNA, 17 nt, Human
cacaguucaauucucau

SEQ ID NO: 1769263 - RNA, 23 nt, Human
cacaguucaaaauucuaaaugua

SEQ ID NO: 1769264 - RNA, 19 nt, Human
caagaggaaguucagaucu

SEQ ID NO: 1769265 - RNA, 20 nt, Human
caagaggaaguucagaucuu

SEQ ID NO: 1769266 - RNA, 18 nt, Human
caacgugcauugugcuuc

SEQ ID NO: 1769267 - RNA, 18 nt, Human
caacuuguauccaggccu

SEQ ID NO: 1769268 - RNA, 20 nt, Human
caacuuguauccaggccugg

SEQ ID NO: 1769269 - RNA, 23 nt, Human
caaagugcugggauuacaagcgu

SEQ ID NO: 1769270 - RNA, 17 nt, Human
caaaguguuuuguacca

SEQ ID NO: 1769271 - RNA, 19 nt, Human
caaaguguuuuguaccagu

SEQ ID NO: 1769272 - RNA, 23 nt, Human
caaaguguuuuguaccagugaau

SEQ ID NO: 1769273 - RNA, 14 nt, Human
caaaguucaacuug

SEQ ID NO: 1769274 - RNA, 13 nt, Human
caaagugcuggga

SEQ ID NO: 1769275 - RNA, 19 nt, Human
caaagugcugggauuacaa

SEQ ID NO: 1769276 - RNA, 23 nt, Human
caaauaaagagagaacaggacua

SEQ ID NO: 1769277 - RNA, 21 nt, Human
caacaggccauugugaaccaa

SEQ ID NO: 1769278 - RNA, 12 nt, Human
caacaggcuggg

SEQ ID NO: 1769279 - RNA, 13 nt, Human
caacaggcugggc

SEQ ID NO: 1769280 - RNA, 17 nt, Human
caaacucuugaccucag

SEQ ID NO: 1769281 - RNA, 19 nt, Human
caaacucuugaccucaggu

SEQ ID NO: 1769282 - RNA, 20 nt, Human
caaacucuugaccucaggug

SEQ ID NO: 1769283 - RNA, 23 nt, Human
caaaccucuguucaguguaaaua

SEQ ID NO: 1769284 - RNA, 15 nt, Human
caaaccuuaucucca

SEQ ID NO: 1769285 - RNA, 17 nt, Human
caaaccuuaucuccaca

SEQ ID NO: 1769286 - RNA, 21 nt, Human
caaaccuuaucuccacaaccu

SEQ ID NO: 1769287 - RNA, 21 nt, Human
caaacucuugaccucagguga

SEQ ID NO: 1769288 - RNA, 22 nt, Human
caaaauuugcugccaaaugcgu

SEQ ID NO: 1769289 - RNA, 21 nt, Human
caaaauuuauuuuauaagaaa

SEQ ID NO: 1769290 - RNA, 22 nt, Human
caaaauuuauuuuauaagaaaa

SEQ ID NO: 1769291 - RNA, 23 nt, Human
caaaauuuauuuuauaagaaaaa

SEQ ID NO: 1769292 - RNA, 14 nt, Human
caaacaaauaugca

SEQ ID NO: 1769293 - RNA, 15 nt, Human
caaacaaauaugcaa

SEQ ID NO: 1769294 - RNA, 17 nt, Human
caaacaaauaugcaaaa

SEQ ID NO: 1769295 - RNA, 16 nt, Human
caaaacuccugucuuu

SEQ ID NO: 1769296 - RNA, 14 nt, Human
caaaaguuucucuu

SEQ ID NO: 1769297 - RNA, 16 nt, Human
caaaaucauuuuaaug

SEQ ID NO: 1769298 - RNA, 20 nt, Human
cacagccgauucaccugagc

SEQ ID NO: 1769299 - RNA, 21 nt, Human
cacagccgauucaccugagca

SEQ ID NO: 1769300 - RNA, 19 nt, Human
cacagauguucccccaucu

SEQ ID NO: 1769301 - RNA, 13 nt, Human
cacagaugcucca

SEQ ID NO: 1769302 - RNA, 15 nt, Human
cacagaugcuccagg

SEQ ID NO: 1769303 - RNA, 16 nt, Human
cacagaugcuccaggg

SEQ ID NO: 1769304 - RNA, 18 nt, Human
cacagauagaccuuuuuu

SEQ ID NO: 1769305 - RNA, 19 nt, Human
cacagagaaaguacuucuc

SEQ ID NO: 1769306 - RNA, 20 nt, Human
cacagagaaaguacuucucc

SEQ ID NO: 1769307 - RNA, 21 nt, Human
cacagagaaaguacuucucca

SEQ ID NO: 1769308 - RNA, 14 nt, Human
cacacucccaaggu

SEQ ID NO: 1769309 - RNA, 21 nt, Human
cacacucccaagguuggagcc

SEQ ID NO: 1769310 - RNA, 23 nt, Human
cacacucccaagguuggagccca

SEQ ID NO: 1769311 - RNA, 17 nt, Human
cacacacgcgugcacac

SEQ ID NO: 1769312 - RNA, 20 nt, Human
cacaaaggcaaaggguccag

SEQ ID NO: 1769313 - RNA, 20 nt, Human
cacaauagccgauaucagaa

SEQ ID NO: 1769314 - RNA, 18 nt, Human
cacaaugcaguucugagc

SEQ ID NO: 1769315 - RNA, 15 nt, Human
cacacacacacacaa

SEQ ID NO: 1769316 - RNA, 22 nt, Human
cacaaaauaaccaauccuggac

SEQ ID NO: 1769317 - RNA, 21 nt, Human
caauuccguagccagcugcuc

SEQ ID NO: 1769318 - RNA, 20 nt, Human
caauuccguagccagcugcu

SEQ ID NO: 1769319 - RNA, 21 nt, Human
caagcuggucccacucagucc

SEQ ID NO: 1769320 - RNA, 15 nt, Human
caagcugcucugagc

SEQ ID NO: 1769321 - RNA, 16 nt, Human
caagcugcucugagcc

SEQ ID NO: 1769322 - RNA, 18 nt, Human
caagcugcucugagccac

SEQ ID NO: 1769323 - RNA, 21 nt, Human
caagcugcucugagccacagu

SEQ ID NO: 1769324 - RNA, 22 nt, Human
caagcugcucugagccacagug

SEQ ID NO: 1769325 - RNA, 15 nt, Human
caagcgauucuucug

SEQ ID NO: 1769326 - RNA, 17 nt, Human
caagcgauucuucugcu

SEQ ID NO: 1769327 - RNA, 18 nt, Human
caagcgauucuucugcuu

SEQ ID NO: 1769328 - RNA, 20 nt, Human
caaggaaaaaauaacaauga

SEQ ID NO: 1769329 - RNA, 22 nt, Human
caagcuggucccacucagucca

SEQ ID NO: 1769330 - RNA, 23 nt, Human
caagcuggucccacucaguccau

SEQ ID NO: 1769331 - RNA, 18 nt, Human
caaggaaaaaauaacaau

SEQ ID NO: 1769332 - RNA, 15 nt, Human
caagggaaaagucuc

SEQ ID NO: 1769333 - RNA, 16 nt, Human
caagggaaaagucucu

SEQ ID NO: 1769334 - RNA, 17 nt, Human
caauaaaguauuuaauu

SEQ ID NO: 1769335 - RNA, 16 nt, Human
caauaaaguauuuaau

SEQ ID NO: 1769336 - RNA, 16 nt, Human
caaggguuaaggccug

SEQ ID NO: 1769337 - RNA, 17 nt, Human
caaggguuaaggccuga

SEQ ID NO: 1769338 - RNA, 18 nt, Human
caaggguuaaggccugaa

SEQ ID NO: 1769339 - RNA, 22 nt, Human
caauaaaguauuuaauuagugc

SEQ ID NO: 1769340 - RNA, 20 nt, Human
caauaaaguauuuaauuagu

SEQ ID NO: 1769341 - RNA, 13 nt, Human
caauaaauugcua

SEQ ID NO: 1769342 - RNA, 15 nt, Human
caauaaauugcuaau

SEQ ID NO: 1769343 - RNA, 20 nt, Human
caauaaauugcuaauguugc

SEQ ID NO: 1769344 - RNA, 22 nt, Human
caauaaauugcuaauguugcug

SEQ ID NO: 1769345 - RNA, 14 nt, Human
caauagcaccccua

SEQ ID NO: 1769346 - RNA, 20 nt, Human
caauagcaccccuacucaca

SEQ ID NO: 1769347 - RNA, 18 nt, Human
cauaugcaguguucuaca

SEQ ID NO: 1769348 - RNA, 12 nt, Human
caucacacacac

SEQ ID NO: 1769349 - RNA, 11 nt, Human
caucacacaca

SEQ ID NO: 1769350 - RNA, 15 nt, Human
caucacaccugcccu

SEQ ID NO: 1769351 - RNA, 17 nt, Human
caucacaccugcccuaa

SEQ ID NO: 1769352 - RNA, 22 nt, Human
caucaagucuuucacauuuaaa

SEQ ID NO: 1769353 - RNA, 12 nt, Human
caucaagccacu

SEQ ID NO: 1769354 - RNA, 18 nt, Human
cauauuuucaccauuuga

SEQ ID NO: 1769355 - RNA, 22 nt, Human
cauaugacucacaugaugcaua

SEQ ID NO: 1769356 - RNA, 20 nt, Human
cauaugacucacaugaugca

SEQ ID NO: 1769357 - RNA, 23 nt, Human
cauauauauguuuuaagaggcag

SEQ ID NO: 1769358 - RNA, 22 nt, Human
cauauauauguuuuaagaggca

SEQ ID NO: 1769359 - RNA, 18 nt, Human
cauaguaugguggcuggg

SEQ ID NO: 1769360 - RNA, 19 nt, Human
cauaguaugguggcugggu

SEQ ID NO: 1769361 - RNA, 20 nt, Human
cauaguaugguggcuggguu

SEQ ID NO: 1769362 - RNA, 22 nt, Human
cauaguggcuuaaaacaacacu

SEQ ID NO: 1769363 - RNA, 22 nt, Human
cauaguuggggucauagauguu

SEQ ID NO: 1769364 - RNA, 20 nt, Human
cauauaaacaucacacacac

SEQ ID NO: 1769365 - RNA, 16 nt, Human
cauaguuuuucagucu

SEQ ID NO: 1769366 - RNA, 19 nt, Human
cauauaaacaucacacaca

SEQ ID NO: 1769367 - RNA, 23 nt, Human
caucccuaccgacccaggguucc

SEQ ID NO: 1769368 - RNA, 21 nt, Human
caucauucucugucucaucca

SEQ ID NO: 1769369 - RNA, 22 nt, Human
caucauucucugucucauccau

SEQ ID NO: 1769370 - RNA, 20 nt, Human
caucauuuuccauauccugg

SEQ ID NO: 1769371 - RNA, 22 nt, Human
caucauuuuccauauccuggug

SEQ ID NO: 1769372 - RNA, 24 nt, Human
caucauucucugucucauccauca

SEQ ID NO: 1769373 - RNA, 15 nt, Human
cauccagguucagcu

SEQ ID NO: 1769374 - RNA, 17 nt, Human
cauccagguucagcuug

SEQ ID NO: 1769375 - RNA, 19 nt, Human
caucccuaccgacccaggg

SEQ ID NO: 1769376 - RNA, 17 nt, Human
cauccacaugggagccg

SEQ ID NO: 1769377 - RNA, 17 nt, Human
caucucccagauaaugu

SEQ ID NO: 1769378 - RNA, 18 nt, Human
caucucccagauaaugug

SEQ ID NO: 1769379 - RNA, 22 nt, Human
caucucccagauaaugugaaaa

SEQ ID NO: 1769380 - RNA, 13 nt, Human
caucuccccucag

SEQ ID NO: 1769381 - RNA, 14 nt, Human
caucuccccucagc

SEQ ID NO: 1769382 - RNA, 13 nt, Human
caucuugcucugc

SEQ ID NO: 1769383 - RNA, 15 nt, Human
caucuugcucugcug

SEQ ID NO: 1769384 - RNA, 14 nt, Human
caucuugcucugcu

SEQ ID NO: 1769385 - RNA, 20 nt, Human
caucuugcucugcugacaga

SEQ ID NO: 1769386 - RNA, 13 nt, Human
caucuugcuggcu

SEQ ID NO: 1769387 - RNA, 14 nt, Human
caucuugcuggcua

SEQ ID NO: 1769388 - RNA, 15 nt, Human
caucuucgggaccag

SEQ ID NO: 1769389 - RNA, 18 nt, Human
caucuucgggaccaggau

SEQ ID NO: 1769390 - RNA, 12 nt, Human
caucuuccugug

SEQ ID NO: 1769391 - RNA, 13 nt, Human
caucuuccugugu

SEQ ID NO: 1769392 - RNA, 14 nt, Human
caucuuccuguguc

SEQ ID NO: 1769393 - RNA, 15 nt, Human
caucuuccugugucc

SEQ ID NO: 1769394 - RNA, 16 nt, Human
caucuuccuguguccu

SEQ ID NO: 1769395 - RNA, 17 nt, Human
caucuuccuguguccug

SEQ ID NO: 1769396 - RNA, 14 nt, Human
caucuucgggacca

SEQ ID NO: 1769397 - RNA, 18 nt, Human
cauccuccacguucugcu

SEQ ID NO: 1769398 - RNA, 20 nt, Human
cauccuccacguucugcuca

SEQ ID NO: 1769399 - RNA, 21 nt, Human
cauccuccacguucugcucau

SEQ ID NO: 1769400 - RNA, 14 nt, Human
caucuacuucaggc

SEQ ID NO: 1769401 - RNA, 19 nt, Human
caucucacuggaugcaaag

SEQ ID NO: 1769402 - RNA, 20 nt, Human
caucucaggacacuuccgua

SEQ ID NO: 1769403 - RNA, 18 nt, Human
caucucaugaggggagag

SEQ ID NO: 1769404 - RNA, 19 nt, Human
caucucaugaggggagagg

SEQ ID NO: 1769405 - RNA, 23 nt, Human
caucucaugaggggagaggagac

SEQ ID NO: 1769406 - RNA, 22 nt, Human
cauacgcuuuuaaugaaaagga

SEQ ID NO: 1769407 - RNA, 16 nt, Human
cauaaccuagccuuag

SEQ ID NO: 1769408 - RNA, 21 nt, Human
cauaacggaucagaaauacag

SEQ ID NO: 1769409 - RNA, 17 nt, Human
cauaacggaucagaaau

SEQ ID NO: 1769410 - RNA, 17 nt, Human
cauaacaauuccucuac

SEQ ID NO: 1769411 - RNA, 14 nt, Human
cauaacaauuccuc

SEQ ID NO: 1769412 - RNA, 15 nt, Human
cauaacaauuccucu

SEQ ID NO: 1769413 - RNA, 16 nt, Human
cauaacaauuccucua

SEQ ID NO: 1769414 - RNA, 22 nt, Human
cauaacggaucagaaauacaga

SEQ ID NO: 1769415 - RNA, 11 nt, Human
cauaagguuuu

SEQ ID NO: 1769416 - RNA, 16 nt, Human
cauaagguuuuuaugc

SEQ ID NO: 1769417 - RNA, 17 nt, Human
cauaagguuuuuaugca

SEQ ID NO: 1769418 - RNA, 15 nt, Human
cauaaguauuucaaa

SEQ ID NO: 1769419 - RNA, 18 nt, Human
cauacccaaaccaggugg

SEQ ID NO: 1769420 - RNA, 14 nt, Human
cauaccaaugaaaa

SEQ ID NO: 1769421 - RNA, 18 nt, Human
caguuggguggaugccug

SEQ ID NO: 1769422 - RNA, 19 nt, Human
caguuggguggaugccugg

SEQ ID NO: 1769423 - RNA, 16 nt, Human
caguuggguggaugcc

SEQ ID NO: 1769424 - RNA, 16 nt, Human
caguugcucuaugcuu

SEQ ID NO: 1769425 - RNA, 12 nt, Human
caguggcagcug

SEQ ID NO: 1769426 - RNA, 20 nt, Human
caguggacucagaaagccaa

SEQ ID NO: 1769427 - RNA, 22 nt, Human
caguggacucagaaagccaaca

SEQ ID NO: 1769428 - RNA, 13 nt, Human
caguggcagcugc

SEQ ID NO: 1769429 - RNA, 14 nt, Human
caguggcagcugcu

SEQ ID NO: 1769430 - RNA, 15 nt, Human
caguggcagcugcuu

SEQ ID NO: 1769431 - RNA, 16 nt, Human
caguggcagcugcuuu

SEQ ID NO: 1769432 - RNA, 16 nt, Human
caguggauugcauuuc

SEQ ID NO: 1769433 - RNA, 14 nt, Human
cagugugacaagga

SEQ ID NO: 1769434 - RNA, 16 nt, Human
cagugugaggccaggg

SEQ ID NO: 1769435 - RNA, 17 nt, Human
cagugugaggccagggc

SEQ ID NO: 1769436 - RNA, 18 nt, Human
cagugugaggccagggca

SEQ ID NO: 1769437 - RNA, 19 nt, Human
cagugugaggccagggcag

SEQ ID NO: 1769438 - RNA, 17 nt, Human
caguguaaauaguuacu

SEQ ID NO: 1769439 - RNA, 19 nt, Human
caguguaaauaguuacucc

SEQ ID NO: 1769440 - RNA, 21 nt, Human
caguuacccacucggucccag

SEQ ID NO: 1769441 - RNA, 17 nt, Human
caguuaaggaauauaau

SEQ ID NO: 1769442 - RNA, 14 nt, Human
caguguuaccugug

SEQ ID NO: 1769443 - RNA, 17 nt, Human
caguguuaccugugugc

SEQ ID NO: 1769444 - RNA, 18 nt, Human
caguguuaccugugugcu

SEQ ID NO: 1769445 - RNA, 19 nt, Human
caguguuaccugugugcuu

SEQ ID NO: 1769446 - RNA, 14 nt, Human
caguguuaaaugug

SEQ ID NO: 1769447 - RNA, 19 nt, Human
caguguuaaaugugaugaa

SEQ ID NO: 1769448 - RNA, 19 nt, Human
caguguuagggaagggccu

SEQ ID NO: 1769449 - RNA, 15 nt, Human
caguuaaaaaaaauu

SEQ ID NO: 1769450 - RNA, 16 nt, Human
caguuaaaaaaaauuu

SEQ ID NO: 1769451 - RNA, 19 nt, Human
caguuaaaaaaaauuuuaa

SEQ ID NO: 1769452 - RNA, 22 nt, Human
caguucggugagcuacaaaugc

SEQ ID NO: 1769453 - RNA, 21 nt, Human
caguucuggauggugugccuu

SEQ ID NO: 1769454 - RNA, 22 nt, Human
caguucuggauggugugccuuc

SEQ ID NO: 1769455 - RNA, 23 nt, Human
caguucuggauggugugccuucc

SEQ ID NO: 1769456 - RNA, 10 nt, Human
caugcaguuu

SEQ ID NO: 1769457 - RNA, 12 nt, Human
caugcaguuuga

SEQ ID NO: 1769458 - RNA, 13 nt, Human
caugcaguuugaa

SEQ ID NO: 1769459 - RNA, 14 nt, Human
caugcaguuugaaa

SEQ ID NO: 1769460 - RNA, 16 nt, Human
caugcaguuugaaauu

SEQ ID NO: 1769461 - RNA, 17 nt, Human
caugcaguuugaaauuc

SEQ ID NO: 1769462 - RNA, 20 nt, Human
caugcaguuugaaauucuga

SEQ ID NO: 1769463 - RNA, 21 nt, Human
caugcaguuugaaauucugaa

SEQ ID NO: 1769464 - RNA, 22 nt, Human
caugcaguuugaaauucugaau

SEQ ID NO: 1769465 - RNA, 16 nt, Human
caugcccucucaggcc

SEQ ID NO: 1769466 - RNA, 21 nt, Human
caugcccucucaggccggcag

SEQ ID NO: 1769467 - RNA, 13 nt, Human
caugcccucucag

SEQ ID NO: 1769468 - RNA, 14 nt, Human
caugcccucucagg

SEQ ID NO: 1769469 - RNA, 15 nt, Human
caugcccucucaggc

SEQ ID NO: 1769470 - RNA, 13 nt, Human
cauggcagaaggc

SEQ ID NO: 1769471 - RNA, 19 nt, Human
cauggauuacuucucuaua

SEQ ID NO: 1769472 - RNA, 16 nt, Human
caugggccuccugugu

SEQ ID NO: 1769473 - RNA, 17 nt, Human
caugggccuccugugug

SEQ ID NO: 1769474 - RNA, 15 nt, Human
caugggccuccugug

SEQ ID NO: 1769475 - RNA, 16 nt, Human
cauggucagcccuagg

SEQ ID NO: 1769476 - RNA, 19 nt, Human
cauggucagcccuagggug

SEQ ID NO: 1769477 - RNA, 20 nt, Human
caugccugccccaaacaaau

SEQ ID NO: 1769478 - RNA, 22 nt, Human
caugcgacacugggaggccagu

SEQ ID NO: 1769479 - RNA, 19 nt, Human
caugccuuaaaccuaccuc

SEQ ID NO: 1769480 - RNA, 20 nt, Human
caugccuuaaaccuaccucc

SEQ ID NO: 1769481 - RNA, 20 nt, Human
cauggaagaggcuacagggc

SEQ ID NO: 1769482 - RNA, 18 nt, Human
cauggugugaucgucuga

SEQ ID NO: 1769483 - RNA, 19 nt, Human
caugguuaagguaaaguaa

SEQ ID NO: 1769484 - RNA, 15 nt, Human
caugugcacaugcac

SEQ ID NO: 1769485 - RNA, 21 nt, Human
caugugccagguuuuuggucu

SEQ ID NO: 1769486 - RNA, 12 nt, Human
caugugacucug

SEQ ID NO: 1769487 - RNA, 22 nt, Human
caugugccagguuuuuggucug

SEQ ID NO: 1769488 - RNA, 19 nt, Human
cauguggcuccucccagcc

SEQ ID NO: 1769489 - RNA, 17 nt, Human
cauguggagacuucauc

SEQ ID NO: 1769490 - RNA, 12 nt, Human
cauguuuuaaca

SEQ ID NO: 1769491 - RNA, 13 nt, Human
cauguuuuaacaa

SEQ ID NO: 1769492 - RNA, 14 nt, Human
cauguuuuaacaaa

SEQ ID NO: 1769493 - RNA, 15 nt, Human
cauguuuuaacaaaa

SEQ ID NO: 1769494 - RNA, 16 nt, Human
cauguuuuaacaaaaa

SEQ ID NO: 1769495 - RNA, 17 nt, Human
cauguuuuaacaaaaac

SEQ ID NO: 1769496 - RNA, 20 nt, Human
cauguuuuaacaaaaaccaa

SEQ ID NO: 1769497 - RNA, 23 nt, Human
cauguguguccacgacugucucc

SEQ ID NO: 1769498 - RNA, 12 nt, Human
caugugugucca

SEQ ID NO: 1769499 - RNA, 21 nt, Human
cauguguguccacgacugucu

SEQ ID NO: 1769500 - RNA, 22 nt, Human
cauguguguccacgacugucuc

SEQ ID NO: 1769501 - RNA, 13 nt, Human
cauuaaauuaccu

SEQ ID NO: 1769502 - RNA, 12 nt, Human
cauuauuuguca

SEQ ID NO: 1769503 - RNA, 13 nt, Human
cauuauuugucaa

SEQ ID NO: 1769504 - RNA, 14 nt, Human
cauuauuugucaaa

SEQ ID NO: 1769505 - RNA, 15 nt, Human
cauuauuugucaaau

SEQ ID NO: 1769506 - RNA, 16 nt, Human
cauuugagcagggcuc

SEQ ID NO: 1769507 - RNA, 14 nt, Human
cauuugagcagggc

SEQ ID NO: 1769508 - RNA, 23 nt, Human
cauuugaaugcauuuuguuuggu

SEQ ID NO: 1769509 - RNA, 18 nt, Human
cauuugaaugcauuuugu

SEQ ID NO: 1769510 - RNA, 15 nt, Human
cauuugaaugcauuu

SEQ ID NO: 1769511 - RNA, 14 nt, Human
cauuugaaugcauu

SEQ ID NO: 1769512 - RNA, 13 nt, Human
cauuugaaugcau

SEQ ID NO: 1769513 - RNA, 20 nt, Human
cauuuuuaguagagacaggg

SEQ ID NO: 1769514 - RNA, 11 nt, Human
ccaaaccucug

SEQ ID NO: 1769515 - RNA, 12 nt, Human
ccaaaccucugu

SEQ ID NO: 1769516 - RNA, 13 nt, Human
ccaaaccucuguu

SEQ ID NO: 1769517 - RNA, 14 nt, Human
ccaaaccucuguuc

SEQ ID NO: 1769518 - RNA, 17 nt, Human
ccaaaccucuguucagu

SEQ ID NO: 1769519 - RNA, 20 nt, Human
ccaaaccucuguucagugua

SEQ ID NO: 1769520 - RNA, 15 nt, Human
ccaaacgcugagcca

SEQ ID NO: 1769521 - RNA, 20 nt, Human
ccaaacgcugagccaccugc

SEQ ID NO: 1769522 - RNA, 21 nt, Human
ccaaaccucuguucaguguaa

SEQ ID NO: 1769523 - RNA, 23 nt, Human
cauuuugggguacccacugcucu

SEQ ID NO: 1769524 - RNA, 23 nt, Human
cauuuuguuugguauuguauuua

SEQ ID NO: 1769525 - RNA, 13 nt, Human
cauuuuuaaaugu

SEQ ID NO: 1769526 - RNA, 14 nt, Human
cauuuuuaaaugug

SEQ ID NO: 1769527 - RNA, 17 nt, Human
cauuuuuaaauguguuu

SEQ ID NO: 1769528 - RNA, 18 nt, Human
cauuuuuaaauguguuuu

SEQ ID NO: 1769529 - RNA, 22 nt, Human
cauuuuguuugguauuguauuu

SEQ ID NO: 1769530 - RNA, 21 nt, Human
cauuuuguuugguauuguauu

SEQ ID NO: 1769531 - RNA, 20 nt, Human
cauuuuguuugguauuguau

SEQ ID NO: 1769532 - RNA, 19 nt, Human
cauuuuguuugguauugua

SEQ ID NO: 1769533 - RNA, 19 nt, Human
cauuuuuaguagagacagg

SEQ ID NO: 1769534 - RNA, 18 nt, Human
cauuuuuaguagagacag

SEQ ID NO: 1769535 - RNA, 20 nt, Human
cauuuugggguacccacugc

SEQ ID NO: 1769536 - RNA, 21 nt, Human
cauuuugggguacccacugcu

SEQ ID NO: 1769537 - RNA, 22 nt, Human
cauuuugggguacccacugcuc

SEQ ID NO: 1769538 - RNA, 19 nt, Human
cauuucuauuucuccucca

SEQ ID NO: 1769539 - RNA, 15 nt, Human
cauuucucuaagaga

SEQ ID NO: 1769540 - RNA, 21 nt, Human
cauuuccauguccccucccag

SEQ ID NO: 1769541 - RNA, 17 nt, Human
cauuuacuuuguguuca

SEQ ID NO: 1769542 - RNA, 21 nt, Human
cauuuacuuuguguucaccuu

SEQ ID NO: 1769543 - RNA, 16 nt, Human
ccacaaugcaguucug

SEQ ID NO: 1769544 - RNA, 20 nt, Human
ccaagguuggagcccagggc

SEQ ID NO: 1769545 - RNA, 22 nt, Human
ccaagguuggagcccagggcau

SEQ ID NO: 1769546 - RNA, 23 nt, Human
ccacaaaauaaccaauccuggac

SEQ ID NO: 1769547 - RNA, 15 nt, Human
ccacaaccucuuccc

SEQ ID NO: 1769548 - RNA, 13 nt, Human
ccacaaccucuuc

SEQ ID NO: 1769549 - RNA, 20 nt, Human
ccacaaaggcaaagggucca

SEQ ID NO: 1769550 - RNA, 16 nt, Human
ccacaaaggcaaaggg

SEQ ID NO: 1769551 - RNA, 18 nt, Human
ccaagcaggacagugcuu

SEQ ID NO: 1769552 - RNA, 19 nt, Human
ccaagcaggacagugcuug

SEQ ID NO: 1769553 - RNA, 18 nt, Human
ccaagcaggaaaugaaaa

SEQ ID NO: 1769554 - RNA, 19 nt, Human
ccaagaggaaguucagauc

SEQ ID NO: 1769555 - RNA, 21 nt, Human
ccaagaggaaguucagaucuu

SEQ ID NO: 1769556 - RNA, 16 nt, Human
ccaacccuggggaagg

SEQ ID NO: 1769557 - RNA, 17 nt, Human
ccaacccuggggaagga

SEQ ID NO: 1769558 - RNA, 18 nt, Human
ccaacccuggggaaggag

SEQ ID NO: 1769559 - RNA, 20 nt, Human
ccaacccuggggaaggagcc

SEQ ID NO: 1769560 - RNA, 15 nt, Human
ccaacauguggcucc

SEQ ID NO: 1769561 - RNA, 14 nt, Human
ccaaccuauuuuga

SEQ ID NO: 1769562 - RNA, 21 nt, Human
ccaaccuauuuugaaguacca

SEQ ID NO: 1769563 - RNA, 23 nt, Human
ccaaccuuagauguucuaagucu

SEQ ID NO: 1769564 - RNA, 17 nt, Human
ccaagaccucagggcac

SEQ ID NO: 1769565 - RNA, 15 nt, Human
ccagcugucaagggc

SEQ ID NO: 1769566 - RNA, 23 nt, Human
ccaggaccagucaaccugggcaa

SEQ ID NO: 1769567 - RNA, 22 nt, Human
ccagcugugcucuggacaggca

SEQ ID NO: 1769568 - RNA, 23 nt, Human
ccagcugugcucuggacaggcau

SEQ ID NO: 1769569 - RNA, 14 nt, Human
ccaggccagaggga

SEQ ID NO: 1769570 - RNA, 21 nt, Human
ccaggccagagggagugacag

SEQ ID NO: 1769571 - RNA, 21 nt, Human
ccaggccccugccacccuggg

SEQ ID NO: 1769572 - RNA, 23 nt, Human
ccaggccccugccacccugggga

SEQ ID NO: 1769573 - RNA, 15 nt, Human
ccaggccccuggagg

SEQ ID NO: 1769574 - RNA, 21 nt, Human
ccaggccccuggaggcugccu

SEQ ID NO: 1769575 - RNA, 23 nt, Human
ccaggccccuggaggcugccucc

SEQ ID NO: 1769576 - RNA, 18 nt, Human
ccagcugugcucuggaca

SEQ ID NO: 1769577 - RNA, 20 nt, Human
ccagcugugcucuggacagg

SEQ ID NO: 1769578 - RNA, 21 nt, Human
ccagcugugcucuggacaggc

SEQ ID NO: 1769579 - RNA, 18 nt, Human
ccagccugaacagaagcu

SEQ ID NO: 1769580 - RNA, 19 nt, Human
ccagccugaacagaagcuc

SEQ ID NO: 1769581 - RNA, 15 nt, Human
ccagcucugaaacca

SEQ ID NO: 1769582 - RNA, 20 nt, Human
ccagcucugaaaccaguguu

SEQ ID NO: 1769583 - RNA, 21 nt, Human
ccagcucugaaaccaguguua

SEQ ID NO: 1769584 - RNA, 14 nt, Human
ccagcucuguauca

SEQ ID NO: 1769585 - RNA, 18 nt, Human
ccagcucuguaucaggac

SEQ ID NO: 1769586 - RNA, 21 nt, Human
ccagcucuguaucaggaccca

SEQ ID NO: 1769587 - RNA, 13 nt, Human
ccagcugcaaagu

SEQ ID NO: 1769588 - RNA, 14 nt, Human
ccagcugcaaagug

SEQ ID NO: 1769589 - RNA, 15 nt, Human
ccagcugcaaagugu

SEQ ID NO: 1769590 - RNA, 16 nt, Human
ccagcugcaaaguguu

SEQ ID NO: 1769591 - RNA, 17 nt, Human
ccagcugcaaaguguuu

SEQ ID NO: 1769592 - RNA, 16 nt, Human
ccagggagaccuggac

SEQ ID NO: 1769593 - RNA, 17 nt, Human
ccagggagaccuggaca

SEQ ID NO: 1769594 - RNA, 18 nt, Human
ccaucaacaaaaauuguc

SEQ ID NO: 1769595 - RNA, 17 nt, Human
ccaucaacaaaaauugu

SEQ ID NO: 1769596 - RNA, 13 nt, Human
ccaguggucucac

SEQ ID NO: 1769597 - RNA, 17 nt, Human
ccaguggucucacaugg

SEQ ID NO: 1769598 - RNA, 18 nt, Human
ccauagauacucucuucu

SEQ ID NO: 1769599 - RNA, 15 nt, Human
ccauauucuguuggc

SEQ ID NO: 1769600 - RNA, 18 nt, Human
ccauauucuguuggccag

SEQ ID NO: 1769601 - RNA, 19 nt, Human
ccauauucuguuggccagu

SEQ ID NO: 1769602 - RNA, 20 nt, Human
ccaucucaugaggggagagg

SEQ ID NO: 1769603 - RNA, 14 nt, Human
ccaucaugucuggc

SEQ ID NO: 1769604 - RNA, 16 nt, Human
ccaucaugucuggcua

SEQ ID NO: 1769605 - RNA, 18 nt, Human
ccagggagaccuggacac

SEQ ID NO: 1769606 - RNA, 22 nt, Human
cccaugagccucagcauccugg

SEQ ID NO: 1769607 - RNA, 13 nt, Human
cccagguuucuau

SEQ ID NO: 1769608 - RNA, 17 nt, Human
cccaguaaaauugccau

SEQ ID NO: 1769609 - RNA, 16 nt, Human
cccaguaaaauugcca

SEQ ID NO: 1769610 - RNA, 13 nt, Human
cccaguaaaauug

SEQ ID NO: 1769611 - RNA, 12 nt, Human
cccaguaaaauu

SEQ ID NO: 1769612 - RNA, 18 nt, Human
cccaguaaaauugccaua

SEQ ID NO: 1769613 - RNA, 14 nt, Human
cccaggguucccgc

SEQ ID NO: 1769614 - RNA, 23 nt, Human
cccaggcaggucuugaacuccug

SEQ ID NO: 1769615 - RNA, 21 nt, Human
cccagugcccacaggaucagu

SEQ ID NO: 1769616 - RNA, 10 nt, Human
cccagucugg

SEQ ID NO: 1769617 - RNA, 18 nt, Human
cccagucuggaaugcagu

SEQ ID NO: 1769618 - RNA, 19 nt, Human
cccagucuggaaugcagug

SEQ ID NO: 1769619 - RNA, 13 nt, Human
cccaucucaggac

SEQ ID NO: 1769620 - RNA, 15 nt, Human
cccaucuucgggacc

SEQ ID NO: 1769621 - RNA, 17 nt, Human
cccaucuucgggaccag

SEQ ID NO: 1769622 - RNA, 18 nt, Human
cccaucuucgggaccagg

SEQ ID NO: 1769623 - RNA, 21 nt, Human
cccaucuucgggaccaggauu

SEQ ID NO: 1769624 - RNA, 15 nt, Human
cccaugagccucagc

SEQ ID NO: 1769625 - RNA, 16 nt, Human
cccaugagccucagca

SEQ ID NO: 1769626 - RNA, 20 nt, Human
cccaugagccucagcauccu

SEQ ID NO: 1769627 - RNA, 19 nt, Human
ccccaaauccgaaccuccu

SEQ ID NO: 1769628 - RNA, 23 nt, Human
ccccaaauccgaaccuccucugu

SEQ ID NO: 1769629 - RNA, 11 nt, Human
ccccaaauccg

SEQ ID NO: 1769630 - RNA, 16 nt, Human
cccagaggauugcugc

SEQ ID NO: 1769631 - RNA, 21 nt, Human
cccagaggaaggggccagagg

SEQ ID NO: 1769632 - RNA, 22 nt, Human
cccagaggaaggggccagaggc

SEQ ID NO: 1769633 - RNA, 23 nt, Human
cccagaggaaggggccagaggcu

SEQ ID NO: 1769634 - RNA, 24 nt, Human
cccagaggaaggggccagaggcuc

SEQ ID NO: 1769635 - RNA, 19 nt, Human
cccagagcugguggaccca

SEQ ID NO: 1769636 - RNA, 20 nt, Human
cccagagcugguggacccag

SEQ ID NO: 1769637 - RNA, 23 nt, Human
cccagagcugguggacccaggga

SEQ ID NO: 1769638 - RNA, 16 nt, Human
cccagaggcugcccca

SEQ ID NO: 1769639 - RNA, 13 nt, Human
cccagccucagcg

SEQ ID NO: 1769640 - RNA, 14 nt, Human
cccagccucagcgc

SEQ ID NO: 1769641 - RNA, 15 nt, Human
cccagccucagcgcg

SEQ ID NO: 1769642 - RNA, 20 nt, Human
cccagccucagcgcggcccu

SEQ ID NO: 1769643 - RNA, 22 nt, Human
cccagccucagcgcggcccucc

SEQ ID NO: 1769644 - RNA, 15 nt, Human
cccagcccucauccc

SEQ ID NO: 1769645 - RNA, 16 nt, Human
cccagcccucaucccg

SEQ ID NO: 1769646 - RNA, 14 nt, Human
cccagcccucaucc

SEQ ID NO: 1769647 - RNA, 19 nt, Human
cccagcccucaucccgagc

SEQ ID NO: 1769648 - RNA, 13 nt, Human
cccaggagccccg

SEQ ID NO: 1769649 - RNA, 14 nt, Human
cccaggagccccga

SEQ ID NO: 1769650 - RNA, 18 nt, Human
cccaggagccccgaggcc

SEQ ID NO: 1769651 - RNA, 15 nt, Human
cccaggacucugacc

SEQ ID NO: 1769652 - RNA, 19 nt, Human
cccaggacucugaccccag

SEQ ID NO: 1769653 - RNA, 23 nt, Human
cccaggacucugaccccagcauu

SEQ ID NO: 1769654 - RNA, 14 nt, Human
cccagcgagcccug

SEQ ID NO: 1769655 - RNA, 20 nt, Human
cccagcuauaccugugccuc

SEQ ID NO: 1769656 - RNA, 12 nt, Human
cccagcucugaa

SEQ ID NO: 1769657 - RNA, 17 nt, Human
cccagcuauaccugugc

SEQ ID NO: 1769658 - RNA, 14 nt, Human
cccagcucugaaac

SEQ ID NO: 1769659 - RNA, 22 nt, Human
cccagcucugaaaccaguguua

SEQ ID NO: 1769660 - RNA, 18 nt, Human
ccauguuggccaggcugg

SEQ ID NO: 1769661 - RNA, 15 nt, Human
ccauguuggccaggc

SEQ ID NO: 1769662 - RNA, 19 nt, Human
ccauguuggccaggcuggu

SEQ ID NO: 1769663 - RNA, 21 nt, Human
ccauguuggccaggcuggucu

SEQ ID NO: 1769664 - RNA, 22 nt, Human
ccauuccugggaaauauucccu

SEQ ID NO: 1769665 - RNA, 17 nt, Human
cccaccuuggcugcagg

SEQ ID NO: 1769666 - RNA, 19 nt, Human
cccaccuuggcugcaggga

SEQ ID NO: 1769667 - RNA, 20 nt, Human
cccaccuuggcugcagggag

SEQ ID NO: 1769668 - RNA, 21 nt, Human
cccagacggcuccacuaggac

SEQ ID NO: 1769669 - RNA, 21 nt, Human
ccaucucaggacacuuccgua

SEQ ID NO: 1769670 - RNA, 15 nt, Human
ccaugaaccaagacc

SEQ ID NO: 1769671 - RNA, 13 nt, Human
ccaugaaacaaag

SEQ ID NO: 1769672 - RNA, 21 nt, Human
ccaugcgacacugggaggcca

SEQ ID NO: 1769673 - RNA, 22 nt, Human
ccaugcgacacugggaggccag

SEQ ID NO: 1769674 - RNA, 16 nt, Human
ccaugccuuaaaccua

SEQ ID NO: 1769675 - RNA, 16 nt, Human
ccaugcgacacuggga

SEQ ID NO: 1769676 - RNA, 13 nt, Human
ccauguuggccag

SEQ ID NO: 1769677 - RNA, 14 nt, Human
ccauguuggccagg

SEQ ID NO: 1769678 - RNA, 17 nt, Human
ccauguggagacuucau

SEQ ID NO: 1769679 - RNA, 13 nt, Human
ccaugugccaggu

SEQ ID NO: 1769680 - RNA, 15 nt, Human
ccauggcccucauua

SEQ ID NO: 1769681 - RNA, 17 nt, Human
ccauggaacuguuuccu

SEQ ID NO: 1769682 - RNA, 19 nt, Human
ccauggaacuguuuccuuc

SEQ ID NO: 1769683 - RNA, 21 nt, Human
ccauggaagaggcuacagggc

SEQ ID NO: 1769684 - RNA, 23 nt, Human
ccauggaagaggcuacagggcca

SEQ ID NO: 1769685 - RNA, 13 nt, Human
cccugcugguuca

SEQ ID NO: 1769686 - RNA, 19 nt, Human
cccugcugguucaggguug

SEQ ID NO: 1769687 - RNA, 20 nt, Human
cccugcugguucaggguugg

SEQ ID NO: 1769688 - RNA, 15 nt, Human
cccuggaagagccca

SEQ ID NO: 1769689 - RNA, 16 nt, Human
cccuggaagagcccag

SEQ ID NO: 1769690 - RNA, 17 nt, Human
cccuggaagagcccagu

SEQ ID NO: 1769691 - RNA, 18 nt, Human
cccuggaagagcccaguc

SEQ ID NO: 1769692 - RNA, 15 nt, Human
cccuggaggcugccu

SEQ ID NO: 1769693 - RNA, 16 nt, Human
cccuggaggcugccuc

SEQ ID NO: 1769694 - RNA, 17 nt, Human
cccuggaggcugccucc

SEQ ID NO: 1769695 - RNA, 18 nt, Human
cccuggaggcugccuccc

SEQ ID NO: 1769696 - RNA, 19 nt, Human
cccuggaggcugccuccca

SEQ ID NO: 1769697 - RNA, 22 nt, Human
cccugguggcagugggagcugc

SEQ ID NO: 1769698 - RNA, 14 nt, Human
cccugccagggcag

SEQ ID NO: 1769699 - RNA, 12 nt, Human
cccugccagggc

SEQ ID NO: 1769700 - RNA, 17 nt, Human
cccugccacccugggga

SEQ ID NO: 1769701 - RNA, 18 nt, Human
cccugccacccuggggag

SEQ ID NO: 1769702 - RNA, 12 nt, Human
cccugccacccu

SEQ ID NO: 1769703 - RNA, 14 nt, Human
cccugccacccugg

SEQ ID NO: 1769704 - RNA, 15 nt, Human
cccugccacccuggg

SEQ ID NO: 1769705 - RNA, 18 nt, Human
cccugcaaaaggacucuc

SEQ ID NO: 1769706 - RNA, 20 nt, Human
cccugcaaaaggacucucag

SEQ ID NO: 1769707 - RNA, 15 nt, Human
cccucuacagagcuu

SEQ ID NO: 1769708 - RNA, 18 nt, Human
cccucuacagagcuuccc

SEQ ID NO: 1769709 - RNA, 21 nt, Human
cccucuacagagcuucccuga

SEQ ID NO: 1769710 - RNA, 14 nt, Human
cccuacugcuguga

SEQ ID NO: 1769711 - RNA, 17 nt, Human
cccuacugcugugaacc

SEQ ID NO: 1769712 - RNA, 17 nt, Human
cccuagaaacuuccaaa

SEQ ID NO: 1769713 - RNA, 22 nt, Human
cccggcacagaugcuccaggga

SEQ ID NO: 1769714 - RNA, 13 nt, Human
cccucaucugucc

SEQ ID NO: 1769715 - RNA, 14 nt, Human
cccucaucuguccc

SEQ ID NO: 1769716 - RNA, 12 nt, Human
cccucauuaaug

SEQ ID NO: 1769717 - RNA, 17 nt, Human
cccucaucccgagcacc

SEQ ID NO: 1769718 - RNA, 17 nt, Human
cccuccaugugggcuag

SEQ ID NO: 1769719 - RNA, 13 nt, Human
ccccagccugcua

SEQ ID NO: 1769720 - RNA, 18 nt, Human
ccccagccugcgccugcu

SEQ ID NO: 1769721 - RNA, 19 nt, Human
ccccagccugcgccugcug

SEQ ID NO: 1769722 - RNA, 12 nt, Human
ccccagccugcu

SEQ ID NO: 1769723 - RNA, 20 nt, Human
ccccagccugcuagcuagcu

SEQ ID NO: 1769724 - RNA, 13 nt, Human
ccccacaguugcu

SEQ ID NO: 1769725 - RNA, 10 nt, Human
ccccagccug

SEQ ID NO: 1769726 - RNA, 11 nt, Human
ccccagccugc

SEQ ID NO: 1769727 - RNA, 12 nt, Human
ccccagccugcg

SEQ ID NO: 1769728 - RNA, 23 nt, Human
ccccagccccgguggcugggcag

SEQ ID NO: 1769729 - RNA, 14 nt, Human
ccccagggccugag

SEQ ID NO: 1769730 - RNA, 15 nt, Human
ccccagggccugagc

SEQ ID NO: 1769731 - RNA, 16 nt, Human
ccccagggccugagcc

SEQ ID NO: 1769732 - RNA, 19 nt, Human
ccccagggccugagccugg

SEQ ID NO: 1769733 - RNA, 21 nt, Human
ccccagggccugagccuggcc

SEQ ID NO: 1769734 - RNA, 20 nt, Human
cccgaggccuucucugaagg

SEQ ID NO: 1769735 - RNA, 15 nt, Human
cccgaggccuucucu

SEQ ID NO: 1769736 - RNA, 22 nt, Human
cccgcggggcugucggcgcugc

SEQ ID NO: 1769737 - RNA, 17 nt, Human
cccgcgccacaggaccc

SEQ ID NO: 1769738 - RNA, 21 nt, Human
ccuccccuccggacuggugcc

SEQ ID NO: 1769739 - RNA, 18 nt, Human
ccucuacagagcuucccu

SEQ ID NO: 1769740 - RNA, 19 nt, Human
ccuccuuuaguaaaacucc

SEQ ID NO: 1769741 - RNA, 15 nt, Human
ccuccuuuccuccuc

SEQ ID NO: 1769742 - RNA, 20 nt, Human
ccucuccccagcaagugaga

SEQ ID NO: 1769743 - RNA, 15 nt, Human
ccucuccccagcaag

SEQ ID NO: 1769744 - RNA, 17 nt, Human
ccucuccaggcauuuag

SEQ ID NO: 1769745 - RNA, 20 nt, Human
ccucuacagagcuucccuga

SEQ ID NO: 1769746 - RNA, 21 nt, Human
ccucuacagagcuucccugac

SEQ ID NO: 1769747 - RNA, 24 nt, Human
ccucuacagagcuucccugacuca

SEQ ID NO: 1769748 - RNA, 21 nt, Human
ccucugacacacagcucuguc

SEQ ID NO: 1769749 - RNA, 17 nt, Human
ccucugacucagggcuc

SEQ ID NO: 1769750 - RNA, 19 nt, Human
ccucugacucagggcuccu

SEQ ID NO: 1769751 - RNA, 21 nt, Human
ccucugacucagggcuccugg

SEQ ID NO: 1769752 - RNA, 22 nt, Human
ccucugacucagggcuccuggg

SEQ ID NO: 1769753 - RNA, 12 nt, Human
ccucugacucag

SEQ ID NO: 1769754 - RNA, 16 nt, Human
ccucugacucagggcu

SEQ ID NO: 1769755 - RNA, 13 nt, Human
ccucugacacaca

SEQ ID NO: 1769756 - RNA, 16 nt, Human
ccucugaaacccugga

SEQ ID NO: 1769757 - RNA, 19 nt, Human
ccucugaaacccuggacca

SEQ ID NO: 1769758 - RNA, 15 nt, Human
ccucugacacacagc

SEQ ID NO: 1769759 - RNA, 14 nt, Human
ccucugacacacag

SEQ ID NO: 1769760 - RNA, 19 nt, Human
ccucugacacacagcucug

SEQ ID NO: 1769761 - RNA, 20 nt, Human
ccucugacacacagcucugu

SEQ ID NO: 1769762 - RNA, 21 nt, Human
ccucccgaauagcugggacua

SEQ ID NO: 1769763 - RNA, 19 nt, Human
ccucccgaguagcugggac

SEQ ID NO: 1769764 - RNA, 17 nt, Human
ccucccgaguagcuggg

SEQ ID NO: 1769765 - RNA, 18 nt, Human
ccucccgaguagcuggga

SEQ ID NO: 1769766 - RNA, 19 nt, Human
ccucccgaauagcugggac

SEQ ID NO: 1769767 - RNA, 20 nt, Human
ccucccgaauagcugggacu

SEQ ID NO: 1769768 - RNA, 18 nt, Human
ccucccgaauagcuggga

SEQ ID NO: 1769769 - RNA, 12 nt, Human
ccuccccugcca

SEQ ID NO: 1769770 - RNA, 13 nt, Human
ccuccccugccag

SEQ ID NO: 1769771 - RNA, 16 nt, Human
ccuccccugccagggc

SEQ ID NO: 1769772 - RNA, 18 nt, Human
ccuccccugccagggcag

SEQ ID NO: 1769773 - RNA, 12 nt, Human
ccuccaggagcu

SEQ ID NO: 1769774 - RNA, 18 nt, Human
ccuccaggagcuucuugu

SEQ ID NO: 1769775 - RNA, 19 nt, Human
ccuccaggagcuucuuguu

SEQ ID NO: 1769776 - RNA, 23 nt, Human
ccuccaggagcuucuuguuuccu

SEQ ID NO: 1769777 - RNA, 16 nt, Human
ccuccagccugaacag

SEQ ID NO: 1769778 - RNA, 12 nt, Human
ccuccauguggg

SEQ ID NO: 1769779 - RNA, 15 nt, Human
ccuccaugugggcua

SEQ ID NO: 1769780 - RNA, 17 nt, Human
ccucccaaagugcuggg

SEQ ID NO: 1769781 - RNA, 11 nt, Human
ccuccauggga

SEQ ID NO: 1769782 - RNA, 17 nt, Human
ccuauuccaagcuucca

SEQ ID NO: 1769783 - RNA, 23 nt, Human
ccuaugugauuuuaacucugucu

SEQ ID NO: 1769784 - RNA, 22 nt, Human
ccuauguuuuuguucaaagcca

SEQ ID NO: 1769785 - RNA, 15 nt, Human
ccuauucuuucgaaa

SEQ ID NO: 1769786 - RNA, 15 nt, Human
ccuaggugacagagu

SEQ ID NO: 1769787 - RNA, 18 nt, Human
ccuagugaaggcuucucu

SEQ ID NO: 1769788 - RNA, 19 nt, Human
ccuagugaaggcuucucuc

SEQ ID NO: 1769789 - RNA, 21 nt, Human
ccuagugaaggcuucucucug

SEQ ID NO: 1769790 - RNA, 22 nt, Human
ccuagugaaggcuucucucugu

SEQ ID NO: 1769791 - RNA, 23 nt, Human
ccuagugaaggcuucucucugug

SEQ ID NO: 1769792 - RNA, 14 nt, Human
cccuucaucuuccu

SEQ ID NO: 1769793 - RNA, 15 nt, Human
cccuucaucuuccug

SEQ ID NO: 1769794 - RNA, 16 nt, Human
cccuucaucuuccugu

SEQ ID NO: 1769795 - RNA, 17 nt, Human
cccuucaucuuccugug

SEQ ID NO: 1769796 - RNA, 20 nt, Human
cccuucaucuuccugugucc

SEQ ID NO: 1769797 - RNA, 14 nt, Human
cccuucccacagga

SEQ ID NO: 1769798 - RNA, 23 nt, Human
cccuucccacaggacauuucucu

SEQ ID NO: 1769799 - RNA, 13 nt, Human
cccuuuacccucu

SEQ ID NO: 1769800 - RNA, 17 nt, Human
ccgggaaccuccccagc

SEQ ID NO: 1769801 - RNA, 18 nt, Human
ccgggaaccuccccagcc

SEQ ID NO: 1769802 - RNA, 19 nt, Human
ccgggaaccuccccagccu

SEQ ID NO: 1769803 - RNA, 20 nt, Human
ccgggaaccuccccagccug

SEQ ID NO: 1769804 - RNA, 21 nt, Human
ccgggaaccuccccagccugc

SEQ ID NO: 1769805 - RNA, 12 nt, Human
ccggacuggugc

SEQ ID NO: 1769806 - RNA, 13 nt, Human
ccggacuggugcc

SEQ ID NO: 1769807 - RNA, 16 nt, Human
ccggacuggugcccuc

SEQ ID NO: 1769808 - RNA, 17 nt, Human
ccggacuggugcccucc

SEQ ID NO: 1769809 - RNA, 18 nt, Human
ccggacuggugcccuccu

SEQ ID NO: 1769810 - RNA, 22 nt, Human
ccgggaaccuccccagccugcg

SEQ ID NO: 1769811 - RNA, 14 nt, Human
ccgguggcugggca

SEQ ID NO: 1769812 - RNA, 16 nt, Human
ccgguggcugggcaga

SEQ ID NO: 1769813 - RNA, 11 nt, Human
ccguggaugcg

SEQ ID NO: 1769814 - RNA, 21 nt, Human
ccguggauggccguggaugcg

SEQ ID NO: 1769815 - RNA, 13 nt, Human
ccuaggugacaga

SEQ ID NO: 1769816 - RNA, 21 nt, Human
ccuagacucggggugcuuccu

SEQ ID NO: 1769817 - RNA, 23 nt, Human
ccuagacucggggugcuuccuug

SEQ ID NO: 1769818 - RNA, 22 nt, Human
ccuacuuacccagguggguccc

SEQ ID NO: 1769819 - RNA, 11 nt, Human
ccuacugcugu

SEQ ID NO: 1769820 - RNA, 12 nt, Human
ccuacugcugug

SEQ ID NO: 1769821 - RNA, 18 nt, Human
ccuacccacccuccuuuc

SEQ ID NO: 1769822 - RNA, 18 nt, Human
ccuacaggagugagcacu

SEQ ID NO: 1769823 - RNA, 13 nt, Human
ccuacccacccuc

SEQ ID NO: 1769824 - RNA, 14 nt, Human
ccuacauguuauuc

SEQ ID NO: 1769825 - RNA, 14 nt, Human
ccuaaauuuauuaa

SEQ ID NO: 1769826 - RNA, 13 nt, Human
ccuaaacauauga

SEQ ID NO: 1769827 - RNA, 16 nt, Human
ccuaaaauucagugga

SEQ ID NO: 1769828 - RNA, 21 nt, Human
ccguguugcagguucauggau

SEQ ID NO: 1769829 - RNA, 22 nt, Human
cuagcaccauuuuaagucccug

SEQ ID NO: 1769830 - RNA, 13 nt, Human
cuagauuuucacu

SEQ ID NO: 1769831 - RNA, 19 nt, Human
cuagauuuucacuuaugaa

SEQ ID NO: 1769832 - RNA, 17 nt, Human
cuagaugcaagucucuu

SEQ ID NO: 1769833 - RNA, 16 nt, Human
cuagagccuucagccu

SEQ ID NO: 1769834 - RNA, 17 nt, Human
cuagagccuucagccuu

SEQ ID NO: 1769835 - RNA, 15 nt, Human
cuagaggaaaagaaa

SEQ ID NO: 1769836 - RNA, 17 nt, Human
cuagaggaaaagaaaga

SEQ ID NO: 1769837 - RNA, 16 nt, Human
cuacucugugucaggu

SEQ ID NO: 1769838 - RNA, 21 nt, Human
cuacucugugucagguggggc

SEQ ID NO: 1769839 - RNA, 15 nt, Human
cuaaggugugcucug

SEQ ID NO: 1769840 - RNA, 19 nt, Human
cuaagccccagcaagcaau

SEQ ID NO: 1769841 - RNA, 17 nt, Human
cuaagccccagcaagca

SEQ ID NO: 1769842 - RNA, 16 nt, Human
cuaagccccagcaagc

SEQ ID NO: 1769843 - RNA, 15 nt, Human
cuaagccccagcaag

SEQ ID NO: 1769844 - RNA, 17 nt, Human
cuaaccacgcuggaccu

SEQ ID NO: 1769845 - RNA, 17 nt, Human
cuacagaggccaugggc

SEQ ID NO: 1769846 - RNA, 20 nt, Human
cuacagagcuucccugacuc

SEQ ID NO: 1769847 - RNA, 14 nt, Human
cuaccacuccugcc

SEQ ID NO: 1769848 - RNA, 17 nt, Human
cuaccacuccugccaag

SEQ ID NO: 1769849 - RNA, 18 nt, Human
cuaccagauaacugagga

SEQ ID NO: 1769850 - RNA, 17 nt, Human
cuacccacccuccuuuc

SEQ ID NO: 1769851 - RNA, 22 nt, Human
cuacccacccuccuuucaccac

SEQ ID NO: 1769852 - RNA, 20 nt, Human
cuacccagcgagcccuggug

SEQ ID NO: 1769853 - RNA, 19 nt, Human
cuacccagcgagcccuggu

SEQ ID NO: 1769854 - RNA, 11 nt, Human
cuacccagggc

SEQ ID NO: 1769855 - RNA, 14 nt, Human
cuacccagggccug

SEQ ID NO: 1769856 - RNA, 15 nt, Human
cuacccagggccugc

SEQ ID NO: 1769857 - RNA, 16 nt, Human
cuacccagggccugca

SEQ ID NO: 1769858 - RNA, 19 nt, Human
cuacccagggccugcagga

SEQ ID NO: 1769859 - RNA, 15 nt, Human
cuacagaggccaugg

SEQ ID NO: 1769860 - RNA, 16 nt, Human
cuacagagcuucccug

SEQ ID NO: 1769861 - RNA, 17 nt, Human
cuacagagcuucccuga

SEQ ID NO: 1769862 - RNA, 18 nt, Human
cuacagagcuucccugac

SEQ ID NO: 1769863 - RNA, 16 nt, Human
cuaaggugugcucuga

SEQ ID NO: 1769864 - RNA, 18 nt, Human
cuaauguugcuggaucag

SEQ ID NO: 1769865 - RNA, 18 nt, Human
cuaucuuuuguuuccuuu

SEQ ID NO: 1769866 - RNA, 19 nt, Human
cuaucuuuuguuuccuuuu

SEQ ID NO: 1769867 - RNA, 14 nt, Human
cuauauuuugucau

SEQ ID NO: 1769868 - RNA, 15 nt, Human
cuauauuuugucaua

SEQ ID NO: 1769869 - RNA, 16 nt, Human
cuauauuuugucauau

SEQ ID NO: 1769870 - RNA, 21 nt, Human
cuauauuuugucauaucaaau

SEQ ID NO: 1769871 - RNA, 18 nt, Human
cuaguuacugugguaugg

SEQ ID NO: 1769872 - RNA, 22 nt, Human
cuaggaccccuccaugugggcu

SEQ ID NO: 1769873 - RNA, 23 nt, Human
cuaggaagaucucugcagggccg

SEQ ID NO: 1769874 - RNA, 17 nt, Human
cuaggacuucaaauugg

SEQ ID NO: 1769875 - RNA, 15 nt, Human
cuagugggguuuccu

SEQ ID NO: 1769876 - RNA, 17 nt, Human
cuagugggguuuccugg

SEQ ID NO: 1769877 - RNA, 18 nt, Human
cuagugggguuuccuggc

SEQ ID NO: 1769878 - RNA, 19 nt, Human
cuagugggguuuccuggca

SEQ ID NO: 1769879 - RNA, 12 nt, Human
cuauuuugaagu

SEQ ID NO: 1769880 - RNA, 17 nt, Human
cucaaggaaaggccuga

SEQ ID NO: 1769881 - RNA, 21 nt, Human
cucacccccuucuccauccac

SEQ ID NO: 1769882 - RNA, 15 nt, Human
cucacccccuucucc

SEQ ID NO: 1769883 - RNA, 15 nt, Human
cucacccccuccuuc

SEQ ID NO: 1769884 - RNA, 16 nt, Human
cucacccccuucucca

SEQ ID NO: 1769885 - RNA, 17 nt, Human
cucacccccuucuccau

SEQ ID NO: 1769886 - RNA, 19 nt, Human
cucacccccuucuccaucc

SEQ ID NO: 1769887 - RNA, 20 nt, Human
cucacccccuucuccaucca

SEQ ID NO: 1769888 - RNA, 17 nt, Human
cucacuauaccaguaua

SEQ ID NO: 1769889 - RNA, 16 nt, Human
cucacuauguugccca

SEQ ID NO: 1769890 - RNA, 17 nt, Human
cucacuauguugcccag

SEQ ID NO: 1769891 - RNA, 18 nt, Human
cucaagugauucuccugc

SEQ ID NO: 1769892 - RNA, 19 nt, Human
cucaagugauucuccugcc

SEQ ID NO: 1769893 - RNA, 20 nt, Human
cucaagugauucuccugccu

SEQ ID NO: 1769894 - RNA, 20 nt, Human
cucaccagccccagugccca

SEQ ID NO: 1769895 - RNA, 21 nt, Human
cucaccagccccagugcccac

SEQ ID NO: 1769896 - RNA, 16 nt, Human
cucacauuagaucuag

SEQ ID NO: 1769897 - RNA, 22 nt, Human
cucacaugucaguaccuucaaa

SEQ ID NO: 1769898 - RNA, 23 nt, Human
cucacauggugcuacgccugcau

SEQ ID NO: 1769899 - RNA, 11 nt, Human
cucaccagcug

SEQ ID NO: 1769900 - RNA, 12 nt, Human
cucaccagcugc

SEQ ID NO: 1769901 - RNA, 13 nt, Human
cucaccagcugca

SEQ ID NO: 1769902 - RNA, 14 nt, Human
cucaccagcugcaa

SEQ ID NO: 1769903 - RNA, 15 nt, Human
cucaccagcugcaaa

SEQ ID NO: 1769904 - RNA, 16 nt, Human
cucaccagcugcaaag

SEQ ID NO: 1769905 - RNA, 17 nt, Human
cucaccagcugcaaagu

SEQ ID NO: 1769906 - RNA, 18 nt, Human
cucaccagcugcaaagug

SEQ ID NO: 1769907 - RNA, 20 nt, Human
cucaccagcugcaaaguguu

SEQ ID NO: 1769908 - RNA, 21 nt, Human
cucacauggugcuacgccugc

SEQ ID NO: 1769909 - RNA, 19 nt, Human
cucaccagccccagugccc

SEQ ID NO: 1769910 - RNA, 13 nt, Human
cucacauuuauau

SEQ ID NO: 1769911 - RNA, 18 nt, Human
cguccugcuuuggcagug

SEQ ID NO: 1769912 - RNA, 12 nt, Human
cguccuccucug

SEQ ID NO: 1769913 - RNA, 13 nt, Human
cguccuccucugu

SEQ ID NO: 1769914 - RNA, 14 nt, Human
cguccuccucugug

SEQ ID NO: 1769915 - RNA, 15 nt, Human
cguccuccucuguga

SEQ ID NO: 1769916 - RNA, 16 nt, Human
cgugcacacaccagag

SEQ ID NO: 1769917 - RNA, 20 nt, Human
cgucugacaggcaaugcugg

SEQ ID NO: 1769918 - RNA, 21 nt, Human
cgucugacaggcaaugcuggc

SEQ ID NO: 1769919 - RNA, 22 nt, Human
cgucugacaggcaaugcuggcu

SEQ ID NO: 1769920 - RNA, 15 nt, Human
cgugcauugugcuuc

SEQ ID NO: 1769921 - RNA, 12 nt, Human
cgugcauugugc

SEQ ID NO: 1769922 - RNA, 21 nt, Human
cgugcauugugcuucuuucuu

SEQ ID NO: 1769923 - RNA, 21 nt, Human
cgugcaguggugcgaucuggg

SEQ ID NO: 1769924 - RNA, 22 nt, Human
cgugcaguggugcgaucugggu

SEQ ID NO: 1769925 - RNA, 18 nt, Human
cgugcacacaccagagcc

SEQ ID NO: 1769926 - RNA, 19 nt, Human
cgugcacacaccagagccc

SEQ ID NO: 1769927 - RNA, 18 nt, Human
cguggaugcgcagugccu

SEQ ID NO: 1769928 - RNA, 13 nt, Human
cgugggcucccug

SEQ ID NO: 1769929 - RNA, 17 nt, Human
cgugggcucccugacug

SEQ ID NO: 1769930 - RNA, 22 nt, Human
cgugggcugggcccacaaaggc

SEQ ID NO: 1769931 - RNA, 16 nt, Human
cuaaauuuauuaaaua

SEQ ID NO: 1769932 - RNA, 17 nt, Human
cuaaauuuauuaaauaa

SEQ ID NO: 1769933 - RNA, 22 nt, Human
cuaacaaucagcuccuuccugg

SEQ ID NO: 1769934 - RNA, 17 nt, Human
cuaaaacaauaaaauuu

SEQ ID NO: 1769935 - RNA, 12 nt, Human
cuaaaacaauaa

SEQ ID NO: 1769936 - RNA, 14 nt, Human
cguuuacuaugccu

SEQ ID NO: 1769937 - RNA, 17 nt, Human
cguuuacuaugccugug

SEQ ID NO: 1769938 - RNA, 16 nt, Human
cuaaaccaaggacuga

SEQ ID NO: 1769939 - RNA, 17 nt, Human
cuaaaccaaggacugag

SEQ ID NO: 1769940 - RNA, 19 nt, Human
cuaaaccaaggacugagca

SEQ ID NO: 1769941 - RNA, 20 nt, Human
cuaaaccaaggacugagcac

SEQ ID NO: 1769942 - RNA, 23 nt, Human
cuaaaccaaggacugagcacccu

SEQ ID NO: 1769943 - RNA, 16 nt, Human
cuaaaagauauaagug

SEQ ID NO: 1769944 - RNA, 20 nt, Human
cguuuacuaugccugugucu

SEQ ID NO: 1769945 - RNA, 14 nt, Human
cgcgccacaggacc

SEQ ID NO: 1769946 - RNA, 16 nt, Human
cgcgccacaggacccu

SEQ ID NO: 1769947 - RNA, 17 nt, Human
cgcgccacaggacccuc

SEQ ID NO: 1769948 - RNA, 21 nt, Human
cgcgccacaggacccucgccg

SEQ ID NO: 1769949 - RNA, 16 nt, Human
ccucugacuuggggac

SEQ ID NO: 1769950 - RNA, 21 nt, Human
cgccccuagccgguuccuguc

SEQ ID NO: 1769951 - RNA, 12 nt, Human
cgcccagucugg

SEQ ID NO: 1769952 - RNA, 22 nt, Human
cgcccagagacccaagcugccu

SEQ ID NO: 1769953 - RNA, 14 nt, Human
cgccaguacuuguc

SEQ ID NO: 1769954 - RNA, 15 nt, Human
cgccaguacuuguca

SEQ ID NO: 1769955 - RNA, 14 nt, Human
cgcuuggagcagag

SEQ ID NO: 1769956 - RNA, 12 nt, Human
cgcuugcucugu

SEQ ID NO: 1769957 - RNA, 11 nt, Human
cgcuuuuccuu

SEQ ID NO: 1769958 - RNA, 14 nt, Human
cgcuuuuccuuggc

SEQ ID NO: 1769959 - RNA, 16 nt, Human
cgcuuuuccuuggcau

SEQ ID NO: 1769960 - RNA, 17 nt, Human
cgcuuuuccuuggcauu

SEQ ID NO: 1769961 - RNA, 13 nt, Human
cgcgccccuagcc

SEQ ID NO: 1769962 - RNA, 22 nt, Human
cgcuuuuccuuggcauuccgca

SEQ ID NO: 1769963 - RNA, 23 nt, Human
cgcuuuugccauuagccaaggau

SEQ ID NO: 1769964 - RNA, 14 nt, Human
cggaauaguuggcu

SEQ ID NO: 1769965 - RNA, 15 nt, Human
cggcagcauggagcu

SEQ ID NO: 1769966 - RNA, 15 nt, Human
cggcagccccagccu

SEQ ID NO: 1769967 - RNA, 16 nt, Human
cggcagccccagccug

SEQ ID NO: 1769968 - RNA, 17 nt, Human
cggcagccccagccugc

SEQ ID NO: 1769969 - RNA, 18 nt, Human
cggcagccccagccugcu

SEQ ID NO: 1769970 - RNA, 22 nt, Human
cggcagccccagccugcuagcu

SEQ ID NO: 1769971 - RNA, 13 nt, Human
cggccccugcugg

SEQ ID NO: 1769972 - RNA, 18 nt, Human
cggccccugcugguucag

SEQ ID NO: 1769973 - RNA, 19 nt, Human
cggccccugcugguucagg

SEQ ID NO: 1769974 - RNA, 24 nt, Human
cggccaggccagagggagugacag

SEQ ID NO: 1769975 - RNA, 20 nt, Human
cggccuagggcccccacagu

SEQ ID NO: 1769976 - RNA, 16 nt, Human
cggcccgcgccacagg

SEQ ID NO: 1769977 - RNA, 17 nt, Human
cggcccgcgccacagga

SEQ ID NO: 1769978 - RNA, 23 nt, Human
cggggacagcuccuucuguccua

SEQ ID NO: 1769979 - RNA, 21 nt, Human
cggggccuuaucgggcuccag

SEQ ID NO: 1769980 - RNA, 22 nt, Human
cggggccuuaucgggcuccagc

SEQ ID NO: 1769981 - RNA, 14 nt, Human
cggggcugucggcg

SEQ ID NO: 1769982 - RNA, 19 nt, Human
cggggcugucggcgcugcc

SEQ ID NO: 1769983 - RNA, 21 nt, Human
cggggcugucggcgcugcccc

SEQ ID NO: 1769984 - RNA, 15 nt, Human
cggggugcuuccuug

SEQ ID NO: 1769985 - RNA, 16 nt, Human
cgggggcaggugcugg

SEQ ID NO: 1769986 - RNA, 16 nt, Human
cgggacucaggcggga

SEQ ID NO: 1769987 - RNA, 22 nt, Human
cgggacucaggcgggacagugc

SEQ ID NO: 1769988 - RNA, 22 nt, Human
cggggacagcuccuucuguccu

SEQ ID NO: 1769989 - RNA, 14 nt, Human
cgggcacucagaag

SEQ ID NO: 1769990 - RNA, 22 nt, Human
cgggcacucagaagacacugau

SEQ ID NO: 1769991 - RNA, 13 nt, Human
cgggucugccucu

SEQ ID NO: 1769992 - RNA, 18 nt, Human
cgggucgggggcaggugc

SEQ ID NO: 1769993 - RNA, 17 nt, Human
cggguuagacagccaaa

SEQ ID NO: 1769994 - RNA, 14 nt, Human
cgguccacccagga

SEQ ID NO: 1769995 - RNA, 15 nt, Human
cgguccacccaggag

SEQ ID NO: 1769996 - RNA, 16 nt, Human
cgguccacccaggagc

SEQ ID NO: 1769997 - RNA, 20 nt, Human
cgguccacccaggagccccg

SEQ ID NO: 1769998 - RNA, 20 nt, Human
cggugagaggggaacagacu

SEQ ID NO: 1769999 - RNA, 21 nt, Human
cggugagaggggaacagacug

SEQ ID NO: 1770000 - RNA, 17 nt, Human
cggugagcuacaaaugc

SEQ ID NO: 1770001 - RNA, 14 nt, Human
cggugccaugucug

SEQ ID NO: 1770002 - RNA, 19 nt, Human
cggugccaugucugcagug

SEQ ID NO: 1770003 - RNA, 21 nt, Human
cggucccaguuuuguugcccc

SEQ ID NO: 1770004 - RNA, 16 nt, Human
cucuauaaggcagccu

SEQ ID NO: 1770005 - RNA, 15 nt, Human
cucuauaaaaaauau

SEQ ID NO: 1770006 - RNA, 16 nt, Human
cucuccuguccucccu

SEQ ID NO: 1770007 - RNA, 14 nt, Human
cucuccuuccugug

SEQ ID NO: 1770008 - RNA, 14 nt, Human
cucuccccagcaag

SEQ ID NO: 1770009 - RNA, 22 nt, Human
cucuccccagcaagugagagcu

SEQ ID NO: 1770010 - RNA, 24 nt, Human
cucuccccagcaagugagagcugg

SEQ ID NO: 1770011 - RNA, 18 nt, Human
cucggcuuuucucagcug

SEQ ID NO: 1770012 - RNA, 17 nt, Human
cucggcuuuucucagcu

SEQ ID NO: 1770013 - RNA, 14 nt, Human
cucuaaccucgccc

SEQ ID NO: 1770014 - RNA, 17 nt, Human
cucuaaccucgcccucu

SEQ ID NO: 1770015 - RNA, 19 nt, Human
cucuaaccucgcccucucc

SEQ ID NO: 1770016 - RNA, 20 nt, Human
cucuaaccucgcccucuccu

SEQ ID NO: 1770017 - RNA, 13 nt, Human
cucuacagaggcc

SEQ ID NO: 1770018 - RNA, 17 nt, Human
cucuacagagcuucccu

SEQ ID NO: 1770019 - RNA, 18 nt, Human
cucuacagagcuucccug

SEQ ID NO: 1770020 - RNA, 20 nt, Human
cucuacagagcuucccugac

SEQ ID NO: 1770021 - RNA, 22 nt, Human
cucuacagagcuucccugacuc

SEQ ID NO: 1770022 - RNA, 23 nt, Human
cucuacagagcuucccugacuca

SEQ ID NO: 1770023 - RNA, 19 nt, Human
cucuacagaggccaugggc

SEQ ID NO: 1770024 - RNA, 14 nt, Human
cucuacagaggcca

SEQ ID NO: 1770025 - RNA, 16 nt, Human
cucuacagaggccaug

SEQ ID NO: 1770026 - RNA, 13 nt, Human
cucggcucagcuc

SEQ ID NO: 1770027 - RNA, 16 nt, Human
cucgcuguugcugaau

SEQ ID NO: 1770028 - RNA, 15 nt, Human
cucgcuguugcugaa

SEQ ID NO: 1770029 - RNA, 13 nt, Human
cucgcuguugcug

SEQ ID NO: 1770030 - RNA, 13 nt, Human
cucgcugccagcu

SEQ ID NO: 1770031 - RNA, 16 nt, Human
cucgcugccagcucug

SEQ ID NO: 1770032 - RNA, 12 nt, Human
cucgcuguugcu

SEQ ID NO: 1770033 - RNA, 19 nt, Human
cucgcuggacucucagucu

SEQ ID NO: 1770034 - RNA, 19 nt, Human
cucgcugccagcucuguau

SEQ ID NO: 1770035 - RNA, 15 nt, Human
cucgcuggacucuca

SEQ ID NO: 1770036 - RNA, 16 nt, Human
cucgcuggacucucag

SEQ ID NO: 1770037 - RNA, 20 nt, Human
cuccugugugugcgccuaca

SEQ ID NO: 1770038 - RNA, 21 nt, Human
cucuacuaacaaucagcuccu

SEQ ID NO: 1770039 - RNA, 20 nt, Human
cucuaccagauaacugagga

SEQ ID NO: 1770040 - RNA, 23 nt, Human
cucuaccagauaacugaggaggg

SEQ ID NO: 1770041 - RNA, 21 nt, Human
cucuaccagauaacugaggag

SEQ ID NO: 1770042 - RNA, 13 nt, Human
cucuacccagggc

SEQ ID NO: 1770043 - RNA, 14 nt, Human
cucuacccagggcc

SEQ ID NO: 1770044 - RNA, 17 nt, Human
cucuacccagggccugc

SEQ ID NO: 1770045 - RNA, 18 nt, Human
cucuacccagggccugca

SEQ ID NO: 1770046 - RNA, 12 nt, Human
cucuaccugaca

SEQ ID NO: 1770047 - RNA, 22 nt, Human
cucuaccugacacucccuuggg

SEQ ID NO: 1770048 - RNA, 15 nt, Human
cucuagagccuucag

SEQ ID NO: 1770049 - RNA, 22 nt, Human
cucuagagccuucagccuuaau

SEQ ID NO: 1770050 - RNA, 16 nt, Human
cuccugccucagccuc

SEQ ID NO: 1770051 - RNA, 15 nt, Human
cuccugccucagccu

SEQ ID NO: 1770052 - RNA, 16 nt, Human
cuccugccuuccuccu

SEQ ID NO: 1770053 - RNA, 18 nt, Human
cuccugccuuccuccugg

SEQ ID NO: 1770054 - RNA, 19 nt, Human
cuccugccuuccuccuggg

SEQ ID NO: 1770055 - RNA, 20 nt, Human
cuccugccuuccuccugggc

SEQ ID NO: 1770056 - RNA, 16 nt, Human
cuccugugugugcgcc

SEQ ID NO: 1770057 - RNA, 19 nt, Human
cuccugugugugcgccuac

SEQ ID NO: 1770058 - RNA, 13 nt, Human
cuccugccucagc

SEQ ID NO: 1770059 - RNA, 14 nt, Human
cuccugccucagcc

SEQ ID NO: 1770060 - RNA, 21 nt, Human
cuccuccccccuccucugaaa

SEQ ID NO: 1770061 - RNA, 22 nt, Human
cuccuccccccuccucugaaac

SEQ ID NO: 1770062 - RNA, 11 nt, Human
cuccucccaua

SEQ ID NO: 1770063 - RNA, 22 nt, Human
cuccucuccccagcaagugaga

SEQ ID NO: 1770064 - RNA, 15 nt, Human
cuccuccaugggaga

SEQ ID NO: 1770065 - RNA, 18 nt, Human
cuccuccaugggagaaaa

SEQ ID NO: 1770066 - RNA, 15 nt, Human
cuccgaccagacacc

SEQ ID NO: 1770067 - RNA, 18 nt, Human
cucccaaagugcugggau

SEQ ID NO: 1770068 - RNA, 23 nt, Human
cucccaggugcagccagaggcac

SEQ ID NO: 1770069 - RNA, 18 nt, Human
cucccaggugcagccaga

SEQ ID NO: 1770070 - RNA, 17 nt, Human
cucccaggugcagccag

SEQ ID NO: 1770071 - RNA, 17 nt, Human
cucccaaagugcuggga

SEQ ID NO: 1770072 - RNA, 13 nt, Human
cuccaugugggcu

SEQ ID NO: 1770073 - RNA, 18 nt, Human
cucacuauguugcccagg

SEQ ID NO: 1770074 - RNA, 12 nt, Human
cuccccagcaag

SEQ ID NO: 1770075 - RNA, 20 nt, Human
cuccccagcaagugagagcu

SEQ ID NO: 1770076 - RNA, 21 nt, Human
cuccccagcaagugagagcug

SEQ ID NO: 1770077 - RNA, 12 nt, Human
cuccccagccug

SEQ ID NO: 1770078 - RNA, 13 nt, Human
cuccccagccugc

SEQ ID NO: 1770079 - RNA, 14 nt, Human
cuccccagccugcg

SEQ ID NO: 1770080 - RNA, 16 nt, Human
cuccccagccugcgcc

SEQ ID NO: 1770081 - RNA, 21 nt, Human
cuccccagccugcgccugcug

SEQ ID NO: 1770082 - RNA, 17 nt, Human
cucccgaauagcuggga

SEQ ID NO: 1770083 - RNA, 16 nt, Human
cucccgaauagcuggg

SEQ ID NO: 1770084 - RNA, 15 nt, Human
cucccgaguagcugg

SEQ ID NO: 1770085 - RNA, 18 nt, Human
cucccgaauagcugggac

SEQ ID NO: 1770086 - RNA, 16 nt, Human
cucccgaguagcuggg

SEQ ID NO: 1770087 - RNA, 17 nt, Human
cucccgaguagcuggga

SEQ ID NO: 1770088 - RNA, 19 nt, Human
cucccgaauagcugggacu

SEQ ID NO: 1770089 - RNA, 18 nt, Human
cucccgaguagcugggac

SEQ ID NO: 1770090 - RNA, 11 nt, Human
cucccgcggug

SEQ ID NO: 1770091 - RNA, 18 nt, Human
cucccgggccccacagac

SEQ ID NO: 1770092 - RNA, 12 nt, Human
cugacuugggga

SEQ ID NO: 1770093 - RNA, 19 nt, Human
cugacuuggggaccuuuug

SEQ ID NO: 1770094 - RNA, 12 nt, Human
cugacucagggc

SEQ ID NO: 1770095 - RNA, 14 nt, Human
cugacucagggcuc

SEQ ID NO: 1770096 - RNA, 13 nt, Human
cugacccacugcu

SEQ ID NO: 1770097 - RNA, 14 nt, Human
cugacccacugcuu

SEQ ID NO: 1770098 - RNA, 22 nt, Human
cugacauuguuggccaaagcca

SEQ ID NO: 1770099 - RNA, 18 nt, Human
cugacauuuggaguguuc

SEQ ID NO: 1770100 - RNA, 21 nt, Human
cugacauuuggaguguucccc

SEQ ID NO: 1770101 - RNA, 19 nt, Human
cugaagacucauucuucug

SEQ ID NO: 1770102 - RNA, 21 nt, Human
cugacaggcaaugcuggcugu

SEQ ID NO: 1770103 - RNA, 12 nt, Human
cugagcugaggc

SEQ ID NO: 1770104 - RNA, 13 nt, Human
cugagcugaggca

SEQ ID NO: 1770105 - RNA, 15 nt, Human
cugagcugaggcagc

SEQ ID NO: 1770106 - RNA, 18 nt, Human
cugaggaugggucagagc

SEQ ID NO: 1770107 - RNA, 19 nt, Human
cugaggaugggucagagcu

SEQ ID NO: 1770108 - RNA, 20 nt, Human
cugaggaugggucagagcua

SEQ ID NO: 1770109 - RNA, 15 nt, Human
cugaggcagcagugu

SEQ ID NO: 1770110 - RNA, 17 nt, Human
cugaggcagcaguguga

SEQ ID NO: 1770111 - RNA, 22 nt, Human
cugaggcagcagugugaggcca

SEQ ID NO: 1770112 - RNA, 23 nt, Human
cugaggcagcagugugaggccag

SEQ ID NO: 1770113 - RNA, 24 nt, Human
cugaggcagcagugugaggccagg

SEQ ID NO: 1770114 - RNA, 13 nt, Human
cugagccuggcca

SEQ ID NO: 1770115 - RNA, 14 nt, Human
cugagccuggccag

SEQ ID NO: 1770116 - RNA, 15 nt, Human
cugagccuggccagc

SEQ ID NO: 1770117 - RNA, 17 nt, Human
cugagccuggccagccu

SEQ ID NO: 1770118 - RNA, 20 nt, Human
cugagcgaggagaugcuccu

SEQ ID NO: 1770119 - RNA, 21 nt, Human
cucugccugaagucacacagu

SEQ ID NO: 1770120 - RNA, 22 nt, Human
cucugccugaagucacacagug

SEQ ID NO: 1770121 - RNA, 15 nt, Human
cucuggacaggcaug

SEQ ID NO: 1770122 - RNA, 16 nt, Human
cucuggacaggcaugu

SEQ ID NO: 1770123 - RNA, 22 nt, Human
cucuggacaggcauguucucug

SEQ ID NO: 1770124 - RNA, 22 nt, Human
cucuggaucuguuccuuggcag

SEQ ID NO: 1770125 - RNA, 19 nt, Human
cucugugucagguggggca

SEQ ID NO: 1770126 - RNA, 14 nt, Human
cucuguucagugua

SEQ ID NO: 1770127 - RNA, 15 nt, Human
cucuguucaguguaa

SEQ ID NO: 1770128 - RNA, 17 nt, Human
cucuguucaguguaaau

SEQ ID NO: 1770129 - RNA, 15 nt, Human
cucugugucaggugg

SEQ ID NO: 1770130 - RNA, 17 nt, Human
cucugugggugaugggg

SEQ ID NO: 1770131 - RNA, 22 nt, Human
cucugugggugauggggagggg

SEQ ID NO: 1770132 - RNA, 18 nt, Human
cucuguucaguguaaaua

SEQ ID NO: 1770133 - RNA, 14 nt, Human
cucuuacucuuucc

SEQ ID NO: 1770134 - RNA, 15 nt, Human
cucuuacucuuuccu

SEQ ID NO: 1770135 - RNA, 16 nt, Human
cucuuacucuuuccua

SEQ ID NO: 1770136 - RNA, 18 nt, Human
cucuuacucuuuccuauu

SEQ ID NO: 1770137 - RNA, 20 nt, Human
cucuuacucuuuccuauuuc

SEQ ID NO: 1770138 - RNA, 14 nt, Human
cucuucaucuaaua

SEQ ID NO: 1770139 - RNA, 22 nt, Human
cucugucugaguaagaaacaga

SEQ ID NO: 1770140 - RNA, 14 nt, Human
cucugucucaucca

SEQ ID NO: 1770141 - RNA, 15 nt, Human
cucugucucauccau

SEQ ID NO: 1770142 - RNA, 17 nt, Human
cucugucuucaccugau

SEQ ID NO: 1770143 - RNA, 18 nt, Human
cugaaagcugguggcaga

SEQ ID NO: 1770144 - RNA, 21 nt, Human
cugaaauaucccggggguggg

SEQ ID NO: 1770145 - RNA, 22 nt, Human
cugaaauaucccgggggugggg

SEQ ID NO: 1770146 - RNA, 19 nt, Human
cucuuucugucccuucugu

SEQ ID NO: 1770147 - RNA, 19 nt, Human
cucuuuccuauuucagugu

SEQ ID NO: 1770148 - RNA, 20 nt, Human
cucuuuccuauuucaguguu

SEQ ID NO: 1770149 - RNA, 12 nt, Human
cucuuugcugca

SEQ ID NO: 1770150 - RNA, 13 nt, Human
cucuuugcugcag

SEQ ID NO: 1770151 - RNA, 17 nt, Human
cucuuugcugcagagaa

SEQ ID NO: 1770152 - RNA, 10 nt, Human
cucuuugaga

SEQ ID NO: 1770153 - RNA, 13 nt, Human
cugaacagaagcu

SEQ ID NO: 1770154 - RNA, 18 nt, Human
cucuuuaaugucacaggc

SEQ ID NO: 1770155 - RNA, 21 nt, Human
cucuuuagaguuagacuguug

SEQ ID NO: 1770156 - RNA, 19 nt, Human
cucuuuagaguuagacugu

SEQ ID NO: 1770157 - RNA, 18 nt, Human
cucuuuagaguuagacug

SEQ ID NO: 1770158 - RNA, 17 nt, Human
cucuuuagaguuagacu

SEQ ID NO: 1770159 - RNA, 15 nt, Human
cucuuuagaguuaga

SEQ ID NO: 1770160 - RNA, 20 nt, Human
cucuuuaaugucacaggcag

SEQ ID NO: 1770161 - RNA, 21 nt, Human
cucuuuaaugucacaggcagg

SEQ ID NO: 1770162 - RNA, 22 nt, Human
cucuuuaaugucacaggcaggu

SEQ ID NO: 1770163 - RNA, 23 nt, Human
cucuuuaaugucacaggcagguc

SEQ ID NO: 1770164 - RNA, 21 nt, Human
cucuuggguucaagcgauucu

SEQ ID NO: 1770165 - RNA, 19 nt, Human
cucuuggguucaagcgauu

SEQ ID NO: 1770166 - RNA, 16 nt, Human
cucuucuucccagcac

SEQ ID NO: 1770167 - RNA, 13 nt, Human
cucuucugucccu

SEQ ID NO: 1770168 - RNA, 16 nt, Human
cucuuccgacucuuuc

SEQ ID NO: 1770169 - RNA, 18 nt, Human
cucuuccgacucuuucug

SEQ ID NO: 1770170 - RNA, 17 nt, Human
cucuuccuacccugccu

SEQ ID NO: 1770171 - RNA, 18 nt, Human
cucuuccuacccugccuc

SEQ ID NO: 1770172 - RNA, 19 nt, Human
cucuuccuacccugccucc

SEQ ID NO: 1770173 - RNA, 16 nt, Human
cuggcacccggccccu

SEQ ID NO: 1770174 - RNA, 17 nt, Human
cuggcacccggccccug

SEQ ID NO: 1770175 - RNA, 18 nt, Human
cuggcacccggccccugc

SEQ ID NO: 1770176 - RNA, 17 nt, Human
cuggcaugauccaagca

SEQ ID NO: 1770177 - RNA, 18 nt, Human
cuggcaugauccaagcaa

SEQ ID NO: 1770178 - RNA, 23 nt, Human
cuggccucaagugauucuccugc

SEQ ID NO: 1770179 - RNA, 17 nt, Human
cuggccccauggucagc

SEQ ID NO: 1770180 - RNA, 19 nt, Human
cugggaggaauggacagac

SEQ ID NO: 1770181 - RNA, 22 nt, Human
cugggaggaauggacagacaga

SEQ ID NO: 1770182 - RNA, 17 nt, Human
cugggaggaauggacag

SEQ ID NO: 1770183 - RNA, 24 nt, Human
cugggccguaucuccggcucccag

SEQ ID NO: 1770184 - RNA, 18 nt, Human
cugggccguaucuccggc

SEQ ID NO: 1770185 - RNA, 21 nt, Human
cugggccguaucuccggcucc

SEQ ID NO: 1770186 - RNA, 12 nt, Human
cugggagugagc

SEQ ID NO: 1770187 - RNA, 20 nt, Human
cugggauuacaggugugaac

SEQ ID NO: 1770188 - RNA, 17 nt, Human
cugggauuacaggugug

SEQ ID NO: 1770189 - RNA, 18 nt, Human
cuggcuguuggcuggggg

SEQ ID NO: 1770190 - RNA, 16 nt, Human
cuggcuguuggcuggg

SEQ ID NO: 1770191 - RNA, 17 nt, Human
cuggcuguuggcugggg

SEQ ID NO: 1770192 - RNA, 22 nt, Human
cuggcgacacguagcagcuuag

SEQ ID NO: 1770193 - RNA, 23 nt, Human
cuggcgagagucuggcccuagac

SEQ ID NO: 1770194 - RNA, 19 nt, Human
cuggcgagagucuggcccu

SEQ ID NO: 1770195 - RNA, 23 nt, Human
cuggcgcagaacgaaccuuggcc

SEQ ID NO: 1770196 - RNA, 24 nt, Human
cuggcgcagaacgaaccuuggccu

SEQ ID NO: 1770197 - RNA, 20 nt, Human
cugguucaggguuggccccu

SEQ ID NO: 1770198 - RNA, 12 nt, Human
cugguggcagcu

SEQ ID NO: 1770199 - RNA, 16 nt, Human
cugguggcagaguccu

SEQ ID NO: 1770200 - RNA, 11 nt, Human
cuguacagggg

SEQ ID NO: 1770201 - RNA, 15 nt, Human
cuggguuggagggug

SEQ ID NO: 1770202 - RNA, 19 nt, Human
cuggguacuuguggacaca

SEQ ID NO: 1770203 - RNA, 18 nt, Human
cuggguacuuguggacac

SEQ ID NO: 1770204 - RNA, 16 nt, Human
cuggguacuuguggac

SEQ ID NO: 1770205 - RNA, 14 nt, Human
cuggguacuugugg

SEQ ID NO: 1770206 - RNA, 17 nt, Human
cugguagccugcagaag

SEQ ID NO: 1770207 - RNA, 23 nt, Human
cuggucucaaacucuugaccuca

SEQ ID NO: 1770208 - RNA, 14 nt, Human
cuggucccacucag

SEQ ID NO: 1770209 - RNA, 13 nt, Human
cuggucccacuca

SEQ ID NO: 1770210 - RNA, 13 nt, Human
cugguccacaggg

SEQ ID NO: 1770211 - RNA, 16 nt, Human
cugguccacagggcac

SEQ ID NO: 1770212 - RNA, 22 nt, Human
cugguccacagggcaccugcca

SEQ ID NO: 1770213 - RNA, 12 nt, Human
cugucccucaca

SEQ ID NO: 1770214 - RNA, 13 nt, Human
cugucccucacag

SEQ ID NO: 1770215 - RNA, 16 nt, Human
cugucccucacagcac

SEQ ID NO: 1770216 - RNA, 12 nt, Human
cugucccuccgg

SEQ ID NO: 1770217 - RNA, 16 nt, Human
cuguccuacucugugu

SEQ ID NO: 1770218 - RNA, 17 nt, Human
cuguccuacucuguguc

SEQ ID NO: 1770219 - RNA, 18 nt, Human
cuguccuacucuguguca

SEQ ID NO: 1770220 - RNA, 20 nt, Human
cuguccuacucugugucagg

SEQ ID NO: 1770221 - RNA, 17 nt, Human
cugucccuucugucccu

SEQ ID NO: 1770222 - RNA, 18 nt, Human
cugucccuucugucccuc

SEQ ID NO: 1770223 - RNA, 19 nt, Human
cugucccuucugucccuca

SEQ ID NO: 1770224 - RNA, 12 nt, Human
cugucucaucca

SEQ ID NO: 1770225 - RNA, 15 nt, Human
cugucucauccauca

SEQ ID NO: 1770226 - RNA, 16 nt, Human
cugucucauccaucau

SEQ ID NO: 1770227 - RNA, 17 nt, Human
cugucucauccaucauc

SEQ ID NO: 1770228 - RNA, 20 nt, Human
cugucucauccaucaucaug

SEQ ID NO: 1770229 - RNA, 21 nt, Human
cugucucauccaucaucaugu

SEQ ID NO: 1770230 - RNA, 21 nt, Human
cuguccuacucugugucaggu

SEQ ID NO: 1770231 - RNA, 22 nt, Human
cugucuccuuucaccccagggc

SEQ ID NO: 1770232 - RNA, 23 nt, Human
cugucuccuuucaccccagggcc

SEQ ID NO: 1770233 - RNA, 18 nt, Human
cugucccauagucccugc

SEQ ID NO: 1770234 - RNA, 19 nt, Human
cugucccauagucccugcc

SEQ ID NO: 1770235 - RNA, 21 nt, Human
cugucccaucuggucauuugg

SEQ ID NO: 1770236 - RNA, 14 nt, Human
cuguaucccaugag

SEQ ID NO: 1770237 - RNA, 15 nt, Human
cuguaucccaugagc

SEQ ID NO: 1770238 - RNA, 19 nt, Human
cuguaucccaugagccuca

SEQ ID NO: 1770239 - RNA, 18 nt, Human
cuguaucccaugagccuc

SEQ ID NO: 1770240 - RNA, 18 nt, Human
cuguauguuauagaacuu

SEQ ID NO: 1770241 - RNA, 19 nt, Human
cuguauguuauagaacuuc

SEQ ID NO: 1770242 - RNA, 15 nt, Human
cuguauuaagccacu

SEQ ID NO: 1770243 - RNA, 12 nt, Human
cugcucugguua

SEQ ID NO: 1770244 - RNA, 20 nt, Human
cugcucugcgugucaccugu

SEQ ID NO: 1770245 - RNA, 21 nt, Human
cugcucugcgugucaccugug

SEQ ID NO: 1770246 - RNA, 22 nt, Human
cugcucugcgugucaccugugc

SEQ ID NO: 1770247 - RNA, 20 nt, Human
cugcuccccagcagcggaac

SEQ ID NO: 1770248 - RNA, 23 nt, Human
cugcuccucuccccagcaaguga

SEQ ID NO: 1770249 - RNA, 19 nt, Human
cugcuccucuccccagcaa

SEQ ID NO: 1770250 - RNA, 20 nt, Human
cugcuccucuccccagcaag

SEQ ID NO: 1770251 - RNA, 15 nt, Human
cugcucuccgaccag

SEQ ID NO: 1770252 - RNA, 19 nt, Human
cugcucuccgaccagacac

SEQ ID NO: 1770253 - RNA, 13 nt, Human
cugccuuccuccu

SEQ ID NO: 1770254 - RNA, 14 nt, Human
cugccuuccuccug

SEQ ID NO: 1770255 - RNA, 15 nt, Human
cugccuuccuccugg

SEQ ID NO: 1770256 - RNA, 16 nt, Human
cugccuuccuccuggg

SEQ ID NO: 1770257 - RNA, 18 nt, Human
cugccuuccuccugggcc

SEQ ID NO: 1770258 - RNA, 21 nt, Human
cugccuuccuccugggcccuc

SEQ ID NO: 1770259 - RNA, 16 nt, Human
cugcgccaguccugcu

SEQ ID NO: 1770260 - RNA, 20 nt, Human
cugcgccaguccugcuaccu

SEQ ID NO: 1770261 - RNA, 21 nt, Human
cugcgccuuuccuuuucgccu

SEQ ID NO: 1770262 - RNA, 12 nt, Human
cugcgccugcug

SEQ ID NO: 1770263 - RNA, 13 nt, Human
cugcgccugcugc

SEQ ID NO: 1770264 - RNA, 20 nt, Human
cugcgccugcugcaugcccu

SEQ ID NO: 1770265 - RNA, 23 nt, Human
cugcgccugcugcaugcccucuc

SEQ ID NO: 1770266 - RNA, 13 nt, Human
cugcgccuuuccu

SEQ ID NO: 1770267 - RNA, 23 nt, Human
cugcgguccacccaggagccccg

SEQ ID NO: 1770268 - RNA, 23 nt, Human
cugccugaagucacacagugagu

SEQ ID NO: 1770269 - RNA, 19 nt, Human
cugccugaagucacacagu

SEQ ID NO: 1770270 - RNA, 12 nt, Human
cugccugcccac

SEQ ID NO: 1770271 - RNA, 13 nt, Human
cugccugcccaca

SEQ ID NO: 1770272 - RNA, 23 nt, Human
cugccugccgguaaacacgccug

SEQ ID NO: 1770273 - RNA, 18 nt, Human
cugccugaagucacacag

SEQ ID NO: 1770274 - RNA, 16 nt, Human
cugccugaagucacac

SEQ ID NO: 1770275 - RNA, 19 nt, Human
cugcuuuugucuaugggac

SEQ ID NO: 1770276 - RNA, 17 nt, Human
cugcuuuuggucugugu

SEQ ID NO: 1770277 - RNA, 12 nt, Human
cuggaagcccag

SEQ ID NO: 1770278 - RNA, 14 nt, Human
cuggaagcccagcc

SEQ ID NO: 1770279 - RNA, 17 nt, Human
cuggaagcccagccccu

SEQ ID NO: 1770280 - RNA, 21 nt, Human
cuggaagcccagccccuacug

SEQ ID NO: 1770281 - RNA, 22 nt, Human
cuggaagcccagccccuacugc

SEQ ID NO: 1770282 - RNA, 14 nt, Human
cugcuuuggcagug

SEQ ID NO: 1770283 - RNA, 15 nt, Human
cugcuuuggcagugc

SEQ ID NO: 1770284 - RNA, 16 nt, Human
cugcuuuggcagugcc

SEQ ID NO: 1770285 - RNA, 15 nt, Human
cugcuuuuggucugu

SEQ ID NO: 1770286 - RNA, 12 nt, Human
cugcuugaggaa

SEQ ID NO: 1770287 - RNA, 13 nt, Human
cugcuugaggaaa

SEQ ID NO: 1770288 - RNA, 14 nt, Human
cugcuugaggaaaa

SEQ ID NO: 1770289 - RNA, 16 nt, Human
cugcuugaggaaaaca

SEQ ID NO: 1770290 - RNA, 22 nt, Human
cugcuucuccaaaaaucugccu

SEQ ID NO: 1770291 - RNA, 23 nt, Human
cugcuucuccaaaaaucugccug

SEQ ID NO: 1770292 - RNA, 12 nt, Human
cugcccucuaga

SEQ ID NO: 1770293 - RNA, 14 nt, Human
cugcccucuagagc

SEQ ID NO: 1770294 - RNA, 20 nt, Human
cugcccucuagagccuucag

SEQ ID NO: 1770295 - RNA, 18 nt, Human
cugcccguaaacacgccu

SEQ ID NO: 1770296 - RNA, 19 nt, Human
cugcccguaaacacgccug

SEQ ID NO: 1770297 - RNA, 21 nt, Human
cugcccguaaacacgccugca

SEQ ID NO: 1770298 - RNA, 14 nt, Human
cugccccagcccag

SEQ ID NO: 1770299 - RNA, 15 nt, Human
cugccccagcccaga

SEQ ID NO: 1770300 - RNA, 16 nt, Human
cugccccagcccagau

SEQ ID NO: 1770301 - RNA, 14 nt, Human
cugcccaggccccu

SEQ ID NO: 1770302 - RNA, 15 nt, Human
cugcccaggccccug

SEQ ID NO: 1770303 - RNA, 23 nt, Human
cugccccaccccuccccauuagc

SEQ ID NO: 1770304 - RNA, 16 nt, Human
cugcccaggccccugc

SEQ ID NO: 1770305 - RNA, 18 nt, Human
cugcccaggccccugcca

SEQ ID NO: 1770306 - RNA, 19 nt, Human
cugcccaggccccugccac

SEQ ID NO: 1770307 - RNA, 20 nt, Human
cugcccaggccccugccacc

SEQ ID NO: 1770308 - RNA, 21 nt, Human
cugccauccagguucagcuug

SEQ ID NO: 1770309 - RNA, 16 nt, Human
cugccauguugccccu

SEQ ID NO: 1770310 - RNA, 22 nt, Human
cugccauguugccccuuucucu

SEQ ID NO: 1770311 - RNA, 17 nt, Human
cugccagcucuguauca

SEQ ID NO: 1770312 - RNA, 21 nt, Human
cugccacccuggggagaaagu

SEQ ID NO: 1770313 - RNA, 23 nt, Human
cugccacccugggccuggcagcu

SEQ ID NO: 1770314 - RNA, 12 nt, Human
cugccacccugg

SEQ ID NO: 1770315 - RNA, 14 nt, Human
cugccacccugggg

SEQ ID NO: 1770316 - RNA, 16 nt, Human
cugccacccugggccu

SEQ ID NO: 1770317 - RNA, 17 nt, Human
cugccacccugggccug

SEQ ID NO: 1770318 - RNA, 12 nt, Human
cugccaccccua

SEQ ID NO: 1770319 - RNA, 14 nt, Human
cugcagugugcccc

SEQ ID NO: 1770320 - RNA, 15 nt, Human
cugcagugugccccc

SEQ ID NO: 1770321 - RNA, 18 nt, Human
cugcaccgggccacagag

SEQ ID NO: 1770322 - RNA, 20 nt, Human
cugcaccgggccacagagaa

SEQ ID NO: 1770323 - RNA, 14 nt, Human
cugcaccgggccac

SEQ ID NO: 1770324 - RNA, 15 nt, Human
cugcaccgggccaca

SEQ ID NO: 1770325 - RNA, 17 nt, Human
cuuucuuagaaauuuau

SEQ ID NO: 1770326 - RNA, 14 nt, Human
cuuucuuagaaauu

SEQ ID NO: 1770327 - RNA, 13 nt, Human
cuuucuuagaaau

SEQ ID NO: 1770328 - RNA, 11 nt, Human
cuuucuuagaa

SEQ ID NO: 1770329 - RNA, 15 nt, Human
cuuucuuucuuagaa

SEQ ID NO: 1770330 - RNA, 17 nt, Human
cuuucuuucuuagaaau

SEQ ID NO: 1770331 - RNA, 16 nt, Human
cuuucuuucuuagaaa

SEQ ID NO: 1770332 - RNA, 22 nt, Human
cuuucuuugggaauauuugaau

SEQ ID NO: 1770333 - RNA, 21 nt, Human
cuuucuuugggaauauuugaa

SEQ ID NO: 1770334 - RNA, 20 nt, Human
cuuucuuugggaauauuuga

SEQ ID NO: 1770335 - RNA, 18 nt, Human
cuuucuuugggaauauuu

SEQ ID NO: 1770336 - RNA, 23 nt, Human
cuuucuuugggaauauuugaauc

SEQ ID NO: 1770337 - RNA, 16 nt, Human
cuuugcagacaggcaa

SEQ ID NO: 1770338 - RNA, 14 nt, Human
cuuugcagacaggc

SEQ ID NO: 1770339 - RNA, 15 nt, Human
cuuugcagacaggca

SEQ ID NO: 1770340 - RNA, 17 nt, Human
cuuugaauaaagaauac

SEQ ID NO: 1770341 - RNA, 18 nt, Human
cuuugaauaaagaauacu

SEQ ID NO: 1770342 - RNA, 21 nt, Human
cuuugaauaaagaauacuuga

SEQ ID NO: 1770343 - RNA, 22 nt, Human
cuuugaauaaagaauacuugaa

SEQ ID NO: 1770344 - RNA, 16 nt, Human
cuuugaagucauacca

SEQ ID NO: 1770345 - RNA, 21 nt, Human
cuuguggacacagcucuucuc

SEQ ID NO: 1770346 - RNA, 19 nt, Human
cuuucaaaaccuuuugaaa

SEQ ID NO: 1770347 - RNA, 15 nt, Human
cuuucaaaccagcuu

SEQ ID NO: 1770348 - RNA, 16 nt, Human
cuuucaaaccagcuuc

SEQ ID NO: 1770349 - RNA, 18 nt, Human
cuuucaaaccagcuucau

SEQ ID NO: 1770350 - RNA, 17 nt, Human
cuuucauguaaacugug

SEQ ID NO: 1770351 - RNA, 19 nt, Human
cuuucauguaaacugugca

SEQ ID NO: 1770352 - RNA, 20 nt, Human
cuuucauguaaacugugcac

SEQ ID NO: 1770353 - RNA, 21 nt, Human
cuuucauguaaacugugcacc

SEQ ID NO: 1770354 - RNA, 21 nt, Human
cuuuccacggagccacuccuc

SEQ ID NO: 1770355 - RNA, 22 nt, Human
cuuuccacggagccacuccucu

SEQ ID NO: 1770356 - RNA, 11 nt, Human
cuuuuucuacc

SEQ ID NO: 1770357 - RNA, 14 nt, Human
cuuuucgccuuucc

SEQ ID NO: 1770358 - RNA, 15 nt, Human
cuuuucgccuuuccu

SEQ ID NO: 1770359 - RNA, 18 nt, Human
cuuuguuuuuuguuggag

SEQ ID NO: 1770360 - RNA, 13 nt, Human
cuuuuaaugaaaa

SEQ ID NO: 1770361 - RNA, 16 nt, Human
cuuuuaaugaaaagga

SEQ ID NO: 1770362 - RNA, 13 nt, Human
cuuuuccuuggca

SEQ ID NO: 1770363 - RNA, 15 nt, Human
cuuuuccuuggcauu

SEQ ID NO: 1770364 - RNA, 16 nt, Human
cuuuuccauuaugcug

SEQ ID NO: 1770365 - RNA, 21 nt, Human
cuucuuucuuugggaauauuu

SEQ ID NO: 1770366 - RNA, 19 nt, Human
cuugaacuccuggccucaa

SEQ ID NO: 1770367 - RNA, 16 nt, Human
cuugaacuggguacuu

SEQ ID NO: 1770368 - RNA, 14 nt, Human
cuugaacuugccuc

SEQ ID NO: 1770369 - RNA, 15 nt, Human
cuugaacuugccucu

SEQ ID NO: 1770370 - RNA, 18 nt, Human
cuugaacuugccucuuuu

SEQ ID NO: 1770371 - RNA, 18 nt, Human
cuugaacuggguacuugu

SEQ ID NO: 1770372 - RNA, 20 nt, Human
cuugaacuggguacuugugg

SEQ ID NO: 1770373 - RNA, 14 nt, Human
cuugaacuccuggc

SEQ ID NO: 1770374 - RNA, 15 nt, Human
cuugaacuccuggcc

SEQ ID NO: 1770375 - RNA, 17 nt, Human
cuugaacuccuggccuc

SEQ ID NO: 1770376 - RNA, 18 nt, Human
cuugaacuccuggccuca

SEQ ID NO: 1770377 - RNA, 14 nt, Human
cuugcaauggcagc

SEQ ID NO: 1770378 - RNA, 20 nt, Human
cuugcagacucuacagaggc

SEQ ID NO: 1770379 - RNA, 18 nt, Human
cuugcagacucuacagag

SEQ ID NO: 1770380 - RNA, 15 nt, Human
cuuguauccaggccu

SEQ ID NO: 1770381 - RNA, 17 nt, Human
cuuguauccaggccugg

SEQ ID NO: 1770382 - RNA, 17 nt, Human
cuuguggacacagcucu

SEQ ID NO: 1770383 - RNA, 18 nt, Human
cuuguggacacagcucuu

SEQ ID NO: 1770384 - RNA, 20 nt, Human
cuugucauauguagccuuca

SEQ ID NO: 1770385 - RNA, 14 nt, Human
cuuggcugcaggga

SEQ ID NO: 1770386 - RNA, 14 nt, Human
cuuggcuugcccac

SEQ ID NO: 1770387 - RNA, 17 nt, Human
cuuguaaacagaagcaa

SEQ ID NO: 1770388 - RNA, 18 nt, Human
cuuguaaaggaauuuaaa

SEQ ID NO: 1770389 - RNA, 23 nt, Human
cuuggcucaaguccucuuuucug

SEQ ID NO: 1770390 - RNA, 12 nt, Human
cuuggcugcagg

SEQ ID NO: 1770391 - RNA, 13 nt, Human
cuuggcugcaggg

SEQ ID NO: 1770392 - RNA, 14 nt, Human
cuuggauucucuaa

SEQ ID NO: 1770393 - RNA, 15 nt, Human
cuuggauucucuaac

SEQ ID NO: 1770394 - RNA, 18 nt, Human
cuuggauguaccugcccc

SEQ ID NO: 1770395 - RNA, 16 nt, Human
cuuggaccagaucuaa

SEQ ID NO: 1770396 - RNA, 21 nt, Human
cuugcuggcuacgccucuucu

SEQ ID NO: 1770397 - RNA, 22 nt, Human
cuugcuggcuacgccucuucug

SEQ ID NO: 1770398 - RNA, 17 nt, Human
cuugccaaauauaaaua

SEQ ID NO: 1770399 - RNA, 12 nt, Human
cuugcugcuguc

SEQ ID NO: 1770400 - RNA, 13 nt, Human
cuugcugcugucu

SEQ ID NO: 1770401 - RNA, 16 nt, Human
gaacugugccacaaug

SEQ ID NO: 1770402 - RNA, 20 nt, Human
gaaccacaucuugcucugcu

SEQ ID NO: 1770403 - RNA, 18 nt, Human
gaaccacaucuugcucug

SEQ ID NO: 1770404 - RNA, 15 nt, Human
gaagaaaguggaaaa

SEQ ID NO: 1770405 - RNA, 22 nt, Human
gaacuuguaaaggaauuuaaaa

SEQ ID NO: 1770406 - RNA, 15 nt, Human
gaacuugucucuuca

SEQ ID NO: 1770407 - RNA, 14 nt, Human
gaagauucuuuccc

SEQ ID NO: 1770408 - RNA, 21 nt, Human
gaagaucucacucugcccccc

SEQ ID NO: 1770409 - RNA, 19 nt, Human
gaagaucucugcagggccg

SEQ ID NO: 1770410 - RNA, 22 nt, Human
gaagaucucugcagggccgcca

SEQ ID NO: 1770411 - RNA, 21 nt, Human
gaaggaacuugucucuucauc

SEQ ID NO: 1770412 - RNA, 23 nt, Human
gaaggaacuugucucuucaucua

SEQ ID NO: 1770413 - RNA, 19 nt, Human
gaaggacauugcggacagc

SEQ ID NO: 1770414 - RNA, 20 nt, Human
gaaggacauugcggacagcc

SEQ ID NO: 1770415 - RNA, 21 nt, Human
gaaggacauugcggacagcca

SEQ ID NO: 1770416 - RNA, 20 nt, Human
gaagccgccaguacuuguca

SEQ ID NO: 1770417 - RNA, 21 nt, Human
gaagccucugggucagugguc

SEQ ID NO: 1770418 - RNA, 16 nt, Human
gaaguaagccucauca

SEQ ID NO: 1770419 - RNA, 15 nt, Human
gaagucaaagcaagg

SEQ ID NO: 1770420 - RNA, 16 nt, Human
gaagucaaagcaagga

SEQ ID NO: 1770421 - RNA, 13 nt, Human
gaagucacacagu

SEQ ID NO: 1770422 - RNA, 14 nt, Human
gaaggggccagagg

SEQ ID NO: 1770423 - RNA, 16 nt, Human
gaaggggccagaggcu

SEQ ID NO: 1770424 - RNA, 17 nt, Human
gaaggggccagaggcuc

SEQ ID NO: 1770425 - RNA, 18 nt, Human
gaaaugaggucagagccu

SEQ ID NO: 1770426 - RNA, 22 nt, Human
gaaaugcauugcucuggaucug

SEQ ID NO: 1770427 - RNA, 12 nt, Human
gaaauaucauuu

SEQ ID NO: 1770428 - RNA, 13 nt, Human
gaaauaucauuua

SEQ ID NO: 1770429 - RNA, 14 nt, Human
gaaauaucauuuau

SEQ ID NO: 1770430 - RNA, 18 nt, Human
gaaauaucccgggggugg

SEQ ID NO: 1770431 - RNA, 20 nt, Human
gaaauaucccgggggugggg

SEQ ID NO: 1770432 - RNA, 22 nt, Human
gaacagacuggaagcacagcuu

SEQ ID NO: 1770433 - RNA, 11 nt, Human
gaacaggacua

SEQ ID NO: 1770434 - RNA, 12 nt, Human
gaacaugcaguu

SEQ ID NO: 1770435 - RNA, 13 nt, Human
gaacaugcaguuu

SEQ ID NO: 1770436 - RNA, 15 nt, Human
gaacaugcaguuuga

SEQ ID NO: 1770437 - RNA, 16 nt, Human
gaacaugcaguuugaa

SEQ ID NO: 1770438 - RNA, 18 nt, Human
gaacaugcaguuugaaau

SEQ ID NO: 1770439 - RNA, 19 nt, Human
gaacaugcaguuugaaauu

SEQ ID NO: 1770440 - RNA, 20 nt, Human
gaacaugcaguuugaaauuc

SEQ ID NO: 1770441 - RNA, 22 nt, Human
gaacaugcaguuugaaauucug

SEQ ID NO: 1770442 - RNA, 23 nt, Human
gaacaugcaguuugaaauucuga

SEQ ID NO: 1770443 - RNA, 20 nt, Human
gaacagacuggaagcacagc

SEQ ID NO: 1770444 - RNA, 17 nt, Human
gaaagacugaagaaagu

SEQ ID NO: 1770445 - RNA, 19 nt, Human
gaaagacugaagaaagugu

SEQ ID NO: 1770446 - RNA, 15 nt, Human
gaaacugcagggaaa

SEQ ID NO: 1770447 - RNA, 20 nt, Human
gaaaaaugcccuuaaaucau

SEQ ID NO: 1770448 - RNA, 19 nt, Human
gaaaaagaacaugcaguuu

SEQ ID NO: 1770449 - RNA, 21 nt, Human
gaaaaagaacaugcaguuuga

SEQ ID NO: 1770450 - RNA, 23 nt, Human
gaaaaagaacaugcaguuugaaa

SEQ ID NO: 1770451 - RNA, 19 nt, Human
gaaacuauauuuugucaua

SEQ ID NO: 1770452 - RNA, 21 nt, Human
gaaagcauuugaaugcauuuu

SEQ ID NO: 1770453 - RNA, 20 nt, Human
gaaagcauuugaaugcauuu

SEQ ID NO: 1770454 - RNA, 18 nt, Human
gaaagcauuugaaugcau

SEQ ID NO: 1770455 - RNA, 17 nt, Human
gaaagcauuugaaugca

SEQ ID NO: 1770456 - RNA, 16 nt, Human
gaaagcauuugaaugc

SEQ ID NO: 1770457 - RNA, 15 nt, Human
gaaagcauuugaaug

SEQ ID NO: 1770458 - RNA, 14 nt, Human
gaaagcauuugaau

SEQ ID NO: 1770459 - RNA, 12 nt, Human
gaaagcauuuga

SEQ ID NO: 1770460 - RNA, 17 nt, Human
gaaagucauuggcuuua

SEQ ID NO: 1770461 - RNA, 14 nt, Human
gaaagucauuggcu

SEQ ID NO: 1770462 - RNA, 21 nt, Human
gaaagucauuggcuuuauccu

SEQ ID NO: 1770463 - RNA, 18 nt, Human
gaaagucauuggcuuuau

SEQ ID NO: 1770464 - RNA, 13 nt, Human
gagcccaccuugg

SEQ ID NO: 1770465 - RNA, 15 nt, Human
gagcccaccuuggcu

SEQ ID NO: 1770466 - RNA, 17 nt, Human
gagcccaccuuggcuca

SEQ ID NO: 1770467 - RNA, 18 nt, Human
gagccacugcaccgggcc

SEQ ID NO: 1770468 - RNA, 19 nt, Human
gagccacugcaccgggcca

SEQ ID NO: 1770469 - RNA, 20 nt, Human
gagccacugcaccgggccac

SEQ ID NO: 1770470 - RNA, 15 nt, Human
gagcagaggggcuga

SEQ ID NO: 1770471 - RNA, 14 nt, Human
gagaguuuuggaug

SEQ ID NO: 1770472 - RNA, 12 nt, Human
gagccugcaguu

SEQ ID NO: 1770473 - RNA, 10 nt, Human
gagccugagg

SEQ ID NO: 1770474 - RNA, 12 nt, Human
gagccugaggga

SEQ ID NO: 1770475 - RNA, 15 nt, Human
gagccugagggaucu

SEQ ID NO: 1770476 - RNA, 13 nt, Human
gagccucagcauc

SEQ ID NO: 1770477 - RNA, 13 nt, Human
gagccgugguccu

SEQ ID NO: 1770478 - RNA, 17 nt, Human
gagccgugguccuuugg

SEQ ID NO: 1770479 - RNA, 16 nt, Human
gagccguggucccuga

SEQ ID NO: 1770480 - RNA, 19 nt, Human
gagccguggucccugagga

SEQ ID NO: 1770481 - RNA, 20 nt, Human
gagccguggucccugaggau

SEQ ID NO: 1770482 - RNA, 17 nt, Human
gagccucagcauccugg

SEQ ID NO: 1770483 - RNA, 14 nt, Human
gagccucagcaucc

SEQ ID NO: 1770484 - RNA, 15 nt, Human
gagccucagcauccu

SEQ ID NO: 1770485 - RNA, 21 nt, Human
gagccgagaucacgccacugc

SEQ ID NO: 1770486 - RNA, 22 nt, Human
gagccgagaucacgccacugca

SEQ ID NO: 1770487 - RNA, 17 nt, Human
gagccgggucugccucu

SEQ ID NO: 1770488 - RNA, 20 nt, Human
gagccgggucugccucuucu

SEQ ID NO: 1770489 - RNA, 21 nt, Human
gagccgggucugccucuucug

SEQ ID NO: 1770490 - RNA, 22 nt, Human
gagccgggucugccucuucugg

SEQ ID NO: 1770491 - RNA, 19 nt, Human
gagccgagaucacgccacu

SEQ ID NO: 1770492 - RNA, 20 nt, Human
gagccgagaucacgccacug

SEQ ID NO: 1770493 - RNA, 15 nt, Human
gagccugcaguuauu

SEQ ID NO: 1770494 - RNA, 12 nt, Human
gagcuagccaga

SEQ ID NO: 1770495 - RNA, 13 nt, Human
gagcuagccagag

SEQ ID NO: 1770496 - RNA, 14 nt, Human
gagcuagccagagg

SEQ ID NO: 1770497 - RNA, 15 nt, Human
gagcuagccagagga

SEQ ID NO: 1770498 - RNA, 18 nt, Human
gagcuagccagaggacug

SEQ ID NO: 1770499 - RNA, 16 nt, Human
gagcugaggcagcagu

SEQ ID NO: 1770500 - RNA, 21 nt, Human
gagcucuugugaggaaaguca

SEQ ID NO: 1770501 - RNA, 21 nt, Human
gagcugaaagcugguggcaga

SEQ ID NO: 1770502 - RNA, 17 nt, Human
gagcucuugugaggaaa

SEQ ID NO: 1770503 - RNA, 21 nt, Human
gagcucuacccagggccugca

SEQ ID NO: 1770504 - RNA, 23 nt, Human
gagcucuacccagggccugcagg

SEQ ID NO: 1770505 - RNA, 14 nt, Human
gagcucuacccagg

SEQ ID NO: 1770506 - RNA, 15 nt, Human
gagcucuacccaggg

SEQ ID NO: 1770507 - RNA, 20 nt, Human
gagcucuacccagggccugc

SEQ ID NO: 1770508 - RNA, 21 nt, Human
gagcucccaggugcagccaga

SEQ ID NO: 1770509 - RNA, 22 nt, Human
gagcucccaggugcagccagag

SEQ ID NO: 1770510 - RNA, 16 nt, Human
gagcucccaggugcag

SEQ ID NO: 1770511 - RNA, 20 nt, Human
gagcucccaggugcagccag

SEQ ID NO: 1770512 - RNA, 18 nt, Human
gaggaaacuacugccuuu

SEQ ID NO: 1770513 - RNA, 22 nt, Human
gaggaaacuacugccuuuagaa

SEQ ID NO: 1770514 - RNA, 20 nt, Human
gaggaaagucauuggcuuua

SEQ ID NO: 1770515 - RNA, 18 nt, Human
gaggaaagucauuggcuu

SEQ ID NO: 1770516 - RNA, 12 nt, Human
gaggaaagucau

SEQ ID NO: 1770517 - RNA, 21 nt, Human
gaggaaagggaggaguggagg

SEQ ID NO: 1770518 - RNA, 19 nt, Human
gagacagaguuuucacucu

SEQ ID NO: 1770519 - RNA, 22 nt, Human
gagaacacagccgauucaccug

SEQ ID NO: 1770520 - RNA, 18 nt, Human
gagaaacuuaagcaaagg

SEQ ID NO: 1770521 - RNA, 12 nt, Human
gagaacaggacu

SEQ ID NO: 1770522 - RNA, 13 nt, Human
gagaacaggacua

SEQ ID NO: 1770523 - RNA, 23 nt, Human
gagaaaguacuucuccacccugc

SEQ ID NO: 1770524 - RNA, 14 nt, Human
gacuuggaagcucc

SEQ ID NO: 1770525 - RNA, 18 nt, Human
gacucggggugcuuccuu

SEQ ID NO: 1770526 - RNA, 19 nt, Human
gacucggggugcuuccuug

SEQ ID NO: 1770527 - RNA, 15 nt, Human
gacuuggaagcuccg

SEQ ID NO: 1770528 - RNA, 16 nt, Human
gacuuggaagcuccgc

SEQ ID NO: 1770529 - RNA, 11 nt, Human
gagaaaaucau

SEQ ID NO: 1770530 - RNA, 15 nt, Human
gagaaaaucaucaag

SEQ ID NO: 1770531 - RNA, 16 nt, Human
gagaaaaucaucaaga

SEQ ID NO: 1770532 - RNA, 18 nt, Human
gagaaaaucaucaagaag

SEQ ID NO: 1770533 - RNA, 23 nt, Human
gagaaaaucaucaagaagggcug

SEQ ID NO: 1770534 - RNA, 14 nt, Human
gagacucugucuca

SEQ ID NO: 1770535 - RNA, 15 nt, Human
gagacugcccagcua

SEQ ID NO: 1770536 - RNA, 18 nt, Human
gagagaggcaauggcucc

SEQ ID NO: 1770537 - RNA, 15 nt, Human
gagagcaucggccua

SEQ ID NO: 1770538 - RNA, 18 nt, Human
gagagcaucggccuaggg

SEQ ID NO: 1770539 - RNA, 16 nt, Human
gagagccaccaagagg

SEQ ID NO: 1770540 - RNA, 13 nt, Human
gagaggggaacag

SEQ ID NO: 1770541 - RNA, 18 nt, Human
gagaggggaacagacugg

SEQ ID NO: 1770542 - RNA, 17 nt, Human
gagauacagaauuuuau

SEQ ID NO: 1770543 - RNA, 18 nt, Human
gacacaggcccggcucca

SEQ ID NO: 1770544 - RNA, 12 nt, Human
gacacaggccug

SEQ ID NO: 1770545 - RNA, 18 nt, Human
gacaccuugacagggcac

SEQ ID NO: 1770546 - RNA, 20 nt, Human
gacaccuugacagggcacac

SEQ ID NO: 1770547 - RNA, 15 nt, Human
gacaccuugacaggg

SEQ ID NO: 1770548 - RNA, 17 nt, Human
gacaccuugacagggca

SEQ ID NO: 1770549 - RNA, 15 nt, Human
gacacuaaccacgcu

SEQ ID NO: 1770550 - RNA, 16 nt, Human
gacacuaaccacgcug

SEQ ID NO: 1770551 - RNA, 17 nt, Human
gacacuaaccacgcugg

SEQ ID NO: 1770552 - RNA, 18 nt, Human
gacacuaaccacgcugga

SEQ ID NO: 1770553 - RNA, 12 nt, Human
gacacacacaca

SEQ ID NO: 1770554 - RNA, 13 nt, Human
gacacacagcucu

SEQ ID NO: 1770555 - RNA, 15 nt, Human
gacacaggcccggcu

SEQ ID NO: 1770556 - RNA, 17 nt, Human
gacacaggcccggcucc

SEQ ID NO: 1770557 - RNA, 21 nt, Human
gacaaucaugaaauaugcauc

SEQ ID NO: 1770558 - RNA, 19 nt, Human
gacaaucaugaaauaugca

SEQ ID NO: 1770559 - RNA, 20 nt, Human
gacaaucaugaaauaugcau

SEQ ID NO: 1770560 - RNA, 21 nt, Human
gacaauaugugccaaucaaua

SEQ ID NO: 1770561 - RNA, 15 nt, Human
gacaauaaaauauua

SEQ ID NO: 1770562 - RNA, 22 nt, Human
gacaaggauugcuacuguccua

SEQ ID NO: 1770563 - RNA, 14 nt, Human
gaaguccuuauguu

SEQ ID NO: 1770564 - RNA, 14 nt, Human
gacaggcaaugcug

SEQ ID NO: 1770565 - RNA, 16 nt, Human
gacaggcaaugcuggc

SEQ ID NO: 1770566 - RNA, 17 nt, Human
gacaggcaaugcuggcu

SEQ ID NO: 1770567 - RNA, 18 nt, Human
gacaggcauguucucuga

SEQ ID NO: 1770568 - RNA, 19 nt, Human
gacaggcauguucucugag

SEQ ID NO: 1770569 - RNA, 18 nt, Human
gacagccaaaggcuggcg

SEQ ID NO: 1770570 - RNA, 16 nt, Human
gacagccaaaggcugg

SEQ ID NO: 1770571 - RNA, 17 nt, Human
gacagccaaaggcuggc

SEQ ID NO: 1770572 - RNA, 13 nt, Human
gacagccacggcc

SEQ ID NO: 1770573 - RNA, 14 nt, Human
gacagacacaggcc

SEQ ID NO: 1770574 - RNA, 20 nt, Human
gacacuaaccacgcuggacc

SEQ ID NO: 1770575 - RNA, 21 nt, Human
gacacuaaccacgcuggaccu

SEQ ID NO: 1770576 - RNA, 15 nt, Human
gacagacacaggccc

SEQ ID NO: 1770577 - RNA, 16 nt, Human
gacagacacaggcccg

SEQ ID NO: 1770578 - RNA, 14 nt, Human
gacaggcagagcug

SEQ ID NO: 1770579 - RNA, 20 nt, Human
gacaugaagauucuuuccca

SEQ ID NO: 1770580 - RNA, 21 nt, Human
gacaucuguuucuaaauguuu

SEQ ID NO: 1770581 - RNA, 16 nt, Human
gacauacgcuuuuaau

SEQ ID NO: 1770582 - RNA, 21 nt, Human
gacauacgcuuuuaaugaaaa

SEQ ID NO: 1770583 - RNA, 13 nt, Human
gaccccuccaugu

SEQ ID NO: 1770584 - RNA, 11 nt, Human
gacccacugcu

SEQ ID NO: 1770585 - RNA, 12 nt, Human
gacccacugcuu

SEQ ID NO: 1770586 - RNA, 20 nt, Human
gacccacgaaacugcccugg

SEQ ID NO: 1770587 - RNA, 22 nt, Human
gacccacgaaacugcccuggcu

SEQ ID NO: 1770588 - RNA, 20 nt, Human
gaccaacccuggggaaggag

SEQ ID NO: 1770589 - RNA, 15 nt, Human
gacccagggaacagc

SEQ ID NO: 1770590 - RNA, 17 nt, Human
gacccagggaacagcca

SEQ ID NO: 1770591 - RNA, 19 nt, Human
gacccagggaacagccacu

SEQ ID NO: 1770592 - RNA, 20 nt, Human
gacccagggaacagccacuc

SEQ ID NO: 1770593 - RNA, 22 nt, Human
gacccagggaacagccacuccc

SEQ ID NO: 1770594 - RNA, 16 nt, Human
gacccaggguucccgc

SEQ ID NO: 1770595 - RNA, 16 nt, Human
gacccuguugcuaagc

SEQ ID NO: 1770596 - RNA, 15 nt, Human
gacccuguugcuaag

SEQ ID NO: 1770597 - RNA, 21 nt, Human
gacccuguugcuaagccccag

SEQ ID NO: 1770598 - RNA, 16 nt, Human
gaccugcauuguaaau

SEQ ID NO: 1770599 - RNA, 23 nt, Human
gaccugauuucugagcauuuaau

SEQ ID NO: 1770600 - RNA, 12 nt, Human
gacuacaggcac

SEQ ID NO: 1770601 - RNA, 12 nt, Human
gacucagggcuc

SEQ ID NO: 1770602 - RNA, 13 nt, Human
gacucagggcucc

SEQ ID NO: 1770603 - RNA, 14 nt, Human
gacucagggcuccu

SEQ ID NO: 1770604 - RNA, 16 nt, Human
gacucagggcuccugg

SEQ ID NO: 1770605 - RNA, 17 nt, Human
gacucagggcuccuggg

SEQ ID NO: 1770606 - RNA, 19 nt, Human
gacucagggcuccuggguu

SEQ ID NO: 1770607 - RNA, 13 nt, Human
gacucaugaggag

SEQ ID NO: 1770608 - RNA, 15 nt, Human
gacucaugaggaggg

SEQ ID NO: 1770609 - RNA, 18 nt, Human
gacucaugaggaggggcc

SEQ ID NO: 1770610 - RNA, 22 nt, Human
gacucaugaggaggggcccccc

SEQ ID NO: 1770611 - RNA, 13 nt, Human
gacucauucugaa

SEQ ID NO: 1770612 - RNA, 16 nt, Human
gacucauucugaagga

SEQ ID NO: 1770613 - RNA, 17 nt, Human
gacucauucugaaggag

SEQ ID NO: 1770614 - RNA, 23 nt, Human
gacgggacucaggcgggacagug

SEQ ID NO: 1770615 - RNA, 23 nt, Human
gacggagucccaccuuggcugca

SEQ ID NO: 1770616 - RNA, 19 nt, Human
gacgcagcaggaggccagg

SEQ ID NO: 1770617 - RNA, 21 nt, Human
gacggagucccaccuuggcug

SEQ ID NO: 1770618 - RNA, 14 nt, Human
gacggagucccacc

SEQ ID NO: 1770619 - RNA, 18 nt, Human
gacggagucccaccuugg

SEQ ID NO: 1770620 - RNA, 12 nt, Human
gaccugccugua

SEQ ID NO: 1770621 - RNA, 23 nt, Human
gaccuugaacuggguacuugugg

SEQ ID NO: 1770622 - RNA, 18 nt, Human
gaccuggacacaggccug

SEQ ID NO: 1770623 - RNA, 18 nt, Human
gaccuuuuuuuuuuuucc

SEQ ID NO: 1770624 - RNA, 21 nt, Human
gacgaacuuccauggcccuca

SEQ ID NO: 1770625 - RNA, 17 nt, Human
gaccuuuugggggaggg

SEQ ID NO: 1770626 - RNA, 18 nt, Human
gaccuuuugggggagggc

SEQ ID NO: 1770627 - RNA, 14 nt, Human
gacgaacuuccaug

SEQ ID NO: 1770628 - RNA, 22 nt, Human
gcagauacaggaaaagcugcug

SEQ ID NO: 1770629 - RNA, 17 nt, Human
gcagccccauucugccu

SEQ ID NO: 1770630 - RNA, 18 nt, Human
gcagccccauucugccug

SEQ ID NO: 1770631 - RNA, 19 nt, Human
gcagccccauucugccugc

SEQ ID NO: 1770632 - RNA, 21 nt, Human
gcagccccauucugccugccc

SEQ ID NO: 1770633 - RNA, 24 nt, Human
gcagccccauucugccugcccagg

SEQ ID NO: 1770634 - RNA, 15 nt, Human
gcagccuuggcaaac

SEQ ID NO: 1770635 - RNA, 14 nt, Human
gcaggaggccaggc

SEQ ID NO: 1770636 - RNA, 15 nt, Human
gcaggaggccaggcc

SEQ ID NO: 1770637 - RNA, 16 nt, Human
gcaggaggccaggccg

SEQ ID NO: 1770638 - RNA, 17 nt, Human
gcaggaggccaggccgg

SEQ ID NO: 1770639 - RNA, 19 nt, Human
gcaggaauauaugugugcc

SEQ ID NO: 1770640 - RNA, 21 nt, Human
gcaggaauauaugugugccua

SEQ ID NO: 1770641 - RNA, 22 nt, Human
gcaggaccagccagcagcagcc

SEQ ID NO: 1770642 - RNA, 21 nt, Human
gcaggaaaugaaaaugucuug

SEQ ID NO: 1770643 - RNA, 23 nt, Human
gcaggaaaugaaaaugucuugug

SEQ ID NO: 1770644 - RNA, 22 nt, Human
gcacccaccaucaugucuggcu

SEQ ID NO: 1770645 - RNA, 19 nt, Human
gcaccauuuuaagucccug

SEQ ID NO: 1770646 - RNA, 17 nt, Human
gcacccaagaccucagg

SEQ ID NO: 1770647 - RNA, 21 nt, Human
gcacccaagaccucagggcac

SEQ ID NO: 1770648 - RNA, 19 nt, Human
gcacccggccccugcuggu

SEQ ID NO: 1770649 - RNA, 12 nt, Human
gcaauggcagcc

SEQ ID NO: 1770650 - RNA, 13 nt, Human
gcaauggcagccu

SEQ ID NO: 1770651 - RNA, 14 nt, Human
gcaauggcagccuu

SEQ ID NO: 1770652 - RNA, 13 nt, Human
gcacccuauaaau

SEQ ID NO: 1770653 - RNA, 14 nt, Human
gcacccuauaaauc

SEQ ID NO: 1770654 - RNA, 21 nt, Human
gcacggaccaugcgacacugg

SEQ ID NO: 1770655 - RNA, 23 nt, Human
gcagacaggcaagcaccuccugc

SEQ ID NO: 1770656 - RNA, 19 nt, Human
gcagacaggcaagcaccuc

SEQ ID NO: 1770657 - RNA, 16 nt, Human
gcagaaugaaucuaug

SEQ ID NO: 1770658 - RNA, 14 nt, Human
gcaguggacucaga

SEQ ID NO: 1770659 - RNA, 22 nt, Human
gcaguggacucagaaagccaac

SEQ ID NO: 1770660 - RNA, 22 nt, Human
gcagguccaggguuugaguuca

SEQ ID NO: 1770661 - RNA, 16 nt, Human
gcagguagccugcugg

SEQ ID NO: 1770662 - RNA, 17 nt, Human
gcagguagccugcuggu

SEQ ID NO: 1770663 - RNA, 19 nt, Human
gcaggucuugaacuccugg

SEQ ID NO: 1770664 - RNA, 20 nt, Human
gcaggucuugaacuccuggc

SEQ ID NO: 1770665 - RNA, 16 nt, Human
gcaggugaaacccagu

SEQ ID NO: 1770666 - RNA, 17 nt, Human
gcaggugaaacccaguc

SEQ ID NO: 1770667 - RNA, 20 nt, Human
gcaggugaaacccagucacu

SEQ ID NO: 1770668 - RNA, 22 nt, Human
gcagggcucagcggggacagcu

SEQ ID NO: 1770669 - RNA, 17 nt, Human
gcagggucucacucugu

SEQ ID NO: 1770670 - RNA, 18 nt, Human
gcagggucucacucuguc

SEQ ID NO: 1770671 - RNA, 19 nt, Human
gcagggcucagcggggaca

SEQ ID NO: 1770672 - RNA, 21 nt, Human
gcagggcucagcggggacagc

SEQ ID NO: 1770673 - RNA, 21 nt, Human
gcagggccccaggcauugcca

SEQ ID NO: 1770674 - RNA, 15 nt, Human
gcagggccgccaggg

SEQ ID NO: 1770675 - RNA, 23 nt, Human
gcagggccgccagggagaccugg

SEQ ID NO: 1770676 - RNA, 17 nt, Human
gcauagguuuaauaauu

SEQ ID NO: 1770677 - RNA, 22 nt, Human
gcauaucugccuuuauuguguu

SEQ ID NO: 1770678 - RNA, 16 nt, Human
gcauaugaaaggagag

SEQ ID NO: 1770679 - RNA, 20 nt, Human
gcauaugaaaggagagcauc

SEQ ID NO: 1770680 - RNA, 21 nt, Human
gcauaucugccuuuauugugu

SEQ ID NO: 1770681 - RNA, 18 nt, Human
gcauaucugccuuuauug

SEQ ID NO: 1770682 - RNA, 16 nt, Human
gcauaucugccuuuau

SEQ ID NO: 1770683 - RNA, 15 nt, Human
gcauaucugccuuua

SEQ ID NO: 1770684 - RNA, 14 nt, Human
gcauaucugccuuu

SEQ ID NO: 1770685 - RNA, 12 nt, Human
gcauaucugccu

SEQ ID NO: 1770686 - RNA, 15 nt, Human
gcagugugaggccag

SEQ ID NO: 1770687 - RNA, 13 nt, Human
gcagugggagcug

SEQ ID NO: 1770688 - RNA, 14 nt, Human
gcagugggagcugc

SEQ ID NO: 1770689 - RNA, 15 nt, Human
gcagugggagcugcc

SEQ ID NO: 1770690 - RNA, 13 nt, Human
gcauagaaguaaa

SEQ ID NO: 1770691 - RNA, 17 nt, Human
gcaguuauuaacacuaa

SEQ ID NO: 1770692 - RNA, 18 nt, Human
gcaucuuuuuuucauuuu

SEQ ID NO: 1770693 - RNA, 15 nt, Human
gcaucuugcuggcua

SEQ ID NO: 1770694 - RNA, 18 nt, Human
gcaugauccaagcaagac

SEQ ID NO: 1770695 - RNA, 19 nt, Human
gcaugauccaagcaagacu

SEQ ID NO: 1770696 - RNA, 22 nt, Human
gcaugauccaagcaagacugag

SEQ ID NO: 1770697 - RNA, 23 nt, Human
gcaugauccaagcaagacugagg

SEQ ID NO: 1770698 - RNA, 13 nt, Human
gcaugauguuugc

SEQ ID NO: 1770699 - RNA, 18 nt, Human
gcaugauguuugcccaaa

SEQ ID NO: 1770700 - RNA, 22 nt, Human
gcaugauguuugcccaaaauuu

SEQ ID NO: 1770701 - RNA, 15 nt, Human
gcauguucucugagg

SEQ ID NO: 1770702 - RNA, 21 nt, Human
gcauguucucugaggacacua

SEQ ID NO: 1770703 - RNA, 22 nt, Human
gcauguucucugaggacacuaa

SEQ ID NO: 1770704 - RNA, 18 nt, Human
gcauuuuguuugguauug

SEQ ID NO: 1770705 - RNA, 23 nt, Human
gcauuuuguuugguauuguauuu

SEQ ID NO: 1770706 - RNA, 21 nt, Human
gcauuuuguuugguauuguau

SEQ ID NO: 1770707 - RNA, 13 nt, Human
gccaaaccucugu

SEQ ID NO: 1770708 - RNA, 13 nt, Human
gccaaagccaaag

SEQ ID NO: 1770709 - RNA, 20 nt, Human
gccaaagccaaagcuaggcc

SEQ ID NO: 1770710 - RNA, 16 nt, Human
gccaaagcuaggccug

SEQ ID NO: 1770711 - RNA, 22 nt, Human
gccaaagcuaggccuggccaga

SEQ ID NO: 1770712 - RNA, 14 nt, Human
gccaaaccucuguu

SEQ ID NO: 1770713 - RNA, 15 nt, Human
gccaaaccucuguuc

SEQ ID NO: 1770714 - RNA, 16 nt, Human
gccaaaccucuguuca

SEQ ID NO: 1770715 - RNA, 17 nt, Human
gccaaaccucuguucag

SEQ ID NO: 1770716 - RNA, 19 nt, Human
gccaaaccucuguucagug

SEQ ID NO: 1770717 - RNA, 22 nt, Human
gccaaaccucuguucaguguaa

SEQ ID NO: 1770718 - RNA, 17 nt, Human
gcauuugaucuguugca

SEQ ID NO: 1770719 - RNA, 21 nt, Human
gcauuugaucuguugcaagcc

SEQ ID NO: 1770720 - RNA, 15 nt, Human
gcauuauauaccauu

SEQ ID NO: 1770721 - RNA, 19 nt, Human
gcauuauauaccauuuauc

SEQ ID NO: 1770722 - RNA, 14 nt, Human
gcauuauugcauua

SEQ ID NO: 1770723 - RNA, 15 nt, Human
gcauuauugcauuau

SEQ ID NO: 1770724 - RNA, 18 nt, Human
gaucuuugcagacaggca

SEQ ID NO: 1770725 - RNA, 15 nt, Human
gaucucacucugccc

SEQ ID NO: 1770726 - RNA, 13 nt, Human
gaucucacucugc

SEQ ID NO: 1770727 - RNA, 18 nt, Human
gaucgucugacugguguu

SEQ ID NO: 1770728 - RNA, 18 nt, Human
gauggccguggauggccg

SEQ ID NO: 1770729 - RNA, 20 nt, Human
gaugccugguggcagcugcg

SEQ ID NO: 1770730 - RNA, 18 nt, Human
gaugccugguggcagcug

SEQ ID NO: 1770731 - RNA, 19 nt, Human
gaugccugguggcagcugc

SEQ ID NO: 1770732 - RNA, 13 nt, Human
gaugcaccagccc

SEQ ID NO: 1770733 - RNA, 17 nt, Human
gaucauccacugugcca

SEQ ID NO: 1770734 - RNA, 19 nt, Human
gaucauccacugugccaug

SEQ ID NO: 1770735 - RNA, 21 nt, Human
gaucauccacugugccaugug

SEQ ID NO: 1770736 - RNA, 12 nt, Human
gaucacggcuca

SEQ ID NO: 1770737 - RNA, 23 nt, Human
gaucagauugcaugugacucuga

SEQ ID NO: 1770738 - RNA, 15 nt, Human
gaucagauugcaugu

SEQ ID NO: 1770739 - RNA, 22 nt, Human
gaucagucugauucccaagcuc

SEQ ID NO: 1770740 - RNA, 16 nt, Human
gaucacgccacugcac

SEQ ID NO: 1770741 - RNA, 18 nt, Human
gaucacgccacugcacua

SEQ ID NO: 1770742 - RNA, 22 nt, Human
gauaagaguagaaacugcaggg

SEQ ID NO: 1770743 - RNA, 17 nt, Human
gauaaggaauuauagac

SEQ ID NO: 1770744 - RNA, 16 nt, Human
gauaaauacaaggccc

SEQ ID NO: 1770745 - RNA, 18 nt, Human
gauacaggaaaagcugcu

SEQ ID NO: 1770746 - RNA, 19 nt, Human
gauacaggaaaagcugcug

SEQ ID NO: 1770747 - RNA, 23 nt, Human
gauagauaggucagugcaaauac

SEQ ID NO: 1770748 - RNA, 22 nt, Human
gauuccauuuggcagagcuucu

SEQ ID NO: 1770749 - RNA, 16 nt, Human
gaugggggcagggcug

SEQ ID NO: 1770750 - RNA, 17 nt, Human
gaugggggcagggcugu

SEQ ID NO: 1770751 - RNA, 20 nt, Human
gaugggggcagggcugugcu

SEQ ID NO: 1770752 - RNA, 16 nt, Human
gauggggucuguaaaa

SEQ ID NO: 1770753 - RNA, 11 nt, Human
gauggggaggg

SEQ ID NO: 1770754 - RNA, 12 nt, Human
gauggggagggg

SEQ ID NO: 1770755 - RNA, 21 nt, Human
gauucccaagcucugcuccuc

SEQ ID NO: 1770756 - RNA, 19 nt, Human
gauucccaagcucugcucc

SEQ ID NO: 1770757 - RNA, 20 nt, Human
gauucccaagcucugcuccu

SEQ ID NO: 1770758 - RNA, 21 nt, Human
gauugcaacaggcugggcuuc

SEQ ID NO: 1770759 - RNA, 20 nt, Human
gauugcaacaggcugggcuu

SEQ ID NO: 1770760 - RNA, 21 nt, Human
gauuuccccccuccgccucca

SEQ ID NO: 1770761 - RNA, 17 nt, Human
gauuucuguaaacucug

SEQ ID NO: 1770762 - RNA, 19 nt, Human
gauuuguuaaugauagcua

SEQ ID NO: 1770763 - RNA, 17 nt, Human
gauuuucaaaagauaau

SEQ ID NO: 1770764 - RNA, 15 nt, Human
gcaaugccaucaucu

SEQ ID NO: 1770765 - RNA, 18 nt, Human
gcaaugccaucaucuccu

SEQ ID NO: 1770766 - RNA, 19 nt, Human
gcaaugccaucaucuccug

SEQ ID NO: 1770767 - RNA, 13 nt, Human
gcaaugcuggcug

SEQ ID NO: 1770768 - RNA, 14 nt, Human
gcaaugcuggcugu

SEQ ID NO: 1770769 - RNA, 22 nt, Human
gcaaugcuggcuguuggcuggg

SEQ ID NO: 1770770 - RNA, 23 nt, Human
gcaaugcuggcuguuggcugggg

SEQ ID NO: 1770771 - RNA, 18 nt, Human
gcaaggguuaaggccuga

SEQ ID NO: 1770772 - RNA, 15 nt, Human
gcaagcuccgcagga

SEQ ID NO: 1770773 - RNA, 18 nt, Human
gcaagcuccgcaggacuu

SEQ ID NO: 1770774 - RNA, 16 nt, Human
gcaagccccucuuucu

SEQ ID NO: 1770775 - RNA, 14 nt, Human
gcaagacgcccucu

SEQ ID NO: 1770776 - RNA, 18 nt, Human
gcaaaggguccagaagga

SEQ ID NO: 1770777 - RNA, 22 nt, Human
gcaaaggguccagaaggagaca

SEQ ID NO: 1770778 - RNA, 13 nt, Human
gcaaaggggacag

SEQ ID NO: 1770779 - RNA, 14 nt, Human
gcaaaggggacagc

SEQ ID NO: 1770780 - RNA, 19 nt, Human
gcaaaggggacagcugugu

SEQ ID NO: 1770781 - RNA, 11 nt, Human
gcaaaguacug

SEQ ID NO: 1770782 - RNA, 12 nt, Human
gcaaaguacugu

SEQ ID NO: 1770783 - RNA, 13 nt, Human
gcaaaguacugua

SEQ ID NO: 1770784 - RNA, 14 nt, Human
gcaaaguacuguaa

SEQ ID NO: 1770785 - RNA, 22 nt, Human
gcaaaguacuguaagaauaauu

SEQ ID NO: 1770786 - RNA, 15 nt, Human
gcaaauccuauguga

SEQ ID NO: 1770787 - RNA, 23 nt, Human
gcaaauccuaugugauuuuaacu

SEQ ID NO: 1770788 - RNA, 17 nt, Human
gcaaauccuaugugauu

SEQ ID NO: 1770789 - RNA, 19 nt, Human
gcaaauccuaugugauuuu

SEQ ID NO: 1770790 - RNA, 17 nt, Human
gccucugacacacagcu

SEQ ID NO: 1770791 - RNA, 18 nt, Human
gccucugacacacagcuc

SEQ ID NO: 1770792 - RNA, 19 nt, Human
gccucugacacacagcucu

SEQ ID NO: 1770793 - RNA, 20 nt, Human
gccucugacacacagcucug

SEQ ID NO: 1770794 - RNA, 21 nt, Human
gccucugacacacagcucugu

SEQ ID NO: 1770795 - RNA, 18 nt, Human
gccucugccucugacaca

SEQ ID NO: 1770796 - RNA, 13 nt, Human
gccugacugcuca

SEQ ID NO: 1770797 - RNA, 14 nt, Human
gccugacugcucag

SEQ ID NO: 1770798 - RNA, 15 nt, Human
gccugacugcucaga

SEQ ID NO: 1770799 - RNA, 12 nt, Human
gccucugccucu

SEQ ID NO: 1770800 - RNA, 13 nt, Human
gccucugccucug

SEQ ID NO: 1770801 - RNA, 16 nt, Human
gccugaguagaaaggc

SEQ ID NO: 1770802 - RNA, 21 nt, Human
gccugaguagaaaggccuuua

SEQ ID NO: 1770803 - RNA, 13 nt, Human
gccugagucaccu

SEQ ID NO: 1770804 - RNA, 21 nt, Human
gccugcaaacgcugccugccc

SEQ ID NO: 1770805 - RNA, 19 nt, Human
gccugcaaacgcugccugc

SEQ ID NO: 1770806 - RNA, 20 nt, Human
gccugcaaacgcugccugcc

SEQ ID NO: 1770807 - RNA, 15 nt, Human
gccucagcauccugg

SEQ ID NO: 1770808 - RNA, 16 nt, Human
gccucagcauccuggc

SEQ ID NO: 1770809 - RNA, 17 nt, Human
gccucagcauccuggca

SEQ ID NO: 1770810 - RNA, 17 nt, Human
gccucagaugauuuccc

SEQ ID NO: 1770811 - RNA, 18 nt, Human
gccucccaaagugcuggg

SEQ ID NO: 1770812 - RNA, 19 nt, Human
gccucccaaagugcuggga

SEQ ID NO: 1770813 - RNA, 23 nt, Human
gccucccaacaguggggaagagu

SEQ ID NO: 1770814 - RNA, 20 nt, Human
gccucccgaguagcugggac

SEQ ID NO: 1770815 - RNA, 18 nt, Human
gccucccgaguagcuggg

SEQ ID NO: 1770816 - RNA, 19 nt, Human
gccucccgaguagcuggga

SEQ ID NO: 1770817 - RNA, 13 nt, Human
gccucccuugacu

SEQ ID NO: 1770818 - RNA, 13 nt, Human
gccguccuugucu

SEQ ID NO: 1770819 - RNA, 17 nt, Human
gccguccuugucucugg

SEQ ID NO: 1770820 - RNA, 21 nt, Human
gccguaucuccggcucccagc

SEQ ID NO: 1770821 - RNA, 23 nt, Human
gccguaucuccggcucccagccu

SEQ ID NO: 1770822 - RNA, 20 nt, Human
gccguaucuccggcucccag

SEQ ID NO: 1770823 - RNA, 12 nt, Human
gccgguuccugu

SEQ ID NO: 1770824 - RNA, 17 nt, Human
gccgguuccugucccug

SEQ ID NO: 1770825 - RNA, 22 nt, Human
gccgguuccugucccugcgccu

SEQ ID NO: 1770826 - RNA, 12 nt, Human
gccguggaugcg

SEQ ID NO: 1770827 - RNA, 13 nt, Human
gccguggauggcc

SEQ ID NO: 1770828 - RNA, 18 nt, Human
gccguggauggccgugga

SEQ ID NO: 1770829 - RNA, 18 nt, Human
gccucaaccuccugggcu

SEQ ID NO: 1770830 - RNA, 19 nt, Human
gccucaaccuccugggcua

SEQ ID NO: 1770831 - RNA, 15 nt, Human
gccucaacuccuccc

SEQ ID NO: 1770832 - RNA, 17 nt, Human
gccucaacuccucccau

SEQ ID NO: 1770833 - RNA, 18 nt, Human
gccucaacuccucccaua

SEQ ID NO: 1770834 - RNA, 16 nt, Human
gccgugguccuuuggg

SEQ ID NO: 1770835 - RNA, 14 nt, Human
gccguggucccuga

SEQ ID NO: 1770836 - RNA, 15 nt, Human
gccguggucccugag

SEQ ID NO: 1770837 - RNA, 17 nt, Human
gccuaaauuuauuaaau

SEQ ID NO: 1770838 - RNA, 18 nt, Human
gccuaaauuuauuaaaua

SEQ ID NO: 1770839 - RNA, 22 nt, Human
gccgagaucacgccacugcacu

SEQ ID NO: 1770840 - RNA, 20 nt, Human
gccgagaucacgccacugca

SEQ ID NO: 1770841 - RNA, 21 nt, Human
gccgagaucacgccacugcac

SEQ ID NO: 1770842 - RNA, 18 nt, Human
gccggcgagcccugugga

SEQ ID NO: 1770843 - RNA, 15 nt, Human
gccggcgagcccugu

SEQ ID NO: 1770844 - RNA, 17 nt, Human
gccggcgagcccugugg

SEQ ID NO: 1770845 - RNA, 13 nt, Human
gccgggcugaggg

SEQ ID NO: 1770846 - RNA, 18 nt, Human
gccgggcugagggccugc

SEQ ID NO: 1770847 - RNA, 17 nt, Human
gcccuuuuuucugccuc

SEQ ID NO: 1770848 - RNA, 19 nt, Human
gcccuuuuuucugccuccu

SEQ ID NO: 1770849 - RNA, 20 nt, Human
gcccuuuuuucugccuccuu

SEQ ID NO: 1770850 - RNA, 22 nt, Human
gcccuuuuuucugccuccuuua

SEQ ID NO: 1770851 - RNA, 18 nt, Human
gcggggcugucggcgcug

SEQ ID NO: 1770852 - RNA, 22 nt, Human
gcggggcugucggcgcugcccc

SEQ ID NO: 1770853 - RNA, 16 nt, Human
gcggacagccacggcc

SEQ ID NO: 1770854 - RNA, 15 nt, Human
gcggacagccacggc

SEQ ID NO: 1770855 - RNA, 14 nt, Human
gcguacaggcuggc

SEQ ID NO: 1770856 - RNA, 11 nt, Human
gcggacagcca

SEQ ID NO: 1770857 - RNA, 13 nt, Human
gcggacagccacg

SEQ ID NO: 1770858 - RNA, 14 nt, Human
gcgcgccccuagcc

SEQ ID NO: 1770859 - RNA, 15 nt, Human
gcgcgccccuagccg

SEQ ID NO: 1770860 - RNA, 18 nt, Human
gcgccuacaggagugagc

SEQ ID NO: 1770861 - RNA, 15 nt, Human
gcgccuacaggagug

SEQ ID NO: 1770862 - RNA, 18 nt, Human
gcgacacugggaggccag

SEQ ID NO: 1770863 - RNA, 17 nt, Human
gcuaaagcaauaugcau

SEQ ID NO: 1770864 - RNA, 19 nt, Human
gcuaaagcaauaugcauuu

SEQ ID NO: 1770865 - RNA, 17 nt, Human
gcuaaacuccuuccugg

SEQ ID NO: 1770866 - RNA, 22 nt, Human
gcuaaacuccuuccuggccuga

SEQ ID NO: 1770867 - RNA, 23 nt, Human
gcuaaacuccuuccuggccugag

SEQ ID NO: 1770868 - RNA, 19 nt, Human
gccuuagaagucacacagu

SEQ ID NO: 1770869 - RNA, 17 nt, Human
gccuuagaagucacaca

SEQ ID NO: 1770870 - RNA, 18 nt, Human
gccuuagaagucacacag

SEQ ID NO: 1770871 - RNA, 19 nt, Human
gccuuaucgggcuccagcc

SEQ ID NO: 1770872 - RNA, 23 nt, Human
gccuuaucgggcuccagccaucu

SEQ ID NO: 1770873 - RNA, 13 nt, Human
gccugguggcagc

SEQ ID NO: 1770874 - RNA, 14 nt, Human
gccugguggcagcu

SEQ ID NO: 1770875 - RNA, 18 nt, Human
gccugguggcagcugcgg

SEQ ID NO: 1770876 - RNA, 19 nt, Human
gccugguggcagcugcggu

SEQ ID NO: 1770877 - RNA, 21 nt, Human
gccugguggcagcugcggucc

SEQ ID NO: 1770878 - RNA, 16 nt, Human
gccugggggugccagg

SEQ ID NO: 1770879 - RNA, 17 nt, Human
gccugggggugccagga

SEQ ID NO: 1770880 - RNA, 21 nt, Human
gccugggggugccaggaccag

SEQ ID NO: 1770881 - RNA, 12 nt, Human
gccuuccagauc

SEQ ID NO: 1770882 - RNA, 16 nt, Human
gccuuccagauccucu

SEQ ID NO: 1770883 - RNA, 20 nt, Human
gccuuccagauccucucugg

SEQ ID NO: 1770884 - RNA, 21 nt, Human
gccuuccagauccucucuggg

SEQ ID NO: 1770885 - RNA, 22 nt, Human
gccuuccagauccucucugggg

SEQ ID NO: 1770886 - RNA, 23 nt, Human
gccuuccagauccucucuggggc

SEQ ID NO: 1770887 - RNA, 22 nt, Human
gcccgagggaggggaagcuucu

SEQ ID NO: 1770888 - RNA, 23 nt, Human
gcccgagggaggggaagcuucug

SEQ ID NO: 1770889 - RNA, 14 nt, Human
gccccucaccuacu

SEQ ID NO: 1770890 - RNA, 15 nt, Human
gccccgaggccuucu

SEQ ID NO: 1770891 - RNA, 18 nt, Human
gccccgaggccuucucug

SEQ ID NO: 1770892 - RNA, 22 nt, Human
gccccgaggccuucucugaagg

SEQ ID NO: 1770893 - RNA, 22 nt, Human
gcccgcagagcgcgccccuagc

SEQ ID NO: 1770894 - RNA, 23 nt, Human
gcccgcagagcgcgccccuagcc

SEQ ID NO: 1770895 - RNA, 15 nt, Human
gccccauucugccug

SEQ ID NO: 1770896 - RNA, 14 nt, Human
gccccauucugccu

SEQ ID NO: 1770897 - RNA, 12 nt, Human
gccccauuccug

SEQ ID NO: 1770898 - RNA, 15 nt, Human
gccccauuccuggga

SEQ ID NO: 1770899 - RNA, 18 nt, Human
gcccccacaguugcucua

SEQ ID NO: 1770900 - RNA, 15 nt, Human
gccccagugcccaca

SEQ ID NO: 1770901 - RNA, 13 nt, Human
gccccagugccca

SEQ ID NO: 1770902 - RNA, 14 nt, Human
gccccagugcccac

SEQ ID NO: 1770903 - RNA, 14 nt, Human
gccccaucagugcu

SEQ ID NO: 1770904 - RNA, 12 nt, Human
gccccagugccc

SEQ ID NO: 1770905 - RNA, 21 nt, Human
gcccagagaggguggugaccu

SEQ ID NO: 1770906 - RNA, 23 nt, Human
gcccaggccccugccacccuggg

SEQ ID NO: 1770907 - RNA, 12 nt, Human
gcccaggcuggc

SEQ ID NO: 1770908 - RNA, 16 nt, Human
gcccagggcaagcucc

SEQ ID NO: 1770909 - RNA, 18 nt, Human
gcccagggcaagcuccgc

SEQ ID NO: 1770910 - RNA, 19 nt, Human
gcccagggcaagcuccgca

SEQ ID NO: 1770911 - RNA, 23 nt, Human
gcccagggcaagcuccgcaggac

SEQ ID NO: 1770912 - RNA, 18 nt, Human
gcccagggcaucuugcug

SEQ ID NO: 1770913 - RNA, 20 nt, Human
gcccagggcaucuugcuggc

SEQ ID NO: 1770914 - RNA, 21 nt, Human
gcccagggcaucuugcuggcu

SEQ ID NO: 1770915 - RNA, 23 nt, Human
gcccagggcaucuugcuggcuac

SEQ ID NO: 1770916 - RNA, 16 nt, Human
gcccauacugguuggc

SEQ ID NO: 1770917 - RNA, 22 nt, Human
gccaggaccagucaaccugggc

SEQ ID NO: 1770918 - RNA, 15 nt, Human
gccagcugcccuaug

SEQ ID NO: 1770919 - RNA, 20 nt, Human
gccagcugcccuaugggccu

SEQ ID NO: 1770920 - RNA, 21 nt, Human
gccagcugcccuaugggccug

SEQ ID NO: 1770921 - RNA, 22 nt, Human
gccagcugcccuaugggccugc

SEQ ID NO: 1770922 - RNA, 23 nt, Human
gccagcucuguaucaggacccag

SEQ ID NO: 1770923 - RNA, 15 nt, Human
gccagcucuguauca

SEQ ID NO: 1770924 - RNA, 14 nt, Human
gccagaugcaccag

SEQ ID NO: 1770925 - RNA, 17 nt, Human
gccagagggagugacag

SEQ ID NO: 1770926 - RNA, 13 nt, Human
gccagaggcaccu

SEQ ID NO: 1770927 - RNA, 22 nt, Human
gccagaggcucguugacuggcu

SEQ ID NO: 1770928 - RNA, 15 nt, Human
gccagaugcaccagc

SEQ ID NO: 1770929 - RNA, 16 nt, Human
gccacuccccuccacu

SEQ ID NO: 1770930 - RNA, 13 nt, Human
gccacuccucuga

SEQ ID NO: 1770931 - RNA, 14 nt, Human
gccacuccucugac

SEQ ID NO: 1770932 - RNA, 15 nt, Human
gccacuccucugacu

SEQ ID NO: 1770933 - RNA, 17 nt, Human
gccacuccucugacuca

SEQ ID NO: 1770934 - RNA, 20 nt, Human
gccacugcaccgggccacag

SEQ ID NO: 1770935 - RNA, 21 nt, Human
gccacugcaccgggccacaga

SEQ ID NO: 1770936 - RNA, 21 nt, Human
gccacuccucugacucagggc

SEQ ID NO: 1770937 - RNA, 22 nt, Human
gccacugcaccgggccacagag

SEQ ID NO: 1770938 - RNA, 14 nt, Human
gcccacuucugcca

SEQ ID NO: 1770939 - RNA, 13 nt, Human
gcccaccuuggcu

SEQ ID NO: 1770940 - RNA, 15 nt, Human
gcccaccuuggcuca

SEQ ID NO: 1770941 - RNA, 16 nt, Human
gcccaccuuggcucaa

SEQ ID NO: 1770942 - RNA, 17 nt, Human
gcccaccuuggcucaag

SEQ ID NO: 1770943 - RNA, 14 nt, Human
gcccaagcuucccu

SEQ ID NO: 1770944 - RNA, 15 nt, Human
gcccaagcuucccuc

SEQ ID NO: 1770945 - RNA, 18 nt, Human
gcccaagcuucccuccau

SEQ ID NO: 1770946 - RNA, 20 nt, Human
gcccaagcuucccuccaucc

SEQ ID NO: 1770947 - RNA, 15 nt, Human
gccaugggccuccug

SEQ ID NO: 1770948 - RNA, 16 nt, Human
gccaugggccuccugu

SEQ ID NO: 1770949 - RNA, 14 nt, Human
gccauccagguuca

SEQ ID NO: 1770950 - RNA, 23 nt, Human
gccaucugguuaggauggcagga

SEQ ID NO: 1770951 - RNA, 13 nt, Human
gccaggcuggucu

SEQ ID NO: 1770952 - RNA, 15 nt, Human
gccaggcuggucuca

SEQ ID NO: 1770953 - RNA, 16 nt, Human
gccaguacuugucaua

SEQ ID NO: 1770954 - RNA, 23 nt, Human
gccaucaucuccugccuuccucc

SEQ ID NO: 1770955 - RNA, 17 nt, Human
uuuuguauucucugagc

SEQ ID NO: 1770956 - RNA, 11 nt, Human
uuuuguacaug

SEQ ID NO: 1770957 - RNA, 20 nt, Human
uuuuuaaaaaugcaaauccu

SEQ ID NO: 1770958 - RNA, 19 nt, Human
uuuuguagagccagggucu

SEQ ID NO: 1770959 - RNA, 11 nt, Human
uuuuguaccag

SEQ ID NO: 1770960 - RNA, 13 nt, Human
uuuuguaccagug

SEQ ID NO: 1770961 - RNA, 14 nt, Human
uuuuguaccaguga

SEQ ID NO: 1770962 - RNA, 14 nt, Human
uuuucuuuccuccu

SEQ ID NO: 1770963 - RNA, 17 nt, Human
uuuucuuuccuccuuuc

SEQ ID NO: 1770964 - RNA, 22 nt, Human
uuuuggggauuuucaaaagaua

SEQ ID NO: 1770965 - RNA, 23 nt, Human
uuuuggggauuuucaaaagauaa

SEQ ID NO: 1770966 - RNA, 15 nt, Human
uuuuggucuguguga

SEQ ID NO: 1770967 - RNA, 15 nt, Human
uuuucuuuuccauua

SEQ ID NO: 1770968 - RNA, 16 nt, Human
uuuuggaugcagugcu

SEQ ID NO: 1770969 - RNA, 12 nt, Human
uuuuucucuccu

SEQ ID NO: 1770970 - RNA, 17 nt, Human
uuuuuccuaugcuauug

SEQ ID NO: 1770971 - RNA, 15 nt, Human
uuuuaaugaaaagga

SEQ ID NO: 1770972 - RNA, 19 nt, Human
uuuuaaugaaaaggaauca

SEQ ID NO: 1770973 - RNA, 22 nt, Human
uuuuaaugaaaaggaaucacgu

SEQ ID NO: 1770974 - RNA, 13 nt, Human
uuuguucucuggg

SEQ ID NO: 1770975 - RNA, 21 nt, Human
uuuguucucugggagaaaauc

SEQ ID NO: 1770976 - RNA, 13 nt, Human
uuuguucccggcu

SEQ ID NO: 1770977 - RNA, 18 nt, Human
uuugaauguuaaauaaau

SEQ ID NO: 1770978 - RNA, 16 nt, Human
uuugaauguuaaauaa

SEQ ID NO: 1770979 - RNA, 13 nt, Human
uuugaauguuaaa

SEQ ID NO: 1770980 - RNA, 22 nt, Human
uuugaauguuaaauaaauugua

SEQ ID NO: 1770981 - RNA, 21 nt, Human
uuugaauguuaaauaaauugu

SEQ ID NO: 1770982 - RNA, 16 nt, Human
uuugaaugcauuuugu

SEQ ID NO: 1770983 - RNA, 14 nt, Human
uuugaaugcauuuu

SEQ ID NO: 1770984 - RNA, 21 nt, Human
uuugaaucuugucucaaugcu

SEQ ID NO: 1770985 - RNA, 13 nt, Human
uuugaaugcauuu

SEQ ID NO: 1770986 - RNA, 20 nt, Human
uuuggagagggggccuggga

SEQ ID NO: 1770987 - RNA, 18 nt, Human
uuugaaucaucaagucuu

SEQ ID NO: 1770988 - RNA, 12 nt, Human
uuugaaucuugu

SEQ ID NO: 1770989 - RNA, 18 nt, Human
uuugaaucuugucucaau

SEQ ID NO: 1770990 - RNA, 16 nt, Human
uuugaaucuugucuca

SEQ ID NO: 1770991 - RNA, 18 nt, Human
uuucuacuuugaagucau

SEQ ID NO: 1770992 - RNA, 22 nt, Human
uuucuacuuugaagucauacca

SEQ ID NO: 1770993 - RNA, 12 nt, Human
uuaccaaaaauu

SEQ ID NO: 1770994 - RNA, 16 nt, Human
uuaccaaaaauuuugu

SEQ ID NO: 1770995 - RNA, 23 nt, Human
guagggcgggaggauguucuggg

SEQ ID NO: 1770996 - RNA, 21 nt, Human
guagggcgggaggauguucug

SEQ ID NO: 1770997 - RNA, 22 nt, Human
guagggcgggaggauguucugg

SEQ ID NO: 1770998 - RNA, 16 nt, Human
guagggcgggaggaug

SEQ ID NO: 1770999 - RNA, 20 nt, Human
guagcccacucugcucgccu

SEQ ID NO: 1771000 - RNA, 16 nt, Human
guagcccacucugcuc

SEQ ID NO: 1771001 - RNA, 14 nt, Human
guagauuaaaaauu

SEQ ID NO: 1771002 - RNA, 21 nt, Human
guagucagaauuagcugcuuc

SEQ ID NO: 1771003 - RNA, 22 nt, Human
guagucagaauuagcugcuucu

SEQ ID NO: 1771004 - RNA, 22 nt, Human
guaggguaauuaguaacaugug

SEQ ID NO: 1771005 - RNA, 23 nt, Human
guaggguuuaauccccaguaaaa

SEQ ID NO: 1771006 - RNA, 13 nt, Human
guauguuauagaa

SEQ ID NO: 1771007 - RNA, 21 nt, Human
guaugaucacggcucacugca

SEQ ID NO: 1771008 - RNA, 22 nt, Human
guaugaucacggcucacugcag

SEQ ID NO: 1771009 - RNA, 20 nt, Human
guaugaucacggcucacugc

SEQ ID NO: 1771010 - RNA, 12 nt, Human
guaugaauuuga

SEQ ID NO: 1771011 - RNA, 14 nt, Human
guaugaauuugagc

SEQ ID NO: 1771012 - RNA, 19 nt, Human
guauacuuccuuaugcuuc

SEQ ID NO: 1771013 - RNA, 13 nt, Human
guauacuuccuua

SEQ ID NO: 1771014 - RNA, 15 nt, Human
guaucgauguuaugu

SEQ ID NO: 1771015 - RNA, 20 nt, Human
guaucuccggcucccagccu

SEQ ID NO: 1771016 - RNA, 21 nt, Human
guaucuccggcucccagccuc

SEQ ID NO: 1771017 - RNA, 22 nt, Human
guaucuccggcucccagccuca

SEQ ID NO: 1771018 - RNA, 16 nt, Human
guaucuccggcuccca

SEQ ID NO: 1771019 - RNA, 18 nt, Human
guaucuccggcucccagc

SEQ ID NO: 1771020 - RNA, 23 nt, Human
gucccuccgggaccuggugcugc

SEQ ID NO: 1771021 - RNA, 16 nt, Human
gucccugcacuugcag

SEQ ID NO: 1771022 - RNA, 12 nt, Human
gucccugaggau

SEQ ID NO: 1771023 - RNA, 22 nt, Human
gucccugaggaugggucagagc

SEQ ID NO: 1771024 - RNA, 19 nt, Human
gucccugcacuugcagacu

SEQ ID NO: 1771025 - RNA, 21 nt, Human
gucccugcacuugcagacucu

SEQ ID NO: 1771026 - RNA, 22 nt, Human
guccccaaauccgaaccuccuc

SEQ ID NO: 1771027 - RNA, 17 nt, Human
gucccauagucccugcc

SEQ ID NO: 1771028 - RNA, 18 nt, Human
gucccauagucccugcca

SEQ ID NO: 1771029 - RNA, 23 nt, Human
gucccaccuuggcugcagggagu

SEQ ID NO: 1771030 - RNA, 13 nt, Human
guccacccaggag

SEQ ID NO: 1771031 - RNA, 13 nt, Human
guccacagggcac

SEQ ID NO: 1771032 - RNA, 12 nt, Human
guccacccagga

SEQ ID NO: 1771033 - RNA, 23 nt, Human
guccacccaggagccccgaggcc

SEQ ID NO: 1771034 - RNA, 15 nt, Human
guccacgacugucuc

SEQ ID NO: 1771035 - RNA, 16 nt, Human
guccacgacugucucc

SEQ ID NO: 1771036 - RNA, 18 nt, Human
guccacgacugucuccau

SEQ ID NO: 1771037 - RNA, 21 nt, Human
gucccaccuuggcugcaggga

SEQ ID NO: 1771038 - RNA, 18 nt, Human
guccagcauugcuggacu

SEQ ID NO: 1771039 - RNA, 19 nt, Human
guccagcauugcuggacuc

SEQ ID NO: 1771040 - RNA, 21 nt, Human
guccagcauugcuggacucug

SEQ ID NO: 1771041 - RNA, 17 nt, Human
gucauuggcuuuauccu

SEQ ID NO: 1771042 - RNA, 14 nt, Human
gucauuggcuuuau

SEQ ID NO: 1771043 - RNA, 21 nt, Human
gucauuagccugaguagaaag

SEQ ID NO: 1771044 - RNA, 19 nt, Human
gucauuagccugaguagaa

SEQ ID NO: 1771045 - RNA, 13 nt, Human
gucauuagccuga

SEQ ID NO: 1771046 - RNA, 13 nt, Human
gucagcucucugc

SEQ ID NO: 1771047 - RNA, 14 nt, Human
gucagcucucugcc

SEQ ID NO: 1771048 - RNA, 15 nt, Human
gucagcucucugccc

SEQ ID NO: 1771049 - RNA, 16 nt, Human
gucagcucucugcccu

SEQ ID NO: 1771050 - RNA, 17 nt, Human
gucagcucucugcccug

SEQ ID NO: 1771051 - RNA, 18 nt, Human
gucagcucucugcccugu

SEQ ID NO: 1771052 - RNA, 21 nt, Human
gucagcucucugcccugugua

SEQ ID NO: 1771053 - RNA, 12 nt, Human
gucagcugaggc

SEQ ID NO: 1771054 - RNA, 23 nt, Human
gucagcugaggcugggggagagc

SEQ ID NO: 1771055 - RNA, 18 nt, Human
guauuuuguauuguuuca

SEQ ID NO: 1771056 - RNA, 15 nt, Human
guauuuuguguccuc

SEQ ID NO: 1771057 - RNA, 24 nt, Human
guauuuuguguccuccaggagcuu

SEQ ID NO: 1771058 - RNA, 13 nt, Human
guauuuugaaaau

SEQ ID NO: 1771059 - RNA, 18 nt, Human
guauuaauuuugauauaa

SEQ ID NO: 1771060 - RNA, 16 nt, Human
gucagacgccugagga

SEQ ID NO: 1771061 - RNA, 17 nt, Human
gucagacgccugaggaa

SEQ ID NO: 1771062 - RNA, 18 nt, Human
gucagacgccugaggaac

SEQ ID NO: 1771063 - RNA, 15 nt, Human
gucagagccugcagu

SEQ ID NO: 1771064 - RNA, 16 nt, Human
gucagagccugcaguu

SEQ ID NO: 1771065 - RNA, 14 nt, Human
gucagagccugcag

SEQ ID NO: 1771066 - RNA, 21 nt, Human
gucagaugcccgagggagggg

SEQ ID NO: 1771067 - RNA, 16 nt, Human
gucucugguagccugc

SEQ ID NO: 1771068 - RNA, 17 nt, Human
gucucugguagccugca

SEQ ID NO: 1771069 - RNA, 13 nt, Human
gucucugggccac

SEQ ID NO: 1771070 - RNA, 19 nt, Human
gucucugggccacuuggag

SEQ ID NO: 1771071 - RNA, 20 nt, Human
gucucugggccacuuggagu

SEQ ID NO: 1771072 - RNA, 12 nt, Human
gucucugcaaac

SEQ ID NO: 1771073 - RNA, 16 nt, Human
gucucaggagucucug

SEQ ID NO: 1771074 - RNA, 17 nt, Human
gucucaggagucucugg

SEQ ID NO: 1771075 - RNA, 15 nt, Human
gucucacucugucgc

SEQ ID NO: 1771076 - RNA, 16 nt, Human
gucucacucugucgcc

SEQ ID NO: 1771077 - RNA, 18 nt, Human
gucucacucugucgccca

SEQ ID NO: 1771078 - RNA, 19 nt, Human
gucucacucugucgcccag

SEQ ID NO: 1771079 - RNA, 22 nt, Human
gucucacucugucgcccagucu

SEQ ID NO: 1771080 - RNA, 22 nt, Human
gucccugccacgaauuucugug

SEQ ID NO: 1771081 - RNA, 18 nt, Human
gucucacuauguugccca

SEQ ID NO: 1771082 - RNA, 11 nt, Human
gucucacucug

SEQ ID NO: 1771083 - RNA, 19 nt, Human
gucucacuauguugcccag

SEQ ID NO: 1771084 - RNA, 18 nt, Human
gucgucaaagcugaaaug

SEQ ID NO: 1771085 - RNA, 17 nt, Human
gucgugagcucuuguga

SEQ ID NO: 1771086 - RNA, 21 nt, Human
gucuugaacuccuggccucaa

SEQ ID NO: 1771087 - RNA, 18 nt, Human
gucuugaacuccuggccu

SEQ ID NO: 1771088 - RNA, 20 nt, Human
gucuugaacuccuggccuca

SEQ ID NO: 1771089 - RNA, 16 nt, Human
gucuugcaauggcagc

SEQ ID NO: 1771090 - RNA, 17 nt, Human
gucuugcaauggcagcc

SEQ ID NO: 1771091 - RNA, 18 nt, Human
gucuugcaauggcagccu

SEQ ID NO: 1771092 - RNA, 19 nt, Human
gucuugcaauggcagccuu

SEQ ID NO: 1771093 - RNA, 20 nt, Human
gucuucucacaagccagcca

SEQ ID NO: 1771094 - RNA, 17 nt, Human
gucuucuccaccacgcu

SEQ ID NO: 1771095 - RNA, 20 nt, Human
gucuucuccaccacgcuggg

SEQ ID NO: 1771096 - RNA, 16 nt, Human
gucuugaacuccuggc

SEQ ID NO: 1771097 - RNA, 17 nt, Human
gucuugaacuccuggcc

SEQ ID NO: 1771098 - RNA, 16 nt, Human
gucuuuuuucacuaca

SEQ ID NO: 1771099 - RNA, 20 nt, Human
gucuuggcagcaccugucuc

SEQ ID NO: 1771100 - RNA, 22 nt, Human
gucuuggcagcaccugucuccu

SEQ ID NO: 1771101 - RNA, 23 nt, Human
gucuugcaauggcagccuuggca

SEQ ID NO: 1771102 - RNA, 20 nt, Human
gucuugcaauggcagccuug

SEQ ID NO: 1771103 - RNA, 21 nt, Human
gucuugcaauggcagccuugg

SEQ ID NO: 1771104 - RNA, 16 nt, Human
gucugccauguugccc

SEQ ID NO: 1771105 - RNA, 21 nt, Human
gucugccauguugccccuuuc

SEQ ID NO: 1771106 - RNA, 12 nt, Human
gucugccccagc

SEQ ID NO: 1771107 - RNA, 11 nt, Human
gucugccucuu

SEQ ID NO: 1771108 - RNA, 11 nt, Human
gucuguugagu

SEQ ID NO: 1771109 - RNA, 12 nt, Human
gugacagaggca

SEQ ID NO: 1771110 - RNA, 13 nt, Human
gugacagaggcag

SEQ ID NO: 1771111 - RNA, 14 nt, Human
gugacagaggcagc

SEQ ID NO: 1771112 - RNA, 12 nt, Human
gugaccucugcc

SEQ ID NO: 1771113 - RNA, 15 nt, Human
gugacagaggcagcc

SEQ ID NO: 1771114 - RNA, 13 nt, Human
gugaccucugccu

SEQ ID NO: 1771115 - RNA, 14 nt, Human
gugaccucugccug

SEQ ID NO: 1771116 - RNA, 15 nt, Human
gugaccucugccuga

SEQ ID NO: 1771117 - RNA, 20 nt, Human
gugacaaggauugcuacugu

SEQ ID NO: 1771118 - RNA, 19 nt, Human
gugaacaagcaaacccaga

SEQ ID NO: 1771119 - RNA, 17 nt, Human
gugauaaaucagucaag

SEQ ID NO: 1771120 - RNA, 15 nt, Human
gugagccacugcacc

SEQ ID NO: 1771121 - RNA, 20 nt, Human
gugagccacugcaccgggcc

SEQ ID NO: 1771122 - RNA, 19 nt, Human
gugagccgagaucacgcca

SEQ ID NO: 1771123 - RNA, 12 nt, Human
gugccaugucug

SEQ ID NO: 1771124 - RNA, 11 nt, Human
gugccauggaa

SEQ ID NO: 1771125 - RNA, 22 nt, Human
gugccauguaaauccccacugg

SEQ ID NO: 1771126 - RNA, 14 nt, Human
gugccaugugccag

SEQ ID NO: 1771127 - RNA, 16 nt, Human
gugccaugugccaggu

SEQ ID NO: 1771128 - RNA, 22 nt, Human
gugccuuccagauccucucugg

SEQ ID NO: 1771129 - RNA, 23 nt, Human
gugccuuccagauccucucuggg

SEQ ID NO: 1771130 - RNA, 21 nt, Human
gugcgaucuggguucacugca

SEQ ID NO: 1771131 - RNA, 14 nt, Human
gugccuucuguggg

SEQ ID NO: 1771132 - RNA, 17 nt, Human
gugccuucuguggggac

SEQ ID NO: 1771133 - RNA, 15 nt, Human
gugcguccacgagcu

SEQ ID NO: 1771134 - RNA, 14 nt, Human
gugcgccuacagga

SEQ ID NO: 1771135 - RNA, 16 nt, Human
gugcuaagugugaacu

SEQ ID NO: 1771136 - RNA, 14 nt, Human
gugcuaagugugaa

SEQ ID NO: 1771137 - RNA, 13 nt, Human
gugcuaaguguga

SEQ ID NO: 1771138 - RNA, 18 nt, Human
gugcuaagugugaacugg

SEQ ID NO: 1771139 - RNA, 17 nt, Human
gugcuaagugugaacug

SEQ ID NO: 1771140 - RNA, 20 nt, Human
gugcuaagugugaacuggac

SEQ ID NO: 1771141 - RNA, 20 nt, Human
gugcaguggugcgaucuggg

SEQ ID NO: 1771142 - RNA, 23 nt, Human
gugcaguggugcgaucuggguuc

SEQ ID NO: 1771143 - RNA, 17 nt, Human
gugcagccgcugagcga

SEQ ID NO: 1771144 - RNA, 18 nt, Human
gugcagccgcugagcgag

SEQ ID NO: 1771145 - RNA, 22 nt, Human
gugcagcucaaggaaaggccug

SEQ ID NO: 1771146 - RNA, 23 nt, Human
gugcagcucaaggaaaggccuga

SEQ ID NO: 1771147 - RNA, 12 nt, Human
gugcagccagag

SEQ ID NO: 1771148 - RNA, 13 nt, Human
gugcagccagagg

SEQ ID NO: 1771149 - RNA, 14 nt, Human
gugcagccagaggc

SEQ ID NO: 1771150 - RNA, 13 nt, Human
gugccaggaccag

SEQ ID NO: 1771151 - RNA, 16 nt, Human
gugccaggaccaguca

SEQ ID NO: 1771152 - RNA, 23 nt, Human
gugauccacccaccucagccucc

SEQ ID NO: 1771153 - RNA, 24 nt, Human
gugauccacccaccucagccuccc

SEQ ID NO: 1771154 - RNA, 14 nt, Human
gugauuuuaacucu

SEQ ID NO: 1771155 - RNA, 16 nt, Human
gugauuuuaacucugu

SEQ ID NO: 1771156 - RNA, 17 nt, Human
gugauuuuaacucuguc

SEQ ID NO: 1771157 - RNA, 18 nt, Human
gugauuuuaacucugucu

SEQ ID NO: 1771158 - RNA, 19 nt, Human
gugauuuuaacucugucuu

SEQ ID NO: 1771159 - RNA, 12 nt, Human
gugugcucugau

SEQ ID NO: 1771160 - RNA, 12 nt, Human
gugugccuucca

SEQ ID NO: 1771161 - RNA, 23 nt, Human
gugugccuuccagauccucucug

SEQ ID NO: 1771162 - RNA, 15 nt, Human
gugugcucugaucau

SEQ ID NO: 1771163 - RNA, 22 nt, Human
gugugcucugaucauccacugu

SEQ ID NO: 1771164 - RNA, 15 nt, Human
gugugcucugcuuca

SEQ ID NO: 1771165 - RNA, 20 nt, Human
gugugagucaccaagcccag

SEQ ID NO: 1771166 - RNA, 18 nt, Human
gugugauaaaucagucaa

SEQ ID NO: 1771167 - RNA, 14 nt, Human
gugugaucgucuga

SEQ ID NO: 1771168 - RNA, 16 nt, Human
gugugcaccaggguug

SEQ ID NO: 1771169 - RNA, 13 nt, Human
guguccugccugu

SEQ ID NO: 1771170 - RNA, 16 nt, Human
guguccugccugucug

SEQ ID NO: 1771171 - RNA, 17 nt, Human
guguccugccugucugc

SEQ ID NO: 1771172 - RNA, 20 nt, Human
guguccugccugucugcccc

SEQ ID NO: 1771173 - RNA, 16 nt, Human
guguccuccaggagcu

SEQ ID NO: 1771174 - RNA, 20 nt, Human
guguccugaaacgcuccuuu

SEQ ID NO: 1771175 - RNA, 21 nt, Human
guguccugaaacgcuccuuug

SEQ ID NO: 1771176 - RNA, 23 nt, Human
gugucccugcacuugcagacucu

SEQ ID NO: 1771177 - RNA, 14 nt, Human
guguuuuguaccag

SEQ ID NO: 1771178 - RNA, 16 nt, Human
guguuuuguuuauuaa

SEQ ID NO: 1771179 - RNA, 18 nt, Human
guguuccccuuccacuga

SEQ ID NO: 1771180 - RNA, 19 nt, Human
guguuccccuuccacugag

SEQ ID NO: 1771181 - RNA, 22 nt, Human
guguuccccuuccacugagggc

SEQ ID NO: 1771182 - RNA, 23 nt, Human
guguuccccuuccacugagggca

SEQ ID NO: 1771183 - RNA, 21 nt, Human
guguuaaaugugaugaauacu

SEQ ID NO: 1771184 - RNA, 23 nt, Human
guguuagggaagggccugccaca

SEQ ID NO: 1771185 - RNA, 16 nt, Human
guguuagggaagggcc

SEQ ID NO: 1771186 - RNA, 22 nt, Human
guguuagggaagggccugccac

SEQ ID NO: 1771187 - RNA, 16 nt, Human
guguuaccugaaaaca

SEQ ID NO: 1771188 - RNA, 15 nt, Human
guguuaccugugugc

SEQ ID NO: 1771189 - RNA, 16 nt, Human
guguuaccugugugcu

SEQ ID NO: 1771190 - RNA, 22 nt, Human
guuaacccuucaucuuccugug

SEQ ID NO: 1771191 - RNA, 19 nt, Human
guuaaauaaauuguauauu

SEQ ID NO: 1771192 - RNA, 18 nt, Human
guuaaauaaauuguauau

SEQ ID NO: 1771193 - RNA, 17 nt, Human
guuaaauaaauuguaua

SEQ ID NO: 1771194 - RNA, 13 nt, Human
guuaaauaaauug

SEQ ID NO: 1771195 - RNA, 21 nt, Human
guuaaauaaauuguauauuca

SEQ ID NO: 1771196 - RNA, 20 nt, Human
guuaaauaaauuguauauuc

SEQ ID NO: 1771197 - RNA, 22 nt, Human
guuaaauaaauuguauauucac

SEQ ID NO: 1771198 - RNA, 21 nt, Human
guuaaauagaguauaugcacu

SEQ ID NO: 1771199 - RNA, 19 nt, Human
guuaaauagaguauaugca

SEQ ID NO: 1771200 - RNA, 20 nt, Human
guuaaauagaguauaugcac

SEQ ID NO: 1771201 - RNA, 23 nt, Human
guuaaacuagcauaucugccuuu

SEQ ID NO: 1771202 - RNA, 15 nt, Human
guuaaacuagcauau

SEQ ID NO: 1771203 - RNA, 22 nt, Human
guuaaacuagcauaucugccuu

SEQ ID NO: 1771204 - RNA, 21 nt, Human
guuaaacuagcauaucugccu

SEQ ID NO: 1771205 - RNA, 20 nt, Human
guuaaacuagcauaucugcc

SEQ ID NO: 1771206 - RNA, 19 nt, Human
guuaaacuagcauaucugc

SEQ ID NO: 1771207 - RNA, 19 nt, Human
guggugcgaucuggguuca

SEQ ID NO: 1771208 - RNA, 14 nt, Human
guggugaccucugc

SEQ ID NO: 1771209 - RNA, 17 nt, Human
guggugaccucugccug

SEQ ID NO: 1771210 - RNA, 19 nt, Human
gugguaugaucacggcuca

SEQ ID NO: 1771211 - RNA, 22 nt, Human
gugguaugacauuggauagaac

SEQ ID NO: 1771212 - RNA, 18 nt, Human
gugguauuaauuuugaua

SEQ ID NO: 1771213 - RNA, 14 nt, Human
gugguaugucugcc

SEQ ID NO: 1771214 - RNA, 15 nt, Human
gugguaugucugcca

SEQ ID NO: 1771215 - RNA, 19 nt, Human
guguacuucccgggccagg

SEQ ID NO: 1771216 - RNA, 23 nt, Human
guguacuucccgggccagggcug

SEQ ID NO: 1771217 - RNA, 17 nt, Human
guguacaguuggcaugg

SEQ ID NO: 1771218 - RNA, 13 nt, Human
gugucccugcacu

SEQ ID NO: 1771219 - RNA, 18 nt, Human
gugucccccucuguccag

SEQ ID NO: 1771220 - RNA, 14 nt, Human
gugucccccucugu

SEQ ID NO: 1771221 - RNA, 16 nt, Human
gugucccugcacuugc

SEQ ID NO: 1771222 - RNA, 18 nt, Human
gugucccugcacuugcag

SEQ ID NO: 1771223 - RNA, 22 nt, Human
guguauagaagcgauuuaaguu

SEQ ID NO: 1771224 - RNA, 19 nt, Human
guggcuggguuggagggug

SEQ ID NO: 1771225 - RNA, 11 nt, Human
guggcugggca

SEQ ID NO: 1771226 - RNA, 12 nt, Human
guggcugggcag

SEQ ID NO: 1771227 - RNA, 15 nt, Human
gugggcaauuuagaa

SEQ ID NO: 1771228 - RNA, 22 nt, Human
guggcuuaaaacaacacucaca

SEQ ID NO: 1771229 - RNA, 15 nt, Human
guggcuccucccagc

SEQ ID NO: 1771230 - RNA, 15 nt, Human
gugggcuaguugggc

SEQ ID NO: 1771231 - RNA, 13 nt, Human
gugggcucccuga

SEQ ID NO: 1771232 - RNA, 14 nt, Human
gugggcucccugac

SEQ ID NO: 1771233 - RNA, 15 nt, Human
gugggcucccugacu

SEQ ID NO: 1771234 - RNA, 17 nt, Human
guggggagacugggcug

SEQ ID NO: 1771235 - RNA, 15 nt, Human
gugggcugggcccuc

SEQ ID NO: 1771236 - RNA, 20 nt, Human
gugggcugggcccucucuuc

SEQ ID NO: 1771237 - RNA, 13 nt, Human
guggggcagcuug

SEQ ID NO: 1771238 - RNA, 17 nt, Human
guggggcagcuugaggg

SEQ ID NO: 1771239 - RNA, 18 nt, Human
guggguguccugccuguc

SEQ ID NO: 1771240 - RNA, 22 nt, Human
guggguguccugccugucugcc

SEQ ID NO: 1771241 - RNA, 18 nt, Human
guuaugaacacuuaaauu

SEQ ID NO: 1771242 - RNA, 20 nt, Human
guuaucaccgugggcucccu

SEQ ID NO: 1771243 - RNA, 22 nt, Human
guuaucaccgugggcucccuga

SEQ ID NO: 1771244 - RNA, 19 nt, Human
guuauauugaaaaaauaga

SEQ ID NO: 1771245 - RNA, 14 nt, Human
guuauaugaauaua

SEQ ID NO: 1771246 - RNA, 19 nt, Human
guuauagaacuucauggau

SEQ ID NO: 1771247 - RNA, 23 nt, Human
guucaauucucauuugucacaca

SEQ ID NO: 1771248 - RNA, 16 nt, Human
guucaauucucauuug

SEQ ID NO: 1771249 - RNA, 20 nt, Human
guucaagcgauucuucugcu

SEQ ID NO: 1771250 - RNA, 23 nt, Human
guucaauaaagcacugagcaagu

SEQ ID NO: 1771251 - RNA, 21 nt, Human
guuauguaaaaggccaaaccu

SEQ ID NO: 1771252 - RNA, 19 nt, Human
guucaagcgauucuucugc

SEQ ID NO: 1771253 - RNA, 17 nt, Human
guuauuauauuuacaaa

SEQ ID NO: 1771254 - RNA, 22 nt, Human
guuauuagagauuaccuccuga

SEQ ID NO: 1771255 - RNA, 23 nt, Human
guuaccauuuugggguacccacu

SEQ ID NO: 1771256 - RNA, 22 nt, Human
guuaccugaaaacacugugcac

SEQ ID NO: 1771257 - RNA, 13 nt, Human
guuaccugugugc

SEQ ID NO: 1771258 - RNA, 14 nt, Human
guuaccugugugcu

SEQ ID NO: 1771259 - RNA, 14 nt, Human
guuauaaagauaca

SEQ ID NO: 1771260 - RNA, 15 nt, Human
guuauaaagauacag

SEQ ID NO: 1771261 - RNA, 16 nt, Human
guuacuccagugccaa

SEQ ID NO: 1771262 - RNA, 22 nt, Human
guuacuccagugccaacaaucc

SEQ ID NO: 1771263 - RNA, 15 nt, Human
guucacuaaagcagu

SEQ ID NO: 1771264 - RNA, 19 nt, Human
guucacgugcagcucaagg

SEQ ID NO: 1771265 - RNA, 19 nt, Human
guucacugcaaccuccgcc

SEQ ID NO: 1771266 - RNA, 16 nt, Human
guucacuuuugacaaa

SEQ ID NO: 1771267 - RNA, 20 nt, Human
guucacuuuugacaaaggca

SEQ ID NO: 1771268 - RNA, 20 nt, Human
guucauccuauucuuucgaa

SEQ ID NO: 1771269 - RNA, 18 nt, Human
guucauggauuacuucuc

SEQ ID NO: 1771270 - RNA, 20 nt, Human
guucagaucuuaauauaaau

SEQ ID NO: 1771271 - RNA, 23 nt, Human
guucagaucuuaauauaaauuca

SEQ ID NO: 1771272 - RNA, 14 nt, Human
guuccagacauucu

SEQ ID NO: 1771273 - RNA, 13 nt, Human
guuccugucccug

SEQ ID NO: 1771274 - RNA, 14 nt, Human
guuccugucccugc

SEQ ID NO: 1771275 - RNA, 15 nt, Human
guuccugucccugcg

SEQ ID NO: 1771276 - RNA, 16 nt, Human
guuccugucccugcgc

SEQ ID NO: 1771277 - RNA, 17 nt, Human
guuccugucccugcgcc

SEQ ID NO: 1771278 - RNA, 15 nt, Human
guucugcucaucauu

SEQ ID NO: 1771279 - RNA, 18 nt, Human
guucugcucaucauucuc

SEQ ID NO: 1771280 - RNA, 23 nt, Human
guucugcucaucauucucugucu

SEQ ID NO: 1771281 - RNA, 11 nt, Human
guucugggaca

SEQ ID NO: 1771282 - RNA, 20 nt, Human
guucuggaggaaagggagga

SEQ ID NO: 1771283 - RNA, 17 nt, Human
guucuggauggugugcc

SEQ ID NO: 1771284 - RNA, 12 nt, Human
guucugggacac

SEQ ID NO: 1771285 - RNA, 14 nt, Human
guucugggacacag

SEQ ID NO: 1771286 - RNA, 15 nt, Human
guucugggacacagu

SEQ ID NO: 1771287 - RNA, 16 nt, Human
guucugggacacaguu

SEQ ID NO: 1771288 - RNA, 23 nt, Human
guucugggacacaguucaauucu

SEQ ID NO: 1771289 - RNA, 16 nt, Human
guucuaagucuuucca

SEQ ID NO: 1771290 - RNA, 13 nt, Human
guucgcagagcuu

SEQ ID NO: 1771291 - RNA, 11 nt, Human
guucugccucu

SEQ ID NO: 1771292 - RNA, 13 nt, Human
guucugccucucc

SEQ ID NO: 1771293 - RNA, 17 nt, Human
guucuaagucuuuccau

SEQ ID NO: 1771294 - RNA, 19 nt, Human
guucuaagucuuuccauug

SEQ ID NO: 1771295 - RNA, 21 nt, Human
guucucugggagaaaaucauc

SEQ ID NO: 1771296 - RNA, 12 nt, Human
guugcccaggca

SEQ ID NO: 1771297 - RNA, 15 nt, Human
guugcccaggcaggu

SEQ ID NO: 1771298 - RNA, 14 nt, Human
guugcccaggcagg

SEQ ID NO: 1771299 - RNA, 13 nt, Human
guuggccaggcug

SEQ ID NO: 1771300 - RNA, 15 nt, Human
guuggccaggcuggu

SEQ ID NO: 1771301 - RNA, 14 nt, Human
guuggccaggcugg

SEQ ID NO: 1771302 - RNA, 17 nt, Human
guuggccaggcuggucu

SEQ ID NO: 1771303 - RNA, 19 nt, Human
guuggccaggcuggucuca

SEQ ID NO: 1771304 - RNA, 14 nt, Human
guuggccaguguga

SEQ ID NO: 1771305 - RNA, 23 nt, Human
guuggccaaagccaaagcuaggc

SEQ ID NO: 1771306 - RNA, 20 nt, Human
guuggcagaaauacagucuu

SEQ ID NO: 1771307 - RNA, 22 nt, Human
guuggauggauggguggauggc

SEQ ID NO: 1771308 - RNA, 23 nt, Human
guuggauggauggguggauggcc

SEQ ID NO: 1771309 - RNA, 14 nt, Human
guugcaagccccuc

SEQ ID NO: 1771310 - RNA, 20 nt, Human
guugcacacccacucagcuc

SEQ ID NO: 1771311 - RNA, 19 nt, Human
guuuagagaaugagaaaug

SEQ ID NO: 1771312 - RNA, 22 nt, Human
guuuacuagggaucccucaucu

SEQ ID NO: 1771313 - RNA, 16 nt, Human
guuuacuaugccugug

SEQ ID NO: 1771314 - RNA, 17 nt, Human
guuuacuaugccugugu

SEQ ID NO: 1771315 - RNA, 20 nt, Human
guuuacuaugccugugucuu

SEQ ID NO: 1771316 - RNA, 14 nt, Human
guuguccaacuauu

SEQ ID NO: 1771317 - RNA, 17 nt, Human
guugcagguucauggau

SEQ ID NO: 1771318 - RNA, 23 nt, Human
guuggcugggggccucagugcca

SEQ ID NO: 1771319 - RNA, 19 nt, Human
guuggcugggggccucagu

SEQ ID NO: 1771320 - RNA, 20 nt, Human
guuggccccugcccggcugc

SEQ ID NO: 1771321 - RNA, 13 nt, Human
guuggccccugcc

SEQ ID NO: 1771322 - RNA, 14 nt, Human
guuggccccugccc

SEQ ID NO: 1771323 - RNA, 12 nt, Human
guuggcuggggg

SEQ ID NO: 1771324 - RNA, 16 nt, Human
guuugaauguuaaaua

SEQ ID NO: 1771325 - RNA, 11 nt, Human
guuugaaauuc

SEQ ID NO: 1771326 - RNA, 14 nt, Human
guuugaaauucuga

SEQ ID NO: 1771327 - RNA, 15 nt, Human
guuugaaauucugaa

SEQ ID NO: 1771328 - RNA, 16 nt, Human
guuugaaauucugaau

SEQ ID NO: 1771329 - RNA, 17 nt, Human
guuugaauguuaaauaa

SEQ ID NO: 1771330 - RNA, 18 nt, Human
guuugguauuguauuuau

SEQ ID NO: 1771331 - RNA, 17 nt, Human
guuugguauuguauuua

SEQ ID NO: 1771332 - RNA, 15 nt, Human
guuugguauuguauu

SEQ ID NO: 1771333 - RNA, 23 nt, Human
guuuguggggugacgggacucag

SEQ ID NO: 1771334 - RNA, 21 nt, Human
guuugucauuagccugaguag

SEQ ID NO: 1771335 - RNA, 15 nt, Human
guuugucauuagccu

SEQ ID NO: 1771336 - RNA, 13 nt, Human
guuugucauuagc

SEQ ID NO: 1771337 - RNA, 12 nt, Human
guuuuguugagc

SEQ ID NO: 1771338 - RNA, 14 nt, Human
guuuuguaccagug

SEQ ID NO: 1771339 - RNA, 15 nt, Human
guuuuguaccaguga

SEQ ID NO: 1771340 - RNA, 17 nt, Human
guuuuguaccagugaau

SEQ ID NO: 1771341 - RNA, 19 nt, Human
guuuuguaccagugaauuu

SEQ ID NO: 1771342 - RNA, 11 nt, Human
guuuucacucu

SEQ ID NO: 1771343 - RNA, 12 nt, Human
guuuucacucuu

SEQ ID NO: 1771344 - RNA, 12 nt, Human
uaaaaggagcca

SEQ ID NO: 1771345 - RNA, 15 nt, Human
uaaaaggccaaaccu

SEQ ID NO: 1771346 - RNA, 18 nt, Human
uaaaaggccaaaccucug

SEQ ID NO: 1771347 - RNA, 20 nt, Human
uaaaaggccaaaccucuguu

SEQ ID NO: 1771348 - RNA, 16 nt, Human
uaaaagauauaagugc

SEQ ID NO: 1771349 - RNA, 13 nt, Human
uaaaagauauaag

SEQ ID NO: 1771350 - RNA, 12 nt, Human
uaaaagauauaa

SEQ ID NO: 1771351 - RNA, 21 nt, Human
uaaaagauauaagugcuguau

SEQ ID NO: 1771352 - RNA, 20 nt, Human
uaaaagaugucucugcaaac

SEQ ID NO: 1771353 - RNA, 20 nt, Human
uaaaagauauaagugcugua

SEQ ID NO: 1771354 - RNA, 19 nt, Human
uaaaagauauaagugcugu

SEQ ID NO: 1771355 - RNA, 18 nt, Human
uaaaagauauaagugcug

SEQ ID NO: 1771356 - RNA, 18 nt, Human
guuuuuaauauaaagccu

SEQ ID NO: 1771357 - RNA, 16 nt, Human
guuuuguuuauuaaau

SEQ ID NO: 1771358 - RNA, 17 nt, Human
guuuuguuuauuaaaua

SEQ ID NO: 1771359 - RNA, 11 nt, Human
uaaaaagcaac

SEQ ID NO: 1771360 - RNA, 23 nt, Human
uaaaacaauaaaauuuuuuuuca

SEQ ID NO: 1771361 - RNA, 22 nt, Human
uaaaacaagcacuaaacaaaga

SEQ ID NO: 1771362 - RNA, 15 nt, Human
uaaaacaacacucac

SEQ ID NO: 1771363 - RNA, 12 nt, Human
uaaagaaaacug

SEQ ID NO: 1771364 - RNA, 15 nt, Human
uaaagcaauaugcau

SEQ ID NO: 1771365 - RNA, 17 nt, Human
uaaagcaauaugcauuu

SEQ ID NO: 1771366 - RNA, 14 nt, Human
uaaagcacugagca

SEQ ID NO: 1771367 - RNA, 14 nt, Human
uaaaguguuugaaa

SEQ ID NO: 1771368 - RNA, 15 nt, Human
uaaaccaaggacuga

SEQ ID NO: 1771369 - RNA, 17 nt, Human
uaaaccaaggacugagc

SEQ ID NO: 1771370 - RNA, 12 nt, Human
uaaacugugcac

SEQ ID NO: 1771371 - RNA, 14 nt, Human
uaaacugugcacca

SEQ ID NO: 1771372 - RNA, 13 nt, Human
uaaaaucugucac

SEQ ID NO: 1771373 - RNA, 14 nt, Human
uaaaaucugucacg

SEQ ID NO: 1771374 - RNA, 18 nt, Human
uaaacacgccugcaaacg

SEQ ID NO: 1771375 - RNA, 11 nt, Human
uaaacacuaca

SEQ ID NO: 1771376 - RNA, 15 nt, Human
uaaacaucacacaca

SEQ ID NO: 1771377 - RNA, 16 nt, Human
uaaacaucacacacac

SEQ ID NO: 1771378 - RNA, 16 nt, Human
uaaaguugguuggaua

SEQ ID NO: 1771379 - RNA, 17 nt, Human
uaaaguugguuggauaa

SEQ ID NO: 1771380 - RNA, 18 nt, Human
uaaaguugguuggauaag

SEQ ID NO: 1771381 - RNA, 23 nt, Human
uaaaguucuguacucaaauguag

SEQ ID NO: 1771382 - RNA, 22 nt, Human
uaaaugucucuuuaaugucaca

SEQ ID NO: 1771383 - RNA, 18 nt, Human
uaacaccugauuaacuga

SEQ ID NO: 1771384 - RNA, 19 nt, Human
uaacaccugauuaacugag

SEQ ID NO: 1771385 - RNA, 12 nt, Human
uaaauuuauuaa

SEQ ID NO: 1771386 - RNA, 16 nt, Human
uaaauuuauuaaauaa

SEQ ID NO: 1771387 - RNA, 16 nt, Human
uaaauucacuuucauu

SEQ ID NO: 1771388 - RNA, 18 nt, Human
uaaauucacuuucauuuu

SEQ ID NO: 1771389 - RNA, 19 nt, Human
uaaaugugaugaauacugu

SEQ ID NO: 1771390 - RNA, 18 nt, Human
uaagaaaugguggaacug

SEQ ID NO: 1771391 - RNA, 20 nt, Human
uaagaaacaacucuuugaga

SEQ ID NO: 1771392 - RNA, 21 nt, Human
uaagaaacaacucuuugagaa

SEQ ID NO: 1771393 - RNA, 17 nt, Human
uaagaaauuuugccuuu

SEQ ID NO: 1771394 - RNA, 13 nt, Human
uaagaaccccucu

SEQ ID NO: 1771395 - RNA, 17 nt, Human
uaagaaccccucugcuu

SEQ ID NO: 1771396 - RNA, 20 nt, Human
uaagaaaaaauaacacacau

SEQ ID NO: 1771397 - RNA, 10 nt, Human
uaagaaaaac

SEQ ID NO: 1771398 - RNA, 11 nt, Human
uaagaaaaacu

SEQ ID NO: 1771399 - RNA, 13 nt, Human
uaagaaaaacuuu

SEQ ID NO: 1771400 - RNA, 15 nt, Human
uaagaaaaacuuuuu

SEQ ID NO: 1771401 - RNA, 19 nt, Human
uaagaaaaacuuuuuuggu

SEQ ID NO: 1771402 - RNA, 20 nt, Human
uaagaaaaacuuuuuugguu

SEQ ID NO: 1771403 - RNA, 13 nt, Human
uaacacuguuuau

SEQ ID NO: 1771404 - RNA, 18 nt, Human
uaacccccacuggacuga

SEQ ID NO: 1771405 - RNA, 15 nt, Human
uaacucugucuucac

SEQ ID NO: 1771406 - RNA, 11 nt, Human
uaacucugucu

SEQ ID NO: 1771407 - RNA, 14 nt, Human
uaacucugucuuca

SEQ ID NO: 1771408 - RNA, 13 nt, Human
uaagucccuguca

SEQ ID NO: 1771409 - RNA, 15 nt, Human
uaagucccugucacc

SEQ ID NO: 1771410 - RNA, 16 nt, Human
uaagucccugucaccu

SEQ ID NO: 1771411 - RNA, 19 nt, Human
uaagucccugucaccucuu

SEQ ID NO: 1771412 - RNA, 12 nt, Human
uaagugcuguau

SEQ ID NO: 1771413 - RNA, 14 nt, Human
uaagugcuguauaa

SEQ ID NO: 1771414 - RNA, 15 nt, Human
uaagugugaacugga

SEQ ID NO: 1771415 - RNA, 14 nt, Human
uaagugugaacugg

SEQ ID NO: 1771416 - RNA, 12 nt, Human
uaagugugaacu

SEQ ID NO: 1771417 - RNA, 22 nt, Human
uaagugugaacuggacccuguu

SEQ ID NO: 1771418 - RNA, 22 nt, Human
uaagccccagcaagcaauccua

SEQ ID NO: 1771419 - RNA, 17 nt, Human
uaagccccagcaagcaa

SEQ ID NO: 1771420 - RNA, 16 nt, Human
uaagccccagcaagca

SEQ ID NO: 1771421 - RNA, 12 nt, Human
uaagaggcaggg

SEQ ID NO: 1771422 - RNA, 15 nt, Human
uaagaggcagggucu

SEQ ID NO: 1771423 - RNA, 13 nt, Human
uaagcccuggcag

SEQ ID NO: 1771424 - RNA, 19 nt, Human
uaagcuauccguguugcag

SEQ ID NO: 1771425 - RNA, 15 nt, Human
uaaggugugcucuga

SEQ ID NO: 1771426 - RNA, 15 nt, Human
uaagucaaccugccu

SEQ ID NO: 1771427 - RNA, 17 nt, Human
uaagucaaccugccuga

SEQ ID NO: 1771428 - RNA, 19 nt, Human
uaauccgaaucucuuuuug

SEQ ID NO: 1771429 - RNA, 21 nt, Human
uaauccgaaucucuuuuugcu

SEQ ID NO: 1771430 - RNA, 21 nt, Human
uaauccccaguaaaauugcca

SEQ ID NO: 1771431 - RNA, 10 nt, Human
uaauaugcau

SEQ ID NO: 1771432 - RNA, 21 nt, Human
uaauaugcugcaacaaaaugu

SEQ ID NO: 1771433 - RNA, 22 nt, Human
uaauaugcugcaacaaaaugua

SEQ ID NO: 1771434 - RNA, 15 nt, Human
uaauggggcggugag

SEQ ID NO: 1771435 - RNA, 17 nt, Human
uaauggacagauuaaua

SEQ ID NO: 1771436 - RNA, 17 nt, Human
uaauggagcaucaagcc

SEQ ID NO: 1771437 - RNA, 22 nt, Human
uaauguugcuggaucaggaagc

SEQ ID NO: 1771438 - RNA, 13 nt, Human
uauagaagcgauu

SEQ ID NO: 1771439 - RNA, 13 nt, Human
uauagaacuucau

SEQ ID NO: 1771440 - RNA, 17 nt, Human
uauagaacuucauggau

SEQ ID NO: 1771441 - RNA, 22 nt, Human
uauagaacuucauggaucagau

SEQ ID NO: 1771442 - RNA, 14 nt, Human
uauaaaguagaaau

SEQ ID NO: 1771443 - RNA, 15 nt, Human
uauaguaaugaguuu

SEQ ID NO: 1771444 - RNA, 13 nt, Human
uauagugauguaa

SEQ ID NO: 1771445 - RNA, 18 nt, Human
uauagugauguaaucuug

SEQ ID NO: 1771446 - RNA, 20 nt, Human
uaucaggugcugccauccag

SEQ ID NO: 1771447 - RNA, 13 nt, Human
uaucauaauuacc

SEQ ID NO: 1771448 - RNA, 19 nt, Human
uaucaggugcugccaucca

SEQ ID NO: 1771449 - RNA, 16 nt, Human
uaucauggugaaaagc

SEQ ID NO: 1771450 - RNA, 13 nt, Human
uauauuuugucau

SEQ ID NO: 1771451 - RNA, 14 nt, Human
uauauuuugucaua

SEQ ID NO: 1771452 - RNA, 14 nt, Human
uauaaacaucacac

SEQ ID NO: 1771453 - RNA, 17 nt, Human
uauaaacaucacacaca

SEQ ID NO: 1771454 - RNA, 18 nt, Human
uauaaacaucacacacac

SEQ ID NO: 1771455 - RNA, 16 nt, Human
uaguaugguggcuggg

SEQ ID NO: 1771456 - RNA, 20 nt, Human
uaguggcuuaaaacaacacu

SEQ ID NO: 1771457 - RNA, 21 nt, Human
uagcugucccaucuggucauu

SEQ ID NO: 1771458 - RNA, 11 nt, Human
uaggugacaga

SEQ ID NO: 1771459 - RNA, 16 nt, Human
uaggugacagagugag

SEQ ID NO: 1771460 - RNA, 15 nt, Human
uagguuccccuguca

SEQ ID NO: 1771461 - RNA, 12 nt, Human
uagguucuucuu

SEQ ID NO: 1771462 - RNA, 14 nt, Human
uaguagauuaaaaa

SEQ ID NO: 1771463 - RNA, 11 nt, Human
uagcagggaaa

SEQ ID NO: 1771464 - RNA, 23 nt, Human
uagcauaucugccuuuauugugu

SEQ ID NO: 1771465 - RNA, 22 nt, Human
uagcauaucugccuuuauugug

SEQ ID NO: 1771466 - RNA, 21 nt, Human
uagcauaucugccuuuauugu

SEQ ID NO: 1771467 - RNA, 18 nt, Human
uagcauaucugccuuuau

SEQ ID NO: 1771468 - RNA, 17 nt, Human
uagcauaucugccuuua

SEQ ID NO: 1771469 - RNA, 16 nt, Human
uagcauaucugccuuu

SEQ ID NO: 1771470 - RNA, 14 nt, Human
uagcauaucugccu

SEQ ID NO: 1771471 - RNA, 16 nt, Human
uagaguuagacuguug

SEQ ID NO: 1771472 - RNA, 15 nt, Human
uagaguuagacuguu

SEQ ID NO: 1771473 - RNA, 17 nt, Human
uagaguuagacuguugg

SEQ ID NO: 1771474 - RNA, 16 nt, Human
uagauacucucuucuu

SEQ ID NO: 1771475 - RNA, 16 nt, Human
uagccuaggugacaga

SEQ ID NO: 1771476 - RNA, 16 nt, Human
uagccgguuccugucc

SEQ ID NO: 1771477 - RNA, 21 nt, Human
uagccgguuccugucccugcg

SEQ ID NO: 1771478 - RNA, 21 nt, Human
uagccgauaucagaauuugug

SEQ ID NO: 1771479 - RNA, 22 nt, Human
uagccgauaucagaauuugugu

SEQ ID NO: 1771480 - RNA, 14 nt, Human
uagccagcugcucc

SEQ ID NO: 1771481 - RNA, 15 nt, Human
uagccagcugcuccc

SEQ ID NO: 1771482 - RNA, 18 nt, Human
uagccagcugcuccccag

SEQ ID NO: 1771483 - RNA, 13 nt, Human
uagccagcuguca

SEQ ID NO: 1771484 - RNA, 18 nt, Human
uagccagcugucaagggc

SEQ ID NO: 1771485 - RNA, 12 nt, Human
uagccugcuggu

SEQ ID NO: 1771486 - RNA, 20 nt, Human
uagcucaggugucccugcac

SEQ ID NO: 1771487 - RNA, 21 nt, Human
uagcucaggugucccugcacu

SEQ ID NO: 1771488 - RNA, 15 nt, Human
uagcugggacuacag

SEQ ID NO: 1771489 - RNA, 17 nt, Human
uagcugggacuacaggc

SEQ ID NO: 1771490 - RNA, 19 nt, Human
uagcugggacuacaggcac

SEQ ID NO: 1771491 - RNA, 15 nt, Human
uagagaaugagaaau

SEQ ID NO: 1771492 - RNA, 11 nt, Human
uagagacaggg

SEQ ID NO: 1771493 - RNA, 12 nt, Human
uagagaauguuc

SEQ ID NO: 1771494 - RNA, 16 nt, Human
uagagaauguuccaga

SEQ ID NO: 1771495 - RNA, 17 nt, Human
uagagaauguuccagac

SEQ ID NO: 1771496 - RNA, 22 nt, Human
uagagaauguuccagacauucu

SEQ ID NO: 1771497 - RNA, 15 nt, Human
uagagugucuuucca

SEQ ID NO: 1771498 - RNA, 14 nt, Human
uagaguuagacugu

SEQ ID NO: 1771499 - RNA, 13 nt, Human
uagaguuagacug

SEQ ID NO: 1771500 - RNA, 20 nt, Human
uagaccuuuuuuuuuuuucc

SEQ ID NO: 1771501 - RNA, 21 nt, Human
uagaccuuuuuuuuuuuucca

SEQ ID NO: 1771502 - RNA, 22 nt, Human
uagaccuuuuuuuuuuuuccaa

SEQ ID NO: 1771503 - RNA, 23 nt, Human
uagacuaaggccauuauuguacu

SEQ ID NO: 1771504 - RNA, 20 nt, Human
uagacucggggugcuuccuu

SEQ ID NO: 1771505 - RNA, 21 nt, Human
uagacucggggugcuuccuug

SEQ ID NO: 1771506 - RNA, 23 nt, Human
uagacuguugggguggguauaaa

SEQ ID NO: 1771507 - RNA, 14 nt, Human
uacuuguggacaca

SEQ ID NO: 1771508 - RNA, 19 nt, Human
uacuuguggacuaaaagau

SEQ ID NO: 1771509 - RNA, 16 nt, Human
uacuuguggacuaaaa

SEQ ID NO: 1771510 - RNA, 15 nt, Human
uacuuguggacuaaa

SEQ ID NO: 1771511 - RNA, 23 nt, Human
uacuuguggacuaaaagauauaa

SEQ ID NO: 1771512 - RNA, 22 nt, Human
uacuuguggacuaaaagauaua

SEQ ID NO: 1771513 - RNA, 20 nt, Human
uacuuguggacuaaaagaua

SEQ ID NO: 1771514 - RNA, 15 nt, Human
uagaaguuuuaaauu

SEQ ID NO: 1771515 - RNA, 14 nt, Human
uagaauauucagac

SEQ ID NO: 1771516 - RNA, 15 nt, Human
uagaauauucagaca

SEQ ID NO: 1771517 - RNA, 17 nt, Human
uagaauauucagacaaa

SEQ ID NO: 1771518 - RNA, 22 nt, Human
uagaauauucagacaaaaugga

SEQ ID NO: 1771519 - RNA, 16 nt, Human
uacauuuuucaacuuu

SEQ ID NO: 1771520 - RNA, 17 nt, Human
uacauuuuucaacuuug

SEQ ID NO: 1771521 - RNA, 19 nt, Human
uacauuuuucaacuuugaa

SEQ ID NO: 1771522 - RNA, 20 nt, Human
uacauuuuucaacuuugaau

SEQ ID NO: 1771523 - RNA, 21 nt, Human
uacauuuuucaacuuugaaua

SEQ ID NO: 1771524 - RNA, 15 nt, Human
uacccacugcucugg

SEQ ID NO: 1771525 - RNA, 14 nt, Human
uaccgacccagggu

SEQ ID NO: 1771526 - RNA, 16 nt, Human
uacccagcgagcccug

SEQ ID NO: 1771527 - RNA, 14 nt, Human
uaccucccacacuc

SEQ ID NO: 1771528 - RNA, 15 nt, Human
uaccucccacacucc

SEQ ID NO: 1771529 - RNA, 17 nt, Human
uaccucccacacuccca

SEQ ID NO: 1771530 - RNA, 20 nt, Human
uaccucccacacucccaagg

SEQ ID NO: 1771531 - RNA, 15 nt, Human
uaccucccuugccuu

SEQ ID NO: 1771532 - RNA, 23 nt, Human
uacuaacaaucagcuccuuccug

SEQ ID NO: 1771533 - RNA, 21 nt, Human
uaccuccugucuuuacaaaua

SEQ ID NO: 1771534 - RNA, 13 nt, Human
uaccuccugagaa

SEQ ID NO: 1771535 - RNA, 19 nt, Human
uaccuccuccccccuccuc

SEQ ID NO: 1771536 - RNA, 11 nt, Human
uaccuccuccu

SEQ ID NO: 1771537 - RNA, 14 nt, Human
uaccuccugagaaa

SEQ ID NO: 1771538 - RNA, 16 nt, Human
uacuguccuacccacc

SEQ ID NO: 1771539 - RNA, 15 nt, Human
uacugccuuuagaaa

SEQ ID NO: 1771540 - RNA, 18 nt, Human
uacugccuuuagaaaaua

SEQ ID NO: 1771541 - RNA, 19 nt, Human
uacugccuuuagaaaauau

SEQ ID NO: 1771542 - RNA, 13 nt, Human
uacuuguggacac

SEQ ID NO: 1771543 - RNA, 13 nt, Human
uacuuaacuguuu

SEQ ID NO: 1771544 - RNA, 11 nt, Human
uacuugaacuu

SEQ ID NO: 1771545 - RNA, 17 nt, Human
uacuugaacuugccucu

SEQ ID NO: 1771546 - RNA, 21 nt, Human
uacuugaacuugccucuuuua

SEQ ID NO: 1771547 - RNA, 13 nt, Human
uacuugaacuugu

SEQ ID NO: 1771548 - RNA, 21 nt, Human
uacuccagugccaacaauccu

SEQ ID NO: 1771549 - RNA, 12 nt, Human
uacugccuuaau

SEQ ID NO: 1771550 - RNA, 22 nt, Human
uacugccuuaauaaaaaaugaa

SEQ ID NO: 1771551 - RNA, 11 nt, Human
uacugccaaag

SEQ ID NO: 1771552 - RNA, 11 nt, Human
uacacacacac

SEQ ID NO: 1771553 - RNA, 17 nt, Human
uacaacucauuccagau

SEQ ID NO: 1771554 - RNA, 18 nt, Human
uacaacucauuccagauc

SEQ ID NO: 1771555 - RNA, 20 nt, Human
uacaacucauuccagauccc

SEQ ID NO: 1771556 - RNA, 20 nt, Human
uaauuagugcuaagugugaa

SEQ ID NO: 1771557 - RNA, 16 nt, Human
uaauuagugcuaagug

SEQ ID NO: 1771558 - RNA, 15 nt, Human
uaauuagugcuaagu

SEQ ID NO: 1771559 - RNA, 14 nt, Human
uaauuagugcuaag

SEQ ID NO: 1771560 - RNA, 12 nt, Human
uaauuagugcua

SEQ ID NO: 1771561 - RNA, 16 nt, Human
uaauguuuuuaauauu

SEQ ID NO: 1771562 - RNA, 16 nt, Human
uacaaacugguauucu

SEQ ID NO: 1771563 - RNA, 14 nt, Human
uacauaaagacuaa

SEQ ID NO: 1771564 - RNA, 15 nt, Human
uacaggagugagcac

SEQ ID NO: 1771565 - RNA, 23 nt, Human
uacaguucggugagcuacaaaug

SEQ ID NO: 1771566 - RNA, 14 nt, Human
ugacacacagcucu

SEQ ID NO: 1771567 - RNA, 15 nt, Human
ugacacacagcucug

SEQ ID NO: 1771568 - RNA, 14 nt, Human
ugacagacacaggc

SEQ ID NO: 1771569 - RNA, 16 nt, Human
ugacagacacaggccc

SEQ ID NO: 1771570 - RNA, 13 nt, Human
ugacagacacagg

SEQ ID NO: 1771571 - RNA, 23 nt, Human
ugacaaggauugcuacuguccua

SEQ ID NO: 1771572 - RNA, 16 nt, Human
ugacaaggucaaauuu

SEQ ID NO: 1771573 - RNA, 19 nt, Human
ugaauuguaacuguucuug

SEQ ID NO: 1771574 - RNA, 12 nt, Human
ugaauuguacag

SEQ ID NO: 1771575 - RNA, 13 nt, Human
ugaauuguacaga

SEQ ID NO: 1771576 - RNA, 17 nt, Human
ugacagacacaggcccg

SEQ ID NO: 1771577 - RNA, 18 nt, Human
ugacagacacaggcccgg

SEQ ID NO: 1771578 - RNA, 21 nt, Human
ugaaguuugaauguuaaauaa

SEQ ID NO: 1771579 - RNA, 20 nt, Human
ugaaguuugaauguuaaaua

SEQ ID NO: 1771580 - RNA, 18 nt, Human
ugaaguuugaauguuaaa

SEQ ID NO: 1771581 - RNA, 17 nt, Human
ugaaguuugaauguuaa

SEQ ID NO: 1771582 - RNA, 16 nt, Human
ugaaguuugaauguua

SEQ ID NO: 1771583 - RNA, 13 nt, Human
ugaaucaugagcc

SEQ ID NO: 1771584 - RNA, 14 nt, Human
ugaaucaugagccu

SEQ ID NO: 1771585 - RNA, 15 nt, Human
ugaaucaugagccug

SEQ ID NO: 1771586 - RNA, 18 nt, Human
ugaaucaugagccugcug

SEQ ID NO: 1771587 - RNA, 19 nt, Human
ugaaggcuucucucugugg

SEQ ID NO: 1771588 - RNA, 13 nt, Human
ugaaggcuucucu

SEQ ID NO: 1771589 - RNA, 15 nt, Human
ugaaggcuucucucu

SEQ ID NO: 1771590 - RNA, 16 nt, Human
ugaaggcuucucucug

SEQ ID NO: 1771591 - RNA, 13 nt, Human
ugaaguuugaaug

SEQ ID NO: 1771592 - RNA, 12 nt, Human
ugaaguuugaau

SEQ ID NO: 1771593 - RNA, 15 nt, Human
ugaaguuugaauguu

SEQ ID NO: 1771594 - RNA, 14 nt, Human
ugaaguuugaaugu

SEQ ID NO: 1771595 - RNA, 13 nt, Human
ugaaucuugucuc

SEQ ID NO: 1771596 - RNA, 20 nt, Human
ugaaucuugucucaaugcuc

SEQ ID NO: 1771597 - RNA, 19 nt, Human
ugaaucuugucucaaugcu

SEQ ID NO: 1771598 - RNA, 16 nt, Human
ugaaucuugucucaau

SEQ ID NO: 1771599 - RNA, 15 nt, Human
ugaaucuugucucaa

SEQ ID NO: 1771600 - RNA, 23 nt, Human
ugaaucuugucucaaugcucaua

SEQ ID NO: 1771601 - RNA, 21 nt, Human
ugaaucuugucucaaugcuca

SEQ ID NO: 1771602 - RNA, 24 nt, Human
ugaaucuugucucaaugcucauaa

SEQ ID NO: 1771603 - RNA, 23 nt, Human
ugaaugcagucuguccaggcucg

SEQ ID NO: 1771604 - RNA, 22 nt, Human
ugaaugcagucuguccaggcuc

SEQ ID NO: 1771605 - RNA, 14 nt, Human
ugaaugauuugcau

SEQ ID NO: 1771606 - RNA, 16 nt, Human
ugaaugauucaguguu

SEQ ID NO: 1771607 - RNA, 14 nt, Human
ugaaggcccugcug

SEQ ID NO: 1771608 - RNA, 15 nt, Human
ugaaggcccugcuga

SEQ ID NO: 1771609 - RNA, 23 nt, Human
ugaagaguaagucaaccugccug

SEQ ID NO: 1771610 - RNA, 9 nt, Human
ugaaacagc

SEQ ID NO: 1771611 - RNA, 10 nt, Human
ugaaacagcu

SEQ ID NO: 1771612 - RNA, 11 nt, Human
ugaaacagcug

SEQ ID NO: 1771613 - RNA, 13 nt, Human
ugaaacagcugcc

SEQ ID NO: 1771614 - RNA, 14 nt, Human
ugaaacagcugccu

SEQ ID NO: 1771615 - RNA, 15 nt, Human
ugaaacagcugccuu

SEQ ID NO: 1771616 - RNA, 16 nt, Human
ugaaacagcugccuua

SEQ ID NO: 1771617 - RNA, 17 nt, Human
ugaaacagcugccuuag

SEQ ID NO: 1771618 - RNA, 19 nt, Human
ugaaacagcugccuuagcu

SEQ ID NO: 1771619 - RNA, 22 nt, Human
ugaaacagcugccuuagcuuca

SEQ ID NO: 1771620 - RNA, 23 nt, Human
ugaaacagcugccuuagcuucag

SEQ ID NO: 1771621 - RNA, 15 nt, Human
ugaacuggucuuccu

SEQ ID NO: 1771622 - RNA, 16 nt, Human
ugaacuggucuuccuu

SEQ ID NO: 1771623 - RNA, 17 nt, Human
ugaacuggucuuccuuu

SEQ ID NO: 1771624 - RNA, 18 nt, Human
ugaacuggucuuccuuuu

SEQ ID NO: 1771625 - RNA, 20 nt, Human
ugaacuuacuguagccucag

SEQ ID NO: 1771626 - RNA, 19 nt, Human
ugaagacucauucuucugu

SEQ ID NO: 1771627 - RNA, 20 nt, Human
ugaagacucauucuucugua

SEQ ID NO: 1771628 - RNA, 21 nt, Human
ugaggcagcagugugaggcca

SEQ ID NO: 1771629 - RNA, 19 nt, Human
ugaggcugggggagagccg

SEQ ID NO: 1771630 - RNA, 18 nt, Human
ugaggucagagccugcag

SEQ ID NO: 1771631 - RNA, 19 nt, Human
ugaggucagagccugcagu

SEQ ID NO: 1771632 - RNA, 22 nt, Human
ugaggaggggccccccugcccu

SEQ ID NO: 1771633 - RNA, 18 nt, Human
ugaggaugggucagagcu

SEQ ID NO: 1771634 - RNA, 23 nt, Human
ugagccgagaucacgccacugca

SEQ ID NO: 1771635 - RNA, 20 nt, Human
ugagcagggcucagcgggga

SEQ ID NO: 1771636 - RNA, 22 nt, Human
ugagcagggcucagcggggaca

SEQ ID NO: 1771637 - RNA, 23 nt, Human
ugagcagggcucagcggggacag

SEQ ID NO: 1771638 - RNA, 22 nt, Human
ugagccgagaucacgccacugc

SEQ ID NO: 1771639 - RNA, 14 nt, Human
ugagcugaggcagc

SEQ ID NO: 1771640 - RNA, 21 nt, Human
ugacugcccggcacagaugcu

SEQ ID NO: 1771641 - RNA, 22 nt, Human
ugacugcccggcacagaugcuc

SEQ ID NO: 1771642 - RNA, 16 nt, Human
ugacugcucagaacuu

SEQ ID NO: 1771643 - RNA, 20 nt, Human
ugacugcucagaacuugcug

SEQ ID NO: 1771644 - RNA, 22 nt, Human
ugacugcucagaacuugcugcu

SEQ ID NO: 1771645 - RNA, 18 nt, Human
ugacuacagucaggaaag

SEQ ID NO: 1771646 - RNA, 16 nt, Human
ugacuacagucaggaa

SEQ ID NO: 1771647 - RNA, 17 nt, Human
ugacuacagucaggaaa

SEQ ID NO: 1771648 - RNA, 19 nt, Human
ugagaggggaacagacugg

SEQ ID NO: 1771649 - RNA, 18 nt, Human
ugagaggggaacagacug

SEQ ID NO: 1771650 - RNA, 14 nt, Human
ugagaggggaacag

SEQ ID NO: 1771651 - RNA, 20 nt, Human
ugagauaccagcgaggaggc

SEQ ID NO: 1771652 - RNA, 21 nt, Human
ugagauaccagcgaggaggcu

SEQ ID NO: 1771653 - RNA, 22 nt, Human
ugagaguuuuggaugcagugcu

SEQ ID NO: 1771654 - RNA, 14 nt, Human
ugacuuuucugugg

SEQ ID NO: 1771655 - RNA, 20 nt, Human
ugagaaacaacaauuucuac

SEQ ID NO: 1771656 - RNA, 15 nt, Human
ucuugcucugcugac

SEQ ID NO: 1771657 - RNA, 23 nt, Human
ucuugcucugcugacagacacag

SEQ ID NO: 1771658 - RNA, 17 nt, Human
ucuugucucaaugcuca

SEQ ID NO: 1771659 - RNA, 15 nt, Human
ucuugucucaaugcu

SEQ ID NO: 1771660 - RNA, 14 nt, Human
ucuugucucaaugc

SEQ ID NO: 1771661 - RNA, 14 nt, Human
ucuugcucugcuga

SEQ ID NO: 1771662 - RNA, 19 nt, Human
ucuugccaaauauaaauaa

SEQ ID NO: 1771663 - RNA, 17 nt, Human
ucuucuuguucugagau

SEQ ID NO: 1771664 - RNA, 14 nt, Human
ucuucgggaccagg

SEQ ID NO: 1771665 - RNA, 17 nt, Human
ucuucgggaccaggauu

SEQ ID NO: 1771666 - RNA, 22 nt, Human
ucugugucagguggggcagcuu

SEQ ID NO: 1771667 - RNA, 17 nt, Human
ucugugucagguggggc

SEQ ID NO: 1771668 - RNA, 20 nt, Human
ucugugucagguggggcagc

SEQ ID NO: 1771669 - RNA, 14 nt, Human
ucuuauaauuuaaa

SEQ ID NO: 1771670 - RNA, 13 nt, Human
ucuuauaauuuaa

SEQ ID NO: 1771671 - RNA, 14 nt, Human
ucuucagaggcccu

SEQ ID NO: 1771672 - RNA, 15 nt, Human
ucuucagaggcccuc

SEQ ID NO: 1771673 - RNA, 14 nt, Human
ucuuugcagacagg

SEQ ID NO: 1771674 - RNA, 17 nt, Human
ucuuugcagacaggcaa

SEQ ID NO: 1771675 - RNA, 13 nt, Human
ucuuugcagacag

SEQ ID NO: 1771676 - RNA, 12 nt, Human
ucuuugcugcag

SEQ ID NO: 1771677 - RNA, 13 nt, Human
ucuuugcugcaga

SEQ ID NO: 1771678 - RNA, 17 nt, Human
ucuuuccaaauaaaaug

SEQ ID NO: 1771679 - RNA, 22 nt, Human
ucuuguggaagugcaucuacuu

SEQ ID NO: 1771680 - RNA, 23 nt, Human
ucuuguggaagugcaucuacuug

SEQ ID NO: 1771681 - RNA, 20 nt, Human
ucuugucucaaugcucauaa

SEQ ID NO: 1771682 - RNA, 18 nt, Human
ucuugucucaaugcucau

SEQ ID NO: 1771683 - RNA, 21 nt, Human
ucuugucucaaugcucauaac

SEQ ID NO: 1771684 - RNA, 23 nt, Human
ucuugugaggaaagucauuggcu

SEQ ID NO: 1771685 - RNA, 13 nt, Human
ucuugugaggaaa

SEQ ID NO: 1771686 - RNA, 16 nt, Human
ugaaaacacugugcac

SEQ ID NO: 1771687 - RNA, 18 nt, Human
ugaaaacacugugcacau

SEQ ID NO: 1771688 - RNA, 14 nt, Human
ucuuuuguuuccuu

SEQ ID NO: 1771689 - RNA, 17 nt, Human
ucuuuuccccuuuccug

SEQ ID NO: 1771690 - RNA, 18 nt, Human
ucuuuuccccuuuccugu

SEQ ID NO: 1771691 - RNA, 19 nt, Human
ucuuuuccccuuuccuguc

SEQ ID NO: 1771692 - RNA, 22 nt, Human
ucuuugcaggaggcccaaccuc

SEQ ID NO: 1771693 - RNA, 19 nt, Human
ucuggacugccccagaaaa

SEQ ID NO: 1771694 - RNA, 18 nt, Human
ucugcucuauuauauaaa

SEQ ID NO: 1771695 - RNA, 16 nt, Human
ucugcucugcguguca

SEQ ID NO: 1771696 - RNA, 21 nt, Human
ucugcucugcgugucaccugu

SEQ ID NO: 1771697 - RNA, 17 nt, Human
ucugccugcccaggccc

SEQ ID NO: 1771698 - RNA, 18 nt, Human
ucugccugcccaggcccc

SEQ ID NO: 1771699 - RNA, 20 nt, Human
ucugccugcccaggccccug

SEQ ID NO: 1771700 - RNA, 16 nt, Human
ucugcucgccuuagca

SEQ ID NO: 1771701 - RNA, 23 nt, Human
ucuguaaaaucuuucuuucuuag

SEQ ID NO: 1771702 - RNA, 22 nt, Human
ucuguaaaaucuuucuuucuua

SEQ ID NO: 1771703 - RNA, 12 nt, Human
ucuguccuggga

SEQ ID NO: 1771704 - RNA, 17 nt, Human
ucugucgcccagucugg

SEQ ID NO: 1771705 - RNA, 13 nt, Human
ucugucucaucca

SEQ ID NO: 1771706 - RNA, 21 nt, Human
ucugucucauccaucaucaug

SEQ ID NO: 1771707 - RNA, 17 nt, Human
ucugucucauccaucau

SEQ ID NO: 1771708 - RNA, 15 nt, Human
ucugucuccagcuuc

SEQ ID NO: 1771709 - RNA, 17 nt, Human
ucugucuccagcuuccc

SEQ ID NO: 1771710 - RNA, 18 nt, Human
ucugagaggacuuuucuu

SEQ ID NO: 1771711 - RNA, 15 nt, Human
ucugagccacagugg

SEQ ID NO: 1771712 - RNA, 17 nt, Human
ucugagccacaguggga

SEQ ID NO: 1771713 - RNA, 20 nt, Human
ucucauagguugagcaauuu

SEQ ID NO: 1771714 - RNA, 13 nt, Human
ucucauccaucau

SEQ ID NO: 1771715 - RNA, 14 nt, Human
ucucauccaucauc

SEQ ID NO: 1771716 - RNA, 22 nt, Human
ucugaggaauccagacccggcu

SEQ ID NO: 1771717 - RNA, 18 nt, Human
ucugaggaauccagaccc

SEQ ID NO: 1771718 - RNA, 21 nt, Human
ucugaggaauccagacccggc

SEQ ID NO: 1771719 - RNA, 19 nt, Human
ucugccauguugccccuuu

SEQ ID NO: 1771720 - RNA, 22 nt, Human
ucugccauauucuguuggccag

SEQ ID NO: 1771721 - RNA, 23 nt, Human
ucugccauauucuguuggccagu

SEQ ID NO: 1771722 - RNA, 16 nt, Human
ucugcagugugccccc

SEQ ID NO: 1771723 - RNA, 23 nt, Human
ucugccucugacacacagcucug

SEQ ID NO: 1771724 - RNA, 14 nt, Human
ucugccucuucugg

SEQ ID NO: 1771725 - RNA, 21 nt, Human
ucugccucugacacacagcuc

SEQ ID NO: 1771726 - RNA, 22 nt, Human
ucugccucugacacacagcucu

SEQ ID NO: 1771727 - RNA, 19 nt, Human
ucugccugaagucacacag

SEQ ID NO: 1771728 - RNA, 15 nt, Human
ucugccucuucuggg

SEQ ID NO: 1771729 - RNA, 17 nt, Human
ucugccucuucugggag

SEQ ID NO: 1771730 - RNA, 18 nt, Human
ucugccucuucugggagg

SEQ ID NO: 1771731 - RNA, 19 nt, Human
ucugccucuucugggaggg

SEQ ID NO: 1771732 - RNA, 20 nt, Human
ucugccugaagucacacagu

SEQ ID NO: 1771733 - RNA, 15 nt, Human
ucugccucugacaca

SEQ ID NO: 1771734 - RNA, 18 nt, Human
ucugccucugacacacag

SEQ ID NO: 1771735 - RNA, 13 nt, Human
ucugccuccuuua

SEQ ID NO: 1771736 - RNA, 13 nt, Human
ucugccucuccag

SEQ ID NO: 1771737 - RNA, 18 nt, Human
ucugccucuccaggcauu

SEQ ID NO: 1771738 - RNA, 16 nt, Human
ucaguuacccacucgg

SEQ ID NO: 1771739 - RNA, 18 nt, Human
ucaguuacccacucgguc

SEQ ID NO: 1771740 - RNA, 15 nt, Human
ucaguguuaaaugug

SEQ ID NO: 1771741 - RNA, 17 nt, Human
ucaguguuaaaugugau

SEQ ID NO: 1771742 - RNA, 21 nt, Human
ucaguguuaaaugugaugaau

SEQ ID NO: 1771743 - RNA, 15 nt, Human
ucaguguuaccugug

SEQ ID NO: 1771744 - RNA, 16 nt, Human
ucaguguuaccugugu

SEQ ID NO: 1771745 - RNA, 17 nt, Human
ucaguguuaccugugug

SEQ ID NO: 1771746 - RNA, 18 nt, Human
ucaguguuaccugugugc

SEQ ID NO: 1771747 - RNA, 19 nt, Human
ucaguguuaccugugugcu

SEQ ID NO: 1771748 - RNA, 17 nt, Human
ucagucugauucccaag

SEQ ID NO: 1771749 - RNA, 19 nt, Human
ucagucugauucccaagcu

SEQ ID NO: 1771750 - RNA, 13 nt, Human
ucagucucugagc

SEQ ID NO: 1771751 - RNA, 15 nt, Human
ucagucucugagcag

SEQ ID NO: 1771752 - RNA, 17 nt, Human
ucagucucugagcagug

SEQ ID NO: 1771753 - RNA, 20 nt, Human
ucagucucugagcagugaau

SEQ ID NO: 1771754 - RNA, 14 nt, Human
ucagguggggcagc

SEQ ID NO: 1771755 - RNA, 13 nt, Human
ucaggugcugucc

SEQ ID NO: 1771756 - RNA, 16 nt, Human
ucaggugcuguccaug

SEQ ID NO: 1771757 - RNA, 18 nt, Human
ucaggugcugccauccag

SEQ ID NO: 1771758 - RNA, 20 nt, Human
ucaggugcugccauccaggu

SEQ ID NO: 1771759 - RNA, 15 nt, Human
ucagguggggcagcu

SEQ ID NO: 1771760 - RNA, 16 nt, Human
ucagguggggcagcuu

SEQ ID NO: 1771761 - RNA, 21 nt, Human
ucagguggggcagcuugaggg

SEQ ID NO: 1771762 - RNA, 17 nt, Human
ucagguggggcagcuug

SEQ ID NO: 1771763 - RNA, 22 nt, Human
ucaggagucucugguagccugc

SEQ ID NO: 1771764 - RNA, 15 nt, Human
ucaguccauagcaga

SEQ ID NO: 1771765 - RNA, 13 nt, Human
ucauggauuacuu

SEQ ID NO: 1771766 - RNA, 22 nt, Human
ucauggauuacuucucuauaaa

SEQ ID NO: 1771767 - RNA, 22 nt, Human
ucauggcagaaggcaaacccau

SEQ ID NO: 1771768 - RNA, 20 nt, Human
ucaucauucucugucucauc

SEQ ID NO: 1771769 - RNA, 22 nt, Human
ucaucauucucugucucaucca

SEQ ID NO: 1771770 - RNA, 14 nt, Human
ucaucaucagagcc

SEQ ID NO: 1771771 - RNA, 11 nt, Human
ucaucaagaag

SEQ ID NO: 1771772 - RNA, 13 nt, Human
ucaucaagaaggg

SEQ ID NO: 1771773 - RNA, 16 nt, Human
ucaucaagaagggcug

SEQ ID NO: 1771774 - RNA, 18 nt, Human
ucaucaagaagggcugca

SEQ ID NO: 1771775 - RNA, 21 nt, Human
ucaucaagaagggcugcauga

SEQ ID NO: 1771776 - RNA, 22 nt, Human
ucagccucccaaagugcuggga

SEQ ID NO: 1771777 - RNA, 12 nt, Human
ucagccucccga

SEQ ID NO: 1771778 - RNA, 20 nt, Human
ucagccucccgaauagcugg

SEQ ID NO: 1771779 - RNA, 18 nt, Human
ucagcuccagcucaccag

SEQ ID NO: 1771780 - RNA, 21 nt, Human
ucagcuccagcucaccagccc

SEQ ID NO: 1771781 - RNA, 22 nt, Human
ucagcuccagcucaccagcccc

SEQ ID NO: 1771782 - RNA, 14 nt, Human
ucagcuccuuccug

SEQ ID NO: 1771783 - RNA, 15 nt, Human
ucagcuccuuccugg

SEQ ID NO: 1771784 - RNA, 16 nt, Human
ucagcuccuuccugga

SEQ ID NO: 1771785 - RNA, 17 nt, Human
ucagcuccuuccuggag

SEQ ID NO: 1771786 - RNA, 18 nt, Human
ucagcucggcucagcucg

SEQ ID NO: 1771787 - RNA, 13 nt, Human
ucagcucggcuca

SEQ ID NO: 1771788 - RNA, 20 nt, Human
ucaggaccaaagcuuucaug

SEQ ID NO: 1771789 - RNA, 15 nt, Human
ucaggacccagagga

SEQ ID NO: 1771790 - RNA, 16 nt, Human
ucaggacccagaggaa

SEQ ID NO: 1771791 - RNA, 19 nt, Human
ucaggacccagaggaaggg

SEQ ID NO: 1771792 - RNA, 18 nt, Human
ucaggaccuccaagccac

SEQ ID NO: 1771793 - RNA, 20 nt, Human
ucaggaccuccaagccacug

SEQ ID NO: 1771794 - RNA, 14 nt, Human
ucaggacucagaag

SEQ ID NO: 1771795 - RNA, 21 nt, Human
ucaggacucagaagccucugg

SEQ ID NO: 1771796 - RNA, 17 nt, Human
ucaggaggcaggaccuu

SEQ ID NO: 1771797 - RNA, 12 nt, Human
ucagccucccaa

SEQ ID NO: 1771798 - RNA, 13 nt, Human
ucagccucccaaa

SEQ ID NO: 1771799 - RNA, 15 nt, Human
ucagcauccuggcac

SEQ ID NO: 1771800 - RNA, 16 nt, Human
ucagcauccuggcacc

SEQ ID NO: 1771801 - RNA, 17 nt, Human
ucagcauccuggcaccc

SEQ ID NO: 1771802 - RNA, 18 nt, Human
ucagcauccuggcacccg

SEQ ID NO: 1771803 - RNA, 16 nt, Human
uaucauuuaauaauau

SEQ ID NO: 1771804 - RNA, 15 nt, Human
ucagauauucugcuc

SEQ ID NO: 1771805 - RNA, 18 nt, Human
ucagauauucugcucuau

SEQ ID NO: 1771806 - RNA, 14 nt, Human
uaucauuuaauaau

SEQ ID NO: 1771807 - RNA, 15 nt, Human
ucccaugagccucag

SEQ ID NO: 1771808 - RNA, 16 nt, Human
ucccaugagccucagc

SEQ ID NO: 1771809 - RNA, 16 nt, Human
ucccaccucagccucc

SEQ ID NO: 1771810 - RNA, 18 nt, Human
ucccaccucagccucccg

SEQ ID NO: 1771811 - RNA, 19 nt, Human
ucccaccuuggcugcaggg

SEQ ID NO: 1771812 - RNA, 21 nt, Human
ucccaccuuggcugcagggag

SEQ ID NO: 1771813 - RNA, 14 nt, Human
ucccacucagucca

SEQ ID NO: 1771814 - RNA, 15 nt, Human
uccauagcugcugcc

SEQ ID NO: 1771815 - RNA, 17 nt, Human
uccauagcugcugcccu

SEQ ID NO: 1771816 - RNA, 20 nt, Human
uccauaucagaacugugcca

SEQ ID NO: 1771817 - RNA, 13 nt, Human
uccauauccuggu

SEQ ID NO: 1771818 - RNA, 14 nt, Human
uccauauccuggug

SEQ ID NO: 1771819 - RNA, 21 nt, Human
uccaugccuuaaaccuaccuc

SEQ ID NO: 1771820 - RNA, 18 nt, Human
uccauguccccucccaga

SEQ ID NO: 1771821 - RNA, 17 nt, Human
uccauguccccucccag

SEQ ID NO: 1771822 - RNA, 16 nt, Human
uccauguccccuccca

SEQ ID NO: 1771823 - RNA, 16 nt, Human
uccagagauucauuuu

SEQ ID NO: 1771824 - RNA, 18 nt, Human
uccagagauucauuuucu

SEQ ID NO: 1771825 - RNA, 19 nt, Human
uccagagauucauuuucua

SEQ ID NO: 1771826 - RNA, 20 nt, Human
uccagagauucauuuucuag

SEQ ID NO: 1771827 - RNA, 21 nt, Human
uccagagauucauuuucuaga

SEQ ID NO: 1771828 - RNA, 23 nt, Human
uccagagauucauuuucuagaua

SEQ ID NO: 1771829 - RNA, 12 nt, Human
uccagagggcac

SEQ ID NO: 1771830 - RNA, 17 nt, Human
uccagagggcacucugc

SEQ ID NO: 1771831 - RNA, 22 nt, Human
uccacugugccaugugccaggu

SEQ ID NO: 1771832 - RNA, 21 nt, Human
uccacccugcucuccgaccag

SEQ ID NO: 1771833 - RNA, 12 nt, Human
uccacagggcac

SEQ ID NO: 1771834 - RNA, 13 nt, Human
uccacccugcucu

SEQ ID NO: 1771835 - RNA, 14 nt, Human
uccacccugcucuc

SEQ ID NO: 1771836 - RNA, 21 nt, Human
uccaggaagaaagaauguuac

SEQ ID NO: 1771837 - RNA, 16 nt, Human
uccaggagaaggccaa

SEQ ID NO: 1771838 - RNA, 20 nt, Human
uccaggagaaggccaauucc

SEQ ID NO: 1771839 - RNA, 23 nt, Human
uccaggagaaggccaauuccuau

SEQ ID NO: 1771840 - RNA, 17 nt, Human
uccaagccacugagcaa

SEQ ID NO: 1771841 - RNA, 16 nt, Human
ucuaauuuuuaagcaa

SEQ ID NO: 1771842 - RNA, 20 nt, Human
ucuaauggguauuuaaacaa

SEQ ID NO: 1771843 - RNA, 20 nt, Human
ucuaggccuccuggcccagg

SEQ ID NO: 1771844 - RNA, 17 nt, Human
ucucacuguugcccagg

SEQ ID NO: 1771845 - RNA, 21 nt, Human
ucucagacuuuggaaaaugca

SEQ ID NO: 1771846 - RNA, 22 nt, Human
ucucagacuuuggaaaaugcau

SEQ ID NO: 1771847 - RNA, 14 nt, Human
ucucacuguugccc

SEQ ID NO: 1771848 - RNA, 15 nt, Human
ucucacuguugccca

SEQ ID NO: 1771849 - RNA, 17 nt, Human
ucucacuggaugcaaag

SEQ ID NO: 1771850 - RNA, 18 nt, Human
ucuaucuuuuguuuccuu

SEQ ID NO: 1771851 - RNA, 14 nt, Human
ucucacaagccagc

SEQ ID NO: 1771852 - RNA, 23 nt, Human
ucucacucugucgcccagucugg

SEQ ID NO: 1771853 - RNA, 14 nt, Human
ucgcccagucugga

SEQ ID NO: 1771854 - RNA, 19 nt, Human
ucgcccagucuggaaugca

SEQ ID NO: 1771855 - RNA, 23 nt, Human
ucgcccagucuggaaugcagugg

SEQ ID NO: 1771856 - RNA, 15 nt, Human
ucggccuagggcccc

SEQ ID NO: 1771857 - RNA, 22 nt, Human
ucggccuagggcccccacaguu

SEQ ID NO: 1771858 - RNA, 16 nt, Human
ucgauguuauguaaaa

SEQ ID NO: 1771859 - RNA, 17 nt, Human
uccuuuguguguguguc

SEQ ID NO: 1771860 - RNA, 18 nt, Human
uccuuuguguguguguca

SEQ ID NO: 1771861 - RNA, 22 nt, Human
uccuuugugugugugucagcug

SEQ ID NO: 1771862 - RNA, 10 nt, Human
uccuguccca

SEQ ID NO: 1771863 - RNA, 14 nt, Human
uccugucccugcgc

SEQ ID NO: 1771864 - RNA, 22 nt, Human
uccugucccugcgccuuuccuu

SEQ ID NO: 1771865 - RNA, 18 nt, Human
uccuugggggcucccagg

SEQ ID NO: 1771866 - RNA, 15 nt, Human
uccuucuuugggaua

SEQ ID NO: 1771867 - RNA, 21 nt, Human
uccuucuuugggauagagaau

SEQ ID NO: 1771868 - RNA, 14 nt, Human
uccuccugggcccu

SEQ ID NO: 1771869 - RNA, 15 nt, Human
uccuccugggcccuc

SEQ ID NO: 1771870 - RNA, 16 nt, Human
uccuccugggcccucu

SEQ ID NO: 1771871 - RNA, 22 nt, Human
uccuccguccauaucagaacug

SEQ ID NO: 1771872 - RNA, 17 nt, Human
uccucaaaacuggaguc

SEQ ID NO: 1771873 - RNA, 12 nt, Human
uccggacuggug

SEQ ID NO: 1771874 - RNA, 14 nt, Human
uccggacuggugcc

SEQ ID NO: 1771875 - RNA, 16 nt, Human
uccggacuggugcccu

SEQ ID NO: 1771876 - RNA, 16 nt, Human
uccggaaugccaccca

SEQ ID NO: 1771877 - RNA, 17 nt, Human
uccggaaugccacccac

SEQ ID NO: 1771878 - RNA, 18 nt, Human
uccggaaugccacccaca

SEQ ID NO: 1771879 - RNA, 20 nt, Human
uccuaugcuauugacaauaa

SEQ ID NO: 1771880 - RNA, 21 nt, Human
uccuaugcuauugacaauaaa

SEQ ID NO: 1771881 - RNA, 22 nt, Human
uccuaugcuauugacaauaaaa

SEQ ID NO: 1771882 - RNA, 21 nt, Human
uccuaugugauuuuaacucug

SEQ ID NO: 1771883 - RNA, 22 nt, Human
uccgaaagggacuuggaagcuc

SEQ ID NO: 1771884 - RNA, 17 nt, Human
uccgaaccuccucugug

SEQ ID NO: 1771885 - RNA, 16 nt, Human
uccgaaccuccucugu

SEQ ID NO: 1771886 - RNA, 15 nt, Human
uccgaaccuccucug

SEQ ID NO: 1771887 - RNA, 19 nt, Human
uccgacucuuucugagugc

SEQ ID NO: 1771888 - RNA, 23 nt, Human
uccgacucuuucugagugccuuc

SEQ ID NO: 1771889 - RNA, 17 nt, Human
ucccuucugucccucac

SEQ ID NO: 1771890 - RNA, 22 nt, Human
ucccuucugucccucacagcac

SEQ ID NO: 1771891 - RNA, 21 nt, Human
uccgaaagggacuuggaagcu

SEQ ID NO: 1771892 - RNA, 20 nt, Human
ucccuugacuuugcuccuca

SEQ ID NO: 1771893 - RNA, 21 nt, Human
uccgcuuucuacccagcgagc

SEQ ID NO: 1771894 - RNA, 16 nt, Human
ucccuucugucccuca

SEQ ID NO: 1771895 - RNA, 12 nt, Human
ucccuggcuucu

SEQ ID NO: 1771896 - RNA, 14 nt, Human
ucccuggcuucugu

SEQ ID NO: 1771897 - RNA, 15 nt, Human
ucccuggcuucugug

SEQ ID NO: 1771898 - RNA, 17 nt, Human
ucccuggcuucuguggg

SEQ ID NO: 1771899 - RNA, 20 nt, Human
ucccugcacuugcagacucu

SEQ ID NO: 1771900 - RNA, 14 nt, Human
ucccuccgggaccu

SEQ ID NO: 1771901 - RNA, 15 nt, Human
ucccuccgggaccug

SEQ ID NO: 1771902 - RNA, 19 nt, Human
ucccuagaaacuuccaaau

SEQ ID NO: 1771903 - RNA, 18 nt, Human
ucccuagaaacuuccaaa

SEQ ID NO: 1771904 - RNA, 17 nt, Human
ucccaugagccucagca

SEQ ID NO: 1771905 - RNA, 22 nt, Human
ucccaugagccucagcauccug

SEQ ID NO: 1771906 - RNA, 15 nt, Human
ucccuaccgacccag

SEQ ID NO: 1771907 - RNA, 18 nt, Human
ucccuaccgacccagggu

SEQ ID NO: 1771908 - RNA, 22 nt, Human
uggacagacagaggaugagcuc

SEQ ID NO: 1771909 - RNA, 16 nt, Human
uggacagacagaggau

SEQ ID NO: 1771910 - RNA, 18 nt, Human
uggacaugaagauucuuu

SEQ ID NO: 1771911 - RNA, 16 nt, Human
uggacagauuaauauu

SEQ ID NO: 1771912 - RNA, 21 nt, Human
uggacaugaagauucuuuccc

SEQ ID NO: 1771913 - RNA, 22 nt, Human
uggacaugaagauucuuuccca

SEQ ID NO: 1771914 - RNA, 13 nt, Human
uggaaccaggcuu

SEQ ID NO: 1771915 - RNA, 15 nt, Human
uggaaccaggcuugg

SEQ ID NO: 1771916 - RNA, 22 nt, Human
uggaauaauccuaaacauauga

SEQ ID NO: 1771917 - RNA, 16 nt, Human
ugcuggagcacugggc

SEQ ID NO: 1771918 - RNA, 18 nt, Human
ugcuggagcacugggcuc

SEQ ID NO: 1771919 - RNA, 20 nt, Human
ugcuggagcacugggcuccc

SEQ ID NO: 1771920 - RNA, 18 nt, Human
uggaaacauucaggagcu

SEQ ID NO: 1771921 - RNA, 17 nt, Human
uggaaaacaaggaaguc

SEQ ID NO: 1771922 - RNA, 13 nt, Human
uggcagugggagc

SEQ ID NO: 1771923 - RNA, 15 nt, Human
uggcagguccucccc

SEQ ID NO: 1771924 - RNA, 17 nt, Human
uggcagguccuccccuc

SEQ ID NO: 1771925 - RNA, 20 nt, Human
uggcaggacgugggcugggc

SEQ ID NO: 1771926 - RNA, 13 nt, Human
uggcagcugcuuu

SEQ ID NO: 1771927 - RNA, 21 nt, Human
uggcacccggccccugcuggu

SEQ ID NO: 1771928 - RNA, 23 nt, Human
uggcaguggacucagaaagccaa

SEQ ID NO: 1771929 - RNA, 20 nt, Human
uggccagaugcaccagcccu

SEQ ID NO: 1771930 - RNA, 21 nt, Human
uggccagaugcaccagcccuu

SEQ ID NO: 1771931 - RNA, 15 nt, Human
uggacucucagucuc

SEQ ID NO: 1771932 - RNA, 20 nt, Human
uggacucucagucucugagc

SEQ ID NO: 1771933 - RNA, 22 nt, Human
uggacucucagucucugagcag

SEQ ID NO: 1771934 - RNA, 21 nt, Human
uggacucugaaauaucccggg

SEQ ID NO: 1771935 - RNA, 12 nt, Human
uggacucagaaa

SEQ ID NO: 1771936 - RNA, 16 nt, Human
uggaggaaagggagga

SEQ ID NO: 1771937 - RNA, 14 nt, Human
uggauuucuuuugu

SEQ ID NO: 1771938 - RNA, 18 nt, Human
uggaucucauuggacccu

SEQ ID NO: 1771939 - RNA, 16 nt, Human
uggauuucuuuuguaa

SEQ ID NO: 1771940 - RNA, 14 nt, Human
ugggggugccagga

SEQ ID NO: 1771941 - RNA, 13 nt, Human
ugggguuuccugg

SEQ ID NO: 1771942 - RNA, 14 nt, Human
ugggguuuccuggc

SEQ ID NO: 1771943 - RNA, 17 nt, Human
ugggguuuccuggcacu

SEQ ID NO: 1771944 - RNA, 15 nt, Human
ugggguuuccuggca

SEQ ID NO: 1771945 - RNA, 18 nt, Human
ugguauuguauuuauuca

SEQ ID NO: 1771946 - RNA, 14 nt, Human
ugguauuguauuua

SEQ ID NO: 1771947 - RNA, 13 nt, Human
ugguauuguauuu

SEQ ID NO: 1771948 - RNA, 12 nt, Human
ugguauuguauu

SEQ ID NO: 1771949 - RNA, 19 nt, Human
ugguauucaggauuacaug

SEQ ID NO: 1771950 - RNA, 18 nt, Human
ugguaugaucacggcuca

SEQ ID NO: 1771951 - RNA, 22 nt, Human
ugggcuaagugauccucccacc

SEQ ID NO: 1771952 - RNA, 16 nt, Human
ugggcuaguugggcuu

SEQ ID NO: 1771953 - RNA, 17 nt, Human
ugggcuggugucaccug

SEQ ID NO: 1771954 - RNA, 15 nt, Human
ugggcuucaguggca

SEQ ID NO: 1771955 - RNA, 17 nt, Human
ugggcuucaguggcagc

SEQ ID NO: 1771956 - RNA, 21 nt, Human
uggcuugaguuuaaauuguaa

SEQ ID NO: 1771957 - RNA, 20 nt, Human
uggcuuuauccucuuuagag

SEQ ID NO: 1771958 - RNA, 16 nt, Human
uggcuuuauccucuuu

SEQ ID NO: 1771959 - RNA, 16 nt, Human
uggcuuuaugcacauu

SEQ ID NO: 1771960 - RNA, 21 nt, Human
uggcuuuauccucuuuagagu

SEQ ID NO: 1771961 - RNA, 14 nt, Human
uggcuucugugggg

SEQ ID NO: 1771962 - RNA, 20 nt, Human
uggcuucuguggggccccuc

SEQ ID NO: 1771963 - RNA, 21 nt, Human
uggcugggggccucagugcca

SEQ ID NO: 1771964 - RNA, 15 nt, Human
ugggagugagcuggu

SEQ ID NO: 1771965 - RNA, 17 nt, Human
ugggagcugccuguuca

SEQ ID NO: 1771966 - RNA, 21 nt, Human
ugggagcugccuguucagcuc

SEQ ID NO: 1771967 - RNA, 22 nt, Human
ugggagcugccuguucagcucc

SEQ ID NO: 1771968 - RNA, 16 nt, Human
ugggauuacaggugug

SEQ ID NO: 1771969 - RNA, 12 nt, Human
ugggagcugccu

SEQ ID NO: 1771970 - RNA, 13 nt, Human
ugggagcugccug

SEQ ID NO: 1771971 - RNA, 14 nt, Human
ugggagcugccugu

SEQ ID NO: 1771972 - RNA, 17 nt, Human
ugcaccgggccacagag

SEQ ID NO: 1771973 - RNA, 22 nt, Human
ugcaccgggccacagagaaagu

SEQ ID NO: 1771974 - RNA, 14 nt, Human
ugcaccgggccaca

SEQ ID NO: 1771975 - RNA, 15 nt, Human
ugcaccgggccacag

SEQ ID NO: 1771976 - RNA, 23 nt, Human
ugcagcaggaauauaugugugcc

SEQ ID NO: 1771977 - RNA, 20 nt, Human
ugcagugcucgcuguugcug

SEQ ID NO: 1771978 - RNA, 19 nt, Human
ugcagugcucgcuguugcu

SEQ ID NO: 1771979 - RNA, 17 nt, Human
ugcagugcucgcuguug

SEQ ID NO: 1771980 - RNA, 22 nt, Human
ugcagugguaugaucacggcuc

SEQ ID NO: 1771981 - RNA, 20 nt, Human
ugcaguggugcgaucugggu

SEQ ID NO: 1771982 - RNA, 23 nt, Human
ugcagugcucgcuguugcugaau

SEQ ID NO: 1771983 - RNA, 22 nt, Human
ugcagugcucgcuguugcugaa

SEQ ID NO: 1771984 - RNA, 21 nt, Human
ugcagugcucgcuguugcuga

SEQ ID NO: 1771985 - RNA, 19 nt, Human
ugcagugguauuaauuuug

SEQ ID NO: 1771986 - RNA, 14 nt, Human
ugcaguucugagca

SEQ ID NO: 1771987 - RNA, 16 nt, Human
ugccccaucagugcuc

SEQ ID NO: 1771988 - RNA, 18 nt, Human
ugccccaucagugcuccc

SEQ ID NO: 1771989 - RNA, 20 nt, Human
ugccccaucagugcucccuc

SEQ ID NO: 1771990 - RNA, 21 nt, Human
ugccccaucagugcucccuca

SEQ ID NO: 1771991 - RNA, 11 nt, Human
ugcccaggcug

SEQ ID NO: 1771992 - RNA, 13 nt, Human
ugcccaggcuggc

SEQ ID NO: 1771993 - RNA, 21 nt, Human
ugccauccagguucagcuugu

SEQ ID NO: 1771994 - RNA, 18 nt, Human
ugccagguuuuuggucug

SEQ ID NO: 1771995 - RNA, 19 nt, Human
ugccagguuuuuggucuga

SEQ ID NO: 1771996 - RNA, 22 nt, Human
ugccagguuuuuggucugaccc

SEQ ID NO: 1771997 - RNA, 19 nt, Human
ugccacccuggggagaaag

SEQ ID NO: 1771998 - RNA, 22 nt, Human
ugccacuacggaauaguuggcu

SEQ ID NO: 1771999 - RNA, 20 nt, Human
ugccacccuggggagaaagu

SEQ ID NO: 1772000 - RNA, 18 nt, Human
ugccaaauauaaauaaaa

SEQ ID NO: 1772001 - RNA, 17 nt, Human
ugccaaauauaaauaaa

SEQ ID NO: 1772002 - RNA, 22 nt, Human
ugccaaauauaaauaaaaauaa

SEQ ID NO: 1772003 - RNA, 19 nt, Human
ugccaaauauaaauaaaaa

SEQ ID NO: 1772004 - RNA, 14 nt, Human
ugcgccuacaggag

SEQ ID NO: 1772005 - RNA, 16 nt, Human
ugcgccuacaggagug

SEQ ID NO: 1772006 - RNA, 22 nt, Human
ugcgccuacaggagugagcacu

SEQ ID NO: 1772007 - RNA, 11 nt, Human
ugcgccugcug

SEQ ID NO: 1772008 - RNA, 14 nt, Human
ugcgaucuggguuc

SEQ ID NO: 1772009 - RNA, 15 nt, Human
ugcgaucuggguuca

SEQ ID NO: 1772010 - RNA, 19 nt, Human
ugcgaucuggguucacugc

SEQ ID NO: 1772011 - RNA, 20 nt, Human
ugcgaucuggguucacugca

SEQ ID NO: 1772012 - RNA, 21 nt, Human
ugcgaucuggguucacugcaa

SEQ ID NO: 1772013 - RNA, 15 nt, Human
ugccucuucugggag

SEQ ID NO: 1772014 - RNA, 13 nt, Human
ugccucuccaggc

SEQ ID NO: 1772015 - RNA, 14 nt, Human
ugccucuccaggca

SEQ ID NO: 1772016 - RNA, 18 nt, Human
ugccucuuuuaccugcug

SEQ ID NO: 1772017 - RNA, 19 nt, Human
ugccucuuuuaccugcugc

SEQ ID NO: 1772018 - RNA, 20 nt, Human
ugccucuuuuaccugcugcu

SEQ ID NO: 1772019 - RNA, 21 nt, Human
ugccucuuuuaccugcugcuu

SEQ ID NO: 1772020 - RNA, 22 nt, Human
ugccucuuuuaccugcugcuuc

SEQ ID NO: 1772021 - RNA, 16 nt, Human
ugccucuucugggagg

SEQ ID NO: 1772022 - RNA, 19 nt, Human
ugccucuucugggagggca

SEQ ID NO: 1772023 - RNA, 20 nt, Human
ugccucuucugggagggcag

SEQ ID NO: 1772024 - RNA, 21 nt, Human
ugccucuucugggagggcagc

SEQ ID NO: 1772025 - RNA, 20 nt, Human
ugccucgaacuggcugcaaa

SEQ ID NO: 1772026 - RNA, 18 nt, Human
ugccucgaacuggcugca

SEQ ID NO: 1772027 - RNA, 19 nt, Human
ugccucgaacuggcugcaa

SEQ ID NO: 1772028 - RNA, 18 nt, Human
ugccugacauuuggagug

SEQ ID NO: 1772029 - RNA, 13 nt, Human
ugccugucugccc

SEQ ID NO: 1772030 - RNA, 14 nt, Human
ugccugucugcccc

SEQ ID NO: 1772031 - RNA, 15 nt, Human
ugccugucugcccca

SEQ ID NO: 1772032 - RNA, 16 nt, Human
ugccugucugccccag

SEQ ID NO: 1772033 - RNA, 15 nt, Human
ugccuguaaacauag

SEQ ID NO: 1772034 - RNA, 18 nt, Human
ugccuguagcccacucug

SEQ ID NO: 1772035 - RNA, 20 nt, Human
ugccuguagcccacucugcu

SEQ ID NO: 1772036 - RNA, 23 nt, Human
ugccuguagcccacucugcucgc

SEQ ID NO: 1772037 - RNA, 14 nt, Human
ugccugguggcagc

SEQ ID NO: 1772038 - RNA, 15 nt, Human
ugccugguggcagcu

SEQ ID NO: 1772039 - RNA, 16 nt, Human
ugccugguggcagcug

SEQ ID NO: 1772040 - RNA, 19 nt, Human
ugcugcuauccugccaaaa

SEQ ID NO: 1772041 - RNA, 11 nt, Human
ugcugcuggcc

SEQ ID NO: 1772042 - RNA, 12 nt, Human
ugcugcuggcca

SEQ ID NO: 1772043 - RNA, 13 nt, Human
ugcugcuggccaa

SEQ ID NO: 1772044 - RNA, 14 nt, Human
ugcugcuggccaaa

SEQ ID NO: 1772045 - RNA, 21 nt, Human
ugcugcuggccaaauagcaaa

SEQ ID NO: 1772046 - RNA, 14 nt, Human
ugcuggaagcccag

SEQ ID NO: 1772047 - RNA, 15 nt, Human
ugcuggaagcccagc

SEQ ID NO: 1772048 - RNA, 12 nt, Human
ugcugcugucuu

SEQ ID NO: 1772049 - RNA, 18 nt, Human
ugcugcaugcccucucag

SEQ ID NO: 1772050 - RNA, 19 nt, Human
ugcugcaugcccucucagg

SEQ ID NO: 1772051 - RNA, 15 nt, Human
ugcugcaugcccucu

SEQ ID NO: 1772052 - RNA, 16 nt, Human
ugcugcaugcccucuc

SEQ ID NO: 1772053 - RNA, 17 nt, Human
ugcugcaacaaaaugua

SEQ ID NO: 1772054 - RNA, 22 nt, Human
ugcugacagacacaggcccggc

SEQ ID NO: 1772055 - RNA, 23 nt, Human
ugcugacagacacaggcccggcu

SEQ ID NO: 1772056 - RNA, 14 nt, Human
ugcuccucucccca

SEQ ID NO: 1772057 - RNA, 15 nt, Human
ugcucacauaucugu

SEQ ID NO: 1772058 - RNA, 16 nt, Human
ugcucacauaucuguc

SEQ ID NO: 1772059 - RNA, 15 nt, Human
ugcuaagccccagca

SEQ ID NO: 1772060 - RNA, 18 nt, Human
ugcuaagccccagcaagc

SEQ ID NO: 1772061 - RNA, 17 nt, Human
ugcuccucuccccagca

SEQ ID NO: 1772062 - RNA, 18 nt, Human
ugcuccucuccccagcaa

SEQ ID NO: 1772063 - RNA, 16 nt, Human
ugcucuaugcuuucca

SEQ ID NO: 1772064 - RNA, 18 nt, Human
ugcucuaugcuuuccaaa

SEQ ID NO: 1772065 - RNA, 12 nt, Human
ugcucuaugcuu

SEQ ID NO: 1772066 - RNA, 21 nt, Human
ugcucuaugcuuuccaaaccu

SEQ ID NO: 1772067 - RNA, 18 nt, Human
ugcucgcuguugcugaau

SEQ ID NO: 1772068 - RNA, 17 nt, Human
ugcucgcuguugcugaa

SEQ ID NO: 1772069 - RNA, 15 nt, Human
ugcucgcuguugcug

SEQ ID NO: 1772070 - RNA, 14 nt, Human
ugcucgcuguugcu

SEQ ID NO: 1772071 - RNA, 13 nt, Human
ugcucgcuguugc

SEQ ID NO: 1772072 - RNA, 18 nt, Human
ugugaaaaugguccagga

SEQ ID NO: 1772073 - RNA, 22 nt, Human
ugugaaaaugguccaggagaag

SEQ ID NO: 1772074 - RNA, 22 nt, Human
uguccugaaacgcuccuuugug

SEQ ID NO: 1772075 - RNA, 16 nt, Human
ugugaguuuaaagcaa

SEQ ID NO: 1772076 - RNA, 14 nt, Human
ugugauauuaacag

SEQ ID NO: 1772077 - RNA, 17 nt, Human
ugugcacaucugugucu

SEQ ID NO: 1772078 - RNA, 20 nt, Human
ugugcacaucugugucuugu

SEQ ID NO: 1772079 - RNA, 15 nt, Human
ugugagucaccaagc

SEQ ID NO: 1772080 - RNA, 17 nt, Human
ugugagucaccaagccc

SEQ ID NO: 1772081 - RNA, 14 nt, Human
ugugaggccagggc

SEQ ID NO: 1772082 - RNA, 15 nt, Human
ugugaggccagggca

SEQ ID NO: 1772083 - RNA, 16 nt, Human
ugugaggccagggcag

SEQ ID NO: 1772084 - RNA, 17 nt, Human
ugugaggccagggcaga

SEQ ID NO: 1772085 - RNA, 22 nt, Human
ugugaggccagggcagagugag

SEQ ID NO: 1772086 - RNA, 19 nt, Human
ugugagucaccaagcccag

SEQ ID NO: 1772087 - RNA, 21 nt, Human
ugugagucaccaagcccaguu

SEQ ID NO: 1772088 - RNA, 15 nt, Human
ugugaccaaugucuu

SEQ ID NO: 1772089 - RNA, 16 nt, Human
ugugaccaaugucuug

SEQ ID NO: 1772090 - RNA, 13 nt, Human
ugugaggccaggg

SEQ ID NO: 1772091 - RNA, 22 nt, Human
ugugacauuuggagagggggcc

SEQ ID NO: 1772092 - RNA, 11 nt, Human
ugugacauucc

SEQ ID NO: 1772093 - RNA, 13 nt, Human
ugugacauuccuu

SEQ ID NO: 1772094 - RNA, 14 nt, Human
ugugacauuccuuc

SEQ ID NO: 1772095 - RNA, 18 nt, Human
uguggacacagcucuucu

SEQ ID NO: 1772096 - RNA, 17 nt, Human
uguggaauguuggauaa

SEQ ID NO: 1772097 - RNA, 19 nt, Human
uguggacacagcucuucuc

SEQ ID NO: 1772098 - RNA, 16 nt, Human
uguggacuaaaagaua

SEQ ID NO: 1772099 - RNA, 15 nt, Human
uguggacuaaaagau

SEQ ID NO: 1772100 - RNA, 19 nt, Human
uguggacuaaaagauauaa

SEQ ID NO: 1772101 - RNA, 20 nt, Human
uguggccuuccauuuauaug

SEQ ID NO: 1772102 - RNA, 22 nt, Human
ugugggcuaguugggcuuccuc

SEQ ID NO: 1772103 - RNA, 16 nt, Human
uguguagggcgggagg

SEQ ID NO: 1772104 - RNA, 12 nt, Human
uguguagggcgg

SEQ ID NO: 1772105 - RNA, 16 nt, Human
ugugcacaugcacgug

SEQ ID NO: 1772106 - RNA, 14 nt, Human
ugugcacguacaca

SEQ ID NO: 1772107 - RNA, 21 nt, Human
ugugcacaucugugucuuguu

SEQ ID NO: 1772108 - RNA, 15 nt, Human
ugugcuuggucuguu

SEQ ID NO: 1772109 - RNA, 18 nt, Human
ugugcuuggucuguuuga

SEQ ID NO: 1772110 - RNA, 17 nt, Human
ugugcuugaaggcccug

SEQ ID NO: 1772111 - RNA, 21 nt, Human
ugugcuugaaggcccugcuga

SEQ ID NO: 1772112 - RNA, 22 nt, Human
ugugcuugaaggcccugcugag

SEQ ID NO: 1772113 - RNA, 14 nt, Human
ugugcgccuacagg

SEQ ID NO: 1772114 - RNA, 19 nt, Human
ugugcgccuacaggaguga

SEQ ID NO: 1772115 - RNA, 18 nt, Human
ugugcucaggacucagaa

SEQ ID NO: 1772116 - RNA, 15 nt, Human
uguacgucugacagg

SEQ ID NO: 1772117 - RNA, 15 nt, Human
uguagccucagauga

SEQ ID NO: 1772118 - RNA, 15 nt, Human
uguagccuucacaca

SEQ ID NO: 1772119 - RNA, 22 nt, Human
uguagcccacucugcucgccuu

SEQ ID NO: 1772120 - RNA, 16 nt, Human
uguagcccacucugcu

SEQ ID NO: 1772121 - RNA, 17 nt, Human
uguagcccacucugcuc

SEQ ID NO: 1772122 - RNA, 22 nt, Human
ugguauuguauuuauucaauaa

SEQ ID NO: 1772123 - RNA, 21 nt, Human
ugguauucuguucuggaggaa

SEQ ID NO: 1772124 - RNA, 19 nt, Human
ugguauuguauuuauucaa

SEQ ID NO: 1772125 - RNA, 16 nt, Human
uguaauccgaaucucu

SEQ ID NO: 1772126 - RNA, 15 nt, Human
uguaaucuugaauug

SEQ ID NO: 1772127 - RNA, 21 nt, Human
uguaaucuugaauuguaacug

SEQ ID NO: 1772128 - RNA, 19 nt, Human
uguauuuauucaauaaagu

SEQ ID NO: 1772129 - RNA, 17 nt, Human
uguauuuauucaauaaa

SEQ ID NO: 1772130 - RNA, 14 nt, Human
uguauuuauucaau

SEQ ID NO: 1772131 - RNA, 13 nt, Human
uguauuuauucaa

SEQ ID NO: 1772132 - RNA, 22 nt, Human
uguauuuauucaauaaaguauu

SEQ ID NO: 1772133 - RNA, 13 nt, Human
ugucacaggcagg

SEQ ID NO: 1772134 - RNA, 12 nt, Human
ugucacaggcag

SEQ ID NO: 1772135 - RNA, 14 nt, Human
uguauuuuguauug

SEQ ID NO: 1772136 - RNA, 17 nt, Human
ugucacacacuuuggcu

SEQ ID NO: 1772137 - RNA, 13 nt, Human
uguauucucugag

SEQ ID NO: 1772138 - RNA, 14 nt, Human
uguauucucugagc

SEQ ID NO: 1772139 - RNA, 19 nt, Human
uguauucucugagcugugc

SEQ ID NO: 1772140 - RNA, 20 nt, Human
uguauucucugagcugugca

SEQ ID NO: 1772141 - RNA, 21 nt, Human
uguauucucugagcugugcag

SEQ ID NO: 1772142 - RNA, 12 nt, Human
uguccuacucug

SEQ ID NO: 1772143 - RNA, 17 nt, Human
uguccuacucuguguca

SEQ ID NO: 1772144 - RNA, 18 nt, Human
ugucccccucuguccagg

SEQ ID NO: 1772145 - RNA, 20 nt, Human
uguccuacccacccuccuuu

SEQ ID NO: 1772146 - RNA, 18 nt, Human
ugucccaccauacgagca

SEQ ID NO: 1772147 - RNA, 23 nt, Human
ugucccaccauacgagcaccucc

SEQ ID NO: 1772148 - RNA, 13 nt, Human
ugucaccugaaga

SEQ ID NO: 1772149 - RNA, 14 nt, Human
ugucaccugugcuu

SEQ ID NO: 1772150 - RNA, 16 nt, Human
ugucaccucuuccgac

SEQ ID NO: 1772151 - RNA, 23 nt, Human
ugucaccucuuccgacucuuucu

SEQ ID NO: 1772152 - RNA, 19 nt, Human
ugucauuugagcagggcuc

SEQ ID NO: 1772153 - RNA, 16 nt, Human
ugucauuugagcaggg

SEQ ID NO: 1772154 - RNA, 19 nt, Human
uuaaacuagcauaucugcc

SEQ ID NO: 1772155 - RNA, 17 nt, Human
uuaaacuagcauaucug

SEQ ID NO: 1772156 - RNA, 23 nt, Human
uuaaacuagcauaucugccuuua

SEQ ID NO: 1772157 - RNA, 22 nt, Human
uuaaacuagcauaucugccuuu

SEQ ID NO: 1772158 - RNA, 21 nt, Human
uuaaacuagcauaucugccuu

SEQ ID NO: 1772159 - RNA, 17 nt, Human
uguuuuaagaggcaggg

SEQ ID NO: 1772160 - RNA, 13 nt, Human
uguuuuaacaaaa

SEQ ID NO: 1772161 - RNA, 14 nt, Human
uguuuuaacaaaaa

SEQ ID NO: 1772162 - RNA, 11 nt, Human
uguuuuaacaa

SEQ ID NO: 1772163 - RNA, 16 nt, Human
uguuuuaagaggcagg

SEQ ID NO: 1772164 - RNA, 14 nt, Human
uguuuguucuguuu

SEQ ID NO: 1772165 - RNA, 15 nt, Human
uguuugugcuguggu

SEQ ID NO: 1772166 - RNA, 13 nt, Human
uguuuacuaggga

SEQ ID NO: 1772167 - RNA, 19 nt, Human
uguuuacuagggaucccuc

SEQ ID NO: 1772168 - RNA, 11 nt, Human
uuaaauguguu

SEQ ID NO: 1772169 - RNA, 21 nt, Human
uuaauaauauacuuguggacu

SEQ ID NO: 1772170 - RNA, 18 nt, Human
uuaauaauauacuugugg

SEQ ID NO: 1772171 - RNA, 16 nt, Human
uuaauaauauacuugu

SEQ ID NO: 1772172 - RNA, 14 nt, Human
uuaauaauauacuu

SEQ ID NO: 1772173 - RNA, 21 nt, Human
uuaagccacuuaaaauguuca

SEQ ID NO: 1772174 - RNA, 16 nt, Human
uuaagcaaaggggaca

SEQ ID NO: 1772175 - RNA, 23 nt, Human
uuaagcaaaggggacagcugugu

SEQ ID NO: 1772176 - RNA, 18 nt, Human
uuacacagaaaugcugcu

SEQ ID NO: 1772177 - RNA, 19 nt, Human
uuacacagaaaugcugcug

SEQ ID NO: 1772178 - RNA, 20 nt, Human
uuacacagaaaugcugcugg

SEQ ID NO: 1772179 - RNA, 23 nt, Human
uuacacagaaaugcugcuggcca

SEQ ID NO: 1772180 - RNA, 14 nt, Human
uuaauuagugcuaa

SEQ ID NO: 1772181 - RNA, 13 nt, Human
uuaauuagugcua

SEQ ID NO: 1772182 - RNA, 14 nt, Human
uuaaugacacuugu

SEQ ID NO: 1772183 - RNA, 19 nt, Human
uuaaugacacuugucccca

SEQ ID NO: 1772184 - RNA, 23 nt, Human
uuaaugacacuuguccccaaauc

SEQ ID NO: 1772185 - RNA, 23 nt, Human
uuaaugaaguuugaauguuaaau

SEQ ID NO: 1772186 - RNA, 22 nt, Human
uuaaugaaguuugaauguuaaa

SEQ ID NO: 1772187 - RNA, 18 nt, Human
uuaaugaaguuugaaugu

SEQ ID NO: 1772188 - RNA, 17 nt, Human
uuaaugaaguuugaaug

SEQ ID NO: 1772189 - RNA, 16 nt, Human
uuaaugaaguuugaau

SEQ ID NO: 1772190 - RNA, 17 nt, Human
uguuggcugggggccuc

SEQ ID NO: 1772191 - RNA, 19 nt, Human
uguuggcugggggccucag

SEQ ID NO: 1772192 - RNA, 15 nt, Human
uguuggccaaagcca

SEQ ID NO: 1772193 - RNA, 15 nt, Human
uguuggccaggcugg

SEQ ID NO: 1772194 - RNA, 16 nt, Human
uguuggccaggcuggu

SEQ ID NO: 1772195 - RNA, 13 nt, Human
uguucuggaggaa

SEQ ID NO: 1772196 - RNA, 12 nt, Human
uguucugggaca

SEQ ID NO: 1772197 - RNA, 14 nt, Human
uguugaaggaacuu

SEQ ID NO: 1772198 - RNA, 18 nt, Human
uguugaaggaacuugucu

SEQ ID NO: 1772199 - RNA, 23 nt, Human
uguugaaggaacuugucucuuca

SEQ ID NO: 1772200 - RNA, 17 nt, Human
uguugaagucucaggag

SEQ ID NO: 1772201 - RNA, 13 nt, Human
uguucucugagga

SEQ ID NO: 1772202 - RNA, 20 nt, Human
uguucucuaucauuuaauaa

SEQ ID NO: 1772203 - RNA, 18 nt, Human
uguucucuaucauuuaau

SEQ ID NO: 1772204 - RNA, 15 nt, Human
uguucucuaucauuu

SEQ ID NO: 1772205 - RNA, 19 nt, Human
ugugugcacguacacacac

SEQ ID NO: 1772206 - RNA, 12 nt, Human
uguuacugccuu

SEQ ID NO: 1772207 - RNA, 19 nt, Human
uguuacugccuuaauaaaa

SEQ ID NO: 1772208 - RNA, 23 nt, Human
uguuaccugaaaacacugugcac

SEQ ID NO: 1772209 - RNA, 15 nt, Human
uguuaccugaaaaca

SEQ ID NO: 1772210 - RNA, 16 nt, Human
uguuaccugaaaacac

SEQ ID NO: 1772211 - RNA, 22 nt, Human
uguuaccugaaaacacugugca

SEQ ID NO: 1772212 - RNA, 13 nt, Human
uguuaccugugug

SEQ ID NO: 1772213 - RNA, 15 nt, Human
uguuaccugugugcu

SEQ ID NO: 1772214 - RNA, 17 nt, Human
uguuaccugugugcuug

SEQ ID NO: 1772215 - RNA, 20 nt, Human
uguucagcuccagcucacca

SEQ ID NO: 1772216 - RNA, 21 nt, Human
uguucagcuccagcucaccag

SEQ ID NO: 1772217 - RNA, 22 nt, Human
uguucagcuccagcucaccagc

SEQ ID NO: 1772218 - RNA, 17 nt, Human
uguucacuuuugacaaa

SEQ ID NO: 1772219 - RNA, 18 nt, Human
cucgguacccggggccca

SEQ ID NO: 1772220 - RNA, 21 nt, Human
cucgguacccggggcccaggg

SEQ ID NO: 1772221 - RNA, 22 nt, Human
cucgguacccggggcccagggc

SEQ ID NO: 1772222 - RNA, 17 nt, Human
cuccuuuguucccggcu

SEQ ID NO: 1772223 - RNA, 12 nt, Human
cuccuuugugug

SEQ ID NO: 1772224 - RNA, 15 nt, Human
cuccuuugugugugu

SEQ ID NO: 1772225 - RNA, 16 nt, Human
cuccuuuguucccggc

SEQ ID NO: 1772226 - RNA, 16 nt, Human
cuccuuuagcgcccag

SEQ ID NO: 1772227 - RNA, 17 nt, Human
cuccuuuagcgcccagu

SEQ ID NO: 1772228 - RNA, 22 nt, Human
cuccuuuagcgcccaguugggu

SEQ ID NO: 1772229 - RNA, 17 nt, Human
cucugaaauaucccggg

SEQ ID NO: 1772230 - RNA, 17 nt, Human
cucugaaaccaguguua

SEQ ID NO: 1772231 - RNA, 15 nt, Human
cucugaaacccugga

SEQ ID NO: 1772232 - RNA, 12 nt, Human
cucugaaaccag

SEQ ID NO: 1772233 - RNA, 9 nt, Human
cucugaaac

SEQ ID NO: 1772234 - RNA, 11 nt, Human
cucugaaacag

SEQ ID NO: 1772235 - RNA, 12 nt, Human
cucugaaacagc

SEQ ID NO: 1772236 - RNA, 13 nt, Human
cucugaaacagcu

SEQ ID NO: 1772237 - RNA, 15 nt, Human
cucugaaacagcugc

SEQ ID NO: 1772238 - RNA, 16 nt, Human
cucugaaacagcugcc

SEQ ID NO: 1772239 - RNA, 17 nt, Human
cucugaaacagcugccu

SEQ ID NO: 1772240 - RNA, 18 nt, Human
cucugaaacagcugccuu

SEQ ID NO: 1772241 - RNA, 19 nt, Human
cucugaaacagcugccuua

SEQ ID NO: 1772242 - RNA, 20 nt, Human
cucugaaacagcugccuuag

SEQ ID NO: 1772243 - RNA, 23 nt, Human
cucugaaacagcugccuuagcuu

SEQ ID NO: 1772244 - RNA, 21 nt, Human
cucuccgaccagacaccuuga

SEQ ID NO: 1772245 - RNA, 16 nt, Human
cucuccgaccagacac

SEQ ID NO: 1772246 - RNA, 13 nt, Human
cucucuugucaga

SEQ ID NO: 1772247 - RNA, 23 nt, Human
cuccgcuuucuacccagcgagcc

SEQ ID NO: 1772248 - RNA, 22 nt, Human
cuccgcuuucuacccagcgagc

SEQ ID NO: 1772249 - RNA, 15 nt, Human
cuccgggaccuggug

SEQ ID NO: 1772250 - RNA, 19 nt, Human
cuccggcucccagccucag

SEQ ID NO: 1772251 - RNA, 20 nt, Human
cuccggcucccagccucagc

SEQ ID NO: 1772252 - RNA, 13 nt, Human
cuccggcugugcu

SEQ ID NO: 1772253 - RNA, 14 nt, Human
cuccggcugugcug

SEQ ID NO: 1772254 - RNA, 17 nt, Human
cuccggcugugcuggga

SEQ ID NO: 1772255 - RNA, 21 nt, Human
cuccggcugugcugggagaaa

SEQ ID NO: 1772256 - RNA, 21 nt, Human
cuccgcuuucuacccagcgag

SEQ ID NO: 1772257 - RNA, 20 nt, Human
cuccgcuuucuacccagcga

SEQ ID NO: 1772258 - RNA, 13 nt, Human
cucccucccagga

SEQ ID NO: 1772259 - RNA, 14 nt, Human
cucccucccaggac

SEQ ID NO: 1772260 - RNA, 17 nt, Human
cucccucccaggacucu

SEQ ID NO: 1772261 - RNA, 14 nt, Human
cucccagccucagc

SEQ ID NO: 1772262 - RNA, 23 nt, Human
cuccaggcuguaucccaugagcc

SEQ ID NO: 1772263 - RNA, 22 nt, Human
cuccagggaugauucaagccau

SEQ ID NO: 1772264 - RNA, 14 nt, Human
cuccagugccaaca

SEQ ID NO: 1772265 - RNA, 14 nt, Human
cucccaccucagcc

SEQ ID NO: 1772266 - RNA, 16 nt, Human
cucccaccucagccuc

SEQ ID NO: 1772267 - RNA, 17 nt, Human
cucccaccucagccucc

SEQ ID NO: 1772268 - RNA, 11 nt, Human
cucccagccuc

SEQ ID NO: 1772269 - RNA, 17 nt, Human
cugacacucccuugggc

SEQ ID NO: 1772270 - RNA, 13 nt, Human
cugacacacagcu

SEQ ID NO: 1772271 - RNA, 15 nt, Human
cugacacacagcucu

SEQ ID NO: 1772272 - RNA, 14 nt, Human
cugaagccagcugc

SEQ ID NO: 1772273 - RNA, 17 nt, Human
cugaagccagcugcccu

SEQ ID NO: 1772274 - RNA, 16 nt, Human
cugacacacagcucug

SEQ ID NO: 1772275 - RNA, 17 nt, Human
cugacacacagcucugu

SEQ ID NO: 1772276 - RNA, 18 nt, Human
cugacacacagcucuguc

SEQ ID NO: 1772277 - RNA, 19 nt, Human
cugacacacagcucugucc

SEQ ID NO: 1772278 - RNA, 20 nt, Human
cugacacacagcucuguccu

SEQ ID NO: 1772279 - RNA, 21 nt, Human
cugacacacagcucuguccug

SEQ ID NO: 1772280 - RNA, 22 nt, Human
cugacacacagcucuguccugg

SEQ ID NO: 1772281 - RNA, 23 nt, Human
cugacacacagcucuguccuggg

SEQ ID NO: 1772282 - RNA, 18 nt, Human
cugagcugaggcagcagu

SEQ ID NO: 1772283 - RNA, 13 nt, Human
cugagcugugcag

SEQ ID NO: 1772284 - RNA, 15 nt, Human
cugagcugugcaggu

SEQ ID NO: 1772285 - RNA, 14 nt, Human
cugaggaauccaga

SEQ ID NO: 1772286 - RNA, 22 nt, Human
cugaggaacccuuacaguagga

SEQ ID NO: 1772287 - RNA, 23 nt, Human
cugaggaauccagacccggcugc

SEQ ID NO: 1772288 - RNA, 13 nt, Human
cucacaagccagc

SEQ ID NO: 1772289 - RNA, 15 nt, Human
cucacaagccagcca

SEQ ID NO: 1772290 - RNA, 21 nt, Human
cucacaauagccgauaucaga

SEQ ID NO: 1772291 - RNA, 14 nt, Human
cuauuuuucucucc

SEQ ID NO: 1772292 - RNA, 16 nt, Human
cuauuuuucucuccug

SEQ ID NO: 1772293 - RNA, 20 nt, Human
cuauuuuucucuccuguccu

SEQ ID NO: 1772294 - RNA, 14 nt, Human
cuauuuuuaaauaa

SEQ ID NO: 1772295 - RNA, 17 nt, Human
cuauuuuuaaauaauuu

SEQ ID NO: 1772296 - RNA, 23 nt, Human
cuauuuuuaaauaauuuccuaca

SEQ ID NO: 1772297 - RNA, 16 nt, Human
cuauguugcccaggca

SEQ ID NO: 1772298 - RNA, 17 nt, Human
cuauguugcccaggcag

SEQ ID NO: 1772299 - RNA, 22 nt, Human
cuauguguagggcgggaggaug

SEQ ID NO: 1772300 - RNA, 20 nt, Human
cuaugugauuuuaacucugu

SEQ ID NO: 1772301 - RNA, 21 nt, Human
cuaugugauuuuaacucuguc

SEQ ID NO: 1772302 - RNA, 22 nt, Human
cuaugugauuuuaacucugucu

SEQ ID NO: 1772303 - RNA, 15 nt, Human
cuauguugcccaggc

SEQ ID NO: 1772304 - RNA, 11 nt, Human
cuaugugauuu

SEQ ID NO: 1772305 - RNA, 16 nt, Human
cuaugugauuuuaacu

SEQ ID NO: 1772306 - RNA, 18 nt, Human
cuaugugauuuuaacucu

SEQ ID NO: 1772307 - RNA, 19 nt, Human
cuaugugauuuuaacucug

SEQ ID NO: 1772308 - RNA, 21 nt, Human
cucagaagggagcuagccaga

SEQ ID NO: 1772309 - RNA, 22 nt, Human
cucagaagggagcuagccagag

SEQ ID NO: 1772310 - RNA, 17 nt, Human
cucagaaagccaacaug

SEQ ID NO: 1772311 - RNA, 23 nt, Human
cuacuaacaaucagcuccuuccu

SEQ ID NO: 1772312 - RNA, 21 nt, Human
cuaccuugguucccccacuga

SEQ ID NO: 1772313 - RNA, 13 nt, Human
cuaccuugcuuuu

SEQ ID NO: 1772314 - RNA, 17 nt, Human
cuaccuugcuuuugcuu

SEQ ID NO: 1772315 - RNA, 19 nt, Human
cuaccuugcuuuugcuucu

SEQ ID NO: 1772316 - RNA, 19 nt, Human
cuaggccuccuggcccagg

SEQ ID NO: 1772317 - RNA, 14 nt, Human
cuaggccuggccag

SEQ ID NO: 1772318 - RNA, 15 nt, Human
cuaggccuggccaga

SEQ ID NO: 1772319 - RNA, 18 nt, Human
cuaggccuggccagaugc

SEQ ID NO: 1772320 - RNA, 19 nt, Human
cuaggccuggccagaugca

SEQ ID NO: 1772321 - RNA, 13 nt, Human
cuaggccuggcca

SEQ ID NO: 1772322 - RNA, 17 nt, Human
cuaggccuccuggccca

SEQ ID NO: 1772323 - RNA, 18 nt, Human
cuaggccuccuggcccag

SEQ ID NO: 1772324 - RNA, 16 nt, Human
cuaggccucaacuccu

SEQ ID NO: 1772325 - RNA, 20 nt, Human
cuaggccucaacuccuccca

SEQ ID NO: 1772326 - RNA, 21 nt, Human
cuaggccucaacuccucccau

SEQ ID NO: 1772327 - RNA, 15 nt, Human
cuaguucuguagaaa

SEQ ID NO: 1772328 - RNA, 16 nt, Human
cuaguuuucuuuccuc

SEQ ID NO: 1772329 - RNA, 18 nt, Human
cuaguuuucuuuccuccu

SEQ ID NO: 1772330 - RNA, 21 nt, Human
cuaguuuucuuuccuccuuuc

SEQ ID NO: 1772331 - RNA, 15 nt, Human
cuauaaaaaauaugu

SEQ ID NO: 1772332 - RNA, 12 nt, Human
cuauaaaagcuu

SEQ ID NO: 1772333 - RNA, 15 nt, Human
cuauaaaagcuuucu

SEQ ID NO: 1772334 - RNA, 16 nt, Human
cuauaaaagcuuucug

SEQ ID NO: 1772335 - RNA, 19 nt, Human
cuauaaaagcuuucugcca

SEQ ID NO: 1772336 - RNA, 14 nt, Human
cuaguucuguagaa

SEQ ID NO: 1772337 - RNA, 15 nt, Human
cggagacggaguccc

SEQ ID NO: 1772338 - RNA, 15 nt, Human
cggugugcaccaggg

SEQ ID NO: 1772339 - RNA, 16 nt, Human
cggugugcaccagggu

SEQ ID NO: 1772340 - RNA, 16 nt, Human
cgguuccugucccugc

SEQ ID NO: 1772341 - RNA, 16 nt, Human
cgugucaccugugcuu

SEQ ID NO: 1772342 - RNA, 14 nt, Human
cgugucaagcugcu

SEQ ID NO: 1772343 - RNA, 15 nt, Human
cgugucaagcugcuc

SEQ ID NO: 1772344 - RNA, 17 nt, Human
cgugucaagcugcucug

SEQ ID NO: 1772345 - RNA, 20 nt, Human
cgcuggacucucagucucug

SEQ ID NO: 1772346 - RNA, 19 nt, Human
cgcuggaccuugaacuggg

SEQ ID NO: 1772347 - RNA, 23 nt, Human
cgcuggaccuugaacuggguacu

SEQ ID NO: 1772348 - RNA, 22 nt, Human
cgccuuagcacuaccacuccug

SEQ ID NO: 1772349 - RNA, 12 nt, Human
cgaguacugugg

SEQ ID NO: 1772350 - RNA, 13 nt, Human
cgaguacuguggg

SEQ ID NO: 1772351 - RNA, 14 nt, Human
cgaguacugugggc

SEQ ID NO: 1772352 - RNA, 16 nt, Human
cgaguacugugggcaa

SEQ ID NO: 1772353 - RNA, 17 nt, Human
cgaguacugugggcaau

SEQ ID NO: 1772354 - RNA, 22 nt, Human
cgaguacugugggcaauuuaga

SEQ ID NO: 1772355 - RNA, 19 nt, Human
cccacugggaccaacccug

SEQ ID NO: 1772356 - RNA, 22 nt, Human
cccagcaagugguccuagaggc

SEQ ID NO: 1772357 - RNA, 22 nt, Human
cccaucagugcucccucacaug

SEQ ID NO: 1772358 - RNA, 23 nt, Human
cccaucagugcucccucacaugu

SEQ ID NO: 1772359 - RNA, 15 nt, Human
ccccagauugcaaca

SEQ ID NO: 1772360 - RNA, 20 nt, Human
ccccagauugcaacaggcug

SEQ ID NO: 1772361 - RNA, 12 nt, Human
ccccagcccaga

SEQ ID NO: 1772362 - RNA, 19 nt, Human
ccccauggucagcccuagg

SEQ ID NO: 1772363 - RNA, 23 nt, Human
ccccauuagcuuucaauuccgua

SEQ ID NO: 1772364 - RNA, 17 nt, Human
ccccauuagcuuucaau

SEQ ID NO: 1772365 - RNA, 19 nt, Human
cccauucugccugcccagg

SEQ ID NO: 1772366 - RNA, 14 nt, Human
cccauucugccugc

SEQ ID NO: 1772367 - RNA, 15 nt, Human
cccauucugccugcc

SEQ ID NO: 1772368 - RNA, 13 nt, Human
cccuccucugaaa

SEQ ID NO: 1772369 - RNA, 14 nt, Human
cccuccucugaaac

SEQ ID NO: 1772370 - RNA, 15 nt, Human
cccuccucugaaaca

SEQ ID NO: 1772371 - RNA, 19 nt, Human
cccuccucugaaacagcug

SEQ ID NO: 1772372 - RNA, 20 nt, Human
cccuccucugaaacagcugc

SEQ ID NO: 1772373 - RNA, 21 nt, Human
cccuccucugaaacagcugcc

SEQ ID NO: 1772374 - RNA, 12 nt, Human
cccuccugaccc

SEQ ID NO: 1772375 - RNA, 21 nt, Human
cccuccucacucccaccugca

SEQ ID NO: 1772376 - RNA, 21 nt, Human
cccucaccuacuuacccaggu

SEQ ID NO: 1772377 - RNA, 16 nt, Human
cccucagcucggcuca

SEQ ID NO: 1772378 - RNA, 19 nt, Human
cccucagcucggcucagcu

SEQ ID NO: 1772379 - RNA, 16 nt, Human
cccgaauagcugggac

SEQ ID NO: 1772380 - RNA, 17 nt, Human
cccgaauagcugggacu

SEQ ID NO: 1772381 - RNA, 18 nt, Human
cccgaauagcugggacua

SEQ ID NO: 1772382 - RNA, 22 nt, Human
cccgaauagcugggacuacagg

SEQ ID NO: 1772383 - RNA, 11 nt, Human
cccggcuccag

SEQ ID NO: 1772384 - RNA, 15 nt, Human
cccggccccugcugg

SEQ ID NO: 1772385 - RNA, 16 nt, Human
cccggccccugcuggu

SEQ ID NO: 1772386 - RNA, 14 nt, Human
ccccugccacccug

SEQ ID NO: 1772387 - RNA, 16 nt, Human
ccccugccacccuggg

SEQ ID NO: 1772388 - RNA, 14 nt, Human
ccccugccagggca

SEQ ID NO: 1772389 - RNA, 15 nt, Human
ccccugccagggcag

SEQ ID NO: 1772390 - RNA, 19 nt, Human
ccccugccagggcagggcc

SEQ ID NO: 1772391 - RNA, 23 nt, Human
ccccugccagggcagggccccag

SEQ ID NO: 1772392 - RNA, 12 nt, Human
ccccucugcuuu

SEQ ID NO: 1772393 - RNA, 13 nt, Human
ccagucccugucc

SEQ ID NO: 1772394 - RNA, 18 nt, Human
ccagucccuguccggaau

SEQ ID NO: 1772395 - RNA, 23 nt, Human
ccaggggggacaauaugugccaa

SEQ ID NO: 1772396 - RNA, 23 nt, Human
ccaggcaggucuugaacuccugg

SEQ ID NO: 1772397 - RNA, 12 nt, Human
ccaggcaggucu

SEQ ID NO: 1772398 - RNA, 14 nt, Human
ccaggcaggucuug

SEQ ID NO: 1772399 - RNA, 12 nt, Human
ccaggcuggcgu

SEQ ID NO: 1772400 - RNA, 16 nt, Human
ccaggcuggcgugcag

SEQ ID NO: 1772401 - RNA, 21 nt, Human
ccaggaucagauugcauguga

SEQ ID NO: 1772402 - RNA, 19 nt, Human
ccaggaucagauugcaugu

SEQ ID NO: 1772403 - RNA, 14 nt, Human
ccaggaucagauug

SEQ ID NO: 1772404 - RNA, 18 nt, Human
ccaggaucagauugcaug

SEQ ID NO: 1772405 - RNA, 14 nt, Human
ccagcuauaccugu

SEQ ID NO: 1772406 - RNA, 15 nt, Human
ccagcuauaccugug

SEQ ID NO: 1772407 - RNA, 16 nt, Human
ccagcuauaccugugc

SEQ ID NO: 1772408 - RNA, 18 nt, Human
ccagcuauaccugugccu

SEQ ID NO: 1772409 - RNA, 22 nt, Human
ccagcuauguuauauugaaaaa

SEQ ID NO: 1772410 - RNA, 19 nt, Human
ccagcuauaccugugccuc

SEQ ID NO: 1772411 - RNA, 18 nt, Human
ccagccccgguggcuggg

SEQ ID NO: 1772412 - RNA, 20 nt, Human
ccagccccgguggcugggca

SEQ ID NO: 1772413 - RNA, 14 nt, Human
ccagccccuacugc

SEQ ID NO: 1772414 - RNA, 15 nt, Human
ccagccccuacugcu

SEQ ID NO: 1772415 - RNA, 17 nt, Human
ccagccccagugcccac

SEQ ID NO: 1772416 - RNA, 22 nt, Human
ccauuuccauguccccucccag

SEQ ID NO: 1772417 - RNA, 15 nt, Human
ccauuggaucucauu

SEQ ID NO: 1772418 - RNA, 15 nt, Human
cccaccccuggaaga

SEQ ID NO: 1772419 - RNA, 23 nt, Human
cccacugcuuuuggucuguguga

SEQ ID NO: 1772420 - RNA, 13 nt, Human
cccaagcucugcu

SEQ ID NO: 1772421 - RNA, 14 nt, Human
cccaagcucugcuc

SEQ ID NO: 1772422 - RNA, 12 nt, Human
cccaagcucugc

SEQ ID NO: 1772423 - RNA, 15 nt, Human
cccaagcucugcucc

SEQ ID NO: 1772424 - RNA, 18 nt, Human
cccaagaccucagggcac

SEQ ID NO: 1772425 - RNA, 13 nt, Human
ccauguccccucc

SEQ ID NO: 1772426 - RNA, 15 nt, Human
ccauguccccuccca

SEQ ID NO: 1772427 - RNA, 16 nt, Human
ccauguccccucccag

SEQ ID NO: 1772428 - RNA, 15 nt, Human
ccauguagaaaauuu

SEQ ID NO: 1772429 - RNA, 16 nt, Human
ccauguagaaaauuug

SEQ ID NO: 1772430 - RNA, 18 nt, Human
ccauccagguucagcuug

SEQ ID NO: 1772431 - RNA, 19 nt, Human
ccauccagguucagcuugu

SEQ ID NO: 1772432 - RNA, 23 nt, Human
ccaguuggguggaugccuggugg

SEQ ID NO: 1772433 - RNA, 12 nt, Human
ccuagccagcug

SEQ ID NO: 1772434 - RNA, 19 nt, Human
ccggcacagaugcuccagg

SEQ ID NO: 1772435 - RNA, 22 nt, Human
ccuagccuuagaagucacacag

SEQ ID NO: 1772436 - RNA, 19 nt, Human
ccuagccuuagaagucaca

SEQ ID NO: 1772437 - RNA, 18 nt, Human
ccguccauaucagaacug

SEQ ID NO: 1772438 - RNA, 21 nt, Human
ccguccauaucagaacugugc

SEQ ID NO: 1772439 - RNA, 23 nt, Human
ccguccauaucagaacugugcca

SEQ ID NO: 1772440 - RNA, 17 nt, Human
ccgguuccugucccugc

SEQ ID NO: 1772441 - RNA, 19 nt, Human
ccgguuccugucccugcgc

SEQ ID NO: 1772442 - RNA, 21 nt, Human
ccguaaacacgccugcaaacg

SEQ ID NO: 1772443 - RNA, 15 nt, Human
ccggcagccccagcc

SEQ ID NO: 1772444 - RNA, 16 nt, Human
ccggcagccccagccu

SEQ ID NO: 1772445 - RNA, 17 nt, Human
ccggcagccccagccug

SEQ ID NO: 1772446 - RNA, 18 nt, Human
ccggcagccccagccugc

SEQ ID NO: 1772447 - RNA, 19 nt, Human
ccggcagccccagccugcu

SEQ ID NO: 1772448 - RNA, 20 nt, Human
ccggcagccccagccugcua

SEQ ID NO: 1772449 - RNA, 21 nt, Human
ccggcagccccagccugcuag

SEQ ID NO: 1772450 - RNA, 21 nt, Human
ccgcagagcgcgccccuagcc

SEQ ID NO: 1772451 - RNA, 22 nt, Human
ccgcagagcgcgccccuagccg

SEQ ID NO: 1772452 - RNA, 22 nt, Human
cccuguggaugagcccucagaa

SEQ ID NO: 1772453 - RNA, 23 nt, Human
cccuguggaugagcccucagaac

SEQ ID NO: 1772454 - RNA, 20 nt, Human
cccuguggaugagcccucag

SEQ ID NO: 1772455 - RNA, 21 nt, Human
cccuguggaugagcccucaga

SEQ ID NO: 1772456 - RNA, 23 nt, Human
cccuucuccauccacaugggagc

SEQ ID NO: 1772457 - RNA, 14 nt, Human
cccuccuuucacca

SEQ ID NO: 1772458 - RNA, 18 nt, Human
ccgaagccgccuguggac

SEQ ID NO: 1772459 - RNA, 13 nt, Human
ccgaaccuccucu

SEQ ID NO: 1772460 - RNA, 15 nt, Human
ccgaaccuccucugu

SEQ ID NO: 1772461 - RNA, 16 nt, Human
ccgaaccuccucugug

SEQ ID NO: 1772462 - RNA, 15 nt, Human
ccucaaccuccuggg

SEQ ID NO: 1772463 - RNA, 23 nt, Human
ccucaagugauucuccugccuca

SEQ ID NO: 1772464 - RNA, 17 nt, Human
ccucagcucggcucagc

SEQ ID NO: 1772465 - RNA, 18 nt, Human
ccucagcucggcucagcu

SEQ ID NO: 1772466 - RNA, 19 nt, Human
ccucagcucggcucagcuc

SEQ ID NO: 1772467 - RNA, 14 nt, Human
ccucagcgcggccc

SEQ ID NO: 1772468 - RNA, 13 nt, Human
ccucagcucggcu

SEQ ID NO: 1772469 - RNA, 15 nt, Human
ccucagcucggcuca

SEQ ID NO: 1772470 - RNA, 16 nt, Human
ccucaaccuccugggc

SEQ ID NO: 1772471 - RNA, 20 nt, Human
ccucaagugauucuccugcc

SEQ ID NO: 1772472 - RNA, 20 nt, Human
ccucccauagauacucucuu

SEQ ID NO: 1772473 - RNA, 21 nt, Human
ccucccauagauacucucuuc

SEQ ID NO: 1772474 - RNA, 13 nt, Human
ccucgaguacugu

SEQ ID NO: 1772475 - RNA, 17 nt, Human
ccucgaguacugugggc

SEQ ID NO: 1772476 - RNA, 18 nt, Human
ccucgaguacugugggca

SEQ ID NO: 1772477 - RNA, 19 nt, Human
ccucgaguacugugggcaa

SEQ ID NO: 1772478 - RNA, 21 nt, Human
ccucgaguacugugggcaauu

SEQ ID NO: 1772479 - RNA, 18 nt, Human
ccucgcuggacucucagu

SEQ ID NO: 1772480 - RNA, 14 nt, Human
ccucgcccucuccu

SEQ ID NO: 1772481 - RNA, 18 nt, Human
ccucgcccucuccuuugu

SEQ ID NO: 1772482 - RNA, 17 nt, Human
ccucgcuggacucucag

SEQ ID NO: 1772483 - RNA, 13 nt, Human
ccuccgccucuug

SEQ ID NO: 1772484 - RNA, 14 nt, Human
ccuccgccucuugg

SEQ ID NO: 1772485 - RNA, 13 nt, Human
ccuccggacuggu

SEQ ID NO: 1772486 - RNA, 15 nt, Human
ccuccggacuggugc

SEQ ID NO: 1772487 - RNA, 16 nt, Human
ccuccggacuggugcc

SEQ ID NO: 1772488 - RNA, 13 nt, Human
ccucccuugccuu

SEQ ID NO: 1772489 - RNA, 22 nt, Human
ccugcccacacagguucacgug

SEQ ID NO: 1772490 - RNA, 16 nt, Human
ccugccucagccuccc

SEQ ID NO: 1772491 - RNA, 15 nt, Human
ccugccucagccucc

SEQ ID NO: 1772492 - RNA, 21 nt, Human
ccugcccaggccccugccacc

SEQ ID NO: 1772493 - RNA, 22 nt, Human
ccugcccaggccccugccaccc

SEQ ID NO: 1772494 - RNA, 19 nt, Human
ccugcccaggccccugcca

SEQ ID NO: 1772495 - RNA, 14 nt, Human
ccugcccacacagg

SEQ ID NO: 1772496 - RNA, 20 nt, Human
ccugccauggaacuguuucc

SEQ ID NO: 1772497 - RNA, 22 nt, Human
ccugccauggaacuguuuccuu

SEQ ID NO: 1772498 - RNA, 20 nt, Human
ccugacccauugcuguuguc

SEQ ID NO: 1772499 - RNA, 13 nt, Human
ccugagggagcuc

SEQ ID NO: 1772500 - RNA, 15 nt, Human
ccugagggagcucca

SEQ ID NO: 1772501 - RNA, 19 nt, Human
ccugcaggaccugccugua

SEQ ID NO: 1772502 - RNA, 20 nt, Human
ccugcaggaccugccuguag

SEQ ID NO: 1772503 - RNA, 23 nt, Human
ccugucuccuuucaccccagggc

SEQ ID NO: 1772504 - RNA, 16 nt, Human
ccuguaaccucuucag

SEQ ID NO: 1772505 - RNA, 21 nt, Human
ccuguaaccucuucagaggcc

SEQ ID NO: 1772506 - RNA, 20 nt, Human
ccugguggcagugggagcug

SEQ ID NO: 1772507 - RNA, 18 nt, Human
ccugguggcagugggagc

SEQ ID NO: 1772508 - RNA, 19 nt, Human
ccugguggcagugggagcu

SEQ ID NO: 1772509 - RNA, 15 nt, Human
ccuggggagaaagua

SEQ ID NO: 1772510 - RNA, 12 nt, Human
ccuggggaagga

SEQ ID NO: 1772511 - RNA, 13 nt, Human
ccuggggaaggag

SEQ ID NO: 1772512 - RNA, 17 nt, Human
ccuggggaaggagccag

SEQ ID NO: 1772513 - RNA, 18 nt, Human
ccuggggaaggagccagu

SEQ ID NO: 1772514 - RNA, 18 nt, Human
ccaccaucaugucuggcu

SEQ ID NO: 1772515 - RNA, 19 nt, Human
ccaccaucaugucuggcua

SEQ ID NO: 1772516 - RNA, 12 nt, Human
ccaccuuggcug

SEQ ID NO: 1772517 - RNA, 14 nt, Human
ccaccuuggcugca

SEQ ID NO: 1772518 - RNA, 15 nt, Human
ccaccuuggcugcag

SEQ ID NO: 1772519 - RNA, 16 nt, Human
ccaccuuggcugcagg

SEQ ID NO: 1772520 - RNA, 13 nt, Human
ccacgcuggagug

SEQ ID NO: 1772521 - RNA, 18 nt, Human
ccacgcuggaccuugaac

SEQ ID NO: 1772522 - RNA, 18 nt, Human
ccaccuuggcugcaggga

SEQ ID NO: 1772523 - RNA, 19 nt, Human
ccaccuuggcugcagggag

SEQ ID NO: 1772524 - RNA, 22 nt, Human
ccacagagaaaguacuucucca

SEQ ID NO: 1772525 - RNA, 23 nt, Human
ccacagacaaaagcgcuuuuccu

SEQ ID NO: 1772526 - RNA, 14 nt, Human
ccacuccucugacu

SEQ ID NO: 1772527 - RNA, 13 nt, Human
ccacuccucugac

SEQ ID NO: 1772528 - RNA, 20 nt, Human
ccacuccucugacucagggc

SEQ ID NO: 1772529 - RNA, 20 nt, Human
ccaagcuggucccacucagu

SEQ ID NO: 1772530 - RNA, 12 nt, Human
ccaagcuggucc

SEQ ID NO: 1772531 - RNA, 19 nt, Human
ccaagcuggucccacucag

SEQ ID NO: 1772532 - RNA, 13 nt, Human
ccaagaaagcagg

SEQ ID NO: 1772533 - RNA, 16 nt, Human
ccaaaguucaacuugg

SEQ ID NO: 1772534 - RNA, 13 nt, Human
ccaauccuauguu

SEQ ID NO: 1772535 - RNA, 14 nt, Human
ccaauccuauguuu

SEQ ID NO: 1772536 - RNA, 16 nt, Human
ccaaucgguguguagu

SEQ ID NO: 1772537 - RNA, 19 nt, Human
ccaaucugcaauuucuacu

SEQ ID NO: 1772538 - RNA, 23 nt, Human
ccaaugaaaaaauguauaugcac

SEQ ID NO: 1772539 - RNA, 15 nt, Human
ccaaugaaaaaaugu

SEQ ID NO: 1772540 - RNA, 23 nt, Human
cauuuaguuugauuauucagugu

SEQ ID NO: 1772541 - RNA, 14 nt, Human
cauuuauucugcuc

SEQ ID NO: 1772542 - RNA, 15 nt, Human
cauuuauucugcuca

SEQ ID NO: 1772543 - RNA, 17 nt, Human
cauuugucacacacuuu

SEQ ID NO: 1772544 - RNA, 23 nt, Human
cauuuggaguguuccccuuccac

SEQ ID NO: 1772545 - RNA, 20 nt, Human
cauuuggcaaugccaucauc

SEQ ID NO: 1772546 - RNA, 15 nt, Human
cauuuggaggcaauc

SEQ ID NO: 1772547 - RNA, 21 nt, Human
caucuggggcccauacugguu

SEQ ID NO: 1772548 - RNA, 13 nt, Human
cauagcugcugcc

SEQ ID NO: 1772549 - RNA, 19 nt, Human
cauagcagagaaugaaagg

SEQ ID NO: 1772550 - RNA, 22 nt, Human
cauagcagagaaugaaagggcc

SEQ ID NO: 1772551 - RNA, 15 nt, Human
cagugggagcugccu

SEQ ID NO: 1772552 - RNA, 23 nt, Human
cauacacccccucuucugagcac

SEQ ID NO: 1772553 - RNA, 21 nt, Human
cauacacuguauguuauagaa

SEQ ID NO: 1772554 - RNA, 21 nt, Human
cauacacccccucuucugagc

SEQ ID NO: 1772555 - RNA, 22 nt, Human
cauacacccccucuucugagca

SEQ ID NO: 1772556 - RNA, 13 nt, Human
caugacagccugc

SEQ ID NO: 1772557 - RNA, 14 nt, Human
caugacagccugca

SEQ ID NO: 1772558 - RNA, 18 nt, Human
caugacagccugcagcag

SEQ ID NO: 1772559 - RNA, 20 nt, Human
caugacagccugcagcagga

SEQ ID NO: 1772560 - RNA, 16 nt, Human
caugcacgugugugca

SEQ ID NO: 1772561 - RNA, 12 nt, Human
cauguuggccag

SEQ ID NO: 1772562 - RNA, 13 nt, Human
cauguuggccagg

SEQ ID NO: 1772563 - RNA, 18 nt, Human
cauguugcacacccacuc

SEQ ID NO: 1772564 - RNA, 22 nt, Human
cauguugcacacccacucagcu

SEQ ID NO: 1772565 - RNA, 23 nt, Human
cauguugcacacccacucagcuc

SEQ ID NO: 1772566 - RNA, 17 nt, Human
cauguugccccuuucuc

SEQ ID NO: 1772567 - RNA, 22 nt, Human
cauguugccccuuucucuuuuc

SEQ ID NO: 1772568 - RNA, 11 nt, Human
cauuccuucuc

SEQ ID NO: 1772569 - RNA, 15 nt, Human
cauguaucauaauua

SEQ ID NO: 1772570 - RNA, 18 nt, Human
cauguaucauaauuacca

SEQ ID NO: 1772571 - RNA, 19 nt, Human
cauguaucauaauuaccaa

SEQ ID NO: 1772572 - RNA, 20 nt, Human
cagaguauuugaaaaaugua

SEQ ID NO: 1772573 - RNA, 23 nt, Human
cagagcuucccugacucauucug

SEQ ID NO: 1772574 - RNA, 17 nt, Human
cagagcugguggaccca

SEQ ID NO: 1772575 - RNA, 18 nt, Human
cagagcugguggacccag

SEQ ID NO: 1772576 - RNA, 20 nt, Human
cagagcugguggacccaggg

SEQ ID NO: 1772577 - RNA, 13 nt, Human
cagagcuucccug

SEQ ID NO: 1772578 - RNA, 14 nt, Human
cagagcuucccuga

SEQ ID NO: 1772579 - RNA, 18 nt, Human
cagagcuucccugacuca

SEQ ID NO: 1772580 - RNA, 21 nt, Human
cagagcugguggacccaggga

SEQ ID NO: 1772581 - RNA, 16 nt, Human
cagcacccuauaaauc

SEQ ID NO: 1772582 - RNA, 17 nt, Human
cagcacccuauaaauca

SEQ ID NO: 1772583 - RNA, 16 nt, Human
cagcagguagccugcu

SEQ ID NO: 1772584 - RNA, 18 nt, Human
cagcagguagccugcugg

SEQ ID NO: 1772585 - RNA, 19 nt, Human
cagcagguagccugcuggu

SEQ ID NO: 1772586 - RNA, 13 nt, Human
cagcuccagcuca

SEQ ID NO: 1772587 - RNA, 14 nt, Human
cagcuccagcucac

SEQ ID NO: 1772588 - RNA, 15 nt, Human
cagcuccagcucacc

SEQ ID NO: 1772589 - RNA, 22 nt, Human
cagcuccagcucaccagcccca

SEQ ID NO: 1772590 - RNA, 16 nt, Human
cagcuccagcucacca

SEQ ID NO: 1772591 - RNA, 17 nt, Human
cagcuccagcucaccag

SEQ ID NO: 1772592 - RNA, 18 nt, Human
cagcuccagcucaccagc

SEQ ID NO: 1772593 - RNA, 20 nt, Human
cagcuccagcucaccagccc

SEQ ID NO: 1772594 - RNA, 19 nt, Human
cagcugugcucuggacagg

SEQ ID NO: 1772595 - RNA, 18 nt, Human
cagcugugcucuggacag

SEQ ID NO: 1772596 - RNA, 15 nt, Human
cagcuucauuuccug

SEQ ID NO: 1772597 - RNA, 18 nt, Human
cagcuucauuuccugugu

SEQ ID NO: 1772598 - RNA, 19 nt, Human
cagcuucauuuccuguguc

SEQ ID NO: 1772599 - RNA, 15 nt, Human
caggaaaggaaucau

SEQ ID NO: 1772600 - RNA, 18 nt, Human
caggaaaggcccagccac

SEQ ID NO: 1772601 - RNA, 19 nt, Human
caggaaaggaaucauuucu

SEQ ID NO: 1772602 - RNA, 13 nt, Human
caggaaaugaaaa

SEQ ID NO: 1772603 - RNA, 22 nt, Human
caggaacaacauuuacaacuca

SEQ ID NO: 1772604 - RNA, 20 nt, Human
caggaaaugaaaaugucuug

SEQ ID NO: 1772605 - RNA, 21 nt, Human
caggaaaugaaaaugucuugu

SEQ ID NO: 1772606 - RNA, 11 nt, Human
cagcugcaaag

SEQ ID NO: 1772607 - RNA, 12 nt, Human
cagcugcaaagu

SEQ ID NO: 1772608 - RNA, 13 nt, Human
cagcugcaaagug

SEQ ID NO: 1772609 - RNA, 15 nt, Human
cagcugcaaaguguu

SEQ ID NO: 1772610 - RNA, 16 nt, Human
cagcugcaaaguguuu

SEQ ID NO: 1772611 - RNA, 16 nt, Human
cagcugcaagggaguu

SEQ ID NO: 1772612 - RNA, 15 nt, Human
cagcugcccuauggg

SEQ ID NO: 1772613 - RNA, 18 nt, Human
cagcugcccuaugggccu

SEQ ID NO: 1772614 - RNA, 19 nt, Human
cagcugcccuaugggccug

SEQ ID NO: 1772615 - RNA, 20 nt, Human
cagcugcccuaugggccugc

SEQ ID NO: 1772616 - RNA, 15 nt, Human
cagcggggacagcuc

SEQ ID NO: 1772617 - RNA, 16 nt, Human
cagcggggacagcucc

SEQ ID NO: 1772618 - RNA, 17 nt, Human
cagcggggacagcuccu

SEQ ID NO: 1772619 - RNA, 17 nt, Human
cagccucuuucuguccc

SEQ ID NO: 1772620 - RNA, 17 nt, Human
cagccugaacagaagcu

SEQ ID NO: 1772621 - RNA, 18 nt, Human
cagccugaacagaagcuc

SEQ ID NO: 1772622 - RNA, 15 nt, Human
cagcgugcuuuaaaa

SEQ ID NO: 1772623 - RNA, 21 nt, Human
cagcgggggaggcccgcagag

SEQ ID NO: 1772624 - RNA, 15 nt, Human
cagcguccuccucug

SEQ ID NO: 1772625 - RNA, 16 nt, Human
cagcguccuccucugu

SEQ ID NO: 1772626 - RNA, 18 nt, Human
cagcguccuccucuguga

SEQ ID NO: 1772627 - RNA, 16 nt, Human
cagcccuuagcaggga

SEQ ID NO: 1772628 - RNA, 21 nt, Human
cagcccuuagcagggaaacag

SEQ ID NO: 1772629 - RNA, 18 nt, Human
cagccgauucaccugagc

SEQ ID NO: 1772630 - RNA, 18 nt, Human
cagccucuuggccccaga

SEQ ID NO: 1772631 - RNA, 16 nt, Human
cagccucuuucugucc

SEQ ID NO: 1772632 - RNA, 19 nt, Human
cagccgauucaccugagca

SEQ ID NO: 1772633 - RNA, 23 nt, Human
caggccagagggagugacagagg

SEQ ID NO: 1772634 - RNA, 19 nt, Human
caggccagagggagugaca

SEQ ID NO: 1772635 - RNA, 21 nt, Human
caggccagagggagugacaga

SEQ ID NO: 1772636 - RNA, 23 nt, Human
caggagcuuccuguccucccagc

SEQ ID NO: 1772637 - RNA, 12 nt, Human
caggagcuuccu

SEQ ID NO: 1772638 - RNA, 16 nt, Human
caggacccucgccgga

SEQ ID NO: 1772639 - RNA, 12 nt, Human
caggacccucgc

SEQ ID NO: 1772640 - RNA, 13 nt, Human
caggacccucgcc

SEQ ID NO: 1772641 - RNA, 18 nt, Human
caggcacccaccaucaug

SEQ ID NO: 1772642 - RNA, 22 nt, Human
caggcacccaccaucaugucug

SEQ ID NO: 1772643 - RNA, 23 nt, Human
caggcacccaccaucaugucugg

SEQ ID NO: 1772644 - RNA, 16 nt, Human
caggaggggaaacauc

SEQ ID NO: 1772645 - RNA, 22 nt, Human
cagggaguccgaaagggacuug

SEQ ID NO: 1772646 - RNA, 18 nt, Human
cagggaggugaccccagg

SEQ ID NO: 1772647 - RNA, 17 nt, Human
caggcgggacagugcug

SEQ ID NO: 1772648 - RNA, 19 nt, Human
caggcgggacagugcugca

SEQ ID NO: 1772649 - RNA, 15 nt, Human
caggcuggcgugcag

SEQ ID NO: 1772650 - RNA, 16 nt, Human
caggcugggcuucagu

SEQ ID NO: 1772651 - RNA, 17 nt, Human
caggcugggcuucagug

SEQ ID NO: 1772652 - RNA, 19 nt, Human
caggcugggcuucaguggc

SEQ ID NO: 1772653 - RNA, 21 nt, Human
caggugcuacacccuuuucca

SEQ ID NO: 1772654 - RNA, 20 nt, Human
caggugauccacccaccuca

SEQ ID NO: 1772655 - RNA, 22 nt, Human
caggugaguccuagagcuacag

SEQ ID NO: 1772656 - RNA, 23 nt, Human
caggugaguccuagagcuacagg

SEQ ID NO: 1772657 - RNA, 17 nt, Human
caggugcagccagaggc

SEQ ID NO: 1772658 - RNA, 19 nt, Human
caggugcagccagaggcac

SEQ ID NO: 1772659 - RNA, 14 nt, Human
caggugcagccaga

SEQ ID NO: 1772660 - RNA, 15 nt, Human
caggugcagccagag

SEQ ID NO: 1772661 - RNA, 16 nt, Human
caggugcagccagagg

SEQ ID NO: 1772662 - RNA, 14 nt, Human
caggguuggccccu

SEQ ID NO: 1772663 - RNA, 20 nt, Human
caggugaguccuagagcuac

SEQ ID NO: 1772664 - RNA, 12 nt, Human
caggguuggccc

SEQ ID NO: 1772665 - RNA, 16 nt, Human
caggugauccacccac

SEQ ID NO: 1772666 - RNA, 17 nt, Human
caggugauccacccacc

SEQ ID NO: 1772667 - RNA, 22 nt, Human
cagggucucacucugucgccca

SEQ ID NO: 1772668 - RNA, 21 nt, Human
cagggucucacucugucgccc

SEQ ID NO: 1772669 - RNA, 18 nt, Human
cagggucucacucugucg

SEQ ID NO: 1772670 - RNA, 19 nt, Human
caggguugaccccagagga

SEQ ID NO: 1772671 - RNA, 20 nt, Human
caggguugaccccagaggau

SEQ ID NO: 1772672 - RNA, 19 nt, Human
caggguucccgcggggcug

SEQ ID NO: 1772673 - RNA, 21 nt, Human
caggguucccgcggggcuguc

SEQ ID NO: 1772674 - RNA, 15 nt, Human
cagguugggauggga

SEQ ID NO: 1772675 - RNA, 14 nt, Human
caguauuuuguguc

SEQ ID NO: 1772676 - RNA, 16 nt, Human
caguauuuuguguccu

SEQ ID NO: 1772677 - RNA, 17 nt, Human
caguauuuuguguccuc

SEQ ID NO: 1772678 - RNA, 18 nt, Human
caguauuuuguguccucc

SEQ ID NO: 1772679 - RNA, 14 nt, Human
caguauuuuugcug

SEQ ID NO: 1772680 - RNA, 19 nt, Human
caguauuuuugcugcuucu

SEQ ID NO: 1772681 - RNA, 20 nt, Human
caguauuuuugcugcuucug

SEQ ID NO: 1772682 - RNA, 14 nt, Human
cagucaaccugggc

SEQ ID NO: 1772683 - RNA, 15 nt, Human
cagucaaccugggca

SEQ ID NO: 1772684 - RNA, 16 nt, Human
cagucaaccugggcaa

SEQ ID NO: 1772685 - RNA, 22 nt, Human
cagucaaccugggcaaagccua

SEQ ID NO: 1772686 - RNA, 21 nt, Human
cagucaaccugggcaaagccu

SEQ ID NO: 1772687 - RNA, 16 nt, Human
cagucaagcuguugaa

SEQ ID NO: 1772688 - RNA, 20 nt, Human
cagucaagcuguugaagucu

SEQ ID NO: 1772689 - RNA, 22 nt, Human
cagucaagcuguugaagucuca

SEQ ID NO: 1772690 - RNA, 15 nt, Human
cagucgauagagcug

SEQ ID NO: 1772691 - RNA, 16 nt, Human
cagucgauagagcugu

SEQ ID NO: 1772692 - RNA, 19 nt, Human
cagucugauucccaagcuc

SEQ ID NO: 1772693 - RNA, 20 nt, Human
cagucugauucccaagcucu

SEQ ID NO: 1772694 - RNA, 22 nt, Human
cagugcaaugguauaaauuuca

SEQ ID NO: 1772695 - RNA, 11 nt, Human
cagugggagcu

SEQ ID NO: 1772696 - RNA, 12 nt, Human
cagugcccacag

SEQ ID NO: 1772697 - RNA, 20 nt, Human
cagugccauguaaaucccca

SEQ ID NO: 1772698 - RNA, 13 nt, Human
auuuaugaauaua

SEQ ID NO: 1772699 - RNA, 14 nt, Human
auuuaugaauauaa

SEQ ID NO: 1772700 - RNA, 15 nt, Human
auuuaauaauauacu

SEQ ID NO: 1772701 - RNA, 13 nt, Human
auuuaauaauaua

SEQ ID NO: 1772702 - RNA, 18 nt, Human
auuuaauaauauacuugu

SEQ ID NO: 1772703 - RNA, 16 nt, Human
auuuaauaauauacuu

SEQ ID NO: 1772704 - RNA, 19 nt, Human
auuuaauaauauacuugug

SEQ ID NO: 1772705 - RNA, 15 nt, Human
auuuaauaaucugua

SEQ ID NO: 1772706 - RNA, 19 nt, Human
auuucaguguuaccugugu

SEQ ID NO: 1772707 - RNA, 21 nt, Human
auuucaguguuaccugugugc

SEQ ID NO: 1772708 - RNA, 15 nt, Human
auuucuauuucuccu

SEQ ID NO: 1772709 - RNA, 18 nt, Human
auuucuauuucuccucca

SEQ ID NO: 1772710 - RNA, 20 nt, Human
auuucuauuucuccuccaug

SEQ ID NO: 1772711 - RNA, 11 nt, Human
auuucuguaaa

SEQ ID NO: 1772712 - RNA, 11 nt, Human
auuucugugcc

SEQ ID NO: 1772713 - RNA, 16 nt, Human
auuucugugcccuccu

SEQ ID NO: 1772714 - RNA, 15 nt, Human
auugcuguuguccaa

SEQ ID NO: 1772715 - RNA, 19 nt, Human
auugcuguuguccaacuau

SEQ ID NO: 1772716 - RNA, 21 nt, Human
auugcuguuguccaacuauuu

SEQ ID NO: 1772717 - RNA, 13 nt, Human
auuguguuuguca

SEQ ID NO: 1772718 - RNA, 19 nt, Human
auuguguuugucauuagcc

SEQ ID NO: 1772719 - RNA, 18 nt, Human
auuguguuugucauuagc

SEQ ID NO: 1772720 - RNA, 16 nt, Human
auuguguuugucauua

SEQ ID NO: 1772721 - RNA, 15 nt, Human
auuguguuugucauu

SEQ ID NO: 1772722 - RNA, 22 nt, Human
auuguguuugucauuagccuga

SEQ ID NO: 1772723 - RNA, 20 nt, Human
auugugugugcucugcuuca

SEQ ID NO: 1772724 - RNA, 13 nt, Human
auuguaacuguuc

SEQ ID NO: 1772725 - RNA, 15 nt, Human
auuguaacuguucuu

SEQ ID NO: 1772726 - RNA, 19 nt, Human
auuguaacuguucuugaau

SEQ ID NO: 1772727 - RNA, 21 nt, Human
auuccuucucccaucucuucc

SEQ ID NO: 1772728 - RNA, 23 nt, Human
auuccuucucccaucucuuccuu

SEQ ID NO: 1772729 - RNA, 17 nt, Human
auuccugggaaauauuc

SEQ ID NO: 1772730 - RNA, 22 nt, Human
auuccugggaaauauucccuag

SEQ ID NO: 1772731 - RNA, 13 nt, Human
auucucugagcug

SEQ ID NO: 1772732 - RNA, 17 nt, Human
auucucugagcugugca

SEQ ID NO: 1772733 - RNA, 18 nt, Human
auucucugagcugugcag

SEQ ID NO: 1772734 - RNA, 17 nt, Human
auucucgcuucccugaa

SEQ ID NO: 1772735 - RNA, 12 nt, Human
auucucugucuc

SEQ ID NO: 1772736 - RNA, 13 nt, Human
auucucugucuca

SEQ ID NO: 1772737 - RNA, 14 nt, Human
auucucugucucau

SEQ ID NO: 1772738 - RNA, 16 nt, Human
auucucugucucaucc

SEQ ID NO: 1772739 - RNA, 17 nt, Human
auucucugucucaucca

SEQ ID NO: 1772740 - RNA, 19 nt, Human
auucuucugcuucagccuc

SEQ ID NO: 1772741 - RNA, 18 nt, Human
auucucugucucauccau

SEQ ID NO: 1772742 - RNA, 19 nt, Human
auucucugucucauccauc

SEQ ID NO: 1772743 - RNA, 20 nt, Human
auucuucugcuucagccucc

SEQ ID NO: 1772744 - RNA, 22 nt, Human
auucuucuguacgucugacagg

SEQ ID NO: 1772745 - RNA, 19 nt, Human
auucuugauuuauuugcuu

SEQ ID NO: 1772746 - RNA, 21 nt, Human
auucuugauuuauuugcuucu

SEQ ID NO: 1772747 - RNA, 22 nt, Human
auucuugauuuauuugcuucuu

SEQ ID NO: 1772748 - RNA, 12 nt, Human
auuaaauuaccu

SEQ ID NO: 1772749 - RNA, 16 nt, Human
auuaguaacauguguu

SEQ ID NO: 1772750 - RNA, 17 nt, Human
auuaguaacauguguua

SEQ ID NO: 1772751 - RNA, 13 nt, Human
auuaguaacaugu

SEQ ID NO: 1772752 - RNA, 16 nt, Human
auuaguaaaugcuuau

SEQ ID NO: 1772753 - RNA, 20 nt, Human
auucaauaaaguauuuaauu

SEQ ID NO: 1772754 - RNA, 18 nt, Human
auucaauaaaguauuuaa

SEQ ID NO: 1772755 - RNA, 22 nt, Human
auucaauaaaguauuuaauuag

SEQ ID NO: 1772756 - RNA, 21 nt, Human
auucaauaaaguauuuaauua

SEQ ID NO: 1772757 - RNA, 13 nt, Human
auucaauauugaa

SEQ ID NO: 1772758 - RNA, 14 nt, Human
auucaauauugaau

SEQ ID NO: 1772759 - RNA, 21 nt, Human
auucaauauugaauuuuuccu

SEQ ID NO: 1772760 - RNA, 14 nt, Human
auuuuuagacagag

SEQ ID NO: 1772761 - RNA, 14 nt, Human
caaaagacacugca

SEQ ID NO: 1772762 - RNA, 16 nt, Human
auuuuuuugagacaga

SEQ ID NO: 1772763 - RNA, 21 nt, Human
caaaaggauaaugaauacuuu

SEQ ID NO: 1772764 - RNA, 12 nt, Human
caacucauucca

SEQ ID NO: 1772765 - RNA, 14 nt, Human
caacucauuccaga

SEQ ID NO: 1772766 - RNA, 15 nt, Human
caacucauuccagau

SEQ ID NO: 1772767 - RNA, 16 nt, Human
caacucauuccagauc

SEQ ID NO: 1772768 - RNA, 12 nt, Human
caacuccuccca

SEQ ID NO: 1772769 - RNA, 13 nt, Human
caacuccucccau

SEQ ID NO: 1772770 - RNA, 23 nt, Human
caagaccccaagaggaaguucag

SEQ ID NO: 1772771 - RNA, 18 nt, Human
caagaugggggcagggcu

SEQ ID NO: 1772772 - RNA, 19 nt, Human
caagaugggggcagggcug

SEQ ID NO: 1772773 - RNA, 20 nt, Human
caagaugggggcagggcugu

SEQ ID NO: 1772774 - RNA, 17 nt, Human
caaaggguccagaagga

SEQ ID NO: 1772775 - RNA, 21 nt, Human
caaaggguccagaaggagaca

SEQ ID NO: 1772776 - RNA, 22 nt, Human
caaaugaccagcagauucaaau

SEQ ID NO: 1772777 - RNA, 12 nt, Human
caccucagccuc

SEQ ID NO: 1772778 - RNA, 12 nt, Human
caccuagccagc

SEQ ID NO: 1772779 - RNA, 15 nt, Human
caccuagccagcugu

SEQ ID NO: 1772780 - RNA, 18 nt, Human
caccuuggcugcagggag

SEQ ID NO: 1772781 - RNA, 15 nt, Human
caccuuggcugcagg

SEQ ID NO: 1772782 - RNA, 16 nt, Human
caccuuggcugcaggg

SEQ ID NO: 1772783 - RNA, 16 nt, Human
cacgaaacugcccugg

SEQ ID NO: 1772784 - RNA, 20 nt, Human
caccuuuguuuuuuguugga

SEQ ID NO: 1772785 - RNA, 15 nt, Human
cacggcucacugcag

SEQ ID NO: 1772786 - RNA, 14 nt, Human
cacggcucacugca

SEQ ID NO: 1772787 - RNA, 12 nt, Human
cacggccaggcc

SEQ ID NO: 1772788 - RNA, 13 nt, Human
cacggccaggcca

SEQ ID NO: 1772789 - RNA, 21 nt, Human
cacuacauuauaaaugucucu

SEQ ID NO: 1772790 - RNA, 20 nt, Human
cacucuuauugcccacgcug

SEQ ID NO: 1772791 - RNA, 21 nt, Human
cacucuuauugcccacgcugg

SEQ ID NO: 1772792 - RNA, 22 nt, Human
cacucuuauugcccacgcugga

SEQ ID NO: 1772793 - RNA, 20 nt, Human
cagaaauacagauuuugaua

SEQ ID NO: 1772794 - RNA, 15 nt, Human
cagaaauacagauuu

SEQ ID NO: 1772795 - RNA, 23 nt, Human
cagaaauacagauuuugauagca

SEQ ID NO: 1772796 - RNA, 21 nt, Human
cagaaauacagucuuccacaa

SEQ ID NO: 1772797 - RNA, 14 nt, Human
cagaaaugcugcug

SEQ ID NO: 1772798 - RNA, 15 nt, Human
cagaaaugcugcugg

SEQ ID NO: 1772799 - RNA, 16 nt, Human
cagaaaugcugcuggc

SEQ ID NO: 1772800 - RNA, 17 nt, Human
cagaaaugcugcuggcc

SEQ ID NO: 1772801 - RNA, 18 nt, Human
cagaaaugcugcuggcca

SEQ ID NO: 1772802 - RNA, 19 nt, Human
cagaaaugcugcuggccaa

SEQ ID NO: 1772803 - RNA, 14 nt, Human
cagaacaguaugaa

SEQ ID NO: 1772804 - RNA, 18 nt, Human
cagaacaguaugaauuug

SEQ ID NO: 1772805 - RNA, 16 nt, Human
cacuuaaauuaugaua

SEQ ID NO: 1772806 - RNA, 22 nt, Human
cacuuguggguuuuuguuuugu

SEQ ID NO: 1772807 - RNA, 18 nt, Human
cacuuguguuaugaagca

SEQ ID NO: 1772808 - RNA, 20 nt, Human
cacugcagccucaaccuccu

SEQ ID NO: 1772809 - RNA, 21 nt, Human
cacugcagccucaaccuccug

SEQ ID NO: 1772810 - RNA, 22 nt, Human
cacugcagccucaaccuccugg

SEQ ID NO: 1772811 - RNA, 23 nt, Human
cacugcagccucaaccuccuggg

SEQ ID NO: 1772812 - RNA, 19 nt, Human
cacugcagccucaaccucc

SEQ ID NO: 1772813 - RNA, 14 nt, Human
cacugcagccucaa

SEQ ID NO: 1772814 - RNA, 14 nt, Human
cacugggaggccag

SEQ ID NO: 1772815 - RNA, 21 nt, Human
cacugggaggccagugagcca

SEQ ID NO: 1772816 - RNA, 15 nt, Human
cacugggcucccggg

SEQ ID NO: 1772817 - RNA, 16 nt, Human
cacugggcucccgggc

SEQ ID NO: 1772818 - RNA, 18 nt, Human
cacuguugcccaggcugg

SEQ ID NO: 1772819 - RNA, 19 nt, Human
cacuguugcccaggcuggc

SEQ ID NO: 1772820 - RNA, 23 nt, Human
cacuguugcccaggcuggcgugc

SEQ ID NO: 1772821 - RNA, 16 nt, Human
cacaucugugucuugu

SEQ ID NO: 1772822 - RNA, 17 nt, Human
cacaucugugucuuguu

SEQ ID NO: 1772823 - RNA, 18 nt, Human
cacaucugugucuuguuu

SEQ ID NO: 1772824 - RNA, 23 nt, Human
cacaucugugucuuguuuggaau

SEQ ID NO: 1772825 - RNA, 12 nt, Human
cacaucuguguc

SEQ ID NO: 1772826 - RNA, 17 nt, Human
cacccaccucagccucc

SEQ ID NO: 1772827 - RNA, 13 nt, Human
caccagccccagu

SEQ ID NO: 1772828 - RNA, 16 nt, Human
caccagccccagugcc

SEQ ID NO: 1772829 - RNA, 18 nt, Human
cacccaccucagccuccc

SEQ ID NO: 1772830 - RNA, 13 nt, Human
cacccacucagcu

SEQ ID NO: 1772831 - RNA, 14 nt, Human
cacccacucagcuc

SEQ ID NO: 1772832 - RNA, 15 nt, Human
cacccacucagcucc

SEQ ID NO: 1772833 - RNA, 16 nt, Human
cacccaggagccccga

SEQ ID NO: 1772834 - RNA, 13 nt, Human
cacagaaaugcug

SEQ ID NO: 1772835 - RNA, 14 nt, Human
cacagaaaugcugc

SEQ ID NO: 1772836 - RNA, 16 nt, Human
cacagaaaugcugcug

SEQ ID NO: 1772837 - RNA, 17 nt, Human
cacagaaaugcugcugg

SEQ ID NO: 1772838 - RNA, 18 nt, Human
cacagaaaugcugcuggc

SEQ ID NO: 1772839 - RNA, 19 nt, Human
cacagaaaugcugcuggcc

SEQ ID NO: 1772840 - RNA, 20 nt, Human
cacagaaaugcugcuggcca

SEQ ID NO: 1772841 - RNA, 21 nt, Human
cacagaaaugcugcuggccaa

SEQ ID NO: 1772842 - RNA, 22 nt, Human
cacagaaaugcugcuggccaaa

SEQ ID NO: 1772843 - RNA, 17 nt, Human
cacacuuuuuaagaaau

SEQ ID NO: 1772844 - RNA, 17 nt, Human
cacagcucuucuccagg

SEQ ID NO: 1772845 - RNA, 14 nt, Human
cacagcucuucucc

SEQ ID NO: 1772846 - RNA, 15 nt, Human
cacagcucuucucca

SEQ ID NO: 1772847 - RNA, 15 nt, Human
cacagcucuguccug

SEQ ID NO: 1772848 - RNA, 16 nt, Human
cacagcucuguccugg

SEQ ID NO: 1772849 - RNA, 18 nt, Human
cacagcucuguccuggga

SEQ ID NO: 1772850 - RNA, 19 nt, Human
cacagcucuguccugggag

SEQ ID NO: 1772851 - RNA, 11 nt, Human
cacagcucugu

SEQ ID NO: 1772852 - RNA, 14 nt, Human
cacagcucuguccu

SEQ ID NO: 1772853 - RNA, 16 nt, Human
cacagaagcacaugca

SEQ ID NO: 1772854 - RNA, 14 nt, Human
caauugcaucuccc

SEQ ID NO: 1772855 - RNA, 15 nt, Human
caauugcaucuccca

SEQ ID NO: 1772856 - RNA, 17 nt, Human
caauugcaucucccaga

SEQ ID NO: 1772857 - RNA, 12 nt, Human
caauuucccccu

SEQ ID NO: 1772858 - RNA, 16 nt, Human
caauuucuacuuugaa

SEQ ID NO: 1772859 - RNA, 20 nt, Human
caauuucuacuuugaaguca

SEQ ID NO: 1772860 - RNA, 21 nt, Human
caauuucuacuuugaagucau

SEQ ID NO: 1772861 - RNA, 17 nt, Human
caaucaugaaauaugca

SEQ ID NO: 1772862 - RNA, 13 nt, Human
caaugcuggcugu

SEQ ID NO: 1772863 - RNA, 20 nt, Human
caaugcuggcuguuggcugg

SEQ ID NO: 1772864 - RNA, 21 nt, Human
caaugcuggcuguuggcuggg

SEQ ID NO: 1772865 - RNA, 13 nt, Human
caagucaugugca

SEQ ID NO: 1772866 - RNA, 16 nt, Human
caagucaugugcauuu

SEQ ID NO: 1772867 - RNA, 17 nt, Human
caagucaugugcauuuc

SEQ ID NO: 1772868 - RNA, 14 nt, Human
caauaaaauauuau

SEQ ID NO: 1772869 - RNA, 17 nt, Human
caauaaaauauuauuga

SEQ ID NO: 1772870 - RNA, 21 nt, Human
caauaaaauauuauugaacua

SEQ ID NO: 1772871 - RNA, 18 nt, Human
ggcucagcggggacagcu

SEQ ID NO: 1772872 - RNA, 19 nt, Human
ggcucagcggggacagcuc

SEQ ID NO: 1772873 - RNA, 20 nt, Human
ggcucagcggggacagcucc

SEQ ID NO: 1772874 - RNA, 19 nt, Human
ggcugcggcguacaggcug

SEQ ID NO: 1772875 - RNA, 21 nt, Human
ggcugcggcguacaggcuggc

SEQ ID NO: 1772876 - RNA, 22 nt, Human
ggcugcggcguacaggcuggcg

SEQ ID NO: 1772877 - RNA, 19 nt, Human
ggcucugugggugaugggg

SEQ ID NO: 1772878 - RNA, 22 nt, Human
ggcucugugggugauggggagg

SEQ ID NO: 1772879 - RNA, 18 nt, Human
ggcucuauaaggcagccu

SEQ ID NO: 1772880 - RNA, 12 nt, Human
ggcugccuccca

SEQ ID NO: 1772881 - RNA, 13 nt, Human
ggcugccucccaa

SEQ ID NO: 1772882 - RNA, 19 nt, Human
ggcugcgacgcuugcucug

SEQ ID NO: 1772883 - RNA, 22 nt, Human
ggcugcggaaugaaccacaucu

SEQ ID NO: 1772884 - RNA, 16 nt, Human
ggcugaauagcagaag

SEQ ID NO: 1772885 - RNA, 21 nt, Human
aaaagccucaacuagucauuu

SEQ ID NO: 1772886 - RNA, 14 nt, Human
gggagaaaaucauc

SEQ ID NO: 1772887 - RNA, 20 nt, Human
gggagaaaaucaucaagaag

SEQ ID NO: 1772888 - RNA, 12 nt, Human
gggagaaauacu

SEQ ID NO: 1772889 - RNA, 19 nt, Human
gggagaaauacuugaacuu

SEQ ID NO: 1772890 - RNA, 15 nt, Human
gggacuuggaagcuc

SEQ ID NO: 1772891 - RNA, 17 nt, Human
gggacuuggaagcuccg

SEQ ID NO: 1772892 - RNA, 18 nt, Human
gggacuuggaagcuccgc

SEQ ID NO: 1772893 - RNA, 23 nt, Human
gggacuuggaagcuccgcuuucu

SEQ ID NO: 1772894 - RNA, 16 nt, Human
aaaaauguauaugcac

SEQ ID NO: 1772895 - RNA, 14 nt, Human
aaaaccuuuugaaa

SEQ ID NO: 1772896 - RNA, 14 nt, Human
ggcuucucucugug

SEQ ID NO: 1772897 - RNA, 12 nt, Human
ggcuucuguggg

SEQ ID NO: 1772898 - RNA, 13 nt, Human
ggcuucugugggg

SEQ ID NO: 1772899 - RNA, 19 nt, Human
ggcuucuguggggccccuc

SEQ ID NO: 1772900 - RNA, 22 nt, Human
gggaacagccacuccccuccac

SEQ ID NO: 1772901 - RNA, 16 nt, Human
gggaaccuccccagcc

SEQ ID NO: 1772902 - RNA, 18 nt, Human
gggaaccuccccagccug

SEQ ID NO: 1772903 - RNA, 19 nt, Human
gggaaccuccccagccugc

SEQ ID NO: 1772904 - RNA, 20 nt, Human
gggaaccuccccagccugcg

SEQ ID NO: 1772905 - RNA, 12 nt, Human
gggacagcuccu

SEQ ID NO: 1772906 - RNA, 13 nt, Human
gggacagcuccuu

SEQ ID NO: 1772907 - RNA, 15 nt, Human
gggacagcuccuucu

SEQ ID NO: 1772908 - RNA, 16 nt, Human
gggacagcuccuucug

SEQ ID NO: 1772909 - RNA, 17 nt, Human
gggacagugcugcagcu

SEQ ID NO: 1772910 - RNA, 16 nt, Human
ggcuuccucauaguau

SEQ ID NO: 1772911 - RNA, 18 nt, Human
ggcuucaguggcagcugc

SEQ ID NO: 1772912 - RNA, 17 nt, Human
ggcuucaguggcagcug

SEQ ID NO: 1772913 - RNA, 19 nt, Human
ggcuucaguggcagcugcu

SEQ ID NO: 1772914 - RNA, 20 nt, Human
ggcuucaguggcagcugcuu

SEQ ID NO: 1772915 - RNA, 18 nt, Human
ggcuguaucccaugagcc

SEQ ID NO: 1772916 - RNA, 15 nt, Human
ggcugggggccucag

SEQ ID NO: 1772917 - RNA, 16 nt, Human
ggcugggggccucagu

SEQ ID NO: 1772918 - RNA, 17 nt, Human
ggcugggggccucagug

SEQ ID NO: 1772919 - RNA, 19 nt, Human
ggcugggggccucagugcc

SEQ ID NO: 1772920 - RNA, 14 nt, Human
aaaaauaacaauga

SEQ ID NO: 1772921 - RNA, 23 nt, Human
ggcacucagaagacacugauggg

SEQ ID NO: 1772922 - RNA, 21 nt, Human
ggcagcagggcuacccugagc

SEQ ID NO: 1772923 - RNA, 13 nt, Human
ggcagcaguguga

SEQ ID NO: 1772924 - RNA, 14 nt, Human
ggcagcagugugag

SEQ ID NO: 1772925 - RNA, 19 nt, Human
ggcagcagugugaggccag

SEQ ID NO: 1772926 - RNA, 20 nt, Human
ggcagcagugugaggccagg

SEQ ID NO: 1772927 - RNA, 13 nt, Human
ggcagcagggcua

SEQ ID NO: 1772928 - RNA, 18 nt, Human
ggcagcagggcuacccug

SEQ ID NO: 1772929 - RNA, 15 nt, Human
ggagacugcccagcu

SEQ ID NO: 1772930 - RNA, 11 nt, Human
ggcagggcugu

SEQ ID NO: 1772931 - RNA, 16 nt, Human
ggcagggcugugcuug

SEQ ID NO: 1772932 - RNA, 20 nt, Human
ggccagugugacaaggauug

SEQ ID NO: 1772933 - RNA, 13 nt, Human
ggcccuuugcugu

SEQ ID NO: 1772934 - RNA, 14 nt, Human
ggcccuuugcuguc

SEQ ID NO: 1772935 - RNA, 23 nt, Human
ggccccugcugguucaggguugg

SEQ ID NO: 1772936 - RNA, 13 nt, Human
ggcccggcuccag

SEQ ID NO: 1772937 - RNA, 13 nt, Human
ggccccugcuggu

SEQ ID NO: 1772938 - RNA, 14 nt, Human
ggccccugcugguu

SEQ ID NO: 1772939 - RNA, 15 nt, Human
ggcccggcuccaggc

SEQ ID NO: 1772940 - RNA, 15 nt, Human
ggcccucgcugccag

SEQ ID NO: 1772941 - RNA, 16 nt, Human
ggcccucgcugccagc

SEQ ID NO: 1772942 - RNA, 19 nt, Human
ggcccucgcugccagcucu

SEQ ID NO: 1772943 - RNA, 21 nt, Human
ggcccucgcugccagcucugu

SEQ ID NO: 1772944 - RNA, 22 nt, Human
ggcccucgcugccagcucugua

SEQ ID NO: 1772945 - RNA, 23 nt, Human
ggcccucgcugccagcucuguau

SEQ ID NO: 1772946 - RNA, 19 nt, Human
gguggaacauauggucucc

SEQ ID NO: 1772947 - RNA, 13 nt, Human
gguggaugccugg

SEQ ID NO: 1772948 - RNA, 13 nt, Human
gguggagggccac

SEQ ID NO: 1772949 - RNA, 23 nt, Human
gguggagggccacaugggaggcu

SEQ ID NO: 1772950 - RNA, 13 nt, Human
ggugcagccagag

SEQ ID NO: 1772951 - RNA, 17 nt, Human
ggugcagccagaggcac

SEQ ID NO: 1772952 - RNA, 18 nt, Human
ggugauccacccaccuca

SEQ ID NO: 1772953 - RNA, 23 nt, Human
ggugauccacccaccucagccuc

SEQ ID NO: 1772954 - RNA, 24 nt, Human
ggugauccacccaccucagccucc

SEQ ID NO: 1772955 - RNA, 17 nt, Human
ggucgacuucgggcugg

SEQ ID NO: 1772956 - RNA, 15 nt, Human
gguccuuugggguga

SEQ ID NO: 1772957 - RNA, 13 nt, Human
aaagcugcugaca

SEQ ID NO: 1772958 - RNA, 20 nt, Human
aaagcugguggcagaguccu

SEQ ID NO: 1772959 - RNA, 12 nt, Human
aaagcuuucugc

SEQ ID NO: 1772960 - RNA, 19 nt, Human
aaaggagcccuuaucugug

SEQ ID NO: 1772961 - RNA, 23 nt, Human
aaaggagcccuuaucugugcuca

SEQ ID NO: 1772962 - RNA, 22 nt, Human
aaagggacuuggaagcuccgcu

SEQ ID NO: 1772963 - RNA, 18 nt, Human
aaagauggggucuguaaa

SEQ ID NO: 1772964 - RNA, 17 nt, Human
aaagauggggucuguaa

SEQ ID NO: 1772965 - RNA, 22 nt, Human
aaagauggggucuguaaaaucu

SEQ ID NO: 1772966 - RNA, 21 nt, Human
aaagauggggucuguaaaauc

SEQ ID NO: 1772967 - RNA, 19 nt, Human
aaagauggggucuguaaaa

SEQ ID NO: 1772968 - RNA, 14 nt, Human
aaagcaaggaaacu

SEQ ID NO: 1772969 - RNA, 20 nt, Human
aaagcaaggaaacuauguaa

SEQ ID NO: 1772970 - RNA, 14 nt, Human
aaagcaauaugcau

SEQ ID NO: 1772971 - RNA, 11 nt, Human
gguccuuccug

SEQ ID NO: 1772972 - RNA, 15 nt, Human
aaacuuggauucucu

SEQ ID NO: 1772973 - RNA, 18 nt, Human
aaacuuggauucucuaac

SEQ ID NO: 1772974 - RNA, 12 nt, Human
aaacuugggcac

SEQ ID NO: 1772975 - RNA, 15 nt, Human
aaacuuugauucuuu

SEQ ID NO: 1772976 - RNA, 20 nt, Human
aaacuuuccucuuccugccu

SEQ ID NO: 1772977 - RNA, 14 nt, Human
aaagacacugcaga

SEQ ID NO: 1772978 - RNA, 13 nt, Human
aaagacagugaaa

SEQ ID NO: 1772979 - RNA, 17 nt, Human
gggucgacuucgggcug

SEQ ID NO: 1772980 - RNA, 12 nt, Human
ggguccaugggc

SEQ ID NO: 1772981 - RNA, 13 nt, Human
ggguccuuccuga

SEQ ID NO: 1772982 - RNA, 18 nt, Human
gggucccggcucuguggg

SEQ ID NO: 1772983 - RNA, 12 nt, Human
ggguccuuccug

SEQ ID NO: 1772984 - RNA, 14 nt, Human
aaaccaaggacuga

SEQ ID NO: 1772985 - RNA, 13 nt, Human
aaaccuuuugaaa

SEQ ID NO: 1772986 - RNA, 20 nt, Human
aaaccuuuuggaaaaucugc

SEQ ID NO: 1772987 - RNA, 11 nt, Human
aaaccucuguu

SEQ ID NO: 1772988 - RNA, 14 nt, Human
aaaccucuguucag

SEQ ID NO: 1772989 - RNA, 16 nt, Human
aaaccucuguucagug

SEQ ID NO: 1772990 - RNA, 17 nt, Human
aaaccucuguucagugu

SEQ ID NO: 1772991 - RNA, 21 nt, Human
aaaccucuguucaguguaaau

SEQ ID NO: 1772992 - RNA, 18 nt, Human
aaacuagggccaagccca

SEQ ID NO: 1772993 - RNA, 17 nt, Human
aaacuauauuuugucau

SEQ ID NO: 1772994 - RNA, 18 nt, Human
aaacuauauuuugucaua

SEQ ID NO: 1772995 - RNA, 19 nt, Human
aaacuguuaauaguucagg

SEQ ID NO: 1772996 - RNA, 15 nt, Human
aaacugcccuggcuc

SEQ ID NO: 1772997 - RNA, 12 nt, Human
aaacugugcacc

SEQ ID NO: 1772998 - RNA, 15 nt, Human
ggggccucagugcca

SEQ ID NO: 1772999 - RNA, 12 nt, Human
gggggccucagu

SEQ ID NO: 1773000 - RNA, 15 nt, Human
gggggccucagugcc

SEQ ID NO: 1773001 - RNA, 17 nt, Human
gggggccucagugccac

SEQ ID NO: 1773002 - RNA, 18 nt, Human
gggggccucagugccacu

SEQ ID NO: 1773003 - RNA, 11 nt, Human
ggggagaaagu

SEQ ID NO: 1773004 - RNA, 20 nt, Human
ggggaccuuuugggggaggg

SEQ ID NO: 1773005 - RNA, 18 nt, Human
ggggacuccggcugugcu

SEQ ID NO: 1773006 - RNA, 22 nt, Human
ggggacuccggcugugcuggga

SEQ ID NO: 1773007 - RNA, 16 nt, Human
aaacauggguuuaguu

SEQ ID NO: 1773008 - RNA, 17 nt, Human
aaacauguuagaagcaa

SEQ ID NO: 1773009 - RNA, 16 nt, Human
aaacauguuagaagca

SEQ ID NO: 1773010 - RNA, 18 nt, Human
aaacagguugggauggga

SEQ ID NO: 1773011 - RNA, 13 nt, Human
ggggaaggagcca

SEQ ID NO: 1773012 - RNA, 15 nt, Human
ggggaaggagccagu

SEQ ID NO: 1773013 - RNA, 21 nt, Human
ggggaaggagccaguuugccg

SEQ ID NO: 1773014 - RNA, 18 nt, Human
ggggaauguuugccucug

SEQ ID NO: 1773015 - RNA, 22 nt, Human
ggggaauguuugccucugccuc

SEQ ID NO: 1773016 - RNA, 16 nt, Human
aaacaaugaaugucuu

SEQ ID NO: 1773017 - RNA, 16 nt, Human
aaacaacaauuucuac

SEQ ID NO: 1773018 - RNA, 22 nt, Human
aaacaacaauuucuacuuugaa

SEQ ID NO: 1773019 - RNA, 16 nt, Human
aaacaauaaaugugca

SEQ ID NO: 1773020 - RNA, 12 nt, Human
aaacaaauaugc

SEQ ID NO: 1773021 - RNA, 13 nt, Human
aaacaaauaugca

SEQ ID NO: 1773022 - RNA, 14 nt, Human
aaacaaauaugcaa

SEQ ID NO: 1773023 - RNA, 17 nt, Human
aaacaaauaugcaaaag

SEQ ID NO: 1773024 - RNA, 16 nt, Human
aaaauuuugugacauu

SEQ ID NO: 1773025 - RNA, 19 nt, Human
aaaauuuugugacauuccu

SEQ ID NO: 1773026 - RNA, 20 nt, Human
aaaauuuugugacauuccuu

SEQ ID NO: 1773027 - RNA, 21 nt, Human
aaaauuuugugacauuccuuc

SEQ ID NO: 1773028 - RNA, 18 nt, Human
aaaauuuauuuuauaaga

SEQ ID NO: 1773029 - RNA, 20 nt, Human
aaaauuuauuuuauaagaaa

SEQ ID NO: 1773030 - RNA, 21 nt, Human
aaaauuuuauaaaauuaagca

SEQ ID NO: 1773031 - RNA, 13 nt, Human
gggaugagaaagg

SEQ ID NO: 1773032 - RNA, 15 nt, Human
gggaugagaguuuug

SEQ ID NO: 1773033 - RNA, 16 nt, Human
gggaugauucaagcca

SEQ ID NO: 1773034 - RNA, 19 nt, Human
aaaguacuucuccacccug

SEQ ID NO: 1773035 - RNA, 23 nt, Human
aaaguacuucuccacccugcucu

SEQ ID NO: 1773036 - RNA, 11 nt, Human
aaaguacugua

SEQ ID NO: 1773037 - RNA, 12 nt, Human
aaaguacuguaa

SEQ ID NO: 1773038 - RNA, 20 nt, Human
aaaguacuucuccacccugc

SEQ ID NO: 1773039 - RNA, 21 nt, Human
aaaguacuucuccacccugcu

SEQ ID NO: 1773040 - RNA, 23 nt, Human
aaaguauuuaauuagugcuaagu

SEQ ID NO: 1773041 - RNA, 21 nt, Human
aaaguauuuaauuagugcuaa

SEQ ID NO: 1773042 - RNA, 20 nt, Human
aaaguauuuaauuagugcua

SEQ ID NO: 1773043 - RNA, 19 nt, Human
aaaguauuuaauuagugcu

SEQ ID NO: 1773044 - RNA, 18 nt, Human
aaaguauuuaauuagugc

SEQ ID NO: 1773045 - RNA, 17 nt, Human
aaaguauuuaauuagug

SEQ ID NO: 1773046 - RNA, 15 nt, Human
aaaguauuauuuucc

SEQ ID NO: 1773047 - RNA, 16 nt, Human
aaaguauuauuuucca

SEQ ID NO: 1773048 - RNA, 17 nt, Human
aaaguauuauuuuccaa

SEQ ID NO: 1773049 - RNA, 14 nt, Human
aaaguucuguacuc

SEQ ID NO: 1773050 - RNA, 21 nt, Human
aaaguucuguacucaaaugua

SEQ ID NO: 1773051 - RNA, 13 nt, Human
aaauaauuuccua

SEQ ID NO: 1773052 - RNA, 14 nt, Human
aaauaauaugcauu

SEQ ID NO: 1773053 - RNA, 12 nt, Human
aaauaauaugca

SEQ ID NO: 1773054 - RNA, 13 nt, Human
aaauaauaugcau

SEQ ID NO: 1773055 - RNA, 24 nt, Human
aaauaagaaacaacucuuugagaa

SEQ ID NO: 1773056 - RNA, 16 nt, Human
aaauaacuucaagcaa

SEQ ID NO: 1773057 - RNA, 16 nt, Human
aaaguugguuggauaa

SEQ ID NO: 1773058 - RNA, 13 nt, Human
aaauaacacacau

SEQ ID NO: 1773059 - RNA, 19 nt, Human
aaauaaccaauccuggaca

SEQ ID NO: 1773060 - RNA, 21 nt, Human
aaauaacacacauauaaacau

SEQ ID NO: 1773061 - RNA, 15 nt, Human
aaauaacuucaagca

SEQ ID NO: 1773062 - RNA, 18 nt, Human
aaauaacuucaagcaaac

SEQ ID NO: 1773063 - RNA, 15 nt, Human
aaauacagauuuuga

SEQ ID NO: 1773064 - RNA, 23 nt, Human
aaauacagauuuugauagcaaag

SEQ ID NO: 1773065 - RNA, 17 nt, Human
aaauacagauuuugaua

SEQ ID NO: 1773066 - RNA, 22 nt, Human
aaauacagucuuccauuugcaa

SEQ ID NO: 1773067 - RNA, 23 nt, Human
aaauacagucuuccauuugcaag

SEQ ID NO: 1773068 - RNA, 13 nt, Human
aaauacaugacau

SEQ ID NO: 1773069 - RNA, 14 nt, Human
aaauacaugcaucu

SEQ ID NO: 1773070 - RNA, 20 nt, Human
guaauaggcguaacuaauuu

SEQ ID NO: 1773071 - RNA, 13 nt, Human
guaauuuguaaag

SEQ ID NO: 1773072 - RNA, 14 nt, Human
guaauuuguaaagu

SEQ ID NO: 1773073 - RNA, 17 nt, Human
aaaucagccaauuaugu

SEQ ID NO: 1773074 - RNA, 23 nt, Human
aaaucagccaauuauguuaaacu

SEQ ID NO: 1773075 - RNA, 21 nt, Human
aaaucagccaauuauguuaaa

SEQ ID NO: 1773076 - RNA, 20 nt, Human
aaaucagccaauuauguuaa

SEQ ID NO: 1773077 - RNA, 18 nt, Human
aaaucagccaauuauguu

SEQ ID NO: 1773078 - RNA, 18 nt, Human
aaauauucccuagaaacu

SEQ ID NO: 1773079 - RNA, 19 nt, Human
aaauauucccuagaaacuu

SEQ ID NO: 1773080 - RNA, 13 nt, Human
aaauauuauugaa

SEQ ID NO: 1773081 - RNA, 20 nt, Human
aaauauuauuuuaugaaagg

SEQ ID NO: 1773082 - RNA, 14 nt, Human
aaaucagucaagcu

SEQ ID NO: 1773083 - RNA, 22 nt, Human
aaaucauaggaaaguauuuuuu

SEQ ID NO: 1773084 - RNA, 18 nt, Human
guacauguucgggugugg

SEQ ID NO: 1773085 - RNA, 21 nt, Human
guacauguucggguguggguu

SEQ ID NO: 1773086 - RNA, 20 nt, Human
guaccaugaaacaaagcugc

SEQ ID NO: 1773087 - RNA, 12 nt, Human
guacccacugcu

SEQ ID NO: 1773088 - RNA, 15 nt, Human
guaccagugaauuuu

SEQ ID NO: 1773089 - RNA, 16 nt, Human
guaccagugaauuuuu

SEQ ID NO: 1773090 - RNA, 19 nt, Human
guaccagugaauuuuugca

SEQ ID NO: 1773091 - RNA, 21 nt, Human
guaccagugaauuuuugcaau

SEQ ID NO: 1773092 - RNA, 22 nt, Human
guaccagugaauuuuugcaaua

SEQ ID NO: 1773093 - RNA, 15 nt, Human
guaccaccaaaaaag

SEQ ID NO: 1773094 - RNA, 16 nt, Human
guacauuuuucaacuu

SEQ ID NO: 1773095 - RNA, 19 nt, Human
guacauuuuucaacuuuga

SEQ ID NO: 1773096 - RNA, 20 nt, Human
guacauuuuucaacuuugaa

SEQ ID NO: 1773097 - RNA, 21 nt, Human
guacauuuuucaacuuugaau

SEQ ID NO: 1773098 - RNA, 22 nt, Human
guacauuuuucaacuuugaaua

SEQ ID NO: 1773099 - RNA, 23 nt, Human
guacauuuuucaacuuugaauaa

SEQ ID NO: 1773100 - RNA, 11 nt, Human
guagagacagg

SEQ ID NO: 1773101 - RNA, 12 nt, Human
guagagacaggg

SEQ ID NO: 1773102 - RNA, 15 nt, Human
guagagccagggucu

SEQ ID NO: 1773103 - RNA, 18 nt, Human
guagagccagggucucac

SEQ ID NO: 1773104 - RNA, 13 nt, Human
guagagacagggu

SEQ ID NO: 1773105 - RNA, 10 nt, Human
guagagccag

SEQ ID NO: 1773106 - RNA, 11 nt, Human
guagagccagg

SEQ ID NO: 1773107 - RNA, 11 nt, Human
guagaauauuc

SEQ ID NO: 1773108 - RNA, 21 nt, Human
guagaaaggccuuuaaaauuu

SEQ ID NO: 1773109 - RNA, 16 nt, Human
guagaaauaauaugca

SEQ ID NO: 1773110 - RNA, 22 nt, Human
guagaaaugguuguauuagaug

SEQ ID NO: 1773111 - RNA, 20 nt, Human
guagaaaugguuguauuaga

SEQ ID NO: 1773112 - RNA, 18 nt, Human
guagaaaugguuguauua

SEQ ID NO: 1773113 - RNA, 17 nt, Human
guagaaaugguuguauu

SEQ ID NO: 1773114 - RNA, 17 nt, Human
guagaaauaauaugcau

SEQ ID NO: 1773115 - RNA, 15 nt, Human
guacucaaauguagc

SEQ ID NO: 1773116 - RNA, 13 nt, Human
guacccacugcuc

SEQ ID NO: 1773117 - RNA, 14 nt, Human
guacccacugcucu

SEQ ID NO: 1773118 - RNA, 16 nt, Human
guacuguaagaauaau

SEQ ID NO: 1773119 - RNA, 16 nt, Human
guacugugggcaauuu

SEQ ID NO: 1773120 - RNA, 17 nt, Human
guacugugggcaauuua

SEQ ID NO: 1773121 - RNA, 20 nt, Human
guacugugggcaauuuagaa

SEQ ID NO: 1773122 - RNA, 21 nt, Human
guacugugggcaauuuagaaa

SEQ ID NO: 1773123 - RNA, 22 nt, Human
guacugugggcaauuuagaaaa

SEQ ID NO: 1773124 - RNA, 13 nt, Human
gcuucaggaaccu

SEQ ID NO: 1773125 - RNA, 14 nt, Human
gcuucaggaaccuc

SEQ ID NO: 1773126 - RNA, 22 nt, Human
gcuucaggaaccucgaguacug

SEQ ID NO: 1773127 - RNA, 23 nt, Human
gcuucaggaaccucgaguacugu

SEQ ID NO: 1773128 - RNA, 12 nt, Human
gcuucagccucc

SEQ ID NO: 1773129 - RNA, 22 nt, Human
gcuuccucauaguaugguggcu

SEQ ID NO: 1773130 - RNA, 16 nt, Human
gcuucuagcugacuug

SEQ ID NO: 1773131 - RNA, 15 nt, Human
gcuucuuccaggugc

SEQ ID NO: 1773132 - RNA, 16 nt, Human
gcuucuuccaggugcc

SEQ ID NO: 1773133 - RNA, 19 nt, Human
gcuucuuccaggugcccag

SEQ ID NO: 1773134 - RNA, 20 nt, Human
gcuuguaaauagcucaggug

SEQ ID NO: 1773135 - RNA, 15 nt, Human
gcuggcuguuggcug

SEQ ID NO: 1773136 - RNA, 16 nt, Human
gcuggcuguuggcugg

SEQ ID NO: 1773137 - RNA, 17 nt, Human
gcuggcuguuggcuggg

SEQ ID NO: 1773138 - RNA, 15 nt, Human
gcuggcuacgccucu

SEQ ID NO: 1773139 - RNA, 21 nt, Human
gcuggcucuauaaggcagccu

SEQ ID NO: 1773140 - RNA, 15 nt, Human
gcugggcccucucuu

SEQ ID NO: 1773141 - RNA, 17 nt, Human
gcugggcccucucuucu

SEQ ID NO: 1773142 - RNA, 18 nt, Human
gcugggcccucucuucuc

SEQ ID NO: 1773143 - RNA, 12 nt, Human
gcuggaggccuc

SEQ ID NO: 1773144 - RNA, 14 nt, Human
gcuggaggccucag

SEQ ID NO: 1773145 - RNA, 19 nt, Human
gcuggaggccucaggugcu

SEQ ID NO: 1773146 - RNA, 20 nt, Human
gcuggcgugcaguggugcga

SEQ ID NO: 1773147 - RNA, 15 nt, Human
gcuggcgagagucug

SEQ ID NO: 1773148 - RNA, 17 nt, Human
gcuggcgagagucuggc

SEQ ID NO: 1773149 - RNA, 20 nt, Human
gcuggcgagagucuggcccu

SEQ ID NO: 1773150 - RNA, 18 nt, Human
gcuggagugcagugagcc

SEQ ID NO: 1773151 - RNA, 17 nt, Human
gcuggagugcagugagc

SEQ ID NO: 1773152 - RNA, 22 nt, Human
gcuggagugcagugagccgaga

SEQ ID NO: 1773153 - RNA, 11 nt, Human
gcugcuggcca

SEQ ID NO: 1773154 - RNA, 21 nt, Human
gcugcuggccaaauagcaaag

SEQ ID NO: 1773155 - RNA, 22 nt, Human
gcugcuggccaaauagcaaaga

SEQ ID NO: 1773156 - RNA, 17 nt, Human
ggacccuguugcuaagc

SEQ ID NO: 1773157 - RNA, 13 nt, Human
ggacccuguugcu

SEQ ID NO: 1773158 - RNA, 16 nt, Human
ggacggguuagacagc

SEQ ID NO: 1773159 - RNA, 15 nt, Human
ggacucaaugcacug

SEQ ID NO: 1773160 - RNA, 14 nt, Human
ggacuacaggugug

SEQ ID NO: 1773161 - RNA, 13 nt, Human
ggacgugggcugg

SEQ ID NO: 1773162 - RNA, 19 nt, Human
ggacuaaaagauauaagug

SEQ ID NO: 1773163 - RNA, 14 nt, Human
ggacuaaaagauau

SEQ ID NO: 1773164 - RNA, 12 nt, Human
ggacuaaaagau

SEQ ID NO: 1773165 - RNA, 16 nt, Human
ggacucaaugcacuga

SEQ ID NO: 1773166 - RNA, 18 nt, Human
ggacucaaugcacugaca

SEQ ID NO: 1773167 - RNA, 16 nt, Human
ggacucaggcgggaca

SEQ ID NO: 1773168 - RNA, 22 nt, Human
ggacucaggcgggacagugcug

SEQ ID NO: 1773169 - RNA, 14 nt, Human
ggacucaugaggag

SEQ ID NO: 1773170 - RNA, 22 nt, Human
ggagaaauacuugaacuugccu

SEQ ID NO: 1773171 - RNA, 14 nt, Human
ggacuuggaagcuc

SEQ ID NO: 1773172 - RNA, 16 nt, Human
ggacuccggcugugcu

SEQ ID NO: 1773173 - RNA, 17 nt, Human
ggacuccggcugugcug

SEQ ID NO: 1773174 - RNA, 23 nt, Human
ggacaggcauguucucugaggac

SEQ ID NO: 1773175 - RNA, 13 nt, Human
ggaacagaaauug

SEQ ID NO: 1773176 - RNA, 16 nt, Human
ggaacuguccuuuccu

SEQ ID NO: 1773177 - RNA, 15 nt, Human
ggaacuguuuccuuc

SEQ ID NO: 1773178 - RNA, 11 nt, Human
ggaagcuccgc

SEQ ID NO: 1773179 - RNA, 13 nt, Human
ggaagcuucuguc

SEQ ID NO: 1773180 - RNA, 13 nt, Human
ggaagcucuucuu

SEQ ID NO: 1773181 - RNA, 16 nt, Human
ggaauccagacccggc

SEQ ID NO: 1773182 - RNA, 24 nt, Human
ggaaucauuucuauuucuccucca

SEQ ID NO: 1773183 - RNA, 13 nt, Human
ggaaucagcuucu

SEQ ID NO: 1773184 - RNA, 14 nt, Human
ggaaucagcuucua

SEQ ID NO: 1773185 - RNA, 15 nt, Human
ggacaauaugugcca

SEQ ID NO: 1773186 - RNA, 19 nt, Human
ggacaaucaugaaauaugc

SEQ ID NO: 1773187 - RNA, 21 nt, Human
ggacaaucaugaaauaugcau

SEQ ID NO: 1773188 - RNA, 21 nt, Human
ggacacagcucuucuccaggc

SEQ ID NO: 1773189 - RNA, 15 nt, Human
ggacacagcucuucu

SEQ ID NO: 1773190 - RNA, 18 nt, Human
ggacacagcucuucucca

SEQ ID NO: 1773191 - RNA, 17 nt, Human
ggacacuaaccacgcug

SEQ ID NO: 1773192 - RNA, 22 nt, Human
ggacacuaaccacgcuggaccu

SEQ ID NO: 1773193 - RNA, 19 nt, Human
ggacagcuccuucuguccu

SEQ ID NO: 1773194 - RNA, 20 nt, Human
ggacagcuccuucuguccua

SEQ ID NO: 1773195 - RNA, 12 nt, Human
ggacagcugugu

SEQ ID NO: 1773196 - RNA, 20 nt, Human
gccuaggugacagagugaga

SEQ ID NO: 1773197 - RNA, 17 nt, Human
gccuagggcccccacag

SEQ ID NO: 1773198 - RNA, 19 nt, Human
gccuagugaaggcuucucu

SEQ ID NO: 1773199 - RNA, 22 nt, Human
gccuagugaaggcuucucucug

SEQ ID NO: 1773200 - RNA, 23 nt, Human
gccuagugaaggcuucucucugu

SEQ ID NO: 1773201 - RNA, 13 nt, Human
gccuaggugacag

SEQ ID NO: 1773202 - RNA, 14 nt, Human
gccuaggugacaga

SEQ ID NO: 1773203 - RNA, 15 nt, Human
gccuaggugacagag

SEQ ID NO: 1773204 - RNA, 22 nt, Human
gcccuuagcagggaaacagcua

SEQ ID NO: 1773205 - RNA, 15 nt, Human
gcccuuaucugugcu

SEQ ID NO: 1773206 - RNA, 16 nt, Human
gcccuuaucugugcuc

SEQ ID NO: 1773207 - RNA, 18 nt, Human
gcccuuaucugugcucag

SEQ ID NO: 1773208 - RNA, 20 nt, Human
gcccuuagcagggaaacagc

SEQ ID NO: 1773209 - RNA, 17 nt, Human
gccccugccacccuggg

SEQ ID NO: 1773210 - RNA, 16 nt, Human
gccccugccacccugg

SEQ ID NO: 1773211 - RNA, 19 nt, Human
gccccccaccccuggaaga

SEQ ID NO: 1773212 - RNA, 21 nt, Human
gccccccaccccuggaagagc

SEQ ID NO: 1773213 - RNA, 19 nt, Human
gccccccagccccgguggc

SEQ ID NO: 1773214 - RNA, 17 nt, Human
gcccguaaacacgccug

SEQ ID NO: 1773215 - RNA, 22 nt, Human
gcgaucuggguucacugcaacc

SEQ ID NO: 1773216 - RNA, 12 nt, Human
gcgaugggucag

SEQ ID NO: 1773217 - RNA, 22 nt, Human
gcgaugggucagguagggggga

SEQ ID NO: 1773218 - RNA, 17 nt, Human
gcgagcccugguggcag

SEQ ID NO: 1773219 - RNA, 15 nt, Human
gcgagcccugguggc

SEQ ID NO: 1773220 - RNA, 19 nt, Human
gcgaggagaugcuccuugg

SEQ ID NO: 1773221 - RNA, 20 nt, Human
gcgaggagaugcuccuuggg

SEQ ID NO: 1773222 - RNA, 15 nt, Human
gcgaggaggcuccag

SEQ ID NO: 1773223 - RNA, 16 nt, Human
gcgaggaggcuccaga

SEQ ID NO: 1773224 - RNA, 17 nt, Human
gcgaggaggcuccagag

SEQ ID NO: 1773225 - RNA, 18 nt, Human
gcgaggaggcuccagagg

SEQ ID NO: 1773226 - RNA, 15 nt, Human
gccuccaucagcuaa

SEQ ID NO: 1773227 - RNA, 17 nt, Human
gccucgaacuggcugca

SEQ ID NO: 1773228 - RNA, 19 nt, Human
gccuccugugugugcgccu

SEQ ID NO: 1773229 - RNA, 23 nt, Human
gccuccugugugugcgccuacag

SEQ ID NO: 1773230 - RNA, 16 nt, Human
gccucccaaagugcug

SEQ ID NO: 1773231 - RNA, 17 nt, Human
gccucccaaagugcugg

SEQ ID NO: 1773232 - RNA, 14 nt, Human
gccucuuggguuca

SEQ ID NO: 1773233 - RNA, 13 nt, Human
gccugcccaggcc

SEQ ID NO: 1773234 - RNA, 14 nt, Human
gccugcccaggccc

SEQ ID NO: 1773235 - RNA, 17 nt, Human
gccucuuucugucccuu

SEQ ID NO: 1773236 - RNA, 16 nt, Human
gccucuuuuaccugcu

SEQ ID NO: 1773237 - RNA, 17 nt, Human
gccucuuuuaccugcug

SEQ ID NO: 1773238 - RNA, 18 nt, Human
gccucuuuuaccugcugc

SEQ ID NO: 1773239 - RNA, 19 nt, Human
gccucuuuuaccugcugcu

SEQ ID NO: 1773240 - RNA, 20 nt, Human
gccucuuuuaccugcugcuu

SEQ ID NO: 1773241 - RNA, 22 nt, Human
gccucuuuuaccugcugcuucu

SEQ ID NO: 1773242 - RNA, 20 nt, Human
gccucgaacuggcugcaaag

SEQ ID NO: 1773243 - RNA, 22 nt, Human
gccucgaacuggcugcaaaggg

SEQ ID NO: 1773244 - RNA, 17 nt, Human
gccugccccaaacaaau

SEQ ID NO: 1773245 - RNA, 23 nt, Human
gccugccccaaacaaauaugcaa

SEQ ID NO: 1773246 - RNA, 22 nt, Human
gccugcccaggccccugccacc

SEQ ID NO: 1773247 - RNA, 19 nt, Human
gccucuuugucuaaaacaa

SEQ ID NO: 1773248 - RNA, 23 nt, Human
gccucuuugucuaaaacaauaaa

SEQ ID NO: 1773249 - RNA, 15 nt, Human
gccugcccaggcccc

SEQ ID NO: 1773250 - RNA, 17 nt, Human
gccugcccaggccccug

SEQ ID NO: 1773251 - RNA, 16 nt, Human
gcuaggccuggccaga

SEQ ID NO: 1773252 - RNA, 17 nt, Human
gcuaggccuggccagau

SEQ ID NO: 1773253 - RNA, 23 nt, Human
gcuaggccuggccagaugcacca

SEQ ID NO: 1773254 - RNA, 14 nt, Human
gcucaggugucccu

SEQ ID NO: 1773255 - RNA, 16 nt, Human
gcucaggugucccugc

SEQ ID NO: 1773256 - RNA, 17 nt, Human
gcucaggugucccugca

SEQ ID NO: 1773257 - RNA, 16 nt, Human
gcucaggacucagaag

SEQ ID NO: 1773258 - RNA, 22 nt, Human
gcucaggcuacuauagguccag

SEQ ID NO: 1773259 - RNA, 17 nt, Human
gcucacugcagccucaa

SEQ ID NO: 1773260 - RNA, 15 nt, Human
gcucacugcagccuc

SEQ ID NO: 1773261 - RNA, 16 nt, Human
gcucacugcagccuca

SEQ ID NO: 1773262 - RNA, 11 nt, Human
gcucacugcag

SEQ ID NO: 1773263 - RNA, 12 nt, Human
gcucacugcagc

SEQ ID NO: 1773264 - RNA, 13 nt, Human
gcucacugcagcc

SEQ ID NO: 1773265 - RNA, 14 nt, Human
gcucacugcagccu

SEQ ID NO: 1773266 - RNA, 14 nt, Human
gcuauugacaauaa

SEQ ID NO: 1773267 - RNA, 15 nt, Human
gcuauugacaauaaa

SEQ ID NO: 1773268 - RNA, 12 nt, Human
gcucaaaaucuu

SEQ ID NO: 1773269 - RNA, 15 nt, Human
gcucaaaaucuuucc

SEQ ID NO: 1773270 - RNA, 20 nt, Human
gcgggaggauguucugggac

SEQ ID NO: 1773271 - RNA, 21 nt, Human
gcgggaggauguucugggaca

SEQ ID NO: 1773272 - RNA, 22 nt, Human
gcgggaggauguucugggacac

SEQ ID NO: 1773273 - RNA, 20 nt, Human
gcgugcacacaccagagccc

SEQ ID NO: 1773274 - RNA, 13 nt, Human
gcuaaaaagcaac

SEQ ID NO: 1773275 - RNA, 14 nt, Human
gcuaaaaagcaaca

SEQ ID NO: 1773276 - RNA, 23 nt, Human
gcgugcacacaccagagcccacc

SEQ ID NO: 1773277 - RNA, 17 nt, Human
gcgugucaccugugcuu

SEQ ID NO: 1773278 - RNA, 23 nt, Human
gcuaagugauccucccaccucag

SEQ ID NO: 1773279 - RNA, 13 nt, Human
gcuaagugugaac

SEQ ID NO: 1773280 - RNA, 15 nt, Human
gcuaaugggacacua

SEQ ID NO: 1773281 - RNA, 22 nt, Human
gcuaauguugcuggaucaggaa

SEQ ID NO: 1773282 - RNA, 13 nt, Human
gcuaaugggacac

SEQ ID NO: 1773283 - RNA, 19 nt, Human
gcuccaccaagaaagcagg

SEQ ID NO: 1773284 - RNA, 17 nt, Human
gcuccugagggagcucc

SEQ ID NO: 1773285 - RNA, 19 nt, Human
gcuccugagggagcuccaa

SEQ ID NO: 1773286 - RNA, 20 nt, Human
gcuccccucugcacggacca

SEQ ID NO: 1773287 - RNA, 13 nt, Human
gcucccagccuca

SEQ ID NO: 1773288 - RNA, 14 nt, Human
gcucccagccucag

SEQ ID NO: 1773289 - RNA, 15 nt, Human
gcucccagccucagc

SEQ ID NO: 1773290 - RNA, 17 nt, Human
gcucccagccucagcgc

SEQ ID NO: 1773291 - RNA, 12 nt, Human
gcucccagccuc

SEQ ID NO: 1773292 - RNA, 20 nt, Human
gcuccagcucaccagcccca

SEQ ID NO: 1773293 - RNA, 21 nt, Human
gcuccagcucaccagccccag

SEQ ID NO: 1773294 - RNA, 18 nt, Human
gcuccagcucaccagccc

SEQ ID NO: 1773295 - RNA, 17 nt, Human
gcucgguacccggggcc

SEQ ID NO: 1773296 - RNA, 23 nt, Human
gcucgguacccggggcccagggc

SEQ ID NO: 1773297 - RNA, 24 nt, Human
gcucgguacccggggcccagggca

SEQ ID NO: 1773298 - RNA, 13 nt, Human
gcucugaucccuc

SEQ ID NO: 1773299 - RNA, 22 nt, Human
gcucugaucccucuacagagcu

SEQ ID NO: 1773300 - RNA, 23 nt, Human
gcucugaucccucuacagagcuu

SEQ ID NO: 1773301 - RNA, 23 nt, Human
gcucugaucauccacugugccau

SEQ ID NO: 1773302 - RNA, 17 nt, Human
gcucugaucauccacug

SEQ ID NO: 1773303 - RNA, 22 nt, Human
gcagcugcgguccacccaggag

SEQ ID NO: 1773304 - RNA, 23 nt, Human
gcagcugcgguccacccaggagc

SEQ ID NO: 1773305 - RNA, 13 nt, Human
gcagcugcuuuug

SEQ ID NO: 1773306 - RNA, 20 nt, Human
gcagcugcuuuugucuaugg

SEQ ID NO: 1773307 - RNA, 16 nt, Human
gcagcuugaggguugg

SEQ ID NO: 1773308 - RNA, 22 nt, Human
gcagggaaacagcuaaugggac

SEQ ID NO: 1773309 - RNA, 19 nt, Human
gcagcuugaggguugggcu

SEQ ID NO: 1773310 - RNA, 21 nt, Human
gcagcuugaggguugggcugg

SEQ ID NO: 1773311 - RNA, 16 nt, Human
gcauaacaauuccucu

SEQ ID NO: 1773312 - RNA, 17 nt, Human
gcauaacaauuccucua

SEQ ID NO: 1773313 - RNA, 14 nt, Human
gcagguucauggau

SEQ ID NO: 1773314 - RNA, 17 nt, Human
gcauccuggcacccggc

SEQ ID NO: 1773315 - RNA, 21 nt, Human
gcauccuggcacccggccccu

SEQ ID NO: 1773316 - RNA, 23 nt, Human
gcauccuuuaggguucugccucu

SEQ ID NO: 1773317 - RNA, 22 nt, Human
gcauccuggcacccggccccug

SEQ ID NO: 1773318 - RNA, 23 nt, Human
gcauccuggcacccggccccugc

SEQ ID NO: 1773319 - RNA, 14 nt, Human
gcaucggccuaggg

SEQ ID NO: 1773320 - RNA, 15 nt, Human
gcaucggccuagggc

SEQ ID NO: 1773321 - RNA, 15 nt, Human
gcaugugacucugaa

SEQ ID NO: 1773322 - RNA, 21 nt, Human
gcaugugacucugaagcugac

SEQ ID NO: 1773323 - RNA, 11 nt, Human
gcauuguaaau

SEQ ID NO: 1773324 - RNA, 12 nt, Human
gcauuguaaaua

SEQ ID NO: 1773325 - RNA, 15 nt, Human
gcauuguaucgaugu

SEQ ID NO: 1773326 - RNA, 19 nt, Human
gcauuguaucgauguuaug

SEQ ID NO: 1773327 - RNA, 20 nt, Human
gcaugugacucugaagcuga

SEQ ID NO: 1773328 - RNA, 16 nt, Human
gccaaccuauuuugaa

SEQ ID NO: 1773329 - RNA, 13 nt, Human
gcauuugaaugca

SEQ ID NO: 1773330 - RNA, 12 nt, Human
gcauuugaaugc

SEQ ID NO: 1773331 - RNA, 10 nt, Human
gcauuugaau

SEQ ID NO: 1773332 - RNA, 16 nt, Human
gcauuugaaugcauuu

SEQ ID NO: 1773333 - RNA, 15 nt, Human
gcauuugaaugcauu

SEQ ID NO: 1773334 - RNA, 15 nt, Human
gccaaccuauuuuga

SEQ ID NO: 1773335 - RNA, 17 nt, Human
gcacuaugcuuuccuuc

SEQ ID NO: 1773336 - RNA, 22 nt, Human
gcacuauagccuaggugacaga

SEQ ID NO: 1773337 - RNA, 12 nt, Human
gcaccuccugcc

SEQ ID NO: 1773338 - RNA, 18 nt, Human
gcaccuccacauccucca

SEQ ID NO: 1773339 - RNA, 15 nt, Human
gcaccuccagccuga

SEQ ID NO: 1773340 - RNA, 20 nt, Human
gcacacaccagagcccaccu

SEQ ID NO: 1773341 - RNA, 18 nt, Human
gcacacagaggggaguca

SEQ ID NO: 1773342 - RNA, 12 nt, Human
gcaauaaugcag

SEQ ID NO: 1773343 - RNA, 13 nt, Human
gcaauaaugcagu

SEQ ID NO: 1773344 - RNA, 14 nt, Human
gcaauaaugcagua

SEQ ID NO: 1773345 - RNA, 19 nt, Human
gcaauaaugcaguauggua

SEQ ID NO: 1773346 - RNA, 12 nt, Human
gcacacaccaga

SEQ ID NO: 1773347 - RNA, 14 nt, Human
gcacacaccagagc

SEQ ID NO: 1773348 - RNA, 15 nt, Human
gcacacaccagagcc

SEQ ID NO: 1773349 - RNA, 16 nt, Human
gcacacaccagagccc

SEQ ID NO: 1773350 - RNA, 17 nt, Human
gcacacaccagagccca

SEQ ID NO: 1773351 - RNA, 18 nt, Human
gcacacaccagagcccac

SEQ ID NO: 1773352 - RNA, 19 nt, Human
gcacacaccagagcccacc

SEQ ID NO: 1773353 - RNA, 18 nt, Human
gcaaccuccgccucuugg

SEQ ID NO: 1773354 - RNA, 12 nt, Human
gcaaaaccagaa

SEQ ID NO: 1773355 - RNA, 18 nt, Human
gcaacccccagccugcua

SEQ ID NO: 1773356 - RNA, 21 nt, Human
gauucuucugcuucagccucc

SEQ ID NO: 1773357 - RNA, 19 nt, Human
gauucuccugccucagccu

SEQ ID NO: 1773358 - RNA, 20 nt, Human
gauucuccugccucagccuc

SEQ ID NO: 1773359 - RNA, 21 nt, Human
gauucuccugccucagccucc

SEQ ID NO: 1773360 - RNA, 20 nt, Human
gauucuuucccaauucacau

SEQ ID NO: 1773361 - RNA, 17 nt, Human
gauuuaaguuacaaugu

SEQ ID NO: 1773362 - RNA, 20 nt, Human
gauuuaaguuacaauguuuu

SEQ ID NO: 1773363 - RNA, 20 nt, Human
gaucuggguucacugcaacc

SEQ ID NO: 1773364 - RNA, 18 nt, Human
gaucuggguucacugcaa

SEQ ID NO: 1773365 - RNA, 19 nt, Human
gaugagcucuacccagggc

SEQ ID NO: 1773366 - RNA, 20 nt, Human
gaugagcucuacccagggcc

SEQ ID NO: 1773367 - RNA, 11 nt, Human
gaugagcucua

SEQ ID NO: 1773368 - RNA, 16 nt, Human
gaugagcucuacccag

SEQ ID NO: 1773369 - RNA, 21 nt, Human
gaugauggucuucagccucuu

SEQ ID NO: 1773370 - RNA, 13 nt, Human
gaugauucaagcc

SEQ ID NO: 1773371 - RNA, 16 nt, Human
gaugauucaagccauu

SEQ ID NO: 1773372 - RNA, 19 nt, Human
gauguaccaugaaacaaag

SEQ ID NO: 1773373 - RNA, 21 nt, Human
gagaagcucucgggcuaggaa

SEQ ID NO: 1773374 - RNA, 21 nt, Human
gagcagugaaugauucagugu

SEQ ID NO: 1773375 - RNA, 18 nt, Human
gagcugugcaggugggga

SEQ ID NO: 1773376 - RNA, 20 nt, Human
gagcugccuguucagcucca

SEQ ID NO: 1773377 - RNA, 16 nt, Human
gagcugguggacccag

SEQ ID NO: 1773378 - RNA, 23 nt, Human
gagcugguggacccagggaacag

SEQ ID NO: 1773379 - RNA, 18 nt, Human
gagcuguauuaagccacu

SEQ ID NO: 1773380 - RNA, 17 nt, Human
gagcgcgccccuagccg

SEQ ID NO: 1773381 - RNA, 15 nt, Human
gagcugccuguucag

SEQ ID NO: 1773382 - RNA, 16 nt, Human
gagcugccuguucagc

SEQ ID NO: 1773383 - RNA, 19 nt, Human
gagcugccuguucagcucc

SEQ ID NO: 1773384 - RNA, 16 nt, Human
gagcgcgccccuagcc

SEQ ID NO: 1773385 - RNA, 18 nt, Human
gagcgaggagaugcuccu

SEQ ID NO: 1773386 - RNA, 21 nt, Human
gagcgaggagaugcuccuugg

SEQ ID NO: 1773387 - RNA, 13 nt, Human
gagccuucagccu

SEQ ID NO: 1773388 - RNA, 17 nt, Human
gagccuucagccuuaau

SEQ ID NO: 1773389 - RNA, 13 nt, Human
gagcccucagaac

SEQ ID NO: 1773390 - RNA, 22 nt, Human
gagucaucuguuagggccuugg

SEQ ID NO: 1773391 - RNA, 13 nt, Human
gagucauuugagu

SEQ ID NO: 1773392 - RNA, 18 nt, Human
gagucauuugagucucuu

SEQ ID NO: 1773393 - RNA, 22 nt, Human
gagugagacccagcccucaucc

SEQ ID NO: 1773394 - RNA, 23 nt, Human
gagugagacccagcccucauccc

SEQ ID NO: 1773395 - RNA, 14 nt, Human
gagugagacucugu

SEQ ID NO: 1773396 - RNA, 18 nt, Human
gagugagacucugucuca

SEQ ID NO: 1773397 - RNA, 18 nt, Human
gagugcagugagccgaga

SEQ ID NO: 1773398 - RNA, 14 nt, Human
gaggcuccagaggg

SEQ ID NO: 1773399 - RNA, 17 nt, Human
gaggcuccagagggcac

SEQ ID NO: 1773400 - RNA, 12 nt, Human
gaggggaacaga

SEQ ID NO: 1773401 - RNA, 16 nt, Human
gaggggaagcuucugu

SEQ ID NO: 1773402 - RNA, 14 nt, Human
gaggcugccuccca

SEQ ID NO: 1773403 - RNA, 15 nt, Human
gaggcugccucccaa

SEQ ID NO: 1773404 - RNA, 23 nt, Human
gaggcugccccaccccuccccau

SEQ ID NO: 1773405 - RNA, 16 nt, Human
gacagcuccuucuguc

SEQ ID NO: 1773406 - RNA, 18 nt, Human
gacagccugcagcaggaa

SEQ ID NO: 1773407 - RNA, 13 nt, Human
gacagcuccuucu

SEQ ID NO: 1773408 - RNA, 14 nt, Human
gacagcuccuucug

SEQ ID NO: 1773409 - RNA, 15 nt, Human
gacagcuccuucugu

SEQ ID NO: 1773410 - RNA, 20 nt, Human
gacacucuauaagauuccaa

SEQ ID NO: 1773411 - RNA, 21 nt, Human
gacacucuauaagauuccaaa

SEQ ID NO: 1773412 - RNA, 15 nt, Human
gacacucccuugggc

SEQ ID NO: 1773413 - RNA, 21 nt, Human
gacacucccuugggcucccug

SEQ ID NO: 1773414 - RNA, 14 nt, Human
gaccaguggucuca

SEQ ID NO: 1773415 - RNA, 17 nt, Human
gaccagucaaccugggc

SEQ ID NO: 1773416 - RNA, 18 nt, Human
gaccagucaaccugggca

SEQ ID NO: 1773417 - RNA, 16 nt, Human
gacccuaaaucuugac

SEQ ID NO: 1773418 - RNA, 12 nt, Human
gacccggcugcg

SEQ ID NO: 1773419 - RNA, 13 nt, Human
gacccggcugcgu

SEQ ID NO: 1773420 - RNA, 14 nt, Human
gacuuugcuccuca

SEQ ID NO: 1773421 - RNA, 14 nt, Human
gacucaaugcacug

SEQ ID NO: 1773422 - RNA, 17 nt, Human
gacucaaugcacugaca

SEQ ID NO: 1773423 - RNA, 22 nt, Human
gacugguguuaucaccgugggc

SEQ ID NO: 1773424 - RNA, 18 nt, Human
gacugucuccauggcccu

SEQ ID NO: 1773425 - RNA, 14 nt, Human
gacccucuaaccuc

SEQ ID NO: 1773426 - RNA, 18 nt, Human
gacccucuaaccucgccc

SEQ ID NO: 1773427 - RNA, 18 nt, Human
gaaccaccacacccagcc

SEQ ID NO: 1773428 - RNA, 20 nt, Human
gaaccaccacacccagccca

SEQ ID NO: 1773429 - RNA, 21 nt, Human
gaaccaccacacccagcccac

SEQ ID NO: 1773430 - RNA, 22 nt, Human
gaaccaccacacccagcccacu

SEQ ID NO: 1773431 - RNA, 15 nt, Human
gaaccaggcuuggaa

SEQ ID NO: 1773432 - RNA, 23 nt, Human
gaaccaccacacccagcccacuu

SEQ ID NO: 1773433 - RNA, 17 nt, Human
gaaccagccggggccuu

SEQ ID NO: 1773434 - RNA, 18 nt, Human
gaaccagccggggccuua

SEQ ID NO: 1773435 - RNA, 15 nt, Human
gaacuccuggccuca

SEQ ID NO: 1773436 - RNA, 14 nt, Human
gaacuccuggccuc

SEQ ID NO: 1773437 - RNA, 13 nt, Human
gaacuccuggccu

SEQ ID NO: 1773438 - RNA, 21 nt, Human
gaagacacugaugggcaaccc

SEQ ID NO: 1773439 - RNA, 16 nt, Human
gaagacacugaugggc

SEQ ID NO: 1773440 - RNA, 22 nt, Human
gaagaccauguggagacuucau

SEQ ID NO: 1773441 - RNA, 23 nt, Human
gaagcagcuaaaccaaggacuga

SEQ ID NO: 1773442 - RNA, 20 nt, Human
gaagcacaugcaccuaccca

SEQ ID NO: 1773443 - RNA, 13 nt, Human
gaagcacagcuuc

SEQ ID NO: 1773444 - RNA, 14 nt, Human
gaagcacagcuuca

SEQ ID NO: 1773445 - RNA, 17 nt, Human
gaagacucauucuucug

SEQ ID NO: 1773446 - RNA, 18 nt, Human
gaagacucauucuucugu

SEQ ID NO: 1773447 - RNA, 16 nt, Human
gaagacucauucuucu

SEQ ID NO: 1773448 - RNA, 21 nt, Human
gaacaaugugcuaugugaaga

SEQ ID NO: 1773449 - RNA, 15 nt, Human
gaaagggcccagaga

SEQ ID NO: 1773450 - RNA, 16 nt, Human
gaaagggcccagagag

SEQ ID NO: 1773451 - RNA, 13 nt, Human
gaaagggcccaga

SEQ ID NO: 1773452 - RNA, 17 nt, Human
gaaacaacucuuugaga

SEQ ID NO: 1773453 - RNA, 20 nt, Human
gaaacaacucuuugagaaac

SEQ ID NO: 1773454 - RNA, 16 nt, Human
gaaaauuauuugcaua

SEQ ID NO: 1773455 - RNA, 17 nt, Human
gaaaaaauaacacacau

SEQ ID NO: 1773456 - RNA, 15 nt, Human
gaaaagaaagaaguu

SEQ ID NO: 1773457 - RNA, 21 nt, Human
gaaaagaaagaaguuauuuuc

SEQ ID NO: 1773458 - RNA, 14 nt, Human
gaaaaugucuugug

SEQ ID NO: 1773459 - RNA, 15 nt, Human
gaaaauuauuugcau

SEQ ID NO: 1773460 - RNA, 15 nt, Human
cuugaaggcccugcu

SEQ ID NO: 1773461 - RNA, 17 nt, Human
cuugaaggcccugcuga

SEQ ID NO: 1773462 - RNA, 18 nt, Human
cuugaaggcccugcugag

SEQ ID NO: 1773463 - RNA, 21 nt, Human
cuugaaggcccugcugaguca

SEQ ID NO: 1773464 - RNA, 21 nt, Human
cuugaauuguaacuguucuug

SEQ ID NO: 1773465 - RNA, 22 nt, Human
cuugaauuguaacuguucuuga

SEQ ID NO: 1773466 - RNA, 17 nt, Human
cuugaauuguaacuguu

SEQ ID NO: 1773467 - RNA, 20 nt, Human
cuugaauuguaacuguucuu

SEQ ID NO: 1773468 - RNA, 12 nt, Human
cuuggccugggc

SEQ ID NO: 1773469 - RNA, 13 nt, Human
cuuggccugggcc

SEQ ID NO: 1773470 - RNA, 14 nt, Human
cuuggccugggccg

SEQ ID NO: 1773471 - RNA, 13 nt, Human
cuucuucaccauu

SEQ ID NO: 1773472 - RNA, 17 nt, Human
cuuccugaaacuauauu

SEQ ID NO: 1773473 - RNA, 20 nt, Human
cuucucacauuuauauuuuu

SEQ ID NO: 1773474 - RNA, 13 nt, Human
cuucucacauuua

SEQ ID NO: 1773475 - RNA, 18 nt, Human
cuuccugaaacuauauuu

SEQ ID NO: 1773476 - RNA, 19 nt, Human
cuuccugaaacuauauuuu

SEQ ID NO: 1773477 - RNA, 23 nt, Human
cuugucucaaugcucauaacgga

SEQ ID NO: 1773478 - RNA, 19 nt, Human
cuugucucaaugcucauaa

SEQ ID NO: 1773479 - RNA, 18 nt, Human
cuugucucaaugcucaua

SEQ ID NO: 1773480 - RNA, 17 nt, Human
cuugucucaaugcucau

SEQ ID NO: 1773481 - RNA, 16 nt, Human
cuugucucaaugcuca

SEQ ID NO: 1773482 - RNA, 14 nt, Human
cuugucucaaugcu

SEQ ID NO: 1773483 - RNA, 17 nt, Human
cuuucagcagacugauc

SEQ ID NO: 1773484 - RNA, 23 nt, Human
cuuuaaugucacaggcaggucca

SEQ ID NO: 1773485 - RNA, 14 nt, Human
cuuuacccucuuug

SEQ ID NO: 1773486 - RNA, 17 nt, Human
cuuuacccucuuugcug

SEQ ID NO: 1773487 - RNA, 19 nt, Human
cuuuacccucuuugcugca

SEQ ID NO: 1773488 - RNA, 22 nt, Human
cuuucaccccagggccugagcc

SEQ ID NO: 1773489 - RNA, 23 nt, Human
cuuucaccccagggccugagccu

SEQ ID NO: 1773490 - RNA, 15 nt, Human
cuuucuacccagcga

SEQ ID NO: 1773491 - RNA, 16 nt, Human
cuuucuacccagcgag

SEQ ID NO: 1773492 - RNA, 13 nt, Human
cuguagaaauggu

SEQ ID NO: 1773493 - RNA, 19 nt, Human
cuguagaaaugguuguauu

SEQ ID NO: 1773494 - RNA, 17 nt, Human
cuguagaaaugguugua

SEQ ID NO: 1773495 - RNA, 20 nt, Human
cuguagaaaugguuguauua

SEQ ID NO: 1773496 - RNA, 24 nt, Human
cuguaggguaauuaguaacaugug

SEQ ID NO: 1773497 - RNA, 15 nt, Human
cuguaaccucuucag

SEQ ID NO: 1773498 - RNA, 19 nt, Human
cuguaaccucuucagaggc

SEQ ID NO: 1773499 - RNA, 20 nt, Human
cuguaaccucuucagaggcc

SEQ ID NO: 1773500 - RNA, 22 nt, Human
cuguaaccucuucagaggcccu

SEQ ID NO: 1773501 - RNA, 23 nt, Human
cuguaaccucuucagaggcccuc

SEQ ID NO: 1773502 - RNA, 15 nt, Human
cugucgcccagucug

SEQ ID NO: 1773503 - RNA, 16 nt, Human
cugucgcccagucugg

SEQ ID NO: 1773504 - RNA, 14 nt, Human
cuguuagggccuug

SEQ ID NO: 1773505 - RNA, 15 nt, Human
cuguuagggccuugg

SEQ ID NO: 1773506 - RNA, 23 nt, Human
cuguguccugaaacgcuccuuug

SEQ ID NO: 1773507 - RNA, 11 nt, Human
cuuagcuucag

SEQ ID NO: 1773508 - RNA, 13 nt, Human
cuuagcuucagga

SEQ ID NO: 1773509 - RNA, 14 nt, Human
cuuagcuucaggaa

SEQ ID NO: 1773510 - RNA, 15 nt, Human
cuuagcuucaggaac

SEQ ID NO: 1773511 - RNA, 16 nt, Human
cuuagcuucaggaacc

SEQ ID NO: 1773512 - RNA, 18 nt, Human
cuuagcuucaggaaccuc

SEQ ID NO: 1773513 - RNA, 21 nt, Human
cuuacccaggugggucccggc

SEQ ID NO: 1773514 - RNA, 22 nt, Human
cuuagccauuuuucaaagcaau

SEQ ID NO: 1773515 - RNA, 17 nt, Human
cuguucaauguuuaaug

SEQ ID NO: 1773516 - RNA, 14 nt, Human
cuguuggcuggggg

SEQ ID NO: 1773517 - RNA, 19 nt, Human
cuguuggcugggggccuca

SEQ ID NO: 1773518 - RNA, 22 nt, Human
cuguuggcugggggccucagug

SEQ ID NO: 1773519 - RNA, 23 nt, Human
cuguugggguggguauaaaagau

SEQ ID NO: 1773520 - RNA, 22 nt, Human
cuguugggguggguauaaaaga

SEQ ID NO: 1773521 - RNA, 14 nt, Human
cuuacaaaaacacu

SEQ ID NO: 1773522 - RNA, 15 nt, Human
cuuacaaaaacacuu

SEQ ID NO: 1773523 - RNA, 14 nt, Human
cuuaaaacaacacu

SEQ ID NO: 1773524 - RNA, 11 nt, Human
cugggacacag

SEQ ID NO: 1773525 - RNA, 14 nt, Human
cugggacuuccaug

SEQ ID NO: 1773526 - RNA, 17 nt, Human
cugggacuuccaugccu

SEQ ID NO: 1773527 - RNA, 19 nt, Human
cugggacuuccaugccuua

SEQ ID NO: 1773528 - RNA, 15 nt, Human
cuggccguccuuguc

SEQ ID NO: 1773529 - RNA, 22 nt, Human
cuggggcagcacccuauaaauc

SEQ ID NO: 1773530 - RNA, 15 nt, Human
cuggguucacugcaa

SEQ ID NO: 1773531 - RNA, 18 nt, Human
cuggguucacugcaaccu

SEQ ID NO: 1773532 - RNA, 20 nt, Human
cuggguucacugcaaccucc

SEQ ID NO: 1773533 - RNA, 21 nt, Human
cuggacugaccugguccacag

SEQ ID NO: 1773534 - RNA, 14 nt, Human
cuggacugaccugg

SEQ ID NO: 1773535 - RNA, 14 nt, Human
cuggaagcacagcu

SEQ ID NO: 1773536 - RNA, 11 nt, Human
cuggaagagcc

SEQ ID NO: 1773537 - RNA, 14 nt, Human
cuggaagagcccag

SEQ ID NO: 1773538 - RNA, 15 nt, Human
cuggaagagcccagu

SEQ ID NO: 1773539 - RNA, 22 nt, Human
cuggaagagcccagucuguuga

SEQ ID NO: 1773540 - RNA, 21 nt, Human
cugcuuuugucuaugggacuc

SEQ ID NO: 1773541 - RNA, 20 nt, Human
cugcuuuugucuaugggacu

SEQ ID NO: 1773542 - RNA, 14 nt, Human
cugccucccuugac

SEQ ID NO: 1773543 - RNA, 14 nt, Human
cugcuagcuagcuc

SEQ ID NO: 1773544 - RNA, 18 nt, Human
cugcuagcuagcucaacu

SEQ ID NO: 1773545 - RNA, 20 nt, Human
cugcuagcuagcucaacuag

SEQ ID NO: 1773546 - RNA, 21 nt, Human
cugcuagcuagcucaacuagu

SEQ ID NO: 1773547 - RNA, 16 nt, Human
cugcucaucauucucu

SEQ ID NO: 1773548 - RNA, 17 nt, Human
cugcucaucauucucug

SEQ ID NO: 1773549 - RNA, 18 nt, Human
cugcucaucauucucugu

SEQ ID NO: 1773550 - RNA, 22 nt, Human
cugcucaucauucucugucuca

SEQ ID NO: 1773551 - RNA, 20 nt, Human
cugccuccccucuccuuccu

SEQ ID NO: 1773552 - RNA, 17 nt, Human
cugccuguucagcucca

SEQ ID NO: 1773553 - RNA, 18 nt, Human
cugccuguucagcuccag

SEQ ID NO: 1773554 - RNA, 19 nt, Human
cugccuguucagcuccagc

SEQ ID NO: 1773555 - RNA, 15 nt, Human
cugccuguagcccac

SEQ ID NO: 1773556 - RNA, 19 nt, Human
cugccuguagcccacucug

SEQ ID NO: 1773557 - RNA, 20 nt, Human
cugccuguagcccacucugc

SEQ ID NO: 1773558 - RNA, 22 nt, Human
cugccuguagcccacucugcuc

SEQ ID NO: 1773559 - RNA, 23 nt, Human
cugccuguagcccacucugcucg

SEQ ID NO: 1773560 - RNA, 15 nt, Human
gugaccaaugucuug

SEQ ID NO: 1773561 - RNA, 16 nt, Human
gugaccaaugucuuga

SEQ ID NO: 1773562 - RNA, 23 nt, Human
gugacagaggcagccccauucug

SEQ ID NO: 1773563 - RNA, 16 nt, Human
gugacagaggcagccc

SEQ ID NO: 1773564 - RNA, 18 nt, Human
gugacagaggcagcccca

SEQ ID NO: 1773565 - RNA, 19 nt, Human
gugacagaggcagccccau

SEQ ID NO: 1773566 - RNA, 17 nt, Human
gugaaggcuucucucug

SEQ ID NO: 1773567 - RNA, 22 nt, Human
gugaaggcuucucucuguggga

SEQ ID NO: 1773568 - RNA, 14 nt, Human
gugaaggcuucucu

SEQ ID NO: 1773569 - RNA, 14 nt, Human
gugaaggcuggcau

SEQ ID NO: 1773570 - RNA, 12 nt, Human
gugaaggcuggc

SEQ ID NO: 1773571 - RNA, 13 nt, Human
gugaaggcuggca

SEQ ID NO: 1773572 - RNA, 19 nt, Human
gugaagaucucacucugcc

SEQ ID NO: 1773573 - RNA, 16 nt, Human
aacuauauuuugucau

SEQ ID NO: 1773574 - RNA, 17 nt, Human
aacuauauuuugucaua

SEQ ID NO: 1773575 - RNA, 12 nt, Human
gugagagcuggg

SEQ ID NO: 1773576 - RNA, 17 nt, Human
gugagaauaggcagccc

SEQ ID NO: 1773577 - RNA, 12 nt, Human
gugaccccaggu

SEQ ID NO: 1773578 - RNA, 21 nt, Human
gugagcacuaaggugugcucu

SEQ ID NO: 1773579 - RNA, 13 nt, Human
gugagagcugggu

SEQ ID NO: 1773580 - RNA, 16 nt, Human
gugagaggggaacaga

SEQ ID NO: 1773581 - RNA, 15 nt, Human
gugagucgaggacag

SEQ ID NO: 1773582 - RNA, 19 nt, Human
gugaguccuagagcuacag

SEQ ID NO: 1773583 - RNA, 17 nt, Human
aacucugucuucaccug

SEQ ID NO: 1773584 - RNA, 20 nt, Human
aacucugucuucaccugauu

SEQ ID NO: 1773585 - RNA, 16 nt, Human
aacucuguggcauuau

SEQ ID NO: 1773586 - RNA, 23 nt, Human
aacucugucuucaccugauucaa

SEQ ID NO: 1773587 - RNA, 18 nt, Human
gucucuuuaaugucacag

SEQ ID NO: 1773588 - RNA, 19 nt, Human
gucucuuuaaugucacagg

SEQ ID NO: 1773589 - RNA, 20 nt, Human
gucucuuuaaugucacaggc

SEQ ID NO: 1773590 - RNA, 22 nt, Human
gucucuuuaaugucacaggcag

SEQ ID NO: 1773591 - RNA, 23 nt, Human
gucucuuuaaugucacaggcagg

SEQ ID NO: 1773592 - RNA, 13 nt, Human
gucucuuguaauc

SEQ ID NO: 1773593 - RNA, 21 nt, Human
gucugacaggcaaugcuggcu

SEQ ID NO: 1773594 - RNA, 22 nt, Human
gucugacaggcaaugcuggcug

SEQ ID NO: 1773595 - RNA, 23 nt, Human
gucugacaggcaaugcuggcugu

SEQ ID NO: 1773596 - RNA, 20 nt, Human
gucuucaccugauucaacua

SEQ ID NO: 1773597 - RNA, 14 nt, Human
gucuucagccucuu

SEQ ID NO: 1773598 - RNA, 15 nt, Human
gucuuccauuugcaa

SEQ ID NO: 1773599 - RNA, 22 nt, Human
gucuucagccucuuucuguccc

SEQ ID NO: 1773600 - RNA, 23 nt, Human
gucuucagccucuuucugucccu

SEQ ID NO: 1773601 - RNA, 14 nt, Human
gucuuccacaaaga

SEQ ID NO: 1773602 - RNA, 15 nt, Human
gucuuccacaaagaa

SEQ ID NO: 1773603 - RNA, 16 nt, Human
gucuuccacaaagaaa

SEQ ID NO: 1773604 - RNA, 17 nt, Human
gucuuccacaaagaaaa

SEQ ID NO: 1773605 - RNA, 19 nt, Human
gucuuccacaaagaaaauu

SEQ ID NO: 1773606 - RNA, 23 nt, Human
aaccuuagauguucuaagucuuu

SEQ ID NO: 1773607 - RNA, 18 nt, Human
aaccuuguuauuucucag

SEQ ID NO: 1773608 - RNA, 17 nt, Human
aaccuuguuauuucuca

SEQ ID NO: 1773609 - RNA, 23 nt, Human
gucgcccagucuggaaugcagug

SEQ ID NO: 1773610 - RNA, 13 nt, Human
gucgcccagucug

SEQ ID NO: 1773611 - RNA, 14 nt, Human
gucgcccagucugg

SEQ ID NO: 1773612 - RNA, 14 nt, Human
gucgaggacaggga

SEQ ID NO: 1773613 - RNA, 18 nt, Human
gucgacuucgggcuggcc

SEQ ID NO: 1773614 - RNA, 17 nt, Human
guccugaucagagccgu

SEQ ID NO: 1773615 - RNA, 21 nt, Human
guccuugucucugggccacuu

SEQ ID NO: 1773616 - RNA, 13 nt, Human
aaccacaucuugc

SEQ ID NO: 1773617 - RNA, 14 nt, Human
gucuccauggcccu

SEQ ID NO: 1773618 - RNA, 14 nt, Human
gucucaaugcucau

SEQ ID NO: 1773619 - RNA, 12 nt, Human
gucucaaugcuc

SEQ ID NO: 1773620 - RNA, 22 nt, Human
gucucaaacucuugaccucagg

SEQ ID NO: 1773621 - RNA, 14 nt, Human
gucuaugggacuca

SEQ ID NO: 1773622 - RNA, 15 nt, Human
gucuaugggacucaa

SEQ ID NO: 1773623 - RNA, 17 nt, Human
gucucaaugcucauaac

SEQ ID NO: 1773624 - RNA, 21 nt, Human
guagccucuccuguauuuaac

SEQ ID NO: 1773625 - RNA, 12 nt, Human
guagccugcugg

SEQ ID NO: 1773626 - RNA, 19 nt, Human
gucccaccuuggcugcagg

SEQ ID NO: 1773627 - RNA, 20 nt, Human
gucccaccuuggcugcaggg

SEQ ID NO: 1773628 - RNA, 17 nt, Human
gucccaccuuggcugca

SEQ ID NO: 1773629 - RNA, 18 nt, Human
gucccaccuuggcugcag

SEQ ID NO: 1773630 - RNA, 13 nt, Human
guccaugggcaga

SEQ ID NO: 1773631 - RNA, 14 nt, Human
guccaugggcagag

SEQ ID NO: 1773632 - RNA, 16 nt, Human
guccaugggcagagcc

SEQ ID NO: 1773633 - RNA, 18 nt, Human
guccaugggcagagccca

SEQ ID NO: 1773634 - RNA, 23 nt, Human
guccaugggcagagcccaaggga

SEQ ID NO: 1773635 - RNA, 22 nt, Human
guccgaaagggacuuggaagcu

SEQ ID NO: 1773636 - RNA, 14 nt, Human
gucccggcucugug

SEQ ID NO: 1773637 - RNA, 15 nt, Human
gucccggcucugugg

SEQ ID NO: 1773638 - RNA, 16 nt, Human
gucccggcucuguggg

SEQ ID NO: 1773639 - RNA, 17 nt, Human
gucccggcucugugggu

SEQ ID NO: 1773640 - RNA, 21 nt, Human
guccgaaagggacuuggaagc

SEQ ID NO: 1773641 - RNA, 13 nt, Human
gucccccucuguc

SEQ ID NO: 1773642 - RNA, 19 nt, Human
gucccccucuguccaggca

SEQ ID NO: 1773643 - RNA, 21 nt, Human
gucccccucuguccaggcacu

SEQ ID NO: 1773644 - RNA, 22 nt, Human
guccccucccagagcuggugga

SEQ ID NO: 1773645 - RNA, 14 nt, Human
aacauauggucucc

SEQ ID NO: 1773646 - RNA, 13 nt, Human
guccuacccaccc

SEQ ID NO: 1773647 - RNA, 20 nt, Human
aacagacuggaagcacagcu

SEQ ID NO: 1773648 - RNA, 17 nt, Human
aacagucuucaggcaaa

SEQ ID NO: 1773649 - RNA, 13 nt, Human
aacagguugggau

SEQ ID NO: 1773650 - RNA, 17 nt, Human
aacagguugggauggga

SEQ ID NO: 1773651 - RNA, 16 nt, Human
guggguauaaaagaug

SEQ ID NO: 1773652 - RNA, 9 nt, Human
gugggucag

SEQ ID NO: 1773653 - RNA, 14 nt, Human
gugggucagaaccc

SEQ ID NO: 1773654 - RNA, 18 nt, Human
guggguccaugggcagag

SEQ ID NO: 1773655 - RNA, 20 nt, Human
guggguccaugggcagagcc

SEQ ID NO: 1773656 - RNA, 22 nt, Human
guggguccaugggcagagccca

SEQ ID NO: 1773657 - RNA, 15 nt, Human
guggguauaaaagau

SEQ ID NO: 1773658 - RNA, 13 nt, Human
guggguauaaaag

SEQ ID NO: 1773659 - RNA, 12 nt, Human
guggguauaaaa

SEQ ID NO: 1773660 - RNA, 10 nt, Human
gugggggugg

SEQ ID NO: 1773661 - RNA, 23 nt, Human
guggugugucccccucuguccag

SEQ ID NO: 1773662 - RNA, 18 nt, Human
gugggucccggcucugug

SEQ ID NO: 1773663 - RNA, 16 nt, Human
gugggaugaaccagcc

SEQ ID NO: 1773664 - RNA, 17 nt, Human
gugggaugaaccagccg

SEQ ID NO: 1773665 - RNA, 23 nt, Human
guggcuucccuuuucuuuguuca

SEQ ID NO: 1773666 - RNA, 14 nt, Human
aagagcccagucug

SEQ ID NO: 1773667 - RNA, 18 nt, Human
aagagcccagucuguuga

SEQ ID NO: 1773668 - RNA, 23 nt, Human
aagagcccagucuguugaguuag

SEQ ID NO: 1773669 - RNA, 17 nt, Human
aagacucauucuucugu

SEQ ID NO: 1773670 - RNA, 16 nt, Human
aagaccccaagaggaa

SEQ ID NO: 1773671 - RNA, 17 nt, Human
gugugaggccagggcag

SEQ ID NO: 1773672 - RNA, 13 nt, Human
gugugagucacca

SEQ ID NO: 1773673 - RNA, 18 nt, Human
gugugagucaccaagccc

SEQ ID NO: 1773674 - RNA, 21 nt, Human
gugucuugcaauggcagccuu

SEQ ID NO: 1773675 - RNA, 12 nt, Human
gugugaggccag

SEQ ID NO: 1773676 - RNA, 14 nt, Human
gugugaggccaggg

SEQ ID NO: 1773677 - RNA, 15 nt, Human
gugugaggccagggc

SEQ ID NO: 1773678 - RNA, 19 nt, Human
gugucuugcaauggcagcc

SEQ ID NO: 1773679 - RNA, 20 nt, Human
gugucccaaaaagaaaggag

SEQ ID NO: 1773680 - RNA, 18 nt, Human
guguccacgacugucucc

SEQ ID NO: 1773681 - RNA, 15 nt, Human
gugugugugucagcu

SEQ ID NO: 1773682 - RNA, 13 nt, Human
aagcaaacccaga

SEQ ID NO: 1773683 - RNA, 16 nt, Human
aagcaaacccagacgg

SEQ ID NO: 1773684 - RNA, 19 nt, Human
aagcaaacccagacggcuc

SEQ ID NO: 1773685 - RNA, 12 nt, Human
gugcacacacca

SEQ ID NO: 1773686 - RNA, 14 nt, Human
gugcacacaccaga

SEQ ID NO: 1773687 - RNA, 14 nt, Human
aacugcagggaaaa

SEQ ID NO: 1773688 - RNA, 23 nt, Human
aacugcagggaaaauuauuugca

SEQ ID NO: 1773689 - RNA, 18 nt, Human
gugcacguacacacacau

SEQ ID NO: 1773690 - RNA, 17 nt, Human
gugcacacaccagagcc

SEQ ID NO: 1773691 - RNA, 13 nt, Human
aacuuggauucuc

SEQ ID NO: 1773692 - RNA, 14 nt, Human
aacuuggauucucu

SEQ ID NO: 1773693 - RNA, 15 nt, Human
aagaaaauuccuaua

SEQ ID NO: 1773694 - RNA, 23 nt, Human
aagaaaaucagauggagcaugaa

SEQ ID NO: 1773695 - RNA, 14 nt, Human
guggacacagcucu

SEQ ID NO: 1773696 - RNA, 15 nt, Human
guggacacagcucuu

SEQ ID NO: 1773697 - RNA, 17 nt, Human
guggacacagcucuucu

SEQ ID NO: 1773698 - RNA, 24 nt, Human
guggacacagcucuucuccaggcu

SEQ ID NO: 1773699 - RNA, 23 nt, Human
guggacuaaaagauauaagugcu

SEQ ID NO: 1773700 - RNA, 15 nt, Human
guggacuaaaagaua

SEQ ID NO: 1773701 - RNA, 21 nt, Human
gugcuguauaaaaucagccaa

SEQ ID NO: 1773702 - RNA, 17 nt, Human
gugcuguauaaaaucag

SEQ ID NO: 1773703 - RNA, 16 nt, Human
gugcuguauaaaauca

SEQ ID NO: 1773704 - RNA, 11 nt, Human
aagaagggcug

SEQ ID NO: 1773705 - RNA, 16 nt, Human
aagaagggcugcauga

SEQ ID NO: 1773706 - RNA, 20 nt, Human
aagaagggcugcaugauguu

SEQ ID NO: 1773707 - RNA, 21 nt, Human
aagaagggcugcaugauguuu

SEQ ID NO: 1773708 - RNA, 22 nt, Human
aagaagggcugcaugauguuug

SEQ ID NO: 1773709 - RNA, 16 nt, Human
gugcuggagcacuggg

SEQ ID NO: 1773710 - RNA, 17 nt, Human
gugcuggagcacugggc

SEQ ID NO: 1773711 - RNA, 19 nt, Human
gugcuggagcacugggcuc

SEQ ID NO: 1773712 - RNA, 22 nt, Human
gugcuggagcacugggcucccg

SEQ ID NO: 1773713 - RNA, 15 nt, Human
gugcuguauaaaauc

SEQ ID NO: 1773714 - RNA, 13 nt, Human
gugcuguauaaaa

SEQ ID NO: 1773715 - RNA, 14 nt, Human
guggcagcugcggu

SEQ ID NO: 1773716 - RNA, 18 nt, Human
guggacucagaaagccaa

SEQ ID NO: 1773717 - RNA, 19 nt, Human
guggcagcugcgguccacc

SEQ ID NO: 1773718 - RNA, 17 nt, Human
guggcagcugcggucca

SEQ ID NO: 1773719 - RNA, 17 nt, Human
aagaauguuacugccuu

SEQ ID NO: 1773720 - RNA, 18 nt, Human
aagaauguuacugccuua

SEQ ID NO: 1773721 - RNA, 19 nt, Human
aagaauguuacugccuuaa

SEQ ID NO: 1773722 - RNA, 20 nt, Human
aagaauguuacugccuuaau

SEQ ID NO: 1773723 - RNA, 13 nt, Human
aagaauuuuuaaa

SEQ ID NO: 1773724 - RNA, 13 nt, Human
aagaauuccaaag

SEQ ID NO: 1773725 - RNA, 14 nt, Human
aagaauuccaaagc

SEQ ID NO: 1773726 - RNA, 16 nt, Human
aagaauuccaaagcaa

SEQ ID NO: 1773727 - RNA, 17 nt, Human
aauaaaaaaugaaaaga

SEQ ID NO: 1773728 - RNA, 19 nt, Human
aauaaagguaugaaagggu

SEQ ID NO: 1773729 - RNA, 12 nt, Human
aauaaaaauaau

SEQ ID NO: 1773730 - RNA, 15 nt, Human
aauaacaauaaaaga

SEQ ID NO: 1773731 - RNA, 15 nt, Human
uaaauaguuaauaua

SEQ ID NO: 1773732 - RNA, 13 nt, Human
uaacaagccaccc

SEQ ID NO: 1773733 - RNA, 16 nt, Human
uaaauaauuuccuaca

SEQ ID NO: 1773734 - RNA, 22 nt, Human
uaaauaauuuccuacacaaaug

SEQ ID NO: 1773735 - RNA, 22 nt, Human
uaaauagguucuucuuguucug

SEQ ID NO: 1773736 - RNA, 22 nt, Human
uaaauaaauuguauauucacuu

SEQ ID NO: 1773737 - RNA, 21 nt, Human
uaaauaaauuguauauucacu

SEQ ID NO: 1773738 - RNA, 20 nt, Human
uaaauaaauuguauauucac

SEQ ID NO: 1773739 - RNA, 19 nt, Human
uaaauaaauuguauauuca

SEQ ID NO: 1773740 - RNA, 18 nt, Human
uaaauaaauuguauauuc

SEQ ID NO: 1773741 - RNA, 17 nt, Human
uaaauaaauuguauauu

SEQ ID NO: 1773742 - RNA, 16 nt, Human
uaaauaaauuguauau

SEQ ID NO: 1773743 - RNA, 15 nt, Human
uaaauaaauuguaua

SEQ ID NO: 1773744 - RNA, 14 nt, Human
uaaauaaauuguau

SEQ ID NO: 1773745 - RNA, 13 nt, Human
uaaacucugcauc

SEQ ID NO: 1773746 - RNA, 17 nt, Human
uaaacucugcauccaga

SEQ ID NO: 1773747 - RNA, 18 nt, Human
uaaacucugcauccagag

SEQ ID NO: 1773748 - RNA, 15 nt, Human
uaaacuccuuccugg

SEQ ID NO: 1773749 - RNA, 16 nt, Human
uaaacuccuuccuggc

SEQ ID NO: 1773750 - RNA, 20 nt, Human
uaaacuccuuccuggccuga

SEQ ID NO: 1773751 - RNA, 21 nt, Human
uaaacuccuuccuggccugag

SEQ ID NO: 1773752 - RNA, 23 nt, Human
uaaacuagcauaucugccuuuau

SEQ ID NO: 1773753 - RNA, 22 nt, Human
uaaacuagcauaucugccuuua

SEQ ID NO: 1773754 - RNA, 21 nt, Human
uaaacuagcauaucugccuuu

SEQ ID NO: 1773755 - RNA, 19 nt, Human
uaaacuagcauaucugccu

SEQ ID NO: 1773756 - RNA, 17 nt, Human
uaaacuagcauaucugc

SEQ ID NO: 1773757 - RNA, 11 nt, Human
uaaaccuaccu

SEQ ID NO: 1773758 - RNA, 23 nt, Human
uaaagauacagaacucuuucaaa

SEQ ID NO: 1773759 - RNA, 19 nt, Human
uaaagagagaacaggacua

SEQ ID NO: 1773760 - RNA, 15 nt, Human
uaaagacuaaguagc

SEQ ID NO: 1773761 - RNA, 12 nt, Human
uaaagaauacuu

SEQ ID NO: 1773762 - RNA, 13 nt, Human
uaaagaauacuug

SEQ ID NO: 1773763 - RNA, 14 nt, Human
uaaagaauacuuga

SEQ ID NO: 1773764 - RNA, 15 nt, Human
uaaagaauacuugaa

SEQ ID NO: 1773765 - RNA, 16 nt, Human
uaaagaauacuugaac

SEQ ID NO: 1773766 - RNA, 17 nt, Human
uaaagaauacuugaacu

SEQ ID NO: 1773767 - RNA, 18 nt, Human
uaaagaauacuugaacuu

SEQ ID NO: 1773768 - RNA, 19 nt, Human
uaaagaauacuugaacuug

SEQ ID NO: 1773769 - RNA, 20 nt, Human
uaaagaauacuugaacuugu

SEQ ID NO: 1773770 - RNA, 16 nt, Human
guuuuuuuucagccac

SEQ ID NO: 1773771 - RNA, 18 nt, Human
aaguguuuuguaccagug

SEQ ID NO: 1773772 - RNA, 19 nt, Human
uaaaauuuuuuuagaaagc

SEQ ID NO: 1773773 - RNA, 18 nt, Human
uaaaauuuuuuuagaaag

SEQ ID NO: 1773774 - RNA, 17 nt, Human
uaaaauuuuuuuagaaa

SEQ ID NO: 1773775 - RNA, 16 nt, Human
uaaaauuuuuuuagaa

SEQ ID NO: 1773776 - RNA, 21 nt, Human
uaaaauuuuuuuagaaagcau

SEQ ID NO: 1773777 - RNA, 20 nt, Human
uaaaauuuuuuuagaaagca

SEQ ID NO: 1773778 - RNA, 16 nt, Human
uaaaauuuuuuuucau

SEQ ID NO: 1773779 - RNA, 17 nt, Human
uaaaauuuuuuuucaug

SEQ ID NO: 1773780 - RNA, 19 nt, Human
uaaaauuuuuuuucauguu

SEQ ID NO: 1773781 - RNA, 20 nt, Human
uaaaauuuuuuuucauguuu

SEQ ID NO: 1773782 - RNA, 23 nt, Human
uaaaauuuuuuuucauguuuuaa

SEQ ID NO: 1773783 - RNA, 17 nt, Human
uaaaauguucacuuuug

SEQ ID NO: 1773784 - RNA, 22 nt, Human
uaaaauguucacuuuugacaaa

SEQ ID NO: 1773785 - RNA, 19 nt, Human
aaggguaucaggugcugcc

SEQ ID NO: 1773786 - RNA, 22 nt, Human
aaggcuggcgagagucuggccc

SEQ ID NO: 1773787 - RNA, 15 nt, Human
aagggcccagagagg

SEQ ID NO: 1773788 - RNA, 13 nt, Human
aagggcccagaga

SEQ ID NO: 1773789 - RNA, 20 nt, Human
aaggcuggcgagagucuggc

SEQ ID NO: 1773790 - RNA, 14 nt, Human
guugguuggauaag

SEQ ID NO: 1773791 - RNA, 18 nt, Human
guuucuaauaaacuugga

SEQ ID NO: 1773792 - RNA, 15 nt, Human
aaggguuaaggccug

SEQ ID NO: 1773793 - RNA, 16 nt, Human
aaggguuaaggccuga

SEQ ID NO: 1773794 - RNA, 14 nt, Human
guuuuaagaggcag

SEQ ID NO: 1773795 - RNA, 16 nt, Human
guuuuaagaggcaggg

SEQ ID NO: 1773796 - RNA, 17 nt, Human
guuugccucugccucug

SEQ ID NO: 1773797 - RNA, 21 nt, Human
aaguacuucuccacccugcuc

SEQ ID NO: 1773798 - RNA, 22 nt, Human
aaguacuucuccacccugcucu

SEQ ID NO: 1773799 - RNA, 23 nt, Human
aaguacuucuccacccugcucuc

SEQ ID NO: 1773800 - RNA, 15 nt, Human
aaguacuguaagaau

SEQ ID NO: 1773801 - RNA, 17 nt, Human
aaguacuguaagaauaa

SEQ ID NO: 1773802 - RNA, 19 nt, Human
aaguacuguaagaauaauu

SEQ ID NO: 1773803 - RNA, 22 nt, Human
aaguacuguaagaauaauuuau

SEQ ID NO: 1773804 - RNA, 13 nt, Human
aagucacacagug

SEQ ID NO: 1773805 - RNA, 24 nt, Human
aagucacacaguauuacuucugcu

SEQ ID NO: 1773806 - RNA, 16 nt, Human
aagucaaccugccuga

SEQ ID NO: 1773807 - RNA, 15 nt, Human
guuuuuguucaaagc

SEQ ID NO: 1773808 - RNA, 18 nt, Human
guuuuugguuuuuaaaac

SEQ ID NO: 1773809 - RNA, 22 nt, Human
guuuuuuguuggaguguuucua

SEQ ID NO: 1773810 - RNA, 18 nt, Human
aagugagaauaggcagcc

SEQ ID NO: 1773811 - RNA, 22 nt, Human
aagucuuauauauuguagauaa

SEQ ID NO: 1773812 - RNA, 14 nt, Human
guugcccaggcugg

SEQ ID NO: 1773813 - RNA, 13 nt, Human
aaggccugaauca

SEQ ID NO: 1773814 - RNA, 17 nt, Human
aaggccuuuaaaauuuu

SEQ ID NO: 1773815 - RNA, 16 nt, Human
aaggccuuuaaaauuu

SEQ ID NO: 1773816 - RNA, 15 nt, Human
aaggccuuuaaaauu

SEQ ID NO: 1773817 - RNA, 11 nt, Human
aaggccuuuaa

SEQ ID NO: 1773818 - RNA, 23 nt, Human
guugcucuaugcuuuccaaaccu

SEQ ID NO: 1773819 - RNA, 22 nt, Human
guugcuaagccccagcaagcaa

SEQ ID NO: 1773820 - RNA, 17 nt, Human
guugcuaagccccagca

SEQ ID NO: 1773821 - RNA, 13 nt, Human
guugcugaauagg

SEQ ID NO: 1773822 - RNA, 15 nt, Human
guugcccaggcuggc

SEQ ID NO: 1773823 - RNA, 16 nt, Human
aaggcuaaaaagcaac

SEQ ID NO: 1773824 - RNA, 17 nt, Human
aaggcuaaaaagcaaca

SEQ ID NO: 1773825 - RNA, 16 nt, Human
guugcccaggcuggcg

SEQ ID NO: 1773826 - RNA, 17 nt, Human
guugcccaggcuggcgu

SEQ ID NO: 1773827 - RNA, 17 nt, Human
guugggcuggugucacc

SEQ ID NO: 1773828 - RNA, 23 nt, Human
guugggguggguauaaaagaugg

SEQ ID NO: 1773829 - RNA, 18 nt, Human
guugguuuugacuucaga

SEQ ID NO: 1773830 - RNA, 21 nt, Human
guugggguggguauaaaagau

SEQ ID NO: 1773831 - RNA, 21 nt, Human
aaggaagucaaagcaaggaaa

SEQ ID NO: 1773832 - RNA, 19 nt, Human
aaggagacaggcagagcug

SEQ ID NO: 1773833 - RNA, 14 nt, Human
aaggagacaggcag

SEQ ID NO: 1773834 - RNA, 16 nt, Human
aaggagacaggcagag

SEQ ID NO: 1773835 - RNA, 15 nt, Human
aaggagccaguuugc

SEQ ID NO: 1773836 - RNA, 17 nt, Human
aaggagccccauuccug

SEQ ID NO: 1773837 - RNA, 19 nt, Human
aaggagccccauuccuggg

SEQ ID NO: 1773838 - RNA, 20 nt, Human
aaggagcccuuaucugugcu

SEQ ID NO: 1773839 - RNA, 23 nt, Human
aaggaggauuccauuuggcagag

SEQ ID NO: 1773840 - RNA, 13 nt, Human
aaggauaaugaau

SEQ ID NO: 1773841 - RNA, 13 nt, Human
aagcucugcuccu

SEQ ID NO: 1773842 - RNA, 23 nt, Human
guuccccucagaaaaaaauucau

SEQ ID NO: 1773843 - RNA, 19 nt, Human
aaggaaaaaauaacaauga

SEQ ID NO: 1773844 - RNA, 16 nt, Human
aaggaaaaaauaacaa

SEQ ID NO: 1773845 - RNA, 15 nt, Human
aagcuccgcaggacu

SEQ ID NO: 1773846 - RNA, 16 nt, Human
aagcuccgcaggacuu

SEQ ID NO: 1773847 - RNA, 19 nt, Human
guguuuauuaaaauucuga

SEQ ID NO: 1773848 - RNA, 20 nt, Human
guugauauuucgaaagcugc

SEQ ID NO: 1773849 - RNA, 19 nt, Human
guugagcaugacagccugc

SEQ ID NO: 1773850 - RNA, 21 nt, Human
guugagcaugacagccugcag

SEQ ID NO: 1773851 - RNA, 20 nt, Human
guugaauuuuguucucuggg

SEQ ID NO: 1773852 - RNA, 21 nt, Human
guugaauuuuguucucuggga

SEQ ID NO: 1773853 - RNA, 22 nt, Human
guugaauuuuguucucugggag

SEQ ID NO: 1773854 - RNA, 16 nt, Human
guucucugaggacacu

SEQ ID NO: 1773855 - RNA, 13 nt, Human
guuccccuuccac

SEQ ID NO: 1773856 - RNA, 15 nt, Human
uacccucuuugcugc

SEQ ID NO: 1773857 - RNA, 16 nt, Human
uacccucuuugcugca

SEQ ID NO: 1773858 - RNA, 19 nt, Human
uacccucuuugcugcagag

SEQ ID NO: 1773859 - RNA, 16 nt, Human
uacccugagcugaggc

SEQ ID NO: 1773860 - RNA, 17 nt, Human
uacccugagcugaggca

SEQ ID NO: 1773861 - RNA, 18 nt, Human
uacccugagcugaggcag

SEQ ID NO: 1773862 - RNA, 12 nt, Human
uacccugccucc

SEQ ID NO: 1773863 - RNA, 15 nt, Human
uaccaugaaacaaag

SEQ ID NO: 1773864 - RNA, 15 nt, Human
aaugucacaggcagg

SEQ ID NO: 1773865 - RNA, 13 nt, Human
aauguugcuggau

SEQ ID NO: 1773866 - RNA, 19 nt, Human
uacauguaaaacauuaucu

SEQ ID NO: 1773867 - RNA, 24 nt, Human
aaugguuguauuagauguucucua

SEQ ID NO: 1773868 - RNA, 23 nt, Human
aaugguuguauuagauguucucu

SEQ ID NO: 1773869 - RNA, 21 nt, Human
aaugguuguauuagauguucu

SEQ ID NO: 1773870 - RNA, 19 nt, Human
aaugguuguauuagauguu

SEQ ID NO: 1773871 - RNA, 14 nt, Human
uacaauaaauugcu

SEQ ID NO: 1773872 - RNA, 16 nt, Human
uacaauaaauugcuaa

SEQ ID NO: 1773873 - RNA, 22 nt, Human
uacaauaaauugcuaauguugc

SEQ ID NO: 1773874 - RNA, 23 nt, Human
uacaauaaauugcuaauguugcu

SEQ ID NO: 1773875 - RNA, 23 nt, Human
uacagauuuugauagcaaagcga

SEQ ID NO: 1773876 - RNA, 22 nt, Human
uacagauuuugauagcaaagcg

SEQ ID NO: 1773877 - RNA, 21 nt, Human
uacagauuuugauagcaaagc

SEQ ID NO: 1773878 - RNA, 18 nt, Human
uacagauuuugauagcaa

SEQ ID NO: 1773879 - RNA, 17 nt, Human
uacagauuuugauagca

SEQ ID NO: 1773880 - RNA, 16 nt, Human
uacagauuuugauagc

SEQ ID NO: 1773881 - RNA, 15 nt, Human
uacagauuuugauag

SEQ ID NO: 1773882 - RNA, 14 nt, Human
uacaccuugcuuuu

SEQ ID NO: 1773883 - RNA, 19 nt, Human
uacaccuugcuuuuuuacu

SEQ ID NO: 1773884 - RNA, 14 nt, Human
aaugucacaggcag

SEQ ID NO: 1773885 - RNA, 13 nt, Human
aaugucacaggca

SEQ ID NO: 1773886 - RNA, 13 nt, Human
uacauacacugua

SEQ ID NO: 1773887 - RNA, 19 nt, Human
aauguagaauauucagaca

SEQ ID NO: 1773888 - RNA, 20 nt, Human
aauguagaauauucagacaa

SEQ ID NO: 1773889 - RNA, 20 nt, Human
uacagucuuccauuugcaag

SEQ ID NO: 1773890 - RNA, 22 nt, Human
uacagucuuccauuugcaaggg

SEQ ID NO: 1773891 - RNA, 14 nt, Human
uacagucuuccaca

SEQ ID NO: 1773892 - RNA, 15 nt, Human
uacagucuuccacaa

SEQ ID NO: 1773893 - RNA, 18 nt, Human
uacagucuuccauuugca

SEQ ID NO: 1773894 - RNA, 19 nt, Human
uacagucuuccauuugcaa

SEQ ID NO: 1773895 - RNA, 16 nt, Human
aaugcaaauccuaugu

SEQ ID NO: 1773896 - RNA, 21 nt, Human
uaauuagugcuaagugugaac

SEQ ID NO: 1773897 - RNA, 12 nt, Human
aaugcacaaaca

SEQ ID NO: 1773898 - RNA, 21 nt, Human
uacaagccauucuaaggaaau

SEQ ID NO: 1773899 - RNA, 13 nt, Human
uacaaaaacacuu

SEQ ID NO: 1773900 - RNA, 23 nt, Human
uacaaaaacacuucguucgcaga

SEQ ID NO: 1773901 - RNA, 16 nt, Human
uacaagcgugagccac

SEQ ID NO: 1773902 - RNA, 18 nt, Human
uacaagcgugagccacug

SEQ ID NO: 1773903 - RNA, 19 nt, Human
uacaagcgugagccacugc

SEQ ID NO: 1773904 - RNA, 20 nt, Human
uacaagcgugagccacugca

SEQ ID NO: 1773905 - RNA, 21 nt, Human
uacaagcgugagccacugcac

SEQ ID NO: 1773906 - RNA, 18 nt, Human
uaaugaaguuugaauguu

SEQ ID NO: 1773907 - RNA, 17 nt, Human
uaaugaaguuugaaugu

SEQ ID NO: 1773908 - RNA, 16 nt, Human
uaaugaaguuugaaug

SEQ ID NO: 1773909 - RNA, 15 nt, Human
uaaugaaguuugaau

SEQ ID NO: 1773910 - RNA, 16 nt, Human
uaaugaagaaagugga

SEQ ID NO: 1773911 - RNA, 17 nt, Human
uaaugaagaaaguggaa

SEQ ID NO: 1773912 - RNA, 14 nt, Human
uaaucuuucaaacc

SEQ ID NO: 1773913 - RNA, 16 nt, Human
uaaucuuucaaaccag

SEQ ID NO: 1773914 - RNA, 19 nt, Human
uaaucuuucaaaccagcuu

SEQ ID NO: 1773915 - RNA, 21 nt, Human
uaaucuuucaaaccagcuuca

SEQ ID NO: 1773916 - RNA, 22 nt, Human
uaaugaagaaaguggaaaacaa

SEQ ID NO: 1773917 - RNA, 23 nt, Human
uaaugaagaaaguggaaaacaag

SEQ ID NO: 1773918 - RNA, 14 nt, Human
uaaugaaguuugaa

SEQ ID NO: 1773919 - RNA, 13 nt, Human
uaaugaaguuuga

SEQ ID NO: 1773920 - RNA, 16 nt, Human
uaaugucacaggcagg

SEQ ID NO: 1773921 - RNA, 17 nt, Human
uaaugucacaggcaggu

SEQ ID NO: 1773922 - RNA, 15 nt, Human
uaaugucacaggcag

SEQ ID NO: 1773923 - RNA, 22 nt, Human
aaucuugacuacagucaggaaa

SEQ ID NO: 1773924 - RNA, 21 nt, Human
uaaugugaaaaugguccagga

SEQ ID NO: 1773925 - RNA, 14 nt, Human
aaugaaaaaaugua

SEQ ID NO: 1773926 - RNA, 16 nt, Human
uaaucuugaauuguaa

SEQ ID NO: 1773927 - RNA, 22 nt, Human
uaaucuugaauuguaacuguuc

SEQ ID NO: 1773928 - RNA, 21 nt, Human
aauacagucuuccauuugcaa

SEQ ID NO: 1773929 - RNA, 16 nt, Human
aauacagucuuccaca

SEQ ID NO: 1773930 - RNA, 18 nt, Human
aauacagucuuccacaaa

SEQ ID NO: 1773931 - RNA, 21 nt, Human
aauacagucuuccacaaagaa

SEQ ID NO: 1773932 - RNA, 16 nt, Human
uagaagucacacagua

SEQ ID NO: 1773933 - RNA, 24 nt, Human
uagaagcgauuuaaguuacaaugu

SEQ ID NO: 1773934 - RNA, 16 nt, Human
uagaagcugcaguggu

SEQ ID NO: 1773935 - RNA, 18 nt, Human
uagacagccaaaggcugg

SEQ ID NO: 1773936 - RNA, 20 nt, Human
uagacagccaaaggcuggcg

SEQ ID NO: 1773937 - RNA, 22 nt, Human
uagaacuuggauguaccugccc

SEQ ID NO: 1773938 - RNA, 15 nt, Human
uagaacuucauggau

SEQ ID NO: 1773939 - RNA, 21 nt, Human
uagaacuucauggaucagauc

SEQ ID NO: 1773940 - RNA, 15 nt, Human
uagaagucacacagu

SEQ ID NO: 1773941 - RNA, 22 nt, Human
aauuuguaaaguugguuggaua

SEQ ID NO: 1773942 - RNA, 13 nt, Human
aauuuuuccuaug

SEQ ID NO: 1773943 - RNA, 17 nt, Human
aauuuuuuugagacaga

SEQ ID NO: 1773944 - RNA, 20 nt, Human
uagagcuguauuaagccacu

SEQ ID NO: 1773945 - RNA, 13 nt, Human
uagaggaaaagaa

SEQ ID NO: 1773946 - RNA, 18 nt, Human
uagcaugucgucaaagcu

SEQ ID NO: 1773947 - RNA, 21 nt, Human
uagcaugucgucaaagcugaa

SEQ ID NO: 1773948 - RNA, 12 nt, Human
acaacacucaca

SEQ ID NO: 1773949 - RNA, 12 nt, Human
acaagccagcca

SEQ ID NO: 1773950 - RNA, 12 nt, Human
acaagccacccc

SEQ ID NO: 1773951 - RNA, 20 nt, Human
acaagcgugagccacugcac

SEQ ID NO: 1773952 - RNA, 21 nt, Human
acaagcgugagccacugcacc

SEQ ID NO: 1773953 - RNA, 18 nt, Human
acaagcacuaaacaaaga

SEQ ID NO: 1773954 - RNA, 19 nt, Human
acaagcaaacccagacggc

SEQ ID NO: 1773955 - RNA, 15 nt, Human
uacugguuggcuccc

SEQ ID NO: 1773956 - RNA, 12 nt, Human
uacucuuuccua

SEQ ID NO: 1773957 - RNA, 13 nt, Human
uacucuuuccuau

SEQ ID NO: 1773958 - RNA, 14 nt, Human
uacgucugacaggc

SEQ ID NO: 1773959 - RNA, 18 nt, Human
aauucuugguugaggaaa

SEQ ID NO: 1773960 - RNA, 19 nt, Human
aauucuugguugaggaaac

SEQ ID NO: 1773961 - RNA, 20 nt, Human
aauucuugguugaggaaaca

SEQ ID NO: 1773962 - RNA, 21 nt, Human
aauucuugccaaauauaaaua

SEQ ID NO: 1773963 - RNA, 22 nt, Human
aauuuagaaaaagaacaugcag

SEQ ID NO: 1773964 - RNA, 11 nt, Human
aauuucuacua

SEQ ID NO: 1773965 - RNA, 15 nt, Human
aauuucuacuuugaa

SEQ ID NO: 1773966 - RNA, 16 nt, Human
aauuucuacuuugaag

SEQ ID NO: 1773967 - RNA, 17 nt, Human
aauuucuacuuugaagu

SEQ ID NO: 1773968 - RNA, 12 nt, Human
aauuucugugcc

SEQ ID NO: 1773969 - RNA, 19 nt, Human
aauuucugugcccuccuga

SEQ ID NO: 1773970 - RNA, 20 nt, Human
aauuucugugcccuccugac

SEQ ID NO: 1773971 - RNA, 13 nt, Human
aauuugagugcuc

SEQ ID NO: 1773972 - RNA, 15 nt, Human
aauugcuaauguugc

SEQ ID NO: 1773973 - RNA, 16 nt, Human
aauugcuaauguugcu

SEQ ID NO: 1773974 - RNA, 22 nt, Human
aauuguuuggggaugagaaagg

SEQ ID NO: 1773975 - RNA, 21 nt, Human
aauugugugugcucugcuuca

SEQ ID NO: 1773976 - RNA, 17 nt, Human
uauguuuuaagaggcag

SEQ ID NO: 1773977 - RNA, 19 nt, Human
uauguuuuaagaggcaggg

SEQ ID NO: 1773978 - RNA, 14 nt, Human
uauuaaauaaaaug

SEQ ID NO: 1773979 - RNA, 23 nt, Human
uauuaaauaaaaugcacaaaacu

SEQ ID NO: 1773980 - RNA, 15 nt, Human
uauuagagugucuuu

SEQ ID NO: 1773981 - RNA, 18 nt, Human
uauuagagugucuuucca

SEQ ID NO: 1773982 - RNA, 22 nt, Human
uauuagauguucucuaucauuu

SEQ ID NO: 1773983 - RNA, 21 nt, Human
uauuagauguucucuaucauu

SEQ ID NO: 1773984 - RNA, 17 nt, Human
uauuagauguucucuau

SEQ ID NO: 1773985 - RNA, 15 nt, Human
uauuagauguucucu

SEQ ID NO: 1773986 - RNA, 14 nt, Human
uauuagauguucuc

SEQ ID NO: 1773987 - RNA, 12 nt, Human
uauuagauguuc

SEQ ID NO: 1773988 - RNA, 15 nt, Human
uauucagacaaaaug

SEQ ID NO: 1773989 - RNA, 16 nt, Human
uauucagacaaaaugg

SEQ ID NO: 1773990 - RNA, 17 nt, Human
uauucagacaaaaugga

SEQ ID NO: 1773991 - RNA, 21 nt, Human
uauucagacaaaauggauaca

SEQ ID NO: 1773992 - RNA, 13 nt, Human
uauucaaauuccu

SEQ ID NO: 1773993 - RNA, 15 nt, Human
acaguauuacuucug

SEQ ID NO: 1773994 - RNA, 16 nt, Human
acaguauuacuucugc

SEQ ID NO: 1773995 - RNA, 17 nt, Human
acaguauuacuucugcu

SEQ ID NO: 1773996 - RNA, 19 nt, Human
acaguauuacuucugcuac

SEQ ID NO: 1773997 - RNA, 21 nt, Human
acaggcugggcuucaguggca

SEQ ID NO: 1773998 - RNA, 14 nt, Human
acaggcugggcuuc

SEQ ID NO: 1773999 - RNA, 17 nt, Human
acaggcugggcuucagu

SEQ ID NO: 1774000 - RNA, 22 nt, Human
acagggcacaccgggcacucag

SEQ ID NO: 1774001 - RNA, 15 nt, Human
acagggcaccugcca

SEQ ID NO: 1774002 - RNA, 17 nt, Human
acagggcaccugccacc

SEQ ID NO: 1774003 - RNA, 16 nt, Human
acaguuaaggaauaua

SEQ ID NO: 1774004 - RNA, 14 nt, Human
acagucuuccauuu

SEQ ID NO: 1774005 - RNA, 19 nt, Human
acagucuuccauuugcaag

SEQ ID NO: 1774006 - RNA, 13 nt, Human
acagucuuccaca

SEQ ID NO: 1774007 - RNA, 21 nt, Human
acagucuuccacaaagaaaau

SEQ ID NO: 1774008 - RNA, 20 nt, Human
acagugaaagaaaauaacaa

SEQ ID NO: 1774009 - RNA, 15 nt, Human
uauuguccauugucc

SEQ ID NO: 1774010 - RNA, 17 nt, Human
uauuguccauuguccaa

SEQ ID NO: 1774011 - RNA, 20 nt, Human
uauuguauuuauucaauaaa

SEQ ID NO: 1774012 - RNA, 18 nt, Human
uauuguauuuauucaaua

SEQ ID NO: 1774013 - RNA, 17 nt, Human
uauuguauuuauucaau

SEQ ID NO: 1774014 - RNA, 16 nt, Human
uauuguauuuauucaa

SEQ ID NO: 1774015 - RNA, 15 nt, Human
uauuguauuuauuca

SEQ ID NO: 1774016 - RNA, 10 nt, Human
uauuguauuu

SEQ ID NO: 1774017 - RNA, 18 nt, Human
uauuucaaauuggagcuu

SEQ ID NO: 1774018 - RNA, 14 nt, Human
uauuucaaauugga

SEQ ID NO: 1774019 - RNA, 23 nt, Human
uauuuaauuuuuuugagacagag

SEQ ID NO: 1774020 - RNA, 21 nt, Human
uauuuaauuagugcuaagugu

SEQ ID NO: 1774021 - RNA, 19 nt, Human
uauuuaauuagugcuaagu

SEQ ID NO: 1774022 - RNA, 18 nt, Human
uauuuaauuagugcuaag

SEQ ID NO: 1774023 - RNA, 17 nt, Human
uauuuaauuagugcuaa

SEQ ID NO: 1774024 - RNA, 16 nt, Human
uauuuaauuagugcua

SEQ ID NO: 1774025 - RNA, 14 nt, Human
uauuuaccaaaaau

SEQ ID NO: 1774026 - RNA, 18 nt, Human
uauuuaccaaaaauuuug

SEQ ID NO: 1774027 - RNA, 14 nt, Human
uauugacucugggu

SEQ ID NO: 1774028 - RNA, 15 nt, Human
uauugacucuggguc

SEQ ID NO: 1774029 - RNA, 20 nt, Human
uauugacucuggguccuucc

SEQ ID NO: 1774030 - RNA, 22 nt, Human
uauugacucuggguccuuccug

SEQ ID NO: 1774031 - RNA, 13 nt, Human
uauugacaauaaa

SEQ ID NO: 1774032 - RNA, 19 nt, Human
uauugacaauaaaauauua

SEQ ID NO: 1774033 - RNA, 20 nt, Human
uauugacaauaaaauauuau

SEQ ID NO: 1774034 - RNA, 21 nt, Human
uauugacaauaaaauauuauu

SEQ ID NO: 1774035 - RNA, 13 nt, Human
uauugaauuuuuc

SEQ ID NO: 1774036 - RNA, 15 nt, Human
uauugaauuuuuccu

SEQ ID NO: 1774037 - RNA, 18 nt, Human
uauugaauuuuuccuaug

SEQ ID NO: 1774038 - RNA, 22 nt, Human
uauugaauuuuuccuaugcuau

SEQ ID NO: 1774039 - RNA, 14 nt, Human
uauugaaagaauua

SEQ ID NO: 1774040 - RNA, 18 nt, Human
uauugaaagaauuauccu

SEQ ID NO: 1774041 - RNA, 13 nt, Human
uauugaaauauua

SEQ ID NO: 1774042 - RNA, 21 nt, Human
uauugaaauauuauagagagu

SEQ ID NO: 1774043 - RNA, 22 nt, Human
uauucuuucgaaagaagaaaau

SEQ ID NO: 1774044 - RNA, 20 nt, Human
uauucuugauuuauuugcuu

SEQ ID NO: 1774045 - RNA, 12 nt, Human
uauucucugagc

SEQ ID NO: 1774046 - RNA, 18 nt, Human
uauucucugagcugugca

SEQ ID NO: 1774047 - RNA, 19 nt, Human
uauucucugagcugugcag

SEQ ID NO: 1774048 - RNA, 16 nt, Human
uauucuguuggccagu

SEQ ID NO: 1774049 - RNA, 22 nt, Human
uauucugcucuauuauauaaac

SEQ ID NO: 1774050 - RNA, 20 nt, Human
acaguucaauucucauuugu

SEQ ID NO: 1774051 - RNA, 21 nt, Human
acaguucaaaauucuaaaugu

SEQ ID NO: 1774052 - RNA, 22 nt, Human
acaguucaaaauucuaaaugua

SEQ ID NO: 1774053 - RNA, 22 nt, Human
acaguucggugagcuacaaaug

SEQ ID NO: 1774054 - RNA, 19 nt, Human
acaguucggugagcuacaa

SEQ ID NO: 1774055 - RNA, 23 nt, Human
acaguucggugagcuacaaaugc

SEQ ID NO: 1774056 - RNA, 22 nt, Human
uauaagauuccaaaaagcacau

SEQ ID NO: 1774057 - RNA, 13 nt, Human
acaccuagccagc

SEQ ID NO: 1774058 - RNA, 22 nt, Human
acaccuagccagcugucaaggg

SEQ ID NO: 1774059 - RNA, 23 nt, Human
acaccuagccagcugucaagggc

SEQ ID NO: 1774060 - RNA, 19 nt, Human
uauaccaguauaauugagu

SEQ ID NO: 1774061 - RNA, 20 nt, Human
acacucccaagguuggagcc

SEQ ID NO: 1774062 - RNA, 21 nt, Human
acacucccaagguuggagccc

SEQ ID NO: 1774063 - RNA, 20 nt, Human
uauagccuaggugacagagu

SEQ ID NO: 1774064 - RNA, 17 nt, Human
acacccagcccccacau

SEQ ID NO: 1774065 - RNA, 21 nt, Human
acaccuacucuaucagagaaa

SEQ ID NO: 1774066 - RNA, 12 nt, Human
acacccagcccc

SEQ ID NO: 1774067 - RNA, 19 nt, Human
acacccagcccacuucugc

SEQ ID NO: 1774068 - RNA, 20 nt, Human
acacccagcccacuucugcc

SEQ ID NO: 1774069 - RNA, 21 nt, Human
acacccagcccacuucugcca

SEQ ID NO: 1774070 - RNA, 23 nt, Human
uauaaaagauggggucuguaaaa

SEQ ID NO: 1774071 - RNA, 22 nt, Human
uauaaaagauggggucuguaaa

SEQ ID NO: 1774072 - RNA, 21 nt, Human
uauaaaagauggggucuguaa

SEQ ID NO: 1774073 - RNA, 20 nt, Human
uauaaaagauggggucugua

SEQ ID NO: 1774074 - RNA, 11 nt, Human
uauaaaagaug

SEQ ID NO: 1774075 - RNA, 15 nt, Human
uaguucuguagaaau

SEQ ID NO: 1774076 - RNA, 14 nt, Human
uaguucuguagaaa

SEQ ID NO: 1774077 - RNA, 13 nt, Human
uaguucuguagaa

SEQ ID NO: 1774078 - RNA, 18 nt, Human
uaguucuguagaaauggu

SEQ ID NO: 1774079 - RNA, 16 nt, Human
uaguucuguagaaaug

SEQ ID NO: 1774080 - RNA, 21 nt, Human
acaaggaagucaaagcaagga

SEQ ID NO: 1774081 - RNA, 19 nt, Human
uagucagaauuagcugcuu

SEQ ID NO: 1774082 - RNA, 14 nt, Human
acagacuggaagca

SEQ ID NO: 1774083 - RNA, 16 nt, Human
acagacagacacacac

SEQ ID NO: 1774084 - RNA, 14 nt, Human
acacucccuugggc

SEQ ID NO: 1774085 - RNA, 23 nt, Human
acagacacaggcccggcuccagg

SEQ ID NO: 1774086 - RNA, 19 nt, Human
uaucaauauaauguuuuua

SEQ ID NO: 1774087 - RNA, 14 nt, Human
uauauuuacaaaug

SEQ ID NO: 1774088 - RNA, 15 nt, Human
uauauuuacaaaugg

SEQ ID NO: 1774089 - RNA, 18 nt, Human
uaucuccggcucccagcc

SEQ ID NO: 1774090 - RNA, 19 nt, Human
uaucuccggcucccagccu

SEQ ID NO: 1774091 - RNA, 20 nt, Human
uaucuccggcucccagccuc

SEQ ID NO: 1774092 - RNA, 21 nt, Human
acagagugagacucugucuca

SEQ ID NO: 1774093 - RNA, 16 nt, Human
uaucuccggcucccag

SEQ ID NO: 1774094 - RNA, 14 nt, Human
uaucuccggcuccc

SEQ ID NO: 1774095 - RNA, 20 nt, Human
acagaguuuucacucuuauu

SEQ ID NO: 1774096 - RNA, 18 nt, Human
acagaguuuucacucuua

SEQ ID NO: 1774097 - RNA, 15 nt, Human
acagccuccccugcc

SEQ ID NO: 1774098 - RNA, 17 nt, Human
acagccuccccugccag

SEQ ID NO: 1774099 - RNA, 18 nt, Human
acagccuccccugccagg

SEQ ID NO: 1774100 - RNA, 19 nt, Human
acagccuccccugccaggg

SEQ ID NO: 1774101 - RNA, 21 nt, Human
acagccuccccugccagggca

SEQ ID NO: 1774102 - RNA, 22 nt, Human
acagccuccccugccagggcag

SEQ ID NO: 1774103 - RNA, 21 nt, Human
uaugaucacggcucacugcag

SEQ ID NO: 1774104 - RNA, 23 nt, Human
uaugaucacggcucacugcagcc

SEQ ID NO: 1774105 - RNA, 14 nt, Human
uaugaucacggcuc

SEQ ID NO: 1774106 - RNA, 16 nt, Human
acagccuugucccccu

SEQ ID NO: 1774107 - RNA, 23 nt, Human
uauggccuaaauuuauuaaauaa

SEQ ID NO: 1774108 - RNA, 16 nt, Human
acucuuauugcccacg

SEQ ID NO: 1774109 - RNA, 19 nt, Human
acucuuauugcccacgcug

SEQ ID NO: 1774110 - RNA, 12 nt, Human
uccucaauccag

SEQ ID NO: 1774111 - RNA, 13 nt, Human
uccucaauccagc

SEQ ID NO: 1774112 - RNA, 14 nt, Human
uccucaauccagcu

SEQ ID NO: 1774113 - RNA, 15 nt, Human
uccucacacuuuugg

SEQ ID NO: 1774114 - RNA, 22 nt, Human
uccucacacuuuuggaaccaug

SEQ ID NO: 1774115 - RNA, 14 nt, Human
uccuccccucucuu

SEQ ID NO: 1774116 - RNA, 17 nt, Human
uccuccccucucuuguc

SEQ ID NO: 1774117 - RNA, 12 nt, Human
uccucuccccag

SEQ ID NO: 1774118 - RNA, 17 nt, Human
uccucccugacuuuucu

SEQ ID NO: 1774119 - RNA, 18 nt, Human
uccucccugacuuuucug

SEQ ID NO: 1774120 - RNA, 20 nt, Human
uccucccugacuuuucugug

SEQ ID NO: 1774121 - RNA, 13 nt, Human
acucucuucuucu

SEQ ID NO: 1774122 - RNA, 15 nt, Human
acucucuucuucuca

SEQ ID NO: 1774123 - RNA, 17 nt, Human
acucucuucuucucaua

SEQ ID NO: 1774124 - RNA, 18 nt, Human
acucugaaauaucccggg

SEQ ID NO: 1774125 - RNA, 12 nt, Human
acucugaagcug

SEQ ID NO: 1774126 - RNA, 23 nt, Human
acucugaagcugacgaacuucca

SEQ ID NO: 1774127 - RNA, 13 nt, Human
acucugcuuguua

SEQ ID NO: 1774128 - RNA, 15 nt, Human
acucugcauccagag

SEQ ID NO: 1774129 - RNA, 20 nt, Human
acucugcauccagagauuca

SEQ ID NO: 1774130 - RNA, 17 nt, Human
uccuaggccucaacucc

SEQ ID NO: 1774131 - RNA, 22 nt, Human
uccuaggccucaacuccuccca

SEQ ID NO: 1774132 - RNA, 23 nt, Human
uccuaggccucaacuccucccau

SEQ ID NO: 1774133 - RNA, 18 nt, Human
uccuagguaggguuuaau

SEQ ID NO: 1774134 - RNA, 15 nt, Human
acucuccaggggucc

SEQ ID NO: 1774135 - RNA, 23 nt, Human
acucuccagggguccuaggccuc

SEQ ID NO: 1774136 - RNA, 16 nt, Human
acucggggugcuuccu

SEQ ID NO: 1774137 - RNA, 20 nt, Human
acucggggugcuuccuugua

SEQ ID NO: 1774138 - RNA, 14 nt, Human
ucccuguaaccucu

SEQ ID NO: 1774139 - RNA, 18 nt, Human
ucccuguaaccucuucag

SEQ ID NO: 1774140 - RNA, 19 nt, Human
ucccuguaaccucuucaga

SEQ ID NO: 1774141 - RNA, 22 nt, Human
ucccuguaaccucuucagaggc

SEQ ID NO: 1774142 - RNA, 23 nt, Human
ucccuguaaccucuucagaggcc

SEQ ID NO: 1774143 - RNA, 15 nt, Human
uccuaaaacaaauag

SEQ ID NO: 1774144 - RNA, 14 nt, Human
acucaugaggaggg

SEQ ID NO: 1774145 - RNA, 21 nt, Human
ucccucaucugucccuccggg

SEQ ID NO: 1774146 - RNA, 16 nt, Human
ucccucaucugucccu

SEQ ID NO: 1774147 - RNA, 12 nt, Human
uccccucagcuc

SEQ ID NO: 1774148 - RNA, 16 nt, Human
uccccuccggacuggu

SEQ ID NO: 1774149 - RNA, 17 nt, Human
uccccuccggacuggug

SEQ ID NO: 1774150 - RNA, 18 nt, Human
uccccuccggacuggugc

SEQ ID NO: 1774151 - RNA, 19 nt, Human
uccccuccggacuggugcc

SEQ ID NO: 1774152 - RNA, 20 nt, Human
uccccuccggacuggugccc

SEQ ID NO: 1774153 - RNA, 21 nt, Human
uccccuccggacuggugcccu

SEQ ID NO: 1774154 - RNA, 15 nt, Human
ucccgaauagcuggg

SEQ ID NO: 1774155 - RNA, 16 nt, Human
ucccgaauagcuggga

SEQ ID NO: 1774156 - RNA, 12 nt, Human
ucccgcggugcc

SEQ ID NO: 1774157 - RNA, 18 nt, Human
ucccgaauagcugggacu

SEQ ID NO: 1774158 - RNA, 18 nt, Human
ucccuauuuuucucuccu

SEQ ID NO: 1774159 - RNA, 20 nt, Human
ucccuauuuuucucuccugu

SEQ ID NO: 1774160 - RNA, 21 nt, Human
ucccuauuuuucucuccuguc

SEQ ID NO: 1774161 - RNA, 22 nt, Human
ucccuauuuuucucuccugucc

SEQ ID NO: 1774162 - RNA, 19 nt, Human
acuauguugcccaggcagg

SEQ ID NO: 1774163 - RNA, 20 nt, Human
acuauguugcccaggcaggu

SEQ ID NO: 1774164 - RNA, 23 nt, Human
acuauguugcccaggcaggucuu

SEQ ID NO: 1774165 - RNA, 18 nt, Human
acuauguugcccaggcag

SEQ ID NO: 1774166 - RNA, 16 nt, Human
uccccaggcaccucac

SEQ ID NO: 1774167 - RNA, 17 nt, Human
acuauagccuaggugac

SEQ ID NO: 1774168 - RNA, 18 nt, Human
acuauagccuaggugaca

SEQ ID NO: 1774169 - RNA, 14 nt, Human
uccccaaauccgaa

SEQ ID NO: 1774170 - RNA, 19 nt, Human
uccccaaauccgaaccucc

SEQ ID NO: 1774171 - RNA, 16 nt, Human
ucccauagucccugcc

SEQ ID NO: 1774172 - RNA, 18 nt, Human
ucccauagucccugccac

SEQ ID NO: 1774173 - RNA, 13 nt, Human
ucccaguuuuguu

SEQ ID NO: 1774174 - RNA, 18 nt, Human
ucccauagauacucucuu

SEQ ID NO: 1774175 - RNA, 19 nt, Human
ucccauagauacucucuuc

SEQ ID NO: 1774176 - RNA, 21 nt, Human
ucccauagauacucucuucuu

SEQ ID NO: 1774177 - RNA, 15 nt, Human
acuacagucaggaaa

SEQ ID NO: 1774178 - RNA, 17 nt, Human
ucccaggugcagccaga

SEQ ID NO: 1774179 - RNA, 20 nt, Human
acguuuuuaauauaaagccu

SEQ ID NO: 1774180 - RNA, 11 nt, Human
acuaaaagaua

SEQ ID NO: 1774181 - RNA, 15 nt, Human
uccagcucaccagcc

SEQ ID NO: 1774182 - RNA, 14 nt, Human
uccagcucaccagc

SEQ ID NO: 1774183 - RNA, 13 nt, Human
acuaaccacgcug

SEQ ID NO: 1774184 - RNA, 23 nt, Human
acuacaggugugagucaccaagc

SEQ ID NO: 1774185 - RNA, 23 nt, Human
acuaaaagauauaagugcuguau

SEQ ID NO: 1774186 - RNA, 21 nt, Human
acuaaaagauauaagugcugu

SEQ ID NO: 1774187 - RNA, 20 nt, Human
acuaaaagauauaagugcug

SEQ ID NO: 1774188 - RNA, 19 nt, Human
acuaaaagauauaagugcu

SEQ ID NO: 1774189 - RNA, 16 nt, Human
acuaaaagauauaagu

SEQ ID NO: 1774190 - RNA, 22 nt, Human
acuggcugcaaaggguaucagg

SEQ ID NO: 1774191 - RNA, 19 nt, Human
acuggcgacacguagcagc

SEQ ID NO: 1774192 - RNA, 14 nt, Human
uccuuccugaaacu

SEQ ID NO: 1774193 - RNA, 23 nt, Human
uccuucauaugaaaggugccaug

SEQ ID NO: 1774194 - RNA, 22 nt, Human
uccuucaucaugaguucugcug

SEQ ID NO: 1774195 - RNA, 22 nt, Human
acugcucagaacuugcugcugu

SEQ ID NO: 1774196 - RNA, 13 nt, Human
acugccuuuagaa

SEQ ID NO: 1774197 - RNA, 19 nt, Human
acugccuuuagaaaauaua

SEQ ID NO: 1774198 - RNA, 14 nt, Human
acugcuugaggaaa

SEQ ID NO: 1774199 - RNA, 15 nt, Human
acugcuugaggaaaa

SEQ ID NO: 1774200 - RNA, 18 nt, Human
acugcuugaggaaaacaa

SEQ ID NO: 1774201 - RNA, 14 nt, Human
ucgaggacagggag

SEQ ID NO: 1774202 - RNA, 17 nt, Human
ucgaggacagggaggug

SEQ ID NO: 1774203 - RNA, 10 nt, Human
ucgaggccug

SEQ ID NO: 1774204 - RNA, 11 nt, Human
ucgaggccuga

SEQ ID NO: 1774205 - RNA, 12 nt, Human
ucgaggccugaa

SEQ ID NO: 1774206 - RNA, 15 nt, Human
ucgaggccugaagcc

SEQ ID NO: 1774207 - RNA, 22 nt, Human
ucgccuuagcacuaccacuccu

SEQ ID NO: 1774208 - RNA, 13 nt, Human
ucgcucccuccca

SEQ ID NO: 1774209 - RNA, 14 nt, Human
ucgcucccucccag

SEQ ID NO: 1774210 - RNA, 23 nt, Human
ucgccuuucccaggugcuacacc

SEQ ID NO: 1774211 - RNA, 12 nt, Human
ucgccuuuccuc

SEQ ID NO: 1774212 - RNA, 13 nt, Human
ucgccuuuccucu

SEQ ID NO: 1774213 - RNA, 21 nt, Human
ucgccuuuccucucuauauuu

SEQ ID NO: 1774214 - RNA, 23 nt, Human
uccuuuaguaaaacuccgaguga

SEQ ID NO: 1774215 - RNA, 19 nt, Human
uccuuuaggguucugccuc

SEQ ID NO: 1774216 - RNA, 20 nt, Human
uccuuuaggguucugccucu

SEQ ID NO: 1774217 - RNA, 13 nt, Human
uccuuccuggccu

SEQ ID NO: 1774218 - RNA, 14 nt, Human
uccuuccuggccug

SEQ ID NO: 1774219 - RNA, 15 nt, Human
uccuuccuggccuga

SEQ ID NO: 1774220 - RNA, 17 nt, Human
uccuuccuggccugaga

SEQ ID NO: 1774221 - RNA, 17 nt, Human
uccuuucaccccagggc

SEQ ID NO: 1774222 - RNA, 15 nt, Human
uccuuucaccacaug

SEQ ID NO: 1774223 - RNA, 18 nt, Human
uccuuucaccccagggcc

SEQ ID NO: 1774224 - RNA, 19 nt, Human
uccuuucaccccagggccu

SEQ ID NO: 1774225 - RNA, 21 nt, Human
uccuuucaccccagggccuga

SEQ ID NO: 1774226 - RNA, 14 nt, Human
ucgaacuggcugca

SEQ ID NO: 1774227 - RNA, 13 nt, Human
ucgaacuggcugc

SEQ ID NO: 1774228 - RNA, 15 nt, Human
ucgaacuggcugcaa

SEQ ID NO: 1774229 - RNA, 14 nt, Human
uccuuuccuccucu

SEQ ID NO: 1774230 - RNA, 19 nt, Human
acuguaagaauaauuuaua

SEQ ID NO: 1774231 - RNA, 20 nt, Human
acuguaagaauaauuuauag

SEQ ID NO: 1774232 - RNA, 22 nt, Human
acuguaagaauaauuuauagua

SEQ ID NO: 1774233 - RNA, 23 nt, Human
acuguaagaauaauuuauaguaa

SEQ ID NO: 1774234 - RNA, 20 nt, Human
acuggguacuuguggacaca

SEQ ID NO: 1774235 - RNA, 23 nt, Human
acuggguacuuguggacacagcu

SEQ ID NO: 1774236 - RNA, 19 nt, Human
acuggguacuuguggacac

SEQ ID NO: 1774237 - RNA, 12 nt, Human
ucgcuccugugu

SEQ ID NO: 1774238 - RNA, 15 nt, Human
ucgcucccucccagg

SEQ ID NO: 1774239 - RNA, 17 nt, Human
ucgcucccucccaggac

SEQ ID NO: 1774240 - RNA, 13 nt, Human
ucgcuccuguguc

SEQ ID NO: 1774241 - RNA, 12 nt, Human
acuguacagggg

SEQ ID NO: 1774242 - RNA, 16 nt, Human
acugcaaccuccgccu

SEQ ID NO: 1774243 - RNA, 22 nt, Human
acugcaaccuccgccucuuggg

SEQ ID NO: 1774244 - RNA, 13 nt, Human
acugcaaccuccg

SEQ ID NO: 1774245 - RNA, 14 nt, Human
acugcaaccuccgc

SEQ ID NO: 1774246 - RNA, 23 nt, Human
acugagggcagucgauagagcug

SEQ ID NO: 1774247 - RNA, 15 nt, Human
uccucuccccagcaa

SEQ ID NO: 1774248 - RNA, 12 nt, Human
acugagggcagu

SEQ ID NO: 1774249 - RNA, 19 nt, Human
uccugccucagccucccaa

SEQ ID NO: 1774250 - RNA, 21 nt, Human
uccugccucgaacuggcugca

SEQ ID NO: 1774251 - RNA, 20 nt, Human
uccugccucgaacuggcugc

SEQ ID NO: 1774252 - RNA, 21 nt, Human
uccugcuaccucccuugccuu

SEQ ID NO: 1774253 - RNA, 23 nt, Human
uccugcuaccucccuugccuuuc

SEQ ID NO: 1774254 - RNA, 18 nt, Human
uccugugugugcgccuac

SEQ ID NO: 1774255 - RNA, 13 nt, Human
uccugugugugcg

SEQ ID NO: 1774256 - RNA, 14 nt, Human
uccugugugugcgc

SEQ ID NO: 1774257 - RNA, 23 nt, Human
uccugugucuugcaauggcagcc

SEQ ID NO: 1774258 - RNA, 24 nt, Human
uccugugucuugcaauggcagccu

SEQ ID NO: 1774259 - RNA, 22 nt, Human
uccuguguguccaaaacugccu

SEQ ID NO: 1774260 - RNA, 12 nt, Human
uccuguguccug

SEQ ID NO: 1774261 - RNA, 10 nt, Human
acugcaggga

SEQ ID NO: 1774262 - RNA, 23 nt, Human
acugcagggaaaauuauuugcau

SEQ ID NO: 1774263 - RNA, 23 nt, Human
acugcagccucaaccuccugggc

SEQ ID NO: 1774264 - RNA, 19 nt, Human
acugcagccucaaccuccu

SEQ ID NO: 1774265 - RNA, 19 nt, Human
acugcagaaacccugagca

SEQ ID NO: 1774266 - RNA, 21 nt, Human
acugcagccucaaccuccugg

SEQ ID NO: 1774267 - RNA, 22 nt, Human
acugcagccucaaccuccuggg

SEQ ID NO: 1774268 - RNA, 16 nt, Human
uccugggcccucucug

SEQ ID NO: 1774269 - RNA, 17 nt, Human
uccugggcccucucugc

SEQ ID NO: 1774270 - RNA, 21 nt, Human
uccugggcccucucugcucug

SEQ ID NO: 1774271 - RNA, 23 nt, Human
uccugggcccucucugcucugcg

SEQ ID NO: 1774272 - RNA, 19 nt, Human
uccugugccuccaucagcu

SEQ ID NO: 1774273 - RNA, 23 nt, Human
uccuggguuuuguauucucugag

SEQ ID NO: 1774274 - RNA, 17 nt, Human
uccuggguuuuguauuc

SEQ ID NO: 1774275 - RNA, 20 nt, Human
uccuggguuuuguauucucu

SEQ ID NO: 1774276 - RNA, 21 nt, Human
uccuggguuuuguauucucug

SEQ ID NO: 1774277 - RNA, 22 nt, Human
uccuggguuuuguauucucuga

SEQ ID NO: 1774278 - RNA, 16 nt, Human
uccugucuuuacaaau

SEQ ID NO: 1774279 - RNA, 15 nt, Human
uccaaauaaaauguu

SEQ ID NO: 1774280 - RNA, 11 nt, Human
uccaagcuggu

SEQ ID NO: 1774281 - RNA, 17 nt, Human
uccaccaagaaagcagg

SEQ ID NO: 1774282 - RNA, 21 nt, Human
ucauuugagcagggcucagcg

SEQ ID NO: 1774283 - RNA, 15 nt, Human
ucauuugagucucuu

SEQ ID NO: 1774284 - RNA, 16 nt, Human
ucauuugagucucuua

SEQ ID NO: 1774285 - RNA, 19 nt, Human
ucauuugagcagggcucag

SEQ ID NO: 1774286 - RNA, 15 nt, Human
uccacugagggcagu

SEQ ID NO: 1774287 - RNA, 19 nt, Human
uccacguucugcucaucau

SEQ ID NO: 1774288 - RNA, 20 nt, Human
uccacguucugcucaucauu

SEQ ID NO: 1774289 - RNA, 21 nt, Human
uccacguucugcucaucauuc

SEQ ID NO: 1774290 - RNA, 14 nt, Human
uccagacccggcug

SEQ ID NO: 1774291 - RNA, 15 nt, Human
accugguccacaggg

SEQ ID NO: 1774292 - RNA, 16 nt, Human
accugguccacagggc

SEQ ID NO: 1774293 - RNA, 17 nt, Human
accugguccacagggca

SEQ ID NO: 1774294 - RNA, 18 nt, Human
accugguccacagggcac

SEQ ID NO: 1774295 - RNA, 16 nt, Human
accuggugcugccucu

SEQ ID NO: 1774296 - RNA, 16 nt, Human
accuugacagggcaca

SEQ ID NO: 1774297 - RNA, 15 nt, Human
accuugacagggcac

SEQ ID NO: 1774298 - RNA, 14 nt, Human
accuugacagggca

SEQ ID NO: 1774299 - RNA, 19 nt, Human
accuuccauggcucuuuuu

SEQ ID NO: 1774300 - RNA, 23 nt, Human
accuccuccccccuccucugaaa

SEQ ID NO: 1774301 - RNA, 19 nt, Human
ucauccacugugccaugug

SEQ ID NO: 1774302 - RNA, 21 nt, Human
ucauccacugugccaugugcc

SEQ ID NO: 1774303 - RNA, 23 nt, Human
ucauccacugugccaugugccag

SEQ ID NO: 1774304 - RNA, 13 nt, Human
ucaugagccugcu

SEQ ID NO: 1774305 - RNA, 14 nt, Human
ucaugagccugcug

SEQ ID NO: 1774306 - RNA, 16 nt, Human
ucaugagccugcugga

SEQ ID NO: 1774307 - RNA, 19 nt, Human
ucaugagccugcuggaagc

SEQ ID NO: 1774308 - RNA, 20 nt, Human
ucaugaggaggggccccccu

SEQ ID NO: 1774309 - RNA, 14 nt, Human
ucaugaggggagag

SEQ ID NO: 1774310 - RNA, 15 nt, Human
ucaugaguucugcug

SEQ ID NO: 1774311 - RNA, 16 nt, Human
ucauguuuuaacaaaa

SEQ ID NO: 1774312 - RNA, 18 nt, Human
ucauguuuuaacaaaaac

SEQ ID NO: 1774313 - RNA, 22 nt, Human
ucauguugcacacccacucagc

SEQ ID NO: 1774314 - RNA, 14 nt, Human
ucauuaaauuaccu

SEQ ID NO: 1774315 - RNA, 13 nt, Human
ucaugucuggcua

SEQ ID NO: 1774316 - RNA, 16 nt, Human
ucaugucuucucacaa

SEQ ID NO: 1774317 - RNA, 12 nt, Human
ucaugugugucc

SEQ ID NO: 1774318 - RNA, 16 nt, Human
ucauguguguccacga

SEQ ID NO: 1774319 - RNA, 21 nt, Human
ucauguguguccacgacuguc

SEQ ID NO: 1774320 - RNA, 23 nt, Human
ucauguguguccacgacugucuc

SEQ ID NO: 1774321 - RNA, 18 nt, Human
accucgcuggacucucag

SEQ ID NO: 1774322 - RNA, 13 nt, Human
accucgcccucuc

SEQ ID NO: 1774323 - RNA, 14 nt, Human
accucgcccucucc

SEQ ID NO: 1774324 - RNA, 15 nt, Human
accucgcccucuccu

SEQ ID NO: 1774325 - RNA, 14 nt, Human
accucgaguacugu

SEQ ID NO: 1774326 - RNA, 15 nt, Human
accucgaguacugug

SEQ ID NO: 1774327 - RNA, 16 nt, Human
accucgaguacugugg

SEQ ID NO: 1774328 - RNA, 18 nt, Human
accucgaguacugugggc

SEQ ID NO: 1774329 - RNA, 19 nt, Human
accucgaguacugugggca

SEQ ID NO: 1774330 - RNA, 22 nt, Human
accucgaguacugugggcaauu

SEQ ID NO: 1774331 - RNA, 14 nt, Human
accucgcuggacuc

SEQ ID NO: 1774332 - RNA, 16 nt, Human
accucgcuggacucuc

SEQ ID NO: 1774333 - RNA, 17 nt, Human
accucgcccucuccuuu

SEQ ID NO: 1774334 - RNA, 22 nt, Human
accucgcccucuccuuuguucc

SEQ ID NO: 1774335 - RNA, 17 nt, Human
ucauuggcuuuauccuc

SEQ ID NO: 1774336 - RNA, 16 nt, Human
ucauuggcuuuauccu

SEQ ID NO: 1774337 - RNA, 14 nt, Human
ucauuggcuuuauc

SEQ ID NO: 1774338 - RNA, 11 nt, Human
ucauuggcuuu

SEQ ID NO: 1774339 - RNA, 24 nt, Human
ucauuguaacacuguuuauugaaa

SEQ ID NO: 1774340 - RNA, 20 nt, Human
accucugaaacccuggacca

SEQ ID NO: 1774341 - RNA, 16 nt, Human
accucuaguagcugaa

SEQ ID NO: 1774342 - RNA, 20 nt, Human
ucauauguagccuucacaca

SEQ ID NO: 1774343 - RNA, 22 nt, Human
ucauauguagccuucacacaga

SEQ ID NO: 1774344 - RNA, 12 nt, Human
acccuuuuccag

SEQ ID NO: 1774345 - RNA, 20 nt, Human
accuccgccucuuggguuca

SEQ ID NO: 1774346 - RNA, 13 nt, Human
accuccccagccu

SEQ ID NO: 1774347 - RNA, 14 nt, Human
accuccccagccug

SEQ ID NO: 1774348 - RNA, 15 nt, Human
accuccccagccugc

SEQ ID NO: 1774349 - RNA, 16 nt, Human
accuccccagccugcg

SEQ ID NO: 1774350 - RNA, 17 nt, Human
accuccccagccugcgc

SEQ ID NO: 1774351 - RNA, 22 nt, Human
accuccccagccugcgccugcu

SEQ ID NO: 1774352 - RNA, 13 nt, Human
accuagccuuaga

SEQ ID NO: 1774353 - RNA, 13 nt, Human
accuagccagcug

SEQ ID NO: 1774354 - RNA, 16 nt, Human
accgugguaugucugc

SEQ ID NO: 1774355 - RNA, 17 nt, Human
accgugguaugucugcc

SEQ ID NO: 1774356 - RNA, 20 nt, Human
accgugguaugucugccaug

SEQ ID NO: 1774357 - RNA, 13 nt, Human
accgugucaagcu

SEQ ID NO: 1774358 - RNA, 14 nt, Human
accgugucaagcug

SEQ ID NO: 1774359 - RNA, 17 nt, Human
accgugucaagcugcuc

SEQ ID NO: 1774360 - RNA, 19 nt, Human
accgugucaagcugcucug

SEQ ID NO: 1774361 - RNA, 14 nt, Human
accgugggcucccu

SEQ ID NO: 1774362 - RNA, 16 nt, Human
accgugggcucccuga

SEQ ID NO: 1774363 - RNA, 14 nt, Human
acccccagccugcu

SEQ ID NO: 1774364 - RNA, 15 nt, Human
acccccagccugcua

SEQ ID NO: 1774365 - RNA, 16 nt, Human
acccaguccacaaaau

SEQ ID NO: 1774366 - RNA, 13 nt, Human
acccagguggguc

SEQ ID NO: 1774367 - RNA, 14 nt, Human
acccaggugggucc

SEQ ID NO: 1774368 - RNA, 16 nt, Human
acccaggugggucccg

SEQ ID NO: 1774369 - RNA, 18 nt, Human
acccaggugggucccggc

SEQ ID NO: 1774370 - RNA, 19 nt, Human
ucagaucuuaauauaaauu

SEQ ID NO: 1774371 - RNA, 20 nt, Human
ucagaucuuaauauaaauuc

SEQ ID NO: 1774372 - RNA, 21 nt, Human
ucagaucuuaauauaaauuca

SEQ ID NO: 1774373 - RNA, 24 nt, Human
ucagaucuuaauauaaauucacuu

SEQ ID NO: 1774374 - RNA, 13 nt, Human
ucagaagacacug

SEQ ID NO: 1774375 - RNA, 13 nt, Human
ucagaacuugcug

SEQ ID NO: 1774376 - RNA, 16 nt, Human
ucagaacuugcugcug

SEQ ID NO: 1774377 - RNA, 17 nt, Human
ucagaacuugcugcugu

SEQ ID NO: 1774378 - RNA, 18 nt, Human
ucagaacuugcugcuguc

SEQ ID NO: 1774379 - RNA, 19 nt, Human
ucagaacuugcugcugucu

SEQ ID NO: 1774380 - RNA, 14 nt, Human
ucagaacugugcca

SEQ ID NO: 1774381 - RNA, 15 nt, Human
ucagaacugugccac

SEQ ID NO: 1774382 - RNA, 18 nt, Human
ucagaacccuuggcuugc

SEQ ID NO: 1774383 - RNA, 20 nt, Human
ucagaacccuuggcuugccc

SEQ ID NO: 1774384 - RNA, 24 nt, Human
ucagaacccuuggcuugcccacgu

SEQ ID NO: 1774385 - RNA, 18 nt, Human
ucagaugauuuccccccu

SEQ ID NO: 1774386 - RNA, 21 nt, Human
ucagaugauuuccccccuccg

SEQ ID NO: 1774387 - RNA, 20 nt, Human
accccuucgcuccugugucu

SEQ ID NO: 1774388 - RNA, 15 nt, Human
acccuucaucuuccu

SEQ ID NO: 1774389 - RNA, 17 nt, Human
acccuucaucuuccugu

SEQ ID NO: 1774390 - RNA, 18 nt, Human
acccuucaucuuccugug

SEQ ID NO: 1774391 - RNA, 19 nt, Human
acccuucaucuuccugugu

SEQ ID NO: 1774392 - RNA, 20 nt, Human
acccuucaucuuccuguguc

SEQ ID NO: 1774393 - RNA, 21 nt, Human
acccuucaucuuccugugucc

SEQ ID NO: 1774394 - RNA, 20 nt, Human
acccucuggauucugaaucu

SEQ ID NO: 1774395 - RNA, 15 nt, Human
acccucuuugcugca

SEQ ID NO: 1774396 - RNA, 16 nt, Human
acccucuuugcugcag

SEQ ID NO: 1774397 - RNA, 20 nt, Human
acccucuuugcugcagagaa

SEQ ID NO: 1774398 - RNA, 21 nt, Human
ucaggccauauuaucaauguu

SEQ ID NO: 1774399 - RNA, 13 nt, Human
ucagguaacaggc

SEQ ID NO: 1774400 - RNA, 15 nt, Human
ucagguaacaggcag

SEQ ID NO: 1774401 - RNA, 16 nt, Human
ucagguaacaggcaga

SEQ ID NO: 1774402 - RNA, 19 nt, Human
accccuucgcuccuguguc

SEQ ID NO: 1774403 - RNA, 15 nt, Human
ucagcggggacagcu

SEQ ID NO: 1774404 - RNA, 16 nt, Human
ucagcggggacagcuc

SEQ ID NO: 1774405 - RNA, 17 nt, Human
ucagcggggacagcucc

SEQ ID NO: 1774406 - RNA, 18 nt, Human
ucagcggggacagcuccu

SEQ ID NO: 1774407 - RNA, 19 nt, Human
ucaggaaccucgaguacug

SEQ ID NO: 1774408 - RNA, 20 nt, Human
ucaggaaccucgaguacugu

SEQ ID NO: 1774409 - RNA, 21 nt, Human
ucaggaaccucgaguacugug

SEQ ID NO: 1774410 - RNA, 22 nt, Human
ucaggaaccucgaguacugugg

SEQ ID NO: 1774411 - RNA, 16 nt, Human
acccagcccacuucug

SEQ ID NO: 1774412 - RNA, 17 nt, Human
acccagcccacuucugc

SEQ ID NO: 1774413 - RNA, 18 nt, Human
acccagcccacuucugcc

SEQ ID NO: 1774414 - RNA, 13 nt, Human
ucagaacccugcc

SEQ ID NO: 1774415 - RNA, 16 nt, Human
ucagaacccugccaug

SEQ ID NO: 1774416 - RNA, 17 nt, Human
ucagaacccugccaugg

SEQ ID NO: 1774417 - RNA, 21 nt, Human
ucagaacccugccauggaacu

SEQ ID NO: 1774418 - RNA, 15 nt, Human
ucagaacccuuggcu

SEQ ID NO: 1774419 - RNA, 16 nt, Human
ucagaacccuuggcuu

SEQ ID NO: 1774420 - RNA, 18 nt, Human
acccaagaccucagggca

SEQ ID NO: 1774421 - RNA, 19 nt, Human
acccaagaccucagggcac

SEQ ID NO: 1774422 - RNA, 23 nt, Human
accauuuugggguacccacugcu

SEQ ID NO: 1774423 - RNA, 16 nt, Human
ucacuguugcccaggc

SEQ ID NO: 1774424 - RNA, 13 nt, Human
ucacugcagccuc

SEQ ID NO: 1774425 - RNA, 12 nt, Human
ucacugcagccu

SEQ ID NO: 1774426 - RNA, 19 nt, Human
ucacuguugcccaggcugg

SEQ ID NO: 1774427 - RNA, 17 nt, Human
ucacuguugcccaggcu

SEQ ID NO: 1774428 - RNA, 18 nt, Human
ucacuguugcccaggcug

SEQ ID NO: 1774429 - RNA, 17 nt, Human
accagugaauuuuugca

SEQ ID NO: 1774430 - RNA, 18 nt, Human
accagugaauuuuugcaa

SEQ ID NO: 1774431 - RNA, 19 nt, Human
accagugaauuuuugcaau

SEQ ID NO: 1774432 - RNA, 21 nt, Human
accagugaauuuuugcaauaa

SEQ ID NO: 1774433 - RNA, 22 nt, Human
accagugaauuuuugcaauaau

SEQ ID NO: 1774434 - RNA, 12 nt, Human
accaguggucuc

SEQ ID NO: 1774435 - RNA, 17 nt, Human
accaguggucucacaug

SEQ ID NO: 1774436 - RNA, 23 nt, Human
accagcgaggaggcuccagaggg

SEQ ID NO: 1774437 - RNA, 19 nt, Human
ucaccugaagacucauucu

SEQ ID NO: 1774438 - RNA, 23 nt, Human
ucaccugaagacucauucuucug

SEQ ID NO: 1774439 - RNA, 22 nt, Human
ucaccugagcaggaccucugaa

SEQ ID NO: 1774440 - RNA, 19 nt, Human
accagagcccaccuuggcu

SEQ ID NO: 1774441 - RNA, 22 nt, Human
accagagcccaccuuggcucaa

SEQ ID NO: 1774442 - RNA, 22 nt, Human
accagacaccuugacagggcac

SEQ ID NO: 1774443 - RNA, 23 nt, Human
accagacaccuugacagggcaca

SEQ ID NO: 1774444 - RNA, 17 nt, Human
accagacaccuugacag

SEQ ID NO: 1774445 - RNA, 16 nt, Human
accacaucuugcucug

SEQ ID NO: 1774446 - RNA, 20 nt, Human
accacaucuugcucugcuga

SEQ ID NO: 1774447 - RNA, 21 nt, Human
accacaucuugcucugcugac

SEQ ID NO: 1774448 - RNA, 24 nt, Human
accacaucuugcucugcugacaga

SEQ ID NO: 1774449 - RNA, 14 nt, Human
accacaucuugcuc

SEQ ID NO: 1774450 - RNA, 17 nt, Human
uauuucaguguuaccug

SEQ ID NO: 1774451 - RNA, 18 nt, Human
uauuucaguguuaccugu

SEQ ID NO: 1774452 - RNA, 19 nt, Human
uauuucaguguuaccugug

SEQ ID NO: 1774453 - RNA, 20 nt, Human
uauuucaguguuaccugugu

SEQ ID NO: 1774454 - RNA, 16 nt, Human
ugaggggagaggagac

SEQ ID NO: 1774455 - RNA, 11 nt, Human
ugagggcaguc

SEQ ID NO: 1774456 - RNA, 13 nt, Human
ugagggccugcug

SEQ ID NO: 1774457 - RNA, 15 nt, Human
ugagggccugcugga

SEQ ID NO: 1774458 - RNA, 18 nt, Human
ugagggccugcuggaggc

SEQ ID NO: 1774459 - RNA, 19 nt, Human
ugagggccugcuggaggcc

SEQ ID NO: 1774460 - RNA, 20 nt, Human
ugagggccugcuggaggccu

SEQ ID NO: 1774461 - RNA, 21 nt, Human
ugagggccugcuggaggccuc

SEQ ID NO: 1774462 - RNA, 22 nt, Human
ugagggccugcuggaggccuca

SEQ ID NO: 1774463 - RNA, 23 nt, Human
ugaggggucgacuucgggcuggc

SEQ ID NO: 1774464 - RNA, 17 nt, Human
ugaggucagagccugca

SEQ ID NO: 1774465 - RNA, 14 nt, Human
ugaggucagagccu

SEQ ID NO: 1774466 - RNA, 16 nt, Human
ugaggucagagccugc

SEQ ID NO: 1774467 - RNA, 13 nt, Human
ugaggucagagcc

SEQ ID NO: 1774468 - RNA, 20 nt, Human
ugaggguugggcugguguca

SEQ ID NO: 1774469 - RNA, 14 nt, Human
agcagaggggcuga

SEQ ID NO: 1774470 - RNA, 13 nt, Human
ugaggccagggca

SEQ ID NO: 1774471 - RNA, 14 nt, Human
ugaggccagggcag

SEQ ID NO: 1774472 - RNA, 15 nt, Human
ugaggccagggcaga

SEQ ID NO: 1774473 - RNA, 16 nt, Human
ugaggccagggcagag

SEQ ID NO: 1774474 - RNA, 21 nt, Human
ugaggacacuaaccacgcugg

SEQ ID NO: 1774475 - RNA, 21 nt, Human
ugaggaauccagacccggcug

SEQ ID NO: 1774476 - RNA, 22 nt, Human
ugaggaauccagacccggcugc

SEQ ID NO: 1774477 - RNA, 16 nt, Human
ugagcuacaaaugcau

SEQ ID NO: 1774478 - RNA, 14 nt, Human
ugagcuacaaaugc

SEQ ID NO: 1774479 - RNA, 13 nt, Human
ugagcuacaaaug

SEQ ID NO: 1774480 - RNA, 22 nt, Human
ugagcgaggagaugcuccuugg

SEQ ID NO: 1774481 - RNA, 23 nt, Human
ugagcgaggagaugcuccuuggg

SEQ ID NO: 1774482 - RNA, 22 nt, Human
ugaggaaagucauuggcuuuau

SEQ ID NO: 1774483 - RNA, 21 nt, Human
ugaggaaagucauuggcuuua

SEQ ID NO: 1774484 - RNA, 19 nt, Human
ugaggaaagucauuggcuu

SEQ ID NO: 1774485 - RNA, 18 nt, Human
ugaggaaagucauuggcu

SEQ ID NO: 1774486 - RNA, 17 nt, Human
ugaggaaagucauuggc

SEQ ID NO: 1774487 - RNA, 15 nt, Human
ugaggaaagucauug

SEQ ID NO: 1774488 - RNA, 21 nt, Human
agcagagaaugaaagggccca

SEQ ID NO: 1774489 - RNA, 16 nt, Human
agcagacugaucagga

SEQ ID NO: 1774490 - RNA, 17 nt, Human
agcagacugaucaggac

SEQ ID NO: 1774491 - RNA, 18 nt, Human
agcagacugaucaggacc

SEQ ID NO: 1774492 - RNA, 19 nt, Human
agcagacugaucaggaccu

SEQ ID NO: 1774493 - RNA, 22 nt, Human
agcagagaaugaaagggcccag

SEQ ID NO: 1774494 - RNA, 23 nt, Human
agcagagaaugaaagggcccaga

SEQ ID NO: 1774495 - RNA, 11 nt, Human
ugagccuggcc

SEQ ID NO: 1774496 - RNA, 12 nt, Human
ugagccuggcca

SEQ ID NO: 1774497 - RNA, 16 nt, Human
ugagccuggccagccu

SEQ ID NO: 1774498 - RNA, 22 nt, Human
agcaccugucuccuuucacccc

SEQ ID NO: 1774499 - RNA, 21 nt, Human
agcacuuguggguuuuuguuu

SEQ ID NO: 1774500 - RNA, 22 nt, Human
agcaagugagagcuggguguca

SEQ ID NO: 1774501 - RNA, 13 nt, Human
agcaagugguccu

SEQ ID NO: 1774502 - RNA, 14 nt, Human
agcaagugagagcu

SEQ ID NO: 1774503 - RNA, 13 nt, Human
agcaagugagagc

SEQ ID NO: 1774504 - RNA, 16 nt, Human
agcacagcuucauuuc

SEQ ID NO: 1774505 - RNA, 18 nt, Human
agcacauauuagugcagc

SEQ ID NO: 1774506 - RNA, 20 nt, Human
ugagcacuaaggugugcucu

SEQ ID NO: 1774507 - RNA, 21 nt, Human
ugagcacuaaggugugcucug

SEQ ID NO: 1774508 - RNA, 22 nt, Human
ugagcacuaaggugugcucuga

SEQ ID NO: 1774509 - RNA, 23 nt, Human
ugagcacuaaggugugcucugau

SEQ ID NO: 1774510 - RNA, 15 nt, Human
ugagcacccucugga

SEQ ID NO: 1774511 - RNA, 16 nt, Human
ugagcacccucuggau

SEQ ID NO: 1774512 - RNA, 21 nt, Human
ugagcaccgugucaagcugcu

SEQ ID NO: 1774513 - RNA, 22 nt, Human
ugagcaccgugucaagcugcuc

SEQ ID NO: 1774514 - RNA, 17 nt, Human
ugagcaauguauaaccc

SEQ ID NO: 1774515 - RNA, 18 nt, Human
ugagcaauguauaacccc

SEQ ID NO: 1774516 - RNA, 21 nt, Human
ugagccacugcaccgggccac

SEQ ID NO: 1774517 - RNA, 18 nt, Human
ugagccacugcaccgggc

SEQ ID NO: 1774518 - RNA, 23 nt, Human
ugagccacugcaccgggccacag

SEQ ID NO: 1774519 - RNA, 13 nt, Human
agauuuggaagcu

SEQ ID NO: 1774520 - RNA, 23 nt, Human
agauucaauauugaauuuuuccu

SEQ ID NO: 1774521 - RNA, 13 nt, Human
ugacucagggcuc

SEQ ID NO: 1774522 - RNA, 14 nt, Human
ugacucagggcucc

SEQ ID NO: 1774523 - RNA, 15 nt, Human
ugacucagggcuccu

SEQ ID NO: 1774524 - RNA, 17 nt, Human
ugacucagggcuccugg

SEQ ID NO: 1774525 - RNA, 18 nt, Human
ugacucagggcuccuggg

SEQ ID NO: 1774526 - RNA, 19 nt, Human
ugacucagggcuccugggu

SEQ ID NO: 1774527 - RNA, 20 nt, Human
ugacucauucugaaggagcc

SEQ ID NO: 1774528 - RNA, 18 nt, Human
ugacuuuacgcccaucuc

SEQ ID NO: 1774529 - RNA, 22 nt, Human
ugacuuuacgcccaucucagga

SEQ ID NO: 1774530 - RNA, 14 nt, Human
agauuauugaaaua

SEQ ID NO: 1774531 - RNA, 16 nt, Human
agauuauugaaauauu

SEQ ID NO: 1774532 - RNA, 23 nt, Human
ugacuugcacagggauucucaca

SEQ ID NO: 1774533 - RNA, 15 nt, Human
ugaccaaugucuuga

SEQ ID NO: 1774534 - RNA, 16 nt, Human
agaugauuuccccccu

SEQ ID NO: 1774535 - RNA, 18 nt, Human
agaugauuuccccccucc

SEQ ID NO: 1774536 - RNA, 22 nt, Human
agaugauuuccccccuccgccu

SEQ ID NO: 1774537 - RNA, 19 nt, Human
ugaauuuaauaaucuguag

SEQ ID NO: 1774538 - RNA, 21 nt, Human
agaugugguugcauaagguuu

SEQ ID NO: 1774539 - RNA, 22 nt, Human
agaugugguugcauaagguuuu

SEQ ID NO: 1774540 - RNA, 13 nt, Human
ugaccucugccug

SEQ ID NO: 1774541 - RNA, 14 nt, Human
ugaccucugccuga

SEQ ID NO: 1774542 - RNA, 16 nt, Human
agauggcaaaugacca

SEQ ID NO: 1774543 - RNA, 17 nt, Human
agagcuucccugacuca

SEQ ID NO: 1774544 - RNA, 20 nt, Human
agagcuucccugacucauuc

SEQ ID NO: 1774545 - RNA, 13 nt, Human
agagcuucccuga

SEQ ID NO: 1774546 - RNA, 16 nt, Human
agagcuucccugacuc

SEQ ID NO: 1774547 - RNA, 12 nt, Human
agagcuucccug

SEQ ID NO: 1774548 - RNA, 19 nt, Human
agagcugggugucaagagg

SEQ ID NO: 1774549 - RNA, 18 nt, Human
agaggcaauggcuccuuc

SEQ ID NO: 1774550 - RNA, 15 nt, Human
agaggcuacagggcc

SEQ ID NO: 1774551 - RNA, 16 nt, Human
agaggcuacagggcca

SEQ ID NO: 1774552 - RNA, 21 nt, Human
agagggacgccugggggugcc

SEQ ID NO: 1774553 - RNA, 15 nt, Human
agagggacgccuggg

SEQ ID NO: 1774554 - RNA, 16 nt, Human
ugaagauucuuuccca

SEQ ID NO: 1774555 - RNA, 14 nt, Human
ugaaugcauuuugu

SEQ ID NO: 1774556 - RNA, 13 nt, Human
ugaaugcauuuug

SEQ ID NO: 1774557 - RNA, 12 nt, Human
ugaaugcauuuu

SEQ ID NO: 1774558 - RNA, 21 nt, Human
ugaaugcauuuuguuugguau

SEQ ID NO: 1774559 - RNA, 15 nt, Human
ugaaugcauuuuguu

SEQ ID NO: 1774560 - RNA, 22 nt, Human
ugaaugcauuuuguuugguauu

SEQ ID NO: 1774561 - RNA, 12 nt, Human
ugaauauaauga

SEQ ID NO: 1774562 - RNA, 15 nt, Human
agagugagacucugu

SEQ ID NO: 1774563 - RNA, 16 nt, Human
agagugagacucuguc

SEQ ID NO: 1774564 - RNA, 20 nt, Human
agagucucacuguugcccag

SEQ ID NO: 1774565 - RNA, 22 nt, Human
agagucucacuguugcccaggc

SEQ ID NO: 1774566 - RNA, 21 nt, Human
agaucaaccccuucgcuccug

SEQ ID NO: 1774567 - RNA, 14 nt, Human
agaucaaccccuuc

SEQ ID NO: 1774568 - RNA, 19 nt, Human
agaucaaccccuucgcucc

SEQ ID NO: 1774569 - RNA, 19 nt, Human
agauacaggaaaagcugcu

SEQ ID NO: 1774570 - RNA, 12 nt, Human
agauacaauaaa

SEQ ID NO: 1774571 - RNA, 13 nt, Human
agauacaauaaau

SEQ ID NO: 1774572 - RNA, 18 nt, Human
agauacagaacucuuuca

SEQ ID NO: 1774573 - RNA, 20 nt, Human
agauacagaacucuuucaaa

SEQ ID NO: 1774574 - RNA, 14 nt, Human
agauaccagcgagg

SEQ ID NO: 1774575 - RNA, 19 nt, Human
agauaccagcgaggaggcu

SEQ ID NO: 1774576 - RNA, 21 nt, Human
agauaccagcgaggaggcucc

SEQ ID NO: 1774577 - RNA, 23 nt, Human
agauaccagcgaggaggcuccag

SEQ ID NO: 1774578 - RNA, 12 nt, Human
agauaaugugaa

SEQ ID NO: 1774579 - RNA, 13 nt, Human
agauaaugugaaa

SEQ ID NO: 1774580 - RNA, 18 nt, Human
agauaaugugaaaauggu

SEQ ID NO: 1774581 - RNA, 19 nt, Human
agagugagacucugucuca

SEQ ID NO: 1774582 - RNA, 16 nt, Human
agagugacucuccagg

SEQ ID NO: 1774583 - RNA, 17 nt, Human
agagugauaauacaagu

SEQ ID NO: 1774584 - RNA, 18 nt, Human
ucuuccuacccugccucc

SEQ ID NO: 1774585 - RNA, 21 nt, Human
ucuuccuacccugccucccuu

SEQ ID NO: 1774586 - RNA, 17 nt, Human
ucuugcaauggcagccu

SEQ ID NO: 1774587 - RNA, 13 nt, Human
ucuugcaauggca

SEQ ID NO: 1774588 - RNA, 16 nt, Human
ucuugcaauggcagcc

SEQ ID NO: 1774589 - RNA, 13 nt, Human
ucuugaugcaugc

SEQ ID NO: 1774590 - RNA, 21 nt, Human
ucuugaugcaugcacuguucc

SEQ ID NO: 1774591 - RNA, 17 nt, Human
agacucauucuucugua

SEQ ID NO: 1774592 - RNA, 18 nt, Human
agacucauucuucuguac

SEQ ID NO: 1774593 - RNA, 23 nt, Human
agacuguugggguggguauaaaa

SEQ ID NO: 1774594 - RNA, 11 nt, Human
agacuguuggg

SEQ ID NO: 1774595 - RNA, 14 nt, Human
agacuuuggaaaau

SEQ ID NO: 1774596 - RNA, 21 nt, Human
agacuuuggaaaaugcauugu

SEQ ID NO: 1774597 - RNA, 22 nt, Human
agacuuuggaaaaugcauugua

SEQ ID NO: 1774598 - RNA, 23 nt, Human
agacuuuggaaaaugcauuguau

SEQ ID NO: 1774599 - RNA, 18 nt, Human
agagaaugaaagggccca

SEQ ID NO: 1774600 - RNA, 14 nt, Human
agagaaugagaaau

SEQ ID NO: 1774601 - RNA, 16 nt, Human
agagaaugaugcucaa

SEQ ID NO: 1774602 - RNA, 19 nt, Human
agacucuacagaggccaug

SEQ ID NO: 1774603 - RNA, 22 nt, Human
agacucggggugcuuccuugua

SEQ ID NO: 1774604 - RNA, 14 nt, Human
agacucggggugcu

SEQ ID NO: 1774605 - RNA, 17 nt, Human
agacucggggugcuucc

SEQ ID NO: 1774606 - RNA, 17 nt, Human
agacucuacagaggcca

SEQ ID NO: 1774607 - RNA, 12 nt, Human
ucuuuagaguua

SEQ ID NO: 1774608 - RNA, 18 nt, Human
ucuuuagaguuagacugu

SEQ ID NO: 1774609 - RNA, 17 nt, Human
ucuuuagaguuagacug

SEQ ID NO: 1774610 - RNA, 16 nt, Human
ucuuuagaguuagacu

SEQ ID NO: 1774611 - RNA, 14 nt, Human
ucuuuagaguuaga

SEQ ID NO: 1774612 - RNA, 19 nt, Human
ucuuuagaguuagacuguu

SEQ ID NO: 1774613 - RNA, 14 nt, Human
ucuggguucacugc

SEQ ID NO: 1774614 - RNA, 16 nt, Human
ucuggguucacugcaa

SEQ ID NO: 1774615 - RNA, 23 nt, Human
ucuggggcagcacccuauaaauc

SEQ ID NO: 1774616 - RNA, 20 nt, Human
ucugucauuugagcagggcu

SEQ ID NO: 1774617 - RNA, 23 nt, Human
ucugucauuugagcagggcucag

SEQ ID NO: 1774618 - RNA, 15 nt, Human
ucugucauuugagca

SEQ ID NO: 1774619 - RNA, 20 nt, Human
ucuguaggguaauuaguaac

SEQ ID NO: 1774620 - RNA, 15 nt, Human
ucugugcccuccuga

SEQ ID NO: 1774621 - RNA, 18 nt, Human
ucuguuggccagugugac

SEQ ID NO: 1774622 - RNA, 19 nt, Human
ucuguuggccagugugaca

SEQ ID NO: 1774623 - RNA, 20 nt, Human
ucuguuggccagugugacaa

SEQ ID NO: 1774624 - RNA, 17 nt, Human
ucuguucaguguaaaua

SEQ ID NO: 1774625 - RNA, 13 nt, Human
ucugugcucagga

SEQ ID NO: 1774626 - RNA, 14 nt, Human
agacagacacacac

SEQ ID NO: 1774627 - RNA, 15 nt, Human
agacagacacacaca

SEQ ID NO: 1774628 - RNA, 16 nt, Human
agacagacacacacac

SEQ ID NO: 1774629 - RNA, 18 nt, Human
agaauuugagugcucuga

SEQ ID NO: 1774630 - RNA, 17 nt, Human
agaauuugagugcucug

SEQ ID NO: 1774631 - RNA, 14 nt, Human
ucuuaauauaaauu

SEQ ID NO: 1774632 - RNA, 15 nt, Human
ucuuaauauaaauuc

SEQ ID NO: 1774633 - RNA, 20 nt, Human
ucuuaauauaaauucacuuu

SEQ ID NO: 1774634 - RNA, 21 nt, Human
ucuuaauauaaauucacuuuc

SEQ ID NO: 1774635 - RNA, 21 nt, Human
agacaggguuuugccauguug

SEQ ID NO: 1774636 - RNA, 23 nt, Human
agacaggcaagcaccuccugccu

SEQ ID NO: 1774637 - RNA, 14 nt, Human
ucuuauugcccacg

SEQ ID NO: 1774638 - RNA, 18 nt, Human
ucuuauugcccacgcugg

SEQ ID NO: 1774639 - RNA, 22 nt, Human
ucuuauugcccacgcuggagug

SEQ ID NO: 1774640 - RNA, 12 nt, Human
ucuuagaaauuu

SEQ ID NO: 1774641 - RNA, 15 nt, Human
ucuuagaaauuuauu

SEQ ID NO: 1774642 - RNA, 11 nt, Human
ucuuagaaauu

SEQ ID NO: 1774643 - RNA, 17 nt, Human
ucuucaccauuuggcaa

SEQ ID NO: 1774644 - RNA, 21 nt, Human
ucuucaccugauucaacuaaa

SEQ ID NO: 1774645 - RNA, 23 nt, Human
ucuucaccugauucaacuaaaaa

SEQ ID NO: 1774646 - RNA, 15 nt, Human
ucuuccaggugccca

SEQ ID NO: 1774647 - RNA, 18 nt, Human
ucuuccaggugcccagcu

SEQ ID NO: 1774648 - RNA, 15 nt, Human
ucuuccgacucuuuc

SEQ ID NO: 1774649 - RNA, 21 nt, Human
ucuuccgacucuuucugagug

SEQ ID NO: 1774650 - RNA, 12 nt, Human
acuuuuuauugc

SEQ ID NO: 1774651 - RNA, 13 nt, Human
acuuuuuauugcc

SEQ ID NO: 1774652 - RNA, 14 nt, Human
acuuuuuauugccu

SEQ ID NO: 1774653 - RNA, 15 nt, Human
acuuuuuauugccuu

SEQ ID NO: 1774654 - RNA, 16 nt, Human
acuuuuuauugccuuc

SEQ ID NO: 1774655 - RNA, 17 nt, Human
acuuuuuauugccuucu

SEQ ID NO: 1774656 - RNA, 18 nt, Human
acuuuuuauugccuucuc

SEQ ID NO: 1774657 - RNA, 14 nt, Human
ucuccggcucccag

SEQ ID NO: 1774658 - RNA, 15 nt, Human
ucuccggcucccagc

SEQ ID NO: 1774659 - RNA, 16 nt, Human
ucuccggcucccagcc

SEQ ID NO: 1774660 - RNA, 17 nt, Human
ucuccggcucccagccu

SEQ ID NO: 1774661 - RNA, 18 nt, Human
ucuccggcucccagccuc

SEQ ID NO: 1774662 - RNA, 22 nt, Human
ucuccggcucccagccucagcg

SEQ ID NO: 1774663 - RNA, 21 nt, Human
ucuccggcucccagccucagc

SEQ ID NO: 1774664 - RNA, 13 nt, Human
ucucuccuguccu

SEQ ID NO: 1774665 - RNA, 14 nt, Human
ucucuccuguccuc

SEQ ID NO: 1774666 - RNA, 15 nt, Human
ucucuccuguccucc

SEQ ID NO: 1774667 - RNA, 13 nt, Human
ucuccuuccugug

SEQ ID NO: 1774668 - RNA, 14 nt, Human
ucuccuuccugugu

SEQ ID NO: 1774669 - RNA, 16 nt, Human
ucuccuuccugugugu

SEQ ID NO: 1774670 - RNA, 22 nt, Human
acuuuuuugguacuauaaaagc

SEQ ID NO: 1774671 - RNA, 22 nt, Human
ucucugcucugcgugucaccug

SEQ ID NO: 1774672 - RNA, 18 nt, Human
ucucugcucugcguguca

SEQ ID NO: 1774673 - RNA, 21 nt, Human
ucucugcucugcgugucaccu

SEQ ID NO: 1774674 - RNA, 14 nt, Human
ucucugcccugugu

SEQ ID NO: 1774675 - RNA, 15 nt, Human
agaaacugcagggaa

SEQ ID NO: 1774676 - RNA, 22 nt, Human
ucucuuuaaugucacaggcagg

SEQ ID NO: 1774677 - RNA, 19 nt, Human
ucugauucccaagcucugc

SEQ ID NO: 1774678 - RNA, 20 nt, Human
ucugauucccaagcucugcu

SEQ ID NO: 1774679 - RNA, 21 nt, Human
ucugauucccaagcucugcuc

SEQ ID NO: 1774680 - RNA, 21 nt, Human
agaaagaauguuacugccuua

SEQ ID NO: 1774681 - RNA, 22 nt, Human
agaaagaauguuacugccuuaa

SEQ ID NO: 1774682 - RNA, 14 nt, Human
ucugacuuggggac

SEQ ID NO: 1774683 - RNA, 19 nt, Human
agaagaaaauggaaccagg

SEQ ID NO: 1774684 - RNA, 20 nt, Human
agaagaaaauggaaccaggc

SEQ ID NO: 1774685 - RNA, 14 nt, Human
agaacucuuucaaa

SEQ ID NO: 1774686 - RNA, 17 nt, Human
ucugcucacauaucugu

SEQ ID NO: 1774687 - RNA, 12 nt, Human
ucugcucaucau

SEQ ID NO: 1774688 - RNA, 16 nt, Human
ucugcucacauaucug

SEQ ID NO: 1774689 - RNA, 14 nt, Human
ucugcucaucauuc

SEQ ID NO: 1774690 - RNA, 15 nt, Human
ucugcucaucauucu

SEQ ID NO: 1774691 - RNA, 18 nt, Human
ucugcucaucauucucug

SEQ ID NO: 1774692 - RNA, 22 nt, Human
ucugcucaucauucucugucuc

SEQ ID NO: 1774693 - RNA, 11 nt, Human
ucugccuuuau

SEQ ID NO: 1774694 - RNA, 18 nt, Human
ucugccuuuauuguguuu

SEQ ID NO: 1774695 - RNA, 16 nt, Human
ucugccuuuauugugu

SEQ ID NO: 1774696 - RNA, 20 nt, Human
ucugccuuuauuguguuugu

SEQ ID NO: 1774697 - RNA, 23 nt, Human
ucugccuuuauuguguuugucau

SEQ ID NO: 1774698 - RNA, 22 nt, Human
agaagaaaauggaaccaggcuu

SEQ ID NO: 1774699 - RNA, 23 nt, Human
agaagaaaauggaaccaggcuug

SEQ ID NO: 1774700 - RNA, 18 nt, Human
ucuggauggugugccuuc

SEQ ID NO: 1774701 - RNA, 21 nt, Human
ucuggauggugugccuuccag

SEQ ID NO: 1774702 - RNA, 22 nt, Human
ucuggauggugugccuuccaga

SEQ ID NO: 1774703 - RNA, 18 nt, Human
ucuggcagguccuccccu

SEQ ID NO: 1774704 - RNA, 22 nt, Human
ucuggcagguccuccccucucu

SEQ ID NO: 1774705 - RNA, 13 nt, Human
ucuggcccuagac

SEQ ID NO: 1774706 - RNA, 14 nt, Human
ucuggcccuagacu

SEQ ID NO: 1774707 - RNA, 19 nt, Human
agaagcgauuuaaguuaca

SEQ ID NO: 1774708 - RNA, 17 nt, Human
ugcauaacaauuccucu

SEQ ID NO: 1774709 - RNA, 18 nt, Human
ugcauaacaauuccucua

SEQ ID NO: 1774710 - RNA, 19 nt, Human
ugcagucuguccaggcucg

SEQ ID NO: 1774711 - RNA, 17 nt, Human
agccucaaccuccuggg

SEQ ID NO: 1774712 - RNA, 18 nt, Human
agccucaaccuccugggc

SEQ ID NO: 1774713 - RNA, 13 nt, Human
agccucagcaucc

SEQ ID NO: 1774714 - RNA, 14 nt, Human
agccucagcauccu

SEQ ID NO: 1774715 - RNA, 16 nt, Human
agccucagcauccugg

SEQ ID NO: 1774716 - RNA, 15 nt, Human
agccucagcauccug

SEQ ID NO: 1774717 - RNA, 19 nt, Human
agccucaaccuccugggcu

SEQ ID NO: 1774718 - RNA, 20 nt, Human
ugcagccucaaccuccuggg

SEQ ID NO: 1774719 - RNA, 18 nt, Human
ugcagccucaaccuccug

SEQ ID NO: 1774720 - RNA, 19 nt, Human
ugcagccucaaccuccugg

SEQ ID NO: 1774721 - RNA, 14 nt, Human
ugcagccgcugagc

SEQ ID NO: 1774722 - RNA, 23 nt, Human
agccugcaguuauuaacacuaac

SEQ ID NO: 1774723 - RNA, 14 nt, Human
agccugcagcagga

SEQ ID NO: 1774724 - RNA, 14 nt, Human
ugcaugauguuugc

SEQ ID NO: 1774725 - RNA, 15 nt, Human
ugcaugauguuugcc

SEQ ID NO: 1774726 - RNA, 17 nt, Human
ugcaugauguuugccca

SEQ ID NO: 1774727 - RNA, 18 nt, Human
ugcaugauguuugcccaa

SEQ ID NO: 1774728 - RNA, 13 nt, Human
ugcaucucccaga

SEQ ID NO: 1774729 - RNA, 18 nt, Human
ugcaucucccagauaaug

SEQ ID NO: 1774730 - RNA, 13 nt, Human
ugcaucuggggcc

SEQ ID NO: 1774731 - RNA, 15 nt, Human
ugcacacaccagagc

SEQ ID NO: 1774732 - RNA, 12 nt, Human
ugcacaugucuu

SEQ ID NO: 1774733 - RNA, 22 nt, Human
ugcaccaagcaggaaaugaaaa

SEQ ID NO: 1774734 - RNA, 16 nt, Human
ugcacaugucuuaaug

SEQ ID NO: 1774735 - RNA, 15 nt, Human
ugcacaugucuuaau

SEQ ID NO: 1774736 - RNA, 14 nt, Human
ugcacaugucuuaa

SEQ ID NO: 1774737 - RNA, 14 nt, Human
ugcaccaagcagga

SEQ ID NO: 1774738 - RNA, 22 nt, Human
ugcacuauagccuaggugacag

SEQ ID NO: 1774739 - RNA, 15 nt, Human
agccuaggugacaga

SEQ ID NO: 1774740 - RNA, 17 nt, Human
agccuaggugacagagu

SEQ ID NO: 1774741 - RNA, 14 nt, Human
agccuagugaaggc

SEQ ID NO: 1774742 - RNA, 23 nt, Human
agccuagugaaggcuucucucug

SEQ ID NO: 1774743 - RNA, 20 nt, Human
agccuagugaaggcuucucu

SEQ ID NO: 1774744 - RNA, 15 nt, Human
agccucaaccuccug

SEQ ID NO: 1774745 - RNA, 22 nt, Human
ugcagacucuacagaggccaug

SEQ ID NO: 1774746 - RNA, 19 nt, Human
ugcagagaaacuuaagcaa

SEQ ID NO: 1774747 - RNA, 20 nt, Human
ugcagagaaacuuaagcaaa

SEQ ID NO: 1774748 - RNA, 21 nt, Human
ugcagagaaacuuaagcaaag

SEQ ID NO: 1774749 - RNA, 19 nt, Human
ugcagacucuacagaggcc

SEQ ID NO: 1774750 - RNA, 20 nt, Human
ugcagacucuacagaggcca

SEQ ID NO: 1774751 - RNA, 17 nt, Human
ugccccuaaucucugua

SEQ ID NO: 1774752 - RNA, 18 nt, Human
ugccccuaaucucuguag

SEQ ID NO: 1774753 - RNA, 20 nt, Human
ugccccuaaucucuguagga

SEQ ID NO: 1774754 - RNA, 21 nt, Human
ugccccuaaucucuguaggaa

SEQ ID NO: 1774755 - RNA, 15 nt, Human
ugcccuaugggccug

SEQ ID NO: 1774756 - RNA, 16 nt, Human
ugcccuaugggccugc

SEQ ID NO: 1774757 - RNA, 18 nt, Human
ugcccuaguuuucuuucc

SEQ ID NO: 1774758 - RNA, 22 nt, Human
ugcccuaguuuucuuuccuccu

SEQ ID NO: 1774759 - RNA, 23 nt, Human
ugcccuaguuuucuuuccuccuu

SEQ ID NO: 1774760 - RNA, 17 nt, Human
ugccccccaccccugga

SEQ ID NO: 1774761 - RNA, 12 nt, Human
ugcccaggcccc

SEQ ID NO: 1774762 - RNA, 14 nt, Human
ugcccaggccccug

SEQ ID NO: 1774763 - RNA, 20 nt, Human
ugcccaggccccugccaccc

SEQ ID NO: 1774764 - RNA, 22 nt, Human
ugcccaggccccugccacccug

SEQ ID NO: 1774765 - RNA, 14 nt, Human
ugcccacaggauca

SEQ ID NO: 1774766 - RNA, 15 nt, Human
ugcccaggcaggucu

SEQ ID NO: 1774767 - RNA, 16 nt, Human
ugcccaggcaggucuu

SEQ ID NO: 1774768 - RNA, 17 nt, Human
ugcccaggcaggucuug

SEQ ID NO: 1774769 - RNA, 20 nt, Human
ugcccaggcaggucuugaac

SEQ ID NO: 1774770 - RNA, 11 nt, Human
ugcccaggccc

SEQ ID NO: 1774771 - RNA, 16 nt, Human
ugccauuagccaagga

SEQ ID NO: 1774772 - RNA, 20 nt, Human
ugccauguuggccaggcugg

SEQ ID NO: 1774773 - RNA, 21 nt, Human
ugccauguuggccaggcuggu

SEQ ID NO: 1774774 - RNA, 17 nt, Human
ugccauguuggccaggc

SEQ ID NO: 1774775 - RNA, 18 nt, Human
ugccauguuggccaggcu

SEQ ID NO: 1774776 - RNA, 19 nt, Human
ugccauguuggccaggcug

SEQ ID NO: 1774777 - RNA, 19 nt, Human
agcuauggugucauaggcu

SEQ ID NO: 1774778 - RNA, 17 nt, Human
agcuauaccugugccuc

SEQ ID NO: 1774779 - RNA, 15 nt, Human
agcuauaccugugcc

SEQ ID NO: 1774780 - RNA, 16 nt, Human
agcuauaccugugccu

SEQ ID NO: 1774781 - RNA, 15 nt, Human
ugccauauucuguug

SEQ ID NO: 1774782 - RNA, 16 nt, Human
ugccauauucuguugg

SEQ ID NO: 1774783 - RNA, 17 nt, Human
ugccauauucuguuggc

SEQ ID NO: 1774784 - RNA, 15 nt, Human
agcgugagccacugc

SEQ ID NO: 1774785 - RNA, 20 nt, Human
ugccauauugcacaugucuu

SEQ ID NO: 1774786 - RNA, 16 nt, Human
agcggggacagcuccu

SEQ ID NO: 1774787 - RNA, 17 nt, Human
agcggggacagcuccuu

SEQ ID NO: 1774788 - RNA, 15 nt, Human
agcggggacagcucc

SEQ ID NO: 1774789 - RNA, 19 nt, Human
ugccauauugcacaugucu

SEQ ID NO: 1774790 - RNA, 16 nt, Human
ugccauauugcacaug

SEQ ID NO: 1774791 - RNA, 15 nt, Human
ugccauauugcacau

SEQ ID NO: 1774792 - RNA, 20 nt, Human
ugccauauucuguuggccag

SEQ ID NO: 1774793 - RNA, 21 nt, Human
ugccauauucuguuggccagu

SEQ ID NO: 1774794 - RNA, 17 nt, Human
agcgugcuuuaaaaaau

SEQ ID NO: 1774795 - RNA, 16 nt, Human
agcgugagccacugca

SEQ ID NO: 1774796 - RNA, 17 nt, Human
agcgugagccacugcac

SEQ ID NO: 1774797 - RNA, 17 nt, Human
agccugcuagcuagcuc

SEQ ID NO: 1774798 - RNA, 18 nt, Human
agccugcuagcuagcuca

SEQ ID NO: 1774799 - RNA, 14 nt, Human
agcgcccaguuggg

SEQ ID NO: 1774800 - RNA, 22 nt, Human
agcgcccaguuggguggaugcc

SEQ ID NO: 1774801 - RNA, 21 nt, Human
agccugcgccaccgcccagag

SEQ ID NO: 1774802 - RNA, 14 nt, Human
agccugcgccugcu

SEQ ID NO: 1774803 - RNA, 15 nt, Human
agccugcgccugcug

SEQ ID NO: 1774804 - RNA, 16 nt, Human
agccugcgccugcugc

SEQ ID NO: 1774805 - RNA, 17 nt, Human
agccugcgccugcugca

SEQ ID NO: 1774806 - RNA, 18 nt, Human
agccugcgccugcugcau

SEQ ID NO: 1774807 - RNA, 20 nt, Human
agccugcgccugcugcaugc

SEQ ID NO: 1774808 - RNA, 9 nt, Human
agccugcua

SEQ ID NO: 1774809 - RNA, 12 nt, Human
agccugcuagcu

SEQ ID NO: 1774810 - RNA, 13 nt, Human
agccugcuagcua

SEQ ID NO: 1774811 - RNA, 18 nt, Human
agcgcggcccucccgagu

SEQ ID NO: 1774812 - RNA, 15 nt, Human
agcgcgccccuagcc

SEQ ID NO: 1774813 - RNA, 15 nt, Human
agcgcggcccucccg

SEQ ID NO: 1774814 - RNA, 18 nt, Human
ugccacaaugcaguucug

SEQ ID NO: 1774815 - RNA, 23 nt, Human
ugccacaaugcaguucugagcac

SEQ ID NO: 1774816 - RNA, 20 nt, Human
ugccucugacacacagcucu

SEQ ID NO: 1774817 - RNA, 21 nt, Human
ugccucugacacacagcucug

SEQ ID NO: 1774818 - RNA, 17 nt, Human
ugcccuuuuuucugccu

SEQ ID NO: 1774819 - RNA, 18 nt, Human
ugcccuuuuuucugccuc

SEQ ID NO: 1774820 - RNA, 19 nt, Human
ugcccuuuuuucugccucc

SEQ ID NO: 1774821 - RNA, 20 nt, Human
ugcccuuuuuucugccuccu

SEQ ID NO: 1774822 - RNA, 21 nt, Human
ugcccuuuuuucugccuccuu

SEQ ID NO: 1774823 - RNA, 16 nt, Human
ugccgcgaugggucag

SEQ ID NO: 1774824 - RNA, 16 nt, Human
ugccggauacaaacug

SEQ ID NO: 1774825 - RNA, 18 nt, Human
ugccggauacaaacuggu

SEQ ID NO: 1774826 - RNA, 22 nt, Human
ugccgggcugagggccugcugg

SEQ ID NO: 1774827 - RNA, 23 nt, Human
ugccgggcugagggccugcugga

SEQ ID NO: 1774828 - RNA, 20 nt, Human
agcugcaucauccuugcagg

SEQ ID NO: 1774829 - RNA, 23 nt, Human
agcugcaucauccuugcaggugg

SEQ ID NO: 1774830 - RNA, 18 nt, Human
ugcccuuggcacccaaga

SEQ ID NO: 1774831 - RNA, 22 nt, Human
agcucugcuccucuccccagca

SEQ ID NO: 1774832 - RNA, 12 nt, Human
agcucugcuccu

SEQ ID NO: 1774833 - RNA, 18 nt, Human
agcucuucuccaggcugu

SEQ ID NO: 1774834 - RNA, 16 nt, Human
agcucuucuucccagc

SEQ ID NO: 1774835 - RNA, 12 nt, Human
agcucuguccug

SEQ ID NO: 1774836 - RNA, 14 nt, Human
agcucuguccuggg

SEQ ID NO: 1774837 - RNA, 12 nt, Human
agcucuguauca

SEQ ID NO: 1774838 - RNA, 22 nt, Human
agcucuguaucaggacccagag

SEQ ID NO: 1774839 - RNA, 23 nt, Human
agcucuguaucaggacccagagg

SEQ ID NO: 1774840 - RNA, 17 nt, Human
agcugggacuacaggug

SEQ ID NO: 1774841 - RNA, 19 nt, Human
agcugggacuacaggugug

SEQ ID NO: 1774842 - RNA, 22 nt, Human
ugccucugacacacagcucugu

SEQ ID NO: 1774843 - RNA, 20 nt, Human
agcugccuccccucuccuuc

SEQ ID NO: 1774844 - RNA, 23 nt, Human
agcugccuccccucuccuuccug

SEQ ID NO: 1774845 - RNA, 10 nt, Human
agcugccugu

SEQ ID NO: 1774846 - RNA, 10 nt, Human
agcugugcag

SEQ ID NO: 1774847 - RNA, 12 nt, Human
agcugugcaggu

SEQ ID NO: 1774848 - RNA, 18 nt, Human
agcugugcagguggggag

SEQ ID NO: 1774849 - RNA, 19 nt, Human
agcugugcagguggggaga

SEQ ID NO: 1774850 - RNA, 15 nt, Human
ugccuguucagcucc

SEQ ID NO: 1774851 - RNA, 14 nt, Human
ugccugugucuucu

SEQ ID NO: 1774852 - RNA, 16 nt, Human
ugccuguucagcucca

SEQ ID NO: 1774853 - RNA, 17 nt, Human
ugccuguucagcuccag

SEQ ID NO: 1774854 - RNA, 19 nt, Human
ugcgacacugggaggccag

SEQ ID NO: 1774855 - RNA, 18 nt, Human
ugcggacagccacggcca

SEQ ID NO: 1774856 - RNA, 15 nt, Human
ugcgacgcuugcucu

SEQ ID NO: 1774857 - RNA, 21 nt, Human
ugccuuuauuguguuugucau

SEQ ID NO: 1774858 - RNA, 20 nt, Human
ugccuuuauuguguuuguca

SEQ ID NO: 1774859 - RNA, 14 nt, Human
ugccuuuauugugu

SEQ ID NO: 1774860 - RNA, 11 nt, Human
ugccuuuagaa

SEQ ID NO: 1774861 - RNA, 15 nt, Human
ugccuuuagaaaaua

SEQ ID NO: 1774862 - RNA, 16 nt, Human
ugccuuuagaaaauau

SEQ ID NO: 1774863 - RNA, 23 nt, Human
ugccuuuagaaaauauaaguaaa

SEQ ID NO: 1774864 - RNA, 21 nt, Human
aggaaacuacugccuuuagaa

SEQ ID NO: 1774865 - RNA, 20 nt, Human
ugcggacagccacggccagg

SEQ ID NO: 1774866 - RNA, 21 nt, Human
ugcggacagccacggccaggc

SEQ ID NO: 1774867 - RNA, 15 nt, Human
ugcuaccucccuugc

SEQ ID NO: 1774868 - RNA, 18 nt, Human
ugcuaccucccuugccuu

SEQ ID NO: 1774869 - RNA, 13 nt, Human
ugcuacgccugca

SEQ ID NO: 1774870 - RNA, 16 nt, Human
ugcuacgccugcaugu

SEQ ID NO: 1774871 - RNA, 20 nt, Human
ugcuacgccugcauguaaac

SEQ ID NO: 1774872 - RNA, 19 nt, Human
agcuuguaaauagcucagg

SEQ ID NO: 1774873 - RNA, 20 nt, Human
agcuuguaaauagcucaggu

SEQ ID NO: 1774874 - RNA, 21 nt, Human
agcuuguaaauagcucaggug

SEQ ID NO: 1774875 - RNA, 13 nt, Human
agcuuucugccac

SEQ ID NO: 1774876 - RNA, 11 nt, Human
ugcugccaucc

SEQ ID NO: 1774877 - RNA, 21 nt, Human
ugcugccauccagguucagcu

SEQ ID NO: 1774878 - RNA, 22 nt, Human
ugcugccauccagguucagcuu

SEQ ID NO: 1774879 - RNA, 12 nt, Human
ugcugccaucca

SEQ ID NO: 1774880 - RNA, 13 nt, Human
ugcugccauccag

SEQ ID NO: 1774881 - RNA, 14 nt, Human
ugcugccauccagg

SEQ ID NO: 1774882 - RNA, 15 nt, Human
ugcugccauccaggu

SEQ ID NO: 1774883 - RNA, 23 nt, Human
aggaauccagacccggcugcgug

SEQ ID NO: 1774884 - RNA, 17 nt, Human
ugcugagucaucuguua

SEQ ID NO: 1774885 - RNA, 19 nt, Human
ugcugagucaucuguuagg

SEQ ID NO: 1774886 - RNA, 21 nt, Human
ugcugagucaucuguuagggc

SEQ ID NO: 1774887 - RNA, 22 nt, Human
ugcucugaucauccacugugcc

SEQ ID NO: 1774888 - RNA, 13 nt, Human
ugcucugaucccu

SEQ ID NO: 1774889 - RNA, 14 nt, Human
ugcucugaucccuc

SEQ ID NO: 1774890 - RNA, 16 nt, Human
ugcucugaucccucua

SEQ ID NO: 1774891 - RNA, 19 nt, Human
ugcucugaucccucuacag

SEQ ID NO: 1774892 - RNA, 20 nt, Human
ugcuauccugccaaaaucau

SEQ ID NO: 1774893 - RNA, 17 nt, Human
ugcucuggacaggcaug

SEQ ID NO: 1774894 - RNA, 16 nt, Human
ugcucuguuugugggg

SEQ ID NO: 1774895 - RNA, 18 nt, Human
aggccugaaaggagcccu

SEQ ID NO: 1774896 - RNA, 13 nt, Human
aggccuggccaga

SEQ ID NO: 1774897 - RNA, 12 nt, Human
aggccuggccag

SEQ ID NO: 1774898 - RNA, 13 nt, Human
aggccugaagcca

SEQ ID NO: 1774899 - RNA, 19 nt, Human
aggccugaagccagcugcc

SEQ ID NO: 1774900 - RNA, 21 nt, Human
aggccugaagccagcugcccu

SEQ ID NO: 1774901 - RNA, 19 nt, Human
aggccugaaucaugagccu

SEQ ID NO: 1774902 - RNA, 20 nt, Human
aggccugaaucaugagccug

SEQ ID NO: 1774903 - RNA, 22 nt, Human
aggccugaaucaugagccugcu

SEQ ID NO: 1774904 - RNA, 23 nt, Human
aggccugaaucaugagccugcug

SEQ ID NO: 1774905 - RNA, 17 nt, Human
aggcccggcuccaggcu

SEQ ID NO: 1774906 - RNA, 14 nt, Human
aggcccggcuccag

SEQ ID NO: 1774907 - RNA, 15 nt, Human
aggcccggcuccagg

SEQ ID NO: 1774908 - RNA, 16 nt, Human
aggcccggcuccaggc

SEQ ID NO: 1774909 - RNA, 13 nt, Human
aggccccugccac

SEQ ID NO: 1774910 - RNA, 15 nt, Human
aggccccugccaccc

SEQ ID NO: 1774911 - RNA, 17 nt, Human
aggccccugccacccug

SEQ ID NO: 1774912 - RNA, 18 nt, Human
aggccccugccacccugg

SEQ ID NO: 1774913 - RNA, 21 nt, Human
aggccccugccacccugggga

SEQ ID NO: 1774914 - RNA, 13 nt, Human
aggccccuggagg

SEQ ID NO: 1774915 - RNA, 14 nt, Human
aggccccuggaggc

SEQ ID NO: 1774916 - RNA, 19 nt, Human
aggccccuggaggcugccu

SEQ ID NO: 1774917 - RNA, 20 nt, Human
aggccccuggaggcugccuc

SEQ ID NO: 1774918 - RNA, 21 nt, Human
aggccccuggaggcugccucc

SEQ ID NO: 1774919 - RNA, 22 nt, Human
aggccccuggaggcugccuccc

SEQ ID NO: 1774920 - RNA, 18 nt, Human
uggcagcaccugucuccu

SEQ ID NO: 1774921 - RNA, 13 nt, Human
aggccauuauugu

SEQ ID NO: 1774922 - RNA, 18 nt, Human
aggccaugggccuccugu

SEQ ID NO: 1774923 - RNA, 11 nt, Human
uggccugggcc

SEQ ID NO: 1774924 - RNA, 24 nt, Human
uggccugggccguaucuccggcuc

SEQ ID NO: 1774925 - RNA, 15 nt, Human
uggcccugcaaaagg

SEQ ID NO: 1774926 - RNA, 19 nt, Human
uggcaugguaguauacaaa

SEQ ID NO: 1774927 - RNA, 21 nt, Human
aggcgaucacaacgugcauug

SEQ ID NO: 1774928 - RNA, 20 nt, Human
aggcgaucacaacgugcauu

SEQ ID NO: 1774929 - RNA, 19 nt, Human
aggcgaucacaacgugcau

SEQ ID NO: 1774930 - RNA, 17 nt, Human
aggccuucucugaagga

SEQ ID NO: 1774931 - RNA, 18 nt, Human
aggccuucucugaaggac

SEQ ID NO: 1774932 - RNA, 14 nt, Human
aggccuugucccag

SEQ ID NO: 1774933 - RNA, 15 nt, Human
aggccuuuaaaauuu

SEQ ID NO: 1774934 - RNA, 14 nt, Human
aggccuuuaaaauu

SEQ ID NO: 1774935 - RNA, 13 nt, Human
aggcuccagaggg

SEQ ID NO: 1774936 - RNA, 14 nt, Human
aggcuccagagggc

SEQ ID NO: 1774937 - RNA, 16 nt, Human
aggcucacccccuucu

SEQ ID NO: 1774938 - RNA, 19 nt, Human
aggcucacccccuucucca

SEQ ID NO: 1774939 - RNA, 21 nt, Human
aggcucacccccuucuccauc

SEQ ID NO: 1774940 - RNA, 23 nt, Human
aggcucacccccuucuccaucca

SEQ ID NO: 1774941 - RNA, 21 nt, Human
aggcaggucuugaacuccugg

SEQ ID NO: 1774942 - RNA, 19 nt, Human
aggcaguauuuuguguccu

SEQ ID NO: 1774943 - RNA, 21 nt, Human
aggcaguauuuuguguccucc

SEQ ID NO: 1774944 - RNA, 22 nt, Human
aggcagggucucacucugucgc

SEQ ID NO: 1774945 - RNA, 14 nt, Human
aggcagguccaggg

SEQ ID NO: 1774946 - RNA, 19 nt, Human
aggcagggucucacucugu

SEQ ID NO: 1774947 - RNA, 18 nt, Human
aggcagggucucacucug

SEQ ID NO: 1774948 - RNA, 20 nt, Human
aggcagggucucacucuguc

SEQ ID NO: 1774949 - RNA, 21 nt, Human
aggcagggucucacucugucg

SEQ ID NO: 1774950 - RNA, 21 nt, Human
aggcaggaccuucgggcugug

SEQ ID NO: 1774951 - RNA, 22 nt, Human
aggcaggaccuucgggcugugc

SEQ ID NO: 1774952 - RNA, 23 nt, Human
aggcaggaccuucgggcugugcc

SEQ ID NO: 1774953 - RNA, 15 nt, Human
aggcacccaccauca

SEQ ID NO: 1774954 - RNA, 15 nt, Human
aggcaccagucccug

SEQ ID NO: 1774955 - RNA, 19 nt, Human
aggcagccccauucugccu

SEQ ID NO: 1774956 - RNA, 20 nt, Human
aggcagccccauucugccug

SEQ ID NO: 1774957 - RNA, 21 nt, Human
aggcagccccauucugccugc

SEQ ID NO: 1774958 - RNA, 22 nt, Human
aggcagccccauucugccugcc

SEQ ID NO: 1774959 - RNA, 16 nt, Human
aggcaccagucccugu

SEQ ID NO: 1774960 - RNA, 15 nt, Human
aggcaaugcuggcug

SEQ ID NO: 1774961 - RNA, 16 nt, Human
aggcaaugcuggcugu

SEQ ID NO: 1774962 - RNA, 21 nt, Human
uggagcuucauggcagaaggc

SEQ ID NO: 1774963 - RNA, 13 nt, Human
aggaggccaggcc

SEQ ID NO: 1774964 - RNA, 22 nt, Human
aggaggccaggccggcgagccc

SEQ ID NO: 1774965 - RNA, 17 nt, Human
uggaagugcaucuacuu

SEQ ID NO: 1774966 - RNA, 14 nt, Human
uggaagcucuucuu

SEQ ID NO: 1774967 - RNA, 13 nt, Human
uggaagcuccgcu

SEQ ID NO: 1774968 - RNA, 18 nt, Human
ugcugccccaucagugcu

SEQ ID NO: 1774969 - RNA, 19 nt, Human
ugcugccccaucagugcuc

SEQ ID NO: 1774970 - RNA, 21 nt, Human
ugcugccccaucagugcuccc

SEQ ID NO: 1774971 - RNA, 12 nt, Human
aggaucagucug

SEQ ID NO: 1774972 - RNA, 16 nt, Human
aggaucagauugcaug

SEQ ID NO: 1774973 - RNA, 22 nt, Human
aggauugcuacuguccuaccca

SEQ ID NO: 1774974 - RNA, 23 nt, Human
aggauuugcacagaagcacaugc

SEQ ID NO: 1774975 - RNA, 14 nt, Human
aggcaagcaccucc

SEQ ID NO: 1774976 - RNA, 20 nt, Human
uggacaaagaauuccaaagc

SEQ ID NO: 1774977 - RNA, 23 nt, Human
uggacaaagaauuccaaagcaaa

SEQ ID NO: 1774978 - RNA, 18 nt, Human
aggcugggcuucaguggc

SEQ ID NO: 1774979 - RNA, 19 nt, Human
aggcugggcuucaguggca

SEQ ID NO: 1774980 - RNA, 20 nt, Human
aggcugggcuucaguggcag

SEQ ID NO: 1774981 - RNA, 21 nt, Human
aggcugggcuucaguggcagc

SEQ ID NO: 1774982 - RNA, 22 nt, Human
aggcugggcuucaguggcagcu

SEQ ID NO: 1774983 - RNA, 23 nt, Human
aggcugggcuucaguggcagcug

SEQ ID NO: 1774984 - RNA, 14 nt, Human
aggcugggcuucag

SEQ ID NO: 1774985 - RNA, 16 nt, Human
aggcuucucucugugg

SEQ ID NO: 1774986 - RNA, 17 nt, Human
aggcugggggagagccg

SEQ ID NO: 1774987 - RNA, 19 nt, Human
aggcugggggagagccgug

SEQ ID NO: 1774988 - RNA, 16 nt, Human
agggaaaaggggcucc

SEQ ID NO: 1774989 - RNA, 17 nt, Human
agggaaaaggggcuccu

SEQ ID NO: 1774990 - RNA, 18 nt, Human
agggaaaauuauuugcau

SEQ ID NO: 1774991 - RNA, 15 nt, Human
uggcuacgccucuuc

SEQ ID NO: 1774992 - RNA, 18 nt, Human
uggcuacgccucuucugu

SEQ ID NO: 1774993 - RNA, 19 nt, Human
uggcuacgccucuucuguc

SEQ ID NO: 1774994 - RNA, 22 nt, Human
uggcuacgccucuucugucccu

SEQ ID NO: 1774995 - RNA, 23 nt, Human
uggcuacgccucuucugucccug

SEQ ID NO: 1774996 - RNA, 15 nt, Human
aggcuccagagggca

SEQ ID NO: 1774997 - RNA, 16 nt, Human
aggcuccagagggcac

SEQ ID NO: 1774998 - RNA, 16 nt, Human
uggcuguuggcugggg

SEQ ID NO: 1774999 - RNA, 18 nt, Human
uggcuguuggcugggggc

SEQ ID NO: 1775000 - RNA, 23 nt, Human
uggcuguuggcugggggccucag

SEQ ID NO: 1775001 - RNA, 23 nt, Human
uggcugcaaaggguaucaggugc

SEQ ID NO: 1775002 - RNA, 23 nt, Human
ugggaaaaaugcccuuaaaucau

SEQ ID NO: 1775003 - RNA, 18 nt, Human
ugggaaacaaaaggauaa

SEQ ID NO: 1775004 - RNA, 20 nt, Human
agggaguccgaaagggacuu

SEQ ID NO: 1775005 - RNA, 23 nt, Human
agggaguccgaaagggacuugga

SEQ ID NO: 1775006 - RNA, 20 nt, Human
agggagugacagaggcagcc

SEQ ID NO: 1775007 - RNA, 12 nt, Human
agggcccagaga

SEQ ID NO: 1775008 - RNA, 13 nt, Human
agggcccagagag

SEQ ID NO: 1775009 - RNA, 21 nt, Human
agggccaagcccagcacugcu

SEQ ID NO: 1775010 - RNA, 19 nt, Human
agggccaaacgcugagcca

SEQ ID NO: 1775011 - RNA, 20 nt, Human
agggccaaacgcugagccac

SEQ ID NO: 1775012 - RNA, 22 nt, Human
agggccaaacgcugagccaccu

SEQ ID NO: 1775013 - RNA, 23 nt, Human
agggccaaacgcugagccaccug

SEQ ID NO: 1775014 - RNA, 14 nt, Human
agggcagaaugaau

SEQ ID NO: 1775015 - RNA, 15 nt, Human
agggcagaaugaauc

SEQ ID NO: 1775016 - RNA, 12 nt, Human
agggcagaguga

SEQ ID NO: 1775017 - RNA, 20 nt, Human
agggcagucgauagagcugu

SEQ ID NO: 1775018 - RNA, 13 nt, Human
agggcccccacag

SEQ ID NO: 1775019 - RNA, 18 nt, Human
agggcccccacaguugcu

SEQ ID NO: 1775020 - RNA, 14 nt, Human
agggcccagagagg

SEQ ID NO: 1775021 - RNA, 18 nt, Human
agggcccagagagggugg

SEQ ID NO: 1775022 - RNA, 12 nt, Human
agggcuccuggg

SEQ ID NO: 1775023 - RNA, 21 nt, Human
agggcugcggcguacaggcug

SEQ ID NO: 1775024 - RNA, 23 nt, Human
agggcugcggcguacaggcuggc

SEQ ID NO: 1775025 - RNA, 21 nt, Human
agggcugccccuaaucucugu

SEQ ID NO: 1775026 - RNA, 12 nt, Human
agggcugcauga

SEQ ID NO: 1775027 - RNA, 15 nt, Human
agggcugcaugaugu

SEQ ID NO: 1775028 - RNA, 16 nt, Human
agggcugcaugauguu

SEQ ID NO: 1775029 - RNA, 22 nt, Human
agggcugcaugauguuugccca

SEQ ID NO: 1775030 - RNA, 11 nt, Human
ugggcucccug

SEQ ID NO: 1775031 - RNA, 15 nt, Human
ugggcucccugacug

SEQ ID NO: 1775032 - RNA, 19 nt, Human
ugggcucccugacugggag

SEQ ID NO: 1775033 - RNA, 21 nt, Human
agggcugugcuugaaggcccu

SEQ ID NO: 1775034 - RNA, 22 nt, Human
agggcugugcuugaaggcccug

SEQ ID NO: 1775035 - RNA, 23 nt, Human
agggcugugcuugaaggcccugc

SEQ ID NO: 1775036 - RNA, 13 nt, Human
ugggcaauuuaga

SEQ ID NO: 1775037 - RNA, 15 nt, Human
ugggcaauuuagaaa

SEQ ID NO: 1775038 - RNA, 16 nt, Human
ugggcaauuuagaaaa

SEQ ID NO: 1775039 - RNA, 14 nt, Human
ugggagggcagcag

SEQ ID NO: 1775040 - RNA, 17 nt, Human
ugggagggcagcagggc

SEQ ID NO: 1775041 - RNA, 18 nt, Human
ugggagggcagcagggcu

SEQ ID NO: 1775042 - RNA, 19 nt, Human
ugggagggcagcagggcua

SEQ ID NO: 1775043 - RNA, 15 nt, Human
ugggcaaagccuagu

SEQ ID NO: 1775044 - RNA, 21 nt, Human
ugggcaaagccuagugaaggc

SEQ ID NO: 1775045 - RNA, 15 nt, Human
ugggagaaaaucauc

SEQ ID NO: 1775046 - RNA, 19 nt, Human
ugggagaaauacuugaacu

SEQ ID NO: 1775047 - RNA, 13 nt, Human
ugggaggcucacc

SEQ ID NO: 1775048 - RNA, 20 nt, Human
ugggaggcucacccccuucu

SEQ ID NO: 1775049 - RNA, 22 nt, Human
ugggaggcucacccccuucucc

SEQ ID NO: 1775050 - RNA, 18 nt, Human
ugggacuacaggcaccca

SEQ ID NO: 1775051 - RNA, 15 nt, Human
agggagcuagccaga

SEQ ID NO: 1775052 - RNA, 16 nt, Human
agggagcuagccagag

SEQ ID NO: 1775053 - RNA, 14 nt, Human
agggagccuggccc

SEQ ID NO: 1775054 - RNA, 18 nt, Human
ugggacuuccaugccuua

SEQ ID NO: 1775055 - RNA, 18 nt, Human
ugggacucaaugcacuga

SEQ ID NO: 1775056 - RNA, 16 nt, Human
ugggacuacaggugug

SEQ ID NO: 1775057 - RNA, 22 nt, Human
agggagcuccaacucagaaggg

SEQ ID NO: 1775058 - RNA, 17 nt, Human
agggagcuagccagagg

SEQ ID NO: 1775059 - RNA, 23 nt, Human
agggagcuagccagaggacugug

SEQ ID NO: 1775060 - RNA, 20 nt, Human
agggacuuggaagcuccgcu

SEQ ID NO: 1775061 - RNA, 16 nt, Human
agggagaccuggacac

SEQ ID NO: 1775062 - RNA, 21 nt, Human
agggagaccuggacacaggcc

SEQ ID NO: 1775063 - RNA, 22 nt, Human
agggagaccuggacacaggccu

SEQ ID NO: 1775064 - RNA, 18 nt, Human
agggacuuggaagcuccg

SEQ ID NO: 1775065 - RNA, 19 nt, Human
agggacuuggaagcuccgc

SEQ ID NO: 1775066 - RNA, 15 nt, Human
agggacuuggaagcu

SEQ ID NO: 1775067 - RNA, 13 nt, Human
agggaaauuucag

SEQ ID NO: 1775068 - RNA, 15 nt, Human
agggaaauaucauuu

SEQ ID NO: 1775069 - RNA, 16 nt, Human
uguccaaaacugccuc

SEQ ID NO: 1775070 - RNA, 17 nt, Human
ugucagguggggcagcu

SEQ ID NO: 1775071 - RNA, 18 nt, Human
ugucagguggggcagcuu

SEQ ID NO: 1775072 - RNA, 15 nt, Human
ugucagaugcccgag

SEQ ID NO: 1775073 - RNA, 21 nt, Human
ugucagaugcccgagggaggg

SEQ ID NO: 1775074 - RNA, 20 nt, Human
ugucagguggggcagcuuga

SEQ ID NO: 1775075 - RNA, 20 nt, Human
ugucauuugagcagggcuca

SEQ ID NO: 1775076 - RNA, 21 nt, Human
ugucauuugagcagggcucag

SEQ ID NO: 1775077 - RNA, 22 nt, Human
ugucauuugagcagggcucagc

SEQ ID NO: 1775078 - RNA, 17 nt, Human
uguccagcauugcugga

SEQ ID NO: 1775079 - RNA, 19 nt, Human
uguccagcauugcuggacu

SEQ ID NO: 1775080 - RNA, 14 nt, Human
uguccaauccuaug

SEQ ID NO: 1775081 - RNA, 20 nt, Human
ugucccugcacuugcagacu

SEQ ID NO: 1775082 - RNA, 22 nt, Human
ugucccugcacuugcagacucu

SEQ ID NO: 1775083 - RNA, 23 nt, Human
ugucccugcacuugcagacucua

SEQ ID NO: 1775084 - RNA, 13 nt, Human
uguccccucccag

SEQ ID NO: 1775085 - RNA, 16 nt, Human
uguccccucccagagc

SEQ ID NO: 1775086 - RNA, 15 nt, Human
agucaccaagcccag

SEQ ID NO: 1775087 - RNA, 15 nt, Human
aguauuuuguguccu

SEQ ID NO: 1775088 - RNA, 16 nt, Human
aguauuucaaauugga

SEQ ID NO: 1775089 - RNA, 13 nt, Human
aguauuauuuucc

SEQ ID NO: 1775090 - RNA, 14 nt, Human
aguauuauuuucca

SEQ ID NO: 1775091 - RNA, 15 nt, Human
aguauuauuuuccaa

SEQ ID NO: 1775092 - RNA, 18 nt, Human
aguauuauuuuccaaaag

SEQ ID NO: 1775093 - RNA, 14 nt, Human
uguauauucacuuu

SEQ ID NO: 1775094 - RNA, 12 nt, Human
uguauauucacu

SEQ ID NO: 1775095 - RNA, 18 nt, Human
agucccaccuuggcugca

SEQ ID NO: 1775096 - RNA, 19 nt, Human
agucccaccuuggcugcag

SEQ ID NO: 1775097 - RNA, 20 nt, Human
agucccaccuuggcugcagg

SEQ ID NO: 1775098 - RNA, 15 nt, Human
agucccaccuuggcu

SEQ ID NO: 1775099 - RNA, 16 nt, Human
agucccaccuuggcug

SEQ ID NO: 1775100 - RNA, 14 nt, Human
agucauaccaauga

SEQ ID NO: 1775101 - RNA, 16 nt, Human
agucaguugaaauucu

SEQ ID NO: 1775102 - RNA, 14 nt, Human
agucaguuugcagu

SEQ ID NO: 1775103 - RNA, 17 nt, Human
agucauaccaaugaaaa

SEQ ID NO: 1775104 - RNA, 23 nt, Human
agucauaccaaugaaaaaaugua

SEQ ID NO: 1775105 - RNA, 16 nt, Human
ugucccuuaaacaaaa

SEQ ID NO: 1775106 - RNA, 18 nt, Human
ugucccugcgccuuuccu

SEQ ID NO: 1775107 - RNA, 13 nt, Human
ugucccuguuaga

SEQ ID NO: 1775108 - RNA, 23 nt, Human
agucacugugagcucccaggugc

SEQ ID NO: 1775109 - RNA, 24 nt, Human
agucacugugagcucccaggugca

SEQ ID NO: 1775110 - RNA, 13 nt, Human
agucagcucucug

SEQ ID NO: 1775111 - RNA, 14 nt, Human
agucagcucucugc

SEQ ID NO: 1775112 - RNA, 17 nt, Human
agucagcucucugcccu

SEQ ID NO: 1775113 - RNA, 18 nt, Human
agucagcucucugcccug

SEQ ID NO: 1775114 - RNA, 16 nt, Human
aguccuaguuuuccua

SEQ ID NO: 1775115 - RNA, 23 nt, Human
aguccuaguuuuccuacuuauaa

SEQ ID NO: 1775116 - RNA, 18 nt, Human
aguccuauucaaauuccu

SEQ ID NO: 1775117 - RNA, 19 nt, Human
aguccuauucaaauuccua

SEQ ID NO: 1775118 - RNA, 23 nt, Human
agucucacuguugcccaggcugg

SEQ ID NO: 1775119 - RNA, 11 nt, Human
ugucucaucca

SEQ ID NO: 1775120 - RNA, 16 nt, Human
ugucucauccaucauc

SEQ ID NO: 1775121 - RNA, 17 nt, Human
ugucucauccaucauca

SEQ ID NO: 1775122 - RNA, 21 nt, Human
ugucucauccaucaucaugug

SEQ ID NO: 1775123 - RNA, 12 nt, Human
ugggcugaggga

SEQ ID NO: 1775124 - RNA, 16 nt, Human
ugggcugagggagccu

SEQ ID NO: 1775125 - RNA, 11 nt, Human
ugggcugaggg

SEQ ID NO: 1775126 - RNA, 16 nt, Human
aggugucccugcacuu

SEQ ID NO: 1775127 - RNA, 20 nt, Human
aggugucccugcacuugcag

SEQ ID NO: 1775128 - RNA, 21 nt, Human
aggugugagucaccaagccca

SEQ ID NO: 1775129 - RNA, 22 nt, Human
aggugugagucaccaagcccag

SEQ ID NO: 1775130 - RNA, 18 nt, Human
agguggggagacugggcu

SEQ ID NO: 1775131 - RNA, 14 nt, Human
aggugggcugggcc

SEQ ID NO: 1775132 - RNA, 21 nt, Human
aggugggcugggcccucucuu

SEQ ID NO: 1775133 - RNA, 22 nt, Human
aggugggcugggcccucucuuc

SEQ ID NO: 1775134 - RNA, 12 nt, Human
aggugugcucug

SEQ ID NO: 1775135 - RNA, 19 nt, Human
agguguccagcauugcugg

SEQ ID NO: 1775136 - RNA, 20 nt, Human
agguguccagcauugcugga

SEQ ID NO: 1775137 - RNA, 23 nt, Human
agguguccagcauugcuggacuc

SEQ ID NO: 1775138 - RNA, 14 nt, Human
agguugaagcacca

SEQ ID NO: 1775139 - RNA, 19 nt, Human
agguucuucuuguucugag

SEQ ID NO: 1775140 - RNA, 15 nt, Human
agguuggagcccagg

SEQ ID NO: 1775141 - RNA, 16 nt, Human
agguuggagcccaggg

SEQ ID NO: 1775142 - RNA, 15 nt, Human
agguuggauggaugg

SEQ ID NO: 1775143 - RNA, 17 nt, Human
aguagauuaaaaauuau

SEQ ID NO: 1775144 - RNA, 18 nt, Human
aguagauuaaaaauuaua

SEQ ID NO: 1775145 - RNA, 19 nt, Human
aguagauuaaaaauuauag

SEQ ID NO: 1775146 - RNA, 17 nt, Human
aguaccaccaaaaaagc

SEQ ID NO: 1775147 - RNA, 22 nt, Human
aguaccaccaaaaaagcuguau

SEQ ID NO: 1775148 - RNA, 17 nt, Human
uguauauauauuaagag

SEQ ID NO: 1775149 - RNA, 14 nt, Human
aguaaugaguuuaa

SEQ ID NO: 1775150 - RNA, 17 nt, Human
aguaaugaguuuaaaaa

SEQ ID NO: 1775151 - RNA, 21 nt, Human
aguaaugaguuuaaaaaucaa

SEQ ID NO: 1775152 - RNA, 14 nt, Human
aguggauugcauuu

SEQ ID NO: 1775153 - RNA, 11 nt, Human
aguggcagcug

SEQ ID NO: 1775154 - RNA, 12 nt, Human
aguggggaagag

SEQ ID NO: 1775155 - RNA, 13 nt, Human
aguggggaagagu

SEQ ID NO: 1775156 - RNA, 18 nt, Human
uguuaaguccucccugac

SEQ ID NO: 1775157 - RNA, 22 nt, Human
uguuaaguccucccugacuuuu

SEQ ID NO: 1775158 - RNA, 23 nt, Human
uguguuaccugaaaacacugugc

SEQ ID NO: 1775159 - RNA, 20 nt, Human
ugugucuugcaauggcagcc

SEQ ID NO: 1775160 - RNA, 16 nt, Human
uguguccaaaacugcc

SEQ ID NO: 1775161 - RNA, 17 nt, Human
uguguccacgacugucu

SEQ ID NO: 1775162 - RNA, 18 nt, Human
uguguccacgacugucuc

SEQ ID NO: 1775163 - RNA, 19 nt, Human
uguguccacgacugucucc

SEQ ID NO: 1775164 - RNA, 16 nt, Human
ugugucccccucuguc

SEQ ID NO: 1775165 - RNA, 18 nt, Human
ugugucccccucugucca

SEQ ID NO: 1775166 - RNA, 21 nt, Human
ugugucccccucuguccaggc

SEQ ID NO: 1775167 - RNA, 17 nt, Human
uguguccuccaggagcu

SEQ ID NO: 1775168 - RNA, 18 nt, Human
uguguccuccaggagcuu

SEQ ID NO: 1775169 - RNA, 21 nt, Human
uguguccuccaggagcuucuu

SEQ ID NO: 1775170 - RNA, 20 nt, Human
uguguccugaaacgcuccuu

SEQ ID NO: 1775171 - RNA, 15 nt, Human
agugccauguaaauc

SEQ ID NO: 1775172 - RNA, 21 nt, Human
aguguuccccuuccacugagg

SEQ ID NO: 1775173 - RNA, 16 nt, Human
aguguuccccuuccac

SEQ ID NO: 1775174 - RNA, 13 nt, Human
aguuagacuguug

SEQ ID NO: 1775175 - RNA, 22 nt, Human
aguuagauuauugaaauauuau

SEQ ID NO: 1775176 - RNA, 23 nt, Human
uguugcccaggcuggcgugcagu

SEQ ID NO: 1775177 - RNA, 20 nt, Human
uguugcccaggcuggcgugc

SEQ ID NO: 1775178 - RNA, 11 nt, Human
uguugccccag

SEQ ID NO: 1775179 - RNA, 16 nt, Human
uguugccccuuucucu

SEQ ID NO: 1775180 - RNA, 17 nt, Human
uguugccccuuucucuu

SEQ ID NO: 1775181 - RNA, 20 nt, Human
uguugccccuuucucuuuuc

SEQ ID NO: 1775182 - RNA, 21 nt, Human
uguugccccuuucucuuuucc

SEQ ID NO: 1775183 - RNA, 17 nt, Human
uguugcagguucaugga

SEQ ID NO: 1775184 - RNA, 23 nt, Human
uguuccuggaggucagcauuuga

SEQ ID NO: 1775185 - RNA, 17 nt, Human
uguuccuuggcagugga

SEQ ID NO: 1775186 - RNA, 15 nt, Human
uguucgggugugggu

SEQ ID NO: 1775187 - RNA, 18 nt, Human
agugugaggccagggcag

SEQ ID NO: 1775188 - RNA, 15 nt, Human
agugugaggccaggg

SEQ ID NO: 1775189 - RNA, 17 nt, Human
agugguccacaucccgg

SEQ ID NO: 1775190 - RNA, 13 nt, Human
agugguccuagag

SEQ ID NO: 1775191 - RNA, 17 nt, Human
agugguccuagaggccc

SEQ ID NO: 1775192 - RNA, 12 nt, Human
ugucuccagcuu

SEQ ID NO: 1775193 - RNA, 15 nt, Human
ugucuccagcuuccc

SEQ ID NO: 1775194 - RNA, 15 nt, Human
ugucuccauggcccu

SEQ ID NO: 1775195 - RNA, 23 nt, Human
ugugaggaaagucauuggcuuua

SEQ ID NO: 1775196 - RNA, 22 nt, Human
ugugaggaaagucauuggcuuu

SEQ ID NO: 1775197 - RNA, 16 nt, Human
ugugaggaaagucauu

SEQ ID NO: 1775198 - RNA, 19 nt, Human
ugugagcucccaggugcag

SEQ ID NO: 1775199 - RNA, 23 nt, Human
ugugagcucccaggugcagccag

SEQ ID NO: 1775200 - RNA, 14 nt, Human
agugagcacuaagg

SEQ ID NO: 1775201 - RNA, 22 nt, Human
agugagcacuaaggugugcucu

SEQ ID NO: 1775202 - RNA, 17 nt, Human
agugagaauaggcagcc

SEQ ID NO: 1775203 - RNA, 14 nt, Human
agugacucuccagg

SEQ ID NO: 1775204 - RNA, 15 nt, Human
agugacucuccaggg

SEQ ID NO: 1775205 - RNA, 22 nt, Human
ugugaugaugaaaugaggucag

SEQ ID NO: 1775206 - RNA, 16 nt, Human
ugugaugcccugcccu

SEQ ID NO: 1775207 - RNA, 12 nt, Human
agugagcugguu

SEQ ID NO: 1775208 - RNA, 16 nt, Human
agucuuucacauuuaa

SEQ ID NO: 1775209 - RNA, 18 nt, Human
agucuuucacauuuaaau

SEQ ID NO: 1775210 - RNA, 12 nt, Human
ugugcucugauc

SEQ ID NO: 1775211 - RNA, 23 nt, Human
ugugcccuccugacccauugcug

SEQ ID NO: 1775212 - RNA, 13 nt, Human
ugugcccuccuga

SEQ ID NO: 1775213 - RNA, 17 nt, Human
ugugcccuccugaccca

SEQ ID NO: 1775214 - RNA, 19 nt, Human
uguggaugagcccucagaa

SEQ ID NO: 1775215 - RNA, 23 nt, Human
uguggaugagcccucagaacccu

SEQ ID NO: 1775216 - RNA, 22 nt, Human
uguggaugccgauuucuguaaa

SEQ ID NO: 1775217 - RNA, 23 nt, Human
agugagcugguuuuuagcggaga

SEQ ID NO: 1775218 - RNA, 13 nt, Human
agugcaucuacuu

SEQ ID NO: 1775219 - RNA, 14 nt, Human
agugcaucuacuug

SEQ ID NO: 1775220 - RNA, 17 nt, Human
agugcagugagccgaga

SEQ ID NO: 1775221 - RNA, 23 nt, Human
agugcaguccugaucagagccgu

SEQ ID NO: 1775222 - RNA, 13 nt, Human
agugcagccaagu

SEQ ID NO: 1775223 - RNA, 21 nt, Human
agugcagccaaguagccucuc

SEQ ID NO: 1775224 - RNA, 22 nt, Human
agugcagccaaguagccucucc

SEQ ID NO: 1775225 - RNA, 18 nt, Human
auagauaggucagugcaa

SEQ ID NO: 1775226 - RNA, 13 nt, Human
auagagcuguauu

SEQ ID NO: 1775227 - RNA, 14 nt, Human
auagaguauaugca

SEQ ID NO: 1775228 - RNA, 15 nt, Human
auagaguauaugcac

SEQ ID NO: 1775229 - RNA, 14 nt, Human
auagagagagacca

SEQ ID NO: 1775230 - RNA, 22 nt, Human
auagaccuuuuuuuuuuuucca

SEQ ID NO: 1775231 - RNA, 12 nt, Human
auagagaauguu

SEQ ID NO: 1775232 - RNA, 13 nt, Human
auagagaauguuc

SEQ ID NO: 1775233 - RNA, 14 nt, Human
auagagaauguucc

SEQ ID NO: 1775234 - RNA, 17 nt, Human
auagagaauguuccaga

SEQ ID NO: 1775235 - RNA, 18 nt, Human
auagaccucuaguagcug

SEQ ID NO: 1775236 - RNA, 13 nt, Human
auagagccugagg

SEQ ID NO: 1775237 - RNA, 15 nt, Human
auagagccugaggga

SEQ ID NO: 1775238 - RNA, 14 nt, Human
auagagcuguauua

SEQ ID NO: 1775239 - RNA, 13 nt, Human
auagauguuuccu

SEQ ID NO: 1775240 - RNA, 20 nt, Human
auagauaagaguagaaacug

SEQ ID NO: 1775241 - RNA, 14 nt, Human
auacuguacagggg

SEQ ID NO: 1775242 - RNA, 13 nt, Human
auagaaguaaaaa

SEQ ID NO: 1775243 - RNA, 16 nt, Human
auagaaguuuuaaauu

SEQ ID NO: 1775244 - RNA, 16 nt, Human
auagaacuucauggau

SEQ ID NO: 1775245 - RNA, 23 nt, Human
auagaagcugcagugguauuaau

SEQ ID NO: 1775246 - RNA, 15 nt, Human
uuauuauauuuacaa

SEQ ID NO: 1775247 - RNA, 14 nt, Human
uuauuauauuuaca

SEQ ID NO: 1775248 - RNA, 13 nt, Human
uuauguuaaacua

SEQ ID NO: 1775249 - RNA, 12 nt, Human
uuauguuaaacu

SEQ ID NO: 1775250 - RNA, 11 nt, Human
uuauguuaaac

SEQ ID NO: 1775251 - RNA, 10 nt, Human
uuauguuaaa

SEQ ID NO: 1775252 - RNA, 14 nt, Human
uuauguuaaacuag

SEQ ID NO: 1775253 - RNA, 12 nt, Human
uuauucaauaaa

SEQ ID NO: 1775254 - RNA, 21 nt, Human
uuauucaauaaaguauuuaau

SEQ ID NO: 1775255 - RNA, 20 nt, Human
uuauucaauaaaguauuuaa

SEQ ID NO: 1775256 - RNA, 19 nt, Human
uuauucaauaaaguauuua

SEQ ID NO: 1775257 - RNA, 17 nt, Human
uuauucaauaaaguauu

SEQ ID NO: 1775258 - RNA, 14 nt, Human
uuauucaauaaagu

SEQ ID NO: 1775259 - RNA, 13 nt, Human
uuauucaguguca

SEQ ID NO: 1775260 - RNA, 14 nt, Human
uuauucagugucac

SEQ ID NO: 1775261 - RNA, 12 nt, Human
uuauucauuauu

SEQ ID NO: 1775262 - RNA, 15 nt, Human
uuauucauuauuugu

SEQ ID NO: 1775263 - RNA, 18 nt, Human
uuauucauuauuugucaa

SEQ ID NO: 1775264 - RNA, 19 nt, Human
uuauucauuauuugucaaa

SEQ ID NO: 1775265 - RNA, 14 nt, Human
auacucauuucuua

SEQ ID NO: 1775266 - RNA, 18 nt, Human
uuaucaccgugggcuccc

SEQ ID NO: 1775267 - RNA, 13 nt, Human
uuaugaagagcua

SEQ ID NO: 1775268 - RNA, 18 nt, Human
uuaugaaagguuuacauu

SEQ ID NO: 1775269 - RNA, 19 nt, Human
uuaugaacacuuaaauuau

SEQ ID NO: 1775270 - RNA, 18 nt, Human
uuaugauagugguaugac

SEQ ID NO: 1775271 - RNA, 14 nt, Human
uuaugaaucuuucc

SEQ ID NO: 1775272 - RNA, 14 nt, Human
uuaugaaugaaaaa

SEQ ID NO: 1775273 - RNA, 21 nt, Human
uuaugucuuuugaugaauaga

SEQ ID NO: 1775274 - RNA, 20 nt, Human
uuauguaaaaggccaaaccu

SEQ ID NO: 1775275 - RNA, 22 nt, Human
uuauguaaaaggccaaaccucu

SEQ ID NO: 1775276 - RNA, 22 nt, Human
auacgcuuuuaaugaaaaggaa

SEQ ID NO: 1775277 - RNA, 15 nt, Human
auacaggaacaacau

SEQ ID NO: 1775278 - RNA, 19 nt, Human
auacagucuuccauuugca

SEQ ID NO: 1775279 - RNA, 17 nt, Human
auacagucuuccacaaa

SEQ ID NO: 1775280 - RNA, 18 nt, Human
auacagucuuccacaaag

SEQ ID NO: 1775281 - RNA, 21 nt, Human
auacagucuuccacaaagaaa

SEQ ID NO: 1775282 - RNA, 22 nt, Human
auacagucuuccacaaagaaaa

SEQ ID NO: 1775283 - RNA, 20 nt, Human
auacagucuuccauuugcaa

SEQ ID NO: 1775284 - RNA, 23 nt, Human
auacaggaaaagcugcugacagu

SEQ ID NO: 1775285 - RNA, 14 nt, Human
auacauaaagacua

SEQ ID NO: 1775286 - RNA, 15 nt, Human
uuauaaaguagaaau

SEQ ID NO: 1775287 - RNA, 22 nt, Human
auacaagccauucuaaggaaau

SEQ ID NO: 1775288 - RNA, 23 nt, Human
auacagaacucuuucaaaaccuu

SEQ ID NO: 1775289 - RNA, 18 nt, Human
auacagaacucuuucaaa

SEQ ID NO: 1775290 - RNA, 20 nt, Human
auacagaacucuuucaaaac

SEQ ID NO: 1775291 - RNA, 14 nt, Human
auacagaacucuuu

SEQ ID NO: 1775292 - RNA, 12 nt, Human
auacaauaaauu

SEQ ID NO: 1775293 - RNA, 14 nt, Human
auacaauaaauugc

SEQ ID NO: 1775294 - RNA, 17 nt, Human
auacaauaaauugcuaa

SEQ ID NO: 1775295 - RNA, 15 nt, Human
auacagaacucuuuc

SEQ ID NO: 1775296 - RNA, 16 nt, Human
auacagaacucuuuca

SEQ ID NO: 1775297 - RNA, 14 nt, Human
aguuucucuuuuca

SEQ ID NO: 1775298 - RNA, 12 nt, Human
uuaaaaaugcaa

SEQ ID NO: 1775299 - RNA, 12 nt, Human
uuaaaauccuca

SEQ ID NO: 1775300 - RNA, 15 nt, Human
uuaaaaaugcaaauc

SEQ ID NO: 1775301 - RNA, 13 nt, Human
uuaaaauccucaa

SEQ ID NO: 1775302 - RNA, 20 nt, Human
aguuuaaauuguaauaggcg

SEQ ID NO: 1775303 - RNA, 17 nt, Human
aguuuaaauuguaauag

SEQ ID NO: 1775304 - RNA, 12 nt, Human
aguuuuguugcc

SEQ ID NO: 1775305 - RNA, 14 nt, Human
aguuuuguugcccc

SEQ ID NO: 1775306 - RNA, 20 nt, Human
uuaagaaaaaauaacacaca

SEQ ID NO: 1775307 - RNA, 21 nt, Human
uuaagaaaaaauaacacacau

SEQ ID NO: 1775308 - RNA, 20 nt, Human
uuaaguuuccuuccagccca

SEQ ID NO: 1775309 - RNA, 21 nt, Human
uuaaguuuccuuccagcccag

SEQ ID NO: 1775310 - RNA, 21 nt, Human
uuaauccccaguaaaauugcc

SEQ ID NO: 1775311 - RNA, 18 nt, Human
uuaauccccaguaaaauu

SEQ ID NO: 1775312 - RNA, 17 nt, Human
uuaauccccaguaaaau

SEQ ID NO: 1775313 - RNA, 17 nt, Human
uuacaguaggagcccag

SEQ ID NO: 1775314 - RNA, 17 nt, Human
uuacaguuaaggaauau

SEQ ID NO: 1775315 - RNA, 14 nt, Human
uuacaggugugaac

SEQ ID NO: 1775316 - RNA, 14 nt, Human
auaaauuguauauu

SEQ ID NO: 1775317 - RNA, 13 nt, Human
auaaauuguauau

SEQ ID NO: 1775318 - RNA, 19 nt, Human
auaaauugcuaauguugcu

SEQ ID NO: 1775319 - RNA, 16 nt, Human
uuagaagucacacagu

SEQ ID NO: 1775320 - RNA, 16 nt, Human
uuacuguagccucaga

SEQ ID NO: 1775321 - RNA, 21 nt, Human
uuacuguagccucagaugauu

SEQ ID NO: 1775322 - RNA, 21 nt, Human
uuagaaucagccuugaaacau

SEQ ID NO: 1775323 - RNA, 11 nt, Human
auaagaaaaac

SEQ ID NO: 1775324 - RNA, 12 nt, Human
auaagaaaaacu

SEQ ID NO: 1775325 - RNA, 14 nt, Human
auaagaaaaacuuu

SEQ ID NO: 1775326 - RNA, 15 nt, Human
auaagaaaaacuuuu

SEQ ID NO: 1775327 - RNA, 17 nt, Human
uuacuggacaaagaauu

SEQ ID NO: 1775328 - RNA, 21 nt, Human
uuacugccaaagggaaauauc

SEQ ID NO: 1775329 - RNA, 13 nt, Human
uuagauguucuaa

SEQ ID NO: 1775330 - RNA, 20 nt, Human
uuagauguucuaagucuuuc

SEQ ID NO: 1775331 - RNA, 20 nt, Human
uuagauguucucuaucauuu

SEQ ID NO: 1775332 - RNA, 19 nt, Human
uuagauguucucuaucauu

SEQ ID NO: 1775333 - RNA, 15 nt, Human
uuagauguucucuau

SEQ ID NO: 1775334 - RNA, 22 nt, Human
uuagauguucuaagucuuucca

SEQ ID NO: 1775335 - RNA, 19 nt, Human
auaauauuuuacauacacu

SEQ ID NO: 1775336 - RNA, 12 nt, Human
auaagauuccaa

SEQ ID NO: 1775337 - RNA, 19 nt, Human
auaagauuccaaaaagcac

SEQ ID NO: 1775338 - RNA, 21 nt, Human
auaagauuccaaaaagcacau

SEQ ID NO: 1775339 - RNA, 22 nt, Human
auaagauuccaaaaagcacaua

SEQ ID NO: 1775340 - RNA, 20 nt, Human
auaauauacuuguggacuaa

SEQ ID NO: 1775341 - RNA, 14 nt, Human
auaauauacuugug

SEQ ID NO: 1775342 - RNA, 13 nt, Human
auaauauacuugu

SEQ ID NO: 1775343 - RNA, 16 nt, Human
uuaggguucugccucu

SEQ ID NO: 1775344 - RNA, 23 nt, Human
uuagauguucucuaucauuuaau

SEQ ID NO: 1775345 - RNA, 22 nt, Human
uuagauguucucuaucauuuaa

SEQ ID NO: 1775346 - RNA, 21 nt, Human
uuagauguucucuaucauuua

SEQ ID NO: 1775347 - RNA, 16 nt, Human
uuauaaaauuaagcaa

SEQ ID NO: 1775348 - RNA, 17 nt, Human
uuaguagagacaggguu

SEQ ID NO: 1775349 - RNA, 14 nt, Human
uuaguagagacagg

SEQ ID NO: 1775350 - RNA, 13 nt, Human
uuaguagagacag

SEQ ID NO: 1775351 - RNA, 17 nt, Human
aucugguuaggauggca

SEQ ID NO: 1775352 - RNA, 22 nt, Human
aucugccuuuauuguguuuguc

SEQ ID NO: 1775353 - RNA, 21 nt, Human
aucugccuuuauuguguuugu

SEQ ID NO: 1775354 - RNA, 19 nt, Human
aucugccuuuauuguguuu

SEQ ID NO: 1775355 - RNA, 12 nt, Human
aucugccugggu

SEQ ID NO: 1775356 - RNA, 16 nt, Human
aucugccuuuauugug

SEQ ID NO: 1775357 - RNA, 13 nt, Human
aucuugcucugcu

SEQ ID NO: 1775358 - RNA, 14 nt, Human
aucuuauaauuuaa

SEQ ID NO: 1775359 - RNA, 18 nt, Human
uugcucuaugcuuuccaa

SEQ ID NO: 1775360 - RNA, 19 nt, Human
uugcucuaugcuuuccaaa

SEQ ID NO: 1775361 - RNA, 13 nt, Human
aucuugucucaau

SEQ ID NO: 1775362 - RNA, 20 nt, Human
aucuugucucaaugcucaua

SEQ ID NO: 1775363 - RNA, 16 nt, Human
aucuugucucaaugcu

SEQ ID NO: 1775364 - RNA, 15 nt, Human
aucuugucucaaugc

SEQ ID NO: 1775365 - RNA, 14 nt, Human
aucuugucucaaug

SEQ ID NO: 1775366 - RNA, 23 nt, Human
aucuugucucaaugcucauaacg

SEQ ID NO: 1775367 - RNA, 18 nt, Human
aucuuugcagacaggcaa

SEQ ID NO: 1775368 - RNA, 17 nt, Human
aucuuugcagacaggca

SEQ ID NO: 1775369 - RNA, 18 nt, Human
augaaagggcccagagag

SEQ ID NO: 1775370 - RNA, 21 nt, Human
aucuuucuuucuuagaaauuu

SEQ ID NO: 1775371 - RNA, 20 nt, Human
aucuuucuuucuuagaaauu

SEQ ID NO: 1775372 - RNA, 17 nt, Human
aucuuucuuucuuagaa

SEQ ID NO: 1775373 - RNA, 15 nt, Human
aucuuucuuucuuag

SEQ ID NO: 1775374 - RNA, 16 nt, Human
uuggagggugucccaa

SEQ ID NO: 1775375 - RNA, 18 nt, Human
uuggccccugcccggcug

SEQ ID NO: 1775376 - RNA, 18 nt, Human
augaacuuguaaaggaau

SEQ ID NO: 1775377 - RNA, 19 nt, Human
augaaagggcccagagagg

SEQ ID NO: 1775378 - RNA, 13 nt, Human
augaaaggugcca

SEQ ID NO: 1775379 - RNA, 17 nt, Human
augaaaggugccaugga

SEQ ID NO: 1775380 - RNA, 22 nt, Human
augaaaggugccauggaagagg

SEQ ID NO: 1775381 - RNA, 16 nt, Human
augaaagguuuacauu

SEQ ID NO: 1775382 - RNA, 21 nt, Human
augaaagguuuacauugucaa

SEQ ID NO: 1775383 - RNA, 21 nt, Human
augaaauggagucauuugagu

SEQ ID NO: 1775384 - RNA, 12 nt, Human
uugagacagagu

SEQ ID NO: 1775385 - RNA, 14 nt, Human
uugacuuugcuccu

SEQ ID NO: 1775386 - RNA, 13 nt, Human
uugacuucagauu

SEQ ID NO: 1775387 - RNA, 22 nt, Human
uugacuuuacgcccaucucagg

SEQ ID NO: 1775388 - RNA, 23 nt, Human
uugacuuuacgcccaucucagga

SEQ ID NO: 1775389 - RNA, 14 nt, Human
uugagucugugcca

SEQ ID NO: 1775390 - RNA, 11 nt, Human
uugagucucuu

SEQ ID NO: 1775391 - RNA, 14 nt, Human
uugaguuuucagug

SEQ ID NO: 1775392 - RNA, 19 nt, Human
uugaguuuucaguggggca

SEQ ID NO: 1775393 - RNA, 18 nt, Human
aucuaauauguaacaagc

SEQ ID NO: 1775394 - RNA, 20 nt, Human
aucuaauauguaacaagcca

SEQ ID NO: 1775395 - RNA, 12 nt, Human
auccucucuggg

SEQ ID NO: 1775396 - RNA, 19 nt, Human
auccucucuggggcugugu

SEQ ID NO: 1775397 - RNA, 20 nt, Human
auccucucuggggcuguguu

SEQ ID NO: 1775398 - RNA, 16 nt, Human
uugaauacucugcccu

SEQ ID NO: 1775399 - RNA, 18 nt, Human
uugaauacucugcccucu

SEQ ID NO: 1775400 - RNA, 15 nt, Human
uugaaggcccugcug

SEQ ID NO: 1775401 - RNA, 20 nt, Human
uugaaggcccugcugaguca

SEQ ID NO: 1775402 - RNA, 17 nt, Human
uugaagggaaauuucag

SEQ ID NO: 1775403 - RNA, 12 nt, Human
uugaauaaagaa

SEQ ID NO: 1775404 - RNA, 18 nt, Human
uugaauaaagaauacuug

SEQ ID NO: 1775405 - RNA, 22 nt, Human
uugaauaaagaauacuugaacu

SEQ ID NO: 1775406 - RNA, 15 nt, Human
uugauuauucagugu

SEQ ID NO: 1775407 - RNA, 17 nt, Human
uugauuauucaguguca

SEQ ID NO: 1775408 - RNA, 13 nt, Human
uugcaagggaaaa

SEQ ID NO: 1775409 - RNA, 19 nt, Human
uugcaagggaaaagucucu

SEQ ID NO: 1775410 - RNA, 14 nt, Human
uugcaagccccucu

SEQ ID NO: 1775411 - RNA, 16 nt, Human
uugcaauggcagccuu

SEQ ID NO: 1775412 - RNA, 22 nt, Human
uugcaagggaaaagucucuugu

SEQ ID NO: 1775413 - RNA, 17 nt, Human
uugcaauggcagccuug

SEQ ID NO: 1775414 - RNA, 19 nt, Human
uugcaauggcagccuuggc

SEQ ID NO: 1775415 - RNA, 14 nt, Human
aucucauuggaccc

SEQ ID NO: 1775416 - RNA, 15 nt, Human
aucucauuggacccu

SEQ ID NO: 1775417 - RNA, 19 nt, Human
aucucauuggacccuucca

SEQ ID NO: 1775418 - RNA, 20 nt, Human
aucucauuggacccuuccau

SEQ ID NO: 1775419 - RNA, 18 nt, Human
aucuccacaaccucuucc

SEQ ID NO: 1775420 - RNA, 19 nt, Human
aucuccacaaccucuuccc

SEQ ID NO: 1775421 - RNA, 19 nt, Human
uucuagaugcaagucucuu

SEQ ID NO: 1775422 - RNA, 15 nt, Human
uucgcuccugugucu

SEQ ID NO: 1775423 - RNA, 19 nt, Human
uucgcuccugugucuugca

SEQ ID NO: 1775424 - RNA, 19 nt, Human
uucggaacuguccuuuccu

SEQ ID NO: 1775425 - RNA, 14 nt, Human
uucucaccagcugc

SEQ ID NO: 1775426 - RNA, 15 nt, Human
uucucaccagcugca

SEQ ID NO: 1775427 - RNA, 16 nt, Human
uucucaccagcugcaa

SEQ ID NO: 1775428 - RNA, 17 nt, Human
uucucaccagcugcaaa

SEQ ID NO: 1775429 - RNA, 18 nt, Human
uucucaccagcugcaaag

SEQ ID NO: 1775430 - RNA, 19 nt, Human
uucucaccagcugcaaagu

SEQ ID NO: 1775431 - RNA, 21 nt, Human
uucucaccagcugcaaagugu

SEQ ID NO: 1775432 - RNA, 22 nt, Human
uucucaccagcugcaaaguguu

SEQ ID NO: 1775433 - RNA, 23 nt, Human
uucucaccagcugcaaaguguuu

SEQ ID NO: 1775434 - RNA, 12 nt, Human
uucucaccagcu

SEQ ID NO: 1775435 - RNA, 13 nt, Human
uucucaccagcug

SEQ ID NO: 1775436 - RNA, 14 nt, Human
aucagauugcaugu

SEQ ID NO: 1775437 - RNA, 15 nt, Human
aucagauugcaugug

SEQ ID NO: 1775438 - RNA, 16 nt, Human
aucagauugcauguga

SEQ ID NO: 1775439 - RNA, 18 nt, Human
aucagauugcaugugacu

SEQ ID NO: 1775440 - RNA, 21 nt, Human
aucagauugcaugugacucug

SEQ ID NO: 1775441 - RNA, 21 nt, Human
aucagggcaaucccaacacau

SEQ ID NO: 1775442 - RNA, 18 nt, Human
aucacggcucacugcagc

SEQ ID NO: 1775443 - RNA, 19 nt, Human
aucacggcucacugcagcc

SEQ ID NO: 1775444 - RNA, 13 nt, Human
aucacgccacugc

SEQ ID NO: 1775445 - RNA, 15 nt, Human
aucacgauguaaauu

SEQ ID NO: 1775446 - RNA, 14 nt, Human
aucacgccacugca

SEQ ID NO: 1775447 - RNA, 18 nt, Human
aucacgauguaaauuauu

SEQ ID NO: 1775448 - RNA, 19 nt, Human
aucacgauguaaauuauua

SEQ ID NO: 1775449 - RNA, 15 nt, Human
aucacggcucacugc

SEQ ID NO: 1775450 - RNA, 20 nt, Human
aucaaugagguaucuucuuu

SEQ ID NO: 1775451 - RNA, 14 nt, Human
uuccuguguccuga

SEQ ID NO: 1775452 - RNA, 16 nt, Human
aucaacaaaaauuguc

SEQ ID NO: 1775453 - RNA, 19 nt, Human
aucaacaccuuaauaugcu

SEQ ID NO: 1775454 - RNA, 11 nt, Human
uuccugugucu

SEQ ID NO: 1775455 - RNA, 20 nt, Human
uuccuguccucccagcuccu

SEQ ID NO: 1775456 - RNA, 14 nt, Human
uuccuguccuccca

SEQ ID NO: 1775457 - RNA, 11 nt, Human
uuccugugucc

SEQ ID NO: 1775458 - RNA, 23 nt, Human
uucccuccaucccccuuuacccu

SEQ ID NO: 1775459 - RNA, 22 nt, Human
auagcaaagcgacguuagucgu

SEQ ID NO: 1775460 - RNA, 17 nt, Human
uucccgggccagggcug

SEQ ID NO: 1775461 - RNA, 18 nt, Human
uucccgggccagggcugc

SEQ ID NO: 1775462 - RNA, 16 nt, Human
uuccguagacuguuua

SEQ ID NO: 1775463 - RNA, 18 nt, Human
uuccguagccagcugcuc

SEQ ID NO: 1775464 - RNA, 19 nt, Human
uuccguagguuauuuucag

SEQ ID NO: 1775465 - RNA, 18 nt, Human
uucuuuuuuuucauuaua

SEQ ID NO: 1775466 - RNA, 16 nt, Human
uugaaagaauuauccu

SEQ ID NO: 1775467 - RNA, 22 nt, Human
uucuuugggaauauuugaaucu

SEQ ID NO: 1775468 - RNA, 20 nt, Human
uucuuugggaauauuugaau

SEQ ID NO: 1775469 - RNA, 18 nt, Human
uucuuugggaauauuuga

SEQ ID NO: 1775470 - RNA, 20 nt, Human
uucuucugcuucagccuccc

SEQ ID NO: 1775471 - RNA, 13 nt, Human
uucuucugcuuca

SEQ ID NO: 1775472 - RNA, 15 nt, Human
uucuucugcuucagc

SEQ ID NO: 1775473 - RNA, 17 nt, Human
aucccaucauuuuccau

SEQ ID NO: 1775474 - RNA, 13 nt, Human
aucccaugagccu

SEQ ID NO: 1775475 - RNA, 18 nt, Human
uucuuaagacauguauca

SEQ ID NO: 1775476 - RNA, 15 nt, Human
auccuaccuugcuuu

SEQ ID NO: 1775477 - RNA, 22 nt, Human
auccuaccuugcuuuugcuucu

SEQ ID NO: 1775478 - RNA, 14 nt, Human
auccuaaaacaaau

SEQ ID NO: 1775479 - RNA, 21 nt, Human
auccgucuuuggccuccucca

SEQ ID NO: 1775480 - RNA, 13 nt, Human
auccguguugcag

SEQ ID NO: 1775481 - RNA, 23 nt, Human
auccguguugcagguucauggau

SEQ ID NO: 1775482 - RNA, 17 nt, Human
uugaaauuguauuacaa

SEQ ID NO: 1775483 - RNA, 12 nt, Human
uugaaauucuga

SEQ ID NO: 1775484 - RNA, 13 nt, Human
uugaaauucugaa

SEQ ID NO: 1775485 - RNA, 14 nt, Human
uugaaauucugaau

SEQ ID NO: 1775486 - RNA, 15 nt, Human
uugaaauucugaauu

SEQ ID NO: 1775487 - RNA, 16 nt, Human
uugaaauucugaauuu

SEQ ID NO: 1775488 - RNA, 17 nt, Human
uugaaauucugaauuug

SEQ ID NO: 1775489 - RNA, 20 nt, Human
uugaaauucugaauuugcaa

SEQ ID NO: 1775490 - RNA, 21 nt, Human
uugaaauucugaauuugcaaa

SEQ ID NO: 1775491 - RNA, 22 nt, Human
uugaaauucugaauuugcaaag

SEQ ID NO: 1775492 - RNA, 18 nt, Human
uugaaauuaaccucucac

SEQ ID NO: 1775493 - RNA, 18 nt, Human
uugaaaugcauugcucug

SEQ ID NO: 1775494 - RNA, 20 nt, Human
uugaaaugcauugcucugga

SEQ ID NO: 1775495 - RNA, 15 nt, Human
uucugccauauucug

SEQ ID NO: 1775496 - RNA, 21 nt, Human
uucugccugcccaggccccug

SEQ ID NO: 1775497 - RNA, 17 nt, Human
uucugccugcccaggcc

SEQ ID NO: 1775498 - RNA, 18 nt, Human
uucugccugcccaggccc

SEQ ID NO: 1775499 - RNA, 14 nt, Human
uucugggagggcag

SEQ ID NO: 1775500 - RNA, 21 nt, Human
uucugggagggcagcagggcu

SEQ ID NO: 1775501 - RNA, 14 nt, Human
aucaggugcugcca

SEQ ID NO: 1775502 - RNA, 14 nt, Human
auccaucaucaugu

SEQ ID NO: 1775503 - RNA, 18 nt, Human
auccaagcuggucccacu

SEQ ID NO: 1775504 - RNA, 21 nt, Human
auccaagcuggucccacucag

SEQ ID NO: 1775505 - RNA, 16 nt, Human
auccaagcaagacuga

SEQ ID NO: 1775506 - RNA, 13 nt, Human
auccacccaccuc

SEQ ID NO: 1775507 - RNA, 15 nt, Human
auccacccaccucag

SEQ ID NO: 1775508 - RNA, 16 nt, Human
auccacccaccucagc

SEQ ID NO: 1775509 - RNA, 20 nt, Human
auggcaggacgugggcuggg

SEQ ID NO: 1775510 - RNA, 21 nt, Human
auggcaggacgugggcugggc

SEQ ID NO: 1775511 - RNA, 23 nt, Human
augggaggcucacccccuucucc

SEQ ID NO: 1775512 - RNA, 13 nt, Human
uuuccccuuuccu

SEQ ID NO: 1775513 - RNA, 14 nt, Human
uuuccccuuuccug

SEQ ID NO: 1775514 - RNA, 15 nt, Human
uuuccccuuuccugu

SEQ ID NO: 1775515 - RNA, 16 nt, Human
uuuccccuuuccuguc

SEQ ID NO: 1775516 - RNA, 12 nt, Human
uuucaaagcaau

SEQ ID NO: 1775517 - RNA, 14 nt, Human
uuucaaagcaauug

SEQ ID NO: 1775518 - RNA, 21 nt, Human
uuucaaagcaauugaaaugca

SEQ ID NO: 1775519 - RNA, 22 nt, Human
uuucaaagcaauugaaaugcau

SEQ ID NO: 1775520 - RNA, 21 nt, Human
uuucaaauuggagcuucaugg

SEQ ID NO: 1775521 - RNA, 12 nt, Human
augcugcuggcc

SEQ ID NO: 1775522 - RNA, 13 nt, Human
augcugcuggcca

SEQ ID NO: 1775523 - RNA, 14 nt, Human
augcugcuggccaa

SEQ ID NO: 1775524 - RNA, 22 nt, Human
uuucaaacuuuauugacaagug

SEQ ID NO: 1775525 - RNA, 12 nt, Human
uuuauuuuucau

SEQ ID NO: 1775526 - RNA, 18 nt, Human
uuucaaaaccuuuugaaa

SEQ ID NO: 1775527 - RNA, 17 nt, Human
uuuauuuuucauuuagu

SEQ ID NO: 1775528 - RNA, 14 nt, Human
augcuauugacaau

SEQ ID NO: 1775529 - RNA, 15 nt, Human
augcuauugacaaua

SEQ ID NO: 1775530 - RNA, 17 nt, Human
augcuauugacaauaaa

SEQ ID NO: 1775531 - RNA, 18 nt, Human
augcuauugacaauaaaa

SEQ ID NO: 1775532 - RNA, 21 nt, Human
augcuauugacaauaaaauau

SEQ ID NO: 1775533 - RNA, 23 nt, Human
augcuauugacaauaaaauauua

SEQ ID NO: 1775534 - RNA, 17 nt, Human
augcaagacgcccucua

SEQ ID NO: 1775535 - RNA, 23 nt, Human
augcaagauaguuuaucuaacuu

SEQ ID NO: 1775536 - RNA, 23 nt, Human
augauucuaauuuuuaagcaaaa

SEQ ID NO: 1775537 - RNA, 22 nt, Human
augcaccagcccuuagcaggga

SEQ ID NO: 1775538 - RNA, 20 nt, Human
uuguuuugcacacuuugcca

SEQ ID NO: 1775539 - RNA, 13 nt, Human
uuuaaaaaucaac

SEQ ID NO: 1775540 - RNA, 15 nt, Human
uuuaaaaaucaacuu

SEQ ID NO: 1775541 - RNA, 16 nt, Human
uuuaaaaaucaacuuu

SEQ ID NO: 1775542 - RNA, 23 nt, Human
uuuaaaaaucaacuuuuuauugc

SEQ ID NO: 1775543 - RNA, 12 nt, Human
uuuaaaaaugca

SEQ ID NO: 1775544 - RNA, 18 nt, Human
augauacucauuucuuau

SEQ ID NO: 1775545 - RNA, 20 nt, Human
augauagcgggaaaaggaga

SEQ ID NO: 1775546 - RNA, 15 nt, Human
augauccaagcaaga

SEQ ID NO: 1775547 - RNA, 17 nt, Human
augauccaagcaagacu

SEQ ID NO: 1775548 - RNA, 13 nt, Human
uuguguucaccuu

SEQ ID NO: 1775549 - RNA, 22 nt, Human
uuguugagcaugacagccugca

SEQ ID NO: 1775550 - RNA, 10 nt, Human
augcccucuc

SEQ ID NO: 1775551 - RNA, 13 nt, Human
augcccucucagg

SEQ ID NO: 1775552 - RNA, 15 nt, Human
augcccuuaaaucau

SEQ ID NO: 1775553 - RNA, 23 nt, Human
augcagugguaugaucacggcuc

SEQ ID NO: 1775554 - RNA, 23 nt, Human
augcauuuuguuugguauuguau

SEQ ID NO: 1775555 - RNA, 22 nt, Human
augcauuuuguuugguauugua

SEQ ID NO: 1775556 - RNA, 19 nt, Human
augcauuuuguuugguauu

SEQ ID NO: 1775557 - RNA, 19 nt, Human
augccaccaacuuacaaaa

SEQ ID NO: 1775558 - RNA, 20 nt, Human
augccaccaacuuacaaaaa

SEQ ID NO: 1775559 - RNA, 15 nt, Human
augccacccacaucu

SEQ ID NO: 1775560 - RNA, 19 nt, Human
uuuaauuuuuuugagacag

SEQ ID NO: 1775561 - RNA, 11 nt, Human
uuuacaacuca

SEQ ID NO: 1775562 - RNA, 22 nt, Human
uuuacaacucauuccagauccc

SEQ ID NO: 1775563 - RNA, 22 nt, Human
uuuaauuagugcuaagugugaa

SEQ ID NO: 1775564 - RNA, 21 nt, Human
uuuaauuagugcuaaguguga

SEQ ID NO: 1775565 - RNA, 20 nt, Human
uuuaauuagugcuaagugug

SEQ ID NO: 1775566 - RNA, 19 nt, Human
uuuaauuagugcuaagugu

SEQ ID NO: 1775567 - RNA, 17 nt, Human
uuuaauuagugcuaagu

SEQ ID NO: 1775568 - RNA, 15 nt, Human
uuuaauuagugcuaa

SEQ ID NO: 1775569 - RNA, 14 nt, Human
uuuaauuagugcua

SEQ ID NO: 1775570 - RNA, 18 nt, Human
uuuaaauauaugcuaagu

SEQ ID NO: 1775571 - RNA, 20 nt, Human
uuuaaauacagucuuccauu

SEQ ID NO: 1775572 - RNA, 15 nt, Human
uuuaagucccuguca

SEQ ID NO: 1775573 - RNA, 16 nt, Human
uuuaagucccugucac

SEQ ID NO: 1775574 - RNA, 23 nt, Human
augucucuuuaaugucacaggca

SEQ ID NO: 1775575 - RNA, 14 nt, Human
augucucugcaaac

SEQ ID NO: 1775576 - RNA, 12 nt, Human
augugacucuga

SEQ ID NO: 1775577 - RNA, 13 nt, Human
augugacucugaa

SEQ ID NO: 1775578 - RNA, 23 nt, Human
augugcacaugcacgugugugca

SEQ ID NO: 1775579 - RNA, 14 nt, Human
augugauuuuaacu

SEQ ID NO: 1775580 - RNA, 15 nt, Human
augugauuuuaacuc

SEQ ID NO: 1775581 - RNA, 16 nt, Human
augugauuuuaacucu

SEQ ID NO: 1775582 - RNA, 18 nt, Human
augugauuuuaacucugu

SEQ ID NO: 1775583 - RNA, 19 nt, Human
augugauuuuaacucuguc

SEQ ID NO: 1775584 - RNA, 20 nt, Human
augugauuuuaacucugucu

SEQ ID NO: 1775585 - RNA, 18 nt, Human
augugacucugaagcuga

SEQ ID NO: 1775586 - RNA, 15 nt, Human
uuugugacauuccuu

SEQ ID NO: 1775587 - RNA, 22 nt, Human
uuuggcaggggcagaaaacucu

SEQ ID NO: 1775588 - RNA, 20 nt, Human
uuuggcagagcuucuuccag

SEQ ID NO: 1775589 - RNA, 13 nt, Human
uuugccucugccu

SEQ ID NO: 1775590 - RNA, 13 nt, Human
uuugcugcuucug

SEQ ID NO: 1775591 - RNA, 15 nt, Human
uuugcugccaaaugc

SEQ ID NO: 1775592 - RNA, 19 nt, Human
uuugcugccaaaugcguau

SEQ ID NO: 1775593 - RNA, 17 nt, Human
uuuggcaaugccaucau

SEQ ID NO: 1775594 - RNA, 14 nt, Human
uuugcaaccucgcu

SEQ ID NO: 1775595 - RNA, 20 nt, Human
uuugcaagggaaaagucucu

SEQ ID NO: 1775596 - RNA, 21 nt, Human
uuugcaagggaaaagucucuu

SEQ ID NO: 1775597 - RNA, 18 nt, Human
uuugccggauacaaacug

SEQ ID NO: 1775598 - RNA, 16 nt, Human
auguagccuucacaca

SEQ ID NO: 1775599 - RNA, 22 nt, Human
auguagccuucacacagauaga

SEQ ID NO: 1775600 - RNA, 14 nt, Human
auguaggaaguagg

SEQ ID NO: 1775601 - RNA, 21 nt, Human
auguagcaaaauacaugacau

SEQ ID NO: 1775602 - RNA, 14 nt, Human
auguagaaaauuug

SEQ ID NO: 1775603 - RNA, 17 nt, Human
auguagaauauucagac

SEQ ID NO: 1775604 - RNA, 20 nt, Human
auguagaauauucagacaaa

SEQ ID NO: 1775605 - RNA, 17 nt, Human
auguacuccucuuuaca

SEQ ID NO: 1775606 - RNA, 20 nt, Human
auguacuccucuuuacacug

SEQ ID NO: 1775607 - RNA, 18 nt, Human
auguaccaugaaacaaag

SEQ ID NO: 1775608 - RNA, 16 nt, Human
augguuguauuagaug

SEQ ID NO: 1775609 - RNA, 14 nt, Human
augguuguauuaga

SEQ ID NO: 1775610 - RNA, 13 nt, Human
augguuguauuag

SEQ ID NO: 1775611 - RNA, 12 nt, Human
augguuguauua

SEQ ID NO: 1775612 - RNA, 21 nt, Human
augguuguauuagauguucuc

SEQ ID NO: 1775613 - RNA, 18 nt, Human
augguuguauuagauguu

SEQ ID NO: 1775614 - RNA, 22 nt, Human
auguaaaaggccaaaccucugu

SEQ ID NO: 1775615 - RNA, 23 nt, Human
auguaaaaggccaaaccucuguu

SEQ ID NO: 1775616 - RNA, 15 nt, Human
auguaaaaggccaaa

SEQ ID NO: 1775617 - RNA, 18 nt, Human
auguaaaaggccaaaccu

SEQ ID NO: 1775618 - RNA, 14 nt, Human
auguaaacugugca

SEQ ID NO: 1775619 - RNA, 14 nt, Human
auguaaauccccac

SEQ ID NO: 1775620 - RNA, 12 nt, Human
augguggcuggg

SEQ ID NO: 1775621 - RNA, 14 nt, Human
augguggagggcca

SEQ ID NO: 1775622 - RNA, 13 nt, Human
augguggagggcc

SEQ ID NO: 1775623 - RNA, 20 nt, Human
auggugcuacgccugcaugu

SEQ ID NO: 1775624 - RNA, 13 nt, Human
augguggcugggu

SEQ ID NO: 1775625 - RNA, 15 nt, Human
augguggcuggguug

SEQ ID NO: 1775626 - RNA, 17 nt, Human
augguggcuggguugga

SEQ ID NO: 1775627 - RNA, 18 nt, Human
augguguggguguccugc

SEQ ID NO: 1775628 - RNA, 20 nt, Human
augguguggguguccugccu

SEQ ID NO: 1775629 - RNA, 17 nt, Human
auggugugccuuccaga

SEQ ID NO: 1775630 - RNA, 15 nt, Human
uuucuguaaacucug

SEQ ID NO: 1775631 - RNA, 15 nt, Human
uuucugucccuucug

SEQ ID NO: 1775632 - RNA, 13 nt, Human
uuucugugcccuc

SEQ ID NO: 1775633 - RNA, 17 nt, Human
uuucugugcccuccuga

SEQ ID NO: 1775634 - RNA, 15 nt, Human
uuucuuucuuagaaa

SEQ ID NO: 1775635 - RNA, 13 nt, Human
uuucuuucuuaga

SEQ ID NO: 1775636 - RNA, 18 nt, Human
uuucuuuccuccuuuccu

SEQ ID NO: 1775637 - RNA, 18 nt, Human
augggcaacccccagccu

SEQ ID NO: 1775638 - RNA, 18 nt, Human
augggaugguggagggcc

SEQ ID NO: 1775639 - RNA, 18 nt, Human
auggggucuguaaaaucu

SEQ ID NO: 1775640 - RNA, 17 nt, Human
auggggucuguaaaauc

SEQ ID NO: 1775641 - RNA, 16 nt, Human
auggggucuguaaaau

SEQ ID NO: 1775642 - RNA, 14 nt, Human
augggugaaggcug

SEQ ID NO: 1775643 - RNA, 13 nt, Human
augggucagagcu

SEQ ID NO: 1775644 - RNA, 14 nt, Human
augggucagagcua

SEQ ID NO: 1775645 - RNA, 15 nt, Human
augggugaaggcugg

SEQ ID NO: 1775646 - RNA, 16 nt, Human
augggugaaggcuggc

SEQ ID NO: 1775647 - RNA, 17 nt, Human
augggugaaggcuggca

SEQ ID NO: 1775648 - RNA, 18 nt, Human
augggugaaggcuggcau

SEQ ID NO: 1775649 - RNA, 14 nt, Human
augggggcagggcu

SEQ ID NO: 1775650 - RNA, 15 nt, Human
augggggcagggcug

SEQ ID NO: 1775651 - RNA, 16 nt, Human
augggggcagggcugu

SEQ ID NO: 1775652 - RNA, 18 nt, Human
augggccuccugugugug

SEQ ID NO: 1775653 - RNA, 18 nt, Human
augggccugccgggcuga

SEQ ID NO: 1775654 - RNA, 20 nt, Human
augggccugccgggcugagg

SEQ ID NO: 1775655 - RNA, 22 nt, Human
augggccugccgggcugagggc

SEQ ID NO: 1775656 - RNA, 11 nt, Human
uuugaaauucu

SEQ ID NO: 1775657 - RNA, 13 nt, Human
uuugaaauucuga

SEQ ID NO: 1775658 - RNA, 14 nt, Human
uuugaaauucugaa

SEQ ID NO: 1775659 - RNA, 15 nt, Human
uuugaaauucugaau

SEQ ID NO: 1775660 - RNA, 16 nt, Human
uuugaaauucugaauu

SEQ ID NO: 1775661 - RNA, 17 nt, Human
uuugaaauucugaauuu

SEQ ID NO: 1775662 - RNA, 18 nt, Human
uuugaaauucugaauuug

SEQ ID NO: 1775663 - RNA, 18 nt, Human
uuugaaauuaaccucuca

SEQ ID NO: 1775664 - RNA, 11 nt, Human
auggggagggg

SEQ ID NO: 1775665 - RNA, 12 nt, Human
auggggaggggc

SEQ ID NO: 1775666 - RNA, 23 nt, Human
uuucuuugggaauauuugaaucu

SEQ ID NO: 1775667 - RNA, 21 nt, Human
uuucuuugggaauauuugaau

SEQ ID NO: 1775668 - RNA, 19 nt, Human
uuucuuugggaauauuuga

SEQ ID NO: 1775669 - RNA, 17 nt, Human
uuucuuugggaauauuu

SEQ ID NO: 1775670 - RNA, 19 nt, Human
auugaaaaaauagagccug

SEQ ID NO: 1775671 - RNA, 22 nt, Human
auugaaaaaauagagccugagg

SEQ ID NO: 1775672 - RNA, 14 nt, Human
auugaaaaaauaga

SEQ ID NO: 1775673 - RNA, 18 nt, Human
auugaaaaaauagagccu

SEQ ID NO: 1775674 - RNA, 13 nt, Human
auugacucugggu

SEQ ID NO: 1775675 - RNA, 14 nt, Human
auugacucuggguc

SEQ ID NO: 1775676 - RNA, 15 nt, Human
auugacucugggucc

SEQ ID NO: 1775677 - RNA, 16 nt, Human
auugacucuggguccu

SEQ ID NO: 1775678 - RNA, 20 nt, Human
auugacucuggguccuuccu

SEQ ID NO: 1775679 - RNA, 22 nt, Human
auugacucuggguccuuccuga

SEQ ID NO: 1775680 - RNA, 23 nt, Human
auugacucuggguccuuccugaa

SEQ ID NO: 1775681 - RNA, 13 nt, Human
auugacaauaaaa

SEQ ID NO: 1775682 - RNA, 15 nt, Human
auugacaauaaaaua

SEQ ID NO: 1775683 - RNA, 16 nt, Human
auugacaauaaaauau

SEQ ID NO: 1775684 - RNA, 17 nt, Human
auugacaauaaaauauu

SEQ ID NO: 1775685 - RNA, 18 nt, Human
auugacaauaaaauauua

SEQ ID NO: 1775686 - RNA, 20 nt, Human
auugacaauaaaauauuauu

SEQ ID NO: 1775687 - RNA, 19 nt, Human
auugaacuuacuguagccu

SEQ ID NO: 1775688 - RNA, 22 nt, Human
auugaacuuacuguagccucag

SEQ ID NO: 1775689 - RNA, 11 nt, Human
auucugccugc

SEQ ID NO: 1775690 - RNA, 13 nt, Human
auucugccugccc

SEQ ID NO: 1775691 - RNA, 14 nt, Human
auucugccugccca

SEQ ID NO: 1775692 - RNA, 15 nt, Human
auucugccugcccag

SEQ ID NO: 1775693 - RNA, 16 nt, Human
auucugccugcccagg

SEQ ID NO: 1775694 - RNA, 17 nt, Human
auucugccugcccaggc

SEQ ID NO: 1775695 - RNA, 18 nt, Human
auucugccugcccaggcc

SEQ ID NO: 1775696 - RNA, 19 nt, Human
auucugccugcccaggccc

SEQ ID NO: 1775697 - RNA, 17 nt, Human
auucucauuugucacac

SEQ ID NO: 1775698 - RNA, 20 nt, Human
auucuaggccuccuggccca

SEQ ID NO: 1775699 - RNA, 22 nt, Human
auucuaguacuagaaacugaag

SEQ ID NO: 1775700 - RNA, 18 nt, Human
auucuaggccuccuggcc

SEQ ID NO: 1775701 - RNA, 19 nt, Human
auucuaggccuccuggccc

SEQ ID NO: 1775702 - RNA, 18 nt, Human
auucugcucacauaucug

SEQ ID NO: 1775703 - RNA, 20 nt, Human
auucugccugcccaggcccc

SEQ ID NO: 1775704 - RNA, 21 nt, Human
auucugccugcccaggccccu

SEQ ID NO: 1775705 - RNA, 19 nt, Human
auucugcucacauaucugu

SEQ ID NO: 1775706 - RNA, 20 nt, Human
auucugcucacauaucuguc

SEQ ID NO: 1775707 - RNA, 21 nt, Human
auucugcucacauaucuguca

SEQ ID NO: 1775708 - RNA, 22 nt, Human
auucugcucacauaucugucau

SEQ ID NO: 1775709 - RNA, 19 nt, Human
auucuguuggccaguguga

SEQ ID NO: 1775710 - RNA, 21 nt, Human
auucuguuggccagugugaca

SEQ ID NO: 1775711 - RNA, 14 nt, Human
auucuguuggccag

SEQ ID NO: 1775712 - RNA, 14 nt, Human
auuccagaucccag

SEQ ID NO: 1775713 - RNA, 16 nt, Human
auuccagaucccaggc

SEQ ID NO: 1775714 - RNA, 17 nt, Human
auucccuagaaacuucc

SEQ ID NO: 1775715 - RNA, 20 nt, Human
auucccuagaaacuuccaaa

SEQ ID NO: 1775716 - RNA, 21 nt, Human
auucccuagaaacuuccaaau

SEQ ID NO: 1775717 - RNA, 15 nt, Human
auucuaaccuggagg

SEQ ID NO: 1775718 - RNA, 14 nt, Human
auuccccuguguca

SEQ ID NO: 1775719 - RNA, 13 nt, Human
auucagacaaaau

SEQ ID NO: 1775720 - RNA, 14 nt, Human
auucagacaaaaug

SEQ ID NO: 1775721 - RNA, 15 nt, Human
auucagacaaaaugg

SEQ ID NO: 1775722 - RNA, 17 nt, Human
auucagacaaaauggau

SEQ ID NO: 1775723 - RNA, 23 nt, Human
auucagacaaaauggauacauaa

SEQ ID NO: 1775724 - RNA, 23 nt, Human
auuauguuaaacuagcauaucug

SEQ ID NO: 1775725 - RNA, 22 nt, Human
auuauguuaaacuagcauaucu

SEQ ID NO: 1775726 - RNA, 14 nt, Human
auuauguuaaacua

SEQ ID NO: 1775727 - RNA, 13 nt, Human
auuauguuaaacu

SEQ ID NO: 1775728 - RNA, 12 nt, Human
auuauguuaaac

SEQ ID NO: 1775729 - RNA, 11 nt, Human
auuauuugcau

SEQ ID NO: 1775730 - RNA, 17 nt, Human
auuauuugucaaauugu

SEQ ID NO: 1775731 - RNA, 17 nt, Human
auucacaucuaaccuca

SEQ ID NO: 1775732 - RNA, 20 nt, Human
auucacaucuaaccucaucu

SEQ ID NO: 1775733 - RNA, 22 nt, Human
auuagugcuaagugugaacugg

SEQ ID NO: 1775734 - RNA, 20 nt, Human
auuagugcuaagugugaacu

SEQ ID NO: 1775735 - RNA, 18 nt, Human
auuagugcuaagugugaa

SEQ ID NO: 1775736 - RNA, 17 nt, Human
auuagugcuaaguguga

SEQ ID NO: 1775737 - RNA, 15 nt, Human
auuauauuuacaaau

SEQ ID NO: 1775738 - RNA, 12 nt, Human
auuuuugcaaua

SEQ ID NO: 1775739 - RNA, 17 nt, Human
auuuuugcaauaaugca

SEQ ID NO: 1775740 - RNA, 19 nt, Human
auuuuugcaauaaugcagu

SEQ ID NO: 1775741 - RNA, 20 nt, Human
auuuuugcaauaaugcagua

SEQ ID NO: 1775742 - RNA, 15 nt, Human
auuuuucucuccugu

SEQ ID NO: 1775743 - RNA, 19 nt, Human
auuuuucucuccuguccuc

SEQ ID NO: 1775744 - RNA, 23 nt, Human
auuuuuccuaugcuauugacaau

SEQ ID NO: 1775745 - RNA, 14 nt, Human
auuuuucaaagcaa

SEQ ID NO: 1775746 - RNA, 15 nt, Human
auuuuucaaagcaau

SEQ ID NO: 1775747 - RNA, 23 nt, Human
auuuuucaaagcaauugaaaugc

SEQ ID NO: 1775748 - RNA, 13 nt, Human
auuuuucaacuuu

SEQ ID NO: 1775749 - RNA, 14 nt, Human
auuuuucaacuuug

SEQ ID NO: 1775750 - RNA, 17 nt, Human
auuuuucaacuuugaau

SEQ ID NO: 1775751 - RNA, 18 nt, Human
auuuuucaacuuugaaua

SEQ ID NO: 1775752 - RNA, 22 nt, Human
auuuuucaacuuugaauaaaga

SEQ ID NO: 1775753 - RNA, 23 nt, Human
auuuuucaacuuugaauaaagaa

SEQ ID NO: 1775754 - RNA, 19 nt, Human
auuuuguuugguauuguau

SEQ ID NO: 1775755 - RNA, 18 nt, Human
auuuuguuugguauugua

SEQ ID NO: 1775756 - RNA, 17 nt, Human
auuuuguuugguauugu

SEQ ID NO: 1775757 - RNA, 14 nt, Human
auuuuguuugguau

SEQ ID NO: 1775758 - RNA, 22 nt, Human
auuuuguuugguauuguauuua

SEQ ID NO: 1775759 - RNA, 21 nt, Human
auuuuguuugguauuguauuu

SEQ ID NO: 1775760 - RNA, 20 nt, Human
auuuuguuugguauuguauu

SEQ ID NO: 1775761 - RNA, 19 nt, Human
auuuuuguagagccagggu

SEQ ID NO: 1775762 - RNA, 12 nt, Human
auuuuuguacau

SEQ ID NO: 1775763 - RNA, 13 nt, Human
auuuuuguacaug

SEQ ID NO: 1775764 - RNA, 22 nt, Human
auuuuugugauuuugugauuga

SEQ ID NO: 1775765 - RNA, 19 nt, Human
auuuuguauuguuucaauu

SEQ ID NO: 1775766 - RNA, 12 nt, Human
auuuuguguccu

SEQ ID NO: 1775767 - RNA, 21 nt, Human
auuuuguguccuccaggagcu

SEQ ID NO: 1775768 - RNA, 17 nt, Human
auuuugugacauuccuu

SEQ ID NO: 1775769 - RNA, 19 nt, Human
auuuugucauaucaaauaa

SEQ ID NO: 1775770 - RNA, 14 nt, Human
auuuuguucucugg

SEQ ID NO: 1775771 - RNA, 15 nt, Human
auuuuguucucuggg

SEQ ID NO: 1775772 - RNA, 16 nt, Human
auuuuguucucuggga

SEQ ID NO: 1775773 - RNA, 18 nt, Human
auuuuguucucugggaga

SEQ ID NO: 1775774 - RNA, 21 nt, Human
auuuuguucucugggagaaaa

SEQ ID NO: 1775775 - RNA, 22 nt, Human
auuuuguucucugggagaaaau

SEQ ID NO: 1775776 - RNA, 14 nt, Human
auuuucuagauaca

SEQ ID NO: 1775777 - RNA, 16 nt, Human
auuuucuagauacaau

SEQ ID NO: 1775778 - RNA, 18 nt, Human
auuuucuagauacaauaa

SEQ ID NO: 1775779 - RNA, 19 nt, Human
auuuucuagauacaauaaa

SEQ ID NO: 1775780 - RNA, 19 nt, Human
auuuugauccaagcugguc

SEQ ID NO: 1775781 - RNA, 15 nt, Human
auuuucuauaauuua

SEQ ID NO: 1775782 - RNA, 14 nt, Human
auuuucuauaauuu

SEQ ID NO: 1775783 - RNA, 21 nt, Human
auuguuuggggaugagaaagg

SEQ ID NO: 1775784 - RNA, 19 nt, Human
auuggacaguaaaauccac

SEQ ID NO: 1775785 - RNA, 14 nt, Human
auuggacccuucca

SEQ ID NO: 1775786 - RNA, 14 nt, Human
auuugucaaauugu

SEQ ID NO: 1775787 - RNA, 13 nt, Human
auuuuaacucugu

SEQ ID NO: 1775788 - RNA, 14 nt, Human
auuuuaacucuguc

SEQ ID NO: 1775789 - RNA, 16 nt, Human
auuuuaacucugucuu

SEQ ID NO: 1775790 - RNA, 15 nt, Human
auuuuaacucugucu

SEQ ID NO: 1775791 - RNA, 20 nt, Human
auuugucaauuuaugaauau

SEQ ID NO: 1775792 - RNA, 23 nt, Human
auuuauuuccuaguucuguagaa

SEQ ID NO: 1775793 - RNA, 18 nt, Human
auuuauuuccuaguucug

SEQ ID NO: 1775794 - RNA, 13 nt, Human
auuuauuuccuag

SEQ ID NO: 1775795 - RNA, 13 nt, Human
auuuauuugcuuc

SEQ ID NO: 1775796 - RNA, 15 nt, Human
auuuauuugcuucuu

SEQ ID NO: 1775797 - RNA, 16 nt, Human
auuuauuugcuucuuc

SEQ ID NO: 1775798 - RNA, 20 nt, Human
auuucuugagguaaaagcau

SEQ ID NO: 1775799 - RNA, 16 nt, Human
aaaaaauguauaugca

SEQ ID NO: 1775800 - RNA, 11 nt, Human
aaaaaauaugu

SEQ ID NO: 1775801 - RNA, 16 nt, Human
acucugucuucaccug

SEQ ID NO: 1775802 - RNA, 17 nt, Human
acucugucuucaccuga

SEQ ID NO: 1775803 - RNA, 18 nt, Human
acucugucuucaccugau

SEQ ID NO: 1775804 - RNA, 22 nt, Human
acucugucuucaccugauucaa

SEQ ID NO: 1775805 - RNA, 19 nt, Human
acuggaagcacagcuucau

SEQ ID NO: 1775806 - RNA, 17 nt, Human
acuggaagcacagcuuc

SEQ ID NO: 1775807 - RNA, 22 nt, Human
acugucuccauggcccugcaaa

SEQ ID NO: 1775808 - RNA, 21 nt, Human
acugugagcucccaggugcag

SEQ ID NO: 1775809 - RNA, 16 nt, Human
acugguauucuguucu

SEQ ID NO: 1775810 - RNA, 22 nt, Human
acugguuggcucccgcggugcc

SEQ ID NO: 1775811 - RNA, 14 nt, Human
acuguaagaauaau

SEQ ID NO: 1775812 - RNA, 15 nt, Human
acuguaagaauaauu

SEQ ID NO: 1775813 - RNA, 18 nt, Human
acuuguaaaggaauuuaa

SEQ ID NO: 1775814 - RNA, 20 nt, Human
acuuuucauaaccuagccuu

SEQ ID NO: 1775815 - RNA, 14 nt, Human
acuuuucuuugugg

SEQ ID NO: 1775816 - RNA, 12 nt, Human
acuuuugacaaa

SEQ ID NO: 1775817 - RNA, 15 nt, Human
acuuuugcccuuuga

SEQ ID NO: 1775818 - RNA, 18 nt, Human
acuuuuggaaccaugccu

SEQ ID NO: 1775819 - RNA, 21 nt, Human
acuuuuggaaccaugccuucc

SEQ ID NO: 1775820 - RNA, 11 nt, Human
agaaaauauaa

SEQ ID NO: 1775821 - RNA, 12 nt, Human
agaaaauauaag

SEQ ID NO: 1775822 - RNA, 14 nt, Human
acuuuuaaggcagu

SEQ ID NO: 1775823 - RNA, 17 nt, Human
acuuuauugacaaguga

SEQ ID NO: 1775824 - RNA, 22 nt, Human
acuuuauuuucuauaauuuaaa

SEQ ID NO: 1775825 - RNA, 23 nt, Human
agaaaguacuucuccacccugcu

SEQ ID NO: 1775826 - RNA, 19 nt, Human
agaaagguuuugagcaugg

SEQ ID NO: 1775827 - RNA, 21 nt, Human
agaaagguuuugagcaugggu

SEQ ID NO: 1775828 - RNA, 22 nt, Human
agaaaguacuucuccacccugc

SEQ ID NO: 1775829 - RNA, 19 nt, Human
agaaaguggaaaacaagga

SEQ ID NO: 1775830 - RNA, 20 nt, Human
agaaaguggaaaacaaggaa

SEQ ID NO: 1775831 - RNA, 23 nt, Human
agaaaguggaaaacaaggaaguc

SEQ ID NO: 1775832 - RNA, 19 nt, Human
agaaaggccuuuaaaauuu

SEQ ID NO: 1775833 - RNA, 17 nt, Human
agaaaggccuuuaaaau

SEQ ID NO: 1775834 - RNA, 16 nt, Human
agaaaggccuuuaaaa

SEQ ID NO: 1775835 - RNA, 12 nt, Human
agaaaaucauca

SEQ ID NO: 1775836 - RNA, 13 nt, Human
agaaaaucaucaa

SEQ ID NO: 1775837 - RNA, 17 nt, Human
agaaaaucaucaagaag

SEQ ID NO: 1775838 - RNA, 19 nt, Human
agaaaaucaucaagaaggg

SEQ ID NO: 1775839 - RNA, 19 nt, Human
agaaaauggaaccaggcuu

SEQ ID NO: 1775840 - RNA, 15 nt, Human
agaaaggccuuuaaa

SEQ ID NO: 1775841 - RNA, 14 nt, Human
agaaaggccuuuaa

SEQ ID NO: 1775842 - RNA, 22 nt, Human
agaaaauggaaccaggcuugga

SEQ ID NO: 1775843 - RNA, 20 nt, Human
agaaaauggaaccaggcuug

SEQ ID NO: 1775844 - RNA, 14 nt, Human
agaaauaauaugca

SEQ ID NO: 1775845 - RNA, 15 nt, Human
agaaauaauaugcau

SEQ ID NO: 1775846 - RNA, 16 nt, Human
agaaauaauaugcauu

SEQ ID NO: 1775847 - RNA, 18 nt, Human
accugcccuuuuuucugc

SEQ ID NO: 1775848 - RNA, 20 nt, Human
accugcccuuuuuucugccu

SEQ ID NO: 1775849 - RNA, 21 nt, Human
accugcccuuuuuucugccuc

SEQ ID NO: 1775850 - RNA, 22 nt, Human
accugcccuuuuuucugccucc

SEQ ID NO: 1775851 - RNA, 23 nt, Human
accugcccuuuuuucugccuccu

SEQ ID NO: 1775852 - RNA, 12 nt, Human
accugucuccuu

SEQ ID NO: 1775853 - RNA, 22 nt, Human
accugucuccuuucaccccagg

SEQ ID NO: 1775854 - RNA, 17 nt, Human
accuuggcugcagggag

SEQ ID NO: 1775855 - RNA, 18 nt, Human
accuuggcugcagggagu

SEQ ID NO: 1775856 - RNA, 16 nt, Human
acgucucgccaagcag

SEQ ID NO: 1775857 - RNA, 19 nt, Human
acuaagaaccccucugcuu

SEQ ID NO: 1775858 - RNA, 18 nt, Human
acuaaguagcccauaagg

SEQ ID NO: 1775859 - RNA, 13 nt, Human
acgucugacaggc

SEQ ID NO: 1775860 - RNA, 14 nt, Human
acgucugacaggca

SEQ ID NO: 1775861 - RNA, 15 nt, Human
acgucugacaggcaa

SEQ ID NO: 1775862 - RNA, 20 nt, Human
acgcuuuuaaugaaaaggaa

SEQ ID NO: 1775863 - RNA, 22 nt, Human
acgcuuuuaaugaaaaggaauc

SEQ ID NO: 1775864 - RNA, 19 nt, Human
acucugucgcccagucugg

SEQ ID NO: 1775865 - RNA, 19 nt, Human
acuauuuauugacucuggg

SEQ ID NO: 1775866 - RNA, 20 nt, Human
acuauuuauugacucugggu

SEQ ID NO: 1775867 - RNA, 23 nt, Human
acuagcaccauuuuaagucccug

SEQ ID NO: 1775868 - RNA, 19 nt, Human
acuagcauaucugccuuua

SEQ ID NO: 1775869 - RNA, 17 nt, Human
acuagcauaucugccuu

SEQ ID NO: 1775870 - RNA, 15 nt, Human
acuagcauaucugcc

SEQ ID NO: 1775871 - RNA, 20 nt, Human
acuagugggguuuccuggca

SEQ ID NO: 1775872 - RNA, 19 nt, Human
acucaguccauagcagaga

SEQ ID NO: 1775873 - RNA, 16 nt, Human
acucagggcuccuggg

SEQ ID NO: 1775874 - RNA, 13 nt, Human
acuagcauaucug

SEQ ID NO: 1775875 - RNA, 20 nt, Human
acuagauuuucacuuaugaa

SEQ ID NO: 1775876 - RNA, 18 nt, Human
acaggcaaugcuggcugu

SEQ ID NO: 1775877 - RNA, 12 nt, Human
acaggcaagcac

SEQ ID NO: 1775878 - RNA, 16 nt, Human
acagcucuucuccagg

SEQ ID NO: 1775879 - RNA, 17 nt, Human
acagcucuucuccaggc

SEQ ID NO: 1775880 - RNA, 18 nt, Human
acagcucuucuccaggcu

SEQ ID NO: 1775881 - RNA, 18 nt, Human
acagccacggccaggcca

SEQ ID NO: 1775882 - RNA, 15 nt, Human
acagccacggccagg

SEQ ID NO: 1775883 - RNA, 16 nt, Human
acagccacggccaggc

SEQ ID NO: 1775884 - RNA, 17 nt, Human
acagccacggccaggcc

SEQ ID NO: 1775885 - RNA, 11 nt, Human
acagacacagg

SEQ ID NO: 1775886 - RNA, 15 nt, Human
acagacacaggcccg

SEQ ID NO: 1775887 - RNA, 19 nt, Human
acagaggcagccccauucu

SEQ ID NO: 1775888 - RNA, 23 nt, Human
acagaggcagccccauucugccu

SEQ ID NO: 1775889 - RNA, 13 nt, Human
acagacacaggcc

SEQ ID NO: 1775890 - RNA, 14 nt, Human
acagacacaggccc

SEQ ID NO: 1775891 - RNA, 14 nt, Human
acagaggcagcccc

SEQ ID NO: 1775892 - RNA, 15 nt, Human
acagaggcagcccca

SEQ ID NO: 1775893 - RNA, 15 nt, Human
acagagugagacucu

SEQ ID NO: 1775894 - RNA, 19 nt, Human
acagagugagacucugucu

SEQ ID NO: 1775895 - RNA, 20 nt, Human
acacagcucuguccugggag

SEQ ID NO: 1775896 - RNA, 16 nt, Human
acacagauagaccuuu

SEQ ID NO: 1775897 - RNA, 11 nt, Human
acacagcucuu

SEQ ID NO: 1775898 - RNA, 13 nt, Human
acacagcucuucu

SEQ ID NO: 1775899 - RNA, 15 nt, Human
acacgcgugcacaca

SEQ ID NO: 1775900 - RNA, 17 nt, Human
acacgcgugcacacacc

SEQ ID NO: 1775901 - RNA, 14 nt, Human
aauuuuguucucug

SEQ ID NO: 1775902 - RNA, 15 nt, Human
aauuuuguucucugg

SEQ ID NO: 1775903 - RNA, 16 nt, Human
aauuuuguucucuggg

SEQ ID NO: 1775904 - RNA, 17 nt, Human
aauuuuguucucuggga

SEQ ID NO: 1775905 - RNA, 18 nt, Human
aauuuuguucucugggag

SEQ ID NO: 1775906 - RNA, 19 nt, Human
aauuuuguucucugggaga

SEQ ID NO: 1775907 - RNA, 21 nt, Human
aauuuuguucucugggagaaa

SEQ ID NO: 1775908 - RNA, 23 nt, Human
aauuuuguucucugggagaaaau

SEQ ID NO: 1775909 - RNA, 24 nt, Human
aauuuuguucucugggagaaaauc

SEQ ID NO: 1775910 - RNA, 19 nt, Human
aauuuuccuaauaaaguuc

SEQ ID NO: 1775911 - RNA, 14 nt, Human
acaacgugcauugu

SEQ ID NO: 1775912 - RNA, 13 nt, Human
acaacgugcauug

SEQ ID NO: 1775913 - RNA, 18 nt, Human
acaacgugcauugugcuu

SEQ ID NO: 1775914 - RNA, 17 nt, Human
acaacgugcauugugcu

SEQ ID NO: 1775915 - RNA, 16 nt, Human
acaacgugcauugugc

SEQ ID NO: 1775916 - RNA, 15 nt, Human
acaacgugcauugug

SEQ ID NO: 1775917 - RNA, 17 nt, Human
acaaggauugcuacugu

SEQ ID NO: 1775918 - RNA, 19 nt, Human
accagauaacugaggaggg

SEQ ID NO: 1775919 - RNA, 12 nt, Human
accaagcccagu

SEQ ID NO: 1775920 - RNA, 13 nt, Human
accaagcaggaaa

SEQ ID NO: 1775921 - RNA, 15 nt, Human
acauuuauucugcuc

SEQ ID NO: 1775922 - RNA, 19 nt, Human
acaggcaaugcuggcuguu

SEQ ID NO: 1775923 - RNA, 23 nt, Human
acaggcaaugcuggcuguuggcu

SEQ ID NO: 1775924 - RNA, 19 nt, Human
acaggguuuugccauguug

SEQ ID NO: 1775925 - RNA, 16 nt, Human
acaugugcacaugcac

SEQ ID NO: 1775926 - RNA, 18 nt, Human
acaugugcacaugcacgu

SEQ ID NO: 1775927 - RNA, 10 nt, Human
acaugcaguu

SEQ ID NO: 1775928 - RNA, 11 nt, Human
acaugcaguuu

SEQ ID NO: 1775929 - RNA, 12 nt, Human
acaugcaguuug

SEQ ID NO: 1775930 - RNA, 13 nt, Human
acaugcaguuuga

SEQ ID NO: 1775931 - RNA, 15 nt, Human
acaugcaguuugaaa

SEQ ID NO: 1775932 - RNA, 16 nt, Human
acaugcaguuugaaau

SEQ ID NO: 1775933 - RNA, 17 nt, Human
acaugcaguuugaaauu

SEQ ID NO: 1775934 - RNA, 18 nt, Human
acaugcaguuugaaauuc

SEQ ID NO: 1775935 - RNA, 19 nt, Human
acaugcaguuugaaauucu

SEQ ID NO: 1775936 - RNA, 22 nt, Human
acaugcaguuugaaauucugaa

SEQ ID NO: 1775937 - RNA, 23 nt, Human
acaugcaguuugaaauucugaau

SEQ ID NO: 1775938 - RNA, 16 nt, Human
accccuccaugugggc

SEQ ID NO: 1775939 - RNA, 19 nt, Human
accccuccaugugggcuag

SEQ ID NO: 1775940 - RNA, 18 nt, Human
acccccuucuccauccac

SEQ ID NO: 1775941 - RNA, 19 nt, Human
acccccuucuccauccaca

SEQ ID NO: 1775942 - RNA, 12 nt, Human
accccuccccau

SEQ ID NO: 1775943 - RNA, 12 nt, Human
accauaugaauu

SEQ ID NO: 1775944 - RNA, 13 nt, Human
accauaugaauug

SEQ ID NO: 1775945 - RNA, 13 nt, Human
acccaccucagcc

SEQ ID NO: 1775946 - RNA, 14 nt, Human
acccaccucagccu

SEQ ID NO: 1775947 - RNA, 15 nt, Human
acccaccucagccuc

SEQ ID NO: 1775948 - RNA, 16 nt, Human
acccaccucagccucc

SEQ ID NO: 1775949 - RNA, 22 nt, Human
acccccucuucugagcacagau

SEQ ID NO: 1775950 - RNA, 13 nt, Human
acccauugcuguu

SEQ ID NO: 1775951 - RNA, 17 nt, Human
acccauugcuguugucc

SEQ ID NO: 1775952 - RNA, 15 nt, Human
aaaauaaacacuaca

SEQ ID NO: 1775953 - RNA, 12 nt, Human
aaaaucaucaag

SEQ ID NO: 1775954 - RNA, 20 nt, Human
aaaaucaucaagaagggcug

SEQ ID NO: 1775955 - RNA, 23 nt, Human
aaaaucaucaagaagggcugcau

SEQ ID NO: 1775956 - RNA, 15 nt, Human
aaaaagaaaggaggg

SEQ ID NO: 1775957 - RNA, 20 nt, Human
aaaaagaacaugcaguuuga

SEQ ID NO: 1775958 - RNA, 16 nt, Human
aaaaguggccucuuug

SEQ ID NO: 1775959 - RNA, 17 nt, Human
aaaaguggccucuuugu

SEQ ID NO: 1775960 - RNA, 15 nt, Human
aaaagugcuucauuc

SEQ ID NO: 1775961 - RNA, 18 nt, Human
aaaagugcuucauucuuu

SEQ ID NO: 1775962 - RNA, 13 nt, Human
aaacacugugcac

SEQ ID NO: 1775963 - RNA, 12 nt, Human
aaaauugccaua

SEQ ID NO: 1775964 - RNA, 17 nt, Human
aaacucugcauccagag

SEQ ID NO: 1775965 - RNA, 23 nt, Human
aaacucugcauccagagauucau

SEQ ID NO: 1775966 - RNA, 21 nt, Human
aaacccgggaaccuccccagc

SEQ ID NO: 1775967 - RNA, 13 nt, Human
aaaccauguagaa

SEQ ID NO: 1775968 - RNA, 21 nt, Human
aaagccagcguccuccucugu

SEQ ID NO: 1775969 - RNA, 14 nt, Human
aaaggcaagcacuu

SEQ ID NO: 1775970 - RNA, 13 nt, Human
aaaggcaaggucc

SEQ ID NO: 1775971 - RNA, 17 nt, Human
aaaggccuuuaaaauuu

SEQ ID NO: 1775972 - RNA, 12 nt, Human
aaaggccuuuaa

SEQ ID NO: 1775973 - RNA, 18 nt, Human
aaaggccaaaccucuguu

SEQ ID NO: 1775974 - RNA, 20 nt, Human
aaaggccaaaccucuguuca

SEQ ID NO: 1775975 - RNA, 21 nt, Human
aaagucauuggcuuuauccuc

SEQ ID NO: 1775976 - RNA, 17 nt, Human
aaagucauuggcuuuau

SEQ ID NO: 1775977 - RNA, 15 nt, Human
aaagucauuggcuuu

SEQ ID NO: 1775978 - RNA, 14 nt, Human
aaagucauuggcuu

SEQ ID NO: 1775979 - RNA, 13 nt, Human
aaagucauuggcu

SEQ ID NO: 1775980 - RNA, 19 nt, Human
aaaguggaaaacaaggaag

SEQ ID NO: 1775981 - RNA, 20 nt, Human
aaaguggaaaacaaggaagu

SEQ ID NO: 1775982 - RNA, 22 nt, Human
aaagugcuucauucuuugcagg

SEQ ID NO: 1775983 - RNA, 23 nt, Human
aaagucauuggcuuuauccucuu

SEQ ID NO: 1775984 - RNA, 14 nt, Human
aaaguggccucuuu

SEQ ID NO: 1775985 - RNA, 16 nt, Human
aaaguggccucuuugu

SEQ ID NO: 1775986 - RNA, 18 nt, Human
aaaguggccucuuugucu

SEQ ID NO: 1775987 - RNA, 24 nt, Human
aaauagcucaggugucccugcacu

SEQ ID NO: 1775988 - RNA, 14 nt, Human
aaauaguuaauaua

SEQ ID NO: 1775989 - RNA, 17 nt, Human
aaauaguuaauauaguc

SEQ ID NO: 1775990 - RNA, 12 nt, Human
aacuuacaaaaa

SEQ ID NO: 1775991 - RNA, 18 nt, Human
aacuuacaaaaacacuuc

SEQ ID NO: 1775992 - RNA, 14 nt, Human
aacuuaagcaaagg

SEQ ID NO: 1775993 - RNA, 21 nt, Human
aacuuaagcaaaggggacagc

SEQ ID NO: 1775994 - RNA, 11 nt, Human
aacgcugccug

SEQ ID NO: 1775995 - RNA, 12 nt, Human
aacgcugccugc

SEQ ID NO: 1775996 - RNA, 13 nt, Human
aacgcugccugcc

SEQ ID NO: 1775997 - RNA, 14 nt, Human
aacgcugccugccc

SEQ ID NO: 1775998 - RNA, 15 nt, Human
aacgcugccugccca

SEQ ID NO: 1775999 - RNA, 15 nt, Human
aacgcugccugcccg

SEQ ID NO: 1776000 - RNA, 16 nt, Human
aacgcuccuuugugug

SEQ ID NO: 1776001 - RNA, 17 nt, Human
aacggaucagaaauaca

SEQ ID NO: 1776002 - RNA, 13 nt, Human
aacggaucagaaa

SEQ ID NO: 1776003 - RNA, 17 nt, Human
aacgcugagccaccugc

SEQ ID NO: 1776004 - RNA, 18 nt, Human
aacggaucagaaauacag

SEQ ID NO: 1776005 - RNA, 21 nt, Human
aacuauuuauugacucugggu

SEQ ID NO: 1776006 - RNA, 12 nt, Human
aacucagaaggg

SEQ ID NO: 1776007 - RNA, 18 nt, Human
aaccuaccucccacacuc

SEQ ID NO: 1776008 - RNA, 22 nt, Human
aaccuaccucccacacucccaa

SEQ ID NO: 1776009 - RNA, 13 nt, Human
aaccacgcuggac

SEQ ID NO: 1776010 - RNA, 22 nt, Human
aaccacuggaaaguuuaugguu

SEQ ID NO: 1776011 - RNA, 16 nt, Human
aaccagaacaguauga

SEQ ID NO: 1776012 - RNA, 15 nt, Human
aaauuuuuuuucaug

SEQ ID NO: 1776013 - RNA, 17 nt, Human
aaauuuuuuuucauguu

SEQ ID NO: 1776014 - RNA, 22 nt, Human
aaauuuuuuuucauguuuuaac

SEQ ID NO: 1776015 - RNA, 23 nt, Human
aaauuuuuuuucauguuuuaaca

SEQ ID NO: 1776016 - RNA, 13 nt, Human
aacacgcaggagc

SEQ ID NO: 1776017 - RNA, 14 nt, Human
aacacgcaggagca

SEQ ID NO: 1776018 - RNA, 15 nt, Human
aacacgccugcaaac

SEQ ID NO: 1776019 - RNA, 20 nt, Human
aacacgccugcaaacgcugc

SEQ ID NO: 1776020 - RNA, 17 nt, Human
aaauugcuaauguugcu

SEQ ID NO: 1776021 - RNA, 23 nt, Human
aaauugccauauugcacaugucu

SEQ ID NO: 1776022 - RNA, 21 nt, Human
aaauugccauauugcacaugu

SEQ ID NO: 1776023 - RNA, 19 nt, Human
aaauugccauauugcacau

SEQ ID NO: 1776024 - RNA, 18 nt, Human
aaauugccauauugcaca

SEQ ID NO: 1776025 - RNA, 16 nt, Human
aaauugccauauugca

SEQ ID NO: 1776026 - RNA, 15 nt, Human
aaauugccauauugc

SEQ ID NO: 1776027 - RNA, 17 nt, Human
aaaucuuauaauuuaaa

SEQ ID NO: 1776028 - RNA, 21 nt, Human
aagcgauucuucugcuucagc

SEQ ID NO: 1776029 - RNA, 23 nt, Human
aagcgcuuuuccuuggcauuccg

SEQ ID NO: 1776030 - RNA, 15 nt, Human
aaggauugcuacugu

SEQ ID NO: 1776031 - RNA, 19 nt, Human
aagcugguggcagaguccu

SEQ ID NO: 1776032 - RNA, 14 nt, Human
aagcuguauuuuga

SEQ ID NO: 1776033 - RNA, 18 nt, Human
aagcuggucccacucagu

SEQ ID NO: 1776034 - RNA, 21 nt, Human
aagcuggucccacucagucca

SEQ ID NO: 1776035 - RNA, 19 nt, Human
aagccagcguccuccucug

SEQ ID NO: 1776036 - RNA, 14 nt, Human
aagccagcguccuc

SEQ ID NO: 1776037 - RNA, 17 nt, Human
aagccagcguccuccuc

SEQ ID NO: 1776038 - RNA, 19 nt, Human
aacuuuccucuuccugccu

SEQ ID NO: 1776039 - RNA, 22 nt, Human
aagagugacaguggauugcauu

SEQ ID NO: 1776040 - RNA, 18 nt, Human
aagagugacucuccaggg

SEQ ID NO: 1776041 - RNA, 19 nt, Human
aagagugacucuccagggg

SEQ ID NO: 1776042 - RNA, 22 nt, Human
aagagugacucuccaggggucc

SEQ ID NO: 1776043 - RNA, 14 nt, Human
aaggugccauggaa

SEQ ID NO: 1776044 - RNA, 17 nt, Human
aaggugccauggaagag

SEQ ID NO: 1776045 - RNA, 18 nt, Human
aaggugccauggaagagg

SEQ ID NO: 1776046 - RNA, 17 nt, Human
aagucccugucaccucu

SEQ ID NO: 1776047 - RNA, 18 nt, Human
aaguccucuuuucugaga

SEQ ID NO: 1776048 - RNA, 14 nt, Human
aaguccucccugac

SEQ ID NO: 1776049 - RNA, 21 nt, Human
aaguccucccugacuuuucug

SEQ ID NO: 1776050 - RNA, 23 nt, Human
aaguccucccugacuuuucugug

SEQ ID NO: 1776051 - RNA, 22 nt, Human
aaguccucuuuucugagaggac

SEQ ID NO: 1776052 - RNA, 17 nt, Human
aagggagcuagccagag

SEQ ID NO: 1776053 - RNA, 16 nt, Human
aagggaaauaucauuu

SEQ ID NO: 1776054 - RNA, 13 nt, Human
aagggaaauauca

SEQ ID NO: 1776055 - RNA, 14 nt, Human
aagggaaauaucau

SEQ ID NO: 1776056 - RNA, 15 nt, Human
aagggaaauaucauu

SEQ ID NO: 1776057 - RNA, 16 nt, Human
aagggaaaagucucuu

SEQ ID NO: 1776058 - RNA, 14 nt, Human
aaugcugcuggcca

SEQ ID NO: 1776059 - RNA, 17 nt, Human
aaugcugcuggccaaau

SEQ ID NO: 1776060 - RNA, 13 nt, Human
aaugguuguauua

SEQ ID NO: 1776061 - RNA, 12 nt, Human
aaugguuguauu

SEQ ID NO: 1776062 - RNA, 18 nt, Human
aaugguuguauuagaugu

SEQ ID NO: 1776063 - RNA, 22 nt, Human
aaugucacguuuuguuuugugc

SEQ ID NO: 1776064 - RNA, 16 nt, Human
aaugguuguauuagau

SEQ ID NO: 1776065 - RNA, 15 nt, Human
aaugguuguauuaga

SEQ ID NO: 1776066 - RNA, 23 nt, Human
aaugucacguuuuguuuugugcc

SEQ ID NO: 1776067 - RNA, 15 nt, Human
aauguuugccucugc

SEQ ID NO: 1776068 - RNA, 16 nt, Human
aauguuugccucugcc

SEQ ID NO: 1776069 - RNA, 14 nt, Human
aauguuuaaugcug

SEQ ID NO: 1776070 - RNA, 20 nt, Human
aaugucuuuuuucaaacuuu

SEQ ID NO: 1776071 - RNA, 13 nt, Human
aauacucugcccu

SEQ ID NO: 1776072 - RNA, 17 nt, Human
aauacucugcccucuag

SEQ ID NO: 1776073 - RNA, 23 nt, Human
aauacucugcccucuagagccuu

SEQ ID NO: 1776074 - RNA, 11 nt, Human
aauacuuuugc

SEQ ID NO: 1776075 - RNA, 15 nt, Human
aauacuguacagggg

SEQ ID NO: 1776076 - RNA, 16 nt, Human
aauacuguauuuugua

SEQ ID NO: 1776077 - RNA, 15 nt, Human
aauauacuuguggac

SEQ ID NO: 1776078 - RNA, 13 nt, Human
aauauacuugugg

SEQ ID NO: 1776079 - RNA, 16 nt, Human
aauauacuuguggacu

SEQ ID NO: 1776080 - RNA, 16 nt, Human
aaugaaguuugaaugu

SEQ ID NO: 1776081 - RNA, 15 nt, Human
aaugaaguuugaaug

SEQ ID NO: 1776082 - RNA, 14 nt, Human
aaugaaguuugaau

SEQ ID NO: 1776083 - RNA, 13 nt, Human
aaugaaguuugaa

SEQ ID NO: 1776084 - RNA, 12 nt, Human
aaugaaguuuga

SEQ ID NO: 1776085 - RNA, 14 nt, Human
aaucucuguaggaa

SEQ ID NO: 1776086 - RNA, 20 nt, Human
aaucucuuuuugcuuucgaa

SEQ ID NO: 1776087 - RNA, 19 nt, Human
aauccagacccggcugcgu

SEQ ID NO: 1776088 - RNA, 17 nt, Human
aauccagacccggcugc

SEQ ID NO: 1776089 - RNA, 15 nt, Human
aauccaaugaaauga

SEQ ID NO: 1776090 - RNA, 14 nt, Human
agaggacuuuucuu

SEQ ID NO: 1776091 - RNA, 15 nt, Human
agaggaaggggccag

SEQ ID NO: 1776092 - RNA, 16 nt, Human
agagggcacucugcuu

SEQ ID NO: 1776093 - RNA, 20 nt, Human
agaggguggugaccucugcc

SEQ ID NO: 1776094 - RNA, 22 nt, Human
agaggguggugaccucugccug

SEQ ID NO: 1776095 - RNA, 19 nt, Human
agaggguggugaccucugc

SEQ ID NO: 1776096 - RNA, 23 nt, Human
agaggguggugaccucugccuga

SEQ ID NO: 1776097 - RNA, 14 nt, Human
agagugucuuucca

SEQ ID NO: 1776098 - RNA, 15 nt, Human
agagugucuuuccac

SEQ ID NO: 1776099 - RNA, 17 nt, Human
agaguuagacuguuggg

SEQ ID NO: 1776100 - RNA, 15 nt, Human
agaguuagacuguug

SEQ ID NO: 1776101 - RNA, 14 nt, Human
agaguuagacuguu

SEQ ID NO: 1776102 - RNA, 13 nt, Human
agaguuagacugu

SEQ ID NO: 1776103 - RNA, 12 nt, Human
agaguuagacug

SEQ ID NO: 1776104 - RNA, 18 nt, Human
agacggagucccaccuug

SEQ ID NO: 1776105 - RNA, 16 nt, Human
agacggaggggaguag

SEQ ID NO: 1776106 - RNA, 18 nt, Human
agaccccaagaggaaguu

SEQ ID NO: 1776107 - RNA, 19 nt, Human
agaccccaagaggaaguuc

SEQ ID NO: 1776108 - RNA, 19 nt, Human
agagcccaccuuggcucaa

SEQ ID NO: 1776109 - RNA, 22 nt, Human
agagaggguggugaccucugcc

SEQ ID NO: 1776110 - RNA, 20 nt, Human
agagaggguggugaccucug

SEQ ID NO: 1776111 - RNA, 21 nt, Human
agagaggguggugaccucugc

SEQ ID NO: 1776112 - RNA, 19 nt, Human
agacuggaagcacagcuuc

SEQ ID NO: 1776113 - RNA, 17 nt, Human
agacuggaagcacagcu

SEQ ID NO: 1776114 - RNA, 16 nt, Human
agacuggaagcacagc

SEQ ID NO: 1776115 - RNA, 13 nt, Human
agccccagugccc

SEQ ID NO: 1776116 - RNA, 14 nt, Human
agccccagugccca

SEQ ID NO: 1776117 - RNA, 15 nt, Human
agccccagugcccac

SEQ ID NO: 1776118 - RNA, 13 nt, Human
agccccauuccug

SEQ ID NO: 1776119 - RNA, 13 nt, Human
agccccauucugc

SEQ ID NO: 1776120 - RNA, 16 nt, Human
agccccauucugccug

SEQ ID NO: 1776121 - RNA, 16 nt, Human
agccccauuccuggga

SEQ ID NO: 1776122 - RNA, 15 nt, Human
agccgcugagcgagg

SEQ ID NO: 1776123 - RNA, 19 nt, Human
agccgcugagcgaggagau

SEQ ID NO: 1776124 - RNA, 18 nt, Human
agccgccaguacuuguca

SEQ ID NO: 1776125 - RNA, 14 nt, Human
agcccucagaaccc

SEQ ID NO: 1776126 - RNA, 15 nt, Human
agcccucagaacccu

SEQ ID NO: 1776127 - RNA, 18 nt, Human
agcccucagaacccuugg

SEQ ID NO: 1776128 - RNA, 16 nt, Human
agcccucaucccgagc

SEQ ID NO: 1776129 - RNA, 19 nt, Human
agcccucagaacccuuggc

SEQ ID NO: 1776130 - RNA, 24 nt, Human
agcccucagaacccuuggcuugcc

SEQ ID NO: 1776131 - RNA, 20 nt, Human
agccucccgaguagcuggga

SEQ ID NO: 1776132 - RNA, 18 nt, Human
agccucccgaguagcugg

SEQ ID NO: 1776133 - RNA, 19 nt, Human
agccucccgaguagcuggg

SEQ ID NO: 1776134 - RNA, 21 nt, Human
agccucccaaagugcugggau

SEQ ID NO: 1776135 - RNA, 18 nt, Human
agcacugggcucccgggc

SEQ ID NO: 1776136 - RNA, 21 nt, Human
agcacugggcucccgggcccc

SEQ ID NO: 1776137 - RNA, 18 nt, Human
agcagcuuagacuaaggc

SEQ ID NO: 1776138 - RNA, 16 nt, Human
agaugggggcagggcu

SEQ ID NO: 1776139 - RNA, 17 nt, Human
agaugggggcagggcug

SEQ ID NO: 1776140 - RNA, 16 nt, Human
agccaacauguggcuc

SEQ ID NO: 1776141 - RNA, 20 nt, Human
agccaacauguggcuccucc

SEQ ID NO: 1776142 - RNA, 17 nt, Human
agccaaguagccucucc

SEQ ID NO: 1776143 - RNA, 20 nt, Human
agccaaguagccucuccugu

SEQ ID NO: 1776144 - RNA, 22 nt, Human
agcauccuggcacccggccccu

SEQ ID NO: 1776145 - RNA, 23 nt, Human
agcauccuggcacccggccccug

SEQ ID NO: 1776146 - RNA, 14 nt, Human
agcaugacagccug

SEQ ID NO: 1776147 - RNA, 15 nt, Human
agcaugacagccugc

SEQ ID NO: 1776148 - RNA, 20 nt, Human
agcaugacagccugcagcag

SEQ ID NO: 1776149 - RNA, 15 nt, Human
agcagugugaggcca

SEQ ID NO: 1776150 - RNA, 21 nt, Human
agcagugugaggccagggcag

SEQ ID NO: 1776151 - RNA, 13 nt, Human
agcuucugucucc

SEQ ID NO: 1776152 - RNA, 14 nt, Human
agcuucugucucca

SEQ ID NO: 1776153 - RNA, 17 nt, Human
agcuucugucuccagcu

SEQ ID NO: 1776154 - RNA, 20 nt, Human
aggaauccagacccggcugc

SEQ ID NO: 1776155 - RNA, 17 nt, Human
aggaauccagacccggc

SEQ ID NO: 1776156 - RNA, 13 nt, Human
aggacccagagga

SEQ ID NO: 1776157 - RNA, 15 nt, Human
aggacccagaggaag

SEQ ID NO: 1776158 - RNA, 13 nt, Human
aggacccaagcag

SEQ ID NO: 1776159 - RNA, 15 nt, Human
aggacccaagcagag

SEQ ID NO: 1776160 - RNA, 18 nt, Human
aggacccaagcagagaag

SEQ ID NO: 1776161 - RNA, 17 nt, Human
aggaguuauuuguaaug

SEQ ID NO: 1776162 - RNA, 16 nt, Human
aggauuacaugcaugu

SEQ ID NO: 1776163 - RNA, 18 nt, Human
aggauguucugggacaca

SEQ ID NO: 1776164 - RNA, 15 nt, Human
aggauguucugggac

SEQ ID NO: 1776165 - RNA, 16 nt, Human
aggauguucugggaca

SEQ ID NO: 1776166 - RNA, 12 nt, Human
agcuccuucugu

SEQ ID NO: 1776167 - RNA, 13 nt, Human
agcuccuucuguc

SEQ ID NO: 1776168 - RNA, 13 nt, Human
agcuccuuccugg

SEQ ID NO: 1776169 - RNA, 15 nt, Human
agcuccuuccuggag

SEQ ID NO: 1776170 - RNA, 19 nt, Human
agcuccuuccuggagacug

SEQ ID NO: 1776171 - RNA, 20 nt, Human
agcuccgcuuucuacccagc

SEQ ID NO: 1776172 - RNA, 21 nt, Human
agcuccgcuuucuacccagcg

SEQ ID NO: 1776173 - RNA, 23 nt, Human
agcuccgcuuucuacccagcgag

SEQ ID NO: 1776174 - RNA, 23 nt, Human
agcuccgcaggacuuccccggag

SEQ ID NO: 1776175 - RNA, 14 nt, Human
agcucccuggcuuc

SEQ ID NO: 1776176 - RNA, 16 nt, Human
agcucccuggcuucug

SEQ ID NO: 1776177 - RNA, 18 nt, Human
agcucccuggcuucugug

SEQ ID NO: 1776178 - RNA, 20 nt, Human
agcucccuggcuucuguggg

SEQ ID NO: 1776179 - RNA, 23 nt, Human
agcucccuggcuucuguggggcc

SEQ ID NO: 1776180 - RNA, 15 nt, Human
agcuccgcaggacuu

SEQ ID NO: 1776181 - RNA, 17 nt, Human
agcuuccauagcugcug

SEQ ID NO: 1776182 - RNA, 18 nt, Human
agcuuccauagcugcugc

SEQ ID NO: 1776183 - RNA, 19 nt, Human
agcuuccauagcugcugcc

SEQ ID NO: 1776184 - RNA, 21 nt, Human
agcuuccauagcugcugcccu

SEQ ID NO: 1776185 - RNA, 23 nt, Human
agcuuccauagcugcugcccuag

SEQ ID NO: 1776186 - RNA, 13 nt, Human
agcuucccuccau

SEQ ID NO: 1776187 - RNA, 22 nt, Human
agcuuccccaacacgcaggagc

SEQ ID NO: 1776188 - RNA, 23 nt, Human
agcugcgguccacccaggagccc

SEQ ID NO: 1776189 - RNA, 13 nt, Human
agcugcuccccag

SEQ ID NO: 1776190 - RNA, 18 nt, Human
agggacgccugggggugc

SEQ ID NO: 1776191 - RNA, 22 nt, Human
agggacgccugggggugccagg

SEQ ID NO: 1776192 - RNA, 13 nt, Human
agggacgccuggg

SEQ ID NO: 1776193 - RNA, 15 nt, Human
agggacgccuggggg

SEQ ID NO: 1776194 - RNA, 23 nt, Human
agggacgccugggggugccagga

SEQ ID NO: 1776195 - RNA, 13 nt, Human
aggcuguauccca

SEQ ID NO: 1776196 - RNA, 18 nt, Human
aggcuguaucccaugagc

SEQ ID NO: 1776197 - RNA, 13 nt, Human
aggcccuuugcug

SEQ ID NO: 1776198 - RNA, 14 nt, Human
aggcccuuugcugu

SEQ ID NO: 1776199 - RNA, 15 nt, Human
aggcccuuugcuguc

SEQ ID NO: 1776200 - RNA, 16 nt, Human
aggcccuuugcugucc

SEQ ID NO: 1776201 - RNA, 14 nt, Human
aggcuaaaaagcaa

SEQ ID NO: 1776202 - RNA, 15 nt, Human
aggcuaaaaagcaac

SEQ ID NO: 1776203 - RNA, 19 nt, Human
aggguaucaggugcugcca

SEQ ID NO: 1776204 - RNA, 21 nt, Human
aggguaucaggugcugccauc

SEQ ID NO: 1776205 - RNA, 18 nt, Human
aggguccagaaggagaca

SEQ ID NO: 1776206 - RNA, 21 nt, Human
agggucagacgccugaggaac

SEQ ID NO: 1776207 - RNA, 19 nt, Human
aggguccagaaggagacag

SEQ ID NO: 1776208 - RNA, 21 nt, Human
aggguccagaaggagacaggc

SEQ ID NO: 1776209 - RNA, 20 nt, Human
agguaaaagcaucacaugaa

SEQ ID NO: 1776210 - RNA, 20 nt, Human
aggugcuacacccuuuucca

SEQ ID NO: 1776211 - RNA, 21 nt, Human
aggugcuacacccuuuuccag

SEQ ID NO: 1776212 - RNA, 17 nt, Human
agguguuuauuaaaauu

SEQ ID NO: 1776213 - RNA, 18 nt, Human
agguguuuauuaaaauuc

SEQ ID NO: 1776214 - RNA, 21 nt, Human
agguguuuauuaaaauucuga

SEQ ID NO: 1776215 - RNA, 18 nt, Human
agguuccgcuuggagcag

SEQ ID NO: 1776216 - RNA, 21 nt, Human
agguuccgcuuggagcagagg

SEQ ID NO: 1776217 - RNA, 23 nt, Human
agguuccgcuuggagcagagggg

SEQ ID NO: 1776218 - RNA, 16 nt, Human
agguuauaugaauaua

SEQ ID NO: 1776219 - RNA, 17 nt, Human
agguuauaugaauauau

SEQ ID NO: 1776220 - RNA, 22 nt, Human
auguuugccucugccucugaca

SEQ ID NO: 1776221 - RNA, 19 nt, Human
auguuugccucugccucug

SEQ ID NO: 1776222 - RNA, 13 nt, Human
auguucugggaca

SEQ ID NO: 1776223 - RNA, 21 nt, Human
auguucucuaucauuuaauaa

SEQ ID NO: 1776224 - RNA, 20 nt, Human
auguucucuaucauuuaaua

SEQ ID NO: 1776225 - RNA, 19 nt, Human
auguucucuaucauuuaau

SEQ ID NO: 1776226 - RNA, 18 nt, Human
auguucucuaucauuuaa

SEQ ID NO: 1776227 - RNA, 11 nt, Human
auguucuggga

SEQ ID NO: 1776228 - RNA, 12 nt, Human
auguucugggac

SEQ ID NO: 1776229 - RNA, 18 nt, Human
auguucuaagucuuucca

SEQ ID NO: 1776230 - RNA, 19 nt, Human
auguucuaagucuuuccau

SEQ ID NO: 1776231 - RNA, 16 nt, Human
auguucucuaucauuu

SEQ ID NO: 1776232 - RNA, 15 nt, Human
auguucucuaucauu

SEQ ID NO: 1776233 - RNA, 14 nt, Human
auguucucuaucau

SEQ ID NO: 1776234 - RNA, 15 nt, Human
auguucggguguggg

SEQ ID NO: 1776235 - RNA, 20 nt, Human
augugggcuaguugggcuuc

SEQ ID NO: 1776236 - RNA, 14 nt, Human
augucuucucacaa

SEQ ID NO: 1776237 - RNA, 20 nt, Human
augucuucucacaagccagc

SEQ ID NO: 1776238 - RNA, 22 nt, Human
augucuucucacaagccagcca

SEQ ID NO: 1776239 - RNA, 10 nt, Human
augucuugug

SEQ ID NO: 1776240 - RNA, 11 nt, Human
augucuugugu

SEQ ID NO: 1776241 - RNA, 23 nt, Human
augucuuaaugaaguuugaaugu

SEQ ID NO: 1776242 - RNA, 21 nt, Human
augucuuaaugaaguuugaau

SEQ ID NO: 1776243 - RNA, 20 nt, Human
augucuuaaugaaguuugaa

SEQ ID NO: 1776244 - RNA, 18 nt, Human
auggucagcccuagggug

SEQ ID NO: 1776245 - RNA, 17 nt, Human
auggucacgcaccuggg

SEQ ID NO: 1776246 - RNA, 14 nt, Human
auguauugagauau

SEQ ID NO: 1776247 - RNA, 11 nt, Human
augauguuugc

SEQ ID NO: 1776248 - RNA, 14 nt, Human
augauguuugccca

SEQ ID NO: 1776249 - RNA, 16 nt, Human
augauguuugcccaaa

SEQ ID NO: 1776250 - RNA, 19 nt, Human
augauguuugcccaaaauu

SEQ ID NO: 1776251 - RNA, 21 nt, Human
augauguuugcccaaaauuua

SEQ ID NO: 1776252 - RNA, 22 nt, Human
augaugcucaaaaucuuuccaa

SEQ ID NO: 1776253 - RNA, 15 nt, Human
augcugcaacaaaau

SEQ ID NO: 1776254 - RNA, 16 nt, Human
augcugcaacaaaaug

SEQ ID NO: 1776255 - RNA, 18 nt, Human
augcugcaacaaaaugua

SEQ ID NO: 1776256 - RNA, 20 nt, Human
augcugcaacaaaauguaga

SEQ ID NO: 1776257 - RNA, 15 nt, Human
augagcucuacccag

SEQ ID NO: 1776258 - RNA, 16 nt, Human
augagcucuacccagg

SEQ ID NO: 1776259 - RNA, 18 nt, Human
augagcucuacccagggc

SEQ ID NO: 1776260 - RNA, 19 nt, Human
augagcucuacccagggcc

SEQ ID NO: 1776261 - RNA, 22 nt, Human
augagcucuacccagggccugc

SEQ ID NO: 1776262 - RNA, 21 nt, Human
augaggaggggccccccugcc

SEQ ID NO: 1776263 - RNA, 20 nt, Human
augaaguuugaauguuaaau

SEQ ID NO: 1776264 - RNA, 19 nt, Human
augaaguuugaauguuaaa

SEQ ID NO: 1776265 - RNA, 18 nt, Human
augaaguuugaauguuaa

SEQ ID NO: 1776266 - RNA, 16 nt, Human
augaaguuugaauguu

SEQ ID NO: 1776267 - RNA, 15 nt, Human
augaaguuugaaugu

SEQ ID NO: 1776268 - RNA, 14 nt, Human
augaaguuugaaug

SEQ ID NO: 1776269 - RNA, 13 nt, Human
augaaguuugaau

SEQ ID NO: 1776270 - RNA, 16 nt, Human
augaaaaaauguauau

SEQ ID NO: 1776271 - RNA, 19 nt, Human
aucucgcucccucccagga

SEQ ID NO: 1776272 - RNA, 17 nt, Human
aucucgcucccucccag

SEQ ID NO: 1776273 - RNA, 14 nt, Human
aucuccccucagcu

SEQ ID NO: 1776274 - RNA, 15 nt, Human
aucuccccucagcuc

SEQ ID NO: 1776275 - RNA, 16 nt, Human
aucuccccucagcucg

SEQ ID NO: 1776276 - RNA, 20 nt, Human
aucuccccucagcucggcuc

SEQ ID NO: 1776277 - RNA, 16 nt, Human
aucuugaauuguaacu

SEQ ID NO: 1776278 - RNA, 18 nt, Human
aucuugaauacucugccc

SEQ ID NO: 1776279 - RNA, 19 nt, Human
aucuugaauacucugcccu

SEQ ID NO: 1776280 - RNA, 21 nt, Human
aucuugaauacucugcccucu

SEQ ID NO: 1776281 - RNA, 14 nt, Human
aucuucuucaccau

SEQ ID NO: 1776282 - RNA, 15 nt, Human
auccagacccggcug

SEQ ID NO: 1776283 - RNA, 15 nt, Human
auccagcuauguuau

SEQ ID NO: 1776284 - RNA, 12 nt, Human
auccuaugugau

SEQ ID NO: 1776285 - RNA, 14 nt, Human
auccuaugugauuu

SEQ ID NO: 1776286 - RNA, 12 nt, Human
auccuauguuuu

SEQ ID NO: 1776287 - RNA, 16 nt, Human
auccuaugugauuuua

SEQ ID NO: 1776288 - RNA, 17 nt, Human
auccuaugugauuuuaa

SEQ ID NO: 1776289 - RNA, 20 nt, Human
auccuauguuuuuguucaaa

SEQ ID NO: 1776290 - RNA, 23 nt, Human
auccuaugugauuuuaacucugu

SEQ ID NO: 1776291 - RNA, 13 nt, Human
auccuauucuuuc

SEQ ID NO: 1776292 - RNA, 19 nt, Human
auccuccacguucugcuca

SEQ ID NO: 1776293 - RNA, 15 nt, Human
auccucccaccucag

SEQ ID NO: 1776294 - RNA, 20 nt, Human
auccucccaccucagccucc

SEQ ID NO: 1776295 - RNA, 18 nt, Human
auccucccaccucagccu

SEQ ID NO: 1776296 - RNA, 19 nt, Human
auccucccaccucagccuc

SEQ ID NO: 1776297 - RNA, 12 nt, Human
aucagccaauua

SEQ ID NO: 1776298 - RNA, 14 nt, Human
aucagccaauuaug

SEQ ID NO: 1776299 - RNA, 13 nt, Human
aucagcuccuucc

SEQ ID NO: 1776300 - RNA, 15 nt, Human
aucagcuccuuccug

SEQ ID NO: 1776301 - RNA, 14 nt, Human
aucagcuauuuacu

SEQ ID NO: 1776302 - RNA, 15 nt, Human
aucagcuauuuacug

SEQ ID NO: 1776303 - RNA, 17 nt, Human
aucagcuccuuccugga

SEQ ID NO: 1776304 - RNA, 21 nt, Human
auaucauuuauuuuuuacauu

SEQ ID NO: 1776305 - RNA, 23 nt, Human
auaucauuuauuuuuuacauuau

SEQ ID NO: 1776306 - RNA, 14 nt, Human
auauuauagagagu

SEQ ID NO: 1776307 - RNA, 16 nt, Human
auauuuauucauuauu

SEQ ID NO: 1776308 - RNA, 19 nt, Human
auauuuauucauuauuugu

SEQ ID NO: 1776309 - RNA, 23 nt, Human
auauuuauucauuauuugucaaa

SEQ ID NO: 1776310 - RNA, 23 nt, Human
auagccauguaucauaauuacca

SEQ ID NO: 1776311 - RNA, 18 nt, Human
auagguccagaaguccuu

SEQ ID NO: 1776312 - RNA, 21 nt, Human
auagguccagaaguccuuaug

SEQ ID NO: 1776313 - RNA, 22 nt, Human
auagguguccagcauugcugga

SEQ ID NO: 1776314 - RNA, 17 nt, Human
auaguaugguggcuggg

SEQ ID NO: 1776315 - RNA, 18 nt, Human
auaguaugguggcugggu

SEQ ID NO: 1776316 - RNA, 22 nt, Human
auagguucuucuuguucugaga

SEQ ID NO: 1776317 - RNA, 13 nt, Human
auagguugagcaa

SEQ ID NO: 1776318 - RNA, 16 nt, Human
auagguugagcaauuu

SEQ ID NO: 1776319 - RNA, 22 nt, Human
auagguugagcaauuucccccu

SEQ ID NO: 1776320 - RNA, 15 nt, Human
auagguuuaauaauu

SEQ ID NO: 1776321 - RNA, 15 nt, Human
auauacuuguggacu

SEQ ID NO: 1776322 - RNA, 14 nt, Human
auauacuuguggac

SEQ ID NO: 1776323 - RNA, 21 nt, Human
auauacuuguggacuaaaaga

SEQ ID NO: 1776324 - RNA, 10 nt, Human
auaaggaauu

SEQ ID NO: 1776325 - RNA, 17 nt, Human
auaaggaauuauagacc

SEQ ID NO: 1776326 - RNA, 19 nt, Human
auaauggacagauuaauau

SEQ ID NO: 1776327 - RNA, 20 nt, Human
auaauggacagauuaauauu

SEQ ID NO: 1776328 - RNA, 17 nt, Human
auaauguuuuuaauauu

SEQ ID NO: 1776329 - RNA, 16 nt, Human
auaccugugccucggc

SEQ ID NO: 1776330 - RNA, 20 nt, Human
auaaagccuguuuugucuuu

SEQ ID NO: 1776331 - RNA, 12 nt, Human
auaaagaauacu

SEQ ID NO: 1776332 - RNA, 13 nt, Human
auaaagaauacuu

SEQ ID NO: 1776333 - RNA, 16 nt, Human
auaaagaauacuugaa

SEQ ID NO: 1776334 - RNA, 19 nt, Human
auaaagaauacuugaacuu

SEQ ID NO: 1776335 - RNA, 20 nt, Human
auaaagaauacuugaacuug

SEQ ID NO: 1776336 - RNA, 18 nt, Human
auaaaggauuaaugucaa

SEQ ID NO: 1776337 - RNA, 14 nt, Human
auaacauaugcagu

SEQ ID NO: 1776338 - RNA, 23 nt, Human
aguugaaaaucuuauaauuuaaa

SEQ ID NO: 1776339 - RNA, 16 nt, Human
aguuaaggugggcccg

SEQ ID NO: 1776340 - RNA, 19 nt, Human
aguuaaggugggcccggcc

SEQ ID NO: 1776341 - RNA, 15 nt, Human
aguuaauauugugaa

SEQ ID NO: 1776342 - RNA, 21 nt, Human
aguuaaauagaguauaugcac

SEQ ID NO: 1776343 - RNA, 23 nt, Human
aguguuuuguaccagugaauuuu

SEQ ID NO: 1776344 - RNA, 20 nt, Human
aguucagguaacaggcagau

SEQ ID NO: 1776345 - RNA, 19 nt, Human
aguucagguaacaggcaga

SEQ ID NO: 1776346 - RNA, 22 nt, Human
aguugaaaaucuuauaauuuaa

SEQ ID NO: 1776347 - RNA, 23 nt, Human
aguggcuuaaaacaacacucaca

SEQ ID NO: 1776348 - RNA, 16 nt, Human
agugggagcugccugu

SEQ ID NO: 1776349 - RNA, 15 nt, Human
agugggagcugccug

SEQ ID NO: 1776350 - RNA, 14 nt, Human
agugggagcugccu

SEQ ID NO: 1776351 - RNA, 23 nt, Human
aguaugaauuugagcaggucuca

SEQ ID NO: 1776352 - RNA, 13 nt, Human
aguaugguacauu

SEQ ID NO: 1776353 - RNA, 14 nt, Human
aguaugguacauuu

SEQ ID NO: 1776354 - RNA, 16 nt, Human
aguaugguacauuuuu

SEQ ID NO: 1776355 - RNA, 19 nt, Human
aguaugguacauuuuucaa

SEQ ID NO: 1776356 - RNA, 22 nt, Human
aguaugguacauuuuucaacuu

SEQ ID NO: 1776357 - RNA, 23 nt, Human
aguaugguacauuuuucaacuuu

SEQ ID NO: 1776358 - RNA, 14 nt, Human
aguaugguggcugg

SEQ ID NO: 1776359 - RNA, 19 nt, Human
agugacaguggauugcauu

SEQ ID NO: 1776360 - RNA, 20 nt, Human
agugacaguggauugcauuu

SEQ ID NO: 1776361 - RNA, 15 nt, Human
agugaaggcuucucu

SEQ ID NO: 1776362 - RNA, 21 nt, Human
agugaaggcuucucucugugg

SEQ ID NO: 1776363 - RNA, 20 nt, Human
agucugauucccaagcucug

SEQ ID NO: 1776364 - RNA, 16 nt, Human
agucugauucccaagc

SEQ ID NO: 1776365 - RNA, 18 nt, Human
agucugauucccaagcuc

SEQ ID NO: 1776366 - RNA, 17 nt, Human
agucuggaaugcagugg

SEQ ID NO: 1776367 - RNA, 18 nt, Human
agucuggaaugcaguggu

SEQ ID NO: 1776368 - RNA, 12 nt, Human
aguccuguaaug

SEQ ID NO: 1776369 - RNA, 17 nt, Human
caccccuaaacuccagg

SEQ ID NO: 1776370 - RNA, 18 nt, Human
cacccccuucuccaucca

SEQ ID NO: 1776371 - RNA, 15 nt, Human
caccccagggccuga

SEQ ID NO: 1776372 - RNA, 22 nt, Human
caccccagggccugagccuggc

SEQ ID NO: 1776373 - RNA, 16 nt, Human
caccccagggccugag

SEQ ID NO: 1776374 - RNA, 17 nt, Human
caccccagggccugagc

SEQ ID NO: 1776375 - RNA, 12 nt, Human
cacccaccucag

SEQ ID NO: 1776376 - RNA, 13 nt, Human
cacccaccucagc

SEQ ID NO: 1776377 - RNA, 14 nt, Human
cacccaccucagcc

SEQ ID NO: 1776378 - RNA, 16 nt, Human
cacccaccucagccuc

SEQ ID NO: 1776379 - RNA, 20 nt, Human
cacccaccaucaugucuggc

SEQ ID NO: 1776380 - RNA, 22 nt, Human
cacccaccaucaugucuggcua

SEQ ID NO: 1776381 - RNA, 17 nt, Human
cacaugugcacaugcac

SEQ ID NO: 1776382 - RNA, 14 nt, Human
cacaugugcacaug

SEQ ID NO: 1776383 - RNA, 15 nt, Human
cacaugugcacaugc

SEQ ID NO: 1776384 - RNA, 23 nt, Human
cacaugucuuaaugaaguuugaa

SEQ ID NO: 1776385 - RNA, 22 nt, Human
cacaugucuuaaugaaguuuga

SEQ ID NO: 1776386 - RNA, 18 nt, Human
cacaugucuuaaugaagu

SEQ ID NO: 1776387 - RNA, 17 nt, Human
cacaugucuuaaugaag

SEQ ID NO: 1776388 - RNA, 16 nt, Human
cacaugucuuaaugaa

SEQ ID NO: 1776389 - RNA, 15 nt, Human
cacaugucuuaauga

SEQ ID NO: 1776390 - RNA, 14 nt, Human
cacaugucuuaaug

SEQ ID NO: 1776391 - RNA, 13 nt, Human
cacaugucuuaau

SEQ ID NO: 1776392 - RNA, 12 nt, Human
cacaugucuuaa

SEQ ID NO: 1776393 - RNA, 22 nt, Human
cacauggugcuacgccugcaug

SEQ ID NO: 1776394 - RNA, 20 nt, Human
cacauggugcuacgccugca

SEQ ID NO: 1776395 - RNA, 12 nt, Human
cacauaucuguc

SEQ ID NO: 1776396 - RNA, 14 nt, Human
cacauaucugucau

SEQ ID NO: 1776397 - RNA, 19 nt, Human
caccacaugugcacaugca

SEQ ID NO: 1776398 - RNA, 15 nt, Human
caccacaugugcaca

SEQ ID NO: 1776399 - RNA, 18 nt, Human
caccacaugugcacaugc

SEQ ID NO: 1776400 - RNA, 15 nt, Human
caccacgucacuuca

SEQ ID NO: 1776401 - RNA, 13 nt, Human
caccacacccagc

SEQ ID NO: 1776402 - RNA, 15 nt, Human
caccacacccagccc

SEQ ID NO: 1776403 - RNA, 17 nt, Human
caccacacccagcccac

SEQ ID NO: 1776404 - RNA, 15 nt, Human
caccaagcccaguua

SEQ ID NO: 1776405 - RNA, 21 nt, Human
cacagugagucgaggacaggg

SEQ ID NO: 1776406 - RNA, 19 nt, Human
cacagugagucgaggacag

SEQ ID NO: 1776407 - RNA, 20 nt, Human
cacagugagucgaggacagg

SEQ ID NO: 1776408 - RNA, 18 nt, Human
cacaguugcucuaugcuu

SEQ ID NO: 1776409 - RNA, 18 nt, Human
cacagugagucgaggaca

SEQ ID NO: 1776410 - RNA, 20 nt, Human
cacaggcccggcuccaggcu

SEQ ID NO: 1776411 - RNA, 23 nt, Human
cacaggcccggcuccaggcuccu

SEQ ID NO: 1776412 - RNA, 17 nt, Human
cacauacacacacacgc

SEQ ID NO: 1776413 - RNA, 16 nt, Human
cacauaguuuuucagu

SEQ ID NO: 1776414 - RNA, 20 nt, Human
cacauaguuuuucagucuau

SEQ ID NO: 1776415 - RNA, 21 nt, Human
cacauauaaacaucacacaca

SEQ ID NO: 1776416 - RNA, 10 nt, Human
cacaggcagg

SEQ ID NO: 1776417 - RNA, 16 nt, Human
cacaggcccggcucca

SEQ ID NO: 1776418 - RNA, 17 nt, Human
cacaggcccggcuccag

SEQ ID NO: 1776419 - RNA, 18 nt, Human
cacaggcccggcuccagg

SEQ ID NO: 1776420 - RNA, 19 nt, Human
cacaggcccggcuccaggc

SEQ ID NO: 1776421 - RNA, 12 nt, Human
cacaggaucagu

SEQ ID NO: 1776422 - RNA, 15 nt, Human
cacaggaucagucug

SEQ ID NO: 1776423 - RNA, 16 nt, Human
cacaggaucagucuga

SEQ ID NO: 1776424 - RNA, 20 nt, Human
cacagccuccccugccaggg

SEQ ID NO: 1776425 - RNA, 21 nt, Human
cacagccuccccugccagggc

SEQ ID NO: 1776426 - RNA, 23 nt, Human
cacagccuccccugccagggcag

SEQ ID NO: 1776427 - RNA, 14 nt, Human
cacagccuccccug

SEQ ID NO: 1776428 - RNA, 17 nt, Human
cacagccuccccugcca

SEQ ID NO: 1776429 - RNA, 19 nt, Human
cacagccuccccugccagg

SEQ ID NO: 1776430 - RNA, 11 nt, Human
caauccuggac

SEQ ID NO: 1776431 - RNA, 17 nt, Human
caauccuagguaggguu

SEQ ID NO: 1776432 - RNA, 15 nt, Human
caauccuagugcuuu

SEQ ID NO: 1776433 - RNA, 14 nt, Human
caauccuauguuuu

SEQ ID NO: 1776434 - RNA, 20 nt, Human
caauccuauguuuuuguuca

SEQ ID NO: 1776435 - RNA, 12 nt, Human
caauaugugcca

SEQ ID NO: 1776436 - RNA, 19 nt, Human
caauaugugccaaucaaua

SEQ ID NO: 1776437 - RNA, 16 nt, Human
cacaaaaguuucucuu

SEQ ID NO: 1776438 - RNA, 18 nt, Human
cacaaaaguuucucuuuu

SEQ ID NO: 1776439 - RNA, 22 nt, Human
cacaaagaugggugaaggcugg

SEQ ID NO: 1776440 - RNA, 19 nt, Human
cacaaagaaaauuccuaua

SEQ ID NO: 1776441 - RNA, 20 nt, Human
cacaaagaaaauuccuauaa

SEQ ID NO: 1776442 - RNA, 20 nt, Human
caauucacaucuaaccucau

SEQ ID NO: 1776443 - RNA, 11 nt, Human
caaugucuuga

SEQ ID NO: 1776444 - RNA, 21 nt, Human
caaugucuugaugcaugcacu

SEQ ID NO: 1776445 - RNA, 23 nt, Human
caaugucuugaugcaugcacugu

SEQ ID NO: 1776446 - RNA, 12 nt, Human
cacagagaaagu

SEQ ID NO: 1776447 - RNA, 12 nt, Human
cacacagcucug

SEQ ID NO: 1776448 - RNA, 14 nt, Human
cacacaccagagcc

SEQ ID NO: 1776449 - RNA, 19 nt, Human
cacaacgugcauugugcuu

SEQ ID NO: 1776450 - RNA, 17 nt, Human
cacaacgugcauugugc

SEQ ID NO: 1776451 - RNA, 14 nt, Human
cacaacgugcauug

SEQ ID NO: 1776452 - RNA, 13 nt, Human
cacacccagccca

SEQ ID NO: 1776453 - RNA, 16 nt, Human
cacacccacucagcuc

SEQ ID NO: 1776454 - RNA, 14 nt, Human
cacacccacucagc

SEQ ID NO: 1776455 - RNA, 15 nt, Human
cacacccacucagcu

SEQ ID NO: 1776456 - RNA, 15 nt, Human
cacaccagagcccac

SEQ ID NO: 1776457 - RNA, 12 nt, Human
cacaccagagcc

SEQ ID NO: 1776458 - RNA, 13 nt, Human
cacaccagagccc

SEQ ID NO: 1776459 - RNA, 17 nt, Human
cacaccgggcacucaga

SEQ ID NO: 1776460 - RNA, 15 nt, Human
cacaccugcccuaaa

SEQ ID NO: 1776461 - RNA, 13 nt, Human
caaauagcaaaga

SEQ ID NO: 1776462 - RNA, 20 nt, Human
caaauaguuuauaaauguga

SEQ ID NO: 1776463 - RNA, 15 nt, Human
caaaggcaagcacuu

SEQ ID NO: 1776464 - RNA, 20 nt, Human
caaauuccuauuuuuaaaua

SEQ ID NO: 1776465 - RNA, 20 nt, Human
caaagccaaagcuaggccug

SEQ ID NO: 1776466 - RNA, 21 nt, Human
caaagccaaagcuaggccugg

SEQ ID NO: 1776467 - RNA, 22 nt, Human
caaagccaaagcuaggccuggc

SEQ ID NO: 1776468 - RNA, 16 nt, Human
caaagcuaggccuggc

SEQ ID NO: 1776469 - RNA, 17 nt, Human
caaagcuaggccuggcc

SEQ ID NO: 1776470 - RNA, 18 nt, Human
caaagcuaggccuggcca

SEQ ID NO: 1776471 - RNA, 23 nt, Human
auuuuuuuagaaagcauuugaau

SEQ ID NO: 1776472 - RNA, 17 nt, Human
auuuuuuuagaaagcau

SEQ ID NO: 1776473 - RNA, 22 nt, Human
caaacuuuauugacaagugauu

SEQ ID NO: 1776474 - RNA, 13 nt, Human
caaagaaaauucc

SEQ ID NO: 1776475 - RNA, 17 nt, Human
caaagaaaauuccuaua

SEQ ID NO: 1776476 - RNA, 19 nt, Human
caaagaaaauuccuauaag

SEQ ID NO: 1776477 - RNA, 20 nt, Human
caacccuggggaaggagcca

SEQ ID NO: 1776478 - RNA, 21 nt, Human
caacccuggggaaggagccag

SEQ ID NO: 1776479 - RNA, 22 nt, Human
caacccuggggaaggagccagu

SEQ ID NO: 1776480 - RNA, 23 nt, Human
caacccuggggaaggagccaguu

SEQ ID NO: 1776481 - RNA, 12 nt, Human
caacuuugaaua

SEQ ID NO: 1776482 - RNA, 14 nt, Human
caacuuugaauaaa

SEQ ID NO: 1776483 - RNA, 16 nt, Human
caacuuugaauaaaga

SEQ ID NO: 1776484 - RNA, 17 nt, Human
caacuuugaauaaagaa

SEQ ID NO: 1776485 - RNA, 22 nt, Human
caacuuugaauaaagaauacuu

SEQ ID NO: 1776486 - RNA, 23 nt, Human
caacuuugaauaaagaauacuug

SEQ ID NO: 1776487 - RNA, 14 nt, Human
caacuuacaaaaac

SEQ ID NO: 1776488 - RNA, 18 nt, Human
caacuuacaaaaacacuu

SEQ ID NO: 1776489 - RNA, 18 nt, Human
caacauuuacaacucauu

SEQ ID NO: 1776490 - RNA, 18 nt, Human
caaccaagucaugugcau

SEQ ID NO: 1776491 - RNA, 20 nt, Human
caaccaagucaugugcauuu

SEQ ID NO: 1776492 - RNA, 21 nt, Human
caaccccuucgcuccuguguc

SEQ ID NO: 1776493 - RNA, 18 nt, Human
caaccccuucgcuccugu

SEQ ID NO: 1776494 - RNA, 19 nt, Human
caaccccuucgcuccugug

SEQ ID NO: 1776495 - RNA, 23 nt, Human
caacaugccugccccaaacaaau

SEQ ID NO: 1776496 - RNA, 17 nt, Human
caacauguggcuccucc

SEQ ID NO: 1776497 - RNA, 18 nt, Human
caacauguggcuccuccc

SEQ ID NO: 1776498 - RNA, 21 nt, Human
caacauguggcuccucccagc

SEQ ID NO: 1776499 - RNA, 23 nt, Human
caacaggcugggcuucaguggca

SEQ ID NO: 1776500 - RNA, 24 nt, Human
caacaggcugggcuucaguggcag

SEQ ID NO: 1776501 - RNA, 23 nt, Human
caaauugugugugcucugcuuca

SEQ ID NO: 1776502 - RNA, 17 nt, Human
caagcgugagccacugc

SEQ ID NO: 1776503 - RNA, 18 nt, Human
caagcgugagccacugca

SEQ ID NO: 1776504 - RNA, 14 nt, Human
caaggaaaggccug

SEQ ID NO: 1776505 - RNA, 17 nt, Human
caagccccucuuucugu

SEQ ID NO: 1776506 - RNA, 16 nt, Human
caagcgugagccacug

SEQ ID NO: 1776507 - RNA, 18 nt, Human
caagcaccuccugccucg

SEQ ID NO: 1776508 - RNA, 17 nt, Human
caagcacuaaacaaaga

SEQ ID NO: 1776509 - RNA, 15 nt, Human
caaggauugcuacug

SEQ ID NO: 1776510 - RNA, 19 nt, Human
caaggauugcuacuguccu

SEQ ID NO: 1776511 - RNA, 20 nt, Human
caagggcuuuguuuugcaca

SEQ ID NO: 1776512 - RNA, 22 nt, Human
caagugauucuccugccucagc

SEQ ID NO: 1776513 - RNA, 16 nt, Human
caagugauucuccugc

SEQ ID NO: 1776514 - RNA, 17 nt, Human
caagugauucuccugcc

SEQ ID NO: 1776515 - RNA, 13 nt, Human
caagucuguguuc

SEQ ID NO: 1776516 - RNA, 14 nt, Human
cccacgcuggagug

SEQ ID NO: 1776517 - RNA, 16 nt, Human
cccaccuuggcugcag

SEQ ID NO: 1776518 - RNA, 15 nt, Human
cccaccuuggcucaa

SEQ ID NO: 1776519 - RNA, 22 nt, Human
cccaccuuggcucaaguccucu

SEQ ID NO: 1776520 - RNA, 14 nt, Human
cccaccuuggcugc

SEQ ID NO: 1776521 - RNA, 15 nt, Human
cccaccuuggcugca

SEQ ID NO: 1776522 - RNA, 12 nt, Human
cccaccucagcc

SEQ ID NO: 1776523 - RNA, 14 nt, Human
cccaccucagccuc

SEQ ID NO: 1776524 - RNA, 15 nt, Human
cccaccucagccucc

SEQ ID NO: 1776525 - RNA, 17 nt, Human
cccaccucagccucccg

SEQ ID NO: 1776526 - RNA, 12 nt, Human
cccaccuuggcu

SEQ ID NO: 1776527 - RNA, 21 nt, Human
cccaccucagccucccaaagu

SEQ ID NO: 1776528 - RNA, 15 nt, Human
ccauuuuucaaagca

SEQ ID NO: 1776529 - RNA, 16 nt, Human
ccauuuuucaaagcaa

SEQ ID NO: 1776530 - RNA, 17 nt, Human
ccauuuuucaaagcaau

SEQ ID NO: 1776531 - RNA, 18 nt, Human
ccauuuuucaaagcaauu

SEQ ID NO: 1776532 - RNA, 15 nt, Human
cccaagguuggagcc

SEQ ID NO: 1776533 - RNA, 19 nt, Human
cccaagguuggagcccagg

SEQ ID NO: 1776534 - RNA, 23 nt, Human
cccacacucccaagguuggagcc

SEQ ID NO: 1776535 - RNA, 23 nt, Human
cccacagacaaaagcgcuuuucc

SEQ ID NO: 1776536 - RNA, 15 nt, Human
cccacaguugcucua

SEQ ID NO: 1776537 - RNA, 17 nt, Human
cccacaggaucagucug

SEQ ID NO: 1776538 - RNA, 13 nt, Human
cccacaggaucag

SEQ ID NO: 1776539 - RNA, 19 nt, Human
ccauuagcuuucaauuccg

SEQ ID NO: 1776540 - RNA, 14 nt, Human
ccauuuuaaguccc

SEQ ID NO: 1776541 - RNA, 15 nt, Human
ccauuuuaagucccu

SEQ ID NO: 1776542 - RNA, 16 nt, Human
ccauuuuaagucccug

SEQ ID NO: 1776543 - RNA, 20 nt, Human
ccauuuuaagucccugucac

SEQ ID NO: 1776544 - RNA, 23 nt, Human
ccauuuuaagucccugucaccuc

SEQ ID NO: 1776545 - RNA, 16 nt, Human
ccauucugccugccca

SEQ ID NO: 1776546 - RNA, 15 nt, Human
ccauucugccugccc

SEQ ID NO: 1776547 - RNA, 13 nt, Human
ccauguugccccu

SEQ ID NO: 1776548 - RNA, 20 nt, Human
ccauguuaaguccucccuga

SEQ ID NO: 1776549 - RNA, 21 nt, Human
ccauguuaaguccucccugac

SEQ ID NO: 1776550 - RNA, 14 nt, Human
ccaucucuuccuug

SEQ ID NO: 1776551 - RNA, 15 nt, Human
ccaucucuuccuuga

SEQ ID NO: 1776552 - RNA, 18 nt, Human
ccaucuucgggaccagga

SEQ ID NO: 1776553 - RNA, 20 nt, Human
ccaucuucgggaccaggauu

SEQ ID NO: 1776554 - RNA, 14 nt, Human
ccaggcuggucuca

SEQ ID NO: 1776555 - RNA, 19 nt, Human
ccaggccccugccacccug

SEQ ID NO: 1776556 - RNA, 12 nt, Human
ccaggccagagg

SEQ ID NO: 1776557 - RNA, 14 nt, Human
ccaggccccugcca

SEQ ID NO: 1776558 - RNA, 15 nt, Human
ccaggccccugccac

SEQ ID NO: 1776559 - RNA, 16 nt, Human
ccaggccccugccacc

SEQ ID NO: 1776560 - RNA, 23 nt, Human
ccagugcccacaggaucagucug

SEQ ID NO: 1776561 - RNA, 14 nt, Human
ccagggccugagcc

SEQ ID NO: 1776562 - RNA, 16 nt, Human
ccagggccugagccug

SEQ ID NO: 1776563 - RNA, 17 nt, Human
ccagggccugagccugg

SEQ ID NO: 1776564 - RNA, 18 nt, Human
ccagggccugagccuggc

SEQ ID NO: 1776565 - RNA, 19 nt, Human
ccagggccugagccuggcc

SEQ ID NO: 1776566 - RNA, 23 nt, Human
ccagggccugcaggaccugccug

SEQ ID NO: 1776567 - RNA, 20 nt, Human
ccagggaugauucaagccau

SEQ ID NO: 1776568 - RNA, 21 nt, Human
ccagggaugauucaagccauu

SEQ ID NO: 1776569 - RNA, 22 nt, Human
ccagggcaagcuccgcaggacu

SEQ ID NO: 1776570 - RNA, 21 nt, Human
ccagggcaaggguuaaggccu

SEQ ID NO: 1776571 - RNA, 22 nt, Human
ccagggcaaggguuaaggccug

SEQ ID NO: 1776572 - RNA, 23 nt, Human
ccagggcaaggguuaaggccuga

SEQ ID NO: 1776573 - RNA, 17 nt, Human
ccagggcaagcuccgca

SEQ ID NO: 1776574 - RNA, 20 nt, Human
ccagggcaagcuccgcagga

SEQ ID NO: 1776575 - RNA, 16 nt, Human
ccagguuucuaugugu

SEQ ID NO: 1776576 - RNA, 13 nt, Human
ccaggugggagcg

SEQ ID NO: 1776577 - RNA, 16 nt, Human
ccaggugcagccagag

SEQ ID NO: 1776578 - RNA, 14 nt, Human
ccaggugcagccag

SEQ ID NO: 1776579 - RNA, 15 nt, Human
ccaggugcagccaga

SEQ ID NO: 1776580 - RNA, 12 nt, Human
ccagugaauuuu

SEQ ID NO: 1776581 - RNA, 17 nt, Human
ccagugaauuuuugcaa

SEQ ID NO: 1776582 - RNA, 18 nt, Human
ccagugaauuuuugcaau

SEQ ID NO: 1776583 - RNA, 19 nt, Human
ccagugaauuuuugcaaua

SEQ ID NO: 1776584 - RNA, 20 nt, Human
ccagugaauuuuugcaauaa

SEQ ID NO: 1776585 - RNA, 21 nt, Human
ccagugaauuuuugcaauaau

SEQ ID NO: 1776586 - RNA, 22 nt, Human
ccagugaauuuuugcaauaaug

SEQ ID NO: 1776587 - RNA, 12 nt, Human
ccaucaugucug

SEQ ID NO: 1776588 - RNA, 13 nt, Human
ccaucaucuccug

SEQ ID NO: 1776589 - RNA, 13 nt, Human
ccaucaugucugg

SEQ ID NO: 1776590 - RNA, 14 nt, Human
ccagugugacaagg

SEQ ID NO: 1776591 - RNA, 23 nt, Human
ccagugugacaaggauugcuacu

SEQ ID NO: 1776592 - RNA, 13 nt, Human
ccaccuuggcuca

SEQ ID NO: 1776593 - RNA, 14 nt, Human
ccacccuccuuuca

SEQ ID NO: 1776594 - RNA, 14 nt, Human
ccaccccuccccau

SEQ ID NO: 1776595 - RNA, 14 nt, Human
ccaccccuggaaga

SEQ ID NO: 1776596 - RNA, 21 nt, Human
ccaccccuggaagagcccagu

SEQ ID NO: 1776597 - RNA, 22 nt, Human
ccaccccuggaagagcccaguc

SEQ ID NO: 1776598 - RNA, 11 nt, Human
ccacccugcuc

SEQ ID NO: 1776599 - RNA, 12 nt, Human
ccacccugcucu

SEQ ID NO: 1776600 - RNA, 19 nt, Human
ccacugugccaugugccag

SEQ ID NO: 1776601 - RNA, 15 nt, Human
ccacugugccaugug

SEQ ID NO: 1776602 - RNA, 16 nt, Human
ccacugugccaugugc

SEQ ID NO: 1776603 - RNA, 22 nt, Human
ccacugcuuuuggucuguguga

SEQ ID NO: 1776604 - RNA, 13 nt, Human
ccacuggacugac

SEQ ID NO: 1776605 - RNA, 18 nt, Human
ccacuggacugaccuggu

SEQ ID NO: 1776606 - RNA, 20 nt, Human
ccacugcuuuuggucugugu

SEQ ID NO: 1776607 - RNA, 12 nt, Human
ccacugcucugg

SEQ ID NO: 1776608 - RNA, 13 nt, Human
ccacugcucuggu

SEQ ID NO: 1776609 - RNA, 15 nt, Human
ccacugcucugguua

SEQ ID NO: 1776610 - RNA, 16 nt, Human
ccagacccggcugcgu

SEQ ID NO: 1776611 - RNA, 14 nt, Human
ccagacccggcugc

SEQ ID NO: 1776612 - RNA, 15 nt, Human
ccagacccggcugcg

SEQ ID NO: 1776613 - RNA, 22 nt, Human
ccagacauucucgcuucccuga

SEQ ID NO: 1776614 - RNA, 14 nt, Human
ccagaaggagacag

SEQ ID NO: 1776615 - RNA, 17 nt, Human
ccagaaggagacaggca

SEQ ID NO: 1776616 - RNA, 18 nt, Human
ccagaaggagacaggcag

SEQ ID NO: 1776617 - RNA, 16 nt, Human
ccagcccacuucugcc

SEQ ID NO: 1776618 - RNA, 17 nt, Human
ccagcccacuucugcca

SEQ ID NO: 1776619 - RNA, 21 nt, Human
ccagcccagauuccccugugu

SEQ ID NO: 1776620 - RNA, 23 nt, Human
ccagcccagauuccccuguguca

SEQ ID NO: 1776621 - RNA, 13 nt, Human
ccagccggggccu

SEQ ID NO: 1776622 - RNA, 13 nt, Human
ccagcgagcccug

SEQ ID NO: 1776623 - RNA, 18 nt, Human
ccagcuccucacucaccu

SEQ ID NO: 1776624 - RNA, 21 nt, Human
ccagccugcgccugcugcaug

SEQ ID NO: 1776625 - RNA, 10 nt, Human
ccagccugcu

SEQ ID NO: 1776626 - RNA, 12 nt, Human
ccagccugcuag

SEQ ID NO: 1776627 - RNA, 13 nt, Human
ccagccugcuagc

SEQ ID NO: 1776628 - RNA, 14 nt, Human
ccagccugcuagcu

SEQ ID NO: 1776629 - RNA, 15 nt, Human
ccagccugcuagcua

SEQ ID NO: 1776630 - RNA, 19 nt, Human
ccagccugcuagcuagcuc

SEQ ID NO: 1776631 - RNA, 21 nt, Human
ccagccugcuagcuagcucaa

SEQ ID NO: 1776632 - RNA, 13 nt, Human
ccagccugcgccu

SEQ ID NO: 1776633 - RNA, 14 nt, Human
ccagccugcgccug

SEQ ID NO: 1776634 - RNA, 15 nt, Human
ccagccugcgccugc

SEQ ID NO: 1776635 - RNA, 16 nt, Human
ccagccugcgccugcu

SEQ ID NO: 1776636 - RNA, 17 nt, Human
ccagccugcgccugcug

SEQ ID NO: 1776637 - RNA, 19 nt, Human
ccagccugcgccugcugca

SEQ ID NO: 1776638 - RNA, 14 nt, Human
ccagagcccaccuu

SEQ ID NO: 1776639 - RNA, 14 nt, Human
ccagauugcaacag

SEQ ID NO: 1776640 - RNA, 16 nt, Human
ccagauugcaacaggc

SEQ ID NO: 1776641 - RNA, 23 nt, Human
ccagauugcaacaggcugggcuu

SEQ ID NO: 1776642 - RNA, 18 nt, Human
ccagauugcaacaggcug

SEQ ID NO: 1776643 - RNA, 22 nt, Human
ccagauugcaacaggcugggcu

SEQ ID NO: 1776644 - RNA, 17 nt, Human
ccagcaagugagagcug

SEQ ID NO: 1776645 - RNA, 18 nt, Human
ccagcaagugagagcugg

SEQ ID NO: 1776646 - RNA, 19 nt, Human
ccagcaagugagagcuggg

SEQ ID NO: 1776647 - RNA, 22 nt, Human
ccagcaccggccccauuuaccc

SEQ ID NO: 1776648 - RNA, 11 nt, Human
ccccugugcag

SEQ ID NO: 1776649 - RNA, 14 nt, Human
ccccuuccacugag

SEQ ID NO: 1776650 - RNA, 19 nt, Human
ccccugugcagccgcugag

SEQ ID NO: 1776651 - RNA, 20 nt, Human
ccccugugcagccgcugagc

SEQ ID NO: 1776652 - RNA, 13 nt, Human
cccgcagagcgcg

SEQ ID NO: 1776653 - RNA, 22 nt, Human
cccgcagagcgcgccccuagcc

SEQ ID NO: 1776654 - RNA, 12 nt, Human
ccccugcccugu

SEQ ID NO: 1776655 - RNA, 14 nt, Human
ccccugcccugugg

SEQ ID NO: 1776656 - RNA, 15 nt, Human
ccccugcccuguggg

SEQ ID NO: 1776657 - RNA, 17 nt, Human
ccccugcccggcugcgg

SEQ ID NO: 1776658 - RNA, 19 nt, Human
ccccugcccggcugcggaa

SEQ ID NO: 1776659 - RNA, 11 nt, Human
ccccugcuggu

SEQ ID NO: 1776660 - RNA, 13 nt, Human
ccccugcugguuc

SEQ ID NO: 1776661 - RNA, 15 nt, Human
ccccugcugguucag

SEQ ID NO: 1776662 - RNA, 20 nt, Human
ccccugcugguucaggguug

SEQ ID NO: 1776663 - RNA, 17 nt, Human
ccccuggaagagcccag

SEQ ID NO: 1776664 - RNA, 18 nt, Human
ccccuggaagagcccagu

SEQ ID NO: 1776665 - RNA, 20 nt, Human
ccccuggaagagcccagucu

SEQ ID NO: 1776666 - RNA, 22 nt, Human
ccccuggaagagcccagucugu

SEQ ID NO: 1776667 - RNA, 17 nt, Human
ccccuggaggcugccuc

SEQ ID NO: 1776668 - RNA, 20 nt, Human
ccccuggaggcugccuccca

SEQ ID NO: 1776669 - RNA, 21 nt, Human
ccccuggaggcugccucccaa

SEQ ID NO: 1776670 - RNA, 13 nt, Human
ccccaucagugcu

SEQ ID NO: 1776671 - RNA, 14 nt, Human
ccccaucagugcuc

SEQ ID NO: 1776672 - RNA, 20 nt, Human
ccccaucagugcucccucac

SEQ ID NO: 1776673 - RNA, 14 nt, Human
ccccagugcccaca

SEQ ID NO: 1776674 - RNA, 15 nt, Human
ccccagugcccacag

SEQ ID NO: 1776675 - RNA, 16 nt, Human
ccccagugcccacagg

SEQ ID NO: 1776676 - RNA, 20 nt, Human
ccccagugcccacaggauca

SEQ ID NO: 1776677 - RNA, 17 nt, Human
ccccaguaaaauugcca

SEQ ID NO: 1776678 - RNA, 14 nt, Human
ccccaguaaaauug

SEQ ID NO: 1776679 - RNA, 13 nt, Human
ccccaguaaaauu

SEQ ID NO: 1776680 - RNA, 17 nt, Human
ccccuagccgguuccug

SEQ ID NO: 1776681 - RNA, 19 nt, Human
ccccuagccgguuccuguc

SEQ ID NO: 1776682 - RNA, 21 nt, Human
ccccuagccgguuccuguccc

SEQ ID NO: 1776683 - RNA, 15 nt, Human
ccccgguggcugggc

SEQ ID NO: 1776684 - RNA, 17 nt, Human
ccccgguggcugggcag

SEQ ID NO: 1776685 - RNA, 11 nt, Human
ccccucaaccc

SEQ ID NO: 1776686 - RNA, 21 nt, Human
cccccugugcagccgcugagc

SEQ ID NO: 1776687 - RNA, 12 nt, Human
cccccugugcag

SEQ ID NO: 1776688 - RNA, 12 nt, Human
cccccagccugc

SEQ ID NO: 1776689 - RNA, 17 nt, Human
cccccuccgccuccagg

SEQ ID NO: 1776690 - RNA, 12 nt, Human
cccccucugucc

SEQ ID NO: 1776691 - RNA, 18 nt, Human
ccccucagcucggcucag

SEQ ID NO: 1776692 - RNA, 14 nt, Human
ccccucagcucggc

SEQ ID NO: 1776693 - RNA, 15 nt, Human
ccccucagcucggcu

SEQ ID NO: 1776694 - RNA, 12 nt, Human
ccccuccaugug

SEQ ID NO: 1776695 - RNA, 13 nt, Human
ccccucaccuacu

SEQ ID NO: 1776696 - RNA, 12 nt, Human
ccccucccagag

SEQ ID NO: 1776697 - RNA, 13 nt, Human
ccccuccgccucc

SEQ ID NO: 1776698 - RNA, 17 nt, Human
ccccuccggacuggugc

SEQ ID NO: 1776699 - RNA, 18 nt, Human
ccccuccggacuggugcc

SEQ ID NO: 1776700 - RNA, 18 nt, Human
ccccuccucugaaacagc

SEQ ID NO: 1776701 - RNA, 22 nt, Human
ccccuccucugaaacagcugcc

SEQ ID NO: 1776702 - RNA, 23 nt, Human
ccccuccucugaaacagcugccu

SEQ ID NO: 1776703 - RNA, 14 nt, Human
ccccucuccuuccu

SEQ ID NO: 1776704 - RNA, 19 nt, Human
ccccucuccuuccugugug

SEQ ID NO: 1776705 - RNA, 23 nt, Human
cccaucucgcucccucccaggac

SEQ ID NO: 1776706 - RNA, 14 nt, Human
cccaguugggugga

SEQ ID NO: 1776707 - RNA, 16 nt, Human
cccaucuccccucagc

SEQ ID NO: 1776708 - RNA, 20 nt, Human
cccaucucgcucccucccag

SEQ ID NO: 1776709 - RNA, 21 nt, Human
cccaucucgcucccucccagg

SEQ ID NO: 1776710 - RNA, 22 nt, Human
cccaucucgcucccucccagga

SEQ ID NO: 1776711 - RNA, 16 nt, Human
cccaucuggucauuug

SEQ ID NO: 1776712 - RNA, 14 nt, Human
cccaugagccucag

SEQ ID NO: 1776713 - RNA, 19 nt, Human
ccgacucuuucugagugcc

SEQ ID NO: 1776714 - RNA, 21 nt, Human
ccgacucuuucugagugccuu

SEQ ID NO: 1776715 - RNA, 12 nt, Human
ccgccuccagga

SEQ ID NO: 1776716 - RNA, 14 nt, Human
ccgaguagcuggga

SEQ ID NO: 1776717 - RNA, 16 nt, Human
ccgaguagcugggacu

SEQ ID NO: 1776718 - RNA, 19 nt, Human
ccggggccuuaucgggcuc

SEQ ID NO: 1776719 - RNA, 16 nt, Human
ccggcuccaggcuccu

SEQ ID NO: 1776720 - RNA, 21 nt, Human
ccggcuccaggcuccuuuagc

SEQ ID NO: 1776721 - RNA, 14 nt, Human
ccggcucccagccu

SEQ ID NO: 1776722 - RNA, 15 nt, Human
ccggcucccagccuc

SEQ ID NO: 1776723 - RNA, 13 nt, Human
ccggagggcugcg

SEQ ID NO: 1776724 - RNA, 13 nt, Human
ccggcucccagcc

SEQ ID NO: 1776725 - RNA, 22 nt, Human
ccgggcacucagaagacacuga

SEQ ID NO: 1776726 - RNA, 13 nt, Human
ccgggccacagag

SEQ ID NO: 1776727 - RNA, 18 nt, Human
ccuaggugacagagugag

SEQ ID NO: 1776728 - RNA, 23 nt, Human
ccuaggccucaacuccucccaua

SEQ ID NO: 1776729 - RNA, 16 nt, Human
ccuaccgacccagggu

SEQ ID NO: 1776730 - RNA, 15 nt, Human
ccuacccugccuccc

SEQ ID NO: 1776731 - RNA, 23 nt, Human
ccuacccugccucccuugacuuu

SEQ ID NO: 1776732 - RNA, 14 nt, Human
cccucccaggacuc

SEQ ID NO: 1776733 - RNA, 14 nt, Human
cccucuucugagca

SEQ ID NO: 1776734 - RNA, 15 nt, Human
cccucuucugagcac

SEQ ID NO: 1776735 - RNA, 17 nt, Human
cccucuccuuccugugu

SEQ ID NO: 1776736 - RNA, 14 nt, Human
cccucuccuuccug

SEQ ID NO: 1776737 - RNA, 19 nt, Human
cccucuaaccucgcccucu

SEQ ID NO: 1776738 - RNA, 15 nt, Human
cccugcccugugggg

SEQ ID NO: 1776739 - RNA, 21 nt, Human
cccugaggaugggucagagcu

SEQ ID NO: 1776740 - RNA, 22 nt, Human
cccugaggaugggucagagcua

SEQ ID NO: 1776741 - RNA, 14 nt, Human
cccucuuugcugca

SEQ ID NO: 1776742 - RNA, 15 nt, Human
cccucuuugcugcag

SEQ ID NO: 1776743 - RNA, 19 nt, Human
cccucuuugcugcagagaa

SEQ ID NO: 1776744 - RNA, 20 nt, Human
cccucuuccuacccugccuc

SEQ ID NO: 1776745 - RNA, 18 nt, Human
cccugcgccuuuccuuuu

SEQ ID NO: 1776746 - RNA, 14 nt, Human
cccugcgccuuucc

SEQ ID NO: 1776747 - RNA, 15 nt, Human
cccugcgccuuuccu

SEQ ID NO: 1776748 - RNA, 18 nt, Human
cccugcugagucaucugu

SEQ ID NO: 1776749 - RNA, 22 nt, Human
cccugcucuccgaccagacacc

SEQ ID NO: 1776750 - RNA, 21 nt, Human
cccugcucuccgaccagacac

SEQ ID NO: 1776751 - RNA, 16 nt, Human
cccuuaucugugcuca

SEQ ID NO: 1776752 - RNA, 20 nt, Human
cccuuaucugugcucaggac

SEQ ID NO: 1776753 - RNA, 16 nt, Human
cccuuccacugagggc

SEQ ID NO: 1776754 - RNA, 13 nt, Human
cccuuccacugag

SEQ ID NO: 1776755 - RNA, 23 nt, Human
cccuuagcagggaaacagcuaau

SEQ ID NO: 1776756 - RNA, 14 nt, Human
cccuuagcagggaa

SEQ ID NO: 1776757 - RNA, 17 nt, Human
cccuugacuuugcuccu

SEQ ID NO: 1776758 - RNA, 19 nt, Human
cccuugacuuugcuccuca

SEQ ID NO: 1776759 - RNA, 20 nt, Human
cccuugccuuucgaggccug

SEQ ID NO: 1776760 - RNA, 21 nt, Human
cccuugccuuucgaggccuga

SEQ ID NO: 1776761 - RNA, 14 nt, Human
cccuggggccugac

SEQ ID NO: 1776762 - RNA, 20 nt, Human
cccuggggccugacugcuca

SEQ ID NO: 1776763 - RNA, 21 nt, Human
cccuggggccugacugcucag

SEQ ID NO: 1776764 - RNA, 13 nt, Human
cccugguggcagu

SEQ ID NO: 1776765 - RNA, 14 nt, Human
cccugguggcagug

SEQ ID NO: 1776766 - RNA, 15 nt, Human
cccugguggcagugg

SEQ ID NO: 1776767 - RNA, 18 nt, Human
cccuggggaaggagccag

SEQ ID NO: 1776768 - RNA, 19 nt, Human
cccuggggaaggagccagu

SEQ ID NO: 1776769 - RNA, 22 nt, Human
cccugucaaauaucaguuaccc

SEQ ID NO: 1776770 - RNA, 13 nt, Human
cccugucaccucu

SEQ ID NO: 1776771 - RNA, 14 nt, Human
cccugucaccucuu

SEQ ID NO: 1776772 - RNA, 14 nt, Human
cccuguuccuggag

SEQ ID NO: 1776773 - RNA, 15 nt, Human
cccuguuccuggagg

SEQ ID NO: 1776774 - RNA, 22 nt, Human
cccuguugaauuuuguucucug

SEQ ID NO: 1776775 - RNA, 12 nt, Human
cuaaccucaucu

SEQ ID NO: 1776776 - RNA, 15 nt, Human
cuaaccucaucuucu

SEQ ID NO: 1776777 - RNA, 17 nt, Human
cuaaccucgcccucucc

SEQ ID NO: 1776778 - RNA, 13 nt, Human
cuaaccucgcccu

SEQ ID NO: 1776779 - RNA, 16 nt, Human
cuaaccucgcccucuc

SEQ ID NO: 1776780 - RNA, 12 nt, Human
cuaaccacgcug

SEQ ID NO: 1776781 - RNA, 14 nt, Human
cuaaccacgcugga

SEQ ID NO: 1776782 - RNA, 12 nt, Human
cuaaaaagcaac

SEQ ID NO: 1776783 - RNA, 18 nt, Human
cuaaaaaaaaaaaaguau

SEQ ID NO: 1776784 - RNA, 20 nt, Human
cuaaaaaaaaaaaaguauua

SEQ ID NO: 1776785 - RNA, 23 nt, Human
cgggaggauguucugggacacag

SEQ ID NO: 1776786 - RNA, 13 nt, Human
cgggaccuggugc

SEQ ID NO: 1776787 - RNA, 18 nt, Human
cgggacagugcugcagcu

SEQ ID NO: 1776788 - RNA, 22 nt, Human
cuaaaugaaaaucgugacaaca

SEQ ID NO: 1776789 - RNA, 14 nt, Human
cuaaacuccuuccu

SEQ ID NO: 1776790 - RNA, 15 nt, Human
cuaaacuccuuccug

SEQ ID NO: 1776791 - RNA, 16 nt, Human
cuaaacuccuuccugg

SEQ ID NO: 1776792 - RNA, 17 nt, Human
cuaaacuccuuccuggc

SEQ ID NO: 1776793 - RNA, 22 nt, Human
cuaaacuccuuccuggccugag

SEQ ID NO: 1776794 - RNA, 21 nt, Human
cuaagcuucacuguaaaauaa

SEQ ID NO: 1776795 - RNA, 19 nt, Human
cuaauggguauuuaaacaa

SEQ ID NO: 1776796 - RNA, 12 nt, Human
cuaaugggacac

SEQ ID NO: 1776797 - RNA, 13 nt, Human
cuaaugggacacu

SEQ ID NO: 1776798 - RNA, 18 nt, Human
cuaauauguaacaagcca

SEQ ID NO: 1776799 - RNA, 23 nt, Human
cuaauaugauagcgggaaaagga

SEQ ID NO: 1776800 - RNA, 23 nt, Human
cuacacgagauacagaauuuuau

SEQ ID NO: 1776801 - RNA, 16 nt, Human
cuacacccuuuuccag

SEQ ID NO: 1776802 - RNA, 18 nt, Human
cuacacccuuuuccagcu

SEQ ID NO: 1776803 - RNA, 20 nt, Human
cuacaccuugcuuuuuuacu

SEQ ID NO: 1776804 - RNA, 15 nt, Human
cuacaggcacccacc

SEQ ID NO: 1776805 - RNA, 17 nt, Human
cuacaggcacccaccau

SEQ ID NO: 1776806 - RNA, 12 nt, Human
cuacagggccaa

SEQ ID NO: 1776807 - RNA, 14 nt, Human
cuacaggagugagc

SEQ ID NO: 1776808 - RNA, 15 nt, Human
cuacaggagugagca

SEQ ID NO: 1776809 - RNA, 16 nt, Human
cuacaggagugagcac

SEQ ID NO: 1776810 - RNA, 14 nt, Human
cuacaggugugagu

SEQ ID NO: 1776811 - RNA, 16 nt, Human
cuacaggugugaguca

SEQ ID NO: 1776812 - RNA, 14 nt, Human
cuacagucaggaaa

SEQ ID NO: 1776813 - RNA, 15 nt, Human
cuacagucaggaaag

SEQ ID NO: 1776814 - RNA, 18 nt, Human
cuacagucaggaaaggaa

SEQ ID NO: 1776815 - RNA, 21 nt, Human
cuacagucaggaaaggaauca

SEQ ID NO: 1776816 - RNA, 18 nt, Human
cuacagccuugucccccu

SEQ ID NO: 1776817 - RNA, 19 nt, Human
cuacagccuugucccccuc

SEQ ID NO: 1776818 - RNA, 22 nt, Human
cuacagaggccaugggccuccu

SEQ ID NO: 1776819 - RNA, 18 nt, Human
cuacagaggccaugggcc

SEQ ID NO: 1776820 - RNA, 20 nt, Human
cuacagaggccaugggccuc

SEQ ID NO: 1776821 - RNA, 13 nt, Human
cuacccugccucc

SEQ ID NO: 1776822 - RNA, 18 nt, Human
cuacccugagcugaggca

SEQ ID NO: 1776823 - RNA, 12 nt, Human
cuacccugagcu

SEQ ID NO: 1776824 - RNA, 17 nt, Human
cuacccugagcugaggc

SEQ ID NO: 1776825 - RNA, 18 nt, Human
cuacccagcgagcccugg

SEQ ID NO: 1776826 - RNA, 13 nt, Human
cuacccacccucc

SEQ ID NO: 1776827 - RNA, 15 nt, Human
cuacccagcgagccc

SEQ ID NO: 1776828 - RNA, 17 nt, Human
cuacccagcgagcccug

SEQ ID NO: 1776829 - RNA, 22 nt, Human
cuacauuauaaaugucucuuua

SEQ ID NO: 1776830 - RNA, 20 nt, Human
cuaccaacuuguauccaggc

SEQ ID NO: 1776831 - RNA, 12 nt, Human
cuaccacuccug

SEQ ID NO: 1776832 - RNA, 21 nt, Human
cuagccuuagaagucacacag

SEQ ID NO: 1776833 - RNA, 22 nt, Human
cuagccuuagaagucacacagu

SEQ ID NO: 1776834 - RNA, 23 nt, Human
cuagccuuagaagucacacagua

SEQ ID NO: 1776835 - RNA, 16 nt, Human
cuagcuagcucaacua

SEQ ID NO: 1776836 - RNA, 12 nt, Human
cuagcuagcuca

SEQ ID NO: 1776837 - RNA, 12 nt, Human
cuacucuguguc

SEQ ID NO: 1776838 - RNA, 13 nt, Human
cuacucuguguca

SEQ ID NO: 1776839 - RNA, 19 nt, Human
cuacuguccuacccacccu

SEQ ID NO: 1776840 - RNA, 11 nt, Human
cuacugccuuu

SEQ ID NO: 1776841 - RNA, 15 nt, Human
cuacugccuuuagaa

SEQ ID NO: 1776842 - RNA, 16 nt, Human
cuacugccuuuagaaa

SEQ ID NO: 1776843 - RNA, 11 nt, Human
cuacugcugug

SEQ ID NO: 1776844 - RNA, 20 nt, Human
cuacugcugugaacccuggg

SEQ ID NO: 1776845 - RNA, 21 nt, Human
cuaccgacccaggguucccgc

SEQ ID NO: 1776846 - RNA, 15 nt, Human
cuaccgacccagggu

SEQ ID NO: 1776847 - RNA, 15 nt, Human
cuaccucccuugccu

SEQ ID NO: 1776848 - RNA, 16 nt, Human
cuaccucccuugccuu

SEQ ID NO: 1776849 - RNA, 14 nt, Human
cuagauacaauaaa

SEQ ID NO: 1776850 - RNA, 15 nt, Human
cuagauacaauaaau

SEQ ID NO: 1776851 - RNA, 16 nt, Human
cuagauacaauaaauu

SEQ ID NO: 1776852 - RNA, 17 nt, Human
cuagauacaauaaauug

SEQ ID NO: 1776853 - RNA, 23 nt, Human
cuagauacaauaaauugcuaaug

SEQ ID NO: 1776854 - RNA, 20 nt, Human
cuagaggcccuuugcugucc

SEQ ID NO: 1776855 - RNA, 20 nt, Human
cuacuguccuacccacccuc

SEQ ID NO: 1776856 - RNA, 17 nt, Human
cuacuuacccagguggg

SEQ ID NO: 1776857 - RNA, 20 nt, Human
cuacuuacccaggugggucc

SEQ ID NO: 1776858 - RNA, 13 nt, Human
cuagacucggggu

SEQ ID NO: 1776859 - RNA, 16 nt, Human
cuagacucggggugcu

SEQ ID NO: 1776860 - RNA, 22 nt, Human
cuagacucggggugcuuccuug

SEQ ID NO: 1776861 - RNA, 14 nt, Human
cuagaaacuuccaa

SEQ ID NO: 1776862 - RNA, 16 nt, Human
cuagaaacuuccaaau

SEQ ID NO: 1776863 - RNA, 19 nt, Human
cuauuuauugacucugggu

SEQ ID NO: 1776864 - RNA, 14 nt, Human
cucaaguccucuuu

SEQ ID NO: 1776865 - RNA, 15 nt, Human
cucaagaugggggca

SEQ ID NO: 1776866 - RNA, 20 nt, Human
cucaagaugggggcagggcu

SEQ ID NO: 1776867 - RNA, 21 nt, Human
cucaagaugggggcagggcug

SEQ ID NO: 1776868 - RNA, 15 nt, Human
cuauuucuccuccau

SEQ ID NO: 1776869 - RNA, 16 nt, Human
cuauuucuccuccaug

SEQ ID NO: 1776870 - RNA, 14 nt, Human
cucaacuccuccca

SEQ ID NO: 1776871 - RNA, 15 nt, Human
cucaacuccucccau

SEQ ID NO: 1776872 - RNA, 21 nt, Human
cucaaccccaccauaugaauu

SEQ ID NO: 1776873 - RNA, 22 nt, Human
cucaaccccaccauaugaauug

SEQ ID NO: 1776874 - RNA, 21 nt, Human
cuauucuugauuuauuugcuu

SEQ ID NO: 1776875 - RNA, 23 nt, Human
cuauucuugauuuauuugcuucu

SEQ ID NO: 1776876 - RNA, 21 nt, Human
cuauucuuucgaaagaagaaa

SEQ ID NO: 1776877 - RNA, 20 nt, Human
cuauugaauucggaacuguc

SEQ ID NO: 1776878 - RNA, 12 nt, Human
cuauugacaaua

SEQ ID NO: 1776879 - RNA, 14 nt, Human
cuauugacaauaaa

SEQ ID NO: 1776880 - RNA, 15 nt, Human
cuauugacaauaaaa

SEQ ID NO: 1776881 - RNA, 16 nt, Human
cuauugacaauaaaau

SEQ ID NO: 1776882 - RNA, 17 nt, Human
cuauugacaauaaaaua

SEQ ID NO: 1776883 - RNA, 18 nt, Human
cuauugacaauaaaauau

SEQ ID NO: 1776884 - RNA, 22 nt, Human
cuauguaacauguaggaaguag

SEQ ID NO: 1776885 - RNA, 13 nt, Human
cuaugggccugcc

SEQ ID NO: 1776886 - RNA, 19 nt, Human
cuaugggccugccgggcug

SEQ ID NO: 1776887 - RNA, 23 nt, Human
cuaugggccugccgggcugaggg

SEQ ID NO: 1776888 - RNA, 16 nt, Human
cuaugcuauugacaau

SEQ ID NO: 1776889 - RNA, 17 nt, Human
cuaugcuauugacaaua

SEQ ID NO: 1776890 - RNA, 19 nt, Human
cuaugcuauugacaauaaa

SEQ ID NO: 1776891 - RNA, 20 nt, Human
cuaugcuauugacaauaaaa

SEQ ID NO: 1776892 - RNA, 21 nt, Human
cuaugcuauugacaauaaaau

SEQ ID NO: 1776893 - RNA, 14 nt, Human
cuaugccugugucu

SEQ ID NO: 1776894 - RNA, 14 nt, Human
cuauagguccagaa

SEQ ID NO: 1776895 - RNA, 15 nt, Human
cuauagguccagaag

SEQ ID NO: 1776896 - RNA, 19 nt, Human
cuauagccuaggugacaga

SEQ ID NO: 1776897 - RNA, 18 nt, Human
cuauagccuaggugacag

SEQ ID NO: 1776898 - RNA, 20 nt, Human
cuauagccuaggugacagag

SEQ ID NO: 1776899 - RNA, 21 nt, Human
cuauagccuaggugacagagu

SEQ ID NO: 1776900 - RNA, 14 nt, Human
cuauaccugugccu

SEQ ID NO: 1776901 - RNA, 15 nt, Human
cuauaccugugccuc

SEQ ID NO: 1776902 - RNA, 19 nt, Human
cuauacgcagcgugcuuua

SEQ ID NO: 1776903 - RNA, 19 nt, Human
cuauaccugugccucggcu

SEQ ID NO: 1776904 - RNA, 13 nt, Human
cuauaauuuaaau

SEQ ID NO: 1776905 - RNA, 12 nt, Human
cuauaauuuaaa

SEQ ID NO: 1776906 - RNA, 20 nt, Human
cuccacguucugcucaucau

SEQ ID NO: 1776907 - RNA, 15 nt, Human
cuccagcucaccagc

SEQ ID NO: 1776908 - RNA, 16 nt, Human
cuccagcucaccagcc

SEQ ID NO: 1776909 - RNA, 18 nt, Human
cuccagcucaccagcccc

SEQ ID NO: 1776910 - RNA, 13 nt, Human
cuccagagggcac

SEQ ID NO: 1776911 - RNA, 20 nt, Human
cuccagagggcacucugcuu

SEQ ID NO: 1776912 - RNA, 21 nt, Human
cuccagagggcacucugcuug

SEQ ID NO: 1776913 - RNA, 21 nt, Human
cuccagauagcucauuucauu

SEQ ID NO: 1776914 - RNA, 12 nt, Human
cucauucuucug

SEQ ID NO: 1776915 - RNA, 17 nt, Human
cucauucugaaggagcc

SEQ ID NO: 1776916 - RNA, 19 nt, Human
cucauucugaaggagcccc

SEQ ID NO: 1776917 - RNA, 21 nt, Human
cucauuugucacacacuuugg

SEQ ID NO: 1776918 - RNA, 15 nt, Human
cuccccugccagggc

SEQ ID NO: 1776919 - RNA, 16 nt, Human
cuccccugccagggca

SEQ ID NO: 1776920 - RNA, 16 nt, Human
cuccccucuccuuccu

SEQ ID NO: 1776921 - RNA, 20 nt, Human
cucccgaauagcugggacua

SEQ ID NO: 1776922 - RNA, 23 nt, Human
cucccgaauagcugggacuacag

SEQ ID NO: 1776923 - RNA, 21 nt, Human
cuccccugccagggcagggcc

SEQ ID NO: 1776924 - RNA, 18 nt, Human
cucccucacccccuccuu

SEQ ID NO: 1776925 - RNA, 19 nt, Human
cucccucacccccuccuuc

SEQ ID NO: 1776926 - RNA, 16 nt, Human
cucccaaagugcuggg

SEQ ID NO: 1776927 - RNA, 23 nt, Human
cucccaaagugcugggauuacag

SEQ ID NO: 1776928 - RNA, 14 nt, Human
cucccaacaguggg

SEQ ID NO: 1776929 - RNA, 15 nt, Human
cucccacacucccaa

SEQ ID NO: 1776930 - RNA, 23 nt, Human
cucaggugauccacccaccucag

SEQ ID NO: 1776931 - RNA, 14 nt, Human
cucaggugcugucc

SEQ ID NO: 1776932 - RNA, 16 nt, Human
cucaggaggcaggacc

SEQ ID NO: 1776933 - RNA, 17 nt, Human
cucaggaggcaggaccu

SEQ ID NO: 1776934 - RNA, 18 nt, Human
cucaggaggcaggaccuu

SEQ ID NO: 1776935 - RNA, 20 nt, Human
cucaggaccaaagcuuucau

SEQ ID NO: 1776936 - RNA, 21 nt, Human
cucaggaccaaagcuuucaug

SEQ ID NO: 1776937 - RNA, 22 nt, Human
cucaggaccaaagcuuucaugu

SEQ ID NO: 1776938 - RNA, 14 nt, Human
cucaggacucagaa

SEQ ID NO: 1776939 - RNA, 16 nt, Human
cucaggacucagaagc

SEQ ID NO: 1776940 - RNA, 21 nt, Human
cucaggacucagaagccucug

SEQ ID NO: 1776941 - RNA, 17 nt, Human
cucagcuuccccaacac

SEQ ID NO: 1776942 - RNA, 22 nt, Human
cucagcuuccccaacacgcagg

SEQ ID NO: 1776943 - RNA, 23 nt, Human
cucagcuggaugauggucuucag

SEQ ID NO: 1776944 - RNA, 18 nt, Human
cucagcucggcucagcuc

SEQ ID NO: 1776945 - RNA, 13 nt, Human
cucagcucggcuc

SEQ ID NO: 1776946 - RNA, 14 nt, Human
cucagcucggcuca

SEQ ID NO: 1776947 - RNA, 15 nt, Human
cucagcucggcucag

SEQ ID NO: 1776948 - RNA, 16 nt, Human
cucagcucggcucagc

SEQ ID NO: 1776949 - RNA, 17 nt, Human
cucagcucggcucagcu

SEQ ID NO: 1776950 - RNA, 14 nt, Human
cucacuguugccca

SEQ ID NO: 1776951 - RNA, 15 nt, Human
cucacuguugcccag

SEQ ID NO: 1776952 - RNA, 15 nt, Human
cucacugcagccuca

SEQ ID NO: 1776953 - RNA, 16 nt, Human
cucacugcagccucaa

SEQ ID NO: 1776954 - RNA, 16 nt, Human
cucacuguugcccagg

SEQ ID NO: 1776955 - RNA, 17 nt, Human
cucacuguugcccaggc

SEQ ID NO: 1776956 - RNA, 18 nt, Human
cucacuguugcccaggcu

SEQ ID NO: 1776957 - RNA, 19 nt, Human
cucacuguugcccaggcug

SEQ ID NO: 1776958 - RNA, 15 nt, Human
cucagcauccuggca

SEQ ID NO: 1776959 - RNA, 13 nt, Human
cucagcauccugg

SEQ ID NO: 1776960 - RNA, 21 nt, Human
cucagcauccuggcacccggc

SEQ ID NO: 1776961 - RNA, 22 nt, Human
cucagcauccuggcacccggcc

SEQ ID NO: 1776962 - RNA, 14 nt, Human
cucagcggggacag

SEQ ID NO: 1776963 - RNA, 15 nt, Human
cucagcggggacagc

SEQ ID NO: 1776964 - RNA, 16 nt, Human
cucagcggggacagcu

SEQ ID NO: 1776965 - RNA, 18 nt, Human
cucagcggggacagcucc

SEQ ID NO: 1776966 - RNA, 19 nt, Human
cucagcggggacagcuccu

SEQ ID NO: 1776967 - RNA, 20 nt, Human
cucagcggggacagcuccuu

SEQ ID NO: 1776968 - RNA, 21 nt, Human
cucagcggggacagcuccuuc

SEQ ID NO: 1776969 - RNA, 23 nt, Human
cucagcggggacagcuccuucug

SEQ ID NO: 1776970 - RNA, 23 nt, Human
cucagcguuuuuuuguuuuuaau

SEQ ID NO: 1776971 - RNA, 12 nt, Human
cgaugggucagg

SEQ ID NO: 1776972 - RNA, 16 nt, Human
cgcagagcuuuucaga

SEQ ID NO: 1776973 - RNA, 18 nt, Human
cgcagagcuuuucagauu

SEQ ID NO: 1776974 - RNA, 16 nt, Human
cgcagcaggaggccag

SEQ ID NO: 1776975 - RNA, 17 nt, Human
cgcagcaggaggccagg

SEQ ID NO: 1776976 - RNA, 18 nt, Human
cgcagcaggaggccaggc

SEQ ID NO: 1776977 - RNA, 23 nt, Human
cgagcccuguggaugagcccuca

SEQ ID NO: 1776978 - RNA, 19 nt, Human
cgagcccugguggcagugg

SEQ ID NO: 1776979 - RNA, 16 nt, Human
cgaggacagggaggug

SEQ ID NO: 1776980 - RNA, 19 nt, Human
cgaggaggcuccagagggc

SEQ ID NO: 1776981 - RNA, 20 nt, Human
cgaggaggcuccagagggca

SEQ ID NO: 1776982 - RNA, 16 nt, Human
cggcuuuucucagcug

SEQ ID NO: 1776983 - RNA, 20 nt, Human
cgggaaaaggagaggaaacu

SEQ ID NO: 1776984 - RNA, 16 nt, Human
cgggaaccuccccagc

SEQ ID NO: 1776985 - RNA, 17 nt, Human
cgggaaccuccccagcc

SEQ ID NO: 1776986 - RNA, 18 nt, Human
cgggaaccuccccagccu

SEQ ID NO: 1776987 - RNA, 19 nt, Human
cgggaaccuccccagccug

SEQ ID NO: 1776988 - RNA, 20 nt, Human
cgggaaccuccccagccugc

SEQ ID NO: 1776989 - RNA, 21 nt, Human
cgggaaccuccccagccugcg

SEQ ID NO: 1776990 - RNA, 22 nt, Human
cgggaaccuccccagccugcgc

SEQ ID NO: 1776991 - RNA, 11 nt, Human
cggccaggcca

SEQ ID NO: 1776992 - RNA, 12 nt, Human
cggccaggccag

SEQ ID NO: 1776993 - RNA, 20 nt, Human
cggccaggccagagggagug

SEQ ID NO: 1776994 - RNA, 21 nt, Human
cggacagccacggccaggcca

SEQ ID NO: 1776995 - RNA, 22 nt, Human
cggacagccacggccaggccag

SEQ ID NO: 1776996 - RNA, 16 nt, Human
cgcuuucuacccagcg

SEQ ID NO: 1776997 - RNA, 14 nt, Human
cgcuuucuacccag

SEQ ID NO: 1776998 - RNA, 16 nt, Human
cggaauaguuggcuag

SEQ ID NO: 1776999 - RNA, 17 nt, Human
cggaauaguuggcuagg

SEQ ID NO: 1777000 - RNA, 13 nt, Human
cgcucccucccag

SEQ ID NO: 1777001 - RNA, 15 nt, Human
cgcucccucccagga

SEQ ID NO: 1777002 - RNA, 20 nt, Human
cgcucccucccaggacucug

SEQ ID NO: 1777003 - RNA, 21 nt, Human
cgcucccucccaggacucuga

SEQ ID NO: 1777004 - RNA, 17 nt, Human
cgcuguugcugaauagg

SEQ ID NO: 1777005 - RNA, 14 nt, Human
cgcuguugcugaau

SEQ ID NO: 1777006 - RNA, 13 nt, Human
cgcuguugcugaa

SEQ ID NO: 1777007 - RNA, 13 nt, Human
cgcccagucugga

SEQ ID NO: 1777008 - RNA, 19 nt, Human
cgcccagucuggaaugcag

SEQ ID NO: 1777009 - RNA, 21 nt, Human
cgcccagucuggaaugcagug

SEQ ID NO: 1777010 - RNA, 23 nt, Human
cgccuuuccuuuucgccuuuccu

SEQ ID NO: 1777011 - RNA, 13 nt, Human
cgccuuucccagg

SEQ ID NO: 1777012 - RNA, 13 nt, Human
cgccuuuccucuc

SEQ ID NO: 1777013 - RNA, 19 nt, Human
cgccuuuccucucuauauu

SEQ ID NO: 1777014 - RNA, 22 nt, Human
cgcggugccaugucugcagugu

SEQ ID NO: 1777015 - RNA, 20 nt, Human
cgcggggcugucggcgcugc

SEQ ID NO: 1777016 - RNA, 16 nt, Human
ccuugguucccccacu

SEQ ID NO: 1777017 - RNA, 13 nt, Human
ccuugggcucccu

SEQ ID NO: 1777018 - RNA, 12 nt, Human
ccuugggcuccc

SEQ ID NO: 1777019 - RNA, 18 nt, Human
ccuuggcuugcccacgug

SEQ ID NO: 1777020 - RNA, 16 nt, Human
ccuuggcugcagggag

SEQ ID NO: 1777021 - RNA, 13 nt, Human
ccuuggcuugccc

SEQ ID NO: 1777022 - RNA, 15 nt, Human
ccuuggcuugcccac

SEQ ID NO: 1777023 - RNA, 16 nt, Human
ccuuggcuugcccacg

SEQ ID NO: 1777024 - RNA, 18 nt, Human
ccuugacagggcacaccg

SEQ ID NO: 1777025 - RNA, 21 nt, Human
ccuugacagggcacaccgggc

SEQ ID NO: 1777026 - RNA, 22 nt, Human
ccuuggcucaaguccucuuuuc

SEQ ID NO: 1777027 - RNA, 13 nt, Human
ccuuggccugggc

SEQ ID NO: 1777028 - RNA, 20 nt, Human
ccuguggaugagcccucaga

SEQ ID NO: 1777029 - RNA, 13 nt, Human
ccugucccugcgc

SEQ ID NO: 1777030 - RNA, 23 nt, Human
ccugucccugcgccuuuccuuuu

SEQ ID NO: 1777031 - RNA, 14 nt, Human
ccuuccagcccaga

SEQ ID NO: 1777032 - RNA, 12 nt, Human
ccuuccagaucc

SEQ ID NO: 1777033 - RNA, 19 nt, Human
ccuuccagauccucucugg

SEQ ID NO: 1777034 - RNA, 13 nt, Human
ccuuccagcccag

SEQ ID NO: 1777035 - RNA, 20 nt, Human
ccuucaucuuccuguguccu

SEQ ID NO: 1777036 - RNA, 22 nt, Human
ccuucaucuuccuguguccuga

SEQ ID NO: 1777037 - RNA, 23 nt, Human
ccuguggggucaacccuucugga

SEQ ID NO: 1777038 - RNA, 21 nt, Human
ccuguggggucaacccuucug

SEQ ID NO: 1777039 - RNA, 11 nt, Human
ccuucuccauc

SEQ ID NO: 1777040 - RNA, 13 nt, Human
ccuucuccaucca

SEQ ID NO: 1777041 - RNA, 16 nt, Human
ccuucuccauccacau

SEQ ID NO: 1777042 - RNA, 22 nt, Human
ccuucuccauccacaugggagc

SEQ ID NO: 1777043 - RNA, 11 nt, Human
ccuucucacca

SEQ ID NO: 1777044 - RNA, 12 nt, Human
ccuucucaccag

SEQ ID NO: 1777045 - RNA, 14 nt, Human
ccuucucaccagcu

SEQ ID NO: 1777046 - RNA, 15 nt, Human
ccuucucaccagcug

SEQ ID NO: 1777047 - RNA, 16 nt, Human
ccuucucaccagcugc

SEQ ID NO: 1777048 - RNA, 17 nt, Human
ccuucucaccagcugca

SEQ ID NO: 1777049 - RNA, 18 nt, Human
ccuucucaccagcugcaa

SEQ ID NO: 1777050 - RNA, 19 nt, Human
ccuucucaccagcugcaaa

SEQ ID NO: 1777051 - RNA, 20 nt, Human
ccuucucaccagcugcaaag

SEQ ID NO: 1777052 - RNA, 21 nt, Human
ccuucucaccagcugcaaagu

SEQ ID NO: 1777053 - RNA, 22 nt, Human
ccuucucaccagcugcaaagug

SEQ ID NO: 1777054 - RNA, 17 nt, Human
ccuucguuuacuaugcc

SEQ ID NO: 1777055 - RNA, 19 nt, Human
ccuucguuuacuaugccug

SEQ ID NO: 1777056 - RNA, 20 nt, Human
ccuucguuuacuaugccugu

SEQ ID NO: 1777057 - RNA, 22 nt, Human
ccuucguuuacuaugccugugu

SEQ ID NO: 1777058 - RNA, 23 nt, Human
ccuucguuuacuaugccuguguc

SEQ ID NO: 1777059 - RNA, 23 nt, Human
ccuuccauggugugaucgucuga

SEQ ID NO: 1777060 - RNA, 13 nt, Human
ccuuccuggccug

SEQ ID NO: 1777061 - RNA, 16 nt, Human
ccuuccuggccugaga

SEQ ID NO: 1777062 - RNA, 20 nt, Human
ccuuccuggagacugcccag

SEQ ID NO: 1777063 - RNA, 15 nt, Human
ccuucgggcugugcc

SEQ ID NO: 1777064 - RNA, 16 nt, Human
ccuucgggcugugccc

SEQ ID NO: 1777065 - RNA, 18 nt, Human
cgaaucagcuauuuacug

SEQ ID NO: 1777066 - RNA, 22 nt, Human
cgaaucucuuuuugcuuucgaa

SEQ ID NO: 1777067 - RNA, 16 nt, Human
cgaauagcugggacua

SEQ ID NO: 1777068 - RNA, 15 nt, Human
cgaauagcugggacu

SEQ ID NO: 1777069 - RNA, 23 nt, Human
cgaaagggacuuggaagcuccgc

SEQ ID NO: 1777070 - RNA, 20 nt, Human
ccuuuuuucugccuccuuua

SEQ ID NO: 1777071 - RNA, 12 nt, Human
ccuugucucugg

SEQ ID NO: 1777072 - RNA, 11 nt, Human
ccuuuuuuccc

SEQ ID NO: 1777073 - RNA, 21 nt, Human
ccuuuuuucccauaagacaau

SEQ ID NO: 1777074 - RNA, 16 nt, Human
ccuuuguguguguguc

SEQ ID NO: 1777075 - RNA, 21 nt, Human
ccuuugugugugugucagcug

SEQ ID NO: 1777076 - RNA, 14 nt, Human
ccuuuguucccggc

SEQ ID NO: 1777077 - RNA, 15 nt, Human
ccuuuguucccggcu

SEQ ID NO: 1777078 - RNA, 20 nt, Human
ccugcccuuuuuucugccuc

SEQ ID NO: 1777079 - RNA, 22 nt, Human
ccugcccuuuuuucugccuccu

SEQ ID NO: 1777080 - RNA, 13 nt, Human
ccugcccuuggca

SEQ ID NO: 1777081 - RNA, 12 nt, Human
ccugccucagcc

SEQ ID NO: 1777082 - RNA, 13 nt, Human
ccugccucagccu

SEQ ID NO: 1777083 - RNA, 14 nt, Human
ccugccucagccuc

SEQ ID NO: 1777084 - RNA, 16 nt, Human
ccugccuguagcccac

SEQ ID NO: 1777085 - RNA, 13 nt, Human
ccugccugucugc

SEQ ID NO: 1777086 - RNA, 14 nt, Human
ccugccugucugcc

SEQ ID NO: 1777087 - RNA, 15 nt, Human
ccugccugucugccc

SEQ ID NO: 1777088 - RNA, 16 nt, Human
ccugccugucugcccc

SEQ ID NO: 1777089 - RNA, 21 nt, Human
ccugccacgaauuucugugcc

SEQ ID NO: 1777090 - RNA, 13 nt, Human
ccugccagggcag

SEQ ID NO: 1777091 - RNA, 17 nt, Human
ccugccagggcagggcc

SEQ ID NO: 1777092 - RNA, 19 nt, Human
ccugccagggcagggcccc

SEQ ID NO: 1777093 - RNA, 14 nt, Human
ccugcccggcugcg

SEQ ID NO: 1777094 - RNA, 16 nt, Human
ccugcccggcugcgga

SEQ ID NO: 1777095 - RNA, 15 nt, Human
ccugcccguaaacac

SEQ ID NO: 1777096 - RNA, 20 nt, Human
ccugcccguaaacacgccug

SEQ ID NO: 1777097 - RNA, 21 nt, Human
ccugcccguaaacacgccugc

SEQ ID NO: 1777098 - RNA, 22 nt, Human
ccugcccguaaacacgccugca

SEQ ID NO: 1777099 - RNA, 23 nt, Human
ccugcccguaaacacgccugcaa

SEQ ID NO: 1777100 - RNA, 13 nt, Human
ccugaucagagcc

SEQ ID NO: 1777101 - RNA, 16 nt, Human
ccugccacccugggga

SEQ ID NO: 1777102 - RNA, 22 nt, Human
ccugccacccuggggagaaagu

SEQ ID NO: 1777103 - RNA, 24 nt, Human
ccugccacccugggccuggcagcu

SEQ ID NO: 1777104 - RNA, 14 nt, Human
ccugccacccuggg

SEQ ID NO: 1777105 - RNA, 15 nt, Human
ccugccacccugggc

SEQ ID NO: 1777106 - RNA, 21 nt, Human
ccugccacccugggccuggca

SEQ ID NO: 1777107 - RNA, 12 nt, Human
ccugccacccug

SEQ ID NO: 1777108 - RNA, 13 nt, Human
ccugccacccugg

SEQ ID NO: 1777109 - RNA, 14 nt, Human
ccugcauuguaaau

SEQ ID NO: 1777110 - RNA, 12 nt, Human
ccugccacagcc

SEQ ID NO: 1777111 - RNA, 12 nt, Human
ccugagccuggc

SEQ ID NO: 1777112 - RNA, 13 nt, Human
ccugagccuggcc

SEQ ID NO: 1777113 - RNA, 14 nt, Human
ccugagccuggcca

SEQ ID NO: 1777114 - RNA, 15 nt, Human
ccugagccuggccag

SEQ ID NO: 1777115 - RNA, 16 nt, Human
ccugagccuggccagc

SEQ ID NO: 1777116 - RNA, 20 nt, Human
ccugaagucacacagugagu

SEQ ID NO: 1777117 - RNA, 14 nt, Human
ccugaaucaugagc

SEQ ID NO: 1777118 - RNA, 16 nt, Human
ccugaaucaugagccu

SEQ ID NO: 1777119 - RNA, 17 nt, Human
ccugaaucaugagccug

SEQ ID NO: 1777120 - RNA, 19 nt, Human
ccugaaucaugagccugcu

SEQ ID NO: 1777121 - RNA, 21 nt, Human
ccugaaucaugagccugcugg

SEQ ID NO: 1777122 - RNA, 22 nt, Human
ccugaaucaugagccugcugga

SEQ ID NO: 1777123 - RNA, 15 nt, Human
ccugagcugaggcag

SEQ ID NO: 1777124 - RNA, 16 nt, Human
ccugagcugaggcagc

SEQ ID NO: 1777125 - RNA, 18 nt, Human
ccugagcugaggcagcag

SEQ ID NO: 1777126 - RNA, 14 nt, Human
ccugaagccagcug

SEQ ID NO: 1777127 - RNA, 18 nt, Human
ccugaagccagcugcccu

SEQ ID NO: 1777128 - RNA, 17 nt, Human
ccugaaacgcuccuuug

SEQ ID NO: 1777129 - RNA, 19 nt, Human
ccugaaacgcuccuuugug

SEQ ID NO: 1777130 - RNA, 20 nt, Human
ccugaaacgcuccuuugugu

SEQ ID NO: 1777131 - RNA, 21 nt, Human
ccugaaacgcuccuuugugug

SEQ ID NO: 1777132 - RNA, 14 nt, Human
ccugaaacuauauu

SEQ ID NO: 1777133 - RNA, 19 nt, Human
ccugaaacuauauuuuguc

SEQ ID NO: 1777134 - RNA, 15 nt, Human
ccucuuccugccuag

SEQ ID NO: 1777135 - RNA, 18 nt, Human
ccugaaaacacugugcac

SEQ ID NO: 1777136 - RNA, 13 nt, Human
ccucuucagaggc

SEQ ID NO: 1777137 - RNA, 14 nt, Human
ccucuucagaggcc

SEQ ID NO: 1777138 - RNA, 16 nt, Human
ccucuucagaggcccu

SEQ ID NO: 1777139 - RNA, 21 nt, Human
ccugcuaauuccccagauugc

SEQ ID NO: 1777140 - RNA, 15 nt, Human
ccugcuagcuagcuc

SEQ ID NO: 1777141 - RNA, 23 nt, Human
ccugcuagcuagcucaacuagug

SEQ ID NO: 1777142 - RNA, 19 nt, Human
ccuggcacccggccccugc

SEQ ID NO: 1777143 - RNA, 20 nt, Human
ccuggcacccggccccugcu

SEQ ID NO: 1777144 - RNA, 21 nt, Human
ccuggcacccggccccugcug

SEQ ID NO: 1777145 - RNA, 15 nt, Human
ccuggccagccuaca

SEQ ID NO: 1777146 - RNA, 21 nt, Human
ccuggccagaugcaccagccc

SEQ ID NO: 1777147 - RNA, 23 nt, Human
ccuggccagaugcaccagcccuu

SEQ ID NO: 1777148 - RNA, 20 nt, Human
ccuggccagaugcaccagcc

SEQ ID NO: 1777149 - RNA, 17 nt, Human
ccugggaaauauucccu

SEQ ID NO: 1777150 - RNA, 18 nt, Human
ccugggaaauauucccua

SEQ ID NO: 1777151 - RNA, 13 nt, Human
ccuggcuucugug

SEQ ID NO: 1777152 - RNA, 14 nt, Human
ccuggcuucugugg

SEQ ID NO: 1777153 - RNA, 16 nt, Human
ccuggcuucugugggg

SEQ ID NO: 1777154 - RNA, 22 nt, Human
ccuggcuucuguggggccccuc

SEQ ID NO: 1777155 - RNA, 16 nt, Human
ccugggagugagcugg

SEQ ID NO: 1777156 - RNA, 14 nt, Human
ccugggacuuccau

SEQ ID NO: 1777157 - RNA, 18 nt, Human
ccugggacuuccaugccu

SEQ ID NO: 1777158 - RNA, 20 nt, Human
ccugggacuuccaugccuua

SEQ ID NO: 1777159 - RNA, 18 nt, Human
ccugggagugagcugguu

SEQ ID NO: 1777160 - RNA, 14 nt, Human
ccugguggcagcug

SEQ ID NO: 1777161 - RNA, 15 nt, Human
ccugguggcagcugc

SEQ ID NO: 1777162 - RNA, 16 nt, Human
ccugguggcagcugcg

SEQ ID NO: 1777163 - RNA, 17 nt, Human
ccugguggcagcugcgg

SEQ ID NO: 1777164 - RNA, 18 nt, Human
ccugguggcagcugcggu

SEQ ID NO: 1777165 - RNA, 12 nt, Human
ccugucaccucu

SEQ ID NO: 1777166 - RNA, 14 nt, Human
ccugucaccucuuc

SEQ ID NO: 1777167 - RNA, 16 nt, Human
ccugucaccucuuccg

SEQ ID NO: 1777168 - RNA, 17 nt, Human
ccugucaccucuuccga

SEQ ID NO: 1777169 - RNA, 15 nt, Human
ccugguggcaguggg

SEQ ID NO: 1777170 - RNA, 13 nt, Human
ccugguggcagug

SEQ ID NO: 1777171 - RNA, 14 nt, Human
ccugguggcagugg

SEQ ID NO: 1777172 - RNA, 12 nt, Human
ccuguagcccac

SEQ ID NO: 1777173 - RNA, 16 nt, Human
ccuguagcccacucug

SEQ ID NO: 1777174 - RNA, 19 nt, Human
ccuguagcccacucugcuc

SEQ ID NO: 1777175 - RNA, 22 nt, Human
ccuguagcccacucugcucgcc

SEQ ID NO: 1777176 - RNA, 23 nt, Human
ccuguagcccacucugcucgccu

SEQ ID NO: 1777177 - RNA, 24 nt, Human
ccuguagcccacucugcucgccuu

SEQ ID NO: 1777178 - RNA, 19 nt, Human
gaaagcugguggcagaguc

SEQ ID NO: 1777179 - RNA, 14 nt, Human
gaaacccuggacca

SEQ ID NO: 1777180 - RNA, 21 nt, Human
gaaacccuggaccaguggucu

SEQ ID NO: 1777181 - RNA, 14 nt, Human
gaaacccugagcag

SEQ ID NO: 1777182 - RNA, 15 nt, Human
gaaacccugagcaga

SEQ ID NO: 1777183 - RNA, 19 nt, Human
gaaacuacugccuuuagaa

SEQ ID NO: 1777184 - RNA, 20 nt, Human
gaaacuacugccuuuagaaa

SEQ ID NO: 1777185 - RNA, 22 nt, Human
gaaacuacugccuuuagaaaau

SEQ ID NO: 1777186 - RNA, 23 nt, Human
gaaacuacugccuuuagaaaaua

SEQ ID NO: 1777187 - RNA, 19 nt, Human
gaaaagcugcugacagugu

SEQ ID NO: 1777188 - RNA, 12 nt, Human
gaaaaggaauca

SEQ ID NO: 1777189 - RNA, 23 nt, Human
gaaaaggaaucacguuagaggaa

SEQ ID NO: 1777190 - RNA, 17 nt, Human
gaaaaggagaggaaacu

SEQ ID NO: 1777191 - RNA, 15 nt, Human
gaaaaucaucaagaa

SEQ ID NO: 1777192 - RNA, 16 nt, Human
gaaaaucaucaagaag

SEQ ID NO: 1777193 - RNA, 20 nt, Human
gaaaaucaucaagaagggcu

SEQ ID NO: 1777194 - RNA, 21 nt, Human
gaaaaucaucaagaagggcug

SEQ ID NO: 1777195 - RNA, 22 nt, Human
gaaaaucaucaagaagggcugc

SEQ ID NO: 1777196 - RNA, 23 nt, Human
gaaaaucaucaagaagggcugca

SEQ ID NO: 1777197 - RNA, 18 nt, Human
gaaaaucuuauaauuuaa

SEQ ID NO: 1777198 - RNA, 21 nt, Human
gaaaaucuagaggaaaagaaa

SEQ ID NO: 1777199 - RNA, 22 nt, Human
gaaaaucuagaggaaaagaaag

SEQ ID NO: 1777200 - RNA, 14 nt, Human
gaaaacacugugca

SEQ ID NO: 1777201 - RNA, 21 nt, Human
gaaaacacugugcacaucugu

SEQ ID NO: 1777202 - RNA, 15 nt, Human
cuuuguguguguguc

SEQ ID NO: 1777203 - RNA, 20 nt, Human
cuuugugugugugucagcug

SEQ ID NO: 1777204 - RNA, 11 nt, Human
cuuuuuauugc

SEQ ID NO: 1777205 - RNA, 13 nt, Human
cuuuuuauugccu

SEQ ID NO: 1777206 - RNA, 14 nt, Human
cuuuuuauugccuu

SEQ ID NO: 1777207 - RNA, 15 nt, Human
cuuuuuauugccuuc

SEQ ID NO: 1777208 - RNA, 16 nt, Human
cuuuuuauugccuucu

SEQ ID NO: 1777209 - RNA, 23 nt, Human
cuuuuuauugccuucucaccagc

SEQ ID NO: 1777210 - RNA, 16 nt, Human
cuuuauccucuuuaga

SEQ ID NO: 1777211 - RNA, 14 nt, Human
cuuuauccucuuua

SEQ ID NO: 1777212 - RNA, 22 nt, Human
cuuuaugaaugaaaaaacaguc

SEQ ID NO: 1777213 - RNA, 14 nt, Human
cuuuagcgcccagu

SEQ ID NO: 1777214 - RNA, 15 nt, Human
cuuuagcgcccaguu

SEQ ID NO: 1777215 - RNA, 18 nt, Human
cuuuaaaauuuuuuuaga

SEQ ID NO: 1777216 - RNA, 23 nt, Human
cuuuaaaauuuuuuuagaaagca

SEQ ID NO: 1777217 - RNA, 21 nt, Human
cuuuaaaauuuuuuuagaaag

SEQ ID NO: 1777218 - RNA, 15 nt, Human
cuuuacgcccaucuc

SEQ ID NO: 1777219 - RNA, 16 nt, Human
cuuuacgcccaucuca

SEQ ID NO: 1777220 - RNA, 22 nt, Human
cuuuacgcccaucucaggacac

SEQ ID NO: 1777221 - RNA, 16 nt, Human
cuuguucugagauuca

SEQ ID NO: 1777222 - RNA, 17 nt, Human
cuuguacuuuauuuucu

SEQ ID NO: 1777223 - RNA, 15 nt, Human
cuugucccagaggcu

SEQ ID NO: 1777224 - RNA, 19 nt, Human
cuugucccagaggcugccc

SEQ ID NO: 1777225 - RNA, 14 nt, Human
cuuguccccaaauc

SEQ ID NO: 1777226 - RNA, 17 nt, Human
cuuguaaauagcucagg

SEQ ID NO: 1777227 - RNA, 18 nt, Human
cuuguaaauagcucaggu

SEQ ID NO: 1777228 - RNA, 21 nt, Human
cuuguaaauagcucagguguc

SEQ ID NO: 1777229 - RNA, 16 nt, Human
cuuguaaauagcucag

SEQ ID NO: 1777230 - RNA, 19 nt, Human
cuugaguuuaaauuguaau

SEQ ID NO: 1777231 - RNA, 18 nt, Human
cuuucuggcagguccucc

SEQ ID NO: 1777232 - RNA, 12 nt, Human
cuuuaugucuuu

SEQ ID NO: 1777233 - RNA, 18 nt, Human
cuuuccauuggaucucau

SEQ ID NO: 1777234 - RNA, 20 nt, Human
cuuugcagacaggcaagcac

SEQ ID NO: 1777235 - RNA, 19 nt, Human
cuuuggcuauuagagauca

SEQ ID NO: 1777236 - RNA, 13 nt, Human
cuucucugaagga

SEQ ID NO: 1777237 - RNA, 13 nt, Human
cuucucucugugg

SEQ ID NO: 1777238 - RNA, 16 nt, Human
cuucucucugugggau

SEQ ID NO: 1777239 - RNA, 12 nt, Human
cuucuccaggcu

SEQ ID NO: 1777240 - RNA, 13 nt, Human
cuucuccaggcug

SEQ ID NO: 1777241 - RNA, 14 nt, Human
cuucuccaggcugu

SEQ ID NO: 1777242 - RNA, 12 nt, Human
cuuccuggccug

SEQ ID NO: 1777243 - RNA, 14 nt, Human
cuuccuggccugag

SEQ ID NO: 1777244 - RNA, 15 nt, Human
cuuccuggccugaga

SEQ ID NO: 1777245 - RNA, 19 nt, Human
cuuccuggccugagaguca

SEQ ID NO: 1777246 - RNA, 22 nt, Human
cuucugggagggcagcagggcu

SEQ ID NO: 1777247 - RNA, 19 nt, Human
cuucugggagggcagcagg

SEQ ID NO: 1777248 - RNA, 23 nt, Human
cuucugggagggcagcagggcua

SEQ ID NO: 1777249 - RNA, 13 nt, Human
cuucugcuucagc

SEQ ID NO: 1777250 - RNA, 21 nt, Human
cuucuguacgucugacaggca

SEQ ID NO: 1777251 - RNA, 14 nt, Human
cuucugucccucac

SEQ ID NO: 1777252 - RNA, 15 nt, Human
cuucugucccucaca

SEQ ID NO: 1777253 - RNA, 14 nt, Human
cuucuguacgucug

SEQ ID NO: 1777254 - RNA, 15 nt, Human
cuucuguacgucuga

SEQ ID NO: 1777255 - RNA, 18 nt, Human
cuucuguacgucugacag

SEQ ID NO: 1777256 - RNA, 20 nt, Human
cuucuguacgucugacaggc

SEQ ID NO: 1777257 - RNA, 16 nt, Human
cuucuguccuacucug

SEQ ID NO: 1777258 - RNA, 17 nt, Human
cuucuguccuacucugu

SEQ ID NO: 1777259 - RNA, 18 nt, Human
cuucuguccuacucugug

SEQ ID NO: 1777260 - RNA, 19 nt, Human
cuucuguccuacucugugu

SEQ ID NO: 1777261 - RNA, 21 nt, Human
cuucuguccuacucuguguca

SEQ ID NO: 1777262 - RNA, 18 nt, Human
cuugaccugcauuguaaa

SEQ ID NO: 1777263 - RNA, 19 nt, Human
cuugaccugcauuguaaau

SEQ ID NO: 1777264 - RNA, 20 nt, Human
cuugaccugcauuguaaaua

SEQ ID NO: 1777265 - RNA, 13 nt, Human
cuugacuuugcuc

SEQ ID NO: 1777266 - RNA, 19 nt, Human
cuugacuuugcuccucaca

SEQ ID NO: 1777267 - RNA, 21 nt, Human
cuugaggguugggcugguguc

SEQ ID NO: 1777268 - RNA, 19 nt, Human
cuugaggguugggcuggug

SEQ ID NO: 1777269 - RNA, 20 nt, Human
cuugaggguugggcuggugu

SEQ ID NO: 1777270 - RNA, 13 nt, Human
cuugaccucaggu

SEQ ID NO: 1777271 - RNA, 13 nt, Human
cuugaacuccugg

SEQ ID NO: 1777272 - RNA, 16 nt, Human
cuucuuuuuuuucauu

SEQ ID NO: 1777273 - RNA, 10 nt, Human
cuucugucuc

SEQ ID NO: 1777274 - RNA, 11 nt, Human
cuucugucucc

SEQ ID NO: 1777275 - RNA, 14 nt, Human
cuucugucuccagc

SEQ ID NO: 1777276 - RNA, 19 nt, Human
cuucuguggggacuccggc

SEQ ID NO: 1777277 - RNA, 16 nt, Human
cuucuguggggccccu

SEQ ID NO: 1777278 - RNA, 20 nt, Human
cuucuguggggccccucacc

SEQ ID NO: 1777279 - RNA, 15 nt, Human
cuucuuguucugaga

SEQ ID NO: 1777280 - RNA, 16 nt, Human
cuucuuguucugagau

SEQ ID NO: 1777281 - RNA, 21 nt, Human
cuucuuguucugagauucaau

SEQ ID NO: 1777282 - RNA, 22 nt, Human
cuucuuguucugagauucaaua

SEQ ID NO: 1777283 - RNA, 15 nt, Human
cuucuuguuuccuug

SEQ ID NO: 1777284 - RNA, 16 nt, Human
cuucuuguuuccuugu

SEQ ID NO: 1777285 - RNA, 17 nt, Human
cuucuuguuuccuuguu

SEQ ID NO: 1777286 - RNA, 14 nt, Human
cuuccacugagggc

SEQ ID NO: 1777287 - RNA, 17 nt, Human
cuuccaccauuguccua

SEQ ID NO: 1777288 - RNA, 17 nt, Human
cuucaguggcagcugcu

SEQ ID NO: 1777289 - RNA, 15 nt, Human
cuucauucuuugcag

SEQ ID NO: 1777290 - RNA, 21 nt, Human
cuucaccauuuggcaaugcca

SEQ ID NO: 1777291 - RNA, 13 nt, Human
cuucaguggcagc

SEQ ID NO: 1777292 - RNA, 14 nt, Human
cuucaguggcagcu

SEQ ID NO: 1777293 - RNA, 15 nt, Human
cuucaguggcagcug

SEQ ID NO: 1777294 - RNA, 16 nt, Human
cuucaguggcagcugc

SEQ ID NO: 1777295 - RNA, 18 nt, Human
cuuccccggagggcugcg

SEQ ID NO: 1777296 - RNA, 17 nt, Human
cuucccgggccagggcu

SEQ ID NO: 1777297 - RNA, 18 nt, Human
cuucccgggccagggcug

SEQ ID NO: 1777298 - RNA, 19 nt, Human
cuucccgggccagggcugc

SEQ ID NO: 1777299 - RNA, 20 nt, Human
cuuauauuaauaguaauuug

SEQ ID NO: 1777300 - RNA, 21 nt, Human
cuuauauuaauaguaauuugu

SEQ ID NO: 1777301 - RNA, 21 nt, Human
cuuauccuaaaacaaauaguu

SEQ ID NO: 1777302 - RNA, 13 nt, Human
cuguucuggagga

SEQ ID NO: 1777303 - RNA, 14 nt, Human
cuguucuggaggaa

SEQ ID NO: 1777304 - RNA, 22 nt, Human
cuguucuggaggaaagggagga

SEQ ID NO: 1777305 - RNA, 23 nt, Human
cuguucuggaggaaagggaggag

SEQ ID NO: 1777306 - RNA, 23 nt, Human
cuucaaacuagggccaagcccag

SEQ ID NO: 1777307 - RNA, 16 nt, Human
cuuaucgggcuccagc

SEQ ID NO: 1777308 - RNA, 18 nt, Human
cuuaucgggcuccagcca

SEQ ID NO: 1777309 - RNA, 17 nt, Human
cuucaccauuuggcaau

SEQ ID NO: 1777310 - RNA, 15 nt, Human
cuguauaaguuauuu

SEQ ID NO: 1777311 - RNA, 22 nt, Human
cuguauaaguuauuuuuguaca

SEQ ID NO: 1777312 - RNA, 23 nt, Human
cuguauaaguuauuuuuguacau

SEQ ID NO: 1777313 - RNA, 16 nt, Human
cuguaucaggacccag

SEQ ID NO: 1777314 - RNA, 22 nt, Human
cuguaucaggacccagaggaag

SEQ ID NO: 1777315 - RNA, 23 nt, Human
cuguaucaggacccagaggaagg

SEQ ID NO: 1777316 - RNA, 16 nt, Human
cuguccaggcacugag

SEQ ID NO: 1777317 - RNA, 23 nt, Human
cuguaucccaugagccucagcau

SEQ ID NO: 1777318 - RNA, 19 nt, Human
cuguccaggcacugagaua

SEQ ID NO: 1777319 - RNA, 12 nt, Human
cuguccaggcuc

SEQ ID NO: 1777320 - RNA, 13 nt, Human
cuguccaggcucg

SEQ ID NO: 1777321 - RNA, 17 nt, Human
cugucccuccgggaccu

SEQ ID NO: 1777322 - RNA, 21 nt, Human
cugucccuccgggaccuggug

SEQ ID NO: 1777323 - RNA, 11 nt, Human
cugucccugcg

SEQ ID NO: 1777324 - RNA, 13 nt, Human
cugucccugcgcc

SEQ ID NO: 1777325 - RNA, 23 nt, Human
cugucucaaaaaaacacaaaagu

SEQ ID NO: 1777326 - RNA, 14 nt, Human
cuguccuacccacc

SEQ ID NO: 1777327 - RNA, 20 nt, Human
cuguccggaaugccacccac

SEQ ID NO: 1777328 - RNA, 21 nt, Human
cuguccggaaugccacccaca

SEQ ID NO: 1777329 - RNA, 18 nt, Human
cugucccugcgccuuucc

SEQ ID NO: 1777330 - RNA, 24 nt, Human
cugggcuucaguggcagcugcuuu

SEQ ID NO: 1777331 - RNA, 16 nt, Human
cuggggcuguguuuug

SEQ ID NO: 1777332 - RNA, 14 nt, Human
cugggggagagccg

SEQ ID NO: 1777333 - RNA, 14 nt, Human
cuggugcugccucu

SEQ ID NO: 1777334 - RNA, 19 nt, Human
cuggugcugccucuaccug

SEQ ID NO: 1777335 - RNA, 13 nt, Human
cugguggcagcug

SEQ ID NO: 1777336 - RNA, 14 nt, Human
cugguggcagcugc

SEQ ID NO: 1777337 - RNA, 12 nt, Human
cuguucccccug

SEQ ID NO: 1777338 - RNA, 15 nt, Human
cuguucccccugugc

SEQ ID NO: 1777339 - RNA, 16 nt, Human
cuguucccccugugca

SEQ ID NO: 1777340 - RNA, 17 nt, Human
cuguucccccugugcag

SEQ ID NO: 1777341 - RNA, 15 nt, Human
cugugugcuuggucu

SEQ ID NO: 1777342 - RNA, 13 nt, Human
cuguggggacucc

SEQ ID NO: 1777343 - RNA, 19 nt, Human
cuguggggacuccggcugu

SEQ ID NO: 1777344 - RNA, 22 nt, Human
cuguggggacuccggcugugcu

SEQ ID NO: 1777345 - RNA, 23 nt, Human
cuguggggacuccggcugugcug

SEQ ID NO: 1777346 - RNA, 21 nt, Human
cugugucuugcaauggcagcc

SEQ ID NO: 1777347 - RNA, 22 nt, Human
cugugucuugcaauggcagccu

SEQ ID NO: 1777348 - RNA, 23 nt, Human
cugugucuugcaauggcagccuu

SEQ ID NO: 1777349 - RNA, 20 nt, Human
cugugugugcgccuacagga

SEQ ID NO: 1777350 - RNA, 20 nt, Human
cugucuccauggcccugcaa

SEQ ID NO: 1777351 - RNA, 15 nt, Human
cugucuccagcuucc

SEQ ID NO: 1777352 - RNA, 17 nt, Human
cugugaguuuaaagcaa

SEQ ID NO: 1777353 - RNA, 15 nt, Human
cugugccuccaucag

SEQ ID NO: 1777354 - RNA, 16 nt, Human
cugugccuccaucagc

SEQ ID NO: 1777355 - RNA, 16 nt, Human
cugugccaugugccag

SEQ ID NO: 1777356 - RNA, 18 nt, Human
cugugccaugugccaggu

SEQ ID NO: 1777357 - RNA, 18 nt, Human
cugugcacaucugugucu

SEQ ID NO: 1777358 - RNA, 19 nt, Human
cugugcacaucugugucuu

SEQ ID NO: 1777359 - RNA, 20 nt, Human
cugugcacaucugugucuug

SEQ ID NO: 1777360 - RNA, 21 nt, Human
cugugcacaucugugucuugu

SEQ ID NO: 1777361 - RNA, 20 nt, Human
cuguggaugagcccucagaa

SEQ ID NO: 1777362 - RNA, 22 nt, Human
cugugccucggcuuuucucagc

SEQ ID NO: 1777363 - RNA, 23 nt, Human
cugugccucggcuuuucucagcu

SEQ ID NO: 1777364 - RNA, 13 nt, Human
cugugccucggcu

SEQ ID NO: 1777365 - RNA, 17 nt, Human
cugugcuucgggcccuu

SEQ ID NO: 1777366 - RNA, 19 nt, Human
cugugcuucgggcccuucc

SEQ ID NO: 1777367 - RNA, 14 nt, Human
cugugcugggagaa

SEQ ID NO: 1777368 - RNA, 20 nt, Human
cugugcuucgggcccuuccc

SEQ ID NO: 1777369 - RNA, 21 nt, Human
cugugcuucgggcccuuccca

SEQ ID NO: 1777370 - RNA, 15 nt, Human
cugugcuugaaggcc

SEQ ID NO: 1777371 - RNA, 16 nt, Human
cugugcuugaaggccc

SEQ ID NO: 1777372 - RNA, 17 nt, Human
cugugcuugaaggcccu

SEQ ID NO: 1777373 - RNA, 18 nt, Human
cugugcuugaaggcccug

SEQ ID NO: 1777374 - RNA, 20 nt, Human
cugugcuugaaggcccugcu

SEQ ID NO: 1777375 - RNA, 22 nt, Human
cugugcuugaaggcccugcuga

SEQ ID NO: 1777376 - RNA, 13 nt, Human
cuggacaaagaau

SEQ ID NO: 1777377 - RNA, 14 nt, Human
cuggacaaagaauu

SEQ ID NO: 1777378 - RNA, 15 nt, Human
cuggacaaagaauuc

SEQ ID NO: 1777379 - RNA, 13 nt, Human
cuggacacaggcc

SEQ ID NO: 1777380 - RNA, 14 nt, Human
cuggacacaggccu

SEQ ID NO: 1777381 - RNA, 15 nt, Human
cuggacacaggccug

SEQ ID NO: 1777382 - RNA, 23 nt, Human
cuggacaggcauguucucugagg

SEQ ID NO: 1777383 - RNA, 14 nt, Human
cuggacaggcaugu

SEQ ID NO: 1777384 - RNA, 17 nt, Human
cuggacaggcauguucu

SEQ ID NO: 1777385 - RNA, 21 nt, Human
cuggaccaguggucucacaug

SEQ ID NO: 1777386 - RNA, 12 nt, Human
cuggaccccagc

SEQ ID NO: 1777387 - RNA, 16 nt, Human
cuggaccuugaacugg

SEQ ID NO: 1777388 - RNA, 18 nt, Human
cuggacccuguugcuaag

SEQ ID NO: 1777389 - RNA, 17 nt, Human
cuggacccuguugcuaa

SEQ ID NO: 1777390 - RNA, 16 nt, Human
cuggacccuguugcua

SEQ ID NO: 1777391 - RNA, 15 nt, Human
cuggacccuguugcu

SEQ ID NO: 1777392 - RNA, 14 nt, Human
cuggacccuguugc

SEQ ID NO: 1777393 - RNA, 17 nt, Human
cuggaccuugaacuggg

SEQ ID NO: 1777394 - RNA, 20 nt, Human
cuggaccuugaacuggguac

SEQ ID NO: 1777395 - RNA, 21 nt, Human
cuggaccuugaacuggguacu

SEQ ID NO: 1777396 - RNA, 14 nt, Human
cuggaggucagcau

SEQ ID NO: 1777397 - RNA, 14 nt, Human
cuggagugcaguga

SEQ ID NO: 1777398 - RNA, 15 nt, Human
cuggagugcagugag

SEQ ID NO: 1777399 - RNA, 16 nt, Human
cuggagugcagugagc

SEQ ID NO: 1777400 - RNA, 17 nt, Human
cuggagugcagugagcc

SEQ ID NO: 1777401 - RNA, 18 nt, Human
cuggagucccaaauguca

SEQ ID NO: 1777402 - RNA, 14 nt, Human
cuggccagaugcac

SEQ ID NO: 1777403 - RNA, 12 nt, Human
cuggcagguccu

SEQ ID NO: 1777404 - RNA, 22 nt, Human
cuggccaucugguuaggauggc

SEQ ID NO: 1777405 - RNA, 17 nt, Human
cuggcacuggaccccag

SEQ ID NO: 1777406 - RNA, 18 nt, Human
cuggcacuggaccccagc

SEQ ID NO: 1777407 - RNA, 19 nt, Human
cuggcacuggaccccagca

SEQ ID NO: 1777408 - RNA, 22 nt, Human
cuggcacccggccccugcuggu

SEQ ID NO: 1777409 - RNA, 20 nt, Human
cuggcacccggccccugcug

SEQ ID NO: 1777410 - RNA, 21 nt, Human
cuggcacccggccccugcugg

SEQ ID NO: 1777411 - RNA, 19 nt, Human
cuggcacccggccccugcu

SEQ ID NO: 1777412 - RNA, 20 nt, Human
cuggagugcagugagccgag

SEQ ID NO: 1777413 - RNA, 14 nt, Human
cuggcgugcagugg

SEQ ID NO: 1777414 - RNA, 15 nt, Human
cuggcgugcaguggu

SEQ ID NO: 1777415 - RNA, 16 nt, Human
cugcugcuucuccaaa

SEQ ID NO: 1777416 - RNA, 13 nt, Human
cugcuggaagccc

SEQ ID NO: 1777417 - RNA, 14 nt, Human
cugcuggaagccca

SEQ ID NO: 1777418 - RNA, 15 nt, Human
cugcuggaagcccag

SEQ ID NO: 1777419 - RNA, 16 nt, Human
cugcuggaagcccagc

SEQ ID NO: 1777420 - RNA, 14 nt, Human
cugcuggaggccuc

SEQ ID NO: 1777421 - RNA, 15 nt, Human
cugcuggaggccuca

SEQ ID NO: 1777422 - RNA, 16 nt, Human
cugcuggaggccucag

SEQ ID NO: 1777423 - RNA, 17 nt, Human
cugcuggaggccucagg

SEQ ID NO: 1777424 - RNA, 18 nt, Human
cugcuggaggccucaggu

SEQ ID NO: 1777425 - RNA, 21 nt, Human
cugcuggaggccucaggugcu

SEQ ID NO: 1777426 - RNA, 12 nt, Human
cugcuggccaaa

SEQ ID NO: 1777427 - RNA, 20 nt, Human
cugcuggccaaauagcaaag

SEQ ID NO: 1777428 - RNA, 13 nt, Human
cugcugguucagg

SEQ ID NO: 1777429 - RNA, 15 nt, Human
cugcugguucagggu

SEQ ID NO: 1777430 - RNA, 23 nt, Human
cugcugguucaggguuggccccu

SEQ ID NO: 1777431 - RNA, 23 nt, Human
cugcugcccuaguuuucuuuccu

SEQ ID NO: 1777432 - RNA, 17 nt, Human
cugcugcaugcccucuc

SEQ ID NO: 1777433 - RNA, 21 nt, Human
cugcugcaugcccucucaggc

SEQ ID NO: 1777434 - RNA, 14 nt, Human
cugcugcaugcccu

SEQ ID NO: 1777435 - RNA, 15 nt, Human
cugcugcaugcccuc

SEQ ID NO: 1777436 - RNA, 16 nt, Human
cugcugcaugcccucu

SEQ ID NO: 1777437 - RNA, 12 nt, Human
cugccuuuauug

SEQ ID NO: 1777438 - RNA, 15 nt, Human
cugccuuuagaaaau

SEQ ID NO: 1777439 - RNA, 16 nt, Human
cugccuuuagaaaaua

SEQ ID NO: 1777440 - RNA, 17 nt, Human
cugccuuuagaaaauau

SEQ ID NO: 1777441 - RNA, 18 nt, Human
cugccuuuauuguguuug

SEQ ID NO: 1777442 - RNA, 17 nt, Human
cugccuuuauuguguuu

SEQ ID NO: 1777443 - RNA, 15 nt, Human
cugccuuuauugugu

SEQ ID NO: 1777444 - RNA, 16 nt, Human
cugcgacgcuugcucu

SEQ ID NO: 1777445 - RNA, 23 nt, Human
cugcgacgcuugcucuguuugug

SEQ ID NO: 1777446 - RNA, 15 nt, Human
cugcccuuuuuucug

SEQ ID NO: 1777447 - RNA, 18 nt, Human
cugcccuuuuuucugccu

SEQ ID NO: 1777448 - RNA, 19 nt, Human
cugcccuuuuuucugccuc

SEQ ID NO: 1777449 - RNA, 20 nt, Human
cugcccuuuuuucugccucc

SEQ ID NO: 1777450 - RNA, 21 nt, Human
cugcccuuuuuucugccuccu

SEQ ID NO: 1777451 - RNA, 15 nt, Human
cugccgggcugaggg

SEQ ID NO: 1777452 - RNA, 18 nt, Human
cugccgggcugagggccu

SEQ ID NO: 1777453 - RNA, 19 nt, Human
cugccgggcugagggccug

SEQ ID NO: 1777454 - RNA, 21 nt, Human
cugccgggcugagggccugcu

SEQ ID NO: 1777455 - RNA, 22 nt, Human
cugccgggcugagggccugcug

SEQ ID NO: 1777456 - RNA, 23 nt, Human
cugccgggcugagggccugcugg

SEQ ID NO: 1777457 - RNA, 18 nt, Human
cugccgguaaacacgccu

SEQ ID NO: 1777458 - RNA, 21 nt, Human
cugccgguaaacacgccugca

SEQ ID NO: 1777459 - RNA, 23 nt, Human
cugcccuaguuuucuuuccuccu

SEQ ID NO: 1777460 - RNA, 16 nt, Human
cugcccuaugggccug

SEQ ID NO: 1777461 - RNA, 17 nt, Human
cugcccuaugggccugc

SEQ ID NO: 1777462 - RNA, 20 nt, Human
cugcccuaugggccugccgg

SEQ ID NO: 1777463 - RNA, 21 nt, Human
cugcccuaugggccugccggg

SEQ ID NO: 1777464 - RNA, 15 nt, Human
cugcccuggcuccag

SEQ ID NO: 1777465 - RNA, 15 nt, Human
cugccucugacacac

SEQ ID NO: 1777466 - RNA, 22 nt, Human
cugccucugacacacagcucug

SEQ ID NO: 1777467 - RNA, 23 nt, Human
cugccucugacacacagcucugu

SEQ ID NO: 1777468 - RNA, 11 nt, Human
cugccucccaa

SEQ ID NO: 1777469 - RNA, 21 nt, Human
cugccucccaacaguggggaa

SEQ ID NO: 1777470 - RNA, 20 nt, Human
cugccugcccaggccccugc

SEQ ID NO: 1777471 - RNA, 15 nt, Human
cugccugaagucaca

SEQ ID NO: 1777472 - RNA, 22 nt, Human
cugccucuucugggagggcagc

SEQ ID NO: 1777473 - RNA, 16 nt, Human
cugccugcccaggccc

SEQ ID NO: 1777474 - RNA, 17 nt, Human
cugccugcccaggcccc

SEQ ID NO: 1777475 - RNA, 16 nt, Human
cugccucuucugggag

SEQ ID NO: 1777476 - RNA, 17 nt, Human
cugccucuucugggagg

SEQ ID NO: 1777477 - RNA, 18 nt, Human
gagaucacgccacugcac

SEQ ID NO: 1777478 - RNA, 19 nt, Human
gagaucacgccacugcacu

SEQ ID NO: 1777479 - RNA, 23 nt, Human
gagaucaaccccuucgcuccugu

SEQ ID NO: 1777480 - RNA, 21 nt, Human
gagcacuaaggugugcucuga

SEQ ID NO: 1777481 - RNA, 15 nt, Human
gagcacuaaggugug

SEQ ID NO: 1777482 - RNA, 19 nt, Human
gagccaauuuaaagaaaac

SEQ ID NO: 1777483 - RNA, 22 nt, Human
gagcaggaccucugaaacccug

SEQ ID NO: 1777484 - RNA, 14 nt, Human
gagccagggucuca

SEQ ID NO: 1777485 - RNA, 14 nt, Human
gagccacaguggga

SEQ ID NO: 1777486 - RNA, 17 nt, Human
gagccaguuugccggau

SEQ ID NO: 1777487 - RNA, 19 nt, Human
gagccagggucucacuaug

SEQ ID NO: 1777488 - RNA, 12 nt, Human
gagcccagcucu

SEQ ID NO: 1777489 - RNA, 14 nt, Human
gagcccagcucuga

SEQ ID NO: 1777490 - RNA, 21 nt, Human
gagcccagcucugaaaccagu

SEQ ID NO: 1777491 - RNA, 13 nt, Human
gagacucugucuc

SEQ ID NO: 1777492 - RNA, 15 nt, Human
gagacugggcugagg

SEQ ID NO: 1777493 - RNA, 17 nt, Human
gagacugggcugaggga

SEQ ID NO: 1777494 - RNA, 20 nt, Human
gagacugggcugagggagcc

SEQ ID NO: 1777495 - RNA, 21 nt, Human
gagacugggcugagggagccu

SEQ ID NO: 1777496 - RNA, 13 nt, Human
gagacugggcuga

SEQ ID NO: 1777497 - RNA, 14 nt, Human
gagacugggcugag

SEQ ID NO: 1777498 - RNA, 22 nt, Human
gagacaggguuuugccauguug

SEQ ID NO: 1777499 - RNA, 12 nt, Human
gagacaggcaga

SEQ ID NO: 1777500 - RNA, 14 nt, Human
gagacaggcagagc

SEQ ID NO: 1777501 - RNA, 16 nt, Human
gagacaggcagagcug

SEQ ID NO: 1777502 - RNA, 19 nt, Human
gagacaggcagagcugcuc

SEQ ID NO: 1777503 - RNA, 14 nt, Human
gagaaugagaaaug

SEQ ID NO: 1777504 - RNA, 17 nt, Human
gagagccguggucccug

SEQ ID NO: 1777505 - RNA, 19 nt, Human
gagagccguggucccugag

SEQ ID NO: 1777506 - RNA, 20 nt, Human
gagagccguggucccugagg

SEQ ID NO: 1777507 - RNA, 21 nt, Human
gagagccguggucccugagga

SEQ ID NO: 1777508 - RNA, 19 nt, Human
gagaggggaacagacugga

SEQ ID NO: 1777509 - RNA, 19 nt, Human
gagagggggccugggacuu

SEQ ID NO: 1777510 - RNA, 23 nt, Human
gagagggggccugggacuuccau

SEQ ID NO: 1777511 - RNA, 13 nt, Human
gagagucuggccc

SEQ ID NO: 1777512 - RNA, 14 nt, Human
gagagucuggcccu

SEQ ID NO: 1777513 - RNA, 20 nt, Human
gagagucagcucucugcccu

SEQ ID NO: 1777514 - RNA, 21 nt, Human
gagagucagcucucugcccug

SEQ ID NO: 1777515 - RNA, 23 nt, Human
gagagucagcucucugcccugug

SEQ ID NO: 1777516 - RNA, 15 nt, Human
gagagucuggcccua

SEQ ID NO: 1777517 - RNA, 18 nt, Human
gagagucuggcccuagac

SEQ ID NO: 1777518 - RNA, 15 nt, Human
gagauaccagcgagg

SEQ ID NO: 1777519 - RNA, 14 nt, Human
gacucauucuucug

SEQ ID NO: 1777520 - RNA, 15 nt, Human
gacucauucuucugu

SEQ ID NO: 1777521 - RNA, 19 nt, Human
gacucagaagccucugggu

SEQ ID NO: 1777522 - RNA, 18 nt, Human
gacuacaggugugaguca

SEQ ID NO: 1777523 - RNA, 21 nt, Human
gacuacaggugugagucacca

SEQ ID NO: 1777524 - RNA, 18 nt, Human
gacuacagucaggaaagg

SEQ ID NO: 1777525 - RNA, 13 nt, Human
gacuacaggugug

SEQ ID NO: 1777526 - RNA, 15 nt, Human
gacuccggcugugcu

SEQ ID NO: 1777527 - RNA, 16 nt, Human
gacuccggcugugcug

SEQ ID NO: 1777528 - RNA, 17 nt, Human
gacuccggcugugcugg

SEQ ID NO: 1777529 - RNA, 18 nt, Human
gacuccggcugugcuggg

SEQ ID NO: 1777530 - RNA, 21 nt, Human
gacuccggcugugcugggaga

SEQ ID NO: 1777531 - RNA, 14 nt, Human
gacuggaagcacag

SEQ ID NO: 1777532 - RNA, 15 nt, Human
gacuggaagcacagc

SEQ ID NO: 1777533 - RNA, 16 nt, Human
gacuggaagcacagcu

SEQ ID NO: 1777534 - RNA, 18 nt, Human
gacuggaagcacagcuuc

SEQ ID NO: 1777535 - RNA, 14 nt, Human
gacugggcugaggg

SEQ ID NO: 1777536 - RNA, 15 nt, Human
gacugggcugaggga

SEQ ID NO: 1777537 - RNA, 16 nt, Human
gacugggcugagggag

SEQ ID NO: 1777538 - RNA, 21 nt, Human
gacugggcugagggagccugg

SEQ ID NO: 1777539 - RNA, 14 nt, Human
gacucucagucucu

SEQ ID NO: 1777540 - RNA, 16 nt, Human
gacucucagucucuga

SEQ ID NO: 1777541 - RNA, 18 nt, Human
gacucucagucucugagc

SEQ ID NO: 1777542 - RNA, 20 nt, Human
gacucucagucucugagcag

SEQ ID NO: 1777543 - RNA, 12 nt, Human
gacucuccaggg

SEQ ID NO: 1777544 - RNA, 24 nt, Human
gacucuccagggguccuaggccuc

SEQ ID NO: 1777545 - RNA, 22 nt, Human
gagaaaguacuucuccacccug

SEQ ID NO: 1777546 - RNA, 16 nt, Human
gagaaagguugaagca

SEQ ID NO: 1777547 - RNA, 16 nt, Human
gacugcccggcacaga

SEQ ID NO: 1777548 - RNA, 13 nt, Human
gacuuggaagcuc

SEQ ID NO: 1777549 - RNA, 16 nt, Human
gacuugcacagggauu

SEQ ID NO: 1777550 - RNA, 17 nt, Human
gacuugcacagggauuc

SEQ ID NO: 1777551 - RNA, 18 nt, Human
gacuugcacagggauucu

SEQ ID NO: 1777552 - RNA, 20 nt, Human
gacagccacggccaggccag

SEQ ID NO: 1777553 - RNA, 21 nt, Human
gacagccacggccaggccaga

SEQ ID NO: 1777554 - RNA, 20 nt, Human
gacagagugagacucugucu

SEQ ID NO: 1777555 - RNA, 22 nt, Human
gacagagugagacucugucuca

SEQ ID NO: 1777556 - RNA, 14 nt, Human
gacagccacggcca

SEQ ID NO: 1777557 - RNA, 17 nt, Human
gacagccacggccaggc

SEQ ID NO: 1777558 - RNA, 18 nt, Human
gacagccacggccaggcc

SEQ ID NO: 1777559 - RNA, 19 nt, Human
gacagccacggccaggcca

SEQ ID NO: 1777560 - RNA, 14 nt, Human
gacagaggcagccc

SEQ ID NO: 1777561 - RNA, 16 nt, Human
gacagaggcagcccca

SEQ ID NO: 1777562 - RNA, 17 nt, Human
gacagaggcagccccau

SEQ ID NO: 1777563 - RNA, 14 nt, Human
gacagagucucacu

SEQ ID NO: 1777564 - RNA, 24 nt, Human
gacagggcacaccgggcacucaga

SEQ ID NO: 1777565 - RNA, 20 nt, Human
gacaguggauugcauuucuu

SEQ ID NO: 1777566 - RNA, 23 nt, Human
gacagggcacaccgggcacucag

SEQ ID NO: 1777567 - RNA, 16 nt, Human
gacagggaggugaccc

SEQ ID NO: 1777568 - RNA, 14 nt, Human
gaccccuccaugug

SEQ ID NO: 1777569 - RNA, 18 nt, Human
gaccccuccaugugggcu

SEQ ID NO: 1777570 - RNA, 21 nt, Human
gaccccuccaugugggcuagu

SEQ ID NO: 1777571 - RNA, 21 nt, Human
gaccagacaccuugacagggc

SEQ ID NO: 1777572 - RNA, 14 nt, Human
gaauguuaaauaaa

SEQ ID NO: 1777573 - RNA, 13 nt, Human
gaauguuaaauaa

SEQ ID NO: 1777574 - RNA, 14 nt, Human
gaauguacucuguu

SEQ ID NO: 1777575 - RNA, 15 nt, Human
gaauguuugccucug

SEQ ID NO: 1777576 - RNA, 18 nt, Human
gaauguuaaauaaauugu

SEQ ID NO: 1777577 - RNA, 16 nt, Human
gaauguuaaauaaauu

SEQ ID NO: 1777578 - RNA, 21 nt, Human
gaauguuaaauaaauuguaua

SEQ ID NO: 1777579 - RNA, 16 nt, Human
gaauguuacugccuua

SEQ ID NO: 1777580 - RNA, 14 nt, Human
gaauguuggauaag

SEQ ID NO: 1777581 - RNA, 20 nt, Human
gaauguuggauaaggaauua

SEQ ID NO: 1777582 - RNA, 18 nt, Human
gaaaggccuuuaaaauuu

SEQ ID NO: 1777583 - RNA, 15 nt, Human
gaaaggccuuuaaaa

SEQ ID NO: 1777584 - RNA, 14 nt, Human
gaaaggccuuuaaa

SEQ ID NO: 1777585 - RNA, 15 nt, Human
gaaucaugagccugc

SEQ ID NO: 1777586 - RNA, 16 nt, Human
gaaucaugagccugcu

SEQ ID NO: 1777587 - RNA, 17 nt, Human
gaaucaugagccugcug

SEQ ID NO: 1777588 - RNA, 18 nt, Human
gaaucaugagccugcugg

SEQ ID NO: 1777589 - RNA, 19 nt, Human
gaaucaugagccugcugga

SEQ ID NO: 1777590 - RNA, 20 nt, Human
gaaucaugagccugcuggaa

SEQ ID NO: 1777591 - RNA, 20 nt, Human
gaauccagacccggcugcgu

SEQ ID NO: 1777592 - RNA, 18 nt, Human
gaaucucuuuuugcuuuc

SEQ ID NO: 1777593 - RNA, 20 nt, Human
gaaugcagucuguccaggcu

SEQ ID NO: 1777594 - RNA, 22 nt, Human
gaaugcagucuguccaggcucg

SEQ ID NO: 1777595 - RNA, 17 nt, Human
gaauuugagugcucuga

SEQ ID NO: 1777596 - RNA, 11 nt, Human
gaauuugcaaa

SEQ ID NO: 1777597 - RNA, 13 nt, Human
gaauuugcaaagu

SEQ ID NO: 1777598 - RNA, 14 nt, Human
gaauuugcaaagua

SEQ ID NO: 1777599 - RNA, 15 nt, Human
gaauuugcaaaguac

SEQ ID NO: 1777600 - RNA, 17 nt, Human
gaauuugcaaaguacug

SEQ ID NO: 1777601 - RNA, 18 nt, Human
gaauuugcaaaguacugu

SEQ ID NO: 1777602 - RNA, 19 nt, Human
gaauuucugugcccuccug

SEQ ID NO: 1777603 - RNA, 16 nt, Human
gaauuguaacuguucu

SEQ ID NO: 1777604 - RNA, 12 nt, Human
gacaaccaugac

SEQ ID NO: 1777605 - RNA, 20 nt, Human
gacacaggcccggcuccagg

SEQ ID NO: 1777606 - RNA, 21 nt, Human
gacacaggcccggcuccaggc

SEQ ID NO: 1777607 - RNA, 19 nt, Human
gacacaggcccggcuccag

SEQ ID NO: 1777608 - RNA, 18 nt, Human
gacaaggauugcuacugu

SEQ ID NO: 1777609 - RNA, 19 nt, Human
gacaaggauugcuacuguc

SEQ ID NO: 1777610 - RNA, 21 nt, Human
gacaaggauugcuacuguccu

SEQ ID NO: 1777611 - RNA, 16 nt, Human
gacaaggaaaaaauaa

SEQ ID NO: 1777612 - RNA, 18 nt, Human
gauuuugauagcaaagcg

SEQ ID NO: 1777613 - RNA, 19 nt, Human
gauuuugauccaagcuggu

SEQ ID NO: 1777614 - RNA, 14 nt, Human
gauuuuaacucugu

SEQ ID NO: 1777615 - RNA, 16 nt, Human
gauuuuaacucugucu

SEQ ID NO: 1777616 - RNA, 14 nt, Human
gcaaagcgacguua

SEQ ID NO: 1777617 - RNA, 14 nt, Human
gauucuccugccuc

SEQ ID NO: 1777618 - RNA, 16 nt, Human
gauugagucugugcca

SEQ ID NO: 1777619 - RNA, 15 nt, Human
gauugcaacaggcug

SEQ ID NO: 1777620 - RNA, 17 nt, Human
gauugcaugugacucug

SEQ ID NO: 1777621 - RNA, 15 nt, Human
gaugguaagaaacaa

SEQ ID NO: 1777622 - RNA, 15 nt, Human
gaugggucagagcua

SEQ ID NO: 1777623 - RNA, 20 nt, Human
gaugggucagguagggggga

SEQ ID NO: 1777624 - RNA, 16 nt, Human
gaugggugaaggcugg

SEQ ID NO: 1777625 - RNA, 21 nt, Human
gaugggugaaggcuggcauga

SEQ ID NO: 1777626 - RNA, 19 nt, Human
gaugggaugguggagggcc

SEQ ID NO: 1777627 - RNA, 20 nt, Human
gaugggaugguggagggcca

SEQ ID NO: 1777628 - RNA, 20 nt, Human
gaugggcaacccccagccug

SEQ ID NO: 1777629 - RNA, 21 nt, Human
gaugggcaacccccagccugc

SEQ ID NO: 1777630 - RNA, 16 nt, Human
gaucagagccgugguc

SEQ ID NO: 1777631 - RNA, 23 nt, Human
gaucagagccgugguccuuuggg

SEQ ID NO: 1777632 - RNA, 13 nt, Human
gaugcuccuuggg

SEQ ID NO: 1777633 - RNA, 14 nt, Human
gaugcuccuugggc

SEQ ID NO: 1777634 - RNA, 16 nt, Human
gaugcuccuugggccc

SEQ ID NO: 1777635 - RNA, 21 nt, Human
gaugcuccuugggcccuuuga

SEQ ID NO: 1777636 - RNA, 20 nt, Human
gauguuauguaaaaggccaa

SEQ ID NO: 1777637 - RNA, 23 nt, Human
gauuacaagcgugagccacugca

SEQ ID NO: 1777638 - RNA, 14 nt, Human
gauuaaaaauuaua

SEQ ID NO: 1777639 - RNA, 22 nt, Human
gauuacaagcgugagccacugc

SEQ ID NO: 1777640 - RNA, 17 nt, Human
gaugguguggguguccu

SEQ ID NO: 1777641 - RNA, 18 nt, Human
gaugguguggguguccug

SEQ ID NO: 1777642 - RNA, 22 nt, Human
gcacacuuugccauauuuucac

SEQ ID NO: 1777643 - RNA, 13 nt, Human
gcacacuuugcca

SEQ ID NO: 1777644 - RNA, 14 nt, Human
gcacacuuugccau

SEQ ID NO: 1777645 - RNA, 17 nt, Human
gcacagaagcacaugca

SEQ ID NO: 1777646 - RNA, 15 nt, Human
gcaauggcagccuug

SEQ ID NO: 1777647 - RNA, 15 nt, Human
gcaauuccgcauuua

SEQ ID NO: 1777648 - RNA, 23 nt, Human
gcacaaagaugggugaaggcugg

SEQ ID NO: 1777649 - RNA, 17 nt, Human
gcaauuccgcauuuaau

SEQ ID NO: 1777650 - RNA, 15 nt, Human
gcaauugaaaugcau

SEQ ID NO: 1777651 - RNA, 16 nt, Human
gcaauuucccccuaaa

SEQ ID NO: 1777652 - RNA, 16 nt, Human
gcaauuuauacaauau

SEQ ID NO: 1777653 - RNA, 19 nt, Human
gcaauuuauacaauaucau

SEQ ID NO: 1777654 - RNA, 16 nt, Human
gcacugcuugaggaaa

SEQ ID NO: 1777655 - RNA, 17 nt, Human
gcacugcuugaggaaaa

SEQ ID NO: 1777656 - RNA, 21 nt, Human
gcacugagauaccagcgagga

SEQ ID NO: 1777657 - RNA, 12 nt, Human
gcagacaggcaa

SEQ ID NO: 1777658 - RNA, 13 nt, Human
gcagacaggcaag

SEQ ID NO: 1777659 - RNA, 14 nt, Human
gcagacaggcaagc

SEQ ID NO: 1777660 - RNA, 15 nt, Human
gcagaaguaagccuc

SEQ ID NO: 1777661 - RNA, 17 nt, Human
gcagaaguaagccucau

SEQ ID NO: 1777662 - RNA, 17 nt, Human
gcacagaugcuccaggg

SEQ ID NO: 1777663 - RNA, 14 nt, Human
gcaccagucccugu

SEQ ID NO: 1777664 - RNA, 23 nt, Human
gcaccaggguugaccccagagga

SEQ ID NO: 1777665 - RNA, 17 nt, Human
gaggcugggggagagcc

SEQ ID NO: 1777666 - RNA, 20 nt, Human
gaggcugggggagagccgug

SEQ ID NO: 1777667 - RNA, 23 nt, Human
gagggagcuccaacucagaaggg

SEQ ID NO: 1777668 - RNA, 21 nt, Human
gagggagugacagaggcagcc

SEQ ID NO: 1777669 - RNA, 22 nt, Human
gagggagugacagaggcagccc

SEQ ID NO: 1777670 - RNA, 21 nt, Human
gagggaggggaagcuucuguc

SEQ ID NO: 1777671 - RNA, 18 nt, Human
gagggagugacagaggca

SEQ ID NO: 1777672 - RNA, 16 nt, Human
gagggccacaugggag

SEQ ID NO: 1777673 - RNA, 16 nt, Human
gagggcagcagggcua

SEQ ID NO: 1777674 - RNA, 19 nt, Human
gagggcagcagggcuaccc

SEQ ID NO: 1777675 - RNA, 12 nt, Human
gagggcagcagg

SEQ ID NO: 1777676 - RNA, 14 nt, Human
gagggcagcagggc

SEQ ID NO: 1777677 - RNA, 15 nt, Human
gagggcagcagggcu

SEQ ID NO: 1777678 - RNA, 21 nt, Human
gaggggucgacuucgggcugg

SEQ ID NO: 1777679 - RNA, 14 nt, Human
gaggguugggcugg

SEQ ID NO: 1777680 - RNA, 15 nt, Human
gaggguugggcuggu

SEQ ID NO: 1777681 - RNA, 12 nt, Human
gaggucagagcc

SEQ ID NO: 1777682 - RNA, 13 nt, Human
gaggucagagccu

SEQ ID NO: 1777683 - RNA, 14 nt, Human
gaggguggugaccu

SEQ ID NO: 1777684 - RNA, 21 nt, Human
gaggguggugaccucugccug

SEQ ID NO: 1777685 - RNA, 22 nt, Human
gagggugucccaaaaagaaagg

SEQ ID NO: 1777686 - RNA, 13 nt, Human
gagggucugagga

SEQ ID NO: 1777687 - RNA, 14 nt, Human
gagggucugaggaa

SEQ ID NO: 1777688 - RNA, 18 nt, Human
gaggcuggccucuacauc

SEQ ID NO: 1777689 - RNA, 16 nt, Human
gaggccuucucugaag

SEQ ID NO: 1777690 - RNA, 12 nt, Human
gaggccucaggu

SEQ ID NO: 1777691 - RNA, 14 nt, Human
gaggccucaggugc

SEQ ID NO: 1777692 - RNA, 15 nt, Human
gaggccucaggugcu

SEQ ID NO: 1777693 - RNA, 16 nt, Human
gaggccucaggugcug

SEQ ID NO: 1777694 - RNA, 20 nt, Human
gaggccucaggugcugucca

SEQ ID NO: 1777695 - RNA, 22 nt, Human
gaggccucaggugcuguccaug

SEQ ID NO: 1777696 - RNA, 18 nt, Human
gaggccuucucugaagga

SEQ ID NO: 1777697 - RNA, 19 nt, Human
gaggccuucucugaaggac

SEQ ID NO: 1777698 - RNA, 9 nt, Human
gaggccuga

SEQ ID NO: 1777699 - RNA, 13 nt, Human
gaggccugaagcc

SEQ ID NO: 1777700 - RNA, 18 nt, Human
gaggccugaagccagcug

SEQ ID NO: 1777701 - RNA, 20 nt, Human
gaggccugaagccagcugcc

SEQ ID NO: 1777702 - RNA, 22 nt, Human
gaggccugaagccagcugcccu

SEQ ID NO: 1777703 - RNA, 23 nt, Human
gaggccugaagccagcugcccua

SEQ ID NO: 1777704 - RNA, 22 nt, Human
gaggaugagcucuacccagggc

SEQ ID NO: 1777705 - RNA, 21 nt, Human
gaggcaauccuaccuugcuuu

SEQ ID NO: 1777706 - RNA, 18 nt, Human
gagcccuguggaugagcc

SEQ ID NO: 1777707 - RNA, 21 nt, Human
gagcccuguggaugagcccuc

SEQ ID NO: 1777708 - RNA, 22 nt, Human
gagcccuguggaugagcccuca

SEQ ID NO: 1777709 - RNA, 18 nt, Human
gagcccuuaucugugcuc

SEQ ID NO: 1777710 - RNA, 19 nt, Human
gagcccuuaucugugcuca

SEQ ID NO: 1777711 - RNA, 14 nt, Human
gaggccaugggccu

SEQ ID NO: 1777712 - RNA, 17 nt, Human
gaggccaugggccuccu

SEQ ID NO: 1777713 - RNA, 16 nt, Human
gaggccagugagccac

SEQ ID NO: 1777714 - RNA, 18 nt, Human
gaggccaugggccuccug

SEQ ID NO: 1777715 - RNA, 20 nt, Human
gaggccaugggccuccugug

SEQ ID NO: 1777716 - RNA, 21 nt, Human
gaggccaugggccuccugugu

SEQ ID NO: 1777717 - RNA, 23 nt, Human
gaggccaugggccuccugugugu

SEQ ID NO: 1777718 - RNA, 21 nt, Human
gaggcagccccauucugccug

SEQ ID NO: 1777719 - RNA, 20 nt, Human
gaggcagccccauucugccu

SEQ ID NO: 1777720 - RNA, 9 nt, Human
gaggcaggg

SEQ ID NO: 1777721 - RNA, 19 nt, Human
gaggcagccccauucugcc

SEQ ID NO: 1777722 - RNA, 18 nt, Human
gagucuggcccuagacuc

SEQ ID NO: 1777723 - RNA, 21 nt, Human
gagugaacuggucuuccuuuu

SEQ ID NO: 1777724 - RNA, 12 nt, Human
gagugaaauacu

SEQ ID NO: 1777725 - RNA, 14 nt, Human
gagugacagaggca

SEQ ID NO: 1777726 - RNA, 15 nt, Human
gagugacagaggcag

SEQ ID NO: 1777727 - RNA, 16 nt, Human
gagugacagaggcagc

SEQ ID NO: 1777728 - RNA, 21 nt, Human
gaguaguugauguugcauuuu

SEQ ID NO: 1777729 - RNA, 20 nt, Human
gaguaguugauguugcauuu

SEQ ID NO: 1777730 - RNA, 12 nt, Human
gaguauaugcac

SEQ ID NO: 1777731 - RNA, 14 nt, Human
gaguauaugcacuu

SEQ ID NO: 1777732 - RNA, 15 nt, Human
gagucgaggacaggg

SEQ ID NO: 1777733 - RNA, 16 nt, Human
gagucgaggacaggga

SEQ ID NO: 1777734 - RNA, 19 nt, Human
gaguccgaaagggacuugg

SEQ ID NO: 1777735 - RNA, 17 nt, Human
gaguccuagagcuacag

SEQ ID NO: 1777736 - RNA, 14 nt, Human
gagucgaggacagg

SEQ ID NO: 1777737 - RNA, 19 nt, Human
gaguagaaacugcagggaa

SEQ ID NO: 1777738 - RNA, 13 nt, Human
gaguacugugggc

SEQ ID NO: 1777739 - RNA, 14 nt, Human
gaguacugugggca

SEQ ID NO: 1777740 - RNA, 15 nt, Human
gaguacugugggcaa

SEQ ID NO: 1777741 - RNA, 17 nt, Human
gaguacugugggcaauu

SEQ ID NO: 1777742 - RNA, 18 nt, Human
gaguacugugggcaauuu

SEQ ID NO: 1777743 - RNA, 22 nt, Human
gaguacugugggcaauuuagaa

SEQ ID NO: 1777744 - RNA, 23 nt, Human
gaguacugugggcaauuuagaaa

SEQ ID NO: 1777745 - RNA, 19 nt, Human
gaguagcugggacuacagg

SEQ ID NO: 1777746 - RNA, 12 nt, Human
gaguagagaagu

SEQ ID NO: 1777747 - RNA, 15 nt, Human
gaguagaaaggccuu

SEQ ID NO: 1777748 - RNA, 23 nt, Human
gaguagaaaggccuuuaaaauuu

SEQ ID NO: 1777749 - RNA, 17 nt, Human
gaguagaaaggccuuua

SEQ ID NO: 1777750 - RNA, 22 nt, Human
gaguagcugggacuacaggcac

SEQ ID NO: 1777751 - RNA, 17 nt, Human
gaggucagagccugcag

SEQ ID NO: 1777752 - RNA, 20 nt, Human
gaggucagagccugcaguua

SEQ ID NO: 1777753 - RNA, 17 nt, Human
gaggucagcauuugauc

SEQ ID NO: 1777754 - RNA, 22 nt, Human
gauauaagugcuguauaaaauc

SEQ ID NO: 1777755 - RNA, 21 nt, Human
gauauaagugcuguauaaaau

SEQ ID NO: 1777756 - RNA, 19 nt, Human
gauauaagugcuguauaaa

SEQ ID NO: 1777757 - RNA, 18 nt, Human
gauauaagugcuguauaa

SEQ ID NO: 1777758 - RNA, 23 nt, Human
gauauaagugcuguauaaaauca

SEQ ID NO: 1777759 - RNA, 18 nt, Human
gaucacaacgugcauugu

SEQ ID NO: 1777760 - RNA, 17 nt, Human
gaucacaacgugcauug

SEQ ID NO: 1777761 - RNA, 16 nt, Human
gaucacaacgugcauu

SEQ ID NO: 1777762 - RNA, 15 nt, Human
gaucacaacgugcau

SEQ ID NO: 1777763 - RNA, 13 nt, Human
gaucacaaaaaca

SEQ ID NO: 1777764 - RNA, 18 nt, Human
gaucacggcucacugcag

SEQ ID NO: 1777765 - RNA, 15 nt, Human
gaucagaaauacaga

SEQ ID NO: 1777766 - RNA, 14 nt, Human
gaucagaaauacag

SEQ ID NO: 1777767 - RNA, 15 nt, Human
gaucacggcucacug

SEQ ID NO: 1777768 - RNA, 16 nt, Human
gaucacggcucacugc

SEQ ID NO: 1777769 - RNA, 23 nt, Human
gaucacaacgugcauugugcuuc

SEQ ID NO: 1777770 - RNA, 22 nt, Human
gaucacaacgugcauugugcuu

SEQ ID NO: 1777771 - RNA, 21 nt, Human
gaucacaacgugcauugugcu

SEQ ID NO: 1777772 - RNA, 20 nt, Human
gaucacaacgugcauugugc

SEQ ID NO: 1777773 - RNA, 23 nt, Human
gauagcaaagcgacguuagucgu

SEQ ID NO: 1777774 - RNA, 16 nt, Human
gauauaagugcuguau

SEQ ID NO: 1777775 - RNA, 14 nt, Human
gauauaagugcugu

SEQ ID NO: 1777776 - RNA, 17 nt, Human
gauagcgggaaaaggag

SEQ ID NO: 1777777 - RNA, 21 nt, Human
gauacaggaaaagcugcugac

SEQ ID NO: 1777778 - RNA, 23 nt, Human
gauacaggaaaagcugcugacag

SEQ ID NO: 1777779 - RNA, 20 nt, Human
gauacaggaaaagcugcuga

SEQ ID NO: 1777780 - RNA, 17 nt, Human
gagugacagaggcagcc

SEQ ID NO: 1777781 - RNA, 18 nt, Human
gaguguuucuaauaaacu

SEQ ID NO: 1777782 - RNA, 22 nt, Human
gaguguuucuaauaaacuugga

SEQ ID NO: 1777783 - RNA, 22 nt, Human
gaguuaaauagaguauaugcac

SEQ ID NO: 1777784 - RNA, 13 nt, Human
gaguuaagguggg

SEQ ID NO: 1777785 - RNA, 20 nt, Human
gaguucauacccuguuacca

SEQ ID NO: 1777786 - RNA, 20 nt, Human
gauaaaucagucaagcuguu

SEQ ID NO: 1777787 - RNA, 17 nt, Human
ggccugggacuuccaug

SEQ ID NO: 1777788 - RNA, 23 nt, Human
ggccucuuugucuaaaacaauaa

SEQ ID NO: 1777789 - RNA, 16 nt, Human
ggccugaaaggagccc

SEQ ID NO: 1777790 - RNA, 22 nt, Human
ggccugaaaggagcccuuaucu

SEQ ID NO: 1777791 - RNA, 15 nt, Human
ggccugaagccagcu

SEQ ID NO: 1777792 - RNA, 16 nt, Human
ggccugaagccagcug

SEQ ID NO: 1777793 - RNA, 17 nt, Human
ggccugaagccagcugc

SEQ ID NO: 1777794 - RNA, 18 nt, Human
ggccugaagccagcugcc

SEQ ID NO: 1777795 - RNA, 19 nt, Human
ggccugaagccagcugccc

SEQ ID NO: 1777796 - RNA, 20 nt, Human
ggccugaagccagcugcccu

SEQ ID NO: 1777797 - RNA, 17 nt, Human
ggccugaaucaugagcc

SEQ ID NO: 1777798 - RNA, 19 nt, Human
ggccugaaucaugagccug

SEQ ID NO: 1777799 - RNA, 21 nt, Human
ggccugaaucaugagccugcu

SEQ ID NO: 1777800 - RNA, 22 nt, Human
ggccugaaucaugagccugcug

SEQ ID NO: 1777801 - RNA, 23 nt, Human
ggccugaaucaugagccugcugg

SEQ ID NO: 1777802 - RNA, 22 nt, Human
ggcuaggaccccuccauguggg

SEQ ID NO: 1777803 - RNA, 16 nt, Human
ggcuaggaccccucca

SEQ ID NO: 1777804 - RNA, 16 nt, Human
ggcuaguugggcuucc

SEQ ID NO: 1777805 - RNA, 15 nt, Human
ggcuaguugggcuuc

SEQ ID NO: 1777806 - RNA, 15 nt, Human
ggcuccagccaucuc

SEQ ID NO: 1777807 - RNA, 18 nt, Human
ggcuccagccaucucaug

SEQ ID NO: 1777808 - RNA, 15 nt, Human
ggcucaaguccucuu

SEQ ID NO: 1777809 - RNA, 21 nt, Human
ggcucaaguccucuuuucuga

SEQ ID NO: 1777810 - RNA, 11 nt, Human
ggcuccaggcu

SEQ ID NO: 1777811 - RNA, 16 nt, Human
ggcuccaggcuccuuu

SEQ ID NO: 1777812 - RNA, 16 nt, Human
ggccguaucuccggcu

SEQ ID NO: 1777813 - RNA, 18 nt, Human
ggccguaucuccggcucc

SEQ ID NO: 1777814 - RNA, 19 nt, Human
ggccguaucuccggcuccc

SEQ ID NO: 1777815 - RNA, 20 nt, Human
ggccguaucuccggcuccca

SEQ ID NO: 1777816 - RNA, 21 nt, Human
ggccguaucuccggcucccag

SEQ ID NO: 1777817 - RNA, 22 nt, Human
ggccguaucuccggcucccagc

SEQ ID NO: 1777818 - RNA, 19 nt, Human
ggcccugcaaaaggacucu

SEQ ID NO: 1777819 - RNA, 22 nt, Human
ggcccugcaaaaggacucucag

SEQ ID NO: 1777820 - RNA, 20 nt, Human
ggcccugcugagucaucugu

SEQ ID NO: 1777821 - RNA, 11 nt, Human
ggcccagagag

SEQ ID NO: 1777822 - RNA, 12 nt, Human
ggcccagagagg

SEQ ID NO: 1777823 - RNA, 14 nt, Human
ggcccucucugcuc

SEQ ID NO: 1777824 - RNA, 15 nt, Human
ggcccucucugcucu

SEQ ID NO: 1777825 - RNA, 21 nt, Human
ggcccucucugcucugcgugu

SEQ ID NO: 1777826 - RNA, 12 nt, Human
ggcccucucuuc

SEQ ID NO: 1777827 - RNA, 18 nt, Human
ggcccucucuucucaccu

SEQ ID NO: 1777828 - RNA, 20 nt, Human
ggcccucucuucucaccuuu

SEQ ID NO: 1777829 - RNA, 19 nt, Human
ggcagggucucacucuguc

SEQ ID NO: 1777830 - RNA, 20 nt, Human
ggcagggucucacucugucg

SEQ ID NO: 1777831 - RNA, 13 nt, Human
ggcagugggagcu

SEQ ID NO: 1777832 - RNA, 14 nt, Human
ggcagugggagcug

SEQ ID NO: 1777833 - RNA, 16 nt, Human
ggcagugggagcugcc

SEQ ID NO: 1777834 - RNA, 22 nt, Human
ggcagcugcuuuugucuauggg

SEQ ID NO: 1777835 - RNA, 17 nt, Human
ggcagcuugaggguugg

SEQ ID NO: 1777836 - RNA, 16 nt, Human
ggccaugggccuccug

SEQ ID NO: 1777837 - RNA, 17 nt, Human
ggccauugugaaccaau

SEQ ID NO: 1777838 - RNA, 18 nt, Human
ggccacaugggaggcuca

SEQ ID NO: 1777839 - RNA, 19 nt, Human
ggccacaugggaggcucac

SEQ ID NO: 1777840 - RNA, 12 nt, Human
ggagugcaguga

SEQ ID NO: 1777841 - RNA, 14 nt, Human
ggagugcagugagc

SEQ ID NO: 1777842 - RNA, 19 nt, Human
ggauagagaauguuccaga

SEQ ID NO: 1777843 - RNA, 13 nt, Human
ggaucccucaucu

SEQ ID NO: 1777844 - RNA, 18 nt, Human
ggaucccucaucuguccc

SEQ ID NO: 1777845 - RNA, 22 nt, Human
ggaucccucaucugucccuccg

SEQ ID NO: 1777846 - RNA, 22 nt, Human
ggaugcagugcucgcuguugcu

SEQ ID NO: 1777847 - RNA, 14 nt, Human
ggaugcagugcucg

SEQ ID NO: 1777848 - RNA, 14 nt, Human
ggaugcgcagugcc

SEQ ID NO: 1777849 - RNA, 16 nt, Human
ggaugcgcagugccuu

SEQ ID NO: 1777850 - RNA, 19 nt, Human
ggauuacaagcgugagcca

SEQ ID NO: 1777851 - RNA, 18 nt, Human
ggcaacccccagccugcu

SEQ ID NO: 1777852 - RNA, 14 nt, Human
ggcaaugcuggcug

SEQ ID NO: 1777853 - RNA, 15 nt, Human
ggcaaugcuggcugu

SEQ ID NO: 1777854 - RNA, 23 nt, Human
ggcaaugcuggcuguuggcuggg

SEQ ID NO: 1777855 - RNA, 22 nt, Human
ggcacccggccccugcugguuc

SEQ ID NO: 1777856 - RNA, 23 nt, Human
ggcacccaccaucaugucuggcu

SEQ ID NO: 1777857 - RNA, 17 nt, Human
ggauugcuacuguccua

SEQ ID NO: 1777858 - RNA, 16 nt, Human
ggcaacccccagccug

SEQ ID NO: 1777859 - RNA, 17 nt, Human
ggcaacccccagccugc

SEQ ID NO: 1777860 - RNA, 19 nt, Human
ggauggaagguuggaugga

SEQ ID NO: 1777861 - RNA, 18 nt, Human
ggauuacuucucuauaaa

SEQ ID NO: 1777862 - RNA, 23 nt, Human
ggauuacaagcgugagccacugc

SEQ ID NO: 1777863 - RNA, 16 nt, Human
gcuucaguggcagcug

SEQ ID NO: 1777864 - RNA, 17 nt, Human
gcuucaguggcagcugc

SEQ ID NO: 1777865 - RNA, 18 nt, Human
gcuucaguggcagcugcu

SEQ ID NO: 1777866 - RNA, 13 nt, Human
gcuucauuuccug

SEQ ID NO: 1777867 - RNA, 16 nt, Human
gcuucauuuccugugu

SEQ ID NO: 1777868 - RNA, 20 nt, Human
gcuucuccaaaaaucugccu

SEQ ID NO: 1777869 - RNA, 22 nt, Human
gcuucuccaaaaaucugccugg

SEQ ID NO: 1777870 - RNA, 23 nt, Human
gcuucuccaaaaaucugccuggg

SEQ ID NO: 1777871 - RNA, 17 nt, Human
gcuucauuuccuguguc

SEQ ID NO: 1777872 - RNA, 18 nt, Human
gcuucauuuccugugucu

SEQ ID NO: 1777873 - RNA, 17 nt, Human
gcuucauucuuugcagg

SEQ ID NO: 1777874 - RNA, 16 nt, Human
gcuugaggguugggcu

SEQ ID NO: 1777875 - RNA, 13 nt, Human
gcuguugcugaau

SEQ ID NO: 1777876 - RNA, 12 nt, Human
gcuguugcugaa

SEQ ID NO: 1777877 - RNA, 16 nt, Human
gcuguugaagucucag

SEQ ID NO: 1777878 - RNA, 23 nt, Human
gcuguggugugucccccucuguc

SEQ ID NO: 1777879 - RNA, 15 nt, Human
gcugucggcgcugcc

SEQ ID NO: 1777880 - RNA, 18 nt, Human
gcugucggcgcugcccca

SEQ ID NO: 1777881 - RNA, 14 nt, Human
ggaaccaggcuugg

SEQ ID NO: 1777882 - RNA, 12 nt, Human
ggaaagggagga

SEQ ID NO: 1777883 - RNA, 12 nt, Human
ggaaaauuauuu

SEQ ID NO: 1777884 - RNA, 14 nt, Human
ggaaaaugcauugu

SEQ ID NO: 1777885 - RNA, 16 nt, Human
ggaaaaugcauuguau

SEQ ID NO: 1777886 - RNA, 14 nt, Human
ggaaaagcugcuga

SEQ ID NO: 1777887 - RNA, 18 nt, Human
ggaaaagcugcugacagu

SEQ ID NO: 1777888 - RNA, 20 nt, Human
ggaaaagcugcugacagugu

SEQ ID NO: 1777889 - RNA, 23 nt, Human
gcuuuucagauuguggaauguug

SEQ ID NO: 1777890 - RNA, 14 nt, Human
gcuuuguuuugcac

SEQ ID NO: 1777891 - RNA, 23 nt, Human
gcuuuguuuugcacacuuugcca

SEQ ID NO: 1777892 - RNA, 22 nt, Human
gcuugaggguugggcugguguc

SEQ ID NO: 1777893 - RNA, 20 nt, Human
gcuuuagaaagguuuugagc

SEQ ID NO: 1777894 - RNA, 18 nt, Human
gcuugaggguugggcugg

SEQ ID NO: 1777895 - RNA, 20 nt, Human
gcuugaggguugggcuggug

SEQ ID NO: 1777896 - RNA, 21 nt, Human
gcuuucaauuccguagccagc

SEQ ID NO: 1777897 - RNA, 16 nt, Human
gcuuucaauuccguag

SEQ ID NO: 1777898 - RNA, 20 nt, Human
ggacgccugggggugccagg

SEQ ID NO: 1777899 - RNA, 11 nt, Human
ggagaggagac

SEQ ID NO: 1777900 - RNA, 14 nt, Human
ggacgccugggggu

SEQ ID NO: 1777901 - RNA, 19 nt, Human
ggacgccugggggugccag

SEQ ID NO: 1777902 - RNA, 15 nt, Human
ggaccuugaacuggg

SEQ ID NO: 1777903 - RNA, 17 nt, Human
ggaccuugaacugggua

SEQ ID NO: 1777904 - RNA, 17 nt, Human
ggaccuucgggcugugc

SEQ ID NO: 1777905 - RNA, 18 nt, Human
ggaccuucgggcugugcc

SEQ ID NO: 1777906 - RNA, 19 nt, Human
ggaccuucgggcugugccc

SEQ ID NO: 1777907 - RNA, 20 nt, Human
ggaccuucgggcugugcccg

SEQ ID NO: 1777908 - RNA, 15 nt, Human
ggacagccacggcca

SEQ ID NO: 1777909 - RNA, 19 nt, Human
ggacagccacggccaggcc

SEQ ID NO: 1777910 - RNA, 20 nt, Human
ggacagccacggccaggcca

SEQ ID NO: 1777911 - RNA, 21 nt, Human
ggacagccacggccaggccag

SEQ ID NO: 1777912 - RNA, 22 nt, Human
ggacagccacggccaggccaga

SEQ ID NO: 1777913 - RNA, 20 nt, Human
ggacauugcggacagccacg

SEQ ID NO: 1777914 - RNA, 14 nt, Human
ggacauuucucuaa

SEQ ID NO: 1777915 - RNA, 16 nt, Human
ggaccaacccugggga

SEQ ID NO: 1777916 - RNA, 17 nt, Human
ggaccaacccuggggaa

SEQ ID NO: 1777917 - RNA, 20 nt, Human
ggaccaacccuggggaagga

SEQ ID NO: 1777918 - RNA, 12 nt, Human
ggaaugcagugg

SEQ ID NO: 1777919 - RNA, 19 nt, Human
ggaauguuugccucugccu

SEQ ID NO: 1777920 - RNA, 15 nt, Human
ggaauguuggauaag

SEQ ID NO: 1777921 - RNA, 20 nt, Human
ggaauguuggauaaggaauu

SEQ ID NO: 1777922 - RNA, 19 nt, Human
ggaauuacauguaaaacau

SEQ ID NO: 1777923 - RNA, 22 nt, Human
ggacaaagaauuccaaagcaaa

SEQ ID NO: 1777924 - RNA, 21 nt, Human
ggaaccuccccagccugcgcc

SEQ ID NO: 1777925 - RNA, 16 nt, Human
ggaaccuccccagccu

SEQ ID NO: 1777926 - RNA, 17 nt, Human
ggaaccuccccagccug

SEQ ID NO: 1777927 - RNA, 18 nt, Human
ggaaccuccccagccugc

SEQ ID NO: 1777928 - RNA, 19 nt, Human
ggaaccuccccagccugcg

SEQ ID NO: 1777929 - RNA, 16 nt, Human
ggaaccucgaguacug

SEQ ID NO: 1777930 - RNA, 17 nt, Human
ggaaccucgaguacugu

SEQ ID NO: 1777931 - RNA, 18 nt, Human
ggaaccucgaguacugug

SEQ ID NO: 1777932 - RNA, 19 nt, Human
ggaaccucgaguacugugg

SEQ ID NO: 1777933 - RNA, 22 nt, Human
ggaaccucgaguacugugggca

SEQ ID NO: 1777934 - RNA, 13 nt, Human
ggaagucaaagca

SEQ ID NO: 1777935 - RNA, 16 nt, Human
ggaaguaggaaguaaa

SEQ ID NO: 1777936 - RNA, 15 nt, Human
ggaaggggccagagg

SEQ ID NO: 1777937 - RNA, 17 nt, Human
ggaaggggccagaggcu

SEQ ID NO: 1777938 - RNA, 14 nt, Human
gcccugguggcagu

SEQ ID NO: 1777939 - RNA, 17 nt, Human
gcccugguggcaguggg

SEQ ID NO: 1777940 - RNA, 18 nt, Human
gcccugguggcaguggga

SEQ ID NO: 1777941 - RNA, 19 nt, Human
gcccugguggcagugggag

SEQ ID NO: 1777942 - RNA, 20 nt, Human
gcccugguggcagugggagc

SEQ ID NO: 1777943 - RNA, 21 nt, Human
gcccugguggcagugggagcu

SEQ ID NO: 1777944 - RNA, 22 nt, Human
gcccugguggcagugggagcug

SEQ ID NO: 1777945 - RNA, 23 nt, Human
gcccugguggcagugggagcugc

SEQ ID NO: 1777946 - RNA, 16 nt, Human
gccgagaucacgccac

SEQ ID NO: 1777947 - RNA, 18 nt, Human
gcccuuugagugcagucc

SEQ ID NO: 1777948 - RNA, 13 nt, Human
gcccuuugcuguc

SEQ ID NO: 1777949 - RNA, 14 nt, Human
gcccuuugcugucc

SEQ ID NO: 1777950 - RNA, 18 nt, Human
gccgagaucacgccacug

SEQ ID NO: 1777951 - RNA, 19 nt, Human
gccgagaucacgccacugc

SEQ ID NO: 1777952 - RNA, 19 nt, Human
gcccuggcuccagugaaac

SEQ ID NO: 1777953 - RNA, 15 nt, Human
gcagacucuacagag

SEQ ID NO: 1777954 - RNA, 13 nt, Human
gccccugccaccc

SEQ ID NO: 1777955 - RNA, 14 nt, Human
gccccugccacccu

SEQ ID NO: 1777956 - RNA, 15 nt, Human
gccccugccacccug

SEQ ID NO: 1777957 - RNA, 12 nt, Human
gcccggcuccag

SEQ ID NO: 1777958 - RNA, 16 nt, Human
gcccggcuccaggcuc

SEQ ID NO: 1777959 - RNA, 15 nt, Human
gcccgcgccacagga

SEQ ID NO: 1777960 - RNA, 16 nt, Human
gcccgcgccacaggac

SEQ ID NO: 1777961 - RNA, 21 nt, Human
gcccugcaaaaggacucucag

SEQ ID NO: 1777962 - RNA, 14 nt, Human
gcccugcaaaagga

SEQ ID NO: 1777963 - RNA, 18 nt, Human
gcccugcaaaaggacucu

SEQ ID NO: 1777964 - RNA, 17 nt, Human
gcccggcuccaggcucc

SEQ ID NO: 1777965 - RNA, 18 nt, Human
gcccggcuccaggcuccu

SEQ ID NO: 1777966 - RNA, 14 nt, Human
gcccucgcugccag

SEQ ID NO: 1777967 - RNA, 15 nt, Human
gcccucgcugccagc

SEQ ID NO: 1777968 - RNA, 17 nt, Human
gcccucgcugccagcuc

SEQ ID NO: 1777969 - RNA, 19 nt, Human
gcccucuaucauggugaaa

SEQ ID NO: 1777970 - RNA, 19 nt, Human
gcccucucaggccggcagc

SEQ ID NO: 1777971 - RNA, 16 nt, Human
gcccucucugcucugc

SEQ ID NO: 1777972 - RNA, 11 nt, Human
gcccucucuuc

SEQ ID NO: 1777973 - RNA, 16 nt, Human
gcccucuccuuuguuc

SEQ ID NO: 1777974 - RNA, 22 nt, Human
gcccucuccuuuguucccggcu

SEQ ID NO: 1777975 - RNA, 23 nt, Human
gccucuaccugacacucccuugg

SEQ ID NO: 1777976 - RNA, 17 nt, Human
gccucccgaguagcugg

SEQ ID NO: 1777977 - RNA, 23 nt, Human
gccucccgaauagcugggacuac

SEQ ID NO: 1777978 - RNA, 15 nt, Human
gccucccgaguagcu

SEQ ID NO: 1777979 - RNA, 18 nt, Human
gccucggcuuuucucagc

SEQ ID NO: 1777980 - RNA, 19 nt, Human
gccucggcuuuucucagcu

SEQ ID NO: 1777981 - RNA, 20 nt, Human
gccucggcuuuucucagcug

SEQ ID NO: 1777982 - RNA, 21 nt, Human
gccucaucaucagagccuuuc

SEQ ID NO: 1777983 - RNA, 15 nt, Human
gccucagugccacua

SEQ ID NO: 1777984 - RNA, 21 nt, Human
gccucccgaauagcugggacu

SEQ ID NO: 1777985 - RNA, 14 nt, Human
gccuccccugccag

SEQ ID NO: 1777986 - RNA, 15 nt, Human
gccuccccugccagg

SEQ ID NO: 1777987 - RNA, 17 nt, Human
gccuccccugccagggc

SEQ ID NO: 1777988 - RNA, 18 nt, Human
gccuccccugccagggca

SEQ ID NO: 1777989 - RNA, 19 nt, Human
gccuccccucuccuuccug

SEQ ID NO: 1777990 - RNA, 21 nt, Human
gccuccccucuccuuccugug

SEQ ID NO: 1777991 - RNA, 18 nt, Human
gccuccccucuccuuccu

SEQ ID NO: 1777992 - RNA, 18 nt, Human
gccucagcgcggcccucc

SEQ ID NO: 1777993 - RNA, 23 nt, Human
gccucagccucccaaagugcugg

SEQ ID NO: 1777994 - RNA, 12 nt, Human
gccucagugcca

SEQ ID NO: 1777995 - RNA, 14 nt, Human
gccucagugccacu

SEQ ID NO: 1777996 - RNA, 16 nt, Human
gccucagcgcggcccu

SEQ ID NO: 1777997 - RNA, 12 nt, Human
gccucaggugcu

SEQ ID NO: 1777998 - RNA, 15 nt, Human
gccucaggugcuguc

SEQ ID NO: 1777999 - RNA, 17 nt, Human
gccucaggugcugucca

SEQ ID NO: 1778000 - RNA, 20 nt, Human
gccucaggugcuguccaugg

SEQ ID NO: 1778001 - RNA, 14 nt, Human
gccucaaccuccug

SEQ ID NO: 1778002 - RNA, 16 nt, Human
gccucaaccuccuggg

SEQ ID NO: 1778003 - RNA, 17 nt, Human
gccucaaccuccugggc

SEQ ID NO: 1778004 - RNA, 19 nt, Human
gccucaagugauucuccug

SEQ ID NO: 1778005 - RNA, 20 nt, Human
gccucaagugauucuccugc

SEQ ID NO: 1778006 - RNA, 21 nt, Human
gccucaagugauucuccugcc

SEQ ID NO: 1778007 - RNA, 19 nt, Human
gccuguagcccacucugcu

SEQ ID NO: 1778008 - RNA, 22 nt, Human
gccuguagcccacucugcucgc

SEQ ID NO: 1778009 - RNA, 13 nt, Human
gccuguagcccac

SEQ ID NO: 1778010 - RNA, 13 nt, Human
gccuggcagcuca

SEQ ID NO: 1778011 - RNA, 20 nt, Human
gccuggcagcucagcuuccc

SEQ ID NO: 1778012 - RNA, 16 nt, Human
gccuggccagccuaca

SEQ ID NO: 1778013 - RNA, 21 nt, Human
gccuggccagccuacaauggg

SEQ ID NO: 1778014 - RNA, 16 nt, Human
gccuggccagaugcac

SEQ ID NO: 1778015 - RNA, 14 nt, Human
gccuggccagaugc

SEQ ID NO: 1778016 - RNA, 15 nt, Human
gccuggccagaugca

SEQ ID NO: 1778017 - RNA, 22 nt, Human
gccugaagucacacagugaguc

SEQ ID NO: 1778018 - RNA, 17 nt, Human
gccugaaucaugagccu

SEQ ID NO: 1778019 - RNA, 18 nt, Human
gccugaaucaugagccug

SEQ ID NO: 1778020 - RNA, 19 nt, Human
gccugaaucaugagccugc

SEQ ID NO: 1778021 - RNA, 21 nt, Human
gccugaaucaugagccugcug

SEQ ID NO: 1778022 - RNA, 23 nt, Human
gccugaaucaugagccugcugga

SEQ ID NO: 1778023 - RNA, 22 nt, Human
gccugacauuuggaguguuccc

SEQ ID NO: 1778024 - RNA, 23 nt, Human
gccugcugguuuuaucugaguga

SEQ ID NO: 1778025 - RNA, 19 nt, Human
gccugcagaaguaagccuc

SEQ ID NO: 1778026 - RNA, 21 nt, Human
gccugcagaaguaagccucau

SEQ ID NO: 1778027 - RNA, 16 nt, Human
gccugcaaacgcugcc

SEQ ID NO: 1778028 - RNA, 17 nt, Human
gccugcaaacgcugccu

SEQ ID NO: 1778029 - RNA, 18 nt, Human
gccugcaaacgcugccug

SEQ ID NO: 1778030 - RNA, 13 nt, Human
gcugcaugauguu

SEQ ID NO: 1778031 - RNA, 19 nt, Human
gcugcaugauguuugccca

SEQ ID NO: 1778032 - RNA, 15 nt, Human
gcugcaugcccucuc

SEQ ID NO: 1778033 - RNA, 16 nt, Human
gcugcaugcccucuca

SEQ ID NO: 1778034 - RNA, 17 nt, Human
gcugcaugcccucucag

SEQ ID NO: 1778035 - RNA, 18 nt, Human
gcugcaugcccucucagg

SEQ ID NO: 1778036 - RNA, 19 nt, Human
gcugcaugcccucucaggc

SEQ ID NO: 1778037 - RNA, 20 nt, Human
gcugcaugcccucucaggcc

SEQ ID NO: 1778038 - RNA, 21 nt, Human
gcugcaugcccucucaggccg

SEQ ID NO: 1778039 - RNA, 22 nt, Human
gcugcaugcccucucaggccgg

SEQ ID NO: 1778040 - RNA, 18 nt, Human
gcucccuggcuucugugg

SEQ ID NO: 1778041 - RNA, 16 nt, Human
gcucuugugaggaaag

SEQ ID NO: 1778042 - RNA, 20 nt, Human
gcucuugugaggaaagucau

SEQ ID NO: 1778043 - RNA, 19 nt, Human
gcucuugugaggaaaguca

SEQ ID NO: 1778044 - RNA, 17 nt, Human
gcucuugugaggaaagu

SEQ ID NO: 1778045 - RNA, 21 nt, Human
gcucuuuaugaaugaaaaaac

SEQ ID NO: 1778046 - RNA, 21 nt, Human
gcugacagacacaggcccggc

SEQ ID NO: 1778047 - RNA, 14 nt, Human
gcucuucuccaggc

SEQ ID NO: 1778048 - RNA, 16 nt, Human
gcucuucuccaggcug

SEQ ID NO: 1778049 - RNA, 12 nt, Human
gcucuucuccag

SEQ ID NO: 1778050 - RNA, 22 nt, Human
gcucugcgugucaccugugcuu

SEQ ID NO: 1778051 - RNA, 14 nt, Human
gcucuggacaggca

SEQ ID NO: 1778052 - RNA, 15 nt, Human
gcucuggacaggcau

SEQ ID NO: 1778053 - RNA, 16 nt, Human
gcucuggacaggcaug

SEQ ID NO: 1778054 - RNA, 21 nt, Human
gcucuggacaggcauguucuc

SEQ ID NO: 1778055 - RNA, 22 nt, Human
gcucuggacaggcauguucucu

SEQ ID NO: 1778056 - RNA, 19 nt, Human
gcucugcuccucuccccag

SEQ ID NO: 1778057 - RNA, 21 nt, Human
gcucugcuccucuccccagca

SEQ ID NO: 1778058 - RNA, 13 nt, Human
gcucugcugacag

SEQ ID NO: 1778059 - RNA, 14 nt, Human
gcucugcugacaga

SEQ ID NO: 1778060 - RNA, 18 nt, Human
gcucugcugacagacaca

SEQ ID NO: 1778061 - RNA, 19 nt, Human
gcucugcugacagacacag

SEQ ID NO: 1778062 - RNA, 20 nt, Human
gcucugcugacagacacagg

SEQ ID NO: 1778063 - RNA, 23 nt, Human
gcucugcugacagacacaggccc

SEQ ID NO: 1778064 - RNA, 13 nt, Human
gcucugcuccucu

SEQ ID NO: 1778065 - RNA, 14 nt, Human
gcucugcuccucuc

SEQ ID NO: 1778066 - RNA, 17 nt, Human
gcucugcgugucaccug

SEQ ID NO: 1778067 - RNA, 12 nt, Human
gcucucugcccu

SEQ ID NO: 1778068 - RNA, 14 nt, Human
gcucucugcccugu

SEQ ID NO: 1778069 - RNA, 15 nt, Human
gcucucugcccugug

SEQ ID NO: 1778070 - RNA, 18 nt, Human
gcucucugcccuguguac

SEQ ID NO: 1778071 - RNA, 21 nt, Human
gcucccuguaaccucuucaga

SEQ ID NO: 1778072 - RNA, 21 nt, Human
gcuccuucuguccuacucugu

SEQ ID NO: 1778073 - RNA, 11 nt, Human
gcuccuugggc

SEQ ID NO: 1778074 - RNA, 19 nt, Human
gcuccuuuguguguguguc

SEQ ID NO: 1778075 - RNA, 20 nt, Human
gcuccuuuguguguguguca

SEQ ID NO: 1778076 - RNA, 22 nt, Human
gcuccuuugugugugugucagc

SEQ ID NO: 1778077 - RNA, 19 nt, Human
gcucuccgaccagacaccu

SEQ ID NO: 1778078 - RNA, 13 nt, Human
gcucuccgaccag

SEQ ID NO: 1778079 - RNA, 17 nt, Human
gcucuccgaccagacac

SEQ ID NO: 1778080 - RNA, 20 nt, Human
gcucaccagccccagugccc

SEQ ID NO: 1778081 - RNA, 23 nt, Human
gcucaccagccccagugcccaca

SEQ ID NO: 1778082 - RNA, 19 nt, Human
gcucaccagccccagugcc

SEQ ID NO: 1778083 - RNA, 22 nt, Human
gcucacccccuucuccauccac

SEQ ID NO: 1778084 - RNA, 18 nt, Human
gcucacccccuucuccau

SEQ ID NO: 1778085 - RNA, 20 nt, Human
gcucacccccuucuccaucc

SEQ ID NO: 1778086 - RNA, 16 nt, Human
gcucacccccuucucc

SEQ ID NO: 1778087 - RNA, 18 nt, Human
gcucauaacggaucagaa

SEQ ID NO: 1778088 - RNA, 19 nt, Human
gcucaggugucccugcacu

SEQ ID NO: 1778089 - RNA, 15 nt, Human
gcucagcggggacag

SEQ ID NO: 1778090 - RNA, 16 nt, Human
gcucagcggggacagc

SEQ ID NO: 1778091 - RNA, 20 nt, Human
gcucagcggggacagcuccu

SEQ ID NO: 1778092 - RNA, 21 nt, Human
gcucagcggggacagcuccuu

SEQ ID NO: 1778093 - RNA, 22 nt, Human
gcucagcggggacagcuccuuc

SEQ ID NO: 1778094 - RNA, 18 nt, Human
gcucaggugucccugcac

SEQ ID NO: 1778095 - RNA, 20 nt, Human
gcuccauuuuuagugaaaua

SEQ ID NO: 1778096 - RNA, 14 nt, Human
gcucccucccagga

SEQ ID NO: 1778097 - RNA, 15 nt, Human
gcucccucccaggac

SEQ ID NO: 1778098 - RNA, 18 nt, Human
gcucccucccaggacucu

SEQ ID NO: 1778099 - RNA, 19 nt, Human
gcucccucccaggacucug

SEQ ID NO: 1778100 - RNA, 21 nt, Human
gcucccucccaggacucugac

SEQ ID NO: 1778101 - RNA, 16 nt, Human
gcucccugacugggag

SEQ ID NO: 1778102 - RNA, 18 nt, Human
gcucccugacugggaguu

SEQ ID NO: 1778103 - RNA, 13 nt, Human
gcuccaggcuccu

SEQ ID NO: 1778104 - RNA, 16 nt, Human
gcuccaggcuccuuua

SEQ ID NO: 1778105 - RNA, 23 nt, Human
gcuccaggcuccuuuagcgccca

SEQ ID NO: 1778106 - RNA, 24 nt, Human
gcuccaggcuccuuuagcgcccag

SEQ ID NO: 1778107 - RNA, 14 nt, Human
gcuccaucaaugag

SEQ ID NO: 1778108 - RNA, 12 nt, Human
gcggggacagcu

SEQ ID NO: 1778109 - RNA, 13 nt, Human
gcggggacagcuc

SEQ ID NO: 1778110 - RNA, 16 nt, Human
gcgguccacccaggag

SEQ ID NO: 1778111 - RNA, 20 nt, Human
gcgguccacccaggagcccc

SEQ ID NO: 1778112 - RNA, 18 nt, Human
gcgguccacccaggagcc

SEQ ID NO: 1778113 - RNA, 19 nt, Human
gcgguccacccaggagccc

SEQ ID NO: 1778114 - RNA, 18 nt, Human
gcgugagccacugcaccg

SEQ ID NO: 1778115 - RNA, 23 nt, Human
gcgugagccacugcaccgggcca

SEQ ID NO: 1778116 - RNA, 14 nt, Human
gcuagcuagcucaa

SEQ ID NO: 1778117 - RNA, 17 nt, Human
gcuagcuagcucaacua

SEQ ID NO: 1778118 - RNA, 12 nt, Human
gcuagcucaacu

SEQ ID NO: 1778119 - RNA, 12 nt, Human
gcuagccagagg

SEQ ID NO: 1778120 - RNA, 13 nt, Human
gcuagccagagga

SEQ ID NO: 1778121 - RNA, 15 nt, Human
gcuagccagaggacu

SEQ ID NO: 1778122 - RNA, 18 nt, Human
gcuagccagaggacugug

SEQ ID NO: 1778123 - RNA, 12 nt, Human
gcuacgccucuu

SEQ ID NO: 1778124 - RNA, 15 nt, Human
gcuacgccucuucug

SEQ ID NO: 1778125 - RNA, 17 nt, Human
gcuacgccucuucuguc

SEQ ID NO: 1778126 - RNA, 12 nt, Human
gcuacgccugca

SEQ ID NO: 1778127 - RNA, 20 nt, Human
gcuaagccccagcaagcaau

SEQ ID NO: 1778128 - RNA, 18 nt, Human
gcuaagccccagcaagca

SEQ ID NO: 1778129 - RNA, 17 nt, Human
gcuaagccccagcaagc

SEQ ID NO: 1778130 - RNA, 14 nt, Human
guacuucuccaccc

SEQ ID NO: 1778131 - RNA, 15 nt, Human
guacuucuccacccu

SEQ ID NO: 1778132 - RNA, 17 nt, Human
guacgucugacaggcaa

SEQ ID NO: 1778133 - RNA, 14 nt, Human
guacgucugacagg

SEQ ID NO: 1778134 - RNA, 15 nt, Human
guacgucugacaggc

SEQ ID NO: 1778135 - RNA, 17 nt, Human
guaccugcccccaaucc

SEQ ID NO: 1778136 - RNA, 16 nt, Human
guacccacugcucugg

SEQ ID NO: 1778137 - RNA, 18 nt, Human
guacccggggcccagggc

SEQ ID NO: 1778138 - RNA, 17 nt, Human
guacccggggcccaggg

SEQ ID NO: 1778139 - RNA, 16 nt, Human
guacuuguggacacag

SEQ ID NO: 1778140 - RNA, 20 nt, Human
guacuuguggacacagcucu

SEQ ID NO: 1778141 - RNA, 22 nt, Human
guacuugccuuauuagaguguc

SEQ ID NO: 1778142 - RNA, 13 nt, Human
guacuucccgggc

SEQ ID NO: 1778143 - RNA, 20 nt, Human
guacuucccgggccagggcu

SEQ ID NO: 1778144 - RNA, 21 nt, Human
guacuucccgggccagggcug

SEQ ID NO: 1778145 - RNA, 22 nt, Human
guacuucccgggccagggcugc

SEQ ID NO: 1778146 - RNA, 20 nt, Human
guacuucuccacccugcucu

SEQ ID NO: 1778147 - RNA, 21 nt, Human
guacuucuccacccugcucuc

SEQ ID NO: 1778148 - RNA, 16 nt, Human
guacuucuccacccug

SEQ ID NO: 1778149 - RNA, 17 nt, Human
guacuucuccacccugc

SEQ ID NO: 1778150 - RNA, 18 nt, Human
guacuucuccacccugcu

SEQ ID NO: 1778151 - RNA, 19 nt, Human
guacuucuccacccugcuc

SEQ ID NO: 1778152 - RNA, 17 nt, Human
guagaaaggccuuuaaa

SEQ ID NO: 1778153 - RNA, 16 nt, Human
guagaaaggccuuuaa

SEQ ID NO: 1778154 - RNA, 14 nt, Human
guagaaaggccuuu

SEQ ID NO: 1778155 - RNA, 15 nt, Human
guagaaacugcaggg

SEQ ID NO: 1778156 - RNA, 19 nt, Human
guagaaacugcagggaaaa

SEQ ID NO: 1778157 - RNA, 21 nt, Human
guacuuguggacacagcucuu

SEQ ID NO: 1778158 - RNA, 17 nt, Human
guacuugucauauguag

SEQ ID NO: 1778159 - RNA, 19 nt, Human
guacuugucauauguagcc

SEQ ID NO: 1778160 - RNA, 23 nt, Human
guacuuuauuuucuauaauuuaa

SEQ ID NO: 1778161 - RNA, 15 nt, Human
guaauugaacuuauc

SEQ ID NO: 1778162 - RNA, 15 nt, Human
guaauuaguaacaug

SEQ ID NO: 1778163 - RNA, 23 nt, Human
guaauuaguaacauguguuaagu

SEQ ID NO: 1778164 - RNA, 20 nt, Human
guaaugaguuuaaaaaucaa

SEQ ID NO: 1778165 - RNA, 14 nt, Human
guaauggagcauca

SEQ ID NO: 1778166 - RNA, 14 nt, Human
guacagaauauuuc

SEQ ID NO: 1778167 - RNA, 17 nt, Human
guacagaauauuucuau

SEQ ID NO: 1778168 - RNA, 13 nt, Human
guacaggcuggcg

SEQ ID NO: 1778169 - RNA, 15 nt, Human
guacccacugcucug

SEQ ID NO: 1778170 - RNA, 13 nt, Human
guaacuguucuug

SEQ ID NO: 1778171 - RNA, 15 nt, Human
guaagcaucuacuuc

SEQ ID NO: 1778172 - RNA, 18 nt, Human
guaagcaucuacuucagg

SEQ ID NO: 1778173 - RNA, 13 nt, Human
guaagccucauca

SEQ ID NO: 1778174 - RNA, 20 nt, Human
guaaaaggccaaaccucugu

SEQ ID NO: 1778175 - RNA, 22 nt, Human
guaaaaggccaaaccucuguuc

SEQ ID NO: 1778176 - RNA, 18 nt, Human
guaaaguugguuggauaa

SEQ ID NO: 1778177 - RNA, 17 nt, Human
guaaauagguucuucuu

SEQ ID NO: 1778178 - RNA, 20 nt, Human
guaaauaguuacuccagugc

SEQ ID NO: 1778179 - RNA, 14 nt, Human
gguugggcuggugu

SEQ ID NO: 1778180 - RNA, 15 nt, Human
gguugggaugggaua

SEQ ID NO: 1778181 - RNA, 11 nt, Human
gguuggagccc

SEQ ID NO: 1778182 - RNA, 14 nt, Human
gguuggagcccagg

SEQ ID NO: 1778183 - RNA, 17 nt, Human
gguuggagcccagggca

SEQ ID NO: 1778184 - RNA, 21 nt, Human
gguuggagcccagggcaucuu

SEQ ID NO: 1778185 - RNA, 14 nt, Human
gguuggauggaugg

SEQ ID NO: 1778186 - RNA, 15 nt, Human
gguugaccccagagg

SEQ ID NO: 1778187 - RNA, 16 nt, Human
gguugaccccagagga

SEQ ID NO: 1778188 - RNA, 19 nt, Human
gguuguauuagauguucuc

SEQ ID NO: 1778189 - RNA, 18 nt, Human
gguuguauuagauguucu

SEQ ID NO: 1778190 - RNA, 20 nt, Human
gguucacugcaaccuccgcc

SEQ ID NO: 1778191 - RNA, 22 nt, Human
gguucaagcgauucuucugcuu

SEQ ID NO: 1778192 - RNA, 23 nt, Human
gguucaagcgauucuucugcuuc

SEQ ID NO: 1778193 - RNA, 12 nt, Human
gguucagcuugu

SEQ ID NO: 1778194 - RNA, 14 nt, Human
gguugaagcaccaa

SEQ ID NO: 1778195 - RNA, 21 nt, Human
gguucaagcgauucuucugcu

SEQ ID NO: 1778196 - RNA, 22 nt, Human
gguuuaauccccaguaaaauug

SEQ ID NO: 1778197 - RNA, 19 nt, Human
gguuuaauccccaguaaaa

SEQ ID NO: 1778198 - RNA, 23 nt, Human
gguuuugccauguuggccaggcu

SEQ ID NO: 1778199 - RNA, 16 nt, Human
gguuuuuaaaacccag

SEQ ID NO: 1778200 - RNA, 19 nt, Human
gguuuuguauucucugagc

SEQ ID NO: 1778201 - RNA, 17 nt, Human
gguuuuguauucucuga

SEQ ID NO: 1778202 - RNA, 18 nt, Human
gguuuuguauucucugag

SEQ ID NO: 1778203 - RNA, 17 nt, Human
gguuuuuacuuaacugu

SEQ ID NO: 1778204 - RNA, 19 nt, Human
gguuuuuacuuaacuguuu

SEQ ID NO: 1778205 - RNA, 16 nt, Human
ggucccggcucugugg

SEQ ID NO: 1778206 - RNA, 17 nt, Human
ggucccggcucuguggg

SEQ ID NO: 1778207 - RNA, 18 nt, Human
ggucccggcucugugggu

SEQ ID NO: 1778208 - RNA, 19 nt, Human
ggucccggcucugugggug

SEQ ID NO: 1778209 - RNA, 22 nt, Human
ggucucacuauguugcccaggc

SEQ ID NO: 1778210 - RNA, 12 nt, Human
ggucucacucug

SEQ ID NO: 1778211 - RNA, 16 nt, Human
ggucucacucugucgc

SEQ ID NO: 1778212 - RNA, 15 nt, Human
ggucugacccacugc

SEQ ID NO: 1778213 - RNA, 16 nt, Human
ggucugacccacugcu

SEQ ID NO: 1778214 - RNA, 19 nt, Human
ggucugaggaauccagacc

SEQ ID NO: 1778215 - RNA, 13 nt, Human
ggugaaggcuggc

SEQ ID NO: 1778216 - RNA, 21 nt, Human
ggugacagagugagacucugu

SEQ ID NO: 1778217 - RNA, 14 nt, Human
ggugaccucugccu

SEQ ID NO: 1778218 - RNA, 16 nt, Human
ggugaccucugccuga

SEQ ID NO: 1778219 - RNA, 21 nt, Human
ggugaccucugccugaaguca

SEQ ID NO: 1778220 - RNA, 22 nt, Human
ggugcccagcuauaccugugcc

SEQ ID NO: 1778221 - RNA, 22 nt, Human
ggugccccccaccccuggaaga

SEQ ID NO: 1778222 - RNA, 16 nt, Human
gguggcagugggagcu

SEQ ID NO: 1778223 - RNA, 15 nt, Human
gguggcagcugcggu

SEQ ID NO: 1778224 - RNA, 23 nt, Human
gguggcagcugcgguccacccag

SEQ ID NO: 1778225 - RNA, 11 nt, Human
gguggcagcug

SEQ ID NO: 1778226 - RNA, 12 nt, Human
gguggcagcugc

SEQ ID NO: 1778227 - RNA, 13 nt, Human
gguggcagcugcg

SEQ ID NO: 1778228 - RNA, 22 nt, Human
ggucccacucaguccauagcag

SEQ ID NO: 1778229 - RNA, 12 nt, Human
ggucccacucag

SEQ ID NO: 1778230 - RNA, 14 nt, Human
ggucccacucaguc

SEQ ID NO: 1778231 - RNA, 23 nt, Human
ggucccaguuuuguugccccaga

SEQ ID NO: 1778232 - RNA, 12 nt, Human
ggucagagccug

SEQ ID NO: 1778233 - RNA, 13 nt, Human
ggucagagccugc

SEQ ID NO: 1778234 - RNA, 14 nt, Human
ggucagagccugca

SEQ ID NO: 1778235 - RNA, 15 nt, Human
ggucagagccugcag

SEQ ID NO: 1778236 - RNA, 16 nt, Human
ggucagagccugcagu

SEQ ID NO: 1778237 - RNA, 22 nt, Human
ggucacaaauccuaaaagaagc

SEQ ID NO: 1778238 - RNA, 16 nt, Human
ggguuggccccugccc

SEQ ID NO: 1778239 - RNA, 13 nt, Human
ggguucugccucu

SEQ ID NO: 1778240 - RNA, 19 nt, Human
ggguuggccccugcccggc

SEQ ID NO: 1778241 - RNA, 17 nt, Human
gguacccacugcucugg

SEQ ID NO: 1778242 - RNA, 17 nt, Human
gguacccggggcccagg

SEQ ID NO: 1778243 - RNA, 19 nt, Human
gguacccggggcccagggc

SEQ ID NO: 1778244 - RNA, 15 nt, Human
ggguugggcuggugu

SEQ ID NO: 1778245 - RNA, 19 nt, Human
ggguuuaauccccaguaaa

SEQ ID NO: 1778246 - RNA, 23 nt, Human
ggguuuaauccccaguaaaauug

SEQ ID NO: 1778247 - RNA, 22 nt, Human
ggguuuaauccccaguaaaauu

SEQ ID NO: 1778248 - RNA, 22 nt, Human
gguacuuguggacacagcucuu

SEQ ID NO: 1778249 - RNA, 21 nt, Human
gguacuuguggacacagcucu

SEQ ID NO: 1778250 - RNA, 23 nt, Human
gguacuauaaaagcuuucugcca

SEQ ID NO: 1778251 - RNA, 14 nt, Human
gggcuucaguggca

SEQ ID NO: 1778252 - RNA, 16 nt, Human
gggcugucggcgcugc

SEQ ID NO: 1778253 - RNA, 23 nt, Human
gggcugugcuugaaggcccugcu

SEQ ID NO: 1778254 - RNA, 14 nt, Human
gggcugagggagcc

SEQ ID NO: 1778255 - RNA, 12 nt, Human
gggcugagggag

SEQ ID NO: 1778256 - RNA, 13 nt, Human
gggcugagggagc

SEQ ID NO: 1778257 - RNA, 13 nt, Human
gggcugagggccu

SEQ ID NO: 1778258 - RNA, 14 nt, Human
gggcugagggccug

SEQ ID NO: 1778259 - RNA, 16 nt, Human
gggcugagggccugcu

SEQ ID NO: 1778260 - RNA, 17 nt, Human
gggcugagggccugcug

SEQ ID NO: 1778261 - RNA, 18 nt, Human
gggcugagggccugcugg

SEQ ID NO: 1778262 - RNA, 14 nt, Human
gggcucccugacug

SEQ ID NO: 1778263 - RNA, 18 nt, Human
gggcucccugacugggag

SEQ ID NO: 1778264 - RNA, 21 nt, Human
gggcucccuguaaccucuuca

SEQ ID NO: 1778265 - RNA, 23 nt, Human
gggccuuaucgggcuccagccau

SEQ ID NO: 1778266 - RNA, 16 nt, Human
gggccuggcagcucag

SEQ ID NO: 1778267 - RNA, 13 nt, Human
ggcucccagccuc

SEQ ID NO: 1778268 - RNA, 15 nt, Human
ggcucccagccucag

SEQ ID NO: 1778269 - RNA, 16 nt, Human
ggcucccagccucagc

SEQ ID NO: 1778270 - RNA, 17 nt, Human
ggcucccagccucagcg

SEQ ID NO: 1778271 - RNA, 23 nt, Human
gggcccggcccgcgccacaggac

SEQ ID NO: 1778272 - RNA, 16 nt, Human
gggcccucucugcucu

SEQ ID NO: 1778273 - RNA, 14 nt, Human
gggccugcuggagg

SEQ ID NO: 1778274 - RNA, 15 nt, Human
gggccugcuggaggc

SEQ ID NO: 1778275 - RNA, 21 nt, Human
gggccugcuggaggccucagg

SEQ ID NO: 1778276 - RNA, 12 nt, Human
ggggcagggcug

SEQ ID NO: 1778277 - RNA, 21 nt, Human
gggggaaacagguugggaugg

SEQ ID NO: 1778278 - RNA, 18 nt, Human
ggguacccacugcucugg

SEQ ID NO: 1778279 - RNA, 13 nt, Human
ggguacccacugc

SEQ ID NO: 1778280 - RNA, 15 nt, Human
ggguacccacugcuc

SEQ ID NO: 1778281 - RNA, 19 nt, Human
ggguacuuguggacacagc

SEQ ID NO: 1778282 - RNA, 22 nt, Human
ggguacuuguggacacagcucu

SEQ ID NO: 1778283 - RNA, 23 nt, Human
ggguacuuguggacacagcucuu

SEQ ID NO: 1778284 - RNA, 19 nt, Human
gggcuucaguggcagcugc

SEQ ID NO: 1778285 - RNA, 20 nt, Human
gggcuucaguggcagcugcu

SEQ ID NO: 1778286 - RNA, 15 nt, Human
gggcuucaguggcag

SEQ ID NO: 1778287 - RNA, 16 nt, Human
gggcuucaguggcagc

SEQ ID NO: 1778288 - RNA, 17 nt, Human
gggcuucaguggcagcu

SEQ ID NO: 1778289 - RNA, 18 nt, Human
gggcuucaguggcagcug

SEQ ID NO: 1778290 - RNA, 14 nt, Human
ggggaguagagaag

SEQ ID NO: 1778291 - RNA, 17 nt, Human
ggggagacugggcugag

SEQ ID NO: 1778292 - RNA, 18 nt, Human
ggggagacugggcugagg

SEQ ID NO: 1778293 - RNA, 18 nt, Human
ggggcagcacccuauaaa

SEQ ID NO: 1778294 - RNA, 20 nt, Human
ggggcagaucuuggacucau

SEQ ID NO: 1778295 - RNA, 15 nt, Human
gucauaccaaugaaa

SEQ ID NO: 1778296 - RNA, 16 nt, Human
gucauaccaaugaaaa

SEQ ID NO: 1778297 - RNA, 14 nt, Human
gucagcauuugauc

SEQ ID NO: 1778298 - RNA, 13 nt, Human
gucagcccuaggg

SEQ ID NO: 1778299 - RNA, 22 nt, Human
gucagcccuaggguggagagcc

SEQ ID NO: 1778300 - RNA, 22 nt, Human
gucaccucuuccgacucuuucu

SEQ ID NO: 1778301 - RNA, 13 nt, Human
gucaccugugcuu

SEQ ID NO: 1778302 - RNA, 21 nt, Human
gucaucccaucauuuuccaua

SEQ ID NO: 1778303 - RNA, 14 nt, Human
gucauaucaaauaa

SEQ ID NO: 1778304 - RNA, 12 nt, Human
gucauagaaauu

SEQ ID NO: 1778305 - RNA, 19 nt, Human
gucauagauguuuccuugc

SEQ ID NO: 1778306 - RNA, 22 nt, Human
gucauaucaaauaaagagagaa

SEQ ID NO: 1778307 - RNA, 17 nt, Human
gucaucuguuagggccu

SEQ ID NO: 1778308 - RNA, 14 nt, Human
guccacccaggagc

SEQ ID NO: 1778309 - RNA, 15 nt, Human
guccacccaggagcc

SEQ ID NO: 1778310 - RNA, 16 nt, Human
guccacccaggagccc

SEQ ID NO: 1778311 - RNA, 11 nt, Human
guccagaagga

SEQ ID NO: 1778312 - RNA, 14 nt, Human
guccagaaggagac

SEQ ID NO: 1778313 - RNA, 16 nt, Human
guccagaaggagacag

SEQ ID NO: 1778314 - RNA, 17 nt, Human
guccagaaggagacagg

SEQ ID NO: 1778315 - RNA, 19 nt, Human
guccagaaggagacaggca

SEQ ID NO: 1778316 - RNA, 20 nt, Human
guccagaaggagacaggcag

SEQ ID NO: 1778317 - RNA, 14 nt, Human
gucccacucagucc

SEQ ID NO: 1778318 - RNA, 15 nt, Human
gucccacucagucca

SEQ ID NO: 1778319 - RNA, 15 nt, Human
guccaggcacugaga

SEQ ID NO: 1778320 - RNA, 13 nt, Human
guauuacuucugc

SEQ ID NO: 1778321 - RNA, 14 nt, Human
guauuacuucugcu

SEQ ID NO: 1778322 - RNA, 15 nt, Human
guauuacuucugcua

SEQ ID NO: 1778323 - RNA, 14 nt, Human
guauuauuuuccaa

SEQ ID NO: 1778324 - RNA, 22 nt, Human
guauuagauguucucuaucauu

SEQ ID NO: 1778325 - RNA, 21 nt, Human
guauuagauguucucuaucau

SEQ ID NO: 1778326 - RNA, 18 nt, Human
guauuagauguucucuau

SEQ ID NO: 1778327 - RNA, 17 nt, Human
guauuagauguucucua

SEQ ID NO: 1778328 - RNA, 15 nt, Human
guauuagauguucuc

SEQ ID NO: 1778329 - RNA, 14 nt, Human
guauuagauguucu

SEQ ID NO: 1778330 - RNA, 13 nt, Human
guauuagauguuc

SEQ ID NO: 1778331 - RNA, 12 nt, Human
guauuagauguu

SEQ ID NO: 1778332 - RNA, 23 nt, Human
guauuuauucaauaaaguauuua

SEQ ID NO: 1778333 - RNA, 22 nt, Human
guauuuauucaauaaaguauuu

SEQ ID NO: 1778334 - RNA, 20 nt, Human
guauuuauucaauaaaguau

SEQ ID NO: 1778335 - RNA, 19 nt, Human
guauuuauucaauaaagua

SEQ ID NO: 1778336 - RNA, 17 nt, Human
guauuuauucaauaaag

SEQ ID NO: 1778337 - RNA, 16 nt, Human
guauuuauucaauaaa

SEQ ID NO: 1778338 - RNA, 14 nt, Human
guauuuauucaaua

SEQ ID NO: 1778339 - RNA, 13 nt, Human
guauuuauucaau

SEQ ID NO: 1778340 - RNA, 13 nt, Human
guauuucaaauug

SEQ ID NO: 1778341 - RNA, 20 nt, Human
gucaccugaagacucauucu

SEQ ID NO: 1778342 - RNA, 18 nt, Human
gucaagagggucugagga

SEQ ID NO: 1778343 - RNA, 19 nt, Human
gucaagagggucugaggaa

SEQ ID NO: 1778344 - RNA, 17 nt, Human
gucaagugcguccacga

SEQ ID NO: 1778345 - RNA, 12 nt, Human
gucaagcugcuc

SEQ ID NO: 1778346 - RNA, 13 nt, Human
gucaagcugcucu

SEQ ID NO: 1778347 - RNA, 14 nt, Human
gucaagcugcucug

SEQ ID NO: 1778348 - RNA, 17 nt, Human
gucaagcugcucugagc

SEQ ID NO: 1778349 - RNA, 18 nt, Human
gucaagcugcucugagcc

SEQ ID NO: 1778350 - RNA, 19 nt, Human
gucaagcugcucugagcca

SEQ ID NO: 1778351 - RNA, 20 nt, Human
gucaagcugcucugagccac

SEQ ID NO: 1778352 - RNA, 22 nt, Human
gucaagcugcucugagccacag

SEQ ID NO: 1778353 - RNA, 23 nt, Human
gucaagcugcucugagccacagu

SEQ ID NO: 1778354 - RNA, 14 nt, Human
guccuccaggagcu

SEQ ID NO: 1778355 - RNA, 15 nt, Human
guccuccaggagcuu

SEQ ID NO: 1778356 - RNA, 15 nt, Human
guccucccagcuccu

SEQ ID NO: 1778357 - RNA, 14 nt, Human
guccuccccucucu

SEQ ID NO: 1778358 - RNA, 17 nt, Human
guccuccccucucuugu

SEQ ID NO: 1778359 - RNA, 15 nt, Human
guccugggagugagc

SEQ ID NO: 1778360 - RNA, 16 nt, Human
guccugggagugagcu

SEQ ID NO: 1778361 - RNA, 14 nt, Human
guccucccucaccc

SEQ ID NO: 1778362 - RNA, 20 nt, Human
guccucccucacccccuccu

SEQ ID NO: 1778363 - RNA, 12 nt, Human
guccucccugac

SEQ ID NO: 1778364 - RNA, 15 nt, Human
guccucccugacuuu

SEQ ID NO: 1778365 - RNA, 19 nt, Human
guccugggagugagcuggu

SEQ ID NO: 1778366 - RNA, 17 nt, Human
guccugggagugagcug

SEQ ID NO: 1778367 - RNA, 18 nt, Human
guccugggagugagcugg

SEQ ID NO: 1778368 - RNA, 19 nt, Human
guccuagaggcccuuugcu

SEQ ID NO: 1778369 - RNA, 20 nt, Human
guccuagaggcccuuugcug

SEQ ID NO: 1778370 - RNA, 15 nt, Human
guccuacucuguguc

SEQ ID NO: 1778371 - RNA, 23 nt, Human
guccuacucugugucaggugggg

SEQ ID NO: 1778372 - RNA, 13 nt, Human
guccuacucugug

SEQ ID NO: 1778373 - RNA, 16 nt, Human
gucccauagucccugc

SEQ ID NO: 1778374 - RNA, 21 nt, Human
gucccugcgccuuuccuuuuc

SEQ ID NO: 1778375 - RNA, 15 nt, Human
gucccaguuuuguug

SEQ ID NO: 1778376 - RNA, 23 nt, Human
gucccaguuuuguugccccagaa

SEQ ID NO: 1778377 - RNA, 22 nt, Human
guccuagaggcccuuugcuguc

SEQ ID NO: 1778378 - RNA, 14 nt, Human
guccuaggccucaa

SEQ ID NO: 1778379 - RNA, 13 nt, Human
gucugacccacug

SEQ ID NO: 1778380 - RNA, 14 nt, Human
gucugacccacugc

SEQ ID NO: 1778381 - RNA, 15 nt, Human
gucugacccacugcu

SEQ ID NO: 1778382 - RNA, 18 nt, Human
gucugaggaauccagacc

SEQ ID NO: 1778383 - RNA, 19 nt, Human
gucugaggaauccagaccc

SEQ ID NO: 1778384 - RNA, 20 nt, Human
gucugauucccaagcucugc

SEQ ID NO: 1778385 - RNA, 21 nt, Human
gucugauucccaagcucugcu

SEQ ID NO: 1778386 - RNA, 17 nt, Human
gucugauucccaagcuc

SEQ ID NO: 1778387 - RNA, 18 nt, Human
gucugauucccaagcucu

SEQ ID NO: 1778388 - RNA, 19 nt, Human
gucugauucccaagcucug

SEQ ID NO: 1778389 - RNA, 21 nt, Human
gucugaggaauccagacccgg

SEQ ID NO: 1778390 - RNA, 20 nt, Human
gucucacuauguugcccagg

SEQ ID NO: 1778391 - RNA, 21 nt, Human
gucucacuauguugcccaggc

SEQ ID NO: 1778392 - RNA, 13 nt, Human
gucucacuguugc

SEQ ID NO: 1778393 - RNA, 23 nt, Human
gucucacuauguugcccaggcag

SEQ ID NO: 1778394 - RNA, 16 nt, Human
gucucacuguugccca

SEQ ID NO: 1778395 - RNA, 17 nt, Human
gucucacuguugcccag

SEQ ID NO: 1778396 - RNA, 18 nt, Human
gucucacuguugcccagg

SEQ ID NO: 1778397 - RNA, 19 nt, Human
gucucacuguugcccaggc

SEQ ID NO: 1778398 - RNA, 20 nt, Human
gucucacuguugcccaggcu

SEQ ID NO: 1778399 - RNA, 21 nt, Human
gucucacuguugcccaggcug

SEQ ID NO: 1778400 - RNA, 22 nt, Human
gucucacuguugcccaggcugg

SEQ ID NO: 1778401 - RNA, 23 nt, Human
gucucacuguugcccaggcuggc

SEQ ID NO: 1778402 - RNA, 13 nt, Human
gucuaaaacaaua

SEQ ID NO: 1778403 - RNA, 14 nt, Human
gucuaaaacaauaa

SEQ ID NO: 1778404 - RNA, 14 nt, Human
gugauucuccugcc

SEQ ID NO: 1778405 - RNA, 16 nt, Human
gugauucuccugccuc

SEQ ID NO: 1778406 - RNA, 17 nt, Human
gugauucuccugccuca

SEQ ID NO: 1778407 - RNA, 18 nt, Human
gugauucuccugccucag

SEQ ID NO: 1778408 - RNA, 19 nt, Human
gugauucuccugccucagc

SEQ ID NO: 1778409 - RNA, 20 nt, Human
gugauucuccugccucagcc

SEQ ID NO: 1778410 - RNA, 22 nt, Human
gugauucuccugccucagccuc

SEQ ID NO: 1778411 - RNA, 23 nt, Human
gugauucuccugccucagccucc

SEQ ID NO: 1778412 - RNA, 23 nt, Human
gugauccucccaccucagccucc

SEQ ID NO: 1778413 - RNA, 20 nt, Human
gugauccucccaccucagcc

SEQ ID NO: 1778414 - RNA, 22 nt, Human
gugauccucccaccucagccuc

SEQ ID NO: 1778415 - RNA, 22 nt, Human
gugauccacccaccucagccuc

SEQ ID NO: 1778416 - RNA, 14 nt, Human
gugauccucccacc

SEQ ID NO: 1778417 - RNA, 15 nt, Human
gugauccucccaccu

SEQ ID NO: 1778418 - RNA, 18 nt, Human
gugauccucccaccucag

SEQ ID NO: 1778419 - RNA, 15 nt, Human
gugauccacccaccu

SEQ ID NO: 1778420 - RNA, 18 nt, Human
gugauccacccaccucag

SEQ ID NO: 1778421 - RNA, 20 nt, Human
gugauccacccaccucagcc

SEQ ID NO: 1778422 - RNA, 20 nt, Human
gugcccacaggaucagucug

SEQ ID NO: 1778423 - RNA, 20 nt, Human
gugcccagcuauaccugugc

SEQ ID NO: 1778424 - RNA, 21 nt, Human
gugcccagcuauaccugugcc

SEQ ID NO: 1778425 - RNA, 22 nt, Human
gugcccagcuauaccugugccu

SEQ ID NO: 1778426 - RNA, 21 nt, Human
gugccccccaccccuggaaga

SEQ ID NO: 1778427 - RNA, 23 nt, Human
gugcccagcuauaccugugccuc

SEQ ID NO: 1778428 - RNA, 20 nt, Human
gugccagguuuuuggucuga

SEQ ID NO: 1778429 - RNA, 22 nt, Human
gugccagguuuuuggucugacc

SEQ ID NO: 1778430 - RNA, 16 nt, Human
gugcaguccugaucag

SEQ ID NO: 1778431 - RNA, 15 nt, Human
gugcagguggggaga

SEQ ID NO: 1778432 - RNA, 14 nt, Human
gugaaaagcuccau

SEQ ID NO: 1778433 - RNA, 15 nt, Human
gugaaaaugguccag

SEQ ID NO: 1778434 - RNA, 17 nt, Human
gugaaaaugguccagga

SEQ ID NO: 1778435 - RNA, 24 nt, Human
gugaaacccagucacugugagcuc

SEQ ID NO: 1778436 - RNA, 19 nt, Human
gugaaagaaaauaacaaua

SEQ ID NO: 1778437 - RNA, 14 nt, Human
gugacucuccaggg

SEQ ID NO: 1778438 - RNA, 14 nt, Human
gugacucugaagcu

SEQ ID NO: 1778439 - RNA, 16 nt, Human
gugacaacacuugugu

SEQ ID NO: 1778440 - RNA, 13 nt, Human
gugaauuuuugca

SEQ ID NO: 1778441 - RNA, 14 nt, Human
gugaauuuuugcaa

SEQ ID NO: 1778442 - RNA, 15 nt, Human
gugaauuuuugcaau

SEQ ID NO: 1778443 - RNA, 16 nt, Human
gugaauuuuugcaaua

SEQ ID NO: 1778444 - RNA, 17 nt, Human
gugaauuuuugcaauaa

SEQ ID NO: 1778445 - RNA, 21 nt, Human
gugaauuuuugcaauaaugca

SEQ ID NO: 1778446 - RNA, 23 nt, Human
gugaauuuuugcaauaaugcagu

SEQ ID NO: 1778447 - RNA, 13 nt, Human
gugagccacugca

SEQ ID NO: 1778448 - RNA, 15 nt, Human
gugaggaaagucauu

SEQ ID NO: 1778449 - RNA, 22 nt, Human
gugagcucccaggugcagccag

SEQ ID NO: 1778450 - RNA, 14 nt, Human
gugagccacugcac

SEQ ID NO: 1778451 - RNA, 14 nt, Human
gugagcuacaaaug

SEQ ID NO: 1778452 - RNA, 19 nt, Human
guggcagugggagcugccu

SEQ ID NO: 1778453 - RNA, 21 nt, Human
guggcagugggagcugccugu

SEQ ID NO: 1778454 - RNA, 15 nt, Human
guggcagugggagcu

SEQ ID NO: 1778455 - RNA, 16 nt, Human
guggcagugggagcug

SEQ ID NO: 1778456 - RNA, 17 nt, Human
guggcagugggagcugc

SEQ ID NO: 1778457 - RNA, 20 nt, Human
guggaugccugguggcagcu

SEQ ID NO: 1778458 - RNA, 21 nt, Human
guggcagcugcgguccaccca

SEQ ID NO: 1778459 - RNA, 22 nt, Human
guggcagcugcgguccacccag

SEQ ID NO: 1778460 - RNA, 23 nt, Human
guggcagcugcgguccacccagg

SEQ ID NO: 1778461 - RNA, 12 nt, Human
guggcagcugcu

SEQ ID NO: 1778462 - RNA, 13 nt, Human
guggcagcugcuu

SEQ ID NO: 1778463 - RNA, 19 nt, Human
guggcagcugcuuuugucu

SEQ ID NO: 1778464 - RNA, 18 nt, Human
guggaacugcguuaugaa

SEQ ID NO: 1778465 - RNA, 16 nt, Human
guggaugccugguggc

SEQ ID NO: 1778466 - RNA, 18 nt, Human
guggaugccugguggcag

SEQ ID NO: 1778467 - RNA, 18 nt, Human
guggaugccgauuucugu

SEQ ID NO: 1778468 - RNA, 20 nt, Human
guggaugccgauuucuguaa

SEQ ID NO: 1778469 - RNA, 12 nt, Human
guggagggccac

SEQ ID NO: 1778470 - RNA, 18 nt, Human
guggaggugggcugggcc

SEQ ID NO: 1778471 - RNA, 14 nt, Human
gugcugcagcuccc

SEQ ID NO: 1778472 - RNA, 18 nt, Human
gugcugcagcucccuggc

SEQ ID NO: 1778473 - RNA, 19 nt, Human
gugcugcagcucccuggcu

SEQ ID NO: 1778474 - RNA, 15 nt, Human
gugcugccauccagg

SEQ ID NO: 1778475 - RNA, 18 nt, Human
gugcugccauccagguuc

SEQ ID NO: 1778476 - RNA, 19 nt, Human
gugcugccauccagguuca

SEQ ID NO: 1778477 - RNA, 17 nt, Human
gugcucuggacaggcau

SEQ ID NO: 1778478 - RNA, 18 nt, Human
gugcucuggacaggcaug

SEQ ID NO: 1778479 - RNA, 15 nt, Human
gugcucuggacaggc

SEQ ID NO: 1778480 - RNA, 16 nt, Human
gugcucuggacaggca

SEQ ID NO: 1778481 - RNA, 19 nt, Human
gugcuuuccuuuuuuaaaa

SEQ ID NO: 1778482 - RNA, 20 nt, Human
gugcuuuccuuuuuuaaaaa

SEQ ID NO: 1778483 - RNA, 14 nt, Human
gugcuucuuucuuu

SEQ ID NO: 1778484 - RNA, 13 nt, Human
gugcuugaaggcc

SEQ ID NO: 1778485 - RNA, 14 nt, Human
gugcuugaaggccc

SEQ ID NO: 1778486 - RNA, 15 nt, Human
gugcuugaaggcccu

SEQ ID NO: 1778487 - RNA, 18 nt, Human
gugcuugaaggcccugcu

SEQ ID NO: 1778488 - RNA, 19 nt, Human
gugcuugaaggcccugcug

SEQ ID NO: 1778489 - RNA, 20 nt, Human
gugcuugaaggcccugcuga

SEQ ID NO: 1778490 - RNA, 21 nt, Human
gugcuugaaggcccugcugag

SEQ ID NO: 1778491 - RNA, 14 nt, Human
gugcuucgggcccu

SEQ ID NO: 1778492 - RNA, 13 nt, Human
gugcuuccuugua

SEQ ID NO: 1778493 - RNA, 13 nt, Human
gugcuucuuucuu

SEQ ID NO: 1778494 - RNA, 17 nt, Human
gugcuucgggcccuucc

SEQ ID NO: 1778495 - RNA, 22 nt, Human
gugcugccauccagguucagcu

SEQ ID NO: 1778496 - RNA, 19 nt, Human
uauauguuuuaagaggcag

SEQ ID NO: 1778497 - RNA, 23 nt, Human
uauccucuuuagaguuagacugu

SEQ ID NO: 1778498 - RNA, 22 nt, Human
uauccucuuuagaguuagacug

SEQ ID NO: 1778499 - RNA, 17 nt, Human
uauccucuuuagaguua

SEQ ID NO: 1778500 - RNA, 16 nt, Human
uauccucuuuagaguu

SEQ ID NO: 1778501 - RNA, 14 nt, Human
uauccucuuuagag

SEQ ID NO: 1778502 - RNA, 24 nt, Human
uauccuuuccucauuaaauuaccu

SEQ ID NO: 1778503 - RNA, 19 nt, Human
uauccuugggggcucccag

SEQ ID NO: 1778504 - RNA, 23 nt, Human
uauccuugggggcucccagggca

SEQ ID NO: 1778505 - RNA, 21 nt, Human
uaucuaauauguaacaagcca

SEQ ID NO: 1778506 - RNA, 13 nt, Human
uaucugccuuuau

SEQ ID NO: 1778507 - RNA, 20 nt, Human
uaucugccuuuauuguguuu

SEQ ID NO: 1778508 - RNA, 18 nt, Human
uaucugccuuuauugugu

SEQ ID NO: 1778509 - RNA, 14 nt, Human
uaucugccuuuauu

SEQ ID NO: 1778510 - RNA, 16 nt, Human
uaugaaugauuugcau

SEQ ID NO: 1778511 - RNA, 23 nt, Human
uaugaaugauuugcauaugaaag

SEQ ID NO: 1778512 - RNA, 13 nt, Human
uaugaauuguaca

SEQ ID NO: 1778513 - RNA, 14 nt, Human
uaugaauuguacag

SEQ ID NO: 1778514 - RNA, 15 nt, Human
uaugaauuguacaga

SEQ ID NO: 1778515 - RNA, 22 nt, Human
uaugaauuguacagaauauuuc

SEQ ID NO: 1778516 - RNA, 20 nt, Human
uaucugucauuugagcaggg

SEQ ID NO: 1778517 - RNA, 21 nt, Human
uaucugucauuugagcagggc

SEQ ID NO: 1778518 - RNA, 23 nt, Human
uaucugucauuugagcagggcuc

SEQ ID NO: 1778519 - RNA, 14 nt, Human
uaucugugcucagg

SEQ ID NO: 1778520 - RNA, 22 nt, Human
uaucugugcucaggacucagaa

SEQ ID NO: 1778521 - RNA, 22 nt, Human
uauggaauuacauguaaaacau

SEQ ID NO: 1778522 - RNA, 14 nt, Human
uauggaauuacaug

SEQ ID NO: 1778523 - RNA, 18 nt, Human
uauggaauuacauguaaa

SEQ ID NO: 1778524 - RNA, 13 nt, Human
uaugcuucuuuca

SEQ ID NO: 1778525 - RNA, 21 nt, Human
uaugcuuuccaaaccuuaucu

SEQ ID NO: 1778526 - RNA, 13 nt, Human
uaugcuuuccuuc

SEQ ID NO: 1778527 - RNA, 14 nt, Human
uaugcuuuccuucu

SEQ ID NO: 1778528 - RNA, 21 nt, Human
uaugcuuuccuucuuugggau

SEQ ID NO: 1778529 - RNA, 19 nt, Human
uaugcacuuauaauuuucc

SEQ ID NO: 1778530 - RNA, 22 nt, Human
uaugcacuuauaauuuuccuaa

SEQ ID NO: 1778531 - RNA, 20 nt, Human
uaugcacuuauaauuuuccu

SEQ ID NO: 1778532 - RNA, 21 nt, Human
uaugacauuggauagaacaug

SEQ ID NO: 1778533 - RNA, 20 nt, Human
uauaauugggucauagaaau

SEQ ID NO: 1778534 - RNA, 19 nt, Human
uauaccugugccucggcuu

SEQ ID NO: 1778535 - RNA, 13 nt, Human
uauaaauucacuu

SEQ ID NO: 1778536 - RNA, 20 nt, Human
uauacgcagcgugcuuuaaa

SEQ ID NO: 1778537 - RNA, 14 nt, Human
uauaguguauagaa

SEQ ID NO: 1778538 - RNA, 17 nt, Human
uauaauguuuuuaauau

SEQ ID NO: 1778539 - RNA, 14 nt, Human
uauaugugugccua

SEQ ID NO: 1778540 - RNA, 23 nt, Human
uaggugacagagugagacucugu

SEQ ID NO: 1778541 - RNA, 13 nt, Human
uagugcuaagugu

SEQ ID NO: 1778542 - RNA, 15 nt, Human
uaggccuggccagau

SEQ ID NO: 1778543 - RNA, 18 nt, Human
uaggccuggccagaugca

SEQ ID NO: 1778544 - RNA, 14 nt, Human
uaggacccaagcag

SEQ ID NO: 1778545 - RNA, 16 nt, Human
uaggacccaagcagag

SEQ ID NO: 1778546 - RNA, 22 nt, Human
uaggaauaucaauauaauguuu

SEQ ID NO: 1778547 - RNA, 14 nt, Human
uagguaggguuuaa

SEQ ID NO: 1778548 - RNA, 16 nt, Human
uaggucagugcaaaua

SEQ ID NO: 1778549 - RNA, 21 nt, Human
ucaagcgauucuucugcuuca

SEQ ID NO: 1778550 - RNA, 18 nt, Human
ucaagcgauucuucugcu

SEQ ID NO: 1778551 - RNA, 19 nt, Human
ucaagcgauucuucugcuu

SEQ ID NO: 1778552 - RNA, 13 nt, Human
ucaaccugccuga

SEQ ID NO: 1778553 - RNA, 17 nt, Human
ucaaccugggcaaagcc

SEQ ID NO: 1778554 - RNA, 14 nt, Human
ucaacuccucccau

SEQ ID NO: 1778555 - RNA, 16 nt, Human
ucaaccuccugggcua

SEQ ID NO: 1778556 - RNA, 20 nt, Human
ucaaccccuucgcuccugug

SEQ ID NO: 1778557 - RNA, 15 nt, Human
ucaaccuccugggcu

SEQ ID NO: 1778558 - RNA, 18 nt, Human
ucaaccccuucgcuccug

SEQ ID NO: 1778559 - RNA, 19 nt, Human
ucaaccccuucgcuccugu

SEQ ID NO: 1778560 - RNA, 21 nt, Human
uauuugcauaacaauuccucu

SEQ ID NO: 1778561 - RNA, 22 nt, Human
uauuugcauaacaauuccucua

SEQ ID NO: 1778562 - RNA, 15 nt, Human
ucacacacuuuggcu

SEQ ID NO: 1778563 - RNA, 19 nt, Human
ucaauuccguagccagcug

SEQ ID NO: 1778564 - RNA, 22 nt, Human
ucaauuccguagccagcugcuc

SEQ ID NO: 1778565 - RNA, 13 nt, Human
ucaccaagcccag

SEQ ID NO: 1778566 - RNA, 14 nt, Human
ucacauuuauucug

SEQ ID NO: 1778567 - RNA, 12 nt, Human
ucacauuuaaau

SEQ ID NO: 1778568 - RNA, 12 nt, Human
uauuguuucaau

SEQ ID NO: 1778569 - RNA, 18 nt, Human
uauuguuucaauugcauc

SEQ ID NO: 1778570 - RNA, 20 nt, Human
uauuuauucaauaaaguauu

SEQ ID NO: 1778571 - RNA, 19 nt, Human
uauuuauucaauaaaguau

SEQ ID NO: 1778572 - RNA, 18 nt, Human
uauuuauucaauaaagua

SEQ ID NO: 1778573 - RNA, 16 nt, Human
uauuuauucaauaaag

SEQ ID NO: 1778574 - RNA, 14 nt, Human
uauuuauucaauaa

SEQ ID NO: 1778575 - RNA, 13 nt, Human
uauuuauucaaua

SEQ ID NO: 1778576 - RNA, 12 nt, Human
uauuuauucaau

SEQ ID NO: 1778577 - RNA, 18 nt, Human
uauuugaaucuugucuca

SEQ ID NO: 1778578 - RNA, 16 nt, Human
uauuugaaucuugucu

SEQ ID NO: 1778579 - RNA, 14 nt, Human
uauuugaaucuugu

SEQ ID NO: 1778580 - RNA, 12 nt, Human
uauuugaaucuu

SEQ ID NO: 1778581 - RNA, 20 nt, Human
uauuugaaucuugucucaau

SEQ ID NO: 1778582 - RNA, 19 nt, Human
uauuugaaucuugucucaa

SEQ ID NO: 1778583 - RNA, 13 nt, Human
uauugcccacgcu

SEQ ID NO: 1778584 - RNA, 14 nt, Human
uauugcccacgcug

SEQ ID NO: 1778585 - RNA, 15 nt, Human
uauugcccacgcugg

SEQ ID NO: 1778586 - RNA, 14 nt, Human
uauuauuuuccaaa

SEQ ID NO: 1778587 - RNA, 13 nt, Human
uauuauuuuccaa

SEQ ID NO: 1778588 - RNA, 17 nt, Human
uauucauuauuugucaa

SEQ ID NO: 1778589 - RNA, 18 nt, Human
uauucauuauuugucaaa

SEQ ID NO: 1778590 - RNA, 19 nt, Human
uauucauuauuugucaaau

SEQ ID NO: 1778591 - RNA, 22 nt, Human
uauucauuauuugucaaauugu

SEQ ID NO: 1778592 - RNA, 23 nt, Human
uauucauuauuugucaaauuguc

SEQ ID NO: 1778593 - RNA, 23 nt, Human
uauugcacaugucuuaaugaagu

SEQ ID NO: 1778594 - RNA, 14 nt, Human
uauugcacaugucu

SEQ ID NO: 1778595 - RNA, 12 nt, Human
uauugcacaugu

SEQ ID NO: 1778596 - RNA, 22 nt, Human
uauugcacaugucuuaaugaag

SEQ ID NO: 1778597 - RNA, 20 nt, Human
uauugcacaugucuuaauga

SEQ ID NO: 1778598 - RNA, 17 nt, Human
uauugcacaugucuuaa

SEQ ID NO: 1778599 - RNA, 16 nt, Human
uauugcacaugucuua

SEQ ID NO: 1778600 - RNA, 17 nt, Human
uauuaaauaguuaauau

SEQ ID NO: 1778601 - RNA, 21 nt, Human
uauguugcccaggcaggucuu

SEQ ID NO: 1778602 - RNA, 21 nt, Human
uauguuaaacuagcauaucug

SEQ ID NO: 1778603 - RNA, 20 nt, Human
uauguuaaacuagcauaucu

SEQ ID NO: 1778604 - RNA, 21 nt, Human
uauguuauagaacuucaugga

SEQ ID NO: 1778605 - RNA, 22 nt, Human
uauguuauagaacuucauggau

SEQ ID NO: 1778606 - RNA, 12 nt, Human
uauuauuuucca

SEQ ID NO: 1778607 - RNA, 16 nt, Human
uauuaucaauguuuac

SEQ ID NO: 1778608 - RNA, 20 nt, Human
uauuauagagaguuaugaac

SEQ ID NO: 1778609 - RNA, 15 nt, Human
uauuauauaaacuuu

SEQ ID NO: 1778610 - RNA, 17 nt, Human
uauuauauuuacaaaug

SEQ ID NO: 1778611 - RNA, 15 nt, Human
ucaucuccugccuuc

SEQ ID NO: 1778612 - RNA, 18 nt, Human
ucaucuccugccuuccuc

SEQ ID NO: 1778613 - RNA, 18 nt, Human
ucauccacugugccaugu

SEQ ID NO: 1778614 - RNA, 14 nt, Human
ucauccacugugcc

SEQ ID NO: 1778615 - RNA, 17 nt, Human
ucauccacugugccaug

SEQ ID NO: 1778616 - RNA, 18 nt, Human
ucaucaugaguucugcug

SEQ ID NO: 1778617 - RNA, 13 nt, Human
ucauagaaauucu

SEQ ID NO: 1778618 - RNA, 17 nt, Human
ucauagaaauucuuuau

SEQ ID NO: 1778619 - RNA, 15 nt, Human
ucauagauguuuccu

SEQ ID NO: 1778620 - RNA, 13 nt, Human
ucaucauucucug

SEQ ID NO: 1778621 - RNA, 14 nt, Human
ucaucauucucugu

SEQ ID NO: 1778622 - RNA, 18 nt, Human
ucaucauucucugucuca

SEQ ID NO: 1778623 - RNA, 19 nt, Human
ucaucauucucugucucau

SEQ ID NO: 1778624 - RNA, 19 nt, Human
ucauuagccugaguagaaa

SEQ ID NO: 1778625 - RNA, 18 nt, Human
ucauuagccugaguagaa

SEQ ID NO: 1778626 - RNA, 20 nt, Human
ucauuagccugaguagaaag

SEQ ID NO: 1778627 - RNA, 14 nt, Human
ucauuuaauaauau

SEQ ID NO: 1778628 - RNA, 11 nt, Human
ucauuuaauaa

SEQ ID NO: 1778629 - RNA, 20 nt, Human
ucauuuaauaauauacuugu

SEQ ID NO: 1778630 - RNA, 18 nt, Human
ucauuuaauaauauacuu

SEQ ID NO: 1778631 - RNA, 21 nt, Human
ucauuuaauaauauacuugug

SEQ ID NO: 1778632 - RNA, 19 nt, Human
ucauuuaguuugauuauuc

SEQ ID NO: 1778633 - RNA, 15 nt, Human
uccaaaccuuaucuc

SEQ ID NO: 1778634 - RNA, 12 nt, Human
uccaaaacugcc

SEQ ID NO: 1778635 - RNA, 13 nt, Human
uccaaaacugccu

SEQ ID NO: 1778636 - RNA, 15 nt, Human
uccaaaaaucugccu

SEQ ID NO: 1778637 - RNA, 18 nt, Human
uccaaaaaucugccuggg

SEQ ID NO: 1778638 - RNA, 16 nt, Human
ucaggugauccaccca

SEQ ID NO: 1778639 - RNA, 23 nt, Human
ucaggugauccacccaccucagc

SEQ ID NO: 1778640 - RNA, 18 nt, Human
ucagguggggcagcuuga

SEQ ID NO: 1778641 - RNA, 19 nt, Human
ucagguggggcagcuugag

SEQ ID NO: 1778642 - RNA, 21 nt, Human
ucagucugauucccaagcucu

SEQ ID NO: 1778643 - RNA, 22 nt, Human
ucagucugauucccaagcucug

SEQ ID NO: 1778644 - RNA, 23 nt, Human
ucagucugauucccaagcucugc

SEQ ID NO: 1778645 - RNA, 19 nt, Human
ucagugauguaccaugaaa

SEQ ID NO: 1778646 - RNA, 14 nt, Human
ucaguauuuuuccu

SEQ ID NO: 1778647 - RNA, 20 nt, Human
ucagguggggcagcuugagg

SEQ ID NO: 1778648 - RNA, 14 nt, Human
ucagcucucugccc

SEQ ID NO: 1778649 - RNA, 15 nt, Human
ucagcucucugcccu

SEQ ID NO: 1778650 - RNA, 19 nt, Human
ucagcucucugcccugugu

SEQ ID NO: 1778651 - RNA, 20 nt, Human
ucagcucucugcccugugua

SEQ ID NO: 1778652 - RNA, 21 nt, Human
ucagcucucugcccuguguac

SEQ ID NO: 1778653 - RNA, 23 nt, Human
ucagcuccagcucaccagcccca

SEQ ID NO: 1778654 - RNA, 24 nt, Human
ucagcuccagcucaccagccccag

SEQ ID NO: 1778655 - RNA, 13 nt, Human
ucaccgugggcuc

SEQ ID NO: 1778656 - RNA, 15 nt, Human
ucaccgugggcuccc

SEQ ID NO: 1778657 - RNA, 16 nt, Human
ucaccgugggcucccu

SEQ ID NO: 1778658 - RNA, 17 nt, Human
ucaccgugggcucccug

SEQ ID NO: 1778659 - RNA, 18 nt, Human
ucaccgugggcucccuga

SEQ ID NO: 1778660 - RNA, 19 nt, Human
ucaccgugggcucccugac

SEQ ID NO: 1778661 - RNA, 18 nt, Human
ucaggccggcagccccag

SEQ ID NO: 1778662 - RNA, 21 nt, Human
ucaggccggcagccccagccu

SEQ ID NO: 1778663 - RNA, 22 nt, Human
ucaggcuacuauagguccagaa

SEQ ID NO: 1778664 - RNA, 22 nt, Human
ucaggccggcagccccagccug

SEQ ID NO: 1778665 - RNA, 23 nt, Human
ucaggccggcagccccagccugc

SEQ ID NO: 1778666 - RNA, 23 nt, Human
ucccagcugugcucuggacaggc

SEQ ID NO: 1778667 - RNA, 21 nt, Human
ucccagcugugcucuggacag

SEQ ID NO: 1778668 - RNA, 22 nt, Human
ucccagcugugcucuggacagg

SEQ ID NO: 1778669 - RNA, 17 nt, Human
ucccaggccccuggagg

SEQ ID NO: 1778670 - RNA, 19 nt, Human
ucccaggccccuggaggcu

SEQ ID NO: 1778671 - RNA, 21 nt, Human
ucccaggccccuggaggcugc

SEQ ID NO: 1778672 - RNA, 22 nt, Human
ucccaggccccuggaggcugcc

SEQ ID NO: 1778673 - RNA, 18 nt, Human
ucccaugagccucagcau

SEQ ID NO: 1778674 - RNA, 19 nt, Human
ucccaugagccucagcauc

SEQ ID NO: 1778675 - RNA, 20 nt, Human
uccaugugggcuaguugggc

SEQ ID NO: 1778676 - RNA, 23 nt, Human
uccaugggcagagcccaagggaa

SEQ ID NO: 1778677 - RNA, 13 nt, Human
ucccaccuuggcu

SEQ ID NO: 1778678 - RNA, 19 nt, Human
ucccaccugcaucuggggc

SEQ ID NO: 1778679 - RNA, 20 nt, Human
ucccaccugcaucuggggcc

SEQ ID NO: 1778680 - RNA, 16 nt, Human
ucccaccuuggcugca

SEQ ID NO: 1778681 - RNA, 17 nt, Human
ucccaccuuggcugcag

SEQ ID NO: 1778682 - RNA, 20 nt, Human
ucccagcugugcucuggaca

SEQ ID NO: 1778683 - RNA, 18 nt, Human
ucccaccuuggcugcagg

SEQ ID NO: 1778684 - RNA, 19 nt, Human
uccccagauugcaacaggc

SEQ ID NO: 1778685 - RNA, 20 nt, Human
uccccagauugcaacaggcu

SEQ ID NO: 1778686 - RNA, 22 nt, Human
uccccagauugcaacaggcugg

SEQ ID NO: 1778687 - RNA, 23 nt, Human
uccccagauugcaacaggcuggg

SEQ ID NO: 1778688 - RNA, 20 nt, Human
uccccagcaagugagagcug

SEQ ID NO: 1778689 - RNA, 21 nt, Human
uccccagcaagugagagcugg

SEQ ID NO: 1778690 - RNA, 22 nt, Human
uccccagcaagugagagcuggg

SEQ ID NO: 1778691 - RNA, 20 nt, Human
ucccaugagccucagcaucc

SEQ ID NO: 1778692 - RNA, 17 nt, Human
uccaugggaaagauggu

SEQ ID NO: 1778693 - RNA, 13 nt, Human
uccccagauugca

SEQ ID NO: 1778694 - RNA, 18 nt, Human
uccccagauugcaacagg

SEQ ID NO: 1778695 - RNA, 14 nt, Human
uccagggguccuag

SEQ ID NO: 1778696 - RNA, 19 nt, Human
uccagggguccuaggccuc

SEQ ID NO: 1778697 - RNA, 13 nt, Human
uccagaucccagg

SEQ ID NO: 1778698 - RNA, 16 nt, Human
uccagaucccaggccc

SEQ ID NO: 1778699 - RNA, 19 nt, Human
uccagaucccaggccccug

SEQ ID NO: 1778700 - RNA, 23 nt, Human
uccagaucccaggccccuggagg

SEQ ID NO: 1778701 - RNA, 16 nt, Human
uccagauccucucugg

SEQ ID NO: 1778702 - RNA, 17 nt, Human
uccagauccucucuggg

SEQ ID NO: 1778703 - RNA, 20 nt, Human
uccagauccucucuggggcu

SEQ ID NO: 1778704 - RNA, 22 nt, Human
uccaguuaaaaaaaauuuuaau

SEQ ID NO: 1778705 - RNA, 20 nt, Human
uccaugggccauaugaaaag

SEQ ID NO: 1778706 - RNA, 18 nt, Human
uccaugggagaaaauaga

SEQ ID NO: 1778707 - RNA, 15 nt, Human
uccaugggcagagcc

SEQ ID NO: 1778708 - RNA, 16 nt, Human
uccaugggcagagccc

SEQ ID NO: 1778709 - RNA, 17 nt, Human
uccaugggcagagccca

SEQ ID NO: 1778710 - RNA, 18 nt, Human
uccaugggcagagcccaa

SEQ ID NO: 1778711 - RNA, 22 nt, Human
uccaugggcagagcccaaggga

SEQ ID NO: 1778712 - RNA, 13 nt, Human
uccaucaucaugu

SEQ ID NO: 1778713 - RNA, 11 nt, Human
uccugccaaaa

SEQ ID NO: 1778714 - RNA, 19 nt, Human
uccugagaaaaaagguucc

SEQ ID NO: 1778715 - RNA, 24 nt, Human
uccugagaaaaaagguuccgcuug

SEQ ID NO: 1778716 - RNA, 13 nt, Human
uccugacugcccg

SEQ ID NO: 1778717 - RNA, 11 nt, Human
uccuccucugu

SEQ ID NO: 1778718 - RNA, 14 nt, Human
uccuccucugacuu

SEQ ID NO: 1778719 - RNA, 13 nt, Human
uccuccucuguga

SEQ ID NO: 1778720 - RNA, 12 nt, Human
uccuccucugug

SEQ ID NO: 1778721 - RNA, 19 nt, Human
uccucugugaccaaugucu

SEQ ID NO: 1778722 - RNA, 21 nt, Human
uccucugugaccaaugucuug

SEQ ID NO: 1778723 - RNA, 20 nt, Human
uccucugugaccaaugucuu

SEQ ID NO: 1778724 - RNA, 12 nt, Human
uccucugugaag

SEQ ID NO: 1778725 - RNA, 21 nt, Human
uccuggacaugaagauucuuu

SEQ ID NO: 1778726 - RNA, 22 nt, Human
uccuggacaugaagauucuuuc

SEQ ID NO: 1778727 - RNA, 13 nt, Human
uccuggccugaga

SEQ ID NO: 1778728 - RNA, 17 nt, Human
uccuggccugagaguca

SEQ ID NO: 1778729 - RNA, 12 nt, Human
uccuggccucaa

SEQ ID NO: 1778730 - RNA, 23 nt, Human
uccuggcacccggccccugcugg

SEQ ID NO: 1778731 - RNA, 14 nt, Human
ucccuuccuauucc

SEQ ID NO: 1778732 - RNA, 20 nt, Human
ucccuugccuuucgaggccu

SEQ ID NO: 1778733 - RNA, 21 nt, Human
ucccuugccuuucgaggccug

SEQ ID NO: 1778734 - RNA, 22 nt, Human
ucccuugccuuucgaggccuga

SEQ ID NO: 1778735 - RNA, 14 nt, Human
uccgccucuugggu

SEQ ID NO: 1778736 - RNA, 13 nt, Human
uccgccuccagga

SEQ ID NO: 1778737 - RNA, 14 nt, Human
uccgcaucccuacc

SEQ ID NO: 1778738 - RNA, 21 nt, Human
uccgcaucccuaccgacccag

SEQ ID NO: 1778739 - RNA, 12 nt, Human
uccgcaggacuu

SEQ ID NO: 1778740 - RNA, 18 nt, Human
uccgcuuucuacccagcg

SEQ ID NO: 1778741 - RNA, 20 nt, Human
uccgcuuucuacccagcgag

SEQ ID NO: 1778742 - RNA, 16 nt, Human
uccgcuuucuacccag

SEQ ID NO: 1778743 - RNA, 12 nt, Human
uccucccaccuc

SEQ ID NO: 1778744 - RNA, 13 nt, Human
uccucccaccuca

SEQ ID NO: 1778745 - RNA, 12 nt, Human
uccuccauggga

SEQ ID NO: 1778746 - RNA, 13 nt, Human
uccuccaggagcu

SEQ ID NO: 1778747 - RNA, 17 nt, Human
uccuccaggagcuucuu

SEQ ID NO: 1778748 - RNA, 19 nt, Human
uccuccaggagcuucuugu

SEQ ID NO: 1778749 - RNA, 21 nt, Human
uccuccagggaugaucaacag

SEQ ID NO: 1778750 - RNA, 19 nt, Human
uccuccacguucugcucau

SEQ ID NO: 1778751 - RNA, 22 nt, Human
uccuagugcuuuccuuuuuuaa

SEQ ID NO: 1778752 - RNA, 15 nt, Human
uccuacccugccucc

SEQ ID NO: 1778753 - RNA, 19 nt, Human
uccuaguaagcaucuacuu

SEQ ID NO: 1778754 - RNA, 13 nt, Human
ucuccccucagcu

SEQ ID NO: 1778755 - RNA, 11 nt, Human
ucuccaggcug

SEQ ID NO: 1778756 - RNA, 13 nt, Human
ucuccagcuuccc

SEQ ID NO: 1778757 - RNA, 13 nt, Human
ucuccaggcauuu

SEQ ID NO: 1778758 - RNA, 14 nt, Human
ucuccccucagcuc

SEQ ID NO: 1778759 - RNA, 16 nt, Human
ucucaugaggggagag

SEQ ID NO: 1778760 - RNA, 20 nt, Human
ucucaugaggggagaggaga

SEQ ID NO: 1778761 - RNA, 22 nt, Human
ucucaugaggggagaggagacg

SEQ ID NO: 1778762 - RNA, 13 nt, Human
ucuccacccugcu

SEQ ID NO: 1778763 - RNA, 17 nt, Human
ucuccacccugcucucc

SEQ ID NO: 1778764 - RNA, 14 nt, Human
ucuccacccugcuc

SEQ ID NO: 1778765 - RNA, 16 nt, Human
ucuccacccugcucuc

SEQ ID NO: 1778766 - RNA, 23 nt, Human
ucuaugcuuuccaaaccuuaucu

SEQ ID NO: 1778767 - RNA, 19 nt, Human
ucuaugggacucaaugcac

SEQ ID NO: 1778768 - RNA, 12 nt, Human
ucuaugggacuc

SEQ ID NO: 1778769 - RNA, 13 nt, Human
ucuaugggacuca

SEQ ID NO: 1778770 - RNA, 11 nt, Human
ucucagucucu

SEQ ID NO: 1778771 - RNA, 13 nt, Human
ucucagucucuga

SEQ ID NO: 1778772 - RNA, 18 nt, Human
ucucagucucugagcagu

SEQ ID NO: 1778773 - RNA, 15 nt, Human
ucucagucucugagc

SEQ ID NO: 1778774 - RNA, 17 nt, Human
ucucagucucugagcag

SEQ ID NO: 1778775 - RNA, 20 nt, Human
ucuacuugccagaaccaaau

SEQ ID NO: 1778776 - RNA, 22 nt, Human
ucuacuugccagaaccaaauua

SEQ ID NO: 1778777 - RNA, 15 nt, Human
ucuacagaggccaug

SEQ ID NO: 1778778 - RNA, 16 nt, Human
ucuacagaggccaugg

SEQ ID NO: 1778779 - RNA, 16 nt, Human
ucuacaccuugcuuuu

SEQ ID NO: 1778780 - RNA, 21 nt, Human
ucuacaccuugcuuuuuuacu

SEQ ID NO: 1778781 - RNA, 16 nt, Human
ucuacagagcuucccu

SEQ ID NO: 1778782 - RNA, 17 nt, Human
ucuacagagcuucccug

SEQ ID NO: 1778783 - RNA, 18 nt, Human
ucuacagagcuucccuga

SEQ ID NO: 1778784 - RNA, 19 nt, Human
ucuacagagcuucccugac

SEQ ID NO: 1778785 - RNA, 14 nt, Human
ucuaucagagaaaa

SEQ ID NO: 1778786 - RNA, 22 nt, Human
ucuaucauuuaauaauauacuu

SEQ ID NO: 1778787 - RNA, 18 nt, Human
ucuaucauuuaauaauau

SEQ ID NO: 1778788 - RNA, 17 nt, Human
ucuaucauuuaauaaua

SEQ ID NO: 1778789 - RNA, 16 nt, Human
ucuaucauuuaauaau

SEQ ID NO: 1778790 - RNA, 15 nt, Human
ucuaucauuuaauaa

SEQ ID NO: 1778791 - RNA, 14 nt, Human
ucuaucauuuaaua

SEQ ID NO: 1778792 - RNA, 13 nt, Human
ucuaucauuuaau

SEQ ID NO: 1778793 - RNA, 12 nt, Human
ucuaucauuuaa

SEQ ID NO: 1778794 - RNA, 13 nt, Human
ucgugacaacacu

SEQ ID NO: 1778795 - RNA, 11 nt, Human
ugaauguuaaa

SEQ ID NO: 1778796 - RNA, 21 nt, Human
ugaauguuaaauaaauuguau

SEQ ID NO: 1778797 - RNA, 20 nt, Human
ugaauguuaaauaaauugua

SEQ ID NO: 1778798 - RNA, 18 nt, Human
ugaauguuaaauaaauug

SEQ ID NO: 1778799 - RNA, 16 nt, Human
ugaauguuaaauaaau

SEQ ID NO: 1778800 - RNA, 15 nt, Human
ugaauguuaaauaaa

SEQ ID NO: 1778801 - RNA, 13 nt, Human
ugaauguuaaaua

SEQ ID NO: 1778802 - RNA, 20 nt, Human
ugaauucuugguugaggaaa

SEQ ID NO: 1778803 - RNA, 23 nt, Human
ugaauucggaacuguccuuuccu

SEQ ID NO: 1778804 - RNA, 22 nt, Human
ugaauucuugguugaggaaaca

SEQ ID NO: 1778805 - RNA, 21 nt, Human
ugaauucuugguugaggaaac

SEQ ID NO: 1778806 - RNA, 15 nt, Human
ugaaggaacuugucu

SEQ ID NO: 1778807 - RNA, 20 nt, Human
ugaaggaacuugucucuuca

SEQ ID NO: 1778808 - RNA, 17 nt, Human
ugaacuccuggccucaa

SEQ ID NO: 1778809 - RNA, 13 nt, Human
ugaaccaaugcaa

SEQ ID NO: 1778810 - RNA, 14 nt, Human
ugaaccaaugcaag

SEQ ID NO: 1778811 - RNA, 22 nt, Human
ugaaggacauugcggacagcca

SEQ ID NO: 1778812 - RNA, 19 nt, Human
ugaaggacauugcggacag

SEQ ID NO: 1778813 - RNA, 20 nt, Human
ugaaggacauugcggacagc

SEQ ID NO: 1778814 - RNA, 11 nt, Human
ugaauaaagaa

SEQ ID NO: 1778815 - RNA, 15 nt, Human
ugaauaaagaauacu

SEQ ID NO: 1778816 - RNA, 16 nt, Human
ugaauaaagaauacuu

SEQ ID NO: 1778817 - RNA, 17 nt, Human
ugaauaaagaauacuug

SEQ ID NO: 1778818 - RNA, 18 nt, Human
ugaauaaagaauacuuga

SEQ ID NO: 1778819 - RNA, 19 nt, Human
ugaauaaagaauacuugaa

SEQ ID NO: 1778820 - RNA, 20 nt, Human
ugaauaaagaauacuugaac

SEQ ID NO: 1778821 - RNA, 22 nt, Human
ugaauaaagaauacuugaacuu

SEQ ID NO: 1778822 - RNA, 21 nt, Human
ugacauacgcuuuuaaugaaa

SEQ ID NO: 1778823 - RNA, 13 nt, Human
ugacagaggcagc

SEQ ID NO: 1778824 - RNA, 20 nt, Human
ugacagacacaggcccggcu

SEQ ID NO: 1778825 - RNA, 23 nt, Human
ugacagacacaggcccggcucca

SEQ ID NO: 1778826 - RNA, 14 nt, Human
ugacagaggcagcc

SEQ ID NO: 1778827 - RNA, 15 nt, Human
ugacagaggcagccc

SEQ ID NO: 1778828 - RNA, 16 nt, Human
ugacagaggcagcccc

SEQ ID NO: 1778829 - RNA, 17 nt, Human
ugacagaggcagcccca

SEQ ID NO: 1778830 - RNA, 18 nt, Human
ugacagaggcagccccau

SEQ ID NO: 1778831 - RNA, 23 nt, Human
ugacagaggcagccccauucugc

SEQ ID NO: 1778832 - RNA, 14 nt, Human
ugacagagugagac

SEQ ID NO: 1778833 - RNA, 17 nt, Human
ugacagagugagacucu

SEQ ID NO: 1778834 - RNA, 19 nt, Human
ugacagagugagacucugu

SEQ ID NO: 1778835 - RNA, 18 nt, Human
ugacaaggauugcuacug

SEQ ID NO: 1778836 - RNA, 18 nt, Human
ugaauuguaacuguucuu

SEQ ID NO: 1778837 - RNA, 15 nt, Human
ugacaauaaaauauu

SEQ ID NO: 1778838 - RNA, 20 nt, Human
ugacaauaaaauauuauuga

SEQ ID NO: 1778839 - RNA, 16 nt, Human
ucuuguucugagauuc

SEQ ID NO: 1778840 - RNA, 20 nt, Human
ucuuguucugagauucaaua

SEQ ID NO: 1778841 - RNA, 15 nt, Human
ucuuguuuccuuguu

SEQ ID NO: 1778842 - RNA, 11 nt, Human
ucuuucaaaac

SEQ ID NO: 1778843 - RNA, 20 nt, Human
ucuuucaaaaccuuuugaaa

SEQ ID NO: 1778844 - RNA, 21 nt, Human
ucuuucaaaaccuuuugaaau

SEQ ID NO: 1778845 - RNA, 23 nt, Human
ucuuucaaaaccuuuugaaauua

SEQ ID NO: 1778846 - RNA, 18 nt, Human
ucuuucaaaccagcuuca

SEQ ID NO: 1778847 - RNA, 11 nt, Human
ucuugcuggcu

SEQ ID NO: 1778848 - RNA, 23 nt, Human
ucuugcuggcuacgccucuucug

SEQ ID NO: 1778849 - RNA, 19 nt, Human
ucuuuccacggagccacuc

SEQ ID NO: 1778850 - RNA, 22 nt, Human
ucuuuccacggagccacuccuc

SEQ ID NO: 1778851 - RNA, 23 nt, Human
ucuuuccacggagccacuccucu

SEQ ID NO: 1778852 - RNA, 23 nt, Human
ucuuucuuugggaauauuugaau

SEQ ID NO: 1778853 - RNA, 22 nt, Human
ucuuucuuugggaauauuugaa

SEQ ID NO: 1778854 - RNA, 15 nt, Human
ucuuucuuucuuaga

SEQ ID NO: 1778855 - RNA, 20 nt, Human
ucuuuccauuggaucucauu

SEQ ID NO: 1778856 - RNA, 12 nt, Human
ucuuugccaagu

SEQ ID NO: 1778857 - RNA, 19 nt, Human
ugaaccacaucuugcucug

SEQ ID NO: 1778858 - RNA, 23 nt, Human
ugaaccacaucuugcucugcuga

SEQ ID NO: 1778859 - RNA, 17 nt, Human
ugaaccaccacacccag

SEQ ID NO: 1778860 - RNA, 20 nt, Human
ugaaccaccacacccagccc

SEQ ID NO: 1778861 - RNA, 16 nt, Human
ugaacuccuggccuca

SEQ ID NO: 1778862 - RNA, 23 nt, Human
ugaacaagcaaacccagacggcu

SEQ ID NO: 1778863 - RNA, 11 nt, Human
ugaaauucuga

SEQ ID NO: 1778864 - RNA, 12 nt, Human
ugaaauucugaa

SEQ ID NO: 1778865 - RNA, 13 nt, Human
ugaaauucugaau

SEQ ID NO: 1778866 - RNA, 14 nt, Human
ugaaauucugaauu

SEQ ID NO: 1778867 - RNA, 15 nt, Human
ugaaagguuuacauu

SEQ ID NO: 1778868 - RNA, 17 nt, Human
ugaaauuaaccucucac

SEQ ID NO: 1778869 - RNA, 14 nt, Human
ugaaauuaaccucu

SEQ ID NO: 1778870 - RNA, 15 nt, Human
ugaaacccuggacca

SEQ ID NO: 1778871 - RNA, 21 nt, Human
ugaaacccuggaccagugguc

SEQ ID NO: 1778872 - RNA, 13 nt, Human
ugaaagggcccag

SEQ ID NO: 1778873 - RNA, 15 nt, Human
ugaaagggcccagag

SEQ ID NO: 1778874 - RNA, 21 nt, Human
ugaaaggugccauggaagagg

SEQ ID NO: 1778875 - RNA, 20 nt, Human
ugaaaccaguguuagggaag

SEQ ID NO: 1778876 - RNA, 11 nt, Human
ugaaacccagu

SEQ ID NO: 1778877 - RNA, 20 nt, Human
ugaaacccagucacugugag

SEQ ID NO: 1778878 - RNA, 14 nt, Human
ugaaacaaagcugc

SEQ ID NO: 1778879 - RNA, 19 nt, Human
ugaaaagcuccaucaauga

SEQ ID NO: 1778880 - RNA, 20 nt, Human
ugaaaagcuccauuuuuagu

SEQ ID NO: 1778881 - RNA, 19 nt, Human
ugagucgaggacagggagg

SEQ ID NO: 1778882 - RNA, 21 nt, Human
ugagugaaauacuguacaggg

SEQ ID NO: 1778883 - RNA, 14 nt, Human
ugaguucugcugaa

SEQ ID NO: 1778884 - RNA, 14 nt, Human
ugagggagccuggc

SEQ ID NO: 1778885 - RNA, 20 nt, Human
ugaccucaggugauccaccc

SEQ ID NO: 1778886 - RNA, 21 nt, Human
ugaccucaggugauccaccca

SEQ ID NO: 1778887 - RNA, 18 nt, Human
ugagacccagcccucauc

SEQ ID NO: 1778888 - RNA, 20 nt, Human
ugagacccagcccucauccc

SEQ ID NO: 1778889 - RNA, 12 nt, Human
ugagcagggcuc

SEQ ID NO: 1778890 - RNA, 13 nt, Human
ugagcagggcuca

SEQ ID NO: 1778891 - RNA, 14 nt, Human
ugagcagggcucag

SEQ ID NO: 1778892 - RNA, 15 nt, Human
ugagcagggcucagc

SEQ ID NO: 1778893 - RNA, 17 nt, Human
ugagagucagcucucug

SEQ ID NO: 1778894 - RNA, 19 nt, Human
ugagagucagcucucugcc

SEQ ID NO: 1778895 - RNA, 21 nt, Human
ugagagucagcucucugcccu

SEQ ID NO: 1778896 - RNA, 22 nt, Human
ugagagucagcucucugcccug

SEQ ID NO: 1778897 - RNA, 19 nt, Human
ugagaguuuuggaugcagu

SEQ ID NO: 1778898 - RNA, 17 nt, Human
ugagaguuuuggaugca

SEQ ID NO: 1778899 - RNA, 15 nt, Human
ugagaguuuuggaug

SEQ ID NO: 1778900 - RNA, 22 nt, Human
ugagcccucagaacccuuggcu

SEQ ID NO: 1778901 - RNA, 19 nt, Human
ugagccgagaucacgccac

SEQ ID NO: 1778902 - RNA, 21 nt, Human
ugagccgagaucacgccacug

SEQ ID NO: 1778903 - RNA, 17 nt, Human
ugagccucagcauccug

SEQ ID NO: 1778904 - RNA, 22 nt, Human
ugagccucagcauccuggcacc

SEQ ID NO: 1778905 - RNA, 18 nt, Human
ugagccucagcauccugg

SEQ ID NO: 1778906 - RNA, 21 nt, Human
ugagccucagcauccuggcac

SEQ ID NO: 1778907 - RNA, 17 nt, Human
ugagcucuacccagggc

SEQ ID NO: 1778908 - RNA, 18 nt, Human
ugagcucuacccagggcc

SEQ ID NO: 1778909 - RNA, 19 nt, Human
ugagcucuacccagggccu

SEQ ID NO: 1778910 - RNA, 22 nt, Human
ugagcucuacccagggccugca

SEQ ID NO: 1778911 - RNA, 13 nt, Human
ugagccugcugga

SEQ ID NO: 1778912 - RNA, 17 nt, Human
ugagccugcuggaagcc

SEQ ID NO: 1778913 - RNA, 19 nt, Human
ugagcagggcucagcgggg

SEQ ID NO: 1778914 - RNA, 16 nt, Human
ugagcagggcucagcg

SEQ ID NO: 1778915 - RNA, 17 nt, Human
ugagcagggcucagcgg

SEQ ID NO: 1778916 - RNA, 13 nt, Human
ugauccaagcugg

SEQ ID NO: 1778917 - RNA, 14 nt, Human
ugauccaagcuggu

SEQ ID NO: 1778918 - RNA, 15 nt, Human
ugauccaagcugguc

SEQ ID NO: 1778919 - RNA, 17 nt, Human
ugauccaagcugguccc

SEQ ID NO: 1778920 - RNA, 18 nt, Human
ugauccaagcaagacuga

SEQ ID NO: 1778921 - RNA, 12 nt, Human
ugaucaggaccu

SEQ ID NO: 1778922 - RNA, 20 nt, Human
ugaucaggaccuccaagcca

SEQ ID NO: 1778923 - RNA, 13 nt, Human
ugauagcaaagcg

SEQ ID NO: 1778924 - RNA, 13 nt, Human
ugaucuguugcaa

SEQ ID NO: 1778925 - RNA, 17 nt, Human
ugauccacccaccucag

SEQ ID NO: 1778926 - RNA, 18 nt, Human
ugauccacccaccucagc

SEQ ID NO: 1778927 - RNA, 19 nt, Human
ugauccacccaccucagcc

SEQ ID NO: 1778928 - RNA, 18 nt, Human
ugaucuuugcagacaggc

SEQ ID NO: 1778929 - RNA, 16 nt, Human
ugaucuuugcagacag

SEQ ID NO: 1778930 - RNA, 23 nt, Human
ugaugcaugcacuguucccccug

SEQ ID NO: 1778931 - RNA, 17 nt, Human
ugaugcaugcacuguuc

SEQ ID NO: 1778932 - RNA, 18 nt, Human
ugaugcaugcacuguucc

SEQ ID NO: 1778933 - RNA, 20 nt, Human
ugaugcuacaggauuugaaa

SEQ ID NO: 1778934 - RNA, 23 nt, Human
ugaugcuacaggauuugaaauug

SEQ ID NO: 1778935 - RNA, 21 nt, Human
ugauucuccugccucagccuc

SEQ ID NO: 1778936 - RNA, 13 nt, Human
ugauuauauguca

SEQ ID NO: 1778937 - RNA, 12 nt, Human
ugauucaagcca

SEQ ID NO: 1778938 - RNA, 21 nt, Human
ugauucaagccauuccaaagu

SEQ ID NO: 1778939 - RNA, 14 nt, Human
ugauucaacuaaaa

SEQ ID NO: 1778940 - RNA, 23 nt, Human
ugauucaacuaaaaaaaaaaaag

SEQ ID NO: 1778941 - RNA, 14 nt, Human
ugauuauucagugu

SEQ ID NO: 1778942 - RNA, 16 nt, Human
ugauuauucaguguca

SEQ ID NO: 1778943 - RNA, 20 nt, Human
ugcugguuuuaucugaguga

SEQ ID NO: 1778944 - RNA, 15 nt, Human
ugcuguggugugucc

SEQ ID NO: 1778945 - RNA, 16 nt, Human
ugcugugguguguccc

SEQ ID NO: 1778946 - RNA, 17 nt, Human
ugcuguggugugucccc

SEQ ID NO: 1778947 - RNA, 23 nt, Human
ugcuguggugugucccccucugu

SEQ ID NO: 1778948 - RNA, 21 nt, Human
ugcugcuucugaauacaaauu

SEQ ID NO: 1778949 - RNA, 20 nt, Human
ugcugggauuacagguguga

SEQ ID NO: 1778950 - RNA, 23 nt, Human
ugccucuaccugacacucccuug

SEQ ID NO: 1778951 - RNA, 15 nt, Human
ugccucuaccugaca

SEQ ID NO: 1778952 - RNA, 17 nt, Human
ugccucuaccugacacu

SEQ ID NO: 1778953 - RNA, 24 nt, Human
ugccucggcuuuucucagcuggau

SEQ ID NO: 1778954 - RNA, 20 nt, Human
ugccucggcuuuucucagcu

SEQ ID NO: 1778955 - RNA, 21 nt, Human
ugccucggcuuuucucagcug

SEQ ID NO: 1778956 - RNA, 15 nt, Human
ugcgccaguccugcu

SEQ ID NO: 1778957 - RNA, 16 nt, Human
ugcgccaguccugcua

SEQ ID NO: 1778958 - RNA, 12 nt, Human
ugcgccugcugc

SEQ ID NO: 1778959 - RNA, 17 nt, Human
ugcgccaccgcccagag

SEQ ID NO: 1778960 - RNA, 14 nt, Human
ugcgcagugccuug

SEQ ID NO: 1778961 - RNA, 20 nt, Human
ugcgcauucuaaccuggagg

SEQ ID NO: 1778962 - RNA, 21 nt, Human
ugcgcauucuaaccuggaggu

SEQ ID NO: 1778963 - RNA, 21 nt, Human
ugcuacuguccuacccacccu

SEQ ID NO: 1778964 - RNA, 22 nt, Human
ugcuacuguccuacccacccuc

SEQ ID NO: 1778965 - RNA, 17 nt, Human
ugcggacagccacggcc

SEQ ID NO: 1778966 - RNA, 14 nt, Human
ugcggaaucagcuu

SEQ ID NO: 1778967 - RNA, 15 nt, Human
ugcggaaucagcuuc

SEQ ID NO: 1778968 - RNA, 17 nt, Human
ugcucacauaucuguca

SEQ ID NO: 1778969 - RNA, 16 nt, Human
ugcucagaacuugcug

SEQ ID NO: 1778970 - RNA, 17 nt, Human
ugcucagaacuugcugc

SEQ ID NO: 1778971 - RNA, 20 nt, Human
ugcucagaacuugcugcugu

SEQ ID NO: 1778972 - RNA, 21 nt, Human
ugcucagaacuugcugcuguc

SEQ ID NO: 1778973 - RNA, 22 nt, Human
ugcucagaacuugcugcugucu

SEQ ID NO: 1778974 - RNA, 16 nt, Human
ugcucacguuaccuug

SEQ ID NO: 1778975 - RNA, 21 nt, Human
ugcucacguuaccuugacaca

SEQ ID NO: 1778976 - RNA, 22 nt, Human
ugcucacguuaccuugacacau

SEQ ID NO: 1778977 - RNA, 23 nt, Human
ugcucuccgaccagacaccuuga

SEQ ID NO: 1778978 - RNA, 19 nt, Human
ugcucgcuguugcugaaua

SEQ ID NO: 1778979 - RNA, 16 nt, Human
ugcucauaacggauca

SEQ ID NO: 1778980 - RNA, 14 nt, Human
ugcucauaacggau

SEQ ID NO: 1778981 - RNA, 18 nt, Human
ugccaaagggaaauauca

SEQ ID NO: 1778982 - RNA, 14 nt, Human
ugccaaagggaaau

SEQ ID NO: 1778983 - RNA, 20 nt, Human
ugccaggaccagucaaccug

SEQ ID NO: 1778984 - RNA, 15 nt, Human
ugccacgaauuucug

SEQ ID NO: 1778985 - RNA, 16 nt, Human
ugccacgaauuucugu

SEQ ID NO: 1778986 - RNA, 23 nt, Human
ugccacgaauuucugugcccucc

SEQ ID NO: 1778987 - RNA, 15 nt, Human
ugccaacaauccuag

SEQ ID NO: 1778988 - RNA, 21 nt, Human
ugccaacaauccuagugcuuu

SEQ ID NO: 1778989 - RNA, 20 nt, Human
ugccaacaauccuagugcuu

SEQ ID NO: 1778990 - RNA, 11 nt, Human
ugcaguuugaa

SEQ ID NO: 1778991 - RNA, 12 nt, Human
ugcaguuugaaa

SEQ ID NO: 1778992 - RNA, 13 nt, Human
ugcaguuugaaau

SEQ ID NO: 1778993 - RNA, 14 nt, Human
ugcaguuugaaauu

SEQ ID NO: 1778994 - RNA, 15 nt, Human
ugcaguuugaaauuc

SEQ ID NO: 1778995 - RNA, 16 nt, Human
ugcaguuugaaauucu

SEQ ID NO: 1778996 - RNA, 17 nt, Human
ugcaguuugaaauucug

SEQ ID NO: 1778997 - RNA, 18 nt, Human
ugcaguuugaaauucuga

SEQ ID NO: 1778998 - RNA, 19 nt, Human
ugcaguuugaaauucugaa

SEQ ID NO: 1778999 - RNA, 20 nt, Human
ugcaguuugaaauucugaau

SEQ ID NO: 1779000 - RNA, 21 nt, Human
ugcaguuugaaauucugaauu

SEQ ID NO: 1779001 - RNA, 22 nt, Human
ugcaguuugaaauucugaauuu

SEQ ID NO: 1779002 - RNA, 23 nt, Human
ugcaguuugaaauucugaauuug

SEQ ID NO: 1779003 - RNA, 13 nt, Human
ugcagggaguccg

SEQ ID NO: 1779004 - RNA, 15 nt, Human
ugcagggaaaauuau

SEQ ID NO: 1779005 - RNA, 20 nt, Human
ugcagggaaaauuauuugca

SEQ ID NO: 1779006 - RNA, 21 nt, Human
ugcagggaaaauuauuugcau

SEQ ID NO: 1779007 - RNA, 22 nt, Human
ugcagggaaaauuauuugcaua

SEQ ID NO: 1779008 - RNA, 21 nt, Human
ugcaguggugcgaucuggguu

SEQ ID NO: 1779009 - RNA, 18 nt, Human
ugcccaggcuggcgugca

SEQ ID NO: 1779010 - RNA, 19 nt, Human
ugcccaggcuggcgugcag

SEQ ID NO: 1779011 - RNA, 20 nt, Human
ugcccaggcuggcgugcagu

SEQ ID NO: 1779012 - RNA, 14 nt, Human
ugccccaaacaaau

SEQ ID NO: 1779013 - RNA, 20 nt, Human
ugccccaaacaaauaugcaa

SEQ ID NO: 1779014 - RNA, 20 nt, Human
ugccccaccccuccccauua

SEQ ID NO: 1779015 - RNA, 12 nt, Human
ugcccggcugcg

SEQ ID NO: 1779016 - RNA, 14 nt, Human
ugcccggcugcgga

SEQ ID NO: 1779017 - RNA, 22 nt, Human
ugcccggcacagaugcuccagg

SEQ ID NO: 1779018 - RNA, 18 nt, Human
ugccccuuucucuuuucc

SEQ ID NO: 1779019 - RNA, 16 nt, Human
ugcccgagggagggga

SEQ ID NO: 1779020 - RNA, 13 nt, Human
ugccccagcccag

SEQ ID NO: 1779021 - RNA, 14 nt, Human
ugccccagcccaga

SEQ ID NO: 1779022 - RNA, 12 nt, Human
ugcccuggcucc

SEQ ID NO: 1779023 - RNA, 14 nt, Human
ugcccuggcuccag

SEQ ID NO: 1779024 - RNA, 21 nt, Human
ugcccuggcuccagugaaacu

SEQ ID NO: 1779025 - RNA, 14 nt, Human
ugccuauuugugug

SEQ ID NO: 1779026 - RNA, 17 nt, Human
ugccuauuuguguggac

SEQ ID NO: 1779027 - RNA, 15 nt, Human
uggggaugagaaagg

SEQ ID NO: 1779028 - RNA, 23 nt, Human
uggggaugagaaagguugaagca

SEQ ID NO: 1779029 - RNA, 14 nt, Human
ugggggagagccgu

SEQ ID NO: 1779030 - RNA, 11 nt, Human
ugggggagggc

SEQ ID NO: 1779031 - RNA, 16 nt, Human
ugggggagggcugcga

SEQ ID NO: 1779032 - RNA, 16 nt, Human
ugggcagagcugcauc

SEQ ID NO: 1779033 - RNA, 11 nt, Human
ugggggugggu

SEQ ID NO: 1779034 - RNA, 13 nt, Human
uggggguggguca

SEQ ID NO: 1779035 - RNA, 14 nt, Human
ugggggugggucag

SEQ ID NO: 1779036 - RNA, 15 nt, Human
ugggggugggucaga

SEQ ID NO: 1779037 - RNA, 10 nt, Human
uggggguggg

SEQ ID NO: 1779038 - RNA, 17 nt, Human
uggguacuuguggacac

SEQ ID NO: 1779039 - RNA, 18 nt, Human
uggguacuuguggacaca

SEQ ID NO: 1779040 - RNA, 17 nt, Human
uggguauaaaagauggg

SEQ ID NO: 1779041 - RNA, 15 nt, Human
uggguauaaaagaug

SEQ ID NO: 1779042 - RNA, 14 nt, Human
uggguauaaaagau

SEQ ID NO: 1779043 - RNA, 22 nt, Human
ugggauuacaagcgugagccac

SEQ ID NO: 1779044 - RNA, 16 nt, Human
uggcugggggccucag

SEQ ID NO: 1779045 - RNA, 17 nt, Human
uggcugggggccucagu

SEQ ID NO: 1779046 - RNA, 20 nt, Human
uggcugggggccucagugcc

SEQ ID NO: 1779047 - RNA, 13 nt, Human
ugggcccucucug

SEQ ID NO: 1779048 - RNA, 16 nt, Human
ugggcccucucugcuc

SEQ ID NO: 1779049 - RNA, 18 nt, Human
ugggcccucucugcucug

SEQ ID NO: 1779050 - RNA, 13 nt, Human
ugggcccucucuu

SEQ ID NO: 1779051 - RNA, 13 nt, Human
ugggcagagccca

SEQ ID NO: 1779052 - RNA, 14 nt, Human
ugggcagagcccaa

SEQ ID NO: 1779053 - RNA, 12 nt, Human
ugguccuuuggg

SEQ ID NO: 1779054 - RNA, 13 nt, Human
uggugaccucugc

SEQ ID NO: 1779055 - RNA, 14 nt, Human
uggugaccucugcc

SEQ ID NO: 1779056 - RNA, 19 nt, Human
uggugauccaaacaaaaug

SEQ ID NO: 1779057 - RNA, 15 nt, Human
uggugaccucugccu

SEQ ID NO: 1779058 - RNA, 16 nt, Human
uggugaccucugccug

SEQ ID NO: 1779059 - RNA, 17 nt, Human
uggugaccucugccuga

SEQ ID NO: 1779060 - RNA, 22 nt, Human
uggugaccucugccugaaguca

SEQ ID NO: 1779061 - RNA, 23 nt, Human
ugguauuguauuuauucaauaaa

SEQ ID NO: 1779062 - RNA, 13 nt, Human
ugguaugucugcc

SEQ ID NO: 1779063 - RNA, 17 nt, Human
ugguccuagaggcccuu

SEQ ID NO: 1779064 - RNA, 21 nt, Human
ugguccuagaggcccuuugcu

SEQ ID NO: 1779065 - RNA, 22 nt, Human
ugguccuagaggcccuuugcug

SEQ ID NO: 1779066 - RNA, 13 nt, Human
uggucccugagga

SEQ ID NO: 1779067 - RNA, 14 nt, Human
uggcuccucccagc

SEQ ID NO: 1779068 - RNA, 20 nt, Human
uggccccugcccggcugcgg

SEQ ID NO: 1779069 - RNA, 15 nt, Human
uggccccugcccggc

SEQ ID NO: 1779070 - RNA, 16 nt, Human
uggccccugcccggcu

SEQ ID NO: 1779071 - RNA, 13 nt, Human
uggccaggcuggu

SEQ ID NO: 1779072 - RNA, 17 nt, Human
uggcccaggugaguccu

SEQ ID NO: 1779073 - RNA, 15 nt, Human
uggcagaguccugga

SEQ ID NO: 1779074 - RNA, 13 nt, Human
uggccagccuaca

SEQ ID NO: 1779075 - RNA, 19 nt, Human
uggccagaugcaccagccc

SEQ ID NO: 1779076 - RNA, 13 nt, Human
uggcagagcuucu

SEQ ID NO: 1779077 - RNA, 17 nt, Human
uggccagaugcaccagc

SEQ ID NO: 1779078 - RNA, 18 nt, Human
uggccagaugcaccagcc

SEQ ID NO: 1779079 - RNA, 23 nt, Human
uggauaagcuauccguguugcag

SEQ ID NO: 1779080 - RNA, 14 nt, Human
uggaggcaauccua

SEQ ID NO: 1779081 - RNA, 20 nt, Human
uggaggcaauccuaccuugc

SEQ ID NO: 1779082 - RNA, 17 nt, Human
uggacugaccuggucca

SEQ ID NO: 1779083 - RNA, 19 nt, Human
uggacugaccugguccaca

SEQ ID NO: 1779084 - RNA, 18 nt, Human
ugcuguuguccaacuauu

SEQ ID NO: 1779085 - RNA, 23 nt, Human
ugcuguuguccaacuauuuauug

SEQ ID NO: 1779086 - RNA, 14 nt, Human
uuaauauaaauuca

SEQ ID NO: 1779087 - RNA, 21 nt, Human
uuacaagcgugagccacugca

SEQ ID NO: 1779088 - RNA, 14 nt, Human
uuacaauguuuuau

SEQ ID NO: 1779089 - RNA, 20 nt, Human
uuacaagcgugagccacugc

SEQ ID NO: 1779090 - RNA, 13 nt, Human
uuaacucugucuu

SEQ ID NO: 1779091 - RNA, 12 nt, Human
uuaacucugucu

SEQ ID NO: 1779092 - RNA, 15 nt, Human
uuaacccuucaucuu

SEQ ID NO: 1779093 - RNA, 21 nt, Human
uuaacccuucaucuuccugug

SEQ ID NO: 1779094 - RNA, 11 nt, Human
uuaaauuaccu

SEQ ID NO: 1779095 - RNA, 14 nt, Human
uguuuuguuuauua

SEQ ID NO: 1779096 - RNA, 22 nt, Human
uguuuuaagaggcagggucuca

SEQ ID NO: 1779097 - RNA, 12 nt, Human
uguuuuguacca

SEQ ID NO: 1779098 - RNA, 13 nt, Human
uguuuuguaccag

SEQ ID NO: 1779099 - RNA, 14 nt, Human
uguuuuguaccagu

SEQ ID NO: 1779100 - RNA, 15 nt, Human
uguuuuguaccagug

SEQ ID NO: 1779101 - RNA, 16 nt, Human
uguuuuguaccaguga

SEQ ID NO: 1779102 - RNA, 20 nt, Human
uguuuuguaccagugaauuu

SEQ ID NO: 1779103 - RNA, 17 nt, Human
uguuuuuuuucagccac

SEQ ID NO: 1779104 - RNA, 20 nt, Human
uguuuuaagaggcagggucu

SEQ ID NO: 1779105 - RNA, 13 nt, Human
uguuugugcugug

SEQ ID NO: 1779106 - RNA, 14 nt, Human
uguuugugcugugg

SEQ ID NO: 1779107 - RNA, 17 nt, Human
uguuugucauuagccug

SEQ ID NO: 1779108 - RNA, 15 nt, Human
uguuugucauuagcc

SEQ ID NO: 1779109 - RNA, 22 nt, Human
uguuugguauuguauuuauuca

SEQ ID NO: 1779110 - RNA, 17 nt, Human
uguuugguauuguauuu

SEQ ID NO: 1779111 - RNA, 16 nt, Human
uguuugguauuguauu

SEQ ID NO: 1779112 - RNA, 13 nt, Human
uguuuccuuuuuu

SEQ ID NO: 1779113 - RNA, 16 nt, Human
uguuuccuuuuuuccc

SEQ ID NO: 1779114 - RNA, 16 nt, Human
uggugccccccacccc

SEQ ID NO: 1779115 - RNA, 23 nt, Human
uggugccccccaccccuggaaga

SEQ ID NO: 1779116 - RNA, 17 nt, Human
uggugcccuccucacuc

SEQ ID NO: 1779117 - RNA, 16 nt, Human
uguuucaauugcaucu

SEQ ID NO: 1779118 - RNA, 18 nt, Human
uuagaguuagacuguugg

SEQ ID NO: 1779119 - RNA, 17 nt, Human
uuagaguuagacuguug

SEQ ID NO: 1779120 - RNA, 14 nt, Human
uuagaguuagacug

SEQ ID NO: 1779121 - RNA, 13 nt, Human
uuagaguuagacu

SEQ ID NO: 1779122 - RNA, 12 nt, Human
uuagaguuagac

SEQ ID NO: 1779123 - RNA, 16 nt, Human
uuagagugucuuucca

SEQ ID NO: 1779124 - RNA, 17 nt, Human
uuagagugucuuuccac

SEQ ID NO: 1779125 - RNA, 16 nt, Human
uuagaggaaaaauauu

SEQ ID NO: 1779126 - RNA, 20 nt, Human
uuagaguccuaguuuuccua

SEQ ID NO: 1779127 - RNA, 12 nt, Human
uuagcugcuucu

SEQ ID NO: 1779128 - RNA, 20 nt, Human
uuagcugcuucuauguuuca

SEQ ID NO: 1779129 - RNA, 12 nt, Human
uuagcuucagga

SEQ ID NO: 1779130 - RNA, 13 nt, Human
uuagcuucaggaa

SEQ ID NO: 1779131 - RNA, 14 nt, Human
uuagcuucaggaac

SEQ ID NO: 1779132 - RNA, 16 nt, Human
uuagcuucaggaaccu

SEQ ID NO: 1779133 - RNA, 15 nt, Human
uuaggauggcaggac

SEQ ID NO: 1779134 - RNA, 15 nt, Human
uuaguuacuuuagau

SEQ ID NO: 1779135 - RNA, 13 nt, Human
uuagucgugagcu

SEQ ID NO: 1779136 - RNA, 24 nt, Human
uuagucgugagcucuugugaggaa

SEQ ID NO: 1779137 - RNA, 21 nt, Human
uuagucgugagcucuugugag

SEQ ID NO: 1779138 - RNA, 19 nt, Human
uuagucgugagcucuugug

SEQ ID NO: 1779139 - RNA, 16 nt, Human
uuagucgugagcucuu

SEQ ID NO: 1779140 - RNA, 17 nt, Human
uuacuuuaaaaggagcc

SEQ ID NO: 1779141 - RNA, 18 nt, Human
uuacuuuaaaaggagcca

SEQ ID NO: 1779142 - RNA, 14 nt, Human
uuacuuuguguuca

SEQ ID NO: 1779143 - RNA, 14 nt, Human
uuagaaaaagaaca

SEQ ID NO: 1779144 - RNA, 20 nt, Human
uuagaaaaagaacaugcagu

SEQ ID NO: 1779145 - RNA, 21 nt, Human
uuagaaaaagaacaugcaguu

SEQ ID NO: 1779146 - RNA, 22 nt, Human
uuagaaaaagaacaugcaguuu

SEQ ID NO: 1779147 - RNA, 18 nt, Human
uuagacuaaggccauuau

SEQ ID NO: 1779148 - RNA, 16 nt, Human
uuagagaaugagaaau

SEQ ID NO: 1779149 - RNA, 20 nt, Human
uuagacuguuggggugggua

SEQ ID NO: 1779150 - RNA, 13 nt, Human
uuacuaugccugu

SEQ ID NO: 1779151 - RNA, 16 nt, Human
uuacuagggaucccuc

SEQ ID NO: 1779152 - RNA, 20 nt, Human
uuacuagggaucccucaucu

SEQ ID NO: 1779153 - RNA, 23 nt, Human
uuacuagggaucccucaucuguc

SEQ ID NO: 1779154 - RNA, 14 nt, Human
uuacuaugccugug

SEQ ID NO: 1779155 - RNA, 18 nt, Human
uuacuaugccugugucuu

SEQ ID NO: 1779156 - RNA, 11 nt, Human
uuacuucugcu

SEQ ID NO: 1779157 - RNA, 15 nt, Human
uuacuucucuauaaa

SEQ ID NO: 1779158 - RNA, 18 nt, Human
uuacuucucuauaaaaaa

SEQ ID NO: 1779159 - RNA, 24 nt, Human
uuacuucucuauaaaaaauaugua

SEQ ID NO: 1779160 - RNA, 12 nt, Human
uuacuucugcua

SEQ ID NO: 1779161 - RNA, 16 nt, Human
uuacuuaacuguuuca

SEQ ID NO: 1779162 - RNA, 12 nt, Human
uucccccuaaac

SEQ ID NO: 1779163 - RNA, 13 nt, Human
uucccugacucau

SEQ ID NO: 1779164 - RNA, 16 nt, Human
uucccugacucauucu

SEQ ID NO: 1779165 - RNA, 14 nt, Human
uuccucauuaaauu

SEQ ID NO: 1779166 - RNA, 17 nt, Human
uuccucauuaaauuacc

SEQ ID NO: 1779167 - RNA, 19 nt, Human
uuccuauuccaagcuucca

SEQ ID NO: 1779168 - RNA, 21 nt, Human
uuccuauuccaagcuuccaua

SEQ ID NO: 1779169 - RNA, 22 nt, Human
uuccuauuucaguguuaccugu

SEQ ID NO: 1779170 - RNA, 16 nt, Human
uuccuauuuuuaaaua

SEQ ID NO: 1779171 - RNA, 17 nt, Human
uuccuauuuuuaaauaa

SEQ ID NO: 1779172 - RNA, 22 nt, Human
uuccuauuuuuaaauaauuucc

SEQ ID NO: 1779173 - RNA, 18 nt, Human
uuccuaugcuauugacaa

SEQ ID NO: 1779174 - RNA, 11 nt, Human
uuccuauaagg

SEQ ID NO: 1779175 - RNA, 13 nt, Human
uuccuauacgcag

SEQ ID NO: 1779176 - RNA, 19 nt, Human
uuccuauacgcagcgugcu

SEQ ID NO: 1779177 - RNA, 14 nt, Human
uucgggcuggccau

SEQ ID NO: 1779178 - RNA, 12 nt, Human
uucgggcugugc

SEQ ID NO: 1779179 - RNA, 13 nt, Human
uucgggcugugcc

SEQ ID NO: 1779180 - RNA, 15 nt, Human
uuccuuggcuuuaug

SEQ ID NO: 1779181 - RNA, 14 nt, Human
uucgggcugugccc

SEQ ID NO: 1779182 - RNA, 17 nt, Human
uucguucgcagagcuuu

SEQ ID NO: 1779183 - RNA, 19 nt, Human
uuccuggaggucagcauuu

SEQ ID NO: 1779184 - RNA, 21 nt, Human
uuccuugaccugcauuguaaa

SEQ ID NO: 1779185 - RNA, 22 nt, Human
uuccuugaccugcauuguaaau

SEQ ID NO: 1779186 - RNA, 11 nt, Human
uucaggaaccu

SEQ ID NO: 1779187 - RNA, 20 nt, Human
uucaggaaccucgaguacug

SEQ ID NO: 1779188 - RNA, 21 nt, Human
uucaggaaccucgaguacugu

SEQ ID NO: 1779189 - RNA, 22 nt, Human
uucaggaaccucgaguacugug

SEQ ID NO: 1779190 - RNA, 15 nt, Human
uucauuuccuguguc

SEQ ID NO: 1779191 - RNA, 16 nt, Human
uucauuuccugugucu

SEQ ID NO: 1779192 - RNA, 20 nt, Human
uuccaaauaaaauguucccu

SEQ ID NO: 1779193 - RNA, 15 nt, Human
uuccaaaccuuaucu

SEQ ID NO: 1779194 - RNA, 20 nt, Human
uuccaaaccuuaucuccaca

SEQ ID NO: 1779195 - RNA, 15 nt, Human
uucccccacugauca

SEQ ID NO: 1779196 - RNA, 16 nt, Human
uuccauuggaucucau

SEQ ID NO: 1779197 - RNA, 17 nt, Human
uuccauuggaucucauu

SEQ ID NO: 1779198 - RNA, 11 nt, Human
uuauucugcuc

SEQ ID NO: 1779199 - RNA, 14 nt, Human
uuauugaaagaauu

SEQ ID NO: 1779200 - RNA, 16 nt, Human
uuauugacucuggguc

SEQ ID NO: 1779201 - RNA, 22 nt, Human
uuauugacucuggguccuuccu

SEQ ID NO: 1779202 - RNA, 15 nt, Human
uuauugcccacgcug

SEQ ID NO: 1779203 - RNA, 13 nt, Human
uuauugcauuaua

SEQ ID NO: 1779204 - RNA, 14 nt, Human
uuauuaaaauucug

SEQ ID NO: 1779205 - RNA, 15 nt, Human
uuauuaaaauucuga

SEQ ID NO: 1779206 - RNA, 16 nt, Human
uuauuaaaauucugaa

SEQ ID NO: 1779207 - RNA, 17 nt, Human
uuaugcauguuuguugu

SEQ ID NO: 1779208 - RNA, 18 nt, Human
uuaugcuguagucuuacc

SEQ ID NO: 1779209 - RNA, 22 nt, Human
uuauuuuauaagaaaaacuuuu

SEQ ID NO: 1779210 - RNA, 23 nt, Human
uucaaagccagcguccuccucug

SEQ ID NO: 1779211 - RNA, 12 nt, Human
uuauuguacuug

SEQ ID NO: 1779212 - RNA, 18 nt, Human
uuauuguguuugucauua

SEQ ID NO: 1779213 - RNA, 17 nt, Human
uuauuguguuugucauu

SEQ ID NO: 1779214 - RNA, 16 nt, Human
uuauuguguuugucau

SEQ ID NO: 1779215 - RNA, 15 nt, Human
uuauuguguuuguca

SEQ ID NO: 1779216 - RNA, 12 nt, Human
uuauugccuucu

SEQ ID NO: 1779217 - RNA, 14 nt, Human
uuauugccuucuca

SEQ ID NO: 1779218 - RNA, 17 nt, Human
uuauugccuucucacca

SEQ ID NO: 1779219 - RNA, 20 nt, Human
uuauugccuucucaccagcu

SEQ ID NO: 1779220 - RNA, 22 nt, Human
uuauugccuucucaccagcugc

SEQ ID NO: 1779221 - RNA, 23 nt, Human
uuauugccuucucaccagcugca

SEQ ID NO: 1779222 - RNA, 19 nt, Human
uucaauugcaucucccaga

SEQ ID NO: 1779223 - RNA, 15 nt, Human
uucaauugcaucucc

SEQ ID NO: 1779224 - RNA, 17 nt, Human
uucaauugcaucuccca

SEQ ID NO: 1779225 - RNA, 21 nt, Human
uucaccugauucaacuaaaaa

SEQ ID NO: 1779226 - RNA, 14 nt, Human
uucacuaaagcagu

SEQ ID NO: 1779227 - RNA, 14 nt, Human
uucacgugcagcuc

SEQ ID NO: 1779228 - RNA, 13 nt, Human
uucacuaaagcag

SEQ ID NO: 1779229 - RNA, 23 nt, Human
uucaccuucguuuacuaugccug

SEQ ID NO: 1779230 - RNA, 12 nt, Human
uucaccugagca

SEQ ID NO: 1779231 - RNA, 16 nt, Human
uucaccugauucaacu

SEQ ID NO: 1779232 - RNA, 14 nt, Human
uuugaauaaagaau

SEQ ID NO: 1779233 - RNA, 16 nt, Human
uuugaauaaagaauac

SEQ ID NO: 1779234 - RNA, 18 nt, Human
uuugaauaaagaauacuu

SEQ ID NO: 1779235 - RNA, 20 nt, Human
uuugaauaaagaauacuuga

SEQ ID NO: 1779236 - RNA, 21 nt, Human
uuugaauaaagaauacuugaa

SEQ ID NO: 1779237 - RNA, 22 nt, Human
uuugaagucauaccaaugaaaa

SEQ ID NO: 1779238 - RNA, 21 nt, Human
uuugaaauuguauuacaaauc

SEQ ID NO: 1779239 - RNA, 20 nt, Human
uuugaaauucugaauuugca

SEQ ID NO: 1779240 - RNA, 21 nt, Human
uuugaaauucugaauuugcaa

SEQ ID NO: 1779241 - RNA, 22 nt, Human
uuugaaauucugaauuugcaaa

SEQ ID NO: 1779242 - RNA, 21 nt, Human
uuuguaaaguugguuggauaa

SEQ ID NO: 1779243 - RNA, 22 nt, Human
uuuguaaaguugguuggauaag

SEQ ID NO: 1779244 - RNA, 13 nt, Human
uuugguucccuuc

SEQ ID NO: 1779245 - RNA, 14 nt, Human
uuugauccaagcug

SEQ ID NO: 1779246 - RNA, 14 nt, Human
uuugcuucuagagc

SEQ ID NO: 1779247 - RNA, 21 nt, Human
uuuccuggcacuggaccccag

SEQ ID NO: 1779248 - RNA, 23 nt, Human
uuuccuggcacuggaccccagca

SEQ ID NO: 1779249 - RNA, 17 nt, Human
uuuccucucuauauuuc

SEQ ID NO: 1779250 - RNA, 24 nt, Human
uuuccuaauaaaguucuguacuca

SEQ ID NO: 1779251 - RNA, 21 nt, Human
uuuccuaauaaaguucuguac

SEQ ID NO: 1779252 - RNA, 23 nt, Human
uuuccuaauaaaguucuguacuc

SEQ ID NO: 1779253 - RNA, 12 nt, Human
uuuccuccucug

SEQ ID NO: 1779254 - RNA, 12 nt, Human
uuuccuccuuuc

SEQ ID NO: 1779255 - RNA, 13 nt, Human
uuucuaaauguuu

SEQ ID NO: 1779256 - RNA, 22 nt, Human
uuucuacccagcgagcccuggu

SEQ ID NO: 1779257 - RNA, 15 nt, Human
uuucuacccagcgag

SEQ ID NO: 1779258 - RNA, 18 nt, Human
uuucuacccagcgagccc

SEQ ID NO: 1779259 - RNA, 17 nt, Human
uuucuaccuuaaaggga

SEQ ID NO: 1779260 - RNA, 15 nt, Human
uuucucuccuguccu

SEQ ID NO: 1779261 - RNA, 16 nt, Human
uuucucuccuguccuc

SEQ ID NO: 1779262 - RNA, 20 nt, Human
uuucucuuuuccccuuuccu

SEQ ID NO: 1779263 - RNA, 21 nt, Human
uuucucuuuuccccuuuccug

SEQ ID NO: 1779264 - RNA, 22 nt, Human
uuucucuuuuccccuuuccugu

SEQ ID NO: 1779265 - RNA, 20 nt, Human
uuucaauugcaucucccaga

SEQ ID NO: 1779266 - RNA, 18 nt, Human
uuucaauugcaucuccca

SEQ ID NO: 1779267 - RNA, 18 nt, Human
uuuccaaaaguggccucu

SEQ ID NO: 1779268 - RNA, 17 nt, Human
uuucauuuuuaaaugug

SEQ ID NO: 1779269 - RNA, 23 nt, Human
uuuccacggagccacuccucuga

SEQ ID NO: 1779270 - RNA, 18 nt, Human
uuuauccucuuuagaguu

SEQ ID NO: 1779271 - RNA, 20 nt, Human
uuuaugaaugaaaaaacagu

SEQ ID NO: 1779272 - RNA, 16 nt, Human
uuuauacaauaucauc

SEQ ID NO: 1779273 - RNA, 16 nt, Human
uuuacccucuuugcug

SEQ ID NO: 1779274 - RNA, 15 nt, Human
uuuaauauaaagccu

SEQ ID NO: 1779275 - RNA, 21 nt, Human
uuuacauacacuguauguuau

SEQ ID NO: 1779276 - RNA, 15 nt, Human
uuguuauuuugcaac

SEQ ID NO: 1779277 - RNA, 22 nt, Human
uuguuauuuugcaaccucgcug

SEQ ID NO: 1779278 - RNA, 15 nt, Human
uuguuugguauugua

SEQ ID NO: 1779279 - RNA, 20 nt, Human
uuguuuggggaugagaaagg

SEQ ID NO: 1779280 - RNA, 13 nt, Human
uuguuuagagaau

SEQ ID NO: 1779281 - RNA, 18 nt, Human
uuguuuauuaaauaguua

SEQ ID NO: 1779282 - RNA, 19 nt, Human
uuguuugguauuguauuua

SEQ ID NO: 1779283 - RNA, 16 nt, Human
uuguuugguauuguau

SEQ ID NO: 1779284 - RNA, 21 nt, Human
uuguuugguauuguauuuauu

SEQ ID NO: 1779285 - RNA, 15 nt, Human
uuuaaaaucugucac

SEQ ID NO: 1779286 - RNA, 12 nt, Human
uuuaaaaugucu

SEQ ID NO: 1779287 - RNA, 19 nt, Human
uuuaaaauuuuuuuagaaa

SEQ ID NO: 1779288 - RNA, 18 nt, Human
uuuaaaauuuuuuuagaa

SEQ ID NO: 1779289 - RNA, 20 nt, Human
uugucuaugggacucaaugc

SEQ ID NO: 1779290 - RNA, 14 nt, Human
uugucuaugggacu

SEQ ID NO: 1779291 - RNA, 12 nt, Human
uuguaccaguga

SEQ ID NO: 1779292 - RNA, 22 nt, Human
uuguaccagugaauuuuugcaa

SEQ ID NO: 1779293 - RNA, 23 nt, Human
uuguaccagugaauuuuugcaau

SEQ ID NO: 1779294 - RNA, 19 nt, Human
uugggaauauuugaaucuu

SEQ ID NO: 1779295 - RNA, 17 nt, Human
uugggaauauuugaauc

SEQ ID NO: 1779296 - RNA, 16 nt, Human
uugggaauauuugaau

SEQ ID NO: 1779297 - RNA, 15 nt, Human
uugggaauauuugaa

SEQ ID NO: 1779298 - RNA, 22 nt, Human
uuggcuuuauccucuuuagagu

SEQ ID NO: 1779299 - RNA, 21 nt, Human
uuggcuuuauccucuuuagag

SEQ ID NO: 1779300 - RNA, 17 nt, Human
uuggcuuuaugcacauu

SEQ ID NO: 1779301 - RNA, 20 nt, Human
uuggcuuuauccucuuuaga

SEQ ID NO: 1779302 - RNA, 14 nt, Human
uuggcuuuauccuc

SEQ ID NO: 1779303 - RNA, 19 nt, Human
uuggcaguggacucagaaa

SEQ ID NO: 1779304 - RNA, 20 nt, Human
uuggucugacccacugcuuu

SEQ ID NO: 1779305 - RNA, 17 nt, Human
uugcuggaucaggaagc

SEQ ID NO: 1779306 - RNA, 12 nt, Human
uugcugcugucu

SEQ ID NO: 1779307 - RNA, 21 nt, Human
uugcuaagccccagcaagcaa

SEQ ID NO: 1779308 - RNA, 20 nt, Human
uugccauguuggccaggcug

SEQ ID NO: 1779309 - RNA, 21 nt, Human
uugccauguuggccaggcugg

SEQ ID NO: 1779310 - RNA, 14 nt, Human
uugccuucucacca

SEQ ID NO: 1779311 - RNA, 17 nt, Human
uugccuucucaccagcu

SEQ ID NO: 1779312 - RNA, 20 nt, Human
uugccuucucaccagcugca

SEQ ID NO: 1779313 - RNA, 23 nt, Human
uugccuucucaccagcugcaaag

SEQ ID NO: 1779314 - RNA, 16 nt, Human
uugccuuucgaggccu

SEQ ID NO: 1779315 - RNA, 17 nt, Human
uugccuuucgaggccug

SEQ ID NO: 1779316 - RNA, 18 nt, Human
uugccuuucgaggccuga

SEQ ID NO: 1779317 - RNA, 15 nt, Human
uuggcagcaccuguc

SEQ ID NO: 1779318 - RNA, 17 nt, Human
uuggcaaugccaucauc

SEQ ID NO: 1779319 - RNA, 19 nt, Human
uuggaagcuccgcuuucua

SEQ ID NO: 1779320 - RNA, 19 nt, Human
uugcuguuguccaacuauu

SEQ ID NO: 1779321 - RNA, 14 nt, Human
uugcuguuguccaa

SEQ ID NO: 1779322 - RNA, 23 nt, Human
uuggacaaucaugaaauaugcau

SEQ ID NO: 1779323 - RNA, 23 nt, Human
uuggaauauuguccauuguccaa

SEQ ID NO: 1779324 - RNA, 23 nt, Human
uugcagacaggcaagcaccuccu

SEQ ID NO: 1779325 - RNA, 19 nt, Human
uugcauaacaauuccucua

SEQ ID NO: 1779326 - RNA, 13 nt, Human
uugcauaagguuu

SEQ ID NO: 1779327 - RNA, 19 nt, Human
uugccauauuuucaccauu

SEQ ID NO: 1779328 - RNA, 16 nt, Human
uugccauguuggccag

SEQ ID NO: 1779329 - RNA, 17 nt, Human
uugccauguuggccagg

SEQ ID NO: 1779330 - RNA, 18 nt, Human
uugccauguuggccaggc

SEQ ID NO: 1779331 - RNA, 19 nt, Human
uugccauguuggccaggcu

SEQ ID NO: 1779332 - RNA, 21 nt, Human
uugaauucuugguugaggaaa

SEQ ID NO: 1779333 - RNA, 15 nt, Human
uugaauuguaacugu

SEQ ID NO: 1779334 - RNA, 20 nt, Human
uugaauguuaaauaaauugu

SEQ ID NO: 1779335 - RNA, 18 nt, Human
uugaauuguaacuguucu

SEQ ID NO: 1779336 - RNA, 19 nt, Human
uugaucgccuuucccaggu

SEQ ID NO: 1779337 - RNA, 17 nt, Human
uugauauuuuuucucuc

SEQ ID NO: 1779338 - RNA, 17 nt, Human
uucuggcagguccuccc

SEQ ID NO: 1779339 - RNA, 19 nt, Human
uucuggcagguccuccccu

SEQ ID NO: 1779340 - RNA, 12 nt, Human
uucuaagucuuu

SEQ ID NO: 1779341 - RNA, 15 nt, Human
uucuaagucuuucca

SEQ ID NO: 1779342 - RNA, 17 nt, Human
uucuaagucuuuccauu

SEQ ID NO: 1779343 - RNA, 13 nt, Human
uucugugcccucc

SEQ ID NO: 1779344 - RNA, 18 nt, Human
uugaauguuaaauaaauu

SEQ ID NO: 1779345 - RNA, 15 nt, Human
uugaauguuaaauaa

SEQ ID NO: 1779346 - RNA, 13 nt, Human
uugaauguuaaau

SEQ ID NO: 1779347 - RNA, 21 nt, Human
uugaaaaucuuauaauuuaaa

SEQ ID NO: 1779348 - RNA, 22 nt, Human
uuugugguacgaccuuuagauu

SEQ ID NO: 1779349 - RNA, 14 nt, Human
aaaaacacaaaagu

SEQ ID NO: 1779350 - RNA, 16 nt, Human
aaaacaauaaaauuuu

SEQ ID NO: 1779351 - RNA, 22 nt, Human
aaaaauuuuauaaaauuaagca

SEQ ID NO: 1779352 - RNA, 21 nt, Human
aaaaauuuugugacauuccuu

SEQ ID NO: 1779353 - RNA, 23 nt, Human
aaaaauuuugugacauuccuucu

SEQ ID NO: 1779354 - RNA, 22 nt, Human
aauuagugcuaagugugaacug

SEQ ID NO: 1779355 - RNA, 18 nt, Human
aauguuugccucugccuc

SEQ ID NO: 1779356 - RNA, 20 nt, Human
aaugucuugaugcaugcacu

SEQ ID NO: 1779357 - RNA, 11 nt, Human
aaugucuugug

SEQ ID NO: 1779358 - RNA, 13 nt, Human
aaugucuuguguu

SEQ ID NO: 1779359 - RNA, 19 nt, Human
aauguuugccucugccucu

SEQ ID NO: 1779360 - RNA, 16 nt, Human
aaugguauaaauuuca

SEQ ID NO: 1779361 - RNA, 13 nt, Human
aauggcuucagug

SEQ ID NO: 1779362 - RNA, 22 nt, Human
aaugguggggaacuauaaagaa

SEQ ID NO: 1779363 - RNA, 20 nt, Human
aaugucucuuuaaugucaca

SEQ ID NO: 1779364 - RNA, 14 nt, Human
aauauaaguaaagu

SEQ ID NO: 1779365 - RNA, 16 nt, Human
aauauaaguaaaguga

SEQ ID NO: 1779366 - RNA, 17 nt, Human
aauauaaguaaagugau

SEQ ID NO: 1779367 - RNA, 14 nt, Human
aauauuauugaacu

SEQ ID NO: 1779368 - RNA, 17 nt, Human
aaucaacaccuuaauau

SEQ ID NO: 1779369 - RNA, 19 nt, Human
aauauucagacaaaaugga

SEQ ID NO: 1779370 - RNA, 10 nt, Human
aaucaacuuu

SEQ ID NO: 1779371 - RNA, 13 nt, Human
aaucaacuuuuua

SEQ ID NO: 1779372 - RNA, 18 nt, Human
aaucaacuuuuuauugcc

SEQ ID NO: 1779373 - RNA, 19 nt, Human
aaucaacuuuuuauugccu

SEQ ID NO: 1779374 - RNA, 20 nt, Human
aaucaacuuuuuauugccuu

SEQ ID NO: 1779375 - RNA, 21 nt, Human
aaucaacuuuuuauugccuuc

SEQ ID NO: 1779376 - RNA, 22 nt, Human
aaucaacuuuuuauugccuucu

SEQ ID NO: 1779377 - RNA, 23 nt, Human
aaucaacuuuuuauugccuucuc

SEQ ID NO: 1779378 - RNA, 16 nt, Human
aaugaaccacaucuug

SEQ ID NO: 1779379 - RNA, 17 nt, Human
aaugaaccacaucuugc

SEQ ID NO: 1779380 - RNA, 23 nt, Human
aaugaaccacaucuugcucugcu

SEQ ID NO: 1779381 - RNA, 10 nt, Human
aaucugccug

SEQ ID NO: 1779382 - RNA, 12 nt, Human
aaucugccuggg

SEQ ID NO: 1779383 - RNA, 19 nt, Human
aaucugcaauuucuacuac

SEQ ID NO: 1779384 - RNA, 11 nt, Human
aaugaagaaag

SEQ ID NO: 1779385 - RNA, 21 nt, Human
aagucucucauucuaggccuc

SEQ ID NO: 1779386 - RNA, 16 nt, Human
aagguuggagcccagg

SEQ ID NO: 1779387 - RNA, 17 nt, Human
aagguuggagcccaggg

SEQ ID NO: 1779388 - RNA, 18 nt, Human
aagguuggagcccagggc

SEQ ID NO: 1779389 - RNA, 14 nt, Human
aagguuggauggau

SEQ ID NO: 1779390 - RNA, 11 nt, Human
aaguacuucuu

SEQ ID NO: 1779391 - RNA, 11 nt, Human
aaguagaaaug

SEQ ID NO: 1779392 - RNA, 13 nt, Human
aaguagaaauggu

SEQ ID NO: 1779393 - RNA, 22 nt, Human
aagugguccuagaggcccuuug

SEQ ID NO: 1779394 - RNA, 19 nt, Human
aagugcuucauucuuugca

SEQ ID NO: 1779395 - RNA, 10 nt, Human
aauaaugcag

SEQ ID NO: 1779396 - RNA, 12 nt, Human
aauaaugcagua

SEQ ID NO: 1779397 - RNA, 15 nt, Human
aauaaugcaguaugg

SEQ ID NO: 1779398 - RNA, 17 nt, Human
aauaaugcaguauggua

SEQ ID NO: 1779399 - RNA, 19 nt, Human
aauaaugcaguaugguaca

SEQ ID NO: 1779400 - RNA, 22 nt, Human
aauaaugcaguaugguacauuu

SEQ ID NO: 1779401 - RNA, 23 nt, Human
aauaaugcaguaugguacauuuu

SEQ ID NO: 1779402 - RNA, 21 nt, Human
aauaauccuaaacauaugaau

SEQ ID NO: 1779403 - RNA, 17 nt, Human
aagugcuguauaaaauc

SEQ ID NO: 1779404 - RNA, 16 nt, Human
aagugcuguauaaaau

SEQ ID NO: 1779405 - RNA, 15 nt, Human
aagugcuguauaaaa

SEQ ID NO: 1779406 - RNA, 13 nt, Human
aagugcuguauaa

SEQ ID NO: 1779407 - RNA, 12 nt, Human
aagugcuguaua

SEQ ID NO: 1779408 - RNA, 22 nt, Human
aagugcuguauaaaaucagcca

SEQ ID NO: 1779409 - RNA, 19 nt, Human
aagugcuguauaaaaucag

SEQ ID NO: 1779410 - RNA, 23 nt, Human
aagugcuguauaaaaucagccaa

SEQ ID NO: 1779411 - RNA, 14 nt, Human
aagcagagaagcuc

SEQ ID NO: 1779412 - RNA, 16 nt, Human
aagcagagaagcucuc

SEQ ID NO: 1779413 - RNA, 21 nt, Human
aagcagaccacugauaaaacc

SEQ ID NO: 1779414 - RNA, 22 nt, Human
aagcaggaaaugaaaaugucuu

SEQ ID NO: 1779415 - RNA, 18 nt, Human
aagccacuuaaaauguuc

SEQ ID NO: 1779416 - RNA, 15 nt, Human
aagccagcugcccua

SEQ ID NO: 1779417 - RNA, 16 nt, Human
aagccagcugcccuau

SEQ ID NO: 1779418 - RNA, 22 nt, Human
aagccagcugcccuaugggccu

SEQ ID NO: 1779419 - RNA, 20 nt, Human
aagccagcguccuccucugu

SEQ ID NO: 1779420 - RNA, 14 nt, Human
aagaacaugcaguu

SEQ ID NO: 1779421 - RNA, 16 nt, Human
aagaacaugcaguuug

SEQ ID NO: 1779422 - RNA, 19 nt, Human
aagaacaugcaguuugaaa

SEQ ID NO: 1779423 - RNA, 20 nt, Human
aagaacaugcaguuugaaau

SEQ ID NO: 1779424 - RNA, 22 nt, Human
aagaacaugcaguuugaaauuc

SEQ ID NO: 1779425 - RNA, 17 nt, Human
aagauuuggaagcucuu

SEQ ID NO: 1779426 - RNA, 20 nt, Human
aagauuuggaagcucuucuu

SEQ ID NO: 1779427 - RNA, 17 nt, Human
aagauuuggaauaaagu

SEQ ID NO: 1779428 - RNA, 23 nt, Human
aagcugccuccccucuccuuccu

SEQ ID NO: 1779429 - RNA, 20 nt, Human
aaggacugagcacccucugg

SEQ ID NO: 1779430 - RNA, 21 nt, Human
aaggacugagcacccucugga

SEQ ID NO: 1779431 - RNA, 18 nt, Human
aaggacauugcggacagc

SEQ ID NO: 1779432 - RNA, 12 nt, Human
aagcugcucuga

SEQ ID NO: 1779433 - RNA, 16 nt, Human
aagcugcucugagcca

SEQ ID NO: 1779434 - RNA, 19 nt, Human
aagcugcucugagccacag

SEQ ID NO: 1779435 - RNA, 20 nt, Human
aagcugcucugagccacagu

SEQ ID NO: 1779436 - RNA, 20 nt, Human
aaaucuuucuuucuuagaaa

SEQ ID NO: 1779437 - RNA, 18 nt, Human
aaaucuuucuuucuuaga

SEQ ID NO: 1779438 - RNA, 16 nt, Human
aaaucuuucuuucuua

SEQ ID NO: 1779439 - RNA, 11 nt, Human
aaaucaacuuu

SEQ ID NO: 1779440 - RNA, 12 nt, Human
aaaucaacuuuu

SEQ ID NO: 1779441 - RNA, 21 nt, Human
aaaucaacuuuuuauugccuu

SEQ ID NO: 1779442 - RNA, 22 nt, Human
aaaucaacuuuuuauugccuuc

SEQ ID NO: 1779443 - RNA, 23 nt, Human
aaaucaacuuuuuauugccuucu

SEQ ID NO: 1779444 - RNA, 21 nt, Human
aaaucaacaccuuaauaugcu

SEQ ID NO: 1779445 - RNA, 22 nt, Human
aaagucucucauucuaggccuc

SEQ ID NO: 1779446 - RNA, 12 nt, Human
aaagucucuugu

SEQ ID NO: 1779447 - RNA, 11 nt, Human
aaagugcuggg

SEQ ID NO: 1779448 - RNA, 14 nt, Human
aaagugcugggauu

SEQ ID NO: 1779449 - RNA, 12 nt, Human
aaauaacaauga

SEQ ID NO: 1779450 - RNA, 14 nt, Human
aaauaaagagagaa

SEQ ID NO: 1779451 - RNA, 22 nt, Human
aaauaaagagagaacaggacua

SEQ ID NO: 1779452 - RNA, 19 nt, Human
aaagaacaugcaguuugaa

SEQ ID NO: 1779453 - RNA, 20 nt, Human
aaagaacaugcaguuugaaa

SEQ ID NO: 1779454 - RNA, 21 nt, Human
aaagaacaugcaguuugaaau

SEQ ID NO: 1779455 - RNA, 22 nt, Human
aaagauauaagugcuguauaaa

SEQ ID NO: 1779456 - RNA, 21 nt, Human
aaagauauaagugcuguauaa

SEQ ID NO: 1779457 - RNA, 20 nt, Human
aaagauauaagugcuguaua

SEQ ID NO: 1779458 - RNA, 18 nt, Human
aaagauauaagugcugua

SEQ ID NO: 1779459 - RNA, 17 nt, Human
aaagauauaagugcugu

SEQ ID NO: 1779460 - RNA, 16 nt, Human
aaagauauaagugcug

SEQ ID NO: 1779461 - RNA, 15 nt, Human
aaagauauaagugcu

SEQ ID NO: 1779462 - RNA, 13 nt, Human
aaaauucagugga

SEQ ID NO: 1779463 - RNA, 18 nt, Human
aaaauugccauauugcac

SEQ ID NO: 1779464 - RNA, 17 nt, Human
aaaauugccauauugca

SEQ ID NO: 1779465 - RNA, 16 nt, Human
aaaauugccauauugc

SEQ ID NO: 1779466 - RNA, 14 nt, Human
aaaauugccauauu

SEQ ID NO: 1779467 - RNA, 13 nt, Human
aaaauugccauau

SEQ ID NO: 1779468 - RNA, 22 nt, Human
aaaauucaugauacucauuucu

SEQ ID NO: 1779469 - RNA, 21 nt, Human
aaaauugccauauugcacaug

SEQ ID NO: 1779470 - RNA, 19 nt, Human
aaaauugccauauugcaca

SEQ ID NO: 1779471 - RNA, 18 nt, Human
aaacacuucguucgcaga

SEQ ID NO: 1779472 - RNA, 21 nt, Human
aaacacuucguucgcagagcu

SEQ ID NO: 1779473 - RNA, 18 nt, Human
aaacagaugugaauauuc

SEQ ID NO: 1779474 - RNA, 12 nt, Human
aacuuugaauaa

SEQ ID NO: 1779475 - RNA, 14 nt, Human
aacuuugaauaaag

SEQ ID NO: 1779476 - RNA, 15 nt, Human
aacuuugaauaaaga

SEQ ID NO: 1779477 - RNA, 17 nt, Human
aacuuugaauaaagaau

SEQ ID NO: 1779478 - RNA, 20 nt, Human
aacuuugaauaaagaauacu

SEQ ID NO: 1779479 - RNA, 23 nt, Human
aacuuugaauaaagaauacuuga

SEQ ID NO: 1779480 - RNA, 14 nt, Human
aacuuuuuauugcc

SEQ ID NO: 1779481 - RNA, 16 nt, Human
aacuuuuuauugccuu

SEQ ID NO: 1779482 - RNA, 20 nt, Human
aacuuuuuauugccuucuca

SEQ ID NO: 1779483 - RNA, 23 nt, Human
aacuuuuuauugccuucucacca

SEQ ID NO: 1779484 - RNA, 12 nt, Human
aacuuuuuuggu

SEQ ID NO: 1779485 - RNA, 21 nt, Human
aacuuagccauuuuucaaagc

SEQ ID NO: 1779486 - RNA, 22 nt, Human
aacuuagccauuuuucaaagca

SEQ ID NO: 1779487 - RNA, 23 nt, Human
aacuuauauuaauaguaauuugu

SEQ ID NO: 1779488 - RNA, 19 nt, Human
aacuuauccuaaaacaaau

SEQ ID NO: 1779489 - RNA, 14 nt, Human
aacuguuuccuuca

SEQ ID NO: 1779490 - RNA, 17 nt, Human
aacaaaauggcuucagu

SEQ ID NO: 1779491 - RNA, 14 nt, Human
aacaaaauguagaa

SEQ ID NO: 1779492 - RNA, 13 nt, Human
aacaaaaauuguc

SEQ ID NO: 1779493 - RNA, 14 nt, Human
aaauugccauauug

SEQ ID NO: 1779494 - RNA, 15 nt, Human
aacaacucuuugaga

SEQ ID NO: 1779495 - RNA, 14 nt, Human
aacaccuuaauaug

SEQ ID NO: 1779496 - RNA, 15 nt, Human
aacaccuuaauaugc

SEQ ID NO: 1779497 - RNA, 16 nt, Human
aacccuggggaaggag

SEQ ID NO: 1779498 - RNA, 19 nt, Human
aacccuggggaaggagcca

SEQ ID NO: 1779499 - RNA, 20 nt, Human
aacccuggggaaggagccag

SEQ ID NO: 1779500 - RNA, 21 nt, Human
aacccuggggaaggagccagu

SEQ ID NO: 1779501 - RNA, 18 nt, Human
aacccuggggccugacug

SEQ ID NO: 1779502 - RNA, 20 nt, Human
aacccuggggccugacugcu

SEQ ID NO: 1779503 - RNA, 13 nt, Human
aacccugccaugg

SEQ ID NO: 1779504 - RNA, 21 nt, Human
aacccugccauggaacuguuu

SEQ ID NO: 1779505 - RNA, 16 nt, Human
aaccaguauuuuugcu

SEQ ID NO: 1779506 - RNA, 21 nt, Human
aaccaguauuuuugcugcuuc

SEQ ID NO: 1779507 - RNA, 22 nt, Human
aaccaguauuuuugcugcuucu

SEQ ID NO: 1779508 - RNA, 23 nt, Human
aaccaguauuuuugcugcuucug

SEQ ID NO: 1779509 - RNA, 20 nt, Human
aaccagcuggucugggugua

SEQ ID NO: 1779510 - RNA, 14 nt, Human
aaccagccggggcc

SEQ ID NO: 1779511 - RNA, 10 nt, Human
aacagcugcc

SEQ ID NO: 1779512 - RNA, 11 nt, Human
aacagcugccu

SEQ ID NO: 1779513 - RNA, 12 nt, Human
aacagcugccuu

SEQ ID NO: 1779514 - RNA, 13 nt, Human
aacagcugccuua

SEQ ID NO: 1779515 - RNA, 14 nt, Human
aacagcugccuuag

SEQ ID NO: 1779516 - RNA, 15 nt, Human
aacagcugccuuagc

SEQ ID NO: 1779517 - RNA, 18 nt, Human
aacagcugccuuagcuuc

SEQ ID NO: 1779518 - RNA, 19 nt, Human
aacagcugccuuagcuuca

SEQ ID NO: 1779519 - RNA, 20 nt, Human
aacagcugccuuagcuucag

SEQ ID NO: 1779520 - RNA, 22 nt, Human
aacagcugccuuagcuucagga

SEQ ID NO: 1779521 - RNA, 23 nt, Human
aacagcugccuuagcuucaggaa

SEQ ID NO: 1779522 - RNA, 16 nt, Human
aacaucacaccugccc

SEQ ID NO: 1779523 - RNA, 18 nt, Human
aacaucacaccugcccua

SEQ ID NO: 1779524 - RNA, 13 nt, Human
aacaucacacaca

SEQ ID NO: 1779525 - RNA, 11 nt, Human
aacaugcaguu

SEQ ID NO: 1779526 - RNA, 13 nt, Human
aacaugcaguuug

SEQ ID NO: 1779527 - RNA, 15 nt, Human
aacaugcaguuugaa

SEQ ID NO: 1779528 - RNA, 17 nt, Human
aacaugcaguuugaaau

SEQ ID NO: 1779529 - RNA, 18 nt, Human
aacaugcaguuugaaauu

SEQ ID NO: 1779530 - RNA, 19 nt, Human
aacaugcaguuugaaauuc

SEQ ID NO: 1779531 - RNA, 21 nt, Human
aacaugcaguuugaaauucug

SEQ ID NO: 1779532 - RNA, 22 nt, Human
aacaugcaguuugaaauucuga

SEQ ID NO: 1779533 - RNA, 21 nt, Human
aacaugccugccccaaacaaa

SEQ ID NO: 1779534 - RNA, 22 nt, Human
aacaugccugccccaaacaaau

SEQ ID NO: 1779535 - RNA, 12 nt, Human
accucuuccgac

SEQ ID NO: 1779536 - RNA, 22 nt, Human
accucuuccgacucuuucugag

SEQ ID NO: 1779537 - RNA, 16 nt, Human
accugcccccaaucca

SEQ ID NO: 1779538 - RNA, 15 nt, Human
accucuucagaggcc

SEQ ID NO: 1779539 - RNA, 17 nt, Human
accucuucagaggcccu

SEQ ID NO: 1779540 - RNA, 18 nt, Human
accucuucagaggcccuc

SEQ ID NO: 1779541 - RNA, 14 nt, Human
accuuggcucaagu

SEQ ID NO: 1779542 - RNA, 12 nt, Human
accuuggcugca

SEQ ID NO: 1779543 - RNA, 17 nt, Human
accuuguuauuucucag

SEQ ID NO: 1779544 - RNA, 22 nt, Human
accuuguuauuucucagacuuu

SEQ ID NO: 1779545 - RNA, 14 nt, Human
accuuggcugcagg

SEQ ID NO: 1779546 - RNA, 18 nt, Human
acgccacugcacuauagc

SEQ ID NO: 1779547 - RNA, 16 nt, Human
acgugcauugugcuuc

SEQ ID NO: 1779548 - RNA, 15 nt, Human
acgugcauugugcuu

SEQ ID NO: 1779549 - RNA, 14 nt, Human
acgugcauugugcu

SEQ ID NO: 1779550 - RNA, 12 nt, Human
acgugcauugug

SEQ ID NO: 1779551 - RNA, 22 nt, Human
acgugcauugugcuucuuucuu

SEQ ID NO: 1779552 - RNA, 16 nt, Human
acucugugucaggugg

SEQ ID NO: 1779553 - RNA, 18 nt, Human
acucuauaagauuccaaa

SEQ ID NO: 1779554 - RNA, 19 nt, Human
acucuggguccuuccugaa

SEQ ID NO: 1779555 - RNA, 15 nt, Human
acucuggguccuucc

SEQ ID NO: 1779556 - RNA, 16 nt, Human
acucuggguccuuccu

SEQ ID NO: 1779557 - RNA, 18 nt, Human
acucuggguccuuccuga

SEQ ID NO: 1779558 - RNA, 14 nt, Human
acucccuugggcuc

SEQ ID NO: 1779559 - RNA, 13 nt, Human
acuauaaaagcuu

SEQ ID NO: 1779560 - RNA, 20 nt, Human
acuauaaagaaguaacaaaa

SEQ ID NO: 1779561 - RNA, 14 nt, Human
acucagcuccguga

SEQ ID NO: 1779562 - RNA, 20 nt, Human
acucaggcgggacagugcug

SEQ ID NO: 1779563 - RNA, 23 nt, Human
acucaggcgggacagugcugcag

SEQ ID NO: 1779564 - RNA, 16 nt, Human
acuagggccaagccca

SEQ ID NO: 1779565 - RNA, 18 nt, Human
acuagggaucccucaucu

SEQ ID NO: 1779566 - RNA, 19 nt, Human
acuagggaucccucaucug

SEQ ID NO: 1779567 - RNA, 20 nt, Human
acuagggaucccucaucugu

SEQ ID NO: 1779568 - RNA, 14 nt, Human
acuagcuauggugu

SEQ ID NO: 1779569 - RNA, 18 nt, Human
acuucugccauauucugu

SEQ ID NO: 1779570 - RNA, 19 nt, Human
acuucugccauauucuguu

SEQ ID NO: 1779571 - RNA, 15 nt, Human
acuucuuucagcaga

SEQ ID NO: 1779572 - RNA, 20 nt, Human
acuuguaaaggaauuuaaaa

SEQ ID NO: 1779573 - RNA, 19 nt, Human
acuuguaaaggaauuuaaa

SEQ ID NO: 1779574 - RNA, 20 nt, Human
acuguuuucuuuaugucuuu

SEQ ID NO: 1779575 - RNA, 20 nt, Human
acuguuuauugaaagaauua

SEQ ID NO: 1779576 - RNA, 14 nt, Human
acuguccuuuccuu

SEQ ID NO: 1779577 - RNA, 21 nt, Human
acuguccuuuccuuggcuuua

SEQ ID NO: 1779578 - RNA, 21 nt, Human
acugguguuaucaccgugggc

SEQ ID NO: 1779579 - RNA, 22 nt, Human
acugguguuaucaccgugggcu

SEQ ID NO: 1779580 - RNA, 16 nt, Human
acugugccaugugcca

SEQ ID NO: 1779581 - RNA, 12 nt, Human
acugugccacaa

SEQ ID NO: 1779582 - RNA, 23 nt, Human
acugugccacaaugcaguucuga

SEQ ID NO: 1779583 - RNA, 18 nt, Human
acugugcaccaagcagga

SEQ ID NO: 1779584 - RNA, 18 nt, Human
acugugaugcccugcccu

SEQ ID NO: 1779585 - RNA, 15 nt, Human
acugugcacaucugu

SEQ ID NO: 1779586 - RNA, 19 nt, Human
acugugcacaucugugucu

SEQ ID NO: 1779587 - RNA, 20 nt, Human
acugugcacaucugugucuu

SEQ ID NO: 1779588 - RNA, 21 nt, Human
acugugcacaucugugucuug

SEQ ID NO: 1779589 - RNA, 16 nt, Human
acuggaagcacagcuu

SEQ ID NO: 1779590 - RNA, 15 nt, Human
acuggaagcacagcu

SEQ ID NO: 1779591 - RNA, 14 nt, Human
acuggaagcacagc

SEQ ID NO: 1779592 - RNA, 16 nt, Human
acuggacccuguugcu

SEQ ID NO: 1779593 - RNA, 18 nt, Human
acuggacccuguugcuaa

SEQ ID NO: 1779594 - RNA, 17 nt, Human
acuggacccuguugcua

SEQ ID NO: 1779595 - RNA, 20 nt, Human
acuggacccuguugcuaagc

SEQ ID NO: 1779596 - RNA, 19 nt, Human
acuggacccuguugcuaag

SEQ ID NO: 1779597 - RNA, 19 nt, Human
acugaaggcuaaaaagcaa

SEQ ID NO: 1779598 - RNA, 20 nt, Human
acugaaggcuaaaaagcaac

SEQ ID NO: 1779599 - RNA, 21 nt, Human
acugccaaagggaaauaucau

SEQ ID NO: 1779600 - RNA, 20 nt, Human
agaaaggaggggauagagag

SEQ ID NO: 1779601 - RNA, 23 nt, Human
agaaaggaggggauagagagaga

SEQ ID NO: 1779602 - RNA, 17 nt, Human
agaaacaacucuuugag

SEQ ID NO: 1779603 - RNA, 18 nt, Human
agaaacaacaauuucuac

SEQ ID NO: 1779604 - RNA, 14 nt, Human
agaaaauuccuaua

SEQ ID NO: 1779605 - RNA, 15 nt, Human
agaaaauuccuauaa

SEQ ID NO: 1779606 - RNA, 16 nt, Human
agaaaauuccuauaag

SEQ ID NO: 1779607 - RNA, 19 nt, Human
agaaaauuccuauaaggaa

SEQ ID NO: 1779608 - RNA, 22 nt, Human
agaaaauuccuauaaggaagau

SEQ ID NO: 1779609 - RNA, 14 nt, Human
agaaaauaacaaua

SEQ ID NO: 1779610 - RNA, 14 nt, Human
acacuaaccacgcu

SEQ ID NO: 1779611 - RNA, 15 nt, Human
acacuaaccacgcug

SEQ ID NO: 1779612 - RNA, 14 nt, Human
acacagcucugucc

SEQ ID NO: 1779613 - RNA, 11 nt, Human
acacagcucug

SEQ ID NO: 1779614 - RNA, 12 nt, Human
acacagcucugu

SEQ ID NO: 1779615 - RNA, 14 nt, Human
acacagaaaugcug

SEQ ID NO: 1779616 - RNA, 16 nt, Human
acacagaaaugcugcu

SEQ ID NO: 1779617 - RNA, 17 nt, Human
acacagaaaugcugcug

SEQ ID NO: 1779618 - RNA, 18 nt, Human
acacagaaaugcugcugg

SEQ ID NO: 1779619 - RNA, 20 nt, Human
acacagaaaugcugcuggcc

SEQ ID NO: 1779620 - RNA, 21 nt, Human
acacagaaaugcugcuggcca

SEQ ID NO: 1779621 - RNA, 12 nt, Human
acaccagagccc

SEQ ID NO: 1779622 - RNA, 22 nt, Human
acaaaauggauacauaaagacu

SEQ ID NO: 1779623 - RNA, 16 nt, Human
acaaaauggcuucagu

SEQ ID NO: 1779624 - RNA, 16 nt, Human
acaaaauguagaauau

SEQ ID NO: 1779625 - RNA, 17 nt, Human
acaaaauguagaauauu

SEQ ID NO: 1779626 - RNA, 19 nt, Human
acaaaauguagaauauuca

SEQ ID NO: 1779627 - RNA, 21 nt, Human
acaaaauguagaauauucaga

SEQ ID NO: 1779628 - RNA, 22 nt, Human
acaaaauguagaauauucagac

SEQ ID NO: 1779629 - RNA, 23 nt, Human
acaaaauguagaauauucagaca

SEQ ID NO: 1779630 - RNA, 14 nt, Human
acaaagaauuccaa

SEQ ID NO: 1779631 - RNA, 20 nt, Human
aauuuugauauaaucuuuca

SEQ ID NO: 1779632 - RNA, 12 nt, Human
acagcuccuucu

SEQ ID NO: 1779633 - RNA, 13 nt, Human
acagcuccuucug

SEQ ID NO: 1779634 - RNA, 14 nt, Human
acagcuccuucugu

SEQ ID NO: 1779635 - RNA, 11 nt, Human
acagcugccuu

SEQ ID NO: 1779636 - RNA, 12 nt, Human
acagcugccuua

SEQ ID NO: 1779637 - RNA, 14 nt, Human
acagcugccuuagc

SEQ ID NO: 1779638 - RNA, 15 nt, Human
acagcugccuuagcu

SEQ ID NO: 1779639 - RNA, 16 nt, Human
acagcugccuuagcuu

SEQ ID NO: 1779640 - RNA, 17 nt, Human
acagcugccuuagcuuc

SEQ ID NO: 1779641 - RNA, 19 nt, Human
acagcugccuuagcuucag

SEQ ID NO: 1779642 - RNA, 20 nt, Human
acagcugccuuagcuucagg

SEQ ID NO: 1779643 - RNA, 21 nt, Human
acagcugccuuagcuucagga

SEQ ID NO: 1779644 - RNA, 13 nt, Human
acagcucuguccu

SEQ ID NO: 1779645 - RNA, 15 nt, Human
acagcuccuucuguc

SEQ ID NO: 1779646 - RNA, 20 nt, Human
acaggugugaaccaccacac

SEQ ID NO: 1779647 - RNA, 23 nt, Human
acaggugugaaccaccacaccca

SEQ ID NO: 1779648 - RNA, 19 nt, Human
acaggcaagcaccuccugc

SEQ ID NO: 1779649 - RNA, 18 nt, Human
acaggcaagcaccuccug

SEQ ID NO: 1779650 - RNA, 15 nt, Human
acaggcaagcaccuc

SEQ ID NO: 1779651 - RNA, 16 nt, Human
acaggcaagcaccucc

SEQ ID NO: 1779652 - RNA, 14 nt, Human
acagaagcacaugc

SEQ ID NO: 1779653 - RNA, 18 nt, Human
acagaagcacaugcaccu

SEQ ID NO: 1779654 - RNA, 20 nt, Human
acacugugcacaucuguguc

SEQ ID NO: 1779655 - RNA, 21 nt, Human
acacugugcacaucugugucu

SEQ ID NO: 1779656 - RNA, 18 nt, Human
acacuguauguuauagaa

SEQ ID NO: 1779657 - RNA, 20 nt, Human
acacuguauguuauagaacu

SEQ ID NO: 1779658 - RNA, 21 nt, Human
acacuguauguuauagaacuu

SEQ ID NO: 1779659 - RNA, 18 nt, Human
acacugugcacaucugug

SEQ ID NO: 1779660 - RNA, 20 nt, Human
acagccacuccccuccacuc

SEQ ID NO: 1779661 - RNA, 19 nt, Human
acagccacggccaggccag

SEQ ID NO: 1779662 - RNA, 16 nt, Human
acagccaaaggcuggc

SEQ ID NO: 1779663 - RNA, 12 nt, Human
acagagucucac

SEQ ID NO: 1779664 - RNA, 14 nt, Human
acagagucucacug

SEQ ID NO: 1779665 - RNA, 12 nt, Human
acagaauauuuc

SEQ ID NO: 1779666 - RNA, 19 nt, Human
acagaauauuucuauugaa

SEQ ID NO: 1779667 - RNA, 21 nt, Human
acagaauauuucuauugaauu

SEQ ID NO: 1779668 - RNA, 17 nt, Human
acagagucucacuguug

SEQ ID NO: 1779669 - RNA, 19 nt, Human
acagagucucacuguugcc

SEQ ID NO: 1779670 - RNA, 23 nt, Human
acagagucucacuguugcccagg

SEQ ID NO: 1779671 - RNA, 12 nt, Human
accaacuuacaa

SEQ ID NO: 1779672 - RNA, 20 nt, Human
accaacuuguauccaggccu

SEQ ID NO: 1779673 - RNA, 23 nt, Human
accaacugaaggcuaaaaagcaa

SEQ ID NO: 1779674 - RNA, 14 nt, Human
acauuuggagaggg

SEQ ID NO: 1779675 - RNA, 22 nt, Human
acauuuggaggcaauccuaccu

SEQ ID NO: 1779676 - RNA, 15 nt, Human
acauuuggaguguuc

SEQ ID NO: 1779677 - RNA, 20 nt, Human
acauuuggaguguuccccuu

SEQ ID NO: 1779678 - RNA, 20 nt, Human
acauaaagacuaaguagccc

SEQ ID NO: 1779679 - RNA, 11 nt, Human
acagguuggga

SEQ ID NO: 1779680 - RNA, 15 nt, Human
acagguugggauggg

SEQ ID NO: 1779681 - RNA, 16 nt, Human
acaucuaaccucaucu

SEQ ID NO: 1779682 - RNA, 17 nt, Human
acaucuaaccucaucuu

SEQ ID NO: 1779683 - RNA, 16 nt, Human
acauccugugccucca

SEQ ID NO: 1779684 - RNA, 14 nt, Human
accaucaugucugg

SEQ ID NO: 1779685 - RNA, 16 nt, Human
accaucaugucuggcu

SEQ ID NO: 1779686 - RNA, 17 nt, Human
accaucaugucuggcua

SEQ ID NO: 1779687 - RNA, 14 nt, Human
accccuaaacucca

SEQ ID NO: 1779688 - RNA, 16 nt, Human
accccuaaacuccagg

SEQ ID NO: 1779689 - RNA, 17 nt, Human
accccuaaacuccaggg

SEQ ID NO: 1779690 - RNA, 15 nt, Human
aguccugcuaccucc

SEQ ID NO: 1779691 - RNA, 19 nt, Human
aguccugcuaccucccuug

SEQ ID NO: 1779692 - RNA, 21 nt, Human
aguccugcuaccucccuugcc

SEQ ID NO: 1779693 - RNA, 22 nt, Human
aguccugcuaccucccuugccu

SEQ ID NO: 1779694 - RNA, 24 nt, Human
aguccugcuaccucccuugccuuu

SEQ ID NO: 1779695 - RNA, 14 nt, Human
agugaauuuuugca

SEQ ID NO: 1779696 - RNA, 15 nt, Human
agugaauuuuugcaa

SEQ ID NO: 1779697 - RNA, 16 nt, Human
agugaauuuuugcaau

SEQ ID NO: 1779698 - RNA, 18 nt, Human
agugaauuuuugcaauaa

SEQ ID NO: 1779699 - RNA, 22 nt, Human
agugaauuuuugcaauaaugca

SEQ ID NO: 1779700 - RNA, 23 nt, Human
agugaauuuuugcaauaaugcag

SEQ ID NO: 1779701 - RNA, 24 nt, Human
agugaauuuuugcaauaaugcagu

SEQ ID NO: 1779702 - RNA, 13 nt, Human
agugauccuccca

SEQ ID NO: 1779703 - RNA, 20 nt, Human
agucaagugcguccacgagc

SEQ ID NO: 1779704 - RNA, 22 nt, Human
agucaagcuguugaagucucag

SEQ ID NO: 1779705 - RNA, 15 nt, Human
agucaaccugccuga

SEQ ID NO: 1779706 - RNA, 14 nt, Human
agucaaccugggca

SEQ ID NO: 1779707 - RNA, 15 nt, Human
agucaaccugggcaa

SEQ ID NO: 1779708 - RNA, 22 nt, Human
agucauuggcuuuauccucuuu

SEQ ID NO: 1779709 - RNA, 21 nt, Human
agucauuggcuuuauccucuu

SEQ ID NO: 1779710 - RNA, 20 nt, Human
agucauuggcuuuauccucu

SEQ ID NO: 1779711 - RNA, 18 nt, Human
agucauuggcuuuauccu

SEQ ID NO: 1779712 - RNA, 15 nt, Human
agucauuggcuuuau

SEQ ID NO: 1779713 - RNA, 14 nt, Human
agucauuggcuuua

SEQ ID NO: 1779714 - RNA, 14 nt, Human
aguccacaaaauaa

SEQ ID NO: 1779715 - RNA, 23 nt, Human
agugugacaaggauugcuacugu

SEQ ID NO: 1779716 - RNA, 23 nt, Human
agugucuuuccacggagccacuc

SEQ ID NO: 1779717 - RNA, 13 nt, Human
agugucuuuccac

SEQ ID NO: 1779718 - RNA, 23 nt, Human
agugugaacuggacccuguugcu

SEQ ID NO: 1779719 - RNA, 22 nt, Human
agugugaacuggacccuguugc

SEQ ID NO: 1779720 - RNA, 14 nt, Human
agugugaacuggac

SEQ ID NO: 1779721 - RNA, 16 nt, Human
auauucagacaaaaug

SEQ ID NO: 1779722 - RNA, 18 nt, Human
auauucagacaaaaugga

SEQ ID NO: 1779723 - RNA, 19 nt, Human
auauucagacaaaauggau

SEQ ID NO: 1779724 - RNA, 22 nt, Human
auauucagacaaaauggauaca

SEQ ID NO: 1779725 - RNA, 17 nt, Human
auaucccgggggugggg

SEQ ID NO: 1779726 - RNA, 16 nt, Human
auaguaugguggcugg

SEQ ID NO: 1779727 - RNA, 15 nt, Human
auauaagugcuguau

SEQ ID NO: 1779728 - RNA, 13 nt, Human
auauaagugcugu

SEQ ID NO: 1779729 - RNA, 18 nt, Human
auauaagugcuguauaaa

SEQ ID NO: 1779730 - RNA, 17 nt, Human
auauaagugcuguauaa

SEQ ID NO: 1779731 - RNA, 20 nt, Human
auauaagugcuguauaaaau

SEQ ID NO: 1779732 - RNA, 21 nt, Human
auacuuccuuaugcuucuuuc

SEQ ID NO: 1779733 - RNA, 15 nt, Human
auaguaugguggcug

SEQ ID NO: 1779734 - RNA, 14 nt, Human
auauaccauuuauc

SEQ ID NO: 1779735 - RNA, 16 nt, Human
auaaguauuucaaauu

SEQ ID NO: 1779736 - RNA, 18 nt, Human
auaaguauuucaaauugg

SEQ ID NO: 1779737 - RNA, 19 nt, Human
auaaguauuucaaauugga

SEQ ID NO: 1779738 - RNA, 13 nt, Human
auaaugugaaaau

SEQ ID NO: 1779739 - RNA, 16 nt, Human
auaaugugaaaauggu

SEQ ID NO: 1779740 - RNA, 16 nt, Human
auaacaguaaaugugc

SEQ ID NO: 1779741 - RNA, 14 nt, Human
augcuucuuucaaa

SEQ ID NO: 1779742 - RNA, 19 nt, Human
auggauuacuucucuauaa

SEQ ID NO: 1779743 - RNA, 17 nt, Human
augcaugcacuguuccc

SEQ ID NO: 1779744 - RNA, 15 nt, Human
augccugguggcagc

SEQ ID NO: 1779745 - RNA, 16 nt, Human
augccugguggcagcu

SEQ ID NO: 1779746 - RNA, 17 nt, Human
augccugguggcagcug

SEQ ID NO: 1779747 - RNA, 15 nt, Human
auggucuucagccuc

SEQ ID NO: 1779748 - RNA, 17 nt, Human
auggucuucagccucuu

SEQ ID NO: 1779749 - RNA, 15 nt, Human
augucacaggcaggu

SEQ ID NO: 1779750 - RNA, 14 nt, Human
augucacaggcagg

SEQ ID NO: 1779751 - RNA, 16 nt, Human
augucacaggcagguc

SEQ ID NO: 1779752 - RNA, 17 nt, Human
augucacaggcaggucc

SEQ ID NO: 1779753 - RNA, 19 nt, Human
auguaaucuugaauuguaa

SEQ ID NO: 1779754 - RNA, 23 nt, Human
augucuugaugcaugcacuguuc

SEQ ID NO: 1779755 - RNA, 15 nt, Human
augugguuacacacu

SEQ ID NO: 1779756 - RNA, 18 nt, Human
auguucucugaggacacu

SEQ ID NO: 1779757 - RNA, 13 nt, Human
auuaaauaaaaug

SEQ ID NO: 1779758 - RNA, 16 nt, Human
auguuuuaagaggcag

SEQ ID NO: 1779759 - RNA, 18 nt, Human
auguuuuaagaggcaggg

SEQ ID NO: 1779760 - RNA, 13 nt, Human
auguuugcccaaa

SEQ ID NO: 1779761 - RNA, 15 nt, Human
auguuuuaacaaaaa

SEQ ID NO: 1779762 - RNA, 16 nt, Human
auguuuuaacaaaaac

SEQ ID NO: 1779763 - RNA, 22 nt, Human
aucuuauaauuuaaaauaugcu

SEQ ID NO: 1779764 - RNA, 17 nt, Human
augacucacaugaugca

SEQ ID NO: 1779765 - RNA, 23 nt, Human
aucuuuuuuucauuuuuaaaugu

SEQ ID NO: 1779766 - RNA, 12 nt, Human
augaaaaggaau

SEQ ID NO: 1779767 - RNA, 16 nt, Human
augaaaaugucuugug

SEQ ID NO: 1779768 - RNA, 20 nt, Human
aucaucuccugccuuccucc

SEQ ID NO: 1779769 - RNA, 23 nt, Human
aucaucuccugccuuccuccugg

SEQ ID NO: 1779770 - RNA, 15 nt, Human
aucauggugaaaagc

SEQ ID NO: 1779771 - RNA, 19 nt, Human
aucagccaauuauguuaaa

SEQ ID NO: 1779772 - RNA, 18 nt, Human
aucagccaauuauguuaa

SEQ ID NO: 1779773 - RNA, 16 nt, Human
aucagccaauuauguu

SEQ ID NO: 1779774 - RNA, 15 nt, Human
aucagccaauuaugu

SEQ ID NO: 1779775 - RNA, 18 nt, Human
auccacccaccucagccu

SEQ ID NO: 1779776 - RNA, 20 nt, Human
auccacccaccucagccucc

SEQ ID NO: 1779777 - RNA, 14 nt, Human
aucccgagcaccuc

SEQ ID NO: 1779778 - RNA, 17 nt, Human
aucccgagcaccuccac

SEQ ID NO: 1779779 - RNA, 19 nt, Human
aucccgagcaccuccacau

SEQ ID NO: 1779780 - RNA, 13 nt, Human
aucgauguuaugu

SEQ ID NO: 1779781 - RNA, 15 nt, Human
aucgauguuauguaa

SEQ ID NO: 1779782 - RNA, 20 nt, Human
auccuuuccucauuaaauua

SEQ ID NO: 1779783 - RNA, 22 nt, Human
auccuuuccucauuaaauuacc

SEQ ID NO: 1779784 - RNA, 19 nt, Human
agacggagucccaccuugg

SEQ ID NO: 1779785 - RNA, 22 nt, Human
agaccaguuagauuauugaaau

SEQ ID NO: 1779786 - RNA, 19 nt, Human
agacugaucaggaccucca

SEQ ID NO: 1779787 - RNA, 14 nt, Human
agacugaucaggac

SEQ ID NO: 1779788 - RNA, 16 nt, Human
agacugaucaggaccu

SEQ ID NO: 1779789 - RNA, 17 nt, Human
agacugaucaggaccuc

SEQ ID NO: 1779790 - RNA, 23 nt, Human
agagaggguggugaccucugccu

SEQ ID NO: 1779791 - RNA, 14 nt, Human
agagccuucagccu

SEQ ID NO: 1779792 - RNA, 16 nt, Human
agagccuucagccuua

SEQ ID NO: 1779793 - RNA, 18 nt, Human
agagaaaguacuucucca

SEQ ID NO: 1779794 - RNA, 22 nt, Human
agaggggaacagacuggaagca

SEQ ID NO: 1779795 - RNA, 20 nt, Human
agaggaugagcucuacccag

SEQ ID NO: 1779796 - RNA, 23 nt, Human
agaguuaaauagaguauaugcac

SEQ ID NO: 1779797 - RNA, 21 nt, Human
agaggggcugaauagcagaag

SEQ ID NO: 1779798 - RNA, 12 nt, Human
agaucuuaauau

SEQ ID NO: 1779799 - RNA, 13 nt, Human
agaucuuaauaua

SEQ ID NO: 1779800 - RNA, 15 nt, Human
agaucuuaauauaaa

SEQ ID NO: 1779801 - RNA, 19 nt, Human
agaucuuaauauaaauuca

SEQ ID NO: 1779802 - RNA, 21 nt, Human
agauaggucagugcaaauacu

SEQ ID NO: 1779803 - RNA, 14 nt, Human
agcccaagcuuccc

SEQ ID NO: 1779804 - RNA, 15 nt, Human
agcccaagcuucccu

SEQ ID NO: 1779805 - RNA, 16 nt, Human
agcccaagcuucccuc

SEQ ID NO: 1779806 - RNA, 19 nt, Human
agcccaagcuucccuccau

SEQ ID NO: 1779807 - RNA, 16 nt, Human
agccccagugcccaca

SEQ ID NO: 1779808 - RNA, 19 nt, Human
agccgagaucacgccacug

SEQ ID NO: 1779809 - RNA, 20 nt, Human
agccgagaucacgccacugc

SEQ ID NO: 1779810 - RNA, 16 nt, Human
agcccuaggguggaga

SEQ ID NO: 1779811 - RNA, 17 nt, Human
agcccuaggguggagag

SEQ ID NO: 1779812 - RNA, 20 nt, Human
agcccuaggguggagagcca

SEQ ID NO: 1779813 - RNA, 12 nt, Human
agccccagccug

SEQ ID NO: 1779814 - RNA, 13 nt, Human
agccccagccugc

SEQ ID NO: 1779815 - RNA, 14 nt, Human
agccccagccugcu

SEQ ID NO: 1779816 - RNA, 15 nt, Human
agccccagccugcua

SEQ ID NO: 1779817 - RNA, 17 nt, Human
agccccagccugcuagc

SEQ ID NO: 1779818 - RNA, 18 nt, Human
agccucccaaagugcugg

SEQ ID NO: 1779819 - RNA, 19 nt, Human
agccucccaaagugcuggg

SEQ ID NO: 1779820 - RNA, 20 nt, Human
agccgggucugccucuucug

SEQ ID NO: 1779821 - RNA, 21 nt, Human
agccgggucugccucuucugg

SEQ ID NO: 1779822 - RNA, 22 nt, Human
agccgggucugccucuucuggg

SEQ ID NO: 1779823 - RNA, 13 nt, Human
agccgguuccugu

SEQ ID NO: 1779824 - RNA, 14 nt, Human
agccgguuccuguc

SEQ ID NO: 1779825 - RNA, 21 nt, Human
agccgguuccugucccugcgc

SEQ ID NO: 1779826 - RNA, 13 nt, Human
agccggggccuua

SEQ ID NO: 1779827 - RNA, 23 nt, Human
agccggggccuuaucgggcucca

SEQ ID NO: 1779828 - RNA, 16 nt, Human
agccgggucugccucu

SEQ ID NO: 1779829 - RNA, 19 nt, Human
agccgauaucagaauuugu

SEQ ID NO: 1779830 - RNA, 18 nt, Human
agccgauucaccugagca

SEQ ID NO: 1779831 - RNA, 21 nt, Human
agccgagaucacgccacugca

SEQ ID NO: 1779832 - RNA, 20 nt, Human
agccucccaaagugcuggga

SEQ ID NO: 1779833 - RNA, 14 nt, Human
agccuccccugcca

SEQ ID NO: 1779834 - RNA, 15 nt, Human
agccuccccugccag

SEQ ID NO: 1779835 - RNA, 18 nt, Human
agccucccgaauagcugg

SEQ ID NO: 1779836 - RNA, 16 nt, Human
agccuccccugccagg

SEQ ID NO: 1779837 - RNA, 17 nt, Human
agccuccccugccaggg

SEQ ID NO: 1779838 - RNA, 18 nt, Human
agccuccccugccagggc

SEQ ID NO: 1779839 - RNA, 19 nt, Human
agccuccccugccagggca

SEQ ID NO: 1779840 - RNA, 19 nt, Human
agccucccgaauagcuggg

SEQ ID NO: 1779841 - RNA, 20 nt, Human
agccucccgaauagcuggga

SEQ ID NO: 1779842 - RNA, 22 nt, Human
agccucccgaauagcugggacu

SEQ ID NO: 1779843 - RNA, 17 nt, Human
agccucccgaguagcug

SEQ ID NO: 1779844 - RNA, 20 nt, Human
agccuccccugccagggcag

SEQ ID NO: 1779845 - RNA, 22 nt, Human
agccuccccugccagggcaggg

SEQ ID NO: 1779846 - RNA, 22 nt, Human
agccucccgaguagcugggacu

SEQ ID NO: 1779847 - RNA, 19 nt, Human
agccaaagcuaggccuggc

SEQ ID NO: 1779848 - RNA, 20 nt, Human
agccaaagcuaggccuggcc

SEQ ID NO: 1779849 - RNA, 23 nt, Human
agccaaagcuaggccuggccaga

SEQ ID NO: 1779850 - RNA, 17 nt, Human
agcacugcuugaggaaa

SEQ ID NO: 1779851 - RNA, 20 nt, Human
agcacuaaggugugcucuga

SEQ ID NO: 1779852 - RNA, 19 nt, Human
agcacuaaggugugcucug

SEQ ID NO: 1779853 - RNA, 21 nt, Human
agcagugaaugauucaguguu

SEQ ID NO: 1779854 - RNA, 22 nt, Human
agcagugaaugauucaguguua

SEQ ID NO: 1779855 - RNA, 20 nt, Human
agcagugaaugauucagugu

SEQ ID NO: 1779856 - RNA, 12 nt, Human
agcacugggcuc

SEQ ID NO: 1779857 - RNA, 15 nt, Human
agcacugggcucccg

SEQ ID NO: 1779858 - RNA, 16 nt, Human
agcacugggcucccgg

SEQ ID NO: 1779859 - RNA, 18 nt, Human
agcagcccaagcuucccu

SEQ ID NO: 1779860 - RNA, 19 nt, Human
agcagcccaagcuucccuc

SEQ ID NO: 1779861 - RNA, 21 nt, Human
agcagcccaagcuucccucca

SEQ ID NO: 1779862 - RNA, 21 nt, Human
agguaauccaagauauuuuaa

SEQ ID NO: 1779863 - RNA, 14 nt, Human
aggugcuguccaug

SEQ ID NO: 1779864 - RNA, 21 nt, Human
aggugcuggagcacugggcuc

SEQ ID NO: 1779865 - RNA, 22 nt, Human
aggugcuggagcacugggcucc

SEQ ID NO: 1779866 - RNA, 16 nt, Human
aggugcugccauccag

SEQ ID NO: 1779867 - RNA, 17 nt, Human
aggugcugccauccagg

SEQ ID NO: 1779868 - RNA, 16 nt, Human
aggugcuggagcacug

SEQ ID NO: 1779869 - RNA, 20 nt, Human
aggugcuggagcacugggcu

SEQ ID NO: 1779870 - RNA, 12 nt, Human
agguucauggau

SEQ ID NO: 1779871 - RNA, 13 nt, Human
agguucagcuugu

SEQ ID NO: 1779872 - RNA, 16 nt, Human
agguucacgugcagcu

SEQ ID NO: 1779873 - RNA, 16 nt, Human
agguucacuaaagcag

SEQ ID NO: 1779874 - RNA, 14 nt, Human
agguuccccuguca

SEQ ID NO: 1779875 - RNA, 21 nt, Human
aggggauagagagagaccacu

SEQ ID NO: 1779876 - RNA, 19 nt, Human
agggcgggaggauguucug

SEQ ID NO: 1779877 - RNA, 17 nt, Human
agggcacaccgggcacu

SEQ ID NO: 1779878 - RNA, 16 nt, Human
agggcacaaagauggg

SEQ ID NO: 1779879 - RNA, 20 nt, Human
agggcaaggguuaaggccug

SEQ ID NO: 1779880 - RNA, 21 nt, Human
agggcaaggguuaaggccuga

SEQ ID NO: 1779881 - RNA, 20 nt, Human
agggcacaccgggcacucag

SEQ ID NO: 1779882 - RNA, 21 nt, Human
agggcacaccgggcacucaga

SEQ ID NO: 1779883 - RNA, 13 nt, Human
aggcugccuccca

SEQ ID NO: 1779884 - RNA, 14 nt, Human
aggcugccucccaa

SEQ ID NO: 1779885 - RNA, 16 nt, Human
aggcugccucccaaca

SEQ ID NO: 1779886 - RNA, 23 nt, Human
aggaaaugucacagaagcagcua

SEQ ID NO: 1779887 - RNA, 20 nt, Human
aggaccccuccaugugggcu

SEQ ID NO: 1779888 - RNA, 22 nt, Human
aggagaggaaacuacugccuuu

SEQ ID NO: 1779889 - RNA, 15 nt, Human
aggaccuccaagcca

SEQ ID NO: 1779890 - RNA, 18 nt, Human
aggaccucugaaacccug

SEQ ID NO: 1779891 - RNA, 21 nt, Human
aggaccuccaagccacugagc

SEQ ID NO: 1779892 - RNA, 20 nt, Human
aggaccucugaaacccugga

SEQ ID NO: 1779893 - RNA, 17 nt, Human
aggaggggauagagaga

SEQ ID NO: 1779894 - RNA, 19 nt, Human
aggaggggccccccugccc

SEQ ID NO: 1779895 - RNA, 21 nt, Human
aggaggggccccccugcccug

SEQ ID NO: 1779896 - RNA, 23 nt, Human
aggaggggccccccugcccugug

SEQ ID NO: 1779897 - RNA, 20 nt, Human
aggauguucugggacacagu

SEQ ID NO: 1779898 - RNA, 19 nt, Human
aggaaaugaaaaugucuug

SEQ ID NO: 1779899 - RNA, 14 nt, Human
aggaaaaauauuua

SEQ ID NO: 1779900 - RNA, 13 nt, Human
agcuucaggaacc

SEQ ID NO: 1779901 - RNA, 16 nt, Human
agcuucaggaaccucg

SEQ ID NO: 1779902 - RNA, 23 nt, Human
agcuucaggaaccucgaguacug

SEQ ID NO: 1779903 - RNA, 17 nt, Human
agcugggugucaagagg

SEQ ID NO: 1779904 - RNA, 22 nt, Human
agcugggugucaagagggucug

SEQ ID NO: 1779905 - RNA, 15 nt, Human
agcugcucugagcca

SEQ ID NO: 1779906 - RNA, 16 nt, Human
agcugcucugagccac

SEQ ID NO: 1779907 - RNA, 18 nt, Human
agcugcucugagccacag

SEQ ID NO: 1779908 - RNA, 21 nt, Human
agcuggucccacucaguccau

SEQ ID NO: 1779909 - RNA, 17 nt, Human
agcugcuccccagcagc

SEQ ID NO: 1779910 - RNA, 20 nt, Human
agcugcuccccagcagcgga

SEQ ID NO: 1779911 - RNA, 16 nt, Human
agcuccucacucaccu

SEQ ID NO: 1779912 - RNA, 20 nt, Human
cucguugacuggcugugugu

SEQ ID NO: 1779913 - RNA, 21 nt, Human
cucuaucauggugaaaagcuc

SEQ ID NO: 1779914 - RNA, 23 nt, Human
cucuaucauuuaauaauauacuu

SEQ ID NO: 1779915 - RNA, 21 nt, Human
cucuaucauuuaauaauauac

SEQ ID NO: 1779916 - RNA, 15 nt, Human
cucuaucauuuaaua

SEQ ID NO: 1779917 - RNA, 14 nt, Human
cucuaucauuuaau

SEQ ID NO: 1779918 - RNA, 23 nt, Human
cucguugacuggcuguguguugg

SEQ ID NO: 1779919 - RNA, 17 nt, Human
cucucaggaccaaagcu

SEQ ID NO: 1779920 - RNA, 12 nt, Human
cuccugggcccu

SEQ ID NO: 1779921 - RNA, 14 nt, Human
cuccugggcccucu

SEQ ID NO: 1779922 - RNA, 21 nt, Human
cuccuggguuuuguauucucu

SEQ ID NO: 1779923 - RNA, 13 nt, Human
cucgaacuggcug

SEQ ID NO: 1779924 - RNA, 14 nt, Human
cucgaacuggcugc

SEQ ID NO: 1779925 - RNA, 15 nt, Human
cucgaacuggcugca

SEQ ID NO: 1779926 - RNA, 16 nt, Human
cucgaacuggcugcaa

SEQ ID NO: 1779927 - RNA, 11 nt, Human
cuccucugaaa

SEQ ID NO: 1779928 - RNA, 12 nt, Human
cuccucugaaac

SEQ ID NO: 1779929 - RNA, 13 nt, Human
cuccucugaaaca

SEQ ID NO: 1779930 - RNA, 14 nt, Human
cuccucugaaacag

SEQ ID NO: 1779931 - RNA, 15 nt, Human
cuccucugaaacagc

SEQ ID NO: 1779932 - RNA, 16 nt, Human
cuccucugaaacagcu

SEQ ID NO: 1779933 - RNA, 17 nt, Human
cuccucugaaacagcug

SEQ ID NO: 1779934 - RNA, 18 nt, Human
cuccucugaaacagcugc

SEQ ID NO: 1779935 - RNA, 23 nt, Human
cuccucugugaccaaugucuuga

SEQ ID NO: 1779936 - RNA, 22 nt, Human
cuccucugugaccaaugucuug

SEQ ID NO: 1779937 - RNA, 13 nt, Human
cuccucugugacc

SEQ ID NO: 1779938 - RNA, 12 nt, Human
cuccucugugaa

SEQ ID NO: 1779939 - RNA, 18 nt, Human
cuccucugugaagcauuc

SEQ ID NO: 1779940 - RNA, 13 nt, Human
cucaucugucccu

SEQ ID NO: 1779941 - RNA, 15 nt, Human
cucaucugucccucc

SEQ ID NO: 1779942 - RNA, 17 nt, Human
cucaucugucccuccgg

SEQ ID NO: 1779943 - RNA, 18 nt, Human
cucaucugucccuccggg

SEQ ID NO: 1779944 - RNA, 16 nt, Human
cuccaacucagaaggg

SEQ ID NO: 1779945 - RNA, 16 nt, Human
cuccccauuagcuuuc

SEQ ID NO: 1779946 - RNA, 14 nt, Human
cugacccauugcug

SEQ ID NO: 1779947 - RNA, 16 nt, Human
cugacccauugcuguu

SEQ ID NO: 1779948 - RNA, 21 nt, Human
cugaccugguccacagggcac

SEQ ID NO: 1779949 - RNA, 16 nt, Human
cugaccugguccacag

SEQ ID NO: 1779950 - RNA, 17 nt, Human
cugaccugguccacagg

SEQ ID NO: 1779951 - RNA, 18 nt, Human
cugaccugguccacaggg

SEQ ID NO: 1779952 - RNA, 20 nt, Human
cugaccugguccacagggca

SEQ ID NO: 1779953 - RNA, 14 nt, Human
cugagagucagcuc

SEQ ID NO: 1779954 - RNA, 17 nt, Human
cugagagucagcucucu

SEQ ID NO: 1779955 - RNA, 18 nt, Human
cugagagucagcucucug

SEQ ID NO: 1779956 - RNA, 22 nt, Human
cugagagucagcucucugcccu

SEQ ID NO: 1779957 - RNA, 18 nt, Human
cugagauaccagcgagga

SEQ ID NO: 1779958 - RNA, 21 nt, Human
cugagaggacuuuucuuugug

SEQ ID NO: 1779959 - RNA, 22 nt, Human
cugagaggacuuuucuuugugg

SEQ ID NO: 1779960 - RNA, 13 nt, Human
cugaggaggggag

SEQ ID NO: 1779961 - RNA, 20 nt, Human
cugaguagaaaggccuuuaa

SEQ ID NO: 1779962 - RNA, 19 nt, Human
cugaguagaaaggccuuua

SEQ ID NO: 1779963 - RNA, 14 nt, Human
cugaguagaaaggc

SEQ ID NO: 1779964 - RNA, 12 nt, Human
cugaguagaaag

SEQ ID NO: 1779965 - RNA, 23 nt, Human
cugaggacacuaaccacgcugga

SEQ ID NO: 1779966 - RNA, 21 nt, Human
cugaggaauccagacccggcu

SEQ ID NO: 1779967 - RNA, 20 nt, Human
cugaggacacuaaccacgcu

SEQ ID NO: 1779968 - RNA, 17 nt, Human
cugaggaauccagaccc

SEQ ID NO: 1779969 - RNA, 20 nt, Human
cugaggaauccagacccggc

SEQ ID NO: 1779970 - RNA, 19 nt, Human
cucuuuuccccuuuccugu

SEQ ID NO: 1779971 - RNA, 20 nt, Human
cucuuuuccccuuuccuguc

SEQ ID NO: 1779972 - RNA, 21 nt, Human
cucuuuuccccuuuccugucc

SEQ ID NO: 1779973 - RNA, 11 nt, Human
cucuuuuuaag

SEQ ID NO: 1779974 - RNA, 10 nt, Human
cugaaacagc

SEQ ID NO: 1779975 - RNA, 11 nt, Human
cugaaacagcu

SEQ ID NO: 1779976 - RNA, 12 nt, Human
cugaaacagcug

SEQ ID NO: 1779977 - RNA, 13 nt, Human
cugaaacagcugc

SEQ ID NO: 1779978 - RNA, 14 nt, Human
cugaaacagcugcc

SEQ ID NO: 1779979 - RNA, 15 nt, Human
cugaaacagcugccu

SEQ ID NO: 1779980 - RNA, 16 nt, Human
cugaaacagcugccuu

SEQ ID NO: 1779981 - RNA, 17 nt, Human
cugaaacagcugccuua

SEQ ID NO: 1779982 - RNA, 18 nt, Human
cugaaacagcugccuuag

SEQ ID NO: 1779983 - RNA, 19 nt, Human
cugaaacagcugccuuagc

SEQ ID NO: 1779984 - RNA, 20 nt, Human
cugaaacagcugccuuagcu

SEQ ID NO: 1779985 - RNA, 22 nt, Human
cugaaacagcugccuuagcuuc

SEQ ID NO: 1779986 - RNA, 23 nt, Human
cugaaacagcugccuuagcuuca

SEQ ID NO: 1779987 - RNA, 14 nt, Human
cugaaaccaguguu

SEQ ID NO: 1779988 - RNA, 16 nt, Human
cugaaacccuggacca

SEQ ID NO: 1779989 - RNA, 19 nt, Human
cugaaacgcuccuuugugu

SEQ ID NO: 1779990 - RNA, 20 nt, Human
cugaaacgcuccuuugugug

SEQ ID NO: 1779991 - RNA, 12 nt, Human
cugaaacuauau

SEQ ID NO: 1779992 - RNA, 20 nt, Human
cugaaacuauauuuugucau

SEQ ID NO: 1779993 - RNA, 23 nt, Human
cugaaggacauugcggacagcca

SEQ ID NO: 1779994 - RNA, 20 nt, Human
cugaagcugacgaacuucca

SEQ ID NO: 1779995 - RNA, 12 nt, Human
cugaaggagccc

SEQ ID NO: 1779996 - RNA, 13 nt, Human
cugaaggagcccc

SEQ ID NO: 1779997 - RNA, 21 nt, Human
cugaaggagccccauuccugg

SEQ ID NO: 1779998 - RNA, 21 nt, Human
cugaaagacugaagaaagugu

SEQ ID NO: 1779999 - RNA, 17 nt, Human
cugaaggcuaaaaagca

SEQ ID NO: 1780000 - RNA, 19 nt, Human
cugaaggcuaaaaagcaac

SEQ ID NO: 1780001 - RNA, 22 nt, Human
cugaaggcuaaaaagcaacagg

SEQ ID NO: 1780002 - RNA, 13 nt, Human
cucuucagaggcc

SEQ ID NO: 1780003 - RNA, 17 nt, Human
cucuucagaggcccucg

SEQ ID NO: 1780004 - RNA, 14 nt, Human
cucuuauugcccac

SEQ ID NO: 1780005 - RNA, 15 nt, Human
cucuuauugcccacg

SEQ ID NO: 1780006 - RNA, 19 nt, Human
cucuuauugcccacgcugg

SEQ ID NO: 1780007 - RNA, 20 nt, Human
cucuuauugcccacgcugga

SEQ ID NO: 1780008 - RNA, 13 nt, Human
cucuuauugccca

SEQ ID NO: 1780009 - RNA, 13 nt, Human
cucugcuccucuc

SEQ ID NO: 1780010 - RNA, 18 nt, Human
cucugcuccucuccccag

SEQ ID NO: 1780011 - RNA, 20 nt, Human
cucugcuccucuccccagca

SEQ ID NO: 1780012 - RNA, 16 nt, Human
cucuggguccuuccug

SEQ ID NO: 1780013 - RNA, 17 nt, Human
cucuggguccuuccuga

SEQ ID NO: 1780014 - RNA, 18 nt, Human
cucuggguccuuccugaa

SEQ ID NO: 1780015 - RNA, 21 nt, Human
cucuggguccuuccugaaacu

SEQ ID NO: 1780016 - RNA, 15 nt, Human
cucuggguccuuccu

SEQ ID NO: 1780017 - RNA, 20 nt, Human
cucugggucagugguccaca

SEQ ID NO: 1780018 - RNA, 17 nt, Human
cucugggucaguggucc

SEQ ID NO: 1780019 - RNA, 13 nt, Human
cucugcugacaga

SEQ ID NO: 1780020 - RNA, 13 nt, Human
cucugcucugcgu

SEQ ID NO: 1780021 - RNA, 14 nt, Human
cucugcugacagac

SEQ ID NO: 1780022 - RNA, 16 nt, Human
cucugcugacagacac

SEQ ID NO: 1780023 - RNA, 14 nt, Human
cucuguccaggcac

SEQ ID NO: 1780024 - RNA, 19 nt, Human
cucuguccaggcacugaga

SEQ ID NO: 1780025 - RNA, 15 nt, Human
cucugguuaucuaau

SEQ ID NO: 1780026 - RNA, 16 nt, Human
cggagucccaccuugg

SEQ ID NO: 1780027 - RNA, 24 nt, Human
cgcugccccaucuccccucagcuc

SEQ ID NO: 1780028 - RNA, 14 nt, Human
cgcugccccaucuc

SEQ ID NO: 1780029 - RNA, 21 nt, Human
cgcugccccaucuccccucag

SEQ ID NO: 1780030 - RNA, 23 nt, Human
cgcugccccaucuccccucagcu

SEQ ID NO: 1780031 - RNA, 15 nt, Human
cgcugccagcucugu

SEQ ID NO: 1780032 - RNA, 19 nt, Human
cgcugccagcucuguauca

SEQ ID NO: 1780033 - RNA, 14 nt, Human
cggggacagcuccu

SEQ ID NO: 1780034 - RNA, 14 nt, Human
cgggcugagggccu

SEQ ID NO: 1780035 - RNA, 15 nt, Human
cgggcugagggccug

SEQ ID NO: 1780036 - RNA, 16 nt, Human
cgggcugagggccugc

SEQ ID NO: 1780037 - RNA, 19 nt, Human
cgggcugagggccugcugg

SEQ ID NO: 1780038 - RNA, 15 nt, Human
cggggacagcuccuu

SEQ ID NO: 1780039 - RNA, 17 nt, Human
cgggccacagagaaagu

SEQ ID NO: 1780040 - RNA, 12 nt, Human
cgggccacagag

SEQ ID NO: 1780041 - RNA, 14 nt, Human
cgggccacagagaa

SEQ ID NO: 1780042 - RNA, 13 nt, Human
cggcucccagccu

SEQ ID NO: 1780043 - RNA, 14 nt, Human
cggcucccagccuc

SEQ ID NO: 1780044 - RNA, 15 nt, Human
cggcucccagccuca

SEQ ID NO: 1780045 - RNA, 17 nt, Human
cggcucccagccucagc

SEQ ID NO: 1780046 - RNA, 19 nt, Human
cggcucccagccucagcgc

SEQ ID NO: 1780047 - RNA, 13 nt, Human
cggcuccaggcuc

SEQ ID NO: 1780048 - RNA, 14 nt, Human
cggcuccaggcucc

SEQ ID NO: 1780049 - RNA, 15 nt, Human
cggcuccaggcuccu

SEQ ID NO: 1780050 - RNA, 16 nt, Human
cggcuccaggcuccuu

SEQ ID NO: 1780051 - RNA, 18 nt, Human
cggagucccaccuuggcu

SEQ ID NO: 1780052 - RNA, 20 nt, Human
cggagucccaccuuggcugc

SEQ ID NO: 1780053 - RNA, 15 nt, Human
cggcucacugcagcc

SEQ ID NO: 1780054 - RNA, 14 nt, Human
cggcucacugcagc

SEQ ID NO: 1780055 - RNA, 16 nt, Human
cggcucacugcagccu

SEQ ID NO: 1780056 - RNA, 17 nt, Human
cggcucacugcagccuc

SEQ ID NO: 1780057 - RNA, 12 nt, Human
cggcuccaggcu

SEQ ID NO: 1780058 - RNA, 15 nt, Human
cggcuccacuaggac

SEQ ID NO: 1780059 - RNA, 14 nt, Human
cgugcacacaccag

SEQ ID NO: 1780060 - RNA, 18 nt, Human
cgauaucagaauuugugu

SEQ ID NO: 1780061 - RNA, 18 nt, Human
cgaucacaacgugcauug

SEQ ID NO: 1780062 - RNA, 18 nt, Human
cgcauucuaaccuggagg

SEQ ID NO: 1780063 - RNA, 19 nt, Human
cgcauucuaaccuggaggu

SEQ ID NO: 1780064 - RNA, 24 nt, Human
cgaucacaacgugcauugugcuuc

SEQ ID NO: 1780065 - RNA, 18 nt, Human
cgcaggagcacacccagc

SEQ ID NO: 1780066 - RNA, 23 nt, Human
cgcaggagcacacccagccccca

SEQ ID NO: 1780067 - RNA, 23 nt, Human
cgaucacaacgugcauugugcuu

SEQ ID NO: 1780068 - RNA, 22 nt, Human
cgaucacaacgugcauugugcu

SEQ ID NO: 1780069 - RNA, 20 nt, Human
cgccugaggaacccuuacag

SEQ ID NO: 1780070 - RNA, 19 nt, Human
cgccugcaaacgcugccug

SEQ ID NO: 1780071 - RNA, 18 nt, Human
cgccugcaaacgcugccu

SEQ ID NO: 1780072 - RNA, 19 nt, Human
cgccuggcugcagccugcg

SEQ ID NO: 1780073 - RNA, 15 nt, Human
cgccugcugcaugcc

SEQ ID NO: 1780074 - RNA, 11 nt, Human
cgccuccagga

SEQ ID NO: 1780075 - RNA, 16 nt, Human
cgacgcuugcucuguu

SEQ ID NO: 1780076 - RNA, 19 nt, Human
cgacucuuucugagugccu

SEQ ID NO: 1780077 - RNA, 21 nt, Human
cgacucuuucugagugccuuc

SEQ ID NO: 1780078 - RNA, 22 nt, Human
cgacucuuucugagugccuucu

SEQ ID NO: 1780079 - RNA, 15 nt, Human
cgacuaaacuagauu

SEQ ID NO: 1780080 - RNA, 21 nt, Human
cgacuaaacuagauuuucacu

SEQ ID NO: 1780081 - RNA, 17 nt, Human
cgacacugggaggccag

SEQ ID NO: 1780082 - RNA, 16 nt, Human
cgaauuucugugcccu

SEQ ID NO: 1780083 - RNA, 20 nt, Human
cgaauuucugugcccuccug

SEQ ID NO: 1780084 - RNA, 13 nt, Human
ccuuuuuuaaaaa

SEQ ID NO: 1780085 - RNA, 16 nt, Human
ccuuuuuuaaaaaugc

SEQ ID NO: 1780086 - RNA, 17 nt, Human
ccuuuuuuaaaaaugca

SEQ ID NO: 1780087 - RNA, 17 nt, Human
ccuuucaccccagggcc

SEQ ID NO: 1780088 - RNA, 12 nt, Human
ccuuuagaaaau

SEQ ID NO: 1780089 - RNA, 14 nt, Human
ccuuuagaaaauau

SEQ ID NO: 1780090 - RNA, 16 nt, Human
ccuuuagaaaauauaa

SEQ ID NO: 1780091 - RNA, 19 nt, Human
ccuuucaccccagggccug

SEQ ID NO: 1780092 - RNA, 21 nt, Human
ccuuucaccccagggccugag

SEQ ID NO: 1780093 - RNA, 19 nt, Human
ccuuuacccucuuugcugc

SEQ ID NO: 1780094 - RNA, 21 nt, Human
ccuuuacccucuuugcugcag

SEQ ID NO: 1780095 - RNA, 22 nt, Human
ccuuuacccucuuugcugcaga

SEQ ID NO: 1780096 - RNA, 21 nt, Human
cuaucauuuaauaauauacuu

SEQ ID NO: 1780097 - RNA, 17 nt, Human
cuaucauuuaauaauau

SEQ ID NO: 1780098 - RNA, 15 nt, Human
cuaucauuuaauaau

SEQ ID NO: 1780099 - RNA, 13 nt, Human
cuaucauuuaaua

SEQ ID NO: 1780100 - RNA, 12 nt, Human
cuauuuuuguac

SEQ ID NO: 1780101 - RNA, 13 nt, Human
cucaaugcacuga

SEQ ID NO: 1780102 - RNA, 15 nt, Human
cucaaugcacugaca

SEQ ID NO: 1780103 - RNA, 13 nt, Human
cucaaugcucaua

SEQ ID NO: 1780104 - RNA, 12 nt, Human
cucaaugcucau

SEQ ID NO: 1780105 - RNA, 15 nt, Human
cucaaugcucauaac

SEQ ID NO: 1780106 - RNA, 20 nt, Human
cucaaacucuugaccucagg

SEQ ID NO: 1780107 - RNA, 14 nt, Human
cuaagugugaacug

SEQ ID NO: 1780108 - RNA, 23 nt, Human
cuaagugauccucccaccucagc

SEQ ID NO: 1780109 - RNA, 19 nt, Human
cuacgccucuucugucccu

SEQ ID NO: 1780110 - RNA, 14 nt, Human
cuacgccugcaugu

SEQ ID NO: 1780111 - RNA, 18 nt, Human
cuagcauaucugccuuua

SEQ ID NO: 1780112 - RNA, 17 nt, Human
cuagcauaucugccuuu

SEQ ID NO: 1780113 - RNA, 15 nt, Human
cuagcauaucugccu

SEQ ID NO: 1780114 - RNA, 14 nt, Human
cuagcauaucugcc

SEQ ID NO: 1780115 - RNA, 19 nt, Human
ccugccucgaacuggcugc

SEQ ID NO: 1780116 - RNA, 21 nt, Human
ccugccucgaacuggcugcaa

SEQ ID NO: 1780117 - RNA, 23 nt, Human
ccugccucgaacuggcugcaaag

SEQ ID NO: 1780118 - RNA, 17 nt, Human
ccugccucccuugacuu

SEQ ID NO: 1780119 - RNA, 13 nt, Human
ccugcccaggccc

SEQ ID NO: 1780120 - RNA, 16 nt, Human
ccugcccccaauccau

SEQ ID NO: 1780121 - RNA, 15 nt, Human
ccugcccccaaucca

SEQ ID NO: 1780122 - RNA, 16 nt, Human
ccugcacuugcagacu

SEQ ID NO: 1780123 - RNA, 17 nt, Human
ccugcacuugcagacuc

SEQ ID NO: 1780124 - RNA, 18 nt, Human
ccugcacuugcagacucu

SEQ ID NO: 1780125 - RNA, 19 nt, Human
ccugcacuugcagacucua

SEQ ID NO: 1780126 - RNA, 23 nt, Human
ccugcagcaggaauauaugugug

SEQ ID NO: 1780127 - RNA, 22 nt, Human
ccuggccucaagugauucuccu

SEQ ID NO: 1780128 - RNA, 11 nt, Human
ccugggcccuc

SEQ ID NO: 1780129 - RNA, 14 nt, Human
ccugggcccucucu

SEQ ID NO: 1780130 - RNA, 21 nt, Human
ccugguggcagugggagcugc

SEQ ID NO: 1780131 - RNA, 13 nt, Human
ccuggggccugac

SEQ ID NO: 1780132 - RNA, 14 nt, Human
ccuggggccugacu

SEQ ID NO: 1780133 - RNA, 16 nt, Human
ccuggggccugacugc

SEQ ID NO: 1780134 - RNA, 17 nt, Human
ccuggggccugacugcu

SEQ ID NO: 1780135 - RNA, 18 nt, Human
ccuggggccugacugcuc

SEQ ID NO: 1780136 - RNA, 15 nt, Human
ccugggcccucucug

SEQ ID NO: 1780137 - RNA, 18 nt, Human
ccugggcccucucugcuc

SEQ ID NO: 1780138 - RNA, 20 nt, Human
ccugggccguaucuccggcu

SEQ ID NO: 1780139 - RNA, 22 nt, Human
ccugggccguaucuccggcucc

SEQ ID NO: 1780140 - RNA, 12 nt, Human
ccugucugcccc

SEQ ID NO: 1780141 - RNA, 14 nt, Human
ccugucugccccag

SEQ ID NO: 1780142 - RNA, 17 nt, Human
ccugucugccccagccc

SEQ ID NO: 1780143 - RNA, 19 nt, Human
ccugucugccccagcccag

SEQ ID NO: 1780144 - RNA, 20 nt, Human
ccugucugccccagcccaga

SEQ ID NO: 1780145 - RNA, 13 nt, Human
cccuucgcuccug

SEQ ID NO: 1780146 - RNA, 13 nt, Human
ccggccccugcug

SEQ ID NO: 1780147 - RNA, 14 nt, Human
cccuucgcuccugu

SEQ ID NO: 1780148 - RNA, 15 nt, Human
cccuucgcuccugug

SEQ ID NO: 1780149 - RNA, 14 nt, Human
ccggccccugcugg

SEQ ID NO: 1780150 - RNA, 15 nt, Human
ccggcgagcccugug

SEQ ID NO: 1780151 - RNA, 17 nt, Human
ccggcgagcccugugga

SEQ ID NO: 1780152 - RNA, 15 nt, Human
ccucccaccucagcc

SEQ ID NO: 1780153 - RNA, 17 nt, Human
ccucccaccucagccuc

SEQ ID NO: 1780154 - RNA, 15 nt, Human
ccucaaaacuggagu

SEQ ID NO: 1780155 - RNA, 17 nt, Human
ccucaaaacuggagucc

SEQ ID NO: 1780156 - RNA, 17 nt, Human
cccucagaacccuuggc

SEQ ID NO: 1780157 - RNA, 18 nt, Human
cccucagaacccuuggcu

SEQ ID NO: 1780158 - RNA, 21 nt, Human
cccucagaacccuuggcuugc

SEQ ID NO: 1780159 - RNA, 22 nt, Human
cccucagaacccuuggcuugcc

SEQ ID NO: 1780160 - RNA, 23 nt, Human
cccucagaacccuuggcuugccc

SEQ ID NO: 1780161 - RNA, 20 nt, Human
cccgggaaccuccccagccu

SEQ ID NO: 1780162 - RNA, 22 nt, Human
cccgggaaccuccccagccugc

SEQ ID NO: 1780163 - RNA, 23 nt, Human
cccgggaaccuccccagccugcg

SEQ ID NO: 1780164 - RNA, 12 nt, Human
cccggcugcgga

SEQ ID NO: 1780165 - RNA, 14 nt, Human
cccuaugggccugc

SEQ ID NO: 1780166 - RNA, 21 nt, Human
cccuaugggccugccgggcug

SEQ ID NO: 1780167 - RNA, 15 nt, Human
ccccauucugccugc

SEQ ID NO: 1780168 - RNA, 13 nt, Human
ccccauucugccu

SEQ ID NO: 1780169 - RNA, 14 nt, Human
ccccauucugccug

SEQ ID NO: 1780170 - RNA, 19 nt, Human
ccccaucuucgggaccagg

SEQ ID NO: 1780171 - RNA, 16 nt, Human
ccccaucuucgggacc

SEQ ID NO: 1780172 - RNA, 18 nt, Human
ccccaucuucgggaccag

SEQ ID NO: 1780173 - RNA, 23 nt, Human
ccccauuccugggaaauauuccc

SEQ ID NO: 1780174 - RNA, 19 nt, Human
ccccuucgcuccugugucu

SEQ ID NO: 1780175 - RNA, 14 nt, Human
ccccuucgcuccug

SEQ ID NO: 1780176 - RNA, 15 nt, Human
ccccuucgcuccugu

SEQ ID NO: 1780177 - RNA, 17 nt, Human
ccccuucgcuccugugu

SEQ ID NO: 1780178 - RNA, 19 nt, Human
cccaguuuuguugccccag

SEQ ID NO: 1780179 - RNA, 23 nt, Human
cccauaaggggucaaaauuugcu

SEQ ID NO: 1780180 - RNA, 23 nt, Human
cccauucugccugcccaggcccc

SEQ ID NO: 1780181 - RNA, 21 nt, Human
ccccagauugcaacaggcugg

SEQ ID NO: 1780182 - RNA, 22 nt, Human
ccccagauugcaacaggcuggg

SEQ ID NO: 1780183 - RNA, 23 nt, Human
ccccagauugcaacaggcugggc

SEQ ID NO: 1780184 - RNA, 17 nt, Human
ccccagcaagugagagc

SEQ ID NO: 1780185 - RNA, 19 nt, Human
ccccagcaagugagagcug

SEQ ID NO: 1780186 - RNA, 20 nt, Human
ccccagcaagugagagcugg

SEQ ID NO: 1780187 - RNA, 21 nt, Human
ccccagcaagugagagcuggg

SEQ ID NO: 1780188 - RNA, 20 nt, Human
cccauucugccugcccaggc

SEQ ID NO: 1780189 - RNA, 21 nt, Human
cccauucugccugcccaggcc

SEQ ID NO: 1780190 - RNA, 22 nt, Human
cccauucugccugcccaggccc

SEQ ID NO: 1780191 - RNA, 17 nt, Human
cccagcccacuucugcc

SEQ ID NO: 1780192 - RNA, 14 nt, Human
cccagcccacuucu

SEQ ID NO: 1780193 - RNA, 21 nt, Human
cccagcacugcuugaggaaaa

SEQ ID NO: 1780194 - RNA, 21 nt, Human
cccagcugugcucuggacagg

SEQ ID NO: 1780195 - RNA, 23 nt, Human
cccagcugugcucuggacaggca

SEQ ID NO: 1780196 - RNA, 17 nt, Human
ccacucucuaccagaua

SEQ ID NO: 1780197 - RNA, 21 nt, Human
ccacucugcucgccuuagcac

SEQ ID NO: 1780198 - RNA, 13 nt, Human
ccagcuucccgag

SEQ ID NO: 1780199 - RNA, 19 nt, Human
ccagcuucauguggcuucc

SEQ ID NO: 1780200 - RNA, 17 nt, Human
ccaggauuugcacagaa

SEQ ID NO: 1780201 - RNA, 21 nt, Human
ccagucacugugagcucccag

SEQ ID NO: 1780202 - RNA, 17 nt, Human
ccaguauuuuugcugcu

SEQ ID NO: 1780203 - RNA, 19 nt, Human
ccaguauuuuugcugcuuc

SEQ ID NO: 1780204 - RNA, 20 nt, Human
ccaguauuuuugcugcuucu

SEQ ID NO: 1780205 - RNA, 14 nt, Human
ccagucaaccuggg

SEQ ID NO: 1780206 - RNA, 17 nt, Human
ccaugggccuccugugu

SEQ ID NO: 1780207 - RNA, 14 nt, Human
ccaugggccuccug

SEQ ID NO: 1780208 - RNA, 15 nt, Human
ccaugggccuccugu

SEQ ID NO: 1780209 - RNA, 13 nt, Human
ccauugaauucuu

SEQ ID NO: 1780210 - RNA, 22 nt, Human
ccauugaauucuugguugagga

SEQ ID NO: 1780211 - RNA, 14 nt, Human
ccaugagccucagc

SEQ ID NO: 1780212 - RNA, 18 nt, Human
ccaugagccucagcaucc

SEQ ID NO: 1780213 - RNA, 19 nt, Human
ccaugagccucagcauccu

SEQ ID NO: 1780214 - RNA, 13 nt, Human
ccaugggccuccu

SEQ ID NO: 1780215 - RNA, 14 nt, Human
ccauacacccccuc

SEQ ID NO: 1780216 - RNA, 19 nt, Human
ccauacacccccucuucug

SEQ ID NO: 1780217 - RNA, 20 nt, Human
auuucuccuccaugggagaa

SEQ ID NO: 1780218 - RNA, 18 nt, Human
auuucucagacuuuggaa

SEQ ID NO: 1780219 - RNA, 16 nt, Human
auuucucagacuuugg

SEQ ID NO: 1780220 - RNA, 21 nt, Human
auuucucagacuuuggaaaau

SEQ ID NO: 1780221 - RNA, 18 nt, Human
auuuaauuagugcuaagu

SEQ ID NO: 1780222 - RNA, 16 nt, Human
auuuaauuagugcuaa

SEQ ID NO: 1780223 - RNA, 15 nt, Human
auuuaauuagugcua

SEQ ID NO: 1780224 - RNA, 16 nt, Human
auuucagcagcugcag

SEQ ID NO: 1780225 - RNA, 13 nt, Human
auuuauaguaaug

SEQ ID NO: 1780226 - RNA, 21 nt, Human
auuuauaguaaugaguuuaaa

SEQ ID NO: 1780227 - RNA, 23 nt, Human
auuguaauaggcguaacuaauuu

SEQ ID NO: 1780228 - RNA, 17 nt, Human
auucuugguugaggaaa

SEQ ID NO: 1780229 - RNA, 18 nt, Human
auucuugguugaggaaac

SEQ ID NO: 1780230 - RNA, 17 nt, Human
auucuuucgaaagaaga

SEQ ID NO: 1780231 - RNA, 11 nt, Human
auucucugagc

SEQ ID NO: 1780232 - RNA, 17 nt, Human
auucuugccaaauauaa

SEQ ID NO: 1780233 - RNA, 13 nt, Human
auucauuuucuag

SEQ ID NO: 1780234 - RNA, 14 nt, Human
auucauuuucuaga

SEQ ID NO: 1780235 - RNA, 15 nt, Human
auucauuuucuagau

SEQ ID NO: 1780236 - RNA, 16 nt, Human
auucauuuucuagaua

SEQ ID NO: 1780237 - RNA, 21 nt, Human
auucauuuucuagauacaaua

SEQ ID NO: 1780238 - RNA, 22 nt, Human
auucauuuucuagauacaauaa

SEQ ID NO: 1780239 - RNA, 13 nt, Human
auuccaaagcaaa

SEQ ID NO: 1780240 - RNA, 16 nt, Human
auuccaaaaagcacau

SEQ ID NO: 1780241 - RNA, 17 nt, Human
auuccaaaaagcacaua

SEQ ID NO: 1780242 - RNA, 20 nt, Human
auuccucuacuaacaaucag

SEQ ID NO: 1780243 - RNA, 21 nt, Human
auucaagccauuccaaaguuc

SEQ ID NO: 1780244 - RNA, 11 nt, Human
auuauguuaaa

SEQ ID NO: 1780245 - RNA, 13 nt, Human
auucaacuaaaaa

SEQ ID NO: 1780246 - RNA, 14 nt, Human
auucaacuaaaaaa

SEQ ID NO: 1780247 - RNA, 23 nt, Human
auucaacuaaaaaaaaaaaagua

SEQ ID NO: 1780248 - RNA, 13 nt, Human
caacaauuucuac

SEQ ID NO: 1780249 - RNA, 18 nt, Human
caacaauuucuacuuuga

SEQ ID NO: 1780250 - RNA, 19 nt, Human
caacaauuucuacuuugaa

SEQ ID NO: 1780251 - RNA, 20 nt, Human
caacaauuucuacuuugaag

SEQ ID NO: 1780252 - RNA, 14 nt, Human
caagauuaaaugua

SEQ ID NO: 1780253 - RNA, 12 nt, Human
caagaagggcug

SEQ ID NO: 1780254 - RNA, 13 nt, Human
caagaagggcugc

SEQ ID NO: 1780255 - RNA, 14 nt, Human
caagaagggcugca

SEQ ID NO: 1780256 - RNA, 15 nt, Human
caagaagggcugcau

SEQ ID NO: 1780257 - RNA, 16 nt, Human
caagaagggcugcaug

SEQ ID NO: 1780258 - RNA, 17 nt, Human
caagaagggcugcauga

SEQ ID NO: 1780259 - RNA, 19 nt, Human
caagaagggcugcaugaug

SEQ ID NO: 1780260 - RNA, 20 nt, Human
caagaagggcugcaugaugu

SEQ ID NO: 1780261 - RNA, 15 nt, Human
caacccccagccugc

SEQ ID NO: 1780262 - RNA, 16 nt, Human
caacccccagccugcu

SEQ ID NO: 1780263 - RNA, 17 nt, Human
caacccccagccugcua

SEQ ID NO: 1780264 - RNA, 20 nt, Human
caaaagguucacuaaagcag

SEQ ID NO: 1780265 - RNA, 20 nt, Human
caaaaguggccucuuugucu

SEQ ID NO: 1780266 - RNA, 20 nt, Human
caaaccaacaggcuaccaac

SEQ ID NO: 1780267 - RNA, 14 nt, Human
caaaaguggccucu

SEQ ID NO: 1780268 - RNA, 16 nt, Human
caaaaguggccucuuu

SEQ ID NO: 1780269 - RNA, 17 nt, Human
caaaaguggccucuuug

SEQ ID NO: 1780270 - RNA, 18 nt, Human
caaaaguggccucuuugu

SEQ ID NO: 1780271 - RNA, 17 nt, Human
caaaagcgcuuuuccuu

SEQ ID NO: 1780272 - RNA, 22 nt, Human
caaaagcgcuuuuccuuggcau

SEQ ID NO: 1780273 - RNA, 12 nt, Human
auuuuuaaauaa

SEQ ID NO: 1780274 - RNA, 15 nt, Human
auuuuuaaauaauuu

SEQ ID NO: 1780275 - RNA, 19 nt, Human
auuuuuaaauguaaaacau

SEQ ID NO: 1780276 - RNA, 13 nt, Human
auuuuuaaaugug

SEQ ID NO: 1780277 - RNA, 15 nt, Human
auuuuuaaauguguu

SEQ ID NO: 1780278 - RNA, 21 nt, Human
auuuuuaagcaaaauauuauu

SEQ ID NO: 1780279 - RNA, 13 nt, Human
auuuuauaagaaa

SEQ ID NO: 1780280 - RNA, 14 nt, Human
auuuuauaagaaaa

SEQ ID NO: 1780281 - RNA, 15 nt, Human
auuuuauaagaaaaa

SEQ ID NO: 1780282 - RNA, 16 nt, Human
auuuuauaagaaaaac

SEQ ID NO: 1780283 - RNA, 17 nt, Human
auuuuauaagaaaaacu

SEQ ID NO: 1780284 - RNA, 20 nt, Human
auuuuauaagaaaaacuuuu

SEQ ID NO: 1780285 - RNA, 18 nt, Human
auuuugauccaagcuggu

SEQ ID NO: 1780286 - RNA, 20 nt, Human
auuuugauauaaucuuucaa

SEQ ID NO: 1780287 - RNA, 20 nt, Human
cacagcucuguccugggagu

SEQ ID NO: 1780288 - RNA, 23 nt, Human
cacagcucuguccugggagugag

SEQ ID NO: 1780289 - RNA, 10 nt, Human
cacagcucuu

SEQ ID NO: 1780290 - RNA, 20 nt, Human
cacagggauucucacaauag

SEQ ID NO: 1780291 - RNA, 16 nt, Human
cacaguauuacuucug

SEQ ID NO: 1780292 - RNA, 18 nt, Human
cacaguauuacuucugcu

SEQ ID NO: 1780293 - RNA, 19 nt, Human
cacaguauuacuucugcua

SEQ ID NO: 1780294 - RNA, 16 nt, Human
cacccagcccacuucu

SEQ ID NO: 1780295 - RNA, 17 nt, Human
cacccagcccacuucug

SEQ ID NO: 1780296 - RNA, 10 nt, Human
caccagcugc

SEQ ID NO: 1780297 - RNA, 11 nt, Human
caccagcugca

SEQ ID NO: 1780298 - RNA, 12 nt, Human
caccagcugcaa

SEQ ID NO: 1780299 - RNA, 13 nt, Human
caccagcugcaaa

SEQ ID NO: 1780300 - RNA, 14 nt, Human
caccagcugcaaag

SEQ ID NO: 1780301 - RNA, 15 nt, Human
caccagcugcaaagu

SEQ ID NO: 1780302 - RNA, 17 nt, Human
caccagcugcaaagugu

SEQ ID NO: 1780303 - RNA, 18 nt, Human
caccagcugcaaaguguu

SEQ ID NO: 1780304 - RNA, 21 nt, Human
caccagcccuuagcagggaaa

SEQ ID NO: 1780305 - RNA, 24 nt, Human
cacccaggagccccgaggccuucu

SEQ ID NO: 1780306 - RNA, 19 nt, Human
cacccagcccacuucugcc

SEQ ID NO: 1780307 - RNA, 20 nt, Human
cacccaggagccccgaggcc

SEQ ID NO: 1780308 - RNA, 23 nt, Human
cacccaggagccccgaggccuuc

SEQ ID NO: 1780309 - RNA, 19 nt, Human
cacaucuugcucugcugac

SEQ ID NO: 1780310 - RNA, 18 nt, Human
cacaucuugcucugcuga

SEQ ID NO: 1780311 - RNA, 16 nt, Human
cacaucuugcucugcu

SEQ ID NO: 1780312 - RNA, 17 nt, Human
cacaucuugcucugcug

SEQ ID NO: 1780313 - RNA, 17 nt, Human
cacaucuaaccucaucu

SEQ ID NO: 1780314 - RNA, 22 nt, Human
cacauccuccacguucugcuca

SEQ ID NO: 1780315 - RNA, 22 nt, Human
caaugcuggcuguuggcugggg

SEQ ID NO: 1780316 - RNA, 23 nt, Human
caaugcuggcuguuggcuggggg

SEQ ID NO: 1780317 - RNA, 20 nt, Human
caauuguuuguucuguuuuc

SEQ ID NO: 1780318 - RNA, 22 nt, Human
caauaaaauuuuuuuucauguu

SEQ ID NO: 1780319 - RNA, 18 nt, Human
caauaaaauuuuuuuuca

SEQ ID NO: 1780320 - RNA, 19 nt, Human
caauaaaauuuuuuuucau

SEQ ID NO: 1780321 - RNA, 19 nt, Human
caccuugcuuuuuuacuua

SEQ ID NO: 1780322 - RNA, 19 nt, Human
caccuugacagggcacacc

SEQ ID NO: 1780323 - RNA, 14 nt, Human
caccuuggcucaag

SEQ ID NO: 1780324 - RNA, 13 nt, Human
caccuuggcucaa

SEQ ID NO: 1780325 - RNA, 23 nt, Human
caccuacccauacacccccucuu

SEQ ID NO: 1780326 - RNA, 23 nt, Human
caccucaagaagaagaggggcau

SEQ ID NO: 1780327 - RNA, 18 nt, Human
caccuacauguuauucua

SEQ ID NO: 1780328 - RNA, 19 nt, Human
caccgugucaagcugcucu

SEQ ID NO: 1780329 - RNA, 20 nt, Human
caccgugucaagcugcucug

SEQ ID NO: 1780330 - RNA, 23 nt, Human
caccgugucaagcugcucugagc

SEQ ID NO: 1780331 - RNA, 17 nt, Human
cacucuuauugcccacg

SEQ ID NO: 1780332 - RNA, 16 nt, Human
cacuccccuccacucu

SEQ ID NO: 1780333 - RNA, 18 nt, Human
cacucuuauugcccacgc

SEQ ID NO: 1780334 - RNA, 19 nt, Human
cacucuuauugcccacgcu

SEQ ID NO: 1780335 - RNA, 18 nt, Human
cacucccaccugcaucug

SEQ ID NO: 1780336 - RNA, 22 nt, Human
cacucccaccugcaucuggggc

SEQ ID NO: 1780337 - RNA, 14 nt, Human
cacggccaggccag

SEQ ID NO: 1780338 - RNA, 15 nt, Human
cacggccaggccaga

SEQ ID NO: 1780339 - RNA, 16 nt, Human
cacggccaggccagag

SEQ ID NO: 1780340 - RNA, 19 nt, Human
cacggaucacgauguaaau

SEQ ID NO: 1780341 - RNA, 17 nt, Human
cacggccaggccagagg

SEQ ID NO: 1780342 - RNA, 23 nt, Human
cacuacggaauaguuggcuagga

SEQ ID NO: 1780343 - RNA, 15 nt, Human
cacuguugcccaggc

SEQ ID NO: 1780344 - RNA, 16 nt, Human
cacuguugcccaggcu

SEQ ID NO: 1780345 - RNA, 23 nt, Human
cacuuguccccaaauccgaaccu

SEQ ID NO: 1780346 - RNA, 12 nt, Human
cacuugucccca

SEQ ID NO: 1780347 - RNA, 20 nt, Human
cacuuguccccaaauccgaa

SEQ ID NO: 1780348 - RNA, 17 nt, Human
cacuguugcccaggcug

SEQ ID NO: 1780349 - RNA, 12 nt, Human
cacuuucauuuu

SEQ ID NO: 1780350 - RNA, 14 nt, Human
cacuuucauuuuug

SEQ ID NO: 1780351 - RNA, 18 nt, Human
caggcagauacaggaaaa

SEQ ID NO: 1780352 - RNA, 13 nt, Human
caggccagaggga

SEQ ID NO: 1780353 - RNA, 15 nt, Human
caggccagagggagu

SEQ ID NO: 1780354 - RNA, 18 nt, Human
caggcaccagucccuguc

SEQ ID NO: 1780355 - RNA, 16 nt, Human
caggcaccagucccug

SEQ ID NO: 1780356 - RNA, 16 nt, Human
caggccagagggagug

SEQ ID NO: 1780357 - RNA, 21 nt, Human
cagggcucagcggggacagcu

SEQ ID NO: 1780358 - RNA, 23 nt, Human
cagggcucagcggggacagcucc

SEQ ID NO: 1780359 - RNA, 20 nt, Human
cagggaugauucaagccauu

SEQ ID NO: 1780360 - RNA, 21 nt, Human
caggcugggcuucaguggcag

SEQ ID NO: 1780361 - RNA, 22 nt, Human
caggcugggcuucaguggcagc

SEQ ID NO: 1780362 - RNA, 20 nt, Human
caggcugggcuucaguggca

SEQ ID NO: 1780363 - RNA, 15 nt, Human
caguggggcagucau

SEQ ID NO: 1780364 - RNA, 21 nt, Human
caguggugcgaucuggguuca

SEQ ID NO: 1780365 - RNA, 21 nt, Human
cagugggaugaaccagccggg

SEQ ID NO: 1780366 - RNA, 13 nt, Human
cagugcccacagg

SEQ ID NO: 1780367 - RNA, 15 nt, Human
cagugcccacaggau

SEQ ID NO: 1780368 - RNA, 17 nt, Human
cagugcccacaggauca

SEQ ID NO: 1780369 - RNA, 20 nt, Human
cagugggagcugccuguuca

SEQ ID NO: 1780370 - RNA, 23 nt, Human
cagugggagcugccuguucagcu

SEQ ID NO: 1780371 - RNA, 18 nt, Human
cagugcccacaggaucag

SEQ ID NO: 1780372 - RNA, 15 nt, Human
cagucuggaaugcag

SEQ ID NO: 1780373 - RNA, 17 nt, Human
cagucuggaaugcagug

SEQ ID NO: 1780374 - RNA, 18 nt, Human
cagucuggaaugcagugg

SEQ ID NO: 1780375 - RNA, 12 nt, Human
cagucucugagc

SEQ ID NO: 1780376 - RNA, 14 nt, Human
cagucucugagcag

SEQ ID NO: 1780377 - RNA, 21 nt, Human
caggugauccacccaccucag

SEQ ID NO: 1780378 - RNA, 22 nt, Human
caggugauccacccaccucagc

SEQ ID NO: 1780379 - RNA, 23 nt, Human
caggugauccacccaccucagcc

SEQ ID NO: 1780380 - RNA, 21 nt, Human
caguaaaauugccauauugca

SEQ ID NO: 1780381 - RNA, 20 nt, Human
caguaaaauugccauauugc

SEQ ID NO: 1780382 - RNA, 20 nt, Human
cagguuuuguuuuuuuucag

SEQ ID NO: 1780383 - RNA, 23 nt, Human
cagguuuuguuuuuuuucagcca

SEQ ID NO: 1780384 - RNA, 22 nt, Human
caggugcccagcuauaccugug

SEQ ID NO: 1780385 - RNA, 23 nt, Human
caggugcccagcuauaccugugc

SEQ ID NO: 1780386 - RNA, 20 nt, Human
cagccgcugagcgaggagau

SEQ ID NO: 1780387 - RNA, 19 nt, Human
cagccgcugagcgaggaga

SEQ ID NO: 1780388 - RNA, 19 nt, Human
cagccugcuaauuccccag

SEQ ID NO: 1780389 - RNA, 21 nt, Human
cagccugcgccugcugcaugc

SEQ ID NO: 1780390 - RNA, 22 nt, Human
cagccugcgccugcugcaugcc

SEQ ID NO: 1780391 - RNA, 23 nt, Human
cagccugcgccugcugcaugccc

SEQ ID NO: 1780392 - RNA, 13 nt, Human
cagccugcuagcu

SEQ ID NO: 1780393 - RNA, 16 nt, Human
cagccugcuagcuagc

SEQ ID NO: 1780394 - RNA, 18 nt, Human
cagccugcuagcuagcuc

SEQ ID NO: 1780395 - RNA, 22 nt, Human
cagccugcuagcuagcucaacu

SEQ ID NO: 1780396 - RNA, 23 nt, Human
cagccugcuagcuagcucaacua

SEQ ID NO: 1780397 - RNA, 18 nt, Human
cagcggggacagcuccuu

SEQ ID NO: 1780398 - RNA, 19 nt, Human
cagcggggacagcuccuuc

SEQ ID NO: 1780399 - RNA, 21 nt, Human
cagcggggacagcuccuucug

SEQ ID NO: 1780400 - RNA, 18 nt, Human
caggaaaagcugcugaca

SEQ ID NO: 1780401 - RNA, 15 nt, Human
caggaaaagcugcug

SEQ ID NO: 1780402 - RNA, 16 nt, Human
caggaaaagcugcuga

SEQ ID NO: 1780403 - RNA, 24 nt, Human
cagcugugcucuggacaggcaugu

SEQ ID NO: 1780404 - RNA, 20 nt, Human
cagcugugcucuggacaggc

SEQ ID NO: 1780405 - RNA, 12 nt, Human
cagcucccuggc

SEQ ID NO: 1780406 - RNA, 14 nt, Human
cagcucccuggcuu

SEQ ID NO: 1780407 - RNA, 16 nt, Human
cagcucccuggcuucu

SEQ ID NO: 1780408 - RNA, 20 nt, Human
cagcucccuggcuucugugg

SEQ ID NO: 1780409 - RNA, 17 nt, Human
cagauugcaacaggcug

SEQ ID NO: 1780410 - RNA, 13 nt, Human
cagauugaacuua

SEQ ID NO: 1780411 - RNA, 17 nt, Human
cagcagugugaggccag

SEQ ID NO: 1780412 - RNA, 19 nt, Human
cagcagugugaggccaggg

SEQ ID NO: 1780413 - RNA, 20 nt, Human
cagcagugugaggccagggc

SEQ ID NO: 1780414 - RNA, 22 nt, Human
cagcagugugaggccagggcag

SEQ ID NO: 1780415 - RNA, 13 nt, Human
cagaauauuucua

SEQ ID NO: 1780416 - RNA, 17 nt, Human
cagaauauuucuauuga

SEQ ID NO: 1780417 - RNA, 19 nt, Human
cagaauauuucuauugaau

SEQ ID NO: 1780418 - RNA, 14 nt, Human
cagauccucucugg

SEQ ID NO: 1780419 - RNA, 19 nt, Human
cagauccucucuggggcug

SEQ ID NO: 1780420 - RNA, 16 nt, Human
cauguuggccaggcug

SEQ ID NO: 1780421 - RNA, 14 nt, Human
cauguuggccaggc

SEQ ID NO: 1780422 - RNA, 15 nt, Human
cauguuggccaggcu

SEQ ID NO: 1780423 - RNA, 15 nt, Human
cauguccccucccag

SEQ ID NO: 1780424 - RNA, 16 nt, Human
cauguccccucccaga

SEQ ID NO: 1780425 - RNA, 18 nt, Human
cauguccccucccagagc

SEQ ID NO: 1780426 - RNA, 20 nt, Human
cauguagaaaauuuguuauu

SEQ ID NO: 1780427 - RNA, 18 nt, Human
cauguaggaaguaggaag

SEQ ID NO: 1780428 - RNA, 21 nt, Human
cauucuagaugcaagucucuu

SEQ ID NO: 1780429 - RNA, 23 nt, Human
cauucuaggccuccuggcccagg

SEQ ID NO: 1780430 - RNA, 16 nt, Human
cauucuaaccuggagg

SEQ ID NO: 1780431 - RNA, 12 nt, Human
caugauguuugc

SEQ ID NO: 1780432 - RNA, 13 nt, Human
caugauguuugcc

SEQ ID NO: 1780433 - RNA, 15 nt, Human
caugauguuugccca

SEQ ID NO: 1780434 - RNA, 17 nt, Human
caugauguuugcccaaa

SEQ ID NO: 1780435 - RNA, 21 nt, Human
caugauguuugcccaaaauuu

SEQ ID NO: 1780436 - RNA, 23 nt, Human
cauccuggcacccggccccugcu

SEQ ID NO: 1780437 - RNA, 22 nt, Human
cauccuggcacccggccccugc

SEQ ID NO: 1780438 - RNA, 14 nt, Human
caucggccuagggc

SEQ ID NO: 1780439 - RNA, 16 nt, Human
caucggccuagggccc

SEQ ID NO: 1780440 - RNA, 17 nt, Human
caucggccuagggcccc

SEQ ID NO: 1780441 - RNA, 15 nt, Human
cauccuggcacccgg

SEQ ID NO: 1780442 - RNA, 17 nt, Human
caucccgagcaccucca

SEQ ID NO: 1780443 - RNA, 21 nt, Human
caucccgggacgcagcaggag

SEQ ID NO: 1780444 - RNA, 11 nt, Human
caucugugucu

SEQ ID NO: 1780445 - RNA, 13 nt, Human
caucugugucuug

SEQ ID NO: 1780446 - RNA, 14 nt, Human
caucugugucuugu

SEQ ID NO: 1780447 - RNA, 15 nt, Human
caucuguuagggccu

SEQ ID NO: 1780448 - RNA, 16 nt, Human
caucuguuagggccuu

SEQ ID NO: 1780449 - RNA, 17 nt, Human
cauauucuguuggccag

SEQ ID NO: 1780450 - RNA, 18 nt, Human
cauauucuguuggccagu

SEQ ID NO: 1780451 - RNA, 20 nt, Human
cauauggucuccauuuuaca

SEQ ID NO: 1780452 - RNA, 12 nt, Human
ccacuccucuga

SEQ ID NO: 1780453 - RNA, 17 nt, Human
ccaccacacccagccca

SEQ ID NO: 1780454 - RNA, 17 nt, Human
ccaccauaugaauugua

SEQ ID NO: 1780455 - RNA, 19 nt, Human
ccaccauaugaauuguaca

SEQ ID NO: 1780456 - RNA, 20 nt, Human
ccaccauaugaauuguacag

SEQ ID NO: 1780457 - RNA, 16 nt, Human
ccacagccuccccugc

SEQ ID NO: 1780458 - RNA, 19 nt, Human
ccacagccuccccugccag

SEQ ID NO: 1780459 - RNA, 20 nt, Human
ccacagccuccccugccagg

SEQ ID NO: 1780460 - RNA, 16 nt, Human
ccacgacugucuccau

SEQ ID NO: 1780461 - RNA, 15 nt, Human
ccacgacugucucca

SEQ ID NO: 1780462 - RNA, 17 nt, Human
ccacgaaacugcccugg

SEQ ID NO: 1780463 - RNA, 18 nt, Human
ccacgaauuucugugccc

SEQ ID NO: 1780464 - RNA, 21 nt, Human
ccacgaauuucugugcccucc

SEQ ID NO: 1780465 - RNA, 23 nt, Human
ccacgaauuucugugcccuccug

SEQ ID NO: 1780466 - RNA, 14 nt, Human
ccacgacugucucc

SEQ ID NO: 1780467 - RNA, 18 nt, Human
ccaccgaagccgccugug

SEQ ID NO: 1780468 - RNA, 17 nt, Human
ccaccgcccagagaccc

SEQ ID NO: 1780469 - RNA, 13 nt, Human
ccaccgcccagag

SEQ ID NO: 1780470 - RNA, 12 nt, Human
ccaaugucuuga

SEQ ID NO: 1780471 - RNA, 15 nt, Human
ccaaugcaagacgcc

SEQ ID NO: 1780472 - RNA, 18 nt, Human
ccaagcucugcuccucuc

SEQ ID NO: 1780473 - RNA, 23 nt, Human
ccaagcugccuccccucuccuuc

SEQ ID NO: 1780474 - RNA, 12 nt, Human
ccaagcucugcu

SEQ ID NO: 1780475 - RNA, 13 nt, Human
ccaagcucugcuc

SEQ ID NO: 1780476 - RNA, 12 nt, Human
ccaacugaaggc

SEQ ID NO: 1780477 - RNA, 23 nt, Human
ccaacugaaggcuaaaaagcaac

SEQ ID NO: 1780478 - RNA, 11 nt, Human
cugcccugugg

SEQ ID NO: 1780479 - RNA, 11 nt, Human
cugccugucug

SEQ ID NO: 1780480 - RNA, 20 nt, Human
cugccuguucagcuccagcu

SEQ ID NO: 1780481 - RNA, 23 nt, Human
cugccuguucagcuccagcucac

SEQ ID NO: 1780482 - RNA, 18 nt, Human
cugcuaccucccuugccu

SEQ ID NO: 1780483 - RNA, 19 nt, Human
cugcuaccucccuugccuu

SEQ ID NO: 1780484 - RNA, 16 nt, Human
cugcuauccugccaaa

SEQ ID NO: 1780485 - RNA, 14 nt, Human
cugcucacauaucu

SEQ ID NO: 1780486 - RNA, 20 nt, Human
cugccucgaacuggcugcaa

SEQ ID NO: 1780487 - RNA, 14 nt, Human
cugccucuccaggc

SEQ ID NO: 1780488 - RNA, 15 nt, Human
cugccucuccaggca

SEQ ID NO: 1780489 - RNA, 12 nt, Human
cugccugucugc

SEQ ID NO: 1780490 - RNA, 13 nt, Human
cugccugucugcc

SEQ ID NO: 1780491 - RNA, 14 nt, Human
cugccugucugccc

SEQ ID NO: 1780492 - RNA, 15 nt, Human
cugccugucugcccc

SEQ ID NO: 1780493 - RNA, 18 nt, Human
cugccugucugccccagc

SEQ ID NO: 1780494 - RNA, 23 nt, Human
cugccugucugccccagcccaga

SEQ ID NO: 1780495 - RNA, 14 nt, Human
cugccucgaacugg

SEQ ID NO: 1780496 - RNA, 12 nt, Human
cugccuccuuua

SEQ ID NO: 1780497 - RNA, 19 nt, Human
cuggaaacauucaggagcu

SEQ ID NO: 1780498 - RNA, 14 nt, Human
cuggacucucaguc

SEQ ID NO: 1780499 - RNA, 17 nt, Human
cuggacucucagucucu

SEQ ID NO: 1780500 - RNA, 18 nt, Human
cuggacucucagucucug

SEQ ID NO: 1780501 - RNA, 19 nt, Human
cuggacucucagucucuga

SEQ ID NO: 1780502 - RNA, 20 nt, Human
cuggacucucagucucugag

SEQ ID NO: 1780503 - RNA, 21 nt, Human
cuggacucucagucucugagc

SEQ ID NO: 1780504 - RNA, 23 nt, Human
cuggacucucagucucugagcag

SEQ ID NO: 1780505 - RNA, 17 nt, Human
cugggacuacaggcacc

SEQ ID NO: 1780506 - RNA, 21 nt, Human
cugggacuacaggcacccacc

SEQ ID NO: 1780507 - RNA, 17 nt, Human
cugggacuacaggugug

SEQ ID NO: 1780508 - RNA, 13 nt, Human
cuggcagcucagc

SEQ ID NO: 1780509 - RNA, 17 nt, Human
cuggcagcucagcuucc

SEQ ID NO: 1780510 - RNA, 13 nt, Human
cuggcccuagacu

SEQ ID NO: 1780511 - RNA, 19 nt, Human
cuggcccuagacucggggu

SEQ ID NO: 1780512 - RNA, 23 nt, Human
cuguugcuaagccccagcaagca

SEQ ID NO: 1780513 - RNA, 22 nt, Human
cuguugcuaagccccagcaagc

SEQ ID NO: 1780514 - RNA, 21 nt, Human
cuguugcuaagccccagcaag

SEQ ID NO: 1780515 - RNA, 12 nt, Human
cuguugcuaagc

SEQ ID NO: 1780516 - RNA, 12 nt, Human
cuguuggccagu

SEQ ID NO: 1780517 - RNA, 16 nt, Human
cuguugcugaauaggc

SEQ ID NO: 1780518 - RNA, 15 nt, Human
cuguugcugaauagg

SEQ ID NO: 1780519 - RNA, 15 nt, Human
cuguuggccagugug

SEQ ID NO: 1780520 - RNA, 17 nt, Human
cugugcucuggacaggc

SEQ ID NO: 1780521 - RNA, 16 nt, Human
cuguucagcuccagcu

SEQ ID NO: 1780522 - RNA, 18 nt, Human
cuguucagcuccagcuca

SEQ ID NO: 1780523 - RNA, 19 nt, Human
cuguucagcuccagcucac

SEQ ID NO: 1780524 - RNA, 22 nt, Human
cuguucagcuccagcucaccag

SEQ ID NO: 1780525 - RNA, 15 nt, Human
cuguucagcuccagc

SEQ ID NO: 1780526 - RNA, 22 nt, Human
cugugucagguggggcagcuug

SEQ ID NO: 1780527 - RNA, 18 nt, Human
cugugcucuggacaggca

SEQ ID NO: 1780528 - RNA, 19 nt, Human
cugugcucuggacaggcau

SEQ ID NO: 1780529 - RNA, 22 nt, Human
cugucggcgcugccccaucucc

SEQ ID NO: 1780530 - RNA, 20 nt, Human
cugucggcgcugccccaucu

SEQ ID NO: 1780531 - RNA, 23 nt, Human
cugucggcgcugccccaucuccc

SEQ ID NO: 1780532 - RNA, 12 nt, Human
cuguccuuuccu

SEQ ID NO: 1780533 - RNA, 13 nt, Human
cuguccuuuccuu

SEQ ID NO: 1780534 - RNA, 14 nt, Human
cugucauuugagca

SEQ ID NO: 1780535 - RNA, 13 nt, Human
cuguccugggagu

SEQ ID NO: 1780536 - RNA, 14 nt, Human
cuguccugggagug

SEQ ID NO: 1780537 - RNA, 20 nt, Human
cuguccugggagugagcugg

SEQ ID NO: 1780538 - RNA, 21 nt, Human
cuguccugggagugagcuggu

SEQ ID NO: 1780539 - RNA, 15 nt, Human
cuguagccucagaug

SEQ ID NO: 1780540 - RNA, 16 nt, Human
cuguagcccacucugc

SEQ ID NO: 1780541 - RNA, 20 nt, Human
cuguagcccacucugcucgc

SEQ ID NO: 1780542 - RNA, 21 nt, Human
cuguagcccacucugcucgcc

SEQ ID NO: 1780543 - RNA, 18 nt, Human
cuguaagaauaauuuaua

SEQ ID NO: 1780544 - RNA, 19 nt, Human
cuguaagaauaauuuauag

SEQ ID NO: 1780545 - RNA, 20 nt, Human
cuguaagaauaauuuauagu

SEQ ID NO: 1780546 - RNA, 21 nt, Human
cuguaagaauaauuuauagua

SEQ ID NO: 1780547 - RNA, 12 nt, Human
cuggucuuccuu

SEQ ID NO: 1780548 - RNA, 16 nt, Human
cuggucuuccuuuuug

SEQ ID NO: 1780549 - RNA, 17 nt, Human
cuggucuuccuuuuugg

SEQ ID NO: 1780550 - RNA, 14 nt, Human
cuuccauuugcaag

SEQ ID NO: 1780551 - RNA, 13 nt, Human
cuuccauuugcaa

SEQ ID NO: 1780552 - RNA, 12 nt, Human
cuuccauuuaua

SEQ ID NO: 1780553 - RNA, 16 nt, Human
cuuacaguaggagccc

SEQ ID NO: 1780554 - RNA, 23 nt, Human
cuuacaguaggagcccagcucug

SEQ ID NO: 1780555 - RNA, 13 nt, Human
cuugguuccccca

SEQ ID NO: 1780556 - RNA, 22 nt, Human
cuugguucaauaaagcacugag

SEQ ID NO: 1780557 - RNA, 23 nt, Human
cuugguucaauaaagcacugagc

SEQ ID NO: 1780558 - RNA, 19 nt, Human
cuugucucuucaucuaaua

SEQ ID NO: 1780559 - RNA, 16 nt, Human
cuugguugaggaaaca

SEQ ID NO: 1780560 - RNA, 14 nt, Human
cuugguugaggaaa

SEQ ID NO: 1780561 - RNA, 15 nt, Human
cuugguugaggaaac

SEQ ID NO: 1780562 - RNA, 16 nt, Human
cuugguucccccacug

SEQ ID NO: 1780563 - RNA, 19 nt, Human
cuugguucccccacugauc

SEQ ID NO: 1780564 - RNA, 16 nt, Human
cuuucaccccagggcc

SEQ ID NO: 1780565 - RNA, 21 nt, Human
cuuucaccccagggccugagc

SEQ ID NO: 1780566 - RNA, 15 nt, Human
cuuucaccccagggc

SEQ ID NO: 1780567 - RNA, 22 nt, Human
cuuuaaugucacaggcaggucc

SEQ ID NO: 1780568 - RNA, 17 nt, Human
cuuuaaugucacaggca

SEQ ID NO: 1780569 - RNA, 18 nt, Human
cuuuaaugucacaggcag

SEQ ID NO: 1780570 - RNA, 19 nt, Human
cuuuaaugucacaggcagg

SEQ ID NO: 1780571 - RNA, 20 nt, Human
cuuuaaugucacaggcaggu

SEQ ID NO: 1780572 - RNA, 18 nt, Human
cuugauuuauuugcuucu

SEQ ID NO: 1780573 - RNA, 22 nt, Human
gaaagaauguuacugccuuaau

SEQ ID NO: 1780574 - RNA, 14 nt, Human
gaaagguuuacauu

SEQ ID NO: 1780575 - RNA, 22 nt, Human
gaaaguacuucuccacccugcu

SEQ ID NO: 1780576 - RNA, 21 nt, Human
gaaaguacuucuccacccugc

SEQ ID NO: 1780577 - RNA, 16 nt, Human
gaaagguuuacauugu

SEQ ID NO: 1780578 - RNA, 13 nt, Human
gaaagguuuugag

SEQ ID NO: 1780579 - RNA, 16 nt, Human
gaacaagcaaacccag

SEQ ID NO: 1780580 - RNA, 21 nt, Human
gaacaagcaaacccagacggc

SEQ ID NO: 1780581 - RNA, 15 nt, Human
cuuuuggucugugug

SEQ ID NO: 1780582 - RNA, 16 nt, Human
cuuuuggucuguguga

SEQ ID NO: 1780583 - RNA, 14 nt, Human
cuuuugggggaggg

SEQ ID NO: 1780584 - RNA, 15 nt, Human
cuuuugggggagggc

SEQ ID NO: 1780585 - RNA, 17 nt, Human
cuuuugucuaugggacu

SEQ ID NO: 1780586 - RNA, 19 nt, Human
cuuuuggaaccaugccuuc

SEQ ID NO: 1780587 - RNA, 19 nt, Human
gaaaagcaguucuggaugg

SEQ ID NO: 1780588 - RNA, 16 nt, Human
gagacggagucccacc

SEQ ID NO: 1780589 - RNA, 19 nt, Human
gagacggagucccaccuug

SEQ ID NO: 1780590 - RNA, 14 nt, Human
gagacggaguccca

SEQ ID NO: 1780591 - RNA, 19 nt, Human
gagaccuggacacaggccu

SEQ ID NO: 1780592 - RNA, 20 nt, Human
gagaccuggacacaggccug

SEQ ID NO: 1780593 - RNA, 15 nt, Human
gagaaugaaagggcc

SEQ ID NO: 1780594 - RNA, 23 nt, Human
gagaaugaaagggcccagagagg

SEQ ID NO: 1780595 - RNA, 18 nt, Human
gagaauaggcagccccca

SEQ ID NO: 1780596 - RNA, 15 nt, Human
gagauuaccuccuga

SEQ ID NO: 1780597 - RNA, 14 nt, Human
gagauucaauauug

SEQ ID NO: 1780598 - RNA, 13 nt, Human
gagagcugggugu

SEQ ID NO: 1780599 - RNA, 17 nt, Human
gagaggagacggagggg

SEQ ID NO: 1780600 - RNA, 18 nt, Human
gagaggagacggagggga

SEQ ID NO: 1780601 - RNA, 20 nt, Human
gagagcugggugucaagagg

SEQ ID NO: 1780602 - RNA, 20 nt, Human
gagaggcaauggcuccuuca

SEQ ID NO: 1780603 - RNA, 15 nt, Human
gagaggcaauggcca

SEQ ID NO: 1780604 - RNA, 20 nt, Human
gagcaucggccuagggcccc

SEQ ID NO: 1780605 - RNA, 17 nt, Human
gagcaugacagccugca

SEQ ID NO: 1780606 - RNA, 22 nt, Human
gagcccagggcaucuugcuggc

SEQ ID NO: 1780607 - RNA, 16 nt, Human
gagcccagucuguuga

SEQ ID NO: 1780608 - RNA, 15 nt, Human
gagcccucagaaccc

SEQ ID NO: 1780609 - RNA, 14 nt, Human
gagccccgaggccu

SEQ ID NO: 1780610 - RNA, 17 nt, Human
gagccccgaggccuucu

SEQ ID NO: 1780611 - RNA, 17 nt, Human
gagcuguuuacuaggga

SEQ ID NO: 1780612 - RNA, 23 nt, Human
gagcuggcucuauaaggcagccu

SEQ ID NO: 1780613 - RNA, 13 nt, Human
gagcccugguggc

SEQ ID NO: 1780614 - RNA, 14 nt, Human
gagcccugguggca

SEQ ID NO: 1780615 - RNA, 14 nt, Human
gagggccugcugga

SEQ ID NO: 1780616 - RNA, 20 nt, Human
gagggccugcuggaggccuc

SEQ ID NO: 1780617 - RNA, 21 nt, Human
gagggccugcuggaggccuca

SEQ ID NO: 1780618 - RNA, 11 nt, Human
gaggggagagg

SEQ ID NO: 1780619 - RNA, 22 nt, Human
gaggcagggucucacucugucg

SEQ ID NO: 1780620 - RNA, 19 nt, Human
gaggcagggucucacucug

SEQ ID NO: 1780621 - RNA, 20 nt, Human
gaggcagggucucacucugu

SEQ ID NO: 1780622 - RNA, 17 nt, Human
gaggagaugcuccuugg

SEQ ID NO: 1780623 - RNA, 23 nt, Human
gaggagacggaggggaguagaga

SEQ ID NO: 1780624 - RNA, 16 nt, Human
gaggacuuuucuuugu

SEQ ID NO: 1780625 - RNA, 20 nt, Human
gaggacuuuucuuuguggcu

SEQ ID NO: 1780626 - RNA, 23 nt, Human
gaggacuuuucuuuguggcuucc

SEQ ID NO: 1780627 - RNA, 21 nt, Human
gacacagcucuucuccaggcu

SEQ ID NO: 1780628 - RNA, 12 nt, Human
gacacagcucuu

SEQ ID NO: 1780629 - RNA, 19 nt, Human
gacacagcucuucuccagg

SEQ ID NO: 1780630 - RNA, 20 nt, Human
gacacagcucuucuccaggc

SEQ ID NO: 1780631 - RNA, 15 nt, Human
gaauuagcugcuucu

SEQ ID NO: 1780632 - RNA, 16 nt, Human
gaauuuuugcaauaau

SEQ ID NO: 1780633 - RNA, 17 nt, Human
gaauuuuugcaauaaug

SEQ ID NO: 1780634 - RNA, 19 nt, Human
gaauuuuugcaauaaugca

SEQ ID NO: 1780635 - RNA, 20 nt, Human
gaauuuuugcaauaaugcag

SEQ ID NO: 1780636 - RNA, 21 nt, Human
gaauuuuugcaauaaugcagu

SEQ ID NO: 1780637 - RNA, 16 nt, Human
gacaaagaauuccaaa

SEQ ID NO: 1780638 - RNA, 19 nt, Human
gacaaagaauuccaaagca

SEQ ID NO: 1780639 - RNA, 21 nt, Human
gacaaagaauuccaaagcaaa

SEQ ID NO: 1780640 - RNA, 17 nt, Human
gacaaaggacauuuguu

SEQ ID NO: 1780641 - RNA, 13 nt, Human
gacaaaggcaagc

SEQ ID NO: 1780642 - RNA, 18 nt, Human
gaauguuugccucugccu

SEQ ID NO: 1780643 - RNA, 19 nt, Human
gaauguuugccucugccuc

SEQ ID NO: 1780644 - RNA, 21 nt, Human
gaauuacauguaaaacauuau

SEQ ID NO: 1780645 - RNA, 22 nt, Human
gaauuacauguaaaacauuauc

SEQ ID NO: 1780646 - RNA, 14 nt, Human
gaaugauuugcaua

SEQ ID NO: 1780647 - RNA, 16 nt, Human
gaauguuugccucugc

SEQ ID NO: 1780648 - RNA, 17 nt, Human
gaauguuugccucugcc

SEQ ID NO: 1780649 - RNA, 23 nt, Human
gaaugaugcucaaaaucuuucca

SEQ ID NO: 1780650 - RNA, 23 nt, Human
gaaugauucuaauuuuuaagcaa

SEQ ID NO: 1780651 - RNA, 15 nt, Human
gaaugauucaguguu

SEQ ID NO: 1780652 - RNA, 21 nt, Human
gaauauauaguguauagaagc

SEQ ID NO: 1780653 - RNA, 15 nt, Human
gaauauaugugugcc

SEQ ID NO: 1780654 - RNA, 13 nt, Human
gaauaucaauaua

SEQ ID NO: 1780655 - RNA, 15 nt, Human
gaauaucaauauaau

SEQ ID NO: 1780656 - RNA, 20 nt, Human
gaauaucaauauaauguuuu

SEQ ID NO: 1780657 - RNA, 13 nt, Human
gaccucagggcac

SEQ ID NO: 1780658 - RNA, 16 nt, Human
gaccuccaagccacug

SEQ ID NO: 1780659 - RNA, 13 nt, Human
gacgccugaggaa

SEQ ID NO: 1780660 - RNA, 14 nt, Human
gacgccugaggaac

SEQ ID NO: 1780661 - RNA, 13 nt, Human
gaccucugccuga

SEQ ID NO: 1780662 - RNA, 19 nt, Human
gaccucaggugauccaccc

SEQ ID NO: 1780663 - RNA, 20 nt, Human
gaccucaggugauccaccca

SEQ ID NO: 1780664 - RNA, 21 nt, Human
gaccucaggugauccacccac

SEQ ID NO: 1780665 - RNA, 16 nt, Human
gacacugggaggccag

SEQ ID NO: 1780666 - RNA, 17 nt, Human
gacacugggaggccagu

SEQ ID NO: 1780667 - RNA, 23 nt, Human
gacacugggaggccagugagcca

SEQ ID NO: 1780668 - RNA, 14 nt, Human
gacacuugucccca

SEQ ID NO: 1780669 - RNA, 17 nt, Human
gacagcuccuucugucc

SEQ ID NO: 1780670 - RNA, 18 nt, Human
gacagcuccuucuguccu

SEQ ID NO: 1780671 - RNA, 19 nt, Human
gacagcuccuucuguccua

SEQ ID NO: 1780672 - RNA, 16 nt, Human
gacauuuggagagggg

SEQ ID NO: 1780673 - RNA, 17 nt, Human
gacauugcggacagcca

SEQ ID NO: 1780674 - RNA, 23 nt, Human
gacauugcggacagccacggcca

SEQ ID NO: 1780675 - RNA, 18 nt, Human
gcaucccuaccgacccag

SEQ ID NO: 1780676 - RNA, 21 nt, Human
gcaucccuaccgacccagggu

SEQ ID NO: 1780677 - RNA, 15 nt, Human
gcauguaaacacgcc

SEQ ID NO: 1780678 - RNA, 17 nt, Human
gcauguaaacacgccug

SEQ ID NO: 1780679 - RNA, 19 nt, Human
gcauguaaacacgccugca

SEQ ID NO: 1780680 - RNA, 15 nt, Human
gcauuuacuuugugu

SEQ ID NO: 1780681 - RNA, 14 nt, Human
gcauccuggcaccc

SEQ ID NO: 1780682 - RNA, 16 nt, Human
gcaucggccuagggcc

SEQ ID NO: 1780683 - RNA, 20 nt, Human
gcaucggccuagggccccca

SEQ ID NO: 1780684 - RNA, 13 nt, Human
gcauccuggcacc

SEQ ID NO: 1780685 - RNA, 20 nt, Human
gcaucuagcaugucgucaaa

SEQ ID NO: 1780686 - RNA, 21 nt, Human
gcaucuacuugccagaaccaa

SEQ ID NO: 1780687 - RNA, 17 nt, Human
gcagucuguccaggcuc

SEQ ID NO: 1780688 - RNA, 20 nt, Human
gcagugaaugauucaguguu

SEQ ID NO: 1780689 - RNA, 18 nt, Human
gcaagugagagcugggug

SEQ ID NO: 1780690 - RNA, 19 nt, Human
gcaagugagagcugggugu

SEQ ID NO: 1780691 - RNA, 20 nt, Human
gcacucagaagacacugaug

SEQ ID NO: 1780692 - RNA, 18 nt, Human
gcagaaacccugagcaga

SEQ ID NO: 1780693 - RNA, 15 nt, Human
gcagcagugugaggc

SEQ ID NO: 1780694 - RNA, 19 nt, Human
gcagcagugugaggccagg

SEQ ID NO: 1780695 - RNA, 20 nt, Human
gcagcagugugaggccaggg

SEQ ID NO: 1780696 - RNA, 21 nt, Human
gcagcagugugaggccagggc

SEQ ID NO: 1780697 - RNA, 22 nt, Human
gcagcagugugaggccagggca

SEQ ID NO: 1780698 - RNA, 23 nt, Human
gcagcagugugaggccagggcag

SEQ ID NO: 1780699 - RNA, 17 nt, Human
gcagccaaguagccucu

SEQ ID NO: 1780700 - RNA, 20 nt, Human
gcagccaaguagccucuccu

SEQ ID NO: 1780701 - RNA, 16 nt, Human
gcagagcuucuuccag

SEQ ID NO: 1780702 - RNA, 22 nt, Human
gcagagcuucuuccaggugccc

SEQ ID NO: 1780703 - RNA, 15 nt, Human
gcagagcuuuucaga

SEQ ID NO: 1780704 - RNA, 16 nt, Human
gcagagcuuuucagau

SEQ ID NO: 1780705 - RNA, 21 nt, Human
gcagaacgaaccuuggccugg

SEQ ID NO: 1780706 - RNA, 22 nt, Human
gcagaacgaaccuuggccuggg

SEQ ID NO: 1780707 - RNA, 13 nt, Human
gcagcucccuggc

SEQ ID NO: 1780708 - RNA, 17 nt, Human
gcagcucccuggcuucu

SEQ ID NO: 1780709 - RNA, 21 nt, Human
gcagcucccuggcuucugugg

SEQ ID NO: 1780710 - RNA, 15 nt, Human
gcagcccaagcuucc

SEQ ID NO: 1780711 - RNA, 17 nt, Human
gcagcccaagcuucccu

SEQ ID NO: 1780712 - RNA, 21 nt, Human
gcagcccaagcuucccuccau

SEQ ID NO: 1780713 - RNA, 20 nt, Human
gcaaccuccgccucuugggu

SEQ ID NO: 1780714 - RNA, 14 nt, Human
gcaacccccagccu

SEQ ID NO: 1780715 - RNA, 15 nt, Human
gcaacccccagccug

SEQ ID NO: 1780716 - RNA, 16 nt, Human
gcaacccccagccugc

SEQ ID NO: 1780717 - RNA, 17 nt, Human
gcaacccccagccugcu

SEQ ID NO: 1780718 - RNA, 19 nt, Human
gcaaccuccgccucuuggg

SEQ ID NO: 1780719 - RNA, 16 nt, Human
gcaacaggcugggcuu

SEQ ID NO: 1780720 - RNA, 19 nt, Human
gcaacaggcugggcuucag

SEQ ID NO: 1780721 - RNA, 19 nt, Human
gcaacaggccauugugaac

SEQ ID NO: 1780722 - RNA, 14 nt, Human
gcaacaggcugggc

SEQ ID NO: 1780723 - RNA, 15 nt, Human
gcaacaggcugggcu

SEQ ID NO: 1780724 - RNA, 13 nt, Human
gcaacaggcuggg

SEQ ID NO: 1780725 - RNA, 20 nt, Human
gcaaaagguucacuaaagca

SEQ ID NO: 1780726 - RNA, 21 nt, Human
gcaaaagguucacuaaagcag

SEQ ID NO: 1780727 - RNA, 16 nt, Human
gcaagugagagcuggg

SEQ ID NO: 1780728 - RNA, 15 nt, Human
gcaagugagagcugg

SEQ ID NO: 1780729 - RNA, 13 nt, Human
gauucuucugcuu

SEQ ID NO: 1780730 - RNA, 15 nt, Human
gauucuucugcuuca

SEQ ID NO: 1780731 - RNA, 20 nt, Human
gauucuucugcuucagccuc

SEQ ID NO: 1780732 - RNA, 11 nt, Human
gauuuauuugc

SEQ ID NO: 1780733 - RNA, 13 nt, Human
gauuuauuugcuu

SEQ ID NO: 1780734 - RNA, 15 nt, Human
gauuuauuugcuucu

SEQ ID NO: 1780735 - RNA, 16 nt, Human
gauuuauuugcuucuu

SEQ ID NO: 1780736 - RNA, 17 nt, Human
gauuuauuugcuucuuc

SEQ ID NO: 1780737 - RNA, 20 nt, Human
gaucucugcagggccgccag

SEQ ID NO: 1780738 - RNA, 15 nt, Human
gaucucugcagggcc

SEQ ID NO: 1780739 - RNA, 16 nt, Human
gaucucugcagggccg

SEQ ID NO: 1780740 - RNA, 15 nt, Human
gaucccaggccccug

SEQ ID NO: 1780741 - RNA, 18 nt, Human
gaucccaggccccuggag

SEQ ID NO: 1780742 - RNA, 19 nt, Human
gaucccaggccccuggagg

SEQ ID NO: 1780743 - RNA, 15 nt, Human
gauaccagcgaggag

SEQ ID NO: 1780744 - RNA, 22 nt, Human
gauaccagcgaggaggcuccag

SEQ ID NO: 1780745 - RNA, 13 nt, Human
gauacuuuacaug

SEQ ID NO: 1780746 - RNA, 22 nt, Human
gauccacccaccucagccuccc

SEQ ID NO: 1780747 - RNA, 20 nt, Human
gauccacccaccucagccuc

SEQ ID NO: 1780748 - RNA, 21 nt, Human
gauccacccaccucagccucc

SEQ ID NO: 1780749 - RNA, 21 nt, Human
gauccaagcuggucccacuca

SEQ ID NO: 1780750 - RNA, 18 nt, Human
gauccacccaccucagcc

SEQ ID NO: 1780751 - RNA, 19 nt, Human
gauccacccaccucagccu

SEQ ID NO: 1780752 - RNA, 12 nt, Human
gauccaagcugg

SEQ ID NO: 1780753 - RNA, 16 nt, Human
gauccaagcugguccc

SEQ ID NO: 1780754 - RNA, 17 nt, Human
gauccaagcugguccca

SEQ ID NO: 1780755 - RNA, 19 nt, Human
gauccaagcuggucccacu

SEQ ID NO: 1780756 - RNA, 12 nt, Human
ggaguguucccc

SEQ ID NO: 1780757 - RNA, 20 nt, Human
ggaguguuccccuuccacug

SEQ ID NO: 1780758 - RNA, 15 nt, Human
ggaugggucagagcu

SEQ ID NO: 1780759 - RNA, 16 nt, Human
ggaugggucagagcua

SEQ ID NO: 1780760 - RNA, 16 nt, Human
ggauggguggauggcc

SEQ ID NO: 1780761 - RNA, 17 nt, Human
ggauggugugccuucca

SEQ ID NO: 1780762 - RNA, 18 nt, Human
ggauggugugccuuccag

SEQ ID NO: 1780763 - RNA, 19 nt, Human
ggaguguuucuaauaaacu

SEQ ID NO: 1780764 - RNA, 17 nt, Human
ggaucucauuggacccu

SEQ ID NO: 1780765 - RNA, 24 nt, Human
ggaucucauuggacccuuccaugg

SEQ ID NO: 1780766 - RNA, 15 nt, Human
ggaggcuccagaggg

SEQ ID NO: 1780767 - RNA, 16 nt, Human
ggaggcuccagagggc

SEQ ID NO: 1780768 - RNA, 18 nt, Human
ggaggcuccagagggcac

SEQ ID NO: 1780769 - RNA, 21 nt, Human
ggaggcucacccccuucucca

SEQ ID NO: 1780770 - RNA, 15 nt, Human
ggaggcugccuccca

SEQ ID NO: 1780771 - RNA, 16 nt, Human
ggaggcugccucccaa

SEQ ID NO: 1780772 - RNA, 17 nt, Human
ggccagagggagugaca

SEQ ID NO: 1780773 - RNA, 19 nt, Human
ggccagagggagugacaga

SEQ ID NO: 1780774 - RNA, 13 nt, Human
ggauuuuugaguc

SEQ ID NO: 1780775 - RNA, 18 nt, Human
ggcacaccgggcacucag

SEQ ID NO: 1780776 - RNA, 16 nt, Human
ggcagggccccaggca

SEQ ID NO: 1780777 - RNA, 22 nt, Human
ggcagcagugugaggccagggc

SEQ ID NO: 1780778 - RNA, 23 nt, Human
ggcagccccauucugccugccca

SEQ ID NO: 1780779 - RNA, 19 nt, Human
ggcagccccagccugcuag

SEQ ID NO: 1780780 - RNA, 17 nt, Human
ggcagccccagccugcu

SEQ ID NO: 1780781 - RNA, 18 nt, Human
ggcagccccagccugcua

SEQ ID NO: 1780782 - RNA, 22 nt, Human
ggcagccccauucugccugccc

SEQ ID NO: 1780783 - RNA, 16 nt, Human
ggcagccccauucugc

SEQ ID NO: 1780784 - RNA, 13 nt, Human
ggcagccccagcc

SEQ ID NO: 1780785 - RNA, 14 nt, Human
ggcagccccagccu

SEQ ID NO: 1780786 - RNA, 15 nt, Human
ggcagccccagccug

SEQ ID NO: 1780787 - RNA, 16 nt, Human
ggcagccccagccugc

SEQ ID NO: 1780788 - RNA, 20 nt, Human
ggcagccccauucugccugc

SEQ ID NO: 1780789 - RNA, 21 nt, Human
ggcagccccauucugccugcc

SEQ ID NO: 1780790 - RNA, 17 nt, Human
ggccugcaggaccugcc

SEQ ID NO: 1780791 - RNA, 20 nt, Human
ggccugcaggaccugccugu

SEQ ID NO: 1780792 - RNA, 21 nt, Human
ggccugcaggaccugccugua

SEQ ID NO: 1780793 - RNA, 21 nt, Human
ggccuuaucgggcuccagcca

SEQ ID NO: 1780794 - RNA, 22 nt, Human
ggccuuaucgggcuccagccau

SEQ ID NO: 1780795 - RNA, 16 nt, Human
ggccuggccagaugca

SEQ ID NO: 1780796 - RNA, 14 nt, Human
ggccuggcagcuca

SEQ ID NO: 1780797 - RNA, 16 nt, Human
ggccuggcagcucagc

SEQ ID NO: 1780798 - RNA, 12 nt, Human
ggccuggccaga

SEQ ID NO: 1780799 - RNA, 15 nt, Human
ggccuggccagaugc

SEQ ID NO: 1780800 - RNA, 14 nt, Human
ggccugccgggcug

SEQ ID NO: 1780801 - RNA, 21 nt, Human
ggccugccgggcugagggccu

SEQ ID NO: 1780802 - RNA, 18 nt, Human
ggccugcgccaguccugc

SEQ ID NO: 1780803 - RNA, 15 nt, Human
ggccugcuggaggcc

SEQ ID NO: 1780804 - RNA, 16 nt, Human
ggccugcuggaggccu

SEQ ID NO: 1780805 - RNA, 17 nt, Human
ggccugcuggaggccuc

SEQ ID NO: 1780806 - RNA, 18 nt, Human
ggccugcuggaggccuca

SEQ ID NO: 1780807 - RNA, 20 nt, Human
ggccugcuggaggccucagg

SEQ ID NO: 1780808 - RNA, 21 nt, Human
ggccugcuggaggccucaggu

SEQ ID NO: 1780809 - RNA, 19 nt, Human
ggcuacccugagcugaggc

SEQ ID NO: 1780810 - RNA, 13 nt, Human
ggcuacgccucuu

SEQ ID NO: 1780811 - RNA, 22 nt, Human
ggcuaccaacuuguauccaggc

SEQ ID NO: 1780812 - RNA, 20 nt, Human
ggcuaagugauccucccacc

SEQ ID NO: 1780813 - RNA, 20 nt, Human
ggcgaucacaacgugcauug

SEQ ID NO: 1780814 - RNA, 18 nt, Human
ggcgaucacaacgugcau

SEQ ID NO: 1780815 - RNA, 22 nt, Human
ggcgagagucuggcccuagacu

SEQ ID NO: 1780816 - RNA, 21 nt, Human
ggcgagcccuguggaugagcc

SEQ ID NO: 1780817 - RNA, 20 nt, Human
ggcuaagcuucacuguaaaa

SEQ ID NO: 1780818 - RNA, 22 nt, Human
ggcccuagacucggggugcuuc

SEQ ID NO: 1780819 - RNA, 17 nt, Human
ggccagaugcaccagcc

SEQ ID NO: 1780820 - RNA, 22 nt, Human
ggccagagggagugacagaggc

SEQ ID NO: 1780821 - RNA, 11 nt, Human
ggccagaggcu

SEQ ID NO: 1780822 - RNA, 15 nt, Human
ggccagaugcaccag

SEQ ID NO: 1780823 - RNA, 16 nt, Human
ggccagaugcaccagc

SEQ ID NO: 1780824 - RNA, 13 nt, Human
ggccucagugcca

SEQ ID NO: 1780825 - RNA, 13 nt, Human
ggccucaggugcu

SEQ ID NO: 1780826 - RNA, 16 nt, Human
ggccucaggugcuguc

SEQ ID NO: 1780827 - RNA, 17 nt, Human
ggccucaggugcugucc

SEQ ID NO: 1780828 - RNA, 18 nt, Human
ggccucaggugcugucca

SEQ ID NO: 1780829 - RNA, 19 nt, Human
ggccucaggugcuguccau

SEQ ID NO: 1780830 - RNA, 13 nt, Human
aaaaaaagaauaa

SEQ ID NO: 1780831 - RNA, 10 nt, Human
aaaaaaagaa

SEQ ID NO: 1780832 - RNA, 12 nt, Human
aaaaaaaguauu

SEQ ID NO: 1780833 - RNA, 14 nt, Human
aaaaaaaguauuau

SEQ ID NO: 1780834 - RNA, 14 nt, Human
ggcuggguuggagg

SEQ ID NO: 1780835 - RNA, 14 nt, Human
aaaaauaaacacua

SEQ ID NO: 1780836 - RNA, 14 nt, Human
aaaaauacaugcau

SEQ ID NO: 1780837 - RNA, 13 nt, Human
ggcucacugcagc

SEQ ID NO: 1780838 - RNA, 14 nt, Human
ggcucacugcagcc

SEQ ID NO: 1780839 - RNA, 15 nt, Human
ggcucacugcagccu

SEQ ID NO: 1780840 - RNA, 12 nt, Human
ggcuggcaugau

SEQ ID NO: 1780841 - RNA, 22 nt, Human
ggcuggcaugauccaagcaaga

SEQ ID NO: 1780842 - RNA, 17 nt, Human
ggcucccugacugggag

SEQ ID NO: 1780843 - RNA, 18 nt, Human
ggcucccugacugggagu

SEQ ID NO: 1780844 - RNA, 20 nt, Human
ggcucccuguaaccucuuca

SEQ ID NO: 1780845 - RNA, 21 nt, Human
ggcucccuguaaccucuucag

SEQ ID NO: 1780846 - RNA, 18 nt, Human
ggcucguugacuggcugu

SEQ ID NO: 1780847 - RNA, 12 nt, Human
gggccagaggcu

SEQ ID NO: 1780848 - RNA, 23 nt, Human
gggccgccagggagaccuggaca

SEQ ID NO: 1780849 - RNA, 15 nt, Human
gggccucagugccac

SEQ ID NO: 1780850 - RNA, 13 nt, Human
gggccucagugcc

SEQ ID NO: 1780851 - RNA, 14 nt, Human
gggccucagugcca

SEQ ID NO: 1780852 - RNA, 24 nt, Human
gggccugcaggaccugccuguagc

SEQ ID NO: 1780853 - RNA, 21 nt, Human
gggcggugagaggggaacaga

SEQ ID NO: 1780854 - RNA, 22 nt, Human
gggcuacccugagcugaggcag

SEQ ID NO: 1780855 - RNA, 21 nt, Human
gggcuacccugagcugaggca

SEQ ID NO: 1780856 - RNA, 14 nt, Human
gggccugccgggcu

SEQ ID NO: 1780857 - RNA, 15 nt, Human
gggccugccgggcug

SEQ ID NO: 1780858 - RNA, 20 nt, Human
gggccugccgggcugagggc

SEQ ID NO: 1780859 - RNA, 21 nt, Human
gggccugccgggcugagggcc

SEQ ID NO: 1780860 - RNA, 19 nt, Human
gggccugcgccaguccugc

SEQ ID NO: 1780861 - RNA, 15 nt, Human
gggcucccgggcccc

SEQ ID NO: 1780862 - RNA, 13 nt, Human
gggcuccagccau

SEQ ID NO: 1780863 - RNA, 13 nt, Human
gggcucccagggc

SEQ ID NO: 1780864 - RNA, 21 nt, Human
gggcucagcggggacagcucc

SEQ ID NO: 1780865 - RNA, 15 nt, Human
gggcuaguugggcuu

SEQ ID NO: 1780866 - RNA, 18 nt, Human
gggcuaguugggcuuccu

SEQ ID NO: 1780867 - RNA, 17 nt, Human
gggcucagcggggacag

SEQ ID NO: 1780868 - RNA, 19 nt, Human
gggcucagcggggacagcu

SEQ ID NO: 1780869 - RNA, 22 nt, Human
gggcugcgacgcuugcucuguu

SEQ ID NO: 1780870 - RNA, 20 nt, Human
gggcugcggcguacaggcug

SEQ ID NO: 1780871 - RNA, 22 nt, Human
gggcugcggcguacaggcuggc

SEQ ID NO: 1780872 - RNA, 12 nt, Human
gggcucccugac

SEQ ID NO: 1780873 - RNA, 18 nt, Human
gggcugggcccucucuuc

SEQ ID NO: 1780874 - RNA, 22 nt, Human
aaaaggagccaauuuaaagaaa

SEQ ID NO: 1780875 - RNA, 19 nt, Human
aaaagguucacuaaagcag

SEQ ID NO: 1780876 - RNA, 14 nt, Human
aaaaggccaaaccu

SEQ ID NO: 1780877 - RNA, 15 nt, Human
aaaaggccaaaccuc

SEQ ID NO: 1780878 - RNA, 19 nt, Human
aaaaggccaaaccucuguu

SEQ ID NO: 1780879 - RNA, 22 nt, Human
aaaaggccaaaccucuguucag

SEQ ID NO: 1780880 - RNA, 23 nt, Human
aaaaggccaaaccucuguucagu

SEQ ID NO: 1780881 - RNA, 16 nt, Human
aaaauaacuucaagca

SEQ ID NO: 1780882 - RNA, 20 nt, Human
aaaaucugucacguagaacu

SEQ ID NO: 1780883 - RNA, 13 nt, Human
aaaaucugccugg

SEQ ID NO: 1780884 - RNA, 17 nt, Human
aaaaugcccuuaaauca

SEQ ID NO: 1780885 - RNA, 16 nt, Human
aaaauggaaccaggcu

SEQ ID NO: 1780886 - RNA, 20 nt, Human
aaaaugcaaauccuauguga

SEQ ID NO: 1780887 - RNA, 22 nt, Human
aaaaugcaaauccuaugugauu

SEQ ID NO: 1780888 - RNA, 20 nt, Human
aaaaugcacaaacaaugcaa

SEQ ID NO: 1780889 - RNA, 14 nt, Human
aaaaugcauuguau

SEQ ID NO: 1780890 - RNA, 14 nt, Human
aaaaugcaaauccu

SEQ ID NO: 1780891 - RNA, 18 nt, Human
aaaaugcaaauccuaugu

SEQ ID NO: 1780892 - RNA, 22 nt, Human
gggggcagaucuuggacucaug

SEQ ID NO: 1780893 - RNA, 13 nt, Human
gggggcagggcug

SEQ ID NO: 1780894 - RNA, 14 nt, Human
gggggcaggugcug

SEQ ID NO: 1780895 - RNA, 15 nt, Human
gggguaguuggcaga

SEQ ID NO: 1780896 - RNA, 19 nt, Human
ggggcccagggcaagcucc

SEQ ID NO: 1780897 - RNA, 15 nt, Human
ggggccccccugccc

SEQ ID NO: 1780898 - RNA, 22 nt, Human
aaaccuuaucuccacaaccucu

SEQ ID NO: 1780899 - RNA, 15 nt, Human
aaaccuggaugucac

SEQ ID NO: 1780900 - RNA, 14 nt, Human
gggucauagaaauu

SEQ ID NO: 1780901 - RNA, 18 nt, Human
gggucauagauguuuccu

SEQ ID NO: 1780902 - RNA, 13 nt, Human
ggguccagaagga

SEQ ID NO: 1780903 - RNA, 17 nt, Human
ggguccagaaggagaca

SEQ ID NO: 1780904 - RNA, 19 nt, Human
gguaucaggugcugccauc

SEQ ID NO: 1780905 - RNA, 14 nt, Human
ggucagugcaaaua

SEQ ID NO: 1780906 - RNA, 11 nt, Human
gguccaggaga

SEQ ID NO: 1780907 - RNA, 23 nt, Human
gguaggggggaaacagguuggga

SEQ ID NO: 1780908 - RNA, 14 nt, Human
gguaucaggugcug

SEQ ID NO: 1780909 - RNA, 13 nt, Human
gguaacaggcaga

SEQ ID NO: 1780910 - RNA, 16 nt, Human
gguaaacacgccugca

SEQ ID NO: 1780911 - RNA, 20 nt, Human
ggguuuugccauguuggcca

SEQ ID NO: 1780912 - RNA, 23 nt, Human
ggguuuugccauguuggccaggc

SEQ ID NO: 1780913 - RNA, 18 nt, Human
ggguuuuguauucucuga

SEQ ID NO: 1780914 - RNA, 24 nt, Human
guaaacugugcaccaagcaggaaa

SEQ ID NO: 1780915 - RNA, 16 nt, Human
guaacaagccacccca

SEQ ID NO: 1780916 - RNA, 23 nt, Human
guaacauguguuaaguauuuuca

SEQ ID NO: 1780917 - RNA, 21 nt, Human
guaaaauugccauauugcaca

SEQ ID NO: 1780918 - RNA, 20 nt, Human
guaaaauugccauauugcac

SEQ ID NO: 1780919 - RNA, 19 nt, Human
guaaaauugccauauugca

SEQ ID NO: 1780920 - RNA, 22 nt, Human
guaaacacgccugcaaacgcug

SEQ ID NO: 1780921 - RNA, 18 nt, Human
guaaaauugccauauugc

SEQ ID NO: 1780922 - RNA, 16 nt, Human
guaaaauugccauauu

SEQ ID NO: 1780923 - RNA, 15 nt, Human
guaaaauugccauau

SEQ ID NO: 1780924 - RNA, 14 nt, Human
guaaaauugccaua

SEQ ID NO: 1780925 - RNA, 15 nt, Human
aaaguguuuuguacc

SEQ ID NO: 1780926 - RNA, 16 nt, Human
aaaguguuuuguacca

SEQ ID NO: 1780927 - RNA, 17 nt, Human
aaaguguuuuguaccag

SEQ ID NO: 1780928 - RNA, 20 nt, Human
aaaguguuuuguaccaguga

SEQ ID NO: 1780929 - RNA, 22 nt, Human
guacaauaaguguuuuuguauu

SEQ ID NO: 1780930 - RNA, 14 nt, Human
guaauaaacuauuu

SEQ ID NO: 1780931 - RNA, 12 nt, Human
guaauaaacuau

SEQ ID NO: 1780932 - RNA, 18 nt, Human
guaaccucuucagaggcc

SEQ ID NO: 1780933 - RNA, 20 nt, Human
guaaccucuucagaggcccu

SEQ ID NO: 1780934 - RNA, 19 nt, Human
aaauaucccgggggugggg

SEQ ID NO: 1780935 - RNA, 13 nt, Human
aaauauguauuua

SEQ ID NO: 1780936 - RNA, 21 nt, Human
aaauauguauuuaccaaaaau

SEQ ID NO: 1780937 - RNA, 10 nt, Human
aaauaugcaa

SEQ ID NO: 1780938 - RNA, 20 nt, Human
aaauauugguguugucagua

SEQ ID NO: 1780939 - RNA, 18 nt, Human
aaauaucauuuauuuuuu

SEQ ID NO: 1780940 - RNA, 18 nt, Human
aaauauaugcuaagucuu

SEQ ID NO: 1780941 - RNA, 16 nt, Human
guacacacacauacac

SEQ ID NO: 1780942 - RNA, 23 nt, Human
gguucuacagccuugucccccuc

SEQ ID NO: 1780943 - RNA, 20 nt, Human
gguuuccuggcacuggaccc

SEQ ID NO: 1780944 - RNA, 22 nt, Human
gguuuuaucugagugaaauacu

SEQ ID NO: 1780945 - RNA, 15 nt, Human
gguguggguguccug

SEQ ID NO: 1780946 - RNA, 19 nt, Human
gguguggguguccugccug

SEQ ID NO: 1780947 - RNA, 22 nt, Human
gguguggguguccugccugucu

SEQ ID NO: 1780948 - RNA, 21 nt, Human
gguguuaucaccgugggcucc

SEQ ID NO: 1780949 - RNA, 23 nt, Human
ggugugucccccucuguccaggc

SEQ ID NO: 1780950 - RNA, 15 nt, Human
gguuccgcuuggagc

SEQ ID NO: 1780951 - RNA, 21 nt, Human
gguuccgcuuggagcagaggg

SEQ ID NO: 1780952 - RNA, 22 nt, Human
gguuccgcuuggagcagagggg

SEQ ID NO: 1780953 - RNA, 23 nt, Human
gguuccgcuuggagcagaggggc

SEQ ID NO: 1780954 - RNA, 13 nt, Human
aaagguuuugagc

SEQ ID NO: 1780955 - RNA, 18 nt, Human
gguggcuggguuggaggg

SEQ ID NO: 1780956 - RNA, 12 nt, Human
gguggcuggguu

SEQ ID NO: 1780957 - RNA, 17 nt, Human
aaagguucacuaaagca

SEQ ID NO: 1780958 - RNA, 13 nt, Human
aaaggugccaugg

SEQ ID NO: 1780959 - RNA, 20 nt, Human
aaagggcccagagagggugg

SEQ ID NO: 1780960 - RNA, 17 nt, Human
ggugcugccucuaccug

SEQ ID NO: 1780961 - RNA, 18 nt, Human
ggugcuggagcacugggc

SEQ ID NO: 1780962 - RNA, 20 nt, Human
ggugcuggagcacugggcuc

SEQ ID NO: 1780963 - RNA, 22 nt, Human
ggugcuggagcacugggcuccc

SEQ ID NO: 1780964 - RNA, 13 nt, Human
gguggacccaggg

SEQ ID NO: 1780965 - RNA, 18 nt, Human
gguggacccagggaacag

SEQ ID NO: 1780966 - RNA, 15 nt, Human
aaagcuguauuuuga

SEQ ID NO: 1780967 - RNA, 17 nt, Human
aaagcuguauuuugaaa

SEQ ID NO: 1780968 - RNA, 17 nt, Human
aaagcuaggccuggcca

SEQ ID NO: 1780969 - RNA, 14 nt, Human
aaagcuaggccugg

SEQ ID NO: 1780970 - RNA, 16 nt, Human
aaagcuaggccuggcc

SEQ ID NO: 1780971 - RNA, 22 nt, Human
aaagcaguagaaauaauaugca

SEQ ID NO: 1780972 - RNA, 17 nt, Human
gcuguaucccaugagcc

SEQ ID NO: 1780973 - RNA, 19 nt, Human
gcuguaucccaugagccuc

SEQ ID NO: 1780974 - RNA, 18 nt, Human
gcuguauaaaaucagcca

SEQ ID NO: 1780975 - RNA, 14 nt, Human
gcuguauaaaauca

SEQ ID NO: 1780976 - RNA, 22 nt, Human
gcuguauaaaaucagccaauua

SEQ ID NO: 1780977 - RNA, 20 nt, Human
gcuguauaaaaucagccaau

SEQ ID NO: 1780978 - RNA, 14 nt, Human
gcuguauaaguuau

SEQ ID NO: 1780979 - RNA, 15 nt, Human
gcuguauaaguuauu

SEQ ID NO: 1780980 - RNA, 18 nt, Human
gcugugcucuggacaggc

SEQ ID NO: 1780981 - RNA, 15 nt, Human
gcugugcucuggaca

SEQ ID NO: 1780982 - RNA, 16 nt, Human
gcugugcucuggacag

SEQ ID NO: 1780983 - RNA, 13 nt, Human
gcugugcucugga

SEQ ID NO: 1780984 - RNA, 15 nt, Human
gcuguuggcuggggg

SEQ ID NO: 1780985 - RNA, 16 nt, Human
gcuguuggcugggggc

SEQ ID NO: 1780986 - RNA, 20 nt, Human
gcuguuggcugggggccuca

SEQ ID NO: 1780987 - RNA, 15 nt, Human
gcuggcgugcagugg

SEQ ID NO: 1780988 - RNA, 18 nt, Human
gcuggcgugcaguggugc

SEQ ID NO: 1780989 - RNA, 18 nt, Human
gcuggcuguuggcugggg

SEQ ID NO: 1780990 - RNA, 19 nt, Human
gcuggcuguuggcuggggg

SEQ ID NO: 1780991 - RNA, 14 nt, Human
gcuggcgugcagug

SEQ ID NO: 1780992 - RNA, 20 nt, Human
gcuggcuguuggcugggggc

SEQ ID NO: 1780993 - RNA, 23 nt, Human
gcuggcuguuggcugggggccuc

SEQ ID NO: 1780994 - RNA, 13 nt, Human
gcugagccaccug

SEQ ID NO: 1780995 - RNA, 15 nt, Human
gcugagccaccugcc

SEQ ID NO: 1780996 - RNA, 16 nt, Human
gcugagccaccugccc

SEQ ID NO: 1780997 - RNA, 20 nt, Human
gcugagccaccugcccuuuu

SEQ ID NO: 1780998 - RNA, 13 nt, Human
gcugaggcagcag

SEQ ID NO: 1780999 - RNA, 23 nt, Human
gcugaggcagcagugugaggcca

SEQ ID NO: 1781000 - RNA, 11 nt, Human
gcugcaaagug

SEQ ID NO: 1781001 - RNA, 12 nt, Human
gcugcaaagugu

SEQ ID NO: 1781002 - RNA, 13 nt, Human
gcugcaaaguguu

SEQ ID NO: 1781003 - RNA, 21 nt, Human
gcugcaaaguguuuuguacca

SEQ ID NO: 1781004 - RNA, 14 nt, Human
gcugcaacaaaaug

SEQ ID NO: 1781005 - RNA, 15 nt, Human
gcugcaacaaaaugu

SEQ ID NO: 1781006 - RNA, 20 nt, Human
gcugcccuaguuuucuuucc

SEQ ID NO: 1781007 - RNA, 16 nt, Human
gcugcccuaugggccu

SEQ ID NO: 1781008 - RNA, 17 nt, Human
gcugcccuaugggccug

SEQ ID NO: 1781009 - RNA, 18 nt, Human
gcugcccuaugggccugc

SEQ ID NO: 1781010 - RNA, 23 nt, Human
gcugcccuccccuccggacuggu

SEQ ID NO: 1781011 - RNA, 19 nt, Human
gcugccccuaaucucugua

SEQ ID NO: 1781012 - RNA, 22 nt, Human
gcugccccuaaucucuguagga

SEQ ID NO: 1781013 - RNA, 16 nt, Human
gcugcagccugcgcca

SEQ ID NO: 1781014 - RNA, 13 nt, Human
gcugccugcccac

SEQ ID NO: 1781015 - RNA, 17 nt, Human
gcugccuguucagcucc

SEQ ID NO: 1781016 - RNA, 12 nt, Human
gcugccuguuca

SEQ ID NO: 1781017 - RNA, 13 nt, Human
gcugccuguucag

SEQ ID NO: 1781018 - RNA, 21 nt, Human
gcugccucuaccugacacucc

SEQ ID NO: 1781019 - RNA, 12 nt, Human
gcugccucccaa

SEQ ID NO: 1781020 - RNA, 22 nt, Human
gcugccucccaacaguggggaa

SEQ ID NO: 1781021 - RNA, 21 nt, Human
gcugccuccccucuccuuccu

SEQ ID NO: 1781022 - RNA, 13 nt, Human
gcuuuugccauua

SEQ ID NO: 1781023 - RNA, 15 nt, Human
gcuuuuccuuggcau

SEQ ID NO: 1781024 - RNA, 21 nt, Human
gcuuuuccuuggcauuccgca

SEQ ID NO: 1781025 - RNA, 23 nt, Human
ggaaagaugguguggguguccug

SEQ ID NO: 1781026 - RNA, 15 nt, Human
ggaaacagguuggga

SEQ ID NO: 1781027 - RNA, 20 nt, Human
ggaaacagcuaaugggacac

SEQ ID NO: 1781028 - RNA, 16 nt, Human
ggaaaaaauaacaaug

SEQ ID NO: 1781029 - RNA, 13 nt, Human
gcuuuugcuucua

SEQ ID NO: 1781030 - RNA, 13 nt, Human
gcuuucuacccag

SEQ ID NO: 1781031 - RNA, 16 nt, Human
gcuuucgaacugcuag

SEQ ID NO: 1781032 - RNA, 19 nt, Human
gcuuucuacccagcgagcc

SEQ ID NO: 1781033 - RNA, 22 nt, Human
gcuuucuacccagcgagcccug

SEQ ID NO: 1781034 - RNA, 23 nt, Human
gcuuucuacccagcgagcccugg

SEQ ID NO: 1781035 - RNA, 17 nt, Human
gcuuuccuuuuuuaaaa

SEQ ID NO: 1781036 - RNA, 23 nt, Human
gcuuuccuuuuuuaaaaaugcaa

SEQ ID NO: 1781037 - RNA, 15 nt, Human
gcuguuuacuaggga

SEQ ID NO: 1781038 - RNA, 14 nt, Human
ggacagugcugcag

SEQ ID NO: 1781039 - RNA, 16 nt, Human
ggacagugcugcagcu

SEQ ID NO: 1781040 - RNA, 23 nt, Human
ggacagugcuugauacaggaaca

SEQ ID NO: 1781041 - RNA, 17 nt, Human
ggacagggaggugaccc

SEQ ID NO: 1781042 - RNA, 14 nt, Human
ggacacagcucuuc

SEQ ID NO: 1781043 - RNA, 13 nt, Human
ggacacagcucuu

SEQ ID NO: 1781044 - RNA, 13 nt, Human
ggacacaggccug

SEQ ID NO: 1781045 - RNA, 18 nt, Human
ggacacaggccugcucuc

SEQ ID NO: 1781046 - RNA, 20 nt, Human
ggaauauuugaaucuugucu

SEQ ID NO: 1781047 - RNA, 15 nt, Human
ggaauauuugaaucu

SEQ ID NO: 1781048 - RNA, 12 nt, Human
ggacacagcucu

SEQ ID NO: 1781049 - RNA, 18 nt, Human
ggaauauaugugugccua

SEQ ID NO: 1781050 - RNA, 14 nt, Human
ggaauaucaauaua

SEQ ID NO: 1781051 - RNA, 14 nt, Human
ggaauauuugaauc

SEQ ID NO: 1781052 - RNA, 13 nt, Human
ggaauauuugaau

SEQ ID NO: 1781053 - RNA, 11 nt, Human
ggaauauuuga

SEQ ID NO: 1781054 - RNA, 23 nt, Human
ggaagcccagccccuacugcugu

SEQ ID NO: 1781055 - RNA, 16 nt, Human
gcucagaacuugcugc

SEQ ID NO: 1781056 - RNA, 17 nt, Human
gcucagaacuugcugcu

SEQ ID NO: 1781057 - RNA, 19 nt, Human
gcucagaacuugcugcugu

SEQ ID NO: 1781058 - RNA, 20 nt, Human
gcucagaacuugcugcuguc

SEQ ID NO: 1781059 - RNA, 22 nt, Human
gcuaggaccccuccaugugggc

SEQ ID NO: 1781060 - RNA, 20 nt, Human
gcuaggaccccuccaugugg

SEQ ID NO: 1781061 - RNA, 14 nt, Human
gcuaguugggcuuc

SEQ ID NO: 1781062 - RNA, 16 nt, Human
gcuaguugggcuuccu

SEQ ID NO: 1781063 - RNA, 18 nt, Human
gcuaagugauccucccac

SEQ ID NO: 1781064 - RNA, 22 nt, Human
gcuaagugauccucccaccuca

SEQ ID NO: 1781065 - RNA, 15 nt, Human
gcggauggauggaag

SEQ ID NO: 1781066 - RNA, 21 nt, Human
gcggauggauggaagguugga

SEQ ID NO: 1781067 - RNA, 16 nt, Human
gcggcguacaggcugg

SEQ ID NO: 1781068 - RNA, 17 nt, Human
gcggcguacaggcuggc

SEQ ID NO: 1781069 - RNA, 16 nt, Human
gcgggacagugcugca

SEQ ID NO: 1781070 - RNA, 18 nt, Human
gcguuaugaagagcuaau

SEQ ID NO: 1781071 - RNA, 23 nt, Human
gcgauucuucugcuucagccucc

SEQ ID NO: 1781072 - RNA, 14 nt, Human
gccuugcauaccca

SEQ ID NO: 1781073 - RNA, 22 nt, Human
gcgauucuucugcuucagccuc

SEQ ID NO: 1781074 - RNA, 13 nt, Human
gccuucugugggg

SEQ ID NO: 1781075 - RNA, 14 nt, Human
gccuucugugggga

SEQ ID NO: 1781076 - RNA, 19 nt, Human
gccuucuguggggacuccg

SEQ ID NO: 1781077 - RNA, 15 nt, Human
gccuucucugaagga

SEQ ID NO: 1781078 - RNA, 16 nt, Human
gccuucucugaaggac

SEQ ID NO: 1781079 - RNA, 12 nt, Human
gccuucucacca

SEQ ID NO: 1781080 - RNA, 13 nt, Human
gccuucucaccag

SEQ ID NO: 1781081 - RNA, 15 nt, Human
gccuucucaccagcu

SEQ ID NO: 1781082 - RNA, 16 nt, Human
gccuucucaccagcug

SEQ ID NO: 1781083 - RNA, 17 nt, Human
gccuucucaccagcugc

SEQ ID NO: 1781084 - RNA, 18 nt, Human
gccuucucaccagcugca

SEQ ID NO: 1781085 - RNA, 19 nt, Human
gccuucucaccagcugcaa

SEQ ID NO: 1781086 - RNA, 21 nt, Human
gccuucucaccagcugcaaag

SEQ ID NO: 1781087 - RNA, 22 nt, Human
gccuucucaccagcugcaaagu

SEQ ID NO: 1781088 - RNA, 23 nt, Human
gccuucucaccagcugcaaagug

SEQ ID NO: 1781089 - RNA, 15 nt, Human
gccuguucagcucca

SEQ ID NO: 1781090 - RNA, 16 nt, Human
gccuguucagcuccag

SEQ ID NO: 1781091 - RNA, 17 nt, Human
gccuguucagcuccagc

SEQ ID NO: 1781092 - RNA, 12 nt, Human
gccucuggguca

SEQ ID NO: 1781093 - RNA, 13 nt, Human
gccucugggucag

SEQ ID NO: 1781094 - RNA, 22 nt, Human
gccucugggucagugguccaca

SEQ ID NO: 1781095 - RNA, 12 nt, Human
gcccaggcaggu

SEQ ID NO: 1781096 - RNA, 11 nt, Human
gcccaggcagg

SEQ ID NO: 1781097 - RNA, 11 nt, Human
gcccaggcccc

SEQ ID NO: 1781098 - RNA, 12 nt, Human
gcccaggccccu

SEQ ID NO: 1781099 - RNA, 20 nt, Human
gcccaggccccugccacccu

SEQ ID NO: 1781100 - RNA, 21 nt, Human
gcccaggccccugccacccug

SEQ ID NO: 1781101 - RNA, 22 nt, Human
gcccaggccccugccacccugg

SEQ ID NO: 1781102 - RNA, 23 nt, Human
gcccacgcuggagugcagugagc

SEQ ID NO: 1781103 - RNA, 19 nt, Human
gcccacgcuggagugcagu

SEQ ID NO: 1781104 - RNA, 21 nt, Human
gcccacgcuggagugcaguga

SEQ ID NO: 1781105 - RNA, 13 nt, Human
gcccacuucugcc

SEQ ID NO: 1781106 - RNA, 14 nt, Human
gccauuagccaagg

SEQ ID NO: 1781107 - RNA, 18 nt, Human
gcauuuacuuuguguuca

SEQ ID NO: 1781108 - RNA, 17 nt, Human
gccccaaacaaauaugc

SEQ ID NO: 1781109 - RNA, 18 nt, Human
gccccaaacaaauaugca

SEQ ID NO: 1781110 - RNA, 19 nt, Human
gccccaaacaaauaugcaa

SEQ ID NO: 1781111 - RNA, 12 nt, Human
gccccugcuggu

SEQ ID NO: 1781112 - RNA, 15 nt, Human
gccccugcugguuca

SEQ ID NO: 1781113 - RNA, 16 nt, Human
gccccugcugguucag

SEQ ID NO: 1781114 - RNA, 16 nt, Human
gccucgaacuggcugc

SEQ ID NO: 1781115 - RNA, 13 nt, Human
gccucgaacuggc

SEQ ID NO: 1781116 - RNA, 17 nt, Human
gccuacaggagugagca

SEQ ID NO: 1781117 - RNA, 21 nt, Human
gccccugcugguucaggguug

SEQ ID NO: 1781118 - RNA, 16 nt, Human
gccuacaggagugagc

SEQ ID NO: 1781119 - RNA, 14 nt, Human
gccggcagccccag

SEQ ID NO: 1781120 - RNA, 15 nt, Human
gccggcagccccagc

SEQ ID NO: 1781121 - RNA, 16 nt, Human
gccggcagccccagcc

SEQ ID NO: 1781122 - RNA, 17 nt, Human
gccggcagccccagccu

SEQ ID NO: 1781123 - RNA, 21 nt, Human
gcccuguggaugagcccucag

SEQ ID NO: 1781124 - RNA, 13 nt, Human
gcccugcugaguc

SEQ ID NO: 1781125 - RNA, 19 nt, Human
gcccuuagcagggaaacag

SEQ ID NO: 1781126 - RNA, 19 nt, Human
gcccuuaucugugcucagg

SEQ ID NO: 1781127 - RNA, 20 nt, Human
gcccuuaucugugcucagga

SEQ ID NO: 1781128 - RNA, 22 nt, Human
gcccuguggaugagcccucaga

SEQ ID NO: 1781129 - RNA, 14 nt, Human
gugucaccugaaga

SEQ ID NO: 1781130 - RNA, 22 nt, Human
gugucaccugaagacucauucu

SEQ ID NO: 1781131 - RNA, 14 nt, Human
gugucaccugugcu

SEQ ID NO: 1781132 - RNA, 14 nt, Human
gugucagguggggc

SEQ ID NO: 1781133 - RNA, 18 nt, Human
gugucagguggggcagcu

SEQ ID NO: 1781134 - RNA, 23 nt, Human
gugugaaccaccacacccagccc

SEQ ID NO: 1781135 - RNA, 16 nt, Human
gugucuguuuugagcu

SEQ ID NO: 1781136 - RNA, 22 nt, Human
gugugaacuggacccuguugcu

SEQ ID NO: 1781137 - RNA, 17 nt, Human
gugugaacuggacccug

SEQ ID NO: 1781138 - RNA, 14 nt, Human
gugugaacuggacc

SEQ ID NO: 1781139 - RNA, 20 nt, Human
gugucagguggggcagcuug

SEQ ID NO: 1781140 - RNA, 19 nt, Human
gugucagguggggcagcuu

SEQ ID NO: 1781141 - RNA, 13 nt, Human
aagcaaaauauua

SEQ ID NO: 1781142 - RNA, 14 nt, Human
aagcaaaauauuau

SEQ ID NO: 1781143 - RNA, 11 nt, Human
aagaggcaggg

SEQ ID NO: 1781144 - RNA, 14 nt, Human
aagaggcagggucu

SEQ ID NO: 1781145 - RNA, 16 nt, Human
aagagggacgccuggg

SEQ ID NO: 1781146 - RNA, 17 nt, Human
aagagggacgccugggg

SEQ ID NO: 1781147 - RNA, 17 nt, Human
aagauauaagugcugua

SEQ ID NO: 1781148 - RNA, 16 nt, Human
aagauauaagugcugu

SEQ ID NO: 1781149 - RNA, 15 nt, Human
aagauauaagugcug

SEQ ID NO: 1781150 - RNA, 11 nt, Human
gugcugccucu

SEQ ID NO: 1781151 - RNA, 12 nt, Human
gugcugccucua

SEQ ID NO: 1781152 - RNA, 19 nt, Human
gugcugccucuaccugaca

SEQ ID NO: 1781153 - RNA, 19 nt, Human
guguaaauaguuacuccag

SEQ ID NO: 1781154 - RNA, 19 nt, Human
aagcauguaacuuauauua

SEQ ID NO: 1781155 - RNA, 12 nt, Human
aagcacugagca

SEQ ID NO: 1781156 - RNA, 17 nt, Human
aagccaaagcuaggccu

SEQ ID NO: 1781157 - RNA, 18 nt, Human
aagccaaagcuaggccug

SEQ ID NO: 1781158 - RNA, 20 nt, Human
aagccaaagcuaggccuggc

SEQ ID NO: 1781159 - RNA, 21 nt, Human
aagcauuugaaugcauuuugu

SEQ ID NO: 1781160 - RNA, 18 nt, Human
aagcauuugaaugcauuu

SEQ ID NO: 1781161 - RNA, 21 nt, Human
aagcacauauuagugcagcca

SEQ ID NO: 1781162 - RNA, 23 nt, Human
aagcacauauuagugcagccaag

SEQ ID NO: 1781163 - RNA, 13 nt, Human
aagcaccuccugc

SEQ ID NO: 1781164 - RNA, 14 nt, Human
aagcaccuccugcc

SEQ ID NO: 1781165 - RNA, 15 nt, Human
aagcaccuccugccu

SEQ ID NO: 1781166 - RNA, 16 nt, Human
aagcaccuccugccuc

SEQ ID NO: 1781167 - RNA, 17 nt, Human
aagcaccuccugccucg

SEQ ID NO: 1781168 - RNA, 16 nt, Human
aagcacuaaacaaaga

SEQ ID NO: 1781169 - RNA, 17 nt, Human
guucagguaacaggcag

SEQ ID NO: 1781170 - RNA, 18 nt, Human
guucagguaacaggcaga

SEQ ID NO: 1781171 - RNA, 16 nt, Human
guucaguguaaauagu

SEQ ID NO: 1781172 - RNA, 20 nt, Human
guucaggguuggccccugcc

SEQ ID NO: 1781173 - RNA, 21 nt, Human
guucaggguuggccccugccc

SEQ ID NO: 1781174 - RNA, 22 nt, Human
guucaggguuggccccugcccg

SEQ ID NO: 1781175 - RNA, 13 nt, Human
guuauuuuccagg

SEQ ID NO: 1781176 - RNA, 23 nt, Human
guucagcuuguaaauagcucagg

SEQ ID NO: 1781177 - RNA, 21 nt, Human
aagccucaucaucagagccuu

SEQ ID NO: 1781178 - RNA, 14 nt, Human
guuacugccuuaau

SEQ ID NO: 1781179 - RNA, 21 nt, Human
guuacugccuuaauaaaaaau

SEQ ID NO: 1781180 - RNA, 19 nt, Human
aagcccagccccuacugcu

SEQ ID NO: 1781181 - RNA, 22 nt, Human
aagcccagccccuacugcugug

SEQ ID NO: 1781182 - RNA, 20 nt, Human
aagcccagcacugcuugagg

SEQ ID NO: 1781183 - RNA, 23 nt, Human
aagcccagcacugcuugaggaaa

SEQ ID NO: 1781184 - RNA, 13 nt, Human
guuaauaccagcu

SEQ ID NO: 1781185 - RNA, 14 nt, Human
aagccauuccaaag

SEQ ID NO: 1781186 - RNA, 15 nt, Human
aagccauuccaaagu

SEQ ID NO: 1781187 - RNA, 20 nt, Human
aagccauucuaaggaaauua

SEQ ID NO: 1781188 - RNA, 19 nt, Human
guuauuauauuuacaaaug

SEQ ID NO: 1781189 - RNA, 13 nt, Human
guuagacagccaa

SEQ ID NO: 1781190 - RNA, 20 nt, Human
guuauuauauuuacaaaugg

SEQ ID NO: 1781191 - RNA, 17 nt, Human
guuagaggaaaaauauu

SEQ ID NO: 1781192 - RNA, 12 nt, Human
guucccccaucu

SEQ ID NO: 1781193 - RNA, 17 nt, Human
aagcucugcuccucucc

SEQ ID NO: 1781194 - RNA, 20 nt, Human
aagcuucugucuccagcuuc

SEQ ID NO: 1781195 - RNA, 16 nt, Human
aagcucuuacucuuuc

SEQ ID NO: 1781196 - RNA, 11 nt, Human
aagcuucccuc

SEQ ID NO: 1781197 - RNA, 12 nt, Human
guucucugagga

SEQ ID NO: 1781198 - RNA, 14 nt, Human
guucucugaggaca

SEQ ID NO: 1781199 - RNA, 12 nt, Human
guucucugggag

SEQ ID NO: 1781200 - RNA, 13 nt, Human
guucucugggaga

SEQ ID NO: 1781201 - RNA, 14 nt, Human
guucucugggagaa

SEQ ID NO: 1781202 - RNA, 15 nt, Human
guucucugggagaaa

SEQ ID NO: 1781203 - RNA, 16 nt, Human
guucucugggagaaaa

SEQ ID NO: 1781204 - RNA, 19 nt, Human
guucucugggagaaaauca

SEQ ID NO: 1781205 - RNA, 20 nt, Human
guucucugggagaaaaucau

SEQ ID NO: 1781206 - RNA, 15 nt, Human
guugaccccagagga

SEQ ID NO: 1781207 - RNA, 14 nt, Human
guugaccccagagg

SEQ ID NO: 1781208 - RNA, 22 nt, Human
guucuucuuguucugagauuca

SEQ ID NO: 1781209 - RNA, 14 nt, Human
guuuuaacaaaaac

SEQ ID NO: 1781210 - RNA, 23 nt, Human
aaguacuguaagaauaauuuaua

SEQ ID NO: 1781211 - RNA, 18 nt, Human
aaguacuucuccacccug

SEQ ID NO: 1781212 - RNA, 19 nt, Human
aaguacuucuccacccugc

SEQ ID NO: 1781213 - RNA, 20 nt, Human
aaguacuucuccacccugcu

SEQ ID NO: 1781214 - RNA, 15 nt, Human
aaguauuauuuucca

SEQ ID NO: 1781215 - RNA, 20 nt, Human
aagucaaagcaaggaaacua

SEQ ID NO: 1781216 - RNA, 16 nt, Human
guuuaaaaaucaacuu

SEQ ID NO: 1781217 - RNA, 19 nt, Human
guuuaaaaaucaacuuuuu

SEQ ID NO: 1781218 - RNA, 22 nt, Human
guuucaaagccaagaccucaca

SEQ ID NO: 1781219 - RNA, 23 nt, Human
guuucaaccaagucaugugcauu

SEQ ID NO: 1781220 - RNA, 22 nt, Human
guuucaauugcaucucccagau

SEQ ID NO: 1781221 - RNA, 16 nt, Human
guuucaauugcaucuc

SEQ ID NO: 1781222 - RNA, 17 nt, Human
guuucaauugcaucucc

SEQ ID NO: 1781223 - RNA, 13 nt, Human
aagggcugcauga

SEQ ID NO: 1781224 - RNA, 14 nt, Human
aagggcugcaugau

SEQ ID NO: 1781225 - RNA, 15 nt, Human
aagggcugcaugaug

SEQ ID NO: 1781226 - RNA, 17 nt, Human
aagggcugcaugauguu

SEQ ID NO: 1781227 - RNA, 20 nt, Human
aagggcugcaugauguuugc

SEQ ID NO: 1781228 - RNA, 11 nt, Human
aaggggacagc

SEQ ID NO: 1781229 - RNA, 16 nt, Human
aaggggacagcugugu

SEQ ID NO: 1781230 - RNA, 15 nt, Human
aaguuacaauguuuu

SEQ ID NO: 1781231 - RNA, 19 nt, Human
aaguuacacagaaaugcug

SEQ ID NO: 1781232 - RNA, 21 nt, Human
aaguuacacagaaaugcugcu

SEQ ID NO: 1781233 - RNA, 22 nt, Human
aaguuacacagaaaugcugcug

SEQ ID NO: 1781234 - RNA, 23 nt, Human
aaguuacacagaaaugcugcugg

SEQ ID NO: 1781235 - RNA, 21 nt, Human
aagugugaacuggacccuguu

SEQ ID NO: 1781236 - RNA, 13 nt, Human
aagugugaacugg

SEQ ID NO: 1781237 - RNA, 10 nt, Human
aaguuauuuu

SEQ ID NO: 1781238 - RNA, 14 nt, Human
aaguuauuuuaccu

SEQ ID NO: 1781239 - RNA, 15 nt, Human
aaguuauuuuuguac

SEQ ID NO: 1781240 - RNA, 16 nt, Human
aaguuauuuuuguaca

SEQ ID NO: 1781241 - RNA, 17 nt, Human
aaguuauuuuuguacau

SEQ ID NO: 1781242 - RNA, 18 nt, Human
aaguuauuuuuguacaug

SEQ ID NO: 1781243 - RNA, 19 nt, Human
aaguuauuuuuguacaugu

SEQ ID NO: 1781244 - RNA, 22 nt, Human
aaguuugaauguuaaauaaauu

SEQ ID NO: 1781245 - RNA, 18 nt, Human
aaguuugaauguuaaaua

SEQ ID NO: 1781246 - RNA, 16 nt, Human
aaguuugaauguuaaa

SEQ ID NO: 1781247 - RNA, 15 nt, Human
aaguuugaauguuaa

SEQ ID NO: 1781248 - RNA, 14 nt, Human
aaguuugaauguua

SEQ ID NO: 1781249 - RNA, 13 nt, Human
aaguuugaauguu

SEQ ID NO: 1781250 - RNA, 18 nt, Human
aaguuuccuuccagccca

SEQ ID NO: 1781251 - RNA, 19 nt, Human
aaguuuccuuccagcccag

SEQ ID NO: 1781252 - RNA, 20 nt, Human
aaguuuccuuccagcccaga

SEQ ID NO: 1781253 - RNA, 21 nt, Human
aaguuuccuuccagcccagaa

SEQ ID NO: 1781254 - RNA, 15 nt, Human
uaaaauucugaauuu

SEQ ID NO: 1781255 - RNA, 19 nt, Human
uaaaauugccauauugcac

SEQ ID NO: 1781256 - RNA, 18 nt, Human
uaaaauugccauauugca

SEQ ID NO: 1781257 - RNA, 16 nt, Human
uaaaauugccauauug

SEQ ID NO: 1781258 - RNA, 15 nt, Human
uaaaauugccauauu

SEQ ID NO: 1781259 - RNA, 14 nt, Human
uaaaauugccauau

SEQ ID NO: 1781260 - RNA, 13 nt, Human
uaaaauugccaua

SEQ ID NO: 1781261 - RNA, 12 nt, Human
uaaaauugccau

SEQ ID NO: 1781262 - RNA, 13 nt, Human
aagugauccuccc

SEQ ID NO: 1781263 - RNA, 19 nt, Human
aagugauccucccaccuca

SEQ ID NO: 1781264 - RNA, 20 nt, Human
aagugauccucccaccucag

SEQ ID NO: 1781265 - RNA, 23 nt, Human
aagugauccucccaccucagccu

SEQ ID NO: 1781266 - RNA, 21 nt, Human
uaaaaccauguagaaaauuug

SEQ ID NO: 1781267 - RNA, 16 nt, Human
uaaaaaaaaaaaagua

SEQ ID NO: 1781268 - RNA, 16 nt, Human
gucgaggacagggagg

SEQ ID NO: 1781269 - RNA, 14 nt, Human
gucgauagagcugu

SEQ ID NO: 1781270 - RNA, 14 nt, Human
guccucuuuucuga

SEQ ID NO: 1781271 - RNA, 22 nt, Human
gucuaugggacucaaugcacug

SEQ ID NO: 1781272 - RNA, 16 nt, Human
aacauguggcuccucc

SEQ ID NO: 1781273 - RNA, 20 nt, Human
aacauguggcuccucccagc

SEQ ID NO: 1781274 - RNA, 15 nt, Human
aacauguaggaagua

SEQ ID NO: 1781275 - RNA, 13 nt, Human
aacauucaggagc

SEQ ID NO: 1781276 - RNA, 14 nt, Human
aacauucaggagcu

SEQ ID NO: 1781277 - RNA, 12 nt, Human
guccuccucugu

SEQ ID NO: 1781278 - RNA, 13 nt, Human
guccuccucugug

SEQ ID NO: 1781279 - RNA, 14 nt, Human
guccuccucuguga

SEQ ID NO: 1781280 - RNA, 14 nt, Human
gucccugucaccuc

SEQ ID NO: 1781281 - RNA, 15 nt, Human
gucccugucaccucu

SEQ ID NO: 1781282 - RNA, 17 nt, Human
gucccugucaccucuuc

SEQ ID NO: 1781283 - RNA, 12 nt, Human
gucccuguuaga

SEQ ID NO: 1781284 - RNA, 19 nt, Human
gucauuugagcagggcuca

SEQ ID NO: 1781285 - RNA, 21 nt, Human
guccauaucagaacugugcca

SEQ ID NO: 1781286 - RNA, 21 nt, Human
aacacucacauuuauucugcu

SEQ ID NO: 1781287 - RNA, 17 nt, Human
gucauuugagcagggcu

SEQ ID NO: 1781288 - RNA, 23 nt, Human
aacacugguggaggauggaaagg

SEQ ID NO: 1781289 - RNA, 22 nt, Human
gucagugguccacaucccggga

SEQ ID NO: 1781290 - RNA, 16 nt, Human
gucaguaccuucaaac

SEQ ID NO: 1781291 - RNA, 15 nt, Human
gucagguagggggga

SEQ ID NO: 1781292 - RNA, 18 nt, Human
gucagguaggggggaaac

SEQ ID NO: 1781293 - RNA, 16 nt, Human
gucagguggggcagcu

SEQ ID NO: 1781294 - RNA, 17 nt, Human
gucagguggggcagcuu

SEQ ID NO: 1781295 - RNA, 18 nt, Human
gucagguggggcagcuug

SEQ ID NO: 1781296 - RNA, 22 nt, Human
gucagguggggcagcuugaggg

SEQ ID NO: 1781297 - RNA, 15 nt, Human
gucagaaacaggacc

SEQ ID NO: 1781298 - RNA, 15 nt, Human
gucagaacccugcca

SEQ ID NO: 1781299 - RNA, 16 nt, Human
gucagaacccugccau

SEQ ID NO: 1781300 - RNA, 12 nt, Human
gucaccaagccc

SEQ ID NO: 1781301 - RNA, 15 nt, Human
gucaccaagcccagu

SEQ ID NO: 1781302 - RNA, 19 nt, Human
gucaccaaaagacacugca

SEQ ID NO: 1781303 - RNA, 22 nt, Human
gucaccaaaagacacugcagaa

SEQ ID NO: 1781304 - RNA, 17 nt, Human
gucaauuuaugaauaua

SEQ ID NO: 1781305 - RNA, 18 nt, Human
gucaauuuaugaauauaa

SEQ ID NO: 1781306 - RNA, 21 nt, Human
gucacaaauccuaaaagaagc

SEQ ID NO: 1781307 - RNA, 12 nt, Human
gucacaggcagg

SEQ ID NO: 1781308 - RNA, 11 nt, Human
aaaucaucaag

SEQ ID NO: 1781309 - RNA, 12 nt, Human
aaaucaucaaga

SEQ ID NO: 1781310 - RNA, 13 nt, Human
aaaucaucaagaa

SEQ ID NO: 1781311 - RNA, 14 nt, Human
aaaucaucaagaag

SEQ ID NO: 1781312 - RNA, 18 nt, Human
aaaucaucaagaagggcu

SEQ ID NO: 1781313 - RNA, 19 nt, Human
aaaucaucaagaagggcug

SEQ ID NO: 1781314 - RNA, 23 nt, Human
aaaucaucaagaagggcugcaug

SEQ ID NO: 1781315 - RNA, 22 nt, Human
guauuguauuuauucaauaaag

SEQ ID NO: 1781316 - RNA, 18 nt, Human
guauuguauuuauucaau

SEQ ID NO: 1781317 - RNA, 17 nt, Human
guauuguauuuauucaa

SEQ ID NO: 1781318 - RNA, 16 nt, Human
guauuguauuuauuca

SEQ ID NO: 1781319 - RNA, 15 nt, Human
guauuguauuuauuc

SEQ ID NO: 1781320 - RNA, 13 nt, Human
guauuguauuuau

SEQ ID NO: 1781321 - RNA, 12 nt, Human
guauuguauuua

SEQ ID NO: 1781322 - RNA, 11 nt, Human
guauuuauuca

SEQ ID NO: 1781323 - RNA, 15 nt, Human
guauuuaccaaaaau

SEQ ID NO: 1781324 - RNA, 20 nt, Human
guauuuaccaaaaauuuugu

SEQ ID NO: 1781325 - RNA, 16 nt, Human
guauuuaacaaaaagu

SEQ ID NO: 1781326 - RNA, 20 nt, Human
guauuuaacaaaaagugcuu

SEQ ID NO: 1781327 - RNA, 12 nt, Human
aaaugucuugug

SEQ ID NO: 1781328 - RNA, 21 nt, Human
aaaugucucuuuaaugucaca

SEQ ID NO: 1781329 - RNA, 14 nt, Human
aaauguauaugcac

SEQ ID NO: 1781330 - RNA, 15 nt, Human
aaauguauaugcacu

SEQ ID NO: 1781331 - RNA, 17 nt, Human
aaauuguauauucacuu

SEQ ID NO: 1781332 - RNA, 21 nt, Human
aaauugucccuuaaacaaaaa

SEQ ID NO: 1781333 - RNA, 17 nt, Human
aaauuguauuacaaauc

SEQ ID NO: 1781334 - RNA, 21 nt, Human
aaauucuauucugaucuuauu

SEQ ID NO: 1781335 - RNA, 14 nt, Human
aaauucuaaaugua

SEQ ID NO: 1781336 - RNA, 17 nt, Human
aaauuccaagugauuga

SEQ ID NO: 1781337 - RNA, 17 nt, Human
gugagucaccaagccca

SEQ ID NO: 1781338 - RNA, 19 nt, Human
gugagucaccaagcccagu

SEQ ID NO: 1781339 - RNA, 18 nt, Human
gugagacucugucucaaa

SEQ ID NO: 1781340 - RNA, 12 nt, Human
aacucuuucaaa

SEQ ID NO: 1781341 - RNA, 13 nt, Human
aacucuuucaaaa

SEQ ID NO: 1781342 - RNA, 14 nt, Human
aacucuuugagaaa

SEQ ID NO: 1781343 - RNA, 20 nt, Human
gugacagagugagacucugu

SEQ ID NO: 1781344 - RNA, 22 nt, Human
gugacagagugagacucugucu

SEQ ID NO: 1781345 - RNA, 18 nt, Human
gugacaguggauugcauu

SEQ ID NO: 1781346 - RNA, 12 nt, Human
aacuccucccau

SEQ ID NO: 1781347 - RNA, 17 nt, Human
aacuccgagugaacugg

SEQ ID NO: 1781348 - RNA, 20 nt, Human
gugagacccagcccucaucc

SEQ ID NO: 1781349 - RNA, 14 nt, Human
gugagacucugucu

SEQ ID NO: 1781350 - RNA, 16 nt, Human
gugagacucugucuca

SEQ ID NO: 1781351 - RNA, 14 nt, Human
gucucaaaaaaaca

SEQ ID NO: 1781352 - RNA, 20 nt, Human
gucugacaggcaaugcuggc

SEQ ID NO: 1781353 - RNA, 15 nt, Human
gucugacaggcaaug

SEQ ID NO: 1781354 - RNA, 18 nt, Human
gucugacaggcaaugcug

SEQ ID NO: 1781355 - RNA, 12 nt, Human
gucugacaggca

SEQ ID NO: 1781356 - RNA, 13 nt, Human
gucugacaggcaa

SEQ ID NO: 1781357 - RNA, 14 nt, Human
gucugacaggcaau

SEQ ID NO: 1781358 - RNA, 18 nt, Human
gucuggaaugcaguggua

SEQ ID NO: 1781359 - RNA, 15 nt, Human
gucuggaaugcagug

SEQ ID NO: 1781360 - RNA, 16 nt, Human
gucuggaaugcagugg

SEQ ID NO: 1781361 - RNA, 22 nt, Human
gucuuaaugaaguuugaauguu

SEQ ID NO: 1781362 - RNA, 20 nt, Human
gucuuaaugaaguuugaaug

SEQ ID NO: 1781363 - RNA, 19 nt, Human
gucuuaaugaaguuugaau

SEQ ID NO: 1781364 - RNA, 18 nt, Human
gucuuaaugaaguuugaa

SEQ ID NO: 1781365 - RNA, 17 nt, Human
gucuuaaugaaguuuga

SEQ ID NO: 1781366 - RNA, 16 nt, Human
gucuuaaugaaguuug

SEQ ID NO: 1781367 - RNA, 14 nt, Human
gucuuaaugaaguu

SEQ ID NO: 1781368 - RNA, 18 nt, Human
gucuuuccacggagccac

SEQ ID NO: 1781369 - RNA, 20 nt, Human
gucuuguugcggauggaugg

SEQ ID NO: 1781370 - RNA, 22 nt, Human
aaccuuaucuccacaaccucuu

SEQ ID NO: 1781371 - RNA, 11 nt, Human
aacgugcauug

SEQ ID NO: 1781372 - RNA, 16 nt, Human
aacgugcauugugcuu

SEQ ID NO: 1781373 - RNA, 14 nt, Human
aacgugcauugugc

SEQ ID NO: 1781374 - RNA, 23 nt, Human
aacgugcauugugcuucuuucuu

SEQ ID NO: 1781375 - RNA, 20 nt, Human
gucuuuccauuggaucucau

SEQ ID NO: 1781376 - RNA, 11 nt, Human
aaccuggaggu

SEQ ID NO: 1781377 - RNA, 19 nt, Human
aaccuggaggucaauguua

SEQ ID NO: 1781378 - RNA, 23 nt, Human
aacuagugggguuuccuggcacu

SEQ ID NO: 1781379 - RNA, 17 nt, Human
aacuagggccaagccca

SEQ ID NO: 1781380 - RNA, 19 nt, Human
gugcucgcuguugcugaau

SEQ ID NO: 1781381 - RNA, 18 nt, Human
gugcucgcuguugcugaa

SEQ ID NO: 1781382 - RNA, 15 nt, Human
gugcucgcuguugcu

SEQ ID NO: 1781383 - RNA, 16 nt, Human
gugcucugaucaucca

SEQ ID NO: 1781384 - RNA, 22 nt, Human
gugcucgcuguugcugaauagg

SEQ ID NO: 1781385 - RNA, 13 nt, Human
gugcucuggacag

SEQ ID NO: 1781386 - RNA, 14 nt, Human
gugcucuggacagg

SEQ ID NO: 1781387 - RNA, 13 nt, Human
aagaauaauuuau

SEQ ID NO: 1781388 - RNA, 18 nt, Human
aagaauaauuuauaguaa

SEQ ID NO: 1781389 - RNA, 20 nt, Human
aagaauaauuuauaguaaug

SEQ ID NO: 1781390 - RNA, 21 nt, Human
gugcuacacccuuuuccagcu

SEQ ID NO: 1781391 - RNA, 20 nt, Human
gugccaacaauccuagugcu

SEQ ID NO: 1781392 - RNA, 11 nt, Human
aagaaaaacuu

SEQ ID NO: 1781393 - RNA, 12 nt, Human
aagaaaaacuuu

SEQ ID NO: 1781394 - RNA, 19 nt, Human
aagaaacaacucuuugaga

SEQ ID NO: 1781395 - RNA, 14 nt, Human
aacuguccuuuccu

SEQ ID NO: 1781396 - RNA, 15 nt, Human
aacugugccacaaug

SEQ ID NO: 1781397 - RNA, 21 nt, Human
gugcacaugcacgugugugca

SEQ ID NO: 1781398 - RNA, 13 nt, Human
gugcauugugcuu

SEQ ID NO: 1781399 - RNA, 11 nt, Human
gugcauugugc

SEQ ID NO: 1781400 - RNA, 18 nt, Human
uagaggcccuuugcuguc

SEQ ID NO: 1781401 - RNA, 21 nt, Human
uagagauuaccuccugagaaa

SEQ ID NO: 1781402 - RNA, 17 nt, Human
uagagauuaccuccuga

SEQ ID NO: 1781403 - RNA, 18 nt, Human
uagagauuaccuccugag

SEQ ID NO: 1781404 - RNA, 19 nt, Human
uagagauuaccuccugaga

SEQ ID NO: 1781405 - RNA, 18 nt, Human
acaaaggcaaagggucca

SEQ ID NO: 1781406 - RNA, 11 nt, Human
acaaaggcaag

SEQ ID NO: 1781407 - RNA, 21 nt, Human
acaaagaugggugaaggcugg

SEQ ID NO: 1781408 - RNA, 22 nt, Human
acaaagaugggugaaggcuggc

SEQ ID NO: 1781409 - RNA, 18 nt, Human
acaaaaggauaaugaaua

SEQ ID NO: 1781410 - RNA, 15 nt, Human
uagccagaggacugu

SEQ ID NO: 1781411 - RNA, 20 nt, Human
uagauggcaagcauguaacu

SEQ ID NO: 1781412 - RNA, 14 nt, Human
uagggaagggccug

SEQ ID NO: 1781413 - RNA, 21 nt, Human
acaaugacauacgcuuuuaau

SEQ ID NO: 1781414 - RNA, 15 nt, Human
acaauccuagugcuu

SEQ ID NO: 1781415 - RNA, 16 nt, Human
acaauccuagugcuuu

SEQ ID NO: 1781416 - RNA, 17 nt, Human
acaauccuagugcuuuc

SEQ ID NO: 1781417 - RNA, 22 nt, Human
acaauccuagugcuuuccuuuu

SEQ ID NO: 1781418 - RNA, 23 nt, Human
acaauccuagugcuuuccuuuuu

SEQ ID NO: 1781419 - RNA, 18 nt, Human
acaaucaugaaauaugca

SEQ ID NO: 1781420 - RNA, 19 nt, Human
acaaucaugaaauaugcau

SEQ ID NO: 1781421 - RNA, 23 nt, Human
uagcuauaauugggucauagaaa

SEQ ID NO: 1781422 - RNA, 23 nt, Human
acaauaaaauuuuuuuucauguu

SEQ ID NO: 1781423 - RNA, 14 nt, Human
acaauaaaugugca

SEQ ID NO: 1781424 - RNA, 16 nt, Human
acaauaaauugcuaau

SEQ ID NO: 1781425 - RNA, 23 nt, Human
acaauaaauugcuaauguugcug

SEQ ID NO: 1781426 - RNA, 22 nt, Human
acaauaaaauuuuuuuucaugu

SEQ ID NO: 1781427 - RNA, 20 nt, Human
acacuaaccacgcuggaccu

SEQ ID NO: 1781428 - RNA, 16 nt, Human
acaccgggcacucaga

SEQ ID NO: 1781429 - RNA, 11 nt, Human
uauaagaaaaa

SEQ ID NO: 1781430 - RNA, 12 nt, Human
uauaagaaaaac

SEQ ID NO: 1781431 - RNA, 13 nt, Human
uauaagaaaaacu

SEQ ID NO: 1781432 - RNA, 15 nt, Human
uauaagaaaaacuuu

SEQ ID NO: 1781433 - RNA, 20 nt, Human
acacucacauuuauucugcu

SEQ ID NO: 1781434 - RNA, 22 nt, Human
acacucacauuuauucugcuca

SEQ ID NO: 1781435 - RNA, 15 nt, Human
uauaaaagcuuucug

SEQ ID NO: 1781436 - RNA, 14 nt, Human
acacauauaaacau

SEQ ID NO: 1781437 - RNA, 22 nt, Human
acacauauaaacaucacacaca

SEQ ID NO: 1781438 - RNA, 13 nt, Human
uauaaaaaauaug

SEQ ID NO: 1781439 - RNA, 14 nt, Human
uauaaaaaauaugu

SEQ ID NO: 1781440 - RNA, 15 nt, Human
uauaaaaaauaugua

SEQ ID NO: 1781441 - RNA, 16 nt, Human
uauaaaaaauauguau

SEQ ID NO: 1781442 - RNA, 17 nt, Human
uauaaaaaauauguauu

SEQ ID NO: 1781443 - RNA, 19 nt, Human
acacacagcucuguccugg

SEQ ID NO: 1781444 - RNA, 17 nt, Human
acacacagcucuguccu

SEQ ID NO: 1781445 - RNA, 13 nt, Human
acacacagcucug

SEQ ID NO: 1781446 - RNA, 14 nt, Human
acacacagcucugu

SEQ ID NO: 1781447 - RNA, 22 nt, Human
acacacacgcgugcacacacca

SEQ ID NO: 1781448 - RNA, 15 nt, Human
acacacacacacaca

SEQ ID NO: 1781449 - RNA, 14 nt, Human
acacaccagagccc

SEQ ID NO: 1781450 - RNA, 15 nt, Human
acacaccagagccca

SEQ ID NO: 1781451 - RNA, 20 nt, Human
acacaccagagcccaccuug

SEQ ID NO: 1781452 - RNA, 21 nt, Human
acacacgcgugcacacaccag

SEQ ID NO: 1781453 - RNA, 19 nt, Human
acacacaaaaaaugcacaa

SEQ ID NO: 1781454 - RNA, 14 nt, Human
acacacaacaauua

SEQ ID NO: 1781455 - RNA, 13 nt, Human
acacacacacaca

SEQ ID NO: 1781456 - RNA, 19 nt, Human
acacaguauuacuucugcu

SEQ ID NO: 1781457 - RNA, 22 nt, Human
acacaguauuacuucugcuaca

SEQ ID NO: 1781458 - RNA, 18 nt, Human
acacaguauuacuucugc

SEQ ID NO: 1781459 - RNA, 21 nt, Human
uagugaaggcuucucucugug

SEQ ID NO: 1781460 - RNA, 23 nt, Human
uaguuaauauugugaagaaaaau

SEQ ID NO: 1781461 - RNA, 19 nt, Human
uagugaaggcuucucucug

SEQ ID NO: 1781462 - RNA, 16 nt, Human
uagucccugccacgaa

SEQ ID NO: 1781463 - RNA, 15 nt, Human
uaguacuagaaacug

SEQ ID NO: 1781464 - RNA, 17 nt, Human
uaugaacacuuaaauua

SEQ ID NO: 1781465 - RNA, 17 nt, Human
uaucuuuuguuuccuuu

SEQ ID NO: 1781466 - RNA, 22 nt, Human
uaucuuuuguuuccuuuuuucc

SEQ ID NO: 1781467 - RNA, 10 nt, Human
uaugccugug

SEQ ID NO: 1781468 - RNA, 21 nt, Human
uaugcauuuaaauacagucuu

SEQ ID NO: 1781469 - RNA, 22 nt, Human
uaugcauuuaaauacagucuuc

SEQ ID NO: 1781470 - RNA, 19 nt, Human
uaugcugcaacaaaaugua

SEQ ID NO: 1781471 - RNA, 15 nt, Human
uaugcuauugacaau

SEQ ID NO: 1781472 - RNA, 22 nt, Human
uauggguuuaguuacuuuagau

SEQ ID NO: 1781473 - RNA, 21 nt, Human
uaugguacauuuuucaacuuu

SEQ ID NO: 1781474 - RNA, 11 nt, Human
acagagaaagu

SEQ ID NO: 1781475 - RNA, 18 nt, Human
acagagaaaguacuucuc

SEQ ID NO: 1781476 - RNA, 22 nt, Human
uaucauuuaauaauauacuugu

SEQ ID NO: 1781477 - RNA, 20 nt, Human
uaucauuuauuuuuuacauu

SEQ ID NO: 1781478 - RNA, 21 nt, Human
uaucauuuaauaauauacuug

SEQ ID NO: 1781479 - RNA, 20 nt, Human
uaucauuuaauaauauacuu

SEQ ID NO: 1781480 - RNA, 19 nt, Human
uaucauuuaauaauauacu

SEQ ID NO: 1781481 - RNA, 18 nt, Human
uaucauuuaauaauauac

SEQ ID NO: 1781482 - RNA, 21 nt, Human
uauccagguaauccaagauau

SEQ ID NO: 1781483 - RNA, 18 nt, Human
uauccagguaauccaaga

SEQ ID NO: 1781484 - RNA, 19 nt, Human
uauaaguuauuuuuguaca

SEQ ID NO: 1781485 - RNA, 20 nt, Human
uauaaguuauuuuuguacau

SEQ ID NO: 1781486 - RNA, 21 nt, Human
uauaaguuauuuuuguacaug

SEQ ID NO: 1781487 - RNA, 22 nt, Human
uauaaguuauuuuuguacaugu

SEQ ID NO: 1781488 - RNA, 13 nt, Human
uauauuaauagua

SEQ ID NO: 1781489 - RNA, 15 nt, Human
uauauuaauaguaau

SEQ ID NO: 1781490 - RNA, 22 nt, Human
uauauuaauaguaauuuguaaa

SEQ ID NO: 1781491 - RNA, 23 nt, Human
uauauuaauaguaauuuguaaag

SEQ ID NO: 1781492 - RNA, 14 nt, Human
acaggcauguucuc

SEQ ID NO: 1781493 - RNA, 14 nt, Human
acaggcagguccag

SEQ ID NO: 1781494 - RNA, 16 nt, Human
acaggcagguccaggg

SEQ ID NO: 1781495 - RNA, 16 nt, Human
acaggagugagcacua

SEQ ID NO: 1781496 - RNA, 14 nt, Human
acaggaucagucug

SEQ ID NO: 1781497 - RNA, 15 nt, Human
acaggaucagucuga

SEQ ID NO: 1781498 - RNA, 15 nt, Human
acaggaaaagcugcu

SEQ ID NO: 1781499 - RNA, 16 nt, Human
acaggaaaagcugcug

SEQ ID NO: 1781500 - RNA, 17 nt, Human
acaggaaaagcugcuga

SEQ ID NO: 1781501 - RNA, 18 nt, Human
acaggaaaagcugcugac

SEQ ID NO: 1781502 - RNA, 23 nt, Human
uaugucuuuugaugaauagaagu

SEQ ID NO: 1781503 - RNA, 22 nt, Human
acaggcauguucucugaggaca

SEQ ID NO: 1781504 - RNA, 15 nt, Human
acaggcauguucucu

SEQ ID NO: 1781505 - RNA, 18 nt, Human
acaggcauguucucugag

SEQ ID NO: 1781506 - RNA, 19 nt, Human
acaggcauguucucugagg

SEQ ID NO: 1781507 - RNA, 20 nt, Human
acaggcauguucucugagga

SEQ ID NO: 1781508 - RNA, 16 nt, Human
uauguuuuuguucaaa

SEQ ID NO: 1781509 - RNA, 15 nt, Human
uauguuuuuguucaa

SEQ ID NO: 1781510 - RNA, 14 nt, Human
uauuacuucugcua

SEQ ID NO: 1781511 - RNA, 13 nt, Human
uauuacuucugcu

SEQ ID NO: 1781512 - RNA, 14 nt, Human
uauuaaaauucuga

SEQ ID NO: 1781513 - RNA, 15 nt, Human
uauuaaaauucugaa

SEQ ID NO: 1781514 - RNA, 19 nt, Human
uauuaaaauucugaauuuu

SEQ ID NO: 1781515 - RNA, 15 nt, Human
uauucagugucacug

SEQ ID NO: 1781516 - RNA, 14 nt, Human
uauucaauaaagua

SEQ ID NO: 1781517 - RNA, 17 nt, Human
uauucaauaaaguauuu

SEQ ID NO: 1781518 - RNA, 15 nt, Human
uauucaauaaaguau

SEQ ID NO: 1781519 - RNA, 20 nt, Human
uauucaauaaaguauuuaau

SEQ ID NO: 1781520 - RNA, 19 nt, Human
uauucaauaaaguauuuaa

SEQ ID NO: 1781521 - RNA, 21 nt, Human
uauucaauaaaguauuuaauu

SEQ ID NO: 1781522 - RNA, 12 nt, Human
acagggcacacc

SEQ ID NO: 1781523 - RNA, 20 nt, Human
acagggcacaccgggcacuc

SEQ ID NO: 1781524 - RNA, 15 nt, Human
acagggauucucaca

SEQ ID NO: 1781525 - RNA, 16 nt, Human
acagggauucucacaa

SEQ ID NO: 1781526 - RNA, 13 nt, Human
acaguaggagccc

SEQ ID NO: 1781527 - RNA, 14 nt, Human
acaguaggagccca

SEQ ID NO: 1781528 - RNA, 22 nt, Human
acaguaggagcccagcucugaa

SEQ ID NO: 1781529 - RNA, 12 nt, Human
acaggcugggcu

SEQ ID NO: 1781530 - RNA, 22 nt, Human
acaggcugggcuucaguggcag

SEQ ID NO: 1781531 - RNA, 23 nt, Human
acaggcugggcuucaguggcagc

SEQ ID NO: 1781532 - RNA, 13 nt, Human
aauguauaugcac

SEQ ID NO: 1781533 - RNA, 14 nt, Human
aauguauaugcacu

SEQ ID NO: 1781534 - RNA, 22 nt, Human
aaugugaaaaugguccaggaga

SEQ ID NO: 1781535 - RNA, 16 nt, Human
uacaggugugagucac

SEQ ID NO: 1781536 - RNA, 23 nt, Human
aauguuaaauaaauuguauauuc

SEQ ID NO: 1781537 - RNA, 22 nt, Human
aauguuaaauaaauuguauauu

SEQ ID NO: 1781538 - RNA, 21 nt, Human
aauguuaaauaaauuguauau

SEQ ID NO: 1781539 - RNA, 20 nt, Human
aauguuaaauaaauuguaua

SEQ ID NO: 1781540 - RNA, 18 nt, Human
aauguuaaauaaauugua

SEQ ID NO: 1781541 - RNA, 22 nt, Human
aauguguuuuguuuauuaaaua

SEQ ID NO: 1781542 - RNA, 15 nt, Human
aauguuaaauaaauu

SEQ ID NO: 1781543 - RNA, 13 nt, Human
aauguuaaauaaa

SEQ ID NO: 1781544 - RNA, 17 nt, Human
aauuaacuuacuuccaa

SEQ ID NO: 1781545 - RNA, 15 nt, Human
aaugccaucaucucc

SEQ ID NO: 1781546 - RNA, 20 nt, Human
aaugcuuaucaucuaaagau

SEQ ID NO: 1781547 - RNA, 16 nt, Human
aauggcagccuuggca

SEQ ID NO: 1781548 - RNA, 12 nt, Human
aauggcagccuu

SEQ ID NO: 1781549 - RNA, 13 nt, Human
aauggcuccuuca

SEQ ID NO: 1781550 - RNA, 13 nt, Human
uacuaugccugug

SEQ ID NO: 1781551 - RNA, 14 nt, Human
uacuaugccugugu

SEQ ID NO: 1781552 - RNA, 22 nt, Human
uacgcagcgugcuuuaaaaaau

SEQ ID NO: 1781553 - RNA, 16 nt, Human
uacgcccaucucagga

SEQ ID NO: 1781554 - RNA, 17 nt, Human
uacgcccaucucaggac

SEQ ID NO: 1781555 - RNA, 13 nt, Human
uacgccucuucug

SEQ ID NO: 1781556 - RNA, 18 nt, Human
uacgccucuucugucccu

SEQ ID NO: 1781557 - RNA, 17 nt, Human
uacgccugcauguaaac

SEQ ID NO: 1781558 - RNA, 20 nt, Human
uacgagcaccuccagccuga

SEQ ID NO: 1781559 - RNA, 21 nt, Human
uacgagcaccuccagccugaa

SEQ ID NO: 1781560 - RNA, 22 nt, Human
uacgagcaccuccagccugaac

SEQ ID NO: 1781561 - RNA, 12 nt, Human
aauuccuauaag

SEQ ID NO: 1781562 - RNA, 15 nt, Human
aauuccuauaaggaa

SEQ ID NO: 1781563 - RNA, 22 nt, Human
aauuccuauacgcagcgugcuu

SEQ ID NO: 1781564 - RNA, 17 nt, Human
aauugaguuuucagugg

SEQ ID NO: 1781565 - RNA, 23 nt, Human
aauugccauauugcacaugucuu

SEQ ID NO: 1781566 - RNA, 19 nt, Human
aauugccauauugcacaug

SEQ ID NO: 1781567 - RNA, 17 nt, Human
aauugccauauugcaca

SEQ ID NO: 1781568 - RNA, 16 nt, Human
aauugccauauugcac

SEQ ID NO: 1781569 - RNA, 15 nt, Human
aauugccauauugca

SEQ ID NO: 1781570 - RNA, 13 nt, Human
aauugccauauug

SEQ ID NO: 1781571 - RNA, 12 nt, Human
aauugccauauu

SEQ ID NO: 1781572 - RNA, 12 nt, Human
uacuguaagaau

SEQ ID NO: 1781573 - RNA, 14 nt, Human
uacuguaagaauaa

SEQ ID NO: 1781574 - RNA, 18 nt, Human
uacuguaagaauaauuua

SEQ ID NO: 1781575 - RNA, 19 nt, Human
uacuguaagaauaauuuau

SEQ ID NO: 1781576 - RNA, 20 nt, Human
uacuguaagaauaauuuaua

SEQ ID NO: 1781577 - RNA, 21 nt, Human
uacucugugucagguggggca

SEQ ID NO: 1781578 - RNA, 12 nt, Human
uacucuguguca

SEQ ID NO: 1781579 - RNA, 14 nt, Human
uacucucuucuucu

SEQ ID NO: 1781580 - RNA, 16 nt, Human
uacucucuucuucuca

SEQ ID NO: 1781581 - RNA, 14 nt, Human
uacucugcccucua

SEQ ID NO: 1781582 - RNA, 16 nt, Human
uacucugcccucuaga

SEQ ID NO: 1781583 - RNA, 18 nt, Human
aauuagugcuaaguguga

SEQ ID NO: 1781584 - RNA, 14 nt, Human
aauuagugcuaagu

SEQ ID NO: 1781585 - RNA, 21 nt, Human
aauuagugcuaagugugaacu

SEQ ID NO: 1781586 - RNA, 20 nt, Human
aauuagugcuaagugugaac

SEQ ID NO: 1781587 - RNA, 17 nt, Human
aauuaguaacauguguu

SEQ ID NO: 1781588 - RNA, 20 nt, Human
aauuaguaaaaaaucaauua

SEQ ID NO: 1781589 - RNA, 12 nt, Human
aauuccccagau

SEQ ID NO: 1781590 - RNA, 14 nt, Human
aauuccacugucaa

SEQ ID NO: 1781591 - RNA, 22 nt, Human
aauuccacugucaagaaagagc

SEQ ID NO: 1781592 - RNA, 13 nt, Human
aauuccaaagcaa

SEQ ID NO: 1781593 - RNA, 14 nt, Human
aauuccaaagcaaa

SEQ ID NO: 1781594 - RNA, 15 nt, Human
aauuccaaagcaaaa

SEQ ID NO: 1781595 - RNA, 18 nt, Human
aauuccaagugauugaaa

SEQ ID NO: 1781596 - RNA, 16 nt, Human
aauucacuuucauuuu

SEQ ID NO: 1781597 - RNA, 21 nt, Human
aauucacuuucauuuuugaua

SEQ ID NO: 1781598 - RNA, 21 nt, Human
aauucacaucuaaccucaucu

SEQ ID NO: 1781599 - RNA, 22 nt, Human
aauucacaucuaaccucaucuu

SEQ ID NO: 1781600 - RNA, 10 nt, Human
uaccugcugc

SEQ ID NO: 1781601 - RNA, 11 nt, Human
uaccugcugcu

SEQ ID NO: 1781602 - RNA, 14 nt, Human
uaccugcugcuucu

SEQ ID NO: 1781603 - RNA, 19 nt, Human
uaccugcugcuucuccaaa

SEQ ID NO: 1781604 - RNA, 13 nt, Human
uaccacuccugcc

SEQ ID NO: 1781605 - RNA, 17 nt, Human
aauuaggaagugauuau

SEQ ID NO: 1781606 - RNA, 15 nt, Human
aauuagcugcuucua

SEQ ID NO: 1781607 - RNA, 14 nt, Human
aauuagcugcuucu

SEQ ID NO: 1781608 - RNA, 19 nt, Human
uaaugaaguuugaauguua

SEQ ID NO: 1781609 - RNA, 20 nt, Human
uaaugaaguuugaauguuaa

SEQ ID NO: 1781610 - RNA, 22 nt, Human
uaaugaaguuugaauguuaaau

SEQ ID NO: 1781611 - RNA, 21 nt, Human
uaaugaaguuugaauguuaaa

SEQ ID NO: 1781612 - RNA, 20 nt, Human
uaauccccaguaaaauugcc

SEQ ID NO: 1781613 - RNA, 18 nt, Human
uaauccccaguaaaauug

SEQ ID NO: 1781614 - RNA, 17 nt, Human
uaauccccaguaaaauu

SEQ ID NO: 1781615 - RNA, 16 nt, Human
uaauauuuuacauaca

SEQ ID NO: 1781616 - RNA, 21 nt, Human
aaucuuucaaaccagcuucau

SEQ ID NO: 1781617 - RNA, 13 nt, Human
aaucuuuccaaau

SEQ ID NO: 1781618 - RNA, 16 nt, Human
aaugaaaaugucuugu

SEQ ID NO: 1781619 - RNA, 15 nt, Human
aaugaaaaugucuug

SEQ ID NO: 1781620 - RNA, 13 nt, Human
aaugaaugucuuu

SEQ ID NO: 1781621 - RNA, 18 nt, Human
uaaugucacaggcagguc

SEQ ID NO: 1781622 - RNA, 12 nt, Human
uaaguaaaguga

SEQ ID NO: 1781623 - RNA, 17 nt, Human
aaucaugaaauaugcau

SEQ ID NO: 1781624 - RNA, 16 nt, Human
aaucaugaaauaugca

SEQ ID NO: 1781625 - RNA, 19 nt, Human
aaucuuauaauuuaaaaua

SEQ ID NO: 1781626 - RNA, 13 nt, Human
aauccgaaccucc

SEQ ID NO: 1781627 - RNA, 19 nt, Human
aauccgaaccuccucugug

SEQ ID NO: 1781628 - RNA, 21 nt, Human
aauccgaccacuaauugccaa

SEQ ID NO: 1781629 - RNA, 12 nt, Human
aauccgaaccuc

SEQ ID NO: 1781630 - RNA, 15 nt, Human
aauccuaaaagaagc

SEQ ID NO: 1781631 - RNA, 20 nt, Human
aauccgaaccuccucuguga

SEQ ID NO: 1781632 - RNA, 13 nt, Human
aauauuguccauu

SEQ ID NO: 1781633 - RNA, 23 nt, Human
aauauugugaagaaaaauaaagu

SEQ ID NO: 1781634 - RNA, 18 nt, Human
aauauugaauuuuuccua

SEQ ID NO: 1781635 - RNA, 13 nt, Human
aauauugaauuuu

SEQ ID NO: 1781636 - RNA, 16 nt, Human
aauauuugaaucuugu

SEQ ID NO: 1781637 - RNA, 15 nt, Human
aauauucccuagaaa

SEQ ID NO: 1781638 - RNA, 17 nt, Human
aauauucccuagaaacu

SEQ ID NO: 1781639 - RNA, 20 nt, Human
aauauucagacaaaauggau

SEQ ID NO: 1781640 - RNA, 21 nt, Human
aauauucagacaaaauggaua

SEQ ID NO: 1781641 - RNA, 23 nt, Human
aauauucagacaaaauggauaca

SEQ ID NO: 1781642 - RNA, 17 nt, Human
uaagcaaaggggacagc

SEQ ID NO: 1781643 - RNA, 19 nt, Human
uaagcaaaggggacagcug

SEQ ID NO: 1781644 - RNA, 22 nt, Human
uaagcaaaggggacagcugugu

SEQ ID NO: 1781645 - RNA, 17 nt, Human
uaagcagaccacugaua

SEQ ID NO: 1781646 - RNA, 20 nt, Human
uaagcagaccacugauaaaa

SEQ ID NO: 1781647 - RNA, 17 nt, Human
uaagauuccaaaaagca

SEQ ID NO: 1781648 - RNA, 20 nt, Human
aauauuugaaucuugucuca

SEQ ID NO: 1781649 - RNA, 13 nt, Human
aauaguuggcuag

SEQ ID NO: 1781650 - RNA, 21 nt, Human
uaacauaugcaguguucuaca

SEQ ID NO: 1781651 - RNA, 23 nt, Human
uaacaucuugaauacucugcccu

SEQ ID NO: 1781652 - RNA, 19 nt, Human
uaagacagucccaucaaaa

SEQ ID NO: 1781653 - RNA, 13 nt, Human
uaagaauaauuua

SEQ ID NO: 1781654 - RNA, 15 nt, Human
uaagaauaauuuaua

SEQ ID NO: 1781655 - RNA, 11 nt, Human
uaacuguuuca

SEQ ID NO: 1781656 - RNA, 17 nt, Human
uaacuguuucaaagcca

SEQ ID NO: 1781657 - RNA, 20 nt, Human
uaacgauaaaagacagugaa

SEQ ID NO: 1781658 - RNA, 15 nt, Human
accaccacacccagc

SEQ ID NO: 1781659 - RNA, 20 nt, Human
accaccacacccagcccacu

SEQ ID NO: 1781660 - RNA, 18 nt, Human
accacaugugcacaugca

SEQ ID NO: 1781661 - RNA, 17 nt, Human
accacaucuugcucugc

SEQ ID NO: 1781662 - RNA, 18 nt, Human
accacaucuugcucugcu

SEQ ID NO: 1781663 - RNA, 19 nt, Human
accacaucuugcucugcug

SEQ ID NO: 1781664 - RNA, 13 nt, Human
ucacccccuucuc

SEQ ID NO: 1781665 - RNA, 16 nt, Human
ucacccccuucuccau

SEQ ID NO: 1781666 - RNA, 22 nt, Human
ucacccccuucuccauccacau

SEQ ID NO: 1781667 - RNA, 18 nt, Human
ucacccccuucuccaucc

SEQ ID NO: 1781668 - RNA, 23 nt, Human
ucaccauuuggcaaugccaucau

SEQ ID NO: 1781669 - RNA, 17 nt, Human
ucaccauuugauuaugu

SEQ ID NO: 1781670 - RNA, 22 nt, Human
ucaccauuugauuauguagcaa

SEQ ID NO: 1781671 - RNA, 15 nt, Human
ucacccccuccuuca

SEQ ID NO: 1781672 - RNA, 21 nt, Human
ucacaacgugcauugugcuuc

SEQ ID NO: 1781673 - RNA, 20 nt, Human
ucacaacgugcauugugcuu

SEQ ID NO: 1781674 - RNA, 19 nt, Human
ucacaacgugcauugugcu

SEQ ID NO: 1781675 - RNA, 18 nt, Human
ucacaacgugcauugugc

SEQ ID NO: 1781676 - RNA, 17 nt, Human
ucacaacgugcauugug

SEQ ID NO: 1781677 - RNA, 16 nt, Human
ucacaacgugcauugu

SEQ ID NO: 1781678 - RNA, 16 nt, Human
ucaauucuugccaaau

SEQ ID NO: 1781679 - RNA, 16 nt, Human
ucaauugcaucuccca

SEQ ID NO: 1781680 - RNA, 17 nt, Human
ucaauugcaucucccag

SEQ ID NO: 1781681 - RNA, 18 nt, Human
ucaauugcaucucccaga

SEQ ID NO: 1781682 - RNA, 22 nt, Human
ucaauugcaucucccagauaau

SEQ ID NO: 1781683 - RNA, 13 nt, Human
ucaauuuaugaau

SEQ ID NO: 1781684 - RNA, 10 nt, Human
accagcugca

SEQ ID NO: 1781685 - RNA, 11 nt, Human
accagcugcaa

SEQ ID NO: 1781686 - RNA, 12 nt, Human
accagcugcaaa

SEQ ID NO: 1781687 - RNA, 13 nt, Human
accagcugcaaag

SEQ ID NO: 1781688 - RNA, 14 nt, Human
accagcugcaaagu

SEQ ID NO: 1781689 - RNA, 15 nt, Human
accagcugcaaagug

SEQ ID NO: 1781690 - RNA, 16 nt, Human
accagcugcaaagugu

SEQ ID NO: 1781691 - RNA, 17 nt, Human
accagcugcaaaguguu

SEQ ID NO: 1781692 - RNA, 18 nt, Human
accagcugcaaaguguuu

SEQ ID NO: 1781693 - RNA, 19 nt, Human
accagcugcaaaguguuuu

SEQ ID NO: 1781694 - RNA, 20 nt, Human
accagcugcaaaguguuuug

SEQ ID NO: 1781695 - RNA, 22 nt, Human
accagcugcaaaguguuuugua

SEQ ID NO: 1781696 - RNA, 17 nt, Human
accagcuuaaaggcagu

SEQ ID NO: 1781697 - RNA, 17 nt, Human
ucacgugcagcucaagg

SEQ ID NO: 1781698 - RNA, 20 nt, Human
ucacguuaccuugacacaua

SEQ ID NO: 1781699 - RNA, 17 nt, Human
ucacguuagaggaaaaa

SEQ ID NO: 1781700 - RNA, 18 nt, Human
ucacguuagaggaaaaau

SEQ ID NO: 1781701 - RNA, 13 nt, Human
ucacuacaacuga

SEQ ID NO: 1781702 - RNA, 23 nt, Human
ucacguuuuguuuugugccaacc

SEQ ID NO: 1781703 - RNA, 14 nt, Human
ucaccugugcuucg

SEQ ID NO: 1781704 - RNA, 12 nt, Human
accagucccugu

SEQ ID NO: 1781705 - RNA, 13 nt, Human
accagucccuguc

SEQ ID NO: 1781706 - RNA, 13 nt, Human
accagugaauuuu

SEQ ID NO: 1781707 - RNA, 16 nt, Human
accaguauuuuugcug

SEQ ID NO: 1781708 - RNA, 18 nt, Human
accaguauuuuugcugcu

SEQ ID NO: 1781709 - RNA, 21 nt, Human
accaguauuuuugcugcuucu

SEQ ID NO: 1781710 - RNA, 23 nt, Human
accaguauuuuugcugcuucuga

SEQ ID NO: 1781711 - RNA, 17 nt, Human
ucacuauguugcccagg

SEQ ID NO: 1781712 - RNA, 14 nt, Human
ucacugcagccuca

SEQ ID NO: 1781713 - RNA, 15 nt, Human
ucacugcagccucaa

SEQ ID NO: 1781714 - RNA, 16 nt, Human
ucacugugagcuccca

SEQ ID NO: 1781715 - RNA, 23 nt, Human
ucacuguugcccaggcuggcgug

SEQ ID NO: 1781716 - RNA, 14 nt, Human
accaaaagacacug

SEQ ID NO: 1781717 - RNA, 12 nt, Human
ucaauauugaau

SEQ ID NO: 1781718 - RNA, 15 nt, Human
ucaauauugaauuuu

SEQ ID NO: 1781719 - RNA, 19 nt, Human
ucaauauugaauuuuuccu

SEQ ID NO: 1781720 - RNA, 22 nt, Human
ucaauauugaauuuuuccuaug

SEQ ID NO: 1781721 - RNA, 22 nt, Human
ucaauauaauguuuuuaauauu

SEQ ID NO: 1781722 - RNA, 22 nt, Human
ucaaguccucuuuucugagagg

SEQ ID NO: 1781723 - RNA, 16 nt, Human
ucaacuuuuuauugcc

SEQ ID NO: 1781724 - RNA, 17 nt, Human
ucaacuuuuuauugccu

SEQ ID NO: 1781725 - RNA, 18 nt, Human
ucaacuuuuuauugccuu

SEQ ID NO: 1781726 - RNA, 19 nt, Human
ucaacuuuuuauugccuuc

SEQ ID NO: 1781727 - RNA, 20 nt, Human
ucaacuuuuuauugccuucu

SEQ ID NO: 1781728 - RNA, 21 nt, Human
ucaacuuuuuauugccuucuc

SEQ ID NO: 1781729 - RNA, 22 nt, Human
ucaacuuuuuauugccuucuca

SEQ ID NO: 1781730 - RNA, 23 nt, Human
ucaacuuuuuauugccuucucac

SEQ ID NO: 1781731 - RNA, 12 nt, Human
ucaacuuugaau

SEQ ID NO: 1781732 - RNA, 14 nt, Human
ucaacuuugaauaa

SEQ ID NO: 1781733 - RNA, 15 nt, Human
ucaacuuugaauaaa

SEQ ID NO: 1781734 - RNA, 16 nt, Human
ucaacuuugaauaaag

SEQ ID NO: 1781735 - RNA, 18 nt, Human
ucaacuuugaauaaagaa

SEQ ID NO: 1781736 - RNA, 14 nt, Human
acauggguuuaguu

SEQ ID NO: 1781737 - RNA, 23 nt, Human
acaugggagccgggucugccucu

SEQ ID NO: 1781738 - RNA, 20 nt, Human
acaugggagccgggucugcc

SEQ ID NO: 1781739 - RNA, 18 nt, Human
acaugucaguaccuucaa

SEQ ID NO: 1781740 - RNA, 19 nt, Human
acaugucaguaccuucaaa

SEQ ID NO: 1781741 - RNA, 21 nt, Human
acaugucaguaccuucaaacu

SEQ ID NO: 1781742 - RNA, 17 nt, Human
acauguaggaaguagga

SEQ ID NO: 1781743 - RNA, 22 nt, Human
acauucuagaugcaagucucuu

SEQ ID NO: 1781744 - RNA, 11 nt, Human
acauuccuucu

SEQ ID NO: 1781745 - RNA, 23 nt, Human
acauuccuucucccaucucuucc

SEQ ID NO: 1781746 - RNA, 19 nt, Human
acauucucgcuucccugaa

SEQ ID NO: 1781747 - RNA, 20 nt, Human
ucaaccccaccauaugaauu

SEQ ID NO: 1781748 - RNA, 22 nt, Human
ucaaccccaccauaugaauugu

SEQ ID NO: 1781749 - RNA, 18 nt, Human
ucaaauuuauuuuuuucu

SEQ ID NO: 1781750 - RNA, 15 nt, Human
ucaacaaaaauuguc

SEQ ID NO: 1781751 - RNA, 18 nt, Human
ucaacaaaaauugucccu

SEQ ID NO: 1781752 - RNA, 13 nt, Human
acccucgccggac

SEQ ID NO: 1781753 - RNA, 18 nt, Human
acccucgccggacccucu

SEQ ID NO: 1781754 - RNA, 14 nt, Human
acccggggcccagg

SEQ ID NO: 1781755 - RNA, 15 nt, Human
acccggggcccaggg

SEQ ID NO: 1781756 - RNA, 22 nt, Human
acccggggcccagggcaagcuc

SEQ ID NO: 1781757 - RNA, 15 nt, Human
acccucuaaccucgc

SEQ ID NO: 1781758 - RNA, 22 nt, Human
acccucuaaccucgcccucucc

SEQ ID NO: 1781759 - RNA, 23 nt, Human
acccucuaaccucgcccucuccu

SEQ ID NO: 1781760 - RNA, 18 nt, Human
acccuucuggaaacugug

SEQ ID NO: 1781761 - RNA, 11 nt, Human
acccugccucc

SEQ ID NO: 1781762 - RNA, 14 nt, Human
acccugccucccuu

SEQ ID NO: 1781763 - RNA, 20 nt, Human
acccugccucccuugacuuu

SEQ ID NO: 1781764 - RNA, 14 nt, Human
ucagcuccagcuca

SEQ ID NO: 1781765 - RNA, 15 nt, Human
ucagcuccagcucac

SEQ ID NO: 1781766 - RNA, 21 nt, Human
ucagcuuguaaauagcucagg

SEQ ID NO: 1781767 - RNA, 22 nt, Human
ucagcuuguaaauagcucaggu

SEQ ID NO: 1781768 - RNA, 16 nt, Human
ucaggguuggccccug

SEQ ID NO: 1781769 - RNA, 17 nt, Human
ucaggguuggccccugc

SEQ ID NO: 1781770 - RNA, 23 nt, Human
ucagguaacaggcagauacagga

SEQ ID NO: 1781771 - RNA, 21 nt, Human
ucagguaacaggcagauacag

SEQ ID NO: 1781772 - RNA, 22 nt, Human
ucagguaacaggcagauacagg

SEQ ID NO: 1781773 - RNA, 14 nt, Human
acccggccccugcu

SEQ ID NO: 1781774 - RNA, 15 nt, Human
acccggccccugcug

SEQ ID NO: 1781775 - RNA, 16 nt, Human
acccggccccugcugg

SEQ ID NO: 1781776 - RNA, 22 nt, Human
acccggccccugcugguucagg

SEQ ID NO: 1781777 - RNA, 17 nt, Human
acccggccccugcuggu

SEQ ID NO: 1781778 - RNA, 20 nt, Human
acccggccccugcugguuca

SEQ ID NO: 1781779 - RNA, 22 nt, Human
acccgggaaccuccccagccug

SEQ ID NO: 1781780 - RNA, 23 nt, Human
acccgggaaccuccccagccugc

SEQ ID NO: 1781781 - RNA, 12 nt, Human
ucagcuccagcu

SEQ ID NO: 1781782 - RNA, 19 nt, Human
ucagcggggacagcuccuu

SEQ ID NO: 1781783 - RNA, 20 nt, Human
ucagcggggacagcuccuuc

SEQ ID NO: 1781784 - RNA, 21 nt, Human
ucagcggggacagcuccuucu

SEQ ID NO: 1781785 - RNA, 23 nt, Human
ucagcggggacagcuccuucugu

SEQ ID NO: 1781786 - RNA, 20 nt, Human
acccccucuucugagcacag

SEQ ID NO: 1781787 - RNA, 21 nt, Human
acccccucuucugagcacaga

SEQ ID NO: 1781788 - RNA, 12 nt, Human
accccuggaaga

SEQ ID NO: 1781789 - RNA, 18 nt, Human
accccuggaagagcccag

SEQ ID NO: 1781790 - RNA, 19 nt, Human
accccuggaagagcccagu

SEQ ID NO: 1781791 - RNA, 23 nt, Human
accccuggaagagcccagucugu

SEQ ID NO: 1781792 - RNA, 19 nt, Human
acccaggagccccgaggcc

SEQ ID NO: 1781793 - RNA, 23 nt, Human
acccaggagccccgaggccuucu

SEQ ID NO: 1781794 - RNA, 19 nt, Human
accccaccauaugaauugu

SEQ ID NO: 1781795 - RNA, 22 nt, Human
accccagcauucucaggcacca

SEQ ID NO: 1781796 - RNA, 23 nt, Human
accccagcauucucaggcaccag

SEQ ID NO: 1781797 - RNA, 22 nt, Human
accaguguuagggaagggccug

SEQ ID NO: 1781798 - RNA, 17 nt, Human
ucagccaauuauguuaa

SEQ ID NO: 1781799 - RNA, 15 nt, Human
ucagccaauuauguu

SEQ ID NO: 1781800 - RNA, 13 nt, Human
ucagccaauuaug

SEQ ID NO: 1781801 - RNA, 18 nt, Human
ucagccaauuauguuaaa

SEQ ID NO: 1781802 - RNA, 21 nt, Human
ucagccacuaagaaccccucu

SEQ ID NO: 1781803 - RNA, 13 nt, Human
ucauguuuuaaca

SEQ ID NO: 1781804 - RNA, 15 nt, Human
ucauccaucaucaug

SEQ ID NO: 1781805 - RNA, 16 nt, Human
ucauccaucaucaugu

SEQ ID NO: 1781806 - RNA, 17 nt, Human
ucauccaucaucaugug

SEQ ID NO: 1781807 - RNA, 11 nt, Human
ucauccaucau

SEQ ID NO: 1781808 - RNA, 12 nt, Human
ucauccaucauc

SEQ ID NO: 1781809 - RNA, 14 nt, Human
ucauccaucaucau

SEQ ID NO: 1781810 - RNA, 13 nt, Human
accuccagccuga

SEQ ID NO: 1781811 - RNA, 14 nt, Human
ucaugaaauaugca

SEQ ID NO: 1781812 - RNA, 15 nt, Human
ucaugaaauaugcau

SEQ ID NO: 1781813 - RNA, 16 nt, Human
accucccacacuccca

SEQ ID NO: 1781814 - RNA, 16 nt, Human
accuccacauccucca

SEQ ID NO: 1781815 - RNA, 14 nt, Human
accuccacauccuc

SEQ ID NO: 1781816 - RNA, 11 nt, Human
accuccucugu

SEQ ID NO: 1781817 - RNA, 12 nt, Human
accuccucugug

SEQ ID NO: 1781818 - RNA, 13 nt, Human
accuccucuguga

SEQ ID NO: 1781819 - RNA, 14 nt, Human
accuccucugugaa

SEQ ID NO: 1781820 - RNA, 18 nt, Human
accuccucugugaagcau

SEQ ID NO: 1781821 - RNA, 13 nt, Human
accuccugagaaa

SEQ ID NO: 1781822 - RNA, 13 nt, Human
accuaccucccac

SEQ ID NO: 1781823 - RNA, 12 nt, Human
ucagugccacua

SEQ ID NO: 1781824 - RNA, 12 nt, Human
ucaguggcagcu

SEQ ID NO: 1781825 - RNA, 13 nt, Human
ucaguggcagcug

SEQ ID NO: 1781826 - RNA, 11 nt, Human
ucaguggcagc

SEQ ID NO: 1781827 - RNA, 15 nt, Human
ucaguuuuugugaaa

SEQ ID NO: 1781828 - RNA, 14 nt, Human
ucaguggggcaguc

SEQ ID NO: 1781829 - RNA, 17 nt, Human
ucaguuuuugugaaaag

SEQ ID NO: 1781830 - RNA, 14 nt, Human
ucauaaccuagccu

SEQ ID NO: 1781831 - RNA, 21 nt, Human
ucauaacggaucagaaauaca

SEQ ID NO: 1781832 - RNA, 19 nt, Human
ucauaacggaucagaaaua

SEQ ID NO: 1781833 - RNA, 18 nt, Human
ucauaacggaucagaaau

SEQ ID NO: 1781834 - RNA, 16 nt, Human
ucauaacggaucagaa

SEQ ID NO: 1781835 - RNA, 14 nt, Human
ucauaacggaucag

SEQ ID NO: 1781836 - RNA, 15 nt, Human
ucauaguaugguggc

SEQ ID NO: 1781837 - RNA, 23 nt, Human
ucauaacggaucagaaauacaga

SEQ ID NO: 1781838 - RNA, 22 nt, Human
ucauaacggaucagaaauacag

SEQ ID NO: 1781839 - RNA, 18 nt, Human
ucauaguaugguggcugg

SEQ ID NO: 1781840 - RNA, 19 nt, Human
ucauaguaugguggcuggg

SEQ ID NO: 1781841 - RNA, 21 nt, Human
ucauaguaugguggcuggguu

SEQ ID NO: 1781842 - RNA, 16 nt, Human
ucauaugaaaggugcc

SEQ ID NO: 1781843 - RNA, 20 nt, Human
ucauaugaaaggugccaugg

SEQ ID NO: 1781844 - RNA, 21 nt, Human
ucauaugaaaggugccaugga

SEQ ID NO: 1781845 - RNA, 19 nt, Human
uccagacauucucgcuucc

SEQ ID NO: 1781846 - RNA, 18 nt, Human
accuuuuuuuuuuuucca

SEQ ID NO: 1781847 - RNA, 19 nt, Human
accuuuuuuuuuuuuccaa

SEQ ID NO: 1781848 - RNA, 10 nt, Human
uccaggcucc

SEQ ID NO: 1781849 - RNA, 16 nt, Human
uccaggagcuucuugu

SEQ ID NO: 1781850 - RNA, 23 nt, Human
uccaggagcuucuuguuuccuug

SEQ ID NO: 1781851 - RNA, 12 nt, Human
uccaggcuccuu

SEQ ID NO: 1781852 - RNA, 22 nt, Human
uccaggcuccuuuagcgcccag

SEQ ID NO: 1781853 - RNA, 16 nt, Human
accuuuguuuuuuguu

SEQ ID NO: 1781854 - RNA, 20 nt, Human
accuugaacuggguacuugu

SEQ ID NO: 1781855 - RNA, 14 nt, Human
ucauguuuuaacaa

SEQ ID NO: 1781856 - RNA, 15 nt, Human
ucauguuuuaacaaa

SEQ ID NO: 1781857 - RNA, 21 nt, Human
uccacugugccaugugccagg

SEQ ID NO: 1781858 - RNA, 20 nt, Human
acgcgugcacacaccagagc

SEQ ID NO: 1781859 - RNA, 18 nt, Human
acgccugggggugccagg

SEQ ID NO: 1781860 - RNA, 22 nt, Human
acgccugcaaacgcugccugcc

SEQ ID NO: 1781861 - RNA, 23 nt, Human
acgccugcaaacgcugccugccc

SEQ ID NO: 1781862 - RNA, 19 nt, Human
acgaauuucugugcccucc

SEQ ID NO: 1781863 - RNA, 21 nt, Human
acgaauuucugugcccuccug

SEQ ID NO: 1781864 - RNA, 18 nt, Human
acgccucuucugucccug

SEQ ID NO: 1781865 - RNA, 23 nt, Human
acgccucuucugucccuguuaga

SEQ ID NO: 1781866 - RNA, 22 nt, Human
acgaauuucugugcccuccuga

SEQ ID NO: 1781867 - RNA, 13 nt, Human
acgccugaggaac

SEQ ID NO: 1781868 - RNA, 21 nt, Human
acgccugaggaacccuuacag

SEQ ID NO: 1781869 - RNA, 14 nt, Human
acgccugcaaacgc

SEQ ID NO: 1781870 - RNA, 17 nt, Human
acgccugcaaacgcugc

SEQ ID NO: 1781871 - RNA, 18 nt, Human
acgccugcaaacgcugcc

SEQ ID NO: 1781872 - RNA, 19 nt, Human
acgccugcaaacgcugccu

SEQ ID NO: 1781873 - RNA, 20 nt, Human
acgccugcaaacgcugccug

SEQ ID NO: 1781874 - RNA, 21 nt, Human
acgccugcaaacgcugccugc

SEQ ID NO: 1781875 - RNA, 23 nt, Human
acggagucccaccuuggcugcag

SEQ ID NO: 1781876 - RNA, 16 nt, Human
acggaucagaaauaca

SEQ ID NO: 1781877 - RNA, 17 nt, Human
acggaucagaaauacag

SEQ ID NO: 1781878 - RNA, 17 nt, Human
acgcuggagugcaguga

SEQ ID NO: 1781879 - RNA, 18 nt, Human
acgcuggagugcagugag

SEQ ID NO: 1781880 - RNA, 20 nt, Human
acgcuggaccuugaacuggg

SEQ ID NO: 1781881 - RNA, 23 nt, Human
acgcuggaccuugaacuggguac

SEQ ID NO: 1781882 - RNA, 15 nt, Human
acgcuggagugcagu

SEQ ID NO: 1781883 - RNA, 16 nt, Human
acgcuggagugcagug

SEQ ID NO: 1781884 - RNA, 13 nt, Human
acgcuggaccuug

SEQ ID NO: 1781885 - RNA, 13 nt, Human
acgcuccuuugug

SEQ ID NO: 1781886 - RNA, 21 nt, Human
acgcuccuuuguguguguguc

SEQ ID NO: 1781887 - RNA, 22 nt, Human
acgcuccuuuguguguguguca

SEQ ID NO: 1781888 - RNA, 18 nt, Human
uccagugccaacaauccu

SEQ ID NO: 1781889 - RNA, 19 nt, Human
uccagugccaacaauccua

SEQ ID NO: 1781890 - RNA, 22 nt, Human
acggcuccacuaggacuucaaa

SEQ ID NO: 1781891 - RNA, 13 nt, Human
acggccaggccag

SEQ ID NO: 1781892 - RNA, 16 nt, Human
acggcucacugcagcc

SEQ ID NO: 1781893 - RNA, 17 nt, Human
acggcucacugcagccu

SEQ ID NO: 1781894 - RNA, 18 nt, Human
acggcucacugcagccuc

SEQ ID NO: 1781895 - RNA, 12 nt, Human
acggccaggcca

SEQ ID NO: 1781896 - RNA, 22 nt, Human
acuagacugguggcaggggcuu

SEQ ID NO: 1781897 - RNA, 21 nt, Human
acuacugccuuuagaaaauau

SEQ ID NO: 1781898 - RNA, 22 nt, Human
acuacugccuuuagaaaauaua

SEQ ID NO: 1781899 - RNA, 15 nt, Human
ucccagccucagcgc

SEQ ID NO: 1781900 - RNA, 20 nt, Human
acuauagccuaggugacaga

SEQ ID NO: 1781901 - RNA, 22 nt, Human
acuauagccuaggugacagagu

SEQ ID NO: 1781902 - RNA, 15 nt, Human
acuauagguccagaa

SEQ ID NO: 1781903 - RNA, 15 nt, Human
acuauauuuugucau

SEQ ID NO: 1781904 - RNA, 16 nt, Human
acuauauuuugucaua

SEQ ID NO: 1781905 - RNA, 16 nt, Human
acuaugccugugucuu

SEQ ID NO: 1781906 - RNA, 17 nt, Human
acuauguugcccaggca

SEQ ID NO: 1781907 - RNA, 15 nt, Human
acuauguugcccagg

SEQ ID NO: 1781908 - RNA, 16 nt, Human
acuauguugcccaggc

SEQ ID NO: 1781909 - RNA, 14 nt, Human
acuauguugcccag

SEQ ID NO: 1781910 - RNA, 15 nt, Human
acuaugcuuuccuuc

SEQ ID NO: 1781911 - RNA, 18 nt, Human
acuaugccugugucuucu

SEQ ID NO: 1781912 - RNA, 19 nt, Human
acuaugccugugucuucuc

SEQ ID NO: 1781913 - RNA, 16 nt, Human
acucaaugcacugaca

SEQ ID NO: 1781914 - RNA, 16 nt, Human
acguguuugugcugug

SEQ ID NO: 1781915 - RNA, 17 nt, Human
acguuaccuugacacau

SEQ ID NO: 1781916 - RNA, 22 nt, Human
acguuagucgugagcucuugug

SEQ ID NO: 1781917 - RNA, 21 nt, Human
acguuagucgugagcucuugu

SEQ ID NO: 1781918 - RNA, 16 nt, Human
acguuagucgugagcu

SEQ ID NO: 1781919 - RNA, 19 nt, Human
uccaguuaaaaaaaauuuu

SEQ ID NO: 1781920 - RNA, 21 nt, Human
uccaguuaaaaaaaauuuuaa

SEQ ID NO: 1781921 - RNA, 16 nt, Human
ucccagaggcugcccc

SEQ ID NO: 1781922 - RNA, 17 nt, Human
ucccagaggcugcccca

SEQ ID NO: 1781923 - RNA, 19 nt, Human
ucccagagcugguggaccc

SEQ ID NO: 1781924 - RNA, 21 nt, Human
ucccagagcugguggacccag

SEQ ID NO: 1781925 - RNA, 22 nt, Human
ucccagagcugguggacccagg

SEQ ID NO: 1781926 - RNA, 16 nt, Human
ucccagauaaugugaa

SEQ ID NO: 1781927 - RNA, 20 nt, Human
acguuagaggaaaaauauuu

SEQ ID NO: 1781928 - RNA, 17 nt, Human
acuaaagcaguagaaau

SEQ ID NO: 1781929 - RNA, 15 nt, Human
acuaauuuuaaaaug

SEQ ID NO: 1781930 - RNA, 14 nt, Human
uccugccugucugc

SEQ ID NO: 1781931 - RNA, 16 nt, Human
uccugccugucugccc

SEQ ID NO: 1781932 - RNA, 17 nt, Human
uccugccugucugcccc

SEQ ID NO: 1781933 - RNA, 19 nt, Human
uccugccugucugccccag

SEQ ID NO: 1781934 - RNA, 20 nt, Human
uccugccugucugccccagc

SEQ ID NO: 1781935 - RNA, 14 nt, Human
uccugccuuccucc

SEQ ID NO: 1781936 - RNA, 16 nt, Human
uccugccuuccuccug

SEQ ID NO: 1781937 - RNA, 19 nt, Human
uccugccuuccuccugggc

SEQ ID NO: 1781938 - RNA, 22 nt, Human
uccugccuuccuccugggcccu

SEQ ID NO: 1781939 - RNA, 23 nt, Human
uccugccuuccuccugggcccuc

SEQ ID NO: 1781940 - RNA, 12 nt, Human
uccugggaguga

SEQ ID NO: 1781941 - RNA, 14 nt, Human
uccugggagugagc

SEQ ID NO: 1781942 - RNA, 17 nt, Human
uccugggagugagcugg

SEQ ID NO: 1781943 - RNA, 14 nt, Human
uccugggaaauauu

SEQ ID NO: 1781944 - RNA, 16 nt, Human
uccugggaaauauucc

SEQ ID NO: 1781945 - RNA, 20 nt, Human
uccugggaaauauucccuag

SEQ ID NO: 1781946 - RNA, 21 nt, Human
uccugggaaauauucccuaga

SEQ ID NO: 1781947 - RNA, 15 nt, Human
uccugcuuuggcagu

SEQ ID NO: 1781948 - RNA, 21 nt, Human
acugcacuauagccuagguga

SEQ ID NO: 1781949 - RNA, 15 nt, Human
uccugaucagagccg

SEQ ID NO: 1781950 - RNA, 14 nt, Human
uccugaucagagcc

SEQ ID NO: 1781951 - RNA, 16 nt, Human
acugcaccgggccaca

SEQ ID NO: 1781952 - RNA, 20 nt, Human
acugcacuauagccuaggug

SEQ ID NO: 1781953 - RNA, 14 nt, Human
acugcaccgggcca

SEQ ID NO: 1781954 - RNA, 11 nt, Human
acucuuucaaa

SEQ ID NO: 1781955 - RNA, 13 nt, Human
acucuuucaaaac

SEQ ID NO: 1781956 - RNA, 16 nt, Human
uccugaaacuauauuu

SEQ ID NO: 1781957 - RNA, 21 nt, Human
uccugaaacuauauuuuguca

SEQ ID NO: 1781958 - RNA, 23 nt, Human
uccugaaacuauauuuugucaua

SEQ ID NO: 1781959 - RNA, 16 nt, Human
uccugaaacgcuccuu

SEQ ID NO: 1781960 - RNA, 17 nt, Human
uccugaaacgcuccuuu

SEQ ID NO: 1781961 - RNA, 21 nt, Human
uccugaaacgcuccuuugugu

SEQ ID NO: 1781962 - RNA, 22 nt, Human
uccugaaacgcuccuuugugug

SEQ ID NO: 1781963 - RNA, 14 nt, Human
uccugaaacuauau

SEQ ID NO: 1781964 - RNA, 14 nt, Human
acugagcacccucu

SEQ ID NO: 1781965 - RNA, 21 nt, Human
acugagcacccucuggauucu

SEQ ID NO: 1781966 - RNA, 19 nt, Human
acugagauaccagcgagga

SEQ ID NO: 1781967 - RNA, 18 nt, Human
acugagauaccagcgagg

SEQ ID NO: 1781968 - RNA, 17 nt, Human
acugaccugguccacag

SEQ ID NO: 1781969 - RNA, 21 nt, Human
acugaccugguccacagggca

SEQ ID NO: 1781970 - RNA, 22 nt, Human
acugaccugguccacagggcac

SEQ ID NO: 1781971 - RNA, 14 nt, Human
acucucuaccagau

SEQ ID NO: 1781972 - RNA, 13 nt, Human
acucugcccucua

SEQ ID NO: 1781973 - RNA, 17 nt, Human
acucugcccucuagagc

SEQ ID NO: 1781974 - RNA, 13 nt, Human
acucugccccccc

SEQ ID NO: 1781975 - RNA, 20 nt, Human
acucugccccccccccccau

SEQ ID NO: 1781976 - RNA, 13 nt, Human
acuccuuccuggc

SEQ ID NO: 1781977 - RNA, 14 nt, Human
acuccuuccuggcc

SEQ ID NO: 1781978 - RNA, 15 nt, Human
acuccuuccuggccu

SEQ ID NO: 1781979 - RNA, 16 nt, Human
acuccuuccuggccug

SEQ ID NO: 1781980 - RNA, 17 nt, Human
acuccuuccuggccuga

SEQ ID NO: 1781981 - RNA, 19 nt, Human
acuccuuccuggccugaga

SEQ ID NO: 1781982 - RNA, 20 nt, Human
acuccuuccuggccugagag

SEQ ID NO: 1781983 - RNA, 23 nt, Human
acuccuuccuggccugagaguca

SEQ ID NO: 1781984 - RNA, 20 nt, Human
uccucccauagauacucucu

SEQ ID NO: 1781985 - RNA, 21 nt, Human
uccucccauagauacucucuu

SEQ ID NO: 1781986 - RNA, 22 nt, Human
uccucauaguaugguggcuggg

SEQ ID NO: 1781987 - RNA, 15 nt, Human
acucuugaccucagg

SEQ ID NO: 1781988 - RNA, 16 nt, Human
acucuugaccucaggu

SEQ ID NO: 1781989 - RNA, 14 nt, Human
acucuugaccucag

SEQ ID NO: 1781990 - RNA, 12 nt, Human
ucccuugggcuc

SEQ ID NO: 1781991 - RNA, 14 nt, Human
ucccuugggcuccc

SEQ ID NO: 1781992 - RNA, 13 nt, Human
uccuacucugugu

SEQ ID NO: 1781993 - RNA, 14 nt, Human
uccuacucuguguc

SEQ ID NO: 1781994 - RNA, 21 nt, Human
uccguagccagcugcucccca

SEQ ID NO: 1781995 - RNA, 15 nt, Human
uccuacucuguguca

SEQ ID NO: 1781996 - RNA, 20 nt, Human
uccguagccagcugcucccc

SEQ ID NO: 1781997 - RNA, 12 nt, Human
acuccuggccuc

SEQ ID NO: 1781998 - RNA, 13 nt, Human
acuccuggccuca

SEQ ID NO: 1781999 - RNA, 14 nt, Human
acuccuggccucaa

SEQ ID NO: 1782000 - RNA, 11 nt, Human
acuccucccau

SEQ ID NO: 1782001 - RNA, 17 nt, Human
acuccugccaaggagga

SEQ ID NO: 1782002 - RNA, 11 nt, Human
acuccuggccu

SEQ ID NO: 1782003 - RNA, 18 nt, Human
acuccaguuaaaaaaaau

SEQ ID NO: 1782004 - RNA, 20 nt, Human
acuccaguuaaaaaaaauuu

SEQ ID NO: 1782005 - RNA, 21 nt, Human
acuccagugccaacaauccua

SEQ ID NO: 1782006 - RNA, 19 nt, Human
ucugcccucuagagccuuc

SEQ ID NO: 1782007 - RNA, 21 nt, Human
ucugccugcccaggccccugc

SEQ ID NO: 1782008 - RNA, 22 nt, Human
ucugccugcccaggccccugcc

SEQ ID NO: 1782009 - RNA, 21 nt, Human
ucugccuggguuuuguucccu

SEQ ID NO: 1782010 - RNA, 19 nt, Human
ucugcucacauaucuguca

SEQ ID NO: 1782011 - RNA, 20 nt, Human
ucugcucacauaucugucau

SEQ ID NO: 1782012 - RNA, 15 nt, Human
ucugcgugucaccug

SEQ ID NO: 1782013 - RNA, 19 nt, Human
ucugcgugucaccugugcu

SEQ ID NO: 1782014 - RNA, 20 nt, Human
ucugcgugucaccugugcuu

SEQ ID NO: 1782015 - RNA, 23 nt, Human
ucugcucaucauucucugucuca

SEQ ID NO: 1782016 - RNA, 14 nt, Human
ucugcuucagccuc

SEQ ID NO: 1782017 - RNA, 15 nt, Human
ucugcuucagccucc

SEQ ID NO: 1782018 - RNA, 13 nt, Human
ucugcuucagccu

SEQ ID NO: 1782019 - RNA, 14 nt, Human
agaacuucauggau

SEQ ID NO: 1782020 - RNA, 13 nt, Human
agaacugugccac

SEQ ID NO: 1782021 - RNA, 16 nt, Human
agaacugugccacaau

SEQ ID NO: 1782022 - RNA, 23 nt, Human
ucuccuuucaccccagggccuga

SEQ ID NO: 1782023 - RNA, 22 nt, Human
agaaagcauuugaaugcauuuu

SEQ ID NO: 1782024 - RNA, 21 nt, Human
agaaagcauuugaaugcauuu

SEQ ID NO: 1782025 - RNA, 20 nt, Human
agaaagcauuugaaugcauu

SEQ ID NO: 1782026 - RNA, 18 nt, Human
agaaagcauuugaaugca

SEQ ID NO: 1782027 - RNA, 17 nt, Human
agaaagcauuugaaugc

SEQ ID NO: 1782028 - RNA, 16 nt, Human
agaaagcauuugaaug

SEQ ID NO: 1782029 - RNA, 15 nt, Human
agaaagcauuugaau

SEQ ID NO: 1782030 - RNA, 13 nt, Human
ucugacacacagc

SEQ ID NO: 1782031 - RNA, 14 nt, Human
ucugacacacagcu

SEQ ID NO: 1782032 - RNA, 15 nt, Human
ucugacacacagcuc

SEQ ID NO: 1782033 - RNA, 13 nt, Human
ucugacucagggc

SEQ ID NO: 1782034 - RNA, 14 nt, Human
ucugacucagggcu

SEQ ID NO: 1782035 - RNA, 15 nt, Human
ucugacucagggcuc

SEQ ID NO: 1782036 - RNA, 20 nt, Human
ucugacucagggcuccuggg

SEQ ID NO: 1782037 - RNA, 22 nt, Human
ucugaaggacauugcggacagc

SEQ ID NO: 1782038 - RNA, 21 nt, Human
ucugaaggacauugcggacag

SEQ ID NO: 1782039 - RNA, 20 nt, Human
ucugaagcugacgaacuucc

SEQ ID NO: 1782040 - RNA, 21 nt, Human
ucugaagcugacgaacuucca

SEQ ID NO: 1782041 - RNA, 20 nt, Human
ucugcagggccgccagggag

SEQ ID NO: 1782042 - RNA, 23 nt, Human
agaaaugguuguauuagauguuc

SEQ ID NO: 1782043 - RNA, 22 nt, Human
agaaaugguuguauuagauguu

SEQ ID NO: 1782044 - RNA, 21 nt, Human
agaaaugguuguauuagaugu

SEQ ID NO: 1782045 - RNA, 20 nt, Human
agaaaugguuguauuagaug

SEQ ID NO: 1782046 - RNA, 19 nt, Human
agaaaugguuguauuagau

SEQ ID NO: 1782047 - RNA, 18 nt, Human
agaaaugguuguauuaga

SEQ ID NO: 1782048 - RNA, 17 nt, Human
agaaaugguuguauuag

SEQ ID NO: 1782049 - RNA, 21 nt, Human
ucugaucccucuacagagcuu

SEQ ID NO: 1782050 - RNA, 17 nt, Human
ucugaucauccacugug

SEQ ID NO: 1782051 - RNA, 16 nt, Human
ucugagugccuucugu

SEQ ID NO: 1782052 - RNA, 19 nt, Human
ucugagugccuucuguggg

SEQ ID NO: 1782053 - RNA, 22 nt, Human
ucugagugccuucuguggggac

SEQ ID NO: 1782054 - RNA, 21 nt, Human
ucugaucauccacugugccau

SEQ ID NO: 1782055 - RNA, 19 nt, Human
agacaccuugacagggcac

SEQ ID NO: 1782056 - RNA, 18 nt, Human
agacaccuugacagggca

SEQ ID NO: 1782057 - RNA, 17 nt, Human
agacaccuugacagggc

SEQ ID NO: 1782058 - RNA, 12 nt, Human
agacacaggccc

SEQ ID NO: 1782059 - RNA, 13 nt, Human
agacacaggcccg

SEQ ID NO: 1782060 - RNA, 16 nt, Human
agacacaggcccggcu

SEQ ID NO: 1782061 - RNA, 13 nt, Human
agacacacacaca

SEQ ID NO: 1782062 - RNA, 15 nt, Human
agaauuuguguugaa

SEQ ID NO: 1782063 - RNA, 19 nt, Human
agaauuuguguugaaggaa

SEQ ID NO: 1782064 - RNA, 21 nt, Human
agaauuuguguugaaggaacu

SEQ ID NO: 1782065 - RNA, 23 nt, Human
agaauuuguguugaaggaacuug

SEQ ID NO: 1782066 - RNA, 18 nt, Human
ucuguugcaagccccucu

SEQ ID NO: 1782067 - RNA, 12 nt, Human
ucuguuggccag

SEQ ID NO: 1782068 - RNA, 17 nt, Human
ucuguuggccaguguga

SEQ ID NO: 1782069 - RNA, 12 nt, Human
agaauacuugaa

SEQ ID NO: 1782070 - RNA, 14 nt, Human
agaauacuugaacu

SEQ ID NO: 1782071 - RNA, 15 nt, Human
agaauacuugaacuu

SEQ ID NO: 1782072 - RNA, 16 nt, Human
agaauacuugaacuug

SEQ ID NO: 1782073 - RNA, 19 nt, Human
ucugcuuguuauuagagau

SEQ ID NO: 1782074 - RNA, 15 nt, Human
agaauuccaaagcaa

SEQ ID NO: 1782075 - RNA, 16 nt, Human
agaauuccaaagcaaa

SEQ ID NO: 1782076 - RNA, 19 nt, Human
ucugggaggaauggacaga

SEQ ID NO: 1782077 - RNA, 23 nt, Human
ucugggaggaauggacagacaga

SEQ ID NO: 1782078 - RNA, 13 nt, Human
ucugggagggcag

SEQ ID NO: 1782079 - RNA, 19 nt, Human
ucugggagggcagcagggc

SEQ ID NO: 1782080 - RNA, 21 nt, Human
ucugggagggcagcagggcua

SEQ ID NO: 1782081 - RNA, 20 nt, Human
agaauccagcaccggcccca

SEQ ID NO: 1782082 - RNA, 14 nt, Human
agaauauucagaca

SEQ ID NO: 1782083 - RNA, 23 nt, Human
agaauauucagacaaaauggaua

SEQ ID NO: 1782084 - RNA, 13 nt, Human
agaauauuucuau

SEQ ID NO: 1782085 - RNA, 16 nt, Human
agaauauuucuauuga

SEQ ID NO: 1782086 - RNA, 17 nt, Human
agaauauuucuauugaa

SEQ ID NO: 1782087 - RNA, 19 nt, Human
agaauauuucuauugaauu

SEQ ID NO: 1782088 - RNA, 17 nt, Human
ucucacuauguugccca

SEQ ID NO: 1782089 - RNA, 19 nt, Human
ucucacuauguugcccagg

SEQ ID NO: 1782090 - RNA, 15 nt, Human
ucuauggguuuaguu

SEQ ID NO: 1782091 - RNA, 21 nt, Human
ucuauggguuuaguuacuuua

SEQ ID NO: 1782092 - RNA, 23 nt, Human
ucuaugggacucaaugcacugac

SEQ ID NO: 1782093 - RNA, 15 nt, Human
acuucccgggccagg

SEQ ID NO: 1782094 - RNA, 18 nt, Human
acuucccgggccagggcu

SEQ ID NO: 1782095 - RNA, 19 nt, Human
acuucccgggccagggcug

SEQ ID NO: 1782096 - RNA, 20 nt, Human
acuucccgggccagggcugc

SEQ ID NO: 1782097 - RNA, 15 nt, Human
acuucaucaaacaug

SEQ ID NO: 1782098 - RNA, 20 nt, Human
acuucaucaaacauggguuu

SEQ ID NO: 1782099 - RNA, 15 nt, Human
ucuagauacaauaaa

SEQ ID NO: 1782100 - RNA, 16 nt, Human
ucuagauacaauaaau

SEQ ID NO: 1782101 - RNA, 20 nt, Human
ucuagauacaauaaauugcu

SEQ ID NO: 1782102 - RNA, 17 nt, Human
ucuagagcuuagcauau

SEQ ID NO: 1782103 - RNA, 12 nt, Human
ucuagagccuuc

SEQ ID NO: 1782104 - RNA, 13 nt, Human
ucuagagccuuca

SEQ ID NO: 1782105 - RNA, 18 nt, Human
ucuagagccuucagccuu

SEQ ID NO: 1782106 - RNA, 19 nt, Human
ucuacccagcgagcccugg

SEQ ID NO: 1782107 - RNA, 21 nt, Human
ucuacagaggccaugggccuc

SEQ ID NO: 1782108 - RNA, 11 nt, Human
ucuaauaaacu

SEQ ID NO: 1782109 - RNA, 16 nt, Human
ucuaauaaacuuggau

SEQ ID NO: 1782110 - RNA, 22 nt, Human
ucuaauaaacuuggauucucua

SEQ ID NO: 1782111 - RNA, 18 nt, Human
uccugggagugagcuggu

SEQ ID NO: 1782112 - RNA, 20 nt, Human
ucuacccagcgagcccuggu

SEQ ID NO: 1782113 - RNA, 16 nt, Human
ucuacccagggccugc

SEQ ID NO: 1782114 - RNA, 13 nt, Human
ucuacccagggcc

SEQ ID NO: 1782115 - RNA, 18 nt, Human
acuguucccccugugcag

SEQ ID NO: 1782116 - RNA, 13 nt, Human
acuguucuugaau

SEQ ID NO: 1782117 - RNA, 19 nt, Human
ucuacagccuugucccccu

SEQ ID NO: 1782118 - RNA, 15 nt, Human
acuguucccccugug

SEQ ID NO: 1782119 - RNA, 16 nt, Human
acuguucccccugugc

SEQ ID NO: 1782120 - RNA, 12 nt, Human
acuuaacuguuu

SEQ ID NO: 1782121 - RNA, 14 nt, Human
acuuaacuguuuca

SEQ ID NO: 1782122 - RNA, 16 nt, Human
acuuaacuguuucaaa

SEQ ID NO: 1782123 - RNA, 15 nt, Human
acuuaguagauuaaa

SEQ ID NO: 1782124 - RNA, 17 nt, Human
acuuaguagauuaaaaa

SEQ ID NO: 1782125 - RNA, 20 nt, Human
acuuaguagauuaaaaauua

SEQ ID NO: 1782126 - RNA, 17 nt, Human
acuuaggguuuggagcu

SEQ ID NO: 1782127 - RNA, 17 nt, Human
acuuaugaaugauuugc

SEQ ID NO: 1782128 - RNA, 20 nt, Human
acuuaugaaugauuugcaua

SEQ ID NO: 1782129 - RNA, 12 nt, Human
acuuugaauaaa

SEQ ID NO: 1782130 - RNA, 14 nt, Human
acuuugaauaaaga

SEQ ID NO: 1782131 - RNA, 15 nt, Human
acuuugaauaaagaa

SEQ ID NO: 1782132 - RNA, 18 nt, Human
acuuugaauaaagaauac

SEQ ID NO: 1782133 - RNA, 19 nt, Human
acuuugaauaaagaauacu

SEQ ID NO: 1782134 - RNA, 20 nt, Human
acuuugaauaaagaauacuu

SEQ ID NO: 1782135 - RNA, 21 nt, Human
acuuugaauaaagaauacuug

SEQ ID NO: 1782136 - RNA, 22 nt, Human
acuuugaauaaagaauacuuga

SEQ ID NO: 1782137 - RNA, 23 nt, Human
acuuugaauaaagaauacuugaa

SEQ ID NO: 1782138 - RNA, 16 nt, Human
ucuccuccaugggaga

SEQ ID NO: 1782139 - RNA, 23 nt, Human
ucuccccagcaagugagagcugg

SEQ ID NO: 1782140 - RNA, 12 nt, Human
ucuccacccugc

SEQ ID NO: 1782141 - RNA, 17 nt, Human
ucuccgaccagacaccu

SEQ ID NO: 1782142 - RNA, 23 nt, Human
ucuccgaccagacaccuugacag

SEQ ID NO: 1782143 - RNA, 18 nt, Human
agaaaaaauaacacacau

SEQ ID NO: 1782144 - RNA, 23 nt, Human
ucucaggccggcagccccagccu

SEQ ID NO: 1782145 - RNA, 20 nt, Human
ucucauuggacccuuccaug

SEQ ID NO: 1782146 - RNA, 20 nt, Human
ucucaggccggcagccccag

SEQ ID NO: 1782147 - RNA, 16 nt, Human
ucucauuugucacaca

SEQ ID NO: 1782148 - RNA, 19 nt, Human
ucuccaaaaaucugccugg

SEQ ID NO: 1782149 - RNA, 20 nt, Human
ucuccaaaaaucugccuggg

SEQ ID NO: 1782150 - RNA, 21 nt, Human
ucuccaaaaaucugccugggu

SEQ ID NO: 1782151 - RNA, 22 nt, Human
ucuccaaaaaucugccuggguu

SEQ ID NO: 1782152 - RNA, 14 nt, Human
ucucauuugucaca

SEQ ID NO: 1782153 - RNA, 16 nt, Human
ucucaggagucucugg

SEQ ID NO: 1782154 - RNA, 13 nt, Human
ucucaggcaccag

SEQ ID NO: 1782155 - RNA, 23 nt, Human
ucucaggaccaaagcuuucaugu

SEQ ID NO: 1782156 - RNA, 20 nt, Human
ucucaggcaccagucccugu

SEQ ID NO: 1782157 - RNA, 13 nt, Human
acuugcugcuguc

SEQ ID NO: 1782158 - RNA, 15 nt, Human
acuugcugcugucuu

SEQ ID NO: 1782159 - RNA, 20 nt, Human
acuugcugcugucuuguugc

SEQ ID NO: 1782160 - RNA, 19 nt, Human
acuuguggacacagcucuu

SEQ ID NO: 1782161 - RNA, 22 nt, Human
acuuguggacacagcucuucuc

SEQ ID NO: 1782162 - RNA, 20 nt, Human
acuuguggacuaaaagauau

SEQ ID NO: 1782163 - RNA, 19 nt, Human
acuuguggacuaaaagaua

SEQ ID NO: 1782164 - RNA, 18 nt, Human
acuuguggacuaaaagau

SEQ ID NO: 1782165 - RNA, 15 nt, Human
acuuguggacuaaaa

SEQ ID NO: 1782166 - RNA, 23 nt, Human
acuugcagacucuacagaggcca

SEQ ID NO: 1782167 - RNA, 19 nt, Human
acuugcagacucuacagag

SEQ ID NO: 1782168 - RNA, 22 nt, Human
acuugcagacucuacagaggcc

SEQ ID NO: 1782169 - RNA, 20 nt, Human
ucucacuauguugcccaggc

SEQ ID NO: 1782170 - RNA, 21 nt, Human
ucucacuauguugcccaggca

SEQ ID NO: 1782171 - RNA, 22 nt, Human
ucucacuauguugcccaggcag

SEQ ID NO: 1782172 - RNA, 23 nt, Human
ucucacuauguugcccaggcagg

SEQ ID NO: 1782173 - RNA, 21 nt, Human
acuugcacagggauucucaca

SEQ ID NO: 1782174 - RNA, 11 nt, Human
ugacucuccag

SEQ ID NO: 1782175 - RNA, 13 nt, Human
ugacucuccaggg

SEQ ID NO: 1782176 - RNA, 14 nt, Human
ugacucuccagggg

SEQ ID NO: 1782177 - RNA, 15 nt, Human
ugaccugguccacag

SEQ ID NO: 1782178 - RNA, 20 nt, Human
ugaccugguccacagggcac

SEQ ID NO: 1782179 - RNA, 12 nt, Human
ugaccugcauug

SEQ ID NO: 1782180 - RNA, 16 nt, Human
ugaccugcauuguaaa

SEQ ID NO: 1782181 - RNA, 17 nt, Human
ugaccugcauuguaaau

SEQ ID NO: 1782182 - RNA, 18 nt, Human
ugaccugcauuguaaaua

SEQ ID NO: 1782183 - RNA, 16 nt, Human
agauuguggaauguug

SEQ ID NO: 1782184 - RNA, 21 nt, Human
agauuguggaauguuggauaa

SEQ ID NO: 1782185 - RNA, 22 nt, Human
agauuguggaauguuggauaag

SEQ ID NO: 1782186 - RNA, 11 nt, Human
agauuaauauu

SEQ ID NO: 1782187 - RNA, 20 nt, Human
agauuaauauuguucucugu

SEQ ID NO: 1782188 - RNA, 14 nt, Human
agauuaccuccuga

SEQ ID NO: 1782189 - RNA, 16 nt, Human
agaucccaggccccug

SEQ ID NO: 1782190 - RNA, 20 nt, Human
agaucccaggccccuggagg

SEQ ID NO: 1782191 - RNA, 16 nt, Human
agaucucacucugccc

SEQ ID NO: 1782192 - RNA, 13 nt, Human
agauccucucugg

SEQ ID NO: 1782193 - RNA, 14 nt, Human
agauccucucuggg

SEQ ID NO: 1782194 - RNA, 16 nt, Human
agauccucucuggggc

SEQ ID NO: 1782195 - RNA, 17 nt, Human
agauccucucuggggcu

SEQ ID NO: 1782196 - RNA, 15 nt, Human
agaugcaagucucuu

SEQ ID NO: 1782197 - RNA, 16 nt, Human
agaugcaagucucuug

SEQ ID NO: 1782198 - RNA, 22 nt, Human
ugacagagugagacucugucuc

SEQ ID NO: 1782199 - RNA, 21 nt, Human
ugaaugccgcgaugggucagg

SEQ ID NO: 1782200 - RNA, 17 nt, Human
ugacaggcaaugcuggc

SEQ ID NO: 1782201 - RNA, 19 nt, Human
ugacaggcaaugcuggcug

SEQ ID NO: 1782202 - RNA, 22 nt, Human
ugacagggcacaccgggcacuc

SEQ ID NO: 1782203 - RNA, 18 nt, Human
ugacauuuauuuuucauu

SEQ ID NO: 1782204 - RNA, 21 nt, Human
ugacauuuauuuuucauuuag

SEQ ID NO: 1782205 - RNA, 21 nt, Human
ugacauuuggaguguuccccu

SEQ ID NO: 1782206 - RNA, 15 nt, Human
ugacauuuggagagg

SEQ ID NO: 1782207 - RNA, 13 nt, Human
agcaccuccugcc

SEQ ID NO: 1782208 - RNA, 14 nt, Human
agcaccuccagccu

SEQ ID NO: 1782209 - RNA, 16 nt, Human
agcaccuccagccuga

SEQ ID NO: 1782210 - RNA, 20 nt, Human
agcaccuccagccugaacag

SEQ ID NO: 1782211 - RNA, 14 nt, Human
agcaccuccugccu

SEQ ID NO: 1782212 - RNA, 16 nt, Human
agcaccuccugccucg

SEQ ID NO: 1782213 - RNA, 22 nt, Human
agcaccaaaagcuuaccaaggg

SEQ ID NO: 1782214 - RNA, 20 nt, Human
agcaccauuuuaagucccug

SEQ ID NO: 1782215 - RNA, 23 nt, Human
agcaccauuuuaagucccuguca

SEQ ID NO: 1782216 - RNA, 19 nt, Human
agcaccgugucaagcugcu

SEQ ID NO: 1782217 - RNA, 20 nt, Human
agcaccgugucaagcugcuc

SEQ ID NO: 1782218 - RNA, 21 nt, Human
agcaccgugucaagcugcucu

SEQ ID NO: 1782219 - RNA, 22 nt, Human
agcaccgugucaagcugcucug

SEQ ID NO: 1782220 - RNA, 18 nt, Human
agcaccccuacucacaua

SEQ ID NO: 1782221 - RNA, 24 nt, Human
agcacccuauaaaucaacaccuua

SEQ ID NO: 1782222 - RNA, 13 nt, Human
agcacccucugga

SEQ ID NO: 1782223 - RNA, 21 nt, Human
agcacagcuucauuuccugug

SEQ ID NO: 1782224 - RNA, 19 nt, Human
agcaauccuagguaggguu

SEQ ID NO: 1782225 - RNA, 12 nt, Human
agcaauaugcau

SEQ ID NO: 1782226 - RNA, 17 nt, Human
agcaagugagagcuggg

SEQ ID NO: 1782227 - RNA, 18 nt, Human
agcaagugagagcugggu

SEQ ID NO: 1782228 - RNA, 14 nt, Human
ugagccacugcacc

SEQ ID NO: 1782229 - RNA, 13 nt, Human
ugagccaccugcc

SEQ ID NO: 1782230 - RNA, 18 nt, Human
ugagccaccugcccuuuu

SEQ ID NO: 1782231 - RNA, 19 nt, Human
ugagccaccugcccuuuuu

SEQ ID NO: 1782232 - RNA, 23 nt, Human
ugagccaaucugcaauuucuacu

SEQ ID NO: 1782233 - RNA, 19 nt, Human
ugagcaugacagccugcag

SEQ ID NO: 1782234 - RNA, 21 nt, Human
ugagcaugacagccugcagca

SEQ ID NO: 1782235 - RNA, 12 nt, Human
ugagccacugca

SEQ ID NO: 1782236 - RNA, 13 nt, Human
ugagccacugcac

SEQ ID NO: 1782237 - RNA, 15 nt, Human
agcaagugagagcug

SEQ ID NO: 1782238 - RNA, 16 nt, Human
agcaagugagagcugg

SEQ ID NO: 1782239 - RNA, 23 nt, Human
ugagauuguuuucuuuuucuacc

SEQ ID NO: 1782240 - RNA, 17 nt, Human
ugagauucaauauugaa

SEQ ID NO: 1782241 - RNA, 18 nt, Human
ugagauucaauauugaau

SEQ ID NO: 1782242 - RNA, 23 nt, Human
ugagauucaauauugaauuuuuc

SEQ ID NO: 1782243 - RNA, 23 nt, Human
ugagaggacuuuucuuuguggcu

SEQ ID NO: 1782244 - RNA, 14 nt, Human
ugagagcugggugu

SEQ ID NO: 1782245 - RNA, 20 nt, Human
ugagacucugucucaaaaaa

SEQ ID NO: 1782246 - RNA, 11 nt, Human
ugagacagagu

SEQ ID NO: 1782247 - RNA, 21 nt, Human
ugagacagaguuuucacucuu

SEQ ID NO: 1782248 - RNA, 11 nt, Human
ugaacuccugg

SEQ ID NO: 1782249 - RNA, 20 nt, Human
ugaacuaccuugguuccccc

SEQ ID NO: 1782250 - RNA, 21 nt, Human
ugaaccaccacacccagccca

SEQ ID NO: 1782251 - RNA, 22 nt, Human
ugaaccaccacacccagcccac

SEQ ID NO: 1782252 - RNA, 14 nt, Human
ugaacccuggggcc

SEQ ID NO: 1782253 - RNA, 15 nt, Human
ugaacccuggggccu

SEQ ID NO: 1782254 - RNA, 21 nt, Human
ugaacccuggggccugacugc

SEQ ID NO: 1782255 - RNA, 15 nt, Human
ugaaauucugaauuu

SEQ ID NO: 1782256 - RNA, 18 nt, Human
ugaaauucugaauuugca

SEQ ID NO: 1782257 - RNA, 19 nt, Human
ugaaauucugaauuugcaa

SEQ ID NO: 1782258 - RNA, 20 nt, Human
ugaaauucugaauuugcaaa

SEQ ID NO: 1782259 - RNA, 21 nt, Human
ugaaauucugaauuugcaaag

SEQ ID NO: 1782260 - RNA, 22 nt, Human
ugaaauucugaauuugcaaagu

SEQ ID NO: 1782261 - RNA, 20 nt, Human
agagauuaccuccugagaaa

SEQ ID NO: 1782262 - RNA, 13 nt, Human
agagauucauuuu

SEQ ID NO: 1782263 - RNA, 15 nt, Human
agagauucauuuucu

SEQ ID NO: 1782264 - RNA, 16 nt, Human
agagauucauuuucua

SEQ ID NO: 1782265 - RNA, 18 nt, Human
agagauucauuuucuaga

SEQ ID NO: 1782266 - RNA, 16 nt, Human
agagauuaccuccuga

SEQ ID NO: 1782267 - RNA, 19 nt, Human
agagauuaccuccugagaa

SEQ ID NO: 1782268 - RNA, 24 nt, Human
agaggcagccccauucugccugcc

SEQ ID NO: 1782269 - RNA, 17 nt, Human
agaggcccuuugcuguc

SEQ ID NO: 1782270 - RNA, 21 nt, Human
agaggcagccccauucugccu

SEQ ID NO: 1782271 - RNA, 22 nt, Human
agaggcagccccauucugccug

SEQ ID NO: 1782272 - RNA, 21 nt, Human
agaggcagggucucacucugu

SEQ ID NO: 1782273 - RNA, 23 nt, Human
agaggcagccccauucugccugc

SEQ ID NO: 1782274 - RNA, 17 nt, Human
agagcuguauuaagcca

SEQ ID NO: 1782275 - RNA, 19 nt, Human
agagcuguauuaagccacu

SEQ ID NO: 1782276 - RNA, 20 nt, Human
agagggagugacagaggcag

SEQ ID NO: 1782277 - RNA, 15 nt, Human
agagggagugacaga

SEQ ID NO: 1782278 - RNA, 21 nt, Human
ugaagauucuuucccaauuca

SEQ ID NO: 1782279 - RNA, 13 nt, Human
ugaagucacacag

SEQ ID NO: 1782280 - RNA, 12 nt, Human
ugaaguaccacc

SEQ ID NO: 1782281 - RNA, 14 nt, Human
ucuuuccuccuuuc

SEQ ID NO: 1782282 - RNA, 14 nt, Human
ucuuuccuauuuca

SEQ ID NO: 1782283 - RNA, 16 nt, Human
ucuuuccuauuucagu

SEQ ID NO: 1782284 - RNA, 24 nt, Human
ucuuuccuauuucaguguuaccug

SEQ ID NO: 1782285 - RNA, 18 nt, Human
ucuuuaaugucacaggca

SEQ ID NO: 1782286 - RNA, 19 nt, Human
ucuuuaaugucacaggcag

SEQ ID NO: 1782287 - RNA, 20 nt, Human
agacaggcaagcaccuccug

SEQ ID NO: 1782288 - RNA, 22 nt, Human
agacaggcaagcaccuccugcc

SEQ ID NO: 1782289 - RNA, 15 nt, Human
ucuuuaaugucacag

SEQ ID NO: 1782290 - RNA, 13 nt, Human
agacucugucuca

SEQ ID NO: 1782291 - RNA, 20 nt, Human
agacugggcugagggagccu

SEQ ID NO: 1782292 - RNA, 15 nt, Human
agacugggcugaggg

SEQ ID NO: 1782293 - RNA, 16 nt, Human
agacugggcugaggga

SEQ ID NO: 1782294 - RNA, 12 nt, Human
agacugggcuga

SEQ ID NO: 1782295 - RNA, 14 nt, Human
agacugggcugagg

SEQ ID NO: 1782296 - RNA, 14 nt, Human
ucuuuguggcuucc

SEQ ID NO: 1782297 - RNA, 15 nt, Human
ucuuugucuaaaaca

SEQ ID NO: 1782298 - RNA, 19 nt, Human
ucuuugucuaaaacaauaa

SEQ ID NO: 1782299 - RNA, 20 nt, Human
ucuuugucuaaaacaauaaa

SEQ ID NO: 1782300 - RNA, 13 nt, Human
ucuuugucuaaaa

SEQ ID NO: 1782301 - RNA, 13 nt, Human
ugaaagaaaauaa

SEQ ID NO: 1782302 - RNA, 16 nt, Human
ugaaaaugucuugugu

SEQ ID NO: 1782303 - RNA, 14 nt, Human
ugucccugcacuug

SEQ ID NO: 1782304 - RNA, 18 nt, Human
ugucccuucugucccuca

SEQ ID NO: 1782305 - RNA, 20 nt, Human
ugucccuucugucccucaca

SEQ ID NO: 1782306 - RNA, 12 nt, Human
ugucccuccggg

SEQ ID NO: 1782307 - RNA, 16 nt, Human
uguccacgacugucuc

SEQ ID NO: 1782308 - RNA, 17 nt, Human
uguccacgacugucucc

SEQ ID NO: 1782309 - RNA, 18 nt, Human
uguccacgacugucucca

SEQ ID NO: 1782310 - RNA, 19 nt, Human
uguccacgacugucuccau

SEQ ID NO: 1782311 - RNA, 21 nt, Human
agucccaccuuggcugcaggg

SEQ ID NO: 1782312 - RNA, 23 nt, Human
agucccaccuuggcugcagggag

SEQ ID NO: 1782313 - RNA, 19 nt, Human
agucaucuguuagggccuu

SEQ ID NO: 1782314 - RNA, 21 nt, Human
aguauuuaauuagugcuaagu

SEQ ID NO: 1782315 - RNA, 19 nt, Human
aguauuuaauuagugcuaa

SEQ ID NO: 1782316 - RNA, 17 nt, Human
aguauuuaauuagugcu

SEQ ID NO: 1782317 - RNA, 16 nt, Human
aguauuuaauuagugc

SEQ ID NO: 1782318 - RNA, 15 nt, Human
aguauuuaauuagug

SEQ ID NO: 1782319 - RNA, 14 nt, Human
aguauuuaauuagu

SEQ ID NO: 1782320 - RNA, 13 nt, Human
aguauuuaauuag

SEQ ID NO: 1782321 - RNA, 11 nt, Human
aguauuuaauu

SEQ ID NO: 1782322 - RNA, 22 nt, Human
aguagcugggacuacaggcacc

SEQ ID NO: 1782323 - RNA, 19 nt, Human
aguagcugggacuacaggc

SEQ ID NO: 1782324 - RNA, 21 nt, Human
aguagcugggacuacaggcac

SEQ ID NO: 1782325 - RNA, 13 nt, Human
aguagcugggacu

SEQ ID NO: 1782326 - RNA, 14 nt, Human
aguagcugggacua

SEQ ID NO: 1782327 - RNA, 16 nt, Human
aguagcugaaaugcaa

SEQ ID NO: 1782328 - RNA, 17 nt, Human
ugucaacauuuggaggc

SEQ ID NO: 1782329 - RNA, 14 nt, Human
uguauuaagccacu

SEQ ID NO: 1782330 - RNA, 19 nt, Human
uguauuagauguucucuau

SEQ ID NO: 1782331 - RNA, 18 nt, Human
uguauuagauguucucua

SEQ ID NO: 1782332 - RNA, 16 nt, Human
uguauuagauguucuc

SEQ ID NO: 1782333 - RNA, 14 nt, Human
uguauuagauguuc

SEQ ID NO: 1782334 - RNA, 13 nt, Human
uguauuagauguu

SEQ ID NO: 1782335 - RNA, 15 nt, Human
uguaucccaugagcc

SEQ ID NO: 1782336 - RNA, 16 nt, Human
uguaucccaugagccu

SEQ ID NO: 1782337 - RNA, 12 nt, Human
uguagagccagg

SEQ ID NO: 1782338 - RNA, 15 nt, Human
uguagagccaggguc

SEQ ID NO: 1782339 - RNA, 16 nt, Human
ugucucugggccacuu

SEQ ID NO: 1782340 - RNA, 20 nt, Human
ugucucuucaucuaauauga

SEQ ID NO: 1782341 - RNA, 22 nt, Human
ugucucuuuaaugucacaggca

SEQ ID NO: 1782342 - RNA, 21 nt, Human
ugucucuuuaaugucacaggc

SEQ ID NO: 1782343 - RNA, 21 nt, Human
agucccugccacgaauuucug

SEQ ID NO: 1782344 - RNA, 22 nt, Human
agucccugccacgaauuucugu

SEQ ID NO: 1782345 - RNA, 22 nt, Human
ugucuccuuucaccccagggcc

SEQ ID NO: 1782346 - RNA, 21 nt, Human
ugucuccuuucaccccagggc

SEQ ID NO: 1782347 - RNA, 15 nt, Human
ugugaaccaccacac

SEQ ID NO: 1782348 - RNA, 16 nt, Human
ugugaaccaccacacc

SEQ ID NO: 1782349 - RNA, 17 nt, Human
ugugaaccaccacaccc

SEQ ID NO: 1782350 - RNA, 22 nt, Human
ugugaaccaccacacccagccc

SEQ ID NO: 1782351 - RNA, 23 nt, Human
ugugaaccaccacacccagccca

SEQ ID NO: 1782352 - RNA, 18 nt, Human
ugugaacccuggggccug

SEQ ID NO: 1782353 - RNA, 20 nt, Human
ugugaacccuggggccugac

SEQ ID NO: 1782354 - RNA, 22 nt, Human
ugugaacccuggggccugacug

SEQ ID NO: 1782355 - RNA, 23 nt, Human
ugugaacccuggggccugacugc

SEQ ID NO: 1782356 - RNA, 15 nt, Human
ugucuugcaauggca

SEQ ID NO: 1782357 - RNA, 22 nt, Human
ugucuugaugcaugcacuguuc

SEQ ID NO: 1782358 - RNA, 17 nt, Human
ugucuugcaauggcagc

SEQ ID NO: 1782359 - RNA, 18 nt, Human
ugucuugcaauggcagcc

SEQ ID NO: 1782360 - RNA, 20 nt, Human
ugucuugcaauggcagccuu

SEQ ID NO: 1782361 - RNA, 21 nt, Human
ugucuugcaauggcagccuug

SEQ ID NO: 1782362 - RNA, 24 nt, Human
ugucuucaccugauucaacuaaaa

SEQ ID NO: 1782363 - RNA, 13 nt, Human
ugucuucaccuga

SEQ ID NO: 1782364 - RNA, 16 nt, Human
agucuuacgaauacuu

SEQ ID NO: 1782365 - RNA, 19 nt, Human
agucuuccauuugcaaggg

SEQ ID NO: 1782366 - RNA, 15 nt, Human
agucuuccauuugca

SEQ ID NO: 1782367 - RNA, 16 nt, Human
agucuuccauuugcaa

SEQ ID NO: 1782368 - RNA, 17 nt, Human
agucuuccauuugcaag

SEQ ID NO: 1782369 - RNA, 12 nt, Human
ugugaagcauuc

SEQ ID NO: 1782370 - RNA, 19 nt, Human
ugugaacuggacccuguug

SEQ ID NO: 1782371 - RNA, 18 nt, Human
ugugaacuggacccuguu

SEQ ID NO: 1782372 - RNA, 11 nt, Human
agucucugagc

SEQ ID NO: 1782373 - RNA, 13 nt, Human
agucucugagcag

SEQ ID NO: 1782374 - RNA, 16 nt, Human
agucucugagcaguga

SEQ ID NO: 1782375 - RNA, 14 nt, Human
ugugaaccaaugca

SEQ ID NO: 1782376 - RNA, 14 nt, Human
ugugauuuuaacuc

SEQ ID NO: 1782377 - RNA, 16 nt, Human
ugugauuuuaacucug

SEQ ID NO: 1782378 - RNA, 17 nt, Human
ugugauuuuaacucugu

SEQ ID NO: 1782379 - RNA, 20 nt, Human
ugugauuuuaacucugucuu

SEQ ID NO: 1782380 - RNA, 18 nt, Human
ugugauuuuaacucuguc

SEQ ID NO: 1782381 - RNA, 19 nt, Human
ugugauuuuaacucugucu

SEQ ID NO: 1782382 - RNA, 15 nt, Human
agugagccacuccgg

SEQ ID NO: 1782383 - RNA, 14 nt, Human
agugagagcugggu

SEQ ID NO: 1782384 - RNA, 22 nt, Human
agugagacucugucucaaaaaa

SEQ ID NO: 1782385 - RNA, 21 nt, Human
agugagacccagcccucaucc

SEQ ID NO: 1782386 - RNA, 16 nt, Human
agugagacucugucuc

SEQ ID NO: 1782387 - RNA, 17 nt, Human
agugagacucugucuca

SEQ ID NO: 1782388 - RNA, 13 nt, Human
agugagacucugu

SEQ ID NO: 1782389 - RNA, 17 nt, Human
agugaaagaaaauaaca

SEQ ID NO: 1782390 - RNA, 16 nt, Human
agguggggcagcuuga

SEQ ID NO: 1782391 - RNA, 14 nt, Human
aggugggucccggc

SEQ ID NO: 1782392 - RNA, 16 nt, Human
aggugggucccggcuc

SEQ ID NO: 1782393 - RNA, 14 nt, Human
agguggggcagcuu

SEQ ID NO: 1782394 - RNA, 13 nt, Human
agguggggcagcu

SEQ ID NO: 1782395 - RNA, 19 nt, Human
agguggggagacugggcug

SEQ ID NO: 1782396 - RNA, 21 nt, Human
agguggggagacugggcugag

SEQ ID NO: 1782397 - RNA, 23 nt, Human
aggugugaaccaccacacccagc

SEQ ID NO: 1782398 - RNA, 22 nt, Human
aggugugaaccaccacacccag

SEQ ID NO: 1782399 - RNA, 14 nt, Human
aggugugagucacc

SEQ ID NO: 1782400 - RNA, 20 nt, Human
aggugugagucaccaagccc

SEQ ID NO: 1782401 - RNA, 21 nt, Human
uguacauguucgggugugggu

SEQ ID NO: 1782402 - RNA, 18 nt, Human
uguacuucccgggccagg

SEQ ID NO: 1782403 - RNA, 21 nt, Human
uguacuucccgggccagggcu

SEQ ID NO: 1782404 - RNA, 22 nt, Human
uguacuucccgggccagggcug

SEQ ID NO: 1782405 - RNA, 15 nt, Human
uguagaauauucaga

SEQ ID NO: 1782406 - RNA, 19 nt, Human
uggugugucccccucuguc

SEQ ID NO: 1782407 - RNA, 12 nt, Human
ugguggcagcug

SEQ ID NO: 1782408 - RNA, 18 nt, Human
uggugugaucgucugacu

SEQ ID NO: 1782409 - RNA, 17 nt, Human
ugguggcagaguccugg

SEQ ID NO: 1782410 - RNA, 16 nt, Human
uggugugaucgucuga

SEQ ID NO: 1782411 - RNA, 15 nt, Human
ugguguggguguccu

SEQ ID NO: 1782412 - RNA, 16 nt, Human
ugguguggguguccug

SEQ ID NO: 1782413 - RNA, 17 nt, Human
ugguguggguguccugc

SEQ ID NO: 1782414 - RNA, 22 nt, Human
ugguguggguguccugccuguc

SEQ ID NO: 1782415 - RNA, 23 nt, Human
ugguguggguguccugccugucu

SEQ ID NO: 1782416 - RNA, 20 nt, Human
ugguucaggguuggccccug

SEQ ID NO: 1782417 - RNA, 22 nt, Human
ugguucaggguuggccccugcc

SEQ ID NO: 1782418 - RNA, 23 nt, Human
ugguucaggguuggccccugccc

SEQ ID NO: 1782419 - RNA, 17 nt, Human
ugguuaaaaaaaagaau

SEQ ID NO: 1782420 - RNA, 20 nt, Human
ugguuaaaaaaaagaauaaa

SEQ ID NO: 1782421 - RNA, 23 nt, Human
aggugauccacccaccucagccu

SEQ ID NO: 1782422 - RNA, 16 nt, Human
uguaaaggaauuuaaa

SEQ ID NO: 1782423 - RNA, 18 nt, Human
uggucugacccacugcuu

SEQ ID NO: 1782424 - RNA, 22 nt, Human
uggucuggguguagcucuuaga

SEQ ID NO: 1782425 - RNA, 12 nt, Human
uggucuguguga

SEQ ID NO: 1782426 - RNA, 22 nt, Human
ugguccaugggccauaugaaaa

SEQ ID NO: 1782427 - RNA, 13 nt, Human
aggguuggccccu

SEQ ID NO: 1782428 - RNA, 14 nt, Human
aggguuggccccug

SEQ ID NO: 1782429 - RNA, 17 nt, Human
aggguuggccccugccc

SEQ ID NO: 1782430 - RNA, 15 nt, Human
aggguugggcuggug

SEQ ID NO: 1782431 - RNA, 16 nt, Human
aggguugaccccagag

SEQ ID NO: 1782432 - RNA, 17 nt, Human
aggguugaccccagagg

SEQ ID NO: 1782433 - RNA, 18 nt, Human
aggguugaccccagagga

SEQ ID NO: 1782434 - RNA, 17 nt, Human
aggguucccgcggggcu

SEQ ID NO: 1782435 - RNA, 19 nt, Human
aggguucccgcggggcugu

SEQ ID NO: 1782436 - RNA, 14 nt, Human
aggguucugccucu

SEQ ID NO: 1782437 - RNA, 16 nt, Human
aggguucugccucucc

SEQ ID NO: 1782438 - RNA, 19 nt, Human
aggguucugccucuccagg

SEQ ID NO: 1782439 - RNA, 20 nt, Human
aggguucugccucuccaggc

SEQ ID NO: 1782440 - RNA, 17 nt, Human
aggguggugaccucugc

SEQ ID NO: 1782441 - RNA, 18 nt, Human
aggguggugaccucugcc

SEQ ID NO: 1782442 - RNA, 19 nt, Human
aggguggugaccucugccu

SEQ ID NO: 1782443 - RNA, 21 nt, Human
aggguggugaccucugccuga

SEQ ID NO: 1782444 - RNA, 14 nt, Human
uggucuucagccuc

SEQ ID NO: 1782445 - RNA, 17 nt, Human
aggguugggcugguguc

SEQ ID NO: 1782446 - RNA, 21 nt, Human
aggguuuaauccccaguaaaa

SEQ ID NO: 1782447 - RNA, 22 nt, Human
aggguuuaauccccaguaaaau

SEQ ID NO: 1782448 - RNA, 15 nt, Human
agguagccugcuggu

SEQ ID NO: 1782449 - RNA, 22 nt, Human
aggucuugaacuccuggccuca

SEQ ID NO: 1782450 - RNA, 14 nt, Human
aggucuuuuuuuaa

SEQ ID NO: 1782451 - RNA, 20 nt, Human
aggucuugaacuccuggccu

SEQ ID NO: 1782452 - RNA, 21 nt, Human
aggucuugaacuccuggccuc

SEQ ID NO: 1782453 - RNA, 15 nt, Human
aggucagugcaaaua

SEQ ID NO: 1782454 - RNA, 16 nt, Human
aggggauagagagaga

SEQ ID NO: 1782455 - RNA, 12 nt, Human
aggggaguagag

SEQ ID NO: 1782456 - RNA, 22 nt, Human
ugggaauauuugaaucuugucu

SEQ ID NO: 1782457 - RNA, 20 nt, Human
ugggaauauuugaaucuugu

SEQ ID NO: 1782458 - RNA, 19 nt, Human
ugggaauauuugaaucuug

SEQ ID NO: 1782459 - RNA, 18 nt, Human
ugggaauauuugaaucuu

SEQ ID NO: 1782460 - RNA, 16 nt, Human
ugggaauauuugaauc

SEQ ID NO: 1782461 - RNA, 15 nt, Human
ugggaauauuugaau

SEQ ID NO: 1782462 - RNA, 14 nt, Human
ugggaauauuugaa

SEQ ID NO: 1782463 - RNA, 13 nt, Human
ugggaauauuuga

SEQ ID NO: 1782464 - RNA, 19 nt, Human
aggggucgacuucgggcug

SEQ ID NO: 1782465 - RNA, 21 nt, Human
aggggucgacuucgggcuggc

SEQ ID NO: 1782466 - RNA, 18 nt, Human
aggguaucaggugcugcc

SEQ ID NO: 1782467 - RNA, 16 nt, Human
aggguaucaggugcug

SEQ ID NO: 1782468 - RNA, 12 nt, Human
ugguccaggaga

SEQ ID NO: 1782469 - RNA, 16 nt, Human
ugguccaggagaaggc

SEQ ID NO: 1782470 - RNA, 13 nt, Human
ugguccacagggc

SEQ ID NO: 1782471 - RNA, 14 nt, Human
ugguccacagggca

SEQ ID NO: 1782472 - RNA, 15 nt, Human
ugguccacagggcac

SEQ ID NO: 1782473 - RNA, 21 nt, Human
ugguccacagggcaccugcca

SEQ ID NO: 1782474 - RNA, 14 nt, Human
ugggugaaggcugg

SEQ ID NO: 1782475 - RNA, 15 nt, Human
ugggugaaggcuggc

SEQ ID NO: 1782476 - RNA, 16 nt, Human
ugggugaaggcuggca

SEQ ID NO: 1782477 - RNA, 14 nt, Human
uggguggaugccug

SEQ ID NO: 1782478 - RNA, 19 nt, Human
ugggugaaggcuggcauga

SEQ ID NO: 1782479 - RNA, 23 nt, Human
uggguggaugccugguggcagcu

SEQ ID NO: 1782480 - RNA, 19 nt, Human
uggguuuuguauucucuga

SEQ ID NO: 1782481 - RNA, 21 nt, Human
uggguuuuguauucucugagc

SEQ ID NO: 1782482 - RNA, 15 nt, Human
uuaccugcugcuucu

SEQ ID NO: 1782483 - RNA, 18 nt, Human
uuaccugaaaacacugug

SEQ ID NO: 1782484 - RNA, 20 nt, Human
uuaccugaaaacacugugca

SEQ ID NO: 1782485 - RNA, 22 nt, Human
uuaccugaaaacacugugcaca

SEQ ID NO: 1782486 - RNA, 12 nt, Human
auaaguuauuuu

SEQ ID NO: 1782487 - RNA, 18 nt, Human
auaaguuauuuuuguaca

SEQ ID NO: 1782488 - RNA, 19 nt, Human
auaaguuauuuuuguacau

SEQ ID NO: 1782489 - RNA, 20 nt, Human
auaaguuauuuuuguacaug

SEQ ID NO: 1782490 - RNA, 22 nt, Human
auaaguuauuuuuguacauguu

SEQ ID NO: 1782491 - RNA, 14 nt, Human
uuagauuauugaaa

SEQ ID NO: 1782492 - RNA, 19 nt, Human
auaauugggucauagaaau

SEQ ID NO: 1782493 - RNA, 19 nt, Human
auaauugaguuuucagugg

SEQ ID NO: 1782494 - RNA, 14 nt, Human
auaaugaauacuuu

SEQ ID NO: 1782495 - RNA, 23 nt, Human
uuaccauuuugggguacccacug

SEQ ID NO: 1782496 - RNA, 17 nt, Human
auaaacuuggauucucu

SEQ ID NO: 1782497 - RNA, 22 nt, Human
auaacucuguggcauuauugca

SEQ ID NO: 1782498 - RNA, 12 nt, Human
auaacugaggag

SEQ ID NO: 1782499 - RNA, 17 nt, Human
auaaacaucacacacac

SEQ ID NO: 1782500 - RNA, 16 nt, Human
auaaacaucacacaca

SEQ ID NO: 1782501 - RNA, 21 nt, Human
auaaaguauuuaauuagugcu

SEQ ID NO: 1782502 - RNA, 19 nt, Human
auaaaguauuuaauuagug

SEQ ID NO: 1782503 - RNA, 17 nt, Human
auaaaguauuuaauuag

SEQ ID NO: 1782504 - RNA, 15 nt, Human
auaaaguauuuaauu

SEQ ID NO: 1782505 - RNA, 14 nt, Human
auaaaguauuuaau

SEQ ID NO: 1782506 - RNA, 12 nt, Human
auaaaguauuua

SEQ ID NO: 1782507 - RNA, 18 nt, Human
uuagccauuuuucaaagc

SEQ ID NO: 1782508 - RNA, 21 nt, Human
uuagcccucacauuagaucua

SEQ ID NO: 1782509 - RNA, 17 nt, Human
uuagccugaguagaaag

SEQ ID NO: 1782510 - RNA, 21 nt, Human
uuauagugauguaaucuugaa

SEQ ID NO: 1782511 - RNA, 13 nt, Human
uuauaguaaugag

SEQ ID NO: 1782512 - RNA, 18 nt, Human
uuauagaacuucauggau

SEQ ID NO: 1782513 - RNA, 17 nt, Human
auacaaacugguauucu

SEQ ID NO: 1782514 - RNA, 13 nt, Human
auacauucuagau

SEQ ID NO: 1782515 - RNA, 14 nt, Human
auacaggaaaagcu

SEQ ID NO: 1782516 - RNA, 19 nt, Human
auacaggaaaagcugcuga

SEQ ID NO: 1782517 - RNA, 20 nt, Human
auacaggaaaagcugcugac

SEQ ID NO: 1782518 - RNA, 22 nt, Human
auacaggaaaagcugcugacag

SEQ ID NO: 1782519 - RNA, 21 nt, Human
auacaguucggugagcuacaa

SEQ ID NO: 1782520 - RNA, 22 nt, Human
auacagauuuugauagcaaagc

SEQ ID NO: 1782521 - RNA, 19 nt, Human
auacagauuuugauagcaa

SEQ ID NO: 1782522 - RNA, 18 nt, Human
auacagauuuugauagca

SEQ ID NO: 1782523 - RNA, 17 nt, Human
auacagauuuugauagc

SEQ ID NO: 1782524 - RNA, 16 nt, Human
auacagauuuugauag

SEQ ID NO: 1782525 - RNA, 14 nt, Human
auacagauuuugau

SEQ ID NO: 1782526 - RNA, 23 nt, Human
auacaaauugguugguuuugacu

SEQ ID NO: 1782527 - RNA, 16 nt, Human
auaccagcgaggaggc

SEQ ID NO: 1782528 - RNA, 22 nt, Human
auaccagcgaggaggcuccaga

SEQ ID NO: 1782529 - RNA, 21 nt, Human
auaccaaugaaaaaauguaua

SEQ ID NO: 1782530 - RNA, 19 nt, Human
auaccaaugaaaaaaugua

SEQ ID NO: 1782531 - RNA, 21 nt, Human
uuaucaccgugggcucccuga

SEQ ID NO: 1782532 - RNA, 15 nt, Human
aguuauuuuuguaca

SEQ ID NO: 1782533 - RNA, 16 nt, Human
aguuauuuuuguacau

SEQ ID NO: 1782534 - RNA, 17 nt, Human
aguuauuuuuguacaug

SEQ ID NO: 1782535 - RNA, 18 nt, Human
aguuauuuuuguacaugu

SEQ ID NO: 1782536 - RNA, 13 nt, Human
aguucaaaauucu

SEQ ID NO: 1782537 - RNA, 20 nt, Human
aguucaaaauucuaaaugua

SEQ ID NO: 1782538 - RNA, 13 nt, Human
aguucaaacaaga

SEQ ID NO: 1782539 - RNA, 14 nt, Human
aguuauuuuccagg

SEQ ID NO: 1782540 - RNA, 17 nt, Human
aguguuucuaauaaacu

SEQ ID NO: 1782541 - RNA, 21 nt, Human
aguguuucuaauaaacuugga

SEQ ID NO: 1782542 - RNA, 20 nt, Human
aguuauuauauuuacaaaug

SEQ ID NO: 1782543 - RNA, 18 nt, Human
aguuauggccuauacacu

SEQ ID NO: 1782544 - RNA, 21 nt, Human
aguuauggccuauacacuauu

SEQ ID NO: 1782545 - RNA, 23 nt, Human
aguuaugaacacuuaaauuauga

SEQ ID NO: 1782546 - RNA, 16 nt, Human
aguuaguuaaguuggg

SEQ ID NO: 1782547 - RNA, 15 nt, Human
agugggguuuccugg

SEQ ID NO: 1782548 - RNA, 14 nt, Human
aguggcagcugcuu

SEQ ID NO: 1782549 - RNA, 20 nt, Human
aguggcagcugcuuuugucu

SEQ ID NO: 1782550 - RNA, 12 nt, Human
aguggcagcugc

SEQ ID NO: 1782551 - RNA, 13 nt, Human
aguggcagcugcu

SEQ ID NO: 1782552 - RNA, 16 nt, Human
aguggugcgaucuggg

SEQ ID NO: 1782553 - RNA, 14 nt, Human
uguucugggacaca

SEQ ID NO: 1782554 - RNA, 15 nt, Human
uguucugggacacag

SEQ ID NO: 1782555 - RNA, 13 nt, Human
uguucugggacac

SEQ ID NO: 1782556 - RNA, 16 nt, Human
uguucccccugugcag

SEQ ID NO: 1782557 - RNA, 15 nt, Human
uguucccccugugca

SEQ ID NO: 1782558 - RNA, 21 nt, Human
uguucaaagccagcguccucc

SEQ ID NO: 1782559 - RNA, 22 nt, Human
uguucaaagccagcguccuccu

SEQ ID NO: 1782560 - RNA, 14 nt, Human
uguuauuuugcaac

SEQ ID NO: 1782561 - RNA, 22 nt, Human
uguuauguaaaaggccaaaccu

SEQ ID NO: 1782562 - RNA, 15 nt, Human
aguucuguagaaaug

SEQ ID NO: 1782563 - RNA, 13 nt, Human
aguucuguagaaa

SEQ ID NO: 1782564 - RNA, 18 nt, Human
aguucuguagaaaugguu

SEQ ID NO: 1782565 - RNA, 17 nt, Human
aguucuguagaaauggu

SEQ ID NO: 1782566 - RNA, 16 nt, Human
aguucuguagaaaugg

SEQ ID NO: 1782567 - RNA, 15 nt, Human
aguugauguugcauu

SEQ ID NO: 1782568 - RNA, 15 nt, Human
aguugaugaaaugga

SEQ ID NO: 1782569 - RNA, 16 nt, Human
aguugauguugcauuu

SEQ ID NO: 1782570 - RNA, 21 nt, Human
aguugaucgccuuucccaggu

SEQ ID NO: 1782571 - RNA, 19 nt, Human
uguuuggggaugagaaagg

SEQ ID NO: 1782572 - RNA, 15 nt, Human
uguuuggggaugaga

SEQ ID NO: 1782573 - RNA, 12 nt, Human
uguuugcccaaa

SEQ ID NO: 1782574 - RNA, 14 nt, Human
uguuugccucugcc

SEQ ID NO: 1782575 - RNA, 16 nt, Human
uguuugccucugccuc

SEQ ID NO: 1782576 - RNA, 17 nt, Human
uguuguccaacuauuua

SEQ ID NO: 1782577 - RNA, 19 nt, Human
aguuuccuuccagcccaga

SEQ ID NO: 1782578 - RNA, 22 nt, Human
aguuuucacucuuauugcccac

SEQ ID NO: 1782579 - RNA, 12 nt, Human
aguuuucagugg

SEQ ID NO: 1782580 - RNA, 17 nt, Human
uuaaaacaacacucaca

SEQ ID NO: 1782581 - RNA, 22 nt, Human
aguugcauagguuuaauaauuu

SEQ ID NO: 1782582 - RNA, 17 nt, Human
agccagaggacugugau

SEQ ID NO: 1782583 - RNA, 20 nt, Human
agccacugcaccgggccaca

SEQ ID NO: 1782584 - RNA, 13 nt, Human
agccacuccucug

SEQ ID NO: 1782585 - RNA, 18 nt, Human
agccacugcaccgggcca

SEQ ID NO: 1782586 - RNA, 19 nt, Human
agccacugcaccgggccac

SEQ ID NO: 1782587 - RNA, 13 nt, Human
agccagaggacug

SEQ ID NO: 1782588 - RNA, 14 nt, Human
agccagaggacugu

SEQ ID NO: 1782589 - RNA, 16 nt, Human
agccacugcaccgggc

SEQ ID NO: 1782590 - RNA, 12 nt, Human
agccacuccucu

SEQ ID NO: 1782591 - RNA, 15 nt, Human
agccacuccccucca

SEQ ID NO: 1782592 - RNA, 19 nt, Human
agccacuccccuccacucu

SEQ ID NO: 1782593 - RNA, 14 nt, Human
agccacuccccucc

SEQ ID NO: 1782594 - RNA, 19 nt, Human
agccacuaagaaccccucu

SEQ ID NO: 1782595 - RNA, 22 nt, Human
agccacuaagaaccccucugcu

SEQ ID NO: 1782596 - RNA, 15 nt, Human
ugauccucccaccuc

SEQ ID NO: 1782597 - RNA, 22 nt, Human
ugauccucccaccucagccucc

SEQ ID NO: 1782598 - RNA, 16 nt, Human
ugauccucccaccuca

SEQ ID NO: 1782599 - RNA, 21 nt, Human
ugauccucccaccucagccuc

SEQ ID NO: 1782600 - RNA, 21 nt, Human
agccaucucaugaggggagag

SEQ ID NO: 1782601 - RNA, 23 nt, Human
agccaucucaugaggggagagga

SEQ ID NO: 1782602 - RNA, 13 nt, Human
agcccacuucugc

SEQ ID NO: 1782603 - RNA, 14 nt, Human
agcccacuucugcc

SEQ ID NO: 1782604 - RNA, 15 nt, Human
agcccacuucugcca

SEQ ID NO: 1782605 - RNA, 22 nt, Human
agcccacuucugccauauucug

SEQ ID NO: 1782606 - RNA, 15 nt, Human
agcccagcacugcuu

SEQ ID NO: 1782607 - RNA, 17 nt, Human
agcccagauuccccugu

SEQ ID NO: 1782608 - RNA, 18 nt, Human
agcccagauuccccugug

SEQ ID NO: 1782609 - RNA, 20 nt, Human
agcccagauuccccuguguc

SEQ ID NO: 1782610 - RNA, 21 nt, Human
agcccagauuccccuguguca

SEQ ID NO: 1782611 - RNA, 16 nt, Human
agccagcguccuccuc

SEQ ID NO: 1782612 - RNA, 17 nt, Human
agccagcguccuccucu

SEQ ID NO: 1782613 - RNA, 18 nt, Human
agccagcguccuccucug

SEQ ID NO: 1782614 - RNA, 19 nt, Human
agccagcguccuccucugu

SEQ ID NO: 1782615 - RNA, 21 nt, Human
agccagcguccuccucuguga

SEQ ID NO: 1782616 - RNA, 23 nt, Human
agccagcguccuccucugugacc

SEQ ID NO: 1782617 - RNA, 22 nt, Human
ugauucccaagcucugcuccuc

SEQ ID NO: 1782618 - RNA, 23 nt, Human
ugauucccaagcucugcuccucu

SEQ ID NO: 1782619 - RNA, 13 nt, Human
ugauucuccugcc

SEQ ID NO: 1782620 - RNA, 21 nt, Human
agcccagcacugcuugaggaa

SEQ ID NO: 1782621 - RNA, 15 nt, Human
agccucaucaucaga

SEQ ID NO: 1782622 - RNA, 17 nt, Human
agccucaucaucagagc

SEQ ID NO: 1782623 - RNA, 22 nt, Human
agccucagcgcggcccucccga

SEQ ID NO: 1782624 - RNA, 22 nt, Human
agccucagaugauuuccccccu

SEQ ID NO: 1782625 - RNA, 19 nt, Human
agccucagcgcggcccucc

SEQ ID NO: 1782626 - RNA, 20 nt, Human
agccucaaccuccugggcua

SEQ ID NO: 1782627 - RNA, 18 nt, Human
agccgagaucacgccacu

SEQ ID NO: 1782628 - RNA, 21 nt, Human
ugcagccucaaccuccugggc

SEQ ID NO: 1782629 - RNA, 22 nt, Human
ugcagccucaaccuccugggcu

SEQ ID NO: 1782630 - RNA, 23 nt, Human
ugcagccucaaccuccugggcua

SEQ ID NO: 1782631 - RNA, 22 nt, Human
ugcagcucaaggaaaggccuga

SEQ ID NO: 1782632 - RNA, 13 nt, Human
agccucuggguca

SEQ ID NO: 1782633 - RNA, 13 nt, Human
agccucuccugua

SEQ ID NO: 1782634 - RNA, 18 nt, Human
ugcagacucuacagaggc

SEQ ID NO: 1782635 - RNA, 16 nt, Human
ugcagacucuacagag

SEQ ID NO: 1782636 - RNA, 17 nt, Human
ugcagacucuacagagg

SEQ ID NO: 1782637 - RNA, 16 nt, Human
agcccuuagcagggaa

SEQ ID NO: 1782638 - RNA, 18 nt, Human
agcccuguggaugagccc

SEQ ID NO: 1782639 - RNA, 19 nt, Human
agcccuguggaugagcccu

SEQ ID NO: 1782640 - RNA, 22 nt, Human
agcccuguggaugagcccucag

SEQ ID NO: 1782641 - RNA, 23 nt, Human
agcccuguggaugagcccucaga

SEQ ID NO: 1782642 - RNA, 21 nt, Human
agcccuuagcagggaaacagc

SEQ ID NO: 1782643 - RNA, 15 nt, Human
agcccuuaucugugc

SEQ ID NO: 1782644 - RNA, 18 nt, Human
agcccuuaucugugcuca

SEQ ID NO: 1782645 - RNA, 17 nt, Human
agccgagaucacgccac

SEQ ID NO: 1782646 - RNA, 22 nt, Human
ugcagacaggcaagcaccuccu

SEQ ID NO: 1782647 - RNA, 11 nt, Human
agcccuggcag

SEQ ID NO: 1782648 - RNA, 22 nt, Human
ugcacacaccagagcccaccuu

SEQ ID NO: 1782649 - RNA, 21 nt, Human
ugcacacaccagagcccaccu

SEQ ID NO: 1782650 - RNA, 17 nt, Human
ugcacacaccagagccc

SEQ ID NO: 1782651 - RNA, 18 nt, Human
ugcacacaccagagccca

SEQ ID NO: 1782652 - RNA, 14 nt, Human
agcccugguggcag

SEQ ID NO: 1782653 - RNA, 15 nt, Human
agcccugguggcagu

SEQ ID NO: 1782654 - RNA, 16 nt, Human
agcccugguggcagug

SEQ ID NO: 1782655 - RNA, 23 nt, Human
agccccauucugccugcccaggc

SEQ ID NO: 1782656 - RNA, 22 nt, Human
agccccucuuucuguccccucu

SEQ ID NO: 1782657 - RNA, 21 nt, Human
agccccauucugccugcccag

SEQ ID NO: 1782658 - RNA, 22 nt, Human
agccccauucugccugcccagg

SEQ ID NO: 1782659 - RNA, 19 nt, Human
agcccagggcaucuugcug

SEQ ID NO: 1782660 - RNA, 22 nt, Human
agcccagggcaucuugcuggcu

SEQ ID NO: 1782661 - RNA, 23 nt, Human
agcccagggcaucuugcuggcua

SEQ ID NO: 1782662 - RNA, 14 nt, Human
ugcaaacgcugccu

SEQ ID NO: 1782663 - RNA, 15 nt, Human
ugcaaacgcugccug

SEQ ID NO: 1782664 - RNA, 16 nt, Human
ugcaaacgcugccugc

SEQ ID NO: 1782665 - RNA, 17 nt, Human
ugcaaacgcugccugcc

SEQ ID NO: 1782666 - RNA, 19 nt, Human
ugcaaacgcugccugccca

SEQ ID NO: 1782667 - RNA, 21 nt, Human
ugcaaacgcugccugcccgua

SEQ ID NO: 1782668 - RNA, 21 nt, Human
ugcaaacgcugccugccggua

SEQ ID NO: 1782669 - RNA, 12 nt, Human
ugcaauaaugca

SEQ ID NO: 1782670 - RNA, 14 nt, Human
ugcaauaaugcagu

SEQ ID NO: 1782671 - RNA, 15 nt, Human
ugcaauaaugcagua

SEQ ID NO: 1782672 - RNA, 16 nt, Human
ugcaauaaugcaguau

SEQ ID NO: 1782673 - RNA, 18 nt, Human
ugcaauaaugcaguaugg

SEQ ID NO: 1782674 - RNA, 20 nt, Human
ugcaauaaugcaguauggua

SEQ ID NO: 1782675 - RNA, 12 nt, Human
ugcaagucucuu

SEQ ID NO: 1782676 - RNA, 14 nt, Human
ugccucugacacac

SEQ ID NO: 1782677 - RNA, 16 nt, Human
ugccucugacacacag

SEQ ID NO: 1782678 - RNA, 11 nt, Human
ugccucugccu

SEQ ID NO: 1782679 - RNA, 12 nt, Human
ugccucugccuc

SEQ ID NO: 1782680 - RNA, 17 nt, Human
ugccugcccaggccccu

SEQ ID NO: 1782681 - RNA, 18 nt, Human
ugccugcccaggccccug

SEQ ID NO: 1782682 - RNA, 19 nt, Human
ugccugcccaggccccugc

SEQ ID NO: 1782683 - RNA, 23 nt, Human
agcugcuuuugucuaugggacuc

SEQ ID NO: 1782684 - RNA, 24 nt, Human
agcugcuuuugucuaugggacuca

SEQ ID NO: 1782685 - RNA, 13 nt, Human
agcugccuguuca

SEQ ID NO: 1782686 - RNA, 22 nt, Human
agcugcuuuugucuaugggacu

SEQ ID NO: 1782687 - RNA, 15 nt, Human
agcucuucuccaggc

SEQ ID NO: 1782688 - RNA, 16 nt, Human
agcucuucuccaggcu

SEQ ID NO: 1782689 - RNA, 17 nt, Human
agcucuucuccaggcug

SEQ ID NO: 1782690 - RNA, 13 nt, Human
ugcccuguguacu

SEQ ID NO: 1782691 - RNA, 15 nt, Human
ugcccuguguacuuc

SEQ ID NO: 1782692 - RNA, 20 nt, Human
ugcccuguguacuucccggg

SEQ ID NO: 1782693 - RNA, 18 nt, Human
ugccucaggaggcaggac

SEQ ID NO: 1782694 - RNA, 21 nt, Human
ugccucaggaggcaggaccuu

SEQ ID NO: 1782695 - RNA, 13 nt, Human
agcuccagcucac

SEQ ID NO: 1782696 - RNA, 17 nt, Human
agcuccagcucaccagc

SEQ ID NO: 1782697 - RNA, 22 nt, Human
ugcccuacuauagcaguuuuua

SEQ ID NO: 1782698 - RNA, 14 nt, Human
ugcccuccucacuc

SEQ ID NO: 1782699 - RNA, 23 nt, Human
ugcccuccugacccauugcuguu

SEQ ID NO: 1782700 - RNA, 14 nt, Human
ugcccucucaggcc

SEQ ID NO: 1782701 - RNA, 13 nt, Human
agcucuacccagg

SEQ ID NO: 1782702 - RNA, 15 nt, Human
agcucuacccagggc

SEQ ID NO: 1782703 - RNA, 17 nt, Human
agcucuacccagggccu

SEQ ID NO: 1782704 - RNA, 19 nt, Human
agcucuacccagggccugc

SEQ ID NO: 1782705 - RNA, 20 nt, Human
agcucuacccagggccugca

SEQ ID NO: 1782706 - RNA, 21 nt, Human
agcucuacccagggccugcag

SEQ ID NO: 1782707 - RNA, 17 nt, Human
agcucuuacucuuuccu

SEQ ID NO: 1782708 - RNA, 18 nt, Human
agcucuuacucuuuccua

SEQ ID NO: 1782709 - RNA, 19 nt, Human
agcucuuacucuuuccuau

SEQ ID NO: 1782710 - RNA, 22 nt, Human
agcuccuucuguccuacucugu

SEQ ID NO: 1782711 - RNA, 23 nt, Human
agcuccuucuguccuacucugug

SEQ ID NO: 1782712 - RNA, 21 nt, Human
agcuccagcucaccagcccca

SEQ ID NO: 1782713 - RNA, 18 nt, Human
agcuccagcucaccagcc

SEQ ID NO: 1782714 - RNA, 19 nt, Human
agcuccagcucaccagccc

SEQ ID NO: 1782715 - RNA, 18 nt, Human
agcuauguuauauugaaa

SEQ ID NO: 1782716 - RNA, 22 nt, Human
agcuauguuauauugaaaaaau

SEQ ID NO: 1782717 - RNA, 20 nt, Human
agcuauguuauauugaaaaa

SEQ ID NO: 1782718 - RNA, 21 nt, Human
agcuaggccuggccagaugca

SEQ ID NO: 1782719 - RNA, 13 nt, Human
agcgugagccacu

SEQ ID NO: 1782720 - RNA, 19 nt, Human
agcguccuccucugugacc

SEQ ID NO: 1782721 - RNA, 17 nt, Human
agcucaggugucccugc

SEQ ID NO: 1782722 - RNA, 15 nt, Human
ugcccaggccccugc

SEQ ID NO: 1782723 - RNA, 17 nt, Human
ugcccaggccccugcca

SEQ ID NO: 1782724 - RNA, 18 nt, Human
ugcccaggccccugccac

SEQ ID NO: 1782725 - RNA, 18 nt, Human
ugcccagcuauaccugug

SEQ ID NO: 1782726 - RNA, 20 nt, Human
ugcccagcuauaccugugcc

SEQ ID NO: 1782727 - RNA, 21 nt, Human
ugcccagcuauaccugugccu

SEQ ID NO: 1782728 - RNA, 22 nt, Human
ugcccagcuauaccugugccuc

SEQ ID NO: 1782729 - RNA, 16 nt, Human
ugccccaucuccccuc

SEQ ID NO: 1782730 - RNA, 19 nt, Human
ugccccaucuccccucagc

SEQ ID NO: 1782731 - RNA, 21 nt, Human
ugccccaucuccccucagcuc

SEQ ID NO: 1782732 - RNA, 23 nt, Human
ugccagcucuguaucaggaccca

SEQ ID NO: 1782733 - RNA, 22 nt, Human
agcggggacagcuccuucuguc

SEQ ID NO: 1782734 - RNA, 15 nt, Human
agcguccuccucugu

SEQ ID NO: 1782735 - RNA, 16 nt, Human
agcguccuccucugug

SEQ ID NO: 1782736 - RNA, 17 nt, Human
agcguccuccucuguga

SEQ ID NO: 1782737 - RNA, 14 nt, Human
agcgggaaaaggag

SEQ ID NO: 1782738 - RNA, 19 nt, Human
agcggggacagcuccuucu

SEQ ID NO: 1782739 - RNA, 20 nt, Human
agcggggacagcuccuucug

SEQ ID NO: 1782740 - RNA, 22 nt, Human
agcgauucuucugcuucagccu

SEQ ID NO: 1782741 - RNA, 14 nt, Human
ugcagcucccuggc

SEQ ID NO: 1782742 - RNA, 18 nt, Human
ugcagcucccuggcuucu

SEQ ID NO: 1782743 - RNA, 19 nt, Human
ugcagcucccuggcuucug

SEQ ID NO: 1782744 - RNA, 20 nt, Human
ugcagcucccuggcuucugu

SEQ ID NO: 1782745 - RNA, 16 nt, Human
ugcauuuaaauacagu

SEQ ID NO: 1782746 - RNA, 22 nt, Human
ugcauuuaaauacagucuucca

SEQ ID NO: 1782747 - RNA, 24 nt, Human
ugcauuuaaauacagucuuccauu

SEQ ID NO: 1782748 - RNA, 16 nt, Human
agcgcuuuuccuuggc

SEQ ID NO: 1782749 - RNA, 16 nt, Human
ugcuuuuaacucuaga

SEQ ID NO: 1782750 - RNA, 17 nt, Human
ugcuuuuaacucuagaa

SEQ ID NO: 1782751 - RNA, 19 nt, Human
aggacauugcggacagcca

SEQ ID NO: 1782752 - RNA, 23 nt, Human
aggacauugcggacagccacggc

SEQ ID NO: 1782753 - RNA, 15 nt, Human
aggacauugcggaca

SEQ ID NO: 1782754 - RNA, 17 nt, Human
aggacauugcggacagc

SEQ ID NO: 1782755 - RNA, 18 nt, Human
aggacauugcggacagcc

SEQ ID NO: 1782756 - RNA, 20 nt, Human
aggacuuccccggagggcug

SEQ ID NO: 1782757 - RNA, 21 nt, Human
aggacuuccccggagggcugc

SEQ ID NO: 1782758 - RNA, 14 nt, Human
aggacauuucucua

SEQ ID NO: 1782759 - RNA, 19 nt, Human
aggacugagcacccucugg

SEQ ID NO: 1782760 - RNA, 20 nt, Human
aggacugagcacccucugga

SEQ ID NO: 1782761 - RNA, 14 nt, Human
aggacugugaugcc

SEQ ID NO: 1782762 - RNA, 20 nt, Human
aggacugugaugcccugccc

SEQ ID NO: 1782763 - RNA, 21 nt, Human
aggacugugaugcccugcccu

SEQ ID NO: 1782764 - RNA, 23 nt, Human
aggagccaguuugccggauacaa

SEQ ID NO: 1782765 - RNA, 22 nt, Human
aggagccccgaggccuucucug

SEQ ID NO: 1782766 - RNA, 23 nt, Human
aggacuuuucuuuguggcuuccu

SEQ ID NO: 1782767 - RNA, 14 nt, Human
aggaggcaggaccu

SEQ ID NO: 1782768 - RNA, 20 nt, Human
aggaugagcucuacccaggg

SEQ ID NO: 1782769 - RNA, 15 nt, Human
uggacacagcucuuc

SEQ ID NO: 1782770 - RNA, 16 nt, Human
uggacacagcucuucu

SEQ ID NO: 1782771 - RNA, 18 nt, Human
uggacacagcucuucucc

SEQ ID NO: 1782772 - RNA, 21 nt, Human
uggacacagcucuucuccagg

SEQ ID NO: 1782773 - RNA, 13 nt, Human
uggaccagugguc

SEQ ID NO: 1782774 - RNA, 18 nt, Human
uggaccaguggucucaca

SEQ ID NO: 1782775 - RNA, 16 nt, Human
uggacccagggaacag

SEQ ID NO: 1782776 - RNA, 13 nt, Human
uggacccuuccau

SEQ ID NO: 1782777 - RNA, 19 nt, Human
aggauuuugauccaagcug

SEQ ID NO: 1782778 - RNA, 21 nt, Human
ugcucugcugacagacacagg

SEQ ID NO: 1782779 - RNA, 22 nt, Human
ugcucugcugacagacacaggc

SEQ ID NO: 1782780 - RNA, 12 nt, Human
ugcucugcuuca

SEQ ID NO: 1782781 - RNA, 19 nt, Human
agcugggacuacaggcacc

SEQ ID NO: 1782782 - RNA, 16 nt, Human
agcugggacuacaggc

SEQ ID NO: 1782783 - RNA, 18 nt, Human
agcugggacuacaggcac

SEQ ID NO: 1782784 - RNA, 11 nt, Human
aggaauuuaaa

SEQ ID NO: 1782785 - RNA, 18 nt, Human
ugcuggcuguuggcuggg

SEQ ID NO: 1782786 - RNA, 13 nt, Human
ugcuggaggccuc

SEQ ID NO: 1782787 - RNA, 16 nt, Human
ugcuggaggccucagg

SEQ ID NO: 1782788 - RNA, 17 nt, Human
ugcuggaggccucaggu

SEQ ID NO: 1782789 - RNA, 20 nt, Human
ugcuggaggccucaggugcu

SEQ ID NO: 1782790 - RNA, 21 nt, Human
ugcuggaggccucaggugcug

SEQ ID NO: 1782791 - RNA, 21 nt, Human
ugcugucccauagucccugcc

SEQ ID NO: 1782792 - RNA, 22 nt, Human
aggacagggaggugaccccagg

SEQ ID NO: 1782793 - RNA, 23 nt, Human
aggacacuaaccacgcuggaccu

SEQ ID NO: 1782794 - RNA, 19 nt, Human
aggacacuaaccacgcugg

SEQ ID NO: 1782795 - RNA, 13 nt, Human
ugcuucagccucc

SEQ ID NO: 1782796 - RNA, 14 nt, Human
ugcuucagccuccc

SEQ ID NO: 1782797 - RNA, 18 nt, Human
ugcugugaacccuggggc

SEQ ID NO: 1782798 - RNA, 21 nt, Human
ugcugugaacccuggggccug

SEQ ID NO: 1782799 - RNA, 22 nt, Human
ugcugugaacccuggggccuga

SEQ ID NO: 1782800 - RNA, 15 nt, Human
uggccaggcuggucu

SEQ ID NO: 1782801 - RNA, 17 nt, Human
uggccaggcuggucuca

SEQ ID NO: 1782802 - RNA, 15 nt, Human
aggccucaacuccuc

SEQ ID NO: 1782803 - RNA, 18 nt, Human
aggccucaacuccuccca

SEQ ID NO: 1782804 - RNA, 19 nt, Human
aggccucaacuccucccau

SEQ ID NO: 1782805 - RNA, 20 nt, Human
aggccucaacuccucccaua

SEQ ID NO: 1782806 - RNA, 17 nt, Human
aggcccucgcugccagc

SEQ ID NO: 1782807 - RNA, 22 nt, Human
aggcccucgcugccagcucugu

SEQ ID NO: 1782808 - RNA, 14 nt, Human
aggccauugugaac

SEQ ID NO: 1782809 - RNA, 17 nt, Human
aggccauugugaaccaa

SEQ ID NO: 1782810 - RNA, 18 nt, Human
aggccauugugaaccaau

SEQ ID NO: 1782811 - RNA, 19 nt, Human
aggccauugugaaccaaug

SEQ ID NO: 1782812 - RNA, 20 nt, Human
aggccauugugaaccaaugc

SEQ ID NO: 1782813 - RNA, 14 nt, Human
aggccuccuggccc

SEQ ID NO: 1782814 - RNA, 14 nt, Human
aggccucaggugcu

SEQ ID NO: 1782815 - RNA, 15 nt, Human
aggccucaggugcug

SEQ ID NO: 1782816 - RNA, 19 nt, Human
aggccucaggugcugucca

SEQ ID NO: 1782817 - RNA, 21 nt, Human
aggccucaggugcuguccaug

SEQ ID NO: 1782818 - RNA, 22 nt, Human
aggccuggccagaugcaccagc

SEQ ID NO: 1782819 - RNA, 23 nt, Human
aggccuggccagaugcaccagcc

SEQ ID NO: 1782820 - RNA, 15 nt, Human
aggccuggccagaug

SEQ ID NO: 1782821 - RNA, 16 nt, Human
aggccuggccagaugc

SEQ ID NO: 1782822 - RNA, 17 nt, Human
aggccuggccagaugca

SEQ ID NO: 1782823 - RNA, 21 nt, Human
aggccuggccagaugcaccag

SEQ ID NO: 1782824 - RNA, 13 nt, Human
uggcccuagacuc

SEQ ID NO: 1782825 - RNA, 21 nt, Human
uggccccugcccggcugcgga

SEQ ID NO: 1782826 - RNA, 13 nt, Human
uggcagccuuggc

SEQ ID NO: 1782827 - RNA, 14 nt, Human
uggcacccaagacc

SEQ ID NO: 1782828 - RNA, 15 nt, Human
uggcacccggccccu

SEQ ID NO: 1782829 - RNA, 16 nt, Human
uggcacccggccccug

SEQ ID NO: 1782830 - RNA, 23 nt, Human
uggcacccaagaccucagggcac

SEQ ID NO: 1782831 - RNA, 17 nt, Human
uggauggguggauggcc

SEQ ID NO: 1782832 - RNA, 14 nt, Human
uggauggugugccu

SEQ ID NO: 1782833 - RNA, 20 nt, Human
uggaugccugguggcagcug

SEQ ID NO: 1782834 - RNA, 18 nt, Human
uggaugccugguggcagc

SEQ ID NO: 1782835 - RNA, 19 nt, Human
uggaugccugguggcagcu

SEQ ID NO: 1782836 - RNA, 16 nt, Human
aggccaaaccucuguu

SEQ ID NO: 1782837 - RNA, 17 nt, Human
aggccaaaccucuguuc

SEQ ID NO: 1782838 - RNA, 18 nt, Human
aggccaaaccucuguuca

SEQ ID NO: 1782839 - RNA, 22 nt, Human
aggccaaaccucuguucagugu

SEQ ID NO: 1782840 - RNA, 14 nt, Human
aggccaaaccucug

SEQ ID NO: 1782841 - RNA, 15 nt, Human
aggccaaaccucugu

SEQ ID NO: 1782842 - RNA, 18 nt, Human
uggacgagaaaacaauaa

SEQ ID NO: 1782843 - RNA, 19 nt, Human
aggcuccuuuagcgcccag

SEQ ID NO: 1782844 - RNA, 17 nt, Human
aggcuggcgagagucug

SEQ ID NO: 1782845 - RNA, 18 nt, Human
aggcuggcgagagucugg

SEQ ID NO: 1782846 - RNA, 19 nt, Human
aggcuggcgagagucuggc

SEQ ID NO: 1782847 - RNA, 20 nt, Human
aggcuggcgagagucuggcc

SEQ ID NO: 1782848 - RNA, 22 nt, Human
aggcuggcgagagucuggcccu

SEQ ID NO: 1782849 - RNA, 13 nt, Human
aggcuggcgugca

SEQ ID NO: 1782850 - RNA, 17 nt, Human
aggcuggcgugcagugg

SEQ ID NO: 1782851 - RNA, 12 nt, Human
aggcuggcauga

SEQ ID NO: 1782852 - RNA, 13 nt, Human
uggcuguuggcug

SEQ ID NO: 1782853 - RNA, 15 nt, Human
uggcuguuggcuggg

SEQ ID NO: 1782854 - RNA, 17 nt, Human
uggcuuaaaacaacacu

SEQ ID NO: 1782855 - RNA, 13 nt, Human
uggcugcuaacaa

SEQ ID NO: 1782856 - RNA, 15 nt, Human
uggcugcagggaguc

SEQ ID NO: 1782857 - RNA, 13 nt, Human
uggcugcagggag

SEQ ID NO: 1782858 - RNA, 14 nt, Human
uggcugcagggagu

SEQ ID NO: 1782859 - RNA, 12 nt, Human
uggcugcaaagg

SEQ ID NO: 1782860 - RNA, 18 nt, Human
uggcucaaguccucuuuu

SEQ ID NO: 1782861 - RNA, 22 nt, Human
uggcuauuagagaucaaccccu

SEQ ID NO: 1782862 - RNA, 18 nt, Human
aggcuggcgugcaguggu

SEQ ID NO: 1782863 - RNA, 20 nt, Human
aggcuggcgugcaguggugc

SEQ ID NO: 1782864 - RNA, 12 nt, Human
uucuuagaaauu

SEQ ID NO: 1782865 - RNA, 22 nt, Human
uucuuagaaauuuauuuccuag

SEQ ID NO: 1782866 - RNA, 13 nt, Human
uucuuagaaauuu

SEQ ID NO: 1782867 - RNA, 16 nt, Human
aucccaugagccucag

SEQ ID NO: 1782868 - RNA, 17 nt, Human
aucccaugagccucagc

SEQ ID NO: 1782869 - RNA, 18 nt, Human
aucccaugagccucagca

SEQ ID NO: 1782870 - RNA, 18 nt, Human
auccaucaucaugugugu

SEQ ID NO: 1782871 - RNA, 17 nt, Human
auccagguucagcuugu

SEQ ID NO: 1782872 - RNA, 15 nt, Human
uucugccugcccagg

SEQ ID NO: 1782873 - RNA, 16 nt, Human
uucugccugcccaggc

SEQ ID NO: 1782874 - RNA, 19 nt, Human
auccaagauauuuuaaaau

SEQ ID NO: 1782875 - RNA, 24 nt, Human
aucauucucugucucauccaucau

SEQ ID NO: 1782876 - RNA, 23 nt, Human
uucuccuccaugggagaaaauag

SEQ ID NO: 1782877 - RNA, 13 nt, Human
uucucuaucauuu

SEQ ID NO: 1782878 - RNA, 16 nt, Human
uucucuauaaaaaaua

SEQ ID NO: 1782879 - RNA, 18 nt, Human
uucucuauaaaaaauaug

SEQ ID NO: 1782880 - RNA, 21 nt, Human
uucucuauaaaaaauauguau

SEQ ID NO: 1782881 - RNA, 16 nt, Human
uucucuaucauuuaau

SEQ ID NO: 1782882 - RNA, 13 nt, Human
uucugaauuugca

SEQ ID NO: 1782883 - RNA, 14 nt, Human
uucugaauuugcaa

SEQ ID NO: 1782884 - RNA, 15 nt, Human
uucugaauuugcaaa

SEQ ID NO: 1782885 - RNA, 16 nt, Human
uucugaauuugcaaag

SEQ ID NO: 1782886 - RNA, 17 nt, Human
uucugaauuugcaaagu

SEQ ID NO: 1782887 - RNA, 18 nt, Human
uucugaauuugcaaagua

SEQ ID NO: 1782888 - RNA, 19 nt, Human
uucugaauuugcaaaguac

SEQ ID NO: 1782889 - RNA, 20 nt, Human
uucugaauuugcaaaguacu

SEQ ID NO: 1782890 - RNA, 21 nt, Human
uucugaauuugcaaaguacug

SEQ ID NO: 1782891 - RNA, 17 nt, Human
aucaggugcugccaucc

SEQ ID NO: 1782892 - RNA, 19 nt, Human
aucaggugcugccauccag

SEQ ID NO: 1782893 - RNA, 15 nt, Human
aucaggugcugccau

SEQ ID NO: 1782894 - RNA, 15 nt, Human
aucagugcucccuca

SEQ ID NO: 1782895 - RNA, 19 nt, Human
aucagucugauucccaagc

SEQ ID NO: 1782896 - RNA, 20 nt, Human
aucaguuacccacucggucc

SEQ ID NO: 1782897 - RNA, 22 nt, Human
aucaguuacccacucgguccca

SEQ ID NO: 1782898 - RNA, 23 nt, Human
aucaguuacccacucggucccag

SEQ ID NO: 1782899 - RNA, 12 nt, Human
aucauucucugu

SEQ ID NO: 1782900 - RNA, 14 nt, Human
aucauucucugucu

SEQ ID NO: 1782901 - RNA, 16 nt, Human
aucauucucugucuca

SEQ ID NO: 1782902 - RNA, 21 nt, Human
aucauucucugucucauccau

SEQ ID NO: 1782903 - RNA, 21 nt, Human
aucauccacugugccaugugc

SEQ ID NO: 1782904 - RNA, 18 nt, Human
aucaucauguguguccac

SEQ ID NO: 1782905 - RNA, 23 nt, Human
aucauccacugugccaugugcca

SEQ ID NO: 1782906 - RNA, 14 nt, Human
aucgugacaacacu

SEQ ID NO: 1782907 - RNA, 15 nt, Human
aucgugacaacacuu

SEQ ID NO: 1782908 - RNA, 18 nt, Human
aucuaaccucaucuucuu

SEQ ID NO: 1782909 - RNA, 13 nt, Human
aucuaaccucauc

SEQ ID NO: 1782910 - RNA, 14 nt, Human
aucuaaccucaucu

SEQ ID NO: 1782911 - RNA, 15 nt, Human
aucuaaccucaucuu

SEQ ID NO: 1782912 - RNA, 17 nt, Human
uugaauaaaaaccuuuu

SEQ ID NO: 1782913 - RNA, 21 nt, Human
auccucuuuagaguuagacug

SEQ ID NO: 1782914 - RNA, 20 nt, Human
auccucuuuagaguuagacu

SEQ ID NO: 1782915 - RNA, 19 nt, Human
auccucuuuagaguuagac

SEQ ID NO: 1782916 - RNA, 16 nt, Human
auccucuuuagaguua

SEQ ID NO: 1782917 - RNA, 23 nt, Human
auccucuuuagaguuagacuguu

SEQ ID NO: 1782918 - RNA, 22 nt, Human
auccucuuuagaguuagacugu

SEQ ID NO: 1782919 - RNA, 15 nt, Human
auccucuuuagaguu

SEQ ID NO: 1782920 - RNA, 13 nt, Human
auccucuuuagag

SEQ ID NO: 1782921 - RNA, 22 nt, Human
auccuggacaugaagauucuuu

SEQ ID NO: 1782922 - RNA, 17 nt, Human
auccuggcacccggccc

SEQ ID NO: 1782923 - RNA, 19 nt, Human
auccuggcacccggccccu

SEQ ID NO: 1782924 - RNA, 20 nt, Human
auccuggcacccggccccug

SEQ ID NO: 1782925 - RNA, 21 nt, Human
auccuggcacccggccccugc

SEQ ID NO: 1782926 - RNA, 22 nt, Human
auccuggcacccggccccugcu

SEQ ID NO: 1782927 - RNA, 23 nt, Human
auccuggcacccggccccugcug

SEQ ID NO: 1782928 - RNA, 20 nt, Human
auccuggggcauuaaaaaaa

SEQ ID NO: 1782929 - RNA, 22 nt, Human
aucggccuagggcccccacagu

SEQ ID NO: 1782930 - RNA, 12 nt, Human
uucccaggugcu

SEQ ID NO: 1782931 - RNA, 16 nt, Human
uucccaggugcuacac

SEQ ID NO: 1782932 - RNA, 13 nt, Human
auauugaauuuuu

SEQ ID NO: 1782933 - RNA, 16 nt, Human
auauugaauuuuuccu

SEQ ID NO: 1782934 - RNA, 13 nt, Human
auauuuacaaaug

SEQ ID NO: 1782935 - RNA, 15 nt, Human
aucacgccacugcac

SEQ ID NO: 1782936 - RNA, 17 nt, Human
aucacgccacugcacua

SEQ ID NO: 1782937 - RNA, 12 nt, Human
aucaacuuuuua

SEQ ID NO: 1782938 - RNA, 13 nt, Human
aucaacuuuuuau

SEQ ID NO: 1782939 - RNA, 16 nt, Human
aucaacuuuuuauugc

SEQ ID NO: 1782940 - RNA, 18 nt, Human
aucaacuuuuuauugccu

SEQ ID NO: 1782941 - RNA, 19 nt, Human
aucaacuuuuuauugccuu

SEQ ID NO: 1782942 - RNA, 15 nt, Human
uuccucucuauauuu

SEQ ID NO: 1782943 - RNA, 16 nt, Human
uuccucucuauauuuc

SEQ ID NO: 1782944 - RNA, 15 nt, Human
uuccugaaaugcagu

SEQ ID NO: 1782945 - RNA, 17 nt, Human
uuccugaaacuauauuu

SEQ ID NO: 1782946 - RNA, 20 nt, Human
uuccugaaacuauauuuugu

SEQ ID NO: 1782947 - RNA, 17 nt, Human
uuccugggaaauauucc

SEQ ID NO: 1782948 - RNA, 14 nt, Human
uuccuggccugaga

SEQ ID NO: 1782949 - RNA, 21 nt, Human
uuccugggaaauauucccuag

SEQ ID NO: 1782950 - RNA, 21 nt, Human
uuccuggcacuggaccccagc

SEQ ID NO: 1782951 - RNA, 14 nt, Human
uuccccuuuccugu

SEQ ID NO: 1782952 - RNA, 15 nt, Human
uuccccuuuccuguc

SEQ ID NO: 1782953 - RNA, 19 nt, Human
uuccccuuuccugucccac

SEQ ID NO: 1782954 - RNA, 21 nt, Human
auauuugaaucuugucucaau

SEQ ID NO: 1782955 - RNA, 19 nt, Human
auauuugaaucuugucuca

SEQ ID NO: 1782956 - RNA, 18 nt, Human
auauuugaaucuugucuc

SEQ ID NO: 1782957 - RNA, 17 nt, Human
auauuugaaucuugucu

SEQ ID NO: 1782958 - RNA, 22 nt, Human
uuccgacucuuucugagugccu

SEQ ID NO: 1782959 - RNA, 13 nt, Human
uuccgcuuggagc

SEQ ID NO: 1782960 - RNA, 19 nt, Human
uuccgcuuggagcagaggg

SEQ ID NO: 1782961 - RNA, 18 nt, Human
auauguagccuucacaca

SEQ ID NO: 1782962 - RNA, 21 nt, Human
auaugugugccuauuugugug

SEQ ID NO: 1782963 - RNA, 20 nt, Human
auaugacucacaugaugcau

SEQ ID NO: 1782964 - RNA, 13 nt, Human
auaugacucacau

SEQ ID NO: 1782965 - RNA, 16 nt, Human
auaugaauauauagug

SEQ ID NO: 1782966 - RNA, 14 nt, Human
auaugaauuguaca

SEQ ID NO: 1782967 - RNA, 15 nt, Human
auaugaauuguacag

SEQ ID NO: 1782968 - RNA, 24 nt, Human
uuccacggagccacuccucugacu

SEQ ID NO: 1782969 - RNA, 15 nt, Human
uuccacggagccacu

SEQ ID NO: 1782970 - RNA, 21 nt, Human
uuccacggagccacuccucug

SEQ ID NO: 1782971 - RNA, 22 nt, Human
uuccacggagccacuccucuga

SEQ ID NO: 1782972 - RNA, 14 nt, Human
uuccacaaagaaaa

SEQ ID NO: 1782973 - RNA, 16 nt, Human
uuccacaaagaaaauu

SEQ ID NO: 1782974 - RNA, 19 nt, Human
uuccaauucuaucuuuugu

SEQ ID NO: 1782975 - RNA, 21 nt, Human
uuccaauucuaucuuuuguuu

SEQ ID NO: 1782976 - RNA, 15 nt, Human
uucauuauuugucaa

SEQ ID NO: 1782977 - RNA, 16 nt, Human
uucauuauuugucaaa

SEQ ID NO: 1782978 - RNA, 21 nt, Human
uucauuauuugucaaauuguc

SEQ ID NO: 1782979 - RNA, 14 nt, Human
uucaggguuggccc

SEQ ID NO: 1782980 - RNA, 16 nt, Human
uucaggguuggccccu

SEQ ID NO: 1782981 - RNA, 17 nt, Human
uucaggguuggccccug

SEQ ID NO: 1782982 - RNA, 19 nt, Human
uucaggguuggccccugcc

SEQ ID NO: 1782983 - RNA, 22 nt, Human
uucaggguuggccccugcccgg

SEQ ID NO: 1782984 - RNA, 15 nt, Human
uucagguaacaggca

SEQ ID NO: 1782985 - RNA, 16 nt, Human
uucagguaacaggcag

SEQ ID NO: 1782986 - RNA, 12 nt, Human
uucagccuuaau

SEQ ID NO: 1782987 - RNA, 20 nt, Human
uucagauuguggaauguugg

SEQ ID NO: 1782988 - RNA, 22 nt, Human
uucagauuguggaauguuggau

SEQ ID NO: 1782989 - RNA, 17 nt, Human
uucacuuuugacaaagg

SEQ ID NO: 1782990 - RNA, 20 nt, Human
uucacuuuugacaaaggcaa

SEQ ID NO: 1782991 - RNA, 14 nt, Human
uucacuuucauuuu

SEQ ID NO: 1782992 - RNA, 15 nt, Human
uucacuuucauuuuu

SEQ ID NO: 1782993 - RNA, 21 nt, Human
auauauguuuuaagaggcagg

SEQ ID NO: 1782994 - RNA, 22 nt, Human
auauauguuuuaagaggcaggg

SEQ ID NO: 1782995 - RNA, 13 nt, Human
auauaugcuaagu

SEQ ID NO: 1782996 - RNA, 17 nt, Human
uucagguaacaggcaga

SEQ ID NO: 1782997 - RNA, 21 nt, Human
uucaguaacccccacuggacu

SEQ ID NO: 1782998 - RNA, 21 nt, Human
uucauaugaaaggugccaugg

SEQ ID NO: 1782999 - RNA, 23 nt, Human
uucauaugaaaggugccauggaa

SEQ ID NO: 1783000 - RNA, 22 nt, Human
uuucaccauuugauuauguagc

SEQ ID NO: 1783001 - RNA, 24 nt, Human
uuucacucuuauugcccacgcugg

SEQ ID NO: 1783002 - RNA, 20 nt, Human
uuucauaguuggggucauag

SEQ ID NO: 1783003 - RNA, 14 nt, Human
uuucauaaguauuu

SEQ ID NO: 1783004 - RNA, 17 nt, Human
uuucauaaguauuucaa

SEQ ID NO: 1783005 - RNA, 18 nt, Human
uuucauaaguauuucaaa

SEQ ID NO: 1783006 - RNA, 19 nt, Human
uuucauaaguauuucaaau

SEQ ID NO: 1783007 - RNA, 22 nt, Human
augcuggcuguuggcugggggc

SEQ ID NO: 1783008 - RNA, 15 nt, Human
uuuauuuuuuacauu

SEQ ID NO: 1783009 - RNA, 16 nt, Human
auggaauaacucugug

SEQ ID NO: 1783010 - RNA, 16 nt, Human
auggaaccaggcuugg

SEQ ID NO: 1783011 - RNA, 17 nt, Human
auggaaccaggcuugga

SEQ ID NO: 1783012 - RNA, 19 nt, Human
augcuuaucaucuaaagau

SEQ ID NO: 1783013 - RNA, 15 nt, Human
augccgauuucugua

SEQ ID NO: 1783014 - RNA, 16 nt, Human
augccgauuucuguaa

SEQ ID NO: 1783015 - RNA, 19 nt, Human
augccgauuucuguaaacu

SEQ ID NO: 1783016 - RNA, 17 nt, Human
augccgcgaugggucag

SEQ ID NO: 1783017 - RNA, 18 nt, Human
augccgcgaugggucagg

SEQ ID NO: 1783018 - RNA, 14 nt, Human
augcgcagugccuu

SEQ ID NO: 1783019 - RNA, 16 nt, Human
augcgcauucuaaccu

SEQ ID NO: 1783020 - RNA, 21 nt, Human
augcgcauucuaaccuggagg

SEQ ID NO: 1783021 - RNA, 22 nt, Human
augcgcauucuaaccuggaggu

SEQ ID NO: 1783022 - RNA, 14 nt, Human
uuuaccugcugcuu

SEQ ID NO: 1783023 - RNA, 11 nt, Human
uuuauuaaaua

SEQ ID NO: 1783024 - RNA, 12 nt, Human
uuuauuaaauaa

SEQ ID NO: 1783025 - RNA, 12 nt, Human
uuuauuaaauag

SEQ ID NO: 1783026 - RNA, 19 nt, Human
uuuauuaaauaguuaauau

SEQ ID NO: 1783027 - RNA, 23 nt, Human
uuuacuagggaucccucaucugu

SEQ ID NO: 1783028 - RNA, 18 nt, Human
uuuacuagggaucccuca

SEQ ID NO: 1783029 - RNA, 15 nt, Human
uuuacuaugccugug

SEQ ID NO: 1783030 - RNA, 15 nt, Human
uuuaguagagacagg

SEQ ID NO: 1783031 - RNA, 17 nt, Human
uuuaggguucugccucu

SEQ ID NO: 1783032 - RNA, 17 nt, Human
augggccuccugugugu

SEQ ID NO: 1783033 - RNA, 12 nt, Human
uuuccugugucu

SEQ ID NO: 1783034 - RNA, 15 nt, Human
uuuccuuccagccca

SEQ ID NO: 1783035 - RNA, 16 nt, Human
uuuccuuccagcccag

SEQ ID NO: 1783036 - RNA, 20 nt, Human
uuuccuuuuuucccauaaga

SEQ ID NO: 1783037 - RNA, 22 nt, Human
uuuccuuuuuucccauaagaca

SEQ ID NO: 1783038 - RNA, 15 nt, Human
uuuccuuuuuuaaaa

SEQ ID NO: 1783039 - RNA, 16 nt, Human
uuuccuuuuuuaaaaa

SEQ ID NO: 1783040 - RNA, 21 nt, Human
uuuccuuuuuuaaaaaugcaa

SEQ ID NO: 1783041 - RNA, 12 nt, Human
uuuccuucuuug

SEQ ID NO: 1783042 - RNA, 13 nt, Human
uuucgccuuuccu

SEQ ID NO: 1783043 - RNA, 16 nt, Human
uuucgccuuuccucuc

SEQ ID NO: 1783044 - RNA, 13 nt, Human
uuucgaggccuga

SEQ ID NO: 1783045 - RNA, 17 nt, Human
augggagccgggucugc

SEQ ID NO: 1783046 - RNA, 20 nt, Human
augggagccgggucugccuc

SEQ ID NO: 1783047 - RNA, 19 nt, Human
augggcaacccccagccug

SEQ ID NO: 1783048 - RNA, 21 nt, Human
augggcaacccccagccugcu

SEQ ID NO: 1783049 - RNA, 14 nt, Human
augggcagagccca

SEQ ID NO: 1783050 - RNA, 15 nt, Human
augggccuccugugu

SEQ ID NO: 1783051 - RNA, 13 nt, Human
uuucuuuguggcu

SEQ ID NO: 1783052 - RNA, 14 nt, Human
uuucuuuuguaaua

SEQ ID NO: 1783053 - RNA, 19 nt, Human
uuucuuuuguaauaaacua

SEQ ID NO: 1783054 - RNA, 21 nt, Human
uuucuggcagguccuccccuc

SEQ ID NO: 1783055 - RNA, 23 nt, Human
uuucuggcagguccuccccucuc

SEQ ID NO: 1783056 - RNA, 15 nt, Human
uuucugccuccuuua

SEQ ID NO: 1783057 - RNA, 17 nt, Human
uuucuauuucuccucca

SEQ ID NO: 1783058 - RNA, 19 nt, Human
uuucucagacuuuggaaaa

SEQ ID NO: 1783059 - RNA, 15 nt, Human
uuucuccagggucag

SEQ ID NO: 1783060 - RNA, 12 nt, Human
augagccucagc

SEQ ID NO: 1783061 - RNA, 15 nt, Human
augagccucagcauc

SEQ ID NO: 1783062 - RNA, 16 nt, Human
augagccucagcaucc

SEQ ID NO: 1783063 - RNA, 17 nt, Human
augagaguuuuggaugc

SEQ ID NO: 1783064 - RNA, 15 nt, Human
augagaguuuuggau

SEQ ID NO: 1783065 - RNA, 21 nt, Human
augagaguuuuggaugcagug

SEQ ID NO: 1783066 - RNA, 20 nt, Human
augagaguuuuggaugcagu

SEQ ID NO: 1783067 - RNA, 18 nt, Human
augagaguuuuggaugca

SEQ ID NO: 1783068 - RNA, 23 nt, Human
augacauacgcuuuuaaugaaaa

SEQ ID NO: 1783069 - RNA, 17 nt, Human
augagccucagcauccu

SEQ ID NO: 1783070 - RNA, 18 nt, Human
augagccucagcauccug

SEQ ID NO: 1783071 - RNA, 19 nt, Human
augagccucagcauccugg

SEQ ID NO: 1783072 - RNA, 18 nt, Human
uugucacacacuuuggcu

SEQ ID NO: 1783073 - RNA, 15 nt, Human
uugucauuagccuga

SEQ ID NO: 1783074 - RNA, 14 nt, Human
uugucauuagccug

SEQ ID NO: 1783075 - RNA, 20 nt, Human
uugucauuagccugaguaga

SEQ ID NO: 1783076 - RNA, 19 nt, Human
uugucauuagccugaguag

SEQ ID NO: 1783077 - RNA, 18 nt, Human
uugucauuagccugagua

SEQ ID NO: 1783078 - RNA, 17 nt, Human
uugucauuagccugagu

SEQ ID NO: 1783079 - RNA, 15 nt, Human
augcaaagaaaauca

SEQ ID NO: 1783080 - RNA, 19 nt, Human
uuguuuuucauucagucuu

SEQ ID NO: 1783081 - RNA, 19 nt, Human
uugugaagaaaaauaaagu

SEQ ID NO: 1783082 - RNA, 13 nt, Human
uugugaaccaaug

SEQ ID NO: 1783083 - RNA, 17 nt, Human
uugugaaccaaugcaag

SEQ ID NO: 1783084 - RNA, 23 nt, Human
uuguucccuauuuuucucuccug

SEQ ID NO: 1783085 - RNA, 12 nt, Human
uuguucucuggg

SEQ ID NO: 1783086 - RNA, 13 nt, Human
uuguucucuggga

SEQ ID NO: 1783087 - RNA, 15 nt, Human
uuguucucugggaga

SEQ ID NO: 1783088 - RNA, 20 nt, Human
uuguucucugggagaaaauc

SEQ ID NO: 1783089 - RNA, 19 nt, Human
uugugugugcucugcuuca

SEQ ID NO: 1783090 - RNA, 23 nt, Human
augaucacggcucacugcagccu

SEQ ID NO: 1783091 - RNA, 18 nt, Human
augaucacggcucacugc

SEQ ID NO: 1783092 - RNA, 19 nt, Human
augaucacggcucacugca

SEQ ID NO: 1783093 - RNA, 15 nt, Human
augaucacggcucac

SEQ ID NO: 1783094 - RNA, 20 nt, Human
uuguuggaguguuucuaaua

SEQ ID NO: 1783095 - RNA, 14 nt, Human
uuguugcggaugga

SEQ ID NO: 1783096 - RNA, 17 nt, Human
uugggguacccacugcu

SEQ ID NO: 1783097 - RNA, 20 nt, Human
augaaccacaucuugcucug

SEQ ID NO: 1783098 - RNA, 13 nt, Human
augaaccacaucu

SEQ ID NO: 1783099 - RNA, 18 nt, Human
uugguuuuuaaaacccag

SEQ ID NO: 1783100 - RNA, 23 nt, Human
uugguuuuuacuuaacuguuuca

SEQ ID NO: 1783101 - RNA, 18 nt, Human
uugguucccccacugauc

SEQ ID NO: 1783102 - RNA, 21 nt, Human
uugguucaauaaagcacugag

SEQ ID NO: 1783103 - RNA, 22 nt, Human
uugggguacccacugcucuggu

SEQ ID NO: 1783104 - RNA, 22 nt, Human
augacacuuguccccaaauccg

SEQ ID NO: 1783105 - RNA, 15 nt, Human
augacagccugcagc

SEQ ID NO: 1783106 - RNA, 16 nt, Human
augacagccugcagca

SEQ ID NO: 1783107 - RNA, 14 nt, Human
uuguauauucacuu

SEQ ID NO: 1783108 - RNA, 13 nt, Human
uuguauauucacu

SEQ ID NO: 1783109 - RNA, 13 nt, Human
uuggacccuucca

SEQ ID NO: 1783110 - RNA, 14 nt, Human
uuggacccuuccau

SEQ ID NO: 1783111 - RNA, 16 nt, Human
uuggacccuuccaugg

SEQ ID NO: 1783112 - RNA, 12 nt, Human
uuggccugggcc

SEQ ID NO: 1783113 - RNA, 22 nt, Human
uuggcuaggaccccuccaugug

SEQ ID NO: 1783114 - RNA, 23 nt, Human
uuggcuauuagagaucaaccccu

SEQ ID NO: 1783115 - RNA, 14 nt, Human
uuggcugcagggag

SEQ ID NO: 1783116 - RNA, 17 nt, Human
aucuuucaaaccagcuu

SEQ ID NO: 1783117 - RNA, 18 nt, Human
aucuuucaaaccagcuuc

SEQ ID NO: 1783118 - RNA, 14 nt, Human
augaaaugagguca

SEQ ID NO: 1783119 - RNA, 13 nt, Human
uugcuaauguugc

SEQ ID NO: 1783120 - RNA, 14 nt, Human
uugcuaauguugcu

SEQ ID NO: 1783121 - RNA, 11 nt, Human
uugcugaauag

SEQ ID NO: 1783122 - RNA, 13 nt, Human
uugcuuuugcuuc

SEQ ID NO: 1783123 - RNA, 18 nt, Human
uugcugaauaggcgauca

SEQ ID NO: 1783124 - RNA, 14 nt, Human
auuugaaucuuguc

SEQ ID NO: 1783125 - RNA, 16 nt, Human
auuugaaucuugucuc

SEQ ID NO: 1783126 - RNA, 15 nt, Human
auuugaaucuugucu

SEQ ID NO: 1783127 - RNA, 22 nt, Human
auuugaaucuugucucaaugcu

SEQ ID NO: 1783128 - RNA, 20 nt, Human
auuugaaucuugucucaaug

SEQ ID NO: 1783129 - RNA, 18 nt, Human
auuugaaucuugucucaa

SEQ ID NO: 1783130 - RNA, 22 nt, Human
auuuuaccuguuuuuguuucuu

SEQ ID NO: 1783131 - RNA, 22 nt, Human
auuuucaguuauuauauuuaca

SEQ ID NO: 1783132 - RNA, 20 nt, Human
auuuucauaaguauuucaaa

SEQ ID NO: 1783133 - RNA, 21 nt, Human
auuuucauaaguauuucaaau

SEQ ID NO: 1783134 - RNA, 22 nt, Human
auuuucauaaguauuucaaauu

SEQ ID NO: 1783135 - RNA, 21 nt, Human
auuuuccuaauaaaguucugu

SEQ ID NO: 1783136 - RNA, 22 nt, Human
auuuuccaaaaguggccucuuu

SEQ ID NO: 1783137 - RNA, 13 nt, Human
auuuucaaaagau

SEQ ID NO: 1783138 - RNA, 15 nt, Human
auuuucaaaagauaa

SEQ ID NO: 1783139 - RNA, 19 nt, Human
auuuucaaaagauaauauu

SEQ ID NO: 1783140 - RNA, 24 nt, Human
auuuucaaaagauaauauuuuaca

SEQ ID NO: 1783141 - RNA, 16 nt, Human
auugaaauauuauaga

SEQ ID NO: 1783142 - RNA, 16 nt, Human
auugaaagaauuaucc

SEQ ID NO: 1783143 - RNA, 18 nt, Human
auugggucauagaaauuc

SEQ ID NO: 1783144 - RNA, 17 nt, Human
auucugcucuauuauau

SEQ ID NO: 1783145 - RNA, 18 nt, Human
auuguccaauccuauguu

SEQ ID NO: 1783146 - RNA, 14 nt, Human
auuguauuuauuca

SEQ ID NO: 1783147 - RNA, 11 nt, Human
auuguauuuau

SEQ ID NO: 1783148 - RNA, 23 nt, Human
auuguauuuauucaauaaaguau

SEQ ID NO: 1783149 - RNA, 20 nt, Human
auuguauuuauucaauaaag

SEQ ID NO: 1783150 - RNA, 19 nt, Human
auuguauuuauucaauaaa

SEQ ID NO: 1783151 - RNA, 18 nt, Human
auuguauuuauucaauaa

SEQ ID NO: 1783152 - RNA, 16 nt, Human
auuguauuuauucaau

SEQ ID NO: 1783153 - RNA, 15 nt, Human
auuguguauauucau

SEQ ID NO: 1783154 - RNA, 14 nt, Human
auuuauucugcuca

SEQ ID NO: 1783155 - RNA, 16 nt, Human
auuuaacaaaaagugc

SEQ ID NO: 1783156 - RNA, 20 nt, Human
auuuaacaaaaagugcuuca

SEQ ID NO: 1783157 - RNA, 15 nt, Human
auuuaguuugauuau

SEQ ID NO: 1783158 - RNA, 22 nt, Human
auuuaguuugauuauucagugu

SEQ ID NO: 1783159 - RNA, 13 nt, Human
auuuauucugcuc

SEQ ID NO: 1783160 - RNA, 21 nt, Human
auuuauucauuauuugucaaa

SEQ ID NO: 1783161 - RNA, 22 nt, Human
auuuauucauuauuugucaaau

SEQ ID NO: 1783162 - RNA, 22 nt, Human
auuuauucaauaaaguauuuaa

SEQ ID NO: 1783163 - RNA, 14 nt, Human
auuuauuuauuuaa

SEQ ID NO: 1783164 - RNA, 21 nt, Human
auuuauucaauaaaguauuua

SEQ ID NO: 1783165 - RNA, 18 nt, Human
auuuauucaauaaaguau

SEQ ID NO: 1783166 - RNA, 17 nt, Human
auuuauucaauaaagua

SEQ ID NO: 1783167 - RNA, 16 nt, Human
auuuauucaauaaagu

SEQ ID NO: 1783168 - RNA, 15 nt, Human
auuuauucaauaaag

SEQ ID NO: 1783169 - RNA, 14 nt, Human
auuuauucaauaaa

SEQ ID NO: 1783170 - RNA, 13 nt, Human
auuuauucaauaa

SEQ ID NO: 1783171 - RNA, 11 nt, Human
auuuauucaau

SEQ ID NO: 1783172 - RNA, 18 nt, Human
auuucuacuuugaaguca

SEQ ID NO: 1783173 - RNA, 21 nt, Human
auuucuuuuguaauaaacuau

SEQ ID NO: 1783174 - RNA, 22 nt, Human
auuucuuuuguaauaaacuauu

SEQ ID NO: 1783175 - RNA, 17 nt, Human
auuucaaauuggagcuu

SEQ ID NO: 1783176 - RNA, 17 nt, Human
auuuccccccuccgccu

SEQ ID NO: 1783177 - RNA, 18 nt, Human
auuuccccccuccgccuc

SEQ ID NO: 1783178 - RNA, 23 nt, Human
auuuccccccuccgccuccagga

SEQ ID NO: 1783179 - RNA, 13 nt, Human
auucucaggcacc

SEQ ID NO: 1783180 - RNA, 12 nt, Human
auucuaaaugua

SEQ ID NO: 1783181 - RNA, 20 nt, Human
auucuaucuuuuguuuccuu

SEQ ID NO: 1783182 - RNA, 21 nt, Human
auucuaucuuuuguuuccuuu

SEQ ID NO: 1783183 - RNA, 20 nt, Human
auucuccugccucagccucc

SEQ ID NO: 1783184 - RNA, 19 nt, Human
auucuccugccucagccuc

SEQ ID NO: 1783185 - RNA, 15 nt, Human
auucuccugccucag

SEQ ID NO: 1783186 - RNA, 17 nt, Human
auucuccugccucagcc

SEQ ID NO: 1783187 - RNA, 11 nt, Human
auucuccugcc

SEQ ID NO: 1783188 - RNA, 14 nt, Human
auucuccugccuca

SEQ ID NO: 1783189 - RNA, 13 nt, Human
auucuccugccuc

SEQ ID NO: 1783190 - RNA, 20 nt, Human
auuccaaagcaaaaccagaa

SEQ ID NO: 1783191 - RNA, 16 nt, Human
auucccaagcucugcu

SEQ ID NO: 1783192 - RNA, 14 nt, Human
auucccaagcucug

SEQ ID NO: 1783193 - RNA, 15 nt, Human
auucccaagcucugc

SEQ ID NO: 1783194 - RNA, 12 nt, Human
auucccucccca

SEQ ID NO: 1783195 - RNA, 12 nt, Human
auucucacaaua

SEQ ID NO: 1783196 - RNA, 13 nt, Human
auucucacaauag

SEQ ID NO: 1783197 - RNA, 13 nt, Human
auguggcuccucc

SEQ ID NO: 1783198 - RNA, 22 nt, Human
augugccagguuuuuggucuga

SEQ ID NO: 1783199 - RNA, 20 nt, Human
auguugcccaggcaggucuu

SEQ ID NO: 1783200 - RNA, 22 nt, Human
auguugccccuuucucuuuucc

SEQ ID NO: 1783201 - RNA, 23 nt, Human
uuuuagaaagcauuugaaugcau

SEQ ID NO: 1783202 - RNA, 22 nt, Human
uuuuagaaagcauuugaaugca

SEQ ID NO: 1783203 - RNA, 21 nt, Human
uuuuagaaagcauuugaaugc

SEQ ID NO: 1783204 - RNA, 20 nt, Human
uuuuagaaagcauuugaaug

SEQ ID NO: 1783205 - RNA, 19 nt, Human
uuuuagaaagcauuugaau

SEQ ID NO: 1783206 - RNA, 18 nt, Human
uuuuagaaagcauuugaa

SEQ ID NO: 1783207 - RNA, 16 nt, Human
uuuuagaaagcauuug

SEQ ID NO: 1783208 - RNA, 14 nt, Human
uuuuagaaagcauu

SEQ ID NO: 1783209 - RNA, 17 nt, Human
auguugcccaggcaggu

SEQ ID NO: 1783210 - RNA, 12 nt, Human
auguugcccagg

SEQ ID NO: 1783211 - RNA, 23 nt, Human
auguuaaacuagcauaucugccu

SEQ ID NO: 1783212 - RNA, 21 nt, Human
auguuaaacuagcauaucugc

SEQ ID NO: 1783213 - RNA, 24 nt, Human
auguuaaacuagcauaucugccuu

SEQ ID NO: 1783214 - RNA, 21 nt, Human
auguuaagcccuggcaggcag

SEQ ID NO: 1783215 - RNA, 19 nt, Human
auguuaaacuagcauaucu

SEQ ID NO: 1783216 - RNA, 15 nt, Human
auguuaaacuagcau

SEQ ID NO: 1783217 - RNA, 20 nt, Human
auguucacuuuugacaaagg

SEQ ID NO: 1783218 - RNA, 22 nt, Human
auguucacuuuugacaaaggca

SEQ ID NO: 1783219 - RNA, 14 nt, Human
auguuacugccuua

SEQ ID NO: 1783220 - RNA, 19 nt, Human
auguuaaguccucccugac

SEQ ID NO: 1783221 - RNA, 23 nt, Human
uuuuccaaaaguggccucuuugu

SEQ ID NO: 1783222 - RNA, 20 nt, Human
uuuuccaaaaguggccucuu

SEQ ID NO: 1783223 - RNA, 18 nt, Human
uuuucauacuuuuaccuu

SEQ ID NO: 1783224 - RNA, 22 nt, Human
auguuguguuucuguucaccuu

SEQ ID NO: 1783225 - RNA, 16 nt, Human
auuacauguaaaacau

SEQ ID NO: 1783226 - RNA, 19 nt, Human
auuacauguaaaacauuau

SEQ ID NO: 1783227 - RNA, 11 nt, Human
uuuuuguacau

SEQ ID NO: 1783228 - RNA, 12 nt, Human
uuuuuguacaug

SEQ ID NO: 1783229 - RNA, 13 nt, Human
uuuuuauugccuu

SEQ ID NO: 1783230 - RNA, 19 nt, Human
uuuuuguagagccaggguc

SEQ ID NO: 1783231 - RNA, 20 nt, Human
uuuuuguagagccagggucu

SEQ ID NO: 1783232 - RNA, 19 nt, Human
uuuuugugaaaagcuccau

SEQ ID NO: 1783233 - RNA, 12 nt, Human
auuacuucugcu

SEQ ID NO: 1783234 - RNA, 16 nt, Human
auuacuucucuauaaa

SEQ ID NO: 1783235 - RNA, 22 nt, Human
auuacuucucuauaaaaaauau

SEQ ID NO: 1783236 - RNA, 23 nt, Human
auuagugcagccaaguagccucu

SEQ ID NO: 1783237 - RNA, 13 nt, Human
auuagugcuaagu

SEQ ID NO: 1783238 - RNA, 23 nt, Human
auuauagugauguaaucuugaau

SEQ ID NO: 1783239 - RNA, 15 nt, Human
auuagugcuaagugu

SEQ ID NO: 1783240 - RNA, 17 nt, Human
uuuugcaauaaugcagu

SEQ ID NO: 1783241 - RNA, 18 nt, Human
uuuugcaauaaugcagua

SEQ ID NO: 1783242 - RNA, 17 nt, Human
uuuugcaaccucgcugg

SEQ ID NO: 1783243 - RNA, 21 nt, Human
uuuugcaaccucgcuggacuc

SEQ ID NO: 1783244 - RNA, 23 nt, Human
uuuugccauguuggccaggcugg

SEQ ID NO: 1783245 - RNA, 13 nt, Human
uuuugcccuuuga

SEQ ID NO: 1783246 - RNA, 21 nt, Human
uuuugcagcccagacaaaugu

SEQ ID NO: 1783247 - RNA, 14 nt, Human
uuuugagcaugggu

SEQ ID NO: 1783248 - RNA, 17 nt, Human
uuuugauccaagcuggu

SEQ ID NO: 1783249 - RNA, 15 nt, Human
uuuugauagcaaagc

SEQ ID NO: 1783250 - RNA, 20 nt, Human
uuuugauagcugucccaucu

SEQ ID NO: 1783251 - RNA, 15 nt, Human
auuaaagacuccagu

SEQ ID NO: 1783252 - RNA, 17 nt, Human
auuaagccacuuaaaau

SEQ ID NO: 1783253 - RNA, 20 nt, Human
auuaagccacuuaaaauguu

SEQ ID NO: 1783254 - RNA, 14 nt, Human
uuuugcugcuucug

SEQ ID NO: 1783255 - RNA, 13 nt, Human
uuuuguuuccuuu

SEQ ID NO: 1783256 - RNA, 22 nt, Human
uuuuguuuccuuuuuucccaua

SEQ ID NO: 1783257 - RNA, 16 nt, Human
uuuuguucaaagccag

SEQ ID NO: 1783258 - RNA, 14 nt, Human
uuuuguuugguauu

SEQ ID NO: 1783259 - RNA, 22 nt, Human
uuuuguuugguauuguauuuau

SEQ ID NO: 1783260 - RNA, 19 nt, Human
uuuuguuugguauuguauu

SEQ ID NO: 1783261 - RNA, 22 nt, Human
uuuuuagacagagucucacugu

SEQ ID NO: 1783262 - RNA, 20 nt, Human
uuuuuagaaagcauuugaau

SEQ ID NO: 1783263 - RNA, 19 nt, Human
cacaggcagguccaggguu

SEQ ID NO: 1783264 - RNA, 22 nt, Human
cacagugagucgaggacaggga

SEQ ID NO: 1783265 - RNA, 19 nt, Human
cacagugggaugaaccagc

SEQ ID NO: 1783266 - RNA, 20 nt, Human
cacagugggaugaaccagcc

SEQ ID NO: 1783267 - RNA, 11 nt, Human
cacaggcaggu

SEQ ID NO: 1783268 - RNA, 14 nt, Human
cacaggcaggucca

SEQ ID NO: 1783269 - RNA, 15 nt, Human
cacaggcagguccag

SEQ ID NO: 1783270 - RNA, 21 nt, Human
cacagcuucauuuccuguguc

SEQ ID NO: 1783271 - RNA, 22 nt, Human
cacagcuucauuuccugugucu

SEQ ID NO: 1783272 - RNA, 23 nt, Human
caauucuaucuuuuguuuccuuu

SEQ ID NO: 1783273 - RNA, 21 nt, Human
cacauauuagugcagccaagu

SEQ ID NO: 1783274 - RNA, 23 nt, Human
caauguagucagaauuagcugcu

SEQ ID NO: 1783275 - RNA, 22 nt, Human
caauggggauguuguguuucug

SEQ ID NO: 1783276 - RNA, 23 nt, Human
caauucucauuugucacacacuu

SEQ ID NO: 1783277 - RNA, 12 nt, Human
caauauugaauu

SEQ ID NO: 1783278 - RNA, 14 nt, Human
caauauugaauuuu

SEQ ID NO: 1783279 - RNA, 18 nt, Human
caauauugaauuuuuccu

SEQ ID NO: 1783280 - RNA, 21 nt, Human
caauauugaauuuuuccuaug

SEQ ID NO: 1783281 - RNA, 15 nt, Human
caauauaauguuuuu

SEQ ID NO: 1783282 - RNA, 21 nt, Human
caauauaauguuuuuaauauu

SEQ ID NO: 1783283 - RNA, 23 nt, Human
caauagccgauaucagaauuugu

SEQ ID NO: 1783284 - RNA, 11 nt, Human
caauaaugcag

SEQ ID NO: 1783285 - RNA, 13 nt, Human
caauaaugcagua

SEQ ID NO: 1783286 - RNA, 17 nt, Human
caauaaugcaguauggu

SEQ ID NO: 1783287 - RNA, 20 nt, Human
caauaaugcaguaugguaca

SEQ ID NO: 1783288 - RNA, 23 nt, Human
caauaaugcaguaugguacauuu

SEQ ID NO: 1783289 - RNA, 15 nt, Human
caaccuccugggcua

SEQ ID NO: 1783290 - RNA, 14 nt, Human
caaccuccugggcu

SEQ ID NO: 1783291 - RNA, 17 nt, Human
caaccuuagauguucua

SEQ ID NO: 1783292 - RNA, 18 nt, Human
caaccuuagauguucuaa

SEQ ID NO: 1783293 - RNA, 17 nt, Human
caacgugcauugugcuu

SEQ ID NO: 1783294 - RNA, 16 nt, Human
caacgugcauugugcu

SEQ ID NO: 1783295 - RNA, 13 nt, Human
caacgugcauugu

SEQ ID NO: 1783296 - RNA, 16 nt, Human
caacccuggggaagga

SEQ ID NO: 1783297 - RNA, 22 nt, Human
caaccccuucgcuccugugucu

SEQ ID NO: 1783298 - RNA, 22 nt, Human
caacacucacauuuauucugcu

SEQ ID NO: 1783299 - RNA, 14 nt, Human
caacuuuuuauugc

SEQ ID NO: 1783300 - RNA, 16 nt, Human
caacuuuuuauugccu

SEQ ID NO: 1783301 - RNA, 17 nt, Human
caacuuuuuauugccuu

SEQ ID NO: 1783302 - RNA, 18 nt, Human
caacuuuuuauugccuuc

SEQ ID NO: 1783303 - RNA, 19 nt, Human
caacuuuuuauugccuucu

SEQ ID NO: 1783304 - RNA, 20 nt, Human
caacuuuuuauugccuucuc

SEQ ID NO: 1783305 - RNA, 21 nt, Human
caacuuuuuauugccuucuca

SEQ ID NO: 1783306 - RNA, 23 nt, Human
caacuuuuuauugccuucucacc

SEQ ID NO: 1783307 - RNA, 17 nt, Human
caagagggacgccuggg

SEQ ID NO: 1783308 - RNA, 19 nt, Human
caagagggacgccuggggg

SEQ ID NO: 1783309 - RNA, 15 nt, Human
caagcaccuccugcc

SEQ ID NO: 1783310 - RNA, 16 nt, Human
caagcaccuccugccu

SEQ ID NO: 1783311 - RNA, 17 nt, Human
caagcaccuccugccuc

SEQ ID NO: 1783312 - RNA, 12 nt, Human
caaggaagucaa

SEQ ID NO: 1783313 - RNA, 17 nt, Human
caagcuggucccacuca

SEQ ID NO: 1783314 - RNA, 19 nt, Human
caagcuggucccacucagu

SEQ ID NO: 1783315 - RNA, 23 nt, Human
caaggaggguguaauggagcauc

SEQ ID NO: 1783316 - RNA, 19 nt, Human
caagcgauucuucugcuuc

SEQ ID NO: 1783317 - RNA, 20 nt, Human
caagcgauucuucugcuuca

SEQ ID NO: 1783318 - RNA, 22 nt, Human
caagcgauucuucugcuucagc

SEQ ID NO: 1783319 - RNA, 17 nt, Human
caagcaggacagugcuu

SEQ ID NO: 1783320 - RNA, 18 nt, Human
caagcaggacagugcuug

SEQ ID NO: 1783321 - RNA, 13 nt, Human
caagccagccaac

SEQ ID NO: 1783322 - RNA, 22 nt, Human
caagccacucggcggcagcaug

SEQ ID NO: 1783323 - RNA, 14 nt, Human
caaguccucuuuuc

SEQ ID NO: 1783324 - RNA, 18 nt, Human
caagugagagcugggugu

SEQ ID NO: 1783325 - RNA, 21 nt, Human
caaguccucuuuucugagagg

SEQ ID NO: 1783326 - RNA, 14 nt, Human
caagugagagcugg

SEQ ID NO: 1783327 - RNA, 15 nt, Human
caagugagagcuggg

SEQ ID NO: 1783328 - RNA, 17 nt, Human
caagugagagcugggug

SEQ ID NO: 1783329 - RNA, 22 nt, Human
auuuugggguacccacugcucu

SEQ ID NO: 1783330 - RNA, 23 nt, Human
auuuugggguacccacugcucug

SEQ ID NO: 1783331 - RNA, 21 nt, Human
auuuugggguacccacugcuc

SEQ ID NO: 1783332 - RNA, 18 nt, Human
auuuuggggauuuucaaa

SEQ ID NO: 1783333 - RNA, 14 nt, Human
caaaaauuuuguga

SEQ ID NO: 1783334 - RNA, 16 nt, Human
caaaaauuuugugaca

SEQ ID NO: 1783335 - RNA, 17 nt, Human
caaaaauuuugugacau

SEQ ID NO: 1783336 - RNA, 14 nt, Human
caaaaaucugccug

SEQ ID NO: 1783337 - RNA, 16 nt, Human
caaaaaucugccuggg

SEQ ID NO: 1783338 - RNA, 15 nt, Human
caaaaagugcuucau

SEQ ID NO: 1783339 - RNA, 12 nt, Human
caaaaagcacau

SEQ ID NO: 1783340 - RNA, 22 nt, Human
caaaacugccucaggaggcagg

SEQ ID NO: 1783341 - RNA, 23 nt, Human
caaagugcugggauuacaggugu

SEQ ID NO: 1783342 - RNA, 19 nt, Human
caaagugcugggauuacag

SEQ ID NO: 1783343 - RNA, 19 nt, Human
caaaggguaucaggugcug

SEQ ID NO: 1783344 - RNA, 21 nt, Human
caaauuuauuuuuuucuuuug

SEQ ID NO: 1783345 - RNA, 16 nt, Human
caaagccaagaccuca

SEQ ID NO: 1783346 - RNA, 20 nt, Human
caaagccagcguccuccucu

SEQ ID NO: 1783347 - RNA, 21 nt, Human
caaagccagcguccuccucug

SEQ ID NO: 1783348 - RNA, 23 nt, Human
caaagccagcguccuccucugug

SEQ ID NO: 1783349 - RNA, 22 nt, Human
caaagccagcguccuccucugu

SEQ ID NO: 1783350 - RNA, 19 nt, Human
caaacuagggccaagccca

SEQ ID NO: 1783351 - RNA, 13 nt, Human
caaacuagggcca

SEQ ID NO: 1783352 - RNA, 18 nt, Human
caaacgcugccugcccac

SEQ ID NO: 1783353 - RNA, 16 nt, Human
caaacugguauucugu

SEQ ID NO: 1783354 - RNA, 19 nt, Human
caaacugguauucuguucu

SEQ ID NO: 1783355 - RNA, 21 nt, Human
caaacugguauucuguucugg

SEQ ID NO: 1783356 - RNA, 16 nt, Human
caaaggguaucaggug

SEQ ID NO: 1783357 - RNA, 18 nt, Human
caaaggguaucaggugcu

SEQ ID NO: 1783358 - RNA, 13 nt, Human
caaagcuaggccu

SEQ ID NO: 1783359 - RNA, 14 nt, Human
caaagcuaggccug

SEQ ID NO: 1783360 - RNA, 19 nt, Human
caaagcuaggccuggccag

SEQ ID NO: 1783361 - RNA, 15 nt, Human
caaagcuaggccugg

SEQ ID NO: 1783362 - RNA, 11 nt, Human
caaaccucugu

SEQ ID NO: 1783363 - RNA, 12 nt, Human
caaaccucuguu

SEQ ID NO: 1783364 - RNA, 20 nt, Human
caaaccucuguucaguguaa

SEQ ID NO: 1783365 - RNA, 13 nt, Human
caaaccucuguuc

SEQ ID NO: 1783366 - RNA, 14 nt, Human
caaaccucuguuca

SEQ ID NO: 1783367 - RNA, 15 nt, Human
caaaccucuguucag

SEQ ID NO: 1783368 - RNA, 19 nt, Human
caaaccucuguucagugua

SEQ ID NO: 1783369 - RNA, 20 nt, Human
caaacgcugagccaccugcc

SEQ ID NO: 1783370 - RNA, 12 nt, Human
caaacgcugccu

SEQ ID NO: 1783371 - RNA, 13 nt, Human
caaacgcugccug

SEQ ID NO: 1783372 - RNA, 14 nt, Human
caaacgcugccugc

SEQ ID NO: 1783373 - RNA, 15 nt, Human
caaacgcugccugcc

SEQ ID NO: 1783374 - RNA, 16 nt, Human
caaacgcugccugccc

SEQ ID NO: 1783375 - RNA, 17 nt, Human
caaacgcugccugccca

SEQ ID NO: 1783376 - RNA, 19 nt, Human
caaaauuuauuuuauaaga

SEQ ID NO: 1783377 - RNA, 20 nt, Human
caaaauuuauuuuauaagaa

SEQ ID NO: 1783378 - RNA, 16 nt, Human
caaaauucuaaaugua

SEQ ID NO: 1783379 - RNA, 16 nt, Human
caaaauggauacauaa

SEQ ID NO: 1783380 - RNA, 17 nt, Human
caaaauggauacauaaa

SEQ ID NO: 1783381 - RNA, 19 nt, Human
caaaauggauacauaaaga

SEQ ID NO: 1783382 - RNA, 15 nt, Human
caaaauggcuucagu

SEQ ID NO: 1783383 - RNA, 18 nt, Human
caaaauguagaauauuca

SEQ ID NO: 1783384 - RNA, 15 nt, Human
cacuggaccccagca

SEQ ID NO: 1783385 - RNA, 17 nt, Human
cacuggaccccagcaag

SEQ ID NO: 1783386 - RNA, 17 nt, Human
cacuggacugaccuggu

SEQ ID NO: 1783387 - RNA, 16 nt, Human
cacuggacugaccugg

SEQ ID NO: 1783388 - RNA, 21 nt, Human
cacugcuuuuggucuguguga

SEQ ID NO: 1783389 - RNA, 15 nt, Human
cacugcuugaggaaa

SEQ ID NO: 1783390 - RNA, 19 nt, Human
cacuggaugcaaagaaaau

SEQ ID NO: 1783391 - RNA, 23 nt, Human
cacuggaugcaaagaaaaucaga

SEQ ID NO: 1783392 - RNA, 20 nt, Human
cacugcuuuuggucugugug

SEQ ID NO: 1783393 - RNA, 13 nt, Human
cacugcuugagga

SEQ ID NO: 1783394 - RNA, 14 nt, Human
cacugcuugaggaa

SEQ ID NO: 1783395 - RNA, 20 nt, Human
cacugcuugaggaaaacaag

SEQ ID NO: 1783396 - RNA, 14 nt, Human
cacugcaccgggcc

SEQ ID NO: 1783397 - RNA, 15 nt, Human
cacugcaccgggcca

SEQ ID NO: 1783398 - RNA, 16 nt, Human
cacugcaccgggccac

SEQ ID NO: 1783399 - RNA, 18 nt, Human
cacugcaccgggccacag

SEQ ID NO: 1783400 - RNA, 19 nt, Human
cacugcaccgggccacaga

SEQ ID NO: 1783401 - RNA, 18 nt, Human
cacugcacuauagccuag

SEQ ID NO: 1783402 - RNA, 12 nt, Human
cacugcucuggu

SEQ ID NO: 1783403 - RNA, 15 nt, Human
cacucugucgcccag

SEQ ID NO: 1783404 - RNA, 16 nt, Human
cacucugucgcccagu

SEQ ID NO: 1783405 - RNA, 19 nt, Human
cacucugucgcccagucug

SEQ ID NO: 1783406 - RNA, 23 nt, Human
cacugacauuguuggccaaagcc

SEQ ID NO: 1783407 - RNA, 20 nt, Human
cacucugucgcccagucugg

SEQ ID NO: 1783408 - RNA, 23 nt, Human
cacugcaaccuccgccucuuggg

SEQ ID NO: 1783409 - RNA, 14 nt, Human
cacugcaaccuccg

SEQ ID NO: 1783410 - RNA, 16 nt, Human
cacugcaaccuccgcc

SEQ ID NO: 1783411 - RNA, 13 nt, Human
cacugcaaccucc

SEQ ID NO: 1783412 - RNA, 14 nt, Human
cacugaugggcaac

SEQ ID NO: 1783413 - RNA, 18 nt, Human
cacugaugggcaaccccc

SEQ ID NO: 1783414 - RNA, 24 nt, Human
cacugaugggcaacccccagccug

SEQ ID NO: 1783415 - RNA, 14 nt, Human
cacugagggcaguc

SEQ ID NO: 1783416 - RNA, 18 nt, Human
cacugagauaccagcgag

SEQ ID NO: 1783417 - RNA, 19 nt, Human
cacugagauaccagcgagg

SEQ ID NO: 1783418 - RNA, 23 nt, Human
cacugagauaccagcgaggaggc

SEQ ID NO: 1783419 - RNA, 14 nt, Human
cacugugccaugug

SEQ ID NO: 1783420 - RNA, 16 nt, Human
cacugugagcucccag

SEQ ID NO: 1783421 - RNA, 17 nt, Human
cacugugagcucccagg

SEQ ID NO: 1783422 - RNA, 17 nt, Human
cacuguauguuauagaa

SEQ ID NO: 1783423 - RNA, 20 nt, Human
cacuguauguuauagaacuu

SEQ ID NO: 1783424 - RNA, 17 nt, Human
cacuguucccccugugc

SEQ ID NO: 1783425 - RNA, 19 nt, Human
cacuguucccccugugcag

SEQ ID NO: 1783426 - RNA, 18 nt, Human
cacugugccaugugccag

SEQ ID NO: 1783427 - RNA, 20 nt, Human
cacugugcacaucugugucu

SEQ ID NO: 1783428 - RNA, 22 nt, Human
cacugugagcucccaggugcag

SEQ ID NO: 1783429 - RNA, 22 nt, Human
cacugugcacaucugugucuug

SEQ ID NO: 1783430 - RNA, 15 nt, Human
cacugugccaugugc

SEQ ID NO: 1783431 - RNA, 16 nt, Human
cacugugccaugugcc

SEQ ID NO: 1783432 - RNA, 13 nt, Human
cacuugcagacuc

SEQ ID NO: 1783433 - RNA, 24 nt, Human
cacuugcagacucuacagaggcca

SEQ ID NO: 1783434 - RNA, 12 nt, Human
cacuugcauuuc

SEQ ID NO: 1783435 - RNA, 14 nt, Human
cacuugcagacucu

SEQ ID NO: 1783436 - RNA, 18 nt, Human
cacuugcagacucuacag

SEQ ID NO: 1783437 - RNA, 19 nt, Human
cacuugcagacucuacaga

SEQ ID NO: 1783438 - RNA, 22 nt, Human
cacuugcagacucuacagaggc

SEQ ID NO: 1783439 - RNA, 22 nt, Human
cacuucugccauauucuguugg

SEQ ID NO: 1783440 - RNA, 13 nt, Human
cacuucucuuccu

SEQ ID NO: 1783441 - RNA, 19 nt, Human
cacuucguucgcagagcuu

SEQ ID NO: 1783442 - RNA, 20 nt, Human
cacuucguucgcagagcuuu

SEQ ID NO: 1783443 - RNA, 14 nt, Human
cacuguugcccagg

SEQ ID NO: 1783444 - RNA, 13 nt, Human
cacgccacugcac

SEQ ID NO: 1783445 - RNA, 19 nt, Human
cacgcaggagcacacccag

SEQ ID NO: 1783446 - RNA, 20 nt, Human
cacgcaggagcacacccagc

SEQ ID NO: 1783447 - RNA, 12 nt, Human
cacgcaggagca

SEQ ID NO: 1783448 - RNA, 15 nt, Human
cacgccacugcacua

SEQ ID NO: 1783449 - RNA, 13 nt, Human
cacgcaccugggu

SEQ ID NO: 1783450 - RNA, 20 nt, Human
cacgagcuguuuacuaggga

SEQ ID NO: 1783451 - RNA, 18 nt, Human
caccuugacagggcacac

SEQ ID NO: 1783452 - RNA, 15 nt, Human
caccuugacagggca

SEQ ID NO: 1783453 - RNA, 16 nt, Human
caccuugacagggcac

SEQ ID NO: 1783454 - RNA, 13 nt, Human
caccuugacaggg

SEQ ID NO: 1783455 - RNA, 21 nt, Human
caccuucguuuacuaugccug

SEQ ID NO: 1783456 - RNA, 22 nt, Human
caccuucguuuacuaugccugu

SEQ ID NO: 1783457 - RNA, 23 nt, Human
caccuucguuuacuaugccugug

SEQ ID NO: 1783458 - RNA, 17 nt, Human
cacgaauuucugugccc

SEQ ID NO: 1783459 - RNA, 23 nt, Human
cacgaauuucugugcccuccuga

SEQ ID NO: 1783460 - RNA, 13 nt, Human
cacgacugucucc

SEQ ID NO: 1783461 - RNA, 16 nt, Human
cacgacugucuccaug

SEQ ID NO: 1783462 - RNA, 14 nt, Human
caccuuaauaugcu

SEQ ID NO: 1783463 - RNA, 23 nt, Human
caccuuaauaugcugcaacaaaa

SEQ ID NO: 1783464 - RNA, 23 nt, Human
caccuucaguaacccccacugga

SEQ ID NO: 1783465 - RNA, 19 nt, Human
caccugugaguuuaaagca

SEQ ID NO: 1783466 - RNA, 20 nt, Human
caccugugaguuuaaagcaa

SEQ ID NO: 1783467 - RNA, 19 nt, Human
caccugugcuucgggcccu

SEQ ID NO: 1783468 - RNA, 21 nt, Human
cacgccugcaaacgcugccug

SEQ ID NO: 1783469 - RNA, 22 nt, Human
cacgccugcaaacgcugccugc

SEQ ID NO: 1783470 - RNA, 23 nt, Human
cacgccugcaaacgcugccugcc

SEQ ID NO: 1783471 - RNA, 17 nt, Human
cacgccugcaaacgcug

SEQ ID NO: 1783472 - RNA, 23 nt, Human
cacgcgugcacacaccagagccc

SEQ ID NO: 1783473 - RNA, 15 nt, Human
cacgcgugcacacac

SEQ ID NO: 1783474 - RNA, 16 nt, Human
cacgcgugcacacacc

SEQ ID NO: 1783475 - RNA, 21 nt, Human
cacgcgugcacacaccagagc

SEQ ID NO: 1783476 - RNA, 20 nt, Human
cacgcuggaccuugaacugg

SEQ ID NO: 1783477 - RNA, 17 nt, Human
cacgcuggaccuugaac

SEQ ID NO: 1783478 - RNA, 16 nt, Human
cacggcucacugcagc

SEQ ID NO: 1783479 - RNA, 17 nt, Human
cacggcucacugcagcc

SEQ ID NO: 1783480 - RNA, 19 nt, Human
cacggcucacugcagccuc

SEQ ID NO: 1783481 - RNA, 20 nt, Human
cacggcucacugcagccuca

SEQ ID NO: 1783482 - RNA, 16 nt, Human
cacgugcagcucaagg

SEQ ID NO: 1783483 - RNA, 18 nt, Human
cacguacacacacauaca

SEQ ID NO: 1783484 - RNA, 19 nt, Human
cacguacacacacauacac

SEQ ID NO: 1783485 - RNA, 14 nt, Human
cacguacacacaca

SEQ ID NO: 1783486 - RNA, 16 nt, Human
cacguguuugugcugu

SEQ ID NO: 1783487 - RNA, 19 nt, Human
cacguuagaggaaaaauau

SEQ ID NO: 1783488 - RNA, 13 nt, Human
cacuaaacaaaga

SEQ ID NO: 1783489 - RNA, 18 nt, Human
cacguuuuguuuugugcc

SEQ ID NO: 1783490 - RNA, 15 nt, Human
cacguuuuguuuugu

SEQ ID NO: 1783491 - RNA, 12 nt, Human
cacuaaagcagu

SEQ ID NO: 1783492 - RNA, 22 nt, Human
cacucagaagacacugaugggc

SEQ ID NO: 1783493 - RNA, 18 nt, Human
cacucagaagacacugau

SEQ ID NO: 1783494 - RNA, 19 nt, Human
cacucagaagacacugaug

SEQ ID NO: 1783495 - RNA, 19 nt, Human
cacucacauuuauucugcu

SEQ ID NO: 1783496 - RNA, 20 nt, Human
cacucacauuuauucugcuc

SEQ ID NO: 1783497 - RNA, 12 nt, Human
cacucagaagac

SEQ ID NO: 1783498 - RNA, 16 nt, Human
cacucagaagacacug

SEQ ID NO: 1783499 - RNA, 17 nt, Human
cacucagaagacacuga

SEQ ID NO: 1783500 - RNA, 20 nt, Human
cacuauguugcccaggcagg

SEQ ID NO: 1783501 - RNA, 21 nt, Human
cacuauguugcccaggcaggu

SEQ ID NO: 1783502 - RNA, 15 nt, Human
cacuauguugcccag

SEQ ID NO: 1783503 - RNA, 15 nt, Human
cacuaugcuuuccuu

SEQ ID NO: 1783504 - RNA, 16 nt, Human
cacuauguugcccagg

SEQ ID NO: 1783505 - RNA, 17 nt, Human
cacuauguugcccaggc

SEQ ID NO: 1783506 - RNA, 18 nt, Human
cacuauguugcccaggca

SEQ ID NO: 1783507 - RNA, 19 nt, Human
cacuauguugcccaggcag

SEQ ID NO: 1783508 - RNA, 14 nt, Human
cacuauagccuagg

SEQ ID NO: 1783509 - RNA, 21 nt, Human
cacuauagccuaggugacaga

SEQ ID NO: 1783510 - RNA, 14 nt, Human
cacuaaccacgcug

SEQ ID NO: 1783511 - RNA, 15 nt, Human
cacuaaccacgcugg

SEQ ID NO: 1783512 - RNA, 16 nt, Human
cacuaaccacgcugga

SEQ ID NO: 1783513 - RNA, 17 nt, Human
cacuaaggugugcucug

SEQ ID NO: 1783514 - RNA, 18 nt, Human
cacuaaggugugcucuga

SEQ ID NO: 1783515 - RNA, 18 nt, Human
cacuaaccacgcuggacc

SEQ ID NO: 1783516 - RNA, 16 nt, Human
cacucaguccauagca

SEQ ID NO: 1783517 - RNA, 13 nt, Human
cacucccuugggc

SEQ ID NO: 1783518 - RNA, 16 nt, Human
cacucccuugggcucc

SEQ ID NO: 1783519 - RNA, 20 nt, Human
cacucccuugggcucccugu

SEQ ID NO: 1783520 - RNA, 13 nt, Human
cacuccugccaag

SEQ ID NO: 1783521 - RNA, 14 nt, Human
cacuccugccaagg

SEQ ID NO: 1783522 - RNA, 12 nt, Human
cacuccucugac

SEQ ID NO: 1783523 - RNA, 13 nt, Human
cacuccucugacu

SEQ ID NO: 1783524 - RNA, 20 nt, Human
cacuccucugacucagggcu

SEQ ID NO: 1783525 - RNA, 21 nt, Human
cacuccucugacucagggcuc

SEQ ID NO: 1783526 - RNA, 23 nt, Human
cacuccucugacucagggcuccu

SEQ ID NO: 1783527 - RNA, 15 nt, Human
cacucucuaccagau

SEQ ID NO: 1783528 - RNA, 11 nt, Human
cacucugcccc

SEQ ID NO: 1783529 - RNA, 18 nt, Human
cacucugcucgccuuagc

SEQ ID NO: 1783530 - RNA, 23 nt, Human
cacucugccccccccccccaucu

SEQ ID NO: 1783531 - RNA, 15 nt, Human
cacucugcucgccuu

SEQ ID NO: 1783532 - RNA, 16 nt, Human
cacucugcuuguuauu

SEQ ID NO: 1783533 - RNA, 22 nt, Human
cacucggcggcagcauggagcu

SEQ ID NO: 1783534 - RNA, 12 nt, Human
cacucgguccca

SEQ ID NO: 1783535 - RNA, 14 nt, Human
cacucggucccagu

SEQ ID NO: 1783536 - RNA, 20 nt, Human
cacucggucccaguuuuguu

SEQ ID NO: 1783537 - RNA, 15 nt, Human
cacccuuuuccagcu

SEQ ID NO: 1783538 - RNA, 17 nt, Human
cacccuuuuccagcugg

SEQ ID NO: 1783539 - RNA, 21 nt, Human
cacccuuuuccagcuggauga

SEQ ID NO: 1783540 - RNA, 12 nt, Human
cacccggccccu

SEQ ID NO: 1783541 - RNA, 13 nt, Human
cacccggccccug

SEQ ID NO: 1783542 - RNA, 14 nt, Human
cacccggccccugc

SEQ ID NO: 1783543 - RNA, 16 nt, Human
cacccggccccugcug

SEQ ID NO: 1783544 - RNA, 17 nt, Human
cacccggccccugcugg

SEQ ID NO: 1783545 - RNA, 18 nt, Human
cacccggccccugcuggu

SEQ ID NO: 1783546 - RNA, 21 nt, Human
cacccggccccugcugguuca

SEQ ID NO: 1783547 - RNA, 13 nt, Human
caccccuccccau

SEQ ID NO: 1783548 - RNA, 18 nt, Human
caccccuggaagagccca

SEQ ID NO: 1783549 - RNA, 19 nt, Human
caccccuggaagagcccag

SEQ ID NO: 1783550 - RNA, 20 nt, Human
caccccuggaagagcccagu

SEQ ID NO: 1783551 - RNA, 16 nt, Human
caccugcaucuggggc

SEQ ID NO: 1783552 - RNA, 17 nt, Human
caccugcaucuggggcc

SEQ ID NO: 1783553 - RNA, 15 nt, Human
caccugccacccugg

SEQ ID NO: 1783554 - RNA, 20 nt, Human
caccugccacccugggccug

SEQ ID NO: 1783555 - RNA, 23 nt, Human
caccugccacccugggccuggca

SEQ ID NO: 1783556 - RNA, 15 nt, Human
caccugauucaacua

SEQ ID NO: 1783557 - RNA, 16 nt, Human
caccugauucaacuaa

SEQ ID NO: 1783558 - RNA, 17 nt, Human
caccugauucaacuaaa

SEQ ID NO: 1783559 - RNA, 18 nt, Human
caccugauucaacuaaaa

SEQ ID NO: 1783560 - RNA, 19 nt, Human
caccugauucaacuaaaaa

SEQ ID NO: 1783561 - RNA, 21 nt, Human
caccugauucaacuaaaaaaa

SEQ ID NO: 1783562 - RNA, 16 nt, Human
caccugagcaggaccu

SEQ ID NO: 1783563 - RNA, 19 nt, Human
caccugagcaggaccucug

SEQ ID NO: 1783564 - RNA, 20 nt, Human
caccugagcaggaccucuga

SEQ ID NO: 1783565 - RNA, 21 nt, Human
caccugagcaggaccucugaa

SEQ ID NO: 1783566 - RNA, 23 nt, Human
caccugaagacucauucuucugu

SEQ ID NO: 1783567 - RNA, 14 nt, Human
caccugaagacuca

SEQ ID NO: 1783568 - RNA, 15 nt, Human
caccugaagacucau

SEQ ID NO: 1783569 - RNA, 13 nt, Human
caccucuuccgac

SEQ ID NO: 1783570 - RNA, 14 nt, Human
caccuccugccucg

SEQ ID NO: 1783571 - RNA, 13 nt, Human
caccuccugccuc

SEQ ID NO: 1783572 - RNA, 11 nt, Human
caccuccugcc

SEQ ID NO: 1783573 - RNA, 16 nt, Human
caccuccacauccucc

SEQ ID NO: 1783574 - RNA, 17 nt, Human
caccuccacauccucca

SEQ ID NO: 1783575 - RNA, 14 nt, Human
caccuccagccuga

SEQ ID NO: 1783576 - RNA, 13 nt, Human
caccgugggcucc

SEQ ID NO: 1783577 - RNA, 17 nt, Human
caccgugggcucccuga

SEQ ID NO: 1783578 - RNA, 18 nt, Human
caccgugggcucccugac

SEQ ID NO: 1783579 - RNA, 15 nt, Human
caccgggcacucaga

SEQ ID NO: 1783580 - RNA, 22 nt, Human
caccgggcacucagaagacacu

SEQ ID NO: 1783581 - RNA, 15 nt, Human
caccgggccacagag

SEQ ID NO: 1783582 - RNA, 18 nt, Human
caccgggccacagagaaa

SEQ ID NO: 1783583 - RNA, 14 nt, Human
caccgggcacucag

SEQ ID NO: 1783584 - RNA, 22 nt, Human
caccggccccauuuacccaacu

SEQ ID NO: 1783585 - RNA, 15 nt, Human
cagagcccaccuugg

SEQ ID NO: 1783586 - RNA, 17 nt, Human
cagagcccaccuuggcu

SEQ ID NO: 1783587 - RNA, 19 nt, Human
cagagcccaccuuggcuca

SEQ ID NO: 1783588 - RNA, 20 nt, Human
cagagcccaccuuggcucaa

SEQ ID NO: 1783589 - RNA, 12 nt, Human
cagagccugcag

SEQ ID NO: 1783590 - RNA, 20 nt, Human
cagagccgugguccuuuggg

SEQ ID NO: 1783591 - RNA, 19 nt, Human
cagagccgugguccuuugg

SEQ ID NO: 1783592 - RNA, 16 nt, Human
cagaggaaggggccag

SEQ ID NO: 1783593 - RNA, 13 nt, Human
cagagccugcagu

SEQ ID NO: 1783594 - RNA, 21 nt, Human
cagaggacugugaugcccugc

SEQ ID NO: 1783595 - RNA, 11 nt, Human
cagaggcagcc

SEQ ID NO: 1783596 - RNA, 23 nt, Human
cagaggaugagcucuacccaggg

SEQ ID NO: 1783597 - RNA, 15 nt, Human
cagaggaugagcucu

SEQ ID NO: 1783598 - RNA, 17 nt, Human
cagaggaugagcucuac

SEQ ID NO: 1783599 - RNA, 19 nt, Human
cagaggaugagcucuaccc

SEQ ID NO: 1783600 - RNA, 21 nt, Human
cagaggaugagcucuacccag

SEQ ID NO: 1783601 - RNA, 18 nt, Human
cagaggaaggggccagag

SEQ ID NO: 1783602 - RNA, 19 nt, Human
cagaggaaggggccagagg

SEQ ID NO: 1783603 - RNA, 20 nt, Human
cagaggaaggggccagaggc

SEQ ID NO: 1783604 - RNA, 21 nt, Human
cagaggaaggggccagaggcu

SEQ ID NO: 1783605 - RNA, 14 nt, Human
cagaggacugugau

SEQ ID NO: 1783606 - RNA, 19 nt, Human
cagagaaugaaagggccca

SEQ ID NO: 1783607 - RNA, 20 nt, Human
cagagaaugaaagggcccag

SEQ ID NO: 1783608 - RNA, 21 nt, Human
cagagaaugaaagggcccaga

SEQ ID NO: 1783609 - RNA, 19 nt, Human
cagagaagcucucgggcua

SEQ ID NO: 1783610 - RNA, 14 nt, Human
cagagauucauuuu

SEQ ID NO: 1783611 - RNA, 19 nt, Human
cagagauucauuuucuaga

SEQ ID NO: 1783612 - RNA, 21 nt, Human
cagagauucauuuucuagaua

SEQ ID NO: 1783613 - RNA, 19 nt, Human
cagaggcccucgcugccag

SEQ ID NO: 1783614 - RNA, 20 nt, Human
cagaggcccucgcugccagc

SEQ ID NO: 1783615 - RNA, 14 nt, Human
cagaggcugcccca

SEQ ID NO: 1783616 - RNA, 14 nt, Human
cagagggagugaca

SEQ ID NO: 1783617 - RNA, 16 nt, Human
cagagggagugacaga

SEQ ID NO: 1783618 - RNA, 18 nt, Human
cagagggagugacagagg

SEQ ID NO: 1783619 - RNA, 19 nt, Human
cagagggagugacagaggc

SEQ ID NO: 1783620 - RNA, 23 nt, Human
cagaggcagccccauucugccug

SEQ ID NO: 1783621 - RNA, 21 nt, Human
cagaggauugcugccccauca

SEQ ID NO: 1783622 - RNA, 19 nt, Human
cagaggccaugggccuccu

SEQ ID NO: 1783623 - RNA, 16 nt, Human
cagaggccaugggccu

SEQ ID NO: 1783624 - RNA, 20 nt, Human
cagaggccaugggccuccug

SEQ ID NO: 1783625 - RNA, 21 nt, Human
cagaggccaugggccuccugu

SEQ ID NO: 1783626 - RNA, 12 nt, Human
cagaggcagccc

SEQ ID NO: 1783627 - RNA, 13 nt, Human
cagaggcagcccc

SEQ ID NO: 1783628 - RNA, 14 nt, Human
cagaggcagcccca

SEQ ID NO: 1783629 - RNA, 15 nt, Human
cagaggcagccccau

SEQ ID NO: 1783630 - RNA, 18 nt, Human
cagaggcagccccauucu

SEQ ID NO: 1783631 - RNA, 19 nt, Human
cagaggcagccccauucug

SEQ ID NO: 1783632 - RNA, 20 nt, Human
cagaggcagccccauucugc

SEQ ID NO: 1783633 - RNA, 22 nt, Human
cagaggcagccccauucugccu

SEQ ID NO: 1783634 - RNA, 13 nt, Human
cagagucucacug

SEQ ID NO: 1783635 - RNA, 13 nt, Human
cagaguccuggag

SEQ ID NO: 1783636 - RNA, 17 nt, Human
cagagucucacuguugc

SEQ ID NO: 1783637 - RNA, 19 nt, Human
cagagucucacuguugccc

SEQ ID NO: 1783638 - RNA, 20 nt, Human
cagagucucacuguugccca

SEQ ID NO: 1783639 - RNA, 21 nt, Human
cagagucucacuguugcccag

SEQ ID NO: 1783640 - RNA, 14 nt, Human
cagagggcacucug

SEQ ID NO: 1783641 - RNA, 20 nt, Human
cagagggagugacagaggca

SEQ ID NO: 1783642 - RNA, 21 nt, Human
cagagggagugacagaggcag

SEQ ID NO: 1783643 - RNA, 22 nt, Human
cagagggagugacagaggcagc

SEQ ID NO: 1783644 - RNA, 23 nt, Human
cagagggagugacagaggcagcc

SEQ ID NO: 1783645 - RNA, 14 nt, Human
cagagugagaccca

SEQ ID NO: 1783646 - RNA, 15 nt, Human
cagagugagacccag

SEQ ID NO: 1783647 - RNA, 22 nt, Human
cagagucucacuguugcccagg

SEQ ID NO: 1783648 - RNA, 23 nt, Human
cagagucucacuguugcccaggc

SEQ ID NO: 1783649 - RNA, 16 nt, Human
cagagugagacucugu

SEQ ID NO: 1783650 - RNA, 17 nt, Human
cagagugagacccagcc

SEQ ID NO: 1783651 - RNA, 20 nt, Human
cagagugagacccagcccuc

SEQ ID NO: 1783652 - RNA, 17 nt, Human
cagagugagacucuguc

SEQ ID NO: 1783653 - RNA, 18 nt, Human
cagagugagacucugucu

SEQ ID NO: 1783654 - RNA, 19 nt, Human
cagagugagacucugucuc

SEQ ID NO: 1783655 - RNA, 20 nt, Human
cagagugagacucugucuca

SEQ ID NO: 1783656 - RNA, 14 nt, Human
cagauaacugagga

SEQ ID NO: 1783657 - RNA, 13 nt, Human
cagauaacugagg

SEQ ID NO: 1783658 - RNA, 20 nt, Human
cagauaacugaggaggggag

SEQ ID NO: 1783659 - RNA, 13 nt, Human
cagauaaugugaa

SEQ ID NO: 1783660 - RNA, 14 nt, Human
cagauaaugugaaa

SEQ ID NO: 1783661 - RNA, 16 nt, Human
cagauaaugugaaaau

SEQ ID NO: 1783662 - RNA, 20 nt, Human
cagauacaggaaaagcugcu

SEQ ID NO: 1783663 - RNA, 21 nt, Human
cagauacaggaaaagcugcug

SEQ ID NO: 1783664 - RNA, 22 nt, Human
cagauacaggaaaagcugcuga

SEQ ID NO: 1783665 - RNA, 23 nt, Human
cagaucuggggcagcacccuaua

SEQ ID NO: 1783666 - RNA, 17 nt, Human
cagaugcaccagcccuu

SEQ ID NO: 1783667 - RNA, 22 nt, Human
cagaugcaccagcccuuagcag

SEQ ID NO: 1783668 - RNA, 13 nt, Human
cagaugcaccagc

SEQ ID NO: 1783669 - RNA, 14 nt, Human
cagaugcaccagcc

SEQ ID NO: 1783670 - RNA, 16 nt, Human
cagaugcaccagcccu

SEQ ID NO: 1783671 - RNA, 16 nt, Human
cagaugauuucccccc

SEQ ID NO: 1783672 - RNA, 18 nt, Human
cagaugauuuccccccuc

SEQ ID NO: 1783673 - RNA, 15 nt, Human
cagaucuuaauauaa

SEQ ID NO: 1783674 - RNA, 18 nt, Human
cagaucuuaauauaaauu

SEQ ID NO: 1783675 - RNA, 14 nt, Human
cagaucuuggacuc

SEQ ID NO: 1783676 - RNA, 15 nt, Human
cagaucuuggacuca

SEQ ID NO: 1783677 - RNA, 18 nt, Human
cagaucuuggacucauga

SEQ ID NO: 1783678 - RNA, 19 nt, Human
cagaucuuggacucaugag

SEQ ID NO: 1783679 - RNA, 20 nt, Human
cagaucuuggacucaugagg

SEQ ID NO: 1783680 - RNA, 22 nt, Human
cagaucuuggacucaugaggag

SEQ ID NO: 1783681 - RNA, 13 nt, Human
cagaaagccaaca

SEQ ID NO: 1783682 - RNA, 16 nt, Human
cagaaacccugagcag

SEQ ID NO: 1783683 - RNA, 13 nt, Human
cagaaacaggacc

SEQ ID NO: 1783684 - RNA, 17 nt, Human
cacuuuugacaaaggca

SEQ ID NO: 1783685 - RNA, 18 nt, Human
cacuuuugacaaaggcaa

SEQ ID NO: 1783686 - RNA, 21 nt, Human
cagaaaaauaacuucaagcaa

SEQ ID NO: 1783687 - RNA, 13 nt, Human
cagaaguaagccu

SEQ ID NO: 1783688 - RNA, 15 nt, Human
cagaaguaagccuca

SEQ ID NO: 1783689 - RNA, 16 nt, Human
cagaaguaagccucau

SEQ ID NO: 1783690 - RNA, 19 nt, Human
cagaagggagcuagccaga

SEQ ID NO: 1783691 - RNA, 20 nt, Human
cagaagggagcuagccagag

SEQ ID NO: 1783692 - RNA, 21 nt, Human
cagaagggagcuagccagagg

SEQ ID NO: 1783693 - RNA, 20 nt, Human
cagaagcucuuacucuuucc

SEQ ID NO: 1783694 - RNA, 21 nt, Human
cagaagcucuuacucuuuccu

SEQ ID NO: 1783695 - RNA, 22 nt, Human
cagaagcucuuacucuuuccua

SEQ ID NO: 1783696 - RNA, 16 nt, Human
cagaagccucuggguc

SEQ ID NO: 1783697 - RNA, 13 nt, Human
cagaaggagacag

SEQ ID NO: 1783698 - RNA, 17 nt, Human
cagaaggagacaggcag

SEQ ID NO: 1783699 - RNA, 18 nt, Human
cagaaggagacaggcaga

SEQ ID NO: 1783700 - RNA, 18 nt, Human
cagaaggcaaacccauca

SEQ ID NO: 1783701 - RNA, 22 nt, Human
cagaaggagacaggcagagcug

SEQ ID NO: 1783702 - RNA, 21 nt, Human
cagaagacacugaugggcaac

SEQ ID NO: 1783703 - RNA, 14 nt, Human
cagaacuugcugcu

SEQ ID NO: 1783704 - RNA, 17 nt, Human
cagaacuugcugcuguc

SEQ ID NO: 1783705 - RNA, 18 nt, Human
cagaacuugcugcugucu

SEQ ID NO: 1783706 - RNA, 20 nt, Human
cagaacuugcugcugucuug

SEQ ID NO: 1783707 - RNA, 19 nt, Human
cagaacccuuggcuugccc

SEQ ID NO: 1783708 - RNA, 15 nt, Human
cagaacccugccaug

SEQ ID NO: 1783709 - RNA, 18 nt, Human
cagaacccugccauggaa

SEQ ID NO: 1783710 - RNA, 14 nt, Human
cagaacccuuggcu

SEQ ID NO: 1783711 - RNA, 16 nt, Human
cagaaccuuguuauuu

SEQ ID NO: 1783712 - RNA, 17 nt, Human
cagaaccuuguuauuuc

SEQ ID NO: 1783713 - RNA, 18 nt, Human
cagaaccuuguuauuucu

SEQ ID NO: 1783714 - RNA, 21 nt, Human
cagaaccuuguuauuucucag

SEQ ID NO: 1783715 - RNA, 21 nt, Human
cagaacgaaccuuggccuggg

SEQ ID NO: 1783716 - RNA, 14 nt, Human
cagaacucuuucaa

SEQ ID NO: 1783717 - RNA, 15 nt, Human
cagaacucuuucaaa

SEQ ID NO: 1783718 - RNA, 16 nt, Human
cagaacucuuucaaaa

SEQ ID NO: 1783719 - RNA, 16 nt, Human
cagaacugugccacaa

SEQ ID NO: 1783720 - RNA, 17 nt, Human
cagaacugugccacaau

SEQ ID NO: 1783721 - RNA, 22 nt, Human
cagaauuuguguugaaggaacu

SEQ ID NO: 1783722 - RNA, 20 nt, Human
cagacaaaagcgcuuuuccu

SEQ ID NO: 1783723 - RNA, 11 nt, Human
cagacaaaaug

SEQ ID NO: 1783724 - RNA, 20 nt, Human
cagacaaaauggauacauaa

SEQ ID NO: 1783725 - RNA, 22 nt, Human
cagacaaaugugguuacacacu

SEQ ID NO: 1783726 - RNA, 12 nt, Human
cagacacacaca

SEQ ID NO: 1783727 - RNA, 14 nt, Human
cagacacacacaca

SEQ ID NO: 1783728 - RNA, 12 nt, Human
cagaaugaaucu

SEQ ID NO: 1783729 - RNA, 13 nt, Human
cagacacaggccc

SEQ ID NO: 1783730 - RNA, 14 nt, Human
cagacacaggcccg

SEQ ID NO: 1783731 - RNA, 15 nt, Human
cagacacaggcccgg

SEQ ID NO: 1783732 - RNA, 17 nt, Human
cagacacaggcccggcu

SEQ ID NO: 1783733 - RNA, 18 nt, Human
cagacacaggcccggcuc

SEQ ID NO: 1783734 - RNA, 21 nt, Human
cagacacaggcccggcuccag

SEQ ID NO: 1783735 - RNA, 22 nt, Human
cagacacaggcccggcuccagg

SEQ ID NO: 1783736 - RNA, 23 nt, Human
cagacacaggcccggcuccaggc

SEQ ID NO: 1783737 - RNA, 19 nt, Human
cagacaccuugacagggca

SEQ ID NO: 1783738 - RNA, 20 nt, Human
cagacaccuugacagggcac

SEQ ID NO: 1783739 - RNA, 22 nt, Human
cagacaccuugacagggcacac

SEQ ID NO: 1783740 - RNA, 19 nt, Human
cagagaaacuuaagcaaag

SEQ ID NO: 1783741 - RNA, 20 nt, Human
cagagaaacuuaagcaaagg

SEQ ID NO: 1783742 - RNA, 19 nt, Human
cagagaaaguacuucucca

SEQ ID NO: 1783743 - RNA, 23 nt, Human
cagagaaaguacuucuccacccu

SEQ ID NO: 1783744 - RNA, 19 nt, Human
cagacuuuggaaaaugcau

SEQ ID NO: 1783745 - RNA, 22 nt, Human
cagacuuuggaaaaugcauugu

SEQ ID NO: 1783746 - RNA, 23 nt, Human
cagacuuuggaaaaugcauugua

SEQ ID NO: 1783747 - RNA, 16 nt, Human
cagacgccugaggaac

SEQ ID NO: 1783748 - RNA, 16 nt, Human
cagacccggcugcgug

SEQ ID NO: 1783749 - RNA, 12 nt, Human
cagacccggcug

SEQ ID NO: 1783750 - RNA, 14 nt, Human
cagacccggcugcg

SEQ ID NO: 1783751 - RNA, 14 nt, Human
cagcucaccagccc

SEQ ID NO: 1783752 - RNA, 14 nt, Human
cagcaagugguccu

SEQ ID NO: 1783753 - RNA, 22 nt, Human
cagcaagugguccuagaggccc

SEQ ID NO: 1783754 - RNA, 19 nt, Human
cagcaagugagagcugggu

SEQ ID NO: 1783755 - RNA, 21 nt, Human
cagcaagugagagcugggugu

SEQ ID NO: 1783756 - RNA, 14 nt, Human
cagcaagugagagc

SEQ ID NO: 1783757 - RNA, 15 nt, Human
cagcaagugagagcu

SEQ ID NO: 1783758 - RNA, 16 nt, Human
cagcaagugagagcug

SEQ ID NO: 1783759 - RNA, 17 nt, Human
cagcaagugagagcugg

SEQ ID NO: 1783760 - RNA, 12 nt, Human
cagcaagugaga

SEQ ID NO: 1783761 - RNA, 16 nt, Human
cagcaagaagggaguu

SEQ ID NO: 1783762 - RNA, 11 nt, Human
cagcagacuga

SEQ ID NO: 1783763 - RNA, 18 nt, Human
cagcagacugaucaggac

SEQ ID NO: 1783764 - RNA, 13 nt, Human
cagcagcccaagc

SEQ ID NO: 1783765 - RNA, 18 nt, Human
cagcagcccaagcuuccc

SEQ ID NO: 1783766 - RNA, 19 nt, Human
cagcagcccaagcuucccu

SEQ ID NO: 1783767 - RNA, 20 nt, Human
cagcagcccaagcuucccuc

SEQ ID NO: 1783768 - RNA, 15 nt, Human
cagcagcagcccaag

SEQ ID NO: 1783769 - RNA, 16 nt, Human
cagcagcagcccaagc

SEQ ID NO: 1783770 - RNA, 12 nt, Human
cagaugcccgag

SEQ ID NO: 1783771 - RNA, 18 nt, Human
cagaugcccgagggaggg

SEQ ID NO: 1783772 - RNA, 19 nt, Human
cagaugcccgagggagggg

SEQ ID NO: 1783773 - RNA, 17 nt, Human
cagauguucccccaucu

SEQ ID NO: 1783774 - RNA, 16 nt, Human
cagauuccccuguguc

SEQ ID NO: 1783775 - RNA, 17 nt, Human
cagauuccccuguguca

SEQ ID NO: 1783776 - RNA, 12 nt, Human
cagauuaauauu

SEQ ID NO: 1783777 - RNA, 16 nt, Human
cagauuuugauagcaa

SEQ ID NO: 1783778 - RNA, 20 nt, Human
cagauuuugauagcaaagcg

SEQ ID NO: 1783779 - RNA, 19 nt, Human
cagauuuugauagcaaagc

SEQ ID NO: 1783780 - RNA, 18 nt, Human
cagauuuugauagcaaag

SEQ ID NO: 1783781 - RNA, 15 nt, Human
cagcccacuucugcc

SEQ ID NO: 1783782 - RNA, 19 nt, Human
cagccaucucaugagggga

SEQ ID NO: 1783783 - RNA, 23 nt, Human
cagccaucucaugaggggagagg

SEQ ID NO: 1783784 - RNA, 18 nt, Human
cagcccacuucugccaua

SEQ ID NO: 1783785 - RNA, 19 nt, Human
cagcccagauuccccugug

SEQ ID NO: 1783786 - RNA, 22 nt, Human
cagcccagauuccccuguguca

SEQ ID NO: 1783787 - RNA, 23 nt, Human
cagccacggccaggccagaggga

SEQ ID NO: 1783788 - RNA, 15 nt, Human
cagccacuaagaacc

SEQ ID NO: 1783789 - RNA, 19 nt, Human
cagccacuaagaaccccuc

SEQ ID NO: 1783790 - RNA, 21 nt, Human
cagccacuccccuccacucuc

SEQ ID NO: 1783791 - RNA, 14 nt, Human
cagccacggccagg

SEQ ID NO: 1783792 - RNA, 15 nt, Human
cagccacggccaggc

SEQ ID NO: 1783793 - RNA, 16 nt, Human
cagccacggccaggcc

SEQ ID NO: 1783794 - RNA, 17 nt, Human
cagccacggccaggcca

SEQ ID NO: 1783795 - RNA, 18 nt, Human
cagccacggccaggccag

SEQ ID NO: 1783796 - RNA, 19 nt, Human
cagccacggccaggccaga

SEQ ID NO: 1783797 - RNA, 21 nt, Human
cagccacggccaggccagagg

SEQ ID NO: 1783798 - RNA, 22 nt, Human
cagccacggccaggccagaggg

SEQ ID NO: 1783799 - RNA, 17 nt, Human
cagccaauuauguuaaa

SEQ ID NO: 1783800 - RNA, 18 nt, Human
cagccaauuauguuaaac

SEQ ID NO: 1783801 - RNA, 21 nt, Human
cagccaccgaagccgccugug

SEQ ID NO: 1783802 - RNA, 11 nt, Human
cagcagggcua

SEQ ID NO: 1783803 - RNA, 19 nt, Human
cagcagggcuacccugagc

SEQ ID NO: 1783804 - RNA, 21 nt, Human
cagcagggcuacccugagcug

SEQ ID NO: 1783805 - RNA, 14 nt, Human
cagcauccuggcac

SEQ ID NO: 1783806 - RNA, 15 nt, Human
cagcauccuggcacc

SEQ ID NO: 1783807 - RNA, 16 nt, Human
cagcauccuggcaccc

SEQ ID NO: 1783808 - RNA, 17 nt, Human
cagcauccuggcacccg

SEQ ID NO: 1783809 - RNA, 17 nt, Human
cagcagcggaaccgccc

SEQ ID NO: 1783810 - RNA, 14 nt, Human
cagcaggaggccag

SEQ ID NO: 1783811 - RNA, 15 nt, Human
cagcaggaggccagg

SEQ ID NO: 1783812 - RNA, 18 nt, Human
cagcaggaggccaggccg

SEQ ID NO: 1783813 - RNA, 15 nt, Human
cagccaaaggcuggc

SEQ ID NO: 1783814 - RNA, 14 nt, Human
cagcauuugaucug

SEQ ID NO: 1783815 - RNA, 16 nt, Human
cagcauuugaucuguu

SEQ ID NO: 1783816 - RNA, 19 nt, Human
cagcauugcuggacucuga

SEQ ID NO: 1783817 - RNA, 18 nt, Human
cagcauucucaggcacca

SEQ ID NO: 1783818 - RNA, 19 nt, Human
cagcauucucaggcaccag

SEQ ID NO: 1783819 - RNA, 20 nt, Human
cagcauucucaggcaccagu

SEQ ID NO: 1783820 - RNA, 21 nt, Human
cagcauccuggcacccggccc

SEQ ID NO: 1783821 - RNA, 19 nt, Human
cagcauccuggcacccggc

SEQ ID NO: 1783822 - RNA, 20 nt, Human
cagcauccuggcacccggcc

SEQ ID NO: 1783823 - RNA, 17 nt, Human
cagcccucaucccgagc

SEQ ID NO: 1783824 - RNA, 13 nt, Human
cagcccucauccc

SEQ ID NO: 1783825 - RNA, 14 nt, Human
cagcccucaucccg

SEQ ID NO: 1783826 - RNA, 18 nt, Human
cagcccuaggguggagag

SEQ ID NO: 1783827 - RNA, 13 nt, Human
cagccccagugcc

SEQ ID NO: 1783828 - RNA, 14 nt, Human
cagccccagugccc

SEQ ID NO: 1783829 - RNA, 15 nt, Human
cagccccagugccca

SEQ ID NO: 1783830 - RNA, 16 nt, Human
cagccccagugcccac

SEQ ID NO: 1783831 - RNA, 17 nt, Human
cagccccagugcccaca

SEQ ID NO: 1783832 - RNA, 18 nt, Human
cagccccagugcccacag

SEQ ID NO: 1783833 - RNA, 12 nt, Human
cagccccagccu

SEQ ID NO: 1783834 - RNA, 13 nt, Human
cagccccagccug

SEQ ID NO: 1783835 - RNA, 14 nt, Human
cagccccagccugc

SEQ ID NO: 1783836 - RNA, 15 nt, Human
cagccccagccugcu

SEQ ID NO: 1783837 - RNA, 16 nt, Human
cagccccagccugcua

SEQ ID NO: 1783838 - RNA, 17 nt, Human
cagccccagccugcuag

SEQ ID NO: 1783839 - RNA, 18 nt, Human
cagccccagccugcuagc

SEQ ID NO: 1783840 - RNA, 19 nt, Human
cagccccagccugcuagcu

SEQ ID NO: 1783841 - RNA, 16 nt, Human
cagccccauucugccu

SEQ ID NO: 1783842 - RNA, 17 nt, Human
cagccccauucugccug

SEQ ID NO: 1783843 - RNA, 18 nt, Human
cagccccauucugccugc

SEQ ID NO: 1783844 - RNA, 13 nt, Human
cagccccauucug

SEQ ID NO: 1783845 - RNA, 14 nt, Human
cagccccauucugc

SEQ ID NO: 1783846 - RNA, 19 nt, Human
cagccucccaaagugcugg

SEQ ID NO: 1783847 - RNA, 20 nt, Human
cagccucccaaagugcuggg

SEQ ID NO: 1783848 - RNA, 21 nt, Human
cagccucccaaagugcuggga

SEQ ID NO: 1783849 - RNA, 23 nt, Human
cagccucccaaagugcugggauu

SEQ ID NO: 1783850 - RNA, 20 nt, Human
cagccucccgaauagcuggg

SEQ ID NO: 1783851 - RNA, 18 nt, Human
cagccuccccugccaggg

SEQ ID NO: 1783852 - RNA, 19 nt, Human
cagccuccccugccagggc

SEQ ID NO: 1783853 - RNA, 20 nt, Human
cagccuccccugccagggca

SEQ ID NO: 1783854 - RNA, 22 nt, Human
cagccuccccugccagggcagg

SEQ ID NO: 1783855 - RNA, 21 nt, Human
cagccucccgaauagcuggga

SEQ ID NO: 1783856 - RNA, 22 nt, Human
cagccucccgaauagcugggac

SEQ ID NO: 1783857 - RNA, 16 nt, Human
cagccuccccugccag

SEQ ID NO: 1783858 - RNA, 17 nt, Human
cagccuccccugccagg

SEQ ID NO: 1783859 - RNA, 17 nt, Human
cagccucagcgcggccc

SEQ ID NO: 1783860 - RNA, 18 nt, Human
cagccucagcgcggcccu

SEQ ID NO: 1783861 - RNA, 20 nt, Human
cagccucagcgcggcccucc

SEQ ID NO: 1783862 - RNA, 19 nt, Human
cagccucaaccuccugggc

SEQ ID NO: 1783863 - RNA, 20 nt, Human
cagccucaaccuccugggcu

SEQ ID NO: 1783864 - RNA, 21 nt, Human
cagccucaaccuccugggcua

SEQ ID NO: 1783865 - RNA, 17 nt, Human
cagccucaaccuccugg

SEQ ID NO: 1783866 - RNA, 18 nt, Human
cagccucaaccuccuggg

SEQ ID NO: 1783867 - RNA, 22 nt, Human
cagcucaccagccccagugccc

SEQ ID NO: 1783868 - RNA, 20 nt, Human
cagcucaccagccccagugc

SEQ ID NO: 1783869 - RNA, 21 nt, Human
cagcucaccagccccagugcc

SEQ ID NO: 1783870 - RNA, 13 nt, Human
cagcucaccagcc

SEQ ID NO: 1783871 - RNA, 19 nt, Human
cagcucaaggaaaggccug

SEQ ID NO: 1783872 - RNA, 20 nt, Human
cagcucaaggaaaggccuga

SEQ ID NO: 1783873 - RNA, 20 nt, Human
cagcuauguuauauugaaaa

SEQ ID NO: 1783874 - RNA, 21 nt, Human
cagcuauguuauauugaaaaa

SEQ ID NO: 1783875 - RNA, 15 nt, Human
cagcucaccagcccc

SEQ ID NO: 1783876 - RNA, 16 nt, Human
cagcucaccagcccca

SEQ ID NO: 1783877 - RNA, 17 nt, Human
cagcucaccagccccag

SEQ ID NO: 1783878 - RNA, 19 nt, Human
cagcucaccagccccagug

SEQ ID NO: 1783879 - RNA, 15 nt, Human
cagcuauaccugugc

SEQ ID NO: 1783880 - RNA, 16 nt, Human
cagcuauaccugugcc

SEQ ID NO: 1783881 - RNA, 17 nt, Human
cagcuauaccugugccu

SEQ ID NO: 1783882 - RNA, 19 nt, Human
cagcuauaccugugccucg

SEQ ID NO: 1783883 - RNA, 21 nt, Human
cagcuauaccugugccucggc

SEQ ID NO: 1783884 - RNA, 22 nt, Human
cagcuauaccugugccucggcu

SEQ ID NO: 1783885 - RNA, 23 nt, Human
cagcuauaccugugccucggcuu

SEQ ID NO: 1783886 - RNA, 21 nt, Human
cagcgagcccugguggcagug

SEQ ID NO: 1783887 - RNA, 16 nt, Human
cagcgaggaggcucca

SEQ ID NO: 1783888 - RNA, 17 nt, Human
cagcgaggaggcuccag

SEQ ID NO: 1783889 - RNA, 18 nt, Human
cagcgaggaggcuccaga

SEQ ID NO: 1783890 - RNA, 13 nt, Human
cagcgagcccugg

SEQ ID NO: 1783891 - RNA, 16 nt, Human
cagcgagcccuggugg

SEQ ID NO: 1783892 - RNA, 17 nt, Human
cagcgagcccugguggc

SEQ ID NO: 1783893 - RNA, 19 nt, Human
cagcgagcccugguggcag

SEQ ID NO: 1783894 - RNA, 20 nt, Human
cagcgagcccugguggcagu

SEQ ID NO: 1783895 - RNA, 15 nt, Human
cagcuaaugggacac

SEQ ID NO: 1783896 - RNA, 16 nt, Human
cagcuaaugggacacu

SEQ ID NO: 1783897 - RNA, 20 nt, Human
cagccuuucuggcagguccu

SEQ ID NO: 1783898 - RNA, 23 nt, Human
cagccucccgaauagcugggacu

SEQ ID NO: 1783899 - RNA, 19 nt, Human
cagccucccgaguagcugg

SEQ ID NO: 1783900 - RNA, 20 nt, Human
cagccucccgaguagcuggg

SEQ ID NO: 1783901 - RNA, 21 nt, Human
cagccucccgaguagcuggga

SEQ ID NO: 1783902 - RNA, 22 nt, Human
cagccucccgaguagcugggac

SEQ ID NO: 1783903 - RNA, 23 nt, Human
cagccucccgaguagcugggacu

SEQ ID NO: 1783904 - RNA, 12 nt, Human
cagcucuguccu

SEQ ID NO: 1783905 - RNA, 13 nt, Human
cagcucuguccug

SEQ ID NO: 1783906 - RNA, 14 nt, Human
cagcucuguccugg

SEQ ID NO: 1783907 - RNA, 16 nt, Human
cagcucuguccuggga

SEQ ID NO: 1783908 - RNA, 17 nt, Human
cagcucuguccugggag

SEQ ID NO: 1783909 - RNA, 18 nt, Human
cagcucuguccugggagu

SEQ ID NO: 1783910 - RNA, 23 nt, Human
cagcucuguccugggagugagcu

SEQ ID NO: 1783911 - RNA, 13 nt, Human
cagcucuucucca

SEQ ID NO: 1783912 - RNA, 14 nt, Human
cagcucuucuccag

SEQ ID NO: 1783913 - RNA, 15 nt, Human
cagcucuucuccagg

SEQ ID NO: 1783914 - RNA, 16 nt, Human
cagcucuucuccaggc

SEQ ID NO: 1783915 - RNA, 17 nt, Human
cagcucuucuccaggcu

SEQ ID NO: 1783916 - RNA, 18 nt, Human
cagcucuucuccaggcug

SEQ ID NO: 1783917 - RNA, 19 nt, Human
cagcucuucuccaggcugu

SEQ ID NO: 1783918 - RNA, 23 nt, Human
cagcucuucuccaggcuguaucc

SEQ ID NO: 1783919 - RNA, 13 nt, Human
cagcucagcuucc

SEQ ID NO: 1783920 - RNA, 14 nt, Human
cagcucagcuuccc

SEQ ID NO: 1783921 - RNA, 16 nt, Human
cagcuccuucuguccu

SEQ ID NO: 1783922 - RNA, 17 nt, Human
cagcuccuucuguccua

SEQ ID NO: 1783923 - RNA, 21 nt, Human
cagcuccuucuguccuacucu

SEQ ID NO: 1783924 - RNA, 23 nt, Human
cagcuccuucuguccuacucugu

SEQ ID NO: 1783925 - RNA, 18 nt, Human
cagcucugaaaccagugu

SEQ ID NO: 1783926 - RNA, 19 nt, Human
cagcucugaaaccaguguu

SEQ ID NO: 1783927 - RNA, 14 nt, Human
cagcucucugcccu

SEQ ID NO: 1783928 - RNA, 15 nt, Human
cagcucucugcccug

SEQ ID NO: 1783929 - RNA, 17 nt, Human
cagcucucugcccugug

SEQ ID NO: 1783930 - RNA, 19 nt, Human
cagcucucugcccugugua

SEQ ID NO: 1783931 - RNA, 21 nt, Human
cagcucucugcccuguguacu

SEQ ID NO: 1783932 - RNA, 16 nt, Human
cagcucgguacccggg

SEQ ID NO: 1783933 - RNA, 13 nt, Human
cagcucggcucag

SEQ ID NO: 1783934 - RNA, 14 nt, Human
cagcucggcucagc

SEQ ID NO: 1783935 - RNA, 15 nt, Human
cagcucggcucagcu

SEQ ID NO: 1783936 - RNA, 13 nt, Human
cagcuccuuccug

SEQ ID NO: 1783937 - RNA, 14 nt, Human
cagcuccuuccugg

SEQ ID NO: 1783938 - RNA, 16 nt, Human
cagcuccuuccuggag

SEQ ID NO: 1783939 - RNA, 18 nt, Human
cagcugcgguccacccag

SEQ ID NO: 1783940 - RNA, 15 nt, Human
cagcugccuuagcuu

SEQ ID NO: 1783941 - RNA, 16 nt, Human
cagcugccuuagcuuc

SEQ ID NO: 1783942 - RNA, 19 nt, Human
cagcugccuuagcuucagg

SEQ ID NO: 1783943 - RNA, 20 nt, Human
cagcugccuuagcuucagga

SEQ ID NO: 1783944 - RNA, 21 nt, Human
cagcugccuuagcuucaggaa

SEQ ID NO: 1783945 - RNA, 22 nt, Human
cagcugccuuagcuucaggaac

SEQ ID NO: 1783946 - RNA, 23 nt, Human
cagcugccuuagcuucaggaacc

SEQ ID NO: 1783947 - RNA, 19 nt, Human
cagcugcgguccacccagg

SEQ ID NO: 1783948 - RNA, 20 nt, Human
cagcugcgguccacccagga

SEQ ID NO: 1783949 - RNA, 21 nt, Human
cagcugcgguccacccaggag

SEQ ID NO: 1783950 - RNA, 22 nt, Human
cagcugcgguccacccaggagc

SEQ ID NO: 1783951 - RNA, 23 nt, Human
cagcugcgguccacccaggagcc

SEQ ID NO: 1783952 - RNA, 24 nt, Human
cagcugcgguccacccaggagccc

SEQ ID NO: 1783953 - RNA, 23 nt, Human
cagcuggaugagaauuugagugc

SEQ ID NO: 1783954 - RNA, 18 nt, Human
cagcuggaugauggucuu

SEQ ID NO: 1783955 - RNA, 23 nt, Human
cagcugcuuuugucuaugggacu

SEQ ID NO: 1783956 - RNA, 22 nt, Human
cagcugcuuuugucuaugggac

SEQ ID NO: 1783957 - RNA, 23 nt, Human
caggaagccgccaguacuuguca

SEQ ID NO: 1783958 - RNA, 17 nt, Human
caggaauauaugugugc

SEQ ID NO: 1783959 - RNA, 20 nt, Human
caggaccuucgggcugugcc

SEQ ID NO: 1783960 - RNA, 21 nt, Human
caggaccuucgggcugugccc

SEQ ID NO: 1783961 - RNA, 22 nt, Human
caggaccuucgggcugugcccg

SEQ ID NO: 1783962 - RNA, 21 nt, Human
caggaccucugaaacccugga

SEQ ID NO: 1783963 - RNA, 13 nt, Human
caggaccugccug

SEQ ID NO: 1783964 - RNA, 19 nt, Human
caggaccugccuguagccc

SEQ ID NO: 1783965 - RNA, 14 nt, Human
caggaccugccugu

SEQ ID NO: 1783966 - RNA, 15 nt, Human
caggaccugccugua

SEQ ID NO: 1783967 - RNA, 14 nt, Human
caggaagaaagaau

SEQ ID NO: 1783968 - RNA, 17 nt, Human
caggaagaaagaauguu

SEQ ID NO: 1783969 - RNA, 18 nt, Human
caggaaccucgaguacug

SEQ ID NO: 1783970 - RNA, 19 nt, Human
caggaaccucgaguacugu

SEQ ID NO: 1783971 - RNA, 20 nt, Human
caggaaccucgaguacugug

SEQ ID NO: 1783972 - RNA, 21 nt, Human
caggaaccucgaguacugugg

SEQ ID NO: 1783973 - RNA, 23 nt, Human
caggaaccucgaguacugugggc

SEQ ID NO: 1783974 - RNA, 18 nt, Human
cagcuugaggguugggcu

SEQ ID NO: 1783975 - RNA, 19 nt, Human
cagcuugaggguugggcug

SEQ ID NO: 1783976 - RNA, 20 nt, Human
cagcuugaggguugggcugg

SEQ ID NO: 1783977 - RNA, 21 nt, Human
cagcuugaggguugggcuggu

SEQ ID NO: 1783978 - RNA, 14 nt, Human
cagcuugaggguug

SEQ ID NO: 1783979 - RNA, 15 nt, Human
cagcuugaggguugg

SEQ ID NO: 1783980 - RNA, 20 nt, Human
cagcuucauuuccugugucu

SEQ ID NO: 1783981 - RNA, 21 nt, Human
cagcuucauuuccugugucuu

SEQ ID NO: 1783982 - RNA, 18 nt, Human
cagcuucuauccuugacu

SEQ ID NO: 1783983 - RNA, 21 nt, Human
cagcuuguaaauagcucaggu

SEQ ID NO: 1783984 - RNA, 22 nt, Human
cagcuuguaaauagcucaggug

SEQ ID NO: 1783985 - RNA, 18 nt, Human
cagcuuguaaauagcuca

SEQ ID NO: 1783986 - RNA, 19 nt, Human
cagcuuguaaauagcucag

SEQ ID NO: 1783987 - RNA, 20 nt, Human
cagcuuguaaauagcucagg

SEQ ID NO: 1783988 - RNA, 16 nt, Human
caguccauagcagaga

SEQ ID NO: 1783989 - RNA, 13 nt, Human
caguccacaaaau

SEQ ID NO: 1783990 - RNA, 16 nt, Human
caguauuacuucugcu

SEQ ID NO: 1783991 - RNA, 15 nt, Human
caguaugguacauuu

SEQ ID NO: 1783992 - RNA, 16 nt, Human
caguaugguacauuuu

SEQ ID NO: 1783993 - RNA, 17 nt, Human
caguaugguacauuuuu

SEQ ID NO: 1783994 - RNA, 18 nt, Human
caguaugguacauuuuuc

SEQ ID NO: 1783995 - RNA, 20 nt, Human
caguaugguacauuuuucaa

SEQ ID NO: 1783996 - RNA, 23 nt, Human
caguaugguacauuuuucaacuu

SEQ ID NO: 1783997 - RNA, 18 nt, Human
caguauuacuucugcuac

SEQ ID NO: 1783998 - RNA, 19 nt, Human
caguauuacuucugcuaca

SEQ ID NO: 1783999 - RNA, 21 nt, Human
cagucaggaaaggaaucauuu

SEQ ID NO: 1784000 - RNA, 22 nt, Human
caguaggagcccagcucugaaa

SEQ ID NO: 1784001 - RNA, 12 nt, Human
caguaggagccc

SEQ ID NO: 1784002 - RNA, 14 nt, Human
caguaggagcccag

SEQ ID NO: 1784003 - RNA, 15 nt, Human
caguaggagcccagc

SEQ ID NO: 1784004 - RNA, 21 nt, Human
caguaggagcccagcucugaa

SEQ ID NO: 1784005 - RNA, 18 nt, Human
caguagaaauaauaugca

SEQ ID NO: 1784006 - RNA, 19 nt, Human
caguagaaauaauaugcau

SEQ ID NO: 1784007 - RNA, 23 nt, Human
caguauaauugaguuuucagugg

SEQ ID NO: 1784008 - RNA, 14 nt, Human
cagugcucgcuguu

SEQ ID NO: 1784009 - RNA, 14 nt, Human
cagugcucccucac

SEQ ID NO: 1784010 - RNA, 22 nt, Human
cagugcucgcuguugcugaaua

SEQ ID NO: 1784011 - RNA, 21 nt, Human
cagugcucgcuguugcugaau

SEQ ID NO: 1784012 - RNA, 20 nt, Human
cagugcucgcuguugcugaa

SEQ ID NO: 1784013 - RNA, 19 nt, Human
cagugcucgcuguugcuga

SEQ ID NO: 1784014 - RNA, 18 nt, Human
cagugcucgcuguugcug

SEQ ID NO: 1784015 - RNA, 17 nt, Human
cagugcucgcuguugcu

SEQ ID NO: 1784016 - RNA, 16 nt, Human
cagugcucgcuguugc

SEQ ID NO: 1784017 - RNA, 15 nt, Human
cagugcucgcuguug

SEQ ID NO: 1784018 - RNA, 19 nt, Human
cagugagucgaggacaggg

SEQ ID NO: 1784019 - RNA, 20 nt, Human
cagugagucgaggacaggga

SEQ ID NO: 1784020 - RNA, 22 nt, Human
cagugagucgaggacagggagg

SEQ ID NO: 1784021 - RNA, 23 nt, Human
cagugagucgaggacagggaggu

SEQ ID NO: 1784022 - RNA, 23 nt, Human
cagugauguaccaugaaacaaag

SEQ ID NO: 1784023 - RNA, 13 nt, Human
cagugagccacuc

SEQ ID NO: 1784024 - RNA, 17 nt, Human
cagugagucgaggacag

SEQ ID NO: 1784025 - RNA, 18 nt, Human
cagugagucgaggacagg

SEQ ID NO: 1784026 - RNA, 18 nt, Human
cagugaaugauucagugu

SEQ ID NO: 1784027 - RNA, 20 nt, Human
cagugaaugauucaguguua

SEQ ID NO: 1784028 - RNA, 17 nt, Human
cagugacacgucucgcc

SEQ ID NO: 1784029 - RNA, 23 nt, Human
cagugacacgucucgccaagcag

SEQ ID NO: 1784030 - RNA, 16 nt, Human
cagugaauuuuugcaa

SEQ ID NO: 1784031 - RNA, 17 nt, Human
cagugaauuuuugcaau

SEQ ID NO: 1784032 - RNA, 18 nt, Human
cagugaauuuuugcaaua

SEQ ID NO: 1784033 - RNA, 19 nt, Human
cagugaauuuuugcaauaa

SEQ ID NO: 1784034 - RNA, 20 nt, Human
cagugaauuuuugcaauaau

SEQ ID NO: 1784035 - RNA, 21 nt, Human
cagugaauuuuugcaauaaug

SEQ ID NO: 1784036 - RNA, 22 nt, Human
cagugaauuuuugcaauaaugc

SEQ ID NO: 1784037 - RNA, 23 nt, Human
cagugaauuuuugcaauaaugca

SEQ ID NO: 1784038 - RNA, 17 nt, Human
cagugaaugauucagug

SEQ ID NO: 1784039 - RNA, 22 nt, Human
caguccugaucagagccguggu

SEQ ID NO: 1784040 - RNA, 19 nt, Human
cagucuggaaugcaguggu

SEQ ID NO: 1784041 - RNA, 15 nt, Human
cagucuuccauuugc

SEQ ID NO: 1784042 - RNA, 16 nt, Human
cagucuuccacaaaga

SEQ ID NO: 1784043 - RNA, 17 nt, Human
cagucuuccacaaagaa

SEQ ID NO: 1784044 - RNA, 18 nt, Human
cagucuuccacaaagaaa

SEQ ID NO: 1784045 - RNA, 19 nt, Human
cagucuuccacaaagaaaa

SEQ ID NO: 1784046 - RNA, 20 nt, Human
cagucuuccacaaagaaaau

SEQ ID NO: 1784047 - RNA, 21 nt, Human
cagucuuccacaaagaaaauu

SEQ ID NO: 1784048 - RNA, 17 nt, Human
cagucuuccauuugcaa

SEQ ID NO: 1784049 - RNA, 18 nt, Human
cagucuuccauuugcaag

SEQ ID NO: 1784050 - RNA, 21 nt, Human
cagucuuccauuugcaaggga

SEQ ID NO: 1784051 - RNA, 20 nt, Human
cagugaaagaaaauaacaau

SEQ ID NO: 1784052 - RNA, 16 nt, Human
cagugaaagaaaauaa

SEQ ID NO: 1784053 - RNA, 18 nt, Human
caggucuugaacuccugg

SEQ ID NO: 1784054 - RNA, 19 nt, Human
caggucuugaacuccuggc

SEQ ID NO: 1784055 - RNA, 20 nt, Human
caggucuugaacuccuggcc

SEQ ID NO: 1784056 - RNA, 21 nt, Human
caggucuugaacuccuggccu

SEQ ID NO: 1784057 - RNA, 22 nt, Human
caggucuugaacuccuggccuc

SEQ ID NO: 1784058 - RNA, 23 nt, Human
caggucuugaacuccuggccuca

SEQ ID NO: 1784059 - RNA, 22 nt, Human
caggugcuggagcacugggcuc

SEQ ID NO: 1784060 - RNA, 23 nt, Human
caggugcuggagcacugggcucc

SEQ ID NO: 1784061 - RNA, 13 nt, Human
caggugcugucca

SEQ ID NO: 1784062 - RNA, 14 nt, Human
caggugcuguccau

SEQ ID NO: 1784063 - RNA, 15 nt, Human
caggugcuggagcac

SEQ ID NO: 1784064 - RNA, 18 nt, Human
caggugcuggagcacugg

SEQ ID NO: 1784065 - RNA, 19 nt, Human
caggugcuggagcacuggg

SEQ ID NO: 1784066 - RNA, 21 nt, Human
caggugcuggagcacugggcu

SEQ ID NO: 1784067 - RNA, 16 nt, Human
caggugaaacccaguc

SEQ ID NO: 1784068 - RNA, 20 nt, Human
cagguaacaggcagauacag

SEQ ID NO: 1784069 - RNA, 21 nt, Human
cagguaacaggcagauacagg

SEQ ID NO: 1784070 - RNA, 21 nt, Human
cagguacccuucucgcuuuug

SEQ ID NO: 1784071 - RNA, 13 nt, Human
cagguagggggga

SEQ ID NO: 1784072 - RNA, 15 nt, Human
cagguagccugcugg

SEQ ID NO: 1784073 - RNA, 16 nt, Human
caggguuuugccaugu

SEQ ID NO: 1784074 - RNA, 17 nt, Human
cagggucucacucuguc

SEQ ID NO: 1784075 - RNA, 16 nt, Human
cagggucucacucugu

SEQ ID NO: 1784076 - RNA, 14 nt, Human
cagguaacaggcag

SEQ ID NO: 1784077 - RNA, 15 nt, Human
cagguaacaggcaga

SEQ ID NO: 1784078 - RNA, 16 nt, Human
cagguaacaggcagau

SEQ ID NO: 1784079 - RNA, 17 nt, Human
cagguaacaggcagaua

SEQ ID NO: 1784080 - RNA, 21 nt, Human
cagggucucacuauguugccc

SEQ ID NO: 1784081 - RNA, 22 nt, Human
cagggucucacuauguugccca

SEQ ID NO: 1784082 - RNA, 23 nt, Human
cagggucucacuauguugcccag

SEQ ID NO: 1784083 - RNA, 15 nt, Human
cagggucucacucug

SEQ ID NO: 1784084 - RNA, 18 nt, Human
cagggucagaaacaggac

SEQ ID NO: 1784085 - RNA, 19 nt, Human
cagggucagaaacaggacc

SEQ ID NO: 1784086 - RNA, 10 nt, Human
cagggucaga

SEQ ID NO: 1784087 - RNA, 16 nt, Human
cagggucagaaacagg

SEQ ID NO: 1784088 - RNA, 13 nt, Human
cagguggggcagc

SEQ ID NO: 1784089 - RNA, 14 nt, Human
cagguggggcagcu

SEQ ID NO: 1784090 - RNA, 19 nt, Human
cagguggggagacugggcu

SEQ ID NO: 1784091 - RNA, 20 nt, Human
cagguggggagacugggcug

SEQ ID NO: 1784092 - RNA, 22 nt, Human
cagguggggagacugggcugag

SEQ ID NO: 1784093 - RNA, 15 nt, Human
cagguggggcagcuu

SEQ ID NO: 1784094 - RNA, 16 nt, Human
cagguggggcagcuug

SEQ ID NO: 1784095 - RNA, 17 nt, Human
cagguggggcagcuuga

SEQ ID NO: 1784096 - RNA, 23 nt, Human
cagguggggagacugggcugagg

SEQ ID NO: 1784097 - RNA, 17 nt, Human
cagguggggguugcugu

SEQ ID NO: 1784098 - RNA, 21 nt, Human
cagguggggguugcuguauaa

SEQ ID NO: 1784099 - RNA, 13 nt, Human
caggugggucccg

SEQ ID NO: 1784100 - RNA, 22 nt, Human
caggugggucccggcucugugg

SEQ ID NO: 1784101 - RNA, 11 nt, Human
caggugucccu

SEQ ID NO: 1784102 - RNA, 14 nt, Human
caggugucccugca

SEQ ID NO: 1784103 - RNA, 22 nt, Human
caggugugagucaccaagccca

SEQ ID NO: 1784104 - RNA, 23 nt, Human
caggugugagucaccaagcccag

SEQ ID NO: 1784105 - RNA, 16 nt, Human
caggugugagucacca

SEQ ID NO: 1784106 - RNA, 20 nt, Human
caggugugagucaccaagcc

SEQ ID NO: 1784107 - RNA, 21 nt, Human
caggugugagucaccaagccc

SEQ ID NO: 1784108 - RNA, 16 nt, Human
caggugugaaccacca

SEQ ID NO: 1784109 - RNA, 19 nt, Human
caggugugaaccaccacac

SEQ ID NO: 1784110 - RNA, 22 nt, Human
caggugugaaccaccacaccca

SEQ ID NO: 1784111 - RNA, 23 nt, Human
caggugugaaccaccacacccag

SEQ ID NO: 1784112 - RNA, 15 nt, Human
caggugucccugcac

SEQ ID NO: 1784113 - RNA, 16 nt, Human
caggugucccugcacu

SEQ ID NO: 1784114 - RNA, 18 nt, Human
caggugucccugcacuug

SEQ ID NO: 1784115 - RNA, 19 nt, Human
caggugucccugcacuugc

SEQ ID NO: 1784116 - RNA, 12 nt, Human
caggugugaacc

SEQ ID NO: 1784117 - RNA, 12 nt, Human
cagguucagcuu

SEQ ID NO: 1784118 - RNA, 13 nt, Human
cagguucauggau

SEQ ID NO: 1784119 - RNA, 22 nt, Human
cagguucauggauuacuucucu

SEQ ID NO: 1784120 - RNA, 13 nt, Human
cagguucagcuug

SEQ ID NO: 1784121 - RNA, 23 nt, Human
caguaccuucaaacuagggccaa

SEQ ID NO: 1784122 - RNA, 12 nt, Human
caguacuuguca

SEQ ID NO: 1784123 - RNA, 13 nt, Human
caguacuugucau

SEQ ID NO: 1784124 - RNA, 22 nt, Human
caggagucucugguagccugca

SEQ ID NO: 1784125 - RNA, 23 nt, Human
caggagccccgaggccuucucug

SEQ ID NO: 1784126 - RNA, 20 nt, Human
caggagccccgaggccuucu

SEQ ID NO: 1784127 - RNA, 22 nt, Human
caggagccccgaggccuucucu

SEQ ID NO: 1784128 - RNA, 15 nt, Human
caggagccccgaggc

SEQ ID NO: 1784129 - RNA, 16 nt, Human
caggagccccgaggcc

SEQ ID NO: 1784130 - RNA, 18 nt, Human
caggagccccgaggccuu

SEQ ID NO: 1784131 - RNA, 12 nt, Human
caggagugagca

SEQ ID NO: 1784132 - RNA, 12 nt, Human
caggacucugac

SEQ ID NO: 1784133 - RNA, 14 nt, Human
caggacucugaccc

SEQ ID NO: 1784134 - RNA, 17 nt, Human
caggacgugggcugggc

SEQ ID NO: 1784135 - RNA, 16 nt, Human
caggacgugggcuggg

SEQ ID NO: 1784136 - RNA, 16 nt, Human
caggacucagaagccu

SEQ ID NO: 1784137 - RNA, 18 nt, Human
caggacucagaagccucu

SEQ ID NO: 1784138 - RNA, 19 nt, Human
caggacucagaagccucug

SEQ ID NO: 1784139 - RNA, 20 nt, Human
caggacucagaagccucugg

SEQ ID NO: 1784140 - RNA, 21 nt, Human
caggacucagaagccucuggg

SEQ ID NO: 1784141 - RNA, 21 nt, Human
caggagcacacccagccccca

SEQ ID NO: 1784142 - RNA, 15 nt, Human
caggagcacacccag

SEQ ID NO: 1784143 - RNA, 16 nt, Human
caggagcacacccagc

SEQ ID NO: 1784144 - RNA, 19 nt, Human
caggagcacacccagcccc

SEQ ID NO: 1784145 - RNA, 15 nt, Human
caggacuuccccgga

SEQ ID NO: 1784146 - RNA, 21 nt, Human
caggacuuccccggagggcug

SEQ ID NO: 1784147 - RNA, 22 nt, Human
caggacuuccccggagggcugc

SEQ ID NO: 1784148 - RNA, 19 nt, Human
caggagaaggccaauuccu

SEQ ID NO: 1784149 - RNA, 21 nt, Human
caggagaaggccaauuccuau

SEQ ID NO: 1784150 - RNA, 22 nt, Human
caggagaaggccaauuccuaua

SEQ ID NO: 1784151 - RNA, 13 nt, Human
caggcccggcucc

SEQ ID NO: 1784152 - RNA, 13 nt, Human
caggccccuggag

SEQ ID NO: 1784153 - RNA, 14 nt, Human
caggccccuggagg

SEQ ID NO: 1784154 - RNA, 16 nt, Human
caggccccuggaggcu

SEQ ID NO: 1784155 - RNA, 19 nt, Human
caggccccuggaggcugcc

SEQ ID NO: 1784156 - RNA, 20 nt, Human
caggccccuggaggcugccu

SEQ ID NO: 1784157 - RNA, 22 nt, Human
caggccccuggaggcugccucc

SEQ ID NO: 1784158 - RNA, 23 nt, Human
caggccccuggaggcugccuccc

SEQ ID NO: 1784159 - RNA, 14 nt, Human
caggcccggcucca

SEQ ID NO: 1784160 - RNA, 15 nt, Human
caggcccggcuccag

SEQ ID NO: 1784161 - RNA, 15 nt, Human
caggccccugccacc

SEQ ID NO: 1784162 - RNA, 17 nt, Human
caggccccugccacccu

SEQ ID NO: 1784163 - RNA, 19 nt, Human
caggccccugccacccugg

SEQ ID NO: 1784164 - RNA, 20 nt, Human
caggccccugccacccuggg

SEQ ID NO: 1784165 - RNA, 16 nt, Human
caggcccggcuccagg

SEQ ID NO: 1784166 - RNA, 15 nt, Human
caggccauugugaac

SEQ ID NO: 1784167 - RNA, 20 nt, Human
caggccauugugaaccaaug

SEQ ID NO: 1784168 - RNA, 15 nt, Human
caggccccaggaaag

SEQ ID NO: 1784169 - RNA, 13 nt, Human
caggccccugcca

SEQ ID NO: 1784170 - RNA, 14 nt, Human
caggcagguccagg

SEQ ID NO: 1784171 - RNA, 15 nt, Human
caggcagguccaggg

SEQ ID NO: 1784172 - RNA, 19 nt, Human
caggcagguccaggguuug

SEQ ID NO: 1784173 - RNA, 12 nt, Human
caggcaggucuu

SEQ ID NO: 1784174 - RNA, 13 nt, Human
caggcaggucuug

SEQ ID NO: 1784175 - RNA, 22 nt, Human
caggcaggucuugaacuccugg

SEQ ID NO: 1784176 - RNA, 23 nt, Human
caggcaggucuugaacuccuggc

SEQ ID NO: 1784177 - RNA, 19 nt, Human
caggcauugccaagggcuu

SEQ ID NO: 1784178 - RNA, 16 nt, Human
caggcauuuagcccuc

SEQ ID NO: 1784179 - RNA, 17 nt, Human
caggcauuuagcccuca

SEQ ID NO: 1784180 - RNA, 15 nt, Human
caggcauguucucug

SEQ ID NO: 1784181 - RNA, 18 nt, Human
caggcauguucucugagg

SEQ ID NO: 1784182 - RNA, 19 nt, Human
caggcauguucucugagga

SEQ ID NO: 1784183 - RNA, 20 nt, Human
caggcauguucucugaggac

SEQ ID NO: 1784184 - RNA, 13 nt, Human
caggcagguccag

SEQ ID NO: 1784185 - RNA, 14 nt, Human
caggcaaugcuggc

SEQ ID NO: 1784186 - RNA, 14 nt, Human
caggcaagcaccuc

SEQ ID NO: 1784187 - RNA, 15 nt, Human
caggcaagcaccucc

SEQ ID NO: 1784188 - RNA, 16 nt, Human
caggcaagcaccuccu

SEQ ID NO: 1784189 - RNA, 21 nt, Human
caggcaagcaccuccugccuc

SEQ ID NO: 1784190 - RNA, 14 nt, Human
caggauuugcacag

SEQ ID NO: 1784191 - RNA, 15 nt, Human
caggauuugcacaga

SEQ ID NO: 1784192 - RNA, 16 nt, Human
caggauuugcacagaa

SEQ ID NO: 1784193 - RNA, 22 nt, Human
caggauuugcacagaagcacau

SEQ ID NO: 1784194 - RNA, 13 nt, Human
caggaucagucug

SEQ ID NO: 1784195 - RNA, 14 nt, Human
caggaucagucuga

SEQ ID NO: 1784196 - RNA, 24 nt, Human
caggaucagauugcaugugacucu

SEQ ID NO: 1784197 - RNA, 20 nt, Human
caggaucagauugcauguga

SEQ ID NO: 1784198 - RNA, 23 nt, Human
caggaucagauugcaugugacuc

SEQ ID NO: 1784199 - RNA, 23 nt, Human
caggcugggcuucaguggcagcu

SEQ ID NO: 1784200 - RNA, 22 nt, Human
caggcuguaucccaugagccuc

SEQ ID NO: 1784201 - RNA, 23 nt, Human
caggcuguaucccaugagccuca

SEQ ID NO: 1784202 - RNA, 12 nt, Human
caggcuggucuc

SEQ ID NO: 1784203 - RNA, 19 nt, Human
caggcuggucucaaacucu

SEQ ID NO: 1784204 - RNA, 14 nt, Human
caggcuguauccca

SEQ ID NO: 1784205 - RNA, 20 nt, Human
caggcuguaucccaugagcc

SEQ ID NO: 1784206 - RNA, 21 nt, Human
caggcuguaucccaugagccu

SEQ ID NO: 1784207 - RNA, 16 nt, Human
cagggaaacagcuaau

SEQ ID NO: 1784208 - RNA, 22 nt, Human
caggcccggcuccaggcuccuu

SEQ ID NO: 1784209 - RNA, 20 nt, Human
caggcccggcuccaggcucc

SEQ ID NO: 1784210 - RNA, 21 nt, Human
caggcccggcuccaggcuccu

SEQ ID NO: 1784211 - RNA, 17 nt, Human
caggcccggcuccaggc

SEQ ID NO: 1784212 - RNA, 18 nt, Human
caggcccggcuccaggcu

SEQ ID NO: 1784213 - RNA, 19 nt, Human
caggcccggcuccaggcuc

SEQ ID NO: 1784214 - RNA, 21 nt, Human
caggcuccuuuagcgcccagu

SEQ ID NO: 1784215 - RNA, 14 nt, Human
caggcuccuuuagc

SEQ ID NO: 1784216 - RNA, 19 nt, Human
caggcuccuuuagcgccca

SEQ ID NO: 1784217 - RNA, 20 nt, Human
caggcuccuuuagcgcccag

SEQ ID NO: 1784218 - RNA, 13 nt, Human
caggccggcagcc

SEQ ID NO: 1784219 - RNA, 17 nt, Human
caggccggcagccccag

SEQ ID NO: 1784220 - RNA, 20 nt, Human
caggccggcagccccagccu

SEQ ID NO: 1784221 - RNA, 21 nt, Human
caggccggcagccccagccug

SEQ ID NO: 1784222 - RNA, 22 nt, Human
caggccggcagccccagccugc

SEQ ID NO: 1784223 - RNA, 23 nt, Human
caggccggcagccccagccugcu

SEQ ID NO: 1784224 - RNA, 19 nt, Human
caggccggcgagcccugug

SEQ ID NO: 1784225 - RNA, 20 nt, Human
caggccggcgagcccugugg

SEQ ID NO: 1784226 - RNA, 22 nt, Human
cagggcacaccgggcacucaga

SEQ ID NO: 1784227 - RNA, 23 nt, Human
cagggcacaccgggcacucagaa

SEQ ID NO: 1784228 - RNA, 15 nt, Human
cagggcacaccgggc

SEQ ID NO: 1784229 - RNA, 17 nt, Human
cagggcacaccgggcac

SEQ ID NO: 1784230 - RNA, 19 nt, Human
cagggcacaccgggcacuc

SEQ ID NO: 1784231 - RNA, 21 nt, Human
cagggcacaccgggcacucag

SEQ ID NO: 1784232 - RNA, 13 nt, Human
cagggcagaguga

SEQ ID NO: 1784233 - RNA, 19 nt, Human
cagggcagagugagaccca

SEQ ID NO: 1784234 - RNA, 15 nt, Human
cagggcaccugccac

SEQ ID NO: 1784235 - RNA, 14 nt, Human
cagggcacaccggg

SEQ ID NO: 1784236 - RNA, 20 nt, Human
cagggcaaggguuaaggccu

SEQ ID NO: 1784237 - RNA, 21 nt, Human
cagggcaaggguuaaggccug

SEQ ID NO: 1784238 - RNA, 22 nt, Human
cagggcaaggguuaaggccuga

SEQ ID NO: 1784239 - RNA, 23 nt, Human
cagggcaaggguuaaggccugaa

SEQ ID NO: 1784240 - RNA, 22 nt, Human
cagggcaagcuccgcaggacuu

SEQ ID NO: 1784241 - RNA, 13 nt, Human
cagggcaagcucc

SEQ ID NO: 1784242 - RNA, 15 nt, Human
cagggcaagcuccgc

SEQ ID NO: 1784243 - RNA, 18 nt, Human
cagggcaagcuccgcagg

SEQ ID NO: 1784244 - RNA, 21 nt, Human
cagggcaagcuccgcaggacu

SEQ ID NO: 1784245 - RNA, 20 nt, Human
cagggccaaacgcugagcca

SEQ ID NO: 1784246 - RNA, 22 nt, Human
cagggccaaacgcugagccacc

SEQ ID NO: 1784247 - RNA, 15 nt, Human
cagggcaucuugcug

SEQ ID NO: 1784248 - RNA, 18 nt, Human
cagggcaucuugcuggcu

SEQ ID NO: 1784249 - RNA, 19 nt, Human
cagggcaucuugcuggcua

SEQ ID NO: 1784250 - RNA, 20 nt, Human
cagggcaucuugcuggcuac

SEQ ID NO: 1784251 - RNA, 13 nt, Human
cagggcagggccc

SEQ ID NO: 1784252 - RNA, 20 nt, Human
cagggccccaggcauugcca

SEQ ID NO: 1784253 - RNA, 14 nt, Human
cagggccgccaggg

SEQ ID NO: 1784254 - RNA, 16 nt, Human
cagggccgccagggag

SEQ ID NO: 1784255 - RNA, 22 nt, Human
cagggccgccagggagaccugg

SEQ ID NO: 1784256 - RNA, 16 nt, Human
cagggccugagccugg

SEQ ID NO: 1784257 - RNA, 17 nt, Human
cagggccugagccuggc

SEQ ID NO: 1784258 - RNA, 18 nt, Human
cagggccugagccuggcc

SEQ ID NO: 1784259 - RNA, 19 nt, Human
cagggccugagccuggcca

SEQ ID NO: 1784260 - RNA, 20 nt, Human
cagggccugagccuggccag

SEQ ID NO: 1784261 - RNA, 21 nt, Human
cagggccugagccuggccagc

SEQ ID NO: 1784262 - RNA, 22 nt, Human
cagggccugagccuggccagcc

SEQ ID NO: 1784263 - RNA, 22 nt, Human
cagggccugcaggaccugccug

SEQ ID NO: 1784264 - RNA, 22 nt, Human
cagggaaacagcuaaugggaca

SEQ ID NO: 1784265 - RNA, 20 nt, Human
cagggaaaauuauuugcaua

SEQ ID NO: 1784266 - RNA, 19 nt, Human
caucuugcucugcugacag

SEQ ID NO: 1784267 - RNA, 16 nt, Human
caucuugcucugcuga

SEQ ID NO: 1784268 - RNA, 17 nt, Human
caucuugcucugcugac

SEQ ID NO: 1784269 - RNA, 14 nt, Human
caucuucuucacca

SEQ ID NO: 1784270 - RNA, 19 nt, Human
caucuucuucaccauuugg

SEQ ID NO: 1784271 - RNA, 22 nt, Human
caucuugaauacucugcccucu

SEQ ID NO: 1784272 - RNA, 16 nt, Human
caucuccugccuuccu

SEQ ID NO: 1784273 - RNA, 15 nt, Human
caucuccccucagcu

SEQ ID NO: 1784274 - RNA, 16 nt, Human
caucuccccucagcuc

SEQ ID NO: 1784275 - RNA, 17 nt, Human
caucuccccucagcucg

SEQ ID NO: 1784276 - RNA, 21 nt, Human
caucuccccucagcucggcuc

SEQ ID NO: 1784277 - RNA, 22 nt, Human
caucucgcucccucccaggacu

SEQ ID NO: 1784278 - RNA, 21 nt, Human
caucucgcucccucccaggac

SEQ ID NO: 1784279 - RNA, 19 nt, Human
caucuccugccuuccuccu

SEQ ID NO: 1784280 - RNA, 22 nt, Human
caucuccugccuuccuccuggg

SEQ ID NO: 1784281 - RNA, 14 nt, Human
caucucgcucccuc

SEQ ID NO: 1784282 - RNA, 17 nt, Human
caucucgcucccuccca

SEQ ID NO: 1784283 - RNA, 19 nt, Human
caucucgcucccucccagg

SEQ ID NO: 1784284 - RNA, 20 nt, Human
caucucgcucccucccagga

SEQ ID NO: 1784285 - RNA, 15 nt, Human
caucugaagagcaga

SEQ ID NO: 1784286 - RNA, 22 nt, Human
caugagccucagcauccuggca

SEQ ID NO: 1784287 - RNA, 23 nt, Human
caugagccucagcauccuggcac

SEQ ID NO: 1784288 - RNA, 12 nt, Human
caugagccugcu

SEQ ID NO: 1784289 - RNA, 14 nt, Human
caugagccugcugg

SEQ ID NO: 1784290 - RNA, 15 nt, Human
caugagccugcugga

SEQ ID NO: 1784291 - RNA, 16 nt, Human
caugagccugcuggaa

SEQ ID NO: 1784292 - RNA, 18 nt, Human
caugagccugcuggaagc

SEQ ID NO: 1784293 - RNA, 19 nt, Human
caugagccugcuggaagcc

SEQ ID NO: 1784294 - RNA, 20 nt, Human
caugagccugcuggaagccc

SEQ ID NO: 1784295 - RNA, 22 nt, Human
caugagccugcuggaagcccag

SEQ ID NO: 1784296 - RNA, 23 nt, Human
caugagccugcuggaagcccagc

SEQ ID NO: 1784297 - RNA, 13 nt, Human
caugaggaggggc

SEQ ID NO: 1784298 - RNA, 21 nt, Human
caugaggaggggccccccugc

SEQ ID NO: 1784299 - RNA, 13 nt, Human
caugaggggagag

SEQ ID NO: 1784300 - RNA, 14 nt, Human
caugaggggagagg

SEQ ID NO: 1784301 - RNA, 15 nt, Human
caugaggggagagga

SEQ ID NO: 1784302 - RNA, 18 nt, Human
caugaggggagaggagac

SEQ ID NO: 1784303 - RNA, 22 nt, Human
caugaggaggggccccccugcc

SEQ ID NO: 1784304 - RNA, 23 nt, Human
caugaggaggggccccccugccc

SEQ ID NO: 1784305 - RNA, 17 nt, Human
caugauacucauuucuu

SEQ ID NO: 1784306 - RNA, 20 nt, Human
caugauccaagcaagacuga

SEQ ID NO: 1784307 - RNA, 15 nt, Human
caugaguucugcuga

SEQ ID NO: 1784308 - RNA, 16 nt, Human
caugaguucugcugaa

SEQ ID NO: 1784309 - RNA, 12 nt, Human
caugagccucag

SEQ ID NO: 1784310 - RNA, 15 nt, Human
caugagccucagcau

SEQ ID NO: 1784311 - RNA, 17 nt, Human
caugagccucagcaucc

SEQ ID NO: 1784312 - RNA, 18 nt, Human
caugagccucagcauccu

SEQ ID NO: 1784313 - RNA, 19 nt, Human
caugagccucagcauccug

SEQ ID NO: 1784314 - RNA, 20 nt, Human
caugagccucagcauccugg

SEQ ID NO: 1784315 - RNA, 21 nt, Human
caugagccucagcauccuggc

SEQ ID NO: 1784316 - RNA, 18 nt, Human
caugaagauucuuuccca

SEQ ID NO: 1784317 - RNA, 13 nt, Human
caugaaacaaagc

SEQ ID NO: 1784318 - RNA, 13 nt, Human
caugaaauaugca

SEQ ID NO: 1784319 - RNA, 14 nt, Human
caugaaauaugcau

SEQ ID NO: 1784320 - RNA, 15 nt, Human
caugaaauaugcauc

SEQ ID NO: 1784321 - RNA, 13 nt, Human
caucaacaaaaau

SEQ ID NO: 1784322 - RNA, 15 nt, Human
caucaacaaaaauug

SEQ ID NO: 1784323 - RNA, 17 nt, Human
cauauugcacaugucuu

SEQ ID NO: 1784324 - RNA, 16 nt, Human
cauauugcacaugucu

SEQ ID NO: 1784325 - RNA, 15 nt, Human
cauauugcacauguc

SEQ ID NO: 1784326 - RNA, 14 nt, Human
cauauugcacaugu

SEQ ID NO: 1784327 - RNA, 22 nt, Human
cauauugcacaugucuuaauga

SEQ ID NO: 1784328 - RNA, 23 nt, Human
cauauugcacaugucuuaaugaa

SEQ ID NO: 1784329 - RNA, 21 nt, Human
cauauugcacaugucuuaaug

SEQ ID NO: 1784330 - RNA, 20 nt, Human
cauauugcacaugucuuaau

SEQ ID NO: 1784331 - RNA, 19 nt, Human
cauauugcacaugucuuaa

SEQ ID NO: 1784332 - RNA, 18 nt, Human
cauauugcacaugucuua

SEQ ID NO: 1784333 - RNA, 22 nt, Human
cauauucuguuggccaguguga

SEQ ID NO: 1784334 - RNA, 15 nt, Human
cauaugaauuguaca

SEQ ID NO: 1784335 - RNA, 16 nt, Human
cauaugaauuguacag

SEQ ID NO: 1784336 - RNA, 17 nt, Human
cauaugaauuguacaga

SEQ ID NO: 1784337 - RNA, 11 nt, Human
cauaucugccu

SEQ ID NO: 1784338 - RNA, 18 nt, Human
cauaucugccuuuauugu

SEQ ID NO: 1784339 - RNA, 15 nt, Human
cauaucugccuuuau

SEQ ID NO: 1784340 - RNA, 13 nt, Human
cauaucugccuuu

SEQ ID NO: 1784341 - RNA, 12 nt, Human
cauaucugccuu

SEQ ID NO: 1784342 - RNA, 20 nt, Human
cauaucugccuuuauugugu

SEQ ID NO: 1784343 - RNA, 15 nt, Human
cauaugaaaggagag

SEQ ID NO: 1784344 - RNA, 16 nt, Human
cauaugaaaggugcca

SEQ ID NO: 1784345 - RNA, 19 nt, Human
cauaugaaaggugccaugg

SEQ ID NO: 1784346 - RNA, 20 nt, Human
cauaugaaaggugccaugga

SEQ ID NO: 1784347 - RNA, 21 nt, Human
cauaugaaaggugccauggaa

SEQ ID NO: 1784348 - RNA, 16 nt, Human
cauaguaugguggcug

SEQ ID NO: 1784349 - RNA, 17 nt, Human
cauaguaugguggcugg

SEQ ID NO: 1784350 - RNA, 12 nt, Human
cauagucccugc

SEQ ID NO: 1784351 - RNA, 15 nt, Human
cauaguaugguggcu

SEQ ID NO: 1784352 - RNA, 15 nt, Human
cagugcugcagcucc

SEQ ID NO: 1784353 - RNA, 19 nt, Human
cagugcugcagcucccugg

SEQ ID NO: 1784354 - RNA, 13 nt, Human
cauagucccugcc

SEQ ID NO: 1784355 - RNA, 22 nt, Human
cauauccuggugccccccaccc

SEQ ID NO: 1784356 - RNA, 13 nt, Human
caucaucuccugc

SEQ ID NO: 1784357 - RNA, 20 nt, Human
caucaucuccugccuuccuc

SEQ ID NO: 1784358 - RNA, 21 nt, Human
caucaucuccugccuuccucc

SEQ ID NO: 1784359 - RNA, 12 nt, Human
caucaucagagc

SEQ ID NO: 1784360 - RNA, 13 nt, Human
caucaucagagcc

SEQ ID NO: 1784361 - RNA, 13 nt, Human
caucaugucuggc

SEQ ID NO: 1784362 - RNA, 14 nt, Human
caucaugaguucug

SEQ ID NO: 1784363 - RNA, 16 nt, Human
caucaugaguucugcu

SEQ ID NO: 1784364 - RNA, 17 nt, Human
caucaugaguucugcug

SEQ ID NO: 1784365 - RNA, 18 nt, Human
caucaugaguucugcuga

SEQ ID NO: 1784366 - RNA, 14 nt, Human
caucaugucuggcu

SEQ ID NO: 1784367 - RNA, 15 nt, Human
caucaugucuggcua

SEQ ID NO: 1784368 - RNA, 13 nt, Human
caucaagaagggc

SEQ ID NO: 1784369 - RNA, 16 nt, Human
caucaagaagggcugc

SEQ ID NO: 1784370 - RNA, 17 nt, Human
caucaagaagggcugca

SEQ ID NO: 1784371 - RNA, 20 nt, Human
caucaagaagggcugcauga

SEQ ID NO: 1784372 - RNA, 21 nt, Human
caucaagaagggcugcaugau

SEQ ID NO: 1784373 - RNA, 22 nt, Human
caucaagaagggcugcaugaug

SEQ ID NO: 1784374 - RNA, 15 nt, Human
caucagugcucccuc

SEQ ID NO: 1784375 - RNA, 16 nt, Human
caucagugcucccuca

SEQ ID NO: 1784376 - RNA, 24 nt, Human
caucagugcucccucacaugucag

SEQ ID NO: 1784377 - RNA, 13 nt, Human
cauccaucaucau

SEQ ID NO: 1784378 - RNA, 14 nt, Human
cauccaucaucaug

SEQ ID NO: 1784379 - RNA, 20 nt, Human
cauccagagauucauuuucu

SEQ ID NO: 1784380 - RNA, 14 nt, Human
cauccacugugcca

SEQ ID NO: 1784381 - RNA, 15 nt, Human
caucauucucugucu

SEQ ID NO: 1784382 - RNA, 16 nt, Human
caucauucucugucuc

SEQ ID NO: 1784383 - RNA, 17 nt, Human
caucauucucugucuca

SEQ ID NO: 1784384 - RNA, 17 nt, Human
cauccacugugccaugu

SEQ ID NO: 1784385 - RNA, 23 nt, Human
cauccacugugccaugugccagg

SEQ ID NO: 1784386 - RNA, 12 nt, Human
caucauucucug

SEQ ID NO: 1784387 - RNA, 14 nt, Human
caucauucucuguc

SEQ ID NO: 1784388 - RNA, 17 nt, Human
caugucugcagugugcc

SEQ ID NO: 1784389 - RNA, 20 nt, Human
caugucugcagugugccccc

SEQ ID NO: 1784390 - RNA, 12 nt, Human
caugucuggcua

SEQ ID NO: 1784391 - RNA, 20 nt, Human
caugucuuaaugaaguuuga

SEQ ID NO: 1784392 - RNA, 18 nt, Human
caugucuuaaugaaguuu

SEQ ID NO: 1784393 - RNA, 17 nt, Human
caugucuuaaugaaguu

SEQ ID NO: 1784394 - RNA, 16 nt, Human
caugucuuaaugaagu

SEQ ID NO: 1784395 - RNA, 15 nt, Human
caugucuuaaugaag

SEQ ID NO: 1784396 - RNA, 14 nt, Human
caugucuuaaugaa

SEQ ID NO: 1784397 - RNA, 13 nt, Human
caugucuuaauga

SEQ ID NO: 1784398 - RNA, 23 nt, Human
caugucuucucacaagccagcca

SEQ ID NO: 1784399 - RNA, 13 nt, Human
caugugacucuga

SEQ ID NO: 1784400 - RNA, 16 nt, Human
caugugacucugaagc

SEQ ID NO: 1784401 - RNA, 23 nt, Human
caugucuuaaugaaguuugaaug

SEQ ID NO: 1784402 - RNA, 22 nt, Human
caugucuuaaugaaguuugaau

SEQ ID NO: 1784403 - RNA, 21 nt, Human
caugucuuaaugaaguuugaa

SEQ ID NO: 1784404 - RNA, 17 nt, Human
caugugacucugaagcu

SEQ ID NO: 1784405 - RNA, 14 nt, Human
caugugcacaugca

SEQ ID NO: 1784406 - RNA, 16 nt, Human
cauguguuaaguauuu

SEQ ID NO: 1784407 - RNA, 15 nt, Human
cauggugaaaagcuc

SEQ ID NO: 1784408 - RNA, 17 nt, Human
cauggugaaaagcucca

SEQ ID NO: 1784409 - RNA, 18 nt, Human
cauggugaaaagcuccau

SEQ ID NO: 1784410 - RNA, 21 nt, Human
caugguggguccaugggcaga

SEQ ID NO: 1784411 - RNA, 22 nt, Human
caugguggguccaugggcagag

SEQ ID NO: 1784412 - RNA, 15 nt, Human
cauguaaacugugca

SEQ ID NO: 1784413 - RNA, 22 nt, Human
cauguaaacacgccugcaaacg

SEQ ID NO: 1784414 - RNA, 16 nt, Human
cauguaaacugugcac

SEQ ID NO: 1784415 - RNA, 21 nt, Human
cauguaaauccccacugggac

SEQ ID NO: 1784416 - RNA, 13 nt, Human
caugggagccggg

SEQ ID NO: 1784417 - RNA, 22 nt, Human
caugggagccgggucugccucu

SEQ ID NO: 1784418 - RNA, 18 nt, Human
caugggccuccugugugu

SEQ ID NO: 1784419 - RNA, 15 nt, Human
caugggcagagccca

SEQ ID NO: 1784420 - RNA, 17 nt, Human
caugggcagagcccaag

SEQ ID NO: 1784421 - RNA, 14 nt, Human
caugggaggcucac

SEQ ID NO: 1784422 - RNA, 22 nt, Human
cauggagcuauaacuaagcauc

SEQ ID NO: 1784423 - RNA, 16 nt, Human
cauggaaaaacuuccu

SEQ ID NO: 1784424 - RNA, 19 nt, Human
caugcacuguucccccugu

SEQ ID NO: 1784425 - RNA, 23 nt, Human
caugcacuguucccccugugcag

SEQ ID NO: 1784426 - RNA, 22 nt, Human
cauuuaauaauauacuugugga

SEQ ID NO: 1784427 - RNA, 20 nt, Human
cauuuaauaauauacuugug

SEQ ID NO: 1784428 - RNA, 17 nt, Human
cauuuaauaauauacuu

SEQ ID NO: 1784429 - RNA, 21 nt, Human
cauugaauucuugguugagga

SEQ ID NO: 1784430 - RNA, 22 nt, Human
cauugaauucuugguugaggaa

SEQ ID NO: 1784431 - RNA, 23 nt, Human
cauugaauucuugguugaggaaa

SEQ ID NO: 1784432 - RNA, 18 nt, Human
cauuuaaauacagucuuc

SEQ ID NO: 1784433 - RNA, 17 nt, Human
cauuuaaauacagucuu

SEQ ID NO: 1784434 - RNA, 20 nt, Human
cauuuaaauacagucuucca

SEQ ID NO: 1784435 - RNA, 14 nt, Human
cauuuaauaauaua

SEQ ID NO: 1784436 - RNA, 13 nt, Human
cauuuaauaauau

SEQ ID NO: 1784437 - RNA, 12 nt, Human
cauuuaauaaua

SEQ ID NO: 1784438 - RNA, 22 nt, Human
cauuugcaagggaaaagucucu

SEQ ID NO: 1784439 - RNA, 14 nt, Human
cauuugagucucuu

SEQ ID NO: 1784440 - RNA, 17 nt, Human
cauuugaucuguugcaa

SEQ ID NO: 1784441 - RNA, 17 nt, Human
cauuuuuaguagagaca

SEQ ID NO: 1784442 - RNA, 16 nt, Human
ccaaaauuuauuuuau

SEQ ID NO: 1784443 - RNA, 21 nt, Human
ccaaaauuuauuuuauaagaa

SEQ ID NO: 1784444 - RNA, 22 nt, Human
ccaaaauuuauuuuauaagaaa

SEQ ID NO: 1784445 - RNA, 16 nt, Human
ccaaacaaauaugcaa

SEQ ID NO: 1784446 - RNA, 12 nt, Human
cauuuucuagau

SEQ ID NO: 1784447 - RNA, 13 nt, Human
cauuuucuagaua

SEQ ID NO: 1784448 - RNA, 17 nt, Human
cauuuucuagauacaau

SEQ ID NO: 1784449 - RNA, 18 nt, Human
cauuuucuagauacaaua

SEQ ID NO: 1784450 - RNA, 20 nt, Human
cauuuucuagauacaauaaa

SEQ ID NO: 1784451 - RNA, 21 nt, Human
cauuuucuagauacaauaaau

SEQ ID NO: 1784452 - RNA, 23 nt, Human
cauuuucuagauacaauaaauug

SEQ ID NO: 1784453 - RNA, 17 nt, Human
cauuuuccauauccugg

SEQ ID NO: 1784454 - RNA, 19 nt, Human
cauuuuccauauccuggug

SEQ ID NO: 1784455 - RNA, 21 nt, Human
cauuuuccauauccuggugcc

SEQ ID NO: 1784456 - RNA, 17 nt, Human
cauuccagaucccaggc

SEQ ID NO: 1784457 - RNA, 12 nt, Human
cauuccaaaguu

SEQ ID NO: 1784458 - RNA, 15 nt, Human
cauucacuugcauuu

SEQ ID NO: 1784459 - RNA, 18 nt, Human
cauucacuugcauuucuu

SEQ ID NO: 1784460 - RNA, 16 nt, Human
cauucaggagcuuccu

SEQ ID NO: 1784461 - RNA, 23 nt, Human
cauucuucuguacgucugacagg

SEQ ID NO: 1784462 - RNA, 13 nt, Human
cauucuuugcagg

SEQ ID NO: 1784463 - RNA, 12 nt, Human
cauucugccugc

SEQ ID NO: 1784464 - RNA, 13 nt, Human
cauucugccugcc

SEQ ID NO: 1784465 - RNA, 15 nt, Human
cauucugccugccca

SEQ ID NO: 1784466 - RNA, 16 nt, Human
cauucugccugcccag

SEQ ID NO: 1784467 - RNA, 17 nt, Human
cauucugccugcccagg

SEQ ID NO: 1784468 - RNA, 18 nt, Human
cauucugccugcccaggc

SEQ ID NO: 1784469 - RNA, 19 nt, Human
cauucugccugcccaggcc

SEQ ID NO: 1784470 - RNA, 20 nt, Human
cauucugccugcccaggccc

SEQ ID NO: 1784471 - RNA, 13 nt, Human
cauucuggaauaa

SEQ ID NO: 1784472 - RNA, 21 nt, Human
cauuccugggaaauauucccu

SEQ ID NO: 1784473 - RNA, 17 nt, Human
ccagguuuuuggucuga

SEQ ID NO: 1784474 - RNA, 15 nt, Human
ccaguaaaauugcca

SEQ ID NO: 1784475 - RNA, 13 nt, Human
ccaguaaaauugc

SEQ ID NO: 1784476 - RNA, 11 nt, Human
ccaguaaaauu

SEQ ID NO: 1784477 - RNA, 18 nt, Human
ccagucuggaaugcagug

SEQ ID NO: 1784478 - RNA, 23 nt, Human
ccaguaaaauugccauauugcac

SEQ ID NO: 1784479 - RNA, 19 nt, Human
ccaguaaaauugccauauu

SEQ ID NO: 1784480 - RNA, 17 nt, Human
ccaguaaaauugccaua

SEQ ID NO: 1784481 - RNA, 19 nt, Human
ccagucuggaaugcagugg

SEQ ID NO: 1784482 - RNA, 20 nt, Human
ccagucuggaaugcaguggu

SEQ ID NO: 1784483 - RNA, 14 nt, Human
ccagggcugccccu

SEQ ID NO: 1784484 - RNA, 16 nt, Human
ccaggguugaccccag

SEQ ID NO: 1784485 - RNA, 18 nt, Human
ccaggguugaccccagag

SEQ ID NO: 1784486 - RNA, 21 nt, Human
ccaggguugaccccagaggau

SEQ ID NO: 1784487 - RNA, 23 nt, Human
ccagggagaccuggacacaggcc

SEQ ID NO: 1784488 - RNA, 21 nt, Human
ccagggagaccuggacacagg

SEQ ID NO: 1784489 - RNA, 22 nt, Human
ccagggagaccuggacacaggc

SEQ ID NO: 1784490 - RNA, 20 nt, Human
ccaggagaaggccaauuccu

SEQ ID NO: 1784491 - RNA, 19 nt, Human
ccaggagccccgaggccuu

SEQ ID NO: 1784492 - RNA, 20 nt, Human
ccaggagccccgaggccuuc

SEQ ID NO: 1784493 - RNA, 18 nt, Human
ccaggccggcgagcccug

SEQ ID NO: 1784494 - RNA, 24 nt, Human
ccaggcuguaucccaugagccuca

SEQ ID NO: 1784495 - RNA, 17 nt, Human
ccaguguuagggaaggg

SEQ ID NO: 1784496 - RNA, 20 nt, Human
ccaguguuagggaagggccu

SEQ ID NO: 1784497 - RNA, 17 nt, Human
ccaguuaaaaaaaauuu

SEQ ID NO: 1784498 - RNA, 23 nt, Human
ccauauucuguuggccaguguga

SEQ ID NO: 1784499 - RNA, 14 nt, Human
ccauagcugcugcc

SEQ ID NO: 1784500 - RNA, 18 nt, Human
ccauagcugcugcccuag

SEQ ID NO: 1784501 - RNA, 23 nt, Human
ccauauugcacaugucuuaauga

SEQ ID NO: 1784502 - RNA, 21 nt, Human
ccauauugcacaugucuuaau

SEQ ID NO: 1784503 - RNA, 18 nt, Human
ccauauugcacaugucuu

SEQ ID NO: 1784504 - RNA, 13 nt, Human
ccauauugcacau

SEQ ID NO: 1784505 - RNA, 13 nt, Human
ccauagucccugc

SEQ ID NO: 1784506 - RNA, 14 nt, Human
ccauagucccugcc

SEQ ID NO: 1784507 - RNA, 17 nt, Human
ccauguuggccaggcug

SEQ ID NO: 1784508 - RNA, 16 nt, Human
ccauguuggccaggcu

SEQ ID NO: 1784509 - RNA, 15 nt, Human
cccaaauccgaaccu

SEQ ID NO: 1784510 - RNA, 18 nt, Human
cccaaauccgaaccuccu

SEQ ID NO: 1784511 - RNA, 23 nt, Human
cccaaauccgaaccuccucugug

SEQ ID NO: 1784512 - RNA, 16 nt, Human
cccaaagugcugggau

SEQ ID NO: 1784513 - RNA, 13 nt, Human
cccaaagugcugg

SEQ ID NO: 1784514 - RNA, 15 nt, Human
cccaaagugcuggga

SEQ ID NO: 1784515 - RNA, 19 nt, Human
ccauuuggcagagcuucuu

SEQ ID NO: 1784516 - RNA, 16 nt, Human
ccagcaagugagagcu

SEQ ID NO: 1784517 - RNA, 20 nt, Human
ccagcaagugagagcugggu

SEQ ID NO: 1784518 - RNA, 21 nt, Human
ccagcaagugagagcugggug

SEQ ID NO: 1784519 - RNA, 22 nt, Human
ccagcaagugagagcugggugu

SEQ ID NO: 1784520 - RNA, 15 nt, Human
ccagcaagugagagc

SEQ ID NO: 1784521 - RNA, 12 nt, Human
ccagccucagcg

SEQ ID NO: 1784522 - RNA, 13 nt, Human
ccagccucagcgc

SEQ ID NO: 1784523 - RNA, 21 nt, Human
ccagccucagcgcggcccucc

SEQ ID NO: 1784524 - RNA, 16 nt, Human
ccagccccagugccca

SEQ ID NO: 1784525 - RNA, 13 nt, Human
ccagcccucaucc

SEQ ID NO: 1784526 - RNA, 14 nt, Human
ccagcccucauccc

SEQ ID NO: 1784527 - RNA, 16 nt, Human
ccagcccuuagcaggg

SEQ ID NO: 1784528 - RNA, 17 nt, Human
ccagcccuuagcaggga

SEQ ID NO: 1784529 - RNA, 13 nt, Human
ccagccccagugc

SEQ ID NO: 1784530 - RNA, 15 nt, Human
ccagccccagugccc

SEQ ID NO: 1784531 - RNA, 14 nt, Human
ccagcauucucagg

SEQ ID NO: 1784532 - RNA, 16 nt, Human
ccagcauucucaggca

SEQ ID NO: 1784533 - RNA, 20 nt, Human
ccagcauucucaggcaccag

SEQ ID NO: 1784534 - RNA, 14 nt, Human
ccagccagcagcag

SEQ ID NO: 1784535 - RNA, 16 nt, Human
ccagccagcagcagcc

SEQ ID NO: 1784536 - RNA, 19 nt, Human
ccagccagcagcagcccaa

SEQ ID NO: 1784537 - RNA, 22 nt, Human
ccagccagcagcagcccaagcu

SEQ ID NO: 1784538 - RNA, 12 nt, Human
ccagcacugcuu

SEQ ID NO: 1784539 - RNA, 20 nt, Human
ccagcacuaugcuuuccuuc

SEQ ID NO: 1784540 - RNA, 21 nt, Human
ccagcacuaugcuuuccuucu

SEQ ID NO: 1784541 - RNA, 15 nt, Human
ccagcacugcuugag

SEQ ID NO: 1784542 - RNA, 18 nt, Human
ccagcacugcuugaggaa

SEQ ID NO: 1784543 - RNA, 19 nt, Human
ccagcacugcuugaggaaa

SEQ ID NO: 1784544 - RNA, 22 nt, Human
ccagcacugcuugaggaaaaca

SEQ ID NO: 1784545 - RNA, 21 nt, Human
ccagauugcaacaggcugggc

SEQ ID NO: 1784546 - RNA, 15 nt, Human
ccagauuccccugug

SEQ ID NO: 1784547 - RNA, 16 nt, Human
ccagauuccccugugu

SEQ ID NO: 1784548 - RNA, 17 nt, Human
ccagauuccccuguguc

SEQ ID NO: 1784549 - RNA, 18 nt, Human
ccagauuccccuguguca

SEQ ID NO: 1784550 - RNA, 19 nt, Human
ccagauugcaacaggcugg

SEQ ID NO: 1784551 - RNA, 20 nt, Human
ccagauugcaacaggcuggg

SEQ ID NO: 1784552 - RNA, 15 nt, Human
ccagaggcugcccca

SEQ ID NO: 1784553 - RNA, 22 nt, Human
ccagagggagugacagaggcag

SEQ ID NO: 1784554 - RNA, 23 nt, Human
ccagagggagugacagaggcagc

SEQ ID NO: 1784555 - RNA, 15 nt, Human
ccagagauucauuuu

SEQ ID NO: 1784556 - RNA, 17 nt, Human
ccagagauucauuuucu

SEQ ID NO: 1784557 - RNA, 17 nt, Human
ccagaggaaggggccag

SEQ ID NO: 1784558 - RNA, 19 nt, Human
ccagaggaaggggccagag

SEQ ID NO: 1784559 - RNA, 14 nt, Human
ccagagcuggugga

SEQ ID NO: 1784560 - RNA, 18 nt, Human
ccagagcugguggaccca

SEQ ID NO: 1784561 - RNA, 22 nt, Human
ccagagcugguggacccaggga

SEQ ID NO: 1784562 - RNA, 16 nt, Human
ccagagggagugacag

SEQ ID NO: 1784563 - RNA, 17 nt, Human
ccagagggagugacaga

SEQ ID NO: 1784564 - RNA, 11 nt, Human
ccagaggcucg

SEQ ID NO: 1784565 - RNA, 18 nt, Human
ccagagggagugacagag

SEQ ID NO: 1784566 - RNA, 19 nt, Human
ccagagggagugacagagg

SEQ ID NO: 1784567 - RNA, 20 nt, Human
ccagagggagugacagaggc

SEQ ID NO: 1784568 - RNA, 21 nt, Human
ccagagggagugacagaggca

SEQ ID NO: 1784569 - RNA, 22 nt, Human
ccagaggaaggggccagaggcu

SEQ ID NO: 1784570 - RNA, 20 nt, Human
ccagaggacugugaugcccu

SEQ ID NO: 1784571 - RNA, 22 nt, Human
ccagaggacugugaugcccugc

SEQ ID NO: 1784572 - RNA, 21 nt, Human
ccagaggauugcugccccauc

SEQ ID NO: 1784573 - RNA, 22 nt, Human
ccagaggcaccucaagaagaag

SEQ ID NO: 1784574 - RNA, 20 nt, Human
ccagacaccuugacagggca

SEQ ID NO: 1784575 - RNA, 21 nt, Human
ccagagaggguggugaccucu

SEQ ID NO: 1784576 - RNA, 23 nt, Human
ccagagaggguggugaccucugc

SEQ ID NO: 1784577 - RNA, 14 nt, Human
ccagagaggguggu

SEQ ID NO: 1784578 - RNA, 17 nt, Human
ccagacaccuugacagg

SEQ ID NO: 1784579 - RNA, 19 nt, Human
ccagacaccuugacagggc

SEQ ID NO: 1784580 - RNA, 15 nt, Human
ccacuggcugcuaac

SEQ ID NO: 1784581 - RNA, 16 nt, Human
ccacuggcugcuaaca

SEQ ID NO: 1784582 - RNA, 16 nt, Human
ccacugggaccaaccc

SEQ ID NO: 1784583 - RNA, 17 nt, Human
ccacugggaccaacccu

SEQ ID NO: 1784584 - RNA, 18 nt, Human
ccacugggaccaacccug

SEQ ID NO: 1784585 - RNA, 23 nt, Human
ccacugggaccaacccuggggaa

SEQ ID NO: 1784586 - RNA, 12 nt, Human
ccacacccagcc

SEQ ID NO: 1784587 - RNA, 13 nt, Human
ccacacccagccc

SEQ ID NO: 1784588 - RNA, 14 nt, Human
ccacacccagccca

SEQ ID NO: 1784589 - RNA, 14 nt, Human
ccaccacacccagc

SEQ ID NO: 1784590 - RNA, 16 nt, Human
ccaccacacccagccc

SEQ ID NO: 1784591 - RNA, 16 nt, Human
ccacccaccucagccu

SEQ ID NO: 1784592 - RNA, 14 nt, Human
ccacccaccucagc

SEQ ID NO: 1784593 - RNA, 15 nt, Human
ccacccaccucagcc

SEQ ID NO: 1784594 - RNA, 13 nt, Human
ccacccaccucag

SEQ ID NO: 1784595 - RNA, 15 nt, Human
ccacacucccaaggu

SEQ ID NO: 1784596 - RNA, 23 nt, Human
ccacacucccaagguuggagccc

SEQ ID NO: 1784597 - RNA, 14 nt, Human
ccacaucuugcucu

SEQ ID NO: 1784598 - RNA, 18 nt, Human
ccacaucuuccauuucca

SEQ ID NO: 1784599 - RNA, 16 nt, Human
ccacaucuugcucugc

SEQ ID NO: 1784600 - RNA, 22 nt, Human
ccacaucuugcucugcugacag

SEQ ID NO: 1784601 - RNA, 23 nt, Human
ccacaucuugcucugcugacaga

SEQ ID NO: 1784602 - RNA, 21 nt, Human
ccacccaggagccccgaggcc

SEQ ID NO: 1784603 - RNA, 12 nt, Human
ccaccucagccu

SEQ ID NO: 1784604 - RNA, 13 nt, Human
ccaccucagccuc

SEQ ID NO: 1784605 - RNA, 14 nt, Human
ccaccucagccucc

SEQ ID NO: 1784606 - RNA, 15 nt, Human
ccaccucagccuccc

SEQ ID NO: 1784607 - RNA, 12 nt, Human
ccacccaggagc

SEQ ID NO: 1784608 - RNA, 14 nt, Human
ccacccaggagccc

SEQ ID NO: 1784609 - RNA, 12 nt, Human
ccacggagccac

SEQ ID NO: 1784610 - RNA, 12 nt, Human
ccacggccaggc

SEQ ID NO: 1784611 - RNA, 20 nt, Human
ccacggagccacuccucuga

SEQ ID NO: 1784612 - RNA, 21 nt, Human
ccacggagccacuccucugac

SEQ ID NO: 1784613 - RNA, 13 nt, Human
ccacggccaggcc

SEQ ID NO: 1784614 - RNA, 14 nt, Human
ccacggccaggcca

SEQ ID NO: 1784615 - RNA, 15 nt, Human
ccacggccaggccag

SEQ ID NO: 1784616 - RNA, 17 nt, Human
ccaccugcaucuggggc

SEQ ID NO: 1784617 - RNA, 18 nt, Human
ccaccugcaucuggggcc

SEQ ID NO: 1784618 - RNA, 18 nt, Human
ccaccugcccuuuuuucu

SEQ ID NO: 1784619 - RNA, 22 nt, Human
ccaccugcccuuuuuucugccu

SEQ ID NO: 1784620 - RNA, 23 nt, Human
ccacguucugcucaucauucucu

SEQ ID NO: 1784621 - RNA, 22 nt, Human
ccacuccccuccacucucuacc

SEQ ID NO: 1784622 - RNA, 23 nt, Human
ccacuacggaauaguuggcuagg

SEQ ID NO: 1784623 - RNA, 20 nt, Human
ccacuaagaaccccucugcu

SEQ ID NO: 1784624 - RNA, 21 nt, Human
ccacuaagaaccccucugcuu

SEQ ID NO: 1784625 - RNA, 22 nt, Human
ccacuacggaauaguuggcuag

SEQ ID NO: 1784626 - RNA, 11 nt, Human
ccacugcucug

SEQ ID NO: 1784627 - RNA, 14 nt, Human
ccugcaucuggggc

SEQ ID NO: 1784628 - RNA, 15 nt, Human
ccugcaucuggggcc

SEQ ID NO: 1784629 - RNA, 20 nt, Human
ccugcauguaaacacgccug

SEQ ID NO: 1784630 - RNA, 21 nt, Human
ccugcauguaaacacgccugc

SEQ ID NO: 1784631 - RNA, 22 nt, Human
ccugcauguaaacacgccugca

SEQ ID NO: 1784632 - RNA, 23 nt, Human
ccugcauguaaacacgccugcaa

SEQ ID NO: 1784633 - RNA, 17 nt, Human
ccugcaaaaggacucuc

SEQ ID NO: 1784634 - RNA, 20 nt, Human
ccugauuguguauauucaua

SEQ ID NO: 1784635 - RNA, 19 nt, Human
ccugcaaaaggacucucag

SEQ ID NO: 1784636 - RNA, 15 nt, Human
ccugcaaacgcugcc

SEQ ID NO: 1784637 - RNA, 16 nt, Human
ccugcaaacgcugccu

SEQ ID NO: 1784638 - RNA, 17 nt, Human
ccugcaaacgcugccug

SEQ ID NO: 1784639 - RNA, 18 nt, Human
ccugcaaacgcugccugc

SEQ ID NO: 1784640 - RNA, 19 nt, Human
ccugcaaacgcugccugcc

SEQ ID NO: 1784641 - RNA, 22 nt, Human
ccugcaaacgcugccugcccac

SEQ ID NO: 1784642 - RNA, 21 nt, Human
ccugcaaacgcugccugcccg

SEQ ID NO: 1784643 - RNA, 22 nt, Human
ccugcaaacgcugccugcccgu

SEQ ID NO: 1784644 - RNA, 19 nt, Human
ccugaggaugggucagagc

SEQ ID NO: 1784645 - RNA, 20 nt, Human
ccugaggaugggucagagcu

SEQ ID NO: 1784646 - RNA, 18 nt, Human
ccugaggaacccuuacag

SEQ ID NO: 1784647 - RNA, 13 nt, Human
ccugacacucccu

SEQ ID NO: 1784648 - RNA, 13 nt, Human
ccuggacacaggc

SEQ ID NO: 1784649 - RNA, 16 nt, Human
ccuggacacaggccug

SEQ ID NO: 1784650 - RNA, 20 nt, Human
ccuggacacaggccugcucu

SEQ ID NO: 1784651 - RNA, 18 nt, Human
ccuggagacugcccagcu

SEQ ID NO: 1784652 - RNA, 22 nt, Human
ccuggcacccggccccugcugg

SEQ ID NO: 1784653 - RNA, 23 nt, Human
ccuggcacccggccccugcuggu

SEQ ID NO: 1784654 - RNA, 14 nt, Human
ccuggcuccaguga

SEQ ID NO: 1784655 - RNA, 18 nt, Human
ccuggcugcagccugcgc

SEQ ID NO: 1784656 - RNA, 14 nt, Human
ccuggcagcucagc

SEQ ID NO: 1784657 - RNA, 15 nt, Human
ccuggccagaugcac

SEQ ID NO: 1784658 - RNA, 15 nt, Human
ccugggggugccagg

SEQ ID NO: 1784659 - RNA, 16 nt, Human
ccugggggugccagga

SEQ ID NO: 1784660 - RNA, 14 nt, Human
ccugggggugccag

SEQ ID NO: 1784661 - RNA, 17 nt, Human
ccugguccacagggcac

SEQ ID NO: 1784662 - RNA, 17 nt, Human
ccuggguuuuguucccu

SEQ ID NO: 1784663 - RNA, 12 nt, Human
ccuggguuuugu

SEQ ID NO: 1784664 - RNA, 19 nt, Human
ccuggguuuuguauucucu

SEQ ID NO: 1784665 - RNA, 20 nt, Human
ccuggguuuuguauucucug

SEQ ID NO: 1784666 - RNA, 21 nt, Human
ccuggguuuuguauucucuga

SEQ ID NO: 1784667 - RNA, 22 nt, Human
ccuggguuuuguauucucugag

SEQ ID NO: 1784668 - RNA, 23 nt, Human
ccuggguuuuguauucucugagc

SEQ ID NO: 1784669 - RNA, 21 nt, Human
ccugcucuccgaccagacacc

SEQ ID NO: 1784670 - RNA, 22 nt, Human
ccugcucuccgaccagacaccu

SEQ ID NO: 1784671 - RNA, 14 nt, Human
ccuggaagagccca

SEQ ID NO: 1784672 - RNA, 15 nt, Human
ccuggaagagcccag

SEQ ID NO: 1784673 - RNA, 16 nt, Human
ccuggaagagcccagu

SEQ ID NO: 1784674 - RNA, 18 nt, Human
ccuggaagagcccagucu

SEQ ID NO: 1784675 - RNA, 20 nt, Human
ccuggaagagcccagucugu

SEQ ID NO: 1784676 - RNA, 11 nt, Human
ccugccucagc

SEQ ID NO: 1784677 - RNA, 16 nt, Human
ccugccgggcugaggg

SEQ ID NO: 1784678 - RNA, 19 nt, Human
ccugccgggcugagggccu

SEQ ID NO: 1784679 - RNA, 20 nt, Human
ccugccgggcugagggccug

SEQ ID NO: 1784680 - RNA, 21 nt, Human
ccugccgggcugagggccugc

SEQ ID NO: 1784681 - RNA, 23 nt, Human
ccugccgggcugagggccugcug

SEQ ID NO: 1784682 - RNA, 15 nt, Human
ccugccgguaaacac

SEQ ID NO: 1784683 - RNA, 20 nt, Human
ccugccgguaaacacgccug

SEQ ID NO: 1784684 - RNA, 21 nt, Human
ccugccgguaaacacgccugc

SEQ ID NO: 1784685 - RNA, 22 nt, Human
ccugccgguaaacacgccugca

SEQ ID NO: 1784686 - RNA, 23 nt, Human
ccugccgguaaacacgccugcaa

SEQ ID NO: 1784687 - RNA, 13 nt, Human
ccugcgccugcug

SEQ ID NO: 1784688 - RNA, 14 nt, Human
ccugcgccugcugc

SEQ ID NO: 1784689 - RNA, 18 nt, Human
ccugcgccugcugcaugc

SEQ ID NO: 1784690 - RNA, 15 nt, Human
ccugcgccugcugca

SEQ ID NO: 1784691 - RNA, 20 nt, Human
ccugcgccaccgcccagaga

SEQ ID NO: 1784692 - RNA, 16 nt, Human
ccugcgccaguccugc

SEQ ID NO: 1784693 - RNA, 17 nt, Human
ccugcgccaguccugcu

SEQ ID NO: 1784694 - RNA, 14 nt, Human
ccugccuuccuccu

SEQ ID NO: 1784695 - RNA, 16 nt, Human
ccugccuuccuccugg

SEQ ID NO: 1784696 - RNA, 17 nt, Human
ccugccuuccuccuggg

SEQ ID NO: 1784697 - RNA, 22 nt, Human
ccugccuuccuccugggcccuc

SEQ ID NO: 1784698 - RNA, 17 nt, Human
ccuuagaagucacacag

SEQ ID NO: 1784699 - RNA, 18 nt, Human
ccuuagaagucacacagu

SEQ ID NO: 1784700 - RNA, 17 nt, Human
ccuuacaguaggagccc

SEQ ID NO: 1784701 - RNA, 21 nt, Human
ccuuacaguaggagcccagcu

SEQ ID NO: 1784702 - RNA, 20 nt, Human
ccuuaaacaaaaauuaaaau

SEQ ID NO: 1784703 - RNA, 23 nt, Human
ccuguuuuuguuucuuguuuuga

SEQ ID NO: 1784704 - RNA, 20 nt, Human
ccugugugugcgccuacagg

SEQ ID NO: 1784705 - RNA, 21 nt, Human
ccugugugugcgccuacagga

SEQ ID NO: 1784706 - RNA, 20 nt, Human
ccuguguguccaaaacugcc

SEQ ID NO: 1784707 - RNA, 21 nt, Human
ccuguguguccaaaacugccu

SEQ ID NO: 1784708 - RNA, 22 nt, Human
ccugugucuugcaauggcagcc

SEQ ID NO: 1784709 - RNA, 23 nt, Human
ccugugucuucuccaccacgcug

SEQ ID NO: 1784710 - RNA, 13 nt, Human
ccuguguccugaa

SEQ ID NO: 1784711 - RNA, 17 nt, Human
ccugugucuugcaaugg

SEQ ID NO: 1784712 - RNA, 19 nt, Human
ccugugucuugcaauggca

SEQ ID NO: 1784713 - RNA, 21 nt, Human
ccugugucuugcaauggcagc

SEQ ID NO: 1784714 - RNA, 22 nt, Human
ccuggugccccccaccccugga

SEQ ID NO: 1784715 - RNA, 15 nt, Human
ccugugugcuugguc

SEQ ID NO: 1784716 - RNA, 12 nt, Human
ccuugggcccuu

SEQ ID NO: 1784717 - RNA, 14 nt, Human
ccuugggcccuuug

SEQ ID NO: 1784718 - RNA, 17 nt, Human
ccuugggcccuuugagu

SEQ ID NO: 1784719 - RNA, 19 nt, Human
ccuuggcuuuaugcacauu

SEQ ID NO: 1784720 - RNA, 15 nt, Human
ccuuucgaggccuga

SEQ ID NO: 1784721 - RNA, 16 nt, Human
ccuuucgaggccugaa

SEQ ID NO: 1784722 - RNA, 18 nt, Human
ccuuucgaggccugaagc

SEQ ID NO: 1784723 - RNA, 14 nt, Human
ccuuguccccauga

SEQ ID NO: 1784724 - RNA, 21 nt, Human
ccuuguuauuucucagacuuu

SEQ ID NO: 1784725 - RNA, 14 nt, Human
ccuucuguggggac

SEQ ID NO: 1784726 - RNA, 20 nt, Human
ccuucuguggggacuccggc

SEQ ID NO: 1784727 - RNA, 14 nt, Human
ccuucgggcugugc

SEQ ID NO: 1784728 - RNA, 16 nt, Human
ccuugacuuagauucu

SEQ ID NO: 1784729 - RNA, 13 nt, Human
ccuugacuuugcu

SEQ ID NO: 1784730 - RNA, 20 nt, Human
ccuugacuuugcuccucaca

SEQ ID NO: 1784731 - RNA, 19 nt, Human
ccuugaccugcauuguaaa

SEQ ID NO: 1784732 - RNA, 20 nt, Human
ccuugaccugcauuguaaau

SEQ ID NO: 1784733 - RNA, 22 nt, Human
cgauucaccugagcaggaccuc

SEQ ID NO: 1784734 - RNA, 18 nt, Human
cgagcccugguggcagug

SEQ ID NO: 1784735 - RNA, 13 nt, Human
cgauguaaauuau

SEQ ID NO: 1784736 - RNA, 15 nt, Human
cgagcccugguggca

SEQ ID NO: 1784737 - RNA, 16 nt, Human
cgagcccugguggcag

SEQ ID NO: 1784738 - RNA, 16 nt, Human
cgccagggagaccugg

SEQ ID NO: 1784739 - RNA, 19 nt, Human
cgcagagcgcgccccuagc

SEQ ID NO: 1784740 - RNA, 21 nt, Human
cgcagagcgcgccccuagccg

SEQ ID NO: 1784741 - RNA, 13 nt, Human
cgcagagcgcgcc

SEQ ID NO: 1784742 - RNA, 22 nt, Human
cgaaagggacuuggaagcuccg

SEQ ID NO: 1784743 - RNA, 19 nt, Human
cgaaagggacuuggaagcu

SEQ ID NO: 1784744 - RNA, 18 nt, Human
cgaaccuuggccugggcc

SEQ ID NO: 1784745 - RNA, 19 nt, Human
cgaaccuuggccugggccg

SEQ ID NO: 1784746 - RNA, 15 nt, Human
cgaaccuccucugug

SEQ ID NO: 1784747 - RNA, 16 nt, Human
cgaaccuccucuguga

SEQ ID NO: 1784748 - RNA, 17 nt, Human
cgaaccuuggccugggc

SEQ ID NO: 1784749 - RNA, 12 nt, Human
cgaacuggcugc

SEQ ID NO: 1784750 - RNA, 14 nt, Human
cgaacuggcugcaa

SEQ ID NO: 1784751 - RNA, 16 nt, Human
ccuuuuuuuuuuuucc

SEQ ID NO: 1784752 - RNA, 17 nt, Human
ccuuuuuuuuuuuucca

SEQ ID NO: 1784753 - RNA, 15 nt, Human
ccuugggggcuccca

SEQ ID NO: 1784754 - RNA, 18 nt, Human
cgagaucacgccacugca

SEQ ID NO: 1784755 - RNA, 20 nt, Human
cgagaucacgccacugcacu

SEQ ID NO: 1784756 - RNA, 20 nt, Human
cgagagucuggcccuagacu

SEQ ID NO: 1784757 - RNA, 13 nt, Human
cgagcaccuccac

SEQ ID NO: 1784758 - RNA, 18 nt, Human
cgagcaccuccagccuga

SEQ ID NO: 1784759 - RNA, 17 nt, Human
cgagaucacgccacugc

SEQ ID NO: 1784760 - RNA, 17 nt, Human
cgagagucuggcccuag

SEQ ID NO: 1784761 - RNA, 19 nt, Human
cgagagucuggcccuagac

SEQ ID NO: 1784762 - RNA, 14 nt, Human
cgagagucuggccc

SEQ ID NO: 1784763 - RNA, 15 nt, Human
cgagagucuggcccu

SEQ ID NO: 1784764 - RNA, 13 nt, Human
cgaauagcuggga

SEQ ID NO: 1784765 - RNA, 14 nt, Human
cgaauagcugggac

SEQ ID NO: 1784766 - RNA, 11 nt, Human
cgacugucucc

SEQ ID NO: 1784767 - RNA, 19 nt, Human
cgaauacuuuugcccuuug

SEQ ID NO: 1784768 - RNA, 16 nt, Human
cccaccauaugaauug

SEQ ID NO: 1784769 - RNA, 18 nt, Human
cccaccaucaugucuggc

SEQ ID NO: 1784770 - RNA, 19 nt, Human
cccacgcuggagugcagug

SEQ ID NO: 1784771 - RNA, 17 nt, Human
cccacgaaacugcccug

SEQ ID NO: 1784772 - RNA, 18 nt, Human
cccacgaaacugcccugg

SEQ ID NO: 1784773 - RNA, 20 nt, Human
cccacgaaacugcccuggcu

SEQ ID NO: 1784774 - RNA, 20 nt, Human
cccacgcuggagugcaguga

SEQ ID NO: 1784775 - RNA, 21 nt, Human
cccacgcuggagugcagugag

SEQ ID NO: 1784776 - RNA, 12 nt, Human
cccacuucugcc

SEQ ID NO: 1784777 - RNA, 19 nt, Human
cccaccugcaucuggggcc

SEQ ID NO: 1784778 - RNA, 19 nt, Human
cccacaggacauuucucua

SEQ ID NO: 1784779 - RNA, 20 nt, Human
cccacaggacauuucucuaa

SEQ ID NO: 1784780 - RNA, 15 nt, Human
cccacaaaggcaaag

SEQ ID NO: 1784781 - RNA, 21 nt, Human
cccgaggccuucucugaagga

SEQ ID NO: 1784782 - RNA, 13 nt, Human
cccgaguagcugg

SEQ ID NO: 1784783 - RNA, 23 nt, Human
cccgagggaggggaagcuucugu

SEQ ID NO: 1784784 - RNA, 14 nt, Human
cccgaguagcuggg

SEQ ID NO: 1784785 - RNA, 15 nt, Human
cccgaguagcuggga

SEQ ID NO: 1784786 - RNA, 16 nt, Human
cccgaguagcugggac

SEQ ID NO: 1784787 - RNA, 17 nt, Human
cccgaguagcugggacu

SEQ ID NO: 1784788 - RNA, 18 nt, Human
cccgaguagcugggacua

SEQ ID NO: 1784789 - RNA, 21 nt, Human
cccgaguagcugggacuacag

SEQ ID NO: 1784790 - RNA, 14 nt, Human
cccgggccagggcu

SEQ ID NO: 1784791 - RNA, 15 nt, Human
cccgggccagggcug

SEQ ID NO: 1784792 - RNA, 11 nt, Human
cccgggcccca

SEQ ID NO: 1784793 - RNA, 22 nt, Human
cccgaguagcugggacuacagg

SEQ ID NO: 1784794 - RNA, 18 nt, Human
cccuagccgguuccuguc

SEQ ID NO: 1784795 - RNA, 23 nt, Human
cccuagccgguuccugucccugc

SEQ ID NO: 1784796 - RNA, 17 nt, Human
cccuagccgguuccugu

SEQ ID NO: 1784797 - RNA, 22 nt, Human
cccggggaaaggcaagguccgg

SEQ ID NO: 1784798 - RNA, 16 nt, Human
cccggggcccagggca

SEQ ID NO: 1784799 - RNA, 15 nt, Human
cccggggcccagggc

SEQ ID NO: 1784800 - RNA, 13 nt, Human
cccgggggugggg

SEQ ID NO: 1784801 - RNA, 19 nt, Human
cccgggggugggggguggg

SEQ ID NO: 1784802 - RNA, 22 nt, Human
cccugcacuugcagacucuaca

SEQ ID NO: 1784803 - RNA, 19 nt, Human
cccugcacuugcagacucu

SEQ ID NO: 1784804 - RNA, 12 nt, Human
cccugcacuugc

SEQ ID NO: 1784805 - RNA, 20 nt, Human
cccucuguccaggcacugag

SEQ ID NO: 1784806 - RNA, 24 nt, Human
cccucuguccaggcacugagauac

SEQ ID NO: 1784807 - RNA, 21 nt, Human
cccuaguuuucuuuccuccuu

SEQ ID NO: 1784808 - RNA, 23 nt, Human
cccuaguuuucuuuccuccuuuc

SEQ ID NO: 1784809 - RNA, 11 nt, Human
cccuauaaauc

SEQ ID NO: 1784810 - RNA, 12 nt, Human
cccuccacucuc

SEQ ID NO: 1784811 - RNA, 20 nt, Human
cccucccaggacucugaccc

SEQ ID NO: 1784812 - RNA, 21 nt, Human
cccucuccuuuguucccggcu

SEQ ID NO: 1784813 - RNA, 14 nt, Human
cccucucugcucug

SEQ ID NO: 1784814 - RNA, 15 nt, Human
cccucucugcucugc

SEQ ID NO: 1784815 - RNA, 16 nt, Human
cccucucugcucugcg

SEQ ID NO: 1784816 - RNA, 14 nt, Human
cccucucuugucag

SEQ ID NO: 1784817 - RNA, 19 nt, Human
cccucuggauucugaaucu

SEQ ID NO: 1784818 - RNA, 16 nt, Human
cccuggaccagugguc

SEQ ID NO: 1784819 - RNA, 17 nt, Human
cccuggaccaguggucu

SEQ ID NO: 1784820 - RNA, 21 nt, Human
cccuggaccaguggucucaca

SEQ ID NO: 1784821 - RNA, 23 nt, Human
cccuggaccaguggucucacaug

SEQ ID NO: 1784822 - RNA, 17 nt, Human
ccucccgaauagcuggg

SEQ ID NO: 1784823 - RNA, 22 nt, Human
ccucuaucauggugaaaagcuc

SEQ ID NO: 1784824 - RNA, 23 nt, Human
ccuccuucauaugaaaggugcca

SEQ ID NO: 1784825 - RNA, 20 nt, Human
ccucuaaccucgcccucucc

SEQ ID NO: 1784826 - RNA, 14 nt, Human
ccucuagagccuuc

SEQ ID NO: 1784827 - RNA, 21 nt, Human
ccucuagagccuucagccuua

SEQ ID NO: 1784828 - RNA, 22 nt, Human
ccucuagagccuucagccuuaa

SEQ ID NO: 1784829 - RNA, 23 nt, Human
ccuccugccucgaacuggcugca

SEQ ID NO: 1784830 - RNA, 20 nt, Human
ccuccugacccauugcuguu

SEQ ID NO: 1784831 - RNA, 21 nt, Human
ccuccugacccauugcuguug

SEQ ID NO: 1784832 - RNA, 12 nt, Human
ccuccugagaaa

SEQ ID NO: 1784833 - RNA, 14 nt, Human
ccuccugggcuaag

SEQ ID NO: 1784834 - RNA, 22 nt, Human
ccuccucugugaccaaugucuu

SEQ ID NO: 1784835 - RNA, 12 nt, Human
ccuccucuguga

SEQ ID NO: 1784836 - RNA, 13 nt, Human
ccuccucugugaa

SEQ ID NO: 1784837 - RNA, 11 nt, Human
ccuccucugug

SEQ ID NO: 1784838 - RNA, 20 nt, Human
ccucccgaguagcugggacu

SEQ ID NO: 1784839 - RNA, 21 nt, Human
ccucccgaguagcugggacua

SEQ ID NO: 1784840 - RNA, 17 nt, Human
ccucaucuucuucacca

SEQ ID NO: 1784841 - RNA, 15 nt, Human
ccucaucugucccuc

SEQ ID NO: 1784842 - RNA, 17 nt, Human
ccucaucugucccuccg

SEQ ID NO: 1784843 - RNA, 15 nt, Human
ccucaucuucuucac

SEQ ID NO: 1784844 - RNA, 15 nt, Human
ccucaucaucagagc

SEQ ID NO: 1784845 - RNA, 18 nt, Human
ccucaucuucuucaccau

SEQ ID NO: 1784846 - RNA, 14 nt, Human
ccuccacauccucc

SEQ ID NO: 1784847 - RNA, 15 nt, Human
ccuccacauccucca

SEQ ID NO: 1784848 - RNA, 16 nt, Human
ccuccacauccuccac

SEQ ID NO: 1784849 - RNA, 20 nt, Human
ccuccacauccuccacguuc

SEQ ID NO: 1784850 - RNA, 14 nt, Human
ccucaucccgagca

SEQ ID NO: 1784851 - RNA, 20 nt, Human
ccucaucccgagcaccucca

SEQ ID NO: 1784852 - RNA, 21 nt, Human
ccuaugcuauugacaauaaaa

SEQ ID NO: 1784853 - RNA, 22 nt, Human
ccuaugcuauugacaauaaaau

SEQ ID NO: 1784854 - RNA, 23 nt, Human
ccuaugcuauugacaauaaaaua

SEQ ID NO: 1784855 - RNA, 11 nt, Human
ccucagugcca

SEQ ID NO: 1784856 - RNA, 20 nt, Human
ccucauaguaugguggcugg

SEQ ID NO: 1784857 - RNA, 21 nt, Human
ccucauaguaugguggcuggg

SEQ ID NO: 1784858 - RNA, 22 nt, Human
ccucauaguaugguggcugggu

SEQ ID NO: 1784859 - RNA, 23 nt, Human
ccuccaugugggcuaguugggcu

SEQ ID NO: 1784860 - RNA, 15 nt, Human
ccucccaaagugcug

SEQ ID NO: 1784861 - RNA, 16 nt, Human
ccucccaaagugcugg

SEQ ID NO: 1784862 - RNA, 17 nt, Human
ccuccacguucugcuca

SEQ ID NO: 1784863 - RNA, 18 nt, Human
ccuccacguucugcucau

SEQ ID NO: 1784864 - RNA, 21 nt, Human
ccuccacguucugcucaucau

SEQ ID NO: 1784865 - RNA, 14 nt, Human
ccgaggccuucucu

SEQ ID NO: 1784866 - RNA, 20 nt, Human
ccgaguagcugggacuacag

SEQ ID NO: 1784867 - RNA, 17 nt, Human
ccgaggccuucucugaa

SEQ ID NO: 1784868 - RNA, 17 nt, Human
ccgaguagcugggacua

SEQ ID NO: 1784869 - RNA, 16 nt, Human
ccgauucaccugagca

SEQ ID NO: 1784870 - RNA, 13 nt, Human
ccgauuucuguaa

SEQ ID NO: 1784871 - RNA, 14 nt, Human
ccgauuucuguaaa

SEQ ID NO: 1784872 - RNA, 16 nt, Human
ccgauuucuguaaacu

SEQ ID NO: 1784873 - RNA, 21 nt, Human
ccgcggggcugucggcgcugc

SEQ ID NO: 1784874 - RNA, 21 nt, Human
ccgcgaugggucagguagggg

SEQ ID NO: 1784875 - RNA, 15 nt, Human
ccgcgccacaggacc

SEQ ID NO: 1784876 - RNA, 16 nt, Human
ccgcgccacaggaccc

SEQ ID NO: 1784877 - RNA, 15 nt, Human
ccggcugugcuggga

SEQ ID NO: 1784878 - RNA, 16 nt, Human
ccggcugugcugggag

SEQ ID NO: 1784879 - RNA, 17 nt, Human
ccggcugugcugggaga

SEQ ID NO: 1784880 - RNA, 19 nt, Human
ccgcuuucuacccagcgag

SEQ ID NO: 1784881 - RNA, 23 nt, Human
ccgcuuucuacccagcgagcccu

SEQ ID NO: 1784882 - RNA, 23 nt, Human
ccgcugagcgaggagaugcuccu

SEQ ID NO: 1784883 - RNA, 12 nt, Human
ccgcuuucuacc

SEQ ID NO: 1784884 - RNA, 15 nt, Human
ccgggcugagggccu

SEQ ID NO: 1784885 - RNA, 16 nt, Human
ccgggcugagggccug

SEQ ID NO: 1784886 - RNA, 18 nt, Human
ccgggcugagggccugcu

SEQ ID NO: 1784887 - RNA, 21 nt, Human
ccgggcugagggccugcugga

SEQ ID NO: 1784888 - RNA, 17 nt, Human
ccgggaccuggugcugc

SEQ ID NO: 1784889 - RNA, 15 nt, Human
ccggggaaaggcaag

SEQ ID NO: 1784890 - RNA, 14 nt, Human
ccgggucugccucu

SEQ ID NO: 1784891 - RNA, 22 nt, Human
ccgguaaacacgccugcaaacg

SEQ ID NO: 1784892 - RNA, 15 nt, Human
ccuaaaauucagugg

SEQ ID NO: 1784893 - RNA, 14 nt, Human
ccgugguccuuugg

SEQ ID NO: 1784894 - RNA, 17 nt, Human
ccgugucaagcugcucu

SEQ ID NO: 1784895 - RNA, 18 nt, Human
ccgugucaagcugcucug

SEQ ID NO: 1784896 - RNA, 23 nt, Human
ccgugucaagcugcucugagcca

SEQ ID NO: 1784897 - RNA, 15 nt, Human
ccgugguaugucugc

SEQ ID NO: 1784898 - RNA, 18 nt, Human
ccgugguaugucugccau

SEQ ID NO: 1784899 - RNA, 13 nt, Human
ccguggucccuga

SEQ ID NO: 1784900 - RNA, 14 nt, Human
ccguggucccugag

SEQ ID NO: 1784901 - RNA, 16 nt, Human
ccguggucccugagga

SEQ ID NO: 1784902 - RNA, 18 nt, Human
ccuagggaacagaaauug

SEQ ID NO: 1784903 - RNA, 12 nt, Human
ccuagggccccc

SEQ ID NO: 1784904 - RNA, 20 nt, Human
ccuagggcccccacaguugc

SEQ ID NO: 1784905 - RNA, 18 nt, Human
ccuaguucuguagaaaug

SEQ ID NO: 1784906 - RNA, 19 nt, Human
ccuaguucuguagaaaugg

SEQ ID NO: 1784907 - RNA, 22 nt, Human
ccuauacgcagcgugcuuuaaa

SEQ ID NO: 1784908 - RNA, 16 nt, Human
ccuaguuuucuuuccu

SEQ ID NO: 1784909 - RNA, 19 nt, Human
ccuaguuuucuuuccuccu

SEQ ID NO: 1784910 - RNA, 20 nt, Human
ccuaguuuucuuuccuccuu

SEQ ID NO: 1784911 - RNA, 22 nt, Human
ccuaguuuucuuuccuccuuuc

SEQ ID NO: 1784912 - RNA, 15 nt, Human
ccuaguuuuccuacu

SEQ ID NO: 1784913 - RNA, 12 nt, Human
ccuauaaggaag

SEQ ID NO: 1784914 - RNA, 21 nt, Human
cuguaucccaugagccucagc

SEQ ID NO: 1784915 - RNA, 22 nt, Human
cuguaucccaugagccucagca

SEQ ID NO: 1784916 - RNA, 20 nt, Human
cuguaucccaugagccucag

SEQ ID NO: 1784917 - RNA, 19 nt, Human
cuguauaaaaucagccaau

SEQ ID NO: 1784918 - RNA, 17 nt, Human
cuguauaaaaucagcca

SEQ ID NO: 1784919 - RNA, 11 nt, Human
cuguauaaaau

SEQ ID NO: 1784920 - RNA, 20 nt, Human
cuguauuuuguauuguuuca

SEQ ID NO: 1784921 - RNA, 20 nt, Human
cuguauuuugaaaaugcuuu

SEQ ID NO: 1784922 - RNA, 19 nt, Human
cuguacgucugacaggcaa

SEQ ID NO: 1784923 - RNA, 20 nt, Human
cuguacgucugacaggcaau

SEQ ID NO: 1784924 - RNA, 14 nt, Human
cuguacgucugaca

SEQ ID NO: 1784925 - RNA, 15 nt, Human
cuguacgucugacag

SEQ ID NO: 1784926 - RNA, 16 nt, Human
cuguacgucugacagg

SEQ ID NO: 1784927 - RNA, 18 nt, Human
cuguacgucugacaggca

SEQ ID NO: 1784928 - RNA, 15 nt, Human
cugguggcagcugcg

SEQ ID NO: 1784929 - RNA, 14 nt, Human
cugguggcaguggg

SEQ ID NO: 1784930 - RNA, 18 nt, Human
cugguggcagugggagcu

SEQ ID NO: 1784931 - RNA, 15 nt, Human
cugguauucuguucu

SEQ ID NO: 1784932 - RNA, 18 nt, Human
cugguauucuguucugga

SEQ ID NO: 1784933 - RNA, 19 nt, Human
cugguauucuguucuggag

SEQ ID NO: 1784934 - RNA, 20 nt, Human
cugguauucuguucuggagg

SEQ ID NO: 1784935 - RNA, 16 nt, Human
cugguggcaggggcuu

SEQ ID NO: 1784936 - RNA, 22 nt, Human
cugguggcaggggcuucuagcu

SEQ ID NO: 1784937 - RNA, 16 nt, Human
cugguuaggauggcag

SEQ ID NO: 1784938 - RNA, 18 nt, Human
cugguuaggauggcagga

SEQ ID NO: 1784939 - RNA, 19 nt, Human
cugguuaggauggcaggac

SEQ ID NO: 1784940 - RNA, 15 nt, Human
cugggggugccagga

SEQ ID NO: 1784941 - RNA, 19 nt, Human
cugggggugccaggaccag

SEQ ID NO: 1784942 - RNA, 14 nt, Human
cugggggugccagg

SEQ ID NO: 1784943 - RNA, 15 nt, Human
cugggcuucaguggc

SEQ ID NO: 1784944 - RNA, 11 nt, Human
cugggcccucu

SEQ ID NO: 1784945 - RNA, 20 nt, Human
cuggguuuuguauucucuga

SEQ ID NO: 1784946 - RNA, 22 nt, Human
cuggguuuuguauucucugagc

SEQ ID NO: 1784947 - RNA, 14 nt, Human
cuggguccuuccug

SEQ ID NO: 1784948 - RNA, 15 nt, Human
cuggguccuuccuga

SEQ ID NO: 1784949 - RNA, 19 nt, Human
cuggguccuuccugaaacu

SEQ ID NO: 1784950 - RNA, 13 nt, Human
cugggcccucucu

SEQ ID NO: 1784951 - RNA, 14 nt, Human
cugggcccucucug

SEQ ID NO: 1784952 - RNA, 15 nt, Human
cugggcccucucugc

SEQ ID NO: 1784953 - RNA, 18 nt, Human
cugggcccucucugcucu

SEQ ID NO: 1784954 - RNA, 15 nt, Human
cugggcaaagccuag

SEQ ID NO: 1784955 - RNA, 21 nt, Human
cugggauuacaagcgugagcc

SEQ ID NO: 1784956 - RNA, 12 nt, Human
cugggcugaggg

SEQ ID NO: 1784957 - RNA, 13 nt, Human
cugggcugaggga

SEQ ID NO: 1784958 - RNA, 16 nt, Human
cugggcugagggagcc

SEQ ID NO: 1784959 - RNA, 18 nt, Human
cugggcugagggagccug

SEQ ID NO: 1784960 - RNA, 19 nt, Human
cugggcugagggagccugg

SEQ ID NO: 1784961 - RNA, 23 nt, Human
cugggcugagggagccuggcccc

SEQ ID NO: 1784962 - RNA, 14 nt, Human
cugggcccucucuu

SEQ ID NO: 1784963 - RNA, 15 nt, Human
cugggcccucucuuc

SEQ ID NO: 1784964 - RNA, 18 nt, Human
cugggccuggcagcucag

SEQ ID NO: 1784965 - RNA, 20 nt, Human
cugggccuggcagcucagcu

SEQ ID NO: 1784966 - RNA, 15 nt, Human
cuguguguccaaaac

SEQ ID NO: 1784967 - RNA, 19 nt, Human
cuguguguccaaaacugcc

SEQ ID NO: 1784968 - RNA, 21 nt, Human
cuguguguccaaaacugccuc

SEQ ID NO: 1784969 - RNA, 22 nt, Human
cuguguguccaaaacugccuca

SEQ ID NO: 1784970 - RNA, 20 nt, Human
cugugucuuuuuucacuaca

SEQ ID NO: 1784971 - RNA, 18 nt, Human
cugugugugcgccuacag

SEQ ID NO: 1784972 - RNA, 17 nt, Human
cuguguucaaaaauaua

SEQ ID NO: 1784973 - RNA, 19 nt, Human
cuguggaugagcccucaga

SEQ ID NO: 1784974 - RNA, 15 nt, Human
cuguggaugagcccu

SEQ ID NO: 1784975 - RNA, 17 nt, Human
cuguggaugagcccuca

SEQ ID NO: 1784976 - RNA, 14 nt, Human
cugugcccuccuga

SEQ ID NO: 1784977 - RNA, 16 nt, Human
cugugcccuccugacc

SEQ ID NO: 1784978 - RNA, 17 nt, Human
cugugcccuccugaccc

SEQ ID NO: 1784979 - RNA, 22 nt, Human
cuguggggucaacccuucugga

SEQ ID NO: 1784980 - RNA, 14 nt, Human
cugugggaugggau

SEQ ID NO: 1784981 - RNA, 14 nt, Human
cugugggcaauuua

SEQ ID NO: 1784982 - RNA, 15 nt, Human
cugugggcaauuuag

SEQ ID NO: 1784983 - RNA, 18 nt, Human
cugugggcaauuuagaaa

SEQ ID NO: 1784984 - RNA, 13 nt, Human
cugugggugaugg

SEQ ID NO: 1784985 - RNA, 16 nt, Human
cugugggugaugggga

SEQ ID NO: 1784986 - RNA, 18 nt, Human
cugugggugauggggagg

SEQ ID NO: 1784987 - RNA, 19 nt, Human
cugugggugauggggaggg

SEQ ID NO: 1784988 - RNA, 21 nt, Human
cugugggugauggggaggggc

SEQ ID NO: 1784989 - RNA, 14 nt, Human
cugugguguguccc

SEQ ID NO: 1784990 - RNA, 15 nt, Human
cuguggugugucccc

SEQ ID NO: 1784991 - RNA, 22 nt, Human
cuguggugugucccccucuguc

SEQ ID NO: 1784992 - RNA, 14 nt, Human
cugugccaugugcc

SEQ ID NO: 1784993 - RNA, 14 nt, Human
cugugcaccaagca

SEQ ID NO: 1784994 - RNA, 16 nt, Human
cugugcagccgcugag

SEQ ID NO: 1784995 - RNA, 17 nt, Human
cugugcagccgcugagc

SEQ ID NO: 1784996 - RNA, 19 nt, Human
cugugcagccgcugagcga

SEQ ID NO: 1784997 - RNA, 21 nt, Human
cugugcagccgcugagcgagg

SEQ ID NO: 1784998 - RNA, 15 nt, Human
cugugccaugugcca

SEQ ID NO: 1784999 - RNA, 14 nt, Human
cugugaugcccugc

SEQ ID NO: 1785000 - RNA, 19 nt, Human
cugugaacccuggggccug

SEQ ID NO: 1785001 - RNA, 20 nt, Human
cugugaacccuggggccuga

SEQ ID NO: 1785002 - RNA, 20 nt, Human
cugugagcucccaggugcag

SEQ ID NO: 1785003 - RNA, 23 nt, Human
cugucauuugagcagggcucagc

SEQ ID NO: 1785004 - RNA, 11 nt, Human
cugucugcccc

SEQ ID NO: 1785005 - RNA, 13 nt, Human
cugucugccccag

SEQ ID NO: 1785006 - RNA, 15 nt, Human
cugucugccccagcc

SEQ ID NO: 1785007 - RNA, 18 nt, Human
cugucugccccagcccag

SEQ ID NO: 1785008 - RNA, 19 nt, Human
cugucugccccagcccaga

SEQ ID NO: 1785009 - RNA, 21 nt, Human
cugucauuugagcagggcuca

SEQ ID NO: 1785010 - RNA, 22 nt, Human
cugucauuugagcagggcucag

SEQ ID NO: 1785011 - RNA, 17 nt, Human
cugucuucaccugauuc

SEQ ID NO: 1785012 - RNA, 18 nt, Human
cugucuucaccugauuca

SEQ ID NO: 1785013 - RNA, 22 nt, Human
cugucuucaccugauucaacua

SEQ ID NO: 1785014 - RNA, 22 nt, Human
cugucuuguugcggauggaugg

SEQ ID NO: 1785015 - RNA, 12 nt, Human
cuuccugugucc

SEQ ID NO: 1785016 - RNA, 14 nt, Human
cuuccuguguccug

SEQ ID NO: 1785017 - RNA, 15 nt, Human
cuuccuguguccuga

SEQ ID NO: 1785018 - RNA, 14 nt, Human
cuuccuggagacug

SEQ ID NO: 1785019 - RNA, 22 nt, Human
cuuccuggagacugcccagcua

SEQ ID NO: 1785020 - RNA, 14 nt, Human
cuucccugacucau

SEQ ID NO: 1785021 - RNA, 13 nt, Human
cuucccugacuca

SEQ ID NO: 1785022 - RNA, 20 nt, Human
cuucccugacucauucugaa

SEQ ID NO: 1785023 - RNA, 22 nt, Human
cuuccuauuccaagcuuccaua

SEQ ID NO: 1785024 - RNA, 20 nt, Human
cuuccccccaaaacccggga

SEQ ID NO: 1785025 - RNA, 16 nt, Human
cuuccacaaagaaaau

SEQ ID NO: 1785026 - RNA, 17 nt, Human
cuuccacaaagaaaauu

SEQ ID NO: 1785027 - RNA, 23 nt, Human
cuuccacaaagaaaauuccuaua

SEQ ID NO: 1785028 - RNA, 15 nt, Human
cuuccacugagggca

SEQ ID NO: 1785029 - RNA, 18 nt, Human
cuuccacugagggcaguc

SEQ ID NO: 1785030 - RNA, 19 nt, Human
cuuccagauccucucuggg

SEQ ID NO: 1785031 - RNA, 21 nt, Human
cuuccagauccucucuggggc

SEQ ID NO: 1785032 - RNA, 22 nt, Human
cuuccagauccucucuggggcu

SEQ ID NO: 1785033 - RNA, 18 nt, Human
cuuccccaacacgcagga

SEQ ID NO: 1785034 - RNA, 17 nt, Human
cuucgcuccugugucuu

SEQ ID NO: 1785035 - RNA, 15 nt, Human
cuuccuuaugcuucu

SEQ ID NO: 1785036 - RNA, 17 nt, Human
cuuccuuaugcuucuuu

SEQ ID NO: 1785037 - RNA, 15 nt, Human
cuuccugugugucca

SEQ ID NO: 1785038 - RNA, 23 nt, Human
cuuccuguguguccaaaacugcc

SEQ ID NO: 1785039 - RNA, 16 nt, Human
cuucgggcugugcccg

SEQ ID NO: 1785040 - RNA, 12 nt, Human
cuucgggaccag

SEQ ID NO: 1785041 - RNA, 14 nt, Human
cuucgggaccagga

SEQ ID NO: 1785042 - RNA, 15 nt, Human
cuucgggaccaggau

SEQ ID NO: 1785043 - RNA, 21 nt, Human
cuucgugcggaaucagcuucu

SEQ ID NO: 1785044 - RNA, 13 nt, Human
cuucguucgcaga

SEQ ID NO: 1785045 - RNA, 17 nt, Human
cuucguucgcagagcuu

SEQ ID NO: 1785046 - RNA, 12 nt, Human
cuucucaccagc

SEQ ID NO: 1785047 - RNA, 13 nt, Human
cuucucaccagcu

SEQ ID NO: 1785048 - RNA, 14 nt, Human
cuucucaccagcug

SEQ ID NO: 1785049 - RNA, 15 nt, Human
cuucucaccagcugc

SEQ ID NO: 1785050 - RNA, 16 nt, Human
cuucucaccagcugca

SEQ ID NO: 1785051 - RNA, 17 nt, Human
cuucucaccagcugcaa

SEQ ID NO: 1785052 - RNA, 19 nt, Human
cuucucaccagcugcaaag

SEQ ID NO: 1785053 - RNA, 20 nt, Human
cuucucaccagcugcaaagu

SEQ ID NO: 1785054 - RNA, 21 nt, Human
cuucucaccagcugcaaagug

SEQ ID NO: 1785055 - RNA, 22 nt, Human
cuucucaccagcugcaaagugu

SEQ ID NO: 1785056 - RNA, 21 nt, Human
cuucagaggcccucgcugcca

SEQ ID NO: 1785057 - RNA, 23 nt, Human
cuucagaggcccucgcugccagc

SEQ ID NO: 1785058 - RNA, 13 nt, Human
cuucagccuuaau

SEQ ID NO: 1785059 - RNA, 21 nt, Human
cuucaggaaccucgaguacug

SEQ ID NO: 1785060 - RNA, 22 nt, Human
cuucaggaaccucgaguacugu

SEQ ID NO: 1785061 - RNA, 16 nt, Human
cuucagccucccgagu

SEQ ID NO: 1785062 - RNA, 20 nt, Human
cuucagccucccgaguagcu

SEQ ID NO: 1785063 - RNA, 20 nt, Human
cuucagccucuuucuguccc

SEQ ID NO: 1785064 - RNA, 14 nt, Human
cuucagccucccga

SEQ ID NO: 1785065 - RNA, 20 nt, Human
cuucaguaacccccacugga

SEQ ID NO: 1785066 - RNA, 22 nt, Human
cuucaguaacccccacuggacu

SEQ ID NO: 1785067 - RNA, 16 nt, Human
cuucauguggcuuccc

SEQ ID NO: 1785068 - RNA, 15 nt, Human
cuucauggcagaagg

SEQ ID NO: 1785069 - RNA, 21 nt, Human
cuucauggcagaaggcaaacc

SEQ ID NO: 1785070 - RNA, 16 nt, Human
cuuaguagauuaaaaa

SEQ ID NO: 1785071 - RNA, 21 nt, Human
cuuaguagauuaaaaauuaua

SEQ ID NO: 1785072 - RNA, 12 nt, Human
cuuacucuuucc

SEQ ID NO: 1785073 - RNA, 14 nt, Human
cuuacucuuuccua

SEQ ID NO: 1785074 - RNA, 15 nt, Human
cuuacucuuuccuau

SEQ ID NO: 1785075 - RNA, 16 nt, Human
cuuacucuuuccuauu

SEQ ID NO: 1785076 - RNA, 23 nt, Human
cuuacucuuuccuauuucagugu

SEQ ID NO: 1785077 - RNA, 17 nt, Human
cuuagaagucacacagu

SEQ ID NO: 1785078 - RNA, 20 nt, Human
cuuagaagucacacaguauu

SEQ ID NO: 1785079 - RNA, 22 nt, Human
cuuaaugaaguuugaauguuaa

SEQ ID NO: 1785080 - RNA, 23 nt, Human
cuuaaugaaguuugaauguuaaa

SEQ ID NO: 1785081 - RNA, 21 nt, Human
cuuaaugaaguuugaauguua

SEQ ID NO: 1785082 - RNA, 20 nt, Human
cuuaaugaaguuugaauguu

SEQ ID NO: 1785083 - RNA, 12 nt, Human
cuuaauauaaau

SEQ ID NO: 1785084 - RNA, 13 nt, Human
cuuaauauaaauu

SEQ ID NO: 1785085 - RNA, 14 nt, Human
cuuaauauaaauuc

SEQ ID NO: 1785086 - RNA, 21 nt, Human
cuuaauauaaauucacuuuca

SEQ ID NO: 1785087 - RNA, 21 nt, Human
cuuaauaugcugcaacaaaau

SEQ ID NO: 1785088 - RNA, 23 nt, Human
cuuaauaugcugcaacaaaaugu

SEQ ID NO: 1785089 - RNA, 19 nt, Human
cuuaaugaaguuugaaugu

SEQ ID NO: 1785090 - RNA, 18 nt, Human
cuuaaugaaguuugaaug

SEQ ID NO: 1785091 - RNA, 17 nt, Human
cuuaaugaaguuugaau

SEQ ID NO: 1785092 - RNA, 15 nt, Human
cuuaaugaaguuuga

SEQ ID NO: 1785093 - RNA, 14 nt, Human
cuuaaugaaguuug

SEQ ID NO: 1785094 - RNA, 12 nt, Human
cuuaaugaaguu

SEQ ID NO: 1785095 - RNA, 22 nt, Human
cuguugaauuuuguucucuggg

SEQ ID NO: 1785096 - RNA, 23 nt, Human
cuguugaauuuuguucucuggga

SEQ ID NO: 1785097 - RNA, 12 nt, Human
cuguugcccagg

SEQ ID NO: 1785098 - RNA, 16 nt, Human
cuguugcaagccccuc

SEQ ID NO: 1785099 - RNA, 22 nt, Human
cuguugcaagccccucuuucug

SEQ ID NO: 1785100 - RNA, 13 nt, Human
cuguugcccaggc

SEQ ID NO: 1785101 - RNA, 14 nt, Human
cuguugcccaggcu

SEQ ID NO: 1785102 - RNA, 15 nt, Human
cuguugcccaggcug

SEQ ID NO: 1785103 - RNA, 16 nt, Human
cuguugcccaggcugg

SEQ ID NO: 1785104 - RNA, 16 nt, Human
cuguuaauaguucagg

SEQ ID NO: 1785105 - RNA, 18 nt, Human
cuguuuguggggugacgg

SEQ ID NO: 1785106 - RNA, 18 nt, Human
cuguugcccaggcuggcg

SEQ ID NO: 1785107 - RNA, 17 nt, Human
cuguugcccaggcuggc

SEQ ID NO: 1785108 - RNA, 18 nt, Human
cuguuuagguuccccugu

SEQ ID NO: 1785109 - RNA, 19 nt, Human
cuguuuagguuccccuguc

SEQ ID NO: 1785110 - RNA, 20 nt, Human
cuguuuagguuccccuguca

SEQ ID NO: 1785111 - RNA, 21 nt, Human
cuguuuagguuccccugucaa

SEQ ID NO: 1785112 - RNA, 18 nt, Human
cuguuucaaagccaagac

SEQ ID NO: 1785113 - RNA, 21 nt, Human
cuguuucaaagccaagaccuc

SEQ ID NO: 1785114 - RNA, 23 nt, Human
cuguuuauugaaagaauuauccu

SEQ ID NO: 1785115 - RNA, 17 nt, Human
cuguuucaacacagacc

SEQ ID NO: 1785116 - RNA, 15 nt, Human
cuuguggacuaaaag

SEQ ID NO: 1785117 - RNA, 19 nt, Human
cuugggggcucccagggca

SEQ ID NO: 1785118 - RNA, 19 nt, Human
cuuguggacuaaaagauau

SEQ ID NO: 1785119 - RNA, 18 nt, Human
cuuguggacuaaaagaua

SEQ ID NO: 1785120 - RNA, 17 nt, Human
cuuguggacuaaaagau

SEQ ID NO: 1785121 - RNA, 16 nt, Human
cuuguggacuaaaaga

SEQ ID NO: 1785122 - RNA, 19 nt, Human
cuuuagaaagguuuugagc

SEQ ID NO: 1785123 - RNA, 20 nt, Human
cuuuagaaagguuuugagca

SEQ ID NO: 1785124 - RNA, 12 nt, Human
cuuuagaaaaua

SEQ ID NO: 1785125 - RNA, 13 nt, Human
cuuuagaaaauau

SEQ ID NO: 1785126 - RNA, 18 nt, Human
cuuuagaaaauauaagua

SEQ ID NO: 1785127 - RNA, 10 nt, Human
cuuucauuuu

SEQ ID NO: 1785128 - RNA, 15 nt, Human
cuuucauuuuugaua

SEQ ID NO: 1785129 - RNA, 18 nt, Human
cuuuccaaaccuuaucuc

SEQ ID NO: 1785130 - RNA, 22 nt, Human
cuuuccaaaccuuaucuccaca

SEQ ID NO: 1785131 - RNA, 21 nt, Human
cuuuauuuucuauaauuuaaa

SEQ ID NO: 1785132 - RNA, 18 nt, Human
cuuuauuguguuugucau

SEQ ID NO: 1785133 - RNA, 16 nt, Human
cuuuauuguguuuguc

SEQ ID NO: 1785134 - RNA, 23 nt, Human
cuuuauuguguuugucauuagcc

SEQ ID NO: 1785135 - RNA, 20 nt, Human
cuuuauuguguuugucauua

SEQ ID NO: 1785136 - RNA, 19 nt, Human
cuuuauuguguuugucauu

SEQ ID NO: 1785137 - RNA, 16 nt, Human
cuugcucugcugacag

SEQ ID NO: 1785138 - RNA, 17 nt, Human
cuugcucugcugacaga

SEQ ID NO: 1785139 - RNA, 13 nt, Human
cuuggaagcuccg

SEQ ID NO: 1785140 - RNA, 22 nt, Human
cuuggaaccguaggacccaagc

SEQ ID NO: 1785141 - RNA, 14 nt, Human
cuugcucugcugac

SEQ ID NO: 1785142 - RNA, 17 nt, Human
cuucuccacccugcucu

SEQ ID NO: 1785143 - RNA, 18 nt, Human
cuucuccacccugcucuc

SEQ ID NO: 1785144 - RNA, 21 nt, Human
cuucuccacccugcucuccga

SEQ ID NO: 1785145 - RNA, 19 nt, Human
cuugccagaaccaaauuaa

SEQ ID NO: 1785146 - RNA, 21 nt, Human
cuugccagaaccaaauuaacu

SEQ ID NO: 1785147 - RNA, 16 nt, Human
cuuggcugcagggagu

SEQ ID NO: 1785148 - RNA, 17 nt, Human
cuuggcugcagggaguc

SEQ ID NO: 1785149 - RNA, 19 nt, Human
cuuguaaaggaauuuaaaa

SEQ ID NO: 1785150 - RNA, 15 nt, Human
cuuugcugcagagaa

SEQ ID NO: 1785151 - RNA, 14 nt, Human
cuuugcugucccau

SEQ ID NO: 1785152 - RNA, 22 nt, Human
cuuugcugucccauagucccug

SEQ ID NO: 1785153 - RNA, 23 nt, Human
cuuugcugucccauagucccugc

SEQ ID NO: 1785154 - RNA, 23 nt, Human
cuuugggaauauuugaaucuugu

SEQ ID NO: 1785155 - RNA, 20 nt, Human
cuuugggaauauuugaaucu

SEQ ID NO: 1785156 - RNA, 19 nt, Human
cuuugggaauauuugaauc

SEQ ID NO: 1785157 - RNA, 18 nt, Human
cuuugggaauauuugaau

SEQ ID NO: 1785158 - RNA, 17 nt, Human
cuuugggaauauuugaa

SEQ ID NO: 1785159 - RNA, 15 nt, Human
cuuugucuaaaacaa

SEQ ID NO: 1785160 - RNA, 19 nt, Human
cuuugucuaaaacaauaaa

SEQ ID NO: 1785161 - RNA, 14 nt, Human
cuuuguucccggcu

SEQ ID NO: 1785162 - RNA, 14 nt, Human
cuuuuaccugcugc

SEQ ID NO: 1785163 - RNA, 15 nt, Human
cuuuuaccugcugcu

SEQ ID NO: 1785164 - RNA, 18 nt, Human
cuuuuaccugcugcuucu

SEQ ID NO: 1785165 - RNA, 20 nt, Human
cuuuuaccugcugcuucucc

SEQ ID NO: 1785166 - RNA, 17 nt, Human
cuuuguuucaaccaagu

SEQ ID NO: 1785167 - RNA, 22 nt, Human
cuuuucauaaccuagccuuaga

SEQ ID NO: 1785168 - RNA, 20 nt, Human
cuuuucauaaccuagccuua

SEQ ID NO: 1785169 - RNA, 16 nt, Human
cuuuucagauugugga

SEQ ID NO: 1785170 - RNA, 13 nt, Human
cuuuucucagcug

SEQ ID NO: 1785171 - RNA, 15 nt, Human
cuuuuccccuuuccu

SEQ ID NO: 1785172 - RNA, 16 nt, Human
cuuuuccccuuuccug

SEQ ID NO: 1785173 - RNA, 17 nt, Human
cuuuuccccuuuccugu

SEQ ID NO: 1785174 - RNA, 18 nt, Human
cuuuuccccuuuccuguc

SEQ ID NO: 1785175 - RNA, 20 nt, Human
cuuuuccccuuuccuguccc

SEQ ID NO: 1785176 - RNA, 21 nt, Human
cuuuuccccuuuccuguccca

SEQ ID NO: 1785177 - RNA, 22 nt, Human
cuuuuccccuuuccugucccac

SEQ ID NO: 1785178 - RNA, 12 nt, Human
gaaacagcugcc

SEQ ID NO: 1785179 - RNA, 13 nt, Human
gaaacagcugccu

SEQ ID NO: 1785180 - RNA, 14 nt, Human
gaaacagcugccuu

SEQ ID NO: 1785181 - RNA, 15 nt, Human
gaaacagcugccuua

SEQ ID NO: 1785182 - RNA, 16 nt, Human
gaaacagcugccuuag

SEQ ID NO: 1785183 - RNA, 19 nt, Human
gaaacagcugccuuagcuu

SEQ ID NO: 1785184 - RNA, 20 nt, Human
gaaacagcugccuuagcuuc

SEQ ID NO: 1785185 - RNA, 22 nt, Human
gaaacagcugccuuagcuucag

SEQ ID NO: 1785186 - RNA, 18 nt, Human
gaaacagcuaaugggaca

SEQ ID NO: 1785187 - RNA, 20 nt, Human
gaaaaucuuauaauuuaaaa

SEQ ID NO: 1785188 - RNA, 13 nt, Human
gaaaagcugcuga

SEQ ID NO: 1785189 - RNA, 17 nt, Human
gaaaagcugcugacagu

SEQ ID NO: 1785190 - RNA, 19 nt, Human
gaaaauaacgauaaaagac

SEQ ID NO: 1785191 - RNA, 19 nt, Human
gaaaaucuuauaauuuaaa

SEQ ID NO: 1785192 - RNA, 13 nt, Human
cuuuuuucugccu

SEQ ID NO: 1785193 - RNA, 14 nt, Human
cuuuuuucugccuc

SEQ ID NO: 1785194 - RNA, 15 nt, Human
cuuuuuucugccucc

SEQ ID NO: 1785195 - RNA, 16 nt, Human
cuuuuuucugccuccu

SEQ ID NO: 1785196 - RNA, 19 nt, Human
cuuuuuucugccuccuuua

SEQ ID NO: 1785197 - RNA, 17 nt, Human
gaaaaauaaacacuaca

SEQ ID NO: 1785198 - RNA, 15 nt, Human
cuuuuuucacuacau

SEQ ID NO: 1785199 - RNA, 22 nt, Human
cuuuuuucccauaagacaauga

SEQ ID NO: 1785200 - RNA, 19 nt, Human
gaaaaauaacuucaagcaa

SEQ ID NO: 1785201 - RNA, 22 nt, Human
gaaaacaauaacgauaaaagac

SEQ ID NO: 1785202 - RNA, 19 nt, Human
gaagcccagccccuacugc

SEQ ID NO: 1785203 - RNA, 20 nt, Human
gaagcccagccccuacugcu

SEQ ID NO: 1785204 - RNA, 22 nt, Human
gaagcccagccccuacugcugu

SEQ ID NO: 1785205 - RNA, 23 nt, Human
gaagcccagccccuacugcugug

SEQ ID NO: 1785206 - RNA, 15 nt, Human
gaagcuucugucucc

SEQ ID NO: 1785207 - RNA, 23 nt, Human
gaagcuucugucuccagcuuccc

SEQ ID NO: 1785208 - RNA, 12 nt, Human
gaagccagcugc

SEQ ID NO: 1785209 - RNA, 13 nt, Human
gaagccagcugcc

SEQ ID NO: 1785210 - RNA, 15 nt, Human
gaagccagcugcccu

SEQ ID NO: 1785211 - RNA, 19 nt, Human
gaagacucauucuucugua

SEQ ID NO: 1785212 - RNA, 21 nt, Human
gaagacucauucuucuguacg

SEQ ID NO: 1785213 - RNA, 15 nt, Human
gaaggagacaggcag

SEQ ID NO: 1785214 - RNA, 16 nt, Human
gaaggagacaggcaga

SEQ ID NO: 1785215 - RNA, 18 nt, Human
gaaggagacaggcagagc

SEQ ID NO: 1785216 - RNA, 20 nt, Human
gaaggagccccauuccuggg

SEQ ID NO: 1785217 - RNA, 21 nt, Human
gaaggagccccauuccuggga

SEQ ID NO: 1785218 - RNA, 22 nt, Human
gaaggagccccauuccugggaa

SEQ ID NO: 1785219 - RNA, 17 nt, Human
gaaggagauagggaaaa

SEQ ID NO: 1785220 - RNA, 18 nt, Human
gaauccagacccggcugc

SEQ ID NO: 1785221 - RNA, 12 nt, Human
gaaucagcuucu

SEQ ID NO: 1785222 - RNA, 22 nt, Human
gaaucauuucuauuucuccucc

SEQ ID NO: 1785223 - RNA, 15 nt, Human
gaauagcugggacua

SEQ ID NO: 1785224 - RNA, 21 nt, Human
gaaucacguuagaggaaaaau

SEQ ID NO: 1785225 - RNA, 14 nt, Human
gaauagcugggacu

SEQ ID NO: 1785226 - RNA, 14 nt, Human
gaaugaaagggccc

SEQ ID NO: 1785227 - RNA, 22 nt, Human
gaaucuugucucaaugcucaua

SEQ ID NO: 1785228 - RNA, 21 nt, Human
gaaucuugucucaaugcucau

SEQ ID NO: 1785229 - RNA, 14 nt, Human
gaaucuugucucaa

SEQ ID NO: 1785230 - RNA, 13 nt, Human
gaaucuugucuca

SEQ ID NO: 1785231 - RNA, 20 nt, Human
gaaucuugucucaaugcuca

SEQ ID NO: 1785232 - RNA, 18 nt, Human
gaaucuugucucaaugcu

SEQ ID NO: 1785233 - RNA, 16 nt, Human
gaaucuugucucaaug

SEQ ID NO: 1785234 - RNA, 15 nt, Human
gaaucuugucucaau

SEQ ID NO: 1785235 - RNA, 19 nt, Human
gaaugaaagggcccagaga

SEQ ID NO: 1785236 - RNA, 21 nt, Human
gaaugaaagggcccagagagg

SEQ ID NO: 1785237 - RNA, 19 nt, Human
gaaucucaagaugggggca

SEQ ID NO: 1785238 - RNA, 11 nt, Human
gaauaaagaau

SEQ ID NO: 1785239 - RNA, 13 nt, Human
gaauaaagaauac

SEQ ID NO: 1785240 - RNA, 15 nt, Human
gaauaaagaauacuu

SEQ ID NO: 1785241 - RNA, 17 nt, Human
gaauaaagaauacuuga

SEQ ID NO: 1785242 - RNA, 18 nt, Human
gaauaaagaauacuugaa

SEQ ID NO: 1785243 - RNA, 19 nt, Human
gaauaaagaauacuugaac

SEQ ID NO: 1785244 - RNA, 19 nt, Human
gaauacuuuugcccuuuga

SEQ ID NO: 1785245 - RNA, 19 nt, Human
gaauaauuuauaguaauga

SEQ ID NO: 1785246 - RNA, 21 nt, Human
gaauaauuuauaguaaugagu

SEQ ID NO: 1785247 - RNA, 14 nt, Human
gaauacuugaacuu

SEQ ID NO: 1785248 - RNA, 15 nt, Human
gaauacuugaacuug

SEQ ID NO: 1785249 - RNA, 16 nt, Human
gaauacuugaacuugu

SEQ ID NO: 1785250 - RNA, 14 nt, Human
gaauacuuuauaaa

SEQ ID NO: 1785251 - RNA, 20 nt, Human
gaauaauccuaaacauauga

SEQ ID NO: 1785252 - RNA, 14 nt, Human
gaaauucugaauuu

SEQ ID NO: 1785253 - RNA, 15 nt, Human
gaaauucugaauuug

SEQ ID NO: 1785254 - RNA, 16 nt, Human
gaaauucugaauuugc

SEQ ID NO: 1785255 - RNA, 17 nt, Human
gaaauucugaauuugca

SEQ ID NO: 1785256 - RNA, 18 nt, Human
gaaauucugaauuugcaa

SEQ ID NO: 1785257 - RNA, 19 nt, Human
gaaauucugaauuugcaaa

SEQ ID NO: 1785258 - RNA, 21 nt, Human
gaaauucugaauuugcaaagu

SEQ ID NO: 1785259 - RNA, 18 nt, Human
gaaauucuuuauacauuc

SEQ ID NO: 1785260 - RNA, 20 nt, Human
gaaauucuuuauacauucua

SEQ ID NO: 1785261 - RNA, 13 nt, Human
gaaaugcugcugg

SEQ ID NO: 1785262 - RNA, 15 nt, Human
gaaaugcugcuggcc

SEQ ID NO: 1785263 - RNA, 16 nt, Human
gaaaugcugcuggcca

SEQ ID NO: 1785264 - RNA, 17 nt, Human
gaaaugcugcuggccaa

SEQ ID NO: 1785265 - RNA, 15 nt, Human
gaaauauucccuaga

SEQ ID NO: 1785266 - RNA, 15 nt, Human
gaaaugguggaacug

SEQ ID NO: 1785267 - RNA, 20 nt, Human
gaaaugguuguauuagaugu

SEQ ID NO: 1785268 - RNA, 19 nt, Human
gaaaugguuguauuagaug

SEQ ID NO: 1785269 - RNA, 18 nt, Human
gaaaugguuguauuagau

SEQ ID NO: 1785270 - RNA, 17 nt, Human
gaaaugguuguauuaga

SEQ ID NO: 1785271 - RNA, 15 nt, Human
gaaaugguuguauua

SEQ ID NO: 1785272 - RNA, 14 nt, Human
gaaaugguuguauu

SEQ ID NO: 1785273 - RNA, 13 nt, Human
gaaaugguuguau

SEQ ID NO: 1785274 - RNA, 21 nt, Human
gaaacagguugggaugggaua

SEQ ID NO: 1785275 - RNA, 22 nt, Human
gaaacagguugggaugggauag

SEQ ID NO: 1785276 - RNA, 13 nt, Human
gaaauaauaugca

SEQ ID NO: 1785277 - RNA, 14 nt, Human
gaaauaauaugcau

SEQ ID NO: 1785278 - RNA, 15 nt, Human
gaaauaauaugcauu

SEQ ID NO: 1785279 - RNA, 13 nt, Human
gaaauaugcaucu

SEQ ID NO: 1785280 - RNA, 22 nt, Human
gaaauacagauuuugauagcaa

SEQ ID NO: 1785281 - RNA, 17 nt, Human
gaaauacagauuuugau

SEQ ID NO: 1785282 - RNA, 21 nt, Human
gaaauacaauucuacauuguc

SEQ ID NO: 1785283 - RNA, 16 nt, Human
gaaauacagucuucca

SEQ ID NO: 1785284 - RNA, 15 nt, Human
gaacagacuggaagc

SEQ ID NO: 1785285 - RNA, 16 nt, Human
gaacagacuggaagca

SEQ ID NO: 1785286 - RNA, 19 nt, Human
gaacagacuggaagcacag

SEQ ID NO: 1785287 - RNA, 21 nt, Human
gaaccacaucuugcucugcug

SEQ ID NO: 1785288 - RNA, 12 nt, Human
gaacagaaauug

SEQ ID NO: 1785289 - RNA, 16 nt, Human
gaaccaccacacccag

SEQ ID NO: 1785290 - RNA, 17 nt, Human
gaaccaccacacccagc

SEQ ID NO: 1785291 - RNA, 15 nt, Human
gaaccguaggaccca

SEQ ID NO: 1785292 - RNA, 19 nt, Human
gaaccgugguaugucugcc

SEQ ID NO: 1785293 - RNA, 15 nt, Human
gaacuauaaagaagu

SEQ ID NO: 1785294 - RNA, 13 nt, Human
gaaccuuguuauu

SEQ ID NO: 1785295 - RNA, 18 nt, Human
gaaccuuguuauuucuca

SEQ ID NO: 1785296 - RNA, 13 nt, Human
gaaccuuggccug

SEQ ID NO: 1785297 - RNA, 16 nt, Human
gaaccuuggccugggc

SEQ ID NO: 1785298 - RNA, 17 nt, Human
gaaccuuggccugggcc

SEQ ID NO: 1785299 - RNA, 22 nt, Human
gaacuggguacuuguggacaca

SEQ ID NO: 1785300 - RNA, 14 nt, Human
gaacuggucuuccu

SEQ ID NO: 1785301 - RNA, 13 nt, Human
gaacuucauggau

SEQ ID NO: 1785302 - RNA, 20 nt, Human
gaacuuacuguagccucaga

SEQ ID NO: 1785303 - RNA, 22 nt, Human
gaacuuagccauuuuucaaagc

SEQ ID NO: 1785304 - RNA, 20 nt, Human
gaacuuauccuaaaacaaau

SEQ ID NO: 1785305 - RNA, 14 nt, Human
gaacugugccacaa

SEQ ID NO: 1785306 - RNA, 12 nt, Human
gaacuugccucu

SEQ ID NO: 1785307 - RNA, 14 nt, Human
gaacuugcugcugu

SEQ ID NO: 1785308 - RNA, 15 nt, Human
gaacuugcugcuguc

SEQ ID NO: 1785309 - RNA, 18 nt, Human
gaacuugcugcugucuug

SEQ ID NO: 1785310 - RNA, 21 nt, Human
gaacuuguaaaggaauuuaaa

SEQ ID NO: 1785311 - RNA, 23 nt, Human
gaagaaaauggaaccaggcuugg

SEQ ID NO: 1785312 - RNA, 17 nt, Human
cugagucaucuguuagg

SEQ ID NO: 1785313 - RNA, 21 nt, Human
cugagucaucuguuagggccu

SEQ ID NO: 1785314 - RNA, 22 nt, Human
cugagucaucuguuagggccuu

SEQ ID NO: 1785315 - RNA, 15 nt, Human
cugagggaucuuuac

SEQ ID NO: 1785316 - RNA, 20 nt, Human
cugaggcugggggagagccg

SEQ ID NO: 1785317 - RNA, 12 nt, Human
cugagggagccu

SEQ ID NO: 1785318 - RNA, 13 nt, Human
cugagggagccug

SEQ ID NO: 1785319 - RNA, 17 nt, Human
cugagggagccuggccc

SEQ ID NO: 1785320 - RNA, 20 nt, Human
cugagggagcuccaacucag

SEQ ID NO: 1785321 - RNA, 14 nt, Human
cugaucagagccgu

SEQ ID NO: 1785322 - RNA, 20 nt, Human
cugaucagagccgugguccu

SEQ ID NO: 1785323 - RNA, 18 nt, Human
cugaucaggaccuccaag

SEQ ID NO: 1785324 - RNA, 15 nt, Human
cugaucccucuacag

SEQ ID NO: 1785325 - RNA, 19 nt, Human
cugcaaacgcugccugccg

SEQ ID NO: 1785326 - RNA, 17 nt, Human
cugcaaaaggacucuca

SEQ ID NO: 1785327 - RNA, 19 nt, Human
cugcaaacgcugccugccc

SEQ ID NO: 1785328 - RNA, 20 nt, Human
cugcaaacgcugccugccca

SEQ ID NO: 1785329 - RNA, 17 nt, Human
cugauuguugucaggcc

SEQ ID NO: 1785330 - RNA, 18 nt, Human
cugcacuugcagacucua

SEQ ID NO: 1785331 - RNA, 12 nt, Human
cugcaccgggcc

SEQ ID NO: 1785332 - RNA, 15 nt, Human
cugccccaaacaaau

SEQ ID NO: 1785333 - RNA, 21 nt, Human
cugcauguaaacacgccugca

SEQ ID NO: 1785334 - RNA, 17 nt, Human
cugcaugcccucucagg

SEQ ID NO: 1785335 - RNA, 18 nt, Human
cugcaugcccucucaggc

SEQ ID NO: 1785336 - RNA, 19 nt, Human
cugcaugcccucucaggcc

SEQ ID NO: 1785337 - RNA, 20 nt, Human
cugcaugcccucucaggccg

SEQ ID NO: 1785338 - RNA, 21 nt, Human
cugcaugcccucucaggccgg

SEQ ID NO: 1785339 - RNA, 13 nt, Human
cugcaugauguuu

SEQ ID NO: 1785340 - RNA, 15 nt, Human
cugcaugauguuugc

SEQ ID NO: 1785341 - RNA, 16 nt, Human
cugcaugauguuugcc

SEQ ID NO: 1785342 - RNA, 20 nt, Human
cugcaugauguuugcccaaa

SEQ ID NO: 1785343 - RNA, 15 nt, Human
cugcaugcccucuca

SEQ ID NO: 1785344 - RNA, 16 nt, Human
cugcaugcccucucag

SEQ ID NO: 1785345 - RNA, 14 nt, Human
cugcaucuggggcc

SEQ ID NO: 1785346 - RNA, 18 nt, Human
cugcaucuggggcccaua

SEQ ID NO: 1785347 - RNA, 20 nt, Human
cugcagaaacccugagcaga

SEQ ID NO: 1785348 - RNA, 21 nt, Human
cugcauccagagauucauuuu

SEQ ID NO: 1785349 - RNA, 22 nt, Human
cugcauccagagauucauuuuc

SEQ ID NO: 1785350 - RNA, 23 nt, Human
cugcacuugcagacucuacagag

SEQ ID NO: 1785351 - RNA, 15 nt, Human
cugccucagccuccc

SEQ ID NO: 1785352 - RNA, 19 nt, Human
cugccucagccucccaaag

SEQ ID NO: 1785353 - RNA, 21 nt, Human
cugccccaaacaaauaugcaa

SEQ ID NO: 1785354 - RNA, 17 nt, Human
cugccucugacacacag

SEQ ID NO: 1785355 - RNA, 18 nt, Human
cugccucugacacacagc

SEQ ID NO: 1785356 - RNA, 21 nt, Human
cugccucugacacacagcucu

SEQ ID NO: 1785357 - RNA, 21 nt, Human
cugccugcccaggccccugcc

SEQ ID NO: 1785358 - RNA, 22 nt, Human
cugccugcccaggccccugcca

SEQ ID NO: 1785359 - RNA, 19 nt, Human
cugcgguccacccaggagc

SEQ ID NO: 1785360 - RNA, 20 nt, Human
cugcgguccacccaggagcc

SEQ ID NO: 1785361 - RNA, 18 nt, Human
cugcgguccacccaggag

SEQ ID NO: 1785362 - RNA, 22 nt, Human
cugccuuuauuguguuugucau

SEQ ID NO: 1785363 - RNA, 24 nt, Human
cugccuuuauuguguuugucauua

SEQ ID NO: 1785364 - RNA, 17 nt, Human
cugcggcguacaggcug

SEQ ID NO: 1785365 - RNA, 18 nt, Human
cucugucgcccagucugg

SEQ ID NO: 1785366 - RNA, 19 nt, Human
cucugucgcccagucugga

SEQ ID NO: 1785367 - RNA, 17 nt, Human
cucugucgcccagucug

SEQ ID NO: 1785368 - RNA, 15 nt, Human
cucuggggcuguguu

SEQ ID NO: 1785369 - RNA, 13 nt, Human
cucugucgcccag

SEQ ID NO: 1785370 - RNA, 14 nt, Human
cucuguccugggag

SEQ ID NO: 1785371 - RNA, 15 nt, Human
cucuguccugggagu

SEQ ID NO: 1785372 - RNA, 22 nt, Human
cucuguccugggagugagcugg

SEQ ID NO: 1785373 - RNA, 12 nt, Human
cucugggagaaa

SEQ ID NO: 1785374 - RNA, 14 nt, Human
cucugggagaaaau

SEQ ID NO: 1785375 - RNA, 18 nt, Human
cucugggagaaaaucauc

SEQ ID NO: 1785376 - RNA, 20 nt, Human
cucugggagaaaaucaucaa

SEQ ID NO: 1785377 - RNA, 21 nt, Human
cucugggagaaaaucaucaag

SEQ ID NO: 1785378 - RNA, 14 nt, Human
cucugggccacuug

SEQ ID NO: 1785379 - RNA, 17 nt, Human
cucugggccacuuggag

SEQ ID NO: 1785380 - RNA, 18 nt, Human
cucugggccacuuggagu

SEQ ID NO: 1785381 - RNA, 10 nt, Human
cucugccuga

SEQ ID NO: 1785382 - RNA, 19 nt, Human
cucugccucugacacacag

SEQ ID NO: 1785383 - RNA, 20 nt, Human
cucugccucugacacacagc

SEQ ID NO: 1785384 - RNA, 15 nt, Human
cucuucuccaggcug

SEQ ID NO: 1785385 - RNA, 13 nt, Human
cucuucuccaggc

SEQ ID NO: 1785386 - RNA, 13 nt, Human
cucuuccccccaa

SEQ ID NO: 1785387 - RNA, 14 nt, Human
cucuuccccccaaa

SEQ ID NO: 1785388 - RNA, 20 nt, Human
cucugugucagguggggcag

SEQ ID NO: 1785389 - RNA, 21 nt, Human
cucugugucagguggggcagc

SEQ ID NO: 1785390 - RNA, 22 nt, Human
cucugugucagguggggcagcu

SEQ ID NO: 1785391 - RNA, 23 nt, Human
cucugugucagguggggcagcuu

SEQ ID NO: 1785392 - RNA, 14 nt, Human
cucugugaccaaug

SEQ ID NO: 1785393 - RNA, 15 nt, Human
cucugugaccaaugu

SEQ ID NO: 1785394 - RNA, 17 nt, Human
cucugugaccaaugucu

SEQ ID NO: 1785395 - RNA, 18 nt, Human
cucugugaccaaugucuu

SEQ ID NO: 1785396 - RNA, 18 nt, Human
cucugugaagcauucgag

SEQ ID NO: 1785397 - RNA, 19 nt, Human
cucugugaccaaugucuug

SEQ ID NO: 1785398 - RNA, 14 nt, Human
cucuguuugugggg

SEQ ID NO: 1785399 - RNA, 16 nt, Human
cucuguuuguggggug

SEQ ID NO: 1785400 - RNA, 16 nt, Human
cucugagcugugcagg

SEQ ID NO: 1785401 - RNA, 16 nt, Human
cucugaggacacuaac

SEQ ID NO: 1785402 - RNA, 12 nt, Human
cucugaggacac

SEQ ID NO: 1785403 - RNA, 14 nt, Human
cucugaggacacua

SEQ ID NO: 1785404 - RNA, 17 nt, Human
cucugacucagggcucc

SEQ ID NO: 1785405 - RNA, 20 nt, Human
cucugacucagggcuccugg

SEQ ID NO: 1785406 - RNA, 21 nt, Human
cucugacucagggcuccuggg

SEQ ID NO: 1785407 - RNA, 14 nt, Human
cucugacucagggc

SEQ ID NO: 1785408 - RNA, 15 nt, Human
cucugacucagggcu

SEQ ID NO: 1785409 - RNA, 16 nt, Human
cucugacucagggcuc

SEQ ID NO: 1785410 - RNA, 20 nt, Human
cucugaccccagcauucuca

SEQ ID NO: 1785411 - RNA, 14 nt, Human
cucugacacacagc

SEQ ID NO: 1785412 - RNA, 15 nt, Human
cucugacacacagcu

SEQ ID NO: 1785413 - RNA, 16 nt, Human
cucugacacacagcuc

SEQ ID NO: 1785414 - RNA, 17 nt, Human
cucugacacacagcucu

SEQ ID NO: 1785415 - RNA, 18 nt, Human
cucugacacacagcucug

SEQ ID NO: 1785416 - RNA, 19 nt, Human
cucugacacacagcucugu

SEQ ID NO: 1785417 - RNA, 22 nt, Human
cucugaaggacauugcggacag

SEQ ID NO: 1785418 - RNA, 12 nt, Human
cucgcugccagc

SEQ ID NO: 1785419 - RNA, 18 nt, Human
cucgcugcacaaauacuc

SEQ ID NO: 1785420 - RNA, 13 nt, Human
cugaagaaagugu

SEQ ID NO: 1785421 - RNA, 16 nt, Human
cucuucuccaggcugu

SEQ ID NO: 1785422 - RNA, 14 nt, Human
cucuuuucaaaaca

SEQ ID NO: 1785423 - RNA, 18 nt, Human
cucuuuuccccuuuccug

SEQ ID NO: 1785424 - RNA, 14 nt, Human
cucuuugucuaaaa

SEQ ID NO: 1785425 - RNA, 16 nt, Human
cucuuugucuaaaaca

SEQ ID NO: 1785426 - RNA, 17 nt, Human
cucuuugucuaaaacaa

SEQ ID NO: 1785427 - RNA, 18 nt, Human
cucuuugucuaaaacaau

SEQ ID NO: 1785428 - RNA, 21 nt, Human
cucuuugucuaaaacaauaaa

SEQ ID NO: 1785429 - RNA, 22 nt, Human
cucuuugucuaaaacaauaaaa

SEQ ID NO: 1785430 - RNA, 14 nt, Human
cucuuuuaccugcu

SEQ ID NO: 1785431 - RNA, 16 nt, Human
cucuuuuaccugcugc

SEQ ID NO: 1785432 - RNA, 17 nt, Human
cucuuuuaccugcugcu

SEQ ID NO: 1785433 - RNA, 18 nt, Human
cucuuuuaccugcugcuu

SEQ ID NO: 1785434 - RNA, 21 nt, Human
cugaagucacacagugagucg

SEQ ID NO: 1785435 - RNA, 18 nt, Human
cugaagucacacagugag

SEQ ID NO: 1785436 - RNA, 19 nt, Human
cugaagucacacagugagu

SEQ ID NO: 1785437 - RNA, 17 nt, Human
cugaagucacacaguga

SEQ ID NO: 1785438 - RNA, 21 nt, Human
cugaaugccgcgaugggucag

SEQ ID NO: 1785439 - RNA, 22 nt, Human
cugaaugccgcgaugggucagg

SEQ ID NO: 1785440 - RNA, 21 nt, Human
cugacgaacuuccauggcccu

SEQ ID NO: 1785441 - RNA, 12 nt, Human
cugaauuugcaa

SEQ ID NO: 1785442 - RNA, 13 nt, Human
cugaauuugcaaa

SEQ ID NO: 1785443 - RNA, 14 nt, Human
cugaauuugcaaag

SEQ ID NO: 1785444 - RNA, 15 nt, Human
cugaauuugcaaagu

SEQ ID NO: 1785445 - RNA, 16 nt, Human
cugaauuugcaaagua

SEQ ID NO: 1785446 - RNA, 18 nt, Human
cugaauuugcaaaguacu

SEQ ID NO: 1785447 - RNA, 19 nt, Human
cugaauuugcaaaguacug

SEQ ID NO: 1785448 - RNA, 20 nt, Human
cugaauuugcaaaguacugu

SEQ ID NO: 1785449 - RNA, 21 nt, Human
cugaauuugcaaaguacugua

SEQ ID NO: 1785450 - RNA, 22 nt, Human
cugaauuugcaaaguacuguaa

SEQ ID NO: 1785451 - RNA, 16 nt, Human
cugacagacacaggcc

SEQ ID NO: 1785452 - RNA, 20 nt, Human
cugaauuuuggggauuuuca

SEQ ID NO: 1785453 - RNA, 21 nt, Human
cugaauuuuggggauuuucaa

SEQ ID NO: 1785454 - RNA, 17 nt, Human
cugacagacacaggccc

SEQ ID NO: 1785455 - RNA, 18 nt, Human
cugacagacacaggcccg

SEQ ID NO: 1785456 - RNA, 13 nt, Human
cugacugcucaga

SEQ ID NO: 1785457 - RNA, 14 nt, Human
cugacugcucagaa

SEQ ID NO: 1785458 - RNA, 21 nt, Human
cugacugcucagaacuugcug

SEQ ID NO: 1785459 - RNA, 12 nt, Human
cugacugggagu

SEQ ID NO: 1785460 - RNA, 16 nt, Human
cugacucagggcuccu

SEQ ID NO: 1785461 - RNA, 18 nt, Human
cugacucagggcuccugg

SEQ ID NO: 1785462 - RNA, 19 nt, Human
cugacucagggcuccuggg

SEQ ID NO: 1785463 - RNA, 21 nt, Human
cugacucagggcuccuggguu

SEQ ID NO: 1785464 - RNA, 16 nt, Human
cugacucauucugaag

SEQ ID NO: 1785465 - RNA, 15 nt, Human
cugacucagggcucc

SEQ ID NO: 1785466 - RNA, 18 nt, Human
cugagauucaauauugaa

SEQ ID NO: 1785467 - RNA, 18 nt, Human
cugagcaggaccucugaa

SEQ ID NO: 1785468 - RNA, 20 nt, Human
cugagcagugaaugauucag

SEQ ID NO: 1785469 - RNA, 13 nt, Human
cugagccacagug

SEQ ID NO: 1785470 - RNA, 12 nt, Human
cugagccaccug

SEQ ID NO: 1785471 - RNA, 14 nt, Human
cugagccaccugcc

SEQ ID NO: 1785472 - RNA, 15 nt, Human
cugagccaccugccc

SEQ ID NO: 1785473 - RNA, 17 nt, Human
cugagccaccugcccuu

SEQ ID NO: 1785474 - RNA, 17 nt, Human
cugagcagaaagaggcc

SEQ ID NO: 1785475 - RNA, 16 nt, Human
cugagcaggaccucug

SEQ ID NO: 1785476 - RNA, 11 nt, Human
cugagcacaga

SEQ ID NO: 1785477 - RNA, 13 nt, Human
cugagcacagaug

SEQ ID NO: 1785478 - RNA, 14 nt, Human
cugagcacccucug

SEQ ID NO: 1785479 - RNA, 15 nt, Human
cugagcacccucugg

SEQ ID NO: 1785480 - RNA, 16 nt, Human
cugagcacccucugga

SEQ ID NO: 1785481 - RNA, 17 nt, Human
cugagcacccucuggau

SEQ ID NO: 1785482 - RNA, 20 nt, Human
cugagcacccucuggauucu

SEQ ID NO: 1785483 - RNA, 17 nt, Human
cugagcaccgugucaag

SEQ ID NO: 1785484 - RNA, 20 nt, Human
cugagcaccgugucaagcug

SEQ ID NO: 1785485 - RNA, 23 nt, Human
cugagcaccgugucaagcugcuc

SEQ ID NO: 1785486 - RNA, 20 nt, Human
cucgccggacccucuaaccu

SEQ ID NO: 1785487 - RNA, 18 nt, Human
cucgcucccucccaggac

SEQ ID NO: 1785488 - RNA, 15 nt, Human
cucgcucccucccag

SEQ ID NO: 1785489 - RNA, 19 nt, Human
cuccuugggcccuuugagu

SEQ ID NO: 1785490 - RNA, 17 nt, Human
cuccuugggcccuuuga

SEQ ID NO: 1785491 - RNA, 18 nt, Human
cuccuugggcccuuugag

SEQ ID NO: 1785492 - RNA, 15 nt, Human
cuccuuccugugugu

SEQ ID NO: 1785493 - RNA, 12 nt, Human
cuccuugggccc

SEQ ID NO: 1785494 - RNA, 13 nt, Human
cuccuugggcccu

SEQ ID NO: 1785495 - RNA, 16 nt, Human
cuccuugggcccuuug

SEQ ID NO: 1785496 - RNA, 12 nt, Human
cuccuuccuggc

SEQ ID NO: 1785497 - RNA, 14 nt, Human
cuccuuccuggccu

SEQ ID NO: 1785498 - RNA, 16 nt, Human
cuccuuccuggccuga

SEQ ID NO: 1785499 - RNA, 17 nt, Human
cuccuuccuggccugag

SEQ ID NO: 1785500 - RNA, 18 nt, Human
cuccuuccuggccugaga

SEQ ID NO: 1785501 - RNA, 13 nt, Human
cuccuuccugugu

SEQ ID NO: 1785502 - RNA, 14 nt, Human
cuccuuccuggaga

SEQ ID NO: 1785503 - RNA, 13 nt, Human
cuccuuccuggag

SEQ ID NO: 1785504 - RNA, 21 nt, Human
cuccugugugugcgccuacag

SEQ ID NO: 1785505 - RNA, 23 nt, Human
cuccugugugugcgccuacagga

SEQ ID NO: 1785506 - RNA, 24 nt, Human
cuccugugugugcgccuacaggag

SEQ ID NO: 1785507 - RNA, 17 nt, Human
cuccugccucagccucc

SEQ ID NO: 1785508 - RNA, 12 nt, Human
cuccugccucag

SEQ ID NO: 1785509 - RNA, 11 nt, Human
cuccugccuca

SEQ ID NO: 1785510 - RNA, 13 nt, Human
cuccucuccccag

SEQ ID NO: 1785511 - RNA, 15 nt, Human
cuccucuccccagca

SEQ ID NO: 1785512 - RNA, 22 nt, Human
cuccugccucgaacuggcugca

SEQ ID NO: 1785513 - RNA, 18 nt, Human
cuccugccucgaacuggc

SEQ ID NO: 1785514 - RNA, 20 nt, Human
cuccugccucgaacuggcug

SEQ ID NO: 1785515 - RNA, 21 nt, Human
cuccugccucgaacuggcugc

SEQ ID NO: 1785516 - RNA, 14 nt, Human
cuccucccagccca

SEQ ID NO: 1785517 - RNA, 18 nt, Human
cuccgagugaacuggucu

SEQ ID NO: 1785518 - RNA, 19 nt, Human
cuccgagugaacuggucuu

SEQ ID NO: 1785519 - RNA, 23 nt, Human
cuccgagugaacuggucuuccuu

SEQ ID NO: 1785520 - RNA, 12 nt, Human
cuccgcaggacu

SEQ ID NO: 1785521 - RNA, 13 nt, Human
cuccgcaggacuu

SEQ ID NO: 1785522 - RNA, 22 nt, Human
cuccgcaggacuuccccggagg

SEQ ID NO: 1785523 - RNA, 13 nt, Human
cucccuugggcuc

SEQ ID NO: 1785524 - RNA, 14 nt, Human
cucccuugggcucc

SEQ ID NO: 1785525 - RNA, 18 nt, Human
cucccuugggcucccugu

SEQ ID NO: 1785526 - RNA, 19 nt, Human
cucccuguaaccucuucag

SEQ ID NO: 1785527 - RNA, 19 nt, Human
cucccgaguagcugggacu

SEQ ID NO: 1785528 - RNA, 20 nt, Human
cucccgaguagcugggacua

SEQ ID NO: 1785529 - RNA, 22 nt, Human
cuccccagcaagugagagcugg

SEQ ID NO: 1785530 - RNA, 23 nt, Human
cuccccagcaagugagagcuggg

SEQ ID NO: 1785531 - RNA, 21 nt, Human
cucauaguaugguggcugggu

SEQ ID NO: 1785532 - RNA, 22 nt, Human
cucaggugauccacccaccuca

SEQ ID NO: 1785533 - RNA, 20 nt, Human
cucaggugauccacccaccu

SEQ ID NO: 1785534 - RNA, 18 nt, Human
cucaggugauccacccac

SEQ ID NO: 1785535 - RNA, 19 nt, Human
cucaggugauccacccacc

SEQ ID NO: 1785536 - RNA, 23 nt, Human
cucauaguaugguggcuggguug

SEQ ID NO: 1785537 - RNA, 13 nt, Human
cucaucauucucu

SEQ ID NO: 1785538 - RNA, 14 nt, Human
cucaucauucucug

SEQ ID NO: 1785539 - RNA, 15 nt, Human
cucaucauucucugu

SEQ ID NO: 1785540 - RNA, 17 nt, Human
cucaucauucucugucu

SEQ ID NO: 1785541 - RNA, 18 nt, Human
cucaucauucucugucuc

SEQ ID NO: 1785542 - RNA, 19 nt, Human
cucaucauucucugucuca

SEQ ID NO: 1785543 - RNA, 20 nt, Human
cucaucauucucugucucau

SEQ ID NO: 1785544 - RNA, 22 nt, Human
cucaucauucucugucucaucc

SEQ ID NO: 1785545 - RNA, 22 nt, Human
cucaucccgagcaccuccacau

SEQ ID NO: 1785546 - RNA, 18 nt, Human
cucagcauccuggcaccc

SEQ ID NO: 1785547 - RNA, 14 nt, Human
cucaggcaccaguc

SEQ ID NO: 1785548 - RNA, 13 nt, Human
cucagggcuccug

SEQ ID NO: 1785549 - RNA, 14 nt, Human
cucagggcuccugg

SEQ ID NO: 1785550 - RNA, 15 nt, Human
cucagggcuccuggg

SEQ ID NO: 1785551 - RNA, 17 nt, Human
cucagggcuccuggguu

SEQ ID NO: 1785552 - RNA, 15 nt, Human
cuccacguucugcuc

SEQ ID NO: 1785553 - RNA, 16 nt, Human
cuccacguucugcuca

SEQ ID NO: 1785554 - RNA, 17 nt, Human
cuccacguucugcucau

SEQ ID NO: 1785555 - RNA, 18 nt, Human
cuccacguucugcucauc

SEQ ID NO: 1785556 - RNA, 14 nt, Human
cuccagcucaccag

SEQ ID NO: 1785557 - RNA, 15 nt, Human
cuccaggaagaaaga

SEQ ID NO: 1785558 - RNA, 11 nt, Human
cuccaggagcu

SEQ ID NO: 1785559 - RNA, 17 nt, Human
cuccaggagcuucuugu

SEQ ID NO: 1785560 - RNA, 20 nt, Human
cuccauccacaugggagccg

SEQ ID NO: 1785561 - RNA, 23 nt, Human
cuccaucccccuuuacccucuuu

SEQ ID NO: 1785562 - RNA, 15 nt, Human
cuccacccugcucuc

SEQ ID NO: 1785563 - RNA, 13 nt, Human
cuccacccugcuc

SEQ ID NO: 1785564 - RNA, 14 nt, Human
cuccacauccucca

SEQ ID NO: 1785565 - RNA, 15 nt, Human
cuccacauccuccac

SEQ ID NO: 1785566 - RNA, 17 nt, Human
cuccacauccuccacgu

SEQ ID NO: 1785567 - RNA, 17 nt, Human
cuccacaaccucuuccc

SEQ ID NO: 1785568 - RNA, 22 nt, Human
cuccacaaccucuuccccccaa

SEQ ID NO: 1785569 - RNA, 13 nt, Human
cuccacauccucc

SEQ ID NO: 1785570 - RNA, 17 nt, Human
cucauuugucacacacu

SEQ ID NO: 1785571 - RNA, 11 nt, Human
cucauuaaauu

SEQ ID NO: 1785572 - RNA, 15 nt, Human
cucauuaaugacacu

SEQ ID NO: 1785573 - RNA, 16 nt, Human
cucauuaaugacacuu

SEQ ID NO: 1785574 - RNA, 18 nt, Human
cucauuugucacacacuu

SEQ ID NO: 1785575 - RNA, 16 nt, Human
cuccaaaaaucugccu

SEQ ID NO: 1785576 - RNA, 17 nt, Human
cuccaaaaaucugccug

SEQ ID NO: 1785577 - RNA, 18 nt, Human
cuccaaaaaucugccugg

SEQ ID NO: 1785578 - RNA, 19 nt, Human
cuccaaaaaucugccuggg

SEQ ID NO: 1785579 - RNA, 20 nt, Human
cuccaaaaaucugccugggu

SEQ ID NO: 1785580 - RNA, 21 nt, Human
cuccaaaaaucugccuggguu

SEQ ID NO: 1785581 - RNA, 18 nt, Human
cuaugggacucaaugcac

SEQ ID NO: 1785582 - RNA, 22 nt, Human
cuaugggacucaaugcacugac

SEQ ID NO: 1785583 - RNA, 23 nt, Human
cuaugggacucaaugcacugaca

SEQ ID NO: 1785584 - RNA, 21 nt, Human
cuauggguuuaguuacuuuag

SEQ ID NO: 1785585 - RNA, 22 nt, Human
cuauucaagaggaaaugucaca

SEQ ID NO: 1785586 - RNA, 23 nt, Human
cuauucaagaggaaaugucacag

SEQ ID NO: 1785587 - RNA, 17 nt, Human
cuaugcuuuccaaaccu

SEQ ID NO: 1785588 - RNA, 16 nt, Human
cuauaaggcagccuug

SEQ ID NO: 1785589 - RNA, 23 nt, Human
cuagugcuuuccuuuuuuaaaaa

SEQ ID NO: 1785590 - RNA, 21 nt, Human
cuagugcuuuccuuuuuuaaa

SEQ ID NO: 1785591 - RNA, 22 nt, Human
cuagugcuuuccuuuuuuaaaa

SEQ ID NO: 1785592 - RNA, 13 nt, Human
cuagugcuuuccu

SEQ ID NO: 1785593 - RNA, 17 nt, Human
cuauagccuaggugaca

SEQ ID NO: 1785594 - RNA, 23 nt, Human
cgcccaguuggguggaugccugg

SEQ ID NO: 1785595 - RNA, 14 nt, Human
cgcccaucucagga

SEQ ID NO: 1785596 - RNA, 22 nt, Human
cgcccaguuggguggaugccug

SEQ ID NO: 1785597 - RNA, 18 nt, Human
cgccagggagaccuggac

SEQ ID NO: 1785598 - RNA, 14 nt, Human
cuaggugacagagu

SEQ ID NO: 1785599 - RNA, 18 nt, Human
cuaggugacagagugaga

SEQ ID NO: 1785600 - RNA, 15 nt, Human
cuagguaggguuuaa

SEQ ID NO: 1785601 - RNA, 24 nt, Human
cuaggugacagagugagacucugu

SEQ ID NO: 1785602 - RNA, 18 nt, Human
cuaguaagcaucuacuuc

SEQ ID NO: 1785603 - RNA, 15 nt, Human
cuaguacuagaaacu

SEQ ID NO: 1785604 - RNA, 17 nt, Human
cuagugaaggcuucucu

SEQ ID NO: 1785605 - RNA, 21 nt, Human
cuagugaaggcuucucucugu

SEQ ID NO: 1785606 - RNA, 19 nt, Human
cucaagaagaagaggggca

SEQ ID NO: 1785607 - RNA, 20 nt, Human
cucaagaagaagaggggcau

SEQ ID NO: 1785608 - RNA, 17 nt, Human
cucaagugauucuccug

SEQ ID NO: 1785609 - RNA, 21 nt, Human
cucaaguccucuuuucugaga

SEQ ID NO: 1785610 - RNA, 17 nt, Human
cucaccagccccagugc

SEQ ID NO: 1785611 - RNA, 18 nt, Human
cucaccagccccagugcc

SEQ ID NO: 1785612 - RNA, 13 nt, Human
cucaccagcccca

SEQ ID NO: 1785613 - RNA, 14 nt, Human
cucaccagccccag

SEQ ID NO: 1785614 - RNA, 15 nt, Human
cucaccagccccagu

SEQ ID NO: 1785615 - RNA, 22 nt, Human
cucacauuuauucugcucacau

SEQ ID NO: 1785616 - RNA, 15 nt, Human
cucacauuuauucug

SEQ ID NO: 1785617 - RNA, 19 nt, Human
cucacauuuauucugcuca

SEQ ID NO: 1785618 - RNA, 13 nt, Human
cucaaccuccugg

SEQ ID NO: 1785619 - RNA, 15 nt, Human
cucaaccuccugggc

SEQ ID NO: 1785620 - RNA, 17 nt, Human
cucaaccuccugggcua

SEQ ID NO: 1785621 - RNA, 19 nt, Human
cuauuucaguguuaccugu

SEQ ID NO: 1785622 - RNA, 21 nt, Human
cuauuucaguguuaccugugu

SEQ ID NO: 1785623 - RNA, 21 nt, Human
cucacuguugcccaggcuggc

SEQ ID NO: 1785624 - RNA, 22 nt, Human
cucacuguugcccaggcuggcg

SEQ ID NO: 1785625 - RNA, 17 nt, Human
cucagacuuuggaaaau

SEQ ID NO: 1785626 - RNA, 22 nt, Human
cucagacuuuggaaaaugcauu

SEQ ID NO: 1785627 - RNA, 20 nt, Human
cucacuguugcccaggcugg

SEQ ID NO: 1785628 - RNA, 16 nt, Human
cucagcauccuggcac

SEQ ID NO: 1785629 - RNA, 17 nt, Human
cucagcauccuggcacc

SEQ ID NO: 1785630 - RNA, 19 nt, Human
cucacuauguugcccaggc

SEQ ID NO: 1785631 - RNA, 20 nt, Human
cucacuauguugcccaggca

SEQ ID NO: 1785632 - RNA, 14 nt, Human
cucacucccaccug

SEQ ID NO: 1785633 - RNA, 23 nt, Human
cucacuauguugcccaggcaggu

SEQ ID NO: 1785634 - RNA, 14 nt, Human
cucacucaccuuca

SEQ ID NO: 1785635 - RNA, 21 nt, Human
cucacuauguugcccaggcag

SEQ ID NO: 1785636 - RNA, 22 nt, Human
cucacuauguugcccaggcagg

SEQ ID NO: 1785637 - RNA, 11 nt, Human
cucacucuguc

SEQ ID NO: 1785638 - RNA, 12 nt, Human
cucacucugucg

SEQ ID NO: 1785639 - RNA, 22 nt, Human
cucacucugucgcccagucugg

SEQ ID NO: 1785640 - RNA, 13 nt, Human
cucacucugucgc

SEQ ID NO: 1785641 - RNA, 21 nt, Human
cucacucugucgcccagucug

SEQ ID NO: 1785642 - RNA, 12 nt, Human
cucacugcagcc

SEQ ID NO: 1785643 - RNA, 13 nt, Human
cucacugcagccu

SEQ ID NO: 1785644 - RNA, 14 nt, Human
cucacugcagccuc

SEQ ID NO: 1785645 - RNA, 14 nt, Human
gagggacgccuggg

SEQ ID NO: 1785646 - RNA, 15 nt, Human
gagggacgccugggg

SEQ ID NO: 1785647 - RNA, 16 nt, Human
gagggacgccuggggg

SEQ ID NO: 1785648 - RNA, 23 nt, Human
gagggacgccugggggugccagg

SEQ ID NO: 1785649 - RNA, 19 nt, Human
gagggaacggaaauaaagg

SEQ ID NO: 1785650 - RNA, 13 nt, Human
gagggagugacag

SEQ ID NO: 1785651 - RNA, 14 nt, Human
gagggagugacaga

SEQ ID NO: 1785652 - RNA, 16 nt, Human
gagggagugacagagg

SEQ ID NO: 1785653 - RNA, 14 nt, Human
gaggccuucucuga

SEQ ID NO: 1785654 - RNA, 16 nt, Human
gaggcccuuugcuguc

SEQ ID NO: 1785655 - RNA, 17 nt, Human
gaggcccuuugcugucc

SEQ ID NO: 1785656 - RNA, 17 nt, Human
gaggcccucgcugccag

SEQ ID NO: 1785657 - RNA, 19 nt, Human
gaggccagggcagagugag

SEQ ID NO: 1785658 - RNA, 15 nt, Human
gaggccagugagcca

SEQ ID NO: 1785659 - RNA, 12 nt, Human
gaggauguucug

SEQ ID NO: 1785660 - RNA, 17 nt, Human
gaggauguucugggaca

SEQ ID NO: 1785661 - RNA, 20 nt, Human
gaggauguucugggacacag

SEQ ID NO: 1785662 - RNA, 17 nt, Human
gaggaugggucagagcu

SEQ ID NO: 1785663 - RNA, 14 nt, Human
gaggaguggaggug

SEQ ID NO: 1785664 - RNA, 19 nt, Human
gaggaggggccccccugcc

SEQ ID NO: 1785665 - RNA, 21 nt, Human
gaggaggggccccccugcccu

SEQ ID NO: 1785666 - RNA, 22 nt, Human
gaggaggggccccccugcccug

SEQ ID NO: 1785667 - RNA, 13 nt, Human
gaggcagccccau

SEQ ID NO: 1785668 - RNA, 13 nt, Human
gaggcagcagugu

SEQ ID NO: 1785669 - RNA, 20 nt, Human
gaggcagcagugugaggcca

SEQ ID NO: 1785670 - RNA, 21 nt, Human
gaggcagcagugugaggccag

SEQ ID NO: 1785671 - RNA, 22 nt, Human
gaggcagcagugugaggccagg

SEQ ID NO: 1785672 - RNA, 23 nt, Human
gaggcagccccauucugccugcc

SEQ ID NO: 1785673 - RNA, 18 nt, Human
gaggcagccccauucugc

SEQ ID NO: 1785674 - RNA, 22 nt, Human
gaggcagccccauucugccugc

SEQ ID NO: 1785675 - RNA, 13 nt, Human
gaggccagggcag

SEQ ID NO: 1785676 - RNA, 15 nt, Human
gaggccagggcagag

SEQ ID NO: 1785677 - RNA, 13 nt, Human
gaggacagggagg

SEQ ID NO: 1785678 - RNA, 22 nt, Human
gaggacagggaggugaccccag

SEQ ID NO: 1785679 - RNA, 23 nt, Human
gaggacagggaggugaccccagg

SEQ ID NO: 1785680 - RNA, 18 nt, Human
gaggaggcuccagagggc

SEQ ID NO: 1785681 - RNA, 22 nt, Human
gagcuucuuccaggugcccagc

SEQ ID NO: 1785682 - RNA, 18 nt, Human
gagcuucuuguuuccuug

SEQ ID NO: 1785683 - RNA, 14 nt, Human
gaggaauccagacc

SEQ ID NO: 1785684 - RNA, 19 nt, Human
gaggaaggggccagaggcu

SEQ ID NO: 1785685 - RNA, 13 nt, Human
gaggaaguucaga

SEQ ID NO: 1785686 - RNA, 14 nt, Human
gaggaaguucagau

SEQ ID NO: 1785687 - RNA, 17 nt, Human
gaggaaguucagaucuu

SEQ ID NO: 1785688 - RNA, 15 nt, Human
gaggaauccagaccc

SEQ ID NO: 1785689 - RNA, 14 nt, Human
gaggaauggacaga

SEQ ID NO: 1785690 - RNA, 18 nt, Human
gagcccugguggcagugg

SEQ ID NO: 1785691 - RNA, 20 nt, Human
gagccucagcauccuggcac

SEQ ID NO: 1785692 - RNA, 21 nt, Human
gagccucagcauccuggcacc

SEQ ID NO: 1785693 - RNA, 15 nt, Human
gagcccugguggcag

SEQ ID NO: 1785694 - RNA, 16 nt, Human
gagcccugguggcagu

SEQ ID NO: 1785695 - RNA, 19 nt, Human
gagccucagcauccuggca

SEQ ID NO: 1785696 - RNA, 17 nt, Human
gagcccugguggcagug

SEQ ID NO: 1785697 - RNA, 12 nt, Human
gagccugcugga

SEQ ID NO: 1785698 - RNA, 15 nt, Human
gagccugcuggaagc

SEQ ID NO: 1785699 - RNA, 16 nt, Human
gagccugcuggaagcc

SEQ ID NO: 1785700 - RNA, 20 nt, Human
gagccugcuggaagcccagc

SEQ ID NO: 1785701 - RNA, 15 nt, Human
gagccuggccagccu

SEQ ID NO: 1785702 - RNA, 13 nt, Human
gagcuacaaaugc

SEQ ID NO: 1785703 - RNA, 12 nt, Human
gagcuacaaaug

SEQ ID NO: 1785704 - RNA, 16 nt, Human
gagcuucauggcagaa

SEQ ID NO: 1785705 - RNA, 16 nt, Human
gagcuuagcauaucug

SEQ ID NO: 1785706 - RNA, 19 nt, Human
gagcuucauggcagaaggc

SEQ ID NO: 1785707 - RNA, 13 nt, Human
gagcuucccugac

SEQ ID NO: 1785708 - RNA, 17 nt, Human
gagcuucccugacucau

SEQ ID NO: 1785709 - RNA, 19 nt, Human
gagcuuccuguccucccag

SEQ ID NO: 1785710 - RNA, 18 nt, Human
gagcuaaacuccuuccug

SEQ ID NO: 1785711 - RNA, 19 nt, Human
gagcuaaacuccuuccugg

SEQ ID NO: 1785712 - RNA, 20 nt, Human
gagcuaaacuccuuccuggc

SEQ ID NO: 1785713 - RNA, 22 nt, Human
gagcuaaacuccuuccuggccu

SEQ ID NO: 1785714 - RNA, 14 nt, Human
gagcuacaaaugca

SEQ ID NO: 1785715 - RNA, 22 nt, Human
gagcuaauuuacuggacaaaga

SEQ ID NO: 1785716 - RNA, 18 nt, Human
gagcuccaacucagaagg

SEQ ID NO: 1785717 - RNA, 19 nt, Human
gagcuccaacucagaaggg

SEQ ID NO: 1785718 - RNA, 20 nt, Human
gagaucaaccccuucgcucc

SEQ ID NO: 1785719 - RNA, 14 nt, Human
gagcacccucugga

SEQ ID NO: 1785720 - RNA, 15 nt, Human
gagcacccucuggau

SEQ ID NO: 1785721 - RNA, 14 nt, Human
gagcaccuccacau

SEQ ID NO: 1785722 - RNA, 18 nt, Human
gagcaccgugucaagcug

SEQ ID NO: 1785723 - RNA, 21 nt, Human
gagcaccgugucaagcugcuc

SEQ ID NO: 1785724 - RNA, 22 nt, Human
gagcaccgugucaagcugcucu

SEQ ID NO: 1785725 - RNA, 23 nt, Human
gagcaccgugucaagcugcucug

SEQ ID NO: 1785726 - RNA, 19 nt, Human
gagcaccuccacauccucc

SEQ ID NO: 1785727 - RNA, 17 nt, Human
gagcaccuccagccuga

SEQ ID NO: 1785728 - RNA, 13 nt, Human
gagcacacccagc

SEQ ID NO: 1785729 - RNA, 15 nt, Human
gagcacacccagccc

SEQ ID NO: 1785730 - RNA, 16 nt, Human
gagcacacccagcccc

SEQ ID NO: 1785731 - RNA, 22 nt, Human
gagccacugcaccgggccacag

SEQ ID NO: 1785732 - RNA, 14 nt, Human
gagccacuccucug

SEQ ID NO: 1785733 - RNA, 15 nt, Human
gagccacuccucuga

SEQ ID NO: 1785734 - RNA, 14 nt, Human
gagcccaagggaau

SEQ ID NO: 1785735 - RNA, 13 nt, Human
gagccaccugccc

SEQ ID NO: 1785736 - RNA, 15 nt, Human
gagccacuccggccc

SEQ ID NO: 1785737 - RNA, 13 nt, Human
gagccacugcacc

SEQ ID NO: 1785738 - RNA, 21 nt, Human
gagcagcagguagccugcugg

SEQ ID NO: 1785739 - RNA, 16 nt, Human
gagcagaggggcugaa

SEQ ID NO: 1785740 - RNA, 14 nt, Human
gagcacugggcucc

SEQ ID NO: 1785741 - RNA, 22 nt, Human
gagucucacuguugcccaggcu

SEQ ID NO: 1785742 - RNA, 23 nt, Human
gagucucacuguugcccaggcug

SEQ ID NO: 1785743 - RNA, 19 nt, Human
gagucucacuguugcccag

SEQ ID NO: 1785744 - RNA, 20 nt, Human
gagucucacuguugcccagg

SEQ ID NO: 1785745 - RNA, 21 nt, Human
gagucucacuguugcccaggc

SEQ ID NO: 1785746 - RNA, 17 nt, Human
gagucgaggacagggag

SEQ ID NO: 1785747 - RNA, 12 nt, Human
gaguagcuggga

SEQ ID NO: 1785748 - RNA, 14 nt, Human
gaguagcugggacu

SEQ ID NO: 1785749 - RNA, 14 nt, Human
gauauaaucuuuca

SEQ ID NO: 1785750 - RNA, 16 nt, Human
gauauaaucuuucaaa

SEQ ID NO: 1785751 - RNA, 21 nt, Human
gaucaaccccuucgcuccugu

SEQ ID NO: 1785752 - RNA, 22 nt, Human
gaucaaccccuucgcuccugug

SEQ ID NO: 1785753 - RNA, 11 nt, Human
gauacaauaaa

SEQ ID NO: 1785754 - RNA, 12 nt, Human
gauacaauaaau

SEQ ID NO: 1785755 - RNA, 13 nt, Human
gagugucuuucca

SEQ ID NO: 1785756 - RNA, 15 nt, Human
gagugucuuuccacg

SEQ ID NO: 1785757 - RNA, 19 nt, Human
gagugucuuuccacggagc

SEQ ID NO: 1785758 - RNA, 21 nt, Human
gagugucuuuccacggagcca

SEQ ID NO: 1785759 - RNA, 17 nt, Human
gagucuggcccuagacu

SEQ ID NO: 1785760 - RNA, 22 nt, Human
gagugucuuuccacggagccac

SEQ ID NO: 1785761 - RNA, 14 nt, Human
gaguuagacuguug

SEQ ID NO: 1785762 - RNA, 12 nt, Human
gaguuagacugu

SEQ ID NO: 1785763 - RNA, 16 nt, Human
gaguuuuggaugcagu

SEQ ID NO: 1785764 - RNA, 21 nt, Human
gaguugaaaaucuuauaauuu

SEQ ID NO: 1785765 - RNA, 12 nt, Human
gaguuccaguca

SEQ ID NO: 1785766 - RNA, 15 nt, Human
gaugguggagggcca

SEQ ID NO: 1785767 - RNA, 15 nt, Human
gauggugugccuucc

SEQ ID NO: 1785768 - RNA, 17 nt, Human
gauggugugccuuccag

SEQ ID NO: 1785769 - RNA, 14 nt, Human
gaugguggagggcc

SEQ ID NO: 1785770 - RNA, 16 nt, Human
gauguucugggacaca

SEQ ID NO: 1785771 - RNA, 14 nt, Human
gauucaccugagca

SEQ ID NO: 1785772 - RNA, 22 nt, Human
gauucccaagcucugcuccucu

SEQ ID NO: 1785773 - RNA, 14 nt, Human
gauucacaucugca

SEQ ID NO: 1785774 - RNA, 23 nt, Human
gauucaacuaaaaaaaaaaaagu

SEQ ID NO: 1785775 - RNA, 13 nt, Human
gauucaagccauu

SEQ ID NO: 1785776 - RNA, 17 nt, Human
gauucaagccauuccaa

SEQ ID NO: 1785777 - RNA, 21 nt, Human
gauucaauauugaauuuuucc

SEQ ID NO: 1785778 - RNA, 19 nt, Human
gauucuaauuuuuaagcaa

SEQ ID NO: 1785779 - RNA, 14 nt, Human
gauuccccuguguc

SEQ ID NO: 1785780 - RNA, 15 nt, Human
gauuccccuguguca

SEQ ID NO: 1785781 - RNA, 16 nt, Human
gauuguggaauguugg

SEQ ID NO: 1785782 - RNA, 21 nt, Human
gauuguggaauguuggauaag

SEQ ID NO: 1785783 - RNA, 18 nt, Human
gaucacgauguaaauuau

SEQ ID NO: 1785784 - RNA, 15 nt, Human
gaucacgccacugca

SEQ ID NO: 1785785 - RNA, 23 nt, Human
gaucaaccccuucgcuccugugu

SEQ ID NO: 1785786 - RNA, 13 nt, Human
gaucacgccacug

SEQ ID NO: 1785787 - RNA, 14 nt, Human
gaucacgccacugc

SEQ ID NO: 1785788 - RNA, 19 nt, Human
gauccucccaccucagccu

SEQ ID NO: 1785789 - RNA, 20 nt, Human
gauccucccaccucagccuc

SEQ ID NO: 1785790 - RNA, 21 nt, Human
gauccucccaccucagccucc

SEQ ID NO: 1785791 - RNA, 15 nt, Human
gaucuuaauauaaau

SEQ ID NO: 1785792 - RNA, 16 nt, Human
gaucuuaauauaaauu

SEQ ID NO: 1785793 - RNA, 17 nt, Human
gaucuuugcagacaggc

SEQ ID NO: 1785794 - RNA, 16 nt, Human
gaucuuugcagacagg

SEQ ID NO: 1785795 - RNA, 11 nt, Human
gaugagaaagg

SEQ ID NO: 1785796 - RNA, 22 nt, Human
gaugagaaagguugaagcacca

SEQ ID NO: 1785797 - RNA, 14 nt, Human
gaugcaaagaaaau

SEQ ID NO: 1785798 - RNA, 13 nt, Human
gaugcccugcccu

SEQ ID NO: 1785799 - RNA, 20 nt, Human
gaugcucaaaaucuuuccaa

SEQ ID NO: 1785800 - RNA, 20 nt, Human
gauggcaggacgugggcugg

SEQ ID NO: 1785801 - RNA, 22 nt, Human
gaugggcaacccccagccugcu

SEQ ID NO: 1785802 - RNA, 15 nt, Human
gcagcucagcuuccc

SEQ ID NO: 1785803 - RNA, 21 nt, Human
gcaggaccuucgggcugugcc

SEQ ID NO: 1785804 - RNA, 17 nt, Human
gcaggacgugggcuggg

SEQ ID NO: 1785805 - RNA, 13 nt, Human
gcagcagcccaag

SEQ ID NO: 1785806 - RNA, 14 nt, Human
gcagcagcccaagc

SEQ ID NO: 1785807 - RNA, 20 nt, Human
gcagcagcccaagcuucccu

SEQ ID NO: 1785808 - RNA, 21 nt, Human
gcagcagcccaagcuucccuc

SEQ ID NO: 1785809 - RNA, 16 nt, Human
gcagcaggaggccagg

SEQ ID NO: 1785810 - RNA, 21 nt, Human
gcagcaggaauauaugugugc

SEQ ID NO: 1785811 - RNA, 16 nt, Human
gcagccgcugagcgag

SEQ ID NO: 1785812 - RNA, 17 nt, Human
gcagccgcugagcgagg

SEQ ID NO: 1785813 - RNA, 16 nt, Human
gcagaucuuggacuca

SEQ ID NO: 1785814 - RNA, 18 nt, Human
gcagacugaucaggaccu

SEQ ID NO: 1785815 - RNA, 20 nt, Human
gcagagaaacuuaagcaaag

SEQ ID NO: 1785816 - RNA, 21 nt, Human
gcagagaaacuuaagcaaagg

SEQ ID NO: 1785817 - RNA, 17 nt, Human
gcagagaagcucucggg

SEQ ID NO: 1785818 - RNA, 17 nt, Human
gcagacucuacagaggc

SEQ ID NO: 1785819 - RNA, 18 nt, Human
gcagacucuacagaggcc

SEQ ID NO: 1785820 - RNA, 19 nt, Human
gcagacucuacagaggcca

SEQ ID NO: 1785821 - RNA, 22 nt, Human
gcagacucuacagaggccaugg

SEQ ID NO: 1785822 - RNA, 14 nt, Human
gcacuugcagacuc

SEQ ID NO: 1785823 - RNA, 16 nt, Human
gcacuugcagacucua

SEQ ID NO: 1785824 - RNA, 16 nt, Human
gcaccccuacucacau

SEQ ID NO: 1785825 - RNA, 15 nt, Human
gcaccaagcaggaaa

SEQ ID NO: 1785826 - RNA, 23 nt, Human
gcacagcuucauuuccugugucu

SEQ ID NO: 1785827 - RNA, 21 nt, Human
gcacagcuucauuuccugugu

SEQ ID NO: 1785828 - RNA, 14 nt, Human
gcacgugugugcac

SEQ ID NO: 1785829 - RNA, 20 nt, Human
gcacuaaggugugcucugau

SEQ ID NO: 1785830 - RNA, 14 nt, Human
gcacugggcucccg

SEQ ID NO: 1785831 - RNA, 18 nt, Human
gcacugggcucccgggcc

SEQ ID NO: 1785832 - RNA, 20 nt, Human
gcacuaccacuccugccaag

SEQ ID NO: 1785833 - RNA, 15 nt, Human
gcacuguucccccug

SEQ ID NO: 1785834 - RNA, 18 nt, Human
gcacuguucccccugugc

SEQ ID NO: 1785835 - RNA, 19 nt, Human
gcacuguucccccugugca

SEQ ID NO: 1785836 - RNA, 20 nt, Human
gcacuguucccccugugcag

SEQ ID NO: 1785837 - RNA, 22 nt, Human
gcaggacuuccccggagggcug

SEQ ID NO: 1785838 - RNA, 20 nt, Human
gcaggcagguguuuauuaaa

SEQ ID NO: 1785839 - RNA, 16 nt, Human
gcagggucucacucug

SEQ ID NO: 1785840 - RNA, 13 nt, Human
gcagggcugugcu

SEQ ID NO: 1785841 - RNA, 15 nt, Human
gcagggcugugcuug

SEQ ID NO: 1785842 - RNA, 23 nt, Human
gcagggcugugcuugaaggcccu

SEQ ID NO: 1785843 - RNA, 11 nt, Human
gcagugggagc

SEQ ID NO: 1785844 - RNA, 12 nt, Human
gcagugggagcu

SEQ ID NO: 1785845 - RNA, 18 nt, Human
gcaguggugcgaucuggg

SEQ ID NO: 1785846 - RNA, 19 nt, Human
gcaguggugcgaucugggu

SEQ ID NO: 1785847 - RNA, 22 nt, Human
gcaguggugcgaucuggguuca

SEQ ID NO: 1785848 - RNA, 20 nt, Human
gcaguggugcgaucuggguu

SEQ ID NO: 1785849 - RNA, 21 nt, Human
gcaguggugcgaucuggguuc

SEQ ID NO: 1785850 - RNA, 15 nt, Human
gcaugcccucucagg

SEQ ID NO: 1785851 - RNA, 14 nt, Human
gcauguucucugag

SEQ ID NO: 1785852 - RNA, 16 nt, Human
gcaugcccucucaggc

SEQ ID NO: 1785853 - RNA, 14 nt, Human
gcaugacagccugc

SEQ ID NO: 1785854 - RNA, 15 nt, Human
gcaugacagccugca

SEQ ID NO: 1785855 - RNA, 16 nt, Human
gcaugacagccugcag

SEQ ID NO: 1785856 - RNA, 18 nt, Human
gcaugacagccugcagca

SEQ ID NO: 1785857 - RNA, 23 nt, Human
gcauccacuucuuucagcagacu

SEQ ID NO: 1785858 - RNA, 22 nt, Human
gcauccacuucuuucagcagac

SEQ ID NO: 1785859 - RNA, 12 nt, Human
gcaucuggggcc

SEQ ID NO: 1785860 - RNA, 20 nt, Human
gcaucuggggcccauacugg

SEQ ID NO: 1785861 - RNA, 12 nt, Human
gcaucucccaga

SEQ ID NO: 1785862 - RNA, 13 nt, Human
gcaucucccagau

SEQ ID NO: 1785863 - RNA, 21 nt, Human
gcaucucccagauaaugugaa

SEQ ID NO: 1785864 - RNA, 15 nt, Human
gcccagagagggugg

SEQ ID NO: 1785865 - RNA, 19 nt, Human
gcccagagacccaagcugc

SEQ ID NO: 1785866 - RNA, 20 nt, Human
gcccagcacugcuugaggaa

SEQ ID NO: 1785867 - RNA, 19 nt, Human
gcccagauuccccuguguc

SEQ ID NO: 1785868 - RNA, 20 nt, Human
gcccagauuccccuguguca

SEQ ID NO: 1785869 - RNA, 21 nt, Human
gcccagauuccccugugucau

SEQ ID NO: 1785870 - RNA, 21 nt, Human
gcccagcacugcuugaggaaa

SEQ ID NO: 1785871 - RNA, 17 nt, Human
gcccagccccuacugcu

SEQ ID NO: 1785872 - RNA, 18 nt, Human
gcccagccccuacugcug

SEQ ID NO: 1785873 - RNA, 19 nt, Human
gcccagccccuacugcugu

SEQ ID NO: 1785874 - RNA, 20 nt, Human
gcccagccccuacugcugug

SEQ ID NO: 1785875 - RNA, 21 nt, Human
gcccagccccuacugcuguga

SEQ ID NO: 1785876 - RNA, 18 nt, Human
gcccagcuauaccugugc

SEQ ID NO: 1785877 - RNA, 19 nt, Human
gcccagcuauaccugugcc

SEQ ID NO: 1785878 - RNA, 22 nt, Human
gcccaggcuggcgugcaguggu

SEQ ID NO: 1785879 - RNA, 19 nt, Human
gcccaggcuggcgugcagu

SEQ ID NO: 1785880 - RNA, 20 nt, Human
gcccaggcuggcgugcagug

SEQ ID NO: 1785881 - RNA, 19 nt, Human
gcccagucuggaaugcagu

SEQ ID NO: 1785882 - RNA, 20 nt, Human
gcccagucuggaaugcagug

SEQ ID NO: 1785883 - RNA, 15 nt, Human
gcccaguugggugga

SEQ ID NO: 1785884 - RNA, 17 nt, Human
gccagguuuuuggucug

SEQ ID NO: 1785885 - RNA, 21 nt, Human
gccagggagaccuggacacag

SEQ ID NO: 1785886 - RNA, 22 nt, Human
gccagggagaccuggacacagg

SEQ ID NO: 1785887 - RNA, 15 nt, Human
gccagggcagaguga

SEQ ID NO: 1785888 - RNA, 16 nt, Human
gccagggcagagugag

SEQ ID NO: 1785889 - RNA, 21 nt, Human
gccagggcagagugagaccca

SEQ ID NO: 1785890 - RNA, 14 nt, Human
gccagggcagggcc

SEQ ID NO: 1785891 - RNA, 19 nt, Human
gccagggcagggccccagg

SEQ ID NO: 1785892 - RNA, 15 nt, Human
gccagggagaccugg

SEQ ID NO: 1785893 - RNA, 18 nt, Human
gccagggagaccuggaca

SEQ ID NO: 1785894 - RNA, 19 nt, Human
gccagggagaccuggacac

SEQ ID NO: 1785895 - RNA, 18 nt, Human
gccaucucaugaggggag

SEQ ID NO: 1785896 - RNA, 19 nt, Human
gccaucucaugaggggaga

SEQ ID NO: 1785897 - RNA, 20 nt, Human
gccaucucaugaggggagag

SEQ ID NO: 1785898 - RNA, 21 nt, Human
gccaucucaugaggggagagg

SEQ ID NO: 1785899 - RNA, 15 nt, Human
gccagugagccacuc

SEQ ID NO: 1785900 - RNA, 18 nt, Human
gccauuuuucaaagcaau

SEQ ID NO: 1785901 - RNA, 19 nt, Human
gccauuuuucaaagcaauu

SEQ ID NO: 1785902 - RNA, 13 nt, Human
gcccaaaauuuau

SEQ ID NO: 1785903 - RNA, 15 nt, Human
gcccaaaauuuauuu

SEQ ID NO: 1785904 - RNA, 21 nt, Human
gcccaaaauuuauuuuauaag

SEQ ID NO: 1785905 - RNA, 23 nt, Human
gcccaaaauuuauuuuauaagaa

SEQ ID NO: 1785906 - RNA, 17 nt, Human
gccauggaacuguuucc

SEQ ID NO: 1785907 - RNA, 22 nt, Human
gccauggaagaggcuacagggc

SEQ ID NO: 1785908 - RNA, 19 nt, Human
gccacggccaggccagagg

SEQ ID NO: 1785909 - RNA, 20 nt, Human
gccacuaagaaccccucugc

SEQ ID NO: 1785910 - RNA, 18 nt, Human
gccacggccaggccagag

SEQ ID NO: 1785911 - RNA, 17 nt, Human
gccacggccaggccaga

SEQ ID NO: 1785912 - RNA, 15 nt, Human
gccacagugggauga

SEQ ID NO: 1785913 - RNA, 20 nt, Human
gccacagugggaugaaccag

SEQ ID NO: 1785914 - RNA, 11 nt, Human
gccaccugccc

SEQ ID NO: 1785915 - RNA, 21 nt, Human
gccagagggagugacagaggc

SEQ ID NO: 1785916 - RNA, 22 nt, Human
gccagagggagugacagaggca

SEQ ID NO: 1785917 - RNA, 23 nt, Human
gccagagggagugacagaggcag

SEQ ID NO: 1785918 - RNA, 16 nt, Human
gccagaugcaccagcc

SEQ ID NO: 1785919 - RNA, 17 nt, Human
gccagaugcaccagccc

SEQ ID NO: 1785920 - RNA, 18 nt, Human
gccagaugcaccagcccu

SEQ ID NO: 1785921 - RNA, 23 nt, Human
gccacuccucugacucagggcuc

SEQ ID NO: 1785922 - RNA, 18 nt, Human
gccaaucugcaauuucua

SEQ ID NO: 1785923 - RNA, 16 nt, Human
gccaagggcuuuguuu

SEQ ID NO: 1785924 - RNA, 13 nt, Human
gccaauuccuaua

SEQ ID NO: 1785925 - RNA, 20 nt, Human
gccaauuauguuaaacuagc

SEQ ID NO: 1785926 - RNA, 19 nt, Human
gccaauuauguuaaacuag

SEQ ID NO: 1785927 - RNA, 17 nt, Human
gccaauuauguuaaacu

SEQ ID NO: 1785928 - RNA, 16 nt, Human
gccaauuauguuaaac

SEQ ID NO: 1785929 - RNA, 15 nt, Human
gccaauuauguuaaa

SEQ ID NO: 1785930 - RNA, 14 nt, Human
gccaauuauguuaa

SEQ ID NO: 1785931 - RNA, 20 nt, Human
gccacaaugcaguucugagc

SEQ ID NO: 1785932 - RNA, 21 nt, Human
gccacaaugcaguucugagca

SEQ ID NO: 1785933 - RNA, 23 nt, Human
gccacagagaaaguacuucucca

SEQ ID NO: 1785934 - RNA, 21 nt, Human
gccacagccuccccugccagg

SEQ ID NO: 1785935 - RNA, 16 nt, Human
gccacagccuccccug

SEQ ID NO: 1785936 - RNA, 11 nt, Human
gccacaggacc

SEQ ID NO: 1785937 - RNA, 12 nt, Human
gccacaggaccc

SEQ ID NO: 1785938 - RNA, 13 nt, Human
gccacagagaaag

SEQ ID NO: 1785939 - RNA, 14 nt, Human
gccacagagaaagu

SEQ ID NO: 1785940 - RNA, 20 nt, Human
gccacagagaaaguacuucu

SEQ ID NO: 1785941 - RNA, 11 nt, Human
ggacagcuccu

SEQ ID NO: 1785942 - RNA, 15 nt, Human
ggacagcuccuucug

SEQ ID NO: 1785943 - RNA, 16 nt, Human
ggacagcuccuucugu

SEQ ID NO: 1785944 - RNA, 17 nt, Human
ggacagcuccuucuguc

SEQ ID NO: 1785945 - RNA, 15 nt, Human
ggaccagccagcagc

SEQ ID NO: 1785946 - RNA, 23 nt, Human
ggaccagccagcagcagcccaag

SEQ ID NO: 1785947 - RNA, 18 nt, Human
ggaccuugaacuggguac

SEQ ID NO: 1785948 - RNA, 16 nt, Human
ggaccuuuugggggag

SEQ ID NO: 1785949 - RNA, 22 nt, Human
ggacgcagcaggaggccaggcc

SEQ ID NO: 1785950 - RNA, 19 nt, Human
ggaccagucaaccugggca

SEQ ID NO: 1785951 - RNA, 23 nt, Human
ggaccaugcgacacugggaggcc

SEQ ID NO: 1785952 - RNA, 23 nt, Human
ggacgcagcaggaggccaggccg

SEQ ID NO: 1785953 - RNA, 12 nt, Human
ggagacaggcag

SEQ ID NO: 1785954 - RNA, 12 nt, Human
ggagcuagccag

SEQ ID NO: 1785955 - RNA, 15 nt, Human
ggagcuagccagagg

SEQ ID NO: 1785956 - RNA, 20 nt, Human
ggagcuccaacucagaaggg

SEQ ID NO: 1785957 - RNA, 13 nt, Human
ggagcacugggcu

SEQ ID NO: 1785958 - RNA, 15 nt, Human
ggagcacugggcucc

SEQ ID NO: 1785959 - RNA, 18 nt, Human
ggagccgggucugccucu

SEQ ID NO: 1785960 - RNA, 17 nt, Human
ggagccgggucugccuc

SEQ ID NO: 1785961 - RNA, 14 nt, Human
ggagcacacccagc

SEQ ID NO: 1785962 - RNA, 15 nt, Human
ggagcacacccagcc

SEQ ID NO: 1785963 - RNA, 17 nt, Human
ggagcacacccagcccc

SEQ ID NO: 1785964 - RNA, 17 nt, Human
ggagacaggcagagcug

SEQ ID NO: 1785965 - RNA, 22 nt, Human
ggagucccaccuuggcugcagg

SEQ ID NO: 1785966 - RNA, 19 nt, Human
ggagggccacaugggaggc

SEQ ID NO: 1785967 - RNA, 23 nt, Human
ggagggccacaugggaggcucac

SEQ ID NO: 1785968 - RNA, 18 nt, Human
ggaggauguucugggaca

SEQ ID NO: 1785969 - RNA, 21 nt, Human
ggaggauguucugggacacag

SEQ ID NO: 1785970 - RNA, 20 nt, Human
ggcauguucucugaggacac

SEQ ID NO: 1785971 - RNA, 19 nt, Human
ggcaguauuuuguguccuc

SEQ ID NO: 1785972 - RNA, 19 nt, Human
ggcagucgauagagcugua

SEQ ID NO: 1785973 - RNA, 16 nt, Human
ggcaugauccaagcaa

SEQ ID NO: 1785974 - RNA, 18 nt, Human
ggcaugauccaagcaaga

SEQ ID NO: 1785975 - RNA, 15 nt, Human
ggcaugauccaagca

SEQ ID NO: 1785976 - RNA, 17 nt, Human
ggcagggucucacucug

SEQ ID NO: 1785977 - RNA, 18 nt, Human
ggcagggucucacucugu

SEQ ID NO: 1785978 - RNA, 23 nt, Human
ggcagcugcgguccacccaggag

SEQ ID NO: 1785979 - RNA, 24 nt, Human
ggcagcugcgguccacccaggagc

SEQ ID NO: 1785980 - RNA, 21 nt, Human
ggcagcugcgguccacccagg

SEQ ID NO: 1785981 - RNA, 21 nt, Human
ggauuagguuucagcagagcu

SEQ ID NO: 1785982 - RNA, 18 nt, Human
ggaugccugguggcagcu

SEQ ID NO: 1785983 - RNA, 19 nt, Human
ggaugccugguggcagcug

SEQ ID NO: 1785984 - RNA, 20 nt, Human
ggaugccugguggcagcugc

SEQ ID NO: 1785985 - RNA, 21 nt, Human
ggaugccugguggcagcugcg

SEQ ID NO: 1785986 - RNA, 16 nt, Human
ggauucucuaaccuuu

SEQ ID NO: 1785987 - RNA, 13 nt, Human
ggaugccuggugg

SEQ ID NO: 1785988 - RNA, 17 nt, Human
ggaugccugguggcagc

SEQ ID NO: 1785989 - RNA, 23 nt, Human
ggagucccaccuuggcugcaggg

SEQ ID NO: 1785990 - RNA, 22 nt, Human
ggaugagaguuuuggaugcagu

SEQ ID NO: 1785991 - RNA, 20 nt, Human
ggaugagaguuuuggaugca

SEQ ID NO: 1785992 - RNA, 20 nt, Human
ggcacccaccaucaugucug

SEQ ID NO: 1785993 - RNA, 18 nt, Human
ggcacccggccccugcug

SEQ ID NO: 1785994 - RNA, 19 nt, Human
ggcacccggccccugcugg

SEQ ID NO: 1785995 - RNA, 20 nt, Human
ggcacccggccccugcuggu

SEQ ID NO: 1785996 - RNA, 18 nt, Human
ggcacucagaagacacug

SEQ ID NO: 1785997 - RNA, 19 nt, Human
ggcacucagaagacacuga

SEQ ID NO: 1785998 - RNA, 20 nt, Human
ggcacucagaagacacugau

SEQ ID NO: 1785999 - RNA, 12 nt, Human
ggcagagcccaa

SEQ ID NO: 1786000 - RNA, 16 nt, Human
ggcagagcccaaggga

SEQ ID NO: 1786001 - RNA, 14 nt, Human
ggcagagcugcauc

SEQ ID NO: 1786002 - RNA, 18 nt, Human
ggcagagcugcuccccuc

SEQ ID NO: 1786003 - RNA, 15 nt, Human
ggcagaguccuggag

SEQ ID NO: 1786004 - RNA, 14 nt, Human
ggcaccagucccug

SEQ ID NO: 1786005 - RNA, 15 nt, Human
ggcaccagucccugu

SEQ ID NO: 1786006 - RNA, 17 nt, Human
ggcaccagucccugucc

SEQ ID NO: 1786007 - RNA, 18 nt, Human
ggcaccagucccuguccg

SEQ ID NO: 1786008 - RNA, 18 nt, Human
ggcacccaagaccucagg

SEQ ID NO: 1786009 - RNA, 22 nt, Human
ggcacccaagaccucagggcac

SEQ ID NO: 1786010 - RNA, 18 nt, Human
ggcaagcaccuccugccu

SEQ ID NO: 1786011 - RNA, 19 nt, Human
ggcaagcaccuccugccuc

SEQ ID NO: 1786012 - RNA, 16 nt, Human
ggcaagcauguaacuu

SEQ ID NO: 1786013 - RNA, 21 nt, Human
ggcaagcauguaacuuauauu

SEQ ID NO: 1786014 - RNA, 14 nt, Human
ggcaagcuccgcag

SEQ ID NO: 1786015 - RNA, 18 nt, Human
ggcaagcuccgcaggacu

SEQ ID NO: 1786016 - RNA, 17 nt, Human
ggcaagcaccuccugcc

SEQ ID NO: 1786017 - RNA, 13 nt, Human
ggauugagucugu

SEQ ID NO: 1786018 - RNA, 17 nt, Human
ggccggcgagcccugug

SEQ ID NO: 1786019 - RNA, 18 nt, Human
ggccggcgagcccugugg

SEQ ID NO: 1786020 - RNA, 19 nt, Human
ggccuaaauuuauuaaaua

SEQ ID NO: 1786021 - RNA, 15 nt, Human
ggccggcgagcccug

SEQ ID NO: 1786022 - RNA, 14 nt, Human
ggccucaagugauu

SEQ ID NO: 1786023 - RNA, 22 nt, Human
ggccucaagugauucuccugcc

SEQ ID NO: 1786024 - RNA, 23 nt, Human
ggccucaagugauucuccugccu

SEQ ID NO: 1786025 - RNA, 17 nt, Human
ggccucaacuccuccca

SEQ ID NO: 1786026 - RNA, 18 nt, Human
ggccucaacuccucccau

SEQ ID NO: 1786027 - RNA, 20 nt, Human
ggccucaacuccucccauag

SEQ ID NO: 1786028 - RNA, 14 nt, Human
ggccuccugugugu

SEQ ID NO: 1786029 - RNA, 15 nt, Human
ggccugagccuggcc

SEQ ID NO: 1786030 - RNA, 16 nt, Human
ggccugagccuggcca

SEQ ID NO: 1786031 - RNA, 15 nt, Human
ggccugagagucagc

SEQ ID NO: 1786032 - RNA, 18 nt, Human
ggccugagagucagcucu

SEQ ID NO: 1786033 - RNA, 21 nt, Human
ggccugagagucagcucucug

SEQ ID NO: 1786034 - RNA, 13 nt, Human
ggccugacugcuc

SEQ ID NO: 1786035 - RNA, 14 nt, Human
ggccugacugcuca

SEQ ID NO: 1786036 - RNA, 15 nt, Human
ggccugacugcucag

SEQ ID NO: 1786037 - RNA, 21 nt, Human
ggccugggccguaucuccggc

SEQ ID NO: 1786038 - RNA, 23 nt, Human
ggccugggccguaucuccggcuc

SEQ ID NO: 1786039 - RNA, 15 nt, Human
ggcuccaggcuccuu

SEQ ID NO: 1786040 - RNA, 16 nt, Human
ggcuccagagggcacu

SEQ ID NO: 1786041 - RNA, 14 nt, Human
ggcuccaggcuccu

SEQ ID NO: 1786042 - RNA, 23 nt, Human
ggcgcugccccaucuccccucag

SEQ ID NO: 1786043 - RNA, 18 nt, Human
ggcgggacagugcugcag

SEQ ID NO: 1786044 - RNA, 13 nt, Human
ggcuccagagggc

SEQ ID NO: 1786045 - RNA, 22 nt, Human
ggcuccagagggcacucugcuu

SEQ ID NO: 1786046 - RNA, 12 nt, Human
ggcuccaggcuc

SEQ ID NO: 1786047 - RNA, 13 nt, Human
ggcuccaggcucc

SEQ ID NO: 1786048 - RNA, 22 nt, Human
ggcucacccccuucuccaucca

SEQ ID NO: 1786049 - RNA, 17 nt, Human
ggcucacccccuucucc

SEQ ID NO: 1786050 - RNA, 14 nt, Human
ggcugggcagagcu

SEQ ID NO: 1786051 - RNA, 11 nt, Human
ggcugggcuuc

SEQ ID NO: 1786052 - RNA, 21 nt, Human
ggcugggcuucaguggcagcu

SEQ ID NO: 1786053 - RNA, 22 nt, Human
ggcugggcuucaguggcagcug

SEQ ID NO: 1786054 - RNA, 14 nt, Human
ggcugggggccuca

SEQ ID NO: 1786055 - RNA, 15 nt, Human
ggcugggggagagcc

SEQ ID NO: 1786056 - RNA, 16 nt, Human
ggcugggggagagccg

SEQ ID NO: 1786057 - RNA, 18 nt, Human
ggcugggggagagccgug

SEQ ID NO: 1786058 - RNA, 19 nt, Human
ggcugggggagagccgugg

SEQ ID NO: 1786059 - RNA, 15 nt, Human
ggcugagggagccug

SEQ ID NO: 1786060 - RNA, 13 nt, Human
ggcugucggcgcu

SEQ ID NO: 1786061 - RNA, 15 nt, Human
ggcugucggcgcugc

SEQ ID NO: 1786062 - RNA, 12 nt, Human
ggcugugcuggg

SEQ ID NO: 1786063 - RNA, 13 nt, Human
ggcugugcuggga

SEQ ID NO: 1786064 - RNA, 16 nt, Human
ggcugugcugggagaa

SEQ ID NO: 1786065 - RNA, 17 nt, Human
ggcugugcuugaaggcc

SEQ ID NO: 1786066 - RNA, 19 nt, Human
ggcugugcuugaaggcccu

SEQ ID NO: 1786067 - RNA, 20 nt, Human
ggcugugcuugaaggcccug

SEQ ID NO: 1786068 - RNA, 21 nt, Human
ggcugugcuugaaggcccugc

SEQ ID NO: 1786069 - RNA, 23 nt, Human
ggcugugcuugaaggcccugcug

SEQ ID NO: 1786070 - RNA, 14 nt, Human
ggcuguuggcuggg

SEQ ID NO: 1786071 - RNA, 15 nt, Human
ggcuguuggcugggg

SEQ ID NO: 1786072 - RNA, 16 nt, Human
ggcuguuggcuggggg

SEQ ID NO: 1786073 - RNA, 20 nt, Human
ggcuguuggcugggggccuc

SEQ ID NO: 1786074 - RNA, 15 nt, Human
ggcuuaaaacaacac

SEQ ID NO: 1786075 - RNA, 21 nt, Human
gggagcuccaacucagaaggg

SEQ ID NO: 1786076 - RNA, 15 nt, Human
gggagcuagccagag

SEQ ID NO: 1786077 - RNA, 18 nt, Human
gggagcuagccagaggac

SEQ ID NO: 1786078 - RNA, 13 nt, Human
gggagcugccugu

SEQ ID NO: 1786079 - RNA, 21 nt, Human
gggagcugccuguucagcucc

SEQ ID NO: 1786080 - RNA, 22 nt, Human
gggagcugccuguucagcucca

SEQ ID NO: 1786081 - RNA, 17 nt, Human
gggagugacagaggcag

SEQ ID NO: 1786082 - RNA, 22 nt, Human
gggaggauguucugggacacag

SEQ ID NO: 1786083 - RNA, 17 nt, Human
gggacucaaugcacuga

SEQ ID NO: 1786084 - RNA, 19 nt, Human
gggacucaaugcacugaca

SEQ ID NO: 1786085 - RNA, 21 nt, Human
gggacgccugggggugccagg

SEQ ID NO: 1786086 - RNA, 22 nt, Human
gggacgccugggggugccagga

SEQ ID NO: 1786087 - RNA, 13 nt, Human
gggaccuuuuggg

SEQ ID NO: 1786088 - RNA, 23 nt, Human
gggacucaaugcacugacauugu

SEQ ID NO: 1786089 - RNA, 19 nt, Human
gggaauguuugccucugcc

SEQ ID NO: 1786090 - RNA, 21 nt, Human
gggaauguuugccucugccuc

SEQ ID NO: 1786091 - RNA, 18 nt, Human
gggaauauuugaaucuug

SEQ ID NO: 1786092 - RNA, 14 nt, Human
gggaauauuugaau

SEQ ID NO: 1786093 - RNA, 13 nt, Human
gggaauauuugaa

SEQ ID NO: 1786094 - RNA, 21 nt, Human
gcugggcuucaguggcagcug

SEQ ID NO: 1786095 - RNA, 22 nt, Human
gcugggcuucaguggcagcugc

SEQ ID NO: 1786096 - RNA, 20 nt, Human
gcugggcuucaguggcagcu

SEQ ID NO: 1786097 - RNA, 14 nt, Human
gcugggggccucag

SEQ ID NO: 1786098 - RNA, 15 nt, Human
gcugggggccucagu

SEQ ID NO: 1786099 - RNA, 18 nt, Human
gcugggggccucagugcc

SEQ ID NO: 1786100 - RNA, 14 nt, Human
gcuggucccacuca

SEQ ID NO: 1786101 - RNA, 21 nt, Human
gcugucccauagucccugcca

SEQ ID NO: 1786102 - RNA, 23 nt, Human
gcugucccauagucccugccacg

SEQ ID NO: 1786103 - RNA, 18 nt, Human
gcugucccauagucccug

SEQ ID NO: 1786104 - RNA, 20 nt, Human
gcugucccauagucccugcc

SEQ ID NO: 1786105 - RNA, 14 nt, Human
gcuggugucaccug

SEQ ID NO: 1786106 - RNA, 15 nt, Human
gcuggugucaccuga

SEQ ID NO: 1786107 - RNA, 14 nt, Human
gcuuggagcagagg

SEQ ID NO: 1786108 - RNA, 16 nt, Human
gcuuggaccagaucua

SEQ ID NO: 1786109 - RNA, 19 nt, Human
gcuugcucuguuugugggg

SEQ ID NO: 1786110 - RNA, 12 nt, Human
gcuuucauguaa

SEQ ID NO: 1786111 - RNA, 19 nt, Human
gcuuuccaaaccuuaucuc

SEQ ID NO: 1786112 - RNA, 22 nt, Human
gcuuuccaaaccuuaucuccac

SEQ ID NO: 1786113 - RNA, 15 nt, Human
gcuuucauguaaacu

SEQ ID NO: 1786114 - RNA, 20 nt, Human
gcuuucauguaaacugugca

SEQ ID NO: 1786115 - RNA, 21 nt, Human
gcuuucauguaaacugugcac
